United States Patent Application Publication US 2005/0244851 A1 - sequence listing, part 142

SEQ ID NO: 5544180 - DNA, 25 bp, Homo sapien
tcctatatacacacgaaagagaaat

SEQ ID NO: 5544181 - DNA, 25 bp, Homo sapien
cactcccaggaacattcaaagcatc

SEQ ID NO: 5544182 - DNA, 25 bp, Homo sapien
tgcccggccttgattccactcctat

SEQ ID NO: 5544183 - DNA, 25 bp, Homo sapien
atgctctacccaccaacagacactc

SEQ ID NO: 5544184 - DNA, 25 bp, Homo sapien
cagtgcccggccttgattccactcc

SEQ ID NO: 5544185 - DNA, 25 bp, Homo sapien
ctacccaccaacagacactcccagg

SEQ ID NO: 5544186 - DNA, 25 bp, Homo sapien
tcccaggaacattcaaagcatcgcc

SEQ ID NO: 5544187 - DNA, 25 bp, Homo sapien
caggaacattcaaagcatcgccatc

SEQ ID NO: 5544188 - DNA, 25 bp, Homo sapien
agaaatgcatgctctacccaccaac

SEQ ID NO: 5544189 - DNA, 25 bp, Homo sapien
tccactcctatatacacacgaaaga

SEQ ID NO: 5544190 - DNA, 25 bp, Homo sapien
agacactcccaggaacattcaaagc

SEQ ID NO: 5544191 - DNA, 25 bp, Homo sapien
agtggatttgtaaacaggatggctc

SEQ ID NO: 5544192 - DNA, 25 bp, Homo sapien
agaggaggacatcagatcctgcatt

SEQ ID NO: 5544193 - DNA, 25 bp, Homo sapien
catgaaggacctgtttatgcggtgc

SEQ ID NO: 5544194 - DNA, 25 bp, Homo sapien
gggcccagaggacttctggcctttg

SEQ ID NO: 5544195 - DNA, 25 bp, Homo sapien
tcgactctggtctaaaaagggtcca

SEQ ID NO: 5544196 - DNA, 25 bp, Homo sapien
aaagcagtgcatcttcaaggccatg

SEQ ID NO: 5544197 - DNA, 25 bp, Homo sapien
ggcacgtcctgctccgtggtgctct

SEQ ID NO: 5544198 - DNA, 25 bp, Homo sapien
atggtcacaccgcccgagtcaattg

SEQ ID NO: 5544199 - DNA, 25 bp, Homo sapien
aaagggtccagaagtaccaatatta

SEQ ID NO: 5544200 - DNA, 25 bp, Homo sapien
gtgattcactgggaaatagaggata

SEQ ID NO: 5544201 - DNA, 25 bp, Homo sapien
tgcatgctgtttaccagaggaggac

SEQ ID NO: 5544202 - DNA, 25 bp, Homo sapien
ataaactgaatcatagacaccaagt

SEQ ID NO: 5544203 - DNA, 25 bp, Homo sapien
taaatcggagttctgagccaaagtc

SEQ ID NO: 5544204 - DNA, 25 bp, Homo sapien
aacacatctcaaatcccaccacgtc

SEQ ID NO: 5544205 - DNA, 25 bp, Homo sapien
ttaggtttgctttaggaagagtgcc

SEQ ID NO: 5544206 - DNA, 25 bp, Homo sapien
ctcacagatacactaggttaatttt

SEQ ID NO: 5544207 - DNA, 25 bp, Homo sapien
taagtcaaacaatagagaaaaatac

SEQ ID NO: 5544208 - DNA, 25 bp, Homo sapien
ttggtaaagcaaatacaacctcaaa

SEQ ID NO: 5544209 - DNA, 25 bp, Homo sapien
gtgtgtgtatctgtgaattccatat

SEQ ID NO: 5544210 - DNA, 25 bp, Homo sapien
tgaaacccagagcatttggagcttc

SEQ ID NO: 5544211 - DNA, 25 bp, Homo sapien
ttaggaagagtgcccctgaaataaa

SEQ ID NO: 5544212 - DNA, 25 bp, Homo sapien
ccaccacgtcagagataaccattgt

SEQ ID NO: 5544213 - DNA, 25 bp, Homo sapien
gatccgtagtcagggacaccaaagt

SEQ ID NO: 5544214 - DNA, 25 bp, Homo sapien
actttggtgtccctgactacggatc

SEQ ID NO: 5544215 - DNA, 25 bp, Homo sapien
gggaggagagaacggtcctggtacc

SEQ ID NO: 5544216 - DNA, 25 bp, Homo sapien
ggtaccaggaccgttctctcctccc

SEQ ID NO: 5544217 - DNA, 25 bp, Homo sapien
taaaacattgataagcaacatgaag

SEQ ID NO: 5544218 - DNA, 25 bp, Homo sapien
cactgtacccaaccatatgtcattc

SEQ ID NO: 5544219 - DNA, 25 bp, Homo sapien
agaatcactctacaatataagcaaa

SEQ ID NO: 5544220 - DNA, 25 bp, Homo sapien
cggttgagccaacttaacagctaat

SEQ ID NO: 5544221 - DNA, 25 bp, Homo sapien
tggcgtgatgagacttcaatgcagc

SEQ ID NO: 5544222 - DNA, 25 bp, Homo sapien
caatataagcaaataatgtgttttt

SEQ ID NO: 5544223 - DNA, 25 bp, Homo sapien
gcagtcacgagccactgtacccaac

SEQ ID NO: 5544224 - DNA, 25 bp, Homo sapien
tcattctttagacacactgcttact

SEQ ID NO: 5544225 - DNA, 25 bp, Homo sapien
tactgaatttccggttgagccaact

SEQ ID NO: 5544226 - DNA, 25 bp, Homo sapien
aaaggatatactgaatttccggttg

SEQ ID NO: 5544227 - DNA, 25 bp, Homo sapien
gcaacatgaagcaatctagaactta

SEQ ID NO: 5544228 - DNA, 25 bp, Homo sapien
atctcctgccagaagcctttcctga

SEQ ID NO: 5544229 - DNA, 25 bp, Homo sapien
taataccaggtaaacacgaatcata

SEQ ID NO: 5544230 - DNA, 25 bp, Homo sapien
tctgagctcctaataccaggtaaac

SEQ ID NO: 5544231 - DNA, 25 bp, Homo sapien
gatgctttcaggttctgttaagacc

SEQ ID NO: 5544232 - DNA, 25 bp, Homo sapien
atcataggtggaaatatgccatgtt

SEQ ID NO: 5544233 - DNA, 25 bp, Homo sapien
ataatgtactggtgatgaagctgca

SEQ ID NO: 5544234 - DNA, 25 bp, Homo sapien
ttgtatacacttccagtgaagcttt

SEQ ID NO: 5544235 - DNA, 25 bp, Homo sapien
tcaagctcaggctttatctcctgcc

SEQ ID NO: 5544236 - DNA, 25 bp, Homo sapien
ataacagattctacaccacagttgt

SEQ ID NO: 5544237 - DNA, 25 bp, Homo sapien
ggtaaacacgaatcataggtggaaa

SEQ ID NO: 5544238 - DNA, 25 bp, Homo sapien
tatgcattccattctgagctcctaa

SEQ ID NO: 5544239 - DNA, 25 bp, Homo sapien
ctagcataagcagacccagtgttag

SEQ ID NO: 5544240 - DNA, 25 bp, Homo sapien
tgccacaaccaagtaaaccctaatg

SEQ ID NO: 5544241 - DNA, 25 bp, Homo sapien
tcaaaatgaagcctagaccaaatac

SEQ ID NO: 5544242 - DNA, 25 bp, Homo sapien
aaagacatgttgcctagagatagaa

SEQ ID NO: 5544243 - DNA, 25 bp, Homo sapien
ttggtgatataaatgacaatgtagg

SEQ ID NO: 5544244 - DNA, 25 bp, Homo sapien
aggctaagaacgatgaaagtttatc

SEQ ID NO: 5544245 - DNA, 25 bp, Homo sapien
taggacatcaatattaacaggactc

SEQ ID NO: 5544246 - DNA, 25 bp, Homo sapien
aacaggactctaaacgggcagtttg

SEQ ID NO: 5544247 - DNA, 25 bp, Homo sapien
atgacaatgtaggctaagaacgatg

SEQ ID NO: 5544248 - DNA, 25 bp, Homo sapien
tttaagcataaagtggactactaat

SEQ ID NO: 5544249 - DNA, 25 bp, Homo sapien
atactgaactagcataagcagaccc

SEQ ID NO: 5544250 - DNA, 25 bp, Homo sapien
atctggcaggaaagttcttagctct

SEQ ID NO: 5544251 - DNA, 25 bp, Homo sapien
ttaaatttgcaagagccgggctttg

SEQ ID NO: 5544252 - DNA, 25 bp, Homo sapien
ctatgggcacacagaagcttcctat

SEQ ID NO: 5544253 - DNA, 25 bp, Homo sapien
ccaaagaaacaacatgacaaacttt

SEQ ID NO: 5544254 - DNA, 25 bp, Homo sapien
acctatgtgtatctggcaggaaagt

SEQ ID NO: 5544255 - DNA, 25 bp, Homo sapien
tacaaaatgatggctctttcccttc

SEQ ID NO: 5544256 - DNA, 25 bp, Homo sapien
gactgtctggatgatctccctgtcc

SEQ ID NO: 5544257 - DNA, 25 bp, Homo sapien
ccagaataaattggggaactggcac

SEQ ID NO: 5544258 - DNA, 25 bp, Homo sapien
attggaacagaaatagaaacataag

SEQ ID NO: 5544259 - DNA, 25 bp, Homo sapien
tcagggtctcagaagctgtccctct

SEQ ID NO: 5544260 - DNA, 25 bp, Homo sapien
tgaccgcctttgatgttggagccag

SEQ ID NO: 5544261 - DNA, 25 bp, Homo sapien
gggcctcagactcacatatgtatgt

SEQ ID NO: 5544262 - DNA, 25 bp, Homo sapien
tgtggcagaatatgtgttgtcagga

SEQ ID NO: 5544263 - DNA, 25 bp, Homo sapien
gaaatacaaaaaagatcaggagaag

SEQ ID NO: 5544264 - DNA, 25 bp, Homo sapien
gctaaggttggagacagtattctat

SEQ ID NO: 5544265 - DNA, 25 bp, Homo sapien
ctacaagtatatggccacagctggc

SEQ ID NO: 5544266 - DNA, 25 bp, Homo sapien
gctgaagaagcatggaaacttccct

SEQ ID NO: 5544267 - DNA, 25 bp, Homo sapien
gaacagaaggcgtaccaatccataa

SEQ ID NO: 5544268 - DNA, 25 bp, Homo sapien
atggccacagctggctaaggttgga

SEQ ID NO: 5544269 - DNA, 25 bp, Homo sapien
gttgtcaggagtgatttggtaattc

SEQ ID NO: 5544270 - DNA, 25 bp, Homo sapien
agacagtattctatccttgggcctc

SEQ ID NO: 5544271 - DNA, 25 bp, Homo sapien
ttggtaattcagaaaagcagctgaa

SEQ ID NO: 5544272 - DNA, 25 bp, Homo sapien
tatggtttttagatatgccttcctt

SEQ ID NO: 5544273 - DNA, 25 bp, Homo sapien
attttggagggataccctaaagaca

SEQ ID NO: 5544274 - DNA, 25 bp, Homo sapien
actgcacccggccgatgtatgcatt

SEQ ID NO: 5544275 - DNA, 25 bp, Homo sapien
atagataagtctgactataggttat

SEQ ID NO: 5544276 - DNA, 25 bp, Homo sapien
atacctaaaagcaaccactatggtt

SEQ ID NO: 5544277 - DNA, 25 bp, Homo sapien
agggataccctaaagacattttctc

SEQ ID NO: 5544278 - DNA, 25 bp, Homo sapien
tgactataggttatataggaaacta

SEQ ID NO: 5544279 - DNA, 25 bp, Homo sapien
tacatatatgctactggaaaactgg

SEQ ID NO: 5544280 - DNA, 25 bp, Homo sapien
tctcacagtatgacctcaatgcatc

SEQ ID NO: 5544281 - DNA, 25 bp, Homo sapien
ttcttcaactttaaagagaaacaga

SEQ ID NO: 5544282 - DNA, 25 bp, Homo sapien
taaggctcctattttggagggatac

SEQ ID NO: 5544283 - DNA, 25 bp, Homo sapien
gggactcgtccaggaccgccgccga

SEQ ID NO: 5544284 - DNA, 25 bp, Homo sapien
tcggcggcggtcctggacgagtccc

SEQ ID NO: 5544285 - DNA, 25 bp, Homo sapien
gccctggctccccacaggggtagag

SEQ ID NO: 5544286 - DNA, 25 bp, Homo sapien
ctctacccctgtggggagccagggc

SEQ ID NO: 5544287 - DNA, 25 bp, Homo sapien
atgggccgtgcacgtctgcacattc

SEQ ID NO: 5544288 - DNA, 25 bp, Homo sapien
gaccaggcctaagccaatcccccac

SEQ ID NO: 5544289 - DNA, 25 bp, Homo sapien
agctgcctcccagccatggaccaca

SEQ ID NO: 5544290 - DNA, 25 bp, Homo sapien
gggtcacggttttcagctcctggcc

SEQ ID NO: 5544291 - DNA, 25 bp, Homo sapien
ccctccgtgctatgtgctgtggggc

SEQ ID NO: 5544292 - DNA, 25 bp, Homo sapien
tccagaccctgtctgatgggccgtg

SEQ ID NO: 5544293 - DNA, 25 bp, Homo sapien
gctcagagttccttagaagccgggc

SEQ ID NO: 5544294 - DNA, 25 bp, Homo sapien
ctgcattttgcagacacccgggagg

SEQ ID NO: 5544295 - DNA, 25 bp, Homo sapien
ggttacacagttcaggatccaagtc

SEQ ID NO: 5544296 - DNA, 25 bp, Homo sapien
gatccaagtcctgtgcaaatgcatc

SEQ ID NO: 5544297 - DNA, 25 bp, Homo sapien
cacatcctccatgaggggacctgcc

SEQ ID NO: 5544298 - DNA, 25 bp, Homo sapien
cagagcaagatcctgtctccaaaaa

SEQ ID NO: 5544299 - DNA, 25 bp, Homo sapien
agaaccaagcaaaaggggttactca

SEQ ID NO: 5544300 - DNA, 25 bp, Homo sapien
tcatgctgctgataaagccataccc

SEQ ID NO: 5544301 - DNA, 25 bp, Homo sapien
taatcacatgtatttggtaagcttt

SEQ ID NO: 5544302 - DNA, 25 bp, Homo sapien
acttgcagtgtaactttctggcccc

SEQ ID NO: 5544303 - DNA, 25 bp, Homo sapien
aataagaaacaacagtatatttgtc

SEQ ID NO: 5544304 - DNA, 25 bp, Homo sapien
aactattgtttttgccatcgccacc

SEQ ID NO: 5544305 - DNA, 25 bp, Homo sapien
aaagaaaaagaagttgaatggactc

SEQ ID NO: 5544306 - DNA, 25 bp, Homo sapien
gtgattgcaccactgcactgtagcc

SEQ ID NO: 5544307 - DNA, 25 bp, Homo sapien
gccatcgccacccagtaaacatagt

SEQ ID NO: 5544308 - DNA, 25 bp, Homo sapien
gtgggaggatcaattgagctccgga

SEQ ID NO: 5544309 - DNA, 25 bp, Homo sapien
ttggggagaaagttaaagctatcaa

SEQ ID NO: 5544310 - DNA, 25 bp, Homo sapien
ttttagggaaaattgtgctgttgct

SEQ ID NO: 5544311 - DNA, 25 bp, Homo sapien
ataaagcaggaaattctaatgcctt

SEQ ID NO: 5544312 - DNA, 25 bp, Homo sapien
aaggtaatgtcagcagctgtactcc

SEQ ID NO: 5544313 - DNA, 25 bp, Homo sapien
atcgtgtctagaactgtgcaaactt

SEQ ID NO: 5544314 - DNA, 25 bp, Homo sapien
taattcacaagtaccaatggctcaa

SEQ ID NO: 5544315 - DNA, 25 bp, Homo sapien
cagtggatcagaacatagatgtctc

SEQ ID NO: 5544316 - DNA, 25 bp, Homo sapien
gtacagctttcaacagtggatcaga

SEQ ID NO: 5544317 - DNA, 25 bp, Homo sapien
aaaggatgtctgcaaataaataggt

SEQ ID NO: 5544318 - DNA, 25 bp, Homo sapien
gagttaaaggatgtgaagtagtcat

SEQ ID NO: 5544319 - DNA, 25 bp, Homo sapien
cttagatttctgtaggaagagttaa

SEQ ID NO: 5544320 - DNA, 25 bp, Homo sapien
actggcagtgatattttggggaaga

SEQ ID NO: 5544321 - DNA, 25 bp, Homo sapien
gtcaaagggcaggtccctgttctca

SEQ ID NO: 5544322 - DNA, 25 bp, Homo sapien
aatagtgctaagtgtggaagacaaa

SEQ ID NO: 5544323 - DNA, 25 bp, Homo sapien
gtttgatgattggtgggatcttcct

SEQ ID NO: 5544324 - DNA, 25 bp, Homo sapien
gtgttgtacacgtgttagagggaca

SEQ ID NO: 5544325 - DNA, 25 bp, Homo sapien
ttccaaacagggcatggcttgtgtg

SEQ ID NO: 5544326 - DNA, 25 bp, Homo sapien
gttctcagtaggtgagggaataaaa

SEQ ID NO: 5544327 - DNA, 25 bp, Homo sapien
agtggagaccagatcccttccttcc

SEQ ID NO: 5544328 - DNA, 25 bp, Homo sapien
gggtaaggatgaggtcagtttttga

SEQ ID NO: 5544329 - DNA, 25 bp, Homo sapien
aaggcatataggagattcgtagatc

SEQ ID NO: 5544330 - DNA, 25 bp, Homo sapien
gaataaaactcggacactgggccat

SEQ ID NO: 5544331 - DNA, 25 bp, Homo sapien
cagaggaaaactagaaagaagtcta

SEQ ID NO: 5544332 - DNA, 25 bp, Homo sapien
gcaccagagtaaatgcttgggcata

SEQ ID NO: 5544333 - DNA, 25 bp, Homo sapien
tgggcataaggtcgtgctttaaccc

SEQ ID NO: 5544334 - DNA, 25 bp, Homo sapien
gtgctgaacggatgcctaagaaaca

SEQ ID NO: 5544335 - DNA, 25 bp, Homo sapien
gtccctggacacatcgcagtgacac

SEQ ID NO: 5544336 - DNA, 25 bp, Homo sapien
gggggtgaaataacagtatctagta

SEQ ID NO: 5544337 - DNA, 25 bp, Homo sapien
tctgatggccaagactagtgctgaa

SEQ ID NO: 5544338 - DNA, 25 bp, Homo sapien
taaaataagtactgaagacggagag

SEQ ID NO: 5544339 - DNA, 25 bp, Homo sapien
tggtgtggtccatttgagagcaaga

SEQ ID NO: 5544340 - DNA, 25 bp, Homo sapien
agcctaagagcaaaactgaaatccc

SEQ ID NO: 5544341 - DNA, 25 bp, Homo sapien
gagccagtgacaccgtctcgcatct

SEQ ID NO: 5544342 - DNA, 25 bp, Homo sapien
gtcactgggtctgactccaccctgc

SEQ ID NO: 5544343 - DNA, 25 bp, Homo sapien
gctcagcagggctcaagttgaaaaa

SEQ ID NO: 5544344 - DNA, 25 bp, Homo sapien
gacattgaaaaggaagtcactgggt

SEQ ID NO: 5544345 - DNA, 25 bp, Homo sapien
gtttccaagagaaagtgaccaaagc

SEQ ID NO: 5544346 - DNA, 25 bp, Homo sapien
ttgcccaaggtagccagcactggga

SEQ ID NO: 5544347 - DNA, 25 bp, Homo sapien
gggagctcagttgattcctcgggtc

SEQ ID NO: 5544348 - DNA, 25 bp, Homo sapien
gggtcaagaagctgcaagtcaaatg

SEQ ID NO: 5544349 - DNA, 25 bp, Homo sapien
gcaggcatgagaaaactcttgctga

SEQ ID NO: 5544350 - DNA, 25 bp, Homo sapien
tggcacagcaaagagaactctctca

SEQ ID NO: 5544351 - DNA, 25 bp, Homo sapien
tggcacatcacagggactgtggcac

SEQ ID NO: 5544352 - DNA, 25 bp, Homo sapien
cagatgctagaaagtttgctgcagt

SEQ ID NO: 5544353 - DNA, 25 bp, Homo sapien
caaggcagctgcatacaactcctgc

SEQ ID NO: 5544354 - DNA, 25 bp, Homo sapien
cattcccacatgtcaggatgccttc

SEQ ID NO: 5544355 - DNA, 25 bp, Homo sapien
tggtttggggcctaacaatgtcttc

SEQ ID NO: 5544356 - DNA, 25 bp, Homo sapien
gaggggacgtcctttcagacgctga

SEQ ID NO: 5544357 - DNA, 25 bp, Homo sapien
ctagattcagtggtaaatgggtttc

SEQ ID NO: 5544358 - DNA, 25 bp, Homo sapien
ttcctgtgagctagcattgtttccc

SEQ ID NO: 5544359 - DNA, 25 bp, Homo sapien
tgacagaatacccaactcagactgg

SEQ ID NO: 5544360 - DNA, 25 bp, Homo sapien
taggtgtaaattccatgtcccatcc

SEQ ID NO: 5544361 - DNA, 25 bp, Homo sapien
gcatggaaaactgcacaagagcttg

SEQ ID NO: 5544362 - DNA, 25 bp, Homo sapien
gtggtgataagtaagccaggatttc

SEQ ID NO: 5544363 - DNA, 25 bp, Homo sapien
ctcagactggattaaataaaagggg

SEQ ID NO: 5544364 - DNA, 25 bp, Homo sapien
ccagactgacatggatcaagcattt

SEQ ID NO: 5544365 - DNA, 25 bp, Homo sapien
tctgtagtctggagtgggactaaga

SEQ ID NO: 5544366 - DNA, 25 bp, Homo sapien
tggggtatggtaactcaaccagttc

SEQ ID NO: 5544367 - DNA, 25 bp, Homo sapien
tagtttaatagagagataagggctg

SEQ ID NO: 5544368 - DNA, 25 bp, Homo sapien
tcgaaatatcattagagagagacag

SEQ ID NO: 5544369 - DNA, 25 bp, Homo sapien
agaatcccctggggaacttcctggc

SEQ ID NO: 5544370 - DNA, 25 bp, Homo sapien
acatgttgaacaggatagagctgag

SEQ ID NO: 5544371 - DNA, 25 bp, Homo sapien
agtccaatcggttcatgtgtagtct

SEQ ID NO: 5544372 - DNA, 25 bp, Homo sapien
gccctgtggcatgctactaaagact

SEQ ID NO: 5544373 - DNA, 25 bp, Homo sapien
atttggaagcaatctgtatcaggtt

SEQ ID NO: 5544374 - DNA, 25 bp, Homo sapien
gtcacctggctaccacagaatcccc

SEQ ID NO: 5544375 - DNA, 25 bp, Homo sapien
tgactgaaaccacgtgcccacacgt

SEQ ID NO: 5544376 - DNA, 25 bp, Homo sapien
acgtgtgggcacgtggtttcagtca

SEQ ID NO: 5544377 - DNA, 25 bp, Homo sapien
ctggatcaccatcgacggcactttc

SEQ ID NO: 5544378 - DNA, 25 bp, Homo sapien
agataaataagtgaagagctagtcc

SEQ ID NO: 5544379 - DNA, 25 bp, Homo sapien
agacatctcaatggcaggggtgaga

SEQ ID NO: 5544380 - DNA, 25 bp, Homo sapien
agcaaagaaagactacagacatctc

SEQ ID NO: 5544381 - DNA, 25 bp, Homo sapien
actagaaacagcaagatgacaatat

SEQ ID NO: 5544382 - DNA, 25 bp, Homo sapien
tgatgatacagaggaattacaacac

SEQ ID NO: 5544383 - DNA, 25 bp, Homo sapien
tgtgagtctcctcagtgacacaggg

SEQ ID NO: 5544384 - DNA, 25 bp, Homo sapien
agagctagtccgctgtgagtctcct

SEQ ID NO: 5544385 - DNA, 25 bp, Homo sapien
acacatctgctgaaatggagataat

SEQ ID NO: 5544386 - DNA, 25 bp, Homo sapien
tctgagtactcagtgcagcaaagaa

SEQ ID NO: 5544387 - DNA, 25 bp, Homo sapien
ttaccatctgaggccacacatctgc

SEQ ID NO: 5544388 - DNA, 25 bp, Homo sapien
tgttaccacataccaggcgcggttc

SEQ ID NO: 5544389 - DNA, 25 bp, Homo sapien
tattaggagtctatgctctagtctt

SEQ ID NO: 5544390 - DNA, 25 bp, Homo sapien
caacactgcagggtagacatcatta

SEQ ID NO: 5544391 - DNA, 25 bp, Homo sapien
tagaggtatatgagttataagtgaa

SEQ ID NO: 5544392 - DNA, 25 bp, Homo sapien
taaattgagagtgcatgcttaagtt

SEQ ID NO: 5544393 - DNA, 25 bp, Homo sapien
taaagttgatgatgacagtaacagc

SEQ ID NO: 5544394 - DNA, 25 bp, Homo sapien
aacagcaacaaccattacactcctt

SEQ ID NO: 5544395 - DNA, 25 bp, Homo sapien
caggcgcggttctacagcatttacc

SEQ ID NO: 5544396 - DNA, 25 bp, Homo sapien
ccatgggaaccctaatttctgtggg

SEQ ID NO: 5544397 - DNA, 25 bp, Homo sapien
cctactacatctagggtggtgtggg

SEQ ID NO: 5544398 - DNA, 25 bp, Homo sapien
ctggaaagaaaatcaggtagaaaaa

SEQ ID NO: 5544399 - DNA, 25 bp, Homo sapien
actgaagtctaaaaactcctccacc

SEQ ID NO: 5544400 - DNA, 25 bp, Homo sapien
ttgtcatagctgttaccaactgaat

SEQ ID NO: 5544401 - DNA, 25 bp, Homo sapien
actaggtagtgctgactatcctgtt

SEQ ID NO: 5544402 - DNA, 25 bp, Homo sapien
ttcagctaaaaaactaggtagtgct

SEQ ID NO: 5544403 - DNA, 25 bp, Homo sapien
atgacactgaaatggcaaaatgata

SEQ ID NO: 5544404 - DNA, 25 bp, Homo sapien
tttgtcactctacagtgcctgcctc

SEQ ID NO: 5544405 - DNA, 25 bp, Homo sapien
tgaaaagatacaacagtgcacattt

SEQ ID NO: 5544406 - DNA, 25 bp, Homo sapien
agggtacctatgtttactgaagtct

SEQ ID NO: 5544407 - DNA, 25 bp, Homo sapien
acatatggacattacaaattcagct

SEQ ID NO: 5544408 - DNA, 25 bp, Homo sapien
aaaagtgaaaagatacaacagtgca

SEQ ID NO: 5544409 - DNA, 25 bp, Homo sapien
actgaaatggcaaaatgatagtcac

SEQ ID NO: 5544410 - DNA, 25 bp, Homo sapien
gcagtgtaatcggtccaggtgctag

SEQ ID NO: 5544411 - DNA, 25 bp, Homo sapien
cggtccaggtgctagaatgtcatta

SEQ ID NO: 5544412 - DNA, 25 bp, Homo sapien
gctaggaagtggtagacaactacat

SEQ ID NO: 5544413 - DNA, 25 bp, Homo sapien
tgatcccagaactgcagagaactcc

SEQ ID NO: 5544414 - DNA, 25 bp, Homo sapien
aaatagagggctggaatctcatata

SEQ ID NO: 5544415 - DNA, 25 bp, Homo sapien
gaatccactacttcagggagagcag

SEQ ID NO: 5544416 - DNA, 25 bp, Homo sapien
acagattatcagaaagagtactatg

SEQ ID NO: 5544417 - DNA, 25 bp, Homo sapien
tatttgtgcagcccaggtgtgctag

SEQ ID NO: 5544418 - DNA, 25 bp, Homo sapien
tcctgctgatgaaagaatccactac

SEQ ID NO: 5544419 - DNA, 25 bp, Homo sapien
gccatactctcaggaagggcacttc

SEQ ID NO: 5544420 - DNA, 25 bp, Homo sapien
caaggcactgaggtttgatcccaga

SEQ ID NO: 5544421 - DNA, 25 bp, Homo sapien
ttttgggctcaaaaagagactaatc

SEQ ID NO: 5544422 - DNA, 25 bp, Homo sapien
caccgcgcccggcctgcattttcaa

SEQ ID NO: 5544423 - DNA, 25 bp, Homo sapien
acaatacagagattcttttgggctc

SEQ ID NO: 5544424 - DNA, 25 bp, Homo sapien
ccaacctcccgagtagctgagacta

SEQ ID NO: 5544425 - DNA, 25 bp, Homo sapien
ttttcaaacagtataggtcttctcc

SEQ ID NO: 5544426 - DNA, 25 bp, Homo sapien
ggctcaccgcaagctccacctccca

SEQ ID NO: 5544427 - DNA, 25 bp, Homo sapien
aaaagagactaatctgtcctgtttt

SEQ ID NO: 5544428 - DNA, 25 bp, Homo sapien
gtgatcctcctgcctcgccctccca

SEQ ID NO: 5544429 - DNA, 25 bp, Homo sapien
tgtgatataaaaatgtaaaagcagc

SEQ ID NO: 5544430 - DNA, 25 bp, Homo sapien
gtaaaagcagctatgggtattgcat

SEQ ID NO: 5544431 - DNA, 25 bp, Homo sapien
taaagtaaaacagaaaaatgcatgc

SEQ ID NO: 5544432 - DNA, 25 bp, Homo sapien
agaattaggcattgaaggataggcc

SEQ ID NO: 5544433 - DNA, 25 bp, Homo sapien
gcaggagtaagttaagtacaacaaa

SEQ ID NO: 5544434 - DNA, 25 bp, Homo sapien
tccacctccagatcagggaatggca

SEQ ID NO: 5544435 - DNA, 25 bp, Homo sapien
ttacagcttgagtacagaagagaca

SEQ ID NO: 5544436 - DNA, 25 bp, Homo sapien
tctgtgagtatttggaatgatgccc

SEQ ID NO: 5544437 - DNA, 25 bp, Homo sapien
gatgtgtctgcccgtgggtttgctt

SEQ ID NO: 5544438 - DNA, 25 bp, Homo sapien
cttctaccccgggacatgaaagggc

SEQ ID NO: 5544439 - DNA, 25 bp, Homo sapien
accagtttggctacagagcagagtc

SEQ ID NO: 5544440 - DNA, 25 bp, Homo sapien
tctctggaggataccagttagcctc

SEQ ID NO: 5544441 - DNA, 25 bp, Homo sapien
ggctgggtatagaagcactttctgt

SEQ ID NO: 5544442 - DNA, 25 bp, Homo sapien
aaccagagtaattaaggggaagtga

SEQ ID NO: 5544443 - DNA, 25 bp, Homo sapien
gagcgggagagactcatatccttca

SEQ ID NO: 5544444 - DNA, 25 bp, Homo sapien
atgcctggcccaaaggaaattctta

SEQ ID NO: 5544445 - DNA, 25 bp, Homo sapien
gatgagagaatgattcctgagagcg

SEQ ID NO: 5544446 - DNA, 25 bp, Homo sapien
agggacctagcctgaacccaggctc

SEQ ID NO: 5544447 - DNA, 25 bp, Homo sapien
atccaaatgagatgagagaatgatt

SEQ ID NO: 5544448 - DNA, 25 bp, Homo sapien
cagtgggattctcaagtcctggctg

SEQ ID NO: 5544449 - DNA, 25 bp, Homo sapien
taggagatagccatccaaatgagat

SEQ ID NO: 5544450 - DNA, 25 bp, Homo sapien
tcttgcttaggtgcgaaccagaagg

SEQ ID NO: 5544451 - DNA, 25 bp, Homo sapien
aggcacagttattgacctaagtgtc

SEQ ID NO: 5544452 - DNA, 25 bp, Homo sapien
caggctctgtcctttcccagtggga

SEQ ID NO: 5544453 - DNA, 25 bp, Homo sapien
aaatttaaaataggagatagccatc

SEQ ID NO: 5544454 - DNA, 25 bp, Homo sapien
tgagccattccatttgatccgtttc

SEQ ID NO: 5544455 - DNA, 25 bp, Homo sapien
gttcaagcgatggcctcacctcagt

SEQ ID NO: 5544456 - DNA, 25 bp, Homo sapien
ggctccactggtattacaaaaacac

SEQ ID NO: 5544457 - DNA, 25 bp, Homo sapien
gctcactgcaacctcaacctcctag

SEQ ID NO: 5544458 - DNA, 25 bp, Homo sapien
cctcttgcccaggctgtagtgcagc

SEQ ID NO: 5544459 - DNA, 25 bp, Homo sapien
acctcctaggttcaagcgatggcct

SEQ ID NO: 5544460 - DNA, 25 bp, Homo sapien
cattttaagaaaaggctccactggt

SEQ ID NO: 5544461 - DNA, 25 bp, Homo sapien
gtagtaataggaaaactactgccat

SEQ ID NO: 5544462 - DNA, 25 bp, Homo sapien
tttgacacagactcagccatcataa

SEQ ID NO: 5544463 - DNA, 25 bp, Homo sapien
gaactcctgtgctcaaacgatcctc

SEQ ID NO: 5544464 - DNA, 25 bp, Homo sapien
atgttgctcaggcttcatcttgaac

SEQ ID NO: 5544465 - DNA, 25 bp, Homo sapien
taagacagctagaggatatgtatat

SEQ ID NO: 5544466 - DNA, 25 bp, Homo sapien
ataaagtgctttgaatggaatccat

SEQ ID NO: 5544467 - DNA, 25 bp, Homo sapien
gccaagagtacaagctttgggctgg

SEQ ID NO: 5544468 - DNA, 25 bp, Homo sapien
tgacaggattaaaggaatacacaca

SEQ ID NO: 5544469 - DNA, 25 bp, Homo sapien
tcaatcagaattctaagacagctag

SEQ ID NO: 5544470 - DNA, 25 bp, Homo sapien
acagcagcctagttcataagtatta

SEQ ID NO: 5544471 - DNA, 25 bp, Homo sapien
tagagctgatgacaggattaaagga

SEQ ID NO: 5544472 - DNA, 25 bp, Homo sapien
ctatcttcaaacagcagcctagttc

SEQ ID NO: 5544473 - DNA, 25 bp, Homo sapien
acttgaatcctggctatagtctttt

SEQ ID NO: 5544474 - DNA, 25 bp, Homo sapien
aaactggagatgataacttatactt

SEQ ID NO: 5544475 - DNA, 25 bp, Homo sapien
tgtgcctcaactataaactggagat

SEQ ID NO: 5544476 - DNA, 25 bp, Homo sapien
gatcataaggatggatccctcataa

SEQ ID NO: 5544477 - DNA, 25 bp, Homo sapien
agcagagcttgccatgcctcccgat

SEQ ID NO: 5544478 - DNA, 25 bp, Homo sapien
aacccagctgcttgtaacattcttg

SEQ ID NO: 5544479 - DNA, 25 bp, Homo sapien
gccatgcctcccgatctgtactctt

SEQ ID NO: 5544480 - DNA, 25 bp, Homo sapien
aaattacccagactcggatattcct

SEQ ID NO: 5544481 - DNA, 25 bp, Homo sapien
ttaatgccctgccatggtgagagta

SEQ ID NO: 5544482 - DNA, 25 bp, Homo sapien
gagtggaagcaacctccagccttta

SEQ ID NO: 5544483 - DNA, 25 bp, Homo sapien
gtacagcctatagaattgtgaccta

SEQ ID NO: 5544484 - DNA, 25 bp, Homo sapien
aaagagcccggtgcttccctctctc

SEQ ID NO: 5544485 - DNA, 25 bp, Homo sapien
cctgatgtagatactggtgctgatt

SEQ ID NO: 5544486 - DNA, 25 bp, Homo sapien
gactccattggagtgaccagcagag

SEQ ID NO: 5544487 - DNA, 25 bp, Homo sapien
ctcagaactctgcacccaggttctc

SEQ ID NO: 5544488 - DNA, 25 bp, Homo sapien
tggccagtggctccaccctggtcag

SEQ ID NO: 5544489 - DNA, 25 bp, Homo sapien
gccacacccgtttgcatgagatgcc

SEQ ID NO: 5544490 - DNA, 25 bp, Homo sapien
cctgggccactgatacctgatctgt

SEQ ID NO: 5544491 - DNA, 25 bp, Homo sapien
gaaaaattagaaggtctcagaactc

SEQ ID NO: 5544492 - DNA, 25 bp, Homo sapien
gagagcagagtgtgacttgcacatt

SEQ ID NO: 5544493 - DNA, 25 bp, Homo sapien
gccctagaatgctgggctgcctggc

SEQ ID NO: 5544494 - DNA, 25 bp, Homo sapien
gacttgcacattaggcgtgcctgtc

SEQ ID NO: 5544495 - DNA, 25 bp, Homo sapien
tctcacagaactacgctcttgtccc

SEQ ID NO: 5544496 - DNA, 25 bp, Homo sapien
aatcccaagtgctccagagccctgg

SEQ ID NO: 5544497 - DNA, 25 bp, Homo sapien
taagtcttaaaaatcaggtgtgaac

SEQ ID NO: 5544498 - DNA, 25 bp, Homo sapien
tgaccaggtttctcatgcccaccct

SEQ ID NO: 5544499 - DNA, 25 bp, Homo sapien
aaagtctggtcctaccaatgggctt

SEQ ID NO: 5544500 - DNA, 25 bp, Homo sapien
aatgggcttagcttccccaggaacc

SEQ ID NO: 5544501 - DNA, 25 bp, Homo sapien
cactgttgcaaaatggctttctctt

SEQ ID NO: 5544502 - DNA, 25 bp, Homo sapien
ctgtacagaaacactctatggaggc

SEQ ID NO: 5544503 - DNA, 25 bp, Homo sapien
ccaggaaccaggaaattttactctc

SEQ ID NO: 5544504 - DNA, 25 bp, Homo sapien
ctcagaaattatcaggaagaaatac

SEQ ID NO: 5544505 - DNA, 25 bp, Homo sapien
ttaagatcactaaacactggctggt

SEQ ID NO: 5544506 - DNA, 25 bp, Homo sapien
ctatggaggccaatatttgattcta

SEQ ID NO: 5544507 - DNA, 25 bp, Homo sapien
ttctagaagccagtgtccctcaacc

SEQ ID NO: 5544508 - DNA, 25 bp, Homo sapien
gctaggtaaagagtagtaaaagaga

SEQ ID NO: 5544509 - DNA, 25 bp, Homo sapien
catttggtcacgtggaggaaaatga

SEQ ID NO: 5544510 - DNA, 25 bp, Homo sapien
caggagtacactttaaagcagggac

SEQ ID NO: 5544511 - DNA, 25 bp, Homo sapien
tagcattcagcttgggtctcccagt

SEQ ID NO: 5544512 - DNA, 25 bp, Homo sapien
tccacacaagaaacctagaatttac

SEQ ID NO: 5544513 - DNA, 25 bp, Homo sapien
ccaactaatgtggaaaaagtctgaa

SEQ ID NO: 5544514 - DNA, 25 bp, Homo sapien
cctaaagtggcatgtggttccctaa

SEQ ID NO: 5544515 - DNA, 25 bp, Homo sapien
catggagcagattttagcattcagc

SEQ ID NO: 5544516 - DNA, 25 bp, Homo sapien
agcagggacttcactcttcaatctc

SEQ ID NO: 5544517 - DNA, 25 bp, Homo sapien
tcccagtcaatatctacgagtctct

SEQ ID NO: 5544518 - DNA, 25 bp, Homo sapien
tcttaaggagatcgatgacacagat

SEQ ID NO: 5544519 - DNA, 25 bp, Homo sapien
tgacacagatacatacagactaaca

SEQ ID NO: 5544520 - DNA, 25 bp, Homo sapien
gcatcccagtcagctgtagcctctc

SEQ ID NO: 5544521 - DNA, 25 bp, Homo sapien
tgtcctgaggtctgggacacttgtc

SEQ ID NO: 5544522 - DNA, 25 bp, Homo sapien
aaattgacttcacagagagctcctc

SEQ ID NO: 5544523 - DNA, 25 bp, Homo sapien
cttcatagctggcatgggtgattta

SEQ ID NO: 5544524 - DNA, 25 bp, Homo sapien
aggaagccagggcataccttctaag

SEQ ID NO: 5544525 - DNA, 25 bp, Homo sapien
gaggcccacacaagtacccttcact

SEQ ID NO: 5544526 - DNA, 25 bp, Homo sapien
tgttacagcgtctcccaaccctgac

SEQ ID NO: 5544527 - DNA, 25 bp, Homo sapien
ctcccttgcagtcaggagtgagcat

SEQ ID NO: 5544528 - DNA, 25 bp, Homo sapien
cccttcactaggggccattcctgcc

SEQ ID NO: 5544529 - DNA, 25 bp, Homo sapien
cctggggtatgttacagccacctgg

SEQ ID NO: 5544530 - DNA, 25 bp, Homo sapien
atgggtgatttagatggatttactc

SEQ ID NO: 5544531 - DNA, 25 bp, Homo sapien
tacaggtatgagctgcctcaatagg

SEQ ID NO: 5544532 - DNA, 25 bp, Homo sapien
tgagtcttctgggtagctgtaacta

SEQ ID NO: 5544533 - DNA, 25 bp, Homo sapien
acacactaccacaaacaactaattt

SEQ ID NO: 5544534 - DNA, 25 bp, Homo sapien
ctcctgcctgagtcttctgggtagc

SEQ ID NO: 5544535 - DNA, 25 bp, Homo sapien
cctgagtcttctgggtagctgtaac

SEQ ID NO: 5544536 - DNA, 25 bp, Homo sapien
tgaaactctcagcctaaagtgatcc

SEQ ID NO: 5544537 - DNA, 25 bp, Homo sapien
aagtgatccaaccactcagccaccc

SEQ ID NO: 5544538 - DNA, 25 bp, Homo sapien
ctgatctgaaactctcagcctaaag

SEQ ID NO: 5544539 - DNA, 25 bp, Homo sapien
ctgcctgagtcttctgggtagctgt

SEQ ID NO: 5544540 - DNA, 25 bp, Homo sapien
agacaagatcttgcttgattgccca

SEQ ID NO: 5544541 - DNA, 25 bp, Homo sapien
gatccaaccactcagccacccaaag

SEQ ID NO: 5544542 - DNA, 25 bp, Homo sapien
ttgcattacagaacaagccttgcac

SEQ ID NO: 5544543 - DNA, 25 bp, Homo sapien
aaagaagacatcctatttgcattac

SEQ ID NO: 5544544 - DNA, 25 bp, Homo sapien
tcacaccatgtgacaatgaatatta

SEQ ID NO: 5544545 - DNA, 25 bp, Homo sapien
caaaaattgattgataggtcttcac

SEQ ID NO: 5544546 - DNA, 25 bp, Homo sapien
ctgtctcaggagagttgtcttaaac

SEQ ID NO: 5544547 - DNA, 25 bp, Homo sapien
caggaaacacaagcttttttaggtc

SEQ ID NO: 5544548 - DNA, 25 bp, Homo sapien
atcagaattatctaaggacaccatc

SEQ ID NO: 5544549 - DNA, 25 bp, Homo sapien
gtactgtcacctggataataaattt

SEQ ID NO: 5544550 - DNA, 25 bp, Homo sapien
ctttggttaagatgtgctgctggca

SEQ ID NO: 5544551 - DNA, 25 bp, Homo sapien
ttaggtcatggctcctcacttcttc

SEQ ID NO: 5544552 - DNA, 25 bp, Homo sapien
tctgggttaacttagctggaacatc

SEQ ID NO: 5544553 - DNA, 25 bp, Homo sapien
cccgcctggatcctctcctagactc

SEQ ID NO: 5544554 - DNA, 25 bp, Homo sapien
ttgaggtgaaattcaaataccatac

SEQ ID NO: 5544555 - DNA, 25 bp, Homo sapien
cagcccaccactcacccacattcct

SEQ ID NO: 5544556 - DNA, 25 bp, Homo sapien
aggatgaggtctgtacagagtcaag

SEQ ID NO: 5544557 - DNA, 25 bp, Homo sapien
acttgaccttggctaggtgtccggg

SEQ ID NO: 5544558 - DNA, 25 bp, Homo sapien
catgagctcattccgccctcccctc

SEQ ID NO: 5544559 - DNA, 25 bp, Homo sapien
ctccaatttgataatggttgggagg

SEQ ID NO: 5544560 - DNA, 25 bp, Homo sapien
gggctggagcttttccaccgcccac

SEQ ID NO: 5544561 - DNA, 25 bp, Homo sapien
tcaatgagttaacgtaaggatgcag

SEQ ID NO: 5544562 - DNA, 25 bp, Homo sapien
tgggggtgataatggtacctccaat

SEQ ID NO: 5544563 - DNA, 25 bp, Homo sapien
tcctagactccagacatcccaacag

SEQ ID NO: 5544564 - DNA, 25 bp, Homo sapien
attatatagcctctggagtggaaaa

SEQ ID NO: 5544565 - DNA, 25 bp, Homo sapien
tcctgataagaagggttggagttta

SEQ ID NO: 5544566 - DNA, 25 bp, Homo sapien
aaaatagatttgagctcgtggaacc

SEQ ID NO: 5544567 - DNA, 25 bp, Homo sapien
cccccaggcttcctcgaccacactt

SEQ ID NO: 5544568 - DNA, 25 bp, Homo sapien
ctggaaagtcctacaaacacaagaa

SEQ ID NO: 5544569 - DNA, 25 bp, Homo sapien
gagtttaggggactagacaattgaa

SEQ ID NO: 5544570 - DNA, 25 bp, Homo sapien
aatctgttgggttttgtgggttata

SEQ ID NO: 5544571 - DNA, 25 bp, Homo sapien
atcgattagcagtcctcaaacattt

SEQ ID NO: 5544572 - DNA, 25 bp, Homo sapien
tcaactcacagatttgggtgcattc

SEQ ID NO: 5544573 - DNA, 25 bp, Homo sapien
aggacccttgttagaggtgccccaa

SEQ ID NO: 5544574 - DNA, 25 bp, Homo sapien
acttagcaggttatgaaaatagatt

SEQ ID NO: 5544575 - DNA, 25 bp, Homo sapien
caaattctgtctgaacatggtgtct

SEQ ID NO: 5544576 - DNA, 25 bp, Homo sapien
ataagcctactaatccccatcagac

SEQ ID NO: 5544577 - DNA, 25 bp, Homo sapien
gggagtccaggattaaggttttgca

SEQ ID NO: 5544578 - DNA, 25 bp, Homo sapien
catggcctctactttgtgtgtggga

SEQ ID NO: 5544579 - DNA, 25 bp, Homo sapien
gtcagagatagagcaagccctcttg

SEQ ID NO: 5544580 - DNA, 25 bp, Homo sapien
aactctcaagagggtaccatgatta

SEQ ID NO: 5544581 - DNA, 25 bp, Homo sapien
tggtgtcttagtctgcttgggctgc

SEQ ID NO: 5544582 - DNA, 25 bp, Homo sapien
ttttgcagggtttggtttctagtga

SEQ ID NO: 5544583 - DNA, 25 bp, Homo sapien
agagggtaccatgattacagggatt

SEQ ID NO: 5544584 - DNA, 25 bp, Homo sapien
tgaaaaaaatcatgagtgagttaaa

SEQ ID NO: 5544585 - DNA, 25 bp, Homo sapien
tctctccataggctaacatggcctc

SEQ ID NO: 5544586 - DNA, 25 bp, Homo sapien
ccccatctagtttttcgcatcatcg

SEQ ID NO: 5544587 - DNA, 25 bp, Homo sapien
cgatgatgcgaaaaactagatgggg

SEQ ID NO: 5544588 - DNA, 25 bp, Homo sapien
ggcctcacccattattggcactcgg

SEQ ID NO: 5544589 - DNA, 25 bp, Homo sapien
agctgagattaacgtcgccccccta

SEQ ID NO: 5544590 - DNA, 25 bp, Homo sapien
taaatcttcaccaaaggcccctgag

SEQ ID NO: 5544591 - DNA, 25 bp, Homo sapien
aggattcgtgggattaatgagaagt

SEQ ID NO: 5544592 - DNA, 25 bp, Homo sapien
attttgtgctaggcacagggcctca

SEQ ID NO: 5544593 - DNA, 25 bp, Homo sapien
cctgaccttgtgatgtaactagtat

SEQ ID NO: 5544594 - DNA, 25 bp, Homo sapien
tcgtgggattaatgagaagttaacc

SEQ ID NO: 5544595 - DNA, 25 bp, Homo sapien
acccactgaccctctgcaggcgctg

SEQ ID NO: 5544596 - DNA, 25 bp, Homo sapien
ctcgattcacatacaagggactggg

SEQ ID NO: 5544597 - DNA, 25 bp, Homo sapien
gatgtaactagtatttcttatgccc

SEQ ID NO: 5544598 - DNA, 25 bp, Homo sapien
cgcccccctacccactgaccctctg

SEQ ID NO: 5544599 - DNA, 25 bp, Homo sapien
aggtaaggtctcctgacgtgagtgt

SEQ ID NO: 5544600 - DNA, 25 bp, Homo sapien
gaccccaagatacaggggaattgtc

SEQ ID NO: 5544601 - DNA, 25 bp, Homo sapien
cttggcctctctgtgcaggattcct

SEQ ID NO: 5544602 - DNA, 25 bp, Homo sapien
tcaggggcatcctggctccaggtaa

SEQ ID NO: 5544603 - DNA, 25 bp, Homo sapien
taatagtaatagactgagaggggaa

SEQ ID NO: 5544604 - DNA, 25 bp, Homo sapien
attccttccttctgggcacggggtg

SEQ ID NO: 5544605 - DNA, 25 bp, Homo sapien
ccctcagaatgaagaccccaagata

SEQ ID NO: 5544606 - DNA, 25 bp, Homo sapien
aaagttatcagagatgatcaggggc

SEQ ID NO: 5544607 - DNA, 25 bp, Homo sapien
acgacagtcaaacacggtaggtcag

SEQ ID NO: 5544608 - DNA, 25 bp, Homo sapien
attatggactgtgtagaaatatgat

SEQ ID NO: 5544609 - DNA, 25 bp, Homo sapien
ctggaatgggtatcttacgacagtc

SEQ ID NO: 5544610 - DNA, 25 bp, Homo sapien
tgttttatggcatggctactgtacc

SEQ ID NO: 5544611 - DNA, 25 bp, Homo sapien
tgagatacactgttatggcgtaggt

SEQ ID NO: 5544612 - DNA, 25 bp, Homo sapien
ggagatgctcccactggaaactatg

SEQ ID NO: 5544613 - DNA, 25 bp, Homo sapien
gcaacaaaagcaatagacataccag

SEQ ID NO: 5544614 - DNA, 25 bp, Homo sapien
ctggaaactatgaaaaaggagaaca

SEQ ID NO: 5544615 - DNA, 25 bp, Homo sapien
cttagtcgttgcatgtgagatacac

SEQ ID NO: 5544616 - DNA, 25 bp, Homo sapien
cagacaagaaagctcctgcaactcc

SEQ ID NO: 5544617 - DNA, 25 bp, Homo sapien
tggcgtaggtggaaatcaattcatt

SEQ ID NO: 5544618 - DNA, 25 bp, Homo sapien
gacataccagtaatccttgcccaaa

SEQ ID NO: 5544619 - DNA, 25 bp, Homo sapien
tactgctcaggtaaaagactgactt

SEQ ID NO: 5544620 - DNA, 25 bp, Homo sapien
ggagagatacaagtgagaagtttgt

SEQ ID NO: 5544621 - DNA, 25 bp, Homo sapien
cttcccttgcctctcaccccccgac

SEQ ID NO: 5544622 - DNA, 25 bp, Homo sapien
taatgctatcacttcccttgcctct

SEQ ID NO: 5544623 - DNA, 25 bp, Homo sapien
tttgagcagcaatccaaagcagtga

SEQ ID NO: 5544624 - DNA, 25 bp, Homo sapien
gacactatgggaagaatgttccagg

SEQ ID NO: 5544625 - DNA, 25 bp, Homo sapien
actatgggaagaatgttccaggcag

SEQ ID NO: 5544626 - DNA, 25 bp, Homo sapien
ttgctgcccccatcaacccataatc

SEQ ID NO: 5544627 - DNA, 25 bp, Homo sapien
ccccccactgtgcccgtatgttctc

SEQ ID NO: 5544628 - DNA, 25 bp, Homo sapien
ttccccccactgtgcccgtatgttc

SEQ ID NO: 5544629 - DNA, 25 bp, Homo sapien
ctgcccccatcaacccataatctac

SEQ ID NO: 5544630 - DNA, 25 bp, Homo sapien
ggtgacttttgagcagcaatccaaa

SEQ ID NO: 5544631 - DNA, 25 bp, Homo sapien
ccactgtgcccgtatgttctcattg

SEQ ID NO: 5544632 - DNA, 25 bp, Homo sapien
tttaagccagtcagactagatttct

SEQ ID NO: 5544633 - DNA, 25 bp, Homo sapien
aagccctgtgttaagtgctaggaat

SEQ ID NO: 5544634 - DNA, 25 bp, Homo sapien
ctgaagtaaggaatagatgatgaat

SEQ ID NO: 5544635 - DNA, 25 bp, Homo sapien
gctgggctgtatccacttctactac

SEQ ID NO: 5544636 - DNA, 25 bp, Homo sapien
acattggggatgttaatactatctt

SEQ ID NO: 5544637 - DNA, 25 bp, Homo sapien
ctgttagtgtgtaaatggcagtgtc

SEQ ID NO: 5544638 - DNA, 25 bp, Homo sapien
ttatatcctcgtgaaagagatggaa

SEQ ID NO: 5544639 - DNA, 25 bp, Homo sapien
atctctgtggatgggcttctgaatt

SEQ ID NO: 5544640 - DNA, 25 bp, Homo sapien
acagtcagctgaagtaaggaataga

SEQ ID NO: 5544641 - DNA, 25 bp, Homo sapien
gcaaggcaaacagtcagctgaagta

SEQ ID NO: 5544642 - DNA, 25 bp, Homo sapien
ttctcaaataggtgccaataaatat

SEQ ID NO: 5544643 - DNA, 25 bp, Homo sapien
aacaagagtgcaaaagatttatctt

SEQ ID NO: 5544644 - DNA, 25 bp, Homo sapien
acagtgcccaaggtaatattgcaac

SEQ ID NO: 5544645 - DNA, 25 bp, Homo sapien
tatggaatgttcatgagggcaaaca

SEQ ID NO: 5544646 - DNA, 25 bp, Homo sapien
tccaaagattgaacacatacagtgt

SEQ ID NO: 5544647 - DNA, 25 bp, Homo sapien
ttgttagaacaagcaggcaaaaaac

SEQ ID NO: 5544648 - DNA, 25 bp, Homo sapien
tggaatgcagtcaaaacagtgccca

SEQ ID NO: 5544649 - DNA, 25 bp, Homo sapien
agaagaaataacaaggagcattaga

SEQ ID NO: 5544650 - DNA, 25 bp, Homo sapien
aactgaatggtgattaaaacatgac

SEQ ID NO: 5544651 - DNA, 25 bp, Homo sapien
aaataaaaacttgtggaatgcagtc

SEQ ID NO: 5544652 - DNA, 25 bp, Homo sapien
catactgggtcaaaaaataagtctc

SEQ ID NO: 5544653 - DNA, 25 bp, Homo sapien
tataaccaatgggtcaaagaagaaa

SEQ ID NO: 5544654 - DNA, 25 bp, Homo sapien
tactggacgtcattcaagtttgatg

SEQ ID NO: 5544655 - DNA, 25 bp, Homo sapien
tgagagattaaacagtagtagactt

SEQ ID NO: 5544656 - DNA, 25 bp, Homo sapien
aagtttgatgaattggccaaaattt

SEQ ID NO: 5544657 - DNA, 25 bp, Homo sapien
atgttagtgaatgttactggacgtc

SEQ ID NO: 5544658 - DNA, 25 bp, Homo sapien
aataacaagctcagacgaagatggt

SEQ ID NO: 5544659 - DNA, 25 bp, Homo sapien
agccaaggtactagaaattaagatt

SEQ ID NO: 5544660 - DNA, 25 bp, Homo sapien
ctggaatagcagttatatccctgag

SEQ ID NO: 5544661 - DNA, 25 bp, Homo sapien
gaattggttcataatatggcctgaa

SEQ ID NO: 5544662 - DNA, 25 bp, Homo sapien
gtagtagacttgttaagaatgaaac

SEQ ID NO: 5544663 - DNA, 25 bp, Homo sapien
tttgaaagtaataacaagctcagac

SEQ ID NO: 5544664 - DNA, 25 bp, Homo sapien
ggcctgaactctaagccaaggtact

SEQ ID NO: 5544665 - DNA, 25 bp, Homo sapien
gtctagcatccggttgacagtggct

SEQ ID NO: 5544666 - DNA, 25 bp, Homo sapien
ccaggcttcaggatgggcctggatc

SEQ ID NO: 5544667 - DNA, 25 bp, Homo sapien
gcatctagtaagcgtgaggtaagtg

SEQ ID NO: 5544668 - DNA, 25 bp, Homo sapien
aaggctacatttgtgcatgggtccc

SEQ ID NO: 5544669 - DNA, 25 bp, Homo sapien
atgggcataggcaacccagcatcta

SEQ ID NO: 5544670 - DNA, 25 bp, Homo sapien
gacagtggctagatatgaccctctc

SEQ ID NO: 5544671 - DNA, 25 bp, Homo sapien
atggggacagaaagttatctggctt

SEQ ID NO: 5544672 - DNA, 25 bp, Homo sapien
tattcacggaagtcaaaaaggcatt

SEQ ID NO: 5544673 - DNA, 25 bp, Homo sapien
aggaaggctgcaaccgccatactta

SEQ ID NO: 5544674 - DNA, 25 bp, Homo sapien
aattccagaagtcacagaaggaagg

SEQ ID NO: 5544675 - DNA, 25 bp, Homo sapien
atgttcagaacccccaggcttcagg

SEQ ID NO: 5544676 - DNA, 25 bp, Homo sapien
acacactcacagaatgtattgacat

SEQ ID NO: 5544677 - DNA, 25 bp, Homo sapien
tgcctgcctgaatacagaaattggc

SEQ ID NO: 5544678 - DNA, 25 bp, Homo sapien
tctcctctagggattggggagtatg

SEQ ID NO: 5544679 - DNA, 25 bp, Homo sapien
ctttaaatgggatacgacaagttat

SEQ ID NO: 5544680 - DNA, 25 bp, Homo sapien
atcaaggatgccaattaacatgagt

SEQ ID NO: 5544681 - DNA, 25 bp, Homo sapien
cttaataaaaggtatctccaggggc

SEQ ID NO: 5544682 - DNA, 25 bp, Homo sapien
cattttaagacacgatggaaaacat

SEQ ID NO: 5544683 - DNA, 25 bp, Homo sapien
agaaattggcctttaaatgggatac

SEQ ID NO: 5544684 - DNA, 25 bp, Homo sapien
gggattggggagtatgactataata

SEQ ID NO: 5544685 - DNA, 25 bp, Homo sapien
aataagttacgtaaagatgtgatct

SEQ ID NO: 5544686 - DNA, 25 bp, Homo sapien
tgtatgtacatatgcctgcctgaat

SEQ ID NO: 5544687 - DNA, 25 bp, Homo sapien
tcacggataaagacgttgagaagga

SEQ ID NO: 5544688 - DNA, 25 bp, Homo sapien
tttctacaggaatccagatccatcc

SEQ ID NO: 5544689 - DNA, 25 bp, Homo sapien
gttcgcaacctaactctgacttccc

SEQ ID NO: 5544690 - DNA, 25 bp, Homo sapien
aaacctgcgtagatagttcgcaacc

SEQ ID NO: 5544691 - DNA, 25 bp, Homo sapien
gatgaggatgccttctgtatctcca

SEQ ID NO: 5544692 - DNA, 25 bp, Homo sapien
acatgaatggctaaaaattcctgtc

SEQ ID NO: 5544693 - DNA, 25 bp, Homo sapien
aactagctgcaaattcaccttcatc

SEQ ID NO: 5544694 - DNA, 25 bp, Homo sapien
ttcggaccattattaaacctgcgta

SEQ ID NO: 5544695 - DNA, 25 bp, Homo sapien
tacttagatgtagactccaaatgca

SEQ ID NO: 5544696 - DNA, 25 bp, Homo sapien
cttcccacagtttgaccattccttc

SEQ ID NO: 5544697 - DNA, 25 bp, Homo sapien
ggatgggtaaaggataatgccctct

SEQ ID NO: 5544698 - DNA, 25 bp, Homo sapien
tatcgatgaaaaggtggtgcacagc

SEQ ID NO: 5544699 - DNA, 25 bp, Homo sapien
gctgtgcaccaccttttcatcgata

SEQ ID NO: 5544700 - DNA, 25 bp, Homo sapien
gcaggtgaagctcacatgtgccact

SEQ ID NO: 5544701 - DNA, 25 bp, Homo sapien
aagggcggtctgctctcactcccct

SEQ ID NO: 5544702 - DNA, 25 bp, Homo sapien
ctaaagtcacattccggcagcaatt

SEQ ID NO: 5544703 - DNA, 25 bp, Homo sapien
caacaataacgagaaacaagtcacc

SEQ ID NO: 5544704 - DNA, 25 bp, Homo sapien
tcataggaagcttgggctctgcttc

SEQ ID NO: 5544705 - DNA, 25 bp, Homo sapien
gtaattaagctcggctgcgcccact

SEQ ID NO: 5544706 - DNA, 25 bp, Homo sapien
tggctgctcttttcaggccggcggc

SEQ ID NO: 5544707 - DNA, 25 bp, Homo sapien
tctcaacaaggggagatttgactgg

SEQ ID NO: 5544708 - DNA, 25 bp, Homo sapien
ctgcgcccactcaggcttccagacc

SEQ ID NO: 5544709 - DNA, 25 bp, Homo sapien
tctgagaaccagtcataggaagctt

SEQ ID NO: 5544710 - DNA, 25 bp, Homo sapien
ccactctgtgagtgtcaccgcgagg

SEQ ID NO: 5544711 - DNA, 25 bp, Homo sapien
agtcttagacagttaggcatggtgg

SEQ ID NO: 5544712 - DNA, 25 bp, Homo sapien
ggctggctaagctagacagtgaatg

SEQ ID NO: 5544713 - DNA, 25 bp, Homo sapien
actgtgctagtaggaatgaaggtaa

SEQ ID NO: 5544714 - DNA, 25 bp, Homo sapien
aactgggtctttggtcaactgtgct

SEQ ID NO: 5544715 - DNA, 25 bp, Homo sapien
ggcttggtacacaggtgtcagccac

SEQ ID NO: 5544716 - DNA, 25 bp, Homo sapien
atcaaggccaccctgctgacaaagt

SEQ ID NO: 5544717 - DNA, 25 bp, Homo sapien
gaggaaggaagagatgttttattcc

SEQ ID NO: 5544718 - DNA, 25 bp, Homo sapien
cagaactgatgccattagaaacatg

SEQ ID NO: 5544719 - DNA, 25 bp, Homo sapien
tactagtgtttgggatcaactgggt

SEQ ID NO: 5544720 - DNA, 25 bp, Homo sapien
tgagctcaggtgtttaagaccagcc

SEQ ID NO: 5544721 - DNA, 25 bp, Homo sapien
acacgcacacaccacatcttaaaac

SEQ ID NO: 5544722 - DNA, 25 bp, Homo sapien
ctgggtcggcctctctcagcaactg

SEQ ID NO: 5544723 - DNA, 25 bp, Homo sapien
cagttgctgagagaggccgacccag

SEQ ID NO: 5544724 - DNA, 25 bp, Homo sapien
tatcatggatagaaagataacattc

SEQ ID NO: 5544725 - DNA, 25 bp, Homo sapien
taccggatgtcaagaatttaggata

SEQ ID NO: 5544726 - DNA, 25 bp, Homo sapien
agccttagactgagaaaagatacta

SEQ ID NO: 5544727 - DNA, 25 bp, Homo sapien
ggagagatacagaattatcatggat

SEQ ID NO: 5544728 - DNA, 25 bp, Homo sapien
ggcagaggagacttccttaccggat

SEQ ID NO: 5544729 - DNA, 25 bp, Homo sapien
cctaaagttcacagaaagagcaagg

SEQ ID NO: 5544730 - DNA, 25 bp, Homo sapien
gacacaaaagccacaattcagatac

SEQ ID NO: 5544731 - DNA, 25 bp, Homo sapien
taaactgctaagacaactgattatc

SEQ ID NO: 5544732 - DNA, 25 bp, Homo sapien
ataacagagagggcattataatcag

SEQ ID NO: 5544733 - DNA, 25 bp, Homo sapien
acttgaattaatggagagatacaga

SEQ ID NO: 5544734 - DNA, 25 bp, Homo sapien
aaaatagaaaggcaaaatcataaaa

SEQ ID NO: 5544735 - DNA, 25 bp, Homo sapien
gtcccgccctcacgttcgatcgcgg

SEQ ID NO: 5544736 - DNA, 25 bp, Homo sapien
ccgcgatcgaacgtgagggcgggac

SEQ ID NO: 5544737 - DNA, 25 bp, Homo sapien
atgatgactgtttacacatagtctc

SEQ ID NO: 5544738 - DNA, 25 bp, Homo sapien
tgtggtcatccaatgtgtatttgtc

SEQ ID NO: 5544739 - DNA, 25 bp, Homo sapien
taagagaaggatgtctcactaggtt

SEQ ID NO: 5544740 - DNA, 25 bp, Homo sapien
ggtttctcaggcctgtctagaactc

SEQ ID NO: 5544741 - DNA, 25 bp, Homo sapien
agtaatctaaatgtctatgtgaaat

SEQ ID NO: 5544742 - DNA, 25 bp, Homo sapien
catttaattttggttgtgggtggtc

SEQ ID NO: 5544743 - DNA, 25 bp, Homo sapien
gtgggtggtctatgtttatgtgtca

SEQ ID NO: 5544744 - DNA, 25 bp, Homo sapien
gtttatgtgtcaggtgcaattatta

SEQ ID NO: 5544745 - DNA, 25 bp, Homo sapien
cttgagtactataatgatgactgtt

SEQ ID NO: 5544746 - DNA, 25 bp, Homo sapien
ttgctagaagctgttttagtgtctt

SEQ ID NO: 5544747 - DNA, 25 bp, Homo sapien
ctgtttgctgttactgtggtcatcc

SEQ ID NO: 5544748 - DNA, 25 bp, Homo sapien
gacctgcctggtcatagacaagaga

SEQ ID NO: 5544749 - DNA, 25 bp, Homo sapien
ggtgctctgcgcttggagttttggt

SEQ ID NO: 5544750 - DNA, 25 bp, Homo sapien
ctctctctgccccaatagaaaaacc

SEQ ID NO: 5544751 - DNA, 25 bp, Homo sapien
gggtccctcccgcctgtgacctgcc

SEQ ID NO: 5544752 - DNA, 25 bp, Homo sapien
gtgctgcattcggacgaagatggca

SEQ ID NO: 5544753 - DNA, 25 bp, Homo sapien
ctgcctggtcatagacaagagaagc

SEQ ID NO: 5544754 - DNA, 25 bp, Homo sapien
tcccggagttaattctccagcttgc

SEQ ID NO: 5544755 - DNA, 25 bp, Homo sapien
ctgggtccctcccgcctgtgacctg

SEQ ID NO: 5544756 - DNA, 25 bp, Homo sapien
cgagctcaagtcccggagttaattc

SEQ ID NO: 5544757 - DNA, 25 bp, Homo sapien
accccgagctcaagtcccggagtta

SEQ ID NO: 5544758 - DNA, 25 bp, Homo sapien
gctctgcgcttggagttttggtttt

SEQ ID NO: 5544759 - DNA, 25 bp, Homo sapien
aaggcagtatgttccccttatggga

SEQ ID NO: 5544760 - DNA, 25 bp, Homo sapien
tcagcagcatgctagagacttcacc

SEQ ID NO: 5544761 - DNA, 25 bp, Homo sapien
tcattcagcagcatgctagagactt

SEQ ID NO: 5544762 - DNA, 25 bp, Homo sapien
taatagtaaaaggcagtatgttccc

SEQ ID NO: 5544763 - DNA, 25 bp, Homo sapien
agcattcttaatagtaaaaggcagt

SEQ ID NO: 5544764 - DNA, 25 bp, Homo sapien
caccaatgtagtaagtcaagaaaac

SEQ ID NO: 5544765 - DNA, 25 bp, Homo sapien
gcagcatgctagagacttcaccaat

SEQ ID NO: 5544766 - DNA, 25 bp, Homo sapien
ctgaactcaaggagattgaatgatc

SEQ ID NO: 5544767 - DNA, 25 bp, Homo sapien
cacttctattcattcagcagcatgc

SEQ ID NO: 5544768 - DNA, 25 bp, Homo sapien
actgcgctggcccagcattcaactt

SEQ ID NO: 5544769 - DNA, 25 bp, Homo sapien
tcaaggagattgaatgatctgcccg

SEQ ID NO: 5544770 - DNA, 25 bp, Homo sapien
acccgtgtcctcgaccatgagcagc

SEQ ID NO: 5544771 - DNA, 25 bp, Homo sapien
gcaatccaaagaggccttcgccatc

SEQ ID NO: 5544772 - DNA, 25 bp, Homo sapien
gctgcgtacaagcaagcgtaccatc

SEQ ID NO: 5544773 - DNA, 25 bp, Homo sapien
gtggccagaatgatcatcgaggccc

SEQ ID NO: 5544774 - DNA, 25 bp, Homo sapien
aggccttcgccatcggcttgggagg

SEQ ID NO: 5544775 - DNA, 25 bp, Homo sapien
ggccgccctggtacaatgaacacgg

SEQ ID NO: 5544776 - DNA, 25 bp, Homo sapien
tctgggaagaccactgtggccagaa

SEQ ID NO: 5544777 - DNA, 25 bp, Homo sapien
tcctgcccatggaagggccagttca

SEQ ID NO: 5544778 - DNA, 25 bp, Homo sapien
ccactgtgctgcccacaggagtggt

SEQ ID NO: 5544779 - DNA, 25 bp, Homo sapien
gcagcttctgcagccaagggtctca

SEQ ID NO: 5544780 - DNA, 25 bp, Homo sapien
gcgtaccatctacaccgccgggcgg

SEQ ID NO: 5544781 - DNA, 25 bp, Homo sapien
agacatcggagactgcccataagta

SEQ ID NO: 5544782 - DNA, 25 bp, Homo sapien
ggggtgttcataagctcagacagac

SEQ ID NO: 5544783 - DNA, 25 bp, Homo sapien
atcatgataggctgtgtttcagggc

SEQ ID NO: 5544784 - DNA, 25 bp, Homo sapien
gagaggagtgatttagggtttctcc

SEQ ID NO: 5544785 - DNA, 25 bp, Homo sapien
atggaaagcaagggattgcttctgc

SEQ ID NO: 5544786 - DNA, 25 bp, Homo sapien
atatcctgaaaagtggttggggtta

SEQ ID NO: 5544787 - DNA, 25 bp, Homo sapien
ctgcccataagtaagggttccctac

SEQ ID NO: 5544788 - DNA, 25 bp, Homo sapien
gagcccatgacccaccccctgggaa

SEQ ID NO: 5544789 - DNA, 25 bp, Homo sapien
aagagtgaaaaagatatcctgaaaa

SEQ ID NO: 5544790 - DNA, 25 bp, Homo sapien
cacttctacctgtgggggtgttcat

SEQ ID NO: 5544791 - DNA, 25 bp, Homo sapien
tttgatatgtcaagtggagagagga

SEQ ID NO: 5544792 - DNA, 25 bp, Homo sapien
gacgtcgattaagaccctcgtcgag

SEQ ID NO: 5544793 - DNA, 25 bp, Homo sapien
ctcgacgagggtcttaatcgacgtc

SEQ ID NO: 5544794 - DNA, 25 bp, Homo sapien
tatgcagtgctccttcccatgctga

SEQ ID NO: 5544795 - DNA, 25 bp, Homo sapien
cattattgtgggttagaaggtacat

SEQ ID NO: 5544796 - DNA, 25 bp, Homo sapien
atataatctgatgagtaagtggcaa

SEQ ID NO: 5544797 - DNA, 25 bp, Homo sapien
tcttagctcctatatgcagtgctcc

SEQ ID NO: 5544798 - DNA, 25 bp, Homo sapien
taagttacgctacattattgtgggt

SEQ ID NO: 5544799 - DNA, 25 bp, Homo sapien
gtgaaaaaatataatctgatgagta

SEQ ID NO: 5544800 - DNA, 25 bp, Homo sapien
agtggcaagagtgttaacttataaa

SEQ ID NO: 5544801 - DNA, 25 bp, Homo sapien
acgcccagcctaaagtgtgtacttt

SEQ ID NO: 5544802 - DNA, 25 bp, Homo sapien
ggtggtcattacttgtgggtggtca

SEQ ID NO: 5544803 - DNA, 25 bp, Homo sapien
ttcccatgctgaatgtctgaatttt

SEQ ID NO: 5544804 - DNA, 25 bp, Homo sapien
taatctgatgagtaagtggcaagag

SEQ ID NO: 5544805 - DNA, 25 bp, Homo sapien
gaacaatggtaggaatgtcaaggaa

SEQ ID NO: 5544806 - DNA, 25 bp, Homo sapien
gattagtcagatgctgtgagaggag

SEQ ID NO: 5544807 - DNA, 25 bp, Homo sapien
ggagtgaagatcggattagtcagat

SEQ ID NO: 5544808 - DNA, 25 bp, Homo sapien
aacaaacaaacctatacgaacaatg

SEQ ID NO: 5544809 - DNA, 25 bp, Homo sapien
cagcctgggctggtttaattaaatt

SEQ ID NO: 5544810 - DNA, 25 bp, Homo sapien
ctagacctatgacttggagctgttc

SEQ ID NO: 5544811 - DNA, 25 bp, Homo sapien
tagaatgggcaggcacctttgaaaa

SEQ ID NO: 5544812 - DNA, 25 bp, Homo sapien
gaaaaaaccagtgtagaatgggcag

SEQ ID NO: 5544813 - DNA, 25 bp, Homo sapien
ctatacgaacaatggtaggaatgtc

SEQ ID NO: 5544814 - DNA, 25 bp, Homo sapien
gagcatagcaaagaagtctagacct

SEQ ID NO: 5544815 - DNA, 25 bp, Homo sapien
gcacctttgaaaaggctagaggaaa

SEQ ID NO: 5544816 - DNA, 25 bp, Homo sapien
tgagccagtcctctcagcagctccc

SEQ ID NO: 5544817 - DNA, 25 bp, Homo sapien
aagaagttactgtacaaatgccaat

SEQ ID NO: 5544818 - DNA, 25 bp, Homo sapien
atgccaatttcttgaaggagagcaa

SEQ ID NO: 5544819 - DNA, 25 bp, Homo sapien
tcagagcctctgcattgagccagtc

SEQ ID NO: 5544820 - DNA, 25 bp, Homo sapien
ctggcctgtgttaggcactggcatc

SEQ ID NO: 5544821 - DNA, 25 bp, Homo sapien
gtccctgcagctctgggtctggttc

SEQ ID NO: 5544822 - DNA, 25 bp, Homo sapien
gtagaacgtggtgaaataacccaca

SEQ ID NO: 5544823 - DNA, 25 bp, Homo sapien
ggaaatggagagtttgtcctatttg

SEQ ID NO: 5544824 - DNA, 25 bp, Homo sapien
cgcatcggtgcttgagtccctgcag

SEQ ID NO: 5544825 - DNA, 25 bp, Homo sapien
ccacagatggtctagacagccctct

SEQ ID NO: 5544826 - DNA, 25 bp, Homo sapien
tctgggtctggttcttcaagttggc

SEQ ID NO: 5544827 - DNA, 25 bp, Homo sapien
caaagagtgatatatgaaaaggtgc

SEQ ID NO: 5544828 - DNA, 25 bp, Homo sapien
tagacggtgataagtactactggca

SEQ ID NO: 5544829 - DNA, 25 bp, Homo sapien
attatgaagtattttagacggtgat

SEQ ID NO: 5544830 - DNA, 25 bp, Homo sapien
tatgcaacaataaagtccaagacca

SEQ ID NO: 5544831 - DNA, 25 bp, Homo sapien
tctgacagcttaaaaatgaagcatc

SEQ ID NO: 5544832 - DNA, 25 bp, Homo sapien
tgcataatatgtgacaaagagtgat

SEQ ID NO: 5544833 - DNA, 25 bp, Homo sapien
ccaagaccataaagaaaagattaat

SEQ ID NO: 5544834 - DNA, 25 bp, Homo sapien
aaaattgatggaaatgacaaattag

SEQ ID NO: 5544835 - DNA, 25 bp, Homo sapien
aggcagcggttatgcaacaataaag

SEQ ID NO: 5544836 - DNA, 25 bp, Homo sapien
tgtgccagacaagtttacacatggg

SEQ ID NO: 5544837 - DNA, 25 bp, Homo sapien
tatgaaaaggtgctaaatatacatc

SEQ ID NO: 5544838 - DNA, 25 bp, Homo sapien
gtacatccacaggaacaacgtcagc

SEQ ID NO: 5544839 - DNA, 25 bp, Homo sapien
ctagattccttcagagttcttgagc

SEQ ID NO: 5544840 - DNA, 25 bp, Homo sapien
ttccatacacctgctgggacagggg

SEQ ID NO: 5544841 - DNA, 25 bp, Homo sapien
cttgagcctcctaaaaagtataagg

SEQ ID NO: 5544842 - DNA, 25 bp, Homo sapien
gctttgtctttcgcaggcctgcacc

SEQ ID NO: 5544843 - DNA, 25 bp, Homo sapien
catccacaggaacaacgtcagcatg

SEQ ID NO: 5544844 - DNA, 25 bp, Homo sapien
ttggattccatacacctgctgggac

SEQ ID NO: 5544845 - DNA, 25 bp, Homo sapien
cccagtgtcgccagccacactcggg

SEQ ID NO: 5544846 - DNA, 25 bp, Homo sapien
gacttccagagctctgctccttcta

SEQ ID NO: 5544847 - DNA, 25 bp, Homo sapien
gacaggggcctcacagctttgtctt

SEQ ID NO: 5544848 - DNA, 25 bp, Homo sapien
ggcggaatgctgaggtgtttctcaa

SEQ ID NO: 5544849 - DNA, 25 bp, Homo sapien
ctgcaccccgccaaaagtaggtatc

SEQ ID NO: 5544850 - DNA, 25 bp, Homo sapien
gggctgagtcgatagctagaacttt

SEQ ID NO: 5544851 - DNA, 25 bp, Homo sapien
gcagatagggaattaggttttcttc

SEQ ID NO: 5544852 - DNA, 25 bp, Homo sapien
cattcttgggggcatctcactgttg

SEQ ID NO: 5544853 - DNA, 25 bp, Homo sapien
ccgtgctgtcgccacttcctcgctc

SEQ ID NO: 5544854 - DNA, 25 bp, Homo sapien
aacagaaacatttggcagataggga

SEQ ID NO: 5544855 - DNA, 25 bp, Homo sapien
ttgccaggacattaccaacagaaac

SEQ ID NO: 5544856 - DNA, 25 bp, Homo sapien
aataagagcccttcccccgaacatc

SEQ ID NO: 5544857 - DNA, 25 bp, Homo sapien
agccagattcaaaccgtgctgtcgc

SEQ ID NO: 5544858 - DNA, 25 bp, Homo sapien
ccgatcctataactgggagaaaata

SEQ ID NO: 5544859 - DNA, 25 bp, Homo sapien
ccaaggtcacacagaattcagaatt

SEQ ID NO: 5544860 - DNA, 25 bp, Homo sapien
tgctatgctgtttgggaagacagtc

SEQ ID NO: 5544861 - DNA, 25 bp, Homo sapien
aggaaagagaacacaactataaatt

SEQ ID NO: 5544862 - DNA, 25 bp, Homo sapien
ggaagtgaagtagaacaactgagtt

SEQ ID NO: 5544863 - DNA, 25 bp, Homo sapien
tgcaggaagggactctattgactaa

SEQ ID NO: 5544864 - DNA, 25 bp, Homo sapien
gagggagataactgaactaaattta

SEQ ID NO: 5544865 - DNA, 25 bp, Homo sapien
ttgagcccaaattactgaggaataa

SEQ ID NO: 5544866 - DNA, 25 bp, Homo sapien
taaatgtaaattatggagggagata

SEQ ID NO: 5544867 - DNA, 25 bp, Homo sapien
tgcaagtcagccttatggaagtgaa

SEQ ID NO: 5544868 - DNA, 25 bp, Homo sapien
tgggaagacagtcaattagacatcc

SEQ ID NO: 5544869 - DNA, 25 bp, Homo sapien
tgaggagaatgtataaatgcaggaa

SEQ ID NO: 5544870 - DNA, 25 bp, Homo sapien
aaggagtcaaagattagggtaatat

SEQ ID NO: 5544871 - DNA, 25 bp, Homo sapien
ccactacaaacgtcgagagaaattc

SEQ ID NO: 5544872 - DNA, 25 bp, Homo sapien
cggcgcctcgtacgctagtgtcctc

SEQ ID NO: 5544873 - DNA, 25 bp, Homo sapien
acagcgtcgaagatccccagcgctg

SEQ ID NO: 5544874 - DNA, 25 bp, Homo sapien
tgaatcctggaacaaggctacagcg

SEQ ID NO: 5544875 - DNA, 25 bp, Homo sapien
cactgcatccctgagcaacccggag

SEQ ID NO: 5544876 - DNA, 25 bp, Homo sapien
agaaattcgtagatgaggccttgtc

SEQ ID NO: 5544877 - DNA, 25 bp, Homo sapien
caaccaacttccgcccacccactac

SEQ ID NO: 5544878 - DNA, 25 bp, Homo sapien
aaacaccccaaccggctgttgtgac

SEQ ID NO: 5544879 - DNA, 25 bp, Homo sapien
gcgacgcggtatttgaatcctggaa

SEQ ID NO: 5544880 - DNA, 25 bp, Homo sapien
caacacaccagaagaggaataaagg

SEQ ID NO: 5544881 - DNA, 25 bp, Homo sapien
ccaggccaacacaacttaaacccca

SEQ ID NO: 5544882 - DNA, 25 bp, Homo sapien
aaaactctacataaaagatacttac

SEQ ID NO: 5544883 - DNA, 25 bp, Homo sapien
gtaagtatcttttatgtagagtttt

SEQ ID NO: 5544884 - DNA, 25 bp, Homo sapien
tcaactgcacccaaaaggggaggaa

SEQ ID NO: 5544885 - DNA, 25 bp, Homo sapien
tcctaggtgagcactagaaaataaa

SEQ ID NO: 5544886 - DNA, 25 bp, Homo sapien
aggaaaatccacagtgcatcttgct

SEQ ID NO: 5544887 - DNA, 25 bp, Homo sapien
gtaagacctaagggttagagtcatc

SEQ ID NO: 5544888 - DNA, 25 bp, Homo sapien
atcagcattaaccagtgaccccaat

SEQ ID NO: 5544889 - DNA, 25 bp, Homo sapien
cttaagtacaaatgatagaagggcg

SEQ ID NO: 5544890 - DNA, 25 bp, Homo sapien
tgcttccccgttctggggatgggaa

SEQ ID NO: 5544891 - DNA, 25 bp, Homo sapien
tagagtcatcaaaaataatatcagc

SEQ ID NO: 5544892 - DNA, 25 bp, Homo sapien
gggatgggaaatccatcaactgcac

SEQ ID NO: 5544893 - DNA, 25 bp, Homo sapien
ggcaccgtgcccggcataagcttta

SEQ ID NO: 5544894 - DNA, 25 bp, Homo sapien
ttcaccaggtaaatacttaagtaca

SEQ ID NO: 5544895 - DNA, 25 bp, Homo sapien
gagggagggaaacggcggacgacgc

SEQ ID NO: 5544896 - DNA, 25 bp, Homo sapien
gcgtcgtccgccgtttccctccctc

SEQ ID NO: 5544897 - DNA, 25 bp, Homo sapien
tgctataatagcagagctgagtagt

SEQ ID NO: 5544898 - DNA, 25 bp, Homo sapien
aaggcatgagcatatatggtgtctt

SEQ ID NO: 5544899 - DNA, 25 bp, Homo sapien
tcaggatggtataacaaaataccag

SEQ ID NO: 5544900 - DNA, 25 bp, Homo sapien
acatagaccctatgtgtcttagtcc

SEQ ID NO: 5544901 - DNA, 25 bp, Homo sapien
tgaacttagtcaaatgtggtccata

SEQ ID NO: 5544902 - DNA, 25 bp, Homo sapien
aaggcatctggcttatgttatcttc

SEQ ID NO: 5544903 - DNA, 25 bp, Homo sapien
ataccagagactagtatggagtatt

SEQ ID NO: 5544904 - DNA, 25 bp, Homo sapien
caaatgtggtccataggctggctat

SEQ ID NO: 5544905 - DNA, 25 bp, Homo sapien
tattggatatagccatgcccatttg

SEQ ID NO: 5544906 - DNA, 25 bp, Homo sapien
tgggaagtccaagtttaaggcatga

SEQ ID NO: 5544907 - DNA, 25 bp, Homo sapien
agctgagtagttgtaacatagaccc

SEQ ID NO: 5544908 - DNA, 25 bp, Homo sapien
ctgaacttctcaggagtccaagctc

SEQ ID NO: 5544909 - DNA, 25 bp, Homo sapien
ttaggctttgtgcttctggataagt

SEQ ID NO: 5544910 - DNA, 25 bp, Homo sapien
tcgaacttgtggtgtgccttcttat

SEQ ID NO: 5544911 - DNA, 25 bp, Homo sapien
gtgcttctggataagttacctcatc

SEQ ID NO: 5544912 - DNA, 25 bp, Homo sapien
ggatgatgatactttgattcttcag

SEQ ID NO: 5544913 - DNA, 25 bp, Homo sapien
tcttgccagccaagggatgatgata

SEQ ID NO: 5544914 - DNA, 25 bp, Homo sapien
aaatgttactgcaaggactaagtga

SEQ ID NO: 5544915 - DNA, 25 bp, Homo sapien
cgcctaccggattcaagtgactctc

SEQ ID NO: 5544916 - DNA, 25 bp, Homo sapien
tttggttatcataaggcgggcagta

SEQ ID NO: 5544917 - DNA, 25 bp, Homo sapien
gcgggcagtagctgaacttctcagg

SEQ ID NO: 5544918 - DNA, 25 bp, Homo sapien
tcatcttgccagccaagggatgatg

SEQ ID NO: 5544919 - DNA, 25 bp, Homo sapien
ctttcaagcccagatggagcctcaa

SEQ ID NO: 5544920 - DNA, 25 bp, Homo sapien
gaggacagccatgacatagtaagaa

SEQ ID NO: 5544921 - DNA, 25 bp, Homo sapien
gaagagagacagtgacaatacacaa

SEQ ID NO: 5544922 - DNA, 25 bp, Homo sapien
gaaaaggagaattccctagcacctg

SEQ ID NO: 5544923 - DNA, 25 bp, Homo sapien
actcatggaaaatcagagagactgc

SEQ ID NO: 5544924 - DNA, 25 bp, Homo sapien
caagaagataagcactcatggaaaa

SEQ ID NO: 5544925 - DNA, 25 bp, Homo sapien
gagcacggtgaccatgaactgtaac

SEQ ID NO: 5544926 - DNA, 25 bp, Homo sapien
cagagagactgcagactcaaatccc

SEQ ID NO: 5544927 - DNA, 25 bp, Homo sapien
tggcctgggtgacacccaaggtctc

SEQ ID NO: 5544928 - DNA, 25 bp, Homo sapien
tgtggatgttcacacaccgccccca

SEQ ID NO: 5544929 - DNA, 25 bp, Homo sapien
tgacctcacgtacatggagcacggt

SEQ ID NO: 5544930 - DNA, 25 bp, Homo sapien
gcttgtgccctctgatattactgcc

SEQ ID NO: 5544931 - DNA, 25 bp, Homo sapien
tggaaggacctttctggagcactat

SEQ ID NO: 5544932 - DNA, 25 bp, Homo sapien
attctagagaactaacaatatcctc

SEQ ID NO: 5544933 - DNA, 25 bp, Homo sapien
ccagcttcaatctgggcttgtgccc

SEQ ID NO: 5544934 - DNA, 25 bp, Homo sapien
tgggggatgttaagacacaaaattg

SEQ ID NO: 5544935 - DNA, 25 bp, Homo sapien
tgagccatactgtgtagtcaagttc

SEQ ID NO: 5544936 - DNA, 25 bp, Homo sapien
ggagcgtaagtggcttgattctggt

SEQ ID NO: 5544937 - DNA, 25 bp, Homo sapien
tctaactttgctgggggatgttaag

SEQ ID NO: 5544938 - DNA, 25 bp, Homo sapien
aggcatgagccatactgtgtagtca

SEQ ID NO: 5544939 - DNA, 25 bp, Homo sapien
attacaagtgcccagcaacatgccc

SEQ ID NO: 5544940 - DNA, 25 bp, Homo sapien
ttcagcttgaaattctagagaacta

SEQ ID NO: 5544941 - DNA, 25 bp, Homo sapien
atcttggctcagtgctccagggttc

SEQ ID NO: 5544942 - DNA, 25 bp, Homo sapien
actcacacatagagaaagtggaaaa

SEQ ID NO: 5544943 - DNA, 25 bp, Homo sapien
agggcctacgccgtgatttgctgct

SEQ ID NO: 5544944 - DNA, 25 bp, Homo sapien
aaaccagctgaagaaccattttcct

SEQ ID NO: 5544945 - DNA, 25 bp, Homo sapien
aacttttcccgaagagcgcagtcct

SEQ ID NO: 5544946 - DNA, 25 bp, Homo sapien
gtaatgaaatgtaatgagacccttt

SEQ ID NO: 5544947 - DNA, 25 bp, Homo sapien
gcaccaagttgaacccacgtggacc

SEQ ID NO: 5544948 - DNA, 25 bp, Homo sapien
acgtggaccagctttgacgatgaag

SEQ ID NO: 5544949 - DNA, 25 bp, Homo sapien
gatgaagctacaggcagccaagtca

SEQ ID NO: 5544950 - DNA, 25 bp, Homo sapien
ctcgagttgatgtgccaaacctctc

SEQ ID NO: 5544951 - DNA, 25 bp, Homo sapien
ccctgagcaaaatggctagggccta

SEQ ID NO: 5544952 - DNA, 25 bp, Homo sapien
accagagctagcagcatgaaactgt

SEQ ID NO: 5544953 - DNA, 25 bp, Homo sapien
aatttacattgtgaaggatgagggc

SEQ ID NO: 5544954 - DNA, 25 bp, Homo sapien
gtcctaccaagcagagtgtggatgg

SEQ ID NO: 5544955 - DNA, 25 bp, Homo sapien
ttggccgaacacagtcctcaagtgg

SEQ ID NO: 5544956 - DNA, 25 bp, Homo sapien
gagcaacttctggaatcccgcagcc

SEQ ID NO: 5544957 - DNA, 25 bp, Homo sapien
ggggctttgaggtctgattgcaagc

SEQ ID NO: 5544958 - DNA, 25 bp, Homo sapien
catctcatgccaacacacaggaggc

SEQ ID NO: 5544959 - DNA, 25 bp, Homo sapien
tccccaggaaacgagacttcatttc

SEQ ID NO: 5544960 - DNA, 25 bp, Homo sapien
taagcaaaggaatgcttggtgcacc

SEQ ID NO: 5544961 - DNA, 25 bp, Homo sapien
atatacaaacaaacgcaccagcttc

SEQ ID NO: 5544962 - DNA, 25 bp, Homo sapien
gggaaagttggtgtgattcttgcct

SEQ ID NO: 5544963 - DNA, 25 bp, Homo sapien
tcacgtttgagattaacaggagggc

SEQ ID NO: 5544964 - DNA, 25 bp, Homo sapien
gagggctgcacagaataaagccttc

SEQ ID NO: 5544965 - DNA, 25 bp, Homo sapien
ttgattttgatgggagtaaagcttc

SEQ ID NO: 5544966 - DNA, 25 bp, Homo sapien
gggaaggaaatgccagatcattctt

SEQ ID NO: 5544967 - DNA, 25 bp, Homo sapien
tccagtgcctaatggagcagatggt

SEQ ID NO: 5544968 - DNA, 25 bp, Homo sapien
tcctcaccagagaaaggttgataaa

SEQ ID NO: 5544969 - DNA, 25 bp, Homo sapien
agaacaaggtgcaaaagattcacgt

SEQ ID NO: 5544970 - DNA, 25 bp, Homo sapien
tggtggaggtcttagactctggaac

SEQ ID NO: 5544971 - DNA, 25 bp, Homo sapien
ttgaaaaaaagcatgtgtgactgac

SEQ ID NO: 5544972 - DNA, 25 bp, Homo sapien
cttcaggctgaatagttgcttggat

SEQ ID NO: 5544973 - DNA, 25 bp, Homo sapien
agaccatggagttatgaggctcact

SEQ ID NO: 5544974 - DNA, 25 bp, Homo sapien
tttccaatatcccagagttaatccc

SEQ ID NO: 5544975 - DNA, 25 bp, Homo sapien
tgaaggtggaagaaagtattattct

SEQ ID NO: 5544976 - DNA, 25 bp, Homo sapien
tgaaatgtttagtgatacaaaagaa

SEQ ID NO: 5544977 - DNA, 25 bp, Homo sapien
atcccagagttaatcccaacctgct

SEQ ID NO: 5544978 - DNA, 25 bp, Homo sapien
cccaacctgcttcaaattaccatgt

SEQ ID NO: 5544979 - DNA, 25 bp, Homo sapien
aatcaagtgatatcattacagaatt

SEQ ID NO: 5544980 - DNA, 25 bp, Homo sapien
tcaagttttttggtcaaggacacac

SEQ ID NO: 5544981 - DNA, 25 bp, Homo sapien
cctaatggagtttaaagtctttcca

SEQ ID NO: 5544982 - DNA, 25 bp, Homo sapien
agaaaacagtaataagaattcttag

SEQ ID NO: 5544983 - DNA, 25 bp, Homo sapien
agagctgcaattacaactggcaccc

SEQ ID NO: 5544984 - DNA, 25 bp, Homo sapien
ttggttttaaaagagctgcaattac

SEQ ID NO: 5544985 - DNA, 25 bp, Homo sapien
ttgtcaggattcagactggaagatt

SEQ ID NO: 5544986 - DNA, 25 bp, Homo sapien
acattaccttgagctgagagtccag

SEQ ID NO: 5544987 - DNA, 25 bp, Homo sapien
gcagggaggactcaactgctaacat

SEQ ID NO: 5544988 - DNA, 25 bp, Homo sapien
atctaaatctaggggatagcctgga

SEQ ID NO: 5544989 - DNA, 25 bp, Homo sapien
tgtgccagtgagattctgggcattc

SEQ ID NO: 5544990 - DNA, 25 bp, Homo sapien
agcctggacctttaaaatgggacac

SEQ ID NO: 5544991 - DNA, 25 bp, Homo sapien
taagacacagtaagcctagaagatc

SEQ ID NO: 5544992 - DNA, 25 bp, Homo sapien
tgtcaccgaatttggctgctgcagc

SEQ ID NO: 5544993 - DNA, 25 bp, Homo sapien
aaggctaatggtggctgtaatgtac

SEQ ID NO: 5544994 - DNA, 25 bp, Homo sapien
ggagaaaggagcaaatgttaaattc

SEQ ID NO: 5544995 - DNA, 25 bp, Homo sapien
catcaagaggctaaagtgcatctat

SEQ ID NO: 5544996 - DNA, 25 bp, Homo sapien
atgaaaaaagacactgtagtcctgc

SEQ ID NO: 5544997 - DNA, 25 bp, Homo sapien
tagaaaggtgcctgatacatagcag

SEQ ID NO: 5544998 - DNA, 25 bp, Homo sapien
gtgggagaactgagcctcagactag

SEQ ID NO: 5544999 - DNA, 25 bp, Homo sapien
gcagggccaattaagatgaccaaga

SEQ ID NO: 5545000 - DNA, 25 bp, Homo sapien
cgtctatgtgccagggcactgcgat

SEQ ID NO: 5545001 - DNA, 25 bp, Homo sapien
accaagaccacccaggtacagagtg

SEQ ID NO: 5545002 - DNA, 25 bp, Homo sapien
ccagggcactgcgatgaaaatttta

SEQ ID NO: 5545003 - DNA, 25 bp, Homo sapien
tgtaaagtatcggaatgaatgtatc

SEQ ID NO: 5545004 - DNA, 25 bp, Homo sapien
acatagcaggcctcagtacgtcttt

SEQ ID NO: 5545005 - DNA, 25 bp, Homo sapien
aaggtcagggatttggatctcattt

SEQ ID NO: 5545006 - DNA, 25 bp, Homo sapien
gtatccaaagtgcctagaaaggtgc

SEQ ID NO: 5545007 - DNA, 25 bp, Homo sapien
aaaattttcagggtgtattatacat

SEQ ID NO: 5545008 - DNA, 25 bp, Homo sapien
atgcgaagtattatcaggttacaat

SEQ ID NO: 5545009 - DNA, 25 bp, Homo sapien
gaaatgaggactaatgcgaagtatt

SEQ ID NO: 5545010 - DNA, 25 bp, Homo sapien
gtgtctcagatctaaacagaagtga

SEQ ID NO: 5545011 - DNA, 25 bp, Homo sapien
tttaagctatcttcccagctcagcc

SEQ ID NO: 5545012 - DNA, 25 bp, Homo sapien
tctaaaagtgtctaatcctaggtat

SEQ ID NO: 5545013 - DNA, 25 bp, Homo sapien
tcacatatttgaaatgaggactaat

SEQ ID NO: 5545014 - DNA, 25 bp, Homo sapien
atatacaaattatgcttgcctagca

SEQ ID NO: 5545015 - DNA, 25 bp, Homo sapien
gcaaacaaagtcaaatctcaaattc

SEQ ID NO: 5545016 - DNA, 25 bp, Homo sapien
attaaagcaaacaaagtcaaatctc

SEQ ID NO: 5545017 - DNA, 25 bp, Homo sapien
atttgaaatgaggactaatgcgaag

SEQ ID NO: 5545018 - DNA, 25 bp, Homo sapien
aatggcctgaaagacactgcttcct

SEQ ID NO: 5545019 - DNA, 25 bp, Homo sapien
tcccctccggctctaagttggtaca

SEQ ID NO: 5545020 - DNA, 25 bp, Homo sapien
gagtcaaaagtgataagaagcacat

SEQ ID NO: 5545021 - DNA, 25 bp, Homo sapien
tgcaattactgctgatggcttatct

SEQ ID NO: 5545022 - DNA, 25 bp, Homo sapien
tcgaaggctgttaataatgatgatt

SEQ ID NO: 5545023 - DNA, 25 bp, Homo sapien
ctagaacaatgccaaagagccaaaa

SEQ ID NO: 5545024 - DNA, 25 bp, Homo sapien
ctgtggaaggtacttgtacagtttc

SEQ ID NO: 5545025 - DNA, 25 bp, Homo sapien
cttaacaatgcaaaaagtgtaggtt

SEQ ID NO: 5545026 - DNA, 25 bp, Homo sapien
gattcatgatgactgtggaaggtac

SEQ ID NO: 5545027 - DNA, 25 bp, Homo sapien
agaagcacatttagagcaatatccc

SEQ ID NO: 5545028 - DNA, 25 bp, Homo sapien
acccttctatgccaggtactgcaat

SEQ ID NO: 5545029 - DNA, 25 bp, Homo sapien
caataactgatagcaaaaaggatac

SEQ ID NO: 5545030 - DNA, 25 bp, Homo sapien
acttgaaaggaagatgtatcccatc

SEQ ID NO: 5545031 - DNA, 25 bp, Homo sapien
tataaaaactgcacccaaaaatagc

SEQ ID NO: 5545032 - DNA, 25 bp, Homo sapien
gaggaagttgtcaaacttgtgtatg

SEQ ID NO: 5545033 - DNA, 25 bp, Homo sapien
agatagacagatataggctgaggtt

SEQ ID NO: 5545034 - DNA, 25 bp, Homo sapien
aggcagaaattattacttgaaagga

SEQ ID NO: 5545035 - DNA, 25 bp, Homo sapien
taaagcagtaggattaaatactttg

SEQ ID NO: 5545036 - DNA, 25 bp, Homo sapien
tattaagctgcaaatctatagcaag

SEQ ID NO: 5545037 - DNA, 25 bp, Homo sapien
aaaatttgaaatccttgacagtgtt

SEQ ID NO: 5545038 - DNA, 25 bp, Homo sapien
ttataatgtatttggaacgtgtttc

SEQ ID NO: 5545039 - DNA, 25 bp, Homo sapien
aaaagaatcaactattgaggaagtt

SEQ ID NO: 5545040 - DNA, 25 bp, Homo sapien
agcctttggcaggctatgttacccc

SEQ ID NO: 5545041 - DNA, 25 bp, Homo sapien
ctggccaacttggtgaaacactgtc

SEQ ID NO: 5545042 - DNA, 25 bp, Homo sapien
tacagaactgtaaggcagttgcttc

SEQ ID NO: 5545043 - DNA, 25 bp, Homo sapien
gcaacaggagcgaaactccatctca

SEQ ID NO: 5545044 - DNA, 25 bp, Homo sapien
tcagctactccggaggctgagacag

SEQ ID NO: 5545045 - DNA, 25 bp, Homo sapien
ggcaggcacctgtaatctcagctac

SEQ ID NO: 5545046 - DNA, 25 bp, Homo sapien
tgcagtgaactgagattgtgccgtt

SEQ ID NO: 5545047 - DNA, 25 bp, Homo sapien
aaagttacattattgccagacgcag

SEQ ID NO: 5545048 - DNA, 25 bp, Homo sapien
ttattgctacaaactgggattaatt

SEQ ID NO: 5545049 - DNA, 25 bp, Homo sapien
tattgccagacgcagtggctcatgc

SEQ ID NO: 5545050 - DNA, 25 bp, Homo sapien
cttccgttgtagatagtcttctgtt

SEQ ID NO: 5545051 - DNA, 25 bp, Homo sapien
tctccctgtaaggtggtatcttaag

SEQ ID NO: 5545052 - DNA, 25 bp, Homo sapien
cttaagataccaccttacagggaga

SEQ ID NO: 5545053 - DNA, 25 bp, Homo sapien
attgcagagccatcatgccccacct

SEQ ID NO: 5545054 - DNA, 25 bp, Homo sapien
gtcaagtttaaatgttgccgggcac

SEQ ID NO: 5545055 - DNA, 25 bp, Homo sapien
ggggatcacaggcatatgccaccac

SEQ ID NO: 5545056 - DNA, 25 bp, Homo sapien
gcaggcgaatcacctgaaggtcagg

SEQ ID NO: 5545057 - DNA, 25 bp, Homo sapien
gcctcccaagtcatggggatcacag

SEQ ID NO: 5545058 - DNA, 25 bp, Homo sapien
aggctgctctcaaactcctggcttc

SEQ ID NO: 5545059 - DNA, 25 bp, Homo sapien
tttgagggtctcactcctgtcaccc

SEQ ID NO: 5545060 - DNA, 25 bp, Homo sapien
cctggcttcaagtgatccacccctc

SEQ ID NO: 5545061 - DNA, 25 bp, Homo sapien
tcacctgaaggtcaggggttcaaga

SEQ ID NO: 5545062 - DNA, 25 bp, Homo sapien
gagataaggtttcgctacgttggcc

SEQ ID NO: 5545063 - DNA, 25 bp, Homo sapien
gcgcgctctcggctcattgcaacct

SEQ ID NO: 5545064 - DNA, 25 bp, Homo sapien
gtcccctgcaaggcagggcacttcc

SEQ ID NO: 5545065 - DNA, 25 bp, Homo sapien
ggcacttccagaatacctcctcccc

SEQ ID NO: 5545066 - DNA, 25 bp, Homo sapien
ggcagggcacttccagaatacctcc

SEQ ID NO: 5545067 - DNA, 25 bp, Homo sapien
cccctgcaaggcagggcacttccag

SEQ ID NO: 5545068 - DNA, 25 bp, Homo sapien
gggggcgcctctgaaaatgccttaa

SEQ ID NO: 5545069 - DNA, 25 bp, Homo sapien
gcgtcccctgcaaggcagggcactt

SEQ ID NO: 5545070 - DNA, 25 bp, Homo sapien
gcactgcccagtccgacacaacctg

SEQ ID NO: 5545071 - DNA, 25 bp, Homo sapien
actgcgtcccctgcaaggcagggca

SEQ ID NO: 5545072 - DNA, 25 bp, Homo sapien
cactgcccagtccgacacaacctgc

SEQ ID NO: 5545073 - DNA, 25 bp, Homo sapien
ctctgaaaatgccttaatgctccac

SEQ ID NO: 5545074 - DNA, 25 bp, Homo sapien
ccactgcgtcccctgcaaggcaggg

SEQ ID NO: 5545075 - DNA, 25 bp, Homo sapien
gcacgcagcctacggatgcctttta

SEQ ID NO: 5545076 - DNA, 25 bp, Homo sapien
gttgcttctactaagaaacactaat

SEQ ID NO: 5545077 - DNA, 25 bp, Homo sapien
attccaacgaatcctgggactggac

SEQ ID NO: 5545078 - DNA, 25 bp, Homo sapien
gaccccctaagaaaatgtctctgat

SEQ ID NO: 5545079 - DNA, 25 bp, Homo sapien
tagaaaattgtgtatagactcagaa

SEQ ID NO: 5545080 - DNA, 25 bp, Homo sapien
aaaaaaaactgtgttgcttctacta

SEQ ID NO: 5545081 - DNA, 25 bp, Homo sapien
atagactcagaatgagaaatctagt

SEQ ID NO: 5545082 - DNA, 25 bp, Homo sapien
caacgaatcctgggactggacaatt

SEQ ID NO: 5545083 - DNA, 25 bp, Homo sapien
actgtcttaagaattagtactacgc

SEQ ID NO: 5545084 - DNA, 25 bp, Homo sapien
tgggactggacaattagataaacac

SEQ ID NO: 5545085 - DNA, 25 bp, Homo sapien
gaaaatgtctctgattccaacgaat

SEQ ID NO: 5545086 - DNA, 25 bp, Homo sapien
gagcagagtgttccccaactcttcc

SEQ ID NO: 5545087 - DNA, 25 bp, Homo sapien
ttcgcggtctgctaattaacgggtg

SEQ ID NO: 5545088 - DNA, 25 bp, Homo sapien
tctctgcacttgtaagaaagatcga

SEQ ID NO: 5545089 - DNA, 25 bp, Homo sapien
aattaacgggtgcattcccagacac

SEQ ID NO: 5545090 - DNA, 25 bp, Homo sapien
agtcatgtgattacaggataggcgg

SEQ ID NO: 5545091 - DNA, 25 bp, Homo sapien
ggctggggtcactgatatttattgc

SEQ ID NO: 5545092 - DNA, 25 bp, Homo sapien
cacttgtaagaaagatcgaagactt

SEQ ID NO: 5545093 - DNA, 25 bp, Homo sapien
gtgaagcaagtcatgtgattacagg

SEQ ID NO: 5545094 - DNA, 25 bp, Homo sapien
ctactgcgctcttcaaagaggaacc

SEQ ID NO: 5545095 - DNA, 25 bp, Homo sapien
aagggtttaagcctccggatgactg

SEQ ID NO: 5545096 - DNA, 25 bp, Homo sapien
ctaccgctatctactgcgctcttca

SEQ ID NO: 5545097 - DNA, 25 bp, Homo sapien
gggctccggacaacattcccaatac

SEQ ID NO: 5545098 - DNA, 25 bp, Homo sapien
gtattgggaatgttgtccggagccc

SEQ ID NO: 5545099 - DNA, 25 bp, Homo sapien
aaaggaaaccataatgagaggtcac

SEQ ID NO: 5545100 - DNA, 25 bp, Homo sapien
aaaacaagatgtacaatggccagtc

SEQ ID NO: 5545101 - DNA, 25 bp, Homo sapien
attaaaagagatcaacaatcattac

SEQ ID NO: 5545102 - DNA, 25 bp, Homo sapien
gacaaaagacatctaaaagacaaac

SEQ ID NO: 5545103 - DNA, 25 bp, Homo sapien
tggaaatgcaaagtggtacaaccac

SEQ ID NO: 5545104 - DNA, 25 bp, Homo sapien
gactgttaccactgcagataacgtt

SEQ ID NO: 5545105 - DNA, 25 bp, Homo sapien
tagagcaactagaacactcatacac

SEQ ID NO: 5545106 - DNA, 25 bp, Homo sapien
acatatagcagtttagaagtcagac

SEQ ID NO: 5545107 - DNA, 25 bp, Homo sapien
agtgttggtgagaatttagagcaac

SEQ ID NO: 5545108 - DNA, 25 bp, Homo sapien
gagaggtcaccacatgatcaccaca

SEQ ID NO: 5545109 - DNA, 25 bp, Homo sapien
cagaatacataaagagcccttacaa

SEQ ID NO: 5545110 - DNA, 25 bp, Homo sapien
acaactgccagaaagcagcacgctt

SEQ ID NO: 5545111 - DNA, 25 bp, Homo sapien
caggaaatcagaggtgccctgtgat

SEQ ID NO: 5545112 - DNA, 25 bp, Homo sapien
aatgattcaactagggctgcttacc

SEQ ID NO: 5545113 - DNA, 25 bp, Homo sapien
gagcaggcccccatgatctgtacag

SEQ ID NO: 5545114 - DNA, 25 bp, Homo sapien
ttccaaaaagcgtcagcaagtacac

SEQ ID NO: 5545115 - DNA, 25 bp, Homo sapien
tgccctctagaggacacacaggcac

SEQ ID NO: 5545116 - DNA, 25 bp, Homo sapien
atcccaggctacaagacaagcagga

SEQ ID NO: 5545117 - DNA, 25 bp, Homo sapien
acaggcaccagccgacaggttttca

SEQ ID NO: 5545118 - DNA, 25 bp, Homo sapien
agatggaacaggccccaagttttta

SEQ ID NO: 5545119 - DNA, 25 bp, Homo sapien
atggattaaggatttggagttctct

SEQ ID NO: 5545120 - DNA, 25 bp, Homo sapien
ctccactcacaggatcaaagggtgc

SEQ ID NO: 5545121 - DNA, 25 bp, Homo sapien
gttgctaggagatctacagtttgga

SEQ ID NO: 5545122 - DNA, 25 bp, Homo sapien
acttgggttaagagactgctgtagt

SEQ ID NO: 5545123 - DNA, 25 bp, Homo sapien
gcacagataagtcagtggcagtttc

SEQ ID NO: 5545124 - DNA, 25 bp, Homo sapien
ctttgatgtgtgccagagttctcgt

SEQ ID NO: 5545125 - DNA, 25 bp, Homo sapien
aggcaaccgggtctctttagaggtc

SEQ ID NO: 5545126 - DNA, 25 bp, Homo sapien
tcccatggctccagagacaatgctc

SEQ ID NO: 5545127 - DNA, 25 bp, Homo sapien
agacaatgctcgctacagcagccac

SEQ ID NO: 5545128 - DNA, 25 bp, Homo sapien
ccttcctttgagctgagcggaggag

SEQ ID NO: 5545129 - DNA, 25 bp, Homo sapien
actgctgtagtacagtggtggtctc

SEQ ID NO: 5545130 - DNA, 25 bp, Homo sapien
taaaaagcatgggcacactgctatt

SEQ ID NO: 5545131 - DNA, 25 bp, Homo sapien
agagacttctaagtttggaggccct

SEQ ID NO: 5545132 - DNA, 25 bp, Homo sapien
ctaaggtattccctaggactccgag

SEQ ID NO: 5545133 - DNA, 25 bp, Homo sapien
tgcagtcctacttacgggtggcagg

SEQ ID NO: 5545134 - DNA, 25 bp, Homo sapien
ctgggtatcagggttcatacttctc

SEQ ID NO: 5545135 - DNA, 25 bp, Homo sapien
ttcttggttgttgccttaggatatg

SEQ ID NO: 5545136 - DNA, 25 bp, Homo sapien
tactaggtactgaaagacataattt

SEQ ID NO: 5545137 - DNA, 25 bp, Homo sapien
cctaggactccgagaaaaaacatgc

SEQ ID NO: 5545138 - DNA, 25 bp, Homo sapien
ggatgggtgtaccaatgacaaccat

SEQ ID NO: 5545139 - DNA, 25 bp, Homo sapien
aatgacaaccatgaaagtattctaa

SEQ ID NO: 5545140 - DNA, 25 bp, Homo sapien
ctttaggtagaattcctgggctgcg

SEQ ID NO: 5545141 - DNA, 25 bp, Homo sapien
ctgcgctgaagaatagaaacatttt

SEQ ID NO: 5545142 - DNA, 25 bp, Homo sapien
tagcatcctactccatgtcagatcc

SEQ ID NO: 5545143 - DNA, 25 bp, Homo sapien
gcttgtggctgctatgctggacagc

SEQ ID NO: 5545144 - DNA, 25 bp, Homo sapien
ccattggatgacaccattggtagct

SEQ ID NO: 5545145 - DNA, 25 bp, Homo sapien
ggtagctacgtgatcttatgcaagt

SEQ ID NO: 5545146 - DNA, 25 bp, Homo sapien
caggaattagtgcttagtacacatc

SEQ ID NO: 5545147 - DNA, 25 bp, Homo sapien
aaagactcagttacatgtggcttgt

SEQ ID NO: 5545148 - DNA, 25 bp, Homo sapien
agagcgagaatccatctcaaccagc

SEQ ID NO: 5545149 - DNA, 25 bp, Homo sapien
cccttgtttgtgaagtgtgcataac

SEQ ID NO: 5545150 - DNA, 25 bp, Homo sapien
ctataatggtgaccctcaacaagtc

SEQ ID NO: 5545151 - DNA, 25 bp, Homo sapien
ggacagcacagacagaaccatttcc

SEQ ID NO: 5545152 - DNA, 25 bp, Homo sapien
gataatgtataaaagcacaggaatt

SEQ ID NO: 5545153 - DNA, 25 bp, Homo sapien
tacacatcagatatcccagaaagga

SEQ ID NO: 5545154 - DNA, 25 bp, Homo sapien
gggacagccaatagaaaggtccagc

SEQ ID NO: 5545155 - DNA, 25 bp, Homo sapien
tgtatctactgataccccaaaggga

SEQ ID NO: 5545156 - DNA, 25 bp, Homo sapien
taagaaaagatatcagcattcctac

SEQ ID NO: 5545157 - DNA, 25 bp, Homo sapien
cacttctgtctaaagcttgcagctt

SEQ ID NO: 5545158 - DNA, 25 bp, Homo sapien
caaagaacttacgatgaaaaactat

SEQ ID NO: 5545159 - DNA, 25 bp, Homo sapien
aataatatgcttaaacctctgcttc

SEQ ID NO: 5545160 - DNA, 25 bp, Homo sapien
agggaaggggagcatctttttatta

SEQ ID NO: 5545161 - DNA, 25 bp, Homo sapien
tcaccaactttagtcactacctgac

SEQ ID NO: 5545162 - DNA, 25 bp, Homo sapien
tccagttaataagtgtgggacagcc

SEQ ID NO: 5545163 - DNA, 25 bp, Homo sapien
taataagtgtgggacagccaataga

SEQ ID NO: 5545164 - DNA, 25 bp, Homo sapien
actgaatccagttaataagtgtggg

SEQ ID NO: 5545165 - DNA, 25 bp, Homo sapien
agttaagagacctagttgcagccat

SEQ ID NO: 5545166 - DNA, 25 bp, Homo sapien
ccacatagcacaagcaatttagggt

SEQ ID NO: 5545167 - DNA, 25 bp, Homo sapien
ggctgggaaaacctctgtcctcgct

SEQ ID NO: 5545168 - DNA, 25 bp, Homo sapien
agttataactggaggttcagctggc

SEQ ID NO: 5545169 - DNA, 25 bp, Homo sapien
ggaggttcagctggctaccttcccc

SEQ ID NO: 5545170 - DNA, 25 bp, Homo sapien
gagatgtagcattgttaagaagtta

SEQ ID NO: 5545171 - DNA, 25 bp, Homo sapien
gccatcactggggcatttatgcttc

SEQ ID NO: 5545172 - DNA, 25 bp, Homo sapien
gcaatttagggtgtgagtgtacatg

SEQ ID NO: 5545173 - DNA, 25 bp, Homo sapien
ccactaggctgtgagcatcctgagg

SEQ ID NO: 5545174 - DNA, 25 bp, Homo sapien
cataggaatatgtgggtcaaaattt

SEQ ID NO: 5545175 - DNA, 25 bp, Homo sapien
ttgagatgtttacgcagtctaattc

SEQ ID NO: 5545176 - DNA, 25 bp, Homo sapien
gcccgatctagcaatgtctggagac

SEQ ID NO: 5545177 - DNA, 25 bp, Homo sapien
cacatccatgcaatggcctttttcc

SEQ ID NO: 5545178 - DNA, 25 bp, Homo sapien
gatgggattacatctcgataaaccc

SEQ ID NO: 5545179 - DNA, 25 bp, Homo sapien
aggaaatggctaaaggtgttattgc

SEQ ID NO: 5545180 - DNA, 25 bp, Homo sapien
taaatgacatcattaggaaatggct

SEQ ID NO: 5545181 - DNA, 25 bp, Homo sapien
accctcctttgatgcacaagacagc

SEQ ID NO: 5545182 - DNA, 25 bp, Homo sapien
cagggatgctgctaaccctcctttg

SEQ ID NO: 5545183 - DNA, 25 bp, Homo sapien
ttgacttatgatgggattacatctc

SEQ ID NO: 5545184 - DNA, 25 bp, Homo sapien
tgtttatgagaacccatggacacag

SEQ ID NO: 5545185 - DNA, 25 bp, Homo sapien
aactgggcacaattttgcccgatct

SEQ ID NO: 5545186 - DNA, 25 bp, Homo sapien
aagccagtgattctcaactgggcac

SEQ ID NO: 5545187 - DNA, 25 bp, Homo sapien
gcccttgatctgcacgatgagcttg

SEQ ID NO: 5545188 - DNA, 25 bp, Homo sapien
agcgcacttccactcctgggccacc

SEQ ID NO: 5545189 - DNA, 25 bp, Homo sapien
gcacacgctcttgtcgcagctgatc

SEQ ID NO: 5545190 - DNA, 25 bp, Homo sapien
aggtctccatgaaagcgcacttcca

SEQ ID NO: 5545191 - DNA, 25 bp, Homo sapien
gttgtagttcatcttggccgaggtc

SEQ ID NO: 5545192 - DNA, 25 bp, Homo sapien
atgagggtgcatttgcccttgacgc

SEQ ID NO: 5545193 - DNA, 25 bp, Homo sapien
gcgtgtccacctcccgctgcgtctc

SEQ ID NO: 5545194 - DNA, 25 bp, Homo sapien
cgtgcccttcacgaagcgcagcacc

SEQ ID NO: 5545195 - DNA, 25 bp, Homo sapien
agcgcttgccgtcgatgttgaggct

SEQ ID NO: 5545196 - DNA, 25 bp, Homo sapien
gcccttgacgcggtctgtcctcttc

SEQ ID NO: 5545197 - DNA, 25 bp, Homo sapien
tgtgatctgcagcgtgcacacgctc

SEQ ID NO: 5545198 - DNA, 25 bp, Homo sapien
tccgcccagtgctgtgacaaacaca

SEQ ID NO: 5545199 - DNA, 25 bp, Homo sapien
acagttacaaaagtgcatggttata

SEQ ID NO: 5545200 - DNA, 25 bp, Homo sapien
tgaggaatgggttaagatatatctt

SEQ ID NO: 5545201 - DNA, 25 bp, Homo sapien
ttacaaaagaccttgtgacgccctc

SEQ ID NO: 5545202 - DNA, 25 bp, Homo sapien
tgggaattcctctaggaagggagaa

SEQ ID NO: 5545203 - DNA, 25 bp, Homo sapien
gtcttctactgctggaaaggatgtc

SEQ ID NO: 5545204 - DNA, 25 bp, Homo sapien
ggggaagcgcagacaattttctctg

SEQ ID NO: 5545205 - DNA, 25 bp, Homo sapien
cagacattagcacattacaggacag

SEQ ID NO: 5545206 - DNA, 25 bp, Homo sapien
aaaaactgagagctctgtggatcca

SEQ ID NO: 5545207 - DNA, 25 bp, Homo sapien
ctctggctttaggaagatgtccttt

SEQ ID NO: 5545208 - DNA, 25 bp, Homo sapien
ctgtggatccagctctccgcccagt

SEQ ID NO: 5545209 - DNA, 25 bp, Homo sapien
ctcaggctgaagacttctgagaagt

SEQ ID NO: 5545210 - DNA, 25 bp, Homo sapien
tcttaagtacctgaagccaatgtat

SEQ ID NO: 5545211 - DNA, 25 bp, Homo sapien
aaccaagtccttgcagctaccaaat

SEQ ID NO: 5545212 - DNA, 25 bp, Homo sapien
atcctgcccactgtattctggtctt

SEQ ID NO: 5545213 - DNA, 25 bp, Homo sapien
caaatgacacaaatagaatgcaact

SEQ ID NO: 5545214 - DNA, 25 bp, Homo sapien
ttgatgaagttgataaataatgcta

SEQ ID NO: 5545215 - DNA, 25 bp, Homo sapien
ctaagttcaaagggcatgtacatta

SEQ ID NO: 5545216 - DNA, 25 bp, Homo sapien
tatagagaagtgaaagtcatcccaa

SEQ ID NO: 5545217 - DNA, 25 bp, Homo sapien
agagtcaagagtccccagctatgtt

SEQ ID NO: 5545218 - DNA, 25 bp, Homo sapien
acaaatcttgcaaatggtggtggat

SEQ ID NO: 5545219 - DNA, 25 bp, Homo sapien
tgagaagtgtaaatgctaagttcaa

SEQ ID NO: 5545220 - DNA, 25 bp, Homo sapien
tctttggttgatggctttgcagaag

SEQ ID NO: 5545221 - DNA, 25 bp, Homo sapien
caagtgaatagagtaatagacagtt

SEQ ID NO: 5545222 - DNA, 25 bp, Homo sapien
tcgatcttgagggtccaagtgattc

SEQ ID NO: 5545223 - DNA, 25 bp, Homo sapien
agtgctgttactacaggtatgaccc

SEQ ID NO: 5545224 - DNA, 25 bp, Homo sapien
tgaaggagatttatataagtagaac

SEQ ID NO: 5545225 - DNA, 25 bp, Homo sapien
actagtcaagggctctctcatcctc

SEQ ID NO: 5545226 - DNA, 25 bp, Homo sapien
gatcagaatatcatggcttagcttc

SEQ ID NO: 5545227 - DNA, 25 bp, Homo sapien
tagaacaatggcaagtaggaaatta

SEQ ID NO: 5545228 - DNA, 25 bp, Homo sapien
ttgcagaagaccccaacaattagtc

SEQ ID NO: 5545229 - DNA, 25 bp, Homo sapien
tgtgtagtaaacagggtgacatcat

SEQ ID NO: 5545230 - DNA, 25 bp, Homo sapien
agacagtttgaagtttggggtgtta

SEQ ID NO: 5545231 - DNA, 25 bp, Homo sapien
ccttgactcatgtagtatctcaggt

SEQ ID NO: 5545232 - DNA, 25 bp, Homo sapien
acctgagatactacatgagtcaagg

SEQ ID NO: 5545233 - DNA, 25 bp, Homo sapien
tatcaggaacgcctaacattgcttc

SEQ ID NO: 5545234 - DNA, 25 bp, Homo sapien
aagctggggtctgtgaccataaagc

SEQ ID NO: 5545235 - DNA, 25 bp, Homo sapien
gagatgtagctttggagatcctgac

SEQ ID NO: 5545236 - DNA, 25 bp, Homo sapien
aactagctttaggaagagatgtagc

SEQ ID NO: 5545237 - DNA, 25 bp, Homo sapien
gtgccttggtgaagatgtaagcttt

SEQ ID NO: 5545238 - DNA, 25 bp, Homo sapien
gccatgttctggcagaaagctgggg

SEQ ID NO: 5545239 - DNA, 25 bp, Homo sapien
agttatggaacatgagacttcagtc

SEQ ID NO: 5545240 - DNA, 25 bp, Homo sapien
tgtgaccataaagcaggactgctgt

SEQ ID NO: 5545241 - DNA, 25 bp, Homo sapien
taaatggccaaatggaccaagtgtt

SEQ ID NO: 5545242 - DNA, 25 bp, Homo sapien
ccaagtgtttgcatgaaagctaatc

SEQ ID NO: 5545243 - DNA, 25 bp, Homo sapien
atgggatgattttcaggagtcctga

SEQ ID NO: 5545244 - DNA, 25 bp, Homo sapien
agggtgttcagtgaggacccgaagg

SEQ ID NO: 5545245 - DNA, 25 bp, Homo sapien
ccttcgggtcctcactgaacaccct

SEQ ID NO: 5545246 - DNA, 25 bp, Homo sapien
tgcaacctagcaatcaagccagaag

SEQ ID NO: 5545247 - DNA, 25 bp, Homo sapien
cctccttgcaaatttgagctggccc

SEQ ID NO: 5545248 - DNA, 25 bp, Homo sapien
agtgtgtaccacagcatgtcagctc

SEQ ID NO: 5545249 - DNA, 25 bp, Homo sapien
gtagaatgtttccaaagatgcctgc

SEQ ID NO: 5545250 - DNA, 25 bp, Homo sapien
gcaatcaagccagaagtcaaaacat

SEQ ID NO: 5545251 - DNA, 25 bp, Homo sapien
gatcatcgcacactacctcaaactc

SEQ ID NO: 5545252 - DNA, 25 bp, Homo sapien
aaatggtgggatctacctcccctcc

SEQ ID NO: 5545253 - DNA, 25 bp, Homo sapien
tctgaagccagatattaaggtactt

SEQ ID NO: 5545254 - DNA, 25 bp, Homo sapien
taaaattagctaagtagaatgtttc

SEQ ID NO: 5545255 - DNA, 25 bp, Homo sapien
tcacccataaaatggtgggatctac

SEQ ID NO: 5545256 - DNA, 25 bp, Homo sapien
ggctattcacaagaacgatcatcgc

SEQ ID NO: 5545257 - DNA, 25 bp, Homo sapien
cattggtctggtttagaaaggtggg

SEQ ID NO: 5545258 - DNA, 25 bp, Homo sapien
aggagactaatagatctgtggaaat

SEQ ID NO: 5545259 - DNA, 25 bp, Homo sapien
gtagtcatcataacaggtgaggtga

SEQ ID NO: 5545260 - DNA, 25 bp, Homo sapien
agggaggcataagatatcaaataca

SEQ ID NO: 5545261 - DNA, 25 bp, Homo sapien
attttagggaggcataagatatcaa

SEQ ID NO: 5545262 - DNA, 25 bp, Homo sapien
tgtactttcaggagactaatagatc

SEQ ID NO: 5545263 - DNA, 25 bp, Homo sapien
atttaagaaacacattggtctggtt

SEQ ID NO: 5545264 - DNA, 25 bp, Homo sapien
cccacccagcatacaagggttccaa

SEQ ID NO: 5545265 - DNA, 25 bp, Homo sapien
tgatgaaaaaagccgaacaagtgta

SEQ ID NO: 5545266 - DNA, 25 bp, Homo sapien
ctgttttggcatagatagtggctgc

SEQ ID NO: 5545267 - DNA, 25 bp, Homo sapien
aaggagtacttctgcactgaggcac

SEQ ID NO: 5545268 - DNA, 25 bp, Homo sapien
atccccaggaagtattatgtgcgag

SEQ ID NO: 5545269 - DNA, 25 bp, Homo sapien
tgtaatggctcgatctcgactcact

SEQ ID NO: 5545270 - DNA, 25 bp, Homo sapien
aggacactcgtaagaagatcatggt

SEQ ID NO: 5545271 - DNA, 25 bp, Homo sapien
aaacccttcctgagtgaggacactc

SEQ ID NO: 5545272 - DNA, 25 bp, Homo sapien
tcatggtcctgggagcaaattggaa

SEQ ID NO: 5545273 - DNA, 25 bp, Homo sapien
gcctataacctcatcaaacccttcc

SEQ ID NO: 5545274 - DNA, 25 bp, Homo sapien
gtgatcctggcatctagttttgctc

SEQ ID NO: 5545275 - DNA, 25 bp, Homo sapien
cagcagtatgaacacagcgtgcaga

SEQ ID NO: 5545276 - DNA, 25 bp, Homo sapien
agtgaggacactcgtaagaagatca

SEQ ID NO: 5545277 - DNA, 25 bp, Homo sapien
caggtgaaacagcagtatgaacaca

SEQ ID NO: 5545278 - DNA, 25 bp, Homo sapien
ggatggaatgtaatggctcgatctc

SEQ ID NO: 5545279 - DNA, 25 bp, Homo sapien
ggtggcagtttatgtcagatggagc

SEQ ID NO: 5545280 - DNA, 25 bp, Homo sapien
ccaaccagaggtacaactcccacct

SEQ ID NO: 5545281 - DNA, 25 bp, Homo sapien
accatgactgaccctgatggaaacc

SEQ ID NO: 5545282 - DNA, 25 bp, Homo sapien
gtggctcctcccaccaagtggagta

SEQ ID NO: 5545283 - DNA, 25 bp, Homo sapien
tttcctgaagaccaagatgggagag

SEQ ID NO: 5545284 - DNA, 25 bp, Homo sapien
aacacagcgtgcagatttcccgtgg

SEQ ID NO: 5545285 - DNA, 25 bp, Homo sapien
accaagtggagtatgagatcctctt

SEQ ID NO: 5545286 - DNA, 25 bp, Homo sapien
ctgaccctgatggaaaccccaagtg

SEQ ID NO: 5545287 - DNA, 25 bp, Homo sapien
agaggtacaactcccacctggtccc

SEQ ID NO: 5545288 - DNA, 25 bp, Homo sapien
cctcacctgcagtgatcctggcatc

SEQ ID NO: 5545289 - DNA, 25 bp, Homo sapien
cgtgcagatttcccgtggctcctcc

SEQ ID NO: 5545290 - DNA, 25 bp, Homo sapien
aatcaagacatataattgtattaag

SEQ ID NO: 5545291 - DNA, 25 bp, Homo sapien
cttaatacaattatatgtcttgatt

SEQ ID NO: 5545292 - DNA, 25 bp, Homo sapien
caggtcatcgattggtgattgatct

SEQ ID NO: 5545293 - DNA, 25 bp, Homo sapien
cttcctgaacagcctgaagcagacg

SEQ ID NO: 5545294 - DNA, 25 bp, Homo sapien
ttggagtcagccttacacgcagcca

SEQ ID NO: 5545295 - DNA, 25 bp, Homo sapien
gagtttcaggcaatgaagtgagcat

SEQ ID NO: 5545296 - DNA, 25 bp, Homo sapien
atgctgttgcccaccgctgagaagc

SEQ ID NO: 5545297 - DNA, 25 bp, Homo sapien
cccttaataggtgtggacgtcttcc

SEQ ID NO: 5545298 - DNA, 25 bp, Homo sapien
agtgagcataagtccaggtcatcga

SEQ ID NO: 5545299 - DNA, 25 bp, Homo sapien
cacgcagccattactgcagagatcc

SEQ ID NO: 5545300 - DNA, 25 bp, Homo sapien
ggcccgggcactctgctctcctgcc

SEQ ID NO: 5545301 - DNA, 25 bp, Homo sapien
tcagtgaagttaacaggtaacctgt

SEQ ID NO: 5545302 - DNA, 25 bp, Homo sapien
cactgtgtttagtaccagccccccc

SEQ ID NO: 5545303 - DNA, 25 bp, Homo sapien
tctcctagcaacccgggtgtgatgg

SEQ ID NO: 5545304 - DNA, 25 bp, Homo sapien
atgagtgcactcagttccttaccaa

SEQ ID NO: 5545305 - DNA, 25 bp, Homo sapien
acaaggtttcttcccatgagtgcac

SEQ ID NO: 5545306 - DNA, 25 bp, Homo sapien
tcctgcaaattggcacttgtactcc

SEQ ID NO: 5545307 - DNA, 25 bp, Homo sapien
ccaagatggatggctgcaataaatc

SEQ ID NO: 5545308 - DNA, 25 bp, Homo sapien
attccgtctgacaatagcgtgtttc

SEQ ID NO: 5545309 - DNA, 25 bp, Homo sapien
ttcagagcaaacagctgctgccaca

SEQ ID NO: 5545310 - DNA, 25 bp, Homo sapien
ttcaacactgcccaagtgcaagggc

SEQ ID NO: 5545311 - DNA, 25 bp, Homo sapien
tccacgaagtctcagcaaggaacaa

SEQ ID NO: 5545312 - DNA, 25 bp, Homo sapien
cacctgcctttgatgattgacaact

SEQ ID NO: 5545313 - DNA, 25 bp, Homo sapien
tacctgaaatggactttgcacctat

SEQ ID NO: 5545314 - DNA, 25 bp, Homo sapien
ctaagagcgttatggaaaagggtga

SEQ ID NO: 5545315 - DNA, 25 bp, Homo sapien
tcacccttttccataacgctcttag

SEQ ID NO: 5545316 - DNA, 25 bp, Homo sapien
ccctgagaaaatggacctgtggata

SEQ ID NO: 5545317 - DNA, 25 bp, Homo sapien
tgggaagggatgcatcttttcttct

SEQ ID NO: 5545318 - DNA, 25 bp, Homo sapien
aagaccagaactttcagggcttctc

SEQ ID NO: 5545319 - DNA, 25 bp, Homo sapien
cgggttggatgcttaaagctgcagc

SEQ ID NO: 5545320 - DNA, 25 bp, Homo sapien
aacatctcaaagaacaacgtggtta

SEQ ID NO: 5545321 - DNA, 25 bp, Homo sapien
tcaggctcaagcagtaccctcacct

SEQ ID NO: 5545322 - DNA, 25 bp, Homo sapien
aagctgcagcaaaaagaccagaact

SEQ ID NO: 5545323 - DNA, 25 bp, Homo sapien
actgcaacctaaaactcaggctcaa

SEQ ID NO: 5545324 - DNA, 25 bp, Homo sapien
tcttggtaataccgggttggatgct

SEQ ID NO: 5545325 - DNA, 25 bp, Homo sapien
tggacctgtggataaaccatcatgc

SEQ ID NO: 5545326 - DNA, 25 bp, Homo sapien
tcaagatgcctgaagacaatcggag

SEQ ID NO: 5545327 - DNA, 25 bp, Homo sapien
gccgcctagcccccgaccgacgcgt

SEQ ID NO: 5545328 - DNA, 25 bp, Homo sapien
acgcgtcggtcgggggctaggcggc

SEQ ID NO: 5545329 - DNA, 25 bp, Homo sapien
ccctagccgcctagcccccgaccga

SEQ ID NO: 5545330 - DNA, 25 bp, Homo sapien
tcggtcgggggctaggcggctaggg

SEQ ID NO: 5545331 - DNA, 25 bp, Homo sapien
tgatggctgaactataatgtgaaga

SEQ ID NO: 5545332 - DNA, 25 bp, Homo sapien
tgagaagctccatgcattagtgtga

SEQ ID NO: 5545333 - DNA, 25 bp, Homo sapien
gtgccaccaggtggccatcacctac

SEQ ID NO: 5545334 - DNA, 25 bp, Homo sapien
acagaaaagatgtatcaaaaccacc

SEQ ID NO: 5545335 - DNA, 25 bp, Homo sapien
agaagctaacgaaattcattaagag

SEQ ID NO: 5545336 - DNA, 25 bp, Homo sapien
aagagatattcgcaggtaataattc

SEQ ID NO: 5545337 - DNA, 25 bp, Homo sapien
caggggaagcctgctacttcaaaca

SEQ ID NO: 5545338 - DNA, 25 bp, Homo sapien
tacaatgaaatgcatagctcccata

SEQ ID NO: 5545339 - DNA, 25 bp, Homo sapien
aaaatagttaaaacagcagcaatac

SEQ ID NO: 5545340 - DNA, 25 bp, Homo sapien
atgcattagtgtgatgtgccaccag

SEQ ID NO: 5545341 - DNA, 25 bp, Homo sapien
tggccatcacctacactgcagggga

SEQ ID NO: 5545342 - DNA, 25 bp, Homo sapien
caggcagtttccaacgtgcatcagc

SEQ ID NO: 5545343 - DNA, 25 bp, Homo sapien
gtggaacaagataacttccagcccc

SEQ ID NO: 5545344 - DNA, 25 bp, Homo sapien
atcaagatgtgattacaggagagtc

SEQ ID NO: 5545345 - DNA, 25 bp, Homo sapien
gtgatccaagatgtaccaaaaggta

SEQ ID NO: 5545346 - DNA, 25 bp, Homo sapien
ggctgagttcagccaggcaagtctg

SEQ ID NO: 5545347 - DNA, 25 bp, Homo sapien
aacgtgcatcagcatgtctgtctcc

SEQ ID NO: 5545348 - DNA, 25 bp, Homo sapien
aaaagatgacccagaccacaatagt

SEQ ID NO: 5545349 - DNA, 25 bp, Homo sapien
agaccaaatgtgaagccatactcca

SEQ ID NO: 5545350 - DNA, 25 bp, Homo sapien
aggagagtcttactgtagtcctgct

SEQ ID NO: 5545351 - DNA, 25 bp, Homo sapien
acccagaacctcaggaggaactctg

SEQ ID NO: 5545352 - DNA, 25 bp, Homo sapien
cagccaggcaagtctggccttgggg

SEQ ID NO: 5545353 - DNA, 25 bp, Homo sapien
aaaagtatgtagtactaactcctag

SEQ ID NO: 5545354 - DNA, 25 bp, Homo sapien
ctaggagttagtactacatactttt

SEQ ID NO: 5545355 - DNA, 25 bp, Homo sapien
accaatgtagctcattacgaagatt

SEQ ID NO: 5545356 - DNA, 25 bp, Homo sapien
aatcttcgtaatgagctacattggt

SEQ ID NO: 5545357 - DNA, 25 bp, Homo sapien
ttagaaatagatggagttaacgcat

SEQ ID NO: 5545358 - DNA, 25 bp, Homo sapien
ttgactgatgtaagccccaggaact

SEQ ID NO: 5545359 - DNA, 25 bp, Homo sapien
actaaaactcagaaggtcaaaaaga

SEQ ID NO: 5545360 - DNA, 25 bp, Homo sapien
ccctggtacagggattagcatacag

SEQ ID NO: 5545361 - DNA, 25 bp, Homo sapien
atcagtcacagaaacagaatgttat

SEQ ID NO: 5545362 - DNA, 25 bp, Homo sapien
agggattagcatacagggtactcaa

SEQ ID NO: 5545363 - DNA, 25 bp, Homo sapien
ttgtgtgatggttaggaataaatac

SEQ ID NO: 5545364 - DNA, 25 bp, Homo sapien
attgatagtagacaggaatgtagat

SEQ ID NO: 5545365 - DNA, 25 bp, Homo sapien
ttgatctgaaacgaactgaactacc

SEQ ID NO: 5545366 - DNA, 25 bp, Homo sapien
tagacagaaccaagtcctcccagtt

SEQ ID NO: 5545367 - DNA, 25 bp, Homo sapien
ggcactaacccataacaaaagcaac

SEQ ID NO: 5545368 - DNA, 25 bp, Homo sapien
aaggttgatatataggttggggtca

SEQ ID NO: 5545369 - DNA, 25 bp, Homo sapien
gtaagctatgataacgaggcactga

SEQ ID NO: 5545370 - DNA, 25 bp, Homo sapien
gaatatgccatgcaacaagggttga

SEQ ID NO: 5545371 - DNA, 25 bp, Homo sapien
tttctttagacagaagaggcagaga

SEQ ID NO: 5545372 - DNA, 25 bp, Homo sapien
gttggggtcagaatagaactttgaa

SEQ ID NO: 5545373 - DNA, 25 bp, Homo sapien
actgtgctttagaaggatgtgctgg

SEQ ID NO: 5545374 - DNA, 25 bp, Homo sapien
gatcttgaagactgaaaactaggaa

SEQ ID NO: 5545375 - DNA, 25 bp, Homo sapien
ttaggaaatgacaagtgcttcagtt

SEQ ID NO: 5545376 - DNA, 25 bp, Homo sapien
aactaggaaattacccagtcagaac

SEQ ID NO: 5545377 - DNA, 25 bp, Homo sapien
tgcaatataaggtgtgtgcgaggta

SEQ ID NO: 5545378 - DNA, 25 bp, Homo sapien
tggaaagccatgagtaaaatagatt

SEQ ID NO: 5545379 - DNA, 25 bp, Homo sapien
acattctgtgggtctggacaagtgc

SEQ ID NO: 5545380 - DNA, 25 bp, Homo sapien
cttcggagtgcacattctgtgggtc

SEQ ID NO: 5545381 - DNA, 25 bp, Homo sapien
catacgagggttcacacttcggagt

SEQ ID NO: 5545382 - DNA, 25 bp, Homo sapien
acaggcacagggtcccttactacca

SEQ ID NO: 5545383 - DNA, 25 bp, Homo sapien
tatcacacagagtagtttcaccgcc

SEQ ID NO: 5545384 - DNA, 25 bp, Homo sapien
acagtgacatgcatccgccagtgta

SEQ ID NO: 5545385 - DNA, 25 bp, Homo sapien
ctctttgtgacgtgatggctcattt

SEQ ID NO: 5545386 - DNA, 25 bp, Homo sapien
gttttggcaattatgtggcagttgc

SEQ ID NO: 5545387 - DNA, 25 bp, Homo sapien
actgatgaccctacacggacatgtc

SEQ ID NO: 5545388 - DNA, 25 bp, Homo sapien
tggtacatgtgtaactgatgaccct

SEQ ID NO: 5545389 - DNA, 25 bp, Homo sapien
gagttcatagtccatacgagggttc

SEQ ID NO: 5545390 - DNA, 25 bp, Homo sapien
taaaatgatcaaatacaagacagtt

SEQ ID NO: 5545391 - DNA, 25 bp, Homo sapien
caagacagtttttcaatcccacgcc

SEQ ID NO: 5545392 - DNA, 25 bp, Homo sapien
tattagcaaggcaaaaaacatacta

SEQ ID NO: 5545393 - DNA, 25 bp, Homo sapien
actgaagcagaaccattaacaattt

SEQ ID NO: 5545394 - DNA, 25 bp, Homo sapien
aatgagaatttacagaattgaaaat

SEQ ID NO: 5545395 - DNA, 25 bp, Homo sapien
aaagtgctcaaacgtcttaatggat

SEQ ID NO: 5545396 - DNA, 25 bp, Homo sapien
gctataatgaacatccttgtacacc

SEQ ID NO: 5545397 - DNA, 25 bp, Homo sapien
tggatttgagttttaaaaccagatc

SEQ ID NO: 5545398 - DNA, 25 bp, Homo sapien
tcaatcccacgccactgaagcagaa

SEQ ID NO: 5545399 - DNA, 25 bp, Homo sapien
aaattaggtataaagatgaatgaga

SEQ ID NO: 5545400 - DNA, 25 bp, Homo sapien
tggacaaatgtgtaaattaggtata

SEQ ID NO: 5545401 - DNA, 25 bp, Homo sapien
cggacagtaccattagaccatctgg

SEQ ID NO: 5545402 - DNA, 25 bp, Homo sapien
ccagatggtctaatggtactgtccg

SEQ ID NO: 5545403 - DNA, 25 bp, Homo sapien
ttaatggtcatccaggagaatggcg

SEQ ID NO: 5545404 - DNA, 25 bp, Homo sapien
gttcaggcactgaccatgtgttccc

SEQ ID NO: 5545405 - DNA, 25 bp, Homo sapien
aagacattagaattaatggtcatcc

SEQ ID NO: 5545406 - DNA, 25 bp, Homo sapien
tcagaatctaggaatatgcatcaaa

SEQ ID NO: 5545407 - DNA, 25 bp, Homo sapien
aatcagaactcctactcatgtcctc

SEQ ID NO: 5545408 - DNA, 25 bp, Homo sapien
ctttgttagcagttgcaaaatagca

SEQ ID NO: 5545409 - DNA, 25 bp, Homo sapien
tcctgccactttgctagaattcctc

SEQ ID NO: 5545410 - DNA, 25 bp, Homo sapien
cattcagtgcacacttagtgggttc

SEQ ID NO: 5545411 - DNA, 25 bp, Homo sapien
gtgcacacttagtgggttcaggcac

SEQ ID NO: 5545412 - DNA, 25 bp, Homo sapien
tagctaaaaggtttcatccattgat

SEQ ID NO: 5545413 - DNA, 25 bp, Homo sapien
tgtgttccccactcactgtgaagtt

SEQ ID NO: 5545414 - DNA, 25 bp, Homo sapien
ataaatgggagctgtgttcttagag

SEQ ID NO: 5545415 - DNA, 25 bp, Homo sapien
taattgagaggtacccagagctata

SEQ ID NO: 5545416 - DNA, 25 bp, Homo sapien
ctcagccagtagggataattgagag

SEQ ID NO: 5545417 - DNA, 25 bp, Homo sapien
ccagacgaggaatcccgctcatagg

SEQ ID NO: 5545418 - DNA, 25 bp, Homo sapien
gggttgttgtgctgtgagttgtcaa

SEQ ID NO: 5545419 - DNA, 25 bp, Homo sapien
ccattaaagtgttgcctcagccagt

SEQ ID NO: 5545420 - DNA, 25 bp, Homo sapien
aaagataaccagtggccacacagta

SEQ ID NO: 5545421 - DNA, 25 bp, Homo sapien
atcccgctcataggagggttgttgt

SEQ ID NO: 5545422 - DNA, 25 bp, Homo sapien
gcttctcgctacacaatgccatgcc

SEQ ID NO: 5545423 - DNA, 25 bp, Homo sapien
ctcagctcgtgctcccacaggtttc

SEQ ID NO: 5545424 - DNA, 25 bp, Homo sapien
ggctggcgcctcaggctaccattaa

SEQ ID NO: 5545425 - DNA, 25 bp, Homo sapien
cattcacctgtacaggggttaggac

SEQ ID NO: 5545426 - DNA, 25 bp, Homo sapien
gccatggtgaaatgtccaacccaag

SEQ ID NO: 5545427 - DNA, 25 bp, Homo sapien
ccaataccttcccccaaacctctca

SEQ ID NO: 5545428 - DNA, 25 bp, Homo sapien
cctctgtaaagacgctatttccaaa

SEQ ID NO: 5545429 - DNA, 25 bp, Homo sapien
aatgtccaacccaagacttcaagac

SEQ ID NO: 5545430 - DNA, 25 bp, Homo sapien
actgcacctgcccaaatgacctcat

SEQ ID NO: 5545431 - DNA, 25 bp, Homo sapien
ttgttgggggacacaatccaatcca

SEQ ID NO: 5545432 - DNA, 25 bp, Homo sapien
ctcatctgtttccagccgagctctg

SEQ ID NO: 5545433 - DNA, 25 bp, Homo sapien
tgtctgcctcctcacatgttgtctc

SEQ ID NO: 5545434 - DNA, 25 bp, Homo sapien
aacctctcaggtgctcagagcctgg

SEQ ID NO: 5545435 - DNA, 25 bp, Homo sapien
cagagcctggatccccagctcctgt

SEQ ID NO: 5545436 - DNA, 25 bp, Homo sapien
ttcaaccttgagctacccactggca

SEQ ID NO: 5545437 - DNA, 25 bp, Homo sapien
aatcgggagagacttttcaaccttg

SEQ ID NO: 5545438 - DNA, 25 bp, Homo sapien
atccctattttgatggcacggctac

SEQ ID NO: 5545439 - DNA, 25 bp, Homo sapien
tatagccttaggacagagtttgttc

SEQ ID NO: 5545440 - DNA, 25 bp, Homo sapien
acaagtaagcatgcacaagtgtgta

SEQ ID NO: 5545441 - DNA, 25 bp, Homo sapien
cttgagctacccactggcagcgtga

SEQ ID NO: 5545442 - DNA, 25 bp, Homo sapien
caagtgtgtaaataggcaaaaaccc

SEQ ID NO: 5545443 - DNA, 25 bp, Homo sapien
agcctgacttcagaatcgggagaga

SEQ ID NO: 5545444 - DNA, 25 bp, Homo sapien
atggcacggctactttatcttactg

SEQ ID NO: 5545445 - DNA, 25 bp, Homo sapien
caagtcaaaatggcaatttgagtat

SEQ ID NO: 5545446 - DNA, 25 bp, Homo sapien
gatgtcataggctcagcttacacaa

SEQ ID NO: 5545447 - DNA, 25 bp, Homo sapien
gagaaggagcacctagaacccgact

SEQ ID NO: 5545448 - DNA, 25 bp, Homo sapien
agtcgggttctaggtgctccttctc

SEQ ID NO: 5545449 - DNA, 25 bp, Homo sapien
taaagttgcataaggagttatttta

SEQ ID NO: 5545450 - DNA, 25 bp, Homo sapien
tggaataggaaatttatgaagctat

SEQ ID NO: 5545451 - DNA, 25 bp, Homo sapien
ttagtgattcctacagtgatctgcc

SEQ ID NO: 5545452 - DNA, 25 bp, Homo sapien
ttgcataggtttttcagtgatctga

SEQ ID NO: 5545453 - DNA, 25 bp, Homo sapien
taaaatatgatatgcaaacaaagtg

SEQ ID NO: 5545454 - DNA, 25 bp, Homo sapien
acagtgatctgccaaatcagctgat

SEQ ID NO: 5545455 - DNA, 25 bp, Homo sapien
agctgataattagctgagttgagtc

SEQ ID NO: 5545456 - DNA, 25 bp, Homo sapien
catgtttcagataaagccattgctc

SEQ ID NO: 5545457 - DNA, 25 bp, Homo sapien
tgtacccaccaaaaaatagcactta

SEQ ID NO: 5545458 - DNA, 25 bp, Homo sapien
caagtatgatgaaagtaaatggaat

SEQ ID NO: 5545459 - DNA, 25 bp, Homo sapien
tgatgaaagtaaatggaataggaaa

SEQ ID NO: 5545460 - DNA, 25 bp, Homo sapien
aactgcaaaaggccagaatgatgaa

SEQ ID NO: 5545461 - DNA, 25 bp, Homo sapien
ttcctaggatctgtaagtagagggc

SEQ ID NO: 5545462 - DNA, 25 bp, Homo sapien
acattcaagagcaacttgagagggc

SEQ ID NO: 5545463 - DNA, 25 bp, Homo sapien
gaatgatgaaattaagacctctcac

SEQ ID NO: 5545464 - DNA, 25 bp, Homo sapien
ttggaacgaagacaaattggatgtg

SEQ ID NO: 5545465 - DNA, 25 bp, Homo sapien
gtagagggcaaagatgctccttcta

SEQ ID NO: 5545466 - DNA, 25 bp, Homo sapien
aacatgaagggtttcggattgaatt

SEQ ID NO: 5545467 - DNA, 25 bp, Homo sapien
caaagggaaagcagacattttatct

SEQ ID NO: 5545468 - DNA, 25 bp, Homo sapien
ttggatgtggcatgtcataggctaa

SEQ ID NO: 5545469 - DNA, 25 bp, Homo sapien
cggattgaatttccacaggggcaga

SEQ ID NO: 5545470 - DNA, 25 bp, Homo sapien
gacctctcacagttggaacgaagac

SEQ ID NO: 5545471 - DNA, 25 bp, Homo sapien
gcaaccctgtgctcagcctgtggtc

SEQ ID NO: 5545472 - DNA, 25 bp, Homo sapien
gctgaaataaacagtggtaggaaac

SEQ ID NO: 5545473 - DNA, 25 bp, Homo sapien
ctctaacatgaggctcttcagcatt

SEQ ID NO: 5545474 - DNA, 25 bp, Homo sapien
ttggagacagaaaaatatacccgac

SEQ ID NO: 5545475 - DNA, 25 bp, Homo sapien
cttcagcatttgggcccacctggag

SEQ ID NO: 5545476 - DNA, 25 bp, Homo sapien
aatgatgatactggagtccaccaca

SEQ ID NO: 5545477 - DNA, 25 bp, Homo sapien
gtccaccacagttccatcgcagagg

SEQ ID NO: 5545478 - DNA, 25 bp, Homo sapien
tcttccagagctagcattccacaca

SEQ ID NO: 5545479 - DNA, 25 bp, Homo sapien
cagtggtaggaaaccagtggtttca

SEQ ID NO: 5545480 - DNA, 25 bp, Homo sapien
catcgcagaggtgaaaaactctaac

SEQ ID NO: 5545481 - DNA, 25 bp, Homo sapien
ccagtggtttcaaggctatctgcac

SEQ ID NO: 5545482 - DNA, 25 bp, Homo sapien
ggaacgtccaggtcggcgcccggga

SEQ ID NO: 5545483 - DNA, 25 bp, Homo sapien
tcccgggcgccgacctggacgttcc

SEQ ID NO: 5545484 - DNA, 25 bp, Homo sapien
tggcagttaccaaaacgtgggcaga

SEQ ID NO: 5545485 - DNA, 25 bp, Homo sapien
gcggtgctgggtcatctccaccacc

SEQ ID NO: 5545486 - DNA, 25 bp, Homo sapien
cctaagccatgcagccttgtgcagt

SEQ ID NO: 5545487 - DNA, 25 bp, Homo sapien
gcctccaagaactgactagctgtcc

SEQ ID NO: 5545488 - DNA, 25 bp, Homo sapien
actctggatccgtgcaggatggtta

SEQ ID NO: 5545489 - DNA, 25 bp, Homo sapien
ggtatgtaggcaccaactctggatc

SEQ ID NO: 5545490 - DNA, 25 bp, Homo sapien
gacacgttgcagctcccgagccaat

SEQ ID NO: 5545491 - DNA, 25 bp, Homo sapien
gaatggaggttaacaggctcgatta

SEQ ID NO: 5545492 - DNA, 25 bp, Homo sapien
aaatgaaaagtctgaatggaggtta

SEQ ID NO: 5545493 - DNA, 25 bp, Homo sapien
gcaggggtcaatctgccaatgacac

SEQ ID NO: 5545494 - DNA, 25 bp, Homo sapien
cttgtgcagtgcttggtgttagatg

SEQ ID NO: 5545495 - DNA, 25 bp, Homo sapien
atcacaaacaggtaaagcatggaga

SEQ ID NO: 5545496 - DNA, 25 bp, Homo sapien
tgctacctgctattaagatggcctc

SEQ ID NO: 5545497 - DNA, 25 bp, Homo sapien
tggagattctgttgggttaatggtc

SEQ ID NO: 5545498 - DNA, 25 bp, Homo sapien
ggaaccagagaaaccacttagcagt

SEQ ID NO: 5545499 - DNA, 25 bp, Homo sapien
agccctcaagagatgttacacacgt

SEQ ID NO: 5545500 - DNA, 25 bp, Homo sapien
tcagcttatctgaaggggctggaaa

SEQ ID NO: 5545501 - DNA, 25 bp, Homo sapien
gtagtcactgctggcctgtcatttt

SEQ ID NO: 5545502 - DNA, 25 bp, Homo sapien
gtggcttaattcagatgggttggtt

SEQ ID NO: 5545503 - DNA, 25 bp, Homo sapien
aagatggcctcatgcaaactgtcat

SEQ ID NO: 5545504 - DNA, 25 bp, Homo sapien
gatgggttggttacatgctacctgc

SEQ ID NO: 5545505 - DNA, 25 bp, Homo sapien
ttgaaactgctggtatgtggagatt

SEQ ID NO: 5545506 - DNA, 25 bp, Homo sapien
cagcatcccataggtaaatgagcaa

SEQ ID NO: 5545507 - DNA, 25 bp, Homo sapien
taagggtgacttaatcatgtttacc

SEQ ID NO: 5545508 - DNA, 25 bp, Homo sapien
gtgatttattcagtaagagcagtta

SEQ ID NO: 5545509 - DNA, 25 bp, Homo sapien
acattacagacagcatcccataggt

SEQ ID NO: 5545510 - DNA, 25 bp, Homo sapien
tttgaaatttagacagacaaggagg

SEQ ID NO: 5545511 - DNA, 25 bp, Homo sapien
gtatccacatctataagggtgactt

SEQ ID NO: 5545512 - DNA, 25 bp, Homo sapien
agtttggtagtcacaagtgagttac

SEQ ID NO: 5545513 - DNA, 25 bp, Homo sapien
aaggtcttggcaaattacatactgc

SEQ ID NO: 5545514 - DNA, 25 bp, Homo sapien
aggagcccagcagcaatttaagaac

SEQ ID NO: 5545515 - DNA, 25 bp, Homo sapien
gaattcactgctattaaggagccca

SEQ ID NO: 5545516 - DNA, 25 bp, Homo sapien
agaacatgaacttaaggtcttggca

SEQ ID NO: 5545517 - DNA, 25 bp, Homo sapien
gtcgggacctgtaatgtcccaggta

SEQ ID NO: 5545518 - DNA, 25 bp, Homo sapien
tacctgggacattacaggtcccgac

SEQ ID NO: 5545519 - DNA, 25 bp, Homo sapien
ccatattctgggaaaagacggtaca

SEQ ID NO: 5545520 - DNA, 25 bp, Homo sapien
tgcagaggtaataaaagatatttat

SEQ ID NO: 5545521 - DNA, 25 bp, Homo sapien
atctacttggcagatgtatgtcatc

SEQ ID NO: 5545522 - DNA, 25 bp, Homo sapien
tcttcattggtagataaatacccag

SEQ ID NO: 5545523 - DNA, 25 bp, Homo sapien
aaacatacaaagttagatcattacc

SEQ ID NO: 5545524 - DNA, 25 bp, Homo sapien
aagtagaaagacatattccatattc

SEQ ID NO: 5545525 - DNA, 25 bp, Homo sapien
ctcagaagttcaagtagaaagacat

SEQ ID NO: 5545526 - DNA, 25 bp, Homo sapien
gatgtatgtcatcattgtgtctctc

SEQ ID NO: 5545527 - DNA, 25 bp, Homo sapien
tctaaaatcagcatctacttggcag

SEQ ID NO: 5545528 - DNA, 25 bp, Homo sapien
gctttaggaatctcagaagttcaag

SEQ ID NO: 5545529 - DNA, 25 bp, Homo sapien
tttaaacagtattgctttaggaatc

SEQ ID NO: 5545530 - DNA, 25 bp, Homo sapien
agcccatggctttcccccaaggact

SEQ ID NO: 5545531 - DNA, 25 bp, Homo sapien
ataccccatggctgtcaggctattc

SEQ ID NO: 5545532 - DNA, 25 bp, Homo sapien
ttccctgcctcactcccacacctgc

SEQ ID NO: 5545533 - DNA, 25 bp, Homo sapien
tctgcgtaggattcatgtgtgtgta

SEQ ID NO: 5545534 - DNA, 25 bp, Homo sapien
ctgtcaggcatgacctgcgctgacc

SEQ ID NO: 5545535 - DNA, 25 bp, Homo sapien
ggtgtggtgttgggaattatttcca

SEQ ID NO: 5545536 - DNA, 25 bp, Homo sapien
ctgggcctggcttcgcccctgtcag

SEQ ID NO: 5545537 - DNA, 25 bp, Homo sapien
atatccagaagcaatacacagtgat

SEQ ID NO: 5545538 - DNA, 25 bp, Homo sapien
tgtacagagtaaggcagaaatctta

SEQ ID NO: 5545539 - DNA, 25 bp, Homo sapien
tttgagtttattgcgcaccaccccc

SEQ ID NO: 5545540 - DNA, 25 bp, Homo sapien
ccagttgtcctggcaatgtgtgggg

SEQ ID NO: 5545541 - DNA, 25 bp, Homo sapien
aatagtactctgctcccctcacccc

SEQ ID NO: 5545542 - DNA, 25 bp, Homo sapien
gtgaagaagtgtttgtgaccgttac

SEQ ID NO: 5545543 - DNA, 25 bp, Homo sapien
tgctgtaaaacctgggtgaagaagt

SEQ ID NO: 5545544 - DNA, 25 bp, Homo sapien
actacaaacggcaaaaatgtcaccg

SEQ ID NO: 5545545 - DNA, 25 bp, Homo sapien
atgtcaccgtatgtgcccttggctt

SEQ ID NO: 5545546 - DNA, 25 bp, Homo sapien
tctgagaggaatgctcccttcccct

SEQ ID NO: 5545547 - DNA, 25 bp, Homo sapien
aagctgcttcttaccttagggcctc

SEQ ID NO: 5545548 - DNA, 25 bp, Homo sapien
cttagggcctctgcacttgtggttc

SEQ ID NO: 5545549 - DNA, 25 bp, Homo sapien
atttggaacttgtcggagtaccagt

SEQ ID NO: 5545550 - DNA, 25 bp, Homo sapien
cgttacatcacacacaggcatggcc

SEQ ID NO: 5545551 - DNA, 25 bp, Homo sapien
gaggagagatacggacattcttctg

SEQ ID NO: 5545552 - DNA, 25 bp, Homo sapien
attaaatatagtgctgttacttcaa

SEQ ID NO: 5545553 - DNA, 25 bp, Homo sapien
ccagccagagaggtttattttgttt

SEQ ID NO: 5545554 - DNA, 25 bp, Homo sapien
aaggtgttttcacagctgcctttag

SEQ ID NO: 5545555 - DNA, 25 bp, Homo sapien
ctggagagcatacgtattaatgtac

SEQ ID NO: 5545556 - DNA, 25 bp, Homo sapien
tcctccgccttcaggtgacaacctt

SEQ ID NO: 5545557 - DNA, 25 bp, Homo sapien
taataaaactggagagcatacgtat

SEQ ID NO: 5545558 - DNA, 25 bp, Homo sapien
attgaataatagtttttgtagtacg

SEQ ID NO: 5545559 - DNA, 25 bp, Homo sapien
tgcatgttttccaatctctagcttc

SEQ ID NO: 5545560 - DNA, 25 bp, Homo sapien
tgccttctcaccagccagccagaga

SEQ ID NO: 5545561 - DNA, 25 bp, Homo sapien
tctagcttctggattttactgtttt

SEQ ID NO: 5545562 - DNA, 25 bp, Homo sapien
gcttttctctaaagaacatggtagg

SEQ ID NO: 5545563 - DNA, 25 bp, Homo sapien
gagggactttgatagatgcctgggt

SEQ ID NO: 5545564 - DNA, 25 bp, Homo sapien
tgttctggtcgcagtctgtgtcctc

SEQ ID NO: 5545565 - DNA, 25 bp, Homo sapien
aacttgtaagtgagtcatcagggaa

SEQ ID NO: 5545566 - DNA, 25 bp, Homo sapien
aaggtgggcactacatttcagagca

SEQ ID NO: 5545567 - DNA, 25 bp, Homo sapien
catgacacagatgggccttgtctgc

SEQ ID NO: 5545568 - DNA, 25 bp, Homo sapien
gagcatggcattagcattgggtatc

SEQ ID NO: 5545569 - DNA, 25 bp, Homo sapien
ctgatgtgaagctagattgagaagg

SEQ ID NO: 5545570 - DNA, 25 bp, Homo sapien
ggggagattctgagacttaagagac

SEQ ID NO: 5545571 - DNA, 25 bp, Homo sapien
cgggggacgctgtcattcacatttt

SEQ ID NO: 5545572 - DNA, 25 bp, Homo sapien
gagaaggtgtgcagtttgtaatact

SEQ ID NO: 5545573 - DNA, 25 bp, Homo sapien
aagtttgccgctttggcaggaaggc

SEQ ID NO: 5545574 - DNA, 25 bp, Homo sapien
ctgaggcatggtctctctgtgttac

SEQ ID NO: 5545575 - DNA, 25 bp, Homo sapien
ctaacaaagaaatggtaagcagtgg

SEQ ID NO: 5545576 - DNA, 25 bp, Homo sapien
aagcagtggcaacataaacacaatt

SEQ ID NO: 5545577 - DNA, 25 bp, Homo sapien
aaatggtaagcagtggcaacataaa

SEQ ID NO: 5545578 - DNA, 25 bp, Homo sapien
caaactttagtggtgacatcaaata

SEQ ID NO: 5545579 - DNA, 25 bp, Homo sapien
tctaggcataacatctaacaaagaa

SEQ ID NO: 5545580 - DNA, 25 bp, Homo sapien
tttcagcatataagctaatgacatt

SEQ ID NO: 5545581 - DNA, 25 bp, Homo sapien
agtggtgacatcaaatatgtgtata

SEQ ID NO: 5545582 - DNA, 25 bp, Homo sapien
atgtgccactatactcagcttagac

SEQ ID NO: 5545583 - DNA, 25 bp, Homo sapien
ctaatgacattaatctaggcataac

SEQ ID NO: 5545584 - DNA, 25 bp, Homo sapien
acagtggctattctcagttacaatc

SEQ ID NO: 5545585 - DNA, 25 bp, Homo sapien
atgaaagcataaatagtagcaatcc

SEQ ID NO: 5545586 - DNA, 25 bp, Homo sapien
aaagcactgggttttgtaagattta

SEQ ID NO: 5545587 - DNA, 25 bp, Homo sapien
aaggacaggactttggttcaatcaa

SEQ ID NO: 5545588 - DNA, 25 bp, Homo sapien
agtacagctgatgtggtaaagcctt

SEQ ID NO: 5545589 - DNA, 25 bp, Homo sapien
ttaatatgaaatgaccctgaatgtt

SEQ ID NO: 5545590 - DNA, 25 bp, Homo sapien
aaatagtagcaatccaatgaaccag

SEQ ID NO: 5545591 - DNA, 25 bp, Homo sapien
ttgtacaagtcagaaataaagtatc

SEQ ID NO: 5545592 - DNA, 25 bp, Homo sapien
acagtaaactgtgaagataaagtcc

SEQ ID NO: 5545593 - DNA, 25 bp, Homo sapien
catttagtagcaaaagcactgggtt

SEQ ID NO: 5545594 - DNA, 25 bp, Homo sapien
aaacagccagtacagctgatgtggt

SEQ ID NO: 5545595 - DNA, 25 bp, Homo sapien
aagacagtctgtgttctactcaaac

SEQ ID NO: 5545596 - DNA, 25 bp, Homo sapien
agtagcctcgatgacggctcccctt

SEQ ID NO: 5545597 - DNA, 25 bp, Homo sapien
tatccttagtagcctcgatgacggc

SEQ ID NO: 5545598 - DNA, 25 bp, Homo sapien
aactcctgggcgcaataaatccttc

SEQ ID NO: 5545599 - DNA, 25 bp, Homo sapien
gttgggattacatgctgcaccccca

SEQ ID NO: 5545600 - DNA, 25 bp, Homo sapien
ttatggtgatggctttgttacgtat

SEQ ID NO: 5545601 - DNA, 25 bp, Homo sapien
ttgtgcagctatttatggtgatggc

SEQ ID NO: 5545602 - DNA, 25 bp, Homo sapien
gttaattgtggacataatcaagttc

SEQ ID NO: 5545603 - DNA, 25 bp, Homo sapien
tgcacccccagtgtatcagcacttc

SEQ ID NO: 5545604 - DNA, 25 bp, Homo sapien
caaattggcttgtatcagtattgtc

SEQ ID NO: 5545605 - DNA, 25 bp, Homo sapien
ggcctacatgaggactcagcttact

SEQ ID NO: 5545606 - DNA, 25 bp, Homo sapien
tcagtattgtcaactggaggcctac

SEQ ID NO: 5545607 - DNA, 25 bp, Homo sapien
catgcccggccaatccttgcatctt

SEQ ID NO: 5545608 - DNA, 25 bp, Homo sapien
cccaggtccaagcgattctcttgcc

SEQ ID NO: 5545609 - DNA, 25 bp, Homo sapien
tggcacctaagagtatgacaacagc

SEQ ID NO: 5545610 - DNA, 25 bp, Homo sapien
gcatctttagtagagacggcatttc

SEQ ID NO: 5545611 - DNA, 25 bp, Homo sapien
cggcatttctccacgttggtcaggc

SEQ ID NO: 5545612 - DNA, 25 bp, Homo sapien
atctgaatgactgcagcaatagttt

SEQ ID NO: 5545613 - DNA, 25 bp, Homo sapien
agtatgacaacagcaacaaaaagta

SEQ ID NO: 5545614 - DNA, 25 bp, Homo sapien
cccaaaacaacaaaacacatgcttc

SEQ ID NO: 5545615 - DNA, 25 bp, Homo sapien
ttaccgcagtttggcacctaagagt

SEQ ID NO: 5545616 - DNA, 25 bp, Homo sapien
accatgaccggccagctactgtctt

SEQ ID NO: 5545617 - DNA, 25 bp, Homo sapien
ctgaagatacttgataaaaattccc

SEQ ID NO: 5545618 - DNA, 25 bp, Homo sapien
cggctgcgctaccagaacctggaga

SEQ ID NO: 5545619 - DNA, 25 bp, Homo sapien
ctaccagaacctggagaacgatgag

SEQ ID NO: 5545620 - DNA, 25 bp, Homo sapien
cagctggacccaacaccctttgatc

SEQ ID NO: 5545621 - DNA, 25 bp, Homo sapien
agcagcacccagcgctcctacaaca

SEQ ID NO: 5545622 - DNA, 25 bp, Homo sapien
ggccccagttcagcattgatgatgc

SEQ ID NO: 5545623 - DNA, 25 bp, Homo sapien
cttccatccgcagctcccagtggtc

SEQ ID NO: 5545624 - DNA, 25 bp, Homo sapien
atgccttcgagctgtccctggagga

SEQ ID NO: 5545625 - DNA, 25 bp, Homo sapien
ccttgacactgagcctcccagcatc

SEQ ID NO: 5545626 - DNA, 25 bp, Homo sapien
gcgctcctacaacacctgctgcagc

SEQ ID NO: 5545627 - DNA, 25 bp, Homo sapien
ccagggattccagccgaacttccat

SEQ ID NO: 5545628 - DNA, 25 bp, Homo sapien
cattgatgatgccttcgagctgtcc

SEQ ID NO: 5545629 - DNA, 25 bp, Homo sapien
gaaccacctcctggccgacagaccg

SEQ ID NO: 5545630 - DNA, 25 bp, Homo sapien
cggtctgtcggccaggaggtggttc

SEQ ID NO: 5545631 - DNA, 25 bp, Homo sapien
gtagcagggtgtccgcggagagctg

SEQ ID NO: 5545632 - DNA, 25 bp, Homo sapien
cagctctccgcggacaccctgctac

SEQ ID NO: 5545633 - DNA, 25 bp, Homo sapien
cagcaaagagcggtagcagggtgtc

SEQ ID NO: 5545634 - DNA, 25 bp, Homo sapien
gacaccctgctaccgctctttgctg

SEQ ID NO: 5545635 - DNA, 25 bp, Homo sapien
tctggcctgactggctatcagcaac

SEQ ID NO: 5545636 - DNA, 25 bp, Homo sapien
tttgaggatgacataatactttgct

SEQ ID NO: 5545637 - DNA, 25 bp, Homo sapien
cactaggaataagtgttaggaaaaa

SEQ ID NO: 5545638 - DNA, 25 bp, Homo sapien
aaaagccaccatgcttttggcccct

SEQ ID NO: 5545639 - DNA, 25 bp, Homo sapien
tccgtggaggtcactatcagatctc

SEQ ID NO: 5545640 - DNA, 25 bp, Homo sapien
ccttccaatcctcagcagtgtccac

SEQ ID NO: 5545641 - DNA, 25 bp, Homo sapien
ctggctatcagcaacactaggaata

SEQ ID NO: 5545642 - DNA, 25 bp, Homo sapien
ccttctttagtgcactccgtggagg

SEQ ID NO: 5545643 - DNA, 25 bp, Homo sapien
gtccactggtaacatttcttgaata

SEQ ID NO: 5545644 - DNA, 25 bp, Homo sapien
cagatctcatctggcctgactggct

SEQ ID NO: 5545645 - DNA, 25 bp, Homo sapien
tactacttggtcatgataaaaattt

SEQ ID NO: 5545646 - DNA, 25 bp, Homo sapien
aggcctagccacagaattggagtct

SEQ ID NO: 5545647 - DNA, 25 bp, Homo sapien
catggcacttagatgtgaccaaatt

SEQ ID NO: 5545648 - DNA, 25 bp, Homo sapien
ggaaggagtaactaccaccatggca

SEQ ID NO: 5545649 - DNA, 25 bp, Homo sapien
ttagaggcatggtctcgttatgttg

SEQ ID NO: 5545650 - DNA, 25 bp, Homo sapien
taataaacagagtgtgattataact

SEQ ID NO: 5545651 - DNA, 25 bp, Homo sapien
ccacagaattggagtcttacacatt

SEQ ID NO: 5545652 - DNA, 25 bp, Homo sapien
cccccaagtaactggcatgacaggt

SEQ ID NO: 5545653 - DNA, 25 bp, Homo sapien
tggcagaatcacagctcactaatcc

SEQ ID NO: 5545654 - DNA, 25 bp, Homo sapien
agttaaaggagcaaaatgtttccca

SEQ ID NO: 5545655 - DNA, 25 bp, Homo sapien
taccttaccaggcctagccacagaa

SEQ ID NO: 5545656 - DNA, 25 bp, Homo sapien
accaccatggcacttagatgtgacc

SEQ ID NO: 5545657 - DNA, 25 bp, Homo sapien
caaaaactcaaaatggtggccatag

SEQ ID NO: 5545658 - DNA, 25 bp, Homo sapien
tggtgagccaaaaattgacgtatgc

SEQ ID NO: 5545659 - DNA, 25 bp, Homo sapien
gagttagaaataaggaaggtatcta

SEQ ID NO: 5545660 - DNA, 25 bp, Homo sapien
aagtatggcctccagtggatgagtg

SEQ ID NO: 5545661 - DNA, 25 bp, Homo sapien
aattgacgtatgcttgaggactgag

SEQ ID NO: 5545662 - DNA, 25 bp, Homo sapien
tgttggccaggctaaaaatacaaaa

SEQ ID NO: 5545663 - DNA, 25 bp, Homo sapien
cacgcctgtaatctcggccacctgg

SEQ ID NO: 5545664 - DNA, 25 bp, Homo sapien
aagtctgagtatggtgagccaaaaa

SEQ ID NO: 5545665 - DNA, 25 bp, Homo sapien
cttctagaaggtagagttcatgaaa

SEQ ID NO: 5545666 - DNA, 25 bp, Homo sapien
aatgctgttctgtgggaaaatcttc

SEQ ID NO: 5545667 - DNA, 25 bp, Homo sapien
gagtggggactcttaaatgctgttc

SEQ ID NO: 5545668 - DNA, 25 bp, Homo sapien
taaacagggataaccatttctgctc

SEQ ID NO: 5545669 - DNA, 25 bp, Homo sapien
gtttctcctctaggatccaaagccc

SEQ ID NO: 5545670 - DNA, 25 bp, Homo sapien
aaacaagcagtttccggatttgatt

SEQ ID NO: 5545671 - DNA, 25 bp, Homo sapien
gctgcccgaatcaggggcaaaagca

SEQ ID NO: 5545672 - DNA, 25 bp, Homo sapien
gcagaccctcttcccgggctccgtg

SEQ ID NO: 5545673 - DNA, 25 bp, Homo sapien
actttgcaagttacaaacgggccgc

SEQ ID NO: 5545674 - DNA, 25 bp, Homo sapien
agtgagggcttattttaaacaggga

SEQ ID NO: 5545675 - DNA, 25 bp, Homo sapien
ttagtggaaactctggagaaaaatc

SEQ ID NO: 5545676 - DNA, 25 bp, Homo sapien
cctttaaggaagtggtaaagagtga

SEQ ID NO: 5545677 - DNA, 25 bp, Homo sapien
acaacgtgcatgtctctgtgagatt

SEQ ID NO: 5545678 - DNA, 25 bp, Homo sapien
ctctaaccatcactaccagcacctc

SEQ ID NO: 5545679 - DNA, 25 bp, Homo sapien
ggtcaccacgtgaggtgcgccctgt

SEQ ID NO: 5545680 - DNA, 25 bp, Homo sapien
acagggcgcacctcacgtggtgacc

SEQ ID NO: 5545681 - DNA, 25 bp, Homo sapien
gggcaccggtcaccacgtgaggtgc

SEQ ID NO: 5545682 - DNA, 25 bp, Homo sapien
gcacctcacgtggtgaccggtgccc

SEQ ID NO: 5545683 - DNA, 25 bp, Homo sapien
cttgggagcctctgagaaacattac

SEQ ID NO: 5545684 - DNA, 25 bp, Homo sapien
gcagagcctcctcgctgatcttagc

SEQ ID NO: 5545685 - DNA, 25 bp, Homo sapien
ccttcctgttggcagagcctcctcg

SEQ ID NO: 5545686 - DNA, 25 bp, Homo sapien
gtagaacctggagtcttccaaagtc

SEQ ID NO: 5545687 - DNA, 25 bp, Homo sapien
aacattactgcttctccggcagaca

SEQ ID NO: 5545688 - DNA, 25 bp, Homo sapien
gagaagctgctccagtagctgattc

SEQ ID NO: 5545689 - DNA, 25 bp, Homo sapien
tttccttcctgttggcagagcctcc

SEQ ID NO: 5545690 - DNA, 25 bp, Homo sapien
tgttggcagagcctcctcgctgatc

SEQ ID NO: 5545691 - DNA, 25 bp, Homo sapien
tgatcttagcagccttctggccttt

SEQ ID NO: 5545692 - DNA, 25 bp, Homo sapien
caggagaagctgctccagtagctga

SEQ ID NO: 5545693 - DNA, 25 bp, Homo sapien
tacccctcttttgctcagaactttc

SEQ ID NO: 5545694 - DNA, 25 bp, Homo sapien
tctcagggctttggatcctagagga

SEQ ID NO: 5545695 - DNA, 25 bp, Homo sapien
gggctttggatcctagaggagaaac

SEQ ID NO: 5545696 - DNA, 25 bp, Homo sapien
acttccttaaaggagtggaggtgct

SEQ ID NO: 5545697 - DNA, 25 bp, Homo sapien
ccccatcccgccaccttccagcatc

SEQ ID NO: 5545698 - DNA, 25 bp, Homo sapien
ggtgcggcccgtttgtaacttgcaa

SEQ ID NO: 5545699 - DNA, 25 bp, Homo sapien
gagggtctgcctccccatcccgcca

SEQ ID NO: 5545700 - DNA, 25 bp, Homo sapien
aagaacagggatcaagttgaatgtt

SEQ ID NO: 5545701 - DNA, 25 bp, Homo sapien
tttgcccctgattcgggcagcgggt

SEQ ID NO: 5545702 - DNA, 25 bp, Homo sapien
ctccagagtttccactaaagggttg

SEQ ID NO: 5545703 - DNA, 25 bp, Homo sapien
caaaaatcaaatccggaaactgctt

SEQ ID NO: 5545704 - DNA, 25 bp, Homo sapien
tcacagagacatgcacgttgtagca

SEQ ID NO: 5545705 - DNA, 25 bp, Homo sapien
tggccctctagattcctgtaatatg

SEQ ID NO: 5545706 - DNA, 25 bp, Homo sapien
ttgcagggtagtttactctttgccc

SEQ ID NO: 5545707 - DNA, 25 bp, Homo sapien
ggctcaatcagccttgacctctcca

SEQ ID NO: 5545708 - DNA, 25 bp, Homo sapien
tgaagtacactggcaccatcatggc

SEQ ID NO: 5545709 - DNA, 25 bp, Homo sapien
atgaaaccaattaaattatccgcat

SEQ ID NO: 5545710 - DNA, 25 bp, Homo sapien
ttgcccaagttggtttcaaactgct

SEQ ID NO: 5545711 - DNA, 25 bp, Homo sapien
atccgcatatatttgcagggtagtt

SEQ ID NO: 5545712 - DNA, 25 bp, Homo sapien
agctgggaatacaagtactacatgc

SEQ ID NO: 5545713 - DNA, 25 bp, Homo sapien
agtactacatgcacatgacaccatt

SEQ ID NO: 5545714 - DNA, 25 bp, Homo sapien
caagttggtttcaaactgctgagct

SEQ ID NO: 5545715 - DNA, 25 bp, Homo sapien
gagatgggtgttttctcattttgcc

SEQ ID NO: 5545716 - DNA, 25 bp, Homo sapien
ttctagtaaagtagagatgaaagcg

SEQ ID NO: 5545717 - DNA, 25 bp, Homo sapien
agcggaggagctttccagctacaaa

SEQ ID NO: 5545718 - DNA, 25 bp, Homo sapien
gaggccttgtctcagtcagtcaatc

SEQ ID NO: 5545719 - DNA, 25 bp, Homo sapien
cattttagctgggccttaaagggga

SEQ ID NO: 5545720 - DNA, 25 bp, Homo sapien
aagaaagtgacattttagctgggcc

SEQ ID NO: 5545721 - DNA, 25 bp, Homo sapien
agctacaaagagtaatctggagatc

SEQ ID NO: 5545722 - DNA, 25 bp, Homo sapien
gcagaagcatgtataagttagggtc

SEQ ID NO: 5545723 - DNA, 25 bp, Homo sapien
ggagctcatatgaggcgtccagttc

SEQ ID NO: 5545724 - DNA, 25 bp, Homo sapien
agttagggtccacaagattatttgc

SEQ ID NO: 5545725 - DNA, 25 bp, Homo sapien
aaggggatggtaagattctagtaaa

SEQ ID NO: 5545726 - DNA, 25 bp, Homo sapien
tggtcttctgaaagaaagtgacatt

SEQ ID NO: 5545727 - DNA, 25 bp, Homo sapien
agacacagaaaatttgaaaccccaa

SEQ ID NO: 5545728 - DNA, 25 bp, Homo sapien
tatatgcctggaaattgatgtgtgc

SEQ ID NO: 5545729 - DNA, 25 bp, Homo sapien
taggtacaatgtaaaggatgcgctt

SEQ ID NO: 5545730 - DNA, 25 bp, Homo sapien
atgcaatgattgaagagacagctta

SEQ ID NO: 5545731 - DNA, 25 bp, Homo sapien
aatggtcaatggaaagtacagaaca

SEQ ID NO: 5545732 - DNA, 25 bp, Homo sapien
tcttggagaacaaataggtacaatg

SEQ ID NO: 5545733 - DNA, 25 bp, Homo sapien
gactctagaaagtgctacaggggag

SEQ ID NO: 5545734 - DNA, 25 bp, Homo sapien
ggggagaatgggtgaattctattaa

SEQ ID NO: 5545735 - DNA, 25 bp, Homo sapien
aaaggatgcgctttatggagattgt

SEQ ID NO: 5545736 - DNA, 25 bp, Homo sapien
tgatgtgtgcaggtccatcaggaga

SEQ ID NO: 5545737 - DNA, 25 bp, Homo sapien
ggagcaggtagatgctgcagattca

SEQ ID NO: 5545738 - DNA, 25 bp, Homo sapien
gagcagctgtgtagatgactgtgtc

SEQ ID NO: 5545739 - DNA, 25 bp, Homo sapien
acctacagttccagcctgattttcc

SEQ ID NO: 5545740 - DNA, 25 bp, Homo sapien
cccactcaaaaatctccaatgttcc

SEQ ID NO: 5545741 - DNA, 25 bp, Homo sapien
agactactgactgttccttggctgt

SEQ ID NO: 5545742 - DNA, 25 bp, Homo sapien
gatgactgtgtctacagaatctacc

SEQ ID NO: 5545743 - DNA, 25 bp, Homo sapien
atgagcagctgtgtagatgactgtg

SEQ ID NO: 5545744 - DNA, 25 bp, Homo sapien
aaggttccggtattcctagaccatc

SEQ ID NO: 5545745 - DNA, 25 bp, Homo sapien
aaaggctctttaacctacagttcca

SEQ ID NO: 5545746 - DNA, 25 bp, Homo sapien
aaagtcctgttttagtcacactaga

SEQ ID NO: 5545747 - DNA, 25 bp, Homo sapien
gctgacttcaaatcaccccaggctg

SEQ ID NO: 5545748 - DNA, 25 bp, Homo sapien
tcacactagactactgactgttcct

SEQ ID NO: 5545749 - DNA, 25 bp, Homo sapien
ggtaataggctactgggtctccttc

SEQ ID NO: 5545750 - DNA, 25 bp, Homo sapien
atgtagatggggttttggcacatct

SEQ ID NO: 5545751 - DNA, 25 bp, Homo sapien
ggatatagttgtagacatggccgtc

SEQ ID NO: 5545752 - DNA, 25 bp, Homo sapien
gaggtagtccggttctgattgcggc

SEQ ID NO: 5545753 - DNA, 25 bp, Homo sapien
gtggttgggttttgactgccccaca

SEQ ID NO: 5545754 - DNA, 25 bp, Homo sapien
ctcttgcaggtttcggtaataggct

SEQ ID NO: 5545755 - DNA, 25 bp, Homo sapien
cgtgagtctcagtgttgtaagaccc

SEQ ID NO: 5545756 - DNA, 25 bp, Homo sapien
ttttggcgtcgagattcataggaag

SEQ ID NO: 5545757 - DNA, 25 bp, Homo sapien
acttattgtgtaagcaggtgtggct

SEQ ID NO: 5545758 - DNA, 25 bp, Homo sapien
aattgaaaggagcttacgtctaagt

SEQ ID NO: 5545759 - DNA, 25 bp, Homo sapien
aagttgttggtattcctgggaacgc

SEQ ID NO: 5545760 - DNA, 25 bp, Homo sapien
ccttatcatgtaaatggtttgcaaa

SEQ ID NO: 5545761 - DNA, 25 bp, Homo sapien
ttaggtcattcatacgtctttagag

SEQ ID NO: 5545762 - DNA, 25 bp, Homo sapien
accagcaatatccaggtgttgccat

SEQ ID NO: 5545763 - DNA, 25 bp, Homo sapien
ggggccatgtgtggtaactgtatat

SEQ ID NO: 5545764 - DNA, 25 bp, Homo sapien
atggatatcctagggagtgtgcagt

SEQ ID NO: 5545765 - DNA, 25 bp, Homo sapien
gattagtgatgcagaacatcttttt

SEQ ID NO: 5545766 - DNA, 25 bp, Homo sapien
gtgtctgttgacacacagaagtttt

SEQ ID NO: 5545767 - DNA, 25 bp, Homo sapien
attatggatatcctagggagtgtgc

SEQ ID NO: 5545768 - DNA, 25 bp, Homo sapien
ctctttgatacatacctaggaatgg

SEQ ID NO: 5545769 - DNA, 25 bp, Homo sapien
acgtctttagagaaatgttcagaac

SEQ ID NO: 5545770 - DNA, 25 bp, Homo sapien
actttctgaagaaccgccaaactgt

SEQ ID NO: 5545771 - DNA, 25 bp, Homo sapien
ttacaggagtgagccgctgctcaca

SEQ ID NO: 5545772 - DNA, 25 bp, Homo sapien
ctgcagtctcgacctcctgaccttc

SEQ ID NO: 5545773 - DNA, 25 bp, Homo sapien
gccaggctgatgtcgaacccctgac

SEQ ID NO: 5545774 - DNA, 25 bp, Homo sapien
ttggagcaacagggttttgtcttgt

SEQ ID NO: 5545775 - DNA, 25 bp, Homo sapien
cctgaccttctggattcaagctgtc

SEQ ID NO: 5545776 - DNA, 25 bp, Homo sapien
gctcaagcgacctgcctgccttggc

SEQ ID NO: 5545777 - DNA, 25 bp, Homo sapien
gagccgctgctcacacaattcttga

SEQ ID NO: 5545778 - DNA, 25 bp, Homo sapien
tcaaatgattctcctgcgtcagcct

SEQ ID NO: 5545779 - DNA, 25 bp, Homo sapien
ctcagctcactgcagtctcgacctc

SEQ ID NO: 5545780 - DNA, 25 bp, Homo sapien
aacccctgacctccagtgatctgcc

SEQ ID NO: 5545781 - DNA, 25 bp, Homo sapien
ttctggattcaagctgtcctcctgc

SEQ ID NO: 5545782 - DNA, 25 bp, Homo sapien
gggctgactgtttaaccatgtgcac

SEQ ID NO: 5545783 - DNA, 25 bp, Homo sapien
tgcaggatcattgaaccacagagta

SEQ ID NO: 5545784 - DNA, 25 bp, Homo sapien
aagcggagacaaagtcaaaagttta

SEQ ID NO: 5545785 - DNA, 25 bp, Homo sapien
gagtatcagggccccaaaggatctt

SEQ ID NO: 5545786 - DNA, 25 bp, Homo sapien
aacctgtagccacatgagccgtatc

SEQ ID NO: 5545787 - DNA, 25 bp, Homo sapien
tgccagattggaaccatggagatga

SEQ ID NO: 5545788 - DNA, 25 bp, Homo sapien
gagccgtatctacccaggagattcc

SEQ ID NO: 5545789 - DNA, 25 bp, Homo sapien
tcctgaccacacaacatggggctgg

SEQ ID NO: 5545790 - DNA, 25 bp, Homo sapien
cacaccaacccagtgcacaccaggt

SEQ ID NO: 5545791 - DNA, 25 bp, Homo sapien
cacaccaggtacagtgtgacagggt

SEQ ID NO: 5545792 - DNA, 25 bp, Homo sapien
cacctcttagggtggagtgagaatt

SEQ ID NO: 5545793 - DNA, 25 bp, Homo sapien
gaatccactagagttaaggccaccc

SEQ ID NO: 5545794 - DNA, 25 bp, Homo sapien
taagatgaacagatgacacggcatc

SEQ ID NO: 5545795 - DNA, 25 bp, Homo sapien
caccagcacaaacgacacctcaagt

SEQ ID NO: 5545796 - DNA, 25 bp, Homo sapien
attgttacaggcacttacgggaacc

SEQ ID NO: 5545797 - DNA, 25 bp, Homo sapien
agcttatctctacgcaggctgccca

SEQ ID NO: 5545798 - DNA, 25 bp, Homo sapien
gagttaaggccacccacttgatgcc

SEQ ID NO: 5545799 - DNA, 25 bp, Homo sapien
gacacggcatcactgattctggata

SEQ ID NO: 5545800 - DNA, 25 bp, Homo sapien
tacatcccataaagtaagaagtgtt

SEQ ID NO: 5545801 - DNA, 25 bp, Homo sapien
tcgttaccaggatcagtctgactga

SEQ ID NO: 5545802 - DNA, 25 bp, Homo sapien
tcatgcagccatggagtatcgttac

SEQ ID NO: 5545803 - DNA, 25 bp, Homo sapien
tctgattactacaaaggtgccaact

SEQ ID NO: 5545804 - DNA, 25 bp, Homo sapien
ctagaaataagggttaaactgcaat

SEQ ID NO: 5545805 - DNA, 25 bp, Homo sapien
ttcctgggtaaactgggacctatga

SEQ ID NO: 5545806 - DNA, 25 bp, Homo sapien
aaggtaattttgacaacagtagcac

SEQ ID NO: 5545807 - DNA, 25 bp, Homo sapien
tatccccgtcctaagccagtcacat

SEQ ID NO: 5545808 - DNA, 25 bp, Homo sapien
gtgaaagggagtgctaccaataatt

SEQ ID NO: 5545809 - DNA, 25 bp, Homo sapien
aggtacaacaggtataaactggaat

SEQ ID NO: 5545810 - DNA, 25 bp, Homo sapien
ctgggacctatgatcaacctagaaa

SEQ ID NO: 5545811 - DNA, 25 bp, Homo sapien
tcccacgcatgtgtggaaaagataa

SEQ ID NO: 5545812 - DNA, 25 bp, Homo sapien
tctcatgagatagatttctgttcac

SEQ ID NO: 5545813 - DNA, 25 bp, Homo sapien
ataattacacaggtacaacaggtat

SEQ ID NO: 5545814 - DNA, 25 bp, Homo sapien
gcaattacatgcagaaatcatacct

SEQ ID NO: 5545815 - DNA, 25 bp, Homo sapien
atgctcaacatgtaggaaaataaga

SEQ ID NO: 5545816 - DNA, 25 bp, Homo sapien
tagcaggaacaagataaatgatgtc

SEQ ID NO: 5545817 - DNA, 25 bp, Homo sapien
tccaagaatgcaaaggtgtttcagc

SEQ ID NO: 5545818 - DNA, 25 bp, Homo sapien
aaatactagccaacaaaatccagca

SEQ ID NO: 5545819 - DNA, 25 bp, Homo sapien
aaaaaagctcagtagacacgcacaa

SEQ ID NO: 5545820 - DNA, 25 bp, Homo sapien
atcatactcagtggtgaaagagaaa

SEQ ID NO: 5545821 - DNA, 25 bp, Homo sapien
cagcatacgaagatcaatgtaatgt

SEQ ID NO: 5545822 - DNA, 25 bp, Homo sapien
ccattttagtagaatgaaggggaaa

SEQ ID NO: 5545823 - DNA, 25 bp, Homo sapien
ttatataccatgaccaagcaggatt

SEQ ID NO: 5545824 - DNA, 25 bp, Homo sapien
actaaagaagaattaatgtgaatcc

SEQ ID NO: 5545825 - DNA, 25 bp, Homo sapien
agaaaagtagaggccaagatctctt

SEQ ID NO: 5545826 - DNA, 25 bp, Homo sapien
ctagtatcggtgttcacaagccctg

SEQ ID NO: 5545827 - DNA, 25 bp, Homo sapien
tggaacggaatgtcacgtggttaga

SEQ ID NO: 5545828 - DNA, 25 bp, Homo sapien
tcacaagccctgtaaggcactcggg

SEQ ID NO: 5545829 - DNA, 25 bp, Homo sapien
ctctctcagggtttcaaggatggga

SEQ ID NO: 5545830 - DNA, 25 bp, Homo sapien
agtgcctgggagaatacacacacta

SEQ ID NO: 5545831 - DNA, 25 bp, Homo sapien
tccaaacccacacttgggcactctc

SEQ ID NO: 5545832 - DNA, 25 bp, Homo sapien
tttaggcctgtgaatactgcttagc

SEQ ID NO: 5545833 - DNA, 25 bp, Homo sapien
tgggagaatacacacactacctggc

SEQ ID NO: 5545834 - DNA, 25 bp, Homo sapien
acactacctggcatgccgccgtaag

SEQ ID NO: 5545835 - DNA, 25 bp, Homo sapien
tactgcttagcatggaacggaatgt

SEQ ID NO: 5545836 - DNA, 25 bp, Homo sapien
ggcgaatgcgtcagtgcctccaaac

SEQ ID NO: 5545837 - DNA, 25 bp, Homo sapien
ctacatattcgtggggtagaatact

SEQ ID NO: 5545838 - DNA, 25 bp, Homo sapien
cagttatcagctcagggtaacaagc

SEQ ID NO: 5545839 - DNA, 25 bp, Homo sapien
ggtacacaacactagggcttattcc

SEQ ID NO: 5545840 - DNA, 25 bp, Homo sapien
tcacctactataaagtcctccagtt

SEQ ID NO: 5545841 - DNA, 25 bp, Homo sapien
ccattgctggcttatttcacctact

SEQ ID NO: 5545842 - DNA, 25 bp, Homo sapien
gcatcctcccacaaatctctcccta

SEQ ID NO: 5545843 - DNA, 25 bp, Homo sapien
tcagctcagggtaacaagcatatcc

SEQ ID NO: 5545844 - DNA, 25 bp, Homo sapien
ttcgtggggtagaatactttgatac

SEQ ID NO: 5545845 - DNA, 25 bp, Homo sapien
agcctctagtatgcgctgtcctaat

SEQ ID NO: 5545846 - DNA, 25 bp, Homo sapien
caaagaatgtacagttatcagctca

SEQ ID NO: 5545847 - DNA, 25 bp, Homo sapien
tagtcatgctatagtggtacacaac

SEQ ID NO: 5545848 - DNA, 25 bp, Homo sapien
acaaacagctcctgagcacagtgga

SEQ ID NO: 5545849 - DNA, 25 bp, Homo sapien
ctaaccaacaacgtcagtgcaaggg

SEQ ID NO: 5545850 - DNA, 25 bp, Homo sapien
tgcaagggggtgctccctaaaatga

SEQ ID NO: 5545851 - DNA, 25 bp, Homo sapien
aaatctcgagacttcatggacagga

SEQ ID NO: 5545852 - DNA, 25 bp, Homo sapien
atggacaggatggcacctgagtaaa

SEQ ID NO: 5545853 - DNA, 25 bp, Homo sapien
cctgccttgcaggacgcaatgcagt

SEQ ID NO: 5545854 - DNA, 25 bp, Homo sapien
gcaggacgcaatgcagtgattgatt

SEQ ID NO: 5545855 - DNA, 25 bp, Homo sapien
atggcacctgagtaaagtaaaagtt

SEQ ID NO: 5545856 - DNA, 25 bp, Homo sapien
catagcaaagctgagtccaaatcct

SEQ ID NO: 5545857 - DNA, 25 bp, Homo sapien
ggtgtgaagacgcataagccttatc

SEQ ID NO: 5545858 - DNA, 25 bp, Homo sapien
ttttccaggcagacacacttgggga

SEQ ID NO: 5545859 - DNA, 25 bp, Homo sapien
catggctaatgtaatgcacagaaaa

SEQ ID NO: 5545860 - DNA, 25 bp, Homo sapien
atataaagcagtcagaacagagcct

SEQ ID NO: 5545861 - DNA, 25 bp, Homo sapien
aatttcacagcaagtaggtatatct

SEQ ID NO: 5545862 - DNA, 25 bp, Homo sapien
actggaacaggacactgactatact

SEQ ID NO: 5545863 - DNA, 25 bp, Homo sapien
cagagaccacactggatgttgcaca

SEQ ID NO: 5545864 - DNA, 25 bp, Homo sapien
ttacttctgggatagagtgaatggt

SEQ ID NO: 5545865 - DNA, 25 bp, Homo sapien
gagtgaatggttgaatcagcataac

SEQ ID NO: 5545866 - DNA, 25 bp, Homo sapien
gaagactagtagtaggtagcatatc

SEQ ID NO: 5545867 - DNA, 25 bp, Homo sapien
ttgcaatagtggaactggaagacta

SEQ ID NO: 5545868 - DNA, 25 bp, Homo sapien
ccattaatggccactggaacaggac

SEQ ID NO: 5545869 - DNA, 25 bp, Homo sapien
accttgagccaaatatgggaatctc

SEQ ID NO: 5545870 - DNA, 25 bp, Homo sapien
tatctagatacctaagtaaaagtat

SEQ ID NO: 5545871 - DNA, 25 bp, Homo sapien
atacttttacttaggtatctagata

SEQ ID NO: 5545872 - DNA, 25 bp, Homo sapien
tccgttggcgaaggacacccctagt

SEQ ID NO: 5545873 - DNA, 25 bp, Homo sapien
actaggggtgtccttcgccaacgga

SEQ ID NO: 5545874 - DNA, 25 bp, Homo sapien
tgggaaataaacgaacaacatcagg

SEQ ID NO: 5545875 - DNA, 25 bp, Homo sapien
gattcataccctgtttcctgccctc

SEQ ID NO: 5545876 - DNA, 25 bp, Homo sapien
gaaataaacgaacaacatcaggcca

SEQ ID NO: 5545877 - DNA, 25 bp, Homo sapien
aaggacaacttgaaatgggaaataa

SEQ ID NO: 5545878 - DNA, 25 bp, Homo sapien
tgcacccactcatttaaggacaact

SEQ ID NO: 5545879 - DNA, 25 bp, Homo sapien
caacttgaaatgggaaataaacgaa

SEQ ID NO: 5545880 - DNA, 25 bp, Homo sapien
aataaacgaacaacatcaggccatg

SEQ ID NO: 5545881 - DNA, 25 bp, Homo sapien
catcaggccatgttttgaaacttaa

SEQ ID NO: 5545882 - DNA, 25 bp, Homo sapien
tgaaatgggaaataaacgaacaaca

SEQ ID NO: 5545883 - DNA, 25 bp, Homo sapien
ccactgcacccactcatttaaggac

SEQ ID NO: 5545884 - DNA, 25 bp, Homo sapien
caggcccccactcctaccccgagta

SEQ ID NO: 5545885 - DNA, 25 bp, Homo sapien
gaacctgagtggaaggcatatattg

SEQ ID NO: 5545886 - DNA, 25 bp, Homo sapien
gaagctttaaatggtgacagaatac

SEQ ID NO: 5545887 - DNA, 25 bp, Homo sapien
ttcagcaaatagatgacatatgtta

SEQ ID NO: 5545888 - DNA, 25 bp, Homo sapien
tcatattgagagctgagcattctat

SEQ ID NO: 5545889 - DNA, 25 bp, Homo sapien
ttaacttgtaagcatgccagcacat

SEQ ID NO: 5545890 - DNA, 25 bp, Homo sapien
gattataaccagaaaagagaatgta

SEQ ID NO: 5545891 - DNA, 25 bp, Homo sapien
ctcagcaggtagtttgctaaacagc

SEQ ID NO: 5545892 - DNA, 25 bp, Homo sapien
ataataggtaggattgcagttcaat

SEQ ID NO: 5545893 - DNA, 25 bp, Homo sapien
atctgtaagaccctgataatgcctc

SEQ ID NO: 5545894 - DNA, 25 bp, Homo sapien
tagtaaagtagataataggtaggat

SEQ ID NO: 5545895 - DNA, 25 bp, Homo sapien
tgcaattcaccacaaacaacccctc

SEQ ID NO: 5545896 - DNA, 25 bp, Homo sapien
gaatgaatgcagtgctgaatggact

SEQ ID NO: 5545897 - DNA, 25 bp, Homo sapien
aggcttgtgaagctcagacacctac

SEQ ID NO: 5545898 - DNA, 25 bp, Homo sapien
tgaatggactataaaaggcttgtga

SEQ ID NO: 5545899 - DNA, 25 bp, Homo sapien
atgcaggcatggagtttttctcacc

SEQ ID NO: 5545900 - DNA, 25 bp, Homo sapien
ctgactcactgtcagctggcaggag

SEQ ID NO: 5545901 - DNA, 25 bp, Homo sapien
ttgcaaagagtgaaaacatgcaggc

SEQ ID NO: 5545902 - DNA, 25 bp, Homo sapien
atgtaaagtgcgatcaaaaaaggaa

SEQ ID NO: 5545903 - DNA, 25 bp, Homo sapien
taaaacccagagacagaagatttac

SEQ ID NO: 5545904 - DNA, 25 bp, Homo sapien
caccagtgtgtacctggcatgaaac

SEQ ID NO: 5545905 - DNA, 25 bp, Homo sapien
ggcaggagccatttacacccccaaa

SEQ ID NO: 5545906 - DNA, 25 bp, Homo sapien
cagccgggatccccactgtgtcttg

SEQ ID NO: 5545907 - DNA, 25 bp, Homo sapien
atttttatctgttcctaagtagact

SEQ ID NO: 5545908 - DNA, 25 bp, Homo sapien
agtctacttaggaacagataaaaat

SEQ ID NO: 5545909 - DNA, 25 bp, Homo sapien
cagacccccaggtaactgggaccaa

SEQ ID NO: 5545910 - DNA, 25 bp, Homo sapien
caccataaccagcctctatcatctt

SEQ ID NO: 5545911 - DNA, 25 bp, Homo sapien
taagcatgcatgtgtctaacctctc

SEQ ID NO: 5545912 - DNA, 25 bp, Homo sapien
ctccttaagtgctaggactataggt

SEQ ID NO: 5545913 - DNA, 25 bp, Homo sapien
cagcggcattatcactgctcactgc

SEQ ID NO: 5545914 - DNA, 25 bp, Homo sapien
taactgggaccaaagacacacatta

SEQ ID NO: 5545915 - DNA, 25 bp, Homo sapien
cccacctcagacccccaggtaactg

SEQ ID NO: 5545916 - DNA, 25 bp, Homo sapien
aagacacacattatcacacctagct

SEQ ID NO: 5545917 - DNA, 25 bp, Homo sapien
tagtcaactttattgagacaaaact

SEQ ID NO: 5545918 - DNA, 25 bp, Homo sapien
tcactgcaaactcaactttctgggc

SEQ ID NO: 5545919 - DNA, 25 bp, Homo sapien
ttctgagtaattatttcggatctat

SEQ ID NO: 5545920 - DNA, 25 bp, Homo sapien
tcggtcaatcttcagtagaagaaaa

SEQ ID NO: 5545921 - DNA, 25 bp, Homo sapien
ttttcttctactgaagattgaccga

SEQ ID NO: 5545922 - DNA, 25 bp, Homo sapien
tcacacagaacatcaaaaagaaatc

SEQ ID NO: 5545923 - DNA, 25 bp, Homo sapien
cttaagaatttcaggattgagattt

SEQ ID NO: 5545924 - DNA, 25 bp, Homo sapien
ttgcaactcaatagcacaagcacag

SEQ ID NO: 5545925 - DNA, 25 bp, Homo sapien
taaccggcagatgcttagtggtaaa

SEQ ID NO: 5545926 - DNA, 25 bp, Homo sapien
ttttaaccggcagatgcttagtggt

SEQ ID NO: 5545927 - DNA, 25 bp, Homo sapien
actttgatatgtagtaggaatactt

SEQ ID NO: 5545928 - DNA, 25 bp, Homo sapien
tcatggatggacattcttaaggtaa

SEQ ID NO: 5545929 - DNA, 25 bp, Homo sapien
aatagcacaagcacagtttctcact

SEQ ID NO: 5545930 - DNA, 25 bp, Homo sapien
aaaaggctagtttaacttgcaactc

SEQ ID NO: 5545931 - DNA, 25 bp, Homo sapien
gtttggtgcccaaaacatcagcagt

SEQ ID NO: 5545932 - DNA, 25 bp, Homo sapien
aggttttgttccagtttggtgccca

SEQ ID NO: 5545933 - DNA, 25 bp, Homo sapien
agttgtgacaccttggtcaagcccc

SEQ ID NO: 5545934 - DNA, 25 bp, Homo sapien
gaaagaaagctacagcatagactgc

SEQ ID NO: 5545935 - DNA, 25 bp, Homo sapien
gcagctctaggctactccagaaggg

SEQ ID NO: 5545936 - DNA, 25 bp, Homo sapien
aagggctctgctgttcactagttgt

SEQ ID NO: 5545937 - DNA, 25 bp, Homo sapien
tgatgcctgcagctctaggctactc

SEQ ID NO: 5545938 - DNA, 25 bp, Homo sapien
cagcatagactgcaaggtgctggct

SEQ ID NO: 5545939 - DNA, 25 bp, Homo sapien
tggtcaagcccctctacccctctac

SEQ ID NO: 5545940 - DNA, 25 bp, Homo sapien
tctggctctcaacttcctccgctgt

SEQ ID NO: 5545941 - DNA, 25 bp, Homo sapien
ggaacacaagggtagtttcaccaga

SEQ ID NO: 5545942 - DNA, 25 bp, Homo sapien
ggtgctggctacaactcactctgcc

SEQ ID NO: 5545943 - DNA, 25 bp, Homo sapien
agtttcaccagaggttggctgtgag

SEQ ID NO: 5545944 - DNA, 25 bp, Homo sapien
gaaaaggtttgggatgtatattgct

SEQ ID NO: 5545945 - DNA, 25 bp, Homo sapien
tgtgcctcagaaataataacgccgc

SEQ ID NO: 5545946 - DNA, 25 bp, Homo sapien
cgcatccagacaacgtggctacctt

SEQ ID NO: 5545947 - DNA, 25 bp, Homo sapien
actcagatgtttggctaccttgggc

SEQ ID NO: 5545948 - DNA, 25 bp, Homo sapien
ctgggaaaactggccaaccaatgta

SEQ ID NO: 5545949 - DNA, 25 bp, Homo sapien
tcagaggttcagagttgtcaaattc

SEQ ID NO: 5545950 - DNA, 25 bp, Homo sapien
ggcctcaggccggccacttccttcc

SEQ ID NO: 5545951 - DNA, 25 bp, Homo sapien
tcttgcccaggcttgctggagttgg

SEQ ID NO: 5545952 - DNA, 25 bp, Homo sapien
ctggagttggggttatccacagtca

SEQ ID NO: 5545953 - DNA, 25 bp, Homo sapien
attcaaccctgagtggcccaaacaa

SEQ ID NO: 5545954 - DNA, 25 bp, Homo sapien
accttgggctgcaactgtcccactc

SEQ ID NO: 5545955 - DNA, 25 bp, Homo sapien
acgtcagttcacacgctggcaggtc

SEQ ID NO: 5545956 - DNA, 25 bp, Homo sapien
ctggcaggtccattaccaggagctc

SEQ ID NO: 5545957 - DNA, 25 bp, Homo sapien
aatagagtagccttgcccttgcagc

SEQ ID NO: 5545958 - DNA, 25 bp, Homo sapien
agcaagtcagttagaacgtgttgat

SEQ ID NO: 5545959 - DNA, 25 bp, Homo sapien
ggaaaaaaacgacacaagcaagtca

SEQ ID NO: 5545960 - DNA, 25 bp, Homo sapien
ctgttggagtcttataaggtccctc

SEQ ID NO: 5545961 - DNA, 25 bp, Homo sapien
gcaccaaggtgcagttatgctaccg

SEQ ID NO: 5545962 - DNA, 25 bp, Homo sapien
gaggatactgagagttgagatctcc

SEQ ID NO: 5545963 - DNA, 25 bp, Homo sapien
ctgtgtcctcccgggagagagtaaa

SEQ ID NO: 5545964 - DNA, 25 bp, Homo sapien
agagagtaaacagcttcccaccgtg

SEQ ID NO: 5545965 - DNA, 25 bp, Homo sapien
caggccattgaactactgttgggga

SEQ ID NO: 5545966 - DNA, 25 bp, Homo sapien
cattgatgtgatgccccaaaacctc

SEQ ID NO: 5545967 - DNA, 25 bp, Homo sapien
tccaaaggcagtacatggcaaatac

SEQ ID NO: 5545968 - DNA, 25 bp, Homo sapien
aagagcccaacagtagctgaagttt

SEQ ID NO: 5545969 - DNA, 25 bp, Homo sapien
gggacttgatgaagcgctaattgct

SEQ ID NO: 5545970 - DNA, 25 bp, Homo sapien
ctgtaccgcttacaaagagcccaac

SEQ ID NO: 5545971 - DNA, 25 bp, Homo sapien
ctgaataatcagctgtaagaaacac

SEQ ID NO: 5545972 - DNA, 25 bp, Homo sapien
ttaactagaatgtaggcaccctcac

SEQ ID NO: 5545973 - DNA, 25 bp, Homo sapien
gtgaatgccaccaatatgtactgtc

SEQ ID NO: 5545974 - DNA, 25 bp, Homo sapien
tgagggtgcctaaaagaaaaccata

SEQ ID NO: 5545975 - DNA, 25 bp, Homo sapien
ttctaacatctgatagggacttgat

SEQ ID NO: 5545976 - DNA, 25 bp, Homo sapien
tcattaccaggtcgagttgtcacat

SEQ ID NO: 5545977 - DNA, 25 bp, Homo sapien
tgagttcaggagatctagaatgaac

SEQ ID NO: 5545978 - DNA, 25 bp, Homo sapien
tagggaatactgagtttgagctgag

SEQ ID NO: 5545979 - DNA, 25 bp, Homo sapien
ccagaaatacacagtcagaagtcag

SEQ ID NO: 5545980 - DNA, 25 bp, Homo sapien
tttgcatcaaatgttggagtgctac

SEQ ID NO: 5545981 - DNA, 25 bp, Homo sapien
cagcacatgggtgatctatgaggta

SEQ ID NO: 5545982 - DNA, 25 bp, Homo sapien
tagaatgaacatacagaactgaaag

SEQ ID NO: 5545983 - DNA, 25 bp, Homo sapien
gtgatcaaagagatacatgggaaaa

SEQ ID NO: 5545984 - DNA, 25 bp, Homo sapien
aattcatgcagaaatgcttagattc

SEQ ID NO: 5545985 - DNA, 25 bp, Homo sapien
tgagctgaggttcttgtataacatc

SEQ ID NO: 5545986 - DNA, 25 bp, Homo sapien
cacagtcagaagtcagaaagatatt

SEQ ID NO: 5545987 - DNA, 25 bp, Homo sapien
aaacaatggtttagggaatactgag

SEQ ID NO: 5545988 - DNA, 25 bp, Homo sapien
agcctaactagtctaactgcctggt

SEQ ID NO: 5545989 - DNA, 25 bp, Homo sapien
caaagtgcacacagaacgttaagac

SEQ ID NO: 5545990 - DNA, 25 bp, Homo sapien
ccactcagaagtgctgttagtattt

SEQ ID NO: 5545991 - DNA, 25 bp, Homo sapien
ctttatacatttgtagggggggatc

SEQ ID NO: 5545992 - DNA, 25 bp, Homo sapien
atctactgtttgggaatctaccttc

SEQ ID NO: 5545993 - DNA, 25 bp, Homo sapien
tgtacagaggtattataaatatgcc

SEQ ID NO: 5545994 - DNA, 25 bp, Homo sapien
cagaacgttaagacacctatcccct

SEQ ID NO: 5545995 - DNA, 25 bp, Homo sapien
taggcactactgacaaacaaaaagc

SEQ ID NO: 5545996 - DNA, 25 bp, Homo sapien
ttaattatcgttgggcatttcagct

SEQ ID NO: 5545997 - DNA, 25 bp, Homo sapien
atgaatgcatgtatcagtgagaatt

SEQ ID NO: 5545998 - DNA, 25 bp, Homo sapien
ggatcgctggttcaaagtgcacaca

SEQ ID NO: 5545999 - DNA, 25 bp, Homo sapien
gcttaaccataagatgccaacccaa

SEQ ID NO: 5546000 - DNA, 25 bp, Homo sapien
gagagctttaaaccatgagatagac

SEQ ID NO: 5546001 - DNA, 25 bp, Homo sapien
ctggccagcctgtgagagctttaaa

SEQ ID NO: 5546002 - DNA, 25 bp, Homo sapien
agaacagaaaggctcctctgtcact

SEQ ID NO: 5546003 - DNA, 25 bp, Homo sapien
aatcagaatggttcccagaacagaa

SEQ ID NO: 5546004 - DNA, 25 bp, Homo sapien
tctacataaatcagaatggttccca

SEQ ID NO: 5546005 - DNA, 25 bp, Homo sapien
tcatatgttccgtgtaactgcctcc

SEQ ID NO: 5546006 - DNA, 25 bp, Homo sapien
gccaacccaattaacagtcacaccc

SEQ ID NO: 5546007 - DNA, 25 bp, Homo sapien
atagacatatggttttgcaaaagtt

SEQ ID NO: 5546008 - DNA, 25 bp, Homo sapien
ccaaaagtatagagaaactgaatgc

SEQ ID NO: 5546009 - DNA, 25 bp, Homo sapien
gcccgccttcgactcacaaagtgct

SEQ ID NO: 5546010 - DNA, 25 bp, Homo sapien
tcacgagcgacccccgtcccgccgc

SEQ ID NO: 5546011 - DNA, 25 bp, Homo sapien
gcggcgggacgggggtcgctcgtga

SEQ ID NO: 5546012 - DNA, 25 bp, Homo sapien
ttgtaatattgggtgtctggcagca

SEQ ID NO: 5546013 - DNA, 25 bp, Homo sapien
gatgctcgtacacccagtcccccta

SEQ ID NO: 5546014 - DNA, 25 bp, Homo sapien
tcactaactttgtggggacaaggtc

SEQ ID NO: 5546015 - DNA, 25 bp, Homo sapien
ccacaatgtggccttactgctccct

SEQ ID NO: 5546016 - DNA, 25 bp, Homo sapien
ccctacctgggaaatcacaacctca

SEQ ID NO: 5546017 - DNA, 25 bp, Homo sapien
tccgagtagcaattaaatcagctcc

SEQ ID NO: 5546018 - DNA, 25 bp, Homo sapien
tcaactgctgcaacttccgagtagc

SEQ ID NO: 5546019 - DNA, 25 bp, Homo sapien
ggggacaaggtcatataacactcta

SEQ ID NO: 5546020 - DNA, 25 bp, Homo sapien
gagcatatcagaatgacagaacatc

SEQ ID NO: 5546021 - DNA, 25 bp, Homo sapien
tagtgcacaggtgcctcccccagtt

SEQ ID NO: 5546022 - DNA, 25 bp, Homo sapien
actgctccctgatatacggtgcctt

SEQ ID NO: 5546023 - DNA, 25 bp, Homo sapien
tattcgtcacgaaagttttactcag

SEQ ID NO: 5546024 - DNA, 25 bp, Homo sapien
ctgagtaaaactttcgtgacgaata

SEQ ID NO: 5546025 - DNA, 25 bp, Homo sapien
gggaggagatattttggtgaaatta

SEQ ID NO: 5546026 - DNA, 25 bp, Homo sapien
aatgtgaatctgagctctaacagtt

SEQ ID NO: 5546027 - DNA, 25 bp, Homo sapien
ttggtgaaattaagaacataggctc

SEQ ID NO: 5546028 - DNA, 25 bp, Homo sapien
gtttgtggttactattgaagatcag

SEQ ID NO: 5546029 - DNA, 25 bp, Homo sapien
tgaaagggtatgtataatttgggag

SEQ ID NO: 5546030 - DNA, 25 bp, Homo sapien
atcacagtagagtacagaataaata

SEQ ID NO: 5546031 - DNA, 25 bp, Homo sapien
gtaacattacactgatcctgaatcc

SEQ ID NO: 5546032 - DNA, 25 bp, Homo sapien
catgtaaattgaaagacggtatcat

SEQ ID NO: 5546033 - DNA, 25 bp, Homo sapien
attaattactaagagaggaaggtag

SEQ ID NO: 5546034 - DNA, 25 bp, Homo sapien
actaatagtgatactgattcatgta

SEQ ID NO: 5546035 - DNA, 25 bp, Homo sapien
ctcactagtaaaattgggataataa

SEQ ID NO: 5546036 - DNA, 25 bp, Homo sapien
cccgtctgttaatttgagtcttctt

SEQ ID NO: 5546037 - DNA, 25 bp, Homo sapien
aagaagactcaaattaacagacggg

SEQ ID NO: 5546038 - DNA, 25 bp, Homo sapien
gagaggtcttacttagttgtgggtc

SEQ ID NO: 5546039 - DNA, 25 bp, Homo sapien
actcagctcctaagcagagatggaa

SEQ ID NO: 5546040 - DNA, 25 bp, Homo sapien
ctgacaagtccccaggggaagtcta

SEQ ID NO: 5546041 - DNA, 25 bp, Homo sapien
ctttgagatcctgagaggtcttact

SEQ ID NO: 5546042 - DNA, 25 bp, Homo sapien
ctaggtggaatgttgaatttgattt

SEQ ID NO: 5546043 - DNA, 25 bp, Homo sapien
agagttaggtcttcataggtactga

SEQ ID NO: 5546044 - DNA, 25 bp, Homo sapien
ggcctagggtccacactcggaatag

SEQ ID NO: 5546045 - DNA, 25 bp, Homo sapien
gattctggtccaacaggtctggggt

SEQ ID NO: 5546046 - DNA, 25 bp, Homo sapien
gttggctgactgtgtgctagctctc

SEQ ID NO: 5546047 - DNA, 25 bp, Homo sapien
atggaagcctcctaggtggaatgtt

SEQ ID NO: 5546048 - DNA, 25 bp, Homo sapien
ggagttgaagcagccaaagttggct

SEQ ID NO: 5546049 - DNA, 25 bp, Homo sapien
tccaaatttaaaggcagggtcagac

SEQ ID NO: 5546050 - DNA, 25 bp, Homo sapien
gtctactggtatgagagtaagggag

SEQ ID NO: 5546051 - DNA, 25 bp, Homo sapien
tggtacatatgaccgtggctccggc

SEQ ID NO: 5546052 - DNA, 25 bp, Homo sapien
aaagaggacaacagcacctacatca

SEQ ID NO: 5546053 - DNA, 25 bp, Homo sapien
ggtcagacttgatcctcagagtggc

SEQ ID NO: 5546054 - DNA, 25 bp, Homo sapien
ttctggggacagtactagattaatt

SEQ ID NO: 5546055 - DNA, 25 bp, Homo sapien
ccagaagattgtagaatgggattcc

SEQ ID NO: 5546056 - DNA, 25 bp, Homo sapien
gagccaggcccaacctcagttggcc

SEQ ID NO: 5546057 - DNA, 25 bp, Homo sapien
tcagagtggcgcactgtacatctct

SEQ ID NO: 5546058 - DNA, 25 bp, Homo sapien
gcctcctctagcgcaggtctcactc

SEQ ID NO: 5546059 - DNA, 25 bp, Homo sapien
tcttgagttcctaagcaggagacct

SEQ ID NO: 5546060 - DNA, 25 bp, Homo sapien
tattgtacagcagtgacagtgacga

SEQ ID NO: 5546061 - DNA, 25 bp, Homo sapien
agaggcatgagtgtctgcgctattt

SEQ ID NO: 5546062 - DNA, 25 bp, Homo sapien
tgtcacagaaatggccgcccactgg

SEQ ID NO: 5546063 - DNA, 25 bp, Homo sapien
tggtgtgaagtctgtcggtctcttc

SEQ ID NO: 5546064 - DNA, 25 bp, Homo sapien
gatccacgcagaacattgcaatgtc

SEQ ID NO: 5546065 - DNA, 25 bp, Homo sapien
tacaggaaggcatcctagcaccttc

SEQ ID NO: 5546066 - DNA, 25 bp, Homo sapien
aggtctgggcccctcatgcgttcct

SEQ ID NO: 5546067 - DNA, 25 bp, Homo sapien
ggaaatcccaagctgcacagtggag

SEQ ID NO: 5546068 - DNA, 25 bp, Homo sapien
aatgaggagctgaactgaatcatac

SEQ ID NO: 5546069 - DNA, 25 bp, Homo sapien
accttggcaggaatccagaaaacga

SEQ ID NO: 5546070 - DNA, 25 bp, Homo sapien
gtgttatgtatgccctcaaagaccc

SEQ ID NO: 5546071 - DNA, 25 bp, Homo sapien
actgagtacggcgttgataccacgg

SEQ ID NO: 5546072 - DNA, 25 bp, Homo sapien
ccgtggtatcaacgccgtactcagt

SEQ ID NO: 5546073 - DNA, 25 bp, Homo sapien
ctttggcttccatcgctgatactct

SEQ ID NO: 5546074 - DNA, 25 bp, Homo sapien
agtttgatcttctgaggccttcttc

SEQ ID NO: 5546075 - DNA, 25 bp, Homo sapien
tttgccatcggttcaaacctcctcc

SEQ ID NO: 5546076 - DNA, 25 bp, Homo sapien
ctctcaactcatcaaggccattctc

SEQ ID NO: 5546077 - DNA, 25 bp, Homo sapien
tttagctcggaatagtttgatcttc

SEQ ID NO: 5546078 - DNA, 25 bp, Homo sapien
gtcacatagttctcgtgccgtggtt

SEQ ID NO: 5546079 - DNA, 25 bp, Homo sapien
ccatcagctcttttaaggacttctc

SEQ ID NO: 5546080 - DNA, 25 bp, Homo sapien
tcatcaaggccattctccgtccagc

SEQ ID NO: 5546081 - DNA, 25 bp, Homo sapien
ccctgtttgtctgggtatcaggcag

SEQ ID NO: 5546082 - DNA, 25 bp, Homo sapien
tcgcattggctactgaggcttgtgc

SEQ ID NO: 5546083 - DNA, 25 bp, Homo sapien
gaggcttgtgcattcgtcacatagt

SEQ ID NO: 5546084 - DNA, 25 bp, Homo sapien
tttgtctttagtctagtgtacaacg

SEQ ID NO: 5546085 - DNA, 25 bp, Homo sapien
cgttgtacactagactaaagacaaa

SEQ ID NO: 5546086 - DNA, 25 bp, Homo sapien
tccaggtttgaaagtagtcaggcaa

SEQ ID NO: 5546087 - DNA, 25 bp, Homo sapien
aaacagacagaacttgagcaataca

SEQ ID NO: 5546088 - DNA, 25 bp, Homo sapien
agaaaagaaagaggttgtattgtga

SEQ ID NO: 5546089 - DNA, 25 bp, Homo sapien
attacccagttgctgggggtatggg

SEQ ID NO: 5546090 - DNA, 25 bp, Homo sapien
gagggggaatacatcactcatgccc

SEQ ID NO: 5546091 - DNA, 25 bp, Homo sapien
cagttgagttcaaatcaggtgccat

SEQ ID NO: 5546092 - DNA, 25 bp, Homo sapien
cagatagaatggcaactcaaatgac

SEQ ID NO: 5546093 - DNA, 25 bp, Homo sapien
gtagtcaggcaagaaagtactaaac

SEQ ID NO: 5546094 - DNA, 25 bp, Homo sapien
agaggcacacacacggacttccttc

SEQ ID NO: 5546095 - DNA, 25 bp, Homo sapien
tttgacatagtaatgagggggaata

SEQ ID NO: 5546096 - DNA, 25 bp, Homo sapien
tactaaacatagagaaagggcaatt

SEQ ID NO: 5546097 - DNA, 25 bp, Homo sapien
gggactgcagttcctgggctcttca

SEQ ID NO: 5546098 - DNA, 25 bp, Homo sapien
tatctgacccatctgccacaatctc

SEQ ID NO: 5546099 - DNA, 25 bp, Homo sapien
cgacaggacacatgctatctgaccc

SEQ ID NO: 5546100 - DNA, 25 bp, Homo sapien
gctcaggcagtgtcagccctcagaa

SEQ ID NO: 5546101 - DNA, 25 bp, Homo sapien
gccacaatctccactgcggcggggt

SEQ ID NO: 5546102 - DNA, 25 bp, Homo sapien
ttaaaaagttgtgacagcgacagga

SEQ ID NO: 5546103 - DNA, 25 bp, Homo sapien
aggaaagaagggtttccatctcata

SEQ ID NO: 5546104 - DNA, 25 bp, Homo sapien
ctgggctcttcaagaggacccccag

SEQ ID NO: 5546105 - DNA, 25 bp, Homo sapien
acagcgacaggacacatgctatctg

SEQ ID NO: 5546106 - DNA, 25 bp, Homo sapien
catctcaatgaaattgagggcaaag

SEQ ID NO: 5546107 - DNA, 25 bp, Homo sapien
actttagtcactcacggcccatctc

SEQ ID NO: 5546108 - DNA, 25 bp, Homo sapien
ctataccactactgggcatatatgc

SEQ ID NO: 5546109 - DNA, 25 bp, Homo sapien
aaaagggggaactcttatatatggc

SEQ ID NO: 5546110 - DNA, 25 bp, Homo sapien
tgagcttgaaagacattaagtgaaa

SEQ ID NO: 5546111 - DNA, 25 bp, Homo sapien
acagtatggatgttcctcaaaaatc

SEQ ID NO: 5546112 - DNA, 25 bp, Homo sapien
tggctggtaggaatgctaattagta

SEQ ID NO: 5546113 - DNA, 25 bp, Homo sapien
tatatatggctggtaggaatgctaa

SEQ ID NO: 5546114 - DNA, 25 bp, Homo sapien
gttaggatggctattaccaaagata

SEQ ID NO: 5546115 - DNA, 25 bp, Homo sapien
atacgtcaaagagagatctacactc

SEQ ID NO: 5546116 - DNA, 25 bp, Homo sapien
agctaagaaatcagtctaagtgtcc

SEQ ID NO: 5546117 - DNA, 25 bp, Homo sapien
tcacagcaacatgaatgagcttgaa

SEQ ID NO: 5546118 - DNA, 25 bp, Homo sapien
aaaatctaaaactatagccaggcac

SEQ ID NO: 5546119 - DNA, 25 bp, Homo sapien
cccctcctgcagggcccatggagga

SEQ ID NO: 5546120 - DNA, 25 bp, Homo sapien
gggccagacctcgctcctccatggt

SEQ ID NO: 5546121 - DNA, 25 bp, Homo sapien
cacgttctggctgaccaggaagcgg

SEQ ID NO: 5546122 - DNA, 25 bp, Homo sapien
tccctccagccccaaaggcagtgca

SEQ ID NO: 5546123 - DNA, 25 bp, Homo sapien
gctccagctgcaccagcgccatgtg

SEQ ID NO: 5546124 - DNA, 25 bp, Homo sapien
cctccatggtccagactccgtgggg

SEQ ID NO: 5546125 - DNA, 25 bp, Homo sapien
ggtggacccacgtctccctccagcc

SEQ ID NO: 5546126 - DNA, 25 bp, Homo sapien
cttttccagaagcctggtggaccca

SEQ ID NO: 5546127 - DNA, 25 bp, Homo sapien
cttcaaggtgggtctcccctcctgc

SEQ ID NO: 5546128 - DNA, 25 bp, Homo sapien
ggcagtgcaagcctctactgatccc

SEQ ID NO: 5546129 - DNA, 25 bp, Homo sapien
cacatggagcccgtccacgttctgg

SEQ ID NO: 5546130 - DNA, 25 bp, Homo sapien
aaacaggctttgagtaacaactaat

SEQ ID NO: 5546131 - DNA, 25 bp, Homo sapien
cacacaatggtgtaaagcctcatcc

SEQ ID NO: 5546132 - DNA, 25 bp, Homo sapien
tcattattaatgcaagtaggggaag

SEQ ID NO: 5546133 - DNA, 25 bp, Homo sapien
gcaggtcacaactgctacatcagcc

SEQ ID NO: 5546134 - DNA, 25 bp, Homo sapien
gtgttgtcaaagagtcaccaatgat

SEQ ID NO: 5546135 - DNA, 25 bp, Homo sapien
taagacttcaagctaaaagggtcta

SEQ ID NO: 5546136 - DNA, 25 bp, Homo sapien
gagcttgcaagagaactgagatctc

SEQ ID NO: 5546137 - DNA, 25 bp, Homo sapien
tgtgtacaaacacggtggcaaacac

SEQ ID NO: 5546138 - DNA, 25 bp, Homo sapien
ccattgtaggctaattgcaggtcac

SEQ ID NO: 5546139 - DNA, 25 bp, Homo sapien
caagtaggggaagctcttaaaaata

SEQ ID NO: 5546140 - DNA, 25 bp, Homo sapien
ccagtcatctttaaggagcttgcaa

SEQ ID NO: 5546141 - DNA, 25 bp, Homo sapien
tgggcaactgacaaaggtgccttgc

SEQ ID NO: 5546142 - DNA, 25 bp, Homo sapien
cattagtaatggaatgggcaactga

SEQ ID NO: 5546143 - DNA, 25 bp, Homo sapien
ttccaaagaagtccagcatacacac

SEQ ID NO: 5546144 - DNA, 25 bp, Homo sapien
atagccaagacaataaatcactcca

SEQ ID NO: 5546145 - DNA, 25 bp, Homo sapien
atagtgaaaactgcctgctgggatg

SEQ ID NO: 5546146 - DNA, 25 bp, Homo sapien
aacagatggagtagttagtacaata

SEQ ID NO: 5546147 - DNA, 25 bp, Homo sapien
caggcttgaatgaaaaagaaagtcc

SEQ ID NO: 5546148 - DNA, 25 bp, Homo sapien
ttgtgaataaccaagagagatgagg

SEQ ID NO: 5546149 - DNA, 25 bp, Homo sapien
gctgggatgtcaggttgcagcattt

SEQ ID NO: 5546150 - DNA, 25 bp, Homo sapien
tagtgcagtgccgggtcttccctaa

SEQ ID NO: 5546151 - DNA, 25 bp, Homo sapien
cagatgctgttgtgtgacaatggct

SEQ ID NO: 5546152 - DNA, 25 bp, Homo sapien
catacaacctaatgggcagtaattc

SEQ ID NO: 5546153 - DNA, 25 bp, Homo sapien
ctgcaggatctgtgccctgatcttg

SEQ ID NO: 5546154 - DNA, 25 bp, Homo sapien
aattggagctgtttggcctgcactt

SEQ ID NO: 5546155 - DNA, 25 bp, Homo sapien
ttgtgtacccagagtatagagcttc

SEQ ID NO: 5546156 - DNA, 25 bp, Homo sapien
tacttgaaaacataggtagcctaaa

SEQ ID NO: 5546157 - DNA, 25 bp, Homo sapien
taatttatgacgtggaattggagct

SEQ ID NO: 5546158 - DNA, 25 bp, Homo sapien
aggtagcctaaagctttctgtgcac

SEQ ID NO: 5546159 - DNA, 25 bp, Homo sapien
ttccaaaaatcctgagatctctact

SEQ ID NO: 5546160 - DNA, 25 bp, Homo sapien
caaacacagtgctaatttatgacgt

SEQ ID NO: 5546161 - DNA, 25 bp, Homo sapien
taatgggcagtaattctgcaggatc

SEQ ID NO: 5546162 - DNA, 25 bp, Homo sapien
aaaaggccagcttctgttgtgtacc

SEQ ID NO: 5546163 - DNA, 25 bp, Homo sapien
ctcagccatgttagggaagaaattg

SEQ ID NO: 5546164 - DNA, 25 bp, Homo sapien
agtcaacagaaagttgaggtggaac

SEQ ID NO: 5546165 - DNA, 25 bp, Homo sapien
gctcgtgggtagcagtacctcataa

SEQ ID NO: 5546166 - DNA, 25 bp, Homo sapien
gggaaactgacaaggtgagttaaca

SEQ ID NO: 5546167 - DNA, 25 bp, Homo sapien
gaatccaagaagatagtgggaaact

SEQ ID NO: 5546168 - DNA, 25 bp, Homo sapien
ggtggaacagtacatcctggggtta

SEQ ID NO: 5546169 - DNA, 25 bp, Homo sapien
tgaaggcagaggctttgcctcccag

SEQ ID NO: 5546170 - DNA, 25 bp, Homo sapien
gatcagtagctgtgttaggtaacaa

SEQ ID NO: 5546171 - DNA, 25 bp, Homo sapien
agtcactctggatgtggtgaaggca

SEQ ID NO: 5546172 - DNA, 25 bp, Homo sapien
tttgagtttgtgcactgaaaagggg

SEQ ID NO: 5546173 - DNA, 25 bp, Homo sapien
atcttgagggatagttctcagccat

SEQ ID NO: 5546174 - DNA, 25 bp, Homo sapien
tctcgtaaagccgtgcgttctgtgg

SEQ ID NO: 5546175 - DNA, 25 bp, Homo sapien
gcaggtgctgtgctgtacttggatt

SEQ ID NO: 5546176 - DNA, 25 bp, Homo sapien
gtgggcgctgtgttcctctctcgta

SEQ ID NO: 5546177 - DNA, 25 bp, Homo sapien
gggtccggcctccgatccctgtgtg

SEQ ID NO: 5546178 - DNA, 25 bp, Homo sapien
accctccggctagaaggagggagta

SEQ ID NO: 5546179 - DNA, 25 bp, Homo sapien
acctggggaatgtgtttaaaatgca

SEQ ID NO: 5546180 - DNA, 25 bp, Homo sapien
tcacagggttagattatcaggctat

SEQ ID NO: 5546181 - DNA, 25 bp, Homo sapien
tctgtgggccgccattcagaaactg

SEQ ID NO: 5546182 - DNA, 25 bp, Homo sapien
ttcagaaactggatggacagcttcg

SEQ ID NO: 5546183 - DNA, 25 bp, Homo sapien
tgttctaaaacttgggaatggcctc

SEQ ID NO: 5546184 - DNA, 25 bp, Homo sapien
ggtctgcgaaaattggctgtgctct

SEQ ID NO: 5546185 - DNA, 25 bp, Homo sapien
atttggggtaaagtagcctgtagaa

SEQ ID NO: 5546186 - DNA, 25 bp, Homo sapien
actcgggtcctcaaaccacaaagac

SEQ ID NO: 5546187 - DNA, 25 bp, Homo sapien
tttctgacaaaattgggcccctata

SEQ ID NO: 5546188 - DNA, 25 bp, Homo sapien
aattccgtagaaactcgggtcctca

SEQ ID NO: 5546189 - DNA, 25 bp, Homo sapien
agctccaggggctcatatgagtact

SEQ ID NO: 5546190 - DNA, 25 bp, Homo sapien
aggctgtggaacaaaatttggggta

SEQ ID NO: 5546191 - DNA, 25 bp, Homo sapien
caggagagatgtaaggtcctttatt

SEQ ID NO: 5546192 - DNA, 25 bp, Homo sapien
agatccagaataaagtcaagaggtt

SEQ ID NO: 5546193 - DNA, 25 bp, Homo sapien
aaagacatgtctaacgaacagaatg

SEQ ID NO: 5546194 - DNA, 25 bp, Homo sapien
tgtagaatgcagatcacgtaaaata

SEQ ID NO: 5546195 - DNA, 25 bp, Homo sapien
gagtcttggcctgacaaaaggtgtg

SEQ ID NO: 5546196 - DNA, 25 bp, Homo sapien
gagagctcatccaaaaaaagacaga

SEQ ID NO: 5546197 - DNA, 25 bp, Homo sapien
agaagaaatctggtaggtattcatc

SEQ ID NO: 5546198 - DNA, 25 bp, Homo sapien
gaatcagagtatattgaggaggtgc

SEQ ID NO: 5546199 - DNA, 25 bp, Homo sapien
tatcatctgagtccttgtcagaatc

SEQ ID NO: 5546200 - DNA, 25 bp, Homo sapien
tctgattctgaagatgaggataaga

SEQ ID NO: 5546201 - DNA, 25 bp, Homo sapien
actgaatcagacagtaaggatagtt

SEQ ID NO: 5546202 - DNA, 25 bp, Homo sapien
agtggaagtgagagctcatccaaaa

SEQ ID NO: 5546203 - DNA, 25 bp, Homo sapien
cacattacaacaggctccaaggctt

SEQ ID NO: 5546204 - DNA, 25 bp, Homo sapien
tgtcagaatcagagtatattgagga

SEQ ID NO: 5546205 - DNA, 25 bp, Homo sapien
ttctgaagatgaggataagaaacaa

SEQ ID NO: 5546206 - DNA, 25 bp, Homo sapien
cagacagtaaggatagtttaaaaaa

SEQ ID NO: 5546207 - DNA, 25 bp, Homo sapien
atctgaggaggtggacaccattttt

SEQ ID NO: 5546208 - DNA, 25 bp, Homo sapien
gaaggagaaagtagcagtctaatta

SEQ ID NO: 5546209 - DNA, 25 bp, Homo sapien
agaatgatcacggaaggactttaga

SEQ ID NO: 5546210 - DNA, 25 bp, Homo sapien
aaggtagatgttaagaaggcttcct

SEQ ID NO: 5546211 - DNA, 25 bp, Homo sapien
gaatatcagattactccagaaggag

SEQ ID NO: 5546212 - DNA, 25 bp, Homo sapien
tagagatcacctattgagtccctgt

SEQ ID NO: 5546213 - DNA, 25 bp, Homo sapien
cacggaaggactttagagatcacct

SEQ ID NO: 5546214 - DNA, 25 bp, Homo sapien
atttggttgcatggtagtcttagta

SEQ ID NO: 5546215 - DNA, 25 bp, Homo sapien
tttggtactgaacgacgtgatgacc

SEQ ID NO: 5546216 - DNA, 25 bp, Homo sapien
cacaccacggctgtggtagacctgg

SEQ ID NO: 5546217 - DNA, 25 bp, Homo sapien
tatgaatagcactccacaccacggc

SEQ ID NO: 5546218 - DNA, 25 bp, Homo sapien
caaaaggtagtgtccagacaggaca

SEQ ID NO: 5546219 - DNA, 25 bp, Homo sapien
agaccatagttcaaccagcacgtgc

SEQ ID NO: 5546220 - DNA, 25 bp, Homo sapien
tagcaccaaaataagacagaccata

SEQ ID NO: 5546221 - DNA, 25 bp, Homo sapien
tgggagaaatgaacattctaagccc

SEQ ID NO: 5546222 - DNA, 25 bp, Homo sapien
tggcacaggcttttagcaccaaaat

SEQ ID NO: 5546223 - DNA, 25 bp, Homo sapien
gcacgtgcaataccttgtaatgggt

SEQ ID NO: 5546224 - DNA, 25 bp, Homo sapien
cagcatggtgaatatcacctgggaa

SEQ ID NO: 5546225 - DNA, 25 bp, Homo sapien
tgatgcatgtaaggtttaaaactcc

SEQ ID NO: 5546226 - DNA, 25 bp, Homo sapien
gcgatctcagcccagtgcaagttcc

SEQ ID NO: 5546227 - DNA, 25 bp, Homo sapien
tgctgcagcgttggtatttggcaca

SEQ ID NO: 5546228 - DNA, 25 bp, Homo sapien
tcctttcttaatggactagggccca

SEQ ID NO: 5546229 - DNA, 25 bp, Homo sapien
tgatctctgaggagatggatcggta

SEQ ID NO: 5546230 - DNA, 25 bp, Homo sapien
tccagaagatagtactttccctgcc

SEQ ID NO: 5546231 - DNA, 25 bp, Homo sapien
agacagtaatagcagggaatcatta

SEQ ID NO: 5546232 - DNA, 25 bp, Homo sapien
tgggtgctgttgagtgttttgaaga

SEQ ID NO: 5546233 - DNA, 25 bp, Homo sapien
acgaatatcgaagaatgtttgggtg

SEQ ID NO: 5546234 - DNA, 25 bp, Homo sapien
gcagtgcaggcaatatatggatttt

SEQ ID NO: 5546235 - DNA, 25 bp, Homo sapien
gtgggaggtatacctggttccaaga

SEQ ID NO: 5546236 - DNA, 25 bp, Homo sapien
actgagaatcagccggacttcacag

SEQ ID NO: 5546237 - DNA, 25 bp, Homo sapien
cctcttgaaaagaagcattagtgct

SEQ ID NO: 5546238 - DNA, 25 bp, Homo sapien
ggatcggtacctgctgctggtgatc

SEQ ID NO: 5546239 - DNA, 25 bp, Homo sapien
tgtagttctgattggcaagagatac

SEQ ID NO: 5546240 - DNA, 25 bp, Homo sapien
acatggggcttagagtctagtgatt

SEQ ID NO: 5546241 - DNA, 25 bp, Homo sapien
agggagtggctattgtcaaaaacac

SEQ ID NO: 5546242 - DNA, 25 bp, Homo sapien
tgtgggtggtaacaatgtgttatgc

SEQ ID NO: 5546243 - DNA, 25 bp, Homo sapien
tgttgaactgagagataaagaagat

SEQ ID NO: 5546244 - DNA, 25 bp, Homo sapien
ggaagagaagactaagtcacctcca

SEQ ID NO: 5546245 - DNA, 25 bp, Homo sapien
actcaacaaaatggtgtgggtggta

SEQ ID NO: 5546246 - DNA, 25 bp, Homo sapien
agtgattccaagactgctgagctac

SEQ ID NO: 5546247 - DNA, 25 bp, Homo sapien
aggcagtctctgactacatggggct

SEQ ID NO: 5546248 - DNA, 25 bp, Homo sapien
tccagatcccttgcacctaggaacc

SEQ ID NO: 5546249 - DNA, 25 bp, Homo sapien
tcctggaaagtcatttaggaaagag

SEQ ID NO: 5546250 - DNA, 25 bp, Homo sapien
gctgagctacaaagttctatgttac

SEQ ID NO: 5546251 - DNA, 25 bp, Homo sapien
ggagtccaagcacagattagctggc

SEQ ID NO: 5546252 - DNA, 25 bp, Homo sapien
ttgctgactactggctagaggccac

SEQ ID NO: 5546253 - DNA, 25 bp, Homo sapien
aggtgttagccagagctaaggtctc

SEQ ID NO: 5546254 - DNA, 25 bp, Homo sapien
gggctccactgaaccaggattcact

SEQ ID NO: 5546255 - DNA, 25 bp, Homo sapien
tggctagaggccacccttagtttct

SEQ ID NO: 5546256 - DNA, 25 bp, Homo sapien
tgaggccctctccaaaggctggttt

SEQ ID NO: 5546257 - DNA, 25 bp, Homo sapien
tctcaaaagactgcaatcaaggtgt

SEQ ID NO: 5546258 - DNA, 25 bp, Homo sapien
aaggtctcagctagggctccactga

SEQ ID NO: 5546259 - DNA, 25 bp, Homo sapien
taaatagaagctcctgctggtattc

SEQ ID NO: 5546260 - DNA, 25 bp, Homo sapien
tggcacactactagaacaaggatct

SEQ ID NO: 5546261 - DNA, 25 bp, Homo sapien
atctggtgtgttaagaacaagacac

SEQ ID NO: 5546262 - DNA, 25 bp, Homo sapien
ctccaggaagtgataactgaattgt

SEQ ID NO: 5546263 - DNA, 25 bp, Homo sapien
ggaaagtgtccctccaggaagtgat

SEQ ID NO: 5546264 - DNA, 25 bp, Homo sapien
caggataagtggtgtccctgcagaa

SEQ ID NO: 5546265 - DNA, 25 bp, Homo sapien
tggtgtccctgcagaacatggagaa

SEQ ID NO: 5546266 - DNA, 25 bp, Homo sapien
gtgtccctgcagaacatggagaagg

SEQ ID NO: 5546267 - DNA, 25 bp, Homo sapien
gataactgaattgtccaaaggggtg

SEQ ID NO: 5546268 - DNA, 25 bp, Homo sapien
agtgataactgaattgtccaaaggg

SEQ ID NO: 5546269 - DNA, 25 bp, Homo sapien
agcaggataagtggtgtccctgcag

SEQ ID NO: 5546270 - DNA, 25 bp, Homo sapien
gaagcaggataagtggtgtccctgc

SEQ ID NO: 5546271 - DNA, 25 bp, Homo sapien
taactgaattgtccaaaggggtgaa

SEQ ID NO: 5546272 - DNA, 25 bp, Homo sapien
ccaggaagtgataactgaattgtcc

SEQ ID NO: 5546273 - DNA, 25 bp, Homo sapien
taccttcagaggtccaagcagtgta

SEQ ID NO: 5546274 - DNA, 25 bp, Homo sapien
ggaacagcatctgcttgctgaagct

SEQ ID NO: 5546275 - DNA, 25 bp, Homo sapien
tcttcattcgtcgccgctggctcgc

SEQ ID NO: 5546276 - DNA, 25 bp, Homo sapien
agcatctgcttgctgaagctgaaaa

SEQ ID NO: 5546277 - DNA, 25 bp, Homo sapien
aaaaagttcttcattcgtcgccgct

SEQ ID NO: 5546278 - DNA, 25 bp, Homo sapien
aataccttcagaggtccaagcagtg

SEQ ID NO: 5546279 - DNA, 25 bp, Homo sapien
atcctgcagtaagtgaaaaagttct

SEQ ID NO: 5546280 - DNA, 25 bp, Homo sapien
aggtccaagcagtgtactaggcact

SEQ ID NO: 5546281 - DNA, 25 bp, Homo sapien
gtactaggcacttgtatagagagca

SEQ ID NO: 5546282 - DNA, 25 bp, Homo sapien
ctgaagctgaaaatcctgcagtaag

SEQ ID NO: 5546283 - DNA, 25 bp, Homo sapien
gttcttcattcgtcgccgctggctc

SEQ ID NO: 5546284 - DNA, 25 bp, Homo sapien
cctcggtaaaatgggcttgatgctg

SEQ ID NO: 5546285 - DNA, 25 bp, Homo sapien
cattatagagatgcagtagagatca

SEQ ID NO: 5546286 - DNA, 25 bp, Homo sapien
aaattagccaggaacgatgtcatgt

SEQ ID NO: 5546287 - DNA, 25 bp, Homo sapien
ggtctgatgcttaggaggccttcat

SEQ ID NO: 5546288 - DNA, 25 bp, Homo sapien
cacactgctagcagaatgaccgggt

SEQ ID NO: 5546289 - DNA, 25 bp, Homo sapien
cctgtacctggcactgggtctgatg

SEQ ID NO: 5546290 - DNA, 25 bp, Homo sapien
gagccacacagcaagaatccgtctc

SEQ ID NO: 5546291 - DNA, 25 bp, Homo sapien
gggctgatgctgtccacttccaggc

SEQ ID NO: 5546292 - DNA, 25 bp, Homo sapien
cttcattcagtgacttgagagtgct

SEQ ID NO: 5546293 - DNA, 25 bp, Homo sapien
atgaccgggtaaatccctgtgcctc

SEQ ID NO: 5546294 - DNA, 25 bp, Homo sapien
gtagagatcaggtgtgtcctgtacc

SEQ ID NO: 5546295 - DNA, 25 bp, Homo sapien
tcaaaaatatgagttgggagaaaaa

SEQ ID NO: 5546296 - DNA, 25 bp, Homo sapien
gacacagcaccaacactgagaagtc

SEQ ID NO: 5546297 - DNA, 25 bp, Homo sapien
tggagcaaaacagcccgttcacttc

SEQ ID NO: 5546298 - DNA, 25 bp, Homo sapien
tttctgaagaactggatgggttttc

SEQ ID NO: 5546299 - DNA, 25 bp, Homo sapien
aagacctgaggacatctaatccatc

SEQ ID NO: 5546300 - DNA, 25 bp, Homo sapien
aggctctaacagacacagcaccaac

SEQ ID NO: 5546301 - DNA, 25 bp, Homo sapien
aagaaaggaataactaaacagtata

SEQ ID NO: 5546302 - DNA, 25 bp, Homo sapien
atgtggttgtacaagaaaagtggct

SEQ ID NO: 5546303 - DNA, 25 bp, Homo sapien
tacccacaccaaggaagtgcttaac

SEQ ID NO: 5546304 - DNA, 25 bp, Homo sapien
ttagatggatagtttaggtgggtaa

SEQ ID NO: 5546305 - DNA, 25 bp, Homo sapien
gagtgagggaatcctggattagatg

SEQ ID NO: 5546306 - DNA, 25 bp, Homo sapien
atcaaagtggctgaaacaacttgct

SEQ ID NO: 5546307 - DNA, 25 bp, Homo sapien
aattagccacggagtgaaaatgaga

SEQ ID NO: 5546308 - DNA, 25 bp, Homo sapien
tgggaagcctttcaccgaggaagga

SEQ ID NO: 5546309 - DNA, 25 bp, Homo sapien
aggggactgcacagcttgttgtgaa

SEQ ID NO: 5546310 - DNA, 25 bp, Homo sapien
aagccaaaaaagcagcactcccctg

SEQ ID NO: 5546311 - DNA, 25 bp, Homo sapien
ggagtgaaaatgagacaaacagtca

SEQ ID NO: 5546312 - DNA, 25 bp, Homo sapien
cataaagctaacctgcagagtgcac

SEQ ID NO: 5546313 - DNA, 25 bp, Homo sapien
atcctgggactcctcaaagctcacc

SEQ ID NO: 5546314 - DNA, 25 bp, Homo sapien
tgttgtgaaccaagacaaagaactt

SEQ ID NO: 5546315 - DNA, 25 bp, Homo sapien
tgggccttgttgggttgtgtttcca

SEQ ID NO: 5546316 - DNA, 25 bp, Homo sapien
gcgtgatccagtaaagtgctcaggc

SEQ ID NO: 5546317 - DNA, 25 bp, Homo sapien
agtctgctggcatgctcaaacgagc

SEQ ID NO: 5546318 - DNA, 25 bp, Homo sapien
ttacatccttggcgtgaaccgagca

SEQ ID NO: 5546319 - DNA, 25 bp, Homo sapien
tctattcatagaagggagcgtaaat

SEQ ID NO: 5546320 - DNA, 25 bp, Homo sapien
tttacctccatggaggaaggggatg

SEQ ID NO: 5546321 - DNA, 25 bp, Homo sapien
gctcaaacgagcagggttttattcc

SEQ ID NO: 5546322 - DNA, 25 bp, Homo sapien
agaagggagcgtaaatttgtacctc

SEQ ID NO: 5546323 - DNA, 25 bp, Homo sapien
gcgcgtcagccatgttggacgtcca

SEQ ID NO: 5546324 - DNA, 25 bp, Homo sapien
tcaaatgatcaccttgtcagacagc

SEQ ID NO: 5546325 - DNA, 25 bp, Homo sapien
ctgaacacttcaaactgagactctt

SEQ ID NO: 5546326 - DNA, 25 bp, Homo sapien
cagatagctgattaaaaaatgatgc

SEQ ID NO: 5546327 - DNA, 25 bp, Homo sapien
tgaagaggtgtgccactcatttcta

SEQ ID NO: 5546328 - DNA, 25 bp, Homo sapien
attaaccacaggatgattagaagaa

SEQ ID NO: 5546329 - DNA, 25 bp, Homo sapien
gcaggaaaatcttctccaagggtcc

SEQ ID NO: 5546330 - DNA, 25 bp, Homo sapien
tatgtgcttgaaacaacagggacaa

SEQ ID NO: 5546331 - DNA, 25 bp, Homo sapien
agagggactacaaatcagacaatga

SEQ ID NO: 5546332 - DNA, 25 bp, Homo sapien
caagggtcctggataggactgtgaa

SEQ ID NO: 5546333 - DNA, 25 bp, Homo sapien
cccaaatacaaggcagtaagttttc

SEQ ID NO: 5546334 - DNA, 25 bp, Homo sapien
atgatcctggggtcccaacccacat

SEQ ID NO: 5546335 - DNA, 25 bp, Homo sapien
gacaagagagttggaaaccatgatc

SEQ ID NO: 5546336 - DNA, 25 bp, Homo sapien
gattagaagaatctcccagtacact

SEQ ID NO: 5546337 - DNA, 25 bp, Homo sapien
tccttcagggcatatacgatgatga

SEQ ID NO: 5546338 - DNA, 25 bp, Homo sapien
acgatgatgatctcagcagtactga

SEQ ID NO: 5546339 - DNA, 25 bp, Homo sapien
tttaagaggagaagatgttgatctt

SEQ ID NO: 5546340 - DNA, 25 bp, Homo sapien
cagttaaaccaaaatggcgcaacgt

SEQ ID NO: 5546341 - DNA, 25 bp, Homo sapien
ggcgcaacgttactcaggaaaagtc

SEQ ID NO: 5546342 - DNA, 25 bp, Homo sapien
tgctggactgtcccaagtgtcatgc

SEQ ID NO: 5546343 - DNA, 25 bp, Homo sapien
agaaatggaagagacaatgctatct

SEQ ID NO: 5546344 - DNA, 25 bp, Homo sapien
agaagacatcagacagagttgtttc

SEQ ID NO: 5546345 - DNA, 25 bp, Homo sapien
tattaaggccatcccagaagacatc

SEQ ID NO: 5546346 - DNA, 25 bp, Homo sapien
ttgggttgaatgctggactgtccca

SEQ ID NO: 5546347 - DNA, 25 bp, Homo sapien
tattcctgctgagtgtcaaagtggc

SEQ ID NO: 5546348 - DNA, 25 bp, Homo sapien
aagcagatgaacagctgaaacaatc

SEQ ID NO: 5546349 - DNA, 25 bp, Homo sapien
tcaaagtggccagaaaacagttaaa

SEQ ID NO: 5546350 - DNA, 25 bp, Homo sapien
gcgcgcgcctacctcggtgagagcg

SEQ ID NO: 5546351 - DNA, 25 bp, Homo sapien
cgctctcaccgaggtaggcgcgcgc

SEQ ID NO: 5546352 - DNA, 25 bp, Homo sapien
gggcgacgccgaagggcgccgcggg

SEQ ID NO: 5546353 - DNA, 25 bp, Homo sapien
cccgcggcgcccttcggcgtcgccc

SEQ ID NO: 5546354 - DNA, 25 bp, Homo sapien
gtcctgaagcaaggagagagacaat

SEQ ID NO: 5546355 - DNA, 25 bp, Homo sapien
attgtctctctccttgcttcaggac

SEQ ID NO: 5546356 - DNA, 25 bp, Homo sapien
caacattccccagataaatgggatt

SEQ ID NO: 5546357 - DNA, 25 bp, Homo sapien
tgggattttagattagatgagtgat

SEQ ID NO: 5546358 - DNA, 25 bp, Homo sapien
accactcctggctaagaataccctt

SEQ ID NO: 5546359 - DNA, 25 bp, Homo sapien
cagtaatagtacagtgctactccat

SEQ ID NO: 5546360 - DNA, 25 bp, Homo sapien
cttatagaaagagtaacagtaatag

SEQ ID NO: 5546361 - DNA, 25 bp, Homo sapien
acagcaagtgaaacttaagtaacag

SEQ ID NO: 5546362 - DNA, 25 bp, Homo sapien
caataggatatgtaactgtaggttt

SEQ ID NO: 5546363 - DNA, 25 bp, Homo sapien
caatcacctgtataatcactggcac

SEQ ID NO: 5546364 - DNA, 25 bp, Homo sapien
tcactggcacatggctctaagacta

SEQ ID NO: 5546365 - DNA, 25 bp, Homo sapien
tctccactttagaaaagccagaata

SEQ ID NO: 5546366 - DNA, 25 bp, Homo sapien
actaacactgtaaacagcaagtgaa

SEQ ID NO: 5546367 - DNA, 25 bp, Homo sapien
acttagactcagccttggaagagaa

SEQ ID NO: 5546368 - DNA, 25 bp, Homo sapien
tttggcgtctgcggttaaatctatc

SEQ ID NO: 5546369 - DNA, 25 bp, Homo sapien
ggcagcagaaattattagaggcgct

SEQ ID NO: 5546370 - DNA, 25 bp, Homo sapien
aaactgcaggcaaaatgttagtgtt

SEQ ID NO: 5546371 - DNA, 25 bp, Homo sapien
ggtctgatggaattgcacctggcca

SEQ ID NO: 5546372 - DNA, 25 bp, Homo sapien
caacccacacaacgaaagcgggaaa

SEQ ID NO: 5546373 - DNA, 25 bp, Homo sapien
ccagaaccagcaacacccaccttgc

SEQ ID NO: 5546374 - DNA, 25 bp, Homo sapien
ctggccctaaacccctggcagaatc

SEQ ID NO: 5546375 - DNA, 25 bp, Homo sapien
tagtgtttatgcagaggtgagttct

SEQ ID NO: 5546376 - DNA, 25 bp, Homo sapien
gaggcgcttggacatatttggacgc

SEQ ID NO: 5546377 - DNA, 25 bp, Homo sapien
gtggacataagctttaggcagcaga

SEQ ID NO: 5546378 - DNA, 25 bp, Homo sapien
ttccataatgaagccctgttgtgtg

SEQ ID NO: 5546379 - DNA, 25 bp, Homo sapien
tagaatataaggcccctctggaacc

SEQ ID NO: 5546380 - DNA, 25 bp, Homo sapien
tacactgcaaagtcaaacaagatgt

SEQ ID NO: 5546381 - DNA, 25 bp, Homo sapien
aaactgctgcataaaatgaggttat

SEQ ID NO: 5546382 - DNA, 25 bp, Homo sapien
tgcacatgcatctctttggttggta

SEQ ID NO: 5546383 - DNA, 25 bp, Homo sapien
tcaatgtacacaaagagaagtttac

SEQ ID NO: 5546384 - DNA, 25 bp, Homo sapien
actgaagcaccttggaatttcaaaa

SEQ ID NO: 5546385 - DNA, 25 bp, Homo sapien
taaggaaggcttctattgcacatgc

SEQ ID NO: 5546386 - DNA, 25 bp, Homo sapien
caaaaagaatccattaggtgtcacc

SEQ ID NO: 5546387 - DNA, 25 bp, Homo sapien
gtctgcctccacaagatgggtattc

SEQ ID NO: 5546388 - DNA, 25 bp, Homo sapien
gcccctctggaaccactgcacacct

SEQ ID NO: 5546389 - DNA, 25 bp, Homo sapien
cattgctgggtcagccacgttccca

SEQ ID NO: 5546390 - DNA, 25 bp, Homo sapien
gggatgaaaaggaacactgtattct

SEQ ID NO: 5546391 - DNA, 25 bp, Homo sapien
agaccgcatctttcagcgacgcctc

SEQ ID NO: 5546392 - DNA, 25 bp, Homo sapien
taaaacccacatttggccgggcgca

SEQ ID NO: 5546393 - DNA, 25 bp, Homo sapien
gcccctcgggctcacatagtaattc

SEQ ID NO: 5546394 - DNA, 25 bp, Homo sapien
ttccatgtgagttgagtcctggggt

SEQ ID NO: 5546395 - DNA, 25 bp, Homo sapien
ctggggtgctcctcagctcccccac

SEQ ID NO: 5546396 - DNA, 25 bp, Homo sapien
aggcccctaacagagcccctcgggc

SEQ ID NO: 5546397 - DNA, 25 bp, Homo sapien
cccccacccatgtggaaacaggcac

SEQ ID NO: 5546398 - DNA, 25 bp, Homo sapien
aggcctgaagttgtctgagccccag

SEQ ID NO: 5546399 - DNA, 25 bp, Homo sapien
cttaggttcagtcaaatatgggatg

SEQ ID NO: 5546400 - DNA, 25 bp, Homo sapien
gtggcccgttcattggccgaggttc

SEQ ID NO: 5546401 - DNA, 25 bp, Homo sapien
accagccctcaggggtctgtcaagg

SEQ ID NO: 5546402 - DNA, 25 bp, Homo sapien
aataaaaatgaagtcaccagccctc

SEQ ID NO: 5546403 - DNA, 25 bp, Homo sapien
gctgcacccacgatgtggctgtaac

SEQ ID NO: 5546404 - DNA, 25 bp, Homo sapien
ggaatcgcctacaccctgctgcacc

SEQ ID NO: 5546405 - DNA, 25 bp, Homo sapien
ctaccctcagctcaggggtctgtgc

SEQ ID NO: 5546406 - DNA, 25 bp, Homo sapien
agtaccccaactagcaagagtggcc

SEQ ID NO: 5546407 - DNA, 25 bp, Homo sapien
tcaaggcaacacacaaaatctccag

SEQ ID NO: 5546408 - DNA, 25 bp, Homo sapien
tccaacctcacagagaggacaggaa

SEQ ID NO: 5546409 - DNA, 25 bp, Homo sapien
ggagcgtccctcgtgctgccttcat

SEQ ID NO: 5546410 - DNA, 25 bp, Homo sapien
gtctggagccaagcgtatctctctg

SEQ ID NO: 5546411 - DNA, 25 bp, Homo sapien
caattcatctaaagccgaagtgttt

SEQ ID NO: 5546412 - DNA, 25 bp, Homo sapien
ttgctgggatttggaagtatttcta

SEQ ID NO: 5546413 - DNA, 25 bp, Homo sapien
tccaccaaagttatcttgctgggat

SEQ ID NO: 5546414 - DNA, 25 bp, Homo sapien
agtgcgatagtcctgctagatcaat

SEQ ID NO: 5546415 - DNA, 25 bp, Homo sapien
gtaagatttaatagtgcgatagtcc

SEQ ID NO: 5546416 - DNA, 25 bp, Homo sapien
gtagatgatctgtggttgcttcgtc

SEQ ID NO: 5546417 - DNA, 25 bp, Homo sapien
gagataggagatacgccctcatgtt

SEQ ID NO: 5546418 - DNA, 25 bp, Homo sapien
tttgttctgcatggaaagacagcta

SEQ ID NO: 5546419 - DNA, 25 bp, Homo sapien
caggttactgagtaattgggattac

SEQ ID NO: 5546420 - DNA, 25 bp, Homo sapien
gacagctagaagtcatatcaattca

SEQ ID NO: 5546421 - DNA, 25 bp, Homo sapien
ctttgggtaatgtagatgatctgtg

SEQ ID NO: 5546422 - DNA, 25 bp, Homo sapien
tccaagagaccaggaaagaatatta

SEQ ID NO: 5546423 - DNA, 25 bp, Homo sapien
aatacataagctatcgattggctat

SEQ ID NO: 5546424 - DNA, 25 bp, Homo sapien
atacactccaactaccagccattac

SEQ ID NO: 5546425 - DNA, 25 bp, Homo sapien
tttggaatccctatgacactaaatc

SEQ ID NO: 5546426 - DNA, 25 bp, Homo sapien
taaatcatcagataggcaaggttga

SEQ ID NO: 5546427 - DNA, 25 bp, Homo sapien
ttctatttgcaaggtggaaaaatat

SEQ ID NO: 5546428 - DNA, 25 bp, Homo sapien
attagcatatcaaggtacacgttac

SEQ ID NO: 5546429 - DNA, 25 bp, Homo sapien
catgaaaccccatgaccatgctgtt

SEQ ID NO: 5546430 - DNA, 25 bp, Homo sapien
gagggctgcaagcttcatgaaaccc

SEQ ID NO: 5546431 - DNA, 25 bp, Homo sapien
tctgctggtgaagtcgcagaatgga

SEQ ID NO: 5546432 - DNA, 25 bp, Homo sapien
gatgagaagaccaaatcaagaaaca

SEQ ID NO: 5546433 - DNA, 25 bp, Homo sapien
gagacacatcagtaggactatcaaa

SEQ ID NO: 5546434 - DNA, 25 bp, Homo sapien
tttgatagtcctactgatgtgtctc

SEQ ID NO: 5546435 - DNA, 25 bp, Homo sapien
agcttcagcaagcagatgctgttcc

SEQ ID NO: 5546436 - DNA, 25 bp, Homo sapien
cttcctggaaaacacttgttcaccc

SEQ ID NO: 5546437 - DNA, 25 bp, Homo sapien
cggcgacgaatgaagaactttttca

SEQ ID NO: 5546438 - DNA, 25 bp, Homo sapien
tacactgcttggacctctgaaggta

SEQ ID NO: 5546439 - DNA, 25 bp, Homo sapien
gtgcctagtacactgcttggacctc

SEQ ID NO: 5546440 - DNA, 25 bp, Homo sapien
atcacttcctggagggacactttcc

SEQ ID NO: 5546441 - DNA, 25 bp, Homo sapien
tgctctctatacaagtgcctagtac

SEQ ID NO: 5546442 - DNA, 25 bp, Homo sapien
tctccatgttctgcagggacaccac

SEQ ID NO: 5546443 - DNA, 25 bp, Homo sapien
tactgcaggattttcagcttcagca

SEQ ID NO: 5546444 - DNA, 25 bp, Homo sapien
gggacaccacttatcctgcttccac

SEQ ID NO: 5546445 - DNA, 25 bp, Homo sapien
tgccagggactccctccccatatct

SEQ ID NO: 5546446 - DNA, 25 bp, Homo sapien
tctttaactacacacacacacccct

SEQ ID NO: 5546447 - DNA, 25 bp, Homo sapien
acacacccctgcccaagggtacagt

SEQ ID NO: 5546448 - DNA, 25 bp, Homo sapien
ttgtattttcagtagggaagggtga

SEQ ID NO: 5546449 - DNA, 25 bp, Homo sapien
atgaaacacatagactagaaatatc

SEQ ID NO: 5546450 - DNA, 25 bp, Homo sapien
tgcccaagggtacagttctactttc

SEQ ID NO: 5546451 - DNA, 25 bp, Homo sapien
caaagttaagggattacaggcctga

SEQ ID NO: 5546452 - DNA, 25 bp, Homo sapien
ctgcgcctggctaacttttgtattt

SEQ ID NO: 5546453 - DNA, 25 bp, Homo sapien
acagctgacccttgaacacaggttt

SEQ ID NO: 5546454 - DNA, 25 bp, Homo sapien
aaacctgcagatgaaacacatagac

SEQ ID NO: 5546455 - DNA, 25 bp, Homo sapien
aagctaataagggccagttttattc

SEQ ID NO: 5546456 - DNA, 25 bp, Homo sapien
agtgatccactccccttggtctccc

SEQ ID NO: 5546457 - DNA, 25 bp, Homo sapien
ccactaagcgtgacaccgttgttcc

SEQ ID NO: 5546458 - DNA, 25 bp, Homo sapien
ttaaagaatagagagataagtagtg

SEQ ID NO: 5546459 - DNA, 25 bp, Homo sapien
cctgcactcttgggacaccaggagc

SEQ ID NO: 5546460 - DNA, 25 bp, Homo sapien
tgcgggtcagccattcgctggcttt

SEQ ID NO: 5546461 - DNA, 25 bp, Homo sapien
ttggttgaatcgtgggtgtcccact

SEQ ID NO: 5546462 - DNA, 25 bp, Homo sapien
tgaggcagagaagtgccagtttatt

SEQ ID NO: 5546463 - DNA, 25 bp, Homo sapien
accaggagcagcagttcctgtgttc

SEQ ID NO: 5546464 - DNA, 25 bp, Homo sapien
gttcctgggacacctcatgcacttc

SEQ ID NO: 5546465 - DNA, 25 bp, Homo sapien
ctgaaactgcgaatgattttggctc

SEQ ID NO: 5546466 - DNA, 25 bp, Homo sapien
tccaaggtggcgccatccacacata

SEQ ID NO: 5546467 - DNA, 25 bp, Homo sapien
atggccacataagaaatagcctccc

SEQ ID NO: 5546468 - DNA, 25 bp, Homo sapien
gtactccggatacccacgggagacc

SEQ ID NO: 5546469 - DNA, 25 bp, Homo sapien
ggtctcccgtgggtatccggagtac

SEQ ID NO: 5546470 - DNA, 25 bp, Homo sapien
cagcgcttctacaagaacgagggag

SEQ ID NO: 5546471 - DNA, 25 bp, Homo sapien
aggcctgatcaccgacatcctgctc

SEQ ID NO: 5546472 - DNA, 25 bp, Homo sapien
gcttcctgcacaacccagacgctgc

SEQ ID NO: 5546473 - DNA, 25 bp, Homo sapien
ctgatcaccgacatcctgctctccc

SEQ ID NO: 5546474 - DNA, 25 bp, Homo sapien
cagctccaccatccagcgcttctac

SEQ ID NO: 5546475 - DNA, 25 bp, Homo sapien
aaatgccaggcctgatcaccgacat

SEQ ID NO: 5546476 - DNA, 25 bp, Homo sapien
ctgcccaaggctttgtgggctgcgc

SEQ ID NO: 5546477 - DNA, 25 bp, Homo sapien
ggctggctgctgcccgaaatgccag

SEQ ID NO: 5546478 - DNA, 25 bp, Homo sapien
tcctccaacgcttcctgcacaaccc

SEQ ID NO: 5546479 - DNA, 25 bp, Homo sapien
aacgcttcctgcacaacccagacgc

SEQ ID NO: 5546480 - DNA, 25 bp, Homo sapien
ctgcccgaaatgccaggcctgatca

SEQ ID NO: 5546481 - DNA, 25 bp, Homo sapien
gtttgtgatcagcataaaatcccgc

SEQ ID NO: 5546482 - DNA, 25 bp, Homo sapien
aaagttcagtaagaaagatccattc

SEQ ID NO: 5546483 - DNA, 25 bp, Homo sapien
cccggttgggatattccttctccac

SEQ ID NO: 5546484 - DNA, 25 bp, Homo sapien
aacagatctgtagaaggatccttag

SEQ ID NO: 5546485 - DNA, 25 bp, Homo sapien
acagggaatgtcctccaacgcttcc

SEQ ID NO: 5546486 - DNA, 25 bp, Homo sapien
caggcaggtattaccccggttggga

SEQ ID NO: 5546487 - DNA, 25 bp, Homo sapien
cgccacacatcgcgacgcagtcaac

SEQ ID NO: 5546488 - DNA, 25 bp, Homo sapien
ggggtcatcagggagaatactgata

SEQ ID NO: 5546489 - DNA, 25 bp, Homo sapien
aaatcccgcttactgcacactgcac

SEQ ID NO: 5546490 - DNA, 25 bp, Homo sapien
cttctccacacagtcgccacacatc

SEQ ID NO: 5546491 - DNA, 25 bp, Homo sapien
aggatccttagaataagagagtcat

SEQ ID NO: 5546492 - DNA, 25 bp, Homo sapien
taagcccagcatttattaggtattc

SEQ ID NO: 5546493 - DNA, 25 bp, Homo sapien
tatgttaacggtacttagttgatac

SEQ ID NO: 5546494 - DNA, 25 bp, Homo sapien
tggacagtgctaaaatagaacattt

SEQ ID NO: 5546495 - DNA, 25 bp, Homo sapien
tgtaagcatcttcgtatctagcagc

SEQ ID NO: 5546496 - DNA, 25 bp, Homo sapien
atggttctagaagcaaagaacagct

SEQ ID NO: 5546497 - DNA, 25 bp, Homo sapien
gctaacttattggacagtgctaaaa

SEQ ID NO: 5546498 - DNA, 25 bp, Homo sapien
agttatattgggacagcatggttct

SEQ ID NO: 5546499 - DNA, 25 bp, Homo sapien
atgcaaaaagttatattgggacagc

SEQ ID NO: 5546500 - DNA, 25 bp, Homo sapien
ttttggacctcatgcccaatacttt

SEQ ID NO: 5546501 - DNA, 25 bp, Homo sapien
ttcccccatgtgcccatgtgttttc

SEQ ID NO: 5546502 - DNA, 25 bp, Homo sapien
tttgctacataggcaaatgtgtgcc

SEQ ID NO: 5546503 - DNA, 25 bp, Homo sapien
gagcatgtagtacttgcaaatgatc

SEQ ID NO: 5546504 - DNA, 25 bp, Homo sapien
tccttgggcagcagaattactggga

SEQ ID NO: 5546505 - DNA, 25 bp, Homo sapien
tgatttccttgggcagcagaattac

SEQ ID NO: 5546506 - DNA, 25 bp, Homo sapien
actaacatatgaaaatacgtgctaa

SEQ ID NO: 5546507 - DNA, 25 bp, Homo sapien
cagctggaataattacaaggtacac

SEQ ID NO: 5546508 - DNA, 25 bp, Homo sapien
atattattcaagagcatgtagtact

SEQ ID NO: 5546509 - DNA, 25 bp, Homo sapien
ggggcgacaactaatgagtatggca

SEQ ID NO: 5546510 - DNA, 25 bp, Homo sapien
gagacaggggttgtacactaaatat

SEQ ID NO: 5546511 - DNA, 25 bp, Homo sapien
aagtgttccaatatggctgggtgcg

SEQ ID NO: 5546512 - DNA, 25 bp, Homo sapien
tgggaggtgattaaagtgttccaat

SEQ ID NO: 5546513 - DNA, 25 bp, Homo sapien
caaaaaaaactgcccagccctatta

SEQ ID NO: 5546514 - DNA, 25 bp, Homo sapien
tataaatcccagagcacaatgtgcg

SEQ ID NO: 5546515 - DNA, 25 bp, Homo sapien
taaagactttgacagccagatatcc

SEQ ID NO: 5546516 - DNA, 25 bp, Homo sapien
aggtatgaaaaggcaagtcactgta

SEQ ID NO: 5546517 - DNA, 25 bp, Homo sapien
ttacagaacaaggatgactattagt

SEQ ID NO: 5546518 - DNA, 25 bp, Homo sapien
tcttatattgaatggcaaaggttcc

SEQ ID NO: 5546519 - DNA, 25 bp, Homo sapien
cacagcaaaatgttctggaggatgt

SEQ ID NO: 5546520 - DNA, 25 bp, Homo sapien
tccggatcagccagcttcctaaaat

SEQ ID NO: 5546521 - DNA, 25 bp, Homo sapien
ggcaagtcactgtaagtaaagtttc

SEQ ID NO: 5546522 - DNA, 25 bp, Homo sapien
atggcaaaggttccatgcacctggc

SEQ ID NO: 5546523 - DNA, 25 bp, Homo sapien
aacataaacaacactcgaatctctt

SEQ ID NO: 5546524 - DNA, 25 bp, Homo sapien
cagatatccaagatccggatcagcc

SEQ ID NO: 5546525 - DNA, 25 bp, Homo sapien
ctctacagccaagagacagatgatc

SEQ ID NO: 5546526 - DNA, 25 bp, Homo sapien
aagtacgaagtgccaaaacaatgtt

SEQ ID NO: 5546527 - DNA, 25 bp, Homo sapien
ttggcaaggaaaattccaggctagc

SEQ ID NO: 5546528 - DNA, 25 bp, Homo sapien
caaggagccacctctacagccaaga

SEQ ID NO: 5546529 - DNA, 25 bp, Homo sapien
atctaagcacgaatttggacacaat

SEQ ID NO: 5546530 - DNA, 25 bp, Homo sapien
taatgaatgaaagtacgaagtgcca

SEQ ID NO: 5546531 - DNA, 25 bp, Homo sapien
ctagctattatggcctgacaggttc

SEQ ID NO: 5546532 - DNA, 25 bp, Homo sapien
tgcacggcagaaacaatctcctctt

SEQ ID NO: 5546533 - DNA, 25 bp, Homo sapien
ctgagtcagacacacatctaagcac

SEQ ID NO: 5546534 - DNA, 25 bp, Homo sapien
agcaaactattcaaggaggacagac

SEQ ID NO: 5546535 - DNA, 25 bp, Homo sapien
ggcctcacatgaaccccaaggagcc

SEQ ID NO: 5546536 - DNA, 25 bp, Homo sapien
ctggcccatctagccgtatggatgc

SEQ ID NO: 5546537 - DNA, 25 bp, Homo sapien
acagcacattcttcactgggcctgc

SEQ ID NO: 5546538 - DNA, 25 bp, Homo sapien
gcacatccagaaaagtcgctctacc

SEQ ID NO: 5546539 - DNA, 25 bp, Homo sapien
agccgtatggatgccaacagcacat

SEQ ID NO: 5546540 - DNA, 25 bp, Homo sapien
taagtagccggtgttaatctgttgc

SEQ ID NO: 5546541 - DNA, 25 bp, Homo sapien
caactcttggggccataatatggtc

SEQ ID NO: 5546542 - DNA, 25 bp, Homo sapien
gaataatgtccaaagcagcacagta

SEQ ID NO: 5546543 - DNA, 25 bp, Homo sapien
taagaatccacagtactggcccatc

SEQ ID NO: 5546544 - DNA, 25 bp, Homo sapien
cagcacagtaagtagccggtgttaa

SEQ ID NO: 5546545 - DNA, 25 bp, Homo sapien
gaacagtggcaaagagatgctttaa

SEQ ID NO: 5546546 - DNA, 25 bp, Homo sapien
agtcacactggatctgaataatgtc

SEQ ID NO: 5546547 - DNA, 25 bp, Homo sapien
aaaatgagctttcccactccgccac

SEQ ID NO: 5546548 - DNA, 25 bp, Homo sapien
tagtttggcattaccaggatgttcc

SEQ ID NO: 5546549 - DNA, 25 bp, Homo sapien
ttagggattttagtgccagtgataa

SEQ ID NO: 5546550 - DNA, 25 bp, Homo sapien
gagatacaggatgtcagtttgtcat

SEQ ID NO: 5546551 - DNA, 25 bp, Homo sapien
taatgccttagttgtgatggtgtcc

SEQ ID NO: 5546552 - DNA, 25 bp, Homo sapien
actccgccacttatcacttagactc

SEQ ID NO: 5546553 - DNA, 25 bp, Homo sapien
ggctgcaaaatagtgattatgtaac

SEQ ID NO: 5546554 - DNA, 25 bp, Homo sapien
gtatgtgtgacttacaaatgtagct

SEQ ID NO: 5546555 - DNA, 25 bp, Homo sapien
gttgtgatggtgtcctttgggtttc

SEQ ID NO: 5546556 - DNA, 25 bp, Homo sapien
tgtggaaaggctaaatatcctgttc

SEQ ID NO: 5546557 - DNA, 25 bp, Homo sapien
tgtattggcttggagatacaggatg

SEQ ID NO: 5546558 - DNA, 25 bp, Homo sapien
gaagggaattaaaatagtgcaagtg

SEQ ID NO: 5546559 - DNA, 25 bp, Homo sapien
gttgaagacgagaagcttttgtccc

SEQ ID NO: 5546560 - DNA, 25 bp, Homo sapien
ctcttaatgggtgtttcagggctga

SEQ ID NO: 5546561 - DNA, 25 bp, Homo sapien
ctggccactgtccctcacctagtgc

SEQ ID NO: 5546562 - DNA, 25 bp, Homo sapien
taggtcggacttagtttcctgtgtc

SEQ ID NO: 5546563 - DNA, 25 bp, Homo sapien
gagatgggagattggatgcttctcc

SEQ ID NO: 5546564 - DNA, 25 bp, Homo sapien
agaagatagagtgaagtcccatcat

SEQ ID NO: 5546565 - DNA, 25 bp, Homo sapien
gctgagtgcgactcagggttgaaga

SEQ ID NO: 5546566 - DNA, 25 bp, Homo sapien
acctagtgctcaaccttggaaaccc

SEQ ID NO: 5546567 - DNA, 25 bp, Homo sapien
ctacaacaaagttcactgtgcttac

SEQ ID NO: 5546568 - DNA, 25 bp, Homo sapien
caagtgtatcaaagcatgtggcctg

SEQ ID NO: 5546569 - DNA, 25 bp, Homo sapien
aagagtggatgctgtctggtctttg

SEQ ID NO: 5546570 - DNA, 25 bp, Homo sapien
cttgctcgtgtcctagctgggatgg

SEQ ID NO: 5546571 - DNA, 25 bp, Homo sapien
ttgaagtctcactcagaagtcacct

SEQ ID NO: 5546572 - DNA, 25 bp, Homo sapien
ggtttgcactgaggaaatcgattcc

SEQ ID NO: 5546573 - DNA, 25 bp, Homo sapien
ggagcagcaaagaatttatcgccac

SEQ ID NO: 5546574 - DNA, 25 bp, Homo sapien
agtgcaactgagtcctgaggcttgc

SEQ ID NO: 5546575 - DNA, 25 bp, Homo sapien
tgaggcttgcccaggtttgcactga

SEQ ID NO: 5546576 - DNA, 25 bp, Homo sapien
tgctggtctcatgcggacttgctcg

SEQ ID NO: 5546577 - DNA, 25 bp, Homo sapien
gttgcttgaagcacccaggattcat

SEQ ID NO: 5546578 - DNA, 25 bp, Homo sapien
tcttgatacagcagcctcagagcat

SEQ ID NO: 5546579 - DNA, 25 bp, Homo sapien
tggctttcatgcacaaggaggctca

SEQ ID NO: 5546580 - DNA, 25 bp, Homo sapien
ggacgtgcttccaccggcgactccc

SEQ ID NO: 5546581 - DNA, 25 bp, Homo sapien
gggagtcgccggtggaagcacgtcc

SEQ ID NO: 5546582 - DNA, 25 bp, Homo sapien
ggaaggccacagtctcaaaacacca

SEQ ID NO: 5546583 - DNA, 25 bp, Homo sapien
tggtgttttgagactgtggccttcc

SEQ ID NO: 5546584 - DNA, 25 bp, Homo sapien
tgttcttgaaatagcaaaaagagtt

SEQ ID NO: 5546585 - DNA, 25 bp, Homo sapien
aactctttttgctatttcaagaaca

SEQ ID NO: 5546586 - DNA, 25 bp, Homo sapien
cctggacacaagtgatactcttgcc

SEQ ID NO: 5546587 - DNA, 25 bp, Homo sapien
agagttgacaaaatgataagtagaa

SEQ ID NO: 5546588 - DNA, 25 bp, Homo sapien
acgaatgcaaacacacagagttgac

SEQ ID NO: 5546589 - DNA, 25 bp, Homo sapien
gagacaaatttccaagaacgaatgc

SEQ ID NO: 5546590 - DNA, 25 bp, Homo sapien
tgctaatggatgagttcaatgctgc

SEQ ID NO: 5546591 - DNA, 25 bp, Homo sapien
gaaaagcaccagcatatgctaatgg

SEQ ID NO: 5546592 - DNA, 25 bp, Homo sapien
agaaaggaaaaatgcaggcctaata

SEQ ID NO: 5546593 - DNA, 25 bp, Homo sapien
agtggcacaatcatacctcgctgta

SEQ ID NO: 5546594 - DNA, 25 bp, Homo sapien
tgcaggcctaataacacagattgtg

SEQ ID NO: 5546595 - DNA, 25 bp, Homo sapien
atacctcgctgtagtcttgagctcc

SEQ ID NO: 5546596 - DNA, 25 bp, Homo sapien
ggcatgcaccagcaagcctgctaat

SEQ ID NO: 5546597 - DNA, 25 bp, Homo sapien
tatggaccaaataaaatagtaccta

SEQ ID NO: 5546598 - DNA, 25 bp, Homo sapien
tctggttgactatgctcaggctgcc

SEQ ID NO: 5546599 - DNA, 25 bp, Homo sapien
tctctgtcatagattaggtgggagt

SEQ ID NO: 5546600 - DNA, 25 bp, Homo sapien
aaggtggaaaaagtcttcaggtatc

SEQ ID NO: 5546601 - DNA, 25 bp, Homo sapien
atcagtaacctacgtgggaaatgac

SEQ ID NO: 5546602 - DNA, 25 bp, Homo sapien
ttaagcaagtaaatatcagaggcaa

SEQ ID NO: 5546603 - DNA, 25 bp, Homo sapien
ctcaggctgccaaaggttacatttt

SEQ ID NO: 5546604 - DNA, 25 bp, Homo sapien
caaagctcctcaacgagtaaggtta

SEQ ID NO: 5546605 - DNA, 25 bp, Homo sapien
gtaaatatcagaggcaataggtaag

SEQ ID NO: 5546606 - DNA, 25 bp, Homo sapien
aggtgggagttagtgttgttctcta

SEQ ID NO: 5546607 - DNA, 25 bp, Homo sapien
tacgtgggaaatgacataataatac

SEQ ID NO: 5546608 - DNA, 25 bp, Homo sapien
ggaattacatacaggagggtcttgg

SEQ ID NO: 5546609 - DNA, 25 bp, Homo sapien
tcatctacgtgacagggcatttatt

SEQ ID NO: 5546610 - DNA, 25 bp, Homo sapien
aacgaaaaagagcccagcatttcct

SEQ ID NO: 5546611 - DNA, 25 bp, Homo sapien
tataggtcagctatccccagcacaa

SEQ ID NO: 5546612 - DNA, 25 bp, Homo sapien
ctagaggtgtaattgcaaagttgtt

SEQ ID NO: 5546613 - DNA, 25 bp, Homo sapien
gcagcatgaatcaagcccagttttc

SEQ ID NO: 5546614 - DNA, 25 bp, Homo sapien
tctgttaggaatagactagaggtgt

SEQ ID NO: 5546615 - DNA, 25 bp, Homo sapien
ctctgcagcatgcaaaacaggtgag

SEQ ID NO: 5546616 - DNA, 25 bp, Homo sapien
ctagcacagtcatctgaggcagcat

SEQ ID NO: 5546617 - DNA, 25 bp, Homo sapien
gcacaaagagattttcaggaatacc

SEQ ID NO: 5546618 - DNA, 25 bp, Homo sapien
caaaacaggtgagagtgttcctgct

SEQ ID NO: 5546619 - DNA, 25 bp, Homo sapien
atgctgacagtcaaaatacaaactc

SEQ ID NO: 5546620 - DNA, 25 bp, Homo sapien
aaaagacttgtatttgaatgctgac

SEQ ID NO: 5546621 - DNA, 25 bp, Homo sapien
taacagggctctcatgaggatcaaa

SEQ ID NO: 5546622 - DNA, 25 bp, Homo sapien
acaccagatgcagttacacaaaagc

SEQ ID NO: 5546623 - DNA, 25 bp, Homo sapien
gctgaatagcaagtatgtaggtatc

SEQ ID NO: 5546624 - DNA, 25 bp, Homo sapien
tagccacagtataaagaccaaaatt

SEQ ID NO: 5546625 - DNA, 25 bp, Homo sapien
tgtgttttcgaaggaaaatgaggac

SEQ ID NO: 5546626 - DNA, 25 bp, Homo sapien
atgtaggtatccactgtagtactcc

SEQ ID NO: 5546627 - DNA, 25 bp, Homo sapien
caaaaaaccaggtatgctgaatagc

SEQ ID NO: 5546628 - DNA, 25 bp, Homo sapien
aatgaggacaataatatgtaccctt

SEQ ID NO: 5546629 - DNA, 25 bp, Homo sapien
ttcaaagatgagcatgattttatta

SEQ ID NO: 5546630 - DNA, 25 bp, Homo sapien
caaatgccacacgacttggacgcag

SEQ ID NO: 5546631 - DNA, 25 bp, Homo sapien
gtgatccacgcacctctgccaccca

SEQ ID NO: 5546632 - DNA, 25 bp, Homo sapien
gccacggttccccaagagcaaagtg

SEQ ID NO: 5546633 - DNA, 25 bp, Homo sapien
aggtccacttggaaacacgctgcca

SEQ ID NO: 5546634 - DNA, 25 bp, Homo sapien
tggccagcccacaggacttctagcc

SEQ ID NO: 5546635 - DNA, 25 bp, Homo sapien
ctgccacccaaaaatgcagggatta

SEQ ID NO: 5546636 - DNA, 25 bp, Homo sapien
cgtgggctgcacttacaagcctctc

SEQ ID NO: 5546637 - DNA, 25 bp, Homo sapien
agagcaaagtgattaccacaggtcc

SEQ ID NO: 5546638 - DNA, 25 bp, Homo sapien
ggacgcagctgctgttaaatgctgt

SEQ ID NO: 5546639 - DNA, 25 bp, Homo sapien
tgaagttgcgttcccagctcaagtc

SEQ ID NO: 5546640 - DNA, 25 bp, Homo sapien
ccagctcaagtcacacgtgggctgc

SEQ ID NO: 5546641 - DNA, 25 bp, Homo sapien
aatgaccacagaaataccacaagta

SEQ ID NO: 5546642 - DNA, 25 bp, Homo sapien
tatataggtttgtatgggctgtttt

SEQ ID NO: 5546643 - DNA, 25 bp, Homo sapien
caaaaatgtggcaccaaacagatgg

SEQ ID NO: 5546644 - DNA, 25 bp, Homo sapien
tttggcactacatttgggggccatt

SEQ ID NO: 5546645 - DNA, 25 bp, Homo sapien
cacatgaattttagcaaacaggcaa

SEQ ID NO: 5546646 - DNA, 25 bp, Homo sapien
agagatcacagagttcagcttcagc

SEQ ID NO: 5546647 - DNA, 25 bp, Homo sapien
ttaaacagtgaagccaccaaaaaca

SEQ ID NO: 5546648 - DNA, 25 bp, Homo sapien
atagtaagagctgaaactagaaagc

SEQ ID NO: 5546649 - DNA, 25 bp, Homo sapien
gtattggtttgggggttacacatga

SEQ ID NO: 5546650 - DNA, 25 bp, Homo sapien
ggaatgccagacagcactttggcac

SEQ ID NO: 5546651 - DNA, 25 bp, Homo sapien
gggacgtgtgcatatggtaactcaa

SEQ ID NO: 5546652 - DNA, 25 bp, Homo sapien
ctaaatgacacggttgagatttgaa

SEQ ID NO: 5546653 - DNA, 25 bp, Homo sapien
gccttccaggcatcatactgaatcc

SEQ ID NO: 5546654 - DNA, 25 bp, Homo sapien
acaattatcctatgacagacacaga

SEQ ID NO: 5546655 - DNA, 25 bp, Homo sapien
ctgttgttcttactgaaactgcttc

SEQ ID NO: 5546656 - DNA, 25 bp, Homo sapien
tcagtgtaacttaatgaagtagaac

SEQ ID NO: 5546657 - DNA, 25 bp, Homo sapien
ttcagacagttttcagcagcagtaa

SEQ ID NO: 5546658 - DNA, 25 bp, Homo sapien
gtgacctctatgtatgccaaagttc

SEQ ID NO: 5546659 - DNA, 25 bp, Homo sapien
atgaagtagaacaaatcagtttatc

SEQ ID NO: 5546660 - DNA, 25 bp, Homo sapien
tattgccattattcactgtcctacc

SEQ ID NO: 5546661 - DNA, 25 bp, Homo sapien
acacagatgtgagaagtaagactca

SEQ ID NO: 5546662 - DNA, 25 bp, Homo sapien
tgtggcattcactgttgttatctta

SEQ ID NO: 5546663 - DNA, 25 bp, Homo sapien
tcttgacctcctgggccgaccttga

SEQ ID NO: 5546664 - DNA, 25 bp, Homo sapien
gtggcacgatgtcagctcactgcaa

SEQ ID NO: 5546665 - DNA, 25 bp, Homo sapien
aggttttgctctgatgactgggctg

SEQ ID NO: 5546666 - DNA, 25 bp, Homo sapien
accgcgtccggccatgatttactct

SEQ ID NO: 5546667 - DNA, 25 bp, Homo sapien
gagcacagctcactgcagtcttgac

SEQ ID NO: 5546668 - DNA, 25 bp, Homo sapien
agctgggaccataaacgtgtgtcac

SEQ ID NO: 5546669 - DNA, 25 bp, Homo sapien
ttgtcgagacagggtcttgtcatgt

SEQ ID NO: 5546670 - DNA, 25 bp, Homo sapien
gtagctgggctacaggcccagcacc

SEQ ID NO: 5546671 - DNA, 25 bp, Homo sapien
ttgatcgcctgggtcttgacctcct

SEQ ID NO: 5546672 - DNA, 25 bp, Homo sapien
cgtgtgtcaccatgtctggctaagt

SEQ ID NO: 5546673 - DNA, 25 bp, Homo sapien
ttgacctcctgggccttgatcgcct

SEQ ID NO: 5546674 - DNA, 25 bp, Homo sapien
tgtggaagtctaaaccgcagatgtg

SEQ ID NO: 5546675 - DNA, 25 bp, Homo sapien
tggggagtatgtgtagtgcacttag

SEQ ID NO: 5546676 - DNA, 25 bp, Homo sapien
ccccacatggtgctgtgagagttaa

SEQ ID NO: 5546677 - DNA, 25 bp, Homo sapien
attcactagtggagagtagaatgag

SEQ ID NO: 5546678 - DNA, 25 bp, Homo sapien
ctcctcaccctgggtggggtctctc

SEQ ID NO: 5546679 - DNA, 25 bp, Homo sapien
ccctgaattggaaatgggagatgga

SEQ ID NO: 5546680 - DNA, 25 bp, Homo sapien
ggcctagtgatcaaagcaccagtcc

SEQ ID NO: 5546681 - DNA, 25 bp, Homo sapien
gagggtgagagcagttctctaagaa

SEQ ID NO: 5546682 - DNA, 25 bp, Homo sapien
tctcaggggtgttcattgcccgtat

SEQ ID NO: 5546683 - DNA, 25 bp, Homo sapien
gagatggataccaaggcttgagtcc

SEQ ID NO: 5546684 - DNA, 25 bp, Homo sapien
tggccaggaggaccctcccaatcca

SEQ ID NO: 5546685 - DNA, 25 bp, Homo sapien
aaaagtagagaacgttaattgcttc

SEQ ID NO: 5546686 - DNA, 25 bp, Homo sapien
tagagtacactaagtcccaggagca

SEQ ID NO: 5546687 - DNA, 25 bp, Homo sapien
gacaagtcacctaaggtaccaggga

SEQ ID NO: 5546688 - DNA, 25 bp, Homo sapien
atatgcacttgccttggtaagattg

SEQ ID NO: 5546689 - DNA, 25 bp, Homo sapien
tgactgcgtccttctgaatagagtt

SEQ ID NO: 5546690 - DNA, 25 bp, Homo sapien
ggttagttggccagattagtgctcc

SEQ ID NO: 5546691 - DNA, 25 bp, Homo sapien
gatataaaaagtttgccggtgaata

SEQ ID NO: 5546692 - DNA, 25 bp, Homo sapien
aggtaccagggattaatagatgtta

SEQ ID NO: 5546693 - DNA, 25 bp, Homo sapien
agtcccaggagcatcttcgaaagtt

SEQ ID NO: 5546694 - DNA, 25 bp, Homo sapien
gtcctaacaactacagagggataac

SEQ ID NO: 5546695 - DNA, 25 bp, Homo sapien
actacagagggataacaaatgaatt

SEQ ID NO: 5546696 - DNA, 25 bp, Homo sapien
tttagaagacggcaaaaaagatata

SEQ ID NO: 5546697 - DNA, 25 bp, Homo sapien
tatatcttttttgccgtcttctaaa

SEQ ID NO: 5546698 - DNA, 25 bp, Homo sapien
gggcagcccaatggatccaatggtg

SEQ ID NO: 5546699 - DNA, 25 bp, Homo sapien
acctcagtatggacagcaaggtgtg

SEQ ID NO: 5546700 - DNA, 25 bp, Homo sapien
atggtgatgaagagacctcagttgt

SEQ ID NO: 5546701 - DNA, 25 bp, Homo sapien
caggcccacagcggtatccaattgg

SEQ ID NO: 5546702 - DNA, 25 bp, Homo sapien
gccatattacagccagcagccgcag

SEQ ID NO: 5546703 - DNA, 25 bp, Homo sapien
attctcagcctcagcagagcagtcc

SEQ ID NO: 5546704 - DNA, 25 bp, Homo sapien
gcgcagtatctgccgtcccagtccc

SEQ ID NO: 5546705 - DNA, 25 bp, Homo sapien
tatccaattggcatccagggtcgga

SEQ ID NO: 5546706 - DNA, 25 bp, Homo sapien
agtccgtacccaggaggttcctatg

SEQ ID NO: 5546707 - DNA, 25 bp, Homo sapien
atggcatgggcagtaaccctcattc

SEQ ID NO: 5546708 - DNA, 25 bp, Homo sapien
ggaaggctatggaactagatctcaa

SEQ ID NO: 5546709 - DNA, 25 bp, Homo sapien
tgtctcgtggcgtcggaccgtaggt

SEQ ID NO: 5546710 - DNA, 25 bp, Homo sapien
acctacggtccgacgccacgagaca

SEQ ID NO: 5546711 - DNA, 25 bp, Homo sapien
ggaagcgttgactgaaacaagaaat

SEQ ID NO: 5546712 - DNA, 25 bp, Homo sapien
gacaacttgaatttccaacttgggc

SEQ ID NO: 5546713 - DNA, 25 bp, Homo sapien
aagttttgccaattgtcccagtaat

SEQ ID NO: 5546714 - DNA, 25 bp, Homo sapien
ttttatggcgaaaggaaccagttca

SEQ ID NO: 5546715 - DNA, 25 bp, Homo sapien
ttcctctggttgaagatgggaagcg

SEQ ID NO: 5546716 - DNA, 25 bp, Homo sapien
tgaaatgaaagtgcattgcagttcc

SEQ ID NO: 5546717 - DNA, 25 bp, Homo sapien
tacaacaagccatcaaagttgagaa

SEQ ID NO: 5546718 - DNA, 25 bp, Homo sapien
gttcaggaccacacactacattcag

SEQ ID NO: 5546719 - DNA, 25 bp, Homo sapien
aaaaagtgacttgaaatgaaagtgc

SEQ ID NO: 5546720 - DNA, 25 bp, Homo sapien
acagaaaagctggagttactataaa

SEQ ID NO: 5546721 - DNA, 25 bp, Homo sapien
tagtagataacttcaggattgtggc

SEQ ID NO: 5546722 - DNA, 25 bp, Homo sapien
tgtgagagctcccttcttaacctcc

SEQ ID NO: 5546723 - DNA, 25 bp, Homo sapien
aagcataaggaatttgtttgaaaac

SEQ ID NO: 5546724 - DNA, 25 bp, Homo sapien
tcacgtagcaagctgcagtttgagc

SEQ ID NO: 5546725 - DNA, 25 bp, Homo sapien
cttacgatagacgtgtgtgagagct

SEQ ID NO: 5546726 - DNA, 25 bp, Homo sapien
gacaactctcacaagggaaaagagc

SEQ ID NO: 5546727 - DNA, 25 bp, Homo sapien
tcagagatgctttgtagcagttctt

SEQ ID NO: 5546728 - DNA, 25 bp, Homo sapien
ggaaaagagctagaaacttcaaata

SEQ ID NO: 5546729 - DNA, 25 bp, Homo sapien
tgtgactcacgtagcaagctgcagt

SEQ ID NO: 5546730 - DNA, 25 bp, Homo sapien
caggcatatccaaacaggttgaagc

SEQ ID NO: 5546731 - DNA, 25 bp, Homo sapien
tgaagccaggagaagcttttaaagg

SEQ ID NO: 5546732 - DNA, 25 bp, Homo sapien
atccagctagctatccttgtgactc

SEQ ID NO: 5546733 - DNA, 25 bp, Homo sapien
caagataatacacagttagcacagt

SEQ ID NO: 5546734 - DNA, 25 bp, Homo sapien
gcagggcacatgaaagcacttaatg

SEQ ID NO: 5546735 - DNA, 25 bp, Homo sapien
tcctttgcaaccagctctgcgtgct

SEQ ID NO: 5546736 - DNA, 25 bp, Homo sapien
ggggtcatcactttcacttgtcctg

SEQ ID NO: 5546737 - DNA, 25 bp, Homo sapien
ctgaaaagtatacaagataatacac

SEQ ID NO: 5546738 - DNA, 25 bp, Homo sapien
ctagagtccagccaacctgagctct

SEQ ID NO: 5546739 - DNA, 25 bp, Homo sapien
aagcacttaatgaacgtttggcccc

SEQ ID NO: 5546740 - DNA, 25 bp, Homo sapien
gaatgttgaagctatcatgaataaa

SEQ ID NO: 5546741 - DNA, 25 bp, Homo sapien
agctctgcgtgctgctgctgacaag

SEQ ID NO: 5546742 - DNA, 25 bp, Homo sapien
gaataaattcaaatgcagggcacat

SEQ ID NO: 5546743 - DNA, 25 bp, Homo sapien
ggatgtcctagagtccagccaacct

SEQ ID NO: 5546744 - DNA, 25 bp, Homo sapien
atattaggttaaagctgcaggatcc

SEQ ID NO: 5546745 - DNA, 25 bp, Homo sapien
ttcagtgagtgaaaattcaagaccc

SEQ ID NO: 5546746 - DNA, 25 bp, Homo sapien
caatacatcctgcccgaaacctgcc

SEQ ID NO: 5546747 - DNA, 25 bp, Homo sapien
aactgccaaagaatgtggtcaacaa

SEQ ID NO: 5546748 - DNA, 25 bp, Homo sapien
tcacaatacatcagaggaggtaggt

SEQ ID NO: 5546749 - DNA, 25 bp, Homo sapien
ggataagagattggcccccactcat

SEQ ID NO: 5546750 - DNA, 25 bp, Homo sapien
agtaaaatgtggccaaggaaaacaa

SEQ ID NO: 5546751 - DNA, 25 bp, Homo sapien
ggtcaacaaacacagctaccggctc

SEQ ID NO: 5546752 - DNA, 25 bp, Homo sapien
accaattgagggccacaaacccatt

SEQ ID NO: 5546753 - DNA, 25 bp, Homo sapien
ttgatcttctgggaggaactgccaa

SEQ ID NO: 5546754 - DNA, 25 bp, Homo sapien
gactagtctcatttcaggtggggat

SEQ ID NO: 5546755 - DNA, 25 bp, Homo sapien
ctccaagaccagggttccatcatgg

SEQ ID NO: 5546756 - DNA, 25 bp, Homo sapien
ccgggtggctcacacaacaaacatt

SEQ ID NO: 5546757 - DNA, 25 bp, Homo sapien
tggggaacacacacactcagtccac

SEQ ID NO: 5546758 - DNA, 25 bp, Homo sapien
tagaggctgggttctatagaccctc

SEQ ID NO: 5546759 - DNA, 25 bp, Homo sapien
acaaaaataccatagaccgggtggc

SEQ ID NO: 5546760 - DNA, 25 bp, Homo sapien
ccatcacgctggaggttagaatttc

SEQ ID NO: 5546761 - DNA, 25 bp, Homo sapien
aatagatgccttagcacagatgtct

SEQ ID NO: 5546762 - DNA, 25 bp, Homo sapien
tacaaatctttggggaacacacaca

SEQ ID NO: 5546763 - DNA, 25 bp, Homo sapien
tctggctgctactaacaaaaatacc

SEQ ID NO: 5546764 - DNA, 25 bp, Homo sapien
gtcaagttctggtgaagaccctctt

SEQ ID NO: 5546765 - DNA, 25 bp, Homo sapien
gaaagaattatgtcctgcagaaaac

SEQ ID NO: 5546766 - DNA, 25 bp, Homo sapien
ggcatgctgagagctagagtttcca

SEQ ID NO: 5546767 - DNA, 25 bp, Homo sapien
gaggggcccacattttcattctgct

SEQ ID NO: 5546768 - DNA, 25 bp, Homo sapien
gcatgcccaggcctggactaagctt

SEQ ID NO: 5546769 - DNA, 25 bp, Homo sapien
ctgctctgggtcccgcagattaagt

SEQ ID NO: 5546770 - DNA, 25 bp, Homo sapien
ggtgcccgcatcctggcatgctgag

SEQ ID NO: 5546771 - DNA, 25 bp, Homo sapien
ggtcccgcagattaagtagctggtc

SEQ ID NO: 5546772 - DNA, 25 bp, Homo sapien
ctagagtttccaggctgcgtttggc

SEQ ID NO: 5546773 - DNA, 25 bp, Homo sapien
ttaagtagctggtcctgcttgaggg

SEQ ID NO: 5546774 - DNA, 25 bp, Homo sapien
gtttccaggctgcgtttggcatcag

SEQ ID NO: 5546775 - DNA, 25 bp, Homo sapien
aggcctggactaagcttcctgcatc

SEQ ID NO: 5546776 - DNA, 25 bp, Homo sapien
ctgcatcccaggcggcctcacttgg

SEQ ID NO: 5546777 - DNA, 25 bp, Homo sapien
gaggaggtggtggagccagccgcgc

SEQ ID NO: 5546778 - DNA, 25 bp, Homo sapien
gcgcggctggctccaccacctcctc

SEQ ID NO: 5546779 - DNA, 25 bp, Homo sapien
gcaattggtttctggcttaagagcc

SEQ ID NO: 5546780 - DNA, 25 bp, Homo sapien
atcattctcactgcggtctcaccgt

SEQ ID NO: 5546781 - DNA, 25 bp, Homo sapien
gtcatggtagactaatgagaggaga

SEQ ID NO: 5546782 - DNA, 25 bp, Homo sapien
cccattacagcgaatgaagagaaag

SEQ ID NO: 5546783 - DNA, 25 bp, Homo sapien
atcaacagaccaacaccagtcacgt

SEQ ID NO: 5546784 - DNA, 25 bp, Homo sapien
agaagatctacagttggggataacc

SEQ ID NO: 5546785 - DNA, 25 bp, Homo sapien
cagtcacgtaaataaatggcattcg

SEQ ID NO: 5546786 - DNA, 25 bp, Homo sapien
atcagttgtgagagtttaacaataa

SEQ ID NO: 5546787 - DNA, 25 bp, Homo sapien
atggcattcgtataatttggcagct

SEQ ID NO: 5546788 - DNA, 25 bp, Homo sapien
ggataaccgataagaggcaattggt

SEQ ID NO: 5546789 - DNA, 25 bp, Homo sapien
gaatgaagagaaagaacatcgtaaa

SEQ ID NO: 5546790 - DNA, 25 bp, Homo sapien
cctgggtcagttcactaagccattc

SEQ ID NO: 5546791 - DNA, 25 bp, Homo sapien
cacaagatatagaaatactttgaat

SEQ ID NO: 5546792 - DNA, 25 bp, Homo sapien
catcatgcctctataaatcccttcc

SEQ ID NO: 5546793 - DNA, 25 bp, Homo sapien
actaagccattcattcgaggtccac

SEQ ID NO: 5546794 - DNA, 25 bp, Homo sapien
ttcattcgaggtccacatcatgcct

SEQ ID NO: 5546795 - DNA, 25 bp, Homo sapien
aacaaacccactgctctctcctctt

SEQ ID NO: 5546796 - DNA, 25 bp, Homo sapien
aaagttgcactctgccttgaagctt

SEQ ID NO: 5546797 - DNA, 25 bp, Homo sapien
gtctacatcaacttcctgggtcagt

SEQ ID NO: 5546798 - DNA, 25 bp, Homo sapien
actttgaattaactccacaggacat

SEQ ID NO: 5546799 - DNA, 25 bp, Homo sapien
ttaatgaacaaaatgtaagtctaca

SEQ ID NO: 5546800 - DNA, 25 bp, Homo sapien
actccacaggacatagaggtacttc

SEQ ID NO: 5546801 - DNA, 25 bp, Homo sapien
gcatgtactgcatgcggcaggctga

SEQ ID NO: 5546802 - DNA, 25 bp, Homo sapien
acctgtggtttggaaagcatggtta

SEQ ID NO: 5546803 - DNA, 25 bp, Homo sapien
cagtggtgtcctgctaggtgttaga

SEQ ID NO: 5546804 - DNA, 25 bp, Homo sapien
tgttttgttgttggtagcagtggtg

SEQ ID NO: 5546805 - DNA, 25 bp, Homo sapien
taggaacctatagaaaaagtgctct

SEQ ID NO: 5546806 - DNA, 25 bp, Homo sapien
tgtttcgtaactgggaaaggcatgt

SEQ ID NO: 5546807 - DNA, 25 bp, Homo sapien
agatcaagcttgaacccggtaacct

SEQ ID NO: 5546808 - DNA, 25 bp, Homo sapien
atcaggccatagctctgcaaggtgg

SEQ ID NO: 5546809 - DNA, 25 bp, Homo sapien
gctaggtgttagaagctaggaacct

SEQ ID NO: 5546810 - DNA, 25 bp, Homo sapien
ggtcaggctgggtttctgtttcgta

SEQ ID NO: 5546811 - DNA, 25 bp, Homo sapien
gaagtggaatgttttgcatcggact

SEQ ID NO: 5546812 - DNA, 25 bp, Homo sapien
tggacatgcaggttgcttctagatc

SEQ ID NO: 5546813 - DNA, 25 bp, Homo sapien
atagagttgtttgaggttcttacat

SEQ ID NO: 5546814 - DNA, 25 bp, Homo sapien
attttgagttttgtgaggaacaccc

SEQ ID NO: 5546815 - DNA, 25 bp, Homo sapien
tgtgaggaacacccaagctgttctc

SEQ ID NO: 5546816 - DNA, 25 bp, Homo sapien
tccttgccagcatttgttatcgtct

SEQ ID NO: 5546817 - DNA, 25 bp, Homo sapien
ccacagtggtggtactaatatacat

SEQ ID NO: 5546818 - DNA, 25 bp, Homo sapien
ccaacagtgtatgaggattaccttt

SEQ ID NO: 5546819 - DNA, 25 bp, Homo sapien
gagttttgtgaggaacacccaagct

SEQ ID NO: 5546820 - DNA, 25 bp, Homo sapien
gttctccacagtggtggtactaata

SEQ ID NO: 5546821 - DNA, 25 bp, Homo sapien
tgcaggttgcttctagatcttggct

SEQ ID NO: 5546822 - DNA, 25 bp, Homo sapien
cagtggaattgctggttcatacagt

SEQ ID NO: 5546823 - DNA, 25 bp, Homo sapien
aaggaaacagcccacttgctccttc

SEQ ID NO: 5546824 - DNA, 25 bp, Homo sapien
aattcccagcaaccgcctccagcag

SEQ ID NO: 5546825 - DNA, 25 bp, Homo sapien
cttcataggtaatcaacacacaaac

SEQ ID NO: 5546826 - DNA, 25 bp, Homo sapien
aggggttctgcaaatcctgaaaggc

SEQ ID NO: 5546827 - DNA, 25 bp, Homo sapien
ttctgcaaatcctgaaaggcaagcc

SEQ ID NO: 5546828 - DNA, 25 bp, Homo sapien
acacccagccccagttgacacttct

SEQ ID NO: 5546829 - DNA, 25 bp, Homo sapien
cacttctaaaggagaaggggttctg

SEQ ID NO: 5546830 - DNA, 25 bp, Homo sapien
cccagttgacacttctaaaggagaa

SEQ ID NO: 5546831 - DNA, 25 bp, Homo sapien
ttgctccttcataggtaatcaacac

SEQ ID NO: 5546832 - DNA, 25 bp, Homo sapien
ccaaataattcccagcaaccgcctc

SEQ ID NO: 5546833 - DNA, 25 bp, Homo sapien
acaggacaccaaataattcccagca

SEQ ID NO: 5546834 - DNA, 25 bp, Homo sapien
tgggctacgtttctggcagcaggaa

SEQ ID NO: 5546835 - DNA, 25 bp, Homo sapien
gcactagccacaacacaataaaacc

SEQ ID NO: 5546836 - DNA, 25 bp, Homo sapien
aaagagaacatatgagagcactgtg

SEQ ID NO: 5546837 - DNA, 25 bp, Homo sapien
gttctgttacagcactagccacaac

SEQ ID NO: 5546838 - DNA, 25 bp, Homo sapien
tatatctatatggacaggtgggcta

SEQ ID NO: 5546839 - DNA, 25 bp, Homo sapien
tgctctgactggaataccctgaatt

SEQ ID NO: 5546840 - DNA, 25 bp, Homo sapien
atgtagcctccatctgtcacccaga

SEQ ID NO: 5546841 - DNA, 25 bp, Homo sapien
aaagcatatgctctgactggaatac

SEQ ID NO: 5546842 - DNA, 25 bp, Homo sapien
gcagcaggaaacggccctgttctgt

SEQ ID NO: 5546843 - DNA, 25 bp, Homo sapien
gagcactgtggaatcatgaagacat

SEQ ID NO: 5546844 - DNA, 25 bp, Homo sapien
ccaaattatgaagaaacacaatatc

SEQ ID NO: 5546845 - DNA, 25 bp, Homo sapien
actgtaatctctgtcttggtattct

SEQ ID NO: 5546846 - DNA, 25 bp, Homo sapien
tcctacagaactgggatcatggctc

SEQ ID NO: 5546847 - DNA, 25 bp, Homo sapien
gaaaggaaactaatattgttgacca

SEQ ID NO: 5546848 - DNA, 25 bp, Homo sapien
aatgaaataacatactactgtaatc

SEQ ID NO: 5546849 - DNA, 25 bp, Homo sapien
aactcaagtgtttgtgaattaaata

SEQ ID NO: 5546850 - DNA, 25 bp, Homo sapien
ttgggtacccctatagatgatctaa

SEQ ID NO: 5546851 - DNA, 25 bp, Homo sapien
tcaaaattcctacagaactgggatc

SEQ ID NO: 5546852 - DNA, 25 bp, Homo sapien
ttgaccaagtgctcccactgtgtgt

SEQ ID NO: 5546853 - DNA, 25 bp, Homo sapien
cttataatagataactcaagtgttt

SEQ ID NO: 5546854 - DNA, 25 bp, Homo sapien
gctcccactgtgtgttgggtacccc

SEQ ID NO: 5546855 - DNA, 25 bp, Homo sapien
catggctcacttaaccctcaatcaa

SEQ ID NO: 5546856 - DNA, 25 bp, Homo sapien
agtatcccaacagtcaggtgagagc

SEQ ID NO: 5546857 - DNA, 25 bp, Homo sapien
tgccattgctagggaccactcaagc

SEQ ID NO: 5546858 - DNA, 25 bp, Homo sapien
actcaagccaagccctgagttgggc

SEQ ID NO: 5546859 - DNA, 25 bp, Homo sapien
tgatgacgtattgacagagaagcca

SEQ ID NO: 5546860 - DNA, 25 bp, Homo sapien
gcccttctgttgaagtgaggggcca

SEQ ID NO: 5546861 - DNA, 25 bp, Homo sapien
agagaagccaaacgctgctcagaaa

SEQ ID NO: 5546862 - DNA, 25 bp, Homo sapien
atgggcattccctaagggggaagca

SEQ ID NO: 5546863 - DNA, 25 bp, Homo sapien
tgctcagaaacgtgtccctcggctg

SEQ ID NO: 5546864 - DNA, 25 bp, Homo sapien
atctttaaacagtggaaaacaggcc

SEQ ID NO: 5546865 - DNA, 25 bp, Homo sapien
acacattccaccgaagagcaggagt

SEQ ID NO: 5546866 - DNA, 25 bp, Homo sapien
tgactgcccgtgtgctcgtacgttt

SEQ ID NO: 5546867 - DNA, 25 bp, Homo sapien
cacgctacgtctcttggtcttaccc

SEQ ID NO: 5546868 - DNA, 25 bp, Homo sapien
tgcacagttctctctcacgctacgt

SEQ ID NO: 5546869 - DNA, 25 bp, Homo sapien
aaaaactcatacaaaagggagagag

SEQ ID NO: 5546870 - DNA, 25 bp, Homo sapien
agagtggacgttttaactaaaggca

SEQ ID NO: 5546871 - DNA, 25 bp, Homo sapien
gtacactcctaagggtgcacagttc

SEQ ID NO: 5546872 - DNA, 25 bp, Homo sapien
acataacatacaagagagaaaaact

SEQ ID NO: 5546873 - DNA, 25 bp, Homo sapien
gaatggaaaaaagtgcctgacatga

SEQ ID NO: 5546874 - DNA, 25 bp, Homo sapien
cagaggcatctgcacccctgataaa

SEQ ID NO: 5546875 - DNA, 25 bp, Homo sapien
ccagccaatggaagaggcacttttt

SEQ ID NO: 5546876 - DNA, 25 bp, Homo sapien
aaggcaacaagaaacataacataca

SEQ ID NO: 5546877 - DNA, 25 bp, Homo sapien
aagttgctacttcagaggcatctgc

SEQ ID NO: 5546878 - DNA, 25 bp, Homo sapien
ttgtagtcaatcctgtgtaagtttt

SEQ ID NO: 5546879 - DNA, 25 bp, Homo sapien
atgcccacacggtatcctgaaggag

SEQ ID NO: 5546880 - DNA, 25 bp, Homo sapien
aaccatacattccaaaaatagcgat

SEQ ID NO: 5546881 - DNA, 25 bp, Homo sapien
gggtgatgcccacacggtatcctga

SEQ ID NO: 5546882 - DNA, 25 bp, Homo sapien
tgagcattagctctgtgctaggggc

SEQ ID NO: 5546883 - DNA, 25 bp, Homo sapien
gagaagcacccacccctgtctagat

SEQ ID NO: 5546884 - DNA, 25 bp, Homo sapien
attccaaaaatagcgattgagcatt

SEQ ID NO: 5546885 - DNA, 25 bp, Homo sapien
cccctgtctagatggtgttgatggg

SEQ ID NO: 5546886 - DNA, 25 bp, Homo sapien
cctgtgtaagtttttgttagataaa

SEQ ID NO: 5546887 - DNA, 25 bp, Homo sapien
aaaaatagcgattgagcattagctc

SEQ ID NO: 5546888 - DNA, 25 bp, Homo sapien
gcattagctctgtgctaggggctgg

SEQ ID NO: 5546889 - DNA, 25 bp, Homo sapien
tgaaatggcatgcaattacagttta

SEQ ID NO: 5546890 - DNA, 25 bp, Homo sapien
attaatgggtgttaaagaaagtgaa

SEQ ID NO: 5546891 - DNA, 25 bp, Homo sapien
ttcccgagtaggtcagtcttcactg

SEQ ID NO: 5546892 - DNA, 25 bp, Homo sapien
actaaaatgtaatgtgggggtgtat

SEQ ID NO: 5546893 - DNA, 25 bp, Homo sapien
atagaatagactccattgaccacat

SEQ ID NO: 5546894 - DNA, 25 bp, Homo sapien
tgtgctctgtataaggacaaacatt

SEQ ID NO: 5546895 - DNA, 25 bp, Homo sapien
tgcttcacttgacagacatatctct

SEQ ID NO: 5546896 - DNA, 25 bp, Homo sapien
gagaaagaaacattttgtgctctgt

SEQ ID NO: 5546897 - DNA, 25 bp, Homo sapien
ttgaccacattcacatgcccgtttc

SEQ ID NO: 5546898 - DNA, 25 bp, Homo sapien
tccagtcaaggtatgaatgtgcttc

SEQ ID NO: 5546899 - DNA, 25 bp, Homo sapien
cctcgaaaagtttgagaaaatgtga

SEQ ID NO: 5546900 - DNA, 25 bp, Homo sapien
ccgggtcgcagtacccctctcggaa

SEQ ID NO: 5546901 - DNA, 25 bp, Homo sapien
ttccgagaggggtactgcgacccgg

SEQ ID NO: 5546902 - DNA, 25 bp, Homo sapien
ggtccgggtcgcagtacccctctcg

SEQ ID NO: 5546903 - DNA, 25 bp, Homo sapien
cgagaggggtactgcgacccggacc

SEQ ID NO: 5546904 - DNA, 25 bp, Homo sapien
tgcacatccagagtttcatgacctc

SEQ ID NO: 5546905 - DNA, 25 bp, Homo sapien
ttggcctgctttgcacatccagagt

SEQ ID NO: 5546906 - DNA, 25 bp, Homo sapien
tttcaaacctaagaggagctcccaa

SEQ ID NO: 5546907 - DNA, 25 bp, Homo sapien
aggtcaccatgtgttgggctcctgg

SEQ ID NO: 5546908 - DNA, 25 bp, Homo sapien
caccgtgcacggccaattattttat

SEQ ID NO: 5546909 - DNA, 25 bp, Homo sapien
aagaggagctcccaatatgaaagta

SEQ ID NO: 5546910 - DNA, 25 bp, Homo sapien
tatgaaagtattgtcagcaagtttt

SEQ ID NO: 5546911 - DNA, 25 bp, Homo sapien
gatgcccatgtttgctcaggtcacc

SEQ ID NO: 5546912 - DNA, 25 bp, Homo sapien
tataaacccagatgcatgtccaggt

SEQ ID NO: 5546913 - DNA, 25 bp, Homo sapien
ctagctaataaagatgcccatgttt

SEQ ID NO: 5546914 - DNA, 25 bp, Homo sapien
catgacctctagctaataaagatgc

SEQ ID NO: 5546915 - DNA, 25 bp, Homo sapien
gcccgcaattaggtcatgtgtaacc

SEQ ID NO: 5546916 - DNA, 25 bp, Homo sapien
gttgcacattagtgtgccagtgcac

SEQ ID NO: 5546917 - DNA, 25 bp, Homo sapien
tttgaagctgtcatggttagcatat

SEQ ID NO: 5546918 - DNA, 25 bp, Homo sapien
cttatgatagtcgtgatagccattc

SEQ ID NO: 5546919 - DNA, 25 bp, Homo sapien
gtcattcctgagggctgagtcaatc

SEQ ID NO: 5546920 - DNA, 25 bp, Homo sapien
gtggttagggtgttacttatgatag

SEQ ID NO: 5546921 - DNA, 25 bp, Homo sapien
ttgagaaattgtggatgtatggtat

SEQ ID NO: 5546922 - DNA, 25 bp, Homo sapien
acaggatgatttagcaaaattgccc

SEQ ID NO: 5546923 - DNA, 25 bp, Homo sapien
gccaagacagtctctggtgtaaaag

SEQ ID NO: 5546924 - DNA, 25 bp, Homo sapien
taaaagaaaataccaagcaatagtc

SEQ ID NO: 5546925 - DNA, 25 bp, Homo sapien
tttctaggactgtaaatggatgagg

SEQ ID NO: 5546926 - DNA, 25 bp, Homo sapien
aaaagggggtagcatttcctcttga

SEQ ID NO: 5546927 - DNA, 25 bp, Homo sapien
tccctccagaatagaggcccacagc

SEQ ID NO: 5546928 - DNA, 25 bp, Homo sapien
atggtgaacttgcttgcccaagctc

SEQ ID NO: 5546929 - DNA, 25 bp, Homo sapien
gtctgcctgactttagagcctattc

SEQ ID NO: 5546930 - DNA, 25 bp, Homo sapien
gtaccaggcatggtgaacttgcttg

SEQ ID NO: 5546931 - DNA, 25 bp, Homo sapien
tccccttcataactagctgggccta

SEQ ID NO: 5546932 - DNA, 25 bp, Homo sapien
atgctggtttcgtaaggccctgctg

SEQ ID NO: 5546933 - DNA, 25 bp, Homo sapien
tcttgaaaatccagcctgcaaggca

SEQ ID NO: 5546934 - DNA, 25 bp, Homo sapien
ttggatagagatcacttccatcccc

SEQ ID NO: 5546935 - DNA, 25 bp, Homo sapien
tgtctttatagacaaggtcaggctc

SEQ ID NO: 5546936 - DNA, 25 bp, Homo sapien
agctgggcctagtacctttgggtta

SEQ ID NO: 5546937 - DNA, 25 bp, Homo sapien
gaccggctgtcactgacaggaccct

SEQ ID NO: 5546938 - DNA, 25 bp, Homo sapien
ccagcagaaagtcgaggacttccta

SEQ ID NO: 5546939 - DNA, 25 bp, Homo sapien
ttgaggctaaactgtagctagtatc

SEQ ID NO: 5546940 - DNA, 25 bp, Homo sapien
gtgtaacacccacgggcccctgaca

SEQ ID NO: 5546941 - DNA, 25 bp, Homo sapien
gtgatttgggcttttggaccatgtc

SEQ ID NO: 5546942 - DNA, 25 bp, Homo sapien
tgtctataagtgacatgggaccggc

SEQ ID NO: 5546943 - DNA, 25 bp, Homo sapien
tgattgaaaacttagcttgggcatt

SEQ ID NO: 5546944 - DNA, 25 bp, Homo sapien
ttttaagttgatgtttggcttggct

SEQ ID NO: 5546945 - DNA, 25 bp, Homo sapien
gacagtaactctgtgcagtgagtgg

SEQ ID NO: 5546946 - DNA, 25 bp, Homo sapien
agcttttcttgaaggagtttgaagt

SEQ ID NO: 5546947 - DNA, 25 bp, Homo sapien
acttcctagatgtctgtggtgcaac

SEQ ID NO: 5546948 - DNA, 25 bp, Homo sapien
aatctgcagcaaagccaaaaatcac

SEQ ID NO: 5546949 - DNA, 25 bp, Homo sapien
aagctatatagatggtttaaagacc

SEQ ID NO: 5546950 - DNA, 25 bp, Homo sapien
agtataataacgggtaagtttgtca

SEQ ID NO: 5546951 - DNA, 25 bp, Homo sapien
tctgcggacagaaaagttaaaatct

SEQ ID NO: 5546952 - DNA, 25 bp, Homo sapien
aaaattagacgacctgaaaatattc

SEQ ID NO: 5546953 - DNA, 25 bp, Homo sapien
agagatgaaatatgtaaaattagac

SEQ ID NO: 5546954 - DNA, 25 bp, Homo sapien
agttaggtgacttaaaaatctccat

SEQ ID NO: 5546955 - DNA, 25 bp, Homo sapien
agtatagagatacaagagtaaatta

SEQ ID NO: 5546956 - DNA, 25 bp, Homo sapien
ctttcggtataagacccaaagacca

SEQ ID NO: 5546957 - DNA, 25 bp, Homo sapien
tcagctagggttgagaattttggct

SEQ ID NO: 5546958 - DNA, 25 bp, Homo sapien
catagcctaaagagatggtaatatc

SEQ ID NO: 5546959 - DNA, 25 bp, Homo sapien
gaagaaactaaggcttatcttgtac

SEQ ID NO: 5546960 - DNA, 25 bp, Homo sapien
cctggaacagagcagtactcaataa

SEQ ID NO: 5546961 - DNA, 25 bp, Homo sapien
aatgacagagatgatttgtgaactc

SEQ ID NO: 5546962 - DNA, 25 bp, Homo sapien
cactgtgtccagcccatatttgatt

SEQ ID NO: 5546963 - DNA, 25 bp, Homo sapien
atgtctgtagaatgagtaagtgctc

SEQ ID NO: 5546964 - DNA, 25 bp, Homo sapien
gctcacctgcatcccatgcctgctc

SEQ ID NO: 5546965 - DNA, 25 bp, Homo sapien
caagcatgagccaaaacacatggct

SEQ ID NO: 5546966 - DNA, 25 bp, Homo sapien
tcttgtactggctaattatgtgatt

SEQ ID NO: 5546967 - DNA, 25 bp, Homo sapien
agtatctcagttggcaaatgaagaa

SEQ ID NO: 5546968 - DNA, 25 bp, Homo sapien
ctcacaaggtctgtattagtatctc

SEQ ID NO: 5546969 - DNA, 25 bp, Homo sapien
cacaattaaagaatgacagagatga

SEQ ID NO: 5546970 - DNA, 25 bp, Homo sapien
ttctcctgtcgacgtcgttccgggt

SEQ ID NO: 5546971 - DNA, 25 bp, Homo sapien
acccggaacgacgtcgacaggagaa

SEQ ID NO: 5546972 - DNA, 25 bp, Homo sapien
cacatcccagaacaggccacctgag

SEQ ID NO: 5546973 - DNA, 25 bp, Homo sapien
caccccggtaactgaagctctcctt

SEQ ID NO: 5546974 - DNA, 25 bp, Homo sapien
agagtttctctgggtctgctggatg

SEQ ID NO: 5546975 - DNA, 25 bp, Homo sapien
gctggatgttgcattgtggtgaatt

SEQ ID NO: 5546976 - DNA, 25 bp, Homo sapien
ctttcttgtcgtgctgagagagagt

SEQ ID NO: 5546977 - DNA, 25 bp, Homo sapien
acttggcggcctccattcaggttcc

SEQ ID NO: 5546978 - DNA, 25 bp, Homo sapien
gtgtgtgtgcgtacaggtttaatga

SEQ ID NO: 5546979 - DNA, 25 bp, Homo sapien
ggcctcgctgcattgcctaggctgg

SEQ ID NO: 5546980 - DNA, 25 bp, Homo sapien
ttaatgagcctggtgaataggaatc

SEQ ID NO: 5546981 - DNA, 25 bp, Homo sapien
agaccccaccacaacttggcggcct

SEQ ID NO: 5546982 - DNA, 25 bp, Homo sapien
aattttctagacaaggcctcgctgc

SEQ ID NO: 5546983 - DNA, 25 bp, Homo sapien
tgcctgcctcactggccaacagacc

SEQ ID NO: 5546984 - DNA, 25 bp, Homo sapien
ggccaacagaccagaaagtcgattc

SEQ ID NO: 5546985 - DNA, 25 bp, Homo sapien
cacagggaagactatcagttaggta

SEQ ID NO: 5546986 - DNA, 25 bp, Homo sapien
aagaggctttcttcacagaactgtc

SEQ ID NO: 5546987 - DNA, 25 bp, Homo sapien
cattcaaacgcaggaaatgtgagtg

SEQ ID NO: 5546988 - DNA, 25 bp, Homo sapien
cccaggagactttctttgattggcc

SEQ ID NO: 5546989 - DNA, 25 bp, Homo sapien
atcatgaaaggtttaagccaatgtt

SEQ ID NO: 5546990 - DNA, 25 bp, Homo sapien
agatatcacagaaaacatgctcccc

SEQ ID NO: 5546991 - DNA, 25 bp, Homo sapien
tgccagtcactgggattactaaaga

SEQ ID NO: 5546992 - DNA, 25 bp, Homo sapien
ttaggtaaccagtaatgcctgcctc

SEQ ID NO: 5546993 - DNA, 25 bp, Homo sapien
aatgggacgatcacacagatatcac

SEQ ID NO: 5546994 - DNA, 25 bp, Homo sapien
gcattgaaaagtcaggttcctgggc

SEQ ID NO: 5546995 - DNA, 25 bp, Homo sapien
tgacagagaaataaacccttgtctc

SEQ ID NO: 5546996 - DNA, 25 bp, Homo sapien
tgtattctatgaggcttgggtgagg

SEQ ID NO: 5546997 - DNA, 25 bp, Homo sapien
cctgggccacccatccctagggatt

SEQ ID NO: 5546998 - DNA, 25 bp, Homo sapien
cccagagtcatagattcacagagct

SEQ ID NO: 5546999 - DNA, 25 bp, Homo sapien
cacgtctagagaacatgaaagtggc

SEQ ID NO: 5547000 - DNA, 25 bp, Homo sapien
aacatggtggctggagttccagcac

SEQ ID NO: 5547001 - DNA, 25 bp, Homo sapien
ataccaacacctaatcagaggcaga

SEQ ID NO: 5547002 - DNA, 25 bp, Homo sapien
ctgattcacaatggtaccccggtac

SEQ ID NO: 5547003 - DNA, 25 bp, Homo sapien
cagctacccacactctgcacccaga

SEQ ID NO: 5547004 - DNA, 25 bp, Homo sapien
ctggagttccagcacgtctagagaa

SEQ ID NO: 5547005 - DNA, 25 bp, Homo sapien
cataatgaaagcaaaccactgactg

SEQ ID NO: 5547006 - DNA, 25 bp, Homo sapien
tagtaatgggatgataaaaatggaa

SEQ ID NO: 5547007 - DNA, 25 bp, Homo sapien
gcatagccaaagccaacttgaacag

SEQ ID NO: 5547008 - DNA, 25 bp, Homo sapien
cctttaatggaaccctaacactcag

SEQ ID NO: 5547009 - DNA, 25 bp, Homo sapien
aggtaacttgaagaaatcagaaatc

SEQ ID NO: 5547010 - DNA, 25 bp, Homo sapien
caggaaatgcataatgaaagcaaac

SEQ ID NO: 5547011 - DNA, 25 bp, Homo sapien
cactgactgcatagccaaagccaac

SEQ ID NO: 5547012 - DNA, 25 bp, Homo sapien
tcagcacgttgactgtaccaggtac

SEQ ID NO: 5547013 - DNA, 25 bp, Homo sapien
tgtaccaggtaccaaaatatactgc

SEQ ID NO: 5547014 - DNA, 25 bp, Homo sapien
atcagaaatcagacaggtagtgctt

SEQ ID NO: 5547015 - DNA, 25 bp, Homo sapien
aacttgaacagaaggtaacttgaag

SEQ ID NO: 5547016 - DNA, 25 bp, Homo sapien
tgggatagaaatacacgactgaaaa

SEQ ID NO: 5547017 - DNA, 25 bp, Homo sapien
tagtggtagagaaaagctattaaga

SEQ ID NO: 5547018 - DNA, 25 bp, Homo sapien
atgaattgaaggacaggaaaatata

SEQ ID NO: 5547019 - DNA, 25 bp, Homo sapien
ggaagtgcaaataacatatggtgac

SEQ ID NO: 5547020 - DNA, 25 bp, Homo sapien
agtaaagcccaagagggaaaaatga

SEQ ID NO: 5547021 - DNA, 25 bp, Homo sapien
agaggaaaactctgggattccccta

SEQ ID NO: 5547022 - DNA, 25 bp, Homo sapien
gccatgtagctctggtggtcatatc

SEQ ID NO: 5547023 - DNA, 25 bp, Homo sapien
atacagaaggtaaaagccatgtagc

SEQ ID NO: 5547024 - DNA, 25 bp, Homo sapien
agaaactaaagaagcttgcagaaat

SEQ ID NO: 5547025 - DNA, 25 bp, Homo sapien
ttctaaggtgccatacagctggttt

SEQ ID NO: 5547026 - DNA, 25 bp, Homo sapien
gggaagcaatctcagaggaaaactc

SEQ ID NO: 5547027 - DNA, 25 bp, Homo sapien
gtgtgttagccaatgaatctgtctc

SEQ ID NO: 5547028 - DNA, 25 bp, Homo sapien
agaaatggctacttaaagttgcttc

SEQ ID NO: 5547029 - DNA, 25 bp, Homo sapien
ctattaagagccattcatcaacgtg

SEQ ID NO: 5547030 - DNA, 25 bp, Homo sapien
agtaggaggagaaagttcattcttg

SEQ ID NO: 5547031 - DNA, 25 bp, Homo sapien
catcaacgtgatttgtgtgttagcc

SEQ ID NO: 5547032 - DNA, 25 bp, Homo sapien
tgatactaaagggttatttgtggta

SEQ ID NO: 5547033 - DNA, 25 bp, Homo sapien
ttacagaggaatatgccagtttaag

SEQ ID NO: 5547034 - DNA, 25 bp, Homo sapien
tgtatttatgagagaagtttaagcc

SEQ ID NO: 5547035 - DNA, 25 bp, Homo sapien
agggaacttgaccaccattggcaca

SEQ ID NO: 5547036 - DNA, 25 bp, Homo sapien
aatgaccccaaaattacagaggaat

SEQ ID NO: 5547037 - DNA, 25 bp, Homo sapien
caaatgggttttagacaaatgcaaa

SEQ ID NO: 5547038 - DNA, 25 bp, Homo sapien
cccgatgtgcacctcagccattttc

SEQ ID NO: 5547039 - DNA, 25 bp, Homo sapien
ggtgagtagttctgcactggccctg

SEQ ID NO: 5547040 - DNA, 25 bp, Homo sapien
cctcagcctcaccgcaccacccttt

SEQ ID NO: 5547041 - DNA, 25 bp, Homo sapien
cccagatgagatcccatgatgtgtg

SEQ ID NO: 5547042 - DNA, 25 bp, Homo sapien
atgatgtgtgttctaaatcggcctt

SEQ ID NO: 5547043 - DNA, 25 bp, Homo sapien
gtagaaaattacgtgtgtgtccata

SEQ ID NO: 5547044 - DNA, 25 bp, Homo sapien
gatttttgcagttggcccgatgtgc

SEQ ID NO: 5547045 - DNA, 25 bp, Homo sapien
tcggcctttagtaatggtgcaggtg

SEQ ID NO: 5547046 - DNA, 25 bp, Homo sapien
ggatattggctttcagattgcaggt

SEQ ID NO: 5547047 - DNA, 25 bp, Homo sapien
tgcttgccatatgttgaggtggggg

SEQ ID NO: 5547048 - DNA, 25 bp, Homo sapien
gtgatgaggctaagtacatgcttgc

SEQ ID NO: 5547049 - DNA, 25 bp, Homo sapien
caatcctggcacttaagcgggaatg

SEQ ID NO: 5547050 - DNA, 25 bp, Homo sapien
gtgtagggcaacatatctctcatac

SEQ ID NO: 5547051 - DNA, 25 bp, Homo sapien
tcccaagaaactgagattaccggca

SEQ ID NO: 5547052 - DNA, 25 bp, Homo sapien
gcaggagacaagactgagattgttt

SEQ ID NO: 5547053 - DNA, 25 bp, Homo sapien
cacacctggcctattcttgcaattc

SEQ ID NO: 5547054 - DNA, 25 bp, Homo sapien
agtggcctaagtgtagggcaacata

SEQ ID NO: 5547055 - DNA, 25 bp, Homo sapien
agactgagattgtttaggccatcct

SEQ ID NO: 5547056 - DNA, 25 bp, Homo sapien
ttgcaattctggaagatttaggggg

SEQ ID NO: 5547057 - DNA, 25 bp, Homo sapien
aggccatcctgttgctgacacaatc

SEQ ID NO: 5547058 - DNA, 25 bp, Homo sapien
tgacacaatcctggcacttaagcgg

SEQ ID NO: 5547059 - DNA, 25 bp, Homo sapien
ccacccgaacctcccaagaaactga

SEQ ID NO: 5547060 - DNA, 25 bp, Homo sapien
tcctcactccctccccccttgttgc

SEQ ID NO: 5547061 - DNA, 25 bp, Homo sapien
agtgattgcactgacatgataacgg

SEQ ID NO: 5547062 - DNA, 25 bp, Homo sapien
tccccccttgttgctaagctcagcc

SEQ ID NO: 5547063 - DNA, 25 bp, Homo sapien
gattgcactgacatgataacggggg

SEQ ID NO: 5547064 - DNA, 25 bp, Homo sapien
cctcaaccataattcccagtgattg

SEQ ID NO: 5547065 - DNA, 25 bp, Homo sapien
tgttgctaagctcagccaaggatgc

SEQ ID NO: 5547066 - DNA, 25 bp, Homo sapien
cccaagtgactcttaatcctcaacc

SEQ ID NO: 5547067 - DNA, 25 bp, Homo sapien
agcctggctgaattatccccaagtg

SEQ ID NO: 5547068 - DNA, 25 bp, Homo sapien
gctgaattatccccaagtgactctt

SEQ ID NO: 5547069 - DNA, 25 bp, Homo sapien
aatctgtttatgttgtgagtgtgtg

SEQ ID NO: 5547070 - DNA, 25 bp, Homo sapien
taagctcagccaaggatgctctagg

SEQ ID NO: 5547071 - DNA, 25 bp, Homo sapien
ggcaccgcatattcgccaacgcctt

SEQ ID NO: 5547072 - DNA, 25 bp, Homo sapien
acacactcgcgttgactggatttac

SEQ ID NO: 5547073 - DNA, 25 bp, Homo sapien
attactttctgatgcgcaaatcgtt

SEQ ID NO: 5547074 - DNA, 25 bp, Homo sapien
acggcaaaaacatcagcccactgtc

SEQ ID NO: 5547075 - DNA, 25 bp, Homo sapien
gcaaatcgttttactatggcaccgc

SEQ ID NO: 5547076 - DNA, 25 bp, Homo sapien
gccgggagtacacttgctactgttc

SEQ ID NO: 5547077 - DNA, 25 bp, Homo sapien
gcgcttccacggcaaaaacatcagc

SEQ ID NO: 5547078 - DNA, 25 bp, Homo sapien
ggaatgacacactcgcgttgactgg

SEQ ID NO: 5547079 - DNA, 25 bp, Homo sapien
agttagcctgttattagttgacatc

SEQ ID NO: 5547080 - DNA, 25 bp, Homo sapien
ccttctcccgtccgtgcgcttccac

SEQ ID NO: 5547081 - DNA, 25 bp, Homo sapien
agcccactgtccaccgcgaggcttg

SEQ ID NO: 5547082 - DNA, 25 bp, Homo sapien
agtgaaggccacatggttgtttcta

SEQ ID NO: 5547083 - DNA, 25 bp, Homo sapien
gtttctacatgggccatgggggagt

SEQ ID NO: 5547084 - DNA, 25 bp, Homo sapien
catacaaccagtgtcagaacattgg

SEQ ID NO: 5547085 - DNA, 25 bp, Homo sapien
gtcctggtgctagcttctgtgggca

SEQ ID NO: 5547086 - DNA, 25 bp, Homo sapien
ctgagcctcagaggtatcctgtggc

SEQ ID NO: 5547087 - DNA, 25 bp, Homo sapien
cctcctcctggaaacatgactctgc

SEQ ID NO: 5547088 - DNA, 25 bp, Homo sapien
agaaagccaagaccctaccctatct

SEQ ID NO: 5547089 - DNA, 25 bp, Homo sapien
ctgtggcccaccctgtccctgttat

SEQ ID NO: 5547090 - DNA, 25 bp, Homo sapien
ctaaccctgaccagggtcctggtgc

SEQ ID NO: 5547091 - DNA, 25 bp, Homo sapien
aagggctgtgcatgttaccacgatg

SEQ ID NO: 5547092 - DNA, 25 bp, Homo sapien
aaagaagattcccacgggccatttc

SEQ ID NO: 5547093 - DNA, 25 bp, Homo sapien
acagaatgcacttagaaggaggctg

SEQ ID NO: 5547094 - DNA, 25 bp, Homo sapien
agccttgaaacaaaagagaggagct

SEQ ID NO: 5547095 - DNA, 25 bp, Homo sapien
gttcagagtttgagctggtagctgg

SEQ ID NO: 5547096 - DNA, 25 bp, Homo sapien
gggcagaaagcaggctagttaattg

SEQ ID NO: 5547097 - DNA, 25 bp, Homo sapien
aagaggaagaacaaaatccagtcct

SEQ ID NO: 5547098 - DNA, 25 bp, Homo sapien
gagaggagctcaaatcattggaaga

SEQ ID NO: 5547099 - DNA, 25 bp, Homo sapien
tctaatgcaggtcttggtgagaaat

SEQ ID NO: 5547100 - DNA, 25 bp, Homo sapien
aagagaggagtgtaactttgacata

SEQ ID NO: 5547101 - DNA, 25 bp, Homo sapien
aatcagagttgtgtgcctaagcttc

SEQ ID NO: 5547102 - DNA, 25 bp, Homo sapien
gacataggtatgactgcagcagtga

SEQ ID NO: 5547103 - DNA, 25 bp, Homo sapien
ggcagcaaagaaaagtactaggtaa

SEQ ID NO: 5547104 - DNA, 25 bp, Homo sapien
gcaagcaggctaagcgatgttagca

SEQ ID NO: 5547105 - DNA, 25 bp, Homo sapien
cagatcctccaatgcccaggctggt

SEQ ID NO: 5547106 - DNA, 25 bp, Homo sapien
taaaatgggtcctgaaatatctgca

SEQ ID NO: 5547107 - DNA, 25 bp, Homo sapien
ggacttcagagggcgttcctcactc

SEQ ID NO: 5547108 - DNA, 25 bp, Homo sapien
tctgaccccaacacatgaagagtcc

SEQ ID NO: 5547109 - DNA, 25 bp, Homo sapien
gatagatttagaaagccccgaagaa

SEQ ID NO: 5547110 - DNA, 25 bp, Homo sapien
ccaggccattcagctggccagtagc

SEQ ID NO: 5547111 - DNA, 25 bp, Homo sapien
cactaggcaatgtaagctccagagg

SEQ ID NO: 5547112 - DNA, 25 bp, Homo sapien
ggcttgtctgcagaatagatgaaaa

SEQ ID NO: 5547113 - DNA, 25 bp, Homo sapien
gaagagtccatctggaaatgttggc

SEQ ID NO: 5547114 - DNA, 25 bp, Homo sapien
aagcgatgttagcaggcaactttgt

SEQ ID NO: 5547115 - DNA, 25 bp, Homo sapien
gacctacgatgacattccgcacctc

SEQ ID NO: 5547116 - DNA, 25 bp, Homo sapien
gctgcactctacaggcaaggtgagc

SEQ ID NO: 5547117 - DNA, 25 bp, Homo sapien
ggagatcgatgtgtacttggccaag

SEQ ID NO: 5547118 - DNA, 25 bp, Homo sapien
tgtgcgtccagcctcgatgacctac

SEQ ID NO: 5547119 - DNA, 25 bp, Homo sapien
cttgagatggccatcgacaccctga

SEQ ID NO: 5547120 - DNA, 25 bp, Homo sapien
ccaactattgccgcagcaaagggga

SEQ ID NO: 5547121 - DNA, 25 bp, Homo sapien
attcctcgaagctgatggacaagca

SEQ ID NO: 5547122 - DNA, 25 bp, Homo sapien
ccagaccaccagtaacacatcccgt

SEQ ID NO: 5547123 - DNA, 25 bp, Homo sapien
tctcagccaagatcaagcccaagca

SEQ ID NO: 5547124 - DNA, 25 bp, Homo sapien
tgacccagttgtacaggagatcgat

SEQ ID NO: 5547125 - DNA, 25 bp, Homo sapien
ctctagtatggccaatgaagaggat

SEQ ID NO: 5547126 - DNA, 25 bp, Homo sapien
gtgggtgagacattcctgctccctg

SEQ ID NO: 5547127 - DNA, 25 bp, Homo sapien
ctgtcaaaagattgatccctcattc

SEQ ID NO: 5547128 - DNA, 25 bp, Homo sapien
tagtttaatccagagtgtaagtaac

SEQ ID NO: 5547129 - DNA, 25 bp, Homo sapien
taaaggaaaatgtgcttcaattacc

SEQ ID NO: 5547130 - DNA, 25 bp, Homo sapien
ttttctattgtaagggtgtgggtga

SEQ ID NO: 5547131 - DNA, 25 bp, Homo sapien
ttgaatattgtgagagtacctattt

SEQ ID NO: 5547132 - DNA, 25 bp, Homo sapien
ctgtttgcctggtaagctcaactcc

SEQ ID NO: 5547133 - DNA, 25 bp, Homo sapien
agtgtaagtaactctggactattct

SEQ ID NO: 5547134 - DNA, 25 bp, Homo sapien
tttataatgttatgagcccaggagt

SEQ ID NO: 5547135 - DNA, 25 bp, Homo sapien
ggtaagctcaactcctgatgggttc

SEQ ID NO: 5547136 - DNA, 25 bp, Homo sapien
tctgcttcaagtaaacaagtgttca

SEQ ID NO: 5547137 - DNA, 25 bp, Homo sapien
aggaatgcatccaaatgactaagtc

SEQ ID NO: 5547138 - DNA, 25 bp, Homo sapien
agctattttacgttaaacaggactc

SEQ ID NO: 5547139 - DNA, 25 bp, Homo sapien
aaggtctgactttagtaatgcactg

SEQ ID NO: 5547140 - DNA, 25 bp, Homo sapien
ctaaaacttaaaccggaatgctcta

SEQ ID NO: 5547141 - DNA, 25 bp, Homo sapien
aggaggaaatgttgtttggcctttc

SEQ ID NO: 5547142 - DNA, 25 bp, Homo sapien
aagtatttcgtttggaaagcaagga

SEQ ID NO: 5547143 - DNA, 25 bp, Homo sapien
ccggaatgctctaaaagttaatgaa

SEQ ID NO: 5547144 - DNA, 25 bp, Homo sapien
atattcagcaatgtaaattcggtta

SEQ ID NO: 5547145 - DNA, 25 bp, Homo sapien
tacctccttctacacccgctcagca

SEQ ID NO: 5547146 - DNA, 25 bp, Homo sapien
cactgcagcaatgtacctccttcta

SEQ ID NO: 5547147 - DNA, 25 bp, Homo sapien
agtaatgcactgtatttaaaggaat

SEQ ID NO: 5547148 - DNA, 25 bp, Homo sapien
acaggtgctgtactagagatgacaa

SEQ ID NO: 5547149 - DNA, 25 bp, Homo sapien
aaatattggtgaatacaggtgctgt

SEQ ID NO: 5547150 - DNA, 25 bp, Homo sapien
gatacatcctgtgcacctcaagtct

SEQ ID NO: 5547151 - DNA, 25 bp, Homo sapien
tctactagttgaataaggatgccat

SEQ ID NO: 5547152 - DNA, 25 bp, Homo sapien
acaaaagtacaattaagagtcctat

SEQ ID NO: 5547153 - DNA, 25 bp, Homo sapien
agaaaaagatctgcacctatgtatg

SEQ ID NO: 5547154 - DNA, 25 bp, Homo sapien
aatacccaacacaccatactcatgc

SEQ ID NO: 5547155 - DNA, 25 bp, Homo sapien
ttctataccgagagatcagcaatct

SEQ ID NO: 5547156 - DNA, 25 bp, Homo sapien
acaatttaagtaagaggagaagata

SEQ ID NO: 5547157 - DNA, 25 bp, Homo sapien
gcaaactactagaactgagaaaatt

SEQ ID NO: 5547158 - DNA, 25 bp, Homo sapien
acctcaagtctatagcaaaagttac

SEQ ID NO: 5547159 - DNA, 25 bp, Homo sapien
gatggacatcaagcctgaggctgac

SEQ ID NO: 5547160 - DNA, 25 bp, Homo sapien
gctggtctttctgtccgtgggcctg

SEQ ID NO: 5547161 - DNA, 25 bp, Homo sapien
gttaccaccctggtgtggcacctcc

SEQ ID NO: 5547162 - DNA, 25 bp, Homo sapien
aggagcagcctgtgcctgttcgctg

SEQ ID NO: 5547163 - DNA, 25 bp, Homo sapien
gtcctggcttgactctgggacgtgg

SEQ ID NO: 5547164 - DNA, 25 bp, Homo sapien
ggccacatgtggtcacagaacgcca

SEQ ID NO: 5547165 - DNA, 25 bp, Homo sapien
tcacctactcagagtggatggagga

SEQ ID NO: 5547166 - DNA, 25 bp, Homo sapien
tgctctggttcagcggttatggcca

SEQ ID NO: 5547167 - DNA, 25 bp, Homo sapien
cggtgcccgagactcctgtgtttga

SEQ ID NO: 5547168 - DNA, 25 bp, Homo sapien
gtgagccgccagccctccttcacct

SEQ ID NO: 5547169 - DNA, 25 bp, Homo sapien
gagaagatcgaggatgacttcctgg

SEQ ID NO: 5547170 - DNA, 25 bp, Homo sapien
tttagcaagtgatatttcctcaaac

SEQ ID NO: 5547171 - DNA, 25 bp, Homo sapien
tcaagccaggcttcatccagaaaaa

SEQ ID NO: 5547172 - DNA, 25 bp, Homo sapien
agcctcctgaatagctggggttaca

SEQ ID NO: 5547173 - DNA, 25 bp, Homo sapien
ccaggcttcatccagaaaaaagaat

SEQ ID NO: 5547174 - DNA, 25 bp, Homo sapien
gggttacaggcgcctgctaccatgc

SEQ ID NO: 5547175 - DNA, 25 bp, Homo sapien
accagtgatggatatttagctaggc

SEQ ID NO: 5547176 - DNA, 25 bp, Homo sapien
agtgatggatatttagctaggctat

SEQ ID NO: 5547177 - DNA, 25 bp, Homo sapien
tcaccatgttgatcaggctggtttt

SEQ ID NO: 5547178 - DNA, 25 bp, Homo sapien
tactccgatttccttctactgtgct

SEQ ID NO: 5547179 - DNA, 25 bp, Homo sapien
caaatgatctgcctgcctcggcctc

SEQ ID NO: 5547180 - DNA, 25 bp, Homo sapien
aggctggttttgaaatcctgacctc

SEQ ID NO: 5547181 - DNA, 25 bp, Homo sapien
gagaaaacttcagggtgtggctcaa

SEQ ID NO: 5547182 - DNA, 25 bp, Homo sapien
ttgtcaagcttggcttggagggaga

SEQ ID NO: 5547183 - DNA, 25 bp, Homo sapien
gaatagggtccagagtaggatttga

SEQ ID NO: 5547184 - DNA, 25 bp, Homo sapien
aggagagagggcctccttcattttc

SEQ ID NO: 5547185 - DNA, 25 bp, Homo sapien
aaagaagcagagggtcctccaataa

SEQ ID NO: 5547186 - DNA, 25 bp, Homo sapien
catctacagaggccagatcagatac

SEQ ID NO: 5547187 - DNA, 25 bp, Homo sapien
ggagggagaagaatcacccatcttc

SEQ ID NO: 5547188 - DNA, 25 bp, Homo sapien
gtcatgaccaatagggacctgtcct

SEQ ID NO: 5547189 - DNA, 25 bp, Homo sapien
accctatcagctgggacaggaatgg

SEQ ID NO: 5547190 - DNA, 25 bp, Homo sapien
ttagcagcagccgtgatgaactgaa

SEQ ID NO: 5547191 - DNA, 25 bp, Homo sapien
cagcaagggatgtcatgaccaatag

SEQ ID NO: 5547192 - DNA, 25 bp, Homo sapien
gagcaatgcaaatttccagtgaacc

SEQ ID NO: 5547193 - DNA, 25 bp, Homo sapien
tatatggttcaatagggcagagaaa

SEQ ID NO: 5547194 - DNA, 25 bp, Homo sapien
tttgggggctctttctctggcatat

SEQ ID NO: 5547195 - DNA, 25 bp, Homo sapien
aagctcaggccactaggaacatctg

SEQ ID NO: 5547196 - DNA, 25 bp, Homo sapien
ctgagatcacaggttggcttagaac

SEQ ID NO: 5547197 - DNA, 25 bp, Homo sapien
tgctctggtagagcctcacagggtc

SEQ ID NO: 5547198 - DNA, 25 bp, Homo sapien
ctttagagattaaggttggtgcctc

SEQ ID NO: 5547199 - DNA, 25 bp, Homo sapien
aaataccaataaagaaagcccaagc

SEQ ID NO: 5547200 - DNA, 25 bp, Homo sapien
tgggcaacaagtgtctcaagaaaaa

SEQ ID NO: 5547201 - DNA, 25 bp, Homo sapien
ccaagcccaaagggttagacatttc

SEQ ID NO: 5547202 - DNA, 25 bp, Homo sapien
taggaacatctggctaggatttgat

SEQ ID NO: 5547203 - DNA, 25 bp, Homo sapien
gaagggcactaagtagctgtagaaa

SEQ ID NO: 5547204 - DNA, 25 bp, Homo sapien
attaagaggtatcagcagataggag

SEQ ID NO: 5547205 - DNA, 25 bp, Homo sapien
aggtaagttcaggaattaagaggta

SEQ ID NO: 5547206 - DNA, 25 bp, Homo sapien
aaaattaacactaaaggcagacttg

SEQ ID NO: 5547207 - DNA, 25 bp, Homo sapien
tgtataaaagtaactgaagggcact

SEQ ID NO: 5547208 - DNA, 25 bp, Homo sapien
aaaggcagacttgaaattgtataaa

SEQ ID NO: 5547209 - DNA, 25 bp, Homo sapien
tagctgtagaaagatttgagtggag

SEQ ID NO: 5547210 - DNA, 25 bp, Homo sapien
aactgctatactccagggaaggttt

SEQ ID NO: 5547211 - DNA, 25 bp, Homo sapien
ctggaatataggttaaatcaggtta

SEQ ID NO: 5547212 - DNA, 25 bp, Homo sapien
aatcactgtccaagcccaacgaaac

SEQ ID NO: 5547213 - DNA, 25 bp, Homo sapien
ctgggtctggcacagatcaactgaa

SEQ ID NO: 5547214 - DNA, 25 bp, Homo sapien
gtacagtttggcaggtttccacaaa

SEQ ID NO: 5547215 - DNA, 25 bp, Homo sapien
accaaccagaggtaactggtgggga

SEQ ID NO: 5547216 - DNA, 25 bp, Homo sapien
accacagtgtgctgaatcattcgtc

SEQ ID NO: 5547217 - DNA, 25 bp, Homo sapien
cccgtaggaatatacctaggagtac

SEQ ID NO: 5547218 - DNA, 25 bp, Homo sapien
attcgtcagtggatgggtatcttga

SEQ ID NO: 5547219 - DNA, 25 bp, Homo sapien
catctgaccaacatctaaagcaagg

SEQ ID NO: 5547220 - DNA, 25 bp, Homo sapien
ctaaagcaaggtacaaaatatttcc

SEQ ID NO: 5547221 - DNA, 25 bp, Homo sapien
ccagcttcttggactcagagcactg

SEQ ID NO: 5547222 - DNA, 25 bp, Homo sapien
ccacaaacgtatattccatctgacc

SEQ ID NO: 5547223 - DNA, 25 bp, Homo sapien
atcttgacagcttccaggttttggc

SEQ ID NO: 5547224 - DNA, 25 bp, Homo sapien
catgttgtggtgtttatcaggaatt

SEQ ID NO: 5547225 - DNA, 25 bp, Homo sapien
ttgatgaactcaagttacacaaagt

SEQ ID NO: 5547226 - DNA, 25 bp, Homo sapien
tttatgagcttaagcaaaatctttc

SEQ ID NO: 5547227 - DNA, 25 bp, Homo sapien
ttaaaattggaatcaagaggctgag

SEQ ID NO: 5547228 - DNA, 25 bp, Homo sapien
atgggaacacctggagctcatcagg

SEQ ID NO: 5547229 - DNA, 25 bp, Homo sapien
cttattctaagtgtggtcagagggg

SEQ ID NO: 5547230 - DNA, 25 bp, Homo sapien
cacctggagctcatcaggaatgtgg

SEQ ID NO: 5547231 - DNA, 25 bp, Homo sapien
ttggaatcaagaggctgagttctca

SEQ ID NO: 5547232 - DNA, 25 bp, Homo sapien
gcagggaacttggattagcgtttga

SEQ ID NO: 5547233 - DNA, 25 bp, Homo sapien
gcctgagtgggtaaatttatgagct

SEQ ID NO: 5547234 - DNA, 25 bp, Homo sapien
tcatatgcctgagtgggtaaattta

SEQ ID NO: 5547235 - DNA, 25 bp, Homo sapien
aagcatgccaatactgattacaaac

SEQ ID NO: 5547236 - DNA, 25 bp, Homo sapien
catctggaagctacttagacataag

SEQ ID NO: 5547237 - DNA, 25 bp, Homo sapien
cagccccgaccctcacctccagtga

SEQ ID NO: 5547238 - DNA, 25 bp, Homo sapien
gatgatgctaagtcactgtgtttgt

SEQ ID NO: 5547239 - DNA, 25 bp, Homo sapien
caacactcccctcaccccgaagacc

SEQ ID NO: 5547240 - DNA, 25 bp, Homo sapien
gagtaaatgagataagacatacact

SEQ ID NO: 5547241 - DNA, 25 bp, Homo sapien
gtgcccagtggacatgagttattca

SEQ ID NO: 5547242 - DNA, 25 bp, Homo sapien
gtgtttgtggttgaatcctggttcc

SEQ ID NO: 5547243 - DNA, 25 bp, Homo sapien
gggtggtgacattcaggttaacagt

SEQ ID NO: 5547244 - DNA, 25 bp, Homo sapien
tacacttagaacaatgcccagtgcc

SEQ ID NO: 5547245 - DNA, 25 bp, Homo sapien
atgcccagtgcctagcacgtgccca

SEQ ID NO: 5547246 - DNA, 25 bp, Homo sapien
tcatacgtgctgtgaggagtaaatg

SEQ ID NO: 5547247 - DNA, 25 bp, Homo sapien
tggcggaattttactaggtgcgtgt

SEQ ID NO: 5547248 - DNA, 25 bp, Homo sapien
gtgcaagcaacgctccccacgtgtt

SEQ ID NO: 5547249 - DNA, 25 bp, Homo sapien
ctgcggtcccctgagtcaactctgt

SEQ ID NO: 5547250 - DNA, 25 bp, Homo sapien
cggagacataacgatttggattgct

SEQ ID NO: 5547251 - DNA, 25 bp, Homo sapien
gggtctacttggccagcgaaactct

SEQ ID NO: 5547252 - DNA, 25 bp, Homo sapien
aggcccggtgtcagacatccggaaa

SEQ ID NO: 5547253 - DNA, 25 bp, Homo sapien
gtgttagcgtgcgtgagattcaatt

SEQ ID NO: 5547254 - DNA, 25 bp, Homo sapien
ggccgcctaggtatgcaatcctgct

SEQ ID NO: 5547255 - DNA, 25 bp, Homo sapien
agctactcttaggatcagggggaga

SEQ ID NO: 5547256 - DNA, 25 bp, Homo sapien
cggggctgaggttttcttgctcctg

SEQ ID NO: 5547257 - DNA, 25 bp, Homo sapien
attcgcacatccggaagccacttca

SEQ ID NO: 5547258 - DNA, 25 bp, Homo sapien
tctcatgtgcacttaccccagctcc

SEQ ID NO: 5547259 - DNA, 25 bp, Homo sapien
tgaagtgtgaaagcatgtaaactat

SEQ ID NO: 5547260 - DNA, 25 bp, Homo sapien
ctcctagtgagattgtgagctcttc

SEQ ID NO: 5547261 - DNA, 25 bp, Homo sapien
acatggtgatgtgccttgggaattt

SEQ ID NO: 5547262 - DNA, 25 bp, Homo sapien
gtgagctcttcaaggtaaggatcat

SEQ ID NO: 5547263 - DNA, 25 bp, Homo sapien
tcagatggcacgaattagaagtaat

SEQ ID NO: 5547264 - DNA, 25 bp, Homo sapien
gaaaatagaaggcatgcttatcaaa

SEQ ID NO: 5547265 - DNA, 25 bp, Homo sapien
ttaaggcctaaaccaagtccaatca

SEQ ID NO: 5547266 - DNA, 25 bp, Homo sapien
aagtaatgcacgagataacagaatc

SEQ ID NO: 5547267 - DNA, 25 bp, Homo sapien
actctgaagtgcataacatggtgat

SEQ ID NO: 5547268 - DNA, 25 bp, Homo sapien
tgaccactgcttagagaaaatagaa

SEQ ID NO: 5547269 - DNA, 25 bp, Homo sapien
taccacgccctaggccctgagctac

SEQ ID NO: 5547270 - DNA, 25 bp, Homo sapien
tcaaagacaatcagaatgcgacatc

SEQ ID NO: 5547271 - DNA, 25 bp, Homo sapien
ggcacaaagtggtgaagttgcttgc

SEQ ID NO: 5547272 - DNA, 25 bp, Homo sapien
gcccaagaccccgtagctggtatgt

SEQ ID NO: 5547273 - DNA, 25 bp, Homo sapien
ggtgccagcccagtatcagttgtag

SEQ ID NO: 5547274 - DNA, 25 bp, Homo sapien
gatggggcctgtcttagctgggccc

SEQ ID NO: 5547275 - DNA, 25 bp, Homo sapien
tgtggcagagcataaatgcaaaccc

SEQ ID NO: 5547276 - DNA, 25 bp, Homo sapien
cagcagtggatgcaccccaaatcat

SEQ ID NO: 5547277 - DNA, 25 bp, Homo sapien
aaccctatgcacagaggaaatggaa

SEQ ID NO: 5547278 - DNA, 25 bp, Homo sapien
agttgtagggaaatctggtaacatt

SEQ ID NO: 5547279 - DNA, 25 bp, Homo sapien
tcctgccctagacgatgacactttt

SEQ ID NO: 5547280 - DNA, 25 bp, Homo sapien
cataaatagtagctgtggttagttt

SEQ ID NO: 5547281 - DNA, 25 bp, Homo sapien
gggtgtggcactagagttcataaat

SEQ ID NO: 5547282 - DNA, 25 bp, Homo sapien
accagatgtggattacagtggtttc

SEQ ID NO: 5547283 - DNA, 25 bp, Homo sapien
taaatcaggattacagagcaaaacc

SEQ ID NO: 5547284 - DNA, 25 bp, Homo sapien
ttgtctaaccagatgtggattacag

SEQ ID NO: 5547285 - DNA, 25 bp, Homo sapien
agcaaaaccctccaggggtgcgtga

SEQ ID NO: 5547286 - DNA, 25 bp, Homo sapien
gcttccctgggaagttgcggaagag

SEQ ID NO: 5547287 - DNA, 25 bp, Homo sapien
cagtggtttcatataagaggatttc

SEQ ID NO: 5547288 - DNA, 25 bp, Homo sapien
agagaagctgaagtgttgcaaacaa

SEQ ID NO: 5547289 - DNA, 25 bp, Homo sapien
cgtctctggagacgtgcttcgtgag

SEQ ID NO: 5547290 - DNA, 25 bp, Homo sapien
aagaggcgtctctggagacgtgctt

SEQ ID NO: 5547291 - DNA, 25 bp, Homo sapien
atgacgaattatgtagccacggctg

SEQ ID NO: 5547292 - DNA, 25 bp, Homo sapien
ttcccagggccttagatcaagatct

SEQ ID NO: 5547293 - DNA, 25 bp, Homo sapien
aataaacaggtagtcttggtgggaa

SEQ ID NO: 5547294 - DNA, 25 bp, Homo sapien
gcccacggctttctgtcagtctggt

SEQ ID NO: 5547295 - DNA, 25 bp, Homo sapien
acaaattggaaataaacaggtagtc

SEQ ID NO: 5547296 - DNA, 25 bp, Homo sapien
cagtctcctagggttgcccacggct

SEQ ID NO: 5547297 - DNA, 25 bp, Homo sapien
agtctggtggcttacaaggcttcac

SEQ ID NO: 5547298 - DNA, 25 bp, Homo sapien
taaaaaatcaggaaaagcagcaaaa

SEQ ID NO: 5547299 - DNA, 25 bp, Homo sapien
gcgtaggtagttctttctggtgttc

SEQ ID NO: 5547300 - DNA, 25 bp, Homo sapien
ggctgtgttgtcaggaggtttcttt

SEQ ID NO: 5547301 - DNA, 25 bp, Homo sapien
aggtaggagtatcattcccagggcc

SEQ ID NO: 5547302 - DNA, 25 bp, Homo sapien
gaaacccaggcttttgagggctctc

SEQ ID NO: 5547303 - DNA, 25 bp, Homo sapien
tgaacaaaataaaagtcgagcacat

SEQ ID NO: 5547304 - DNA, 25 bp, Homo sapien
ggggttacgctgcagtcactaacag

SEQ ID NO: 5547305 - DNA, 25 bp, Homo sapien
gattaaggatcataggttttcgtgc

SEQ ID NO: 5547306 - DNA, 25 bp, Homo sapien
tcgtgcttactcagatggaacaaga

SEQ ID NO: 5547307 - DNA, 25 bp, Homo sapien
aaatcccactaacagagaagggtta

SEQ ID NO: 5547308 - DNA, 25 bp, Homo sapien
tggtgagacaacatctggtgaaaga

SEQ ID NO: 5547309 - DNA, 25 bp, Homo sapien
aaagtcgagcacattcaaaacatcc

SEQ ID NO: 5547310 - DNA, 25 bp, Homo sapien
ctctttgtgtgatcacaggggaggg

SEQ ID NO: 5547311 - DNA, 25 bp, Homo sapien
atctggtgaaagatttggggttacg

SEQ ID NO: 5547312 - DNA, 25 bp, Homo sapien
agaaaagctgaaagcccaccaaaaa

SEQ ID NO: 5547313 - DNA, 25 bp, Homo sapien
agtggtaggggattctccccacttc

SEQ ID NO: 5547314 - DNA, 25 bp, Homo sapien
agatactgtacatgaagcccttgcc

SEQ ID NO: 5547315 - DNA, 25 bp, Homo sapien
tcccaaaggcgattagaacaaagta

SEQ ID NO: 5547316 - DNA, 25 bp, Homo sapien
gtttggccactgaaggcaaatctgc

SEQ ID NO: 5547317 - DNA, 25 bp, Homo sapien
tgatccagtggaaaaacctcacaac

SEQ ID NO: 5547318 - DNA, 25 bp, Homo sapien
agcaagacagcacaatgtgactccc

SEQ ID NO: 5547319 - DNA, 25 bp, Homo sapien
tggctatccgtgcagcaagacagca

SEQ ID NO: 5547320 - DNA, 25 bp, Homo sapien
gtgttataagatgtagagaattggc

SEQ ID NO: 5547321 - DNA, 25 bp, Homo sapien
gaacaaagtaagaggaggcctctta

SEQ ID NO: 5547322 - DNA, 25 bp, Homo sapien
tgctcgttgcttacagtggtagggg

SEQ ID NO: 5547323 - DNA, 25 bp, Homo sapien
acaaagagacccatagatgtcccaa

SEQ ID NO: 5547324 - DNA, 25 bp, Homo sapien
tggtgagtaattatttgaagaaggg

SEQ ID NO: 5547325 - DNA, 25 bp, Homo sapien
aaccagataactgaacacaggtacc

SEQ ID NO: 5547326 - DNA, 25 bp, Homo sapien
aaagtaaatacttgctggagaattg

SEQ ID NO: 5547327 - DNA, 25 bp, Homo sapien
ataggaggctatagtgaataaaatc

SEQ ID NO: 5547328 - DNA, 25 bp, Homo sapien
ctctcaatgagaactgatccagtgg

SEQ ID NO: 5547329 - DNA, 25 bp, Homo sapien
aactaccatgaagataacgacaatt

SEQ ID NO: 5547330 - DNA, 25 bp, Homo sapien
gatccagtgggcattatactgattc

SEQ ID NO: 5547331 - DNA, 25 bp, Homo sapien
cacaggtaccagtattcacaactac

SEQ ID NO: 5547332 - DNA, 25 bp, Homo sapien
ttcaggccatgtatataggaggcta

SEQ ID NO: 5547333 - DNA, 25 bp, Homo sapien
tgatgcaatgctaagtaaacaatat

SEQ ID NO: 5547334 - DNA, 25 bp, Homo sapien
gaataaaatcccatagtagactgct

SEQ ID NO: 5547335 - DNA, 25 bp, Homo sapien
gatttctacctgcaggcacagacct

SEQ ID NO: 5547336 - DNA, 25 bp, Homo sapien
aactctacgaggtcaagcagagtgc

SEQ ID NO: 5547337 - DNA, 25 bp, Homo sapien
aggtggctggatattaagacatgta

SEQ ID NO: 5547338 - DNA, 25 bp, Homo sapien
ttctggctttgagagtaacagggga

SEQ ID NO: 5547339 - DNA, 25 bp, Homo sapien
taagactatgacccctgagaggaat

SEQ ID NO: 5547340 - DNA, 25 bp, Homo sapien
atctgcataggagccccttgagagg

SEQ ID NO: 5547341 - DNA, 25 bp, Homo sapien
gacatgtaagcctagagcaaaactc

SEQ ID NO: 5547342 - DNA, 25 bp, Homo sapien
gagtaccagagagctaacagatatg

SEQ ID NO: 5547343 - DNA, 25 bp, Homo sapien
acaggggaaagatttagcttcttac

SEQ ID NO: 5547344 - DNA, 25 bp, Homo sapien
atctgaggtccaactagccagtgtt

SEQ ID NO: 5547345 - DNA, 25 bp, Homo sapien
ggtggtttcatgtagttgagaagac

SEQ ID NO: 5547346 - DNA, 25 bp, Homo sapien
gctctttggtagaaataaaggctgt

SEQ ID NO: 5547347 - DNA, 25 bp, Homo sapien
tcagaagcacgaaataaatccaaac

SEQ ID NO: 5547348 - DNA, 25 bp, Homo sapien
gcattagaatcagaagcacgaaata

SEQ ID NO: 5547349 - DNA, 25 bp, Homo sapien
atcaaaaacagtggaatatggcatg

SEQ ID NO: 5547350 - DNA, 25 bp, Homo sapien
ataattgcgctagtggattagcatc

SEQ ID NO: 5547351 - DNA, 25 bp, Homo sapien
aaatccaaactggggacagatggta

SEQ ID NO: 5547352 - DNA, 25 bp, Homo sapien
ctgcccatcaactctaccagggact

SEQ ID NO: 5547353 - DNA, 25 bp, Homo sapien
ggggacagatggtaattctctccag

SEQ ID NO: 5547354 - DNA, 25 bp, Homo sapien
aaaacctcagccgagtctgcccatc

SEQ ID NO: 5547355 - DNA, 25 bp, Homo sapien
ttttgaattgtggtagttgtgagca

SEQ ID NO: 5547356 - DNA, 25 bp, Homo sapien
agtggaatatggcatgtaacattgc

SEQ ID NO: 5547357 - DNA, 25 bp, Homo sapien
aaagttgttcatgggcacgtcagcg

SEQ ID NO: 5547358 - DNA, 25 bp, Homo sapien
cgctgacgtgcccatgaacaacttt

SEQ ID NO: 5547359 - DNA, 25 bp, Homo sapien
agcattgaccttgtgggctcgagca

SEQ ID NO: 5547360 - DNA, 25 bp, Homo sapien
ttcctctccaaaccaccacgtgctc

SEQ ID NO: 5547361 - DNA, 25 bp, Homo sapien
tgtagtggcttcgcagagtatttat

SEQ ID NO: 5547362 - DNA, 25 bp, Homo sapien
acagctttctgcagcattgaccttg

SEQ ID NO: 5547363 - DNA, 25 bp, Homo sapien
atttggccagaaagtctatagtcaa

SEQ ID NO: 5547364 - DNA, 25 bp, Homo sapien
aaaagctgtggctatgaagaagtga

SEQ ID NO: 5547365 - DNA, 25 bp, Homo sapien
tccttaaataaaaagctgtggctat

SEQ ID NO: 5547366 - DNA, 25 bp, Homo sapien
tgtgcagaaaagtattacgtgggtt

SEQ ID NO: 5547367 - DNA, 25 bp, Homo sapien
ttgtgtgttattgtagtggcttcgc

SEQ ID NO: 5547368 - DNA, 25 bp, Homo sapien
ggctatgaagaagtgagagtttttt

SEQ ID NO: 5547369 - DNA, 25 bp, Homo sapien
ctccagctcatgcagaattctgttt

SEQ ID NO: 5547370 - DNA, 25 bp, Homo sapien
aatgccagagactgttgagtatctt

SEQ ID NO: 5547371 - DNA, 25 bp, Homo sapien
ggcttggatggctgtatttgaggtt

SEQ ID NO: 5547372 - DNA, 25 bp, Homo sapien
tccattctgtgtgccgtcctgggcg

SEQ ID NO: 5547373 - DNA, 25 bp, Homo sapien
aaacacagaaataacgcagcaatag

SEQ ID NO: 5547374 - DNA, 25 bp, Homo sapien
tagaattactggcttggatggctgt

SEQ ID NO: 5547375 - DNA, 25 bp, Homo sapien
gtcctgggcgccattgctcctaact

SEQ ID NO: 5547376 - DNA, 25 bp, Homo sapien
tggttacactgactggaaacagaac

SEQ ID NO: 5547377 - DNA, 25 bp, Homo sapien
ggaaatgaggtgtatttacagagaa

SEQ ID NO: 5547378 - DNA, 25 bp, Homo sapien
gtacagacaagaagcaagtttcaca

SEQ ID NO: 5547379 - DNA, 25 bp, Homo sapien
gagtgccaagagctaaatgagttac

SEQ ID NO: 5547380 - DNA, 25 bp, Homo sapien
taacgttgtagcaccccaaatgcac

SEQ ID NO: 5547381 - DNA, 25 bp, Homo sapien
taacagtagaaagaatcacacagtc

SEQ ID NO: 5547382 - DNA, 25 bp, Homo sapien
acaagggagatttcctgagaataaa

SEQ ID NO: 5547383 - DNA, 25 bp, Homo sapien
aaataatggactacagttgggttct

SEQ ID NO: 5547384 - DNA, 25 bp, Homo sapien
tgaacgatttggaaactgggtgata

SEQ ID NO: 5547385 - DNA, 25 bp, Homo sapien
catggatacaggtagaggatatcta

SEQ ID NO: 5547386 - DNA, 25 bp, Homo sapien
gtgactgaaagacagccatggatac

SEQ ID NO: 5547387 - DNA, 25 bp, Homo sapien
taggattgcttaaatgtgaagactc

SEQ ID NO: 5547388 - DNA, 25 bp, Homo sapien
gtcttgcaaaatggacaagggagat

SEQ ID NO: 5547389 - DNA, 25 bp, Homo sapien
ctcagaaatttaggaagagggtaaa

SEQ ID NO: 5547390 - DNA, 25 bp, Homo sapien
aagagcaggattgaaacaaataatg

SEQ ID NO: 5547391 - DNA, 25 bp, Homo sapien
ctgtctggataaatggctctgtcta

SEQ ID NO: 5547392 - DNA, 25 bp, Homo sapien
actggtggtcagtacttgaacctcc

SEQ ID NO: 5547393 - DNA, 25 bp, Homo sapien
gccaaaccaaagaaatggattacac

SEQ ID NO: 5547394 - DNA, 25 bp, Homo sapien
tatatcaactgggtccaacagcagg

SEQ ID NO: 5547395 - DNA, 25 bp, Homo sapien
aaacctacaagtgtgaaatggattt

SEQ ID NO: 5547396 - DNA, 25 bp, Homo sapien
ataacacattgcaaaggagtgctat

SEQ ID NO: 5547397 - DNA, 25 bp, Homo sapien
atgggacagattatacagtatgata

SEQ ID NO: 5547398 - DNA, 25 bp, Homo sapien
tacatagggtaaatgagaaaatggg

SEQ ID NO: 5547399 - DNA, 25 bp, Homo sapien
gtacaagaattgatagacataagaa

SEQ ID NO: 5547400 - DNA, 25 bp, Homo sapien
gcaggcctatggaatggtaggtttt

SEQ ID NO: 5547401 - DNA, 25 bp, Homo sapien
aactctacaagatcggtattccccc

SEQ ID NO: 5547402 - DNA, 25 bp, Homo sapien
ctttttaaggaagttgtggtacatc

SEQ ID NO: 5547403 - DNA, 25 bp, Homo sapien
atgaaaatacaacaacctatgtgac

SEQ ID NO: 5547404 - DNA, 25 bp, Homo sapien
gcccagccagctctttatagtttaa

SEQ ID NO: 5547405 - DNA, 25 bp, Homo sapien
gagtctggaaaaatccatgtaccgg

SEQ ID NO: 5547406 - DNA, 25 bp, Homo sapien
agggatccacaagactgcctccatg

SEQ ID NO: 5547407 - DNA, 25 bp, Homo sapien
acaacaacctatgtgacttcccaag

SEQ ID NO: 5547408 - DNA, 25 bp, Homo sapien
gagatttgctagaaggactcatggg

SEQ ID NO: 5547409 - DNA, 25 bp, Homo sapien
aagaggaaggataaaccttaagaga

SEQ ID NO: 5547410 - DNA, 25 bp, Homo sapien
gtaccggcttccttatgtgctgtgc

SEQ ID NO: 5547411 - DNA, 25 bp, Homo sapien
ctggaaaaatccatgtaccggcttc

SEQ ID NO: 5547412 - DNA, 25 bp, Homo sapien
tgtttggagatttgctagaaggact

SEQ ID NO: 5547413 - DNA, 25 bp, Homo sapien
aaaccttaagagatcacaacactat

SEQ ID NO: 5547414 - DNA, 25 bp, Homo sapien
agtactgagagggtcaccccattca

SEQ ID NO: 5547415 - DNA, 25 bp, Homo sapien
ccaccacccgcagcccatgattcca

SEQ ID NO: 5547416 - DNA, 25 bp, Homo sapien
aaaaactctccttgtgccctactcc

SEQ ID NO: 5547417 - DNA, 25 bp, Homo sapien
cgcataaagggtaacatcttgcaac

SEQ ID NO: 5547418 - DNA, 25 bp, Homo sapien
agggtaacatcttgcaacttgattc

SEQ ID NO: 5547419 - DNA, 25 bp, Homo sapien
ctccttgtgccctactccctcatcc

SEQ ID NO: 5547420 - DNA, 25 bp, Homo sapien
ttagtatacatgcttccagactttt

SEQ ID NO: 5547421 - DNA, 25 bp, Homo sapien
ttttcttcgcataaagggtaacatc

SEQ ID NO: 5547422 - DNA, 25 bp, Homo sapien
cagggtcttcctatgctgcttaggc

SEQ ID NO: 5547423 - DNA, 25 bp, Homo sapien
tccctgaagtaatgctactctgcat

SEQ ID NO: 5547424 - DNA, 25 bp, Homo sapien
aagtgttcatatgacaggcatgagc

SEQ ID NO: 5547425 - DNA, 25 bp, Homo sapien
ccaagaaacaggaattgccactgct

SEQ ID NO: 5547426 - DNA, 25 bp, Homo sapien
ttaaagctagccttgagcagacagg

SEQ ID NO: 5547427 - DNA, 25 bp, Homo sapien
ataggactgtccatagcgtgaattg

SEQ ID NO: 5547428 - DNA, 25 bp, Homo sapien
cagacaggggattaaataacgtgtc

SEQ ID NO: 5547429 - DNA, 25 bp, Homo sapien
gaacctagactgctgaagcctgcct

SEQ ID NO: 5547430 - DNA, 25 bp, Homo sapien
gtcttagtcgtagcagtagagcttc

SEQ ID NO: 5547431 - DNA, 25 bp, Homo sapien
tgtaggtatatcttgggagttctcc

SEQ ID NO: 5547432 - DNA, 25 bp, Homo sapien
aagttggcaaaatgagaacctagac

SEQ ID NO: 5547433 - DNA, 25 bp, Homo sapien
caccatggtatgaggtaagaagtgc

SEQ ID NO: 5547434 - DNA, 25 bp, Homo sapien
tggaaacacccgacacctcacctga

SEQ ID NO: 5547435 - DNA, 25 bp, Homo sapien
gctccaagtgagcacagactggaaa

SEQ ID NO: 5547436 - DNA, 25 bp, Homo sapien
tgataggctagaagtcaattgacgc

SEQ ID NO: 5547437 - DNA, 25 bp, Homo sapien
gcgtcaattgacttctagcctatca

SEQ ID NO: 5547438 - DNA, 25 bp, Homo sapien
cgtatcggtgtttgaccgttttgaa

SEQ ID NO: 5547439 - DNA, 25 bp, Homo sapien
ttcaaaacggtcaaacaccgatacg

SEQ ID NO: 5547440 - DNA, 25 bp, Homo sapien
tcagagccagtgaggttttacatgt

SEQ ID NO: 5547441 - DNA, 25 bp, Homo sapien
agggaaggcagtgccctacctcatt

SEQ ID NO: 5547442 - DNA, 25 bp, Homo sapien
ctcattcctgcaccaaggcaatccc

SEQ ID NO: 5547443 - DNA, 25 bp, Homo sapien
ttttacatgtaatggagggacaatg

SEQ ID NO: 5547444 - DNA, 25 bp, Homo sapien
tgcaccaaggcaatccctaggtctt

SEQ ID NO: 5547445 - DNA, 25 bp, Homo sapien
aatctccacttgagccctcctgggc

SEQ ID NO: 5547446 - DNA, 25 bp, Homo sapien
gaagcaaatgaaaagactccatcag

SEQ ID NO: 5547447 - DNA, 25 bp, Homo sapien
ttcttgcctctgactaatcgcctta

SEQ ID NO: 5547448 - DNA, 25 bp, Homo sapien
cggccaagaagccacactcttaagc

SEQ ID NO: 5547449 - DNA, 25 bp, Homo sapien
aagcactctacagggagtgtagtgc

SEQ ID NO: 5547450 - DNA, 25 bp, Homo sapien
atcaccttatacttccagcctggac

SEQ ID NO: 5547451 - DNA, 25 bp, Homo sapien
gaagtgaagatagtgaatcgtcaga

SEQ ID NO: 5547452 - DNA, 25 bp, Homo sapien
ttgacgtatgagttttagacgtgtc

SEQ ID NO: 5547453 - DNA, 25 bp, Homo sapien
caagggtaaagaaatagactccctc

SEQ ID NO: 5547454 - DNA, 25 bp, Homo sapien
cctccagtagatatgcccaggcttc

SEQ ID NO: 5547455 - DNA, 25 bp, Homo sapien
caaggcctcttaaagcttcagctgc

SEQ ID NO: 5547456 - DNA, 25 bp, Homo sapien
gatgggtgcagctttcaagcatatc

SEQ ID NO: 5547457 - DNA, 25 bp, Homo sapien
gcccaggcttctcacagcatggtgg

SEQ ID NO: 5547458 - DNA, 25 bp, Homo sapien
tctctcactaggagaaacagcaaat

SEQ ID NO: 5547459 - DNA, 25 bp, Homo sapien
gaatcgtcagattcaggacgcactt

SEQ ID NO: 5547460 - DNA, 25 bp, Homo sapien
gtgaggagaaacttcaaggcctctt

SEQ ID NO: 5547461 - DNA, 25 bp, Homo sapien
ggacgcacttgatgggtgcagcttt

SEQ ID NO: 5547462 - DNA, 25 bp, Homo sapien
aagtgtcgggatgattcagactgtg

SEQ ID NO: 5547463 - DNA, 25 bp, Homo sapien
ccttgttgtacagcacagtgtgcat

SEQ ID NO: 5547464 - DNA, 25 bp, Homo sapien
aagtgtgcattaatgggcaatgtgc

SEQ ID NO: 5547465 - DNA, 25 bp, Homo sapien
cacagtgtgcattcaagtcaaagtc

SEQ ID NO: 5547466 - DNA, 25 bp, Homo sapien
tgggaaacagtgcagtccaagtcaa

SEQ ID NO: 5547467 - DNA, 25 bp, Homo sapien
aaaatgcaaactgaaacctgggaaa

SEQ ID NO: 5547468 - DNA, 25 bp, Homo sapien
gggcaatgtgcaggttctatctgtg

SEQ ID NO: 5547469 - DNA, 25 bp, Homo sapien
gcccagcatctgaccctaaaccaaa

SEQ ID NO: 5547470 - DNA, 25 bp, Homo sapien
aagggaaggaatatgtaatggcttc

SEQ ID NO: 5547471 - DNA, 25 bp, Homo sapien
tgtaataggcatacacaagtgtgca

SEQ ID NO: 5547472 - DNA, 25 bp, Homo sapien
gggatgattcagactgtgcaaggga

SEQ ID NO: 5547473 - DNA, 25 bp, Homo sapien
acattggccttgtcgctgaacctcc

SEQ ID NO: 5547474 - DNA, 25 bp, Homo sapien
tctgcattccaagggaagttacttt

SEQ ID NO: 5547475 - DNA, 25 bp, Homo sapien
tctctggcaccgtttggtctcaatt

SEQ ID NO: 5547476 - DNA, 25 bp, Homo sapien
ttcgtatgaagcaaggtgcatatgc

SEQ ID NO: 5547477 - DNA, 25 bp, Homo sapien
ggtagtgatcttaggggtcttatct

SEQ ID NO: 5547478 - DNA, 25 bp, Homo sapien
ttactccatgaggatgggtagtgat

SEQ ID NO: 5547479 - DNA, 25 bp, Homo sapien
aattcctacccgaccctgctgcttt

SEQ ID NO: 5547480 - DNA, 25 bp, Homo sapien
gtgcatatgccacagcaattggttt

SEQ ID NO: 5547481 - DNA, 25 bp, Homo sapien
aaggctcaggataacttaaagttcc

SEQ ID NO: 5547482 - DNA, 25 bp, Homo sapien
tgctgctttatgatgaattggcctt

SEQ ID NO: 5547483 - DNA, 25 bp, Homo sapien
gttagaccatccgctgggctcattc

SEQ ID NO: 5547484 - DNA, 25 bp, Homo sapien
taaccagagtaagtgagctggaaag

SEQ ID NO: 5547485 - DNA, 25 bp, Homo sapien
tctgagtcaagtaagaaggaaattg

SEQ ID NO: 5547486 - DNA, 25 bp, Homo sapien
acgagttgggtattgcatagtgtta

SEQ ID NO: 5547487 - DNA, 25 bp, Homo sapien
ctttggagctgtgaaagtgacaaga

SEQ ID NO: 5547488 - DNA, 25 bp, Homo sapien
gtgcttggaattgaggctttggagc

SEQ ID NO: 5547489 - DNA, 25 bp, Homo sapien
ttactggcatggagtaaccagagta

SEQ ID NO: 5547490 - DNA, 25 bp, Homo sapien
tccgctcctggttcaatggttctcc

SEQ ID NO: 5547491 - DNA, 25 bp, Homo sapien
aacacaaaaactggtggtggtgagt

SEQ ID NO: 5547492 - DNA, 25 bp, Homo sapien
agatgcaggtattaccatgggagtc

SEQ ID NO: 5547493 - DNA, 25 bp, Homo sapien
agtgagccccaagcttccagttttc

SEQ ID NO: 5547494 - DNA, 25 bp, Homo sapien
gctggaaagatgagttatcagggca

SEQ ID NO: 5547495 - DNA, 25 bp, Homo sapien
cctcctcaggaaccacttgtgctac

SEQ ID NO: 5547496 - DNA, 25 bp, Homo sapien
atttgcatgaccgctcaggaaggcg

SEQ ID NO: 5547497 - DNA, 25 bp, Homo sapien
tctggcctgggaccttttccactat

SEQ ID NO: 5547498 - DNA, 25 bp, Homo sapien
gtgaaagctcaagaggctccatcta

SEQ ID NO: 5547499 - DNA, 25 bp, Homo sapien
gctccgacccagcatttgcatgacc

SEQ ID NO: 5547500 - DNA, 25 bp, Homo sapien
gactccagcaattctgctccgaccc

SEQ ID NO: 5547501 - DNA, 25 bp, Homo sapien
tgtgcccagcctagcaaactgttca

SEQ ID NO: 5547502 - DNA, 25 bp, Homo sapien
cttacatggcacctcagtatcaacc

SEQ ID NO: 5547503 - DNA, 25 bp, Homo sapien
agcctcagttctggcctgggacctt

SEQ ID NO: 5547504 - DNA, 25 bp, Homo sapien
gaaccacttgtgctacttgagggtg

SEQ ID NO: 5547505 - DNA, 25 bp, Homo sapien
aagtgagaacttacatggcacctca

SEQ ID NO: 5547506 - DNA, 25 bp, Homo sapien
tatcggccacggtccggccgactcg

SEQ ID NO: 5547507 - DNA, 25 bp, Homo sapien
cgagtcggccggaccgtggccgata

SEQ ID NO: 5547508 - DNA, 25 bp, Homo sapien
actagctgaaatcacaaagataaat

SEQ ID NO: 5547509 - DNA, 25 bp, Homo sapien
ttatagattctccaccctcctcccc

SEQ ID NO: 5547510 - DNA, 25 bp, Homo sapien
atgagtccatatactagctgaaatc

SEQ ID NO: 5547511 - DNA, 25 bp, Homo sapien
ttcatatagtttagagtttcagttc

SEQ ID NO: 5547512 - DNA, 25 bp, Homo sapien
attgactaaagcataataaagatta

SEQ ID NO: 5547513 - DNA, 25 bp, Homo sapien
caaagttgaaaaacaccattgattt

SEQ ID NO: 5547514 - DNA, 25 bp, Homo sapien
agatagagaaaatgggagtttttct

SEQ ID NO: 5547515 - DNA, 25 bp, Homo sapien
aatagagagaataatttgataattt

SEQ ID NO: 5547516 - DNA, 25 bp, Homo sapien
tcaaatagaagtggaagtgattctt

SEQ ID NO: 5547517 - DNA, 25 bp, Homo sapien
acacacaatgagatagagaaaatgg

SEQ ID NO: 5547518 - DNA, 25 bp, Homo sapien
tccccatcagacatccatgagtcca

SEQ ID NO: 5547519 - DNA, 25 bp, Homo sapien
gctgcacaaggtgaatctgatcttc

SEQ ID NO: 5547520 - DNA, 25 bp, Homo sapien
tcataagaactcagaagacttagta

SEQ ID NO: 5547521 - DNA, 25 bp, Homo sapien
aagaacaacctggtggacatcattc

SEQ ID NO: 5547522 - DNA, 25 bp, Homo sapien
cataggcccgaaacaccttaaagac

SEQ ID NO: 5547523 - DNA, 25 bp, Homo sapien
actaagacgatcaaatacaaaaggc

SEQ ID NO: 5547524 - DNA, 25 bp, Homo sapien
catcattcagcagaacaaagagagg

SEQ ID NO: 5547525 - DNA, 25 bp, Homo sapien
acattgctgatgcactaagacgatc

SEQ ID NO: 5547526 - DNA, 25 bp, Homo sapien
tgagacacattcataggcccgaaac

SEQ ID NO: 5547527 - DNA, 25 bp, Homo sapien
gactactcccttgcagcagtggacc

SEQ ID NO: 5547528 - DNA, 25 bp, Homo sapien
aaggctccatgagtgatgggtccta

SEQ ID NO: 5547529 - DNA, 25 bp, Homo sapien
gaaagagttagctgcacaaggtgaa

SEQ ID NO: 5547530 - DNA, 25 bp, Homo sapien
atcaggtttcactacacaaagtatt

SEQ ID NO: 5547531 - DNA, 25 bp, Homo sapien
catgtttgagatcagccaacaggcc

SEQ ID NO: 5547532 - DNA, 25 bp, Homo sapien
tagataagaaaaagtcagaatatta

SEQ ID NO: 5547533 - DNA, 25 bp, Homo sapien
cccatccatctaagaacaaggaaca

SEQ ID NO: 5547534 - DNA, 25 bp, Homo sapien
gaagaaaacgctgacctgcacagtg

SEQ ID NO: 5547535 - DNA, 25 bp, Homo sapien
catccagacactctgaggatgccag

SEQ ID NO: 5547536 - DNA, 25 bp, Homo sapien
acacactatcactccatcaggtttc

SEQ ID NO: 5547537 - DNA, 25 bp, Homo sapien
gccaacaggccacttacttataccc

SEQ ID NO: 5547538 - DNA, 25 bp, Homo sapien
gccttaaggagtatgaaagaagtcc

SEQ ID NO: 5547539 - DNA, 25 bp, Homo sapien
ctaacttaagagcaagcaaacatat

SEQ ID NO: 5547540 - DNA, 25 bp, Homo sapien
tggtagtttccaacaactgaacctc

SEQ ID NO: 5547541 - DNA, 25 bp, Homo sapien
gttgatgcaaataggttggtgcaaa

SEQ ID NO: 5547542 - DNA, 25 bp, Homo sapien
aaaatgggttgtaaaacggcagata

SEQ ID NO: 5547543 - DNA, 25 bp, Homo sapien
ttcttaacatggaccagttaggcaa

SEQ ID NO: 5547544 - DNA, 25 bp, Homo sapien
catggaccagttaggcaaaattgtt

SEQ ID NO: 5547545 - DNA, 25 bp, Homo sapien
tagactatggaaatgatgttagaca

SEQ ID NO: 5547546 - DNA, 25 bp, Homo sapien
gcacccggcccacacacatttctta

SEQ ID NO: 5547547 - DNA, 25 bp, Homo sapien
gctaatgacttagtacttgctgttt

SEQ ID NO: 5547548 - DNA, 25 bp, Homo sapien
acaatggcgcccagctaactgtaaa

SEQ ID NO: 5547549 - DNA, 25 bp, Homo sapien
caaaattgttgatgcaaataggttg

SEQ ID NO: 5547550 - DNA, 25 bp, Homo sapien
aaacggcagatataactcacaacat

SEQ ID NO: 5547551 - DNA, 25 bp, Homo sapien
ttgcaacaatgatgtgggaatgcat

SEQ ID NO: 5547552 - DNA, 25 bp, Homo sapien
acaactgcccaggtaagattacatc

SEQ ID NO: 5547553 - DNA, 25 bp, Homo sapien
tgactataaagcccaaaactccagc

SEQ ID NO: 5547554 - DNA, 25 bp, Homo sapien
gagaagactgctagcagctccccga

SEQ ID NO: 5547555 - DNA, 25 bp, Homo sapien
caggagtgacatctgcaaccttgaa

SEQ ID NO: 5547556 - DNA, 25 bp, Homo sapien
ggaaaggcaatccctcctcctgcat

SEQ ID NO: 5547557 - DNA, 25 bp, Homo sapien
gcccaaaactccagcttgctgaggc

SEQ ID NO: 5547558 - DNA, 25 bp, Homo sapien
ctgaggcagctaatgtgttagagct

SEQ ID NO: 5547559 - DNA, 25 bp, Homo sapien
gatggtctccaggactcaaacgatc

SEQ ID NO: 5547560 - DNA, 25 bp, Homo sapien
gtggccacgtgaccaagttcttgcc

SEQ ID NO: 5547561 - DNA, 25 bp, Homo sapien
ctcccagcctccctgtgattaggtg

SEQ ID NO: 5547562 - DNA, 25 bp, Homo sapien
ttatgtaaacacaaggttttgctat

SEQ ID NO: 5547563 - DNA, 25 bp, Homo sapien
ggtggtgaccagaagtttacatctt

SEQ ID NO: 5547564 - DNA, 25 bp, Homo sapien
tgaccagtctgggacatctgaattc

SEQ ID NO: 5547565 - DNA, 25 bp, Homo sapien
atagtacctcaaagatgtcaccatc

SEQ ID NO: 5547566 - DNA, 25 bp, Homo sapien
gaacagaaaaaagagtgtcttattc

SEQ ID NO: 5547567 - DNA, 25 bp, Homo sapien
aacagaaggtgaaactcaaactggc

SEQ ID NO: 5547568 - DNA, 25 bp, Homo sapien
cagcaagatgaaatcagtatgcaat

SEQ ID NO: 5547569 - DNA, 25 bp, Homo sapien
gcagaactgtaaaaaagggagctgc

SEQ ID NO: 5547570 - DNA, 25 bp, Homo sapien
caggagcaggttgatagtacctcaa

SEQ ID NO: 5547571 - DNA, 25 bp, Homo sapien
aagctctggacatgatggccatttg

SEQ ID NO: 5547572 - DNA, 25 bp, Homo sapien
tctgaattcagggctagagaacaca

SEQ ID NO: 5547573 - DNA, 25 bp, Homo sapien
cctagcactttggacaaaagctctg

SEQ ID NO: 5547574 - DNA, 25 bp, Homo sapien
aaacatgttgttaaggctcaggcca

SEQ ID NO: 5547575 - DNA, 25 bp, Homo sapien
gcgtcatagccatcaggagcacgtc

SEQ ID NO: 5547576 - DNA, 25 bp, Homo sapien
gggaaaacagccttgagagctgaga

SEQ ID NO: 5547577 - DNA, 25 bp, Homo sapien
tcgtcatggtgggctacttctcgca

SEQ ID NO: 5547578 - DNA, 25 bp, Homo sapien
aagcaaaggcagcttcgtcatggtg

SEQ ID NO: 5547579 - DNA, 25 bp, Homo sapien
agctgagagccacaaacagagtttg

SEQ ID NO: 5547580 - DNA, 25 bp, Homo sapien
gacaaacaatacagattaaaggcac

SEQ ID NO: 5547581 - DNA, 25 bp, Homo sapien
aggcttagggcctgttcccagcatg

SEQ ID NO: 5547582 - DNA, 25 bp, Homo sapien
aacaacttctagcagtgggcgtcat

SEQ ID NO: 5547583 - DNA, 25 bp, Homo sapien
agcatacttagagaggagtagagaa

SEQ ID NO: 5547584 - DNA, 25 bp, Homo sapien
gttgtttgtggtttgagcagttttc

SEQ ID NO: 5547585 - DNA, 25 bp, Homo sapien
aaaggggcatttataaggctcactt

SEQ ID NO: 5547586 - DNA, 25 bp, Homo sapien
atggtggaacctcgaccccaaatga

SEQ ID NO: 5547587 - DNA, 25 bp, Homo sapien
tggctggcaatagtgcctgaaggta

SEQ ID NO: 5547588 - DNA, 25 bp, Homo sapien
ggacatatggtgatatggtggaacc

SEQ ID NO: 5547589 - DNA, 25 bp, Homo sapien
ggttctacagatgatagaggcccat

SEQ ID NO: 5547590 - DNA, 25 bp, Homo sapien
ggaagattgtattgcagggcaagca

SEQ ID NO: 5547591 - DNA, 25 bp, Homo sapien
tagtggattggacatgttcagaaaa

SEQ ID NO: 5547592 - DNA, 25 bp, Homo sapien
cctgaaggtaacatctctgtggcac

SEQ ID NO: 5547593 - DNA, 25 bp, Homo sapien
ggcaagcaaaggtgttgtgtaatga

SEQ ID NO: 5547594 - DNA, 25 bp, Homo sapien
acttgcttgggaaaagccaacaggt

SEQ ID NO: 5547595 - DNA, 25 bp, Homo sapien
aagaaaatgatcagatggtagacac

SEQ ID NO: 5547596 - DNA, 25 bp, Homo sapien
ggagaacccagtccaggacaaccta

SEQ ID NO: 5547597 - DNA, 25 bp, Homo sapien
tggggccctcacctgcaagtatcat

SEQ ID NO: 5547598 - DNA, 25 bp, Homo sapien
caacctagccaaccagatagaccgg

SEQ ID NO: 5547599 - DNA, 25 bp, Homo sapien
tccaaggccgatccagctgcttatt

SEQ ID NO: 5547600 - DNA, 25 bp, Homo sapien
atgagttgtgtgcatgtggcagaaa

SEQ ID NO: 5547601 - DNA, 25 bp, Homo sapien
acaaaattcatcgaagtgggaggag

SEQ ID NO: 5547602 - DNA, 25 bp, Homo sapien
tcataaatggtaagtaagctgggat

SEQ ID NO: 5547603 - DNA, 25 bp, Homo sapien
taagctgggatcaagacaaaattca

SEQ ID NO: 5547604 - DNA, 25 bp, Homo sapien
tctattggatgacctgagtgaagca

SEQ ID NO: 5547605 - DNA, 25 bp, Homo sapien
agcaggctccatcagtgagttggtc

SEQ ID NO: 5547606 - DNA, 25 bp, Homo sapien
gggatgtgcccctggtgattctatt

SEQ ID NO: 5547607 - DNA, 25 bp, Homo sapien
tttagcccagagtagtcatgttcaa

SEQ ID NO: 5547608 - DNA, 25 bp, Homo sapien
atcacacatgacaaaggctagcctg

SEQ ID NO: 5547609 - DNA, 25 bp, Homo sapien
tgactgagtgtcaggatcctggcac

SEQ ID NO: 5547610 - DNA, 25 bp, Homo sapien
tcatgttcaaactagaggctgcagg

SEQ ID NO: 5547611 - DNA, 25 bp, Homo sapien
gtggagttctccacgaggaagtgaa

SEQ ID NO: 5547612 - DNA, 25 bp, Homo sapien
actaggggcctgtggccttgtcatt

SEQ ID NO: 5547613 - DNA, 25 bp, Homo sapien
cctcctgggagctcagatcaagaag

SEQ ID NO: 5547614 - DNA, 25 bp, Homo sapien
gaagacctggcaacgagtgccatca

SEQ ID NO: 5547615 - DNA, 25 bp, Homo sapien
accggcaaaccgcatccctgactag

SEQ ID NO: 5547616 - DNA, 25 bp, Homo sapien
gcaggctccatggacattgactatc

SEQ ID NO: 5547617 - DNA, 25 bp, Homo sapien
gatcctggcactcagtaggaaggtg

SEQ ID NO: 5547618 - DNA, 25 bp, Homo sapien
aattgtaaatttaaagggttgagca

SEQ ID NO: 5547619 - DNA, 25 bp, Homo sapien
ctcactggcgagtttctcacattcc

SEQ ID NO: 5547620 - DNA, 25 bp, Homo sapien
gatcacaggattcggaaattgtaaa

SEQ ID NO: 5547621 - DNA, 25 bp, Homo sapien
atgccgctgcatctctgtcttctca

SEQ ID NO: 5547622 - DNA, 25 bp, Homo sapien
ccttaatccgatcacaggattcgga

SEQ ID NO: 5547623 - DNA, 25 bp, Homo sapien
gtggtattgagcctgtaaaaactga

SEQ ID NO: 5547624 - DNA, 25 bp, Homo sapien
tgtaaatttaaagggttgagcaggc

SEQ ID NO: 5547625 - DNA, 25 bp, Homo sapien
ggtacatcttgctcaggtcgcgaat

SEQ ID NO: 5547626 - DNA, 25 bp, Homo sapien
acatcttgctcaggtcgcgaatcat

SEQ ID NO: 5547627 - DNA, 25 bp, Homo sapien
gtattgagcctgtaaaaactgaaac

SEQ ID NO: 5547628 - DNA, 25 bp, Homo sapien
atgacataatgccgctgcatctctg

SEQ ID NO: 5547629 - DNA, 25 bp, Homo sapien
ggggcaagtgcctctaggatactca

SEQ ID NO: 5547630 - DNA, 25 bp, Homo sapien
ggaagatgaggcttctaagaacaca

SEQ ID NO: 5547631 - DNA, 25 bp, Homo sapien
tttttgcagagtacgtaagacatat

SEQ ID NO: 5547632 - DNA, 25 bp, Homo sapien
ggagactgtgtttgaactgggattt

SEQ ID NO: 5547633 - DNA, 25 bp, Homo sapien
aggggcaacattaagagacagtccc

SEQ ID NO: 5547634 - DNA, 25 bp, Homo sapien
ctaggatactcaacttagcgggtgg

SEQ ID NO: 5547635 - DNA, 25 bp, Homo sapien
agaacacaaatcactcctgggcagc

SEQ ID NO: 5547636 - DNA, 25 bp, Homo sapien
ggaaagaaggatctcttcagagacc

SEQ ID NO: 5547637 - DNA, 25 bp, Homo sapien
tacatacattaagaagacaaggttc

SEQ ID NO: 5547638 - DNA, 25 bp, Homo sapien
tcatggaagccaggccgtctttctt

SEQ ID NO: 5547639 - DNA, 25 bp, Homo sapien
tcagagaccaagaaaggcttcctga

SEQ ID NO: 5547640 - DNA, 25 bp, Homo sapien
aatgtcttaattcaggtagtccctt

SEQ ID NO: 5547641 - DNA, 25 bp, Homo sapien
ggaagcttcagtaagtagagatctc

SEQ ID NO: 5547642 - DNA, 25 bp, Homo sapien
aattcaggtagtcccttgcttagaa

SEQ ID NO: 5547643 - DNA, 25 bp, Homo sapien
gagccatggaacccagccctctttt

SEQ ID NO: 5547644 - DNA, 25 bp, Homo sapien
cttaactatgtcattgggaagcttc

SEQ ID NO: 5547645 - DNA, 25 bp, Homo sapien
cttcagtaagtagagatctcccttc

SEQ ID NO: 5547646 - DNA, 25 bp, Homo sapien
tcccgtgagaatcagattatcaatt

SEQ ID NO: 5547647 - DNA, 25 bp, Homo sapien
cttttgggggacacttaactatgtc

SEQ ID NO: 5547648 - DNA, 25 bp, Homo sapien
atagagatatggcatgatgaacatc

SEQ ID NO: 5547649 - DNA, 25 bp, Homo sapien
aatgaaaactttcccgtgagaatca

SEQ ID NO: 5547650 - DNA, 25 bp, Homo sapien
ttcatctcaaaatggtgtccaccaa

SEQ ID NO: 5547651 - DNA, 25 bp, Homo sapien
atgaacacaagaacctagaggcaat

SEQ ID NO: 5547652 - DNA, 25 bp, Homo sapien
atatcttaaagttggcagctgcctg

SEQ ID NO: 5547653 - DNA, 25 bp, Homo sapien
ctgatggaaatgtgtccagcgagaa

SEQ ID NO: 5547654 - DNA, 25 bp, Homo sapien
gcccacttccaaccctgacccagcc

SEQ ID NO: 5547655 - DNA, 25 bp, Homo sapien
atactgatggactgggtcacctcat

SEQ ID NO: 5547656 - DNA, 25 bp, Homo sapien
gtgtccagcgagaatgaacacaaga

SEQ ID NO: 5547657 - DNA, 25 bp, Homo sapien
tgagactgaagccatttttaggttt

SEQ ID NO: 5547658 - DNA, 25 bp, Homo sapien
ttaatttagggtgcactgatggaaa

SEQ ID NO: 5547659 - DNA, 25 bp, Homo sapien
actcactacgtttccggcgactgtt

SEQ ID NO: 5547660 - DNA, 25 bp, Homo sapien
tgcttgtgaaccaatctactggctc

SEQ ID NO: 5547661 - DNA, 25 bp, Homo sapien
cctaagcacccaaacgtgggagaac

SEQ ID NO: 5547662 - DNA, 25 bp, Homo sapien
gagctgaactccacgcagaacacag

SEQ ID NO: 5547663 - DNA, 25 bp, Homo sapien
ggagctgaactccacgcagaacaca

SEQ ID NO: 5547664 - DNA, 25 bp, Homo sapien
gcagaacacagcgcagcgtccttta

SEQ ID NO: 5547665 - DNA, 25 bp, Homo sapien
acacagcgcagcgtcctttaaagga

SEQ ID NO: 5547666 - DNA, 25 bp, Homo sapien
agccacacgaagaccaaagtgaaga

SEQ ID NO: 5547667 - DNA, 25 bp, Homo sapien
acctgctctgagaggcttcagaacc

SEQ ID NO: 5547668 - DNA, 25 bp, Homo sapien
gtgatcaaagcggtcacagcacaat

SEQ ID NO: 5547669 - DNA, 25 bp, Homo sapien
tgaactccacgcagaacacagcgca

SEQ ID NO: 5547670 - DNA, 25 bp, Homo sapien
ggacctgctctgagaggcttcagaa

SEQ ID NO: 5547671 - DNA, 25 bp, Homo sapien
ctggacctgctctgagaggcttcag

SEQ ID NO: 5547672 - DNA, 25 bp, Homo sapien
gctggacctgctctgagaggcttca

SEQ ID NO: 5547673 - DNA, 25 bp, Homo sapien
ggataagatctgagtttcagtgagt

SEQ ID NO: 5547674 - DNA, 25 bp, Homo sapien
actcactgaaactcagatcttatcc

SEQ ID NO: 5547675 - DNA, 25 bp, Homo sapien
ggtgtaccactcaacaagtaattat

SEQ ID NO: 5547676 - DNA, 25 bp, Homo sapien
ataattacttgttgagtggtacacc

SEQ ID NO: 5547677 - DNA, 25 bp, Homo sapien
ttgaatgcagaagtaaaaatataat

SEQ ID NO: 5547678 - DNA, 25 bp, Homo sapien
tatctgcgagatgttgagtattttc

SEQ ID NO: 5547679 - DNA, 25 bp, Homo sapien
atgtagcacattacactggtgacat

SEQ ID NO: 5547680 - DNA, 25 bp, Homo sapien
tggtgtactatcaaagaaaaatata

SEQ ID NO: 5547681 - DNA, 25 bp, Homo sapien
agaaataccaggatcaaaatcgctt

SEQ ID NO: 5547682 - DNA, 25 bp, Homo sapien
tttggatttcatgctgcaactaccc

SEQ ID NO: 5547683 - DNA, 25 bp, Homo sapien
tgacatgttgcagttgattgaatgc

SEQ ID NO: 5547684 - DNA, 25 bp, Homo sapien
ctgtacacatcaaccaaaatgacat

SEQ ID NO: 5547685 - DNA, 25 bp, Homo sapien
aaatatgagcaaatccattaggctt

SEQ ID NO: 5547686 - DNA, 25 bp, Homo sapien
atcgcttgacatgacatttggcaat

SEQ ID NO: 5547687 - DNA, 25 bp, Homo sapien
taacacatgtaataagcataacacc

SEQ ID NO: 5547688 - DNA, 25 bp, Homo sapien
gcacaagccactacacctagattgc

SEQ ID NO: 5547689 - DNA, 25 bp, Homo sapien
cttgaattactaggctcaggggatc

SEQ ID NO: 5547690 - DNA, 25 bp, Homo sapien
acaaccacggtaccattattcatgc

SEQ ID NO: 5547691 - DNA, 25 bp, Homo sapien
taccaaaatcagagccagtcttgtt

SEQ ID NO: 5547692 - DNA, 25 bp, Homo sapien
tatgtaaccaggattcaggcacaag

SEQ ID NO: 5547693 - DNA, 25 bp, Homo sapien
tttatctgttgaaggtcatttgtcc

SEQ ID NO: 5547694 - DNA, 25 bp, Homo sapien
agcgtacacatttcctgaagtttcc

SEQ ID NO: 5547695 - DNA, 25 bp, Homo sapien
cctaaatgaataattccgcactgtc

SEQ ID NO: 5547696 - DNA, 25 bp, Homo sapien
tctgaagcaaattccaggcatttta

SEQ ID NO: 5547697 - DNA, 25 bp, Homo sapien
tcaggggatccttctatgtaaccag

SEQ ID NO: 5547698 - DNA, 25 bp, Homo sapien
agtacaagtattccatcagtcagct

SEQ ID NO: 5547699 - DNA, 25 bp, Homo sapien
tattaggggaacaattaagcaagaa

SEQ ID NO: 5547700 - DNA, 25 bp, Homo sapien
gctggactgtaaactctctgagtat

SEQ ID NO: 5547701 - DNA, 25 bp, Homo sapien
cttactccaccaatcaccaatcaga

SEQ ID NO: 5547702 - DNA, 25 bp, Homo sapien
gtgggtggttagtgcttacatctta

SEQ ID NO: 5547703 - DNA, 25 bp, Homo sapien
aagcaagaagccctcccttactcca

SEQ ID NO: 5547704 - DNA, 25 bp, Homo sapien
aagtcatgcccaatattaggggaac

SEQ ID NO: 5547705 - DNA, 25 bp, Homo sapien
ctcagcgtcccaatgtgcttggatt

SEQ ID NO: 5547706 - DNA, 25 bp, Homo sapien
catgtaccaccacacaaagccaatt

SEQ ID NO: 5547707 - DNA, 25 bp, Homo sapien
tcttagcatttcgactgagttgtac

SEQ ID NO: 5547708 - DNA, 25 bp, Homo sapien
tgagtataaatttgagatcctattc

SEQ ID NO: 5547709 - DNA, 25 bp, Homo sapien
atagtcatacccaagtctgtttccc

SEQ ID NO: 5547710 - DNA, 25 bp, Homo sapien
tttcggattcgtggccaccagcaaa

SEQ ID NO: 5547711 - DNA, 25 bp, Homo sapien
ggagaagacacagtcacaacacacg

SEQ ID NO: 5547712 - DNA, 25 bp, Homo sapien
cacaacacacgatacccacactttc

SEQ ID NO: 5547713 - DNA, 25 bp, Homo sapien
agcatgggcctttcggattcgtggc

SEQ ID NO: 5547714 - DNA, 25 bp, Homo sapien
aattagctgtagtcagtcagcagga

SEQ ID NO: 5547715 - DNA, 25 bp, Homo sapien
actatttcccccacacagtgaaggg

SEQ ID NO: 5547716 - DNA, 25 bp, Homo sapien
ttgctccaatccaatctcggagtcc

SEQ ID NO: 5547717 - DNA, 25 bp, Homo sapien
caatccaatctcggagtcctcttcc

SEQ ID NO: 5547718 - DNA, 25 bp, Homo sapien
cgctcacgtgcacacgagcacctgg

SEQ ID NO: 5547719 - DNA, 25 bp, Homo sapien
gacacagtcacaacacacgataccc

SEQ ID NO: 5547720 - DNA, 25 bp, Homo sapien
cgtggccaccagcaaaacaacacag

SEQ ID NO: 5547721 - DNA, 25 bp, Homo sapien
tcagggaacacagcacatggtgttc

SEQ ID NO: 5547722 - DNA, 25 bp, Homo sapien
tggttaatccagggtaagatcttta

SEQ ID NO: 5547723 - DNA, 25 bp, Homo sapien
gttccttggctgagcaccatgacct

SEQ ID NO: 5547724 - DNA, 25 bp, Homo sapien
catacagggcattcctaggtggtag

SEQ ID NO: 5547725 - DNA, 25 bp, Homo sapien
ggggggccacaattcaacacgccat

SEQ ID NO: 5547726 - DNA, 25 bp, Homo sapien
gctcaccacccagtcttcagggctc

SEQ ID NO: 5547727 - DNA, 25 bp, Homo sapien
gtggagaacccgtcgcattacactt

SEQ ID NO: 5547728 - DNA, 25 bp, Homo sapien
ggacaactctggaaatttgccccac

SEQ ID NO: 5547729 - DNA, 25 bp, Homo sapien
gctcaagcagtggacatacaccctt

SEQ ID NO: 5547730 - DNA, 25 bp, Homo sapien
acttggggttacagactccagtgtc

SEQ ID NO: 5547731 - DNA, 25 bp, Homo sapien
gcaccagggttaagacttggacata

SEQ ID NO: 5547732 - DNA, 25 bp, Homo sapien
agaaataacacaaggaatactttta

SEQ ID NO: 5547733 - DNA, 25 bp, Homo sapien
ttaagtgttgccagttgttgaacta

SEQ ID NO: 5547734 - DNA, 25 bp, Homo sapien
tttgaacacatctgaccaggaggcc

SEQ ID NO: 5547735 - DNA, 25 bp, Homo sapien
tacagagaagttttagaaataacac

SEQ ID NO: 5547736 - DNA, 25 bp, Homo sapien
ttgaagtcagacatacagagaagtt

SEQ ID NO: 5547737 - DNA, 25 bp, Homo sapien
aagaaatcaatgctgacacagtacc

SEQ ID NO: 5547738 - DNA, 25 bp, Homo sapien
tttctggaaacatttgagagtaaat

SEQ ID NO: 5547739 - DNA, 25 bp, Homo sapien
agaaagaaattctggccaaggatca

SEQ ID NO: 5547740 - DNA, 25 bp, Homo sapien
ctcagcaagaataagtgacactgtc

SEQ ID NO: 5547741 - DNA, 25 bp, Homo sapien
tcctaaacaaggacagcctcttata

SEQ ID NO: 5547742 - DNA, 25 bp, Homo sapien
gagtaaattgctgacctaatatcct

SEQ ID NO: 5547743 - DNA, 25 bp, Homo sapien
ttagaacatagtagcacagagaaac

SEQ ID NO: 5547744 - DNA, 25 bp, Homo sapien
tagagaataactggagagaatgttg

SEQ ID NO: 5547745 - DNA, 25 bp, Homo sapien
tcagatggccttaaagacagcaaac

SEQ ID NO: 5547746 - DNA, 25 bp, Homo sapien
atggatgaaacatggaatatgaatt

SEQ ID NO: 5547747 - DNA, 25 bp, Homo sapien
tgaatgatagaataatggatgaaac

SEQ ID NO: 5547748 - DNA, 25 bp, Homo sapien
ccagatttaggtgatagagaataac

SEQ ID NO: 5547749 - DNA, 25 bp, Homo sapien
ggaggtgacaggtaataagtataaa

SEQ ID NO: 5547750 - DNA, 25 bp, Homo sapien
tatgaattttagtggaggtgacagg

SEQ ID NO: 5547751 - DNA, 25 bp, Homo sapien
agtggaaccacgctaatctgatttc

SEQ ID NO: 5547752 - DNA, 25 bp, Homo sapien
tgatgatggaatgtatactagatgc

SEQ ID NO: 5547753 - DNA, 25 bp, Homo sapien
gtcacaaagtagtggaaccacgcta

SEQ ID NO: 5547754 - DNA, 25 bp, Homo sapien
catctgtcaatgcccctagctctct

SEQ ID NO: 5547755 - DNA, 25 bp, Homo sapien
gacagtgtgaccttgagcaagatca

SEQ ID NO: 5547756 - DNA, 25 bp, Homo sapien
aggggtcttggtaagacacttttca

SEQ ID NO: 5547757 - DNA, 25 bp, Homo sapien
ctcttgagtaactgggattacaggc

SEQ ID NO: 5547758 - DNA, 25 bp, Homo sapien
aggctgaagtgcagtcatgtgatct

SEQ ID NO: 5547759 - DNA, 25 bp, Homo sapien
agcttagaaggttgttgtgaggtta

SEQ ID NO: 5547760 - DNA, 25 bp, Homo sapien
gacctgcagcctgtcagtaactgac

SEQ ID NO: 5547761 - DNA, 25 bp, Homo sapien
ctctagcagcagctgtgcaaacacc

SEQ ID NO: 5547762 - DNA, 25 bp, Homo sapien
tgtgaggttacaatgaaaaagcata

SEQ ID NO: 5547763 - DNA, 25 bp, Homo sapien
ccaccgtgcctggcctctccacctt

SEQ ID NO: 5547764 - DNA, 25 bp, Homo sapien
atcaaatggcacaactatttcagct

SEQ ID NO: 5547765 - DNA, 25 bp, Homo sapien
ctttagctagttctaatgaaagctt

SEQ ID NO: 5547766 - DNA, 25 bp, Homo sapien
atgattggattattaagcaaggcta

SEQ ID NO: 5547767 - DNA, 25 bp, Homo sapien
gcatgtgctcatcaaaaagtgcttt

SEQ ID NO: 5547768 - DNA, 25 bp, Homo sapien
catatgtttatagactagatgtatc

SEQ ID NO: 5547769 - DNA, 25 bp, Homo sapien
ttaagcaaggctatgattaggaaat

SEQ ID NO: 5547770 - DNA, 25 bp, Homo sapien
ccacatatacacagagggaaattat

SEQ ID NO: 5547771 - DNA, 25 bp, Homo sapien
atgaaagctttccaaattaaacact

SEQ ID NO: 5547772 - DNA, 25 bp, Homo sapien
ggctatgattaggaaataaaccact

SEQ ID NO: 5547773 - DNA, 25 bp, Homo sapien
tagactagatgtatcacttgtttac

SEQ ID NO: 5547774 - DNA, 25 bp, Homo sapien
cttcttccattcatagcatgtgctc

SEQ ID NO: 5547775 - DNA, 25 bp, Homo sapien
cttaaaagtgaccaccaacaccatc

SEQ ID NO: 5547776 - DNA, 25 bp, Homo sapien
cagaagtatcattgtagagtatatt

SEQ ID NO: 5547777 - DNA, 25 bp, Homo sapien
catttagcaggaatgcaagcatttt

SEQ ID NO: 5547778 - DNA, 25 bp, Homo sapien
ctcaggaatagttgtttgatctgtt

SEQ ID NO: 5547779 - DNA, 25 bp, Homo sapien
ttcaaagagtattgagagtagtgaa

SEQ ID NO: 5547780 - DNA, 25 bp, Homo sapien
tctggttcagtaggatgaataaatt

SEQ ID NO: 5547781 - DNA, 25 bp, Homo sapien
tgctattggaaagttaccataagat

SEQ ID NO: 5547782 - DNA, 25 bp, Homo sapien
agttcagaataatagagcttaagct

SEQ ID NO: 5547783 - DNA, 25 bp, Homo sapien
aagctacccgaaacactcaggaata

SEQ ID NO: 5547784 - DNA, 25 bp, Homo sapien
tattgagagtagtgaagttcagaat

SEQ ID NO: 5547785 - DNA, 25 bp, Homo sapien
agagcttaagctacccgaaacactc

SEQ ID NO: 5547786 - DNA, 25 bp, Homo sapien
agtgataataatagaaatggttata

SEQ ID NO: 5547787 - DNA, 25 bp, Homo sapien
agtcaccaacagataagaagcagaa

SEQ ID NO: 5547788 - DNA, 25 bp, Homo sapien
taaggcatggaagtattttgaaccg

SEQ ID NO: 5547789 - DNA, 25 bp, Homo sapien
aaccgagagtcaccaacagataaga

SEQ ID NO: 5547790 - DNA, 25 bp, Homo sapien
tgagcgcattgcatcacatgatttt

SEQ ID NO: 5547791 - DNA, 25 bp, Homo sapien
ttgaaccgagagtcaccaacagata

SEQ ID NO: 5547792 - DNA, 25 bp, Homo sapien
gcagaaagttgagcgcattgcatca

SEQ ID NO: 5547793 - DNA, 25 bp, Homo sapien
aaacctataaggcatggaagtattt

SEQ ID NO: 5547794 - DNA, 25 bp, Homo sapien
gtattttgaaccgagagtcaccaac

SEQ ID NO: 5547795 - DNA, 25 bp, Homo sapien
accaacagataagaagcagaaagtt

SEQ ID NO: 5547796 - DNA, 25 bp, Homo sapien
atggaagtattttgaaccgagagtc

SEQ ID NO: 5547797 - DNA, 25 bp, Homo sapien
gagagtcaccaacagataagaagca

SEQ ID NO: 5547798 - DNA, 25 bp, Homo sapien
ccaagtcattggatagaaaaattca

SEQ ID NO: 5547799 - DNA, 25 bp, Homo sapien
tagaaaaattcatttgtggtatgtc

SEQ ID NO: 5547800 - DNA, 25 bp, Homo sapien
gcagtggagcgatctctgctcactg

SEQ ID NO: 5547801 - DNA, 25 bp, Homo sapien
tctgtggtatttcttttggtatgtc

SEQ ID NO: 5547802 - DNA, 25 bp, Homo sapien
ggggttcaccgtgttagcaaggatg

SEQ ID NO: 5547803 - DNA, 25 bp, Homo sapien
cataaaaaggacattgttaaattac

SEQ ID NO: 5547804 - DNA, 25 bp, Homo sapien
atttgcaatgttgattccaagtcat

SEQ ID NO: 5547805 - DNA, 25 bp, Homo sapien
atttgtggtatgtcttaaggaaaga

SEQ ID NO: 5547806 - DNA, 25 bp, Homo sapien
gtggtatgtcttaaggaaagattac

SEQ ID NO: 5547807 - DNA, 25 bp, Homo sapien
taaggaaagattacacagttgatcc

SEQ ID NO: 5547808 - DNA, 25 bp, Homo sapien
tataacataatgatcaatgctattt

SEQ ID NO: 5547809 - DNA, 25 bp, Homo sapien
agggatttaaggctgtctctgctac

SEQ ID NO: 5547810 - DNA, 25 bp, Homo sapien
gtgctggctgagtacagcatggctt

SEQ ID NO: 5547811 - DNA, 25 bp, Homo sapien
aaggctccttcagtgcatgggtgct

SEQ ID NO: 5547812 - DNA, 25 bp, Homo sapien
acctagcaccctggagcactttagc

SEQ ID NO: 5547813 - DNA, 25 bp, Homo sapien
ctttagcccatggtagtgagacttg

SEQ ID NO: 5547814 - DNA, 25 bp, Homo sapien
taggtctggtccaaaggctccttca

SEQ ID NO: 5547815 - DNA, 25 bp, Homo sapien
aaaaccaggtagtatgaatgctcac

SEQ ID NO: 5547816 - DNA, 25 bp, Homo sapien
agtcccctagttactgcgctgtccc

SEQ ID NO: 5547817 - DNA, 25 bp, Homo sapien
taagagttgcctaggagttgttgtc

SEQ ID NO: 5547818 - DNA, 25 bp, Homo sapien
tctgtccatgttgtggggccagatt

SEQ ID NO: 5547819 - DNA, 25 bp, Homo sapien
attcttattgccgggatggatgagt

SEQ ID NO: 5547820 - DNA, 25 bp, Homo sapien
actgaagaattggccatttcccgcc

SEQ ID NO: 5547821 - DNA, 25 bp, Homo sapien
gcccagatcaggcgcgttcattcgg

SEQ ID NO: 5547822 - DNA, 25 bp, Homo sapien
cctgctgcttgcccttggagtcctg

SEQ ID NO: 5547823 - DNA, 25 bp, Homo sapien
tcggccgacccttgtgctggctgta

SEQ ID NO: 5547824 - DNA, 25 bp, Homo sapien
tcacaggagtctggtaagatacgtg

SEQ ID NO: 5547825 - DNA, 25 bp, Homo sapien
acatggctgccagagtcgcctttct

SEQ ID NO: 5547826 - DNA, 25 bp, Homo sapien
gctggctgtaccctgcactgtgatg

SEQ ID NO: 5547827 - DNA, 25 bp, Homo sapien
tctccaccatggaataaaggccgct

SEQ ID NO: 5547828 - DNA, 25 bp, Homo sapien
actgaaaatgcatgaactactggac

SEQ ID NO: 5547829 - DNA, 25 bp, Homo sapien
gtctggagcatgcattctcggcctt

SEQ ID NO: 5547830 - DNA, 25 bp, Homo sapien
cagatgccctcctcaggggccctac

SEQ ID NO: 5547831 - DNA, 25 bp, Homo sapien
acataccccgctaccgacaagtccc

SEQ ID NO: 5547832 - DNA, 25 bp, Homo sapien
gacaatggccttgaacttgcctgcc

SEQ ID NO: 5547833 - DNA, 25 bp, Homo sapien
gccaaggtggtttactgcacagatc

SEQ ID NO: 5547834 - DNA, 25 bp, Homo sapien
gtcctccaggactagacaatggcct

SEQ ID NO: 5547835 - DNA, 25 bp, Homo sapien
ggttctttggctggtaggtgcctca

SEQ ID NO: 5547836 - DNA, 25 bp, Homo sapien
ctaggaaggttcttgtaccccagac

SEQ ID NO: 5547837 - DNA, 25 bp, Homo sapien
cagtctaaggtcagctctcccggct

SEQ ID NO: 5547838 - DNA, 25 bp, Homo sapien
ctccatgagcgttgactaggaaggt

SEQ ID NO: 5547839 - DNA, 25 bp, Homo sapien
gtacctgtgcaggatgtataggttt

SEQ ID NO: 5547840 - DNA, 25 bp, Homo sapien
agaatcagtcatgaaacttggggtc

SEQ ID NO: 5547841 - DNA, 25 bp, Homo sapien
cacaggtaactgtgtgccaaggtgg

SEQ ID NO: 5547842 - DNA, 25 bp, Homo sapien
gtatctcgcaagacctagcagtgcc

SEQ ID NO: 5547843 - DNA, 25 bp, Homo sapien
gtgcctggcaagtaacaggtgctca

SEQ ID NO: 5547844 - DNA, 25 bp, Homo sapien
tacaaagtgaataacgatccattta

SEQ ID NO: 5547845 - DNA, 25 bp, Homo sapien
aacaggtgctcattatatacttgct

SEQ ID NO: 5547846 - DNA, 25 bp, Homo sapien
tagcagtgcctggcaagtaacaggt

SEQ ID NO: 5547847 - DNA, 25 bp, Homo sapien
aaaaagccaactattactctactca

SEQ ID NO: 5547848 - DNA, 25 bp, Homo sapien
tacaactttgtatctcgcaagacct

SEQ ID NO: 5547849 - DNA, 25 bp, Homo sapien
tgaccagaatttacaaagtgaataa

SEQ ID NO: 5547850 - DNA, 25 bp, Homo sapien
cacagttaaaacatttggttgtccc

SEQ ID NO: 5547851 - DNA, 25 bp, Homo sapien
aacaaaaaaatagctcggagtggtg

SEQ ID NO: 5547852 - DNA, 25 bp, Homo sapien
acttgctgatagaaggcccaactga

SEQ ID NO: 5547853 - DNA, 25 bp, Homo sapien
aaggtgaaggtaagccttgcttcca

SEQ ID NO: 5547854 - DNA, 25 bp, Homo sapien
tggtgcagcttccttgtggggatga

SEQ ID NO: 5547855 - DNA, 25 bp, Homo sapien
ccatcctgcgatgtagcttcgtgtc

SEQ ID NO: 5547856 - DNA, 25 bp, Homo sapien
tagaacagctcaaacgaactaagac

SEQ ID NO: 5547857 - DNA, 25 bp, Homo sapien
atcaacatactggaactcggtggtg

SEQ ID NO: 5547858 - DNA, 25 bp, Homo sapien
tgacatttgaataagagaagaggca

SEQ ID NO: 5547859 - DNA, 25 bp, Homo sapien
tcgtgtctgtgaatagcaagcaact

SEQ ID NO: 5547860 - DNA, 25 bp, Homo sapien
gaagggctgtgctagaatttcagag

SEQ ID NO: 5547861 - DNA, 25 bp, Homo sapien
tccagaaccataagagatgaatttc

SEQ ID NO: 5547862 - DNA, 25 bp, Homo sapien
cttcattgccctgcccagcgggagt

SEQ ID NO: 5547863 - DNA, 25 bp, Homo sapien
tgtggggatgactcttaggaatcat

SEQ ID NO: 5547864 - DNA, 25 bp, Homo sapien
acaggtaaggcatatcagttggccc

SEQ ID NO: 5547865 - DNA, 25 bp, Homo sapien
ctctatggtaacaagacaggtaagg

SEQ ID NO: 5547866 - DNA, 25 bp, Homo sapien
atgttccctagttggccatgccagt

SEQ ID NO: 5547867 - DNA, 25 bp, Homo sapien
ttgagccatgtatcagagagagaca

SEQ ID NO: 5547868 - DNA, 25 bp, Homo sapien
gaacaactatctggccagggagaga

SEQ ID NO: 5547869 - DNA, 25 bp, Homo sapien
atgactgactgccggactcagagtt

SEQ ID NO: 5547870 - DNA, 25 bp, Homo sapien
agaaagagaaaatcggcttataagt

SEQ ID NO: 5547871 - DNA, 25 bp, Homo sapien
aggttgtgttgccagcccagatacc

SEQ ID NO: 5547872 - DNA, 25 bp, Homo sapien
ttcctagcaagtggacgctgttttc

SEQ ID NO: 5547873 - DNA, 25 bp, Homo sapien
agttggcccagactcattggtcctc

SEQ ID NO: 5547874 - DNA, 25 bp, Homo sapien
cagagttgagggtctgatctcagag

SEQ ID NO: 5547875 - DNA, 25 bp, Homo sapien
aggcctctcccacgagagtcctcga

SEQ ID NO: 5547876 - DNA, 25 bp, Homo sapien
tcgaggactctcgtgggagaggcct

SEQ ID NO: 5547877 - DNA, 25 bp, Homo sapien
gaactgtatgcatgtatgaagtaat

SEQ ID NO: 5547878 - DNA, 25 bp, Homo sapien
tatgtgtgcactacaaccaacaaag

SEQ ID NO: 5547879 - DNA, 25 bp, Homo sapien
tcaaagtaagtgatgaaaattaatt

SEQ ID NO: 5547880 - DNA, 25 bp, Homo sapien
cggacacctacacaaagagaaatac

SEQ ID NO: 5547881 - DNA, 25 bp, Homo sapien
tggtggcggacacctacacaaagag

SEQ ID NO: 5547882 - DNA, 25 bp, Homo sapien
aagtatagtacatagagcaaaaaac

SEQ ID NO: 5547883 - DNA, 25 bp, Homo sapien
tacaaccaacaaagatccgataact

SEQ ID NO: 5547884 - DNA, 25 bp, Homo sapien
aggggtgagttcagtgactgctatt

SEQ ID NO: 5547885 - DNA, 25 bp, Homo sapien
acaaagatccgataactgagagggg

SEQ ID NO: 5547886 - DNA, 25 bp, Homo sapien
attaatttgtgaaatgaaccatggt

SEQ ID NO: 5547887 - DNA, 25 bp, Homo sapien
cagtgactgctattaaaaaagtata

SEQ ID NO: 5547888 - DNA, 25 bp, Homo sapien
aaacagactgaaaatactcaggaaa

SEQ ID NO: 5547889 - DNA, 25 bp, Homo sapien
aggtcttaaaagtaaacatgcagtt

SEQ ID NO: 5547890 - DNA, 25 bp, Homo sapien
gtatgcactgagggtcctaccaatc

SEQ ID NO: 5547891 - DNA, 25 bp, Homo sapien
ctaacgcatttatgtcggcacttac

SEQ ID NO: 5547892 - DNA, 25 bp, Homo sapien
agccaaacctgaatttgccacacgc

SEQ ID NO: 5547893 - DNA, 25 bp, Homo sapien
agcacctgaagaatttggtatgcac

SEQ ID NO: 5547894 - DNA, 25 bp, Homo sapien
aagtgtgaacaattagtacatgctc

SEQ ID NO: 5547895 - DNA, 25 bp, Homo sapien
gcttaaagcatacaagaagacatgt

SEQ ID NO: 5547896 - DNA, 25 bp, Homo sapien
gttgaagtcaacattaaacgtacta

SEQ ID NO: 5547897 - DNA, 25 bp, Homo sapien
agttagccctatgtatctgtggttc

SEQ ID NO: 5547898 - DNA, 25 bp, Homo sapien
tgccacacgcaaatactatactgaa

SEQ ID NO: 5547899 - DNA, 25 bp, Homo sapien
tagaagtacagctctgttattgata

SEQ ID NO: 5547900 - DNA, 25 bp, Homo sapien
gatcagataaaatcagaagaagcaa

SEQ ID NO: 5547901 - DNA, 25 bp, Homo sapien
cctctcaatataactgggaagctca

SEQ ID NO: 5547902 - DNA, 25 bp, Homo sapien
tcctaaactcagaacaacacaggaa

SEQ ID NO: 5547903 - DNA, 25 bp, Homo sapien
accatgcccagccatgtaatcgctc

SEQ ID NO: 5547904 - DNA, 25 bp, Homo sapien
cagaagaagcaaaagcataatatag

SEQ ID NO: 5547905 - DNA, 25 bp, Homo sapien
gcataatatagtccaaggtgtttcc

SEQ ID NO: 5547906 - DNA, 25 bp, Homo sapien
caatataactgggaagctcatcttc

SEQ ID NO: 5547907 - DNA, 25 bp, Homo sapien
ccacttgacctcttagaagtacagc

SEQ ID NO: 5547908 - DNA, 25 bp, Homo sapien
ctactacttactgtggaaagggacc

SEQ ID NO: 5547909 - DNA, 25 bp, Homo sapien
taacagcatttcctaggttctgccc

SEQ ID NO: 5547910 - DNA, 25 bp, Homo sapien
gatctctagtagacagaaaagaact

SEQ ID NO: 5547911 - DNA, 25 bp, Homo sapien
ttcctgtgtaatctcagtggggccc

SEQ ID NO: 5547912 - DNA, 25 bp, Homo sapien
ccttcaaagtaggcagaacaacgca

SEQ ID NO: 5547913 - DNA, 25 bp, Homo sapien
agagccagaagttctatgcctcctt

SEQ ID NO: 5547914 - DNA, 25 bp, Homo sapien
gcacggcatctggctgctctgtcta

SEQ ID NO: 5547915 - DNA, 25 bp, Homo sapien
gtggggcccgtgtccacccacacat

SEQ ID NO: 5547916 - DNA, 25 bp, Homo sapien
actgtcccatggtctacgcacggca

SEQ ID NO: 5547917 - DNA, 25 bp, Homo sapien
actgccaagtcctgaagacgcattc

SEQ ID NO: 5547918 - DNA, 25 bp, Homo sapien
ggacaatgcaaatgaatgatctcta

SEQ ID NO: 5547919 - DNA, 25 bp, Homo sapien
acatcgtgacccacataggggagag

SEQ ID NO: 5547920 - DNA, 25 bp, Homo sapien
gccccacagggcatgtgtcactaat

SEQ ID NO: 5547921 - DNA, 25 bp, Homo sapien
aaggtcgaaatagagtataagatga

SEQ ID NO: 5547922 - DNA, 25 bp, Homo sapien
tcatcttatactctatttcgacctt

SEQ ID NO: 5547923 - DNA, 25 bp, Homo sapien
cccctggaagtgatgcagcatccag

SEQ ID NO: 5547924 - DNA, 25 bp, Homo sapien
tgctgccatagaggggctcttttca

SEQ ID NO: 5547925 - DNA, 25 bp, Homo sapien
catgtgaccttgtgccacagcggga

SEQ ID NO: 5547926 - DNA, 25 bp, Homo sapien
gaactactgaaagctgctgagtgtc

SEQ ID NO: 5547927 - DNA, 25 bp, Homo sapien
gacacgagtgcatgtgaccttgtgc

SEQ ID NO: 5547928 - DNA, 25 bp, Homo sapien
ccagaagtatggaaaaaatgaggtt

SEQ ID NO: 5547929 - DNA, 25 bp, Homo sapien
cagcgggaatcttgactaccacaca

SEQ ID NO: 5547930 - DNA, 25 bp, Homo sapien
tactatttggagttggacacgagtg

SEQ ID NO: 5547931 - DNA, 25 bp, Homo sapien
attttcaatccagaggaagaccttc

SEQ ID NO: 5547932 - DNA, 25 bp, Homo sapien
ggatgaaggggactccctcactctg

SEQ ID NO: 5547933 - DNA, 25 bp, Homo sapien
ccttctaaaagaggtgatggatggg

SEQ ID NO: 5547934 - DNA, 25 bp, Homo sapien
gggtacaatctttctgggaggtcac

SEQ ID NO: 5547935 - DNA, 25 bp, Homo sapien
aggctgcaggactgtaccacagttc

SEQ ID NO: 5547936 - DNA, 25 bp, Homo sapien
acacagagatgccccataggagtgt

SEQ ID NO: 5547937 - DNA, 25 bp, Homo sapien
gagtgcagcctcacgtgaggtcctt

SEQ ID NO: 5547938 - DNA, 25 bp, Homo sapien
agtgtggtcaacagatacccccagc

SEQ ID NO: 5547939 - DNA, 25 bp, Homo sapien
gatgaactcttgatgggagaaaggg

SEQ ID NO: 5547940 - DNA, 25 bp, Homo sapien
ataggagtgtcatatgaggacttgc

SEQ ID NO: 5547941 - DNA, 25 bp, Homo sapien
ccacccaatgggacaacactgatag

SEQ ID NO: 5547942 - DNA, 25 bp, Homo sapien
taccaaggacctaagcaaacatata

SEQ ID NO: 5547943 - DNA, 25 bp, Homo sapien
acttgcttcacaggaggacttgcta

SEQ ID NO: 5547944 - DNA, 25 bp, Homo sapien
caggacagccctcatctggtcagtg

SEQ ID NO: 5547945 - DNA, 25 bp, Homo sapien
gatggactactataacagttaaaaa

SEQ ID NO: 5547946 - DNA, 25 bp, Homo sapien
tgcagtctcaatgccaacatgcctg

SEQ ID NO: 5547947 - DNA, 25 bp, Homo sapien
tctgtcatatgtctggagggaaatc

SEQ ID NO: 5547948 - DNA, 25 bp, Homo sapien
aaggggtattttggctaactgtatc

SEQ ID NO: 5547949 - DNA, 25 bp, Homo sapien
agatacagggttacaaaactatact

SEQ ID NO: 5547950 - DNA, 25 bp, Homo sapien
ctgaagatacagggttacaaaacta

SEQ ID NO: 5547951 - DNA, 25 bp, Homo sapien
atattaactgaagatacagggttac

SEQ ID NO: 5547952 - DNA, 25 bp, Homo sapien
ctatggccactgcagtctcaatgcc

SEQ ID NO: 5547953 - DNA, 25 bp, Homo sapien
atggcatgtttaattgatggactac

SEQ ID NO: 5547954 - DNA, 25 bp, Homo sapien
atgtgactatggccactgcagtctc

SEQ ID NO: 5547955 - DNA, 25 bp, Homo sapien
ttaatctgtcatatgtctggaggga

SEQ ID NO: 5547956 - DNA, 25 bp, Homo sapien
acttacagtttcacatggatgggga

SEQ ID NO: 5547957 - DNA, 25 bp, Homo sapien
tggtgaagacatatccaagactggg

SEQ ID NO: 5547958 - DNA, 25 bp, Homo sapien
cccgctaccacgccccatccacgat

SEQ ID NO: 5547959 - DNA, 25 bp, Homo sapien
aaaaaagtgtactagtccattttca

SEQ ID NO: 5547960 - DNA, 25 bp, Homo sapien
atctcgtatttgtcttagcagcttc

SEQ ID NO: 5547961 - DNA, 25 bp, Homo sapien
gcgtggtggaaactgctcacgattc

SEQ ID NO: 5547962 - DNA, 25 bp, Homo sapien
caaaagacacttcttatatggtggc

SEQ ID NO: 5547963 - DNA, 25 bp, Homo sapien
taccacgccccatccacgatcttcc

SEQ ID NO: 5547964 - DNA, 25 bp, Homo sapien
gctgctggtgaagacatatccaaga

SEQ ID NO: 5547965 - DNA, 25 bp, Homo sapien
tcaaattatctcctactgggtccct

SEQ ID NO: 5547966 - DNA, 25 bp, Homo sapien
gctggcacgctcagaagatctcgta

SEQ ID NO: 5547967 - DNA, 25 bp, Homo sapien
gaggatggaagcacataacaatgaa

SEQ ID NO: 5547968 - DNA, 25 bp, Homo sapien
aagcagagattaagaagttgaaaga

SEQ ID NO: 5547969 - DNA, 25 bp, Homo sapien
gccacgggaagaatctctggcagaa

SEQ ID NO: 5547970 - DNA, 25 bp, Homo sapien
ttggaatctgtgagtgcaacgtgta

SEQ ID NO: 5547971 - DNA, 25 bp, Homo sapien
gctgagccaagaactaatggaaaaa

SEQ ID NO: 5547972 - DNA, 25 bp, Homo sapien
tggcagaaaagaagtacacctctca

SEQ ID NO: 5547973 - DNA, 25 bp, Homo sapien
ggcagaggtgacttgtcttgaagtt

SEQ ID NO: 5547974 - DNA, 25 bp, Homo sapien
ttagggtccctaacagagactctca

SEQ ID NO: 5547975 - DNA, 25 bp, Homo sapien
ggggacttagacagtgtgctctccc

SEQ ID NO: 5547976 - DNA, 25 bp, Homo sapien
tgaaagaacagattttacagggtga

SEQ ID NO: 5547977 - DNA, 25 bp, Homo sapien
gcaacgtgtaaaacagctgagccaa

SEQ ID NO: 5547978 - DNA, 25 bp, Homo sapien
tgccaaatcgctgctccttctgaac

SEQ ID NO: 5547979 - DNA, 25 bp, Homo sapien
caggggcttttctagggtacattgt

SEQ ID NO: 5547980 - DNA, 25 bp, Homo sapien
gaaacgagaatgtgcagctcactct

SEQ ID NO: 5547981 - DNA, 25 bp, Homo sapien
ctctcctgagtctaacaggtcccac

SEQ ID NO: 5547982 - DNA, 25 bp, Homo sapien
tctccctgttcgggaacgggatgtg

SEQ ID NO: 5547983 - DNA, 25 bp, Homo sapien
gcagattttacggtgggcagatcta

SEQ ID NO: 5547984 - DNA, 25 bp, Homo sapien
tcggtaagctccagatacagctgca

SEQ ID NO: 5547985 - DNA, 25 bp, Homo sapien
tgcactagattcggtaagctccaga

SEQ ID NO: 5547986 - DNA, 25 bp, Homo sapien
acttggaaacagaatcggctcccta

SEQ ID NO: 5547987 - DNA, 25 bp, Homo sapien
tttaaagctgcactagattcggtaa

SEQ ID NO: 5547988 - DNA, 25 bp, Homo sapien
atacagctgcaaatcaagagccatc

SEQ ID NO: 5547989 - DNA, 25 bp, Homo sapien
ttacagacggacttcagtgtttcct

SEQ ID NO: 5547990 - DNA, 25 bp, Homo sapien
aggaaacactgaagtccgtctgtaa

SEQ ID NO: 5547991 - DNA, 25 bp, Homo sapien
gatcgagtcggctactgaagcttgt

SEQ ID NO: 5547992 - DNA, 25 bp, Homo sapien
ggagatgcattcctttggaggggga

SEQ ID NO: 5547993 - DNA, 25 bp, Homo sapien
ttttagcttctttgtgatgcgttca

SEQ ID NO: 5547994 - DNA, 25 bp, Homo sapien
acttgatcgagtcggctactgaagc

SEQ ID NO: 5547995 - DNA, 25 bp, Homo sapien
gttccattgctgacgaggagatgca

SEQ ID NO: 5547996 - DNA, 25 bp, Homo sapien
ttctttgtgatgcgttcaagcttcc

SEQ ID NO: 5547997 - DNA, 25 bp, Homo sapien
tcttccacttgatcgagtcggctac

SEQ ID NO: 5547998 - DNA, 25 bp, Homo sapien
gcgttgttccattgctgacgaggag

SEQ ID NO: 5547999 - DNA, 25 bp, Homo sapien
tgtgatgcgttcaagcttcctcctt

SEQ ID NO: 5548000 - DNA, 25 bp, Homo sapien
tctccatccagcgttgttccattgc

SEQ ID NO: 5548001 - DNA, 25 bp, Homo sapien
gctgacgaggagatgcattcctttg

SEQ ID NO: 5548002 - DNA, 25 bp, Homo sapien
attttaataaacacgtcttacgcac

SEQ ID NO: 5548003 - DNA, 25 bp, Homo sapien
gtgcgtaagacgtgtttattaaaat

SEQ ID NO: 5548004 - DNA, 25 bp, Homo sapien
acccatatgcaacaagaggcagtgc

SEQ ID NO: 5548005 - DNA, 25 bp, Homo sapien
gtggtggagtctaagtgttctaaga

SEQ ID NO: 5548006 - DNA, 25 bp, Homo sapien
aggcagtgctaaaaggaaaacatgc

SEQ ID NO: 5548007 - DNA, 25 bp, Homo sapien
cagtgtgtggcaaaatgtcttcttc

SEQ ID NO: 5548008 - DNA, 25 bp, Homo sapien
gtaagtggaatgcttggtattagtc

SEQ ID NO: 5548009 - DNA, 25 bp, Homo sapien
ttgtggagatgtgacccagatcaat

SEQ ID NO: 5548010 - DNA, 25 bp, Homo sapien
tgaaaatcagggcattggacccata

SEQ ID NO: 5548011 - DNA, 25 bp, Homo sapien
tctgcctgccatagtaggtggtgga

SEQ ID NO: 5548012 - DNA, 25 bp, Homo sapien
tatggagtctgcatgatcaagatta

SEQ ID NO: 5548013 - DNA, 25 bp, Homo sapien
gaaaacatgcttgtaagtggaatgc

SEQ ID NO: 5548014 - DNA, 25 bp, Homo sapien
atgagaacaggacaaactacaagat

SEQ ID NO: 5548015 - DNA, 25 bp, Homo sapien
gttggcaagaaatggattatgtccc

SEQ ID NO: 5548016 - DNA, 25 bp, Homo sapien
gccaacatgacaacgctcaaccttt

SEQ ID NO: 5548017 - DNA, 25 bp, Homo sapien
tttacctaaagaagagctatctctc

SEQ ID NO: 5548018 - DNA, 25 bp, Homo sapien
cctgggccatgaaccagtactggtc

SEQ ID NO: 5548019 - DNA, 25 bp, Homo sapien
ggacttgacttgctgcagtgacctc

SEQ ID NO: 5548020 - DNA, 25 bp, Homo sapien
gcctgttaggacttgggttgcaaca

SEQ ID NO: 5548021 - DNA, 25 bp, Homo sapien
cattttcctctagtccaggggtccc

SEQ ID NO: 5548022 - DNA, 25 bp, Homo sapien
tttgtgtcctgttggcaagaaatgg

SEQ ID NO: 5548023 - DNA, 25 bp, Homo sapien
gcagtgacctcggctaagcaactca

SEQ ID NO: 5548024 - DNA, 25 bp, Homo sapien
ttggggcattaagagccaacatgac

SEQ ID NO: 5548025 - DNA, 25 bp, Homo sapien
ttgaaatgagtttaccttgaaggac

SEQ ID NO: 5548026 - DNA, 25 bp, Homo sapien
tttctaggtcactgagacatgaagt

SEQ ID NO: 5548027 - DNA, 25 bp, Homo sapien
tagttcaaagaagtgaccactcaca

SEQ ID NO: 5548028 - DNA, 25 bp, Homo sapien
attcccctatacagatggtaccagc

SEQ ID NO: 5548029 - DNA, 25 bp, Homo sapien
actcgtgcctgtggtcaagcttcag

SEQ ID NO: 5548030 - DNA, 25 bp, Homo sapien
gggctcagcgtcattaaagcactgc

SEQ ID NO: 5548031 - DNA, 25 bp, Homo sapien
gggccttcctctcagtgacaccact

SEQ ID NO: 5548032 - DNA, 25 bp, Homo sapien
cagaactctctgaggcatgctgggc

SEQ ID NO: 5548033 - DNA, 25 bp, Homo sapien
aagaggaaagtcactcgtgcctgtg

SEQ ID NO: 5548034 - DNA, 25 bp, Homo sapien
gagggtggagaattaatttgcatta

SEQ ID NO: 5548035 - DNA, 25 bp, Homo sapien
ggcatgctgggctaattgactctat

SEQ ID NO: 5548036 - DNA, 25 bp, Homo sapien
aagcttcaggcaatcccagtgacct

SEQ ID NO: 5548037 - DNA, 25 bp, Homo sapien
taggttctgggtatagcaatatgtc

SEQ ID NO: 5548038 - DNA, 25 bp, Homo sapien
atagatgctgggcaaagtgatatgt

SEQ ID NO: 5548039 - DNA, 25 bp, Homo sapien
gtcccataacctagaaggtgggctc

SEQ ID NO: 5548040 - DNA, 25 bp, Homo sapien
caggaaaagagagtcaccttggtga

SEQ ID NO: 5548041 - DNA, 25 bp, Homo sapien
gaaggctgtcaaagcacatagatgc

SEQ ID NO: 5548042 - DNA, 25 bp, Homo sapien
accttggtgagaatgtcagagatat

SEQ ID NO: 5548043 - DNA, 25 bp, Homo sapien
ttgtcacacttgatcgtagggccca

SEQ ID NO: 5548044 - DNA, 25 bp, Homo sapien
cttaggtgctaggcccagcaataca

SEQ ID NO: 5548045 - DNA, 25 bp, Homo sapien
ccaagcagtaaaaaagagtcacatt

SEQ ID NO: 5548046 - DNA, 25 bp, Homo sapien
ggcaggtccattaaagagaaggctg

SEQ ID NO: 5548047 - DNA, 25 bp, Homo sapien
caaatgcccctaagaagagggccca

SEQ ID NO: 5548048 - DNA, 25 bp, Homo sapien
taggtgttggactcagcaatatatc

SEQ ID NO: 5548049 - DNA, 25 bp, Homo sapien
attattctcctttgggcagtgcttc

SEQ ID NO: 5548050 - DNA, 25 bp, Homo sapien
ggagaggagagtcaccattacttag

SEQ ID NO: 5548051 - DNA, 25 bp, Homo sapien
gcagaaaagttgcaccttctaggtg

SEQ ID NO: 5548052 - DNA, 25 bp, Homo sapien
tctaggtgttggactcagcaatata

SEQ ID NO: 5548053 - DNA, 25 bp, Homo sapien
tcctttgggcagtgcttctgcagaa

SEQ ID NO: 5548054 - DNA, 25 bp, Homo sapien
ttgggcagtgcttctgcagaaaagt

SEQ ID NO: 5548055 - DNA, 25 bp, Homo sapien
tggactcagcaatatatcacaatgt

SEQ ID NO: 5548056 - DNA, 25 bp, Homo sapien
ccttctaggtgttggactcagcaat

SEQ ID NO: 5548057 - DNA, 25 bp, Homo sapien
caccttctaggtgttggactcagca

SEQ ID NO: 5548058 - DNA, 25 bp, Homo sapien
agaagagtcacatcatctagatgat

SEQ ID NO: 5548059 - DNA, 25 bp, Homo sapien
gtagaaagaattgaaggatgctgtt

SEQ ID NO: 5548060 - DNA, 25 bp, Homo sapien
gaatcatagtccagagagaagacag

SEQ ID NO: 5548061 - DNA, 25 bp, Homo sapien
agtggcacattgacaacgctgcttc

SEQ ID NO: 5548062 - DNA, 25 bp, Homo sapien
ttctaccaccatggaggaatgacct

SEQ ID NO: 5548063 - DNA, 25 bp, Homo sapien
tcagtgctcatggaaagtggcacat

SEQ ID NO: 5548064 - DNA, 25 bp, Homo sapien
tgctggcacatggctttgcaatctt

SEQ ID NO: 5548065 - DNA, 25 bp, Homo sapien
gggtggttaagcctttgctggcaca

SEQ ID NO: 5548066 - DNA, 25 bp, Homo sapien
acctattgtgaggccagcaccatgg

SEQ ID NO: 5548067 - DNA, 25 bp, Homo sapien
gtgggtacagctcagatccctgcct

SEQ ID NO: 5548068 - DNA, 25 bp, Homo sapien
gggcattcacagtgggtacagctca

SEQ ID NO: 5548069 - DNA, 25 bp, Homo sapien
gaggaatgacctcaccctgggtagt

SEQ ID NO: 5548070 - DNA, 25 bp, Homo sapien
ttaaatctgtgtcgttttaatcttt

SEQ ID NO: 5548071 - DNA, 25 bp, Homo sapien
aaagattaaaacgacacagatttaa

SEQ ID NO: 5548072 - DNA, 25 bp, Homo sapien
aggcttaaacatggtctgaaagatg

SEQ ID NO: 5548073 - DNA, 25 bp, Homo sapien
actatggaggcttaaacatggtctg

SEQ ID NO: 5548074 - DNA, 25 bp, Homo sapien
agaacaaacagaacaaactatggag

SEQ ID NO: 5548075 - DNA, 25 bp, Homo sapien
tctagaatgacttcttaagcaagaa

SEQ ID NO: 5548076 - DNA, 25 bp, Homo sapien
gacttcttaagcaagaacaaacaga

SEQ ID NO: 5548077 - DNA, 25 bp, Homo sapien
caaacagaacaaactatggaggctt

SEQ ID NO: 5548078 - DNA, 25 bp, Homo sapien
cttaaacctgtagctaccatgccca

SEQ ID NO: 5548079 - DNA, 25 bp, Homo sapien
cagaacaaactatggaggcttaaac

SEQ ID NO: 5548080 - DNA, 25 bp, Homo sapien
tttgcatcttaaacctgtagctacc

SEQ ID NO: 5548081 - DNA, 25 bp, Homo sapien
gggcccagccatagaaacacttctg

SEQ ID NO: 5548082 - DNA, 25 bp, Homo sapien
atggaggcttaaacatggtctgaaa

SEQ ID NO: 5548083 - DNA, 25 bp, Homo sapien
ccaacctccctaaaagcaggccaac

SEQ ID NO: 5548084 - DNA, 25 bp, Homo sapien
ctacctacaaactatagagaggttc

SEQ ID NO: 5548085 - DNA, 25 bp, Homo sapien
atagcacattagaaaaaccaaggtt

SEQ ID NO: 5548086 - DNA, 25 bp, Homo sapien
gtcaaatgtaaatgaactacccacc

SEQ ID NO: 5548087 - DNA, 25 bp, Homo sapien
aactctttaggcaaatatgacttac

SEQ ID NO: 5548088 - DNA, 25 bp, Homo sapien
aaaagcaggccaactatactgttct

SEQ ID NO: 5548089 - DNA, 25 bp, Homo sapien
catcttaaaattgggggatcagggt

SEQ ID NO: 5548090 - DNA, 25 bp, Homo sapien
atacactcttaaggcatctgctgtc

SEQ ID NO: 5548091 - DNA, 25 bp, Homo sapien
tatagagaggttcttagccaaactc

SEQ ID NO: 5548092 - DNA, 25 bp, Homo sapien
tatgccactggactctgttggagga

SEQ ID NO: 5548093 - DNA, 25 bp, Homo sapien
aactacaggttgcctctgcccatag

SEQ ID NO: 5548094 - DNA, 25 bp, Homo sapien
gctgtgctgttaactgcagtagtgc

SEQ ID NO: 5548095 - DNA, 25 bp, Homo sapien
tacagtctagtctcaagcttccttc

SEQ ID NO: 5548096 - DNA, 25 bp, Homo sapien
tatacatgttaagtgcttggctatc

SEQ ID NO: 5548097 - DNA, 25 bp, Homo sapien
ttaagttcatccttgagcaggcttt

SEQ ID NO: 5548098 - DNA, 25 bp, Homo sapien
ctgcagtagtgctctctatacatgt

SEQ ID NO: 5548099 - DNA, 25 bp, Homo sapien
tccacttgagctttagagaatttaa

SEQ ID NO: 5548100 - DNA, 25 bp, Homo sapien
tcctaatggtactgcacataatgct

SEQ ID NO: 5548101 - DNA, 25 bp, Homo sapien
gagcaggctttttcaaacacacatt

SEQ ID NO: 5548102 - DNA, 25 bp, Homo sapien
ttcttgagaccctaaccataaattc

SEQ ID NO: 5548103 - DNA, 25 bp, Homo sapien
gctatctcattgcacaagaaaaatc

SEQ ID NO: 5548104 - DNA, 25 bp, Homo sapien
ctctaatcacttgggttatctctcc

SEQ ID NO: 5548105 - DNA, 25 bp, Homo sapien
cctatgtaaatcagaggatggtggg

SEQ ID NO: 5548106 - DNA, 25 bp, Homo sapien
accaagggttaaaactaggatagca

SEQ ID NO: 5548107 - DNA, 25 bp, Homo sapien
actaggatagcaatgcccaatggca

SEQ ID NO: 5548108 - DNA, 25 bp, Homo sapien
ggagtcgtgggaatcacaaagtatt

SEQ ID NO: 5548109 - DNA, 25 bp, Homo sapien
gtgtgaagagaaacatctgctcctg

SEQ ID NO: 5548110 - DNA, 25 bp, Homo sapien
ttgttactcaaagggatcacatatc

SEQ ID NO: 5548111 - DNA, 25 bp, Homo sapien
tttaccgtgggagtttcaaatgtca

SEQ ID NO: 5548112 - DNA, 25 bp, Homo sapien
actggatgttaaagcagtgtggtgt

SEQ ID NO: 5548113 - DNA, 25 bp, Homo sapien
gaaaaggtcacgaatactggatgtt

SEQ ID NO: 5548114 - DNA, 25 bp, Homo sapien
actgtggtgctgagatttgagttca

SEQ ID NO: 5548115 - DNA, 25 bp, Homo sapien
tatttttgttggtctggagtcgtgg

SEQ ID NO: 5548116 - DNA, 25 bp, Homo sapien
ccagtgtgtacaagggttgcaattt

SEQ ID NO: 5548117 - DNA, 25 bp, Homo sapien
ccagaggttcacactgaaggctggc

SEQ ID NO: 5548118 - DNA, 25 bp, Homo sapien
catagaagaacataggtcacacatc

SEQ ID NO: 5548119 - DNA, 25 bp, Homo sapien
taccccagtcctgcccaagtctagc

SEQ ID NO: 5548120 - DNA, 25 bp, Homo sapien
taaatgaaatattgagttgaacttg

SEQ ID NO: 5548121 - DNA, 25 bp, Homo sapien
tcttccctgaggtcctgtggccagt

SEQ ID NO: 5548122 - DNA, 25 bp, Homo sapien
aagggttgcaatttcacaccacacc

SEQ ID NO: 5548123 - DNA, 25 bp, Homo sapien
caatttctaggcccataccccagtc

SEQ ID NO: 5548124 - DNA, 25 bp, Homo sapien
ctacagcagctgtaagacaacatag

SEQ ID NO: 5548125 - DNA, 25 bp, Homo sapien
taaatattgtgttgctgactgaaag

SEQ ID NO: 5548126 - DNA, 25 bp, Homo sapien
ttgagatatgtgagtactgaaatga

SEQ ID NO: 5548127 - DNA, 25 bp, Homo sapien
ggactgtaggagaacacactcaagt

SEQ ID NO: 5548128 - DNA, 25 bp, Homo sapien
ggcatcagtcagctaggacacagcc

SEQ ID NO: 5548129 - DNA, 25 bp, Homo sapien
gaaaattgttggtggagccagatgt

SEQ ID NO: 5548130 - DNA, 25 bp, Homo sapien
actccaaatgagaaagcgagaaaac

SEQ ID NO: 5548131 - DNA, 25 bp, Homo sapien
atggcggcttccacactgacgctgg

SEQ ID NO: 5548132 - DNA, 25 bp, Homo sapien
ttcacagccctgaggtcaaacagca

SEQ ID NO: 5548133 - DNA, 25 bp, Homo sapien
tttcatgttgacaagaatggcggct

SEQ ID NO: 5548134 - DNA, 25 bp, Homo sapien
gatgttaaaggggtgccttgtgtca

SEQ ID NO: 5548135 - DNA, 25 bp, Homo sapien
gagagaaacgttgaaattccgccca

SEQ ID NO: 5548136 - DNA, 25 bp, Homo sapien
caggcatcttgaacagaagggattg

SEQ ID NO: 5548137 - DNA, 25 bp, Homo sapien
agcaagaatggctaaacaagcactc

SEQ ID NO: 5548138 - DNA, 25 bp, Homo sapien
tacaacgagctcaataaagatttcc

SEQ ID NO: 5548139 - DNA, 25 bp, Homo sapien
aggggacagagctgttttgcatctt

SEQ ID NO: 5548140 - DNA, 25 bp, Homo sapien
tgtagcaaaaaatgcacacggaaat

SEQ ID NO: 5548141 - DNA, 25 bp, Homo sapien
gctgttgagtgcctgaacctacacg

SEQ ID NO: 5548142 - DNA, 25 bp, Homo sapien
gaaatatgctgtcattggggaaacc

SEQ ID NO: 5548143 - DNA, 25 bp, Homo sapien
gaaaccaggttaagtgtacatgggc

SEQ ID NO: 5548144 - DNA, 25 bp, Homo sapien
aagaaggtgttaaaaacgcaagcat

SEQ ID NO: 5548145 - DNA, 25 bp, Homo sapien
aatgatcaaaagtcccctgtgctct

SEQ ID NO: 5548146 - DNA, 25 bp, Homo sapien
acgcaagcatgcacaaggctctgaa

SEQ ID NO: 5548147 - DNA, 25 bp, Homo sapien
gactggtgggttgcatcattgcaga

SEQ ID NO: 5548148 - DNA, 25 bp, Homo sapien
gtacatgggccctctttgtgagctc

SEQ ID NO: 5548149 - DNA, 25 bp, Homo sapien
tagcgtgtgcaggctttaccactac

SEQ ID NO: 5548150 - DNA, 25 bp, Homo sapien
accactacacagcacagcattgcaa

SEQ ID NO: 5548151 - DNA, 25 bp, Homo sapien
gatgagaacattgagtcacaaggct

SEQ ID NO: 5548152 - DNA, 25 bp, Homo sapien
ctggttcccaacaggtaggtttgag

SEQ ID NO: 5548153 - DNA, 25 bp, Homo sapien
ctgctgggctgatctggttcccaac

SEQ ID NO: 5548154 - DNA, 25 bp, Homo sapien
ccaggccatggctctgctaccagcc

SEQ ID NO: 5548155 - DNA, 25 bp, Homo sapien
aaggaccctatgcgataggtgccat

SEQ ID NO: 5548156 - DNA, 25 bp, Homo sapien
tcctcacaaggaccctatgcgatag

SEQ ID NO: 5548157 - DNA, 25 bp, Homo sapien
cctgaggtcacacaagcaggaagaa

SEQ ID NO: 5548158 - DNA, 25 bp, Homo sapien
cattgagtcacaaggctgtttgggg

SEQ ID NO: 5548159 - DNA, 25 bp, Homo sapien
taccagcctgctgggctgatctggt

SEQ ID NO: 5548160 - DNA, 25 bp, Homo sapien
ttacagtgttaagagctagaatagc

SEQ ID NO: 5548161 - DNA, 25 bp, Homo sapien
aactgtgcaatgacccatgatttcc

SEQ ID NO: 5548162 - DNA, 25 bp, Homo sapien
agctaaagcagtcgctaacagcatg

SEQ ID NO: 5548163 - DNA, 25 bp, Homo sapien
ggggggaaatatctcaagaaagcaa

SEQ ID NO: 5548164 - DNA, 25 bp, Homo sapien
aaacagatgagcaaaagcaagtatt

SEQ ID NO: 5548165 - DNA, 25 bp, Homo sapien
agaaaatgagactactgccaacgaa

SEQ ID NO: 5548166 - DNA, 25 bp, Homo sapien
gcatgctgagaactaccctgtcata

SEQ ID NO: 5548167 - DNA, 25 bp, Homo sapien
tactaaagacagatagaaaacatat

SEQ ID NO: 5548168 - DNA, 25 bp, Homo sapien
gtttgttaggtaaagctgcaggtta

SEQ ID NO: 5548169 - DNA, 25 bp, Homo sapien
ctactgccaacgaaatgcccaaggg

SEQ ID NO: 5548170 - DNA, 25 bp, Homo sapien
acgtaaagcagtggaaacttaagat

SEQ ID NO: 5548171 - DNA, 25 bp, Homo sapien
tgtgatagtacagagggctttgatt

SEQ ID NO: 5548172 - DNA, 25 bp, Homo sapien
cagcctgagatgctgtatgagggcg

SEQ ID NO: 5548173 - DNA, 25 bp, Homo sapien
ctctggatctcgggccttatggcta

SEQ ID NO: 5548174 - DNA, 25 bp, Homo sapien
gatgggataattggcatgcttgcgt

SEQ ID NO: 5548175 - DNA, 25 bp, Homo sapien
tctgaaataggaggcacttaagctc

SEQ ID NO: 5548176 - DNA, 25 bp, Homo sapien
tacagataaggaaagttgagtccca

SEQ ID NO: 5548177 - DNA, 25 bp, Homo sapien
ctatttggcaaagttgggagtaagg

SEQ ID NO: 5548178 - DNA, 25 bp, Homo sapien
atgcttgcgtgggctcctaatctct

SEQ ID NO: 5548179 - DNA, 25 bp, Homo sapien
gggagtaaggtcctgagcactcctc

SEQ ID NO: 5548180 - DNA, 25 bp, Homo sapien
tgcacccctctgatgggcctgccga

SEQ ID NO: 5548181 - DNA, 25 bp, Homo sapien
gttggtgagatgaaaacacccgcac

SEQ ID NO: 5548182 - DNA, 25 bp, Homo sapien
acttaagccttcaaatagcacagac

SEQ ID NO: 5548183 - DNA, 25 bp, Homo sapien
ggagagtatcttaaacttggcatgt

SEQ ID NO: 5548184 - DNA, 25 bp, Homo sapien
gactgattttcagtgaggctctcgc

SEQ ID NO: 5548185 - DNA, 25 bp, Homo sapien
tttgcataacgatctggagagtatc

SEQ ID NO: 5548186 - DNA, 25 bp, Homo sapien
ttcctgagactaaaagattgagctc

SEQ ID NO: 5548187 - DNA, 25 bp, Homo sapien
aactttgagctaaaatccaggatct

SEQ ID NO: 5548188 - DNA, 25 bp, Homo sapien
atgcctgttgccttgggtgactgat

SEQ ID NO: 5548189 - DNA, 25 bp, Homo sapien
gtggacaaactagcacattagaaca

SEQ ID NO: 5548190 - DNA, 25 bp, Homo sapien
tggcagactcgattaatatgtggac

SEQ ID NO: 5548191 - DNA, 25 bp, Homo sapien
gagggtttgctcctttggcgctcta

SEQ ID NO: 5548192 - DNA, 25 bp, Homo sapien
tggcatgttcaaacctggcagactc

SEQ ID NO: 5548193 - DNA, 25 bp, Homo sapien
tgcctgattacaacgacgagggaga

SEQ ID NO: 5548194 - DNA, 25 bp, Homo sapien
tgctgacggtgatctgagtacattt

SEQ ID NO: 5548195 - DNA, 25 bp, Homo sapien
cagaaccacacgcacagcatgtgca

SEQ ID NO: 5548196 - DNA, 25 bp, Homo sapien
acagaactcgcggtacacacaaata

SEQ ID NO: 5548197 - DNA, 25 bp, Homo sapien
ctatcttagcatggcagaaagcgga

SEQ ID NO: 5548198 - DNA, 25 bp, Homo sapien
agaaaaacaccagatagctcagcct

SEQ ID NO: 5548199 - DNA, 25 bp, Homo sapien
tgaaagcaacccatgccctcgagga

SEQ ID NO: 5548200 - DNA, 25 bp, Homo sapien
gaaagcggattccaaccagccacag

SEQ ID NO: 5548201 - DNA, 25 bp, Homo sapien
aaaccacgagtgtcagcagtgtgta

SEQ ID NO: 5548202 - DNA, 25 bp, Homo sapien
caggagctgaagctcagcccttcct

SEQ ID NO: 5548203 - DNA, 25 bp, Homo sapien
gtgggccacctgctacctagtgctt

SEQ ID NO: 5548204 - DNA, 25 bp, Homo sapien
ggagaaaccttctgagccattgact

SEQ ID NO: 5548205 - DNA, 25 bp, Homo sapien
attccaccttgagagcagactgatg

SEQ ID NO: 5548206 - DNA, 25 bp, Homo sapien
tgtcagctgccccgagcttctactc

SEQ ID NO: 5548207 - DNA, 25 bp, Homo sapien
cacactccccaggtttggagaaacc

SEQ ID NO: 5548208 - DNA, 25 bp, Homo sapien
gggaagagatttggcatctggtccc

SEQ ID NO: 5548209 - DNA, 25 bp, Homo sapien
tttgtatctggactgtgacatttcc

SEQ ID NO: 5548210 - DNA, 25 bp, Homo sapien
tctgctgctaggcttctgggatagc

SEQ ID NO: 5548211 - DNA, 25 bp, Homo sapien
gagctagcaaacagcacactcccca

SEQ ID NO: 5548212 - DNA, 25 bp, Homo sapien
ttctgggatagcacactccgtctcc

SEQ ID NO: 5548213 - DNA, 25 bp, Homo sapien
cttctcacaatcccaccctccctcc

SEQ ID NO: 5548214 - DNA, 25 bp, Homo sapien
ttgactatggatttgccaaggtttt

SEQ ID NO: 5548215 - DNA, 25 bp, Homo sapien
accttaagttggtagctctgggtct

SEQ ID NO: 5548216 - DNA, 25 bp, Homo sapien
aagtacctgtatctatagggcagtt

SEQ ID NO: 5548217 - DNA, 25 bp, Homo sapien
tcacttcaagatgtctaaacgcttc

SEQ ID NO: 5548218 - DNA, 25 bp, Homo sapien
tttgttgggttctcttgactgcttt

SEQ ID NO: 5548219 - DNA, 25 bp, Homo sapien
taagctatagaaagtatgtgcagtc

SEQ ID NO: 5548220 - DNA, 25 bp, Homo sapien
ctttgtaatgttttgggggctcaat

SEQ ID NO: 5548221 - DNA, 25 bp, Homo sapien
aatgtgccaaccttgaaccagacct

SEQ ID NO: 5548222 - DNA, 25 bp, Homo sapien
taaatctgataatgtgccaaccttg

SEQ ID NO: 5548223 - DNA, 25 bp, Homo sapien
tgtatgttagagctcctcaggtcat

SEQ ID NO: 5548224 - DNA, 25 bp, Homo sapien
cctagcagatgtatgttagagctcc

SEQ ID NO: 5548225 - DNA, 25 bp, Homo sapien
gaaccagaccttaagttggtagctc

SEQ ID NO: 5548226 - DNA, 25 bp, Homo sapien
tgctttcaaccaaggaggcagcaca

SEQ ID NO: 5548227 - DNA, 25 bp, Homo sapien
gcagcacagaccataccgtgtccct

SEQ ID NO: 5548228 - DNA, 25 bp, Homo sapien
acgcgtggaaccaaaggtatctcat

SEQ ID NO: 5548229 - DNA, 25 bp, Homo sapien
agactcaagaattgctgtaagcccc

SEQ ID NO: 5548230 - DNA, 25 bp, Homo sapien
tgtccctcggcgctctgccctagct

SEQ ID NO: 5548231 - DNA, 25 bp, Homo sapien
caaaaaaagtcaatacaggccaaat

SEQ ID NO: 5548232 - DNA, 25 bp, Homo sapien
tgttcccagatccagaagccgggag

SEQ ID NO: 5548233 - DNA, 25 bp, Homo sapien
acaggccaaattaagtgtcagactc

SEQ ID NO: 5548234 - DNA, 25 bp, Homo sapien
gattctgcgtgggataaacactgtc

SEQ ID NO: 5548235 - DNA, 25 bp, Homo sapien
gtaagccccccatggggacacagat

SEQ ID NO: 5548236 - DNA, 25 bp, Homo sapien
ccgggaggaaattatgtgaatgttt

SEQ ID NO: 5548237 - DNA, 25 bp, Homo sapien
gttgtggcacataacagtaattttc

SEQ ID NO: 5548238 - DNA, 25 bp, Homo sapien
tgattctagaatttgcatttggttc

SEQ ID NO: 5548239 - DNA, 25 bp, Homo sapien
aatggtgctagaagcattcttcttt

SEQ ID NO: 5548240 - DNA, 25 bp, Homo sapien
gctattgaatggatatacctgattt

SEQ ID NO: 5548241 - DNA, 25 bp, Homo sapien
cagaatgaatgcatacttcagcatt

SEQ ID NO: 5548242 - DNA, 25 bp, Homo sapien
ttccagtactgtatagtatgctatt

SEQ ID NO: 5548243 - DNA, 25 bp, Homo sapien
tttacttctcttggggcattcatgt

SEQ ID NO: 5548244 - DNA, 25 bp, Homo sapien
agagataacctctatactgacttct

SEQ ID NO: 5548245 - DNA, 25 bp, Homo sapien
ataaatggaatcacatagtacatat

SEQ ID NO: 5548246 - DNA, 25 bp, Homo sapien
cattcataagatggagttctacatc

SEQ ID NO: 5548247 - DNA, 25 bp, Homo sapien
tgttatgaataatggtgctagaagc

SEQ ID NO: 5548248 - DNA, 25 bp, Homo sapien
aaaagagattaagcataggtaggtt

SEQ ID NO: 5548249 - DNA, 25 bp, Homo sapien
aaacagacgggaactcttgtaactc

SEQ ID NO: 5548250 - DNA, 25 bp, Homo sapien
tggccttaaaggctaagcatgtctg

SEQ ID NO: 5548251 - DNA, 25 bp, Homo sapien
aaaaacggtctgccaaacctgcatc

SEQ ID NO: 5548252 - DNA, 25 bp, Homo sapien
tgtaaaagaagtgaaaggtaatata

SEQ ID NO: 5548253 - DNA, 25 bp, Homo sapien
actcatgatgggtttgtcaggatgt

SEQ ID NO: 5548254 - DNA, 25 bp, Homo sapien
aggtaggtttgctgtagtgctgttg

SEQ ID NO: 5548255 - DNA, 25 bp, Homo sapien
aaaatacagtgataggatgacaaga

SEQ ID NO: 5548256 - DNA, 25 bp, Homo sapien
tataggtcagactaagcaagttcta

SEQ ID NO: 5548257 - DNA, 25 bp, Homo sapien
tagcccaaacttcaataggacagat

SEQ ID NO: 5548258 - DNA, 25 bp, Homo sapien
ggatgacaagatcagaaaagagatt

SEQ ID NO: 5548259 - DNA, 25 bp, Homo sapien
tatacagaaagagcccttcccaaga

SEQ ID NO: 5548260 - DNA, 25 bp, Homo sapien
tccacgttgatgataacacgattgc

SEQ ID NO: 5548261 - DNA, 25 bp, Homo sapien
ctttgcaatgatggcttaacagtgt

SEQ ID NO: 5548262 - DNA, 25 bp, Homo sapien
cacacatgaaaactgcattgccctt

SEQ ID NO: 5548263 - DNA, 25 bp, Homo sapien
agccgaaggacactctccgggttca

SEQ ID NO: 5548264 - DNA, 25 bp, Homo sapien
gggcagctgctaaccttacacacat

SEQ ID NO: 5548265 - DNA, 25 bp, Homo sapien
tccacatccgacctggcagttcctc

SEQ ID NO: 5548266 - DNA, 25 bp, Homo sapien
tttgaaggcagaataacataagact

SEQ ID NO: 5548267 - DNA, 25 bp, Homo sapien
gataacacgattgcagactgtcatc

SEQ ID NO: 5548268 - DNA, 25 bp, Homo sapien
gcccttcccaagaaagggcagctgc

SEQ ID NO: 5548269 - DNA, 25 bp, Homo sapien
atcaacatggaaagataggacattt

SEQ ID NO: 5548270 - DNA, 25 bp, Homo sapien
attgggtggcagttactcaactcat

SEQ ID NO: 5548271 - DNA, 25 bp, Homo sapien
ctctagaaatgtagaacttgaaaaa

SEQ ID NO: 5548272 - DNA, 25 bp, Homo sapien
acccattttggatcaagggcaaagc

SEQ ID NO: 5548273 - DNA, 25 bp, Homo sapien
actttctaatatcagcgctagctgt

SEQ ID NO: 5548274 - DNA, 25 bp, Homo sapien
tagtctatgaattgggtggcagtta

SEQ ID NO: 5548275 - DNA, 25 bp, Homo sapien
tactttagtctatgaattgggtggc

SEQ ID NO: 5548276 - DNA, 25 bp, Homo sapien
cagcgctagctgtagtctgtttctc

SEQ ID NO: 5548277 - DNA, 25 bp, Homo sapien
gcccagccagaatatcataatgtta

SEQ ID NO: 5548278 - DNA, 25 bp, Homo sapien
aaacccacaaagaacaaatgaaagc

SEQ ID NO: 5548279 - DNA, 25 bp, Homo sapien
ggatcaagggcaaagctttgttttc

SEQ ID NO: 5548280 - DNA, 25 bp, Homo sapien
aaatgaaagccccctgccctgaagt

SEQ ID NO: 5548281 - DNA, 25 bp, Homo sapien
ccggttctactggactttggcttgt

SEQ ID NO: 5548282 - DNA, 25 bp, Homo sapien
acaagccaaagtccagtagaaccgg

SEQ ID NO: 5548283 - DNA, 25 bp, Homo sapien
gaagacctttagggcagtgaaccta

SEQ ID NO: 5548284 - DNA, 25 bp, Homo sapien
gacaaaggacatgatgaaaactcta

SEQ ID NO: 5548285 - DNA, 25 bp, Homo sapien
gttatgcatgttcacagtggggaag

SEQ ID NO: 5548286 - DNA, 25 bp, Homo sapien
gtctcagtgtaagttcatcgattgt

SEQ ID NO: 5548287 - DNA, 25 bp, Homo sapien
atagtactagctagacacaggtctt

SEQ ID NO: 5548288 - DNA, 25 bp, Homo sapien
tgcaagaacccaaagagcgtatagt

SEQ ID NO: 5548289 - DNA, 25 bp, Homo sapien
atccggtgttaaaaagaattgagct

SEQ ID NO: 5548290 - DNA, 25 bp, Homo sapien
agaattgagctatgacggcattaac

SEQ ID NO: 5548291 - DNA, 25 bp, Homo sapien
atggagggaccttaaatgcgtatta

SEQ ID NO: 5548292 - DNA, 25 bp, Homo sapien
aagagcgtatagtaccaagaatgaa

SEQ ID NO: 5548293 - DNA, 25 bp, Homo sapien
gacggcattaacagatatggaggga

SEQ ID NO: 5548294 - DNA, 25 bp, Homo sapien
tgcaggtcctggattaatgagcctt

SEQ ID NO: 5548295 - DNA, 25 bp, Homo sapien
caactaaaggaagtagcctctgctc

SEQ ID NO: 5548296 - DNA, 25 bp, Homo sapien
gactcccagtagctgccatgcagga

SEQ ID NO: 5548297 - DNA, 25 bp, Homo sapien
ggtgaagtctaagaggaacaacaaa

SEQ ID NO: 5548298 - DNA, 25 bp, Homo sapien
acctatcgtcggaagacaaaaggga

SEQ ID NO: 5548299 - DNA, 25 bp, Homo sapien
tttcaaataccgtgtgggccaaaca

SEQ ID NO: 5548300 - DNA, 25 bp, Homo sapien
aatgagccttggatatgtgtggcac

SEQ ID NO: 5548301 - DNA, 25 bp, Homo sapien
acgcctaatgggtccagataggaac

SEQ ID NO: 5548302 - DNA, 25 bp, Homo sapien
aacaaaatatctgcgggcgaaatgc

SEQ ID NO: 5548303 - DNA, 25 bp, Homo sapien
aatgggggcacaattcaaacgccta

SEQ ID NO: 5548304 - DNA, 25 bp, Homo sapien
gataggaaccctgaatgagtgaaat

SEQ ID NO: 5548305 - DNA, 25 bp, Homo sapien
agggttagggcttcattatatgaat

SEQ ID NO: 5548306 - DNA, 25 bp, Homo sapien
atccatcacagaacagaccacggtc

SEQ ID NO: 5548307 - DNA, 25 bp, Homo sapien
cccgacaatccatcacagaacagac

SEQ ID NO: 5548308 - DNA, 25 bp, Homo sapien
cggtcctgctgcgtccagcccttgc

SEQ ID NO: 5548309 - DNA, 25 bp, Homo sapien
ttacctcttgaaagacacttcctcc

SEQ ID NO: 5548310 - DNA, 25 bp, Homo sapien
aactaagcccataacagtgacttct

SEQ ID NO: 5548311 - DNA, 25 bp, Homo sapien
tttaagaggatacaactaagcccat

SEQ ID NO: 5548312 - DNA, 25 bp, Homo sapien
ttcaattcctcacacgctcccgttt

SEQ ID NO: 5548313 - DNA, 25 bp, Homo sapien
ccagactcagaatcagaatgttgcc

SEQ ID NO: 5548314 - DNA, 25 bp, Homo sapien
tgggattacaggcggtaattacctc

SEQ ID NO: 5548315 - DNA, 25 bp, Homo sapien
tactattttgatctctgggacttct

SEQ ID NO: 5548316 - DNA, 25 bp, Homo sapien
gtctggcacaggtaaccactcagta

SEQ ID NO: 5548317 - DNA, 25 bp, Homo sapien
cctatgagacattatcgctttggat

SEQ ID NO: 5548318 - DNA, 25 bp, Homo sapien
caaagacttcaaatggattaatctc

SEQ ID NO: 5548319 - DNA, 25 bp, Homo sapien
atttaggtggaatttttggatttca

SEQ ID NO: 5548320 - DNA, 25 bp, Homo sapien
tatatgcacaaaactgtaactctac

SEQ ID NO: 5548321 - DNA, 25 bp, Homo sapien
ccattggtaccacataacccacacc

SEQ ID NO: 5548322 - DNA, 25 bp, Homo sapien
aattgacttggattagtaggtgcac

SEQ ID NO: 5548323 - DNA, 25 bp, Homo sapien
ttctgccattacaatgccaggatgt

SEQ ID NO: 5548324 - DNA, 25 bp, Homo sapien
ctagtaggcttttgagtatatgcac

SEQ ID NO: 5548325 - DNA, 25 bp, Homo sapien
agcatctagaacattgtctggcaca

SEQ ID NO: 5548326 - DNA, 25 bp, Homo sapien
tggattagtaggtgcacacaatgat

SEQ ID NO: 5548327 - DNA, 25 bp, Homo sapien
ttaatcaaataagaacatccgcatt

SEQ ID NO: 5548328 - DNA, 25 bp, Homo sapien
atccgcatttaactgagaagggtat

SEQ ID NO: 5548329 - DNA, 25 bp, Homo sapien
aagtgcaaggtaaaccaatggattt

SEQ ID NO: 5548330 - DNA, 25 bp, Homo sapien
aagtcattccaagtgcaaggtaaac

SEQ ID NO: 5548331 - DNA, 25 bp, Homo sapien
ttccaggaaaacaacacttgttgcc

SEQ ID NO: 5548332 - DNA, 25 bp, Homo sapien
attcagacttgagcatttggcagat

SEQ ID NO: 5548333 - DNA, 25 bp, Homo sapien
ttgatatggtttgataaaatgagtc

SEQ ID NO: 5548334 - DNA, 25 bp, Homo sapien
attactgaaatgaatgaagtgagcc

SEQ ID NO: 5548335 - DNA, 25 bp, Homo sapien
atgagtcaattttcaggagatctgt

SEQ ID NO: 5548336 - DNA, 25 bp, Homo sapien
cttatctgatgagactagtggtaat

SEQ ID NO: 5548337 - DNA, 25 bp, Homo sapien
aggagatctgtacaatctaggtaac

SEQ ID NO: 5548338 - DNA, 25 bp, Homo sapien
ctttgtagagttacaggcaaggttc

SEQ ID NO: 5548339 - DNA, 25 bp, Homo sapien
ggttggttcttgttcagactctgta

SEQ ID NO: 5548340 - DNA, 25 bp, Homo sapien
cctgaattcccttggttggttcttg

SEQ ID NO: 5548341 - DNA, 25 bp, Homo sapien
atagaatagcacatgtggatatcat

SEQ ID NO: 5548342 - DNA, 25 bp, Homo sapien
tagagttacaggcaaggttcctgcc

SEQ ID NO: 5548343 - DNA, 25 bp, Homo sapien
ttttctttccagattgggagcagtg

SEQ ID NO: 5548344 - DNA, 25 bp, Homo sapien
ggagcagtgcatgaaaatggtattc

SEQ ID NO: 5548345 - DNA, 25 bp, Homo sapien
ttggtccctacagagatcgattggc

SEQ ID NO: 5548346 - DNA, 25 bp, Homo sapien
tcctaacagatggctttgtagagtt

SEQ ID NO: 5548347 - DNA, 25 bp, Homo sapien
aggtaggagaacagtgtcttttagc

SEQ ID NO: 5548348 - DNA, 25 bp, Homo sapien
agagatcgattggcaaaatgctttc

SEQ ID NO: 5548349 - DNA, 25 bp, Homo sapien
acctggaatttcagcgtcaactttt

SEQ ID NO: 5548350 - DNA, 25 bp, Homo sapien
tgtgtgtgtattggaggtctttagg

SEQ ID NO: 5548351 - DNA, 25 bp, Homo sapien
tttactgtgcccttggatgagctac

SEQ ID NO: 5548352 - DNA, 25 bp, Homo sapien
aaggacagcatcaacacctggcatg

SEQ ID NO: 5548353 - DNA, 25 bp, Homo sapien
tggggcatgcaagcacccttactcc

SEQ ID NO: 5548354 - DNA, 25 bp, Homo sapien
tcagcgtcaacttttactgtgccct

SEQ ID NO: 5548355 - DNA, 25 bp, Homo sapien
ccaggctttggcactggtggtagtg

SEQ ID NO: 5548356 - DNA, 25 bp, Homo sapien
tactccttgggacactcatcattcc

SEQ ID NO: 5548357 - DNA, 25 bp, Homo sapien
ggtacatatgtacaacttgcaggtt

SEQ ID NO: 5548358 - DNA, 25 bp, Homo sapien
tgtgcccttggatgagctactgatc

SEQ ID NO: 5548359 - DNA, 25 bp, Homo sapien
gcatcaacacctggcatgggagcca

SEQ ID NO: 5548360 - DNA, 25 bp, Homo sapien
gttgcagatatcttgaaataatgtc

SEQ ID NO: 5548361 - DNA, 25 bp, Homo sapien
cctggcccacagtacataatgttaa

SEQ ID NO: 5548362 - DNA, 25 bp, Homo sapien
agtggaaaccagatatttttgttgc

SEQ ID NO: 5548363 - DNA, 25 bp, Homo sapien
gttgttattacgcctgcaccagatc

SEQ ID NO: 5548364 - DNA, 25 bp, Homo sapien
tgttaatagtacctgtggcgttgtc

SEQ ID NO: 5548365 - DNA, 25 bp, Homo sapien
atgacagatagcccctatggaaaaa

SEQ ID NO: 5548366 - DNA, 25 bp, Homo sapien
cttacaaaaatgacagatagcccct

SEQ ID NO: 5548367 - DNA, 25 bp, Homo sapien
tataaataaataagcccacatactt

SEQ ID NO: 5548368 - DNA, 25 bp, Homo sapien
tctagcatatataaagaactcctac

SEQ ID NO: 5548369 - DNA, 25 bp, Homo sapien
gccaccacgcctggcccacagtaca

SEQ ID NO: 5548370 - DNA, 25 bp, Homo sapien
gtggcgttgtcacaagtggaaacca

SEQ ID NO: 5548371 - DNA, 25 bp, Homo sapien
tgcagtcagccctgattgctgccac

SEQ ID NO: 5548372 - DNA, 25 bp, Homo sapien
gactaaagccaattaatggggtatg

SEQ ID NO: 5548373 - DNA, 25 bp, Homo sapien
cagtaggacataatagggctgaaga

SEQ ID NO: 5548374 - DNA, 25 bp, Homo sapien
gcaggatcacttggacctgaggggt

SEQ ID NO: 5548375 - DNA, 25 bp, Homo sapien
aggttaaggtcatgcagtaggacat

SEQ ID NO: 5548376 - DNA, 25 bp, Homo sapien
gatgaacaaatgcatgtaagagaac

SEQ ID NO: 5548377 - DNA, 25 bp, Homo sapien
ggggtatggcaatagtctagttgga

SEQ ID NO: 5548378 - DNA, 25 bp, Homo sapien
atagtcaacagtgataacaggatcc

SEQ ID NO: 5548379 - DNA, 25 bp, Homo sapien
taaagggtagaattcacaagatttg

SEQ ID NO: 5548380 - DNA, 25 bp, Homo sapien
atagtctagttggaagaggttaagg

SEQ ID NO: 5548381 - DNA, 25 bp, Homo sapien
gaagtatggatggaattgacaaact

SEQ ID NO: 5548382 - DNA, 25 bp, Homo sapien
gaagacattttcacagactaattct

SEQ ID NO: 5548383 - DNA, 25 bp, Homo sapien
tagatttccgagaactgtcttgaat

SEQ ID NO: 5548384 - DNA, 25 bp, Homo sapien
tcttactgaaatgcataaccacatc

SEQ ID NO: 5548385 - DNA, 25 bp, Homo sapien
ctagaaatagtgctctgtgtgacat

SEQ ID NO: 5548386 - DNA, 25 bp, Homo sapien
cggctaactgcaaccttccacctcc

SEQ ID NO: 5548387 - DNA, 25 bp, Homo sapien
aaccacatcagtatcacaatttctc

SEQ ID NO: 5548388 - DNA, 25 bp, Homo sapien
ataatttagatttccgagaactgtc

SEQ ID NO: 5548389 - DNA, 25 bp, Homo sapien
aattagatctggtcagtttaccgtt

SEQ ID NO: 5548390 - DNA, 25 bp, Homo sapien
ttattttgggatcgtactagtactc

SEQ ID NO: 5548391 - DNA, 25 bp, Homo sapien
caccatgcccagctagctctgcctc

SEQ ID NO: 5548392 - DNA, 25 bp, Homo sapien
caatctcggctaactgcaaccttcc

SEQ ID NO: 5548393 - DNA, 25 bp, Homo sapien
cataacacaagcaacagactgtaag

SEQ ID NO: 5548394 - DNA, 25 bp, Homo sapien
accattccattgggtaggtatcacc

SEQ ID NO: 5548395 - DNA, 25 bp, Homo sapien
tgtcaaaagatggcctgtgaaggta

SEQ ID NO: 5548396 - DNA, 25 bp, Homo sapien
acacaaggtgttaactaaagttctg

SEQ ID NO: 5548397 - DNA, 25 bp, Homo sapien
ttagtgtctagaatgcacaatattc

SEQ ID NO: 5548398 - DNA, 25 bp, Homo sapien
taatgaataatcaaaaagatgcaaa

SEQ ID NO: 5548399 - DNA, 25 bp, Homo sapien
ataggaaaagatacagacaactcac

SEQ ID NO: 5548400 - DNA, 25 bp, Homo sapien
ttaagatgttgttggtaatactctc

SEQ ID NO: 5548401 - DNA, 25 bp, Homo sapien
actgtgcatcctataaaccaaccat

SEQ ID NO: 5548402 - DNA, 25 bp, Homo sapien
tataaaaagatgaagttaatgaata

SEQ ID NO: 5548403 - DNA, 25 bp, Homo sapien
accagggagtaaattataacagtta

SEQ ID NO: 5548404 - DNA, 25 bp, Homo sapien
gccggaccaggaactgtcaattagt

SEQ ID NO: 5548405 - DNA, 25 bp, Homo sapien
gcagttactataaatcaaggccagc

SEQ ID NO: 5548406 - DNA, 25 bp, Homo sapien
tcacccagtgagcctggctactttg

SEQ ID NO: 5548407 - DNA, 25 bp, Homo sapien
ttctagcgattcttgcatgcacagc

SEQ ID NO: 5548408 - DNA, 25 bp, Homo sapien
agggtgggctcttttactaactgga

SEQ ID NO: 5548409 - DNA, 25 bp, Homo sapien
gggagagccttctagacgtgattct

SEQ ID NO: 5548410 - DNA, 25 bp, Homo sapien
gtcaattagtggtgtctggcagtta

SEQ ID NO: 5548411 - DNA, 25 bp, Homo sapien
tctgacccctgattccatgacactc

SEQ ID NO: 5548412 - DNA, 25 bp, Homo sapien
cactagaacgagtggttccagctct

SEQ ID NO: 5548413 - DNA, 25 bp, Homo sapien
agggcaccagaaatgtcaccactaa

SEQ ID NO: 5548414 - DNA, 25 bp, Homo sapien
atcaaggccagcaagataaaagaaa

SEQ ID NO: 5548415 - DNA, 25 bp, Homo sapien
agcctgtgctggacctgtcactctg

SEQ ID NO: 5548416 - DNA, 25 bp, Homo sapien
cactcagtgtgtcctcctttgctct

SEQ ID NO: 5548417 - DNA, 25 bp, Homo sapien
tgggaggaacttgctcaccatggga

SEQ ID NO: 5548418 - DNA, 25 bp, Homo sapien
gctcaccatgggataccaacaccta

SEQ ID NO: 5548419 - DNA, 25 bp, Homo sapien
ttcttgagctggaagcactaatttt

SEQ ID NO: 5548420 - DNA, 25 bp, Homo sapien
aataaaaatgggccttgggcctgaa

SEQ ID NO: 5548421 - DNA, 25 bp, Homo sapien
cagttgttggcatcagctgctggga

SEQ ID NO: 5548422 - DNA, 25 bp, Homo sapien
atgtgtgtcatatgtcacctggctc

SEQ ID NO: 5548423 - DNA, 25 bp, Homo sapien
ttttgaaggttgattggctgttatt

SEQ ID NO: 5548424 - DNA, 25 bp, Homo sapien
gtcttgacatgtgttggaaaaggcg

SEQ ID NO: 5548425 - DNA, 25 bp, Homo sapien
ttaccaagcgatagagtcctcacag

SEQ ID NO: 5548426 - DNA, 25 bp, Homo sapien
acgaccaatctgacccagcaggatt

SEQ ID NO: 5548427 - DNA, 25 bp, Homo sapien
cacccaaggaatggcaaacgttctt

SEQ ID NO: 5548428 - DNA, 25 bp, Homo sapien
tagtagaaccatagggttagtttgc

SEQ ID NO: 5548429 - DNA, 25 bp, Homo sapien
attggtgcccctaagcttcacgacc

SEQ ID NO: 5548430 - DNA, 25 bp, Homo sapien
aaccagttgaacacccagcagctat

SEQ ID NO: 5548431 - DNA, 25 bp, Homo sapien
tcttgtttactgggtggcatcgcta

SEQ ID NO: 5548432 - DNA, 25 bp, Homo sapien
gggtggcatcgctaaggtcttttta

SEQ ID NO: 5548433 - DNA, 25 bp, Homo sapien
ctaataaagtagcggttttcccata

SEQ ID NO: 5548434 - DNA, 25 bp, Homo sapien
agcaggattcaagcataaaattgcc

SEQ ID NO: 5548435 - DNA, 25 bp, Homo sapien
gcttcctgggaaagcaactgaaact

SEQ ID NO: 5548436 - DNA, 25 bp, Homo sapien
cctacaattggaggacaaagaagag

SEQ ID NO: 5548437 - DNA, 25 bp, Homo sapien
aaacccgtggaatctccagagtgat

SEQ ID NO: 5548438 - DNA, 25 bp, Homo sapien
gggcttcgggaatcttggatagctt

SEQ ID NO: 5548439 - DNA, 25 bp, Homo sapien
accctaactgaggggttcagagagc

SEQ ID NO: 5548440 - DNA, 25 bp, Homo sapien
atgtctatatgccaggaggtggtat

SEQ ID NO: 5548441 - DNA, 25 bp, Homo sapien
caggaggtggtatataccccaactc

SEQ ID NO: 5548442 - DNA, 25 bp, Homo sapien
tttgcatgctaatgagatgaccggg

SEQ ID NO: 5548443 - DNA, 25 bp, Homo sapien
gaggggctaaagattgagttaatca

SEQ ID NO: 5548444 - DNA, 25 bp, Homo sapien
ccagagtgatatgcgtgtcttttgc

SEQ ID NO: 5548445 - DNA, 25 bp, Homo sapien
cggcattattagagggttgaaagtt

SEQ ID NO: 5548446 - DNA, 25 bp, Homo sapien
gggactgaagctcctggacccttct

SEQ ID NO: 5548447 - DNA, 25 bp, Homo sapien
ttgccagaaagaccacggcattatt

SEQ ID NO: 5548448 - DNA, 25 bp, Homo sapien
gtgagccatcacatccaacaagacc

SEQ ID NO: 5548449 - DNA, 25 bp, Homo sapien
ctgtcttagtctctgtgttgggatt

SEQ ID NO: 5548450 - DNA, 25 bp, Homo sapien
acccttgctaggtaagctgggctct

SEQ ID NO: 5548451 - DNA, 25 bp, Homo sapien
ttcaggcagcaatctacaatagggt

SEQ ID NO: 5548452 - DNA, 25 bp, Homo sapien
ccttagatttaagccaaaacaggac

SEQ ID NO: 5548453 - DNA, 25 bp, Homo sapien
gttaaggaattgcctgcaaggtctt

SEQ ID NO: 5548454 - DNA, 25 bp, Homo sapien
gggattgaagtacaggggattccca

SEQ ID NO: 5548455 - DNA, 25 bp, Homo sapien
tcccaggcacccttgctaggtaagc

SEQ ID NO: 5548456 - DNA, 25 bp, Homo sapien
ggtgagcaaaagtaagaatgagctc

SEQ ID NO: 5548457 - DNA, 25 bp, Homo sapien
atgagggtaaacagttaaggaattg

SEQ ID NO: 5548458 - DNA, 25 bp, Homo sapien
tgcaaggtcttctcgtctcccaggt

SEQ ID NO: 5548459 - DNA, 25 bp, Homo sapien
ctgaatggattgctgtcatggacac

SEQ ID NO: 5548460 - DNA, 25 bp, Homo sapien
aatgagataatatgagtggcagctc

SEQ ID NO: 5548461 - DNA, 25 bp, Homo sapien
aggaagaatgtgccttcaggccaca

SEQ ID NO: 5548462 - DNA, 25 bp, Homo sapien
gctccaagagcagcctcctgaagtg

SEQ ID NO: 5548463 - DNA, 25 bp, Homo sapien
atgagtcctgcagtgctaagcaaat

SEQ ID NO: 5548464 - DNA, 25 bp, Homo sapien
ggacacggacacggatcttcatctg

SEQ ID NO: 5548465 - DNA, 25 bp, Homo sapien
gaggctaagacaaaaaccgcacctg

SEQ ID NO: 5548466 - DNA, 25 bp, Homo sapien
aaaccgcacctgagccagatctctc

SEQ ID NO: 5548467 - DNA, 25 bp, Homo sapien
agtcaccatgagagctcccttgcct

SEQ ID NO: 5548468 - DNA, 25 bp, Homo sapien
tcaggccacagtcgtgctgctagaa

SEQ ID NO: 5548469 - DNA, 25 bp, Homo sapien
ggactctgagaaccaacaggacttc

SEQ ID NO: 5548470 - DNA, 25 bp, Homo sapien
ttaaataattaggggatgctggaac

SEQ ID NO: 5548471 - DNA, 25 bp, Homo sapien
caccagattgatggagacaaatggc

SEQ ID NO: 5548472 - DNA, 25 bp, Homo sapien
ttttagtgaacagtgacaggaaatg

SEQ ID NO: 5548473 - DNA, 25 bp, Homo sapien
gttgctggagtatttgagacgtcta

SEQ ID NO: 5548474 - DNA, 25 bp, Homo sapien
gtagattgctcggacaggacttgtc

SEQ ID NO: 5548475 - DNA, 25 bp, Homo sapien
aggagtaaggcatacacatagctga

SEQ ID NO: 5548476 - DNA, 25 bp, Homo sapien
attgctaatggagagtcaagactgt

SEQ ID NO: 5548477 - DNA, 25 bp, Homo sapien
gcgaggagtttgggattaattacgc

SEQ ID NO: 5548478 - DNA, 25 bp, Homo sapien
atggcagatgtgggttattgctaat

SEQ ID NO: 5548479 - DNA, 25 bp, Homo sapien
ggaactgtgcagagtctagtgatct

SEQ ID NO: 5548480 - DNA, 25 bp, Homo sapien
ttaatagtggataactaggaggctg

SEQ ID NO: 5548481 - DNA, 25 bp, Homo sapien
ttgacttaaagggcaaaagtgccta

SEQ ID NO: 5548482 - DNA, 25 bp, Homo sapien
atcttagcactgacacatggccctc

SEQ ID NO: 5548483 - DNA, 25 bp, Homo sapien
acaaggaagatagggctttccactg

SEQ ID NO: 5548484 - DNA, 25 bp, Homo sapien
gaatgtaaatctagcgccaagccac

SEQ ID NO: 5548485 - DNA, 25 bp, Homo sapien
gccaagtgataaatcgaggaaagaa

SEQ ID NO: 5548486 - DNA, 25 bp, Homo sapien
tggagggaatgttcagttcagttga

SEQ ID NO: 5548487 - DNA, 25 bp, Homo sapien
cagaaatactgggcaaagagttgtg

SEQ ID NO: 5548488 - DNA, 25 bp, Homo sapien
ccaagccacatgtgagctgagtgtg

SEQ ID NO: 5548489 - DNA, 25 bp, Homo sapien
agaaagatcacatgaggctgacatc

SEQ ID NO: 5548490 - DNA, 25 bp, Homo sapien
aaggcagtgttcaaaggactcattc

SEQ ID NO: 5548491 - DNA, 25 bp, Homo sapien
gagttgtgagtcagctacaaggaag

SEQ ID NO: 5548492 - DNA, 25 bp, Homo sapien
cccaaagtgagtaaagtgctgtaga

SEQ ID NO: 5548493 - DNA, 25 bp, Homo sapien
ttctggtatgaagcacaggttaggg

SEQ ID NO: 5548494 - DNA, 25 bp, Homo sapien
tgtttatcttgtagctcacgtcccc

SEQ ID NO: 5548495 - DNA, 25 bp, Homo sapien
tccaatacacaatgccaagaacaga

SEQ ID NO: 5548496 - DNA, 25 bp, Homo sapien
ggaatacgagacagcctgtgtcact

SEQ ID NO: 5548497 - DNA, 25 bp, Homo sapien
attttaggtgctacaacaggcattc

SEQ ID NO: 5548498 - DNA, 25 bp, Homo sapien
ggggcctgactaggaagttcattct

SEQ ID NO: 5548499 - DNA, 25 bp, Homo sapien
ttttgggcagaaatatcccatgttc

SEQ ID NO: 5548500 - DNA, 25 bp, Homo sapien
ttcattctaatgatgacagagacac

SEQ ID NO: 5548501 - DNA, 25 bp, Homo sapien
gtgctgtagaatctaggatttggtc

SEQ ID NO: 5548502 - DNA, 25 bp, Homo sapien
agactccaaagctcggaggaaagag

SEQ ID NO: 5548503 - DNA, 25 bp, Homo sapien
aatgctttatgctaagaaatgggag

SEQ ID NO: 5548504 - DNA, 25 bp, Homo sapien
tcacagagctaatcagcgcagaatc

SEQ ID NO: 5548505 - DNA, 25 bp, Homo sapien
ggtctgcctgatacatgctttgcaa

SEQ ID NO: 5548506 - DNA, 25 bp, Homo sapien
tctagggttttcactatttcttgcc

SEQ ID NO: 5548507 - DNA, 25 bp, Homo sapien
gctaatcagcgcagaatcttgggat

SEQ ID NO: 5548508 - DNA, 25 bp, Homo sapien
aggtcacagagctaatcagcgcaga

SEQ ID NO: 5548509 - DNA, 25 bp, Homo sapien
tgggattaaaccctgctgttctagg

SEQ ID NO: 5548510 - DNA, 25 bp, Homo sapien
tatttcttgccttaggagaatcact

SEQ ID NO: 5548511 - DNA, 25 bp, Homo sapien
gggagtaagatcatctctggcttgg

SEQ ID NO: 5548512 - DNA, 25 bp, Homo sapien
gaaatgggagtaagatcatctctgg

SEQ ID NO: 5548513 - DNA, 25 bp, Homo sapien
ctttatgctaagaaatgggagtaag

SEQ ID NO: 5548514 - DNA, 25 bp, Homo sapien
caaggctttccaaggggtaattaca

SEQ ID NO: 5548515 - DNA, 25 bp, Homo sapien
aggtagtttctggaatgagctcttc

SEQ ID NO: 5548516 - DNA, 25 bp, Homo sapien
ctcaatgtcacaatagccagtaaat

SEQ ID NO: 5548517 - DNA, 25 bp, Homo sapien
taagtgccagatactgtactaagct

SEQ ID NO: 5548518 - DNA, 25 bp, Homo sapien
caagaatacaaaaggcacagccttt

SEQ ID NO: 5548519 - DNA, 25 bp, Homo sapien
ataaataagatgggaacattaagcc

SEQ ID NO: 5548520 - DNA, 25 bp, Homo sapien
atgaaattacactacatctggtatc

SEQ ID NO: 5548521 - DNA, 25 bp, Homo sapien
gcatcccattgtgtgccaagctctt

SEQ ID NO: 5548522 - DNA, 25 bp, Homo sapien
aaaaccccaggttgcttggctctgc

SEQ ID NO: 5548523 - DNA, 25 bp, Homo sapien
aacagaagagggattattaagctca

SEQ ID NO: 5548524 - DNA, 25 bp, Homo sapien
gatgggaacattaagccacttgctc

SEQ ID NO: 5548525 - DNA, 25 bp, Homo sapien
tgtttagctaaacatctgggcatcc

SEQ ID NO: 5548526 - DNA, 25 bp, Homo sapien
cgatcttgtaggtttaagtttgcac

SEQ ID NO: 5548527 - DNA, 25 bp, Homo sapien
accaatgagaacgtgttttattttc

SEQ ID NO: 5548528 - DNA, 25 bp, Homo sapien
tgatttacaaccgttcatcctgagc

SEQ ID NO: 5548529 - DNA, 25 bp, Homo sapien
catttcactggcaaaccaatgagaa

SEQ ID NO: 5548530 - DNA, 25 bp, Homo sapien
catcacacccctgtatagtcagaag

SEQ ID NO: 5548531 - DNA, 25 bp, Homo sapien
catctgggcatcctgtgatccagtt

SEQ ID NO: 5548532 - DNA, 25 bp, Homo sapien
tagtcagaaggaacactacagatct

SEQ ID NO: 5548533 - DNA, 25 bp, Homo sapien
cttgggattcccttgatttacaacc

SEQ ID NO: 5548534 - DNA, 25 bp, Homo sapien
cctgtgatccagttaagttaatgca

SEQ ID NO: 5548535 - DNA, 25 bp, Homo sapien
ataggttggctcttatagaacttac

SEQ ID NO: 5548536 - DNA, 25 bp, Homo sapien
gcacatgagacttggtgcccgcacc

SEQ ID NO: 5548537 - DNA, 25 bp, Homo sapien
ggtgcgggcaccaagtctcatgtgc

SEQ ID NO: 5548538 - DNA, 25 bp, Homo sapien
agtccagactagttgcttggggtac

SEQ ID NO: 5548539 - DNA, 25 bp, Homo sapien
aacactggcagttaagggactgatg

SEQ ID NO: 5548540 - DNA, 25 bp, Homo sapien
tgcttggggtacttctcagacaacc

SEQ ID NO: 5548541 - DNA, 25 bp, Homo sapien
aattcaacctcccagtccagactag

SEQ ID NO: 5548542 - DNA, 25 bp, Homo sapien
ttgcatggtccacgaacactggcag

SEQ ID NO: 5548543 - DNA, 25 bp, Homo sapien
gaagagatagccaagagctaaggtt

SEQ ID NO: 5548544 - DNA, 25 bp, Homo sapien
gcccctgcatggagagatctcaggc

SEQ ID NO: 5548545 - DNA, 25 bp, Homo sapien
tcctcttggttgttttgcatggtcc

SEQ ID NO: 5548546 - DNA, 25 bp, Homo sapien
aacagcaaggactcaattcaacctc

SEQ ID NO: 5548547 - DNA, 25 bp, Homo sapien
acttctcagacaacccagtggcttg

SEQ ID NO: 5548548 - DNA, 25 bp, Homo sapien
ttgaagtcatacctgagatggtccc

SEQ ID NO: 5548549 - DNA, 25 bp, Homo sapien
gggactataggtgcgtgccaccatg

SEQ ID NO: 5548550 - DNA, 25 bp, Homo sapien
gtgagcaacatggagaatccccatc

SEQ ID NO: 5548551 - DNA, 25 bp, Homo sapien
ggtggcacatgcctgtaatcacagc

SEQ ID NO: 5548552 - DNA, 25 bp, Homo sapien
acaaaattagctcggcatggtggca

SEQ ID NO: 5548553 - DNA, 25 bp, Homo sapien
cagtaagccaagatcgtgccactgc

SEQ ID NO: 5548554 - DNA, 25 bp, Homo sapien
cggggtttcacagtgttagctagga

SEQ ID NO: 5548555 - DNA, 25 bp, Homo sapien
tgggagaatcgcttgaatccaggag

SEQ ID NO: 5548556 - DNA, 25 bp, Homo sapien
aggctgcagtaagccaagatcgtgc

SEQ ID NO: 5548557 - DNA, 25 bp, Homo sapien
ttcacagtgttagctaggatggtct

SEQ ID NO: 5548558 - DNA, 25 bp, Homo sapien
atgatgagctaactatttgaattcc

SEQ ID NO: 5548559 - DNA, 25 bp, Homo sapien
aataaaagaatgatgagctaactat

SEQ ID NO: 5548560 - DNA, 25 bp, Homo sapien
attgttattgggccaggcagtgttc

SEQ ID NO: 5548561 - DNA, 25 bp, Homo sapien
ttttcttgaagtgcaggatataatc

SEQ ID NO: 5548562 - DNA, 25 bp, Homo sapien
atggattcatgagaccaagcgtggg

SEQ ID NO: 5548563 - DNA, 25 bp, Homo sapien
tgtaggtcccagagattttaaggct

SEQ ID NO: 5548564 - DNA, 25 bp, Homo sapien
ttatgcccctggtctagatggtggt

SEQ ID NO: 5548565 - DNA, 25 bp, Homo sapien
tctgggatgggttactattaccgta

SEQ ID NO: 5548566 - DNA, 25 bp, Homo sapien
atgtgaaagatggattcatgagacc

SEQ ID NO: 5548567 - DNA, 25 bp, Homo sapien
tgccttggtgtttgagcccaaagtt

SEQ ID NO: 5548568 - DNA, 25 bp, Homo sapien
gcgtgggtgataatgaactctgaaa

SEQ ID NO: 5548569 - DNA, 25 bp, Homo sapien
tacatgtcagctgaggtccttttta

SEQ ID NO: 5548570 - DNA, 25 bp, Homo sapien
tacaaatgaaattgggattcaggat

SEQ ID NO: 5548571 - DNA, 25 bp, Homo sapien
ctgcctggaacagcatttcagcccc

SEQ ID NO: 5548572 - DNA, 25 bp, Homo sapien
gctggatctcacccccagggggtcc

SEQ ID NO: 5548573 - DNA, 25 bp, Homo sapien
acctcctgagtgagcgctctgtgtt

SEQ ID NO: 5548574 - DNA, 25 bp, Homo sapien
gcccatacatcaacgggaggtgaga

SEQ ID NO: 5548575 - DNA, 25 bp, Homo sapien
gacagcttaatgaggaaggactttc

SEQ ID NO: 5548576 - DNA, 25 bp, Homo sapien
agggatgcttatggggactattata

SEQ ID NO: 5548577 - DNA, 25 bp, Homo sapien
atgcaaggtttagggacagcttaat

SEQ ID NO: 5548578 - DNA, 25 bp, Homo sapien
gaggcagtaagatgttagacagtca

SEQ ID NO: 5548579 - DNA, 25 bp, Homo sapien
ctccatctgctgaggaccctgacgt

SEQ ID NO: 5548580 - DNA, 25 bp, Homo sapien
gggagtcccttggcaagggtgtagc

SEQ ID NO: 5548581 - DNA, 25 bp, Homo sapien
ggaaaattagaggtttgaagctgtc

SEQ ID NO: 5548582 - DNA, 25 bp, Homo sapien
gcaccacagacggtcggtcaacgaa

SEQ ID NO: 5548583 - DNA, 25 bp, Homo sapien
ttcgttgaccgaccgtctgtggtgc

SEQ ID NO: 5548584 - DNA, 25 bp, Homo sapien
ggggcaccacagacggtcggtcaac

SEQ ID NO: 5548585 - DNA, 25 bp, Homo sapien
gttgaccgaccgtctgtggtgcccc

SEQ ID NO: 5548586 - DNA, 25 bp, Homo sapien
agttccagtgtggcagccctctcct

SEQ ID NO: 5548587 - DNA, 25 bp, Homo sapien
tagaaagagtatagtgaaaccacaa

SEQ ID NO: 5548588 - DNA, 25 bp, Homo sapien
cagggtgcttcactggcctttatga

SEQ ID NO: 5548589 - DNA, 25 bp, Homo sapien
tgctgtatgagttccagtgtggcag

SEQ ID NO: 5548590 - DNA, 25 bp, Homo sapien
gcagaatcccctgggactgggacaa

SEQ ID NO: 5548591 - DNA, 25 bp, Homo sapien
actcttgctagttccagggtgcttc

SEQ ID NO: 5548592 - DNA, 25 bp, Homo sapien
ctcttgcccctgaggtctgggggtg

SEQ ID NO: 5548593 - DNA, 25 bp, Homo sapien
atagatggtgtattcaaactggata

SEQ ID NO: 5548594 - DNA, 25 bp, Homo sapien
aaaccacaagtaatagcagaatccc

SEQ ID NO: 5548595 - DNA, 25 bp, Homo sapien
gtcaccagaacctggagacagagag

SEQ ID NO: 5548596 - DNA, 25 bp, Homo sapien
ggctgcctggcttcagataatgtca

SEQ ID NO: 5548597 - DNA, 25 bp, Homo sapien
accacagacggtcggtcaacgaagg

SEQ ID NO: 5548598 - DNA, 25 bp, Homo sapien
ccttcgttgaccgaccgtctgtggt

SEQ ID NO: 5548599 - DNA, 25 bp, Homo sapien
tgtatgaagtgtctgtcgacccctg

SEQ ID NO: 5548600 - DNA, 25 bp, Homo sapien
ttttttatgttgatgctattccttt

SEQ ID NO: 5548601 - DNA, 25 bp, Homo sapien
gagcttgagcactatgctgggagat

SEQ ID NO: 5548602 - DNA, 25 bp, Homo sapien
cagagcttgagcactatgctgggag

SEQ ID NO: 5548603 - DNA, 25 bp, Homo sapien
ctcagcagagcttgagcactatgct

SEQ ID NO: 5548604 - DNA, 25 bp, Homo sapien
ccccttctaccaggtgctctgtctg

SEQ ID NO: 5548605 - DNA, 25 bp, Homo sapien
gcagaacggcaaagattgctgcttg

SEQ ID NO: 5548606 - DNA, 25 bp, Homo sapien
atgaagtgtctgtcgacccctgctg

SEQ ID NO: 5548607 - DNA, 25 bp, Homo sapien
aacggcaaagattgctgcttgttcc

SEQ ID NO: 5548608 - DNA, 25 bp, Homo sapien
tccctcagcagagcttgagcactat

SEQ ID NO: 5548609 - DNA, 25 bp, Homo sapien
agcagagcttgagcactatgctggg

SEQ ID NO: 5548610 - DNA, 25 bp, Homo sapien
gacagagacgtcacattagtttaac

SEQ ID NO: 5548611 - DNA, 25 bp, Homo sapien
ccagagtttctttgacagagacgtc

SEQ ID NO: 5548612 - DNA, 25 bp, Homo sapien
acagccagaagcctgatgaaagatt

SEQ ID NO: 5548613 - DNA, 25 bp, Homo sapien
caagtgctaggaaatatgaagtgtg

SEQ ID NO: 5548614 - DNA, 25 bp, Homo sapien
acaaatagtgaatgaaataatagat

SEQ ID NO: 5548615 - DNA, 25 bp, Homo sapien
tttaagataacaagtgctaggaaat

SEQ ID NO: 5548616 - DNA, 25 bp, Homo sapien
gtgagccaccattccgggccctaaa

SEQ ID NO: 5548617 - DNA, 25 bp, Homo sapien
tgaaagatttatactgcttgggaca

SEQ ID NO: 5548618 - DNA, 25 bp, Homo sapien
taggaaatatgaagtgtgagtaaat

SEQ ID NO: 5548619 - DNA, 25 bp, Homo sapien
tgcttgggacaagttttaatgattg

SEQ ID NO: 5548620 - DNA, 25 bp, Homo sapien
gtgttttgttacaacagccagaagc

SEQ ID NO: 5548621 - DNA, 25 bp, Homo sapien
tggataaatgcagtcaatggcctac

SEQ ID NO: 5548622 - DNA, 25 bp, Homo sapien
taccctgattcaagtcacctcgacc

SEQ ID NO: 5548623 - DNA, 25 bp, Homo sapien
taaccttgagctcaagggggtcaag

SEQ ID NO: 5548624 - DNA, 25 bp, Homo sapien
tggggattctctcaaagatggtatt

SEQ ID NO: 5548625 - DNA, 25 bp, Homo sapien
cagtccgtaacccttggagtcgtcc

SEQ ID NO: 5548626 - DNA, 25 bp, Homo sapien
caaaagtctagaatctggtcatttc

SEQ ID NO: 5548627 - DNA, 25 bp, Homo sapien
gactacagtgaaggatcatgggtca

SEQ ID NO: 5548628 - DNA, 25 bp, Homo sapien
ttggagtcgtccttgacccttcttc

SEQ ID NO: 5548629 - DNA, 25 bp, Homo sapien
acatgctcctaaatgacttggcccc

SEQ ID NO: 5548630 - DNA, 25 bp, Homo sapien
cgcactaccgccactattactaccc

SEQ ID NO: 5548631 - DNA, 25 bp, Homo sapien
atacagtcaacatagcaatcagatc

SEQ ID NO: 5548632 - DNA, 25 bp, Homo sapien
agactgggaatgcctaatagctggt

SEQ ID NO: 5548633 - DNA, 25 bp, Homo sapien
agatctccacgaggaaatgaagaac

SEQ ID NO: 5548634 - DNA, 25 bp, Homo sapien
cccaaaagtggaagtgaaataagga

SEQ ID NO: 5548635 - DNA, 25 bp, Homo sapien
agtaccaccaactggaaagactggg

SEQ ID NO: 5548636 - DNA, 25 bp, Homo sapien
caggacctaagcaccacgcacctgc

SEQ ID NO: 5548637 - DNA, 25 bp, Homo sapien
gcaggagaagttaatgtagaatact

SEQ ID NO: 5548638 - DNA, 25 bp, Homo sapien
gctggtactggccattgtcgtaggc

SEQ ID NO: 5548639 - DNA, 25 bp, Homo sapien
atggggactcgactcaccttcgcca

SEQ ID NO: 5548640 - DNA, 25 bp, Homo sapien
ataagagcagttggaataacaaagc

SEQ ID NO: 5548641 - DNA, 25 bp, Homo sapien
tagagatgtacaaaagctgaccgaa

SEQ ID NO: 5548642 - DNA, 25 bp, Homo sapien
aatgggtaactatactagatcggcc

SEQ ID NO: 5548643 - DNA, 25 bp, Homo sapien
tggaaatattggggccaaataaaca

SEQ ID NO: 5548644 - DNA, 25 bp, Homo sapien
tgtcttgttcacatggccagccacc

SEQ ID NO: 5548645 - DNA, 25 bp, Homo sapien
caccagccatgttggatgccccttt

SEQ ID NO: 5548646 - DNA, 25 bp, Homo sapien
taacgcacgtacacgctatactgac

SEQ ID NO: 5548647 - DNA, 25 bp, Homo sapien
catttcacctctaacgcacgtacac

SEQ ID NO: 5548648 - DNA, 25 bp, Homo sapien
gttacagatgctatagatacttcac

SEQ ID NO: 5548649 - DNA, 25 bp, Homo sapien
cgcgcccggcccattcttcctaaag

SEQ ID NO: 5548650 - DNA, 25 bp, Homo sapien
tctttatgctgtggcaaatgcaaat

SEQ ID NO: 5548651 - DNA, 25 bp, Homo sapien
aaacgcctgtagcacaaaagcaaag

SEQ ID NO: 5548652 - DNA, 25 bp, Homo sapien
cttagggcctgccatgttacagatg

SEQ ID NO: 5548653 - DNA, 25 bp, Homo sapien
cctaaagataagaaacgcctgtagc

SEQ ID NO: 5548654 - DNA, 25 bp, Homo sapien
tctggttccactgtggccatggagc

SEQ ID NO: 5548655 - DNA, 25 bp, Homo sapien
tccaatgaaccttacaccccaccac

SEQ ID NO: 5548656 - DNA, 25 bp, Homo sapien
ctggcacccccagctccaagtttag

SEQ ID NO: 5548657 - DNA, 25 bp, Homo sapien
gtggccatggagcttgtttagttac

SEQ ID NO: 5548658 - DNA, 25 bp, Homo sapien
atcccctgaactaggtatctgacct

SEQ ID NO: 5548659 - DNA, 25 bp, Homo sapien
ccaagtttagtgggtcctggatacc

SEQ ID NO: 5548660 - DNA, 25 bp, Homo sapien
ctggataccagctggtcctctaaca

SEQ ID NO: 5548661 - DNA, 25 bp, Homo sapien
caatcatagctgagtcccagacttc

SEQ ID NO: 5548662 - DNA, 25 bp, Homo sapien
ctttgatcaactgcagtctggttcc

SEQ ID NO: 5548663 - DNA, 25 bp, Homo sapien
tgatgcacaatcactcacacaccct

SEQ ID NO: 5548664 - DNA, 25 bp, Homo sapien
ctcacacaccctcgcatgagcccag

SEQ ID NO: 5548665 - DNA, 25 bp, Homo sapien
gtgtgagttgtccccgataccattg

SEQ ID NO: 5548666 - DNA, 25 bp, Homo sapien
gagcgagaatctgagagtgatcttt

SEQ ID NO: 5548667 - DNA, 25 bp, Homo sapien
tggtcacagtccgttcatcctgagc

SEQ ID NO: 5548668 - DNA, 25 bp, Homo sapien
gtgaagtgaggtattaacactgaat

SEQ ID NO: 5548669 - DNA, 25 bp, Homo sapien
cactgaatagatttggatatactcc

SEQ ID NO: 5548670 - DNA, 25 bp, Homo sapien
gctgctcggaggcatttgtcacttc

SEQ ID NO: 5548671 - DNA, 25 bp, Homo sapien
atagtatagagtagggtacatggat

SEQ ID NO: 5548672 - DNA, 25 bp, Homo sapien
tgtggttctgacactgccgtccagt

SEQ ID NO: 5548673 - DNA, 25 bp, Homo sapien
caatatgcctgagaaaaaaagtaat

SEQ ID NO: 5548674 - DNA, 25 bp, Homo sapien
atacctagtctgagcgagaatctga

SEQ ID NO: 5548675 - DNA, 25 bp, Homo sapien
aaggctgcttccagtgaagtgaggt

SEQ ID NO: 5548676 - DNA, 25 bp, Homo sapien
atatgcatgagaaaataaccagttt

SEQ ID NO: 5548677 - DNA, 25 bp, Homo sapien
aattcatctgcataagacataactg

SEQ ID NO: 5548678 - DNA, 25 bp, Homo sapien
tgttcaaaagcaccccaaagaccag

SEQ ID NO: 5548679 - DNA, 25 bp, Homo sapien
caaagaccagtgcataaaaacaggt

SEQ ID NO: 5548680 - DNA, 25 bp, Homo sapien
gacaattaaaacatcagacactact

SEQ ID NO: 5548681 - DNA, 25 bp, Homo sapien
gaccagtgcataaaaacaggtagcc

SEQ ID NO: 5548682 - DNA, 25 bp, Homo sapien
gtttcctggacttcagaagaggaag

SEQ ID NO: 5548683 - DNA, 25 bp, Homo sapien
tactgttcaaaagcaccccaaagac

SEQ ID NO: 5548684 - DNA, 25 bp, Homo sapien
ggatcgcagccaagagcgcgatctt

SEQ ID NO: 5548685 - DNA, 25 bp, Homo sapien
agtgcataaaaacaggtagccccta

SEQ ID NO: 5548686 - DNA, 25 bp, Homo sapien
aacaggtagcccctaattcatctgc

SEQ ID NO: 5548687 - DNA, 25 bp, Homo sapien
ttatctcggtgaagccttgaattcc

SEQ ID NO: 5548688 - DNA, 25 bp, Homo sapien
gcactgcatgaatgggacataccat

SEQ ID NO: 5548689 - DNA, 25 bp, Homo sapien
tgtgctggctgaattccagaactgt

SEQ ID NO: 5548690 - DNA, 25 bp, Homo sapien
aagcgattctcccgtggtcatatgc

SEQ ID NO: 5548691 - DNA, 25 bp, Homo sapien
ggaaaccccgtccgcattagcagtc

SEQ ID NO: 5548692 - DNA, 25 bp, Homo sapien
catcgccttaaatggaaaccccgtc

SEQ ID NO: 5548693 - DNA, 25 bp, Homo sapien
attagcagtcacccccgtctcctcc

SEQ ID NO: 5548694 - DNA, 25 bp, Homo sapien
atgaaccagcatgcacggctaactt

SEQ ID NO: 5548695 - DNA, 25 bp, Homo sapien
ggtcatatgcgaacgggtgaattaa

SEQ ID NO: 5548696 - DNA, 25 bp, Homo sapien
ctacagtggcacctccttatctcgg

SEQ ID NO: 5548697 - DNA, 25 bp, Homo sapien
atattctctgtggatctgcctgttc

SEQ ID NO: 5548698 - DNA, 25 bp, Homo sapien
tctcttgtatggggtatcttttggc

SEQ ID NO: 5548699 - DNA, 25 bp, Homo sapien
cagcatttgccccaggtgatctgtc

SEQ ID NO: 5548700 - DNA, 25 bp, Homo sapien
cagagctctcttgtatggggtatct

SEQ ID NO: 5548701 - DNA, 25 bp, Homo sapien
tgttgatattgatgctatacctttc

SEQ ID NO: 5548702 - DNA, 25 bp, Homo sapien
gcatttgccccaggtgatctgtccc

SEQ ID NO: 5548703 - DNA, 25 bp, Homo sapien
agaggcagtctagctacagtagctt

SEQ ID NO: 5548704 - DNA, 25 bp, Homo sapien
agctacagtagctttgctgagctgc

SEQ ID NO: 5548705 - DNA, 25 bp, Homo sapien
ggcagggacctttgagactgctgaa

SEQ ID NO: 5548706 - DNA, 25 bp, Homo sapien
gtatggggtatcttttggcccctgc

SEQ ID NO: 5548707 - DNA, 25 bp, Homo sapien
acagtagctttgctgagctgcggag

SEQ ID NO: 5548708 - DNA, 25 bp, Homo sapien
ggggggtgtctcctggtcaggagac

SEQ ID NO: 5548709 - DNA, 25 bp, Homo sapien
gtacctaatggaagttgtcagatgt

SEQ ID NO: 5548710 - DNA, 25 bp, Homo sapien
agttattaacagaaaaaatgctcta

SEQ ID NO: 5548711 - DNA, 25 bp, Homo sapien
gaaaaatgacgtgcaagaaataact

SEQ ID NO: 5548712 - DNA, 25 bp, Homo sapien
taataggtacctaatggaagttgtc

SEQ ID NO: 5548713 - DNA, 25 bp, Homo sapien
aatgacgtgcaagaaataactggag

SEQ ID NO: 5548714 - DNA, 25 bp, Homo sapien
tgtgattatcaagttgaaatgaata

SEQ ID NO: 5548715 - DNA, 25 bp, Homo sapien
gattcctctggctcataataggctt

SEQ ID NO: 5548716 - DNA, 25 bp, Homo sapien
atggaagttgtcagatgtgattatc

SEQ ID NO: 5548717 - DNA, 25 bp, Homo sapien
cagaaaaaatgctctaataggtacc

SEQ ID NO: 5548718 - DNA, 25 bp, Homo sapien
gtgcaagaaataactggagccatta

SEQ ID NO: 5548719 - DNA, 25 bp, Homo sapien
gcgtaagccaccgtgtctgacccat

SEQ ID NO: 5548720 - DNA, 25 bp, Homo sapien
gtagttagtgaactggcaaacaggc

SEQ ID NO: 5548721 - DNA, 25 bp, Homo sapien
tagattaaacaatgggatcccacct

SEQ ID NO: 5548722 - DNA, 25 bp, Homo sapien
aaaggcagtcaactactgtggcaac

SEQ ID NO: 5548723 - DNA, 25 bp, Homo sapien
aaatattaggcttgaggctctgtgg

SEQ ID NO: 5548724 - DNA, 25 bp, Homo sapien
gagccaagttacattgtgactcact

SEQ ID NO: 5548725 - DNA, 25 bp, Homo sapien
caaacaggcctgctgtgctggtatt

SEQ ID NO: 5548726 - DNA, 25 bp, Homo sapien
agggaacagatgtagatttgggtta

SEQ ID NO: 5548727 - DNA, 25 bp, Homo sapien
tcttgcgtgcatgctgactgtcctc

SEQ ID NO: 5548728 - DNA, 25 bp, Homo sapien
tatgaggtaaagcattcttgcgtgc

SEQ ID NO: 5548729 - DNA, 25 bp, Homo sapien
ccacctgtcttgactggaaagagga

SEQ ID NO: 5548730 - DNA, 25 bp, Homo sapien
actgtggcaacaaggtagttagtga

SEQ ID NO: 5548731 - DNA, 25 bp, Homo sapien
gcccggcacttgccagggctccaaa

SEQ ID NO: 5548732 - DNA, 25 bp, Homo sapien
tgatccccagatgcacgtgaaaatg

SEQ ID NO: 5548733 - DNA, 25 bp, Homo sapien
ttctacagcgcatccaggccctgga

SEQ ID NO: 5548734 - DNA, 25 bp, Homo sapien
cagcaaaattaacccgcccggcact

SEQ ID NO: 5548735 - DNA, 25 bp, Homo sapien
aggaggaagcccttctacagcgcat

SEQ ID NO: 5548736 - DNA, 25 bp, Homo sapien
cacgtgaaaatgtgcaagaagatcg

SEQ ID NO: 5548737 - DNA, 25 bp, Homo sapien
cctcacgctctccagggaaatgctg

SEQ ID NO: 5548738 - DNA, 25 bp, Homo sapien
ctcaccaaggtgatttatgccctga

SEQ ID NO: 5548739 - DNA, 25 bp, Homo sapien
gccctgaacacccgccaggatgagg

SEQ ID NO: 5548740 - DNA, 25 bp, Homo sapien
cgccgagcgagtcctcacgctctcc

SEQ ID NO: 5548741 - DNA, 25 bp, Homo sapien
ctggagaatggactgtgatccccag

SEQ ID NO: 5548742 - DNA, 25 bp, Homo sapien
aagtggaatttttagagaaactaca

SEQ ID NO: 5548743 - DNA, 25 bp, Homo sapien
gttcagatgtgtgtttttggttggt

SEQ ID NO: 5548744 - DNA, 25 bp, Homo sapien
tctagtgggtattgttctagaagca

SEQ ID NO: 5548745 - DNA, 25 bp, Homo sapien
ttagctgacagttcagatgtgtgtt

SEQ ID NO: 5548746 - DNA, 25 bp, Homo sapien
caacagttctaaaaaaagacttgga

SEQ ID NO: 5548747 - DNA, 25 bp, Homo sapien
tgatcataacaccaagcctacccct

SEQ ID NO: 5548748 - DNA, 25 bp, Homo sapien
ttggttggttcaaatacaggaagac

SEQ ID NO: 5548749 - DNA, 25 bp, Homo sapien
taatacatagcagtcttccaaaaat

SEQ ID NO: 5548750 - DNA, 25 bp, Homo sapien
tggttcaaatacaggaagacaccct

SEQ ID NO: 5548751 - DNA, 25 bp, Homo sapien
gttctagaagcaagactcctctaat

SEQ ID NO: 5548752 - DNA, 25 bp, Homo sapien
aagcctaccccttagctgacagttc

SEQ ID NO: 5548753 - DNA, 25 bp, Homo sapien
aagtcactatcaagaaggaagatct

SEQ ID NO: 5548754 - DNA, 25 bp, Homo sapien
gaaacaagcggagtcagtatatttg

SEQ ID NO: 5548755 - DNA, 25 bp, Homo sapien
ctgagatggagatatctcgagcagc

SEQ ID NO: 5548756 - DNA, 25 bp, Homo sapien
gaggggaggctattctgcttaattt

SEQ ID NO: 5548757 - DNA, 25 bp, Homo sapien
tgcctaactagtgtatgcggagggg

SEQ ID NO: 5548758 - DNA, 25 bp, Homo sapien
gaacgcagtttgcgggaacacatgg

SEQ ID NO: 5548759 - DNA, 25 bp, Homo sapien
ggtggcacattaatgcctgggaacc

SEQ ID NO: 5548760 - DNA, 25 bp, Homo sapien
ccctaaccaactgatgcgtgctttc

SEQ ID NO: 5548761 - DNA, 25 bp, Homo sapien
agatctggagctaatagtgagtggt

SEQ ID NO: 5548762 - DNA, 25 bp, Homo sapien
atcttgggtcaagtagagtgtatac

SEQ ID NO: 5548763 - DNA, 25 bp, Homo sapien
gtggtagaggcgcttattgccctaa

SEQ ID NO: 5548764 - DNA, 25 bp, Homo sapien
atagtaattgtgccaagcgtggtgg

SEQ ID NO: 5548765 - DNA, 25 bp, Homo sapien
attgtaacacgacttttgcagctat

SEQ ID NO: 5548766 - DNA, 25 bp, Homo sapien
gaggattgcctgagtccaggagttc

SEQ ID NO: 5548767 - DNA, 25 bp, Homo sapien
aaggtggaaggatcacttgatctca

SEQ ID NO: 5548768 - DNA, 25 bp, Homo sapien
gcaacaagagcgaaaccctgtctca

SEQ ID NO: 5548769 - DNA, 25 bp, Homo sapien
ttaaaaattagctggatatggtggt

SEQ ID NO: 5548770 - DNA, 25 bp, Homo sapien
acccgtaatcccaggacttgaggag

SEQ ID NO: 5548771 - DNA, 25 bp, Homo sapien
cctgtttgtgacatgaagggtgtgg

SEQ ID NO: 5548772 - DNA, 25 bp, Homo sapien
ggagttcaagaccaatcctggcaac

SEQ ID NO: 5548773 - DNA, 25 bp, Homo sapien
ggaggaatacctgagccatggttgt

SEQ ID NO: 5548774 - DNA, 25 bp, Homo sapien
gtagttccaggtacttgggaagcta

SEQ ID NO: 5548775 - DNA, 25 bp, Homo sapien
ccaacaacgttatgaagcgggtaca

SEQ ID NO: 5548776 - DNA, 25 bp, Homo sapien
caagctgcctggtacaaagcacctg

SEQ ID NO: 5548777 - DNA, 25 bp, Homo sapien
ctgtgaagattaaccgagataacat

SEQ ID NO: 5548778 - DNA, 25 bp, Homo sapien
tgggataacaagtgttagccacacc

SEQ ID NO: 5548779 - DNA, 25 bp, Homo sapien
tcatttttaccgatggggagatgga

SEQ ID NO: 5548780 - DNA, 25 bp, Homo sapien
ctaacctcagagagttgctgtgaag

SEQ ID NO: 5548781 - DNA, 25 bp, Homo sapien
gaagcgggtacatcatcatcctcat

SEQ ID NO: 5548782 - DNA, 25 bp, Homo sapien
cacaccactcagcgatggcaatgtt

SEQ ID NO: 5548783 - DNA, 25 bp, Homo sapien
tatgtaaactgaaccccaagctatt

SEQ ID NO: 5548784 - DNA, 25 bp, Homo sapien
taaatgtagaatagtgtagaataac

SEQ ID NO: 5548785 - DNA, 25 bp, Homo sapien
gataacatatgtaaggcaagctgcc

SEQ ID NO: 5548786 - DNA, 25 bp, Homo sapien
tcactagatggcacttaggatattt

SEQ ID NO: 5548787 - DNA, 25 bp, Homo sapien
ggagcacagtgatgcaaccaagctc

SEQ ID NO: 5548788 - DNA, 25 bp, Homo sapien
tcttgggctcgaataatcctctggc

SEQ ID NO: 5548789 - DNA, 25 bp, Homo sapien
tctgcataagaccctcagtgcttcc

SEQ ID NO: 5548790 - DNA, 25 bp, Homo sapien
ggtttggaggttgatttactattgc

SEQ ID NO: 5548791 - DNA, 25 bp, Homo sapien
accatgccctgctaaccccatctca

SEQ ID NO: 5548792 - DNA, 25 bp, Homo sapien
aagagaaccttttcttagaagcctc

SEQ ID NO: 5548793 - DNA, 25 bp, Homo sapien
tgcaaccaagctcaccacaaccctg

SEQ ID NO: 5548794 - DNA, 25 bp, Homo sapien
gcacaggcacctctcactagatggc

SEQ ID NO: 5548795 - DNA, 25 bp, Homo sapien
tttggcaaagagtttgggctagtat

SEQ ID NO: 5548796 - DNA, 25 bp, Homo sapien
gtttactgctcgctgcacaggcacc

SEQ ID NO: 5548797 - DNA, 25 bp, Homo sapien
gaagaccctgtgggcatgccaataa

SEQ ID NO: 5548798 - DNA, 25 bp, Homo sapien
tgatctaatcagaggtcagaagacc

SEQ ID NO: 5548799 - DNA, 25 bp, Homo sapien
ccagtatgcccaccacaaagagaac

SEQ ID NO: 5548800 - DNA, 25 bp, Homo sapien
attgacatgggagaagtcatgcttg

SEQ ID NO: 5548801 - DNA, 25 bp, Homo sapien
caccaaagtggaatagggtgttctc

SEQ ID NO: 5548802 - DNA, 25 bp, Homo sapien
atgggtgacctttgggtgattctcc

SEQ ID NO: 5548803 - DNA, 25 bp, Homo sapien
accaatcaggagtaagcatagaaaa

SEQ ID NO: 5548804 - DNA, 25 bp, Homo sapien
atgccaataaagaagaccaagatgt

SEQ ID NO: 5548805 - DNA, 25 bp, Homo sapien
aatgtgatctgtgagctccttctgc

SEQ ID NO: 5548806 - DNA, 25 bp, Homo sapien
gtggctgtgctcattgacatgggag

SEQ ID NO: 5548807 - DNA, 25 bp, Homo sapien
caggttcaccagaatgaggatgatt

SEQ ID NO: 5548808 - DNA, 25 bp, Homo sapien
ttcctagtgaaattcggatgactgc

SEQ ID NO: 5548809 - DNA, 25 bp, Homo sapien
acagctgtgctatttacaggcatct

SEQ ID NO: 5548810 - DNA, 25 bp, Homo sapien
taactgtatttggaagcagttggtt

SEQ ID NO: 5548811 - DNA, 25 bp, Homo sapien
tcttggaacacgtctggtttactgc

SEQ ID NO: 5548812 - DNA, 25 bp, Homo sapien
ttatttgccataaaggtgaaatgat

SEQ ID NO: 5548813 - DNA, 25 bp, Homo sapien
aaggaaattctacagaagctgcttc

SEQ ID NO: 5548814 - DNA, 25 bp, Homo sapien
ttcggatgactgcaattcaagcaaa

SEQ ID NO: 5548815 - DNA, 25 bp, Homo sapien
caggccagctcagaagtgtacctta

SEQ ID NO: 5548816 - DNA, 25 bp, Homo sapien
aatgatagtgtaactagtcacatgt

SEQ ID NO: 5548817 - DNA, 25 bp, Homo sapien
ttcaagcaaaagtcagatctgaagt

SEQ ID NO: 5548818 - DNA, 25 bp, Homo sapien
cttagtgacatttaggcagtacttt

SEQ ID NO: 5548819 - DNA, 25 bp, Homo sapien
atcgtgtggtgacacccttgtggct

SEQ ID NO: 5548820 - DNA, 25 bp, Homo sapien
agccacaagggtgtcaccacacgat

SEQ ID NO: 5548821 - DNA, 25 bp, Homo sapien
gagacgaggttaaatcatgttgacc

SEQ ID NO: 5548822 - DNA, 25 bp, Homo sapien
acctataagtagggtgaccatataa

SEQ ID NO: 5548823 - DNA, 25 bp, Homo sapien
agggacactaacaatggcttcagca

SEQ ID NO: 5548824 - DNA, 25 bp, Homo sapien
agtggatgtttgttgagtccttgcc

SEQ ID NO: 5548825 - DNA, 25 bp, Homo sapien
gataccactgaagtcctctgcaagt

SEQ ID NO: 5548826 - DNA, 25 bp, Homo sapien
tcttgagcacctagcaccccctcta

SEQ ID NO: 5548827 - DNA, 25 bp, Homo sapien
ctctgcaagttgacagttgcgctgc

SEQ ID NO: 5548828 - DNA, 25 bp, Homo sapien
gcctggccactcagcagacatttct

SEQ ID NO: 5548829 - DNA, 25 bp, Homo sapien
taaaaaggaacactactgataccac

SEQ ID NO: 5548830 - DNA, 25 bp, Homo sapien
ccgaatcaggacacctatgagagta

SEQ ID NO: 5548831 - DNA, 25 bp, Homo sapien
ccccctctaacaaaaacagtggatg

SEQ ID NO: 5548832 - DNA, 25 bp, Homo sapien
ctttggctctctaaacccttgcccc

SEQ ID NO: 5548833 - DNA, 25 bp, Homo sapien
caaggtcattgattccaggtctctc

SEQ ID NO: 5548834 - DNA, 25 bp, Homo sapien
ccgtctccttcctttgcagcattcc

SEQ ID NO: 5548835 - DNA, 25 bp, Homo sapien
tatactctaagggtagagacatttc

SEQ ID NO: 5548836 - DNA, 25 bp, Homo sapien
ccatgtgcctctgtaccttaattcc

SEQ ID NO: 5548837 - DNA, 25 bp, Homo sapien
tacaacattgggctaaaatttcatc

SEQ ID NO: 5548838 - DNA, 25 bp, Homo sapien
ctccctgtcttctgcgtcttccgtc

SEQ ID NO: 5548839 - DNA, 25 bp, Homo sapien
tcaaagagaattagagtacagcaag

SEQ ID NO: 5548840 - DNA, 25 bp, Homo sapien
tgctctactaaacacaaggtcattg

SEQ ID NO: 5548841 - DNA, 25 bp, Homo sapien
gtacagcaagtaagatactatctta

SEQ ID NO: 5548842 - DNA, 25 bp, Homo sapien
ggtggggaaagcctatcataatcta

SEQ ID NO: 5548843 - DNA, 25 bp, Homo sapien
attaatatagagagaatggtacagc

SEQ ID NO: 5548844 - DNA, 25 bp, Homo sapien
tacaatagtagagaggcatcatgtc

SEQ ID NO: 5548845 - DNA, 25 bp, Homo sapien
ctcagatggttcaggagaaatatgc

SEQ ID NO: 5548846 - DNA, 25 bp, Homo sapien
atgtgtttatgtaagagagtgtcct

SEQ ID NO: 5548847 - DNA, 25 bp, Homo sapien
aaagggtatatgggaaattgcatca

SEQ ID NO: 5548848 - DNA, 25 bp, Homo sapien
cagtgggacaagttgtaagcaattg

SEQ ID NO: 5548849 - DNA, 25 bp, Homo sapien
ttagggaacaaacactgaaatatac

SEQ ID NO: 5548850 - DNA, 25 bp, Homo sapien
gattgtggggttcgatcatagtatc

SEQ ID NO: 5548851 - DNA, 25 bp, Homo sapien
tgggctcacaaaactgaacgctcca

SEQ ID NO: 5548852 - DNA, 25 bp, Homo sapien
tggtgaatctaggtaaagggtatat

SEQ ID NO: 5548853 - DNA, 25 bp, Homo sapien
gactaaacacacacttgaggcattc

SEQ ID NO: 5548854 - DNA, 25 bp, Homo sapien
aagctgaatacctgccacccctccc

SEQ ID NO: 5548855 - DNA, 25 bp, Homo sapien
ctttagaatgcacccactgtcaccc

SEQ ID NO: 5548856 - DNA, 25 bp, Homo sapien
ttagtggacgtgaaatgttatctta

SEQ ID NO: 5548857 - DNA, 25 bp, Homo sapien
caactgactcgtgaagatccatttc

SEQ ID NO: 5548858 - DNA, 25 bp, Homo sapien
aatgataaagagttccagtgtctcc

SEQ ID NO: 5548859 - DNA, 25 bp, Homo sapien
ttgtgttgtcctgatgactggggac

SEQ ID NO: 5548860 - DNA, 25 bp, Homo sapien
gactggggacattgaacaccttttc

SEQ ID NO: 5548861 - DNA, 25 bp, Homo sapien
gtcctgtgagatacctactgaattc

SEQ ID NO: 5548862 - DNA, 25 bp, Homo sapien
gccactgatcatgatatcccggtcc

SEQ ID NO: 5548863 - DNA, 25 bp, Homo sapien
aatgaaccaataaaagcaacgaatc

SEQ ID NO: 5548864 - DNA, 25 bp, Homo sapien
actgtcacccaaatggctgaaatgc

SEQ ID NO: 5548865 - DNA, 25 bp, Homo sapien
agcaggtagagagcaaattctccat

SEQ ID NO: 5548866 - DNA, 25 bp, Homo sapien
aagaagtgggattatctggaaagtt

SEQ ID NO: 5548867 - DNA, 25 bp, Homo sapien
gagtttaccaaggccactggatgtc

SEQ ID NO: 5548868 - DNA, 25 bp, Homo sapien
aagcctgcctgaatgtagagtttac

SEQ ID NO: 5548869 - DNA, 25 bp, Homo sapien
gagggacacctctctgccagtgctt

SEQ ID NO: 5548870 - DNA, 25 bp, Homo sapien
acagacactgcagcagtagagtttc

SEQ ID NO: 5548871 - DNA, 25 bp, Homo sapien
gcctcaatctcaagggggcctagtg

SEQ ID NO: 5548872 - DNA, 25 bp, Homo sapien
cagtgcttggtagaggtgtttctgt

SEQ ID NO: 5548873 - DNA, 25 bp, Homo sapien
aaattctccatcagggaaggggagg

SEQ ID NO: 5548874 - DNA, 25 bp, Homo sapien
tggcccagcctgtttcgcctgccct

SEQ ID NO: 5548875 - DNA, 25 bp, Homo sapien
cacttcttcaggagctattgggacc

SEQ ID NO: 5548876 - DNA, 25 bp, Homo sapien
cgttattacaaggaggccatgtgag

SEQ ID NO: 5548877 - DNA, 25 bp, Homo sapien
cgagaccccactgcaaaaataagga

SEQ ID NO: 5548878 - DNA, 25 bp, Homo sapien
gcactagcgttattacaaggaggcc

SEQ ID NO: 5548879 - DNA, 25 bp, Homo sapien
ggccacacagacacatagggtagat

SEQ ID NO: 5548880 - DNA, 25 bp, Homo sapien
gtggcttggcctatacttggatttc

SEQ ID NO: 5548881 - DNA, 25 bp, Homo sapien
tgacctcatggtccgtccaccgcag

SEQ ID NO: 5548882 - DNA, 25 bp, Homo sapien
ggtagatggtttcagagactggagt

SEQ ID NO: 5548883 - DNA, 25 bp, Homo sapien
ccaccgcacccaggcactagcgtta

SEQ ID NO: 5548884 - DNA, 25 bp, Homo sapien
aaataaggaatgccatgtgaaggcc

SEQ ID NO: 5548885 - DNA, 25 bp, Homo sapien
gaatgccatgtgaaggccacacaga

SEQ ID NO: 5548886 - DNA, 25 bp, Homo sapien
ggcatggtggcactcactcataatc

SEQ ID NO: 5548887 - DNA, 25 bp, Homo sapien
cgacgggtcgcgcaccccttcccgc

SEQ ID NO: 5548888 - DNA, 25 bp, Homo sapien
gcgggaaggggtgcgcgacccgtcg

SEQ ID NO: 5548889 - DNA, 25 bp, Homo sapien
ggtcgcgcaccccttcccgccctgg

SEQ ID NO: 5548890 - DNA, 25 bp, Homo sapien
ccagggcgggaaggggtgcgcgacc

SEQ ID NO: 5548891 - DNA, 25 bp, Homo sapien
ttaaaggtcccttatgaaaagatgt

SEQ ID NO: 5548892 - DNA, 25 bp, Homo sapien
acatcttttcataagggacctttaa

SEQ ID NO: 5548893 - DNA, 25 bp, Homo sapien
gtgatcacacaacaagccgaaagta

SEQ ID NO: 5548894 - DNA, 25 bp, Homo sapien
tggagaaaagtgattccacccactc

SEQ ID NO: 5548895 - DNA, 25 bp, Homo sapien
cagagaagttaaatggtttggcagt

SEQ ID NO: 5548896 - DNA, 25 bp, Homo sapien
gccgaaagtagaatccaagtctctc

SEQ ID NO: 5548897 - DNA, 25 bp, Homo sapien
cagggtttccgtatatggagaaaag

SEQ ID NO: 5548898 - DNA, 25 bp, Homo sapien
ccatgccctggcacgtcatgatgcc

SEQ ID NO: 5548899 - DNA, 25 bp, Homo sapien
gtgatgaggaaggtaaatccttttc

SEQ ID NO: 5548900 - DNA, 25 bp, Homo sapien
ttaaatggtttggcagtgatcacac

SEQ ID NO: 5548901 - DNA, 25 bp, Homo sapien
cagacatgcagacttgcacaactgc

SEQ ID NO: 5548902 - DNA, 25 bp, Homo sapien
gatgtaaatcagaagttagtgtttc

SEQ ID NO: 5548903 - DNA, 25 bp, Homo sapien
acagacttaaacatacagggtttcc

SEQ ID NO: 5548904 - DNA, 25 bp, Homo sapien
agaggtaaaatgaatattggaacac

SEQ ID NO: 5548905 - DNA, 25 bp, Homo sapien
cctctgggatcgaccttacactggc

SEQ ID NO: 5548906 - DNA, 25 bp, Homo sapien
caaagctaaagaaatgtgagaagga

SEQ ID NO: 5548907 - DNA, 25 bp, Homo sapien
aattaagttaggtagtcagacatct

SEQ ID NO: 5548908 - DNA, 25 bp, Homo sapien
aatattggaacacacccgcagcaaa

SEQ ID NO: 5548909 - DNA, 25 bp, Homo sapien
ggctttggtatggctacagaaatcc

SEQ ID NO: 5548910 - DNA, 25 bp, Homo sapien
attattcaaaaggacgtggttcagg

SEQ ID NO: 5548911 - DNA, 25 bp, Homo sapien
cgcatgaatgaaaacaccctggctt

SEQ ID NO: 5548912 - DNA, 25 bp, Homo sapien
acactggccccaattagaagttcaa

SEQ ID NO: 5548913 - DNA, 25 bp, Homo sapien
aggcagatgcctctaacacaacaca

SEQ ID NO: 5548914 - DNA, 25 bp, Homo sapien
gtcacccagtcctgaacacagggtc

SEQ ID NO: 5548915 - DNA, 25 bp, Homo sapien
catgtaagaagccaagtgtctgaat

SEQ ID NO: 5548916 - DNA, 25 bp, Homo sapien
gaagatatcataaatagcactatat

SEQ ID NO: 5548917 - DNA, 25 bp, Homo sapien
aaataagaattgtacttgagtcatt

SEQ ID NO: 5548918 - DNA, 25 bp, Homo sapien
gtggtcaaactaaagtgaaagagaa

SEQ ID NO: 5548919 - DNA, 25 bp, Homo sapien
acagacaagttacataagtattttc

SEQ ID NO: 5548920 - DNA, 25 bp, Homo sapien
tcaagaaatgacaatctcctgagta

SEQ ID NO: 5548921 - DNA, 25 bp, Homo sapien
tattttgaatgtacagaagcctttt

SEQ ID NO: 5548922 - DNA, 25 bp, Homo sapien
agctaacagcataatgtggtcaaac

SEQ ID NO: 5548923 - DNA, 25 bp, Homo sapien
acaagaggtgacaagtagttactta

SEQ ID NO: 5548924 - DNA, 25 bp, Homo sapien
tgatgaataacaatgagaagatatc

SEQ ID NO: 5548925 - DNA, 25 bp, Homo sapien
ctgtcaaaagccaggtgacaagagg

SEQ ID NO: 5548926 - DNA, 25 bp, Homo sapien
gactggagatcgaacatgtacctac

SEQ ID NO: 5548927 - DNA, 25 bp, Homo sapien
gtccgggcttgaatgcaccaaggaa

SEQ ID NO: 5548928 - DNA, 25 bp, Homo sapien
tcagagcaacgagaaaacaaatttc

SEQ ID NO: 5548929 - DNA, 25 bp, Homo sapien
agaaacctcacagaaatcggccaac

SEQ ID NO: 5548930 - DNA, 25 bp, Homo sapien
ctcgggcttccagcttcagagcaac

SEQ ID NO: 5548931 - DNA, 25 bp, Homo sapien
gagcatggagcacaccttcctggtt

SEQ ID NO: 5548932 - DNA, 25 bp, Homo sapien
tactcattaacacctgggggacctc

SEQ ID NO: 5548933 - DNA, 25 bp, Homo sapien
gcttaggaatcaggcactggatcac

SEQ ID NO: 5548934 - DNA, 25 bp, Homo sapien
tagcaagaaggcagctgtctgcaag

SEQ ID NO: 5548935 - DNA, 25 bp, Homo sapien
gaggagaaccctcaccagaaacctc

SEQ ID NO: 5548936 - DNA, 25 bp, Homo sapien
ggttcacctgagctggattcggaga

SEQ ID NO: 5548937 - DNA, 25 bp, Homo sapien
gaatatgtcacaataggggaaggta

SEQ ID NO: 5548938 - DNA, 25 bp, Homo sapien
attggaattccatgtagactttctt

SEQ ID NO: 5548939 - DNA, 25 bp, Homo sapien
taacactgccatttggaaagggaaa

SEQ ID NO: 5548940 - DNA, 25 bp, Homo sapien
acctgtgatgaggcacaaatagttc

SEQ ID NO: 5548941 - DNA, 25 bp, Homo sapien
aataaggatctacccattggaattc

SEQ ID NO: 5548942 - DNA, 25 bp, Homo sapien
aaagggaaagaatatgtcacaatag

SEQ ID NO: 5548943 - DNA, 25 bp, Homo sapien
tcatcaacatgattgcacacattcc

SEQ ID NO: 5548944 - DNA, 25 bp, Homo sapien
tagttctctgaataaggatctaccc

SEQ ID NO: 5548945 - DNA, 25 bp, Homo sapien
agtgctaataaacctattccagatc

SEQ ID NO: 5548946 - DNA, 25 bp, Homo sapien
ataggggaaggtacttcatcaacat

SEQ ID NO: 5548947 - DNA, 25 bp, Homo sapien
gtgatgaggcacaaatagttctctg

SEQ ID NO: 5548948 - DNA, 25 bp, Homo sapien
cacttagtgaaagtgaggctggaat

SEQ ID NO: 5548949 - DNA, 25 bp, Homo sapien
taaactggaaagacatatctcacat

SEQ ID NO: 5548950 - DNA, 25 bp, Homo sapien
agtcacttctggattggtaattcac

SEQ ID NO: 5548951 - DNA, 25 bp, Homo sapien
atgtgttaggtgatatgctaagttc

SEQ ID NO: 5548952 - DNA, 25 bp, Homo sapien
accagagtggccgatgccatatttc

SEQ ID NO: 5548953 - DNA, 25 bp, Homo sapien
aacaactctttggcgtatagatgcc

SEQ ID NO: 5548954 - DNA, 25 bp, Homo sapien
tgcctgttagtttgaaaggtaccac

SEQ ID NO: 5548955 - DNA, 25 bp, Homo sapien
tggaatgctagaacgttaaagtaca

SEQ ID NO: 5548956 - DNA, 25 bp, Homo sapien
gtaattcacgtaccagagtggccga

SEQ ID NO: 5548957 - DNA, 25 bp, Homo sapien
taaggcttacaaggcgatgtagttc

SEQ ID NO: 5548958 - DNA, 25 bp, Homo sapien
tatatgcgtcggtattggaatgcta

SEQ ID NO: 5548959 - DNA, 25 bp, Homo sapien
tctaattatagagcctgaaggaggc

SEQ ID NO: 5548960 - DNA, 25 bp, Homo sapien
tgcctctaacttgtggggtctatgc

SEQ ID NO: 5548961 - DNA, 25 bp, Homo sapien
aggcttaagggatccctccaattta

SEQ ID NO: 5548962 - DNA, 25 bp, Homo sapien
aagggtcaaatgtatagtactttcc

SEQ ID NO: 5548963 - DNA, 25 bp, Homo sapien
taacttgtggggtctatgctaactt

SEQ ID NO: 5548964 - DNA, 25 bp, Homo sapien
cacccagccaactatatttctgatt

SEQ ID NO: 5548965 - DNA, 25 bp, Homo sapien
agttctgtgagttgttctaattata

SEQ ID NO: 5548966 - DNA, 25 bp, Homo sapien
accccaacttgcaacaggcatctga

SEQ ID NO: 5548967 - DNA, 25 bp, Homo sapien
aacttttgagtggttagcatcagaa

SEQ ID NO: 5548968 - DNA, 25 bp, Homo sapien
ccccaaccccaacttgcaacaggca

SEQ ID NO: 5548969 - DNA, 25 bp, Homo sapien
tatagagcctgaaggaggcttaagg

SEQ ID NO: 5548970 - DNA, 25 bp, Homo sapien
cagtcatgctacttggggtgatcag

SEQ ID NO: 5548971 - DNA, 25 bp, Homo sapien
attggcccctcggattctggtgatt

SEQ ID NO: 5548972 - DNA, 25 bp, Homo sapien
tcgaatcttttggataagctggttt

SEQ ID NO: 5548973 - DNA, 25 bp, Homo sapien
tcactggattcaagattcgggaggt

SEQ ID NO: 5548974 - DNA, 25 bp, Homo sapien
atgctccagtgtgttatgaaaatgt

SEQ ID NO: 5548975 - DNA, 25 bp, Homo sapien
ccgcaagcgcaaatgctccagtgtg

SEQ ID NO: 5548976 - DNA, 25 bp, Homo sapien
ttaaaacctgaattgttaccgcatc

SEQ ID NO: 5548977 - DNA, 25 bp, Homo sapien
tcaagattcgggaggtcttctcgaa

SEQ ID NO: 5548978 - DNA, 25 bp, Homo sapien
gcgtaataaaaccctcactggatgt

SEQ ID NO: 5548979 - DNA, 25 bp, Homo sapien
ccctcactggatgtacatggaaagg

SEQ ID NO: 5548980 - DNA, 25 bp, Homo sapien
atgaaaatgtttgttaatctgctct

SEQ ID NO: 5548981 - DNA, 25 bp, Homo sapien
taccacaagaagttacaggaacaac

SEQ ID NO: 5548982 - DNA, 25 bp, Homo sapien
tcttgggcctttacacagctgttgc

SEQ ID NO: 5548983 - DNA, 25 bp, Homo sapien
cacagatgctgtcaagaggcttatg

SEQ ID NO: 5548984 - DNA, 25 bp, Homo sapien
tatgctggggtgatataccacaaga

SEQ ID NO: 5548985 - DNA, 25 bp, Homo sapien
atcatggctttggtgcatggtcggt

SEQ ID NO: 5548986 - DNA, 25 bp, Homo sapien
tgctccaagctcccacaaaccagcc

SEQ ID NO: 5548987 - DNA, 25 bp, Homo sapien
ctaaccaatagggtgactccaagtt

SEQ ID NO: 5548988 - DNA, 25 bp, Homo sapien
caggaacaactgctaaaagaattaa

SEQ ID NO: 5548989 - DNA, 25 bp, Homo sapien
tgcacccgggctctcagaaatctta

SEQ ID NO: 5548990 - DNA, 25 bp, Homo sapien
gcatggtcggtcacagatgctgtca

SEQ ID NO: 5548991 - DNA, 25 bp, Homo sapien
cagccttaataaaagaggaaggatc

SEQ ID NO: 5548992 - DNA, 25 bp, Homo sapien
tataacactgattagaagtggtagt

SEQ ID NO: 5548993 - DNA, 25 bp, Homo sapien
ccaccgcgcccggcctatttcttcc

SEQ ID NO: 5548994 - DNA, 25 bp, Homo sapien
ttacctcaggtattagcacatagtt

SEQ ID NO: 5548995 - DNA, 25 bp, Homo sapien
tttcttggctggtctgaaggtttgt

SEQ ID NO: 5548996 - DNA, 25 bp, Homo sapien
caatttcatctaagttacctcaggt

SEQ ID NO: 5548997 - DNA, 25 bp, Homo sapien
tggtctgaaggtttgtcattttgtt

SEQ ID NO: 5548998 - DNA, 25 bp, Homo sapien
gcacatagttactcataatagtctc

SEQ ID NO: 5548999 - DNA, 25 bp, Homo sapien
attgccctggatagaatctcaacta

SEQ ID NO: 5549000 - DNA, 25 bp, Homo sapien
gcttgctttcagaaatttcagcctt

SEQ ID NO: 5549001 - DNA, 25 bp, Homo sapien
gtctttctagcaatctgtcaatttc

SEQ ID NO: 5549002 - DNA, 25 bp, Homo sapien
ctgattagaagtggtagtttatgtc

SEQ ID NO: 5549003 - DNA, 25 bp, Homo sapien
aacagaaaaaccacgccttatcttc

SEQ ID NO: 5549004 - DNA, 25 bp, Homo sapien
tgacatgcgcctgtactctgagctg

SEQ ID NO: 5549005 - DNA, 25 bp, Homo sapien
tctgcatttttcttgtgggcatttc

SEQ ID NO: 5549006 - DNA, 25 bp, Homo sapien
ttgtgggcatttctaccaagttcaa

SEQ ID NO: 5549007 - DNA, 25 bp, Homo sapien
caattttacaacagagattcagttc

SEQ ID NO: 5549008 - DNA, 25 bp, Homo sapien
tgtaagaatgtatcttgtccagcac

SEQ ID NO: 5549009 - DNA, 25 bp, Homo sapien
acatgcgcctgtactctgagctgct

SEQ ID NO: 5549010 - DNA, 25 bp, Homo sapien
agagattcagttcagtcatcatttt

SEQ ID NO: 5549011 - DNA, 25 bp, Homo sapien
cattaggctcaaaatgtctcatgta

SEQ ID NO: 5549012 - DNA, 25 bp, Homo sapien
tcaccgtgaactaaataaaatctgc

SEQ ID NO: 5549013 - DNA, 25 bp, Homo sapien
caaatcatttaaatagctgcaacta

SEQ ID NO: 5549014 - DNA, 25 bp, Homo sapien
gcacatatactacactaccaccatc

SEQ ID NO: 5549015 - DNA, 25 bp, Homo sapien
ctgagacttcttataagactgagct

SEQ ID NO: 5549016 - DNA, 25 bp, Homo sapien
tcctctgtaactaataactggctta

SEQ ID NO: 5549017 - DNA, 25 bp, Homo sapien
atccaagtcagcaaaaaagctctgc

SEQ ID NO: 5549018 - DNA, 25 bp, Homo sapien
cttggggataagattttacttgaac

SEQ ID NO: 5549019 - DNA, 25 bp, Homo sapien
catacacatgacacttggggataag

SEQ ID NO: 5549020 - DNA, 25 bp, Homo sapien
gaatgggaataggaatccaagtcag

SEQ ID NO: 5549021 - DNA, 25 bp, Homo sapien
acatacaaaggcacatgtgcacata

SEQ ID NO: 5549022 - DNA, 25 bp, Homo sapien
aaaagctctgctatatccccaacac

SEQ ID NO: 5549023 - DNA, 25 bp, Homo sapien
ttgggctataaagccctcaaggaat

SEQ ID NO: 5549024 - DNA, 25 bp, Homo sapien
ttagtgactttcaaattgggctata

SEQ ID NO: 5549025 - DNA, 25 bp, Homo sapien
aactccagaggaatacctccaaacc

SEQ ID NO: 5549026 - DNA, 25 bp, Homo sapien
aggaagccctgaaattgtcttagcc

SEQ ID NO: 5549027 - DNA, 25 bp, Homo sapien
tactgaattcagtgcaatggggaag

SEQ ID NO: 5549028 - DNA, 25 bp, Homo sapien
tcagtgtctggatagaagcttagtt

SEQ ID NO: 5549029 - DNA, 25 bp, Homo sapien
gagccaggccctgtttataggctgc

SEQ ID NO: 5549030 - DNA, 25 bp, Homo sapien
atttttagggatgctgccccacaac

SEQ ID NO: 5549031 - DNA, 25 bp, Homo sapien
acctccaaacctcagtagcaggttt

SEQ ID NO: 5549032 - DNA, 25 bp, Homo sapien
aaacagttacagtatcatcagtgtc

SEQ ID NO: 5549033 - DNA, 25 bp, Homo sapien
gtatcatcagtgtctggatagaagc

SEQ ID NO: 5549034 - DNA, 25 bp, Homo sapien
tgaattcagtgcaatggggaagtaa

SEQ ID NO: 5549035 - DNA, 25 bp, Homo sapien
taaggaaacatttactggatgccat

SEQ ID NO: 5549036 - DNA, 25 bp, Homo sapien
gctatccatcccccctccgccgacc

SEQ ID NO: 5549037 - DNA, 25 bp, Homo sapien
gaatgatggcctgtagagtgtatat

SEQ ID NO: 5549038 - DNA, 25 bp, Homo sapien
cttaactgcctctgtgcagggacag

SEQ ID NO: 5549039 - DNA, 25 bp, Homo sapien
aaagtcagaaaatagcatgattgcc

SEQ ID NO: 5549040 - DNA, 25 bp, Homo sapien
gcagagtgagtaaacaaagtcagaa

SEQ ID NO: 5549041 - DNA, 25 bp, Homo sapien
acaggcccaggtgattactcaacaa

SEQ ID NO: 5549042 - DNA, 25 bp, Homo sapien
gatgaaataattgtctagcagagtg

SEQ ID NO: 5549043 - DNA, 25 bp, Homo sapien
ggttatgaacttggtgtgtgatttt

SEQ ID NO: 5549044 - DNA, 25 bp, Homo sapien
cttaaatgaggtatagaatgatggc

SEQ ID NO: 5549045 - DNA, 25 bp, Homo sapien
tagtgcaagagagatgactatatgc

SEQ ID NO: 5549046 - DNA, 25 bp, Homo sapien
agttggataaataggtatatggtga

SEQ ID NO: 5549047 - DNA, 25 bp, Homo sapien
caaggaagcaagtccgtgacgcact

SEQ ID NO: 5549048 - DNA, 25 bp, Homo sapien
agtgcgtcacggacttgcttccttg

SEQ ID NO: 5549049 - DNA, 25 bp, Homo sapien
catggctcggaacgcatctccttgg

SEQ ID NO: 5549050 - DNA, 25 bp, Homo sapien
tcagttactcggagctctggaaaag

SEQ ID NO: 5549051 - DNA, 25 bp, Homo sapien
gcaaaaccaactgtggcgtgtgctg

SEQ ID NO: 5549052 - DNA, 25 bp, Homo sapien
ttgtgcaaaaccaactgtggcgtgt

SEQ ID NO: 5549053 - DNA, 25 bp, Homo sapien
cctccagcccctaggctacgaggtg

SEQ ID NO: 5549054 - DNA, 25 bp, Homo sapien
aactgctcaacctctgctcgccgct

SEQ ID NO: 5549055 - DNA, 25 bp, Homo sapien
gacactggccttttccatcgagcgc

SEQ ID NO: 5549056 - DNA, 25 bp, Homo sapien
gacactgctcagttactcggagctc

SEQ ID NO: 5549057 - DNA, 25 bp, Homo sapien
ggaacgcatctccttggtggtgggg

SEQ ID NO: 5549058 - DNA, 25 bp, Homo sapien
tccatcgagcgcatcatggccaaga

SEQ ID NO: 5549059 - DNA, 25 bp, Homo sapien
ccatggcaagctcggcttccctgga

SEQ ID NO: 5549060 - DNA, 25 bp, Homo sapien
caaggtaaccaagctgattagaatt

SEQ ID NO: 5549061 - DNA, 25 bp, Homo sapien
aaaagttattaggctctgaggtggg

SEQ ID NO: 5549062 - DNA, 25 bp, Homo sapien
agggatgaagtaccaggactttgtg

SEQ ID NO: 5549063 - DNA, 25 bp, Homo sapien
tgtgactttgtggccctacagtgca

SEQ ID NO: 5549064 - DNA, 25 bp, Homo sapien
tacacagctcacagccacattgcct

SEQ ID NO: 5549065 - DNA, 25 bp, Homo sapien
agagactgatggaggagtttttatt

SEQ ID NO: 5549066 - DNA, 25 bp, Homo sapien
agtttttattatgaagaagtgggag

SEQ ID NO: 5549067 - DNA, 25 bp, Homo sapien
gagtgccaggcctgccttcacagca

SEQ ID NO: 5549068 - DNA, 25 bp, Homo sapien
aggaatgatcagacacttacacagc

SEQ ID NO: 5549069 - DNA, 25 bp, Homo sapien
gcgcgattctcagctcactcaacct

SEQ ID NO: 5549070 - DNA, 25 bp, Homo sapien
cctacagtgcatgcgcagtaagaga

SEQ ID NO: 5549071 - DNA, 25 bp, Homo sapien
tatgctagccccacagcaccactgc

SEQ ID NO: 5549072 - DNA, 25 bp, Homo sapien
acagcaccactgcagtttgggttac

SEQ ID NO: 5549073 - DNA, 25 bp, Homo sapien
atgatcacagatgggtaattacaca

SEQ ID NO: 5549074 - DNA, 25 bp, Homo sapien
aaggtcccacaacatgttggatctc

SEQ ID NO: 5549075 - DNA, 25 bp, Homo sapien
aaatagaacagtagaatgatcacag

SEQ ID NO: 5549076 - DNA, 25 bp, Homo sapien
gagaaatcagcaagggcttcctgga

SEQ ID NO: 5549077 - DNA, 25 bp, Homo sapien
ttgcctccagtgtacaaggtcccac

SEQ ID NO: 5549078 - DNA, 25 bp, Homo sapien
ggtctacaaagtatgaattgcctcc

SEQ ID NO: 5549079 - DNA, 25 bp, Homo sapien
tctctggaaaacacaaccctagtat

SEQ ID NO: 5549080 - DNA, 25 bp, Homo sapien
tctaagtaataaggtcagaccatgc

SEQ ID NO: 5549081 - DNA, 25 bp, Homo sapien
gaagtggcactcaagcaagatcttg

SEQ ID NO: 5549082 - DNA, 25 bp, Homo sapien
acttttgggtctgcaaggtctgaat

SEQ ID NO: 5549083 - DNA, 25 bp, Homo sapien
aatctcctgacaaggctggtctagg

SEQ ID NO: 5549084 - DNA, 25 bp, Homo sapien
cacgaacaaggatggatttgttgac

SEQ ID NO: 5549085 - DNA, 25 bp, Homo sapien
gagtaatctgtaatgggaagcagcc

SEQ ID NO: 5549086 - DNA, 25 bp, Homo sapien
ggtctgaatcagaaggccaataaac

SEQ ID NO: 5549087 - DNA, 25 bp, Homo sapien
cctggagattgttcacaagagcttc

SEQ ID NO: 5549088 - DNA, 25 bp, Homo sapien
atccggcctgcaaacactacatgaa

SEQ ID NO: 5549089 - DNA, 25 bp, Homo sapien
catggcggtacaagccctcaatggc

SEQ ID NO: 5549090 - DNA, 25 bp, Homo sapien
tatgatgctgatggaaatggttcta

SEQ ID NO: 5549091 - DNA, 25 bp, Homo sapien
ctactggacatgttcatggcggtac

SEQ ID NO: 5549092 - DNA, 25 bp, Homo sapien
tatcaatggcatggcaaaagatcag

SEQ ID NO: 5549093 - DNA, 25 bp, Homo sapien
cacagttcctggcctaggcttcttt

SEQ ID NO: 5549094 - DNA, 25 bp, Homo sapien
gcagtacgctgtttggcatgcaaaa

SEQ ID NO: 5549095 - DNA, 25 bp, Homo sapien
tgtagagactgggttgttttgtaga

SEQ ID NO: 5549096 - DNA, 25 bp, Homo sapien
ctccttggcgtcccagtgtgctgag

SEQ ID NO: 5549097 - DNA, 25 bp, Homo sapien
acataaagagccattctcaatcctc

SEQ ID NO: 5549098 - DNA, 25 bp, Homo sapien
ttgtagaaactaggctgttttgccc

SEQ ID NO: 5549099 - DNA, 25 bp, Homo sapien
cttcctagtcagtcttgagcaagtc

SEQ ID NO: 5549100 - DNA, 25 bp, Homo sapien
aacatgtaaatatgcagtacgctgt

SEQ ID NO: 5549101 - DNA, 25 bp, Homo sapien
agctattctccctccttggcgtccc

SEQ ID NO: 5549102 - DNA, 25 bp, Homo sapien
taaaaggaatgatttaacatgtaaa

SEQ ID NO: 5549103 - DNA, 25 bp, Homo sapien
tcagtcccatgtaaaaagagataat

SEQ ID NO: 5549104 - DNA, 25 bp, Homo sapien
agagggcctcactgtcatggtctga

SEQ ID NO: 5549105 - DNA, 25 bp, Homo sapien
ggtctgatgatagtatgccatgaac

SEQ ID NO: 5549106 - DNA, 25 bp, Homo sapien
tgccatgaactgaggagtatgacta

SEQ ID NO: 5549107 - DNA, 25 bp, Homo sapien
aataaaacaagagggcctcactgtc

SEQ ID NO: 5549108 - DNA, 25 bp, Homo sapien
ataatgcatgctcacgaaataataa

SEQ ID NO: 5549109 - DNA, 25 bp, Homo sapien
aaaaaacataaatcataacaccacc

SEQ ID NO: 5549110 - DNA, 25 bp, Homo sapien
tgaggagtatgactaactcaatcct

SEQ ID NO: 5549111 - DNA, 25 bp, Homo sapien
gcctattgtagtgagaaaatgggac

SEQ ID NO: 5549112 - DNA, 25 bp, Homo sapien
tggaatgaggaaaaacttgcaaaaa

SEQ ID NO: 5549113 - DNA, 25 bp, Homo sapien
aacacataaatggaaatatccacat

SEQ ID NO: 5549114 - DNA, 25 bp, Homo sapien
agcacattagaaaattgcctattgt

SEQ ID NO: 5549115 - DNA, 25 bp, Homo sapien
ttaggactggaagcttgactaaagc

SEQ ID NO: 5549116 - DNA, 25 bp, Homo sapien
agcaggacagatgtttaggactgga

SEQ ID NO: 5549117 - DNA, 25 bp, Homo sapien
gaggcggagccacatttgtattata

SEQ ID NO: 5549118 - DNA, 25 bp, Homo sapien
tgactaaagctgagacatctgcttc

SEQ ID NO: 5549119 - DNA, 25 bp, Homo sapien
tgggcctccccatcgggccattcac

SEQ ID NO: 5549120 - DNA, 25 bp, Homo sapien
agtttcccacagcatgggcctcccc

SEQ ID NO: 5549121 - DNA, 25 bp, Homo sapien
acagcttagatgggtagttctggct

SEQ ID NO: 5549122 - DNA, 25 bp, Homo sapien
ctcagagtgagtaatccaaggttgg

SEQ ID NO: 5549123 - DNA, 25 bp, Homo sapien
caagatgtcagcaggacagatgttt

SEQ ID NO: 5549124 - DNA, 25 bp, Homo sapien
acatggcagctaactattctcagag

SEQ ID NO: 5549125 - DNA, 25 bp, Homo sapien
tccaagaaggctcgttcacatgctg

SEQ ID NO: 5549126 - DNA, 25 bp, Homo sapien
tttccaaacagcaggacatcacacc

SEQ ID NO: 5549127 - DNA, 25 bp, Homo sapien
gcaggacatcacaccccgacaacat

SEQ ID NO: 5549128 - DNA, 25 bp, Homo sapien
cagagtgccaatttttcagaacttc

SEQ ID NO: 5549129 - DNA, 25 bp, Homo sapien
tagaatgacggagaattccagaaaa

SEQ ID NO: 5549130 - DNA, 25 bp, Homo sapien
ataaccagtgttctaataagtcatc

SEQ ID NO: 5549131 - DNA, 25 bp, Homo sapien
aaattactgcatactcagagtgcca

SEQ ID NO: 5549132 - DNA, 25 bp, Homo sapien
agagaaaatttagttagaatgacgg

SEQ ID NO: 5549133 - DNA, 25 bp, Homo sapien
gacagattggaatgataaatgagtc

SEQ ID NO: 5549134 - DNA, 25 bp, Homo sapien
tctatcttcaagagcaacagggttg

SEQ ID NO: 5549135 - DNA, 25 bp, Homo sapien
tttctcaatggctggcataattttg

SEQ ID NO: 5549136 - DNA, 25 bp, Homo sapien
cacaccccgacaacatgactcatct

SEQ ID NO: 5549137 - DNA, 25 bp, Homo sapien
gttatacggctcctggcagacaacc

SEQ ID NO: 5549138 - DNA, 25 bp, Homo sapien
ccagggtcacgcagcttcctggtgg

SEQ ID NO: 5549139 - DNA, 25 bp, Homo sapien
gtgtctcccctgagcccggtgattt

SEQ ID NO: 5549140 - DNA, 25 bp, Homo sapien
cgtctatctggaaggtctgttgagg

SEQ ID NO: 5549141 - DNA, 25 bp, Homo sapien
aggttagaagctagttctggtgggt

SEQ ID NO: 5549142 - DNA, 25 bp, Homo sapien
gatgtcggcagctctgccaccaggc

SEQ ID NO: 5549143 - DNA, 25 bp, Homo sapien
aaccagtcctgctgcagcgaggtgg

SEQ ID NO: 5549144 - DNA, 25 bp, Homo sapien
gtcttctcggcaatgcccagcgtgc

SEQ ID NO: 5549145 - DNA, 25 bp, Homo sapien
gccgggagcagctcacttcccagta

SEQ ID NO: 5549146 - DNA, 25 bp, Homo sapien
aagtcaggattgagccgtctatctg

SEQ ID NO: 5549147 - DNA, 25 bp, Homo sapien
cacttcccagtagaggccatccgat

SEQ ID NO: 5549148 - DNA, 25 bp, Homo sapien
tggtagagagacacaagattattct

SEQ ID NO: 5549149 - DNA, 25 bp, Homo sapien
ttgagaaccgtacagctacagcaca

SEQ ID NO: 5549150 - DNA, 25 bp, Homo sapien
attccaaaaaagaagagtagaggaa

SEQ ID NO: 5549151 - DNA, 25 bp, Homo sapien
tacagcacagcgttatacggctcct

SEQ ID NO: 5549152 - DNA, 25 bp, Homo sapien
ctaaaatgtatatggaaagcaattc

SEQ ID NO: 5549153 - DNA, 25 bp, Homo sapien
gatgttgagaaccgtacagctacag

SEQ ID NO: 5549154 - DNA, 25 bp, Homo sapien
cctgatgttgagaaccgtacagcta

SEQ ID NO: 5549155 - DNA, 25 bp, Homo sapien
aaccgtacagctacagcacagcgtt

SEQ ID NO: 5549156 - DNA, 25 bp, Homo sapien
gtacagctacagcacagcgttatac

SEQ ID NO: 5549157 - DNA, 25 bp, Homo sapien
agctacagcacagcgttatacggct

SEQ ID NO: 5549158 - DNA, 25 bp, Homo sapien
gagaaccgtacagctacagcacagc

SEQ ID NO: 5549159 - DNA, 25 bp, Homo sapien
cactgcagctggccaaaacatacat

SEQ ID NO: 5549160 - DNA, 25 bp, Homo sapien
ccctcacctcagaccccagactagc

SEQ ID NO: 5549161 - DNA, 25 bp, Homo sapien
ttttaatccccctgagctgtggtgt

SEQ ID NO: 5549162 - DNA, 25 bp, Homo sapien
gtctctacccagcaagaagtgtttc

SEQ ID NO: 5549163 - DNA, 25 bp, Homo sapien
tgcaatagttgctttgaagtcttta

SEQ ID NO: 5549164 - DNA, 25 bp, Homo sapien
cagctccgcactaccatgctcacct

SEQ ID NO: 5549165 - DNA, 25 bp, Homo sapien
ctagctccaacatctggggtcactt

SEQ ID NO: 5549166 - DNA, 25 bp, Homo sapien
gagctgtggtgttctatcttgtttc

SEQ ID NO: 5549167 - DNA, 25 bp, Homo sapien
tgcccatgctagtatgtagtggtgc

SEQ ID NO: 5549168 - DNA, 25 bp, Homo sapien
tgggactacagctccgcactaccat

SEQ ID NO: 5549169 - DNA, 25 bp, Homo sapien
acccagcaagaagtgtttctgtacc

SEQ ID NO: 5549170 - DNA, 25 bp, Homo sapien
atggagcagaaaaattactactgcc

SEQ ID NO: 5549171 - DNA, 25 bp, Homo sapien
gtaacattgtagcacaacacattac

SEQ ID NO: 5549172 - DNA, 25 bp, Homo sapien
agacagtgatattgatgatcttgac

SEQ ID NO: 5549173 - DNA, 25 bp, Homo sapien
gcatgttattgcccctaaagacctt

SEQ ID NO: 5549174 - DNA, 25 bp, Homo sapien
tgcctagtgacagaacaattgtaac

SEQ ID NO: 5549175 - DNA, 25 bp, Homo sapien
atagacataggccaatgagtgtaat

SEQ ID NO: 5549176 - DNA, 25 bp, Homo sapien
taaagaccttccaataggacaagat

SEQ ID NO: 5549177 - DNA, 25 bp, Homo sapien
tgtgattatactggtgtaaacaaac

SEQ ID NO: 5549178 - DNA, 25 bp, Homo sapien
ctgagctgtaaaaagtctaggttat

SEQ ID NO: 5549179 - DNA, 25 bp, Homo sapien
agtaagtattaccggtttatgcact

SEQ ID NO: 5549180 - DNA, 25 bp, Homo sapien
gtcagtgatagacctcatataccac

SEQ ID NO: 5549181 - DNA, 25 bp, Homo sapien
tctacgttttggatggattgcctta

SEQ ID NO: 5549182 - DNA, 25 bp, Homo sapien
taaaatggtgctaaaatggatgtta

SEQ ID NO: 5549183 - DNA, 25 bp, Homo sapien
tagaagtgctactggagtaacagag

SEQ ID NO: 5549184 - DNA, 25 bp, Homo sapien
tgttggggaatgtgaatcataaagc

SEQ ID NO: 5549185 - DNA, 25 bp, Homo sapien
aggaagtagttgcatcatctctgta

SEQ ID NO: 5549186 - DNA, 25 bp, Homo sapien
tcgtgtagttgtgcattacgtagaa

SEQ ID NO: 5549187 - DNA, 25 bp, Homo sapien
atttagaaggacactctgctcacaa

SEQ ID NO: 5549188 - DNA, 25 bp, Homo sapien
aggtgaggaatcggttctgctcaag

SEQ ID NO: 5549189 - DNA, 25 bp, Homo sapien
actatatacctgggggtgaacacaa

SEQ ID NO: 5549190 - DNA, 25 bp, Homo sapien
ttgaagaactgattggatttctcct

SEQ ID NO: 5549191 - DNA, 25 bp, Homo sapien
acgtagaatatggtaaggcaacatc

SEQ ID NO: 5549192 - DNA, 25 bp, Homo sapien
tatggtaataagacggacaacacaa

SEQ ID NO: 5549193 - DNA, 25 bp, Homo sapien
attcataatgaacaggatgggcctt

SEQ ID NO: 5549194 - DNA, 25 bp, Homo sapien
taccatggagaaaaccttcaacact

SEQ ID NO: 5549195 - DNA, 25 bp, Homo sapien
tgctcaggaatgctgggcacattcc

SEQ ID NO: 5549196 - DNA, 25 bp, Homo sapien
tagcagcattaaacagcggcttagc

SEQ ID NO: 5549197 - DNA, 25 bp, Homo sapien
gaaggcatgcatgtgacacctcaga

SEQ ID NO: 5549198 - DNA, 25 bp, Homo sapien
acattccggtctcatgatggggatt

SEQ ID NO: 5549199 - DNA, 25 bp, Homo sapien
gagaaaggattaacctggctggtga

SEQ ID NO: 5549200 - DNA, 25 bp, Homo sapien
cacatcatttataggcgcagcgccc

SEQ ID NO: 5549201 - DNA, 25 bp, Homo sapien
gaagaaaaccagagcaagaaaatgg

SEQ ID NO: 5549202 - DNA, 25 bp, Homo sapien
ctggctggtgacgtagcagcattaa

SEQ ID NO: 5549203 - DNA, 25 bp, Homo sapien
gatacgctgtccagaaaaacggagg

SEQ ID NO: 5549204 - DNA, 25 bp, Homo sapien
gcagagcgaacttccgcagaacctg

SEQ ID NO: 5549205 - DNA, 25 bp, Homo sapien
agtgacaaagacactgaccagagga

SEQ ID NO: 5549206 - DNA, 25 bp, Homo sapien
cgcagaacctgagagtctagcgttg

SEQ ID NO: 5549207 - DNA, 25 bp, Homo sapien
gaagccaacggtgcttgagctcatc

SEQ ID NO: 5549208 - DNA, 25 bp, Homo sapien
atttgactgaagaacgacttggaga

SEQ ID NO: 5549209 - DNA, 25 bp, Homo sapien
gccctgacagccccaagtgtcacgc

SEQ ID NO: 5549210 - DNA, 25 bp, Homo sapien
gccgatcctcagtcacgggagcaga

SEQ ID NO: 5549211 - DNA, 25 bp, Homo sapien
agccaacagaccgccgcttgaagtg

SEQ ID NO: 5549212 - DNA, 25 bp, Homo sapien
gagctcatcctcaagggctgtggcg

SEQ ID NO: 5549213 - DNA, 25 bp, Homo sapien
aagagtaagggctgcttcacccctg

SEQ ID NO: 5549214 - DNA, 25 bp, Homo sapien
gggcaaagtccccaccgtcatccgc

SEQ ID NO: 5549215 - DNA, 25 bp, Homo sapien
gccttggcgtgtctgtccctactgc

SEQ ID NO: 5549216 - DNA, 25 bp, Homo sapien
gttcatcgaggagtgtctcaagttc

SEQ ID NO: 5549217 - DNA, 25 bp, Homo sapien
gatctgtcccagcgcacctcactct

SEQ ID NO: 5549218 - DNA, 25 bp, Homo sapien
gtacagcaagttcccttgtgccccc

SEQ ID NO: 5549219 - DNA, 25 bp, Homo sapien
acggcctcatcgcgtctgcgttccc

SEQ ID NO: 5549220 - DNA, 25 bp, Homo sapien
ctgcagccaggctgatctgtcccag

SEQ ID NO: 5549221 - DNA, 25 bp, Homo sapien
ccccggcctctcagccgcagctgtg

SEQ ID NO: 5549222 - DNA, 25 bp, Homo sapien
gccttgtggaggccctcacccatgg

SEQ ID NO: 5549223 - DNA, 25 bp, Homo sapien
ccatgaccttagttccgctgccctc

SEQ ID NO: 5549224 - DNA, 25 bp, Homo sapien
caccgtcatccgccagcgctatctc

SEQ ID NO: 5549225 - DNA, 25 bp, Homo sapien
tcaatagtatgaattcctcgaatat

SEQ ID NO: 5549226 - DNA, 25 bp, Homo sapien
atattcgaggaattcatactattga

SEQ ID NO: 5549227 - DNA, 25 bp, Homo sapien
aacctaatagttatatcctgaagag

SEQ ID NO: 5549228 - DNA, 25 bp, Homo sapien
atagtggttgcgtaacatcgtaaat

SEQ ID NO: 5549229 - DNA, 25 bp, Homo sapien
aacagcctctgttgaacccctcatt

SEQ ID NO: 5549230 - DNA, 25 bp, Homo sapien
tattattactaccaccaacagcctc

SEQ ID NO: 5549231 - DNA, 25 bp, Homo sapien
gaattgcacaattgtttaggaaaat

SEQ ID NO: 5549232 - DNA, 25 bp, Homo sapien
acccctcattaccatgcaagcagcc

SEQ ID NO: 5549233 - DNA, 25 bp, Homo sapien
acatcgtaaataatgccactgaatt

SEQ ID NO: 5549234 - DNA, 25 bp, Homo sapien
ctgataggtttgtctgtgtagtttt

SEQ ID NO: 5549235 - DNA, 25 bp, Homo sapien
cctaagaacactaaaagaaagtcat

SEQ ID NO: 5549236 - DNA, 25 bp, Homo sapien
tttggaaatacaatagtggttgcgt

SEQ ID NO: 5549237 - DNA, 25 bp, Homo sapien
gcaagcagccacatccaattctcag

SEQ ID NO: 5549238 - DNA, 25 bp, Homo sapien
agttgcgcagtgatttagaccttcc

SEQ ID NO: 5549239 - DNA, 25 bp, Homo sapien
agcaatgcaagactggaagaatgtc

SEQ ID NO: 5549240 - DNA, 25 bp, Homo sapien
gtgggaaataggcaccccagtcatt

SEQ ID NO: 5549241 - DNA, 25 bp, Homo sapien
tctatataaactggggagcaatgca

SEQ ID NO: 5549242 - DNA, 25 bp, Homo sapien
ctcaaaacaatcgtgggaaataggc

SEQ ID NO: 5549243 - DNA, 25 bp, Homo sapien
ccatgtaacccaggaacccaaggat

SEQ ID NO: 5549244 - DNA, 25 bp, Homo sapien
acccaaggatatgtgatgagatgtt

SEQ ID NO: 5549245 - DNA, 25 bp, Homo sapien
aataaatgcagaattgggcacttat

SEQ ID NO: 5549246 - DNA, 25 bp, Homo sapien
tgacacatagattgagctacaccac

SEQ ID NO: 5549247 - DNA, 25 bp, Homo sapien
gagattgtgggatagctatgacaca

SEQ ID NO: 5549248 - DNA, 25 bp, Homo sapien
agatgtttgtggaagcaggaattaa

SEQ ID NO: 5549249 - DNA, 25 bp, Homo sapien
tggcctgatcgtagttcactgtcac

SEQ ID NO: 5549250 - DNA, 25 bp, Homo sapien
ccgggcccaagtgatcatccctcct

SEQ ID NO: 5549251 - DNA, 25 bp, Homo sapien
gctgaaacagtcttccgcatgcatt

SEQ ID NO: 5549252 - DNA, 25 bp, Homo sapien
tggcatagagggatgttacctttgc

SEQ ID NO: 5549253 - DNA, 25 bp, Homo sapien
agatgtagggtttattgaatgcttg

SEQ ID NO: 5549254 - DNA, 25 bp, Homo sapien
tcaatcaagctgtggcatagaggga

SEQ ID NO: 5549255 - DNA, 25 bp, Homo sapien
gactggaatcaagtggcctgatcgt

SEQ ID NO: 5549256 - DNA, 25 bp, Homo sapien
aggatgatcctgaacttccgggccc

SEQ ID NO: 5549257 - DNA, 25 bp, Homo sapien
ggtagaggtgaagtcttgacatatt

SEQ ID NO: 5549258 - DNA, 25 bp, Homo sapien
gcatgcatttggacctcagtcaggc

SEQ ID NO: 5549259 - DNA, 25 bp, Homo sapien
ttaccctgttgccaagactggaatc

SEQ ID NO: 5549260 - DNA, 25 bp, Homo sapien
tgatggtcacgcacttggagtagtg

SEQ ID NO: 5549261 - DNA, 25 bp, Homo sapien
tgccctgagactcagcgagcttgcc

SEQ ID NO: 5549262 - DNA, 25 bp, Homo sapien
gcggcaaagctgtccccgaagatat

SEQ ID NO: 5549263 - DNA, 25 bp, Homo sapien
gcaaagctgtccccgaagatatctc

SEQ ID NO: 5549264 - DNA, 25 bp, Homo sapien
attcgtgccctgagactcagcgagc

SEQ ID NO: 5549265 - DNA, 25 bp, Homo sapien
atgtcacgaaccatagaatccatga

SEQ ID NO: 5549266 - DNA, 25 bp, Homo sapien
acacggccatccgaatgtcccggga

SEQ ID NO: 5549267 - DNA, 25 bp, Homo sapien
atgcggtccagtatgtcacgaacca

SEQ ID NO: 5549268 - DNA, 25 bp, Homo sapien
atatctccgccgctgttggcatggc

SEQ ID NO: 5549269 - DNA, 25 bp, Homo sapien
gtccccgaagatatctccgccgctg

SEQ ID NO: 5549270 - DNA, 25 bp, Homo sapien
gcacacggccatccgaatgtcccgg

SEQ ID NO: 5549271 - DNA, 25 bp, Homo sapien
aattgagagtaagatatagagattt

SEQ ID NO: 5549272 - DNA, 25 bp, Homo sapien
acccttacagtatcacacagtgaat

SEQ ID NO: 5549273 - DNA, 25 bp, Homo sapien
ttagggttcatgcttagtgttgtac

SEQ ID NO: 5549274 - DNA, 25 bp, Homo sapien
aaaaatcccttatgctatgcctgtt

SEQ ID NO: 5549275 - DNA, 25 bp, Homo sapien
ccccatacatgcatagcctcctcca

SEQ ID NO: 5549276 - DNA, 25 bp, Homo sapien
gcctcctccactatcaacatctccc

SEQ ID NO: 5549277 - DNA, 25 bp, Homo sapien
agttttgacagttgtgcataaagct

SEQ ID NO: 5549278 - DNA, 25 bp, Homo sapien
cagcaaaattgagagtaagatatag

SEQ ID NO: 5549279 - DNA, 25 bp, Homo sapien
acatctcccacgagggtgggaaatt

SEQ ID NO: 5549280 - DNA, 25 bp, Homo sapien
tttggacaaacgtatgatgacatga

SEQ ID NO: 5549281 - DNA, 25 bp, Homo sapien
gctatgcctgtttatctctccctcc

SEQ ID NO: 5549282 - DNA, 25 bp, Homo sapien
agaggacactacaggactcagctac

SEQ ID NO: 5549283 - DNA, 25 bp, Homo sapien
gggtcaagagaacctgaaatgctgt

SEQ ID NO: 5549284 - DNA, 25 bp, Homo sapien
attcaggcaatattcaagcaatggc

SEQ ID NO: 5549285 - DNA, 25 bp, Homo sapien
cagagctctgctatacatgggtggg

SEQ ID NO: 5549286 - DNA, 25 bp, Homo sapien
taaggtctgatcaggcttcggactt

SEQ ID NO: 5549287 - DNA, 25 bp, Homo sapien
accagtttaatcaggacagctaatc

SEQ ID NO: 5549288 - DNA, 25 bp, Homo sapien
cccactggagagaattcgatctgat

SEQ ID NO: 5549289 - DNA, 25 bp, Homo sapien
gatcagattgtagcggcaaagaaaa

SEQ ID NO: 5549290 - DNA, 25 bp, Homo sapien
aagcaatggccaaaatcatccaggc

SEQ ID NO: 5549291 - DNA, 25 bp, Homo sapien
tctagtaatgatcttgaggggtgaa

SEQ ID NO: 5549292 - DNA, 25 bp, Homo sapien
acctggaactgtgagtgaaaactct

SEQ ID NO: 5549293 - DNA, 25 bp, Homo sapien
ggaagcccaggtatagatttagaat

SEQ ID NO: 5549294 - DNA, 25 bp, Homo sapien
gaaggagatggaacaaaatattcga

SEQ ID NO: 5549295 - DNA, 25 bp, Homo sapien
actggattattgatggtagagggtg

SEQ ID NO: 5549296 - DNA, 25 bp, Homo sapien
gtttgtgccaacttagggatctgac

SEQ ID NO: 5549297 - DNA, 25 bp, Homo sapien
tgtgcaaaagtaccaatggaggacc

SEQ ID NO: 5549298 - DNA, 25 bp, Homo sapien
tgtggagcagacgccttcttccaac

SEQ ID NO: 5549299 - DNA, 25 bp, Homo sapien
gggatctgactcaagggcacctcag

SEQ ID NO: 5549300 - DNA, 25 bp, Homo sapien
ggagcattaactacagggccagctg

SEQ ID NO: 5549301 - DNA, 25 bp, Homo sapien
tggaggaccccatgccacatgtcta

SEQ ID NO: 5549302 - DNA, 25 bp, Homo sapien
atcgaccccaaatgtctgcaggatc

SEQ ID NO: 5549303 - DNA, 25 bp, Homo sapien
cccatatagtacagagcatcccatt

SEQ ID NO: 5549304 - DNA, 25 bp, Homo sapien
tgcagttaggccagaccccttccaa

SEQ ID NO: 5549305 - DNA, 25 bp, Homo sapien
aacaagagttgatggttgctgtgat

SEQ ID NO: 5549306 - DNA, 25 bp, Homo sapien
cctgaggtttctgtagaccacggtc

SEQ ID NO: 5549307 - DNA, 25 bp, Homo sapien
ccgaatccagataagcagctcataa

SEQ ID NO: 5549308 - DNA, 25 bp, Homo sapien
agtaagggcacaacctacacagtcc

SEQ ID NO: 5549309 - DNA, 25 bp, Homo sapien
gatagggaaggttgcccaatcattg

SEQ ID NO: 5549310 - DNA, 25 bp, Homo sapien
ctaccatggactgagcacttagtac

SEQ ID NO: 5549311 - DNA, 25 bp, Homo sapien
tacacagtcccaggcatccacagtt

SEQ ID NO: 5549312 - DNA, 25 bp, Homo sapien
ttggtaacagtctgcgagtgatagg

SEQ ID NO: 5549313 - DNA, 25 bp, Homo sapien
agcacacacagaactccgaatccag

SEQ ID NO: 5549314 - DNA, 25 bp, Homo sapien
acagaccaatctggagaatgcatgc

SEQ ID NO: 5549315 - DNA, 25 bp, Homo sapien
atggtcaggtaccgattcaggcctg

SEQ ID NO: 5549316 - DNA, 25 bp, Homo sapien
tgccccacagtggtagtcactctca

SEQ ID NO: 5549317 - DNA, 25 bp, Homo sapien
ttcttcctggatgttcttgatggtc

SEQ ID NO: 5549318 - DNA, 25 bp, Homo sapien
taccgattcaggcctgagcccaaga

SEQ ID NO: 5549319 - DNA, 25 bp, Homo sapien
tttataattactgtagccgctgctc

SEQ ID NO: 5549320 - DNA, 25 bp, Homo sapien
ttgatggtcaggtaccgattcaggc

SEQ ID NO: 5549321 - DNA, 25 bp, Homo sapien
tggatgttcttgatggtcaggtacc

SEQ ID NO: 5549322 - DNA, 25 bp, Homo sapien
attactgtagccgctgctcagggtg

SEQ ID NO: 5549323 - DNA, 25 bp, Homo sapien
gattcaggcctgagcccaagactga

SEQ ID NO: 5549324 - DNA, 25 bp, Homo sapien
tcaggtaccgattcaggcctgagcc

SEQ ID NO: 5549325 - DNA, 25 bp, Homo sapien
gttcttgatggtcaggtaccgattc

SEQ ID NO: 5549326 - DNA, 25 bp, Homo sapien
cagtcacatcatgtgtaataataat

SEQ ID NO: 5549327 - DNA, 25 bp, Homo sapien
attattattacacatgatgtgactg

SEQ ID NO: 5549328 - DNA, 25 bp, Homo sapien
aacatacctgtatggtaggggtaac

SEQ ID NO: 5549329 - DNA, 25 bp, Homo sapien
cacatcttcgaaacctgccaaactc

SEQ ID NO: 5549330 - DNA, 25 bp, Homo sapien
ttcagaaagcatgtcataattattt

SEQ ID NO: 5549331 - DNA, 25 bp, Homo sapien
aatggacagaatatttaatgtggtt

SEQ ID NO: 5549332 - DNA, 25 bp, Homo sapien
tgaacatgatgtctatgggtttttc

SEQ ID NO: 5549333 - DNA, 25 bp, Homo sapien
ttgtcatcttgccttgcatgctgca

SEQ ID NO: 5549334 - DNA, 25 bp, Homo sapien
ttcatacctgtgttcaaaagactca

SEQ ID NO: 5549335 - DNA, 25 bp, Homo sapien
tttatgaaactatctggggacactt

SEQ ID NO: 5549336 - DNA, 25 bp, Homo sapien
atggtaggggtaacattggtttaga

SEQ ID NO: 5549337 - DNA, 25 bp, Homo sapien
gggttatgaacatgccttgtcatca

SEQ ID NO: 5549338 - DNA, 25 bp, Homo sapien
caaaagtattgcagttatttagctg

SEQ ID NO: 5549339 - DNA, 25 bp, Homo sapien
gcaggccaccccacctttgggcgtc

SEQ ID NO: 5549340 - DNA, 25 bp, Homo sapien
ccccacctttgggcgtctcccggca

SEQ ID NO: 5549341 - DNA, 25 bp, Homo sapien
gcacagccatggtctttgttcatgc

SEQ ID NO: 5549342 - DNA, 25 bp, Homo sapien
aggccaccccacctttgggcgtctc

SEQ ID NO: 5549343 - DNA, 25 bp, Homo sapien
gccatggtctttgttcatgcagttc

SEQ ID NO: 5549344 - DNA, 25 bp, Homo sapien
ggcacagccatggtctttgttcatg

SEQ ID NO: 5549345 - DNA, 25 bp, Homo sapien
tcgcaggccaccccacctttgggcg

SEQ ID NO: 5549346 - DNA, 25 bp, Homo sapien
gtctttgttcatgcagttcataccc

SEQ ID NO: 5549347 - DNA, 25 bp, Homo sapien
cgcaggccaccccacctttgggcgt

SEQ ID NO: 5549348 - DNA, 25 bp, Homo sapien
caggccaccccacctttgggcgtct

SEQ ID NO: 5549349 - DNA, 25 bp, Homo sapien
atggtctttgttcatgcagttcata

SEQ ID NO: 5549350 - DNA, 25 bp, Homo sapien
cccatggtgttttgctaggggccag

SEQ ID NO: 5549351 - DNA, 25 bp, Homo sapien
ttcggcccagtgaactactctcatc

SEQ ID NO: 5549352 - DNA, 25 bp, Homo sapien
aaaattctaggctctgggaaggaaa

SEQ ID NO: 5549353 - DNA, 25 bp, Homo sapien
caggtgctgagcaagaaccatattg

SEQ ID NO: 5549354 - DNA, 25 bp, Homo sapien
catgtaggagatgttgtctagcagg

SEQ ID NO: 5549355 - DNA, 25 bp, Homo sapien
gttcccagatgccagcagaattcct

SEQ ID NO: 5549356 - DNA, 25 bp, Homo sapien
gagttgtgacaacatgtaggagatg

SEQ ID NO: 5549357 - DNA, 25 bp, Homo sapien
agggggttcctacaggatgcactta

SEQ ID NO: 5549358 - DNA, 25 bp, Homo sapien
actccccagtcgtgggcgtaagtga

SEQ ID NO: 5549359 - DNA, 25 bp, Homo sapien
agaattcctaaggagagcagcttca

SEQ ID NO: 5549360 - DNA, 25 bp, Homo sapien
gcgtaagtgaggcctttaatgagct

SEQ ID NO: 5549361 - DNA, 25 bp, Homo sapien
tgtgatcctgccactgcactccacc

SEQ ID NO: 5549362 - DNA, 25 bp, Homo sapien
gtggcacacacctgtagccccagct

SEQ ID NO: 5549363 - DNA, 25 bp, Homo sapien
ggaggctcagatgggacctgagcct

SEQ ID NO: 5549364 - DNA, 25 bp, Homo sapien
ttacaaggtatcctgtggcaaaggg

SEQ ID NO: 5549365 - DNA, 25 bp, Homo sapien
ccctatactggggcaggaactttac

SEQ ID NO: 5549366 - DNA, 25 bp, Homo sapien
tataaaaaattagctggcagggtgg

SEQ ID NO: 5549367 - DNA, 25 bp, Homo sapien
aaggctgcagtaagctgtgatcctg

SEQ ID NO: 5549368 - DNA, 25 bp, Homo sapien
atgagcaacatgggaaaaaaaaata

SEQ ID NO: 5549369 - DNA, 25 bp, Homo sapien
aactcccgggatctagagattctcc

SEQ ID NO: 5549370 - DNA, 25 bp, Homo sapien
actccaccctgggcaaccctgtctc

SEQ ID NO: 5549371 - DNA, 25 bp, Homo sapien
agtttgagaccagcatgagcaacat

SEQ ID NO: 5549372 - DNA, 25 bp, Homo sapien
gatttgaggtcagagaactgcagtt

SEQ ID NO: 5549373 - DNA, 25 bp, Homo sapien
actgagagtcgcgtcctcatctgta

SEQ ID NO: 5549374 - DNA, 25 bp, Homo sapien
aataaaactagatttgaggtcagag

SEQ ID NO: 5549375 - DNA, 25 bp, Homo sapien
cccaaagcagtggaattacagccat

SEQ ID NO: 5549376 - DNA, 25 bp, Homo sapien
atacccagctctttttaacgagact

SEQ ID NO: 5549377 - DNA, 25 bp, Homo sapien
gtgtcatcaaaaacaacaggaaggt

SEQ ID NO: 5549378 - DNA, 25 bp, Homo sapien
cttcttaactgagagtcgcgtcctc

SEQ ID NO: 5549379 - DNA, 25 bp, Homo sapien
taagtaaataaccgaagtgacacac

SEQ ID NO: 5549380 - DNA, 25 bp, Homo sapien
aactcctggcagcaagcgaactgcc

SEQ ID NO: 5549381 - DNA, 25 bp, Homo sapien
gtcagagaactgcagttggttcttc

SEQ ID NO: 5549382 - DNA, 25 bp, Homo sapien
ataaccgaagtgacacacatgtgtc

SEQ ID NO: 5549383 - DNA, 25 bp, Homo sapien
aattgacaatcactaccacactggt

SEQ ID NO: 5549384 - DNA, 25 bp, Homo sapien
acaaagcattctcatgtatatactc

SEQ ID NO: 5549385 - DNA, 25 bp, Homo sapien
tatgacacatgtgagggtcattcac

SEQ ID NO: 5549386 - DNA, 25 bp, Homo sapien
tttcactatgacacatgtgagggtc

SEQ ID NO: 5549387 - DNA, 25 bp, Homo sapien
caatcactaccacactggtgtacgt

SEQ ID NO: 5549388 - DNA, 25 bp, Homo sapien
cgcccggccagtaacagcatttttt

SEQ ID NO: 5549389 - DNA, 25 bp, Homo sapien
ggattagtaaagctccacaataatt

SEQ ID NO: 5549390 - DNA, 25 bp, Homo sapien
attaaatggattagtaaagctccac

SEQ ID NO: 5549391 - DNA, 25 bp, Homo sapien
gagataggtgcaatggtcattttct

SEQ ID NO: 5549392 - DNA, 25 bp, Homo sapien
gagttaaaatgaggagaactgagat

SEQ ID NO: 5549393 - DNA, 25 bp, Homo sapien
gagggtcattcacatacaaagcatt

SEQ ID NO: 5549394 - DNA, 25 bp, Homo sapien
ggataggtaaaaagtgaataagcaa

SEQ ID NO: 5549395 - DNA, 25 bp, Homo sapien
tccccgtaagcaatgtatcaaagaa

SEQ ID NO: 5549396 - DNA, 25 bp, Homo sapien
atttcaggtaatatagtaaacagtt

SEQ ID NO: 5549397 - DNA, 25 bp, Homo sapien
tatcaaagaaataactatcaaaata

SEQ ID NO: 5549398 - DNA, 25 bp, Homo sapien
aaatgtaagcattagggataggtaa

SEQ ID NO: 5549399 - DNA, 25 bp, Homo sapien
agtaaacagttgattccccgtaagc

SEQ ID NO: 5549400 - DNA, 25 bp, Homo sapien
tatgtatagtgtgtactaaaatctc

SEQ ID NO: 5549401 - DNA, 25 bp, Homo sapien
taaagttcagcttacacattgattt

SEQ ID NO: 5549402 - DNA, 25 bp, Homo sapien
ctctagtgttaacttatgtaacctc

SEQ ID NO: 5549403 - DNA, 25 bp, Homo sapien
aaaagtgaataagcaaagtgaataa

SEQ ID NO: 5549404 - DNA, 25 bp, Homo sapien
ttggttcctgaaaaaatacaacatc

SEQ ID NO: 5549405 - DNA, 25 bp, Homo sapien
agcacttcccgggttaggcttgaac

SEQ ID NO: 5549406 - DNA, 25 bp, Homo sapien
ctggaaacccctaaagcgctggatt

SEQ ID NO: 5549407 - DNA, 25 bp, Homo sapien
tatgaccccaagcttctccacccta

SEQ ID NO: 5549408 - DNA, 25 bp, Homo sapien
aatcccctgtactctgctggagccc

SEQ ID NO: 5549409 - DNA, 25 bp, Homo sapien
gctggagcccagattaaaattcacc

SEQ ID NO: 5549410 - DNA, 25 bp, Homo sapien
ttcacaaagcctgaaagccggatga

SEQ ID NO: 5549411 - DNA, 25 bp, Homo sapien
ccaatcaggcaagcccacctgtctc

SEQ ID NO: 5549412 - DNA, 25 bp, Homo sapien
atgagggcttcagcacttcccgggt

SEQ ID NO: 5549413 - DNA, 25 bp, Homo sapien
aagtccaatctcagtagcaggaagc

SEQ ID NO: 5549414 - DNA, 25 bp, Homo sapien
ttccatagatgaactcaccaccccc

SEQ ID NO: 5549415 - DNA, 25 bp, Homo sapien
ctgtagaataaaggtgtgcccccta

SEQ ID NO: 5549416 - DNA, 25 bp, Homo sapien
agttcctccggtagtgataggcact

SEQ ID NO: 5549417 - DNA, 25 bp, Homo sapien
ggggtagtctccaatggctgtgtac

SEQ ID NO: 5549418 - DNA, 25 bp, Homo sapien
cccatgttgccaagttctcgggctt

SEQ ID NO: 5549419 - DNA, 25 bp, Homo sapien
agtccagcataggcccgcatctcaa

SEQ ID NO: 5549420 - DNA, 25 bp, Homo sapien
ggattgcttggcaagaagaacacac

SEQ ID NO: 5549421 - DNA, 25 bp, Homo sapien
gataggcactgcccaggttgctata

SEQ ID NO: 5549422 - DNA, 25 bp, Homo sapien
ctgtgccagctccaggacatagtta

SEQ ID NO: 5549423 - DNA, 25 bp, Homo sapien
gacatagttatggtaagacatggcc

SEQ ID NO: 5549424 - DNA, 25 bp, Homo sapien
tctcgggcttcagaaagttcatctt

SEQ ID NO: 5549425 - DNA, 25 bp, Homo sapien
ggttgctataagcccgggcctcttc

SEQ ID NO: 5549426 - DNA, 25 bp, Homo sapien
acccatggcaatatacacagctccc

SEQ ID NO: 5549427 - DNA, 25 bp, Homo sapien
gcacagtctggtttcactgggcatc

SEQ ID NO: 5549428 - DNA, 25 bp, Homo sapien
acggctccattctgtatggccttcc

SEQ ID NO: 5549429 - DNA, 25 bp, Homo sapien
tggccatactcacggctccattctg

SEQ ID NO: 5549430 - DNA, 25 bp, Homo sapien
cttgttaaatgaggaagcagttcct

SEQ ID NO: 5549431 - DNA, 25 bp, Homo sapien
ccctcccaagaaatgagccagtgag

SEQ ID NO: 5549432 - DNA, 25 bp, Homo sapien
gaggagtgccaggcatctactgctc

SEQ ID NO: 5549433 - DNA, 25 bp, Homo sapien
ggaggacgtactttgtgaagacaga

SEQ ID NO: 5549434 - DNA, 25 bp, Homo sapien
ctctgtccctggataagtcaggctg

SEQ ID NO: 5549435 - DNA, 25 bp, Homo sapien
tctaagccctcccaagaaatgagcc

SEQ ID NO: 5549436 - DNA, 25 bp, Homo sapien
gaagacagacggtgtctcctctgcc

SEQ ID NO: 5549437 - DNA, 25 bp, Homo sapien
gtactttgtgaagacagacggtgtc

SEQ ID NO: 5549438 - DNA, 25 bp, Homo sapien
gctcaatacaagggacattaggatt

SEQ ID NO: 5549439 - DNA, 25 bp, Homo sapien
gatccacacagcacttagcctcagt

SEQ ID NO: 5549440 - DNA, 25 bp, Homo sapien
caaatctaagacccagagggctcac

SEQ ID NO: 5549441 - DNA, 25 bp, Homo sapien
gaggtgtcagactgcagaagttgat

SEQ ID NO: 5549442 - DNA, 25 bp, Homo sapien
acaggtacatacttgggatccacac

SEQ ID NO: 5549443 - DNA, 25 bp, Homo sapien
tgcagaagttgattccaggcttgta

SEQ ID NO: 5549444 - DNA, 25 bp, Homo sapien
ctgcacctgcctgacttgccccaac

SEQ ID NO: 5549445 - DNA, 25 bp, Homo sapien
attggcagtagctcagagatctctc

SEQ ID NO: 5549446 - DNA, 25 bp, Homo sapien
tgtcaacacagtcaacgctcaatac

SEQ ID NO: 5549447 - DNA, 25 bp, Homo sapien
cattaggattggcagtagctcagag

SEQ ID NO: 5549448 - DNA, 25 bp, Homo sapien
tgttgagactcaaggttggaagaga

SEQ ID NO: 5549449 - DNA, 25 bp, Homo sapien
gtatacacacagattagcctttgca

SEQ ID NO: 5549450 - DNA, 25 bp, Homo sapien
tgttcggcgtttcagtggaagataa

SEQ ID NO: 5549451 - DNA, 25 bp, Homo sapien
ccttgacacttacatgttcggcgtt

SEQ ID NO: 5549452 - DNA, 25 bp, Homo sapien
actagctacaccctgtggcagttgt

SEQ ID NO: 5549453 - DNA, 25 bp, Homo sapien
catggctcggttcaagtatacacac

SEQ ID NO: 5549454 - DNA, 25 bp, Homo sapien
ttttgatctctagggggtgtacaga

SEQ ID NO: 5549455 - DNA, 25 bp, Homo sapien
caattttgtatagcagtagccagtg

SEQ ID NO: 5549456 - DNA, 25 bp, Homo sapien
tccactccactagaaacaggctatt

SEQ ID NO: 5549457 - DNA, 25 bp, Homo sapien
gcagtagccagtgaagttatccata

SEQ ID NO: 5549458 - DNA, 25 bp, Homo sapien
atcaattctgaaaacgtaggcttat

SEQ ID NO: 5549459 - DNA, 25 bp, Homo sapien
atagagattataactgcatgttggt

SEQ ID NO: 5549460 - DNA, 25 bp, Homo sapien
gatgcactgagggtaaccagatgat

SEQ ID NO: 5549461 - DNA, 25 bp, Homo sapien
tataaaggtagaaatttgtggagga

SEQ ID NO: 5549462 - DNA, 25 bp, Homo sapien
taactcttgacaggaaggtgcagta

SEQ ID NO: 5549463 - DNA, 25 bp, Homo sapien
tacccagtgttagcaccaaagtccc

SEQ ID NO: 5549464 - DNA, 25 bp, Homo sapien
aggcctgtgtcctcagaacccctcc

SEQ ID NO: 5549465 - DNA, 25 bp, Homo sapien
aaggtcagcatgggctccatcatac

SEQ ID NO: 5549466 - DNA, 25 bp, Homo sapien
atgctgtcagtacctgtctctgctc

SEQ ID NO: 5549467 - DNA, 25 bp, Homo sapien
cagatgatctcatgggacttaccca

SEQ ID NO: 5549468 - DNA, 25 bp, Homo sapien
ccaaagtcccatgaactgaggtgtt

SEQ ID NO: 5549469 - DNA, 25 bp, Homo sapien
gcggtcaggtccatcatacggtggt

SEQ ID NO: 5549470 - DNA, 25 bp, Homo sapien
ggtccatcatacggcgctcaggtct

SEQ ID NO: 5549471 - DNA, 25 bp, Homo sapien
ggtcttccgagagcgctggtaatta

SEQ ID NO: 5549472 - DNA, 25 bp, Homo sapien
ctggtaattagatctgcgaaggatt

SEQ ID NO: 5549473 - DNA, 25 bp, Homo sapien
agatgtgaacagataaattaaggct

SEQ ID NO: 5549474 - DNA, 25 bp, Homo sapien
gaggaatgaacagaggtgacattcc

SEQ ID NO: 5549475 - DNA, 25 bp, Homo sapien
atcagggacttgtagaaatcttggt

SEQ ID NO: 5549476 - DNA, 25 bp, Homo sapien
tctttgctgattggggctttaaatt

SEQ ID NO: 5549477 - DNA, 25 bp, Homo sapien
agatcaattgtatagaggaatgaac

SEQ ID NO: 5549478 - DNA, 25 bp, Homo sapien
ttcagcaaaatctatggcagaggca

SEQ ID NO: 5549479 - DNA, 25 bp, Homo sapien
cagaaggtacttgaaagatgtgaac

SEQ ID NO: 5549480 - DNA, 25 bp, Homo sapien
ggcagaggcattccaaatagtagct

SEQ ID NO: 5549481 - DNA, 25 bp, Homo sapien
agtagctcgtggagaattaaaagta

SEQ ID NO: 5549482 - DNA, 25 bp, Homo sapien
tccagacctccctgtacccagttac

SEQ ID NO: 5549483 - DNA, 25 bp, Homo sapien
tgaatttacgaaggctccaagggaa

SEQ ID NO: 5549484 - DNA, 25 bp, Homo sapien
ctcattactgggccgcaagaataag

SEQ ID NO: 5549485 - DNA, 25 bp, Homo sapien
tgaggtgtgcctgactatagtccca

SEQ ID NO: 5549486 - DNA, 25 bp, Homo sapien
taatcaccccagcaccttcacccat

SEQ ID NO: 5549487 - DNA, 25 bp, Homo sapien
gtgaggtatgattgtaccactacac

SEQ ID NO: 5549488 - DNA, 25 bp, Homo sapien
catctgcatctcattactgggccgc

SEQ ID NO: 5549489 - DNA, 25 bp, Homo sapien
gaatgcacacgtacacatagacata

SEQ ID NO: 5549490 - DNA, 25 bp, Homo sapien
gtctttagatgaatgcacacgtaca

SEQ ID NO: 5549491 - DNA, 25 bp, Homo sapien
agttttattgtggatcttaaggaac

SEQ ID NO: 5549492 - DNA, 25 bp, Homo sapien
ctccccagaccttcacaaacaagct

SEQ ID NO: 5549493 - DNA, 25 bp, Homo sapien
ggcctagcagtggtattataatctt

SEQ ID NO: 5549494 - DNA, 25 bp, Homo sapien
tgcatgccagcacacccggctgatt

SEQ ID NO: 5549495 - DNA, 25 bp, Homo sapien
tatagaggatttacgaaaactttgc

SEQ ID NO: 5549496 - DNA, 25 bp, Homo sapien
gataggtgaaaagatactaaagacc

SEQ ID NO: 5549497 - DNA, 25 bp, Homo sapien
gacctttttggagaatgagaatacc

SEQ ID NO: 5549498 - DNA, 25 bp, Homo sapien
gtaactggtactataggtgcatgcc

SEQ ID NO: 5549499 - DNA, 25 bp, Homo sapien
gtctagagctataatatagaggatt

SEQ ID NO: 5549500 - DNA, 25 bp, Homo sapien
gagacaaggtctcactgtgtttccc

SEQ ID NO: 5549501 - DNA, 25 bp, Homo sapien
ccatgttagccagaatggtctcgat

SEQ ID NO: 5549502 - DNA, 25 bp, Homo sapien
gaatgagaataccactgtcaatcaa

SEQ ID NO: 5549503 - DNA, 25 bp, Homo sapien
tgagccaccaggcctagcagtggta

SEQ ID NO: 5549504 - DNA, 25 bp, Homo sapien
ctttgtgaccctaggcaagtctgaa

SEQ ID NO: 5549505 - DNA, 25 bp, Homo sapien
gcgtggttccactactttgtgaccc

SEQ ID NO: 5549506 - DNA, 25 bp, Homo sapien
tgaaatcagattagcgtggttccac

SEQ ID NO: 5549507 - DNA, 25 bp, Homo sapien
aaagctcctgctattatggcaaatt

SEQ ID NO: 5549508 - DNA, 25 bp, Homo sapien
taaaaaccatcccaacattctctcc

SEQ ID NO: 5549509 - DNA, 25 bp, Homo sapien
ttgcatttcaagcttacagtgtaca

SEQ ID NO: 5549510 - DNA, 25 bp, Homo sapien
tttaaggccatctgaaattacatta

SEQ ID NO: 5549511 - DNA, 25 bp, Homo sapien
atagggttattatgaagattttaaa

SEQ ID NO: 5549512 - DNA, 25 bp, Homo sapien
aatctggtttgctgtctttaaggcc

SEQ ID NO: 5549513 - DNA, 25 bp, Homo sapien
accctaggcaagtctgaaattcctc

SEQ ID NO: 5549514 - DNA, 25 bp, Homo sapien
ctctgcatctagtatacattccatc

SEQ ID NO: 5549515 - DNA, 25 bp, Homo sapien
agaagcggcgagaccctgccacagg

SEQ ID NO: 5549516 - DNA, 25 bp, Homo sapien
cctgtggcagggtctcgccgcttct

SEQ ID NO: 5549517 - DNA, 25 bp, Homo sapien
acttcttcaatacagtaaatgaaat

SEQ ID NO: 5549518 - DNA, 25 bp, Homo sapien
atttcatttactgtattgaagaagt

SEQ ID NO: 5549519 - DNA, 25 bp, Homo sapien
gtagacagtacattggactgccttc

SEQ ID NO: 5549520 - DNA, 25 bp, Homo sapien
aaacgactgggcgtgctgatattta

SEQ ID NO: 5549521 - DNA, 25 bp, Homo sapien
gggcttagcaggtgttctccctgtg

SEQ ID NO: 5549522 - DNA, 25 bp, Homo sapien
gaactgaaatgaatgtagacagtac

SEQ ID NO: 5549523 - DNA, 25 bp, Homo sapien
cattaagacataatagtgctcagta

SEQ ID NO: 5549524 - DNA, 25 bp, Homo sapien
gttcagtgactggccattccctatg

SEQ ID NO: 5549525 - DNA, 25 bp, Homo sapien
cccaaccacattgtaaagtccatgg

SEQ ID NO: 5549526 - DNA, 25 bp, Homo sapien
tctccctgtgtgcagagacaagaga

SEQ ID NO: 5549527 - DNA, 25 bp, Homo sapien
gccttcaaacagaggaaaacgtgta

SEQ ID NO: 5549528 - DNA, 25 bp, Homo sapien
aagtccatggtattgcattcataat

SEQ ID NO: 5549529 - DNA, 25 bp, Homo sapien
aaatatatattgaactgaactgaaa

SEQ ID NO: 5549530 - DNA, 25 bp, Homo sapien
tgcctggccccgctcttaattttaa

SEQ ID NO: 5549531 - DNA, 25 bp, Homo sapien
agaaaatttcccaaggctacaatct

SEQ ID NO: 5549532 - DNA, 25 bp, Homo sapien
gaagtagagttgggactttccaata

SEQ ID NO: 5549533 - DNA, 25 bp, Homo sapien
attggatttattgggaagtagagtt

SEQ ID NO: 5549534 - DNA, 25 bp, Homo sapien
atgttcattgctgtgttgggatttt

SEQ ID NO: 5549535 - DNA, 25 bp, Homo sapien
cccaaggctacaatctcaacataat

SEQ ID NO: 5549536 - DNA, 25 bp, Homo sapien
tttttccagtagattagtgtgttaa

SEQ ID NO: 5549537 - DNA, 25 bp, Homo sapien
ggactttccaatagagagcccattt

SEQ ID NO: 5549538 - DNA, 25 bp, Homo sapien
tcctacagagccccgtaacttatac

SEQ ID NO: 5549539 - DNA, 25 bp, Homo sapien
atatccaaatggtcatatagttctt

SEQ ID NO: 5549540 - DNA, 25 bp, Homo sapien
agagccccgtaacttatactgcatt

SEQ ID NO: 5549541 - DNA, 25 bp, Homo sapien
agaggctaaagaaagtgatagcatt

SEQ ID NO: 5549542 - DNA, 25 bp, Homo sapien
actaacttagaggctaaagaaagtg

SEQ ID NO: 5549543 - DNA, 25 bp, Homo sapien
atgacaaagtcgtatctatctgaac

SEQ ID NO: 5549544 - DNA, 25 bp, Homo sapien
ccttgcatcaggaagttaatttact

SEQ ID NO: 5549545 - DNA, 25 bp, Homo sapien
taacaaatgcagagacaatagatga

SEQ ID NO: 5549546 - DNA, 25 bp, Homo sapien
actaaaacaatgataacagaaaacc

SEQ ID NO: 5549547 - DNA, 25 bp, Homo sapien
tgaccttataggatcaacaggttat

SEQ ID NO: 5549548 - DNA, 25 bp, Homo sapien
taccagaataacagagtttggctta

SEQ ID NO: 5549549 - DNA, 25 bp, Homo sapien
cagactggtgtcacagcactgattc

SEQ ID NO: 5549550 - DNA, 25 bp, Homo sapien
gactactagtacagactggtgtcac

SEQ ID NO: 5549551 - DNA, 25 bp, Homo sapien
ataagaacattggtaacaagggtaa

SEQ ID NO: 5549552 - DNA, 25 bp, Homo sapien
tcaaggttggatgagatcataaggg

SEQ ID NO: 5549553 - DNA, 25 bp, Homo sapien
catgtgatagtacttggagatggag

SEQ ID NO: 5549554 - DNA, 25 bp, Homo sapien
ataaccccagtattaaagatgctac

SEQ ID NO: 5549555 - DNA, 25 bp, Homo sapien
aatgatacaggccagaaccttaatc

SEQ ID NO: 5549556 - DNA, 25 bp, Homo sapien
tactgaagccctaatctcatgtgat

SEQ ID NO: 5549557 - DNA, 25 bp, Homo sapien
gccaggagtaggccttcaccagaaa

SEQ ID NO: 5549558 - DNA, 25 bp, Homo sapien
aggtaatcaaggttggatgagatca

SEQ ID NO: 5549559 - DNA, 25 bp, Homo sapien
tcaccagaaaatgatacaggccaga

SEQ ID NO: 5549560 - DNA, 25 bp, Homo sapien
caaaagaagtgcaaaataaccccag

SEQ ID NO: 5549561 - DNA, 25 bp, Homo sapien
aggcctctgggaggtaatcaaggtt

SEQ ID NO: 5549562 - DNA, 25 bp, Homo sapien
taaagatgctactatggttacatgt

SEQ ID NO: 5549563 - DNA, 25 bp, Homo sapien
taatcagtgatagaggagaaatgta

SEQ ID NO: 5549564 - DNA, 25 bp, Homo sapien
cagaagctcttaagatgggtaatgc

SEQ ID NO: 5549565 - DNA, 25 bp, Homo sapien
gtgggagaaggttacacagtaacat

SEQ ID NO: 5549566 - DNA, 25 bp, Homo sapien
attgtgggttaggcacatgccatct

SEQ ID NO: 5549567 - DNA, 25 bp, Homo sapien
gaagctgcacaatttatccaaggtc

SEQ ID NO: 5549568 - DNA, 25 bp, Homo sapien
caaggtcgtacaattaatcagtgat

SEQ ID NO: 5549569 - DNA, 25 bp, Homo sapien
ttgtaggaattattgtgggttaggc

SEQ ID NO: 5549570 - DNA, 25 bp, Homo sapien
ttgttagaaatctacagaggcaggg

SEQ ID NO: 5549571 - DNA, 25 bp, Homo sapien
attagctatggtgcaaatgtgtttc

SEQ ID NO: 5549572 - DNA, 25 bp, Homo sapien
caatcagtaaataaccaggcccaac

SEQ ID NO: 5549573 - DNA, 25 bp, Homo sapien
atcccgatgcttgatgtcacatgac

SEQ ID NO: 5549574 - DNA, 25 bp, Homo sapien
ccccagatattgcaagtgtcagctc

SEQ ID NO: 5549575 - DNA, 25 bp, Homo sapien
cggctccctgcaatgcctgactccc

SEQ ID NO: 5549576 - DNA, 25 bp, Homo sapien
catgagaaacatcctttgggctact

SEQ ID NO: 5549577 - DNA, 25 bp, Homo sapien
catgggttagtgaaacaaataggct

SEQ ID NO: 5549578 - DNA, 25 bp, Homo sapien
tgcttgccacctgatgtcttgagtc

SEQ ID NO: 5549579 - DNA, 25 bp, Homo sapien
gtggacacccaggatgttgattggc

SEQ ID NO: 5549580 - DNA, 25 bp, Homo sapien
ccctgtctgtgttggtagggcatgg

SEQ ID NO: 5549581 - DNA, 25 bp, Homo sapien
acccagattcagagagtagtggaca

SEQ ID NO: 5549582 - DNA, 25 bp, Homo sapien
gtttaagcctcagatggtggttacc

SEQ ID NO: 5549583 - DNA, 25 bp, Homo sapien
gctactagggattgggcacatttgt

SEQ ID NO: 5549584 - DNA, 25 bp, Homo sapien
ttgattggctggtttgtaacgtgtt

SEQ ID NO: 5549585 - DNA, 25 bp, Homo sapien
tgaaagatgtgtgctaaaatctccc

SEQ ID NO: 5549586 - DNA, 25 bp, Homo sapien
tgtgctccttgtaaacagcaaacat

SEQ ID NO: 5549587 - DNA, 25 bp, Homo sapien
caaagctatattgctaagtgaattc

SEQ ID NO: 5549588 - DNA, 25 bp, Homo sapien
accttctgtggtctgtgaacatggc

SEQ ID NO: 5549589 - DNA, 25 bp, Homo sapien
tttgaattctcttgctatgcctact

SEQ ID NO: 5549590 - DNA, 25 bp, Homo sapien
ccctttaataagtgaatgcaaccat

SEQ ID NO: 5549591 - DNA, 25 bp, Homo sapien
aagatgataatgaaatatctcttcg

SEQ ID NO: 5549592 - DNA, 25 bp, Homo sapien
cattaagctcattaactgctcatgt

SEQ ID NO: 5549593 - DNA, 25 bp, Homo sapien
ctgtcaacttctgaaagatgtgtgc

SEQ ID NO: 5549594 - DNA, 25 bp, Homo sapien
caaactgatttgagaggctaccctt

SEQ ID NO: 5549595 - DNA, 25 bp, Homo sapien
gtggtctgtgaacatggcgtctata

SEQ ID NO: 5549596 - DNA, 25 bp, Homo sapien
cccaggcactgcttttgaagtcccc

SEQ ID NO: 5549597 - DNA, 25 bp, Homo sapien
ctgaagggtgaaatcaagtcaaatg

SEQ ID NO: 5549598 - DNA, 25 bp, Homo sapien
gaacaactgaatgcagtggaaaggc

SEQ ID NO: 5549599 - DNA, 25 bp, Homo sapien
ccaaactgtccacctgggtctcggt

SEQ ID NO: 5549600 - DNA, 25 bp, Homo sapien
aatgttagtgttgtcgccgctggaa

SEQ ID NO: 5549601 - DNA, 25 bp, Homo sapien
ttttgccccacatgactgctgagtc

SEQ ID NO: 5549602 - DNA, 25 bp, Homo sapien
ctgagtcacatcccagctccctccc

SEQ ID NO: 5549603 - DNA, 25 bp, Homo sapien
gccgctggaactagtgatttgtgct

SEQ ID NO: 5549604 - DNA, 25 bp, Homo sapien
tgtgacaaggtgccagtcatttgcc

SEQ ID NO: 5549605 - DNA, 25 bp, Homo sapien
cgtgcggtgtgttcagttccccaga

SEQ ID NO: 5549606 - DNA, 25 bp, Homo sapien
ttcaggctaatctagcagggtcgtg

SEQ ID NO: 5549607 - DNA, 25 bp, Homo sapien
tttgctaggtatcccaaggaaagcc

SEQ ID NO: 5549608 - DNA, 25 bp, Homo sapien
aatagtttgtccctcccagccatag

SEQ ID NO: 5549609 - DNA, 25 bp, Homo sapien
caaggaaagcctactgtgttctgaa

SEQ ID NO: 5549610 - DNA, 25 bp, Homo sapien
taagttcgagaaattctgaagtgtc

SEQ ID NO: 5549611 - DNA, 25 bp, Homo sapien
tagatcttaggtacagaatctgata

SEQ ID NO: 5549612 - DNA, 25 bp, Homo sapien
gaaaggcctgtcttacatggctgca

SEQ ID NO: 5549613 - DNA, 25 bp, Homo sapien
taaacaggactaacatactatactt

SEQ ID NO: 5549614 - DNA, 25 bp, Homo sapien
taggtggttctgtataccagccctt

SEQ ID NO: 5549615 - DNA, 25 bp, Homo sapien
ccagccatagagaaagctgagttgt

SEQ ID NO: 5549616 - DNA, 25 bp, Homo sapien
ataatcgtagagacttgccttaaat

SEQ ID NO: 5549617 - DNA, 25 bp, Homo sapien
aatctgataaagtctaggtggttct

SEQ ID NO: 5549618 - DNA, 25 bp, Homo sapien
gctgcaaatttctgtgcagactgac

SEQ ID NO: 5549619 - DNA, 25 bp, Homo sapien
aagaattatttgatgcctggctgaa

SEQ ID NO: 5549620 - DNA, 25 bp, Homo sapien
ttagctggaagaattatttgatgcc

SEQ ID NO: 5549621 - DNA, 25 bp, Homo sapien
ctgaagagggaatatatgtttgcct

SEQ ID NO: 5549622 - DNA, 25 bp, Homo sapien
tcctgaagagggaatatatgtttgc

SEQ ID NO: 5549623 - DNA, 25 bp, Homo sapien
tacaggtacctgttgctaggatcta

SEQ ID NO: 5549624 - DNA, 25 bp, Homo sapien
gttgctaggatctaataattttctc

SEQ ID NO: 5549625 - DNA, 25 bp, Homo sapien
gtgcagactgacatgtggttatttc

SEQ ID NO: 5549626 - DNA, 25 bp, Homo sapien
gaaggtgatttcctgaagagggaat

SEQ ID NO: 5549627 - DNA, 25 bp, Homo sapien
ggctgaaggtgatttcctgaagagg

SEQ ID NO: 5549628 - DNA, 25 bp, Homo sapien
gaattttagctggaagaattatttg

SEQ ID NO: 5549629 - DNA, 25 bp, Homo sapien
ctgaagaacagctgaatccaatagc

SEQ ID NO: 5549630 - DNA, 25 bp, Homo sapien
ttgagatcctttgccatggaggtgc

SEQ ID NO: 5549631 - DNA, 25 bp, Homo sapien
caatagcttggcagaacatgaagac

SEQ ID NO: 5549632 - DNA, 25 bp, Homo sapien
gtggaccttggtactgggatcttga

SEQ ID NO: 5549633 - DNA, 25 bp, Homo sapien
gtaaatggcacataacaagaggaag

SEQ ID NO: 5549634 - DNA, 25 bp, Homo sapien
tttacacagagaacagactaacagc

SEQ ID NO: 5549635 - DNA, 25 bp, Homo sapien
cagcagaaaagatatcagggttaca

SEQ ID NO: 5549636 - DNA, 25 bp, Homo sapien
ggcagaacatgaagacaggtttgtt

SEQ ID NO: 5549637 - DNA, 25 bp, Homo sapien
ccatggaggtgcatcttcttgagat

SEQ ID NO: 5549638 - DNA, 25 bp, Homo sapien
atcagggttacagtaaagggtacta

SEQ ID NO: 5549639 - DNA, 25 bp, Homo sapien
aagggtactaagtttgctagcatgg

SEQ ID NO: 5549640 - DNA, 25 bp, Homo sapien
tctcggcattgacaggacccttcgt

SEQ ID NO: 5549641 - DNA, 25 bp, Homo sapien
acgaagggtcctgtcaatgccgaga

SEQ ID NO: 5549642 - DNA, 25 bp, Homo sapien
cctctcgaggtgatatggtggttcc

SEQ ID NO: 5549643 - DNA, 25 bp, Homo sapien
ggaaccaccatatcacctcgagagg

SEQ ID NO: 5549644 - DNA, 25 bp, Homo sapien
ttcaagggcttcacaggcctcctga

SEQ ID NO: 5549645 - DNA, 25 bp, Homo sapien
gaggtctgagaaccacctgcactcc

SEQ ID NO: 5549646 - DNA, 25 bp, Homo sapien
acaaacaacggcagaccggtaagta

SEQ ID NO: 5549647 - DNA, 25 bp, Homo sapien
catcaaaatctctggggaaggaaat

SEQ ID NO: 5549648 - DNA, 25 bp, Homo sapien
ctaaaccaagcgatgactcactctc

SEQ ID NO: 5549649 - DNA, 25 bp, Homo sapien
gttgggatggctcagaactgaattc

SEQ ID NO: 5549650 - DNA, 25 bp, Homo sapien
cagggaaaagaaagccaccttacta

SEQ ID NO: 5549651 - DNA, 25 bp, Homo sapien
ctgaattctcaacgttggggtctcc

SEQ ID NO: 5549652 - DNA, 25 bp, Homo sapien
gcaacaccagtcagggcttcttaac

SEQ ID NO: 5549653 - DNA, 25 bp, Homo sapien
accacaaaatgactgatcagggaaa

SEQ ID NO: 5549654 - DNA, 25 bp, Homo sapien
aggtaagaaccctggtgtatgcaac

SEQ ID NO: 5549655 - DNA, 25 bp, Homo sapien
gggactagagatgtatgccatcaca

SEQ ID NO: 5549656 - DNA, 25 bp, Homo sapien
ggccaggtgatgtgttggtttagtt

SEQ ID NO: 5549657 - DNA, 25 bp, Homo sapien
atctcccagcaggcaacctggggct

SEQ ID NO: 5549658 - DNA, 25 bp, Homo sapien
aatggagctgttcctgacttcctac

SEQ ID NO: 5549659 - DNA, 25 bp, Homo sapien
tacatttgcttacacctggcctgga

SEQ ID NO: 5549660 - DNA, 25 bp, Homo sapien
tacttctatacccagggccaggtga

SEQ ID NO: 5549661 - DNA, 25 bp, Homo sapien
cacaaggagtggctaatcttctgtc

SEQ ID NO: 5549662 - DNA, 25 bp, Homo sapien
tcctggggctgaactccctacattt

SEQ ID NO: 5549663 - DNA, 25 bp, Homo sapien
cacctggccatggcatgattctttt

SEQ ID NO: 5549664 - DNA, 25 bp, Homo sapien
tcaggactgagctttattatgcatc

SEQ ID NO: 5549665 - DNA, 25 bp, Homo sapien
ggcttctgatactgcccgggagagc

SEQ ID NO: 5549666 - DNA, 25 bp, Homo sapien
ttacaagagcacaaacatcggcgaa

SEQ ID NO: 5549667 - DNA, 25 bp, Homo sapien
aaaaaaagccagtgcagattgagag

SEQ ID NO: 5549668 - DNA, 25 bp, Homo sapien
tgaatgagagttagctggtgcaaaa

SEQ ID NO: 5549669 - DNA, 25 bp, Homo sapien
ttactgcgaaatccccaacaactat

SEQ ID NO: 5549670 - DNA, 25 bp, Homo sapien
aacatcggcgaataaaaagaattac

SEQ ID NO: 5549671 - DNA, 25 bp, Homo sapien
ctcttggtcacaagtgatccgcctg

SEQ ID NO: 5549672 - DNA, 25 bp, Homo sapien
agattgagagacctggccatagaaa

SEQ ID NO: 5549673 - DNA, 25 bp, Homo sapien
ggatgaggtttcgctgtgttgatca

SEQ ID NO: 5549674 - DNA, 25 bp, Homo sapien
ctggccatagaaaattacaacgctc

SEQ ID NO: 5549675 - DNA, 25 bp, Homo sapien
attacaacgctcagggataaggtat

SEQ ID NO: 5549676 - DNA, 25 bp, Homo sapien
gttgcacaggatagactgtagtggc

SEQ ID NO: 5549677 - DNA, 25 bp, Homo sapien
ctgcaaagtacaataagatgagggt

SEQ ID NO: 5549678 - DNA, 25 bp, Homo sapien
ttgactgttttggaggttagatgcc

SEQ ID NO: 5549679 - DNA, 25 bp, Homo sapien
ccctttggtttgtggatggtgtttc

SEQ ID NO: 5549680 - DNA, 25 bp, Homo sapien
tcctggggctgttgtaacaaagtac

SEQ ID NO: 5549681 - DNA, 25 bp, Homo sapien
aggttgtggtagattcagacaccct

SEQ ID NO: 5549682 - DNA, 25 bp, Homo sapien
gcctctcctaggttgtggtagattc

SEQ ID NO: 5549683 - DNA, 25 bp, Homo sapien
tgtaagagtttgtgaatgattgttg

SEQ ID NO: 5549684 - DNA, 25 bp, Homo sapien
gtttagtagatgtattaggttgaat

SEQ ID NO: 5549685 - DNA, 25 bp, Homo sapien
taagatgagggtatacctgtatatt

SEQ ID NO: 5549686 - DNA, 25 bp, Homo sapien
ttggtatctggctaatgctggcttc

SEQ ID NO: 5549687 - DNA, 25 bp, Homo sapien
cagaatatcagcatgagactcaatt

SEQ ID NO: 5549688 - DNA, 25 bp, Homo sapien
ggcacagttactttcatgggcagca

SEQ ID NO: 5549689 - DNA, 25 bp, Homo sapien
agggccacagtggtaaaatgaatgt

SEQ ID NO: 5549690 - DNA, 25 bp, Homo sapien
agtatctctaggaataaaatagcct

SEQ ID NO: 5549691 - DNA, 25 bp, Homo sapien
tggatcaccataatagtcatggccc

SEQ ID NO: 5549692 - DNA, 25 bp, Homo sapien
tgaacaattttgcagacctggagcc

SEQ ID NO: 5549693 - DNA, 25 bp, Homo sapien
gtttaacaccagagacacagtgggc

SEQ ID NO: 5549694 - DNA, 25 bp, Homo sapien
gagacacagtgggcacagttacttt

SEQ ID NO: 5549695 - DNA, 25 bp, Homo sapien
atagtcatggcccttcccccagttc

SEQ ID NO: 5549696 - DNA, 25 bp, Homo sapien
attttgcagacctggagcccactga

SEQ ID NO: 5549697 - DNA, 25 bp, Homo sapien
gagaccaagtgacagtgtttaacac

SEQ ID NO: 5549698 - DNA, 25 bp, Homo sapien
ttgtgagggtctttggtagtatctc

SEQ ID NO: 5549699 - DNA, 25 bp, Homo sapien
caaagaatcctgtggttactgaccc

SEQ ID NO: 5549700 - DNA, 25 bp, Homo sapien
cgagcttcccatcccaggtggagct

SEQ ID NO: 5549701 - DNA, 25 bp, Homo sapien
agcaggcagactctctgtgaactca

SEQ ID NO: 5549702 - DNA, 25 bp, Homo sapien
aggggaagccactaatcttgccaga

SEQ ID NO: 5549703 - DNA, 25 bp, Homo sapien
actggcagaactctttggaggccca

SEQ ID NO: 5549704 - DNA, 25 bp, Homo sapien
ggtcgagcttcccatcccgggtcga

SEQ ID NO: 5549705 - DNA, 25 bp, Homo sapien
agagccccagctggtaccatctcca

SEQ ID NO: 5549706 - DNA, 25 bp, Homo sapien
tgcaggattctagaggcgttctctg

SEQ ID NO: 5549707 - DNA, 25 bp, Homo sapien
aagttcaacacaaagtaggcttccc

SEQ ID NO: 5549708 - DNA, 25 bp, Homo sapien
cctccctcactgaggcccggaagga

SEQ ID NO: 5549709 - DNA, 25 bp, Homo sapien
gaaagccaattaggaaccctctctg

SEQ ID NO: 5549710 - DNA, 25 bp, Homo sapien
acctgagctcaaatcgtgaagatgt

SEQ ID NO: 5549711 - DNA, 25 bp, Homo sapien
cgtgaagatgtactgctgtccctgc

SEQ ID NO: 5549712 - DNA, 25 bp, Homo sapien
ccccactcaaaaccggcagacttac

SEQ ID NO: 5549713 - DNA, 25 bp, Homo sapien
gagagttgccatagacctgagctca

SEQ ID NO: 5549714 - DNA, 25 bp, Homo sapien
ttgaaggagataaccaacatgcctc

SEQ ID NO: 5549715 - DNA, 25 bp, Homo sapien
ttgcttatgacagaacaggagagtt

SEQ ID NO: 5549716 - DNA, 25 bp, Homo sapien
attccttcgtaaatgggccagggca

SEQ ID NO: 5549717 - DNA, 25 bp, Homo sapien
cttggacacttcaggcatatgtgcc

SEQ ID NO: 5549718 - DNA, 25 bp, Homo sapien
ggctggttgaaggctccatacagta

SEQ ID NO: 5549719 - DNA, 25 bp, Homo sapien
ctgccatgtgaaagcaaacaccttc

SEQ ID NO: 5549720 - DNA, 25 bp, Homo sapien
cataggagtacatgatgcagcaatt

SEQ ID NO: 5549721 - DNA, 25 bp, Homo sapien
aggatgcccagatgtttagctaaac

SEQ ID NO: 5549722 - DNA, 25 bp, Homo sapien
tctgactatacaggggtgtgatggt

SEQ ID NO: 5549723 - DNA, 25 bp, Homo sapien
tccagagagattagcatttgaattg

SEQ ID NO: 5549724 - DNA, 25 bp, Homo sapien
cggttgtaaatcaagggaatcccaa

SEQ ID NO: 5549725 - DNA, 25 bp, Homo sapien
tagtaagttctataagagccaacct

SEQ ID NO: 5549726 - DNA, 25 bp, Homo sapien
atagactgagtcaagattgccctga

SEQ ID NO: 5549727 - DNA, 25 bp, Homo sapien
acttaactggatcacaggatgccca

SEQ ID NO: 5549728 - DNA, 25 bp, Homo sapien
ggtttgccagtgaaatgaatgataa

SEQ ID NO: 5549729 - DNA, 25 bp, Homo sapien
aaacctacaagatcgaggaggtgaa

SEQ ID NO: 5549730 - DNA, 25 bp, Homo sapien
tgtgaggctgtttccagagagatta

SEQ ID NO: 5549731 - DNA, 25 bp, Homo sapien
agcatttgaattgatagactgagtc

SEQ ID NO: 5549732 - DNA, 25 bp, Homo sapien
atgcagagatgataaagatgctgtc

SEQ ID NO: 5549733 - DNA, 25 bp, Homo sapien
agcagaagggaacctttccctcctg

SEQ ID NO: 5549734 - DNA, 25 bp, Homo sapien
gtctcaacagagtgggatttgaggg

SEQ ID NO: 5549735 - DNA, 25 bp, Homo sapien
tagggtccctggatgcctcatcgta

SEQ ID NO: 5549736 - DNA, 25 bp, Homo sapien
aatgtgctgtgtatagtcaacaata

SEQ ID NO: 5549737 - DNA, 25 bp, Homo sapien
tgatagagccctaaaatgtgctgtg

SEQ ID NO: 5549738 - DNA, 25 bp, Homo sapien
taactcaactgcttgtctgacaatt

SEQ ID NO: 5549739 - DNA, 25 bp, Homo sapien
attttgcccagtccaggtctctaac

SEQ ID NO: 5549740 - DNA, 25 bp, Homo sapien
ttatttgattgatgtatttagagac

SEQ ID NO: 5549741 - DNA, 25 bp, Homo sapien
gggaccactggtgcacattaccaca

SEQ ID NO: 5549742 - DNA, 25 bp, Homo sapien
tctgacaattaagcagaagggaacc

SEQ ID NO: 5549743 - DNA, 25 bp, Homo sapien
aggggcaggatatttgagaaagccc

SEQ ID NO: 5549744 - DNA, 25 bp, Homo sapien
cccctcacaacgaagtctgggggca

SEQ ID NO: 5549745 - DNA, 25 bp, Homo sapien
aggatgggatcctgcaacccttgga

SEQ ID NO: 5549746 - DNA, 25 bp, Homo sapien
gaaaagggcaacaagccatgttatc

SEQ ID NO: 5549747 - DNA, 25 bp, Homo sapien
agcaaattgctaaggccaaggatgg

SEQ ID NO: 5549748 - DNA, 25 bp, Homo sapien
tctatgcctagaggagtagcaagaa

SEQ ID NO: 5549749 - DNA, 25 bp, Homo sapien
agccacacaaatgggtagaaagaac

SEQ ID NO: 5549750 - DNA, 25 bp, Homo sapien
gagtagcaagaaatgatcctgagtc

SEQ ID NO: 5549751 - DNA, 25 bp, Homo sapien
tgaggaaaccaccgtcagtggtgca

SEQ ID NO: 5549752 - DNA, 25 bp, Homo sapien
ggggaagctccaagctccacccaga

SEQ ID NO: 5549753 - DNA, 25 bp, Homo sapien
actgaggctagactaggacaagaat

SEQ ID NO: 5549754 - DNA, 25 bp, Homo sapien
cctacccttggaacaagagactttc

SEQ ID NO: 5549755 - DNA, 25 bp, Homo sapien
ctggagccctcacctggacattgca

SEQ ID NO: 5549756 - DNA, 25 bp, Homo sapien
cccctcaactttgggaggagggctc

SEQ ID NO: 5549757 - DNA, 25 bp, Homo sapien
tcctatgccatagccttgtcccagc

SEQ ID NO: 5549758 - DNA, 25 bp, Homo sapien
caggaggtgcctacctaggctctga

SEQ ID NO: 5549759 - DNA, 25 bp, Homo sapien
taagtggatcaaaatgtcccccctc

SEQ ID NO: 5549760 - DNA, 25 bp, Homo sapien
cctttccctgggaatgcgcagaaca

SEQ ID NO: 5549761 - DNA, 25 bp, Homo sapien
gtcctcgttccagcgccgccgagag

SEQ ID NO: 5549762 - DNA, 25 bp, Homo sapien
ccagaaggaatgcaaaccctgtact

SEQ ID NO: 5549763 - DNA, 25 bp, Homo sapien
gaagctgcagaatttgagcccggaa

SEQ ID NO: 5549764 - DNA, 25 bp, Homo sapien
gttggtgtaacccagaaggaatgca

SEQ ID NO: 5549765 - DNA, 25 bp, Homo sapien
ttacaccatattgggggcccgctgt

SEQ ID NO: 5549766 - DNA, 25 bp, Homo sapien
aggagtgatgagtgtaaaaatatat

SEQ ID NO: 5549767 - DNA, 25 bp, Homo sapien
ctgggcatagtgatgataaaaagca

SEQ ID NO: 5549768 - DNA, 25 bp, Homo sapien
gcagagacctgccacgattacacca

SEQ ID NO: 5549769 - DNA, 25 bp, Homo sapien
ttgcattcagagacacaccaaggga

SEQ ID NO: 5549770 - DNA, 25 bp, Homo sapien
ataccacacacatgggtgggaactc

SEQ ID NO: 5549771 - DNA, 25 bp, Homo sapien
tggctatttgacaggcacattaaac

SEQ ID NO: 5549772 - DNA, 25 bp, Homo sapien
tctgtgggaagagcacttcatctct

SEQ ID NO: 5549773 - DNA, 25 bp, Homo sapien
ggagaaggatcagtccacctctgtg

SEQ ID NO: 5549774 - DNA, 25 bp, Homo sapien
cctggatatgtgaagaacaagtgag

SEQ ID NO: 5549775 - DNA, 25 bp, Homo sapien
cacatagcacttcaggcagagacct

SEQ ID NO: 5549776 - DNA, 25 bp, Homo sapien
gaggtgaggaatttgctaattaccc

SEQ ID NO: 5549777 - DNA, 25 bp, Homo sapien
attgcacagtaggacgactatagtt

SEQ ID NO: 5549778 - DNA, 25 bp, Homo sapien
gaataaacctagagacactatgtta

SEQ ID NO: 5549779 - DNA, 25 bp, Homo sapien
atgataatgtttgaggtgaggaatt

SEQ ID NO: 5549780 - DNA, 25 bp, Homo sapien
acatgcattgaaacagtatactcct

SEQ ID NO: 5549781 - DNA, 25 bp, Homo sapien
agataggaggaacaagttctgttgt

SEQ ID NO: 5549782 - DNA, 25 bp, Homo sapien
caacaggtacaaagtaagctacact

SEQ ID NO: 5549783 - DNA, 25 bp, Homo sapien
actgagcataggacaaataccacat

SEQ ID NO: 5549784 - DNA, 25 bp, Homo sapien
gtgaaataaactgagcataggacaa

SEQ ID NO: 5549785 - DNA, 25 bp, Homo sapien
agatagagataaacggttggtcaac

SEQ ID NO: 5549786 - DNA, 25 bp, Homo sapien
taagctacacttagataggaggaac

SEQ ID NO: 5549787 - DNA, 25 bp, Homo sapien
ggatccagacacaaaaggacgtatc

SEQ ID NO: 5549788 - DNA, 25 bp, Homo sapien
tctgataacaagtgcggtttcggac

SEQ ID NO: 5549789 - DNA, 25 bp, Homo sapien
tcagtggataaacacagcatggtcc

SEQ ID NO: 5549790 - DNA, 25 bp, Homo sapien
ggagctgatagcctttcacagggcc

SEQ ID NO: 5549791 - DNA, 25 bp, Homo sapien
gcacacacaagtgcacagcggcatg

SEQ ID NO: 5549792 - DNA, 25 bp, Homo sapien
cttggagaaaccacgagcccattta

SEQ ID NO: 5549793 - DNA, 25 bp, Homo sapien
cccatttaacaggcaggacgctgag

SEQ ID NO: 5549794 - DNA, 25 bp, Homo sapien
agctcagagttaaccattgtgcccc

SEQ ID NO: 5549795 - DNA, 25 bp, Homo sapien
accagacagtggaatattacgcagc

SEQ ID NO: 5549796 - DNA, 25 bp, Homo sapien
ggactgaaagaggtgtttgcacaca

SEQ ID NO: 5549797 - DNA, 25 bp, Homo sapien
ccctaagcctaacagcagctggagc

SEQ ID NO: 5549798 - DNA, 25 bp, Homo sapien
ggcaataggtgttaagtgatgatgt

SEQ ID NO: 5549799 - DNA, 25 bp, Homo sapien
tggggatcaagtttattatgaggat

SEQ ID NO: 5549800 - DNA, 25 bp, Homo sapien
tgtctttgaaatggcaataggtgtt

SEQ ID NO: 5549801 - DNA, 25 bp, Homo sapien
gcatgggtccatacccagaaaagcc

SEQ ID NO: 5549802 - DNA, 25 bp, Homo sapien
ggcagacaaaccattgcatgggtcc

SEQ ID NO: 5549803 - DNA, 25 bp, Homo sapien
tccccatgcacaatccctgttcccc

SEQ ID NO: 5549804 - DNA, 25 bp, Homo sapien
gagaatccagaagctactataaaca

SEQ ID NO: 5549805 - DNA, 25 bp, Homo sapien
gaaaagcctgttgggattctgtctt

SEQ ID NO: 5549806 - DNA, 25 bp, Homo sapien
gttgaaaggcagacaaaccattgca

SEQ ID NO: 5549807 - DNA, 25 bp, Homo sapien
tgatacaaattgttgaaaggcagac

SEQ ID NO: 5549808 - DNA, 25 bp, Homo sapien
tgtaataactggagatgtgtataaa

SEQ ID NO: 5549809 - DNA, 25 bp, Homo sapien
tttaagtatgaattccagcattatc

SEQ ID NO: 5549810 - DNA, 25 bp, Homo sapien
cattatctgagcaaatccaggcctc

SEQ ID NO: 5549811 - DNA, 25 bp, Homo sapien
gactgtgataaagataacaacaatg

SEQ ID NO: 5549812 - DNA, 25 bp, Homo sapien
agagctaatgggccctaaaagacta

SEQ ID NO: 5549813 - DNA, 25 bp, Homo sapien
aggcttgagagctaatgggccctaa

SEQ ID NO: 5549814 - DNA, 25 bp, Homo sapien
atgatgaattgatgacacttttgta

SEQ ID NO: 5549815 - DNA, 25 bp, Homo sapien
aacaacaatgatgaattgatgacac

SEQ ID NO: 5549816 - DNA, 25 bp, Homo sapien
taatttgggcaacaatattattgac

SEQ ID NO: 5549817 - DNA, 25 bp, Homo sapien
cacagggcacatgtatgcttttaat

SEQ ID NO: 5549818 - DNA, 25 bp, Homo sapien
tgggccctaaaagactaacatcagc

SEQ ID NO: 5549819 - DNA, 25 bp, Homo sapien
ctgaatttcttgagggtatgtctga

SEQ ID NO: 5549820 - DNA, 25 bp, Homo sapien
tatgactccaggagggcacgtttta

SEQ ID NO: 5549821 - DNA, 25 bp, Homo sapien
ttgaggctagtctgtgatatctgtt

SEQ ID NO: 5549822 - DNA, 25 bp, Homo sapien
tctcattaaggtgcaagcctcctct

SEQ ID NO: 5549823 - DNA, 25 bp, Homo sapien
taagaaacaccctggcttctaggcc

SEQ ID NO: 5549824 - DNA, 25 bp, Homo sapien
tttatcacactgaactggaaggggg

SEQ ID NO: 5549825 - DNA, 25 bp, Homo sapien
tggagcacaaattgcccccacagtc

SEQ ID NO: 5549826 - DNA, 25 bp, Homo sapien
gctagctagtagcaataagaaatgc

SEQ ID NO: 5549827 - DNA, 25 bp, Homo sapien
aaatgctgatggcctgtgcctccca

SEQ ID NO: 5549828 - DNA, 25 bp, Homo sapien
gcctcccaaggagataccatgttcc

SEQ ID NO: 5549829 - DNA, 25 bp, Homo sapien
atgaacttcaggtagaaggtgaatt

SEQ ID NO: 5549830 - DNA, 25 bp, Homo sapien
ggaggctgtggttcaaatgtcaccg

SEQ ID NO: 5549831 - DNA, 25 bp, Homo sapien
caggcagggtcatgttctgccccct

SEQ ID NO: 5549832 - DNA, 25 bp, Homo sapien
gaaatgaatgactagataaatgact

SEQ ID NO: 5549833 - DNA, 25 bp, Homo sapien
gattggtttcagaagtgtcacagtt

SEQ ID NO: 5549834 - DNA, 25 bp, Homo sapien
tggggagaaagatcctaggctttct

SEQ ID NO: 5549835 - DNA, 25 bp, Homo sapien
tctctagtggcattctctctgggga

SEQ ID NO: 5549836 - DNA, 25 bp, Homo sapien
tatggcatgtctagctgacagaggg

SEQ ID NO: 5549837 - DNA, 25 bp, Homo sapien
ccatgagaggctttcctaagattgg

SEQ ID NO: 5549838 - DNA, 25 bp, Homo sapien
agggcaggacaacttttcaacaggg

SEQ ID NO: 5549839 - DNA, 25 bp, Homo sapien
ttcttaggtcctaggagggtcatta

SEQ ID NO: 5549840 - DNA, 25 bp, Homo sapien
taaatgactggaaataataggatga

SEQ ID NO: 5549841 - DNA, 25 bp, Homo sapien
acaacttttcaacagggaggtccca

SEQ ID NO: 5549842 - DNA, 25 bp, Homo sapien
gacaaaaaagagtctatacatgttc

SEQ ID NO: 5549843 - DNA, 25 bp, Homo sapien
gatatgctacttaaaattgggggaa

SEQ ID NO: 5549844 - DNA, 25 bp, Homo sapien
tagtgtttgcagataacctatgcac

SEQ ID NO: 5549845 - DNA, 25 bp, Homo sapien
tccctcggcatctgtgggagattgg

SEQ ID NO: 5549846 - DNA, 25 bp, Homo sapien
ccaaactgagtacctcctatgtgtt

SEQ ID NO: 5549847 - DNA, 25 bp, Homo sapien
aggacctcccttggataccaaagtc

SEQ ID NO: 5549848 - DNA, 25 bp, Homo sapien
gaatggaactgtatggatatggatt

SEQ ID NO: 5549849 - DNA, 25 bp, Homo sapien
gggtgagaagacattgatacaaaaa

SEQ ID NO: 5549850 - DNA, 25 bp, Homo sapien
gatatggatttttagaatagtgcac

SEQ ID NO: 5549851 - DNA, 25 bp, Homo sapien
atgaagttccactttggggatgggg

SEQ ID NO: 5549852 - DNA, 25 bp, Homo sapien
ataatgcgcaatacaacttaaatgc

SEQ ID NO: 5549853 - DNA, 25 bp, Homo sapien
gtatatcatgtgaccctggcaagtc

SEQ ID NO: 5549854 - DNA, 25 bp, Homo sapien
ggagctttggcatatcactagatgc

SEQ ID NO: 5549855 - DNA, 25 bp, Homo sapien
gacttaactggggcaaaatgagtaa

SEQ ID NO: 5549856 - DNA, 25 bp, Homo sapien
gggcaaaatgagtaacactagccaa

SEQ ID NO: 5549857 - DNA, 25 bp, Homo sapien
caaaatgctatgattatggctgtga

SEQ ID NO: 5549858 - DNA, 25 bp, Homo sapien
aaggtagaaatagtttggcaaacgc

SEQ ID NO: 5549859 - DNA, 25 bp, Homo sapien
atgattatggctgtgagacactgca

SEQ ID NO: 5549860 - DNA, 25 bp, Homo sapien
taacactagccaaaaagtcaggatg

SEQ ID NO: 5549861 - DNA, 25 bp, Homo sapien
gtgaccctggcaagtcccagctcct

SEQ ID NO: 5549862 - DNA, 25 bp, Homo sapien
aagtcaggatgcataacatctgtat

SEQ ID NO: 5549863 - DNA, 25 bp, Homo sapien
gcttactgaactaccaggaagagct

SEQ ID NO: 5549864 - DNA, 25 bp, Homo sapien
accgcacccggccagctcttcttaa

SEQ ID NO: 5549865 - DNA, 25 bp, Homo sapien
tctttcaacacagtatagctctttt

SEQ ID NO: 5549866 - DNA, 25 bp, Homo sapien
ctcttcttaagagacccttggtggg

SEQ ID NO: 5549867 - DNA, 25 bp, Homo sapien
gagacggagtcccactctgttgccc

SEQ ID NO: 5549868 - DNA, 25 bp, Homo sapien
gcccagcccaaagacacttactgtc

SEQ ID NO: 5549869 - DNA, 25 bp, Homo sapien
caaaacagagtcaaaatggcaaatt

SEQ ID NO: 5549870 - DNA, 25 bp, Homo sapien
tttcctggtgacctgttcaaaacag

SEQ ID NO: 5549871 - DNA, 25 bp, Homo sapien
tttatacaggactctttcaacacag

SEQ ID NO: 5549872 - DNA, 25 bp, Homo sapien
aaatggcaaatttaagacatcctcc

SEQ ID NO: 5549873 - DNA, 25 bp, Homo sapien
taagccaccatgcccagcccaaaga

SEQ ID NO: 5549874 - DNA, 25 bp, Homo sapien
tgttcaaaacagagtcaaaatggca

SEQ ID NO: 5549875 - DNA, 25 bp, Homo sapien
acgtctccaaccacggccgaagaag

SEQ ID NO: 5549876 - DNA, 25 bp, Homo sapien
cttcttcggccgtggttggagacgt

SEQ ID NO: 5549877 - DNA, 25 bp, Homo sapien
aagtcagtacatcaaagagatttgc

SEQ ID NO: 5549878 - DNA, 25 bp, Homo sapien
aacagggaaaatgatctgaatagac

SEQ ID NO: 5549879 - DNA, 25 bp, Homo sapien
tctcacctgttaaatggctactttc

SEQ ID NO: 5549880 - DNA, 25 bp, Homo sapien
tgaaaacacgcctaccatatgatcc

SEQ ID NO: 5549881 - DNA, 25 bp, Homo sapien
atggccaacaagtgtaggaaaaaat

SEQ ID NO: 5549882 - DNA, 25 bp, Homo sapien
aaggggaccactcatacaccgttgc

SEQ ID NO: 5549883 - DNA, 25 bp, Homo sapien
cccaaaaatctgaaaacacgcctac

SEQ ID NO: 5549884 - DNA, 25 bp, Homo sapien
aagaaaacaatcagcagagtgaaga

SEQ ID NO: 5549885 - DNA, 25 bp, Homo sapien
cattaatcgtcagggaaacgaaaac

SEQ ID NO: 5549886 - DNA, 25 bp, Homo sapien
ggggaggaatatgcaaactatccat

SEQ ID NO: 5549887 - DNA, 25 bp, Homo sapien
gctgggaatataaattagtatagcc

SEQ ID NO: 5549888 - DNA, 25 bp, Homo sapien
ccttgggaaaggatagttccgtaca

SEQ ID NO: 5549889 - DNA, 25 bp, Homo sapien
cttgattgaccacaagggacagact

SEQ ID NO: 5549890 - DNA, 25 bp, Homo sapien
tgagaaggaatgatcttgatgtcac

SEQ ID NO: 5549891 - DNA, 25 bp, Homo sapien
agtccactgggaaataattgtttac

SEQ ID NO: 5549892 - DNA, 25 bp, Homo sapien
tagcagaaagtatgcatgatgtacc

SEQ ID NO: 5549893 - DNA, 25 bp, Homo sapien
atagacaataatagtcgctggtccc

SEQ ID NO: 5549894 - DNA, 25 bp, Homo sapien
agcacctgtccaatgaacctgatat

SEQ ID NO: 5549895 - DNA, 25 bp, Homo sapien
cagatcccctagacttggtggaagt

SEQ ID NO: 5549896 - DNA, 25 bp, Homo sapien
gaagtcttggggcaaaccaaaatga

SEQ ID NO: 5549897 - DNA, 25 bp, Homo sapien
gtcgctggtcccataggagtaggga

SEQ ID NO: 5549898 - DNA, 25 bp, Homo sapien
tatagtgaaaagccttgagaaggaa

SEQ ID NO: 5549899 - DNA, 25 bp, Homo sapien
aaaaccagatggacatggaatcttt

SEQ ID NO: 5549900 - DNA, 25 bp, Homo sapien
taagtgtattctgggagtgacctct

SEQ ID NO: 5549901 - DNA, 25 bp, Homo sapien
ccgggacaccaacagcttctgctat

SEQ ID NO: 5549902 - DNA, 25 bp, Homo sapien
gtgacctctgtggcagaccaaggga

SEQ ID NO: 5549903 - DNA, 25 bp, Homo sapien
ttgtcaaaaatgtggggcctaccag

SEQ ID NO: 5549904 - DNA, 25 bp, Homo sapien
ctcaggtcaccctcagaaggagaca

SEQ ID NO: 5549905 - DNA, 25 bp, Homo sapien
gggcctaccaggtgttagcctccat

SEQ ID NO: 5549906 - DNA, 25 bp, Homo sapien
agacacagggagtcctaagtgtatt

SEQ ID NO: 5549907 - DNA, 25 bp, Homo sapien
caccacgtgtggccatacctatgag

SEQ ID NO: 5549908 - DNA, 25 bp, Homo sapien
cccataacatcgtggctcaggtcac

SEQ ID NO: 5549909 - DNA, 25 bp, Homo sapien
agtaataaaaaccagatggacatgg

SEQ ID NO: 5549910 - DNA, 25 bp, Homo sapien
tctaaaaagagcaaagtgtctggtg

SEQ ID NO: 5549911 - DNA, 25 bp, Homo sapien
atccgtggacaattctgataggaaa

SEQ ID NO: 5549912 - DNA, 25 bp, Homo sapien
tgagcagatgagttatggtatccgt

SEQ ID NO: 5549913 - DNA, 25 bp, Homo sapien
ctgggcaataaaccgaaggcttcta

SEQ ID NO: 5549914 - DNA, 25 bp, Homo sapien
tatccttcagaaagcctgggcaata

SEQ ID NO: 5549915 - DNA, 25 bp, Homo sapien
aaggaactcttcaagtagctagtgc

SEQ ID NO: 5549916 - DNA, 25 bp, Homo sapien
gaaacccatgataaaccaaaggcac

SEQ ID NO: 5549917 - DNA, 25 bp, Homo sapien
atagccagttggagagctatgctgt

SEQ ID NO: 5549918 - DNA, 25 bp, Homo sapien
agtgtctggtgagtcaagcagaatc

SEQ ID NO: 5549919 - DNA, 25 bp, Homo sapien
agaagaataagcatgaaggaactct

SEQ ID NO: 5549920 - DNA, 25 bp, Homo sapien
aaatttggtgaatctggactttgcc

SEQ ID NO: 5549921 - DNA, 25 bp, Homo sapien
cacctccgtcgtcccgcctaccgcc

SEQ ID NO: 5549922 - DNA, 25 bp, Homo sapien
ggcggtaggcgggacgacggaggtg

SEQ ID NO: 5549923 - DNA, 25 bp, Homo sapien
agctacaaagctaacaagggtgtgc

SEQ ID NO: 5549924 - DNA, 25 bp, Homo sapien
agggtgtgccatcagaactatccat

SEQ ID NO: 5549925 - DNA, 25 bp, Homo sapien
tggttggtacacactgcagcaaaca

SEQ ID NO: 5549926 - DNA, 25 bp, Homo sapien
ggctacgtgctctccagagtgttcc

SEQ ID NO: 5549927 - DNA, 25 bp, Homo sapien
gagtgttcccatgatcaccacgtcc

SEQ ID NO: 5549928 - DNA, 25 bp, Homo sapien
atgtggcttaaagtcaccctgagtc

SEQ ID NO: 5549929 - DNA, 25 bp, Homo sapien
tcctctctgtgctggctccgaacgc

SEQ ID NO: 5549930 - DNA, 25 bp, Homo sapien
agacccaccaacaaccaagaagctg

SEQ ID NO: 5549931 - DNA, 25 bp, Homo sapien
taacagctgccatgtgacatgtggc

SEQ ID NO: 5549932 - DNA, 25 bp, Homo sapien
ccgaacgcttgcttacagacccacc

SEQ ID NO: 5549933 - DNA, 25 bp, Homo sapien
ccaagaagctgcactggttggtaca

SEQ ID NO: 5549934 - DNA, 25 bp, Homo sapien
gactcctgtaaggttcagcaggacc

SEQ ID NO: 5549935 - DNA, 25 bp, Homo sapien
attgcaagagcacatagaaaaaaag

SEQ ID NO: 5549936 - DNA, 25 bp, Homo sapien
tgtagggcacagaacagttattacc

SEQ ID NO: 5549937 - DNA, 25 bp, Homo sapien
aaagtagcaacagcattacagaaat

SEQ ID NO: 5549938 - DNA, 25 bp, Homo sapien
caaagttcaggaccactgaaaccat

SEQ ID NO: 5549939 - DNA, 25 bp, Homo sapien
cctagggccactcctgacatgattc

SEQ ID NO: 5549940 - DNA, 25 bp, Homo sapien
aactgtgataatactgaaaagaaat

SEQ ID NO: 5549941 - DNA, 25 bp, Homo sapien
aggtggcatcctccttgtagggcac

SEQ ID NO: 5549942 - DNA, 25 bp, Homo sapien
cttgggagctaatgtcaaagaatca

SEQ ID NO: 5549943 - DNA, 25 bp, Homo sapien
ttagccagaggcttttccgagcatt

SEQ ID NO: 5549944 - DNA, 25 bp, Homo sapien
tagctaaaagggtgtgatattctga

SEQ ID NO: 5549945 - DNA, 25 bp, Homo sapien
aagtaaacttcatttccagctcccc

SEQ ID NO: 5549946 - DNA, 25 bp, Homo sapien
tttgttatgcagagaaaataacttc

SEQ ID NO: 5549947 - DNA, 25 bp, Homo sapien
atcaactgtgagaagctaataaact

SEQ ID NO: 5549948 - DNA, 25 bp, Homo sapien
tggtttccccaaggagctctattgt

SEQ ID NO: 5549949 - DNA, 25 bp, Homo sapien
ctgccttcagcttttgtgcatgtgc

SEQ ID NO: 5549950 - DNA, 25 bp, Homo sapien
ttgtgcatgtgcaagcaggttcttt

SEQ ID NO: 5549951 - DNA, 25 bp, Homo sapien
cattgctcacaaagataagtaactg

SEQ ID NO: 5549952 - DNA, 25 bp, Homo sapien
acatcctcactgactctctgccttc

SEQ ID NO: 5549953 - DNA, 25 bp, Homo sapien
atgccagcagggaccttactgcatc

SEQ ID NO: 5549954 - DNA, 25 bp, Homo sapien
taagtaactgaaatgccagcaggga

SEQ ID NO: 5549955 - DNA, 25 bp, Homo sapien
ttttgctcagtagaagaaaaaggct

SEQ ID NO: 5549956 - DNA, 25 bp, Homo sapien
tctcaagatcccagtaccaaggtcc

SEQ ID NO: 5549957 - DNA, 25 bp, Homo sapien
tctcaagaagatgcacctccatggc

SEQ ID NO: 5549958 - DNA, 25 bp, Homo sapien
tttactgtaaccctgatatcttttc

SEQ ID NO: 5549959 - DNA, 25 bp, Homo sapien
ccaagctattggattcagctgttct

SEQ ID NO: 5549960 - DNA, 25 bp, Homo sapien
ctccatggcaaaggatctcaagatc

SEQ ID NO: 5549961 - DNA, 25 bp, Homo sapien
tgttcttcagcccacccgttcatcc

SEQ ID NO: 5549962 - DNA, 25 bp, Homo sapien
ctgtcttcatgttctgccaagctat

SEQ ID NO: 5549963 - DNA, 25 bp, Homo sapien
tgctgttagtctgttctctgtgtaa

SEQ ID NO: 5549964 - DNA, 25 bp, Homo sapien
agatgcacctccatggcaaaggatc

SEQ ID NO: 5549965 - DNA, 25 bp, Homo sapien
tccttcctcttgttatgtgccattt

SEQ ID NO: 5549966 - DNA, 25 bp, Homo sapien
accaaggtccacataaaagttttgc

SEQ ID NO: 5549967 - DNA, 25 bp, Homo sapien
tgttctccttgaagatggcgatcag

SEQ ID NO: 5549968 - DNA, 25 bp, Homo sapien
gacctgcatctccttggacggccgc

SEQ ID NO: 5549969 - DNA, 25 bp, Homo sapien
gcgcgttcatgaagaagttgctgac

SEQ ID NO: 5549970 - DNA, 25 bp, Homo sapien
ctgcgagatggtgacctgcatctcc

SEQ ID NO: 5549971 - DNA, 25 bp, Homo sapien
tgctgctcctgttccttgcgcttgc

SEQ ID NO: 5549972 - DNA, 25 bp, Homo sapien
gggcgcgctccttctgctgctcctg

SEQ ID NO: 5549973 - DNA, 25 bp, Homo sapien
ctcctcagcccagcggttcatgcag

SEQ ID NO: 5549974 - DNA, 25 bp, Homo sapien
gtgaacaccaggcgctgcttcttgg

SEQ ID NO: 5549975 - DNA, 25 bp, Homo sapien
cttggacggccgcttgttctccttg

SEQ ID NO: 5549976 - DNA, 25 bp, Homo sapien
tcctggatagcacccctcttcagtt

SEQ ID NO: 5549977 - DNA, 25 bp, Homo sapien
tgttgagctccaagccgagctgctg

SEQ ID NO: 5549978 - DNA, 25 bp, Homo sapien
tttctattaaaaattaggaccatag

SEQ ID NO: 5549979 - DNA, 25 bp, Homo sapien
ctatggtcctaatttttaatagaaa

SEQ ID NO: 5549980 - DNA, 25 bp, Homo sapien
gtgttttgaacatgtatcctgcaac

SEQ ID NO: 5549981 - DNA, 25 bp, Homo sapien
tttagtgatgaaagagtgttgattt

SEQ ID NO: 5549982 - DNA, 25 bp, Homo sapien
tagagtagattatattgattgattt

SEQ ID NO: 5549983 - DNA, 25 bp, Homo sapien
actatctgggtcttacaatacaaat

SEQ ID NO: 5549984 - DNA, 25 bp, Homo sapien
attggatgaggaagacttctattcc

SEQ ID NO: 5549985 - DNA, 25 bp, Homo sapien
tttaaatgcaaatagtgagagtgga

SEQ ID NO: 5549986 - DNA, 25 bp, Homo sapien
aaatgcaaatagtgagagtggatat

SEQ ID NO: 5549987 - DNA, 25 bp, Homo sapien
ctgatgttaagccaaccttgcattc

SEQ ID NO: 5549988 - DNA, 25 bp, Homo sapien
tgagtttgatgttagctgtagattt

SEQ ID NO: 5549989 - DNA, 25 bp, Homo sapien
acaaaatcatgtctgcaaataggac

SEQ ID NO: 5549990 - DNA, 25 bp, Homo sapien
ggatttcttagagctttgtacatac

SEQ ID NO: 5549991 - DNA, 25 bp, Homo sapien
aaaggtgcacacgtcaaaactcatc

SEQ ID NO: 5549992 - DNA, 25 bp, Homo sapien
gaaggagccaaacaagagtacctat

SEQ ID NO: 5549993 - DNA, 25 bp, Homo sapien
acttattatgctggatggaaggagc

SEQ ID NO: 5549994 - DNA, 25 bp, Homo sapien
cttttttggggtgattgatatgttc

SEQ ID NO: 5549995 - DNA, 25 bp, Homo sapien
aaaaggaatgaacatagacgcatat

SEQ ID NO: 5549996 - DNA, 25 bp, Homo sapien
atattccaggtatgtgggagaatgt

SEQ ID NO: 5549997 - DNA, 25 bp, Homo sapien
ccatgattgcctgtggatgtgggaa

SEQ ID NO: 5549998 - DNA, 25 bp, Homo sapien
taacaatagaaaacagatccatgat

SEQ ID NO: 5549999 - DNA, 25 bp, Homo sapien
aaattgtaggaaacgcaaactaatc

SEQ ID NO: 5550000 - DNA, 25 bp, Homo sapien
tagacgcatataacaacatgaatga

SEQ ID NO: 5550001 - DNA, 25 bp, Homo sapien
tattgtcatgatggttggaaaggtg

SEQ ID NO: 5550002 - DNA, 25 bp, Homo sapien
acatgagtatgtacagaagtgtatt

SEQ ID NO: 5550003 - DNA, 25 bp, Homo sapien
tttagtattaggtcacaaacccata

SEQ ID NO: 5550004 - DNA, 25 bp, Homo sapien
atctcagtggtaaatacggttaagt

SEQ ID NO: 5550005 - DNA, 25 bp, Homo sapien
tcgtccagaggtttcatctcagtgg

SEQ ID NO: 5550006 - DNA, 25 bp, Homo sapien
ccatatgtagaccatgggaggaata

SEQ ID NO: 5550007 - DNA, 25 bp, Homo sapien
gttttgaagtggagttttatgaata

SEQ ID NO: 5550008 - DNA, 25 bp, Homo sapien
ctgtagagttccccatatgtagacc

SEQ ID NO: 5550009 - DNA, 25 bp, Homo sapien
ttgagaatatagacagcttcccatt

SEQ ID NO: 5550010 - DNA, 25 bp, Homo sapien
tagtggtttatgtgactggcttcct

SEQ ID NO: 5550011 - DNA, 25 bp, Homo sapien
ggcactgtgggaacatagtggttta

SEQ ID NO: 5550012 - DNA, 25 bp, Homo sapien
gtaatgacgtcttaaagtgagaatt

SEQ ID NO: 5550013 - DNA, 25 bp, Homo sapien
tacagagtctgaagtaactataacc

SEQ ID NO: 5550014 - DNA, 25 bp, Homo sapien
taacctagactctggcttcttgcac

SEQ ID NO: 5550015 - DNA, 25 bp, Homo sapien
tgagactatttccagggaagatccc

SEQ ID NO: 5550016 - DNA, 25 bp, Homo sapien
atgaagtcccaatgcagggtgacaa

SEQ ID NO: 5550017 - DNA, 25 bp, Homo sapien
cttgtgtctcacagggctttggatg

SEQ ID NO: 5550018 - DNA, 25 bp, Homo sapien
caaggtgcgcccctcacaatgtcaa

SEQ ID NO: 5550019 - DNA, 25 bp, Homo sapien
atcctccagttgaggagaatggcgt

SEQ ID NO: 5550020 - DNA, 25 bp, Homo sapien
ctgtgctccaagttcccaaggtgcg

SEQ ID NO: 5550021 - DNA, 25 bp, Homo sapien
cagggctttggatggcaaattctga

SEQ ID NO: 5550022 - DNA, 25 bp, Homo sapien
agggtgacaagtgacacctgagact

SEQ ID NO: 5550023 - DNA, 25 bp, Homo sapien
tcacagtctcatgaagtcccaatgc

SEQ ID NO: 5550024 - DNA, 25 bp, Homo sapien
ttccggctgctaaagttgggattta

SEQ ID NO: 5550025 - DNA, 25 bp, Homo sapien
tattagtgcacctcaggaactgaat

SEQ ID NO: 5550026 - DNA, 25 bp, Homo sapien
tagaatgttggccacagtcaaagat

SEQ ID NO: 5550027 - DNA, 25 bp, Homo sapien
aagtttagccacacatgactagggc

SEQ ID NO: 5550028 - DNA, 25 bp, Homo sapien
atgatgatgtgaaagtgatatatat

SEQ ID NO: 5550029 - DNA, 25 bp, Homo sapien
gaacaaagccagagtactgccatgc

SEQ ID NO: 5550030 - DNA, 25 bp, Homo sapien
tcttcagttgcgacttccggctgct

SEQ ID NO: 5550031 - DNA, 25 bp, Homo sapien
ctgtgtgtaaagaacacctggttcc

SEQ ID NO: 5550032 - DNA, 25 bp, Homo sapien
atggaacaacacagtttgaaggtac

SEQ ID NO: 5550033 - DNA, 25 bp, Homo sapien
atgactagggctactgtatggaaca

SEQ ID NO: 5550034 - DNA, 25 bp, Homo sapien
gggccactgacttaggaaggtttga

SEQ ID NO: 5550035 - DNA, 25 bp, Homo sapien
atagcaaaagtgcccactcaggttc

SEQ ID NO: 5550036 - DNA, 25 bp, Homo sapien
ttgcttgaagcagtgttaaagatac

SEQ ID NO: 5550037 - DNA, 25 bp, Homo sapien
aatcagcaaatggttggttggctgt

SEQ ID NO: 5550038 - DNA, 25 bp, Homo sapien
aggaactcagagcacatgtgtgacc

SEQ ID NO: 5550039 - DNA, 25 bp, Homo sapien
accagtattaataaagcagcaagac

SEQ ID NO: 5550040 - DNA, 25 bp, Homo sapien
gaggctggtgagttctaattggttg

SEQ ID NO: 5550041 - DNA, 25 bp, Homo sapien
atgaaggattgaaacacgattagtt

SEQ ID NO: 5550042 - DNA, 25 bp, Homo sapien
gcaagaccagaggttgggttcttgt

SEQ ID NO: 5550043 - DNA, 25 bp, Homo sapien
ccggttagccactcaggatccatct

SEQ ID NO: 5550044 - DNA, 25 bp, Homo sapien
gttctgactagttggtgctgctgag

SEQ ID NO: 5550045 - DNA, 25 bp, Homo sapien
aattggttggttcgcattagctctg

SEQ ID NO: 5550046 - DNA, 25 bp, Homo sapien
gtttccctaaggtctgaggagcacc

SEQ ID NO: 5550047 - DNA, 25 bp, Homo sapien
tccatccagcccagccaccctgagg

SEQ ID NO: 5550048 - DNA, 25 bp, Homo sapien
tccatcccccaaggtgacatccctc

SEQ ID NO: 5550049 - DNA, 25 bp, Homo sapien
caatgaaacaaggatttttagaccc

SEQ ID NO: 5550050 - DNA, 25 bp, Homo sapien
tggtcttaagcatcatagcaaactc

SEQ ID NO: 5550051 - DNA, 25 bp, Homo sapien
gggcagctctgcaatctaggctcac

SEQ ID NO: 5550052 - DNA, 25 bp, Homo sapien
ccaccctgaggtgcctgtatctcct

SEQ ID NO: 5550053 - DNA, 25 bp, Homo sapien
aagggtcatcaaagtccatccagcc

SEQ ID NO: 5550054 - DNA, 25 bp, Homo sapien
agggaaaagtgcagtaataacaaat

SEQ ID NO: 5550055 - DNA, 25 bp, Homo sapien
ttcatccccgacttagcccagggcc

SEQ ID NO: 5550056 - DNA, 25 bp, Homo sapien
tcccaaattagagaaccatcaggtc

SEQ ID NO: 5550057 - DNA, 25 bp, Homo sapien
ggccatcgtttgcaccacggcgtcc

SEQ ID NO: 5550058 - DNA, 25 bp, Homo sapien
tctcggtaatgtttggtaggtctaa

SEQ ID NO: 5550059 - DNA, 25 bp, Homo sapien
cacggcgtccagaaatactcatcct

SEQ ID NO: 5550060 - DNA, 25 bp, Homo sapien
ctagacaagtatgaagcctcccctg

SEQ ID NO: 5550061 - DNA, 25 bp, Homo sapien
gcaacagagcagccaactgactgtt

SEQ ID NO: 5550062 - DNA, 25 bp, Homo sapien
tggagatccagtatcagcaagctac

SEQ ID NO: 5550063 - DNA, 25 bp, Homo sapien
gctcatagtgggtctagcaatgtcc

SEQ ID NO: 5550064 - DNA, 25 bp, Homo sapien
agggttgaaacccagaaagctcctc

SEQ ID NO: 5550065 - DNA, 25 bp, Homo sapien
cctttgcccttcggggaggcaacag

SEQ ID NO: 5550066 - DNA, 25 bp, Homo sapien
gctcctcggagcccttctggggttc

SEQ ID NO: 5550067 - DNA, 25 bp, Homo sapien
cgcgaacgacggtctctagacaagt

SEQ ID NO: 5550068 - DNA, 25 bp, Homo sapien
tgcaacagtgactgtatggcttgca

SEQ ID NO: 5550069 - DNA, 25 bp, Homo sapien
gatggatgaaaagaaccatggcctt

SEQ ID NO: 5550070 - DNA, 25 bp, Homo sapien
aatacccacagtccacacctggccc

SEQ ID NO: 5550071 - DNA, 25 bp, Homo sapien
tgctatgctggtcaagctgtacttg

SEQ ID NO: 5550072 - DNA, 25 bp, Homo sapien
gatactgggtatagatggatgaaaa

SEQ ID NO: 5550073 - DNA, 25 bp, Homo sapien
agatcaaaggtcagcaaactaatac

SEQ ID NO: 5550074 - DNA, 25 bp, Homo sapien
cagtgctgagtagctgcaacagtga

SEQ ID NO: 5550075 - DNA, 25 bp, Homo sapien
aggtcaccaagaatcatctgctatc

SEQ ID NO: 5550076 - DNA, 25 bp, Homo sapien
atggcctttggaaactgacagatac

SEQ ID NO: 5550077 - DNA, 25 bp, Homo sapien
ttcacgctatgatggcagtgctgag

SEQ ID NO: 5550078 - DNA, 25 bp, Homo sapien
cacacctggcccaccacttggttct

SEQ ID NO: 5550079 - DNA, 25 bp, Homo sapien
atggggttatactgagctgaatact

SEQ ID NO: 5550080 - DNA, 25 bp, Homo sapien
gctctggactatggggttatactga

SEQ ID NO: 5550081 - DNA, 25 bp, Homo sapien
tgctagtttctatggggatggcaac

SEQ ID NO: 5550082 - DNA, 25 bp, Homo sapien
atggggatggcaactcaactaataa

SEQ ID NO: 5550083 - DNA, 25 bp, Homo sapien
catgaatccttaaccaggcaacact

SEQ ID NO: 5550084 - DNA, 25 bp, Homo sapien
cagcagcaagctaaagaaatattac

SEQ ID NO: 5550085 - DNA, 25 bp, Homo sapien
ttggggcgtcttttagcaaagtgtg

SEQ ID NO: 5550086 - DNA, 25 bp, Homo sapien
aggacagggatagataaacccaaca

SEQ ID NO: 5550087 - DNA, 25 bp, Homo sapien
gatagataaacccaacagcagcaag

SEQ ID NO: 5550088 - DNA, 25 bp, Homo sapien
tggagaaacccagagatcatccttg

SEQ ID NO: 5550089 - DNA, 25 bp, Homo sapien
tcaaaaaggaaggtcaacaatatac

SEQ ID NO: 5550090 - DNA, 25 bp, Homo sapien
ttggggaaatattaatgctctcatt

SEQ ID NO: 5550091 - DNA, 25 bp, Homo sapien
ccagagagatccatctcagaccagc

SEQ ID NO: 5550092 - DNA, 25 bp, Homo sapien
tattcagaccaaagctcataacttc

SEQ ID NO: 5550093 - DNA, 25 bp, Homo sapien
acaatcaagatagatggccagctca

SEQ ID NO: 5550094 - DNA, 25 bp, Homo sapien
ctagcgtctgtgaagtagtactatt

SEQ ID NO: 5550095 - DNA, 25 bp, Homo sapien
cggactaataacaatggaaacaaac

SEQ ID NO: 5550096 - DNA, 25 bp, Homo sapien
tgcgagacacccaacaggtgctctc

SEQ ID NO: 5550097 - DNA, 25 bp, Homo sapien
tttctggacttcagagcaattgctc

SEQ ID NO: 5550098 - DNA, 25 bp, Homo sapien
atatcaacgggtgtctagcgtctgt

SEQ ID NO: 5550099 - DNA, 25 bp, Homo sapien
cacacctctcaaagcttatgccctc

SEQ ID NO: 5550100 - DNA, 25 bp, Homo sapien
gccagctcaggtaagtttgtgcaac

SEQ ID NO: 5550101 - DNA, 25 bp, Homo sapien
taagtttagcgcccaccaggaagaa

SEQ ID NO: 5550102 - DNA, 25 bp, Homo sapien
ggtgacacgagccactgtgctcctg

SEQ ID NO: 5550103 - DNA, 25 bp, Homo sapien
aaaggataaatatgggctgtgtgat

SEQ ID NO: 5550104 - DNA, 25 bp, Homo sapien
tcttctgatgaaagtgggactaatc

SEQ ID NO: 5550105 - DNA, 25 bp, Homo sapien
tgctaaaggtacagtatgaagggca

SEQ ID NO: 5550106 - DNA, 25 bp, Homo sapien
agaaagaaaacgattatctgcctcc

SEQ ID NO: 5550107 - DNA, 25 bp, Homo sapien
taagcccagggtgaagatttggtta

SEQ ID NO: 5550108 - DNA, 25 bp, Homo sapien
cactccaaaggtgagataaggtaga

SEQ ID NO: 5550109 - DNA, 25 bp, Homo sapien
ttagtgttgacagtatgccagctct

SEQ ID NO: 5550110 - DNA, 25 bp, Homo sapien
atggccctgagctacacgtgaatga

SEQ ID NO: 5550111 - DNA, 25 bp, Homo sapien
gataaggtagagttgctaaaggtac

SEQ ID NO: 5550112 - DNA, 25 bp, Homo sapien
gatttactacatctttactttatac

SEQ ID NO: 5550113 - DNA, 25 bp, Homo sapien
gtataaagtaaagatgtagtaaatc

SEQ ID NO: 5550114 - DNA, 25 bp, Homo sapien
gctgaggcacagctcctgtttccac

SEQ ID NO: 5550115 - DNA, 25 bp, Homo sapien
ctcactggtgcgcaagtcctcacca

SEQ ID NO: 5550116 - DNA, 25 bp, Homo sapien
tcacaaagcccagggtttggggtga

SEQ ID NO: 5550117 - DNA, 25 bp, Homo sapien
atacagccaaaaacaggaacacctt

SEQ ID NO: 5550118 - DNA, 25 bp, Homo sapien
agcctggctggggttacccctaagc

SEQ ID NO: 5550119 - DNA, 25 bp, Homo sapien
ccctgtcctgatagggctagcctgg

SEQ ID NO: 5550120 - DNA, 25 bp, Homo sapien
ctctgtttccacatggcaggagctg

SEQ ID NO: 5550121 - DNA, 25 bp, Homo sapien
aggttccacagcaatttgggatttc

SEQ ID NO: 5550122 - DNA, 25 bp, Homo sapien
tggcccgctggtatctcctctgtgg

SEQ ID NO: 5550123 - DNA, 25 bp, Homo sapien
ggcaatggtgggcctctgtttccac

SEQ ID NO: 5550124 - DNA, 25 bp, Homo sapien
cccctccctgtaggctcactggtgc

SEQ ID NO: 5550125 - DNA, 25 bp, Homo sapien
tagttagaatatagagtagtcccct

SEQ ID NO: 5550126 - DNA, 25 bp, Homo sapien
aagttataggaggacaaaatcagtt

SEQ ID NO: 5550127 - DNA, 25 bp, Homo sapien
gcaccaaacagatactgagtcccta

SEQ ID NO: 5550128 - DNA, 25 bp, Homo sapien
taccacgtcgtagtaatagctggtt

SEQ ID NO: 5550129 - DNA, 25 bp, Homo sapien
atttccttgaggaggtaagatgtcc

SEQ ID NO: 5550130 - DNA, 25 bp, Homo sapien
ttggcattggctaagtagtaaaatt

SEQ ID NO: 5550131 - DNA, 25 bp, Homo sapien
actgagtccctagtcttagtgctct

SEQ ID NO: 5550132 - DNA, 25 bp, Homo sapien
ttcaggaaggttatgtacctcctac

SEQ ID NO: 5550133 - DNA, 25 bp, Homo sapien
aaataatagacataccagaaccacc

SEQ ID NO: 5550134 - DNA, 25 bp, Homo sapien
cctttggtgcagagcaacaaaataa

SEQ ID NO: 5550135 - DNA, 25 bp, Homo sapien
ctgaatatgcagttttaccacgtcg

SEQ ID NO: 5550136 - DNA, 25 bp, Homo sapien
ggtgctccacattgcagacagggca

SEQ ID NO: 5550137 - DNA, 25 bp, Homo sapien
gatagggaattatcatgtagccatc

SEQ ID NO: 5550138 - DNA, 25 bp, Homo sapien
cagccaacaggcatatgaaaaactc

SEQ ID NO: 5550139 - DNA, 25 bp, Homo sapien
tgtgaggcaaaaaaagcactaccca

SEQ ID NO: 5550140 - DNA, 25 bp, Homo sapien
gcactacccaaaaggtctgagggaa

SEQ ID NO: 5550141 - DNA, 25 bp, Homo sapien
tgagataccatgtcacaccagtcag

SEQ ID NO: 5550142 - DNA, 25 bp, Homo sapien
atgaaagttagcactggtggaaagg

SEQ ID NO: 5550143 - DNA, 25 bp, Homo sapien
tgaaaggaaacagtgaatagaaatt

SEQ ID NO: 5550144 - DNA, 25 bp, Homo sapien
ccaagatatggtaatgtgaatacaa

SEQ ID NO: 5550145 - DNA, 25 bp, Homo sapien
aaaaaatagtgaaaggaaacagtga

SEQ ID NO: 5550146 - DNA, 25 bp, Homo sapien
tggaaaggcaacagatctggcctga

SEQ ID NO: 5550147 - DNA, 25 bp, Homo sapien
ggagggtaggtcctttctgcaactg

SEQ ID NO: 5550148 - DNA, 25 bp, Homo sapien
agctcagagacctccagtgggtatt

SEQ ID NO: 5550149 - DNA, 25 bp, Homo sapien
ctctgtaggcaggttgtccatcagg

SEQ ID NO: 5550150 - DNA, 25 bp, Homo sapien
tcttaggcttgttgacccataggtc

SEQ ID NO: 5550151 - DNA, 25 bp, Homo sapien
ccctcttggtcctctggcagtcctc

SEQ ID NO: 5550152 - DNA, 25 bp, Homo sapien
aggaagtacatgccgattggtccat

SEQ ID NO: 5550153 - DNA, 25 bp, Homo sapien
aggatggctcctctctgcaactgat

SEQ ID NO: 5550154 - DNA, 25 bp, Homo sapien
cccacaggttgtctctgcagctgtc

SEQ ID NO: 5550155 - DNA, 25 bp, Homo sapien
agagggtggctcttctctgcccaca

SEQ ID NO: 5550156 - DNA, 25 bp, Homo sapien
gatcgtcctaatgtctgcagctctc

SEQ ID NO: 5550157 - DNA, 25 bp, Homo sapien
attcagttctcagtagagaggaggc

SEQ ID NO: 5550158 - DNA, 25 bp, Homo sapien
agactgaaattaagagagtcaagct

SEQ ID NO: 5550159 - DNA, 25 bp, Homo sapien
taagagagtcaagcttaattaaaaa

SEQ ID NO: 5550160 - DNA, 25 bp, Homo sapien
atttgggggatcatagatagaaaga

SEQ ID NO: 5550161 - DNA, 25 bp, Homo sapien
ggggatcatagatagaaagactgaa

SEQ ID NO: 5550162 - DNA, 25 bp, Homo sapien
gacagagtcacaaatcgtgtaaata

SEQ ID NO: 5550163 - DNA, 25 bp, Homo sapien
aaaaatcatggttgacgactgatag

SEQ ID NO: 5550164 - DNA, 25 bp, Homo sapien
agtatatcaaaatttgggggatcat

SEQ ID NO: 5550165 - DNA, 25 bp, Homo sapien
tcaaaatttgggggatcatagatag

SEQ ID NO: 5550166 - DNA, 25 bp, Homo sapien
aatcatggttgacgactgatagtcc

SEQ ID NO: 5550167 - DNA, 25 bp, Homo sapien
ctgatagtccaaaagacagagtcac

SEQ ID NO: 5550168 - DNA, 25 bp, Homo sapien
gcctggcctcagacatcaataattt

SEQ ID NO: 5550169 - DNA, 25 bp, Homo sapien
ttacagaatttaaggtactcatatt

SEQ ID NO: 5550170 - DNA, 25 bp, Homo sapien
atgagccaccatacctggcctctat

SEQ ID NO: 5550171 - DNA, 25 bp, Homo sapien
gcagccttgacatcctaggaggctc

SEQ ID NO: 5550172 - DNA, 25 bp, Homo sapien
aagcaatcctcctgagtcatcctcc

SEQ ID NO: 5550173 - DNA, 25 bp, Homo sapien
atagactgggttttgctctgtcacc

SEQ ID NO: 5550174 - DNA, 25 bp, Homo sapien
gacatcctaggaggctcaagcaatc

SEQ ID NO: 5550175 - DNA, 25 bp, Homo sapien
gattaccagtatgaagggcagttac

SEQ ID NO: 5550176 - DNA, 25 bp, Homo sapien
tatcaagattaccagtatgaagggc

SEQ ID NO: 5550177 - DNA, 25 bp, Homo sapien
ggtgtgatcacagctccctgcagcc

SEQ ID NO: 5550178 - DNA, 25 bp, Homo sapien
aacaattaacacagaaataaaaata

SEQ ID NO: 5550179 - DNA, 25 bp, Homo sapien
tggcctctatcttataacaagtcac

SEQ ID NO: 5550180 - DNA, 25 bp, Homo sapien
agtgttattaaatagatggagtcgc

SEQ ID NO: 5550181 - DNA, 25 bp, Homo sapien
gcgactccatctatttaataacact

SEQ ID NO: 5550182 - DNA, 25 bp, Homo sapien
acctgagtgctaacctctagtctgc

SEQ ID NO: 5550183 - DNA, 25 bp, Homo sapien
atatagctagtcagtgttcagattt

SEQ ID NO: 5550184 - DNA, 25 bp, Homo sapien
tataggaagctagatgaattgttta

SEQ ID NO: 5550185 - DNA, 25 bp, Homo sapien
tgagagccaagcaatattaggtcta

SEQ ID NO: 5550186 - DNA, 25 bp, Homo sapien
aacatacacaacagtaaaggaaatt

SEQ ID NO: 5550187 - DNA, 25 bp, Homo sapien
tgcccaaatatcagtaggtacagtc

SEQ ID NO: 5550188 - DNA, 25 bp, Homo sapien
aaataattgagagccaagcaatatt

SEQ ID NO: 5550189 - DNA, 25 bp, Homo sapien
ttgaggtaacacatacctgagtgct

SEQ ID NO: 5550190 - DNA, 25 bp, Homo sapien
gtaggtacagtcatatggacctccc

SEQ ID NO: 5550191 - DNA, 25 bp, Homo sapien
tctaagttgtcaatgcaaagcaaag

SEQ ID NO: 5550192 - DNA, 25 bp, Homo sapien
ttatggagatttgttgaagattatt

SEQ ID NO: 5550193 - DNA, 25 bp, Homo sapien
aacaacaagctattctgaaagcgac

SEQ ID NO: 5550194 - DNA, 25 bp, Homo sapien
aagacagcagagttgaaaatcagtg

SEQ ID NO: 5550195 - DNA, 25 bp, Homo sapien
tactcaaggccaaatcaagcacaat

SEQ ID NO: 5550196 - DNA, 25 bp, Homo sapien
gttcacagaagacagcagagttgaa

SEQ ID NO: 5550197 - DNA, 25 bp, Homo sapien
caccagcaccgctgggactcttcta

SEQ ID NO: 5550198 - DNA, 25 bp, Homo sapien
tcccactcatccaagataggaaaat

SEQ ID NO: 5550199 - DNA, 25 bp, Homo sapien
tggatggttatttgatggattttgt

SEQ ID NO: 5550200 - DNA, 25 bp, Homo sapien
ggcacaggtgtgccttttccccaac

SEQ ID NO: 5550201 - DNA, 25 bp, Homo sapien
tgcttgggaaccaaggctgacttgg

SEQ ID NO: 5550202 - DNA, 25 bp, Homo sapien
aaatcttatcttggcacaggtgtgc

SEQ ID NO: 5550203 - DNA, 25 bp, Homo sapien
ctgaaagcgacttgtgcttgggaac

SEQ ID NO: 5550204 - DNA, 25 bp, Homo sapien
gagggtccgcaccaacttttcgacc

SEQ ID NO: 5550205 - DNA, 25 bp, Homo sapien
ggtcgaaaagttggtgcggaccctc

SEQ ID NO: 5550206 - DNA, 25 bp, Homo sapien
caaggttagacgaatggaaaaatct

SEQ ID NO: 5550207 - DNA, 25 bp, Homo sapien
aagagctgtgctataggaaatcaag

SEQ ID NO: 5550208 - DNA, 25 bp, Homo sapien
tacgagactataatgactggaaacc

SEQ ID NO: 5550209 - DNA, 25 bp, Homo sapien
gcaagagaaaccaaaatcctggtca

SEQ ID NO: 5550210 - DNA, 25 bp, Homo sapien
atcaaaggcaggttaataataagac

SEQ ID NO: 5550211 - DNA, 25 bp, Homo sapien
aatcacccctaagtaaggcaggtac

SEQ ID NO: 5550212 - DNA, 25 bp, Homo sapien
ccagggggatgtaaacaacactgga

SEQ ID NO: 5550213 - DNA, 25 bp, Homo sapien
tgaggcacaccacagttagatccat

SEQ ID NO: 5550214 - DNA, 25 bp, Homo sapien
gcatgggttttacaagaggacactg

SEQ ID NO: 5550215 - DNA, 25 bp, Homo sapien
tcaaaatgggtcctagggaaatcaa

SEQ ID NO: 5550216 - DNA, 25 bp, Homo sapien
gtgtgctaggcactactcaaagtac

SEQ ID NO: 5550217 - DNA, 25 bp, Homo sapien
cactgaaagaaagacatgcaaagga

SEQ ID NO: 5550218 - DNA, 25 bp, Homo sapien
tttctcctacaaagggaagcagcct

SEQ ID NO: 5550219 - DNA, 25 bp, Homo sapien
gcgctgaccccactgagatcaacac

SEQ ID NO: 5550220 - DNA, 25 bp, Homo sapien
aggtgaatgcaggctctgctacgtc

SEQ ID NO: 5550221 - DNA, 25 bp, Homo sapien
aaagcgatctgcaatgagcgccttt

SEQ ID NO: 5550222 - DNA, 25 bp, Homo sapien
accaactggtgggctccaaaaatct

SEQ ID NO: 5550223 - DNA, 25 bp, Homo sapien
agatcaacaccttgctggaggcctc

SEQ ID NO: 5550224 - DNA, 25 bp, Homo sapien
ttcattcgaaggcgcaaaagaaaaa

SEQ ID NO: 5550225 - DNA, 25 bp, Homo sapien
ggctgctggttccagtgaatggcgc

SEQ ID NO: 5550226 - DNA, 25 bp, Homo sapien
aatcccttcaggaaaccagagcttc

SEQ ID NO: 5550227 - DNA, 25 bp, Homo sapien
ggaagaaagagtccagtacttgacc

SEQ ID NO: 5550228 - DNA, 25 bp, Homo sapien
ctgtgcccggccacgtgtacatttt

SEQ ID NO: 5550229 - DNA, 25 bp, Homo sapien
catcttggaatggttcggatataag

SEQ ID NO: 5550230 - DNA, 25 bp, Homo sapien
agagtaaagagccctgggatcaata

SEQ ID NO: 5550231 - DNA, 25 bp, Homo sapien
agagccctgggatcaataaacttac

SEQ ID NO: 5550232 - DNA, 25 bp, Homo sapien
tgatctgagagagatcagaaagtgt

SEQ ID NO: 5550233 - DNA, 25 bp, Homo sapien
gttacttcatggaggatgatgtaaa

SEQ ID NO: 5550234 - DNA, 25 bp, Homo sapien
ttaaaatgctattgatctgagagag

SEQ ID NO: 5550235 - DNA, 25 bp, Homo sapien
agtagctttggttacagccgcgcac

SEQ ID NO: 5550236 - DNA, 25 bp, Homo sapien
tctgttaagaaaggaattggagttg

SEQ ID NO: 5550237 - DNA, 25 bp, Homo sapien
tccagaaaagcttaaattgtacatt

SEQ ID NO: 5550238 - DNA, 25 bp, Homo sapien
aaaattggacgtgtaagagtaaaga

SEQ ID NO: 5550239 - DNA, 25 bp, Homo sapien
tcataaaaagccctagggagctgat

SEQ ID NO: 5550240 - DNA, 25 bp, Homo sapien
gagctgatggtctggtatgtctact

SEQ ID NO: 5550241 - DNA, 25 bp, Homo sapien
aaagaggcttattatttagagagat

SEQ ID NO: 5550242 - DNA, 25 bp, Homo sapien
gtgtttttgcaaatatatacagctt

SEQ ID NO: 5550243 - DNA, 25 bp, Homo sapien
ggtctggtatgtctactatagtgtt

SEQ ID NO: 5550244 - DNA, 25 bp, Homo sapien
ttagagagatataccaaaaggaact

SEQ ID NO: 5550245 - DNA, 25 bp, Homo sapien
actgtaaagcaaaagaggcttatta

SEQ ID NO: 5550246 - DNA, 25 bp, Homo sapien
tttcataaaaagccctagggagctg

SEQ ID NO: 5550247 - DNA, 25 bp, Homo sapien
ataaaaagccctagggagctgatgg

SEQ ID NO: 5550248 - DNA, 25 bp, Homo sapien
agagagatataccaaaaggaactgg

SEQ ID NO: 5550249 - DNA, 25 bp, Homo sapien
tatttagagagatataccaaaagga

SEQ ID NO: 5550250 - DNA, 25 bp, Homo sapien
ggagagggaagtcttagtcttacta

SEQ ID NO: 5550251 - DNA, 25 bp, Homo sapien
tgggaatggcttctcaagagcactc

SEQ ID NO: 5550252 - DNA, 25 bp, Homo sapien
tgcttcgaatgcaaatgcaggtccc

SEQ ID NO: 5550253 - DNA, 25 bp, Homo sapien
aggaagctcttctggctagcctggc

SEQ ID NO: 5550254 - DNA, 25 bp, Homo sapien
ccagagtcaagagttctcatgtgca

SEQ ID NO: 5550255 - DNA, 25 bp, Homo sapien
ctgccacctgcagtgagtcagggaa

SEQ ID NO: 5550256 - DNA, 25 bp, Homo sapien
cctacctgcctggtctgggaatggc

SEQ ID NO: 5550257 - DNA, 25 bp, Homo sapien
ccccggcccagcatgcaatttttca

SEQ ID NO: 5550258 - DNA, 25 bp, Homo sapien
ttcctccaacagaatgcggccactg

SEQ ID NO: 5550259 - DNA, 25 bp, Homo sapien
gcagaaagaagcaattcctccaaca

SEQ ID NO: 5550260 - DNA, 25 bp, Homo sapien
tccctcattcacggggaggagaggg

SEQ ID NO: 5550261 - DNA, 25 bp, Homo sapien
tcctggtaatgcatggtgtgtgaga

SEQ ID NO: 5550262 - DNA, 25 bp, Homo sapien
acgtaccacagagaatgagacctct

SEQ ID NO: 5550263 - DNA, 25 bp, Homo sapien
gtgtgtgagatgcacgtaccacaga

SEQ ID NO: 5550264 - DNA, 25 bp, Homo sapien
attctacctggctgagcttggtggc

SEQ ID NO: 5550265 - DNA, 25 bp, Homo sapien
agtgtgtgacatgtaatgcgctttt

SEQ ID NO: 5550266 - DNA, 25 bp, Homo sapien
aatcaagtatagacaagaccattgc

SEQ ID NO: 5550267 - DNA, 25 bp, Homo sapien
gggtcatgctgggttcgcttcagga

SEQ ID NO: 5550268 - DNA, 25 bp, Homo sapien
tgtgaccccctgattagtgtgtgac

SEQ ID NO: 5550269 - DNA, 25 bp, Homo sapien
agcttggtggctcagattttaggga

SEQ ID NO: 5550270 - DNA, 25 bp, Homo sapien
tctacccgaagctgacccaaaacaa

SEQ ID NO: 5550271 - DNA, 25 bp, Homo sapien
taggaaatagtgaacatgaaaccaa

SEQ ID NO: 5550272 - DNA, 25 bp, Homo sapien
gagaagtactaaggcttgcatatcc

SEQ ID NO: 5550273 - DNA, 25 bp, Homo sapien
ccttccccatttgagcagcagtgac

SEQ ID NO: 5550274 - DNA, 25 bp, Homo sapien
cctgaagtcttgagtaatgtttgat

SEQ ID NO: 5550275 - DNA, 25 bp, Homo sapien
tgtggcagttagcatcgtctcagac

SEQ ID NO: 5550276 - DNA, 25 bp, Homo sapien
tgaggtgtggtatgaaaacaaacaa

SEQ ID NO: 5550277 - DNA, 25 bp, Homo sapien
ttgcatatggctaatgagaagtact

SEQ ID NO: 5550278 - DNA, 25 bp, Homo sapien
aaatgaagataaaacccacttgaaa

SEQ ID NO: 5550279 - DNA, 25 bp, Homo sapien
cacttgaaagggttgttattaggat

SEQ ID NO: 5550280 - DNA, 25 bp, Homo sapien
tgaatacttggcagaaacagcttcc

SEQ ID NO: 5550281 - DNA, 25 bp, Homo sapien
cagtcctctagtatggtccacccct

SEQ ID NO: 5550282 - DNA, 25 bp, Homo sapien
tttgcttagcacaggttgtaaaacc

SEQ ID NO: 5550283 - DNA, 25 bp, Homo sapien
tacatcagctgctcaggataccttc

SEQ ID NO: 5550284 - DNA, 25 bp, Homo sapien
tacacagtagagaacattttagatc

SEQ ID NO: 5550285 - DNA, 25 bp, Homo sapien
ctgggccttggcccccaccgtctat

SEQ ID NO: 5550286 - DNA, 25 bp, Homo sapien
gacatagtgtgtttcggttagcttt

SEQ ID NO: 5550287 - DNA, 25 bp, Homo sapien
gaaggatttcacattaccaagcccc

SEQ ID NO: 5550288 - DNA, 25 bp, Homo sapien
aattgtagcaaaggtgctctgcagg

SEQ ID NO: 5550289 - DNA, 25 bp, Homo sapien
tggaagtaatgaattgtagtgggaa

SEQ ID NO: 5550290 - DNA, 25 bp, Homo sapien
ttttaatgctgaattgaaggatttc

SEQ ID NO: 5550291 - DNA, 25 bp, Homo sapien
gccccaaatgctgactgataggcag

SEQ ID NO: 5550292 - DNA, 25 bp, Homo sapien
ttgtcctgagtgttgcatttaagtc

SEQ ID NO: 5550293 - DNA, 25 bp, Homo sapien
aagaaaataagaattgggaaataga

SEQ ID NO: 5550294 - DNA, 25 bp, Homo sapien
ttaaataaggagctaatgaaaggtc

SEQ ID NO: 5550295 - DNA, 25 bp, Homo sapien
acactagggtaattatgggcaggtg

SEQ ID NO: 5550296 - DNA, 25 bp, Homo sapien
gctggaactcagggaagccagttaa

SEQ ID NO: 5550297 - DNA, 25 bp, Homo sapien
cagggaagccagttaataggctttg

SEQ ID NO: 5550298 - DNA, 25 bp, Homo sapien
atccaagtacagtatgctggaactc

SEQ ID NO: 5550299 - DNA, 25 bp, Homo sapien
tttacagacatgattaaataaggag

SEQ ID NO: 5550300 - DNA, 25 bp, Homo sapien
aaagacacaataaaagcctagttaa

SEQ ID NO: 5550301 - DNA, 25 bp, Homo sapien
atgaggacaaacactagggtaatta

SEQ ID NO: 5550302 - DNA, 25 bp, Homo sapien
ggacagatccaagtacagtatgctg

SEQ ID NO: 5550303 - DNA, 25 bp, Homo sapien
tgctgctgtccttagaaagtcttgc

SEQ ID NO: 5550304 - DNA, 25 bp, Homo sapien
tagttaaagataggagattagtggg

SEQ ID NO: 5550305 - DNA, 25 bp, Homo sapien
gctgggcagaaatagccacacccag

SEQ ID NO: 5550306 - DNA, 25 bp, Homo sapien
atccaccaaggatgtgggctatgtc

SEQ ID NO: 5550307 - DNA, 25 bp, Homo sapien
ggtactggcaaccattccctggctc

SEQ ID NO: 5550308 - DNA, 25 bp, Homo sapien
tgtgggctatgtcctggcctctccc

SEQ ID NO: 5550309 - DNA, 25 bp, Homo sapien
gtgtcctcaggcaactagctgtccc

SEQ ID NO: 5550310 - DNA, 25 bp, Homo sapien
gtccatgctcgatggaagagctgag

SEQ ID NO: 5550311 - DNA, 25 bp, Homo sapien
agaaaagggagacaccaacttatct

SEQ ID NO: 5550312 - DNA, 25 bp, Homo sapien
gcctccacagctagaaaagggagac

SEQ ID NO: 5550313 - DNA, 25 bp, Homo sapien
ctctgcatattctgggatggttctc

SEQ ID NO: 5550314 - DNA, 25 bp, Homo sapien
gtgctgcttgggttgtccatgctcg

SEQ ID NO: 5550315 - DNA, 25 bp, Homo sapien
agatctagccccaagttccagccgt

SEQ ID NO: 5550316 - DNA, 25 bp, Homo sapien
tatgtcgtagacacaaagaaaaaaa

SEQ ID NO: 5550317 - DNA, 25 bp, Homo sapien
gctagcagcttggaggtaagctctg

SEQ ID NO: 5550318 - DNA, 25 bp, Homo sapien
gggacaggttcgctgactctcaaga

SEQ ID NO: 5550319 - DNA, 25 bp, Homo sapien
cacacctggccactgatccctttca

SEQ ID NO: 5550320 - DNA, 25 bp, Homo sapien
caacaaggcatggattcttagcttc

SEQ ID NO: 5550321 - DNA, 25 bp, Homo sapien
cttctttgggaaaggtcaaatggga

SEQ ID NO: 5550322 - DNA, 25 bp, Homo sapien
caaaatgtcaggaaaaattacctcc

SEQ ID NO: 5550323 - DNA, 25 bp, Homo sapien
acactttcaggccatcgagtagggg

SEQ ID NO: 5550324 - DNA, 25 bp, Homo sapien
gcagggaagatgaaacactttcagg

SEQ ID NO: 5550325 - DNA, 25 bp, Homo sapien
catcaaagctggccttaagggacag

SEQ ID NO: 5550326 - DNA, 25 bp, Homo sapien
tctatgctgataacaggcagggaag

SEQ ID NO: 5550327 - DNA, 25 bp, Homo sapien
cagccacctggtagaatgatgaatt

SEQ ID NO: 5550328 - DNA, 25 bp, Homo sapien
aatgagcctctggtagcaattgtga

SEQ ID NO: 5550329 - DNA, 25 bp, Homo sapien
ctttcctagtggccctggaaaaatc

SEQ ID NO: 5550330 - DNA, 25 bp, Homo sapien
agggtatggacaagccagttaaaca

SEQ ID NO: 5550331 - DNA, 25 bp, Homo sapien
ttttgcatcagaaagaccttagttc

SEQ ID NO: 5550332 - DNA, 25 bp, Homo sapien
aattgtgagataaaattgaagggcg

SEQ ID NO: 5550333 - DNA, 25 bp, Homo sapien
agttttcagggaaactgtgagtttc

SEQ ID NO: 5550334 - DNA, 25 bp, Homo sapien
tgtaaagagtggcttataacacatc

SEQ ID NO: 5550335 - DNA, 25 bp, Homo sapien
ctaaaagggtaccagccacctggta

SEQ ID NO: 5550336 - DNA, 25 bp, Homo sapien
aatttgggattaccagcctgggctt

SEQ ID NO: 5550337 - DNA, 25 bp, Homo sapien
tagaaagagggtagattttgcatca

SEQ ID NO: 5550338 - DNA, 25 bp, Homo sapien
atggcacaactgccaggggaaaaat

SEQ ID NO: 5550339 - DNA, 25 bp, Homo sapien
aaggttatgctgacaaagatggcac

SEQ ID NO: 5550340 - DNA, 25 bp, Homo sapien
tgcactatggcagcaaaggttatgc

SEQ ID NO: 5550341 - DNA, 25 bp, Homo sapien
cagcacaaacgcagtgcactatggc

SEQ ID NO: 5550342 - DNA, 25 bp, Homo sapien
caggggaaaaatcatgacatattac

SEQ ID NO: 5550343 - DNA, 25 bp, Homo sapien
aacaaacacctgtaaaaggctgcaa

SEQ ID NO: 5550344 - DNA, 25 bp, Homo sapien
ctggcaaggaggttttaaacaaaca

SEQ ID NO: 5550345 - DNA, 25 bp, Homo sapien
ctggatacaatgcctggccccaagc

SEQ ID NO: 5550346 - DNA, 25 bp, Homo sapien
gtgatacctgcagcactggatacaa

SEQ ID NO: 5550347 - DNA, 25 bp, Homo sapien
gccccaagcaggtcactagctcatg

SEQ ID NO: 5550348 - DNA, 25 bp, Homo sapien
tcccccagccttccagcacaaacgc

SEQ ID NO: 5550349 - DNA, 25 bp, Homo sapien
gtgtcttttgccaaacatggaaaat

SEQ ID NO: 5550350 - DNA, 25 bp, Homo sapien
ttcaggtgttctttcagcgtcactc

SEQ ID NO: 5550351 - DNA, 25 bp, Homo sapien
tcttcactctactgttgagcccatc

SEQ ID NO: 5550352 - DNA, 25 bp, Homo sapien
attagccagtcttcaaaggcagttc

SEQ ID NO: 5550353 - DNA, 25 bp, Homo sapien
tctaggcctctaatgatacaaatgt

SEQ ID NO: 5550354 - DNA, 25 bp, Homo sapien
actgttccacatggacctgaggcat

SEQ ID NO: 5550355 - DNA, 25 bp, Homo sapien
aggcagttctgctagtgagaaattc

SEQ ID NO: 5550356 - DNA, 25 bp, Homo sapien
ttatttgtgctatttggggttcgct

SEQ ID NO: 5550357 - DNA, 25 bp, Homo sapien
atggacctgaggcatggttcatttt

SEQ ID NO: 5550358 - DNA, 25 bp, Homo sapien
gagtgatgctctgttgtatgtaccc

SEQ ID NO: 5550359 - DNA, 25 bp, Homo sapien
agaacttatcaagggagtgatgctc

SEQ ID NO: 5550360 - DNA, 25 bp, Homo sapien
catacacatacaaagggagaataca

SEQ ID NO: 5550361 - DNA, 25 bp, Homo sapien
atgcttgggcttcctgaaaatctcc

SEQ ID NO: 5550362 - DNA, 25 bp, Homo sapien
ttaggaagtatgtcaaactgagtcc

SEQ ID NO: 5550363 - DNA, 25 bp, Homo sapien
tctgaaagttaactgcctggagttg

SEQ ID NO: 5550364 - DNA, 25 bp, Homo sapien
cttagaattggaggaatactgtaaa

SEQ ID NO: 5550365 - DNA, 25 bp, Homo sapien
aaactgagtcctatgcttgggcttc

SEQ ID NO: 5550366 - DNA, 25 bp, Homo sapien
gcctggagttgaacattcaaagccc

SEQ ID NO: 5550367 - DNA, 25 bp, Homo sapien
ttttcctgagcctcagagtgacatc

SEQ ID NO: 5550368 - DNA, 25 bp, Homo sapien
agttcactcactgtctgggcaaaaa

SEQ ID NO: 5550369 - DNA, 25 bp, Homo sapien
gcaagtaaaacttgagagttgacat

SEQ ID NO: 5550370 - DNA, 25 bp, Homo sapien
cagggccctctatgggaggcccttt

SEQ ID NO: 5550371 - DNA, 25 bp, Homo sapien
tcaaagtacatgaaacaatatgcaa

SEQ ID NO: 5550372 - DNA, 25 bp, Homo sapien
aaaacagaacaataataccagaacc

SEQ ID NO: 5550373 - DNA, 25 bp, Homo sapien
agaaacaaacccatgcttgagactc

SEQ ID NO: 5550374 - DNA, 25 bp, Homo sapien
gtactggcaggaggaattctgctat

SEQ ID NO: 5550375 - DNA, 25 bp, Homo sapien
ttggtcctggcagtgttcacctttc

SEQ ID NO: 5550376 - DNA, 25 bp, Homo sapien
gagaatggtgtccctacagaaaatc

SEQ ID NO: 5550377 - DNA, 25 bp, Homo sapien
ataataccagaacctgaaggcagaa

SEQ ID NO: 5550378 - DNA, 25 bp, Homo sapien
ccttgctggtccagagccacagtgc

SEQ ID NO: 5550379 - DNA, 25 bp, Homo sapien
ctgcaagtgttccacagcccaggga

SEQ ID NO: 5550380 - DNA, 25 bp, Homo sapien
gacatgacacaactaaggagtaatt

SEQ ID NO: 5550381 - DNA, 25 bp, Homo sapien
aaaaaggaagacatgacacaactaa

SEQ ID NO: 5550382 - DNA, 25 bp, Homo sapien
atctgtcccctgaggtgacctgaga

SEQ ID NO: 5550383 - DNA, 25 bp, Homo sapien
ccttgggaattgaaatggtcagtgg

SEQ ID NO: 5550384 - DNA, 25 bp, Homo sapien
tgaaaaagtagttgacatctgtcct

SEQ ID NO: 5550385 - DNA, 25 bp, Homo sapien
ttcaagtgagccaggatttgatttc

SEQ ID NO: 5550386 - DNA, 25 bp, Homo sapien
cattgtcaaagagcagtctgccatc

SEQ ID NO: 5550387 - DNA, 25 bp, Homo sapien
gtgtaaatacacaggctaaaaggta

SEQ ID NO: 5550388 - DNA, 25 bp, Homo sapien
atatgttatgaagctggtttgaaaa

SEQ ID NO: 5550389 - DNA, 25 bp, Homo sapien
tttgcaccttagggaccatctgtcc

SEQ ID NO: 5550390 - DNA, 25 bp, Homo sapien
gtgacctgagaaacaaccagttgcc

SEQ ID NO: 5550391 - DNA, 25 bp, Homo sapien
gtcagtggcccgttacagaaactta

SEQ ID NO: 5550392 - DNA, 25 bp, Homo sapien
agtctgttgatagccaaagtcagtt

SEQ ID NO: 5550393 - DNA, 25 bp, Homo sapien
accagccattacaccccgttccctc

SEQ ID NO: 5550394 - DNA, 25 bp, Homo sapien
cccgtcggtaccttctggatccgcc

SEQ ID NO: 5550395 - DNA, 25 bp, Homo sapien
tgctctgcctgttcacaaatggata

SEQ ID NO: 5550396 - DNA, 25 bp, Homo sapien
acaaatggataattgtgtgtcaata

SEQ ID NO: 5550397 - DNA, 25 bp, Homo sapien
tgctgcctcctgcaaagtttcgttt

SEQ ID NO: 5550398 - DNA, 25 bp, Homo sapien
ttaaaagatccaacacctgtgcatc

SEQ ID NO: 5550399 - DNA, 25 bp, Homo sapien
ccatatccgaccctgtatctgttgc

SEQ ID NO: 5550400 - DNA, 25 bp, Homo sapien
tctgaacttcctgcgcatcgaacaa

SEQ ID NO: 5550401 - DNA, 25 bp, Homo sapien
ccagagtagctcccctaatggactg

SEQ ID NO: 5550402 - DNA, 25 bp, Homo sapien
catcgaacaatgcctgtgctgtctc

SEQ ID NO: 5550403 - DNA, 25 bp, Homo sapien
tatctgttgcggtttcatcctcatc

SEQ ID NO: 5550404 - DNA, 25 bp, Homo sapien
ctctctgtagccctgtcccagcaac

SEQ ID NO: 5550405 - DNA, 25 bp, Homo sapien
gaacactattattaaggcaggactt

SEQ ID NO: 5550406 - DNA, 25 bp, Homo sapien
ttattgtcagaaatacatgcagatt

SEQ ID NO: 5550407 - DNA, 25 bp, Homo sapien
ttttcacagagccatcatgcatgat

SEQ ID NO: 5550408 - DNA, 25 bp, Homo sapien
aatatcaggaaagctagtaattatt

SEQ ID NO: 5550409 - DNA, 25 bp, Homo sapien
catgcatgatgaagaaaatggaatg

SEQ ID NO: 5550410 - DNA, 25 bp, Homo sapien
ttaatgaatgagaacagagtcttaa

SEQ ID NO: 5550411 - DNA, 25 bp, Homo sapien
tataaacagggcaaagcttacattt

SEQ ID NO: 5550412 - DNA, 25 bp, Homo sapien
atgcagatttggacagggacaaata

SEQ ID NO: 5550413 - DNA, 25 bp, Homo sapien
gaagaaaatggaatgcatcagtatt

SEQ ID NO: 5550414 - DNA, 25 bp, Homo sapien
ggctgggtcctagcagttgcctacg

SEQ ID NO: 5550415 - DNA, 25 bp, Homo sapien
gtaagatgtgttcatcaggaggcag

SEQ ID NO: 5550416 - DNA, 25 bp, Homo sapien
tagggagtgagtagcatagctattt

SEQ ID NO: 5550417 - DNA, 25 bp, Homo sapien
agggttccctgaatatgcctggccc

SEQ ID NO: 5550418 - DNA, 25 bp, Homo sapien
gagactgtggtcctcttgcaagttc

SEQ ID NO: 5550419 - DNA, 25 bp, Homo sapien
cagaatagggaattaagtaagatgt

SEQ ID NO: 5550420 - DNA, 25 bp, Homo sapien
ccagccatcagttagggatcactct

SEQ ID NO: 5550421 - DNA, 25 bp, Homo sapien
gcagttgccggactgaactcccatt

SEQ ID NO: 5550422 - DNA, 25 bp, Homo sapien
acaaggctgaagtcaaaatgttggc

SEQ ID NO: 5550423 - DNA, 25 bp, Homo sapien
ataaccgtggaagtgatatccagtc

SEQ ID NO: 5550424 - DNA, 25 bp, Homo sapien
gttggcagaatacggttccttgcag

SEQ ID NO: 5550425 - DNA, 25 bp, Homo sapien
atgttggccagggcttcagtctgat

SEQ ID NO: 5550426 - DNA, 25 bp, Homo sapien
aaagctcgtgttggctgcattgcac

SEQ ID NO: 5550427 - DNA, 25 bp, Homo sapien
aacctaaacacagacagtgcatccc

SEQ ID NO: 5550428 - DNA, 25 bp, Homo sapien
accacagtcacagaataaggagttc

SEQ ID NO: 5550429 - DNA, 25 bp, Homo sapien
gaggaagaagaacagtcaatccttt

SEQ ID NO: 5550430 - DNA, 25 bp, Homo sapien
ggtagaccccatcataggcagttcc

SEQ ID NO: 5550431 - DNA, 25 bp, Homo sapien
tacaacccaagcagaaaatgattcc

SEQ ID NO: 5550432 - DNA, 25 bp, Homo sapien
tttcctagatgatctgggtgcgttg

SEQ ID NO: 5550433 - DNA, 25 bp, Homo sapien
ggcaagactgtggtttatggtgctc

SEQ ID NO: 5550434 - DNA, 25 bp, Homo sapien
tttgggactagtaggaccacagtca

SEQ ID NO: 5550435 - DNA, 25 bp, Homo sapien
agtgcatccctgaaaaaagctcgtg

SEQ ID NO: 5550436 - DNA, 25 bp, Homo sapien
aatgcagccacagatgtgtcaacct

SEQ ID NO: 5550437 - DNA, 25 bp, Homo sapien
gggaaaatcgcctctggatgcagat

SEQ ID NO: 5550438 - DNA, 25 bp, Homo sapien
aagaaacctgattgccaggaacccc

SEQ ID NO: 5550439 - DNA, 25 bp, Homo sapien
acgggccacctccaaccatggttca

SEQ ID NO: 5550440 - DNA, 25 bp, Homo sapien
agcaccaagtgccatcgcccatgca

SEQ ID NO: 5550441 - DNA, 25 bp, Homo sapien
ctgggcgtatatagtttggctgtcc

SEQ ID NO: 5550442 - DNA, 25 bp, Homo sapien
ggatgcagatctggggcttctattc

SEQ ID NO: 5550443 - DNA, 25 bp, Homo sapien
aggaacccctgaccctcatggcagc

SEQ ID NO: 5550444 - DNA, 25 bp, Homo sapien
cctgcagcctcacaactcagtgccc

SEQ ID NO: 5550445 - DNA, 25 bp, Homo sapien
ccagccatgcgctgagagcttctct

SEQ ID NO: 5550446 - DNA, 25 bp, Homo sapien
gggccaccctgcatccaagaaacct

SEQ ID NO: 5550447 - DNA, 25 bp, Homo sapien
gagaagccaatcgcaaagctcactt

SEQ ID NO: 5550448 - DNA, 25 bp, Homo sapien
tttcagaccagagacccaggattta

SEQ ID NO: 5550449 - DNA, 25 bp, Homo sapien
aactggaccttgaagtacggctaat

SEQ ID NO: 5550450 - DNA, 25 bp, Homo sapien
atataggcaggtgagacttaatgaa

SEQ ID NO: 5550451 - DNA, 25 bp, Homo sapien
acccaggatttaaggcacagaggtg

SEQ ID NO: 5550452 - DNA, 25 bp, Homo sapien
gagtcaaggctgattttggagtgtc

SEQ ID NO: 5550453 - DNA, 25 bp, Homo sapien
agacagcagtgtaaccatgtgtgtt

SEQ ID NO: 5550454 - DNA, 25 bp, Homo sapien
ttggctaagtatagggaaactggaa

SEQ ID NO: 5550455 - DNA, 25 bp, Homo sapien
tgatgtagataaagactgagagtca

SEQ ID NO: 5550456 - DNA, 25 bp, Homo sapien
agtatgtgggttatcaactggacct

SEQ ID NO: 5550457 - DNA, 25 bp, Homo sapien
tgaccttaggaaaccagtggtgcat

SEQ ID NO: 5550458 - DNA, 25 bp, Homo sapien
ccattaacagtgacagacagcagtg

SEQ ID NO: 5550459 - DNA, 25 bp, Homo sapien
ttgtgtgtgcaataataagcttcct

SEQ ID NO: 5550460 - DNA, 25 bp, Homo sapien
tacagtgtaatcagtgaggtagagg

SEQ ID NO: 5550461 - DNA, 25 bp, Homo sapien
ggtgaccagatagttagtggcagat

SEQ ID NO: 5550462 - DNA, 25 bp, Homo sapien
tcctcatggaatagagccttactct

SEQ ID NO: 5550463 - DNA, 25 bp, Homo sapien
atagggctacacaggaacttcaaca

SEQ ID NO: 5550464 - DNA, 25 bp, Homo sapien
gaggtagaggtagaattatactttc

SEQ ID NO: 5550465 - DNA, 25 bp, Homo sapien
ctacagacatattaaacaaaggccc

SEQ ID NO: 5550466 - DNA, 25 bp, Homo sapien
aagatgactttgaggatatcagtaa

SEQ ID NO: 5550467 - DNA, 25 bp, Homo sapien
aataatcagatggtcaagatgactt

SEQ ID NO: 5550468 - DNA, 25 bp, Homo sapien
cctaagatacaacatctgagggtga

SEQ ID NO: 5550469 - DNA, 25 bp, Homo sapien
tccttattactgccaggagccgaac

SEQ ID NO: 5550470 - DNA, 25 bp, Homo sapien
ttgacgccagcacatttgaggatac

SEQ ID NO: 5550471 - DNA, 25 bp, Homo sapien
tctggtgaaaacttctagtgggtac

SEQ ID NO: 5550472 - DNA, 25 bp, Homo sapien
ctaggtcttcaatgcttctcggttc

SEQ ID NO: 5550473 - DNA, 25 bp, Homo sapien
atgagctctgaaactaaaacactgc

SEQ ID NO: 5550474 - DNA, 25 bp, Homo sapien
tggtggggttgaccttcacttctta

SEQ ID NO: 5550475 - DNA, 25 bp, Homo sapien
tgcaggtattctttggtggggttga

SEQ ID NO: 5550476 - DNA, 25 bp, Homo sapien
agaagtaaactgttgccgtgttgtt

SEQ ID NO: 5550477 - DNA, 25 bp, Homo sapien
tcattgctggagttttcttggttac

SEQ ID NO: 5550478 - DNA, 25 bp, Homo sapien
tggggaggacttataatgagctctg

SEQ ID NO: 5550479 - DNA, 25 bp, Homo sapien
tggggaagacttacaacaaatgcaa

SEQ ID NO: 5550480 - DNA, 25 bp, Homo sapien
agtattggtacttaaacacaggtct

SEQ ID NO: 5550481 - DNA, 25 bp, Homo sapien
tacgtcacagttgtaaaaggattta

SEQ ID NO: 5550482 - DNA, 25 bp, Homo sapien
tctaaggcacaattactcaggattt

SEQ ID NO: 5550483 - DNA, 25 bp, Homo sapien
accagaaccatagtatatagtgcta

SEQ ID NO: 5550484 - DNA, 25 bp, Homo sapien
aaaagtaaagacagcttatttcact

SEQ ID NO: 5550485 - DNA, 25 bp, Homo sapien
ttgctacagcatctggttgaaaatc

SEQ ID NO: 5550486 - DNA, 25 bp, Homo sapien
tcttagcaaaggatgttttgattac

SEQ ID NO: 5550487 - DNA, 25 bp, Homo sapien
taaatgagttacttacgtcacagtt

SEQ ID NO: 5550488 - DNA, 25 bp, Homo sapien
tcaggatttagacgccagaagagaa

SEQ ID NO: 5550489 - DNA, 25 bp, Homo sapien
cagaactaactgtgctgaggaagtc

SEQ ID NO: 5550490 - DNA, 25 bp, Homo sapien
cagaagagaaagttaatggtatttc

SEQ ID NO: 5550491 - DNA, 25 bp, Homo sapien
actgtgctgaggaagtctctaatcc

SEQ ID NO: 5550492 - DNA, 25 bp, Homo sapien
gaatggctccagacaaagaccactg

SEQ ID NO: 5550493 - DNA, 25 bp, Homo sapien
cagggcctccagagctaaaactgtt

SEQ ID NO: 5550494 - DNA, 25 bp, Homo sapien
gggactgtggagagtcatccaattc

SEQ ID NO: 5550495 - DNA, 25 bp, Homo sapien
aattcagccttgctccaggcgggct

SEQ ID NO: 5550496 - DNA, 25 bp, Homo sapien
taatgaagctggattctgtaccgcc

SEQ ID NO: 5550497 - DNA, 25 bp, Homo sapien
cactggctgcctacagacaggccaa

SEQ ID NO: 5550498 - DNA, 25 bp, Homo sapien
gaaacaggaagagacttgttaattc

SEQ ID NO: 5550499 - DNA, 25 bp, Homo sapien
ttctgtgctgtccataccaggcccc

SEQ ID NO: 5550500 - DNA, 25 bp, Homo sapien
ggccctcgccaccaagatcacacag

SEQ ID NO: 5550501 - DNA, 25 bp, Homo sapien
ctaaaactgtttgagagaaggcttc

SEQ ID NO: 5550502 - DNA, 25 bp, Homo sapien
gctgctactccaacggaatggctcc

SEQ ID NO: 5550503 - DNA, 25 bp, Homo sapien
ggtgcgactgattacaggtcactgc

SEQ ID NO: 5550504 - DNA, 25 bp, Homo sapien
aaccctggggtcttgagacatacat

SEQ ID NO: 5550505 - DNA, 25 bp, Homo sapien
gatttacaggaacaagagaaccttc

SEQ ID NO: 5550506 - DNA, 25 bp, Homo sapien
tatggaacaaactctgtctggattt

SEQ ID NO: 5550507 - DNA, 25 bp, Homo sapien
ctggatttgcaggtttagtggttat

SEQ ID NO: 5550508 - DNA, 25 bp, Homo sapien
ttaagtaagcatgtcaaggcacagg

SEQ ID NO: 5550509 - DNA, 25 bp, Homo sapien
gtgaacagtggtgcgactgattaca

SEQ ID NO: 5550510 - DNA, 25 bp, Homo sapien
tccctaaaagaagtggacaatggac

SEQ ID NO: 5550511 - DNA, 25 bp, Homo sapien
caatggactttccaaggacaaagac

SEQ ID NO: 5550512 - DNA, 25 bp, Homo sapien
cacgcccagcgtaatacccttatat

SEQ ID NO: 5550513 - DNA, 25 bp, Homo sapien
tgtcaaggcacaggatttacaggaa

SEQ ID NO: 5550514 - DNA, 25 bp, Homo sapien
cctcaaggagtttctgtgacctgct

SEQ ID NO: 5550515 - DNA, 25 bp, Homo sapien
agctagcagctttggaatgcagaaa

SEQ ID NO: 5550516 - DNA, 25 bp, Homo sapien
aatgcagaaagtattcagatgtcca

SEQ ID NO: 5550517 - DNA, 25 bp, Homo sapien
ttcagatgtccaagccaggagtgaa

SEQ ID NO: 5550518 - DNA, 25 bp, Homo sapien
gctgcacagggctcctataagaatc

SEQ ID NO: 5550519 - DNA, 25 bp, Homo sapien
acctcctcatcaagcctccacctcc

SEQ ID NO: 5550520 - DNA, 25 bp, Homo sapien
ccgcggcctctcttgtggtccatct

SEQ ID NO: 5550521 - DNA, 25 bp, Homo sapien
cattattaacacccaggaggagagg

SEQ ID NO: 5550522 - DNA, 25 bp, Homo sapien
cgagttactgtaggtgattgtgctt

SEQ ID NO: 5550523 - DNA, 25 bp, Homo sapien
ggaccccacactgagtgaatcggcc

SEQ ID NO: 5550524 - DNA, 25 bp, Homo sapien
ttgtaaactgtaaagcactgtcatt

SEQ ID NO: 5550525 - DNA, 25 bp, Homo sapien
tgagttccatgttttgtagcagttt

SEQ ID NO: 5550526 - DNA, 25 bp, Homo sapien
tgtgaaattctgagggtaggactaa

SEQ ID NO: 5550527 - DNA, 25 bp, Homo sapien
atttgggaactgattgatacttact

SEQ ID NO: 5550528 - DNA, 25 bp, Homo sapien
tctgagggtaggactaaacctctca

SEQ ID NO: 5550529 - DNA, 25 bp, Homo sapien
agtgtgatttcagagaacatttctt

SEQ ID NO: 5550530 - DNA, 25 bp, Homo sapien
gattgatacttacttggccattccc

SEQ ID NO: 5550531 - DNA, 25 bp, Homo sapien
tacagcacaaagaaactaccagttt

SEQ ID NO: 5550532 - DNA, 25 bp, Homo sapien
ttgattccaaaacctgagttccatg

SEQ ID NO: 5550533 - DNA, 25 bp, Homo sapien
tacatggattgcacaaaggaattat

SEQ ID NO: 5550534 - DNA, 25 bp, Homo sapien
tgtagcagtttgggaattattttac

SEQ ID NO: 5550535 - DNA, 25 bp, Homo sapien
cttaggtacctattaggatacagtt

SEQ ID NO: 5550536 - DNA, 25 bp, Homo sapien
ccagaatgtctgttgaaaccatgag

SEQ ID NO: 5550537 - DNA, 25 bp, Homo sapien
catcactggagccacagcattttta

SEQ ID NO: 5550538 - DNA, 25 bp, Homo sapien
gaaaccatgagactcagggaaacac

SEQ ID NO: 5550539 - DNA, 25 bp, Homo sapien
ttagcatgacagtcacgaccatcat

SEQ ID NO: 5550540 - DNA, 25 bp, Homo sapien
tgtggctcacacaggtgtctctagc

SEQ ID NO: 5550541 - DNA, 25 bp, Homo sapien
agtttgtaatcgacagtggtgatac

SEQ ID NO: 5550542 - DNA, 25 bp, Homo sapien
gttgcagcagttgcctcctgcccat

SEQ ID NO: 5550543 - DNA, 25 bp, Homo sapien
ttgatattctcatctgggacccatc

SEQ ID NO: 5550544 - DNA, 25 bp, Homo sapien
atcgacagtggtgatacccctcatc

SEQ ID NO: 5550545 - DNA, 25 bp, Homo sapien
cagatatcttacagtggccccagta

SEQ ID NO: 5550546 - DNA, 25 bp, Homo sapien
aactcaccggaactgttgcagcagt

SEQ ID NO: 5550547 - DNA, 25 bp, Homo sapien
gcacacatgcctccttactattccc

SEQ ID NO: 5550548 - DNA, 25 bp, Homo sapien
ctacttccactcttgctcagccccc

SEQ ID NO: 5550549 - DNA, 25 bp, Homo sapien
aattggtcctcttggctctactttc

SEQ ID NO: 5550550 - DNA, 25 bp, Homo sapien
tgctctgatcaggtcactcgggatt

SEQ ID NO: 5550551 - DNA, 25 bp, Homo sapien
tttaagtgcacaagccaaaaatact

SEQ ID NO: 5550552 - DNA, 25 bp, Homo sapien
ttcgtccaaggaaccatgcttctca

SEQ ID NO: 5550553 - DNA, 25 bp, Homo sapien
ttaaaaggatcactttgtctgctct

SEQ ID NO: 5550554 - DNA, 25 bp, Homo sapien
ggtcactcgggatttcttaactgtc

SEQ ID NO: 5550555 - DNA, 25 bp, Homo sapien
ttaatcattctgctcaggcacacat

SEQ ID NO: 5550556 - DNA, 25 bp, Homo sapien
tctctctcgctctcaccccatatct

SEQ ID NO: 5550557 - DNA, 25 bp, Homo sapien
tgtcctacaaggctatatatgatct

SEQ ID NO: 5550558 - DNA, 25 bp, Homo sapien
agctgggcagtttcttaccacttaa

SEQ ID NO: 5550559 - DNA, 25 bp, Homo sapien
tcagccattccacagatagttaatt

SEQ ID NO: 5550560 - DNA, 25 bp, Homo sapien
aataaaagcataaagactagtacac

SEQ ID NO: 5550561 - DNA, 25 bp, Homo sapien
aaagactagtacacaaatgtccata

SEQ ID NO: 5550562 - DNA, 25 bp, Homo sapien
tgtaacaacgtgaatgaacctcaaa

SEQ ID NO: 5550563 - DNA, 25 bp, Homo sapien
taattatcaaagagaataaaagcat

SEQ ID NO: 5550564 - DNA, 25 bp, Homo sapien
gaacctcaaaacagtaagctaagta

SEQ ID NO: 5550565 - DNA, 25 bp, Homo sapien
ggaaataatccagatgcccatcaac

SEQ ID NO: 5550566 - DNA, 25 bp, Homo sapien
actaagccatgtaacaacgtgaatg

SEQ ID NO: 5550567 - DNA, 25 bp, Homo sapien
aatgacctcgaactggaaataatcc

SEQ ID NO: 5550568 - DNA, 25 bp, Homo sapien
agacggagtccccatttgtcaccca

SEQ ID NO: 5550569 - DNA, 25 bp, Homo sapien
ccataaccaggaatttagaccaact

SEQ ID NO: 5550570 - DNA, 25 bp, Homo sapien
aaggcaagactggttcatggccatt

SEQ ID NO: 5550571 - DNA, 25 bp, Homo sapien
accatggtccaaaactgtcctattc

SEQ ID NO: 5550572 - DNA, 25 bp, Homo sapien
aatgtgacactaataggattaagcc

SEQ ID NO: 5550573 - DNA, 25 bp, Homo sapien
ttgaggcctgtaatagccattgctc

SEQ ID NO: 5550574 - DNA, 25 bp, Homo sapien
atagatcatctgaaaaggcaagact

SEQ ID NO: 5550575 - DNA, 25 bp, Homo sapien
atttccaagttccctaccatggtcc

SEQ ID NO: 5550576 - DNA, 25 bp, Homo sapien
catggccattgcaaaggattcggac

SEQ ID NO: 5550577 - DNA, 25 bp, Homo sapien
aaggattcggactctttgaggcctg

SEQ ID NO: 5550578 - DNA, 25 bp, Homo sapien
actaataggattaagccaaaacaaa

SEQ ID NO: 5550579 - DNA, 25 bp, Homo sapien
tctaaaagtaaaatgtgacactaat

SEQ ID NO: 5550580 - DNA, 25 bp, Homo sapien
tcgccgccccttccctcgggcggag

SEQ ID NO: 5550581 - DNA, 25 bp, Homo sapien
ctccgcccgagggaaggggcggcga

SEQ ID NO: 5550582 - DNA, 25 bp, Homo sapien
cacatcgcccaccaaggcctgggtg

SEQ ID NO: 5550583 - DNA, 25 bp, Homo sapien
tccacagcctgcaacctgaggatgg

SEQ ID NO: 5550584 - DNA, 25 bp, Homo sapien
ctgccctgactctctgaagtggctt

SEQ ID NO: 5550585 - DNA, 25 bp, Homo sapien
ggagaccctgagtaacagagactca

SEQ ID NO: 5550586 - DNA, 25 bp, Homo sapien
ccctggatgtggactcctgagtcag

SEQ ID NO: 5550587 - DNA, 25 bp, Homo sapien
gacaccctcactccacagcctgcaa

SEQ ID NO: 5550588 - DNA, 25 bp, Homo sapien
catcttgagcatcacacagaccggc

SEQ ID NO: 5550589 - DNA, 25 bp, Homo sapien
cagagactcacagcccatccaggtc

SEQ ID NO: 5550590 - DNA, 25 bp, Homo sapien
ccctggcggacacaatcccttttcc

SEQ ID NO: 5550591 - DNA, 25 bp, Homo sapien
gtgagtgaccctcactggacaccct

SEQ ID NO: 5550592 - DNA, 25 bp, Homo sapien
ggctgcctgggttgacctcattggg

SEQ ID NO: 5550593 - DNA, 25 bp, Homo sapien
caatctaagtggctcaatgtaaacc

SEQ ID NO: 5550594 - DNA, 25 bp, Homo sapien
aaccatgcttagaaaacgctgtgtt

SEQ ID NO: 5550595 - DNA, 25 bp, Homo sapien
tatccaaaagaaacacagcacagag

SEQ ID NO: 5550596 - DNA, 25 bp, Homo sapien
gtggctggcattgcctcgtgcacac

SEQ ID NO: 5550597 - DNA, 25 bp, Homo sapien
cacaggtaatttggatgtggctggc

SEQ ID NO: 5550598 - DNA, 25 bp, Homo sapien
caggccctatgaaggacacattgaa

SEQ ID NO: 5550599 - DNA, 25 bp, Homo sapien
aacacgaactagaaaaactaggcac

SEQ ID NO: 5550600 - DNA, 25 bp, Homo sapien
ggcacaaatagaaactgtatagacc

SEQ ID NO: 5550601 - DNA, 25 bp, Homo sapien
ctcgtgcacacctaaagtaaccatg

SEQ ID NO: 5550602 - DNA, 25 bp, Homo sapien
caggtcttaagcaagattgatgccc

SEQ ID NO: 5550603 - DNA, 25 bp, Homo sapien
agcacagagaattctatgaacaaac

SEQ ID NO: 5550604 - DNA, 25 bp, Homo sapien
cggtcaagggtgtcctggcgtccca

SEQ ID NO: 5550605 - DNA, 25 bp, Homo sapien
tgggacgccaggacacccttgaccg

SEQ ID NO: 5550606 - DNA, 25 bp, Homo sapien
ggctgaggcagagcccctttcttcc

SEQ ID NO: 5550607 - DNA, 25 bp, Homo sapien
gggagcaaattagggcccatctcgc

SEQ ID NO: 5550608 - DNA, 25 bp, Homo sapien
gctagctccaggtcacgtggctaac

SEQ ID NO: 5550609 - DNA, 25 bp, Homo sapien
gtggagtctggcttgtgtgcactca

SEQ ID NO: 5550610 - DNA, 25 bp, Homo sapien
gataccaacagctgccttgtgggct

SEQ ID NO: 5550611 - DNA, 25 bp, Homo sapien
ggatccacagtccgaaaatgggagg

SEQ ID NO: 5550612 - DNA, 25 bp, Homo sapien
gacttgctgcgctctggagtaagac

SEQ ID NO: 5550613 - DNA, 25 bp, Homo sapien
ctcttgtagcctgcagtctggggca

SEQ ID NO: 5550614 - DNA, 25 bp, Homo sapien
acccccaagccctagggacttgctg

SEQ ID NO: 5550615 - DNA, 25 bp, Homo sapien
ggagacaatgtcctagatgggcgtt

SEQ ID NO: 5550616 - DNA, 25 bp, Homo sapien
agtgcagcctggggtcttttgaaat

SEQ ID NO: 5550617 - DNA, 25 bp, Homo sapien
atagactgtgcttggtgcctctgac

SEQ ID NO: 5550618 - DNA, 25 bp, Homo sapien
tcccaataacgtggacactgagtgg

SEQ ID NO: 5550619 - DNA, 25 bp, Homo sapien
gcccactagccagggatagactgtg

SEQ ID NO: 5550620 - DNA, 25 bp, Homo sapien
caaagcgcactcactggtgtagctc

SEQ ID NO: 5550621 - DNA, 25 bp, Homo sapien
aaagaaatgggagtcacactctatc

SEQ ID NO: 5550622 - DNA, 25 bp, Homo sapien
tggcacaaaggttttgacagggatg

SEQ ID NO: 5550623 - DNA, 25 bp, Homo sapien
tcagtggaacctactccagggcaca

SEQ ID NO: 5550624 - DNA, 25 bp, Homo sapien
ggaatgtgaacatagtcctgggcct

SEQ ID NO: 5550625 - DNA, 25 bp, Homo sapien
agcgtccgtaggatagcctagacat

SEQ ID NO: 5550626 - DNA, 25 bp, Homo sapien
gaccttcacagccctcagacaggcc

SEQ ID NO: 5550627 - DNA, 25 bp, Homo sapien
atcaggaacctcagaagcgtccgta

SEQ ID NO: 5550628 - DNA, 25 bp, Homo sapien
tgtgtgtagagaccatgggtattac

SEQ ID NO: 5550629 - DNA, 25 bp, Homo sapien
gcttcaggtttagagacttgagggg

SEQ ID NO: 5550630 - DNA, 25 bp, Homo sapien
aggaccaggactctaaggttgcctg

SEQ ID NO: 5550631 - DNA, 25 bp, Homo sapien
tggtcccaacacacctctcggctgc

SEQ ID NO: 5550632 - DNA, 25 bp, Homo sapien
tttgtgtgtggtcagccttaggtca

SEQ ID NO: 5550633 - DNA, 25 bp, Homo sapien
tctcggctgcactgtggcctatgac

SEQ ID NO: 5550634 - DNA, 25 bp, Homo sapien
cagggctccctgctagttggcacta

SEQ ID NO: 5550635 - DNA, 25 bp, Homo sapien
gcaagagaagtcacctcctggtccc

SEQ ID NO: 5550636 - DNA, 25 bp, Homo sapien
atgacagtgataagccacatagtgc

SEQ ID NO: 5550637 - DNA, 25 bp, Homo sapien
gtacgatgacagtttccccagagct

SEQ ID NO: 5550638 - DNA, 25 bp, Homo sapien
ggagcagtgagcaatgcactcaact

SEQ ID NO: 5550639 - DNA, 25 bp, Homo sapien
gttggggattgctggcatacaaaat

SEQ ID NO: 5550640 - DNA, 25 bp, Homo sapien
ggacgccacacacggaccttatgat

SEQ ID NO: 5550641 - DNA, 25 bp, Homo sapien
atacatacagcatacagcaggggtc

SEQ ID NO: 5550642 - DNA, 25 bp, Homo sapien
ctacagaccactaccagcccatagc

SEQ ID NO: 5550643 - DNA, 25 bp, Homo sapien
catgttagtcaggatggtctcaatc

SEQ ID NO: 5550644 - DNA, 25 bp, Homo sapien
aaccatcctcccaccgacctctgtc

SEQ ID NO: 5550645 - DNA, 25 bp, Homo sapien
ccatgaaactggtccctggtgacaa

SEQ ID NO: 5550646 - DNA, 25 bp, Homo sapien
cgcctcggccccctaaagtgctggg

SEQ ID NO: 5550647 - DNA, 25 bp, Homo sapien
ttatgttaccagtaaggcatccggt

SEQ ID NO: 5550648 - DNA, 25 bp, Homo sapien
ctaccagcccatagcctgttagaac

SEQ ID NO: 5550649 - DNA, 25 bp, Homo sapien
gggtctgcaacccccaggctacaga

SEQ ID NO: 5550650 - DNA, 25 bp, Homo sapien
aataatgggctagcctgttagaacc

SEQ ID NO: 5550651 - DNA, 25 bp, Homo sapien
acagcaattgaagaccaaatgtgaa

SEQ ID NO: 5550652 - DNA, 25 bp, Homo sapien
agagagtgaaacaatgctatacagc

SEQ ID NO: 5550653 - DNA, 25 bp, Homo sapien
atgcccccttaacgacagctgcagc

SEQ ID NO: 5550654 - DNA, 25 bp, Homo sapien
aagaggatacaaacagtgcttattc

SEQ ID NO: 5550655 - DNA, 25 bp, Homo sapien
caaatgtgaaggcaaaaactgatta

SEQ ID NO: 5550656 - DNA, 25 bp, Homo sapien
tcaggacaaaaacatgcacaacaaa

SEQ ID NO: 5550657 - DNA, 25 bp, Homo sapien
gaatagaaagcattgtgataaaaac

SEQ ID NO: 5550658 - DNA, 25 bp, Homo sapien
cagctgcagcaattcatggacctct

SEQ ID NO: 5550659 - DNA, 25 bp, Homo sapien
gaagaagtagaagttctatggtgaa

SEQ ID NO: 5550660 - DNA, 25 bp, Homo sapien
tatggaccatagaaaaatgccccct

SEQ ID NO: 5550661 - DNA, 25 bp, Homo sapien
aaactccctgagaatgggcctagaa

SEQ ID NO: 5550662 - DNA, 25 bp, Homo sapien
tgtagcaatccttggagacatattt

SEQ ID NO: 5550663 - DNA, 25 bp, Homo sapien
acccaaggctaagacaggcaaattt

SEQ ID NO: 5550664 - DNA, 25 bp, Homo sapien
gctggagcatggtgacacaatcata

SEQ ID NO: 5550665 - DNA, 25 bp, Homo sapien
ataggtatgattctggcccccaaac

SEQ ID NO: 5550666 - DNA, 25 bp, Homo sapien
ctgggggatcctgtctttacgcttt

SEQ ID NO: 5550667 - DNA, 25 bp, Homo sapien
ttgatgttgtggtaagttcgtgttc

SEQ ID NO: 5550668 - DNA, 25 bp, Homo sapien
ccaggctacaagatggttggctttc

SEQ ID NO: 5550669 - DNA, 25 bp, Homo sapien
gagaatgggcctagaattaagaatt

SEQ ID NO: 5550670 - DNA, 25 bp, Homo sapien
cttctggggctgaattcattgttac

SEQ ID NO: 5550671 - DNA, 25 bp, Homo sapien
ttcagaccaacaagataggtatgat

SEQ ID NO: 5550672 - DNA, 25 bp, Homo sapien
tcaacagcccatgagtaggggattt

SEQ ID NO: 5550673 - DNA, 25 bp, Homo sapien
attgagatatgagaaatatgtgtgc

SEQ ID NO: 5550674 - DNA, 25 bp, Homo sapien
ttctaatagaaatgaggtcttccta

SEQ ID NO: 5550675 - DNA, 25 bp, Homo sapien
ctaagagtataaagtgcattgagat

SEQ ID NO: 5550676 - DNA, 25 bp, Homo sapien
aagcatgaatcatcacccccagccc

SEQ ID NO: 5550677 - DNA, 25 bp, Homo sapien
atgaaaataaaactacttgcacgaa

SEQ ID NO: 5550678 - DNA, 25 bp, Homo sapien
tatctccctgatggctttggctttt

SEQ ID NO: 5550679 - DNA, 25 bp, Homo sapien
tatgtgtgcagtattatggataata

SEQ ID NO: 5550680 - DNA, 25 bp, Homo sapien
attaagcaaatggtaagtggttatt

SEQ ID NO: 5550681 - DNA, 25 bp, Homo sapien
aatgattaaggttcttcaacagccc

SEQ ID NO: 5550682 - DNA, 25 bp, Homo sapien
tgggccaacctacagatacacacat

SEQ ID NO: 5550683 - DNA, 25 bp, Homo sapien
gctggcacagctgaagccctctgat

SEQ ID NO: 5550684 - DNA, 25 bp, Homo sapien
cctgcaggaacaatttaaagaaagt

SEQ ID NO: 5550685 - DNA, 25 bp, Homo sapien
attgctctcagaagcagaagccctt

SEQ ID NO: 5550686 - DNA, 25 bp, Homo sapien
taaagaaagtgcattaagtcctcct

SEQ ID NO: 5550687 - DNA, 25 bp, Homo sapien
gtgcaagcaccaacagtaccactga

SEQ ID NO: 5550688 - DNA, 25 bp, Homo sapien
actgacaggtctcatgtgcaagcac

SEQ ID NO: 5550689 - DNA, 25 bp, Homo sapien
atggctctcattaatcaagggaagt

SEQ ID NO: 5550690 - DNA, 25 bp, Homo sapien
tttgagtgttgagttccagaaattc

SEQ ID NO: 5550691 - DNA, 25 bp, Homo sapien
tagttagaaattagcagtagatacc

SEQ ID NO: 5550692 - DNA, 25 bp, Homo sapien
tgtcgacacacttccagcactgttc

SEQ ID NO: 5550693 - DNA, 25 bp, Homo sapien
tcaagggaagttgcatagactagaa

SEQ ID NO: 5550694 - DNA, 25 bp, Homo sapien
attccctgttaggtgaggtcactga

SEQ ID NO: 5550695 - DNA, 25 bp, Homo sapien
ctttaagagacagctggtgtacctc

SEQ ID NO: 5550696 - DNA, 25 bp, Homo sapien
tggaacagagttgccgtattagcct

SEQ ID NO: 5550697 - DNA, 25 bp, Homo sapien
ggtagagattgttggttgactgcca

SEQ ID NO: 5550698 - DNA, 25 bp, Homo sapien
tcactgacatcagaaatggcctccc

SEQ ID NO: 5550699 - DNA, 25 bp, Homo sapien
gtgataggattatgtggaacagagt

SEQ ID NO: 5550700 - DNA, 25 bp, Homo sapien
tgtgtagattgcaggagccttcttt

SEQ ID NO: 5550701 - DNA, 25 bp, Homo sapien
tacttgcctggatagtagggtgata

SEQ ID NO: 5550702 - DNA, 25 bp, Homo sapien
cctggaacatggatgcttgcatttt

SEQ ID NO: 5550703 - DNA, 25 bp, Homo sapien
atctgggcacacacctgcatggaat

SEQ ID NO: 5550704 - DNA, 25 bp, Homo sapien
cctgaggacaaggactacttgcctg

SEQ ID NO: 5550705 - DNA, 25 bp, Homo sapien
ggggaatgcaaatataggacagatt

SEQ ID NO: 5550706 - DNA, 25 bp, Homo sapien
tcataccccctgaggaatggacctg

SEQ ID NO: 5550707 - DNA, 25 bp, Homo sapien
taccctatggagctaaagatctatt

SEQ ID NO: 5550708 - DNA, 25 bp, Homo sapien
aaagcagaggaccagatcctgtctt

SEQ ID NO: 5550709 - DNA, 25 bp, Homo sapien
ccagatgtggatgccgggcatcctc

SEQ ID NO: 5550710 - DNA, 25 bp, Homo sapien
gactagaggctggatttcacttggg

SEQ ID NO: 5550711 - DNA, 25 bp, Homo sapien
ttaacccatccctaggagaggtata

SEQ ID NO: 5550712 - DNA, 25 bp, Homo sapien
gaggtataaatagtgggtcagctta

SEQ ID NO: 5550713 - DNA, 25 bp, Homo sapien
atactagatcttagggggaatgcaa

SEQ ID NO: 5550714 - DNA, 25 bp, Homo sapien
tactgtacttcataggagaggagag

SEQ ID NO: 5550715 - DNA, 25 bp, Homo sapien
ttaatctagactgaaggggaaagaa

SEQ ID NO: 5550716 - DNA, 25 bp, Homo sapien
gagaaagattatgtaggaaatctca

SEQ ID NO: 5550717 - DNA, 25 bp, Homo sapien
ctgaagatgaaaagtagttagattt

SEQ ID NO: 5550718 - DNA, 25 bp, Homo sapien
tctacttctgagggagacccagaga

SEQ ID NO: 5550719 - DNA, 25 bp, Homo sapien
aaagggttggagaatttgcccagaa

SEQ ID NO: 5550720 - DNA, 25 bp, Homo sapien
catagcgctctggttagattacata

SEQ ID NO: 5550721 - DNA, 25 bp, Homo sapien
aacatttctccccaccatagcgctc

SEQ ID NO: 5550722 - DNA, 25 bp, Homo sapien
attcaagcctagacagtttcatatc

SEQ ID NO: 5550723 - DNA, 25 bp, Homo sapien
ggtgttggtagccgttctccgtcaa

SEQ ID NO: 5550724 - DNA, 25 bp, Homo sapien
tatagctatataacagtaaactgat

SEQ ID NO: 5550725 - DNA, 25 bp, Homo sapien
tctccgtcaacatccagaatattgt

SEQ ID NO: 5550726 - DNA, 25 bp, Homo sapien
ttcctcgtagtaacatgatcattcc

SEQ ID NO: 5550727 - DNA, 25 bp, Homo sapien
ggtcatggaggtaatagcctgtctg

SEQ ID NO: 5550728 - DNA, 25 bp, Homo sapien
gggatactacagaaagtgagctgga

SEQ ID NO: 5550729 - DNA, 25 bp, Homo sapien
gtgtggctgctaagtcaggtacacc

SEQ ID NO: 5550730 - DNA, 25 bp, Homo sapien
agggggttcgattactggaaatgaa

SEQ ID NO: 5550731 - DNA, 25 bp, Homo sapien
ggtcagaaagaatgccagaagaata

SEQ ID NO: 5550732 - DNA, 25 bp, Homo sapien
gcagaggacaagattcctgaagaca

SEQ ID NO: 5550733 - DNA, 25 bp, Homo sapien
aggattactggatctgggatactac

SEQ ID NO: 5550734 - DNA, 25 bp, Homo sapien
gtggcttgaaggtcctagtaggatc

SEQ ID NO: 5550735 - DNA, 25 bp, Homo sapien
catggcatactttggtggggtcatg

SEQ ID NO: 5550736 - DNA, 25 bp, Homo sapien
aggtgacctgctaatctcagtgggt

SEQ ID NO: 5550737 - DNA, 25 bp, Homo sapien
taccagaaatccaagtggagctgtc

SEQ ID NO: 5550738 - DNA, 25 bp, Homo sapien
ttgccaaggaattccctagcagcat

SEQ ID NO: 5550739 - DNA, 25 bp, Homo sapien
actagagcttggaaaaacaaccctg

SEQ ID NO: 5550740 - DNA, 25 bp, Homo sapien
aaacaaccctgagctatctaacact

SEQ ID NO: 5550741 - DNA, 25 bp, Homo sapien
gttagctaaaatgtggtagactgaa

SEQ ID NO: 5550742 - DNA, 25 bp, Homo sapien
ttcgagtagaaaacagcaaaagata

SEQ ID NO: 5550743 - DNA, 25 bp, Homo sapien
agtagtactgcatctgacctcaacc

SEQ ID NO: 5550744 - DNA, 25 bp, Homo sapien
taaggccaagtgatagaaatcaaat

SEQ ID NO: 5550745 - DNA, 25 bp, Homo sapien
tctgtgcaatcttgtgagcctatca

SEQ ID NO: 5550746 - DNA, 25 bp, Homo sapien
taacttgaacactagagcttggaaa

SEQ ID NO: 5550747 - DNA, 25 bp, Homo sapien
tggtagactgaaaaatggaaattta

SEQ ID NO: 5550748 - DNA, 25 bp, Homo sapien
agcaaaagatacctgtgtcaaataa

SEQ ID NO: 5550749 - DNA, 25 bp, Homo sapien
tgtggcatttgcactagcttgttcc

SEQ ID NO: 5550750 - DNA, 25 bp, Homo sapien
taagtgaggtcatgcaatatttgtc

SEQ ID NO: 5550751 - DNA, 25 bp, Homo sapien
ctggtccgatttctggttctcaaac

SEQ ID NO: 5550752 - DNA, 25 bp, Homo sapien
tctcatgccactctcccctttcccc

SEQ ID NO: 5550753 - DNA, 25 bp, Homo sapien
ctgtgctctcactatcctggtccga

SEQ ID NO: 5550754 - DNA, 25 bp, Homo sapien
tcccataacatgagaaaaacatttc

SEQ ID NO: 5550755 - DNA, 25 bp, Homo sapien
aacttgttcccgctttgtggcattt

SEQ ID NO: 5550756 - DNA, 25 bp, Homo sapien
aaaagaaggaaatcctatcatttgc

SEQ ID NO: 5550757 - DNA, 25 bp, Homo sapien
tttgcaacagcatggttgtaccata

SEQ ID NO: 5550758 - DNA, 25 bp, Homo sapien
ccccaatcttatcatgacaggctcc

SEQ ID NO: 5550759 - DNA, 25 bp, Homo sapien
gtcaataacttagagagattcctcc

SEQ ID NO: 5550760 - DNA, 25 bp, Homo sapien
gcagcatttccagtccccaggcctc

SEQ ID NO: 5550761 - DNA, 25 bp, Homo sapien
gagtgttaaaagcacggcagcattt

SEQ ID NO: 5550762 - DNA, 25 bp, Homo sapien
tccaacagcttgggcgttggcagtg

SEQ ID NO: 5550763 - DNA, 25 bp, Homo sapien
tttcagcatgaacacagtatggggt

SEQ ID NO: 5550764 - DNA, 25 bp, Homo sapien
aggaggattactggtgttccggatt

SEQ ID NO: 5550765 - DNA, 25 bp, Homo sapien
gatgtgcagtctgtcaggagtgtta

SEQ ID NO: 5550766 - DNA, 25 bp, Homo sapien
ctgggtcccagcatttgcgggattc

SEQ ID NO: 5550767 - DNA, 25 bp, Homo sapien
aggggacagctgaacttcagagctg

SEQ ID NO: 5550768 - DNA, 25 bp, Homo sapien
tgcttctgttgggctgtctgctggt

SEQ ID NO: 5550769 - DNA, 25 bp, Homo sapien
gtggctggcccctcctgatctgttc

SEQ ID NO: 5550770 - DNA, 25 bp, Homo sapien
cccccaggtgactcacatgggaggc

SEQ ID NO: 5550771 - DNA, 25 bp, Homo sapien
tttgttctaggtccagagtgtagcg

SEQ ID NO: 5550772 - DNA, 25 bp, Homo sapien
tcctacataggtgatcataagcaga

SEQ ID NO: 5550773 - DNA, 25 bp, Homo sapien
gcgggcctgcttcttagagactgct

SEQ ID NO: 5550774 - DNA, 25 bp, Homo sapien
gagaatgtttagaaagcctggagtc

SEQ ID NO: 5550775 - DNA, 25 bp, Homo sapien
agaaaaacatcatgtaggtggctac

SEQ ID NO: 5550776 - DNA, 25 bp, Homo sapien
tgccaagcacagagtagaatttcct

SEQ ID NO: 5550777 - DNA, 25 bp, Homo sapien
gtttatagagcatctgaggctgacc

SEQ ID NO: 5550778 - DNA, 25 bp, Homo sapien
gtgtgtgtgtgaatcagcgcctaat

SEQ ID NO: 5550779 - DNA, 25 bp, Homo sapien
tatgcagtgtatgccaagtgccaag

SEQ ID NO: 5550780 - DNA, 25 bp, Homo sapien
gcctggagtcaaaccaagaatatgc

SEQ ID NO: 5550781 - DNA, 25 bp, Homo sapien
gtaggtggctacaagcagtactcaa

SEQ ID NO: 5550782 - DNA, 25 bp, Homo sapien
atccttaataatgggaaggggcttc

SEQ ID NO: 5550783 - DNA, 25 bp, Homo sapien
tcacgcctggattgtgagaaagcaa

SEQ ID NO: 5550784 - DNA, 25 bp, Homo sapien
cacaatgtagtgccctgccccgggc

SEQ ID NO: 5550785 - DNA, 25 bp, Homo sapien
agtgtggcctcgacgtcaaaaatgt

SEQ ID NO: 5550786 - DNA, 25 bp, Homo sapien
gcaagggaaacaggtaactaatata

SEQ ID NO: 5550787 - DNA, 25 bp, Homo sapien
aattactcgtggaagtgaatggact

SEQ ID NO: 5550788 - DNA, 25 bp, Homo sapien
ctgtgaggatagatcaaatccaggc

SEQ ID NO: 5550789 - DNA, 25 bp, Homo sapien
gcttccacttgtcgccctccgcctc

SEQ ID NO: 5550790 - DNA, 25 bp, Homo sapien
atccctggtctgagagctagggatg

SEQ ID NO: 5550791 - DNA, 25 bp, Homo sapien
cttccctgaccaaggaggaagaatt

SEQ ID NO: 5550792 - DNA, 25 bp, Homo sapien
tcatctgctaagtgggaaagcagtg

SEQ ID NO: 5550793 - DNA, 25 bp, Homo sapien
attttatgtaaggcttggtggtggt

SEQ ID NO: 5550794 - DNA, 25 bp, Homo sapien
aaaaccactgaggatttgaggattc

SEQ ID NO: 5550795 - DNA, 25 bp, Homo sapien
tggtggtggcttacattaggattta

SEQ ID NO: 5550796 - DNA, 25 bp, Homo sapien
ctaggatgcctccaagtccaactgc

SEQ ID NO: 5550797 - DNA, 25 bp, Homo sapien
gtgggactgtaactgaaatagagga

SEQ ID NO: 5550798 - DNA, 25 bp, Homo sapien
taggagtaaagatttgagttcattc

SEQ ID NO: 5550799 - DNA, 25 bp, Homo sapien
tttgggtatgtgagtatatatgtgt

SEQ ID NO: 5550800 - DNA, 25 bp, Homo sapien
tccaaggacaaaagacatatgacat

SEQ ID NO: 5550801 - DNA, 25 bp, Homo sapien
tgcagagtattccagtgggactgta

SEQ ID NO: 5550802 - DNA, 25 bp, Homo sapien
tagtcttgaggttgcagagtattcc

SEQ ID NO: 5550803 - DNA, 25 bp, Homo sapien
aaccaaaaagattacctaggatgcc

SEQ ID NO: 5550804 - DNA, 25 bp, Homo sapien
tctccaagttggccatgagcaggtt

SEQ ID NO: 5550805 - DNA, 25 bp, Homo sapien
ttctggagcttgaactccccgcctt

SEQ ID NO: 5550806 - DNA, 25 bp, Homo sapien
aaagaaggtctttgtctcatggccc

SEQ ID NO: 5550807 - DNA, 25 bp, Homo sapien
catggcccagagttagaatcacatc

SEQ ID NO: 5550808 - DNA, 25 bp, Homo sapien
attgtaacaggtaagaaacacgtac

SEQ ID NO: 5550809 - DNA, 25 bp, Homo sapien
atgagcaggttgacagatgacttca

SEQ ID NO: 5550810 - DNA, 25 bp, Homo sapien
catggccttgtgctagaaaaatgtt

SEQ ID NO: 5550811 - DNA, 25 bp, Homo sapien
ttggatacaaacttgggaaatttgc

SEQ ID NO: 5550812 - DNA, 25 bp, Homo sapien
ttgtggctgcgtttgagtttctgga

SEQ ID NO: 5550813 - DNA, 25 bp, Homo sapien
cgcctttggataccggcatgctctc

SEQ ID NO: 5550814 - DNA, 25 bp, Homo sapien
catgtcgatgatggaagcattgtgg

SEQ ID NO: 5550815 - DNA, 25 bp, Homo sapien
atttagtgctggaaaccgtaggtgt

SEQ ID NO: 5550816 - DNA, 25 bp, Homo sapien
acacctacggtttccagcactaaat

SEQ ID NO: 5550817 - DNA, 25 bp, Homo sapien
tcaaaaaccaaatcccctgtgtctc

SEQ ID NO: 5550818 - DNA, 25 bp, Homo sapien
agaactaaccaggccgacgtcttta

SEQ ID NO: 5550819 - DNA, 25 bp, Homo sapien
actggacctagtacaaaagtgccca

SEQ ID NO: 5550820 - DNA, 25 bp, Homo sapien
agtgaaataatgatggtaaaacctc

SEQ ID NO: 5550821 - DNA, 25 bp, Homo sapien
ggaatctacaagagatacagtggtt

SEQ ID NO: 5550822 - DNA, 25 bp, Homo sapien
aaaagctaaaagtttgaaatcagac

SEQ ID NO: 5550823 - DNA, 25 bp, Homo sapien
agtgcccactgaacagtgttacctc

SEQ ID NO: 5550824 - DNA, 25 bp, Homo sapien
tgaaaaacaatgtcaggacaacttg

SEQ ID NO: 5550825 - DNA, 25 bp, Homo sapien
tgagaaacactgatgtaaaagctaa

SEQ ID NO: 5550826 - DNA, 25 bp, Homo sapien
gagaaagctgctaaactattgcctc

SEQ ID NO: 5550827 - DNA, 25 bp, Homo sapien
tcagacagctctgactttgagtctc

SEQ ID NO: 5550828 - DNA, 25 bp, Homo sapien
agacagggttcgcgttgtcacccaa

SEQ ID NO: 5550829 - DNA, 25 bp, Homo sapien
ggatgagccattgtgtgcggcatga

SEQ ID NO: 5550830 - DNA, 25 bp, Homo sapien
cattgtgtgcggcatgagccattgt

SEQ ID NO: 5550831 - DNA, 25 bp, Homo sapien
taaatatgtgataaacagatgaatt

SEQ ID NO: 5550832 - DNA, 25 bp, Homo sapien
aatctgtcagcctctagcaagactc

SEQ ID NO: 5550833 - DNA, 25 bp, Homo sapien
gcgttgtcacccaagctgaggtgca

SEQ ID NO: 5550834 - DNA, 25 bp, Homo sapien
taaaaatccctgccagatgtgacat

SEQ ID NO: 5550835 - DNA, 25 bp, Homo sapien
gtgcacggccggtccgttgctaaat

SEQ ID NO: 5550836 - DNA, 25 bp, Homo sapien
tatgcctggtatttgataagcactc

SEQ ID NO: 5550837 - DNA, 25 bp, Homo sapien
ctcagcgcccccaacaagtagctgg

SEQ ID NO: 5550838 - DNA, 25 bp, Homo sapien
gatgtgacattgtattactggaatc

SEQ ID NO: 5550839 - DNA, 25 bp, Homo sapien
agtctgtgggctataatgttgatgg

SEQ ID NO: 5550840 - DNA, 25 bp, Homo sapien
atgttgatggccaccaccctcaaga

SEQ ID NO: 5550841 - DNA, 25 bp, Homo sapien
tcaaccccaatgagatcaaagtcgt

SEQ ID NO: 5550842 - DNA, 25 bp, Homo sapien
ggggactgcccagtctgtgggctat

SEQ ID NO: 5550843 - DNA, 25 bp, Homo sapien
gtctccaaaaaaggttggtgatgac

SEQ ID NO: 5550844 - DNA, 25 bp, Homo sapien
tagccagagaactatctggtaccat

SEQ ID NO: 5550845 - DNA, 25 bp, Homo sapien
tcatcaaagctctcaaggaaccacc

SEQ ID NO: 5550846 - DNA, 25 bp, Homo sapien
gtaccattaaagagatcttggggac

SEQ ID NO: 5550847 - DNA, 25 bp, Homo sapien
ctcaaggaaccaccaagagtcagaa

SEQ ID NO: 5550848 - DNA, 25 bp, Homo sapien
acagatgcagtactgatccttagcc

SEQ ID NO: 5550849 - DNA, 25 bp, Homo sapien
ggtgaagtcggtgccactttctgca

SEQ ID NO: 5550850 - DNA, 25 bp, Homo sapien
ctttccaaaaactctcctgtgctcc

SEQ ID NO: 5550851 - DNA, 25 bp, Homo sapien
atcctgcaaataataaaatggagga

SEQ ID NO: 5550852 - DNA, 25 bp, Homo sapien
ttgatgaaatgatactgacactgat

SEQ ID NO: 5550853 - DNA, 25 bp, Homo sapien
gggactatagtcaagcactgtaggt

SEQ ID NO: 5550854 - DNA, 25 bp, Homo sapien
tctggactcaaacgatctcccaagt

SEQ ID NO: 5550855 - DNA, 25 bp, Homo sapien
aatccagtgaggtaaatatgaatcc

SEQ ID NO: 5550856 - DNA, 25 bp, Homo sapien
tgaatcctatcattgctatcctgca

SEQ ID NO: 5550857 - DNA, 25 bp, Homo sapien
taaaaatccagtgaggtaaatatga

SEQ ID NO: 5550858 - DNA, 25 bp, Homo sapien
gacaaatatataacatgtatccacc

SEQ ID NO: 5550859 - DNA, 25 bp, Homo sapien
tatctgggactatagtcaagcactg

SEQ ID NO: 5550860 - DNA, 25 bp, Homo sapien
aagcactgtaggttttgacaaatat

SEQ ID NO: 5550861 - DNA, 25 bp, Homo sapien
taagtaaaacaggattctgacagta

SEQ ID NO: 5550862 - DNA, 25 bp, Homo sapien
aacacacacaatacaacaccagctc

SEQ ID NO: 5550863 - DNA, 25 bp, Homo sapien
agatggagcaactatagcaggaaat

SEQ ID NO: 5550864 - DNA, 25 bp, Homo sapien
tgctgaataagcacaaatgattcct

SEQ ID NO: 5550865 - DNA, 25 bp, Homo sapien
atgtgtaacagaagaaaacccaact

SEQ ID NO: 5550866 - DNA, 25 bp, Homo sapien
ctttagaagaaagtagtatttgtgt

SEQ ID NO: 5550867 - DNA, 25 bp, Homo sapien
gaatggcttgcaactttaagggacc

SEQ ID NO: 5550868 - DNA, 25 bp, Homo sapien
gatatccagcaaactaaaatgaaac

SEQ ID NO: 5550869 - DNA, 25 bp, Homo sapien
aaaaggaagtttgcttgttcgtatc

SEQ ID NO: 5550870 - DNA, 25 bp, Homo sapien
tgaaacagtggacatacaacaaaca

SEQ ID NO: 5550871 - DNA, 25 bp, Homo sapien
aagagattttagatttgtgagtgta

SEQ ID NO: 5550872 - DNA, 25 bp, Homo sapien
agaaggaaagatgttatacagatgt

SEQ ID NO: 5550873 - DNA, 25 bp, Homo sapien
aaccgtatcatcgaagccaatgggg

SEQ ID NO: 5550874 - DNA, 25 bp, Homo sapien
tttatgttgggaactggagcccaaa

SEQ ID NO: 5550875 - DNA, 25 bp, Homo sapien
atttgctgtgagctaggcagccaca

SEQ ID NO: 5550876 - DNA, 25 bp, Homo sapien
actactgcaaggtcttggggctgat

SEQ ID NO: 5550877 - DNA, 25 bp, Homo sapien
tggggccaggaacttaattgttgcc

SEQ ID NO: 5550878 - DNA, 25 bp, Homo sapien
atgactaattggctggactagactc

SEQ ID NO: 5550879 - DNA, 25 bp, Homo sapien
ttggggctgatgacaatctccattc

SEQ ID NO: 5550880 - DNA, 25 bp, Homo sapien
gtgaccgccagggtatttgctgtga

SEQ ID NO: 5550881 - DNA, 25 bp, Homo sapien
gactagactcacgtgctcatgcctc

SEQ ID NO: 5550882 - DNA, 25 bp, Homo sapien
tctgcagtgataaaaagaaaagagt

SEQ ID NO: 5550883 - DNA, 25 bp, Homo sapien
attgagtaagacttcttgaaatact

SEQ ID NO: 5550884 - DNA, 25 bp, Homo sapien
tatgcaactgagatatagctgagat

SEQ ID NO: 5550885 - DNA, 25 bp, Homo sapien
tgcctcttccagatgtccaagtaac

SEQ ID NO: 5550886 - DNA, 25 bp, Homo sapien
cctcagcacactgcacacaattcta

SEQ ID NO: 5550887 - DNA, 25 bp, Homo sapien
aggcttaaatatgaacacctgtcct

SEQ ID NO: 5550888 - DNA, 25 bp, Homo sapien
atttaagatgttcccactcaattat

SEQ ID NO: 5550889 - DNA, 25 bp, Homo sapien
ataatgcatataaagaagtgattta

SEQ ID NO: 5550890 - DNA, 25 bp, Homo sapien
gtccaagtaactattgagtaagact

SEQ ID NO: 5550891 - DNA, 25 bp, Homo sapien
cacctgtcctgttaattctttgggc

SEQ ID NO: 5550892 - DNA, 25 bp, Homo sapien
actgagatatagctgagatgtcttt

SEQ ID NO: 5550893 - DNA, 25 bp, Homo sapien
acacacacaaaccccaaatacgtta

SEQ ID NO: 5550894 - DNA, 25 bp, Homo sapien
gagaccaagaggcaaagtattagta

SEQ ID NO: 5550895 - DNA, 25 bp, Homo sapien
aagtattagtatagagaggagtgat

SEQ ID NO: 5550896 - DNA, 25 bp, Homo sapien
ttacccttgaccccagagacagggc

SEQ ID NO: 5550897 - DNA, 25 bp, Homo sapien
taagatatggtaaacttaagcatat

SEQ ID NO: 5550898 - DNA, 25 bp, Homo sapien
gcatccttgaagagctaagagagca

SEQ ID NO: 5550899 - DNA, 25 bp, Homo sapien
cccacaagacaaaatctccagtaga

SEQ ID NO: 5550900 - DNA, 25 bp, Homo sapien
tgtgcctctatgtgagctcttaccc

SEQ ID NO: 5550901 - DNA, 25 bp, Homo sapien
ctccagtagagatatagggagaaga

SEQ ID NO: 5550902 - DNA, 25 bp, Homo sapien
aatatgtagatatatggtgtgcctc

SEQ ID NO: 5550903 - DNA, 25 bp, Homo sapien
taacaatagagcatccttgaagagc

SEQ ID NO: 5550904 - DNA, 25 bp, Homo sapien
tatgtgagctcttacccttgacccc

SEQ ID NO: 5550905 - DNA, 25 bp, Homo sapien
gatggctaaatccaaggcagagtgg

SEQ ID NO: 5550906 - DNA, 25 bp, Homo sapien
atgaatgaataagttatcatttgcc

SEQ ID NO: 5550907 - DNA, 25 bp, Homo sapien
atggagagttctgtagctcaccctc

SEQ ID NO: 5550908 - DNA, 25 bp, Homo sapien
tatcatttgcctttgggtcccattc

SEQ ID NO: 5550909 - DNA, 25 bp, Homo sapien
cattcttgagtggtcatggagagtt

SEQ ID NO: 5550910 - DNA, 25 bp, Homo sapien
gtggtcatggagagttctgtagctc

SEQ ID NO: 5550911 - DNA, 25 bp, Homo sapien
ggactgcgatggctaaatccaaggc

SEQ ID NO: 5550912 - DNA, 25 bp, Homo sapien
aagtttatcccttgatgaatgaata

SEQ ID NO: 5550913 - DNA, 25 bp, Homo sapien
ggcagagtgggatctttatctatta

SEQ ID NO: 5550914 - DNA, 25 bp, Homo sapien
tgcgatggctaaatccaaggcagag

SEQ ID NO: 5550915 - DNA, 25 bp, Homo sapien
ttgcacaaatttcacctaagagtat

SEQ ID NO: 5550916 - DNA, 25 bp, Homo sapien
ctgatggggtctgctatcgcccttt

SEQ ID NO: 5550917 - DNA, 25 bp, Homo sapien
ccatcccaaagcaaaatggtggccc

SEQ ID NO: 5550918 - DNA, 25 bp, Homo sapien
tctgtgcatgccggtgcctgcaaaa

SEQ ID NO: 5550919 - DNA, 25 bp, Homo sapien
acaggagttcaagtttagggtgtct

SEQ ID NO: 5550920 - DNA, 25 bp, Homo sapien
cttatttagcgcctggccggctgga

SEQ ID NO: 5550921 - DNA, 25 bp, Homo sapien
cgtcgctgttgctgagaaagaaagg

SEQ ID NO: 5550922 - DNA, 25 bp, Homo sapien
ttcctacccgctggcacaggatctg

SEQ ID NO: 5550923 - DNA, 25 bp, Homo sapien
ttgcagctgctgattgaccaaacag

SEQ ID NO: 5550924 - DNA, 25 bp, Homo sapien
gggcttcggctcctgggatttccaa

SEQ ID NO: 5550925 - DNA, 25 bp, Homo sapien
cggagagccatcttctgtgcatgcc

SEQ ID NO: 5550926 - DNA, 25 bp, Homo sapien
gctgggaggcagctacatattccta

SEQ ID NO: 5550927 - DNA, 25 bp, Homo sapien
atgtcagtgggtgttaaagtgctgt

SEQ ID NO: 5550928 - DNA, 25 bp, Homo sapien
tatttccataagaaagggcagcagg

SEQ ID NO: 5550929 - DNA, 25 bp, Homo sapien
aggcatgaagcaacatgaccctctg

SEQ ID NO: 5550930 - DNA, 25 bp, Homo sapien
atgtgcctgaccatgtgaccggtcc

SEQ ID NO: 5550931 - DNA, 25 bp, Homo sapien
acagcttctcgtgatgagtgaggga

SEQ ID NO: 5550932 - DNA, 25 bp, Homo sapien
attcctgaaaccaagtgaggagaca

SEQ ID NO: 5550933 - DNA, 25 bp, Homo sapien
ctgaagaaccacaggtcctcagggg

SEQ ID NO: 5550934 - DNA, 25 bp, Homo sapien
ctggccagaaacttgaatgggcttc

SEQ ID NO: 5550935 - DNA, 25 bp, Homo sapien
gaaggtcccctccagaaatgcagct

SEQ ID NO: 5550936 - DNA, 25 bp, Homo sapien
acaagaggttgaaggtgtcatcttt

SEQ ID NO: 5550937 - DNA, 25 bp, Homo sapien
tgaccggtcctgggaacctaagata

SEQ ID NO: 5550938 - DNA, 25 bp, Homo sapien
atcaccaactatgcaggtcagagtc

SEQ ID NO: 5550939 - DNA, 25 bp, Homo sapien
cctttccagcaaacggccttaacag

SEQ ID NO: 5550940 - DNA, 25 bp, Homo sapien
ccaactgcagtgatctaggcacttc

SEQ ID NO: 5550941 - DNA, 25 bp, Homo sapien
gctgggcagctaagaaaatttcttc

SEQ ID NO: 5550942 - DNA, 25 bp, Homo sapien
tccaaattgtctaatgagcaggcat

SEQ ID NO: 5550943 - DNA, 25 bp, Homo sapien
gccacggcaatgtttgaggatgaaa

SEQ ID NO: 5550944 - DNA, 25 bp, Homo sapien
gagcaggcatcactataagcatatt

SEQ ID NO: 5550945 - DNA, 25 bp, Homo sapien
atgcaggtcagagtcacactgctct

SEQ ID NO: 5550946 - DNA, 25 bp, Homo sapien
gcagttgctggcccaggttcagtct

SEQ ID NO: 5550947 - DNA, 25 bp, Homo sapien
aaaagggattgtttctggatttgtg

SEQ ID NO: 5550948 - DNA, 25 bp, Homo sapien
gtttcaaatgctacggcaatgcttt

SEQ ID NO: 5550949 - DNA, 25 bp, Homo sapien
agtttgtacaaaaggagaatttggc

SEQ ID NO: 5550950 - DNA, 25 bp, Homo sapien
taggtctccttcagttctagccttc

SEQ ID NO: 5550951 - DNA, 25 bp, Homo sapien
ttttaatgttgcagctaccggagcg

SEQ ID NO: 5550952 - DNA, 25 bp, Homo sapien
accggagcggtaagttttacagcta

SEQ ID NO: 5550953 - DNA, 25 bp, Homo sapien
aatttggcctatattgactaatggc

SEQ ID NO: 5550954 - DNA, 25 bp, Homo sapien
tctctggattatagtaatgggaaat

SEQ ID NO: 5550955 - DNA, 25 bp, Homo sapien
aagaactgcctttatcaactcccac

SEQ ID NO: 5550956 - DNA, 25 bp, Homo sapien
tgtatcgcatcaccaattgctccag

SEQ ID NO: 5550957 - DNA, 25 bp, Homo sapien
ggaaaggtggcccaactagctatat

SEQ ID NO: 5550958 - DNA, 25 bp, Homo sapien
ttaaagtatcccagtcatatggtat

SEQ ID NO: 5550959 - DNA, 25 bp, Homo sapien
cttctcacccattagggggagaggg

SEQ ID NO: 5550960 - DNA, 25 bp, Homo sapien
tttaatttaggagtgtctttggaca

SEQ ID NO: 5550961 - DNA, 25 bp, Homo sapien
atggaagttagtatgacacagccct

SEQ ID NO: 5550962 - DNA, 25 bp, Homo sapien
atgtgctttgtctggtattaatgct

SEQ ID NO: 5550963 - DNA, 25 bp, Homo sapien
ggacattcttaaaaaccaggctgag

SEQ ID NO: 5550964 - DNA, 25 bp, Homo sapien
tataaataagatcaactggggaaat

SEQ ID NO: 5550965 - DNA, 25 bp, Homo sapien
tgctagttggattagatcaaactcc

SEQ ID NO: 5550966 - DNA, 25 bp, Homo sapien
aaaaccaggctgagagtctttgtct

SEQ ID NO: 5550967 - DNA, 25 bp, Homo sapien
actggggaaattagatttccagcta

SEQ ID NO: 5550968 - DNA, 25 bp, Homo sapien
gtgaattgtacctttagtgagttta

SEQ ID NO: 5550969 - DNA, 25 bp, Homo sapien
tatgacacagcccttctacagtaaa

SEQ ID NO: 5550970 - DNA, 25 bp, Homo sapien
ttggttatggaagttagtatgacac

SEQ ID NO: 5550971 - DNA, 25 bp, Homo sapien
tgtgtaaacaaaattagagcaacca

SEQ ID NO: 5550972 - DNA, 25 bp, Homo sapien
cctagagataggcttatgtattttc

SEQ ID NO: 5550973 - DNA, 25 bp, Homo sapien
tcagagggtttcagtgtagaaagga

SEQ ID NO: 5550974 - DNA, 25 bp, Homo sapien
agtcagtattgacctagagataggc

SEQ ID NO: 5550975 - DNA, 25 bp, Homo sapien
cataggtaaggctaaagctttgagc

SEQ ID NO: 5550976 - DNA, 25 bp, Homo sapien
tagagcaaccattaaacagatacaa

SEQ ID NO: 5550977 - DNA, 25 bp, Homo sapien
aagtaaaaagctaggacatgtaaac

SEQ ID NO: 5550978 - DNA, 25 bp, Homo sapien
gcttttcgtctgctcagagggtttc

SEQ ID NO: 5550979 - DNA, 25 bp, Homo sapien
atttgttaggaaatgtacttggaac

SEQ ID NO: 5550980 - DNA, 25 bp, Homo sapien
actttgcagatagggaaaagtcagt

SEQ ID NO: 5550981 - DNA, 25 bp, Homo sapien
aacatcaacagaatagagctcactt

SEQ ID NO: 5550982 - DNA, 25 bp, Homo sapien
tgcagcttcaaccctccgggctcca

SEQ ID NO: 5550983 - DNA, 25 bp, Homo sapien
acaaaatcttggaatgcaaattgat

SEQ ID NO: 5550984 - DNA, 25 bp, Homo sapien
acagagaatctagcaaagtatggga

SEQ ID NO: 5550985 - DNA, 25 bp, Homo sapien
catgcctggccaacctttatacctt

SEQ ID NO: 5550986 - DNA, 25 bp, Homo sapien
atagagtgtgaaattaacagaatcc

SEQ ID NO: 5550987 - DNA, 25 bp, Homo sapien
tagacagaatatttagaaaggtggt

SEQ ID NO: 5550988 - DNA, 25 bp, Homo sapien
tgatgatggcagaacatccagccta

SEQ ID NO: 5550989 - DNA, 25 bp, Homo sapien
aggtggtaataaactacagagaatc

SEQ ID NO: 5550990 - DNA, 25 bp, Homo sapien
aagtatgggataaattgtcagatta

SEQ ID NO: 5550991 - DNA, 25 bp, Homo sapien
ttgactctctgggttacctagacag

SEQ ID NO: 5550992 - DNA, 25 bp, Homo sapien
tcaaccctccgggctccaatggtcc

SEQ ID NO: 5550993 - DNA, 25 bp, Homo sapien
ctgtgcagcttaaaggacaacatgc

SEQ ID NO: 5550994 - DNA, 25 bp, Homo sapien
taaacatcgaaaagtagagtagagg

SEQ ID NO: 5550995 - DNA, 25 bp, Homo sapien
tgaatatacgggcaattgttaacac

SEQ ID NO: 5550996 - DNA, 25 bp, Homo sapien
attgttaacacaatggtaggtattt

SEQ ID NO: 5550997 - DNA, 25 bp, Homo sapien
ttttactttcgaaatgaagatgaat

SEQ ID NO: 5550998 - DNA, 25 bp, Homo sapien
gattctactgaatatacgggcaatt

SEQ ID NO: 5550999 - DNA, 25 bp, Homo sapien
tttactgaacagtgtgccatacttt

SEQ ID NO: 5551000 - DNA, 25 bp, Homo sapien
aaagacttctttggtctgtgcagct

SEQ ID NO: 5551001 - DNA, 25 bp, Homo sapien
caacaacaacaaagtgggattttat

SEQ ID NO: 5551002 - DNA, 25 bp, Homo sapien
gttctcttggataatagaaaacaac

SEQ ID NO: 5551003 - DNA, 25 bp, Homo sapien
gaatgtgtttggaataagaaatatg

SEQ ID NO: 5551004 - DNA, 25 bp, Homo sapien
taacccagacctggaatggtgagaa

SEQ ID NO: 5551005 - DNA, 25 bp, Homo sapien
agaatttgctggagaaccatatacc

SEQ ID NO: 5551006 - DNA, 25 bp, Homo sapien
aaacaatcttaagagaaacagagag

SEQ ID NO: 5551007 - DNA, 25 bp, Homo sapien
acatgtgacatgcaacagtaaaaac

SEQ ID NO: 5551008 - DNA, 25 bp, Homo sapien
ggctatagcggtaacctaggagaga

SEQ ID NO: 5551009 - DNA, 25 bp, Homo sapien
agtagtcagagaggtccacttaatt

SEQ ID NO: 5551010 - DNA, 25 bp, Homo sapien
ttcctcacaagtagtcagagaggtc

SEQ ID NO: 5551011 - DNA, 25 bp, Homo sapien
ttcttaatggggctatagcggtaac

SEQ ID NO: 5551012 - DNA, 25 bp, Homo sapien
agaggatagtaacccagacctggaa

SEQ ID NO: 5551013 - DNA, 25 bp, Homo sapien
agccacaaggaaacttcttaatggg

SEQ ID NO: 5551014 - DNA, 25 bp, Homo sapien
gtggatttaatgtaaaggaggagac

SEQ ID NO: 5551015 - DNA, 25 bp, Homo sapien
cacctatgacagcaaaagagggtgc

SEQ ID NO: 5551016 - DNA, 25 bp, Homo sapien
tgagggaagcctacacactaaggtg

SEQ ID NO: 5551017 - DNA, 25 bp, Homo sapien
acaagttaaacggcaataatagggc

SEQ ID NO: 5551018 - DNA, 25 bp, Homo sapien
gagggtgcataaataattacaggac

SEQ ID NO: 5551019 - DNA, 25 bp, Homo sapien
agcccctacagagcctgcaggggtg

SEQ ID NO: 5551020 - DNA, 25 bp, Homo sapien
cagtttgcagagttatgtggagtca

SEQ ID NO: 5551021 - DNA, 25 bp, Homo sapien
ggacaaacagggacttgcgttccca

SEQ ID NO: 5551022 - DNA, 25 bp, Homo sapien
gtgcagaaccgacactgacaagtta

SEQ ID NO: 5551023 - DNA, 25 bp, Homo sapien
tcacaagcgtcacaaactgagtctc

SEQ ID NO: 5551024 - DNA, 25 bp, Homo sapien
gtgtgctaaatagggtgactgttcc

SEQ ID NO: 5551025 - DNA, 25 bp, Homo sapien
gacaataggcgtaaacctgagtgac

SEQ ID NO: 5551026 - DNA, 25 bp, Homo sapien
aagcaccctggtggccaccatcact

SEQ ID NO: 5551027 - DNA, 25 bp, Homo sapien
tgccaggtcagacctgaagtgagca

SEQ ID NO: 5551028 - DNA, 25 bp, Homo sapien
cactgagattatgccaggtcagacc

SEQ ID NO: 5551029 - DNA, 25 bp, Homo sapien
gctgtaaccactacctggctaccac

SEQ ID NO: 5551030 - DNA, 25 bp, Homo sapien
cttacccaaggcctgctgtaaccac

SEQ ID NO: 5551031 - DNA, 25 bp, Homo sapien
cacagcagtgggtcttacccaaggc

SEQ ID NO: 5551032 - DNA, 25 bp, Homo sapien
acctggctaccacctgtgtttgctc

SEQ ID NO: 5551033 - DNA, 25 bp, Homo sapien
ttactccaaacagcatgtctctctc

SEQ ID NO: 5551034 - DNA, 25 bp, Homo sapien
cctgtgtttgctcaaggcgctgagg

SEQ ID NO: 5551035 - DNA, 25 bp, Homo sapien
ggctctacaaccagtgggtggcaat

SEQ ID NO: 5551036 - DNA, 25 bp, Homo sapien
gtggcaataccagccaggcttgttt

SEQ ID NO: 5551037 - DNA, 25 bp, Homo sapien
cttggcctaaaaagtagagcttcca

SEQ ID NO: 5551038 - DNA, 25 bp, Homo sapien
gctaaccctactaagggcagagacc

SEQ ID NO: 5551039 - DNA, 25 bp, Homo sapien
ctagtaaatggaatgtctgtatgac

SEQ ID NO: 5551040 - DNA, 25 bp, Homo sapien
gacacaagcaaaggcccaactacta

SEQ ID NO: 5551041 - DNA, 25 bp, Homo sapien
gggcagagaccagctttcaaagtca

SEQ ID NO: 5551042 - DNA, 25 bp, Homo sapien
gaaaaccaaccaggatcagttactc

SEQ ID NO: 5551043 - DNA, 25 bp, Homo sapien
caccgtggacacagtacaaatttct

SEQ ID NO: 5551044 - DNA, 25 bp, Homo sapien
tgaaaatagctcctgggcccctaca

SEQ ID NO: 5551045 - DNA, 25 bp, Homo sapien
agcaggcaactgatttaaggaaaaa

SEQ ID NO: 5551046 - DNA, 25 bp, Homo sapien
tcagttactcagtggaggtaggaaa

SEQ ID NO: 5551047 - DNA, 25 bp, Homo sapien
agcactcctaagtcaccgtggacac

SEQ ID NO: 5551048 - DNA, 25 bp, Homo sapien
ttccccaagcaaaaagtgagctcac

SEQ ID NO: 5551049 - DNA, 25 bp, Homo sapien
gcctactgccatcacagaagggacc

SEQ ID NO: 5551050 - DNA, 25 bp, Homo sapien
caacatgcctacaaaggaagcgaga

SEQ ID NO: 5551051 - DNA, 25 bp, Homo sapien
atacaggcaataggaaagaactaaa

SEQ ID NO: 5551052 - DNA, 25 bp, Homo sapien
agagagaaccgtggatcagatataa

SEQ ID NO: 5551053 - DNA, 25 bp, Homo sapien
gaagggacctgctgataacctgcaa

SEQ ID NO: 5551054 - DNA, 25 bp, Homo sapien
aaagctaaaaggaatgaactgaata

SEQ ID NO: 5551055 - DNA, 25 bp, Homo sapien
tacagttgaacatgacccgtgcaca

SEQ ID NO: 5551056 - DNA, 25 bp, Homo sapien
agaactcggaagaaatagatgatac

SEQ ID NO: 5551057 - DNA, 25 bp, Homo sapien
atggtagagtgggaacctatttagc

SEQ ID NO: 5551058 - DNA, 25 bp, Homo sapien
agtgagccactgcctaactgcgtac

SEQ ID NO: 5551059 - DNA, 25 bp, Homo sapien
tcccggcctgtgaacaggtctcctg

SEQ ID NO: 5551060 - DNA, 25 bp, Homo sapien
caggagacctgttcacaggccggga

SEQ ID NO: 5551061 - DNA, 25 bp, Homo sapien
gactcttcgactccatactctgtgt

SEQ ID NO: 5551062 - DNA, 25 bp, Homo sapien
acacagagtatggagtcgaagagtc

SEQ ID NO: 5551063 - DNA, 25 bp, Homo sapien
aagacgcgatgaaatgtgccctttt

SEQ ID NO: 5551064 - DNA, 25 bp, Homo sapien
gagggcgctggaaaatccctccctc

SEQ ID NO: 5551065 - DNA, 25 bp, Homo sapien
aaattaacaaaagcaagaaccagag

SEQ ID NO: 5551066 - DNA, 25 bp, Homo sapien
aaggacggtaataaactctactctg

SEQ ID NO: 5551067 - DNA, 25 bp, Homo sapien
aaacccaaatcaccctctgagctgc

SEQ ID NO: 5551068 - DNA, 25 bp, Homo sapien
aactccattctaaggcattgctccc

SEQ ID NO: 5551069 - DNA, 25 bp, Homo sapien
tgctcccttggtacatcagtctcac

SEQ ID NO: 5551070 - DNA, 25 bp, Homo sapien
taaaaatgaggcagactgtaaattc

SEQ ID NO: 5551071 - DNA, 25 bp, Homo sapien
aaggcatcccactgcagagcaggag

SEQ ID NO: 5551072 - DNA, 25 bp, Homo sapien
tactctgtagggacaactctttctc

SEQ ID NO: 5551073 - DNA, 25 bp, Homo sapien
ttagagaaatatagagcagaaaaaa

SEQ ID NO: 5551074 - DNA, 25 bp, Homo sapien
ggccagcctgtggcatcagtcctct

SEQ ID NO: 5551075 - DNA, 25 bp, Homo sapien
ctcagtccctcatgccagtggtacc

SEQ ID NO: 5551076 - DNA, 25 bp, Homo sapien
tgccttagtcttgggacaaacttac

SEQ ID NO: 5551077 - DNA, 25 bp, Homo sapien
ccctaagttccatgccaagctcctg

SEQ ID NO: 5551078 - DNA, 25 bp, Homo sapien
gaaacaggacttgaggaccatctaa

SEQ ID NO: 5551079 - DNA, 25 bp, Homo sapien
taaatgagtgatagacatcccaccc

SEQ ID NO: 5551080 - DNA, 25 bp, Homo sapien
accaccatggctgctaaggccctca

SEQ ID NO: 5551081 - DNA, 25 bp, Homo sapien
tcagactcatagcagaaacaggact

SEQ ID NO: 5551082 - DNA, 25 bp, Homo sapien
ggggagcaagaattaataagacaaa

SEQ ID NO: 5551083 - DNA, 25 bp, Homo sapien
ctgtgcccagattgtaaagccctaa

SEQ ID NO: 5551084 - DNA, 25 bp, Homo sapien
atgcctgtaaaggtaccaccatggc

SEQ ID NO: 5551085 - DNA, 25 bp, Homo sapien
gaacaatatcaacagtagaacaacc

SEQ ID NO: 5551086 - DNA, 25 bp, Homo sapien
cacttcaaagccaaatgaggacttg

SEQ ID NO: 5551087 - DNA, 25 bp, Homo sapien
actgtggagaaaaccagtcagtaac

SEQ ID NO: 5551088 - DNA, 25 bp, Homo sapien
tatttgataggtggtgtagaatgat

SEQ ID NO: 5551089 - DNA, 25 bp, Homo sapien
gaagcaatgactataggattccctc

SEQ ID NO: 5551090 - DNA, 25 bp, Homo sapien
tgcacagcacaacaaactcacttca

SEQ ID NO: 5551091 - DNA, 25 bp, Homo sapien
atgaggacttggcatactcaggaaa

SEQ ID NO: 5551092 - DNA, 25 bp, Homo sapien
tatgttggaactgctaggcctacga

SEQ ID NO: 5551093 - DNA, 25 bp, Homo sapien
acagtggatcatgaagcaatgacta

SEQ ID NO: 5551094 - DNA, 25 bp, Homo sapien
gctaggcctacgagtcagaatatct

SEQ ID NO: 5551095 - DNA, 25 bp, Homo sapien
aggaaattctagtaatgagatgctc

SEQ ID NO: 5551096 - DNA, 25 bp, Homo sapien
ttttgtacttcctgggttgatcatc

SEQ ID NO: 5551097 - DNA, 25 bp, Homo sapien
ataagtatctcgtggtataaccgat

SEQ ID NO: 5551098 - DNA, 25 bp, Homo sapien
ttcctgggttgatcatctaactttc

SEQ ID NO: 5551099 - DNA, 25 bp, Homo sapien
cgtggtataaccgattaaatagcta

SEQ ID NO: 5551100 - DNA, 25 bp, Homo sapien
gtgacttgtccagatagtctgaaat

SEQ ID NO: 5551101 - DNA, 25 bp, Homo sapien
accctccataagtatctcgtggtat

SEQ ID NO: 5551102 - DNA, 25 bp, Homo sapien
cattcaaccaagagactactgtttt

SEQ ID NO: 5551103 - DNA, 25 bp, Homo sapien
aaatttcactcagtagtatgggttc

SEQ ID NO: 5551104 - DNA, 25 bp, Homo sapien
taactttaggcagattttgtacttc

SEQ ID NO: 5551105 - DNA, 25 bp, Homo sapien
cactcagtagtatgggttctttttc

SEQ ID NO: 5551106 - DNA, 25 bp, Homo sapien
cgattaaatagctaagtgacttgtc

SEQ ID NO: 5551107 - DNA, 25 bp, Homo sapien
tgggatcaaactgcagattctggac

SEQ ID NO: 5551108 - DNA, 25 bp, Homo sapien
ttggatgagactgctgttcacactg

SEQ ID NO: 5551109 - DNA, 25 bp, Homo sapien
tggtagattttgagtgaagtagatt

SEQ ID NO: 5551110 - DNA, 25 bp, Homo sapien
tactcagctagatcacagtgcccag

SEQ ID NO: 5551111 - DNA, 25 bp, Homo sapien
aagggatggttaatgtgtctactca

SEQ ID NO: 5551112 - DNA, 25 bp, Homo sapien
ccaatcaggtgaaggcctgagtaga

SEQ ID NO: 5551113 - DNA, 25 bp, Homo sapien
ctgacctcccgcaagcaggagggaa

SEQ ID NO: 5551114 - DNA, 25 bp, Homo sapien
agcctccataactgcatgggccaat

SEQ ID NO: 5551115 - DNA, 25 bp, Homo sapien
gtagtcaccctactgggctaaggga

SEQ ID NO: 5551116 - DNA, 25 bp, Homo sapien
caggcagcctttgggatcaaactgc

SEQ ID NO: 5551117 - DNA, 25 bp, Homo sapien
tgaggatgtttttggatgagactgc

SEQ ID NO: 5551118 - DNA, 25 bp, Homo sapien
cataccatggaactggcctgccatc

SEQ ID NO: 5551119 - DNA, 25 bp, Homo sapien
tagagttcaactgaagacgacaatc

SEQ ID NO: 5551120 - DNA, 25 bp, Homo sapien
ggctctaggctgagcttccaggagc

SEQ ID NO: 5551121 - DNA, 25 bp, Homo sapien
ggttgaagccgcaagggatttatta

SEQ ID NO: 5551122 - DNA, 25 bp, Homo sapien
ctctcaacaccacgaagcgaggaat

SEQ ID NO: 5551123 - DNA, 25 bp, Homo sapien
cagtgtgaaacaaatgccatccgat

SEQ ID NO: 5551124 - DNA, 25 bp, Homo sapien
caggagcacctactggaatcatacc

SEQ ID NO: 5551125 - DNA, 25 bp, Homo sapien
tggtgccagcctagtaatatgtccc

SEQ ID NO: 5551126 - DNA, 25 bp, Homo sapien
gccacagaagaggaagtaccttctt

SEQ ID NO: 5551127 - DNA, 25 bp, Homo sapien
aaagaggcatccaaagcatgtcctt

SEQ ID NO: 5551128 - DNA, 25 bp, Homo sapien
gctgggtcctggatgtccattgtcc

SEQ ID NO: 5551129 - DNA, 25 bp, Homo sapien
aaggagagagctgggttctctttct

SEQ ID NO: 5551130 - DNA, 25 bp, Homo sapien
tggtcgagccgctctgaccaggaag

SEQ ID NO: 5551131 - DNA, 25 bp, Homo sapien
agaggaaccagtgtggctaaataaa

SEQ ID NO: 5551132 - DNA, 25 bp, Homo sapien
attgaggctaagcctaggcaggtga

SEQ ID NO: 5551133 - DNA, 25 bp, Homo sapien
ttggatctgtgaaatggctgcatct

SEQ ID NO: 5551134 - DNA, 25 bp, Homo sapien
gctgcatctggaatataggtgccgc

SEQ ID NO: 5551135 - DNA, 25 bp, Homo sapien
acagaactctcctcgggcatcccac

SEQ ID NO: 5551136 - DNA, 25 bp, Homo sapien
agaaagaccgcaaaggagctttcca

SEQ ID NO: 5551137 - DNA, 25 bp, Homo sapien
tccttagggtcatgtgaggtaggaa

SEQ ID NO: 5551138 - DNA, 25 bp, Homo sapien
gcatcccacgcagcatggcacattt

SEQ ID NO: 5551139 - DNA, 25 bp, Homo sapien
ggggaacagtaaataacagcagcca

SEQ ID NO: 5551140 - DNA, 25 bp, Homo sapien
tttacctgtgagataaggccagtag

SEQ ID NO: 5551141 - DNA, 25 bp, Homo sapien
cagagcagggtcccgcttccctaag

SEQ ID NO: 5551142 - DNA, 25 bp, Homo sapien
gccagccccgtcctggcagggctgt

SEQ ID NO: 5551143 - DNA, 25 bp, Homo sapien
gaatggtgcgtcctaggtgttcacc

SEQ ID NO: 5551144 - DNA, 25 bp, Homo sapien
aggtcgtggccgcctctactccctt

SEQ ID NO: 5551145 - DNA, 25 bp, Homo sapien
cagtgctatctgggacatattcctc

SEQ ID NO: 5551146 - DNA, 25 bp, Homo sapien
tccctaaggccctgctctgggcttc

SEQ ID NO: 5551147 - DNA, 25 bp, Homo sapien
tttgagtccttggcaagcccaggag

SEQ ID NO: 5551148 - DNA, 25 bp, Homo sapien
cccagaacctgagctgctctgacgc

SEQ ID NO: 5551149 - DNA, 25 bp, Homo sapien
ttccctacaggggttcctggctctg

SEQ ID NO: 5551150 - DNA, 25 bp, Homo sapien
cggccgtctggtgcgtttcactgat

SEQ ID NO: 5551151 - DNA, 25 bp, Homo sapien
acaatggcattgtttacaggttggt

SEQ ID NO: 5551152 - DNA, 25 bp, Homo sapien
aggtgcccgctaccacgtctggtta

SEQ ID NO: 5551153 - DNA, 25 bp, Homo sapien
tccagtttttaggcagcatggctgc

SEQ ID NO: 5551154 - DNA, 25 bp, Homo sapien
agcatggctgcatcatttcaggttg

SEQ ID NO: 5551155 - DNA, 25 bp, Homo sapien
acagagctttctggtcaggcaattt

SEQ ID NO: 5551156 - DNA, 25 bp, Homo sapien
atttcatagtggagagcccatgttc

SEQ ID NO: 5551157 - DNA, 25 bp, Homo sapien
tacatgacatttgctctgggagatc

SEQ ID NO: 5551158 - DNA, 25 bp, Homo sapien
gcgcccggccaataccataatttca

SEQ ID NO: 5551159 - DNA, 25 bp, Homo sapien
gaagcagaactgtctacaatggcat

SEQ ID NO: 5551160 - DNA, 25 bp, Homo sapien
tttcaggttgaagcagaactgtcta

SEQ ID NO: 5551161 - DNA, 25 bp, Homo sapien
agtggagagcccatgttcatacacc

SEQ ID NO: 5551162 - DNA, 25 bp, Homo sapien
taaagagctgagacattactacttc

SEQ ID NO: 5551163 - DNA, 25 bp, Homo sapien
ttcagcagggttctgactgccagtc

SEQ ID NO: 5551164 - DNA, 25 bp, Homo sapien
ttgtgagtcacagtcagcctgatac

SEQ ID NO: 5551165 - DNA, 25 bp, Homo sapien
gtctgagagctcacaggtattgcta

SEQ ID NO: 5551166 - DNA, 25 bp, Homo sapien
gcagggataaggaagatccttcagt

SEQ ID NO: 5551167 - DNA, 25 bp, Homo sapien
aacacacaatttaaagagctgagac

SEQ ID NO: 5551168 - DNA, 25 bp, Homo sapien
gcgggcgctaatcctttcagcaggg

SEQ ID NO: 5551169 - DNA, 25 bp, Homo sapien
gcctgatactggatgttgaaatgtc

SEQ ID NO: 5551170 - DNA, 25 bp, Homo sapien
tcacactatgaaatggaaacaagta

SEQ ID NO: 5551171 - DNA, 25 bp, Homo sapien
gtcactttgaagccaggtacagtcc

SEQ ID NO: 5551172 - DNA, 25 bp, Homo sapien
ttaccagagttgccatgtgctgcgg

SEQ ID NO: 5551173 - DNA, 25 bp, Homo sapien
gaaacagctggactagttcagtggg

SEQ ID NO: 5551174 - DNA, 25 bp, Homo sapien
aggccttaggggatccctagagcca

SEQ ID NO: 5551175 - DNA, 25 bp, Homo sapien
agtggacacttgacatgacacaacc

SEQ ID NO: 5551176 - DNA, 25 bp, Homo sapien
tggggatgattcagcctgagtcaca

SEQ ID NO: 5551177 - DNA, 25 bp, Homo sapien
aacaacctgcagactaaggaagttc

SEQ ID NO: 5551178 - DNA, 25 bp, Homo sapien
aatggaaagtgtaaaccctgaaggc

SEQ ID NO: 5551179 - DNA, 25 bp, Homo sapien
acagcatacaggatacacagcacat

SEQ ID NO: 5551180 - DNA, 25 bp, Homo sapien
cctagagccaggaatcccctctggg

SEQ ID NO: 5551181 - DNA, 25 bp, Homo sapien
gaggagtccggatattcttggagtc

SEQ ID NO: 5551182 - DNA, 25 bp, Homo sapien
taggcaagcagacttaatgagatac

SEQ ID NO: 5551183 - DNA, 25 bp, Homo sapien
tggtgagtatgagtaattgcagaat

SEQ ID NO: 5551184 - DNA, 25 bp, Homo sapien
gctaaagactgcgttcacgtccacc

SEQ ID NO: 5551185 - DNA, 25 bp, Homo sapien
gtgaacgtgctgctcctcgcctgca

SEQ ID NO: 5551186 - DNA, 25 bp, Homo sapien
gccttcaacaaggtggccgtgtacg

SEQ ID NO: 5551187 - DNA, 25 bp, Homo sapien
cgcctgcacgctcatcagcggcgga

SEQ ID NO: 5551188 - DNA, 25 bp, Homo sapien
agccagtgatccctctagccctctc

SEQ ID NO: 5551189 - DNA, 25 bp, Homo sapien
tctacctcctccgaaccgtgcgctg

SEQ ID NO: 5551190 - DNA, 25 bp, Homo sapien
ttcaagaccggctactactccagtt

SEQ ID NO: 5551191 - DNA, 25 bp, Homo sapien
gctcactgcgatgatgctgctggca

SEQ ID NO: 5551192 - DNA, 25 bp, Homo sapien
tagccctctccagtcgcctccgcca

SEQ ID NO: 5551193 - DNA, 25 bp, Homo sapien
gagtgccagtcagccatcaagatcc

SEQ ID NO: 5551194 - DNA, 25 bp, Homo sapien
gctgtttggaatctgcaccctcatc

SEQ ID NO: 5551195 - DNA, 25 bp, Homo sapien
gcagatagaagggcagcttaattgc

SEQ ID NO: 5551196 - DNA, 25 bp, Homo sapien
gggcagtgtaggccttagtctgtgg

SEQ ID NO: 5551197 - DNA, 25 bp, Homo sapien
ggacgtccttcacttggagctgggc

SEQ ID NO: 5551198 - DNA, 25 bp, Homo sapien
cagctgccaattcgggatggctgac

SEQ ID NO: 5551199 - DNA, 25 bp, Homo sapien
cagcttaattgcgggcaccctgagg

SEQ ID NO: 5551200 - DNA, 25 bp, Homo sapien
tgggtcagagccatatccttgcagc

SEQ ID NO: 5551201 - DNA, 25 bp, Homo sapien
agctgggctccagtgaatgtcccag

SEQ ID NO: 5551202 - DNA, 25 bp, Homo sapien
accaaggacagattcatgcagatag

SEQ ID NO: 5551203 - DNA, 25 bp, Homo sapien
cacggcttctgggtcagagccatat

SEQ ID NO: 5551204 - DNA, 25 bp, Homo sapien
agcaaccaactcgctggacgtcctt

SEQ ID NO: 5551205 - DNA, 25 bp, Homo sapien
gcaccctgagggcacgttataggga

SEQ ID NO: 5551206 - DNA, 25 bp, Homo sapien
ggaggtaggagcctcccactgcaca

SEQ ID NO: 5551207 - DNA, 25 bp, Homo sapien
gaaagacccccagcttggctgtgga

SEQ ID NO: 5551208 - DNA, 25 bp, Homo sapien
tgttagttctggaggtcaagaaatc

SEQ ID NO: 5551209 - DNA, 25 bp, Homo sapien
gtcaggcttcctgggtgcatagatc

SEQ ID NO: 5551210 - DNA, 25 bp, Homo sapien
acaccacaataatgtgtcaggcttc

SEQ ID NO: 5551211 - DNA, 25 bp, Homo sapien
gcacggggactcttcagtgacatat

SEQ ID NO: 5551212 - DNA, 25 bp, Homo sapien
gtggaacctctaaggttgcaggact

SEQ ID NO: 5551213 - DNA, 25 bp, Homo sapien
atctcagattcaccacccatgctcc

SEQ ID NO: 5551214 - DNA, 25 bp, Homo sapien
tctctgacaggacaaatgttagttc

SEQ ID NO: 5551215 - DNA, 25 bp, Homo sapien
tggtgatcatatagagtagtgaaca

SEQ ID NO: 5551216 - DNA, 25 bp, Homo sapien
taggaatataaagattgagaaaaag

SEQ ID NO: 5551217 - DNA, 25 bp, Homo sapien
tacttcaaagacatggcactgctaa

SEQ ID NO: 5551218 - DNA, 25 bp, Homo sapien
gagaggcttacgtactttcataggc

SEQ ID NO: 5551219 - DNA, 25 bp, Homo sapien
tagttatcggagagtgcttcaaaat

SEQ ID NO: 5551220 - DNA, 25 bp, Homo sapien
tcataggcatatgtagaccacagaa

SEQ ID NO: 5551221 - DNA, 25 bp, Homo sapien
tgtcagaataatagcccagtagaat

SEQ ID NO: 5551222 - DNA, 25 bp, Homo sapien
tataagtaaggaatctgtggagaga

SEQ ID NO: 5551223 - DNA, 25 bp, Homo sapien
attagccagagttgctgtcagaata

SEQ ID NO: 5551224 - DNA, 25 bp, Homo sapien
aatgggaactgcattagccagagtt

SEQ ID NO: 5551225 - DNA, 25 bp, Homo sapien
ctaggtgtgaattgaaagcagtaat

SEQ ID NO: 5551226 - DNA, 25 bp, Homo sapien
aagatgtaaagtagttgtcaaatgt

SEQ ID NO: 5551227 - DNA, 25 bp, Homo sapien
ttaaaggataggtgcaatgcattga

SEQ ID NO: 5551228 - DNA, 25 bp, Homo sapien
aggaaatgtaacagaaaactgcagt

SEQ ID NO: 5551229 - DNA, 25 bp, Homo sapien
tttatgatactaggggaaaatgatg

SEQ ID NO: 5551230 - DNA, 25 bp, Homo sapien
acatagtagacattagatagtagta

SEQ ID NO: 5551231 - DNA, 25 bp, Homo sapien
ttgccgaaagcaattcagaagaatc

SEQ ID NO: 5551232 - DNA, 25 bp, Homo sapien
atcagtgttagaagtgaggcctaaa

SEQ ID NO: 5551233 - DNA, 25 bp, Homo sapien
tgaggcctaaattatatgaagcagc

SEQ ID NO: 5551234 - DNA, 25 bp, Homo sapien
aattgtaggtgaataaaaagtatgc

SEQ ID NO: 5551235 - DNA, 25 bp, Homo sapien
agttctgactataatggagtgaatt

SEQ ID NO: 5551236 - DNA, 25 bp, Homo sapien
aaatggaaggtggcacttacaacta

SEQ ID NO: 5551237 - DNA, 25 bp, Homo sapien
aattgggggaatatggtatacttct

SEQ ID NO: 5551238 - DNA, 25 bp, Homo sapien
atatgaaagagcttagtacgataat

SEQ ID NO: 5551239 - DNA, 25 bp, Homo sapien
ataacccagaaataacagctttgat

SEQ ID NO: 5551240 - DNA, 25 bp, Homo sapien
taagctctgcacaaatgagaccaaa

SEQ ID NO: 5551241 - DNA, 25 bp, Homo sapien
ttgggaaccatacagaataccagtc

SEQ ID NO: 5551242 - DNA, 25 bp, Homo sapien
gcttaggcaaggagaaaaatataag

SEQ ID NO: 5551243 - DNA, 25 bp, Homo sapien
tggcaagccctcagggtttactgct

SEQ ID NO: 5551244 - DNA, 25 bp, Homo sapien
ttgggtgggatgattaataacccag

SEQ ID NO: 5551245 - DNA, 25 bp, Homo sapien
ggtgacatggactagtccaaggtaa

SEQ ID NO: 5551246 - DNA, 25 bp, Homo sapien
gtccaaggtaaataaacatgccaat

SEQ ID NO: 5551247 - DNA, 25 bp, Homo sapien
taataacttataaagtgggagagat

SEQ ID NO: 5551248 - DNA, 25 bp, Homo sapien
tttgattagtgaaaggtgacatgga

SEQ ID NO: 5551249 - DNA, 25 bp, Homo sapien
caaatgaagaacagcttaggcaagg

SEQ ID NO: 5551250 - DNA, 25 bp, Homo sapien
tactctcccatccccgagccctccc

SEQ ID NO: 5551251 - DNA, 25 bp, Homo sapien
gataccccactgcctgatgtcattt

SEQ ID NO: 5551252 - DNA, 25 bp, Homo sapien
gtcactaaagaaagcgtggtcactg

SEQ ID NO: 5551253 - DNA, 25 bp, Homo sapien
cttgctgagtctcagagttcctgtg

SEQ ID NO: 5551254 - DNA, 25 bp, Homo sapien
cctcccaggacacccttgctgagtc

SEQ ID NO: 5551255 - DNA, 25 bp, Homo sapien
acagttctgaatgagttgtgaatct

SEQ ID NO: 5551256 - DNA, 25 bp, Homo sapien
ctgtgtactctcccatccccgagcc

SEQ ID NO: 5551257 - DNA, 25 bp, Homo sapien
acacagataccccactgcctgatgt

SEQ ID NO: 5551258 - DNA, 25 bp, Homo sapien
ctgaatgagttgtgaatctgtgtac

SEQ ID NO: 5551259 - DNA, 25 bp, Homo sapien
ccctaggactaaagtgatcttggtc

SEQ ID NO: 5551260 - DNA, 25 bp, Homo sapien
ttctctagtctagtcccctaggact

SEQ ID NO: 5551261 - DNA, 25 bp, Homo sapien
agctattctaatgactgtggatgcc

SEQ ID NO: 5551262 - DNA, 25 bp, Homo sapien
tctgactgggttactttgaaagacc

SEQ ID NO: 5551263 - DNA, 25 bp, Homo sapien
ctagcaagactagagaacttttcct

SEQ ID NO: 5551264 - DNA, 25 bp, Homo sapien
gtaggaatgccaataagttataagt

SEQ ID NO: 5551265 - DNA, 25 bp, Homo sapien
atgactgtggatgccttaggaatgg

SEQ ID NO: 5551266 - DNA, 25 bp, Homo sapien
tttcttttgcattgaccacagctat

SEQ ID NO: 5551267 - DNA, 25 bp, Homo sapien
agggtatctgctgctaagtctgttg

SEQ ID NO: 5551268 - DNA, 25 bp, Homo sapien
taatttggccctttgtttgagctgc

SEQ ID NO: 5551269 - DNA, 25 bp, Homo sapien
ccttaggaatgggcatcttgtttac

SEQ ID NO: 5551270 - DNA, 25 bp, Homo sapien
tcttttctaggttgcagggtatctg

SEQ ID NO: 5551271 - DNA, 25 bp, Homo sapien
atcccacaggtgttctctgaatttc

SEQ ID NO: 5551272 - DNA, 25 bp, Homo sapien
ctcagctcacagattttgcgcttgc

SEQ ID NO: 5551273 - DNA, 25 bp, Homo sapien
aaaggatgaattatctgtgctccta

SEQ ID NO: 5551274 - DNA, 25 bp, Homo sapien
agcaaaagtccaagtgctctggcgc

SEQ ID NO: 5551275 - DNA, 25 bp, Homo sapien
cgaaagctcacctccagatgcccag

SEQ ID NO: 5551276 - DNA, 25 bp, Homo sapien
tggctttaagcgatactctcacctc

SEQ ID NO: 5551277 - DNA, 25 bp, Homo sapien
tctggcgccccctacctctctgacc

SEQ ID NO: 5551278 - DNA, 25 bp, Homo sapien
tgctcctagcaaagaccaaccccat

SEQ ID NO: 5551279 - DNA, 25 bp, Homo sapien
gcttgctcttgtcatgcctggcctc

SEQ ID NO: 5551280 - DNA, 25 bp, Homo sapien
ctctctgcctcgaaagctcacctcc

SEQ ID NO: 5551281 - DNA, 25 bp, Homo sapien
aaacacatttgtcagatcacgtcac

SEQ ID NO: 5551282 - DNA, 25 bp, Homo sapien
ccccatccacttgtacatcagactc

SEQ ID NO: 5551283 - DNA, 25 bp, Homo sapien
gtccagattaccgtgacgccgacgg

SEQ ID NO: 5551284 - DNA, 25 bp, Homo sapien
ccgtcggcgtcacggtaatctggac

SEQ ID NO: 5551285 - DNA, 25 bp, Homo sapien
ttgagaacagaggagtattatttgc

SEQ ID NO: 5551286 - DNA, 25 bp, Homo sapien
aaatgtgatcttcttgagaacagag

SEQ ID NO: 5551287 - DNA, 25 bp, Homo sapien
cattaaaatgtgatcttcttgagaa

SEQ ID NO: 5551288 - DNA, 25 bp, Homo sapien
gagaacagaggagtattatttgctc

SEQ ID NO: 5551289 - DNA, 25 bp, Homo sapien
gctgtcttttatagcaagcagaaca

SEQ ID NO: 5551290 - DNA, 25 bp, Homo sapien
tcttttatagcaagcagaacagtga

SEQ ID NO: 5551291 - DNA, 25 bp, Homo sapien
tgagaacagaggagtattatttgct

SEQ ID NO: 5551292 - DNA, 25 bp, Homo sapien
cagaggagtattatttgctcattgc

SEQ ID NO: 5551293 - DNA, 25 bp, Homo sapien
atgtgatcttcttgagaacagagga

SEQ ID NO: 5551294 - DNA, 25 bp, Homo sapien
gaacagaggagtattatttgctcat

SEQ ID NO: 5551295 - DNA, 25 bp, Homo sapien
tgtcttttatagcaagcagaacagt

SEQ ID NO: 5551296 - DNA, 25 bp, Homo sapien
ccacctgccgctctgcccacctcag

SEQ ID NO: 5551297 - DNA, 25 bp, Homo sapien
atgtccgaaacctacggtacgaggc

SEQ ID NO: 5551298 - DNA, 25 bp, Homo sapien
cctcgcgtagcccatctcctcttcc

SEQ ID NO: 5551299 - DNA, 25 bp, Homo sapien
cgctctgcccacctcagcgcacacc

SEQ ID NO: 5551300 - DNA, 25 bp, Homo sapien
cgccccaggtccttccccaccgaga

SEQ ID NO: 5551301 - DNA, 25 bp, Homo sapien
gggcctcgcgtagcccatctcctct

SEQ ID NO: 5551302 - DNA, 25 bp, Homo sapien
gccatgtccgaaacctacggtacga

SEQ ID NO: 5551303 - DNA, 25 bp, Homo sapien
gccgctcccaagatgtcgcagacgg

SEQ ID NO: 5551304 - DNA, 25 bp, Homo sapien
tcctcttcctcctcgcggtcgcggc

SEQ ID NO: 5551305 - DNA, 25 bp, Homo sapien
gcgccgctcccaagatgtcgcagac

SEQ ID NO: 5551306 - DNA, 25 bp, Homo sapien
cagacggccatgtccgaaacctacg

SEQ ID NO: 5551307 - DNA, 25 bp, Homo sapien
tactcagcacagatccttcacgggt

SEQ ID NO: 5551308 - DNA, 25 bp, Homo sapien
caccacagggtggtttttctcctat

SEQ ID NO: 5551309 - DNA, 25 bp, Homo sapien
gcacagatccttcacgggtgtcggg

SEQ ID NO: 5551310 - DNA, 25 bp, Homo sapien
taatcctactcagcacagatccttc

SEQ ID NO: 5551311 - DNA, 25 bp, Homo sapien
caaatgtacgatcagttttatactg

SEQ ID NO: 5551312 - DNA, 25 bp, Homo sapien
gtgtcacaagtaagttcaagggaag

SEQ ID NO: 5551313 - DNA, 25 bp, Homo sapien
agggaaggtactatgtctagatgtg

SEQ ID NO: 5551314 - DNA, 25 bp, Homo sapien
acatttcagtggagtaaagagtaac

SEQ ID NO: 5551315 - DNA, 25 bp, Homo sapien
tactatgtctagatgtgcacgtagg

SEQ ID NO: 5551316 - DNA, 25 bp, Homo sapien
actatctcagcaagaggaatgtggc

SEQ ID NO: 5551317 - DNA, 25 bp, Homo sapien
cacccaaacatttcagtggagtaaa

SEQ ID NO: 5551318 - DNA, 25 bp, Homo sapien
cggcgcggaaacacaccggcccgcc

SEQ ID NO: 5551319 - DNA, 25 bp, Homo sapien
ggcgggccggtgtgtttccgcgccg

SEQ ID NO: 5551320 - DNA, 25 bp, Homo sapien
ggcgcggaaacacaccggcccgccc

SEQ ID NO: 5551321 - DNA, 25 bp, Homo sapien
gggcgggccggtgtgtttccgcgcc

SEQ ID NO: 5551322 - DNA, 25 bp, Homo sapien
ggaaagagatatttagcaaagacac

SEQ ID NO: 5551323 - DNA, 25 bp, Homo sapien
gcggcacaagccatgcctgcttccc

SEQ ID NO: 5551324 - DNA, 25 bp, Homo sapien
gccatgcctgcttcccagcgtcagc

SEQ ID NO: 5551325 - DNA, 25 bp, Homo sapien
tcgtccagcaccatggtgccgagcc

SEQ ID NO: 5551326 - DNA, 25 bp, Homo sapien
tgctccaaaagaaaccgacagcagc

SEQ ID NO: 5551327 - DNA, 25 bp, Homo sapien
tcgccaacggacgcctcgtccagca

SEQ ID NO: 5551328 - DNA, 25 bp, Homo sapien
acctgctgacacattgccaggccga

SEQ ID NO: 5551329 - DNA, 25 bp, Homo sapien
gagagccacccattcagcccggctt

SEQ ID NO: 5551330 - DNA, 25 bp, Homo sapien
aagagacttgcagaggaaatttgaa

SEQ ID NO: 5551331 - DNA, 25 bp, Homo sapien
agctatcacaagtcgagcctgtccc

SEQ ID NO: 5551332 - DNA, 25 bp, Homo sapien
tctcacccgaagacacctgctgaca

SEQ ID NO: 5551333 - DNA, 25 bp, Homo sapien
tgactctaagtaacctgtgtgaccc

SEQ ID NO: 5551334 - DNA, 25 bp, Homo sapien
gaccgcccagtcagcattcctgcca

SEQ ID NO: 5551335 - DNA, 25 bp, Homo sapien
ccagggcctgctgactaatgtgccc

SEQ ID NO: 5551336 - DNA, 25 bp, Homo sapien
gcggagccaaatggtatagcaccga

SEQ ID NO: 5551337 - DNA, 25 bp, Homo sapien
gccacctcaagccttgcggagccaa

SEQ ID NO: 5551338 - DNA, 25 bp, Homo sapien
accgaatggagcatgcgttccaaga

SEQ ID NO: 5551339 - DNA, 25 bp, Homo sapien
agagagagaatcttagtaccctcag

SEQ ID NO: 5551340 - DNA, 25 bp, Homo sapien
atgcgttccaagagctgacacagtg

SEQ ID NO: 5551341 - DNA, 25 bp, Homo sapien
gacacctttgcagtagttgagcccc

SEQ ID NO: 5551342 - DNA, 25 bp, Homo sapien
tgaagcagatgaaaactgcatggac

SEQ ID NO: 5551343 - DNA, 25 bp, Homo sapien
gtgtgttagaaagaatgcagacacc

SEQ ID NO: 5551344 - DNA, 25 bp, Homo sapien
atgcggtcttgcagtgagctgttct

SEQ ID NO: 5551345 - DNA, 25 bp, Homo sapien
ctgaggagttgttctaggacctgga

SEQ ID NO: 5551346 - DNA, 25 bp, Homo sapien
tcataggtgagttatgggctcatgc

SEQ ID NO: 5551347 - DNA, 25 bp, Homo sapien
tccggatcagcccgtctaggagaga

SEQ ID NO: 5551348 - DNA, 25 bp, Homo sapien
agtacaggggatatcctggcatgga

SEQ ID NO: 5551349 - DNA, 25 bp, Homo sapien
gaagactggtctgacggcaacttct

SEQ ID NO: 5551350 - DNA, 25 bp, Homo sapien
ctagaataactgagaatgtgaagct

SEQ ID NO: 5551351 - DNA, 25 bp, Homo sapien
tgatcagtgcaaggtttgctgagtc

SEQ ID NO: 5551352 - DNA, 25 bp, Homo sapien
ctggagtggggtacatcttagtaca

SEQ ID NO: 5551353 - DNA, 25 bp, Homo sapien
gctgagtcgatcataaagcagggtc

SEQ ID NO: 5551354 - DNA, 25 bp, Homo sapien
ttttagaagttggcacatggtcctg

SEQ ID NO: 5551355 - DNA, 25 bp, Homo sapien
accatagatgagaatactaacacct

SEQ ID NO: 5551356 - DNA, 25 bp, Homo sapien
gaaagagatcagacttgactgactc

SEQ ID NO: 5551357 - DNA, 25 bp, Homo sapien
tgaagccttggaacctcagcctggc

SEQ ID NO: 5551358 - DNA, 25 bp, Homo sapien
agacagctgcaaagcagttccactc

SEQ ID NO: 5551359 - DNA, 25 bp, Homo sapien
agtgactgacggccctttcccaact

SEQ ID NO: 5551360 - DNA, 25 bp, Homo sapien
gtccttgctcagtcctggaagtagg

SEQ ID NO: 5551361 - DNA, 25 bp, Homo sapien
ctgaaacaaaactgataatagccct

SEQ ID NO: 5551362 - DNA, 25 bp, Homo sapien
gcctggcttgcgtgagtacactcag

SEQ ID NO: 5551363 - DNA, 25 bp, Homo sapien
taagaataaggtgctgttaaaccca

SEQ ID NO: 5551364 - DNA, 25 bp, Homo sapien
gaagtaggctggaactaaccttggc

SEQ ID NO: 5551365 - DNA, 25 bp, Homo sapien
ttggcaaggaattcagtttatggtt

SEQ ID NO: 5551366 - DNA, 25 bp, Homo sapien
aggaaccatagcctaatcgaaggtc

SEQ ID NO: 5551367 - DNA, 25 bp, Homo sapien
ttgcacatggatgtccagttgttcc

SEQ ID NO: 5551368 - DNA, 25 bp, Homo sapien
ttaatagcgacctttgcagcacaaa

SEQ ID NO: 5551369 - DNA, 25 bp, Homo sapien
cagttgactgtaaatgtatggattt

SEQ ID NO: 5551370 - DNA, 25 bp, Homo sapien
tcagtgtcatctaggaaccatagcc

SEQ ID NO: 5551371 - DNA, 25 bp, Homo sapien
gctagtaccatacagtcttgatgac

SEQ ID NO: 5551372 - DNA, 25 bp, Homo sapien
atcgaaggtcattaggatttgcacc

SEQ ID NO: 5551373 - DNA, 25 bp, Homo sapien
tcctcatgaactgtcgtcttgcctc

SEQ ID NO: 5551374 - DNA, 25 bp, Homo sapien
tgagattggaaagtgttcttgggct

SEQ ID NO: 5551375 - DNA, 25 bp, Homo sapien
aatattttgattgtgtgggttgtct

SEQ ID NO: 5551376 - DNA, 25 bp, Homo sapien
ttcttgggctgagaaatgtaagaat

SEQ ID NO: 5551377 - DNA, 25 bp, Homo sapien
caaagggaacttgcaccatcttggt

SEQ ID NO: 5551378 - DNA, 25 bp, Homo sapien
atgtagcaaagcactctttgaagta

SEQ ID NO: 5551379 - DNA, 25 bp, Homo sapien
cacgccatctgcaaagggaacttgc

SEQ ID NO: 5551380 - DNA, 25 bp, Homo sapien
aataacagcatttcaggactggttt

SEQ ID NO: 5551381 - DNA, 25 bp, Homo sapien
tgtgaacctgttgtctcttgaggac

SEQ ID NO: 5551382 - DNA, 25 bp, Homo sapien
ctctttgaagtaaaagtacctgtct

SEQ ID NO: 5551383 - DNA, 25 bp, Homo sapien
aaaaatcaagtgtgcccacgccatc

SEQ ID NO: 5551384 - DNA, 25 bp, Homo sapien
caaaacgaaatccctaacattatta

SEQ ID NO: 5551385 - DNA, 25 bp, Homo sapien
atcatggaaattactgtgaacctgt

SEQ ID NO: 5551386 - DNA, 25 bp, Homo sapien
cccagcttagccacacccaacatca

SEQ ID NO: 5551387 - DNA, 25 bp, Homo sapien
gaaccaatccccagcttagccacac

SEQ ID NO: 5551388 - DNA, 25 bp, Homo sapien
aaacttgttggagacccgattgcac

SEQ ID NO: 5551389 - DNA, 25 bp, Homo sapien
attgctggaattctgaaaaatttgt

SEQ ID NO: 5551390 - DNA, 25 bp, Homo sapien
tgcacatcactggcaggagaactga

SEQ ID NO: 5551391 - DNA, 25 bp, Homo sapien
aggagaactgaggtccaaaatagct

SEQ ID NO: 5551392 - DNA, 25 bp, Homo sapien
tcagttattttatatgtggaggtac

SEQ ID NO: 5551393 - DNA, 25 bp, Homo sapien
tttcagaataaatgagttgcttcac

SEQ ID NO: 5551394 - DNA, 25 bp, Homo sapien
ggagacccgattgcacatcactggc

SEQ ID NO: 5551395 - DNA, 25 bp, Homo sapien
aaaatagctgaaacctttggacttc

SEQ ID NO: 5551396 - DNA, 25 bp, Homo sapien
ctttggacttcaagaaaattatatc

SEQ ID NO: 5551397 - DNA, 25 bp, Homo sapien
tgtggaggtacaatttgtataggaa

SEQ ID NO: 5551398 - DNA, 25 bp, Homo sapien
tgtataggaaagttagaataaaata

SEQ ID NO: 5551399 - DNA, 25 bp, Homo sapien
aacgtcagatcaatgaactatgaac

SEQ ID NO: 5551400 - DNA, 25 bp, Homo sapien
ttgtcaaataatgctgtttagctaa

SEQ ID NO: 5551401 - DNA, 25 bp, Homo sapien
tcttaagcctattgagtgatttatt

SEQ ID NO: 5551402 - DNA, 25 bp, Homo sapien
tctctttcaagggaatttgtcaaat

SEQ ID NO: 5551403 - DNA, 25 bp, Homo sapien
ggacagcaagtattatggccaaagc

SEQ ID NO: 5551404 - DNA, 25 bp, Homo sapien
tttgcatgtatgaagaactgagtca

SEQ ID NO: 5551405 - DNA, 25 bp, Homo sapien
atggccaaagccagtttcttggcat

SEQ ID NO: 5551406 - DNA, 25 bp, Homo sapien
gcaagcaattgcatattaacagctg

SEQ ID NO: 5551407 - DNA, 25 bp, Homo sapien
tgtgattttgttggacagcaagtat

SEQ ID NO: 5551408 - DNA, 25 bp, Homo sapien
ttctttcagcacaaacaacagcaaa

SEQ ID NO: 5551409 - DNA, 25 bp, Homo sapien
ttacttgattcagtgtgctagacac

SEQ ID NO: 5551410 - DNA, 25 bp, Homo sapien
cgacctgaggtgatccactgcctca

SEQ ID NO: 5551411 - DNA, 25 bp, Homo sapien
cacgcccggccttgtgtggttttaa

SEQ ID NO: 5551412 - DNA, 25 bp, Homo sapien
ccatttatgtggatgatctcggctc

SEQ ID NO: 5551413 - DNA, 25 bp, Homo sapien
atagccagagaacaccatttatgtg

SEQ ID NO: 5551414 - DNA, 25 bp, Homo sapien
tattgagaacagagttattgaagtc

SEQ ID NO: 5551415 - DNA, 25 bp, Homo sapien
tgggtatatgttctgtgggcacttg

SEQ ID NO: 5551416 - DNA, 25 bp, Homo sapien
gtgggcacttggaaagaatatgtat

SEQ ID NO: 5551417 - DNA, 25 bp, Homo sapien
catgtgccaccatgcacggctagtt

SEQ ID NO: 5551418 - DNA, 25 bp, Homo sapien
tttatgacccagaatatgatctatc

SEQ ID NO: 5551419 - DNA, 25 bp, Homo sapien
attaaaccagttgataatgttatcc

SEQ ID NO: 5551420 - DNA, 25 bp, Homo sapien
ctgttgctcttgagtagagtgtttt

SEQ ID NO: 5551421 - DNA, 25 bp, Homo sapien
ccaaggaacagtgccaagttagatg

SEQ ID NO: 5551422 - DNA, 25 bp, Homo sapien
cacccaaacaagaagctggaattag

SEQ ID NO: 5551423 - DNA, 25 bp, Homo sapien
gatgccgattacccacttcgagtcc

SEQ ID NO: 5551424 - DNA, 25 bp, Homo sapien
tgacaagagtatgtggccttgcaac

SEQ ID NO: 5551425 - DNA, 25 bp, Homo sapien
aagaagaaatatgtgacaagagtat

SEQ ID NO: 5551426 - DNA, 25 bp, Homo sapien
gccaaaattcccagagcaaagaaga

SEQ ID NO: 5551427 - DNA, 25 bp, Homo sapien
tttattgtggagtctgttcattacc

SEQ ID NO: 5551428 - DNA, 25 bp, Homo sapien
accacaaaaggttactatagccaaa

SEQ ID NO: 5551429 - DNA, 25 bp, Homo sapien
gaccgcctgggtttgtgaaatggct

SEQ ID NO: 5551430 - DNA, 25 bp, Homo sapien
atttctgaatccagcggggctgact

SEQ ID NO: 5551431 - DNA, 25 bp, Homo sapien
acagtgccaagttagatgccgatta

SEQ ID NO: 5551432 - DNA, 25 bp, Homo sapien
ctgacagaaatagtcggcctcatcc

SEQ ID NO: 5551433 - DNA, 25 bp, Homo sapien
atccccgacctcgaccctgctgatg

SEQ ID NO: 5551434 - DNA, 25 bp, Homo sapien
gagggccggtcgaaattataataga

SEQ ID NO: 5551435 - DNA, 25 bp, Homo sapien
ccactacttatatcccacagctgac

SEQ ID NO: 5551436 - DNA, 25 bp, Homo sapien
ctacttatatcccacagctgacaga

SEQ ID NO: 5551437 - DNA, 25 bp, Homo sapien
ctcatccccgacctcgaccctgctg

SEQ ID NO: 5551438 - DNA, 25 bp, Homo sapien
gacagaaatagtcggcctcatcccc

SEQ ID NO: 5551439 - DNA, 25 bp, Homo sapien
actttcaatattgtcccccccacag

SEQ ID NO: 5551440 - DNA, 25 bp, Homo sapien
ttataatagatgaccagaatagggg

SEQ ID NO: 5551441 - DNA, 25 bp, Homo sapien
agctgacagaaatagtcggcctcat

SEQ ID NO: 5551442 - DNA, 25 bp, Homo sapien
tggtaccagtgcacagttttacttt

SEQ ID NO: 5551443 - DNA, 25 bp, Homo sapien
acacctgaatagttggacagaaaat

SEQ ID NO: 5551444 - DNA, 25 bp, Homo sapien
tgaatagttggacagaaaattgaaa

SEQ ID NO: 5551445 - DNA, 25 bp, Homo sapien
agtgaaatagaaagttaggctgtaa

SEQ ID NO: 5551446 - DNA, 25 bp, Homo sapien
gcacagtgaaatagaaagttaggct

SEQ ID NO: 5551447 - DNA, 25 bp, Homo sapien
aagcacagtgaaatagaaagttagg

SEQ ID NO: 5551448 - DNA, 25 bp, Homo sapien
tgaagcacagtgaaatagaaagtta

SEQ ID NO: 5551449 - DNA, 25 bp, Homo sapien
gaaatagaaagttaggctgtaagaa

SEQ ID NO: 5551450 - DNA, 25 bp, Homo sapien
ttctaactatgaagcacagtgaaat

SEQ ID NO: 5551451 - DNA, 25 bp, Homo sapien
aattctaactatgaagcacagtgaa

SEQ ID NO: 5551452 - DNA, 25 bp, Homo sapien
agttggacagaaaattgaaatcttt

SEQ ID NO: 5551453 - DNA, 25 bp, Homo sapien
aatagttggacagaaaattgaaatc

SEQ ID NO: 5551454 - DNA, 25 bp, Homo sapien
cagaaacaagatatgacaaagggag

SEQ ID NO: 5551455 - DNA, 25 bp, Homo sapien
tcatcagaaacaagatatgacaaag

SEQ ID NO: 5551456 - DNA, 25 bp, Homo sapien
cctgaaaggaaagtcctcctttctg

SEQ ID NO: 5551457 - DNA, 25 bp, Homo sapien
gaaaagaccgttggactcacgagtg

SEQ ID NO: 5551458 - DNA, 25 bp, Homo sapien
agaaaagaccgttggactcacgagt

SEQ ID NO: 5551459 - DNA, 25 bp, Homo sapien
ctttctgcagaaaagaccgttggac

SEQ ID NO: 5551460 - DNA, 25 bp, Homo sapien
agccccagaaagacccctgaaagga

SEQ ID NO: 5551461 - DNA, 25 bp, Homo sapien
ttttatagtaagagccccagaaaga

SEQ ID NO: 5551462 - DNA, 25 bp, Homo sapien
cctcctttctgcagaaaagaccgtt

SEQ ID NO: 5551463 - DNA, 25 bp, Homo sapien
ccccttttatagtaagagccccaga

SEQ ID NO: 5551464 - DNA, 25 bp, Homo sapien
ttttgtcatcagaaacaagatatga

SEQ ID NO: 5551465 - DNA, 25 bp, Homo sapien
agtgtactcacacaatacgtggtct

SEQ ID NO: 5551466 - DNA, 25 bp, Homo sapien
ttattatatccagagagttgtgcaa

SEQ ID NO: 5551467 - DNA, 25 bp, Homo sapien
tggaatgctgagtcatataataact

SEQ ID NO: 5551468 - DNA, 25 bp, Homo sapien
tagcataacatgttgaagggtcatc

SEQ ID NO: 5551469 - DNA, 25 bp, Homo sapien
ctcttggttgtatatctaggagtgg

SEQ ID NO: 5551470 - DNA, 25 bp, Homo sapien
aaaaagatacctgatacccattaac

SEQ ID NO: 5551471 - DNA, 25 bp, Homo sapien
atgtgccattggatgaatacatcac

SEQ ID NO: 5551472 - DNA, 25 bp, Homo sapien
atgttggtgcatgaaccagttattc

SEQ ID NO: 5551473 - DNA, 25 bp, Homo sapien
ttgaagggtcatccatgttggtgca

SEQ ID NO: 5551474 - DNA, 25 bp, Homo sapien
gagatataatggatacagtttaccc

SEQ ID NO: 5551475 - DNA, 25 bp, Homo sapien
atgtacaagcttatgtgtaggcata

SEQ ID NO: 5551476 - DNA, 25 bp, Homo sapien
aacggctgggctcgctgatatttat

SEQ ID NO: 5551477 - DNA, 25 bp, Homo sapien
aggaacgtgaccattgaagcaccac

SEQ ID NO: 5551478 - DNA, 25 bp, Homo sapien
gtcacctgatcacaggacagcgggc

SEQ ID NO: 5551479 - DNA, 25 bp, Homo sapien
tcagtaacgggtgccttcccagaca

SEQ ID NO: 5551480 - DNA, 25 bp, Homo sapien
ataaggagggtcagtcttctaagtg

SEQ ID NO: 5551481 - DNA, 25 bp, Homo sapien
gcggcaggcatcagcgttttcttct

SEQ ID NO: 5551482 - DNA, 25 bp, Homo sapien
accactaccacaaagacacggagac

SEQ ID NO: 5551483 - DNA, 25 bp, Homo sapien
cccggtctgctcagtaacgggtgcc

SEQ ID NO: 5551484 - DNA, 25 bp, Homo sapien
ctcttaggtagctgaagcagagaga

SEQ ID NO: 5551485 - DNA, 25 bp, Homo sapien
gggaccactaccacaaagacacgga

SEQ ID NO: 5551486 - DNA, 25 bp, Homo sapien
cgcttgaccaaggggccctcaagcg

SEQ ID NO: 5551487 - DNA, 25 bp, Homo sapien
tcgcgggcccgagcgtcgactgctc

SEQ ID NO: 5551488 - DNA, 25 bp, Homo sapien
gagcagtcgacgctcgggcccgcga

SEQ ID NO: 5551489 - DNA, 25 bp, Homo sapien
tgtagctatttggcagtccaaggcc

SEQ ID NO: 5551490 - DNA, 25 bp, Homo sapien
tggtctgtccttataggccagctta

SEQ ID NO: 5551491 - DNA, 25 bp, Homo sapien
ttggacccaggatattgcctcccta

SEQ ID NO: 5551492 - DNA, 25 bp, Homo sapien
aagacagctagctctatgagatcca

SEQ ID NO: 5551493 - DNA, 25 bp, Homo sapien
cagtccaaggcctaggtaaactggt

SEQ ID NO: 5551494 - DNA, 25 bp, Homo sapien
gctcaaaggccttagtggagacatc

SEQ ID NO: 5551495 - DNA, 25 bp, Homo sapien
gagatccattgtcacgtgcagtcac

SEQ ID NO: 5551496 - DNA, 25 bp, Homo sapien
tccagcttggcaatgagagccagag

SEQ ID NO: 5551497 - DNA, 25 bp, Homo sapien
tttgtattttatgatgcagggcagg

SEQ ID NO: 5551498 - DNA, 25 bp, Homo sapien
gtggactagacatcccagtcttctc

SEQ ID NO: 5551499 - DNA, 25 bp, Homo sapien
agagccagagattttggacccagga

SEQ ID NO: 5551500 - DNA, 25 bp, Homo sapien
ctgctctggagataaattgggaaat

SEQ ID NO: 5551501 - DNA, 25 bp, Homo sapien
aacacccatgtgatattcggcggag

SEQ ID NO: 5551502 - DNA, 25 bp, Homo sapien
ctggtatcaacagagaccaggccag

SEQ ID NO: 5551503 - DNA, 25 bp, Homo sapien
aatatgcttcctggtatcaacagag

SEQ ID NO: 5551504 - DNA, 25 bp, Homo sapien
ggacaacacccatgtgatattcggc

SEQ ID NO: 5551505 - DNA, 25 bp, Homo sapien
acctctggaaacacagccactctga

SEQ ID NO: 5551506 - DNA, 25 bp, Homo sapien
atgcttcctggtatcaacagagacc

SEQ ID NO: 5551507 - DNA, 25 bp, Homo sapien
acccatgtgatattcggcggaggga

SEQ ID NO: 5551508 - DNA, 25 bp, Homo sapien
cctctggaaacacagccactctgac

SEQ ID NO: 5551509 - DNA, 25 bp, Homo sapien
agccagcttcacctgctctggagat

SEQ ID NO: 5551510 - DNA, 25 bp, Homo sapien
ggcgtgggacaacacccatgtgata

SEQ ID NO: 5551511 - DNA, 25 bp, Homo sapien
gtcctgacggccaaacgggggagac

SEQ ID NO: 5551512 - DNA, 25 bp, Homo sapien
gtctcccccgtttggccgtcaggac

SEQ ID NO: 5551513 - DNA, 25 bp, Homo sapien
gggcagtccttgaccccatcacagg

SEQ ID NO: 5551514 - DNA, 25 bp, Homo sapien
ggcagtccttgaccccatcacaggc

SEQ ID NO: 5551515 - DNA, 25 bp, Homo sapien
tcacagaacagaggaactctccagg

SEQ ID NO: 5551516 - DNA, 25 bp, Homo sapien
agggacacagagtccattcacagaa

SEQ ID NO: 5551517 - DNA, 25 bp, Homo sapien
ggcagggacacagagtccattcaca

SEQ ID NO: 5551518 - DNA, 25 bp, Homo sapien
tccttgaccccatcacaggcaggga

SEQ ID NO: 5551519 - DNA, 25 bp, Homo sapien
acagagtccattcacagaacagagg

SEQ ID NO: 5551520 - DNA, 25 bp, Homo sapien
gagtccattcacagaacagaggaac

SEQ ID NO: 5551521 - DNA, 25 bp, Homo sapien
cagagtccattcacagaacagagga

SEQ ID NO: 5551522 - DNA, 25 bp, Homo sapien
acacagagtccattcacagaacaga

SEQ ID NO: 5551523 - DNA, 25 bp, Homo sapien
cttgaccccatcacaggcagggaca

SEQ ID NO: 5551524 - DNA, 25 bp, Homo sapien
agatagatagtgctgcaattgttaa

SEQ ID NO: 5551525 - DNA, 25 bp, Homo sapien
tctgtggaacagagtttagccttct

SEQ ID NO: 5551526 - DNA, 25 bp, Homo sapien
tatcggcaattgacgtatatgctaa

SEQ ID NO: 5551527 - DNA, 25 bp, Homo sapien
actcaaaagtgaaaggaggatattt

SEQ ID NO: 5551528 - DNA, 25 bp, Homo sapien
agtagacttaagattgtaatgacat

SEQ ID NO: 5551529 - DNA, 25 bp, Homo sapien
ttgttagacttatggatgtggttcc

SEQ ID NO: 5551530 - DNA, 25 bp, Homo sapien
gaatatgatagaaattggtgctagt

SEQ ID NO: 5551531 - DNA, 25 bp, Homo sapien
tgagggaaagatttggaatatgata

SEQ ID NO: 5551532 - DNA, 25 bp, Homo sapien
gagctgtgtttgattgagcccccct

SEQ ID NO: 5551533 - DNA, 25 bp, Homo sapien
ttgagaatagatacagttgctgtta

SEQ ID NO: 5551534 - DNA, 25 bp, Homo sapien
aagatgatggccagcgtgtttattt

SEQ ID NO: 5551535 - DNA, 25 bp, Homo sapien
ggtctactgttattccggttattaa

SEQ ID NO: 5551536 - DNA, 25 bp, Homo sapien
ttaataaccggaataacagtagacc

SEQ ID NO: 5551537 - DNA, 25 bp, Homo sapien
ttgttccaaatacattgccggaact

SEQ ID NO: 5551538 - DNA, 25 bp, Homo sapien
agttccggcaatgtatttggaacaa

SEQ ID NO: 5551539 - DNA, 25 bp, Homo sapien
tatgaccacagaaggcagcttatat

SEQ ID NO: 5551540 - DNA, 25 bp, Homo sapien
ttgaggttgctttaagttccacaga

SEQ ID NO: 5551541 - DNA, 25 bp, Homo sapien
tctaacctgaagaatgttggcatat

SEQ ID NO: 5551542 - DNA, 25 bp, Homo sapien
ctaattttgtttgaggttgctttaa

SEQ ID NO: 5551543 - DNA, 25 bp, Homo sapien
acctgaagaatgttggcatatgacc

SEQ ID NO: 5551544 - DNA, 25 bp, Homo sapien
gcatatgaccacagaaggcagctta

SEQ ID NO: 5551545 - DNA, 25 bp, Homo sapien
ttccacagatcactgcaaatagaag

SEQ ID NO: 5551546 - DNA, 25 bp, Homo sapien
atgttggcatatgaccacagaaggc

SEQ ID NO: 5551547 - DNA, 25 bp, Homo sapien
acagatcactgcaaatagaagttct

SEQ ID NO: 5551548 - DNA, 25 bp, Homo sapien
tagaagttctaacctgaagaatgtt

SEQ ID NO: 5551549 - DNA, 25 bp, Homo sapien
gttggcatatgaccacagaaggcag

SEQ ID NO: 5551550 - DNA, 25 bp, Homo sapien
gacctcctcctgaagatccgccact

SEQ ID NO: 5551551 - DNA, 25 bp, Homo sapien
agcgggtaccataggcttttggttc

SEQ ID NO: 5551552 - DNA, 25 bp, Homo sapien
ttgtctccgtgcttcccaaccgccc

SEQ ID NO: 5551553 - DNA, 25 bp, Homo sapien
ctgctcccccttgacagccaccgcg

SEQ ID NO: 5551554 - DNA, 25 bp, Homo sapien
ctcctcctgaagatccgccactgca

SEQ ID NO: 5551555 - DNA, 25 bp, Homo sapien
gcctctgctcccccttgacagccac

SEQ ID NO: 5551556 - DNA, 25 bp, Homo sapien
cgccccctgcctctgctcccccttg

SEQ ID NO: 5551557 - DNA, 25 bp, Homo sapien
ataggcttttggttcccgttctctc

SEQ ID NO: 5551558 - DNA, 25 bp, Homo sapien
gccgaagcccaggacctcctcctga

SEQ ID NO: 5551559 - DNA, 25 bp, Homo sapien
ttcccaaccgccccctgcctctgct

SEQ ID NO: 5551560 - DNA, 25 bp, Homo sapien
cccctttttgtctccgtgcttccca

SEQ ID NO: 5551561 - DNA, 25 bp, Homo sapien
agtttaacaagtagtctctctttat

SEQ ID NO: 5551562 - DNA, 25 bp, Homo sapien
ataaagagagactacttgttaaact

SEQ ID NO: 5551563 - DNA, 25 bp, Homo sapien
gtgtaggtgctgtgctcactgctta

SEQ ID NO: 5551564 - DNA, 25 bp, Homo sapien
ccttcattatatactggggggacct

SEQ ID NO: 5551565 - DNA, 25 bp, Homo sapien
accattcgatggtgtaggtgctgtg

SEQ ID NO: 5551566 - DNA, 25 bp, Homo sapien
ctcactgcttagggtgcaggtgagc

SEQ ID NO: 5551567 - DNA, 25 bp, Homo sapien
ctccacagtgatactcagcctcatc

SEQ ID NO: 5551568 - DNA, 25 bp, Homo sapien
gtgagcttgatcgaggctcccagca

SEQ ID NO: 5551569 - DNA, 25 bp, Homo sapien
tcagccccagaactggagcccatga

SEQ ID NO: 5551570 - DNA, 25 bp, Homo sapien
gatcccgtcccccttgctgtggctg

SEQ ID NO: 5551571 - DNA, 25 bp, Homo sapien
ctgtggctgccatcactcttaacct

SEQ ID NO: 5551572 - DNA, 25 bp, Homo sapien
cctcatcgtcagactggaggttgga

SEQ ID NO: 5551573 - DNA, 25 bp, Homo sapien
cgatcggggatcccgtcccccttgc

SEQ ID NO: 5551574 - DNA, 25 bp, Homo sapien
aatgctggcttgtgacaaaaccaat

SEQ ID NO: 5551575 - DNA, 25 bp, Homo sapien
ggccagggtagtcttgaactcctga

SEQ ID NO: 5551576 - DNA, 25 bp, Homo sapien
tttttggtattgttcctgaggtgct

SEQ ID NO: 5551577 - DNA, 25 bp, Homo sapien
ttggctcactgcaccctctacctcc

SEQ ID NO: 5551578 - DNA, 25 bp, Homo sapien
tgggccaccaattatacagctgttg

SEQ ID NO: 5551579 - DNA, 25 bp, Homo sapien
agaggtgcgattttggctcactgca

SEQ ID NO: 5551580 - DNA, 25 bp, Homo sapien
tcctatttgaattcagctgggcttt

SEQ ID NO: 5551581 - DNA, 25 bp, Homo sapien
cagtagagatgggattttgccatgt

SEQ ID NO: 5551582 - DNA, 25 bp, Homo sapien
tcctctccttctgggccaccaatta

SEQ ID NO: 5551583 - DNA, 25 bp, Homo sapien
acagtgacaatgctggcttgtgaca

SEQ ID NO: 5551584 - DNA, 25 bp, Homo sapien
cctgaggtgctgttcattttttgtt

SEQ ID NO: 5551585 - DNA, 25 bp, Homo sapien
gagggaacatgaaacaagccatctc

SEQ ID NO: 5551586 - DNA, 25 bp, Homo sapien
tcctcctgagggaacatgaaacaag

SEQ ID NO: 5551587 - DNA, 25 bp, Homo sapien
ccccatcagcactatgtgacctgac

SEQ ID NO: 5551588 - DNA, 25 bp, Homo sapien
agctgctatgatatcctcctgaggg

SEQ ID NO: 5551589 - DNA, 25 bp, Homo sapien
gtgacctgacagctgctatgatatc

SEQ ID NO: 5551590 - DNA, 25 bp, Homo sapien
tcagccccatcagcactatgtgacc

SEQ ID NO: 5551591 - DNA, 25 bp, Homo sapien
atgatatcctcctgagggaacatga

SEQ ID NO: 5551592 - DNA, 25 bp, Homo sapien
atcagcactatgtgacctgacagct

SEQ ID NO: 5551593 - DNA, 25 bp, Homo sapien
ttgctcagccccatcagcactatgt

SEQ ID NO: 5551594 - DNA, 25 bp, Homo sapien
tgaaacaagccatctcagctgtgat

SEQ ID NO: 5551595 - DNA, 25 bp, Homo sapien
tatcctcctgagggaacatgaaaca

SEQ ID NO: 5551596 - DNA, 25 bp, Homo sapien
cagtccgcgtttaggtggtgaaccc

SEQ ID NO: 5551597 - DNA, 25 bp, Homo sapien
gggttcaccacctaaacgcggactg

SEQ ID NO: 5551598 - DNA, 25 bp, Homo sapien
taggggtagtgacaatcatcaccac

SEQ ID NO: 5551599 - DNA, 25 bp, Homo sapien
agtaaattagtggacctggtaaaca

SEQ ID NO: 5551600 - DNA, 25 bp, Homo sapien
atcatcaccacgatcacagcaggcg

SEQ ID NO: 5551601 - DNA, 25 bp, Homo sapien
gagtgggcagaatcaacagttataa

SEQ ID NO: 5551602 - DNA, 25 bp, Homo sapien
aatatgattattgtacctctcacac

SEQ ID NO: 5551603 - DNA, 25 bp, Homo sapien
atcaccacgatcacagcaggcgaat

SEQ ID NO: 5551604 - DNA, 25 bp, Homo sapien
gaaggcagcttatatcttaatatcg

SEQ ID NO: 5551605 - DNA, 25 bp, Homo sapien
acacttaggggtagtgacaatcatc

SEQ ID NO: 5551606 - DNA, 25 bp, Homo sapien
attagtggacctggtaaacactggg

SEQ ID NO: 5551607 - DNA, 25 bp, Homo sapien
taatatcgataatagatggagtaaa

SEQ ID NO: 5551608 - DNA, 25 bp, Homo sapien
acctctcacacttaggggtagtgac

SEQ ID NO: 5551609 - DNA, 25 bp, Homo sapien
gaatataaagccttggaggaactgc

SEQ ID NO: 5551610 - DNA, 25 bp, Homo sapien
ccaggtcaactgccacaacaaggtg

SEQ ID NO: 5551611 - DNA, 25 bp, Homo sapien
tggttgttggcttctcacccaggtc

SEQ ID NO: 5551612 - DNA, 25 bp, Homo sapien
gaagacgggtgcttcaccatgcttc

SEQ ID NO: 5551613 - DNA, 25 bp, Homo sapien
agtaatatcatcaggaagacgggtg

SEQ ID NO: 5551614 - DNA, 25 bp, Homo sapien
caacaaggtgcctgaaagcactttc

SEQ ID NO: 5551615 - DNA, 25 bp, Homo sapien
cttgaggactctgcactggttgttg

SEQ ID NO: 5551616 - DNA, 25 bp, Homo sapien
aggtacagggagctttgctgctttt

SEQ ID NO: 5551617 - DNA, 25 bp, Homo sapien
ttccccttctcggaggatcacggct

SEQ ID NO: 5551618 - DNA, 25 bp, Homo sapien
catgcttctgcctgtaccagtgtac

SEQ ID NO: 5551619 - DNA, 25 bp, Homo sapien
aggaactgcagttgatgacagcatc

SEQ ID NO: 5551620 - DNA, 25 bp, Homo sapien
tctgctaacttcctgttgatgtgtc

SEQ ID NO: 5551621 - DNA, 25 bp, Homo sapien
tcctgttgatgtgtcttgaagaagg

SEQ ID NO: 5551622 - DNA, 25 bp, Homo sapien
ttctaagacggaagccattgaaagg

SEQ ID NO: 5551623 - DNA, 25 bp, Homo sapien
ttttcttctaagacggaagccattg

SEQ ID NO: 5551624 - DNA, 25 bp, Homo sapien
ggaagccattgaaagggttgtagtc

SEQ ID NO: 5551625 - DNA, 25 bp, Homo sapien
agccattgaaagggttgtagtcatt

SEQ ID NO: 5551626 - DNA, 25 bp, Homo sapien
aaatgtgtagtttctgctaacttcc

SEQ ID NO: 5551627 - DNA, 25 bp, Homo sapien
acggaagccattgaaagggttgtag

SEQ ID NO: 5551628 - DNA, 25 bp, Homo sapien
ttgatgtgtcttgaagaaggagaag

SEQ ID NO: 5551629 - DNA, 25 bp, Homo sapien
ccattgaaagggttgtagtcattac

SEQ ID NO: 5551630 - DNA, 25 bp, Homo sapien
catttcaaatgtgtagtttctgcta

SEQ ID NO: 5551631 - DNA, 25 bp, Homo sapien
ccagccccttccctggagcctggga

SEQ ID NO: 5551632 - DNA, 25 bp, Homo sapien
ctgctcttcacagattgtgcataac

SEQ ID NO: 5551633 - DNA, 25 bp, Homo sapien
ttggcattttctttggagatggtga

SEQ ID NO: 5551634 - DNA, 25 bp, Homo sapien
gattgtgcataacatatctgacttc

SEQ ID NO: 5551635 - DNA, 25 bp, Homo sapien
cagtagctactgaaggttaatccag

SEQ ID NO: 5551636 - DNA, 25 bp, Homo sapien
taatccagagtctgcacaggagagt

SEQ ID NO: 5551637 - DNA, 25 bp, Homo sapien
tgggaatctgagctcattcagtagc

SEQ ID NO: 5551638 - DNA, 25 bp, Homo sapien
tttggagatggtgaatctgctcttc

SEQ ID NO: 5551639 - DNA, 25 bp, Homo sapien
atctactactcactccagccccttc

SEQ ID NO: 5551640 - DNA, 25 bp, Homo sapien
ctgaaggttaatccagagtctgcac

SEQ ID NO: 5551641 - DNA, 25 bp, Homo sapien
tggagcctgggaatctgagctcatt

SEQ ID NO: 5551642 - DNA, 25 bp, Homo sapien
tggtgatgtctggatgttgcacagc

SEQ ID NO: 5551643 - DNA, 25 bp, Homo sapien
atgttgcacagcaacttgcggtggc

SEQ ID NO: 5551644 - DNA, 25 bp, Homo sapien
gcttgagggcataaactaagtcctt

SEQ ID NO: 5551645 - DNA, 25 bp, Homo sapien
gtcaagcgcatccgggatcacgtta

SEQ ID NO: 5551646 - DNA, 25 bp, Homo sapien
aattccttgagcatccacgggtttc

SEQ ID NO: 5551647 - DNA, 25 bp, Homo sapien
gaatgcgtttgacaccgccaggcca

SEQ ID NO: 5551648 - DNA, 25 bp, Homo sapien
cgggatcacgttatccggaaattcc

SEQ ID NO: 5551649 - DNA, 25 bp, Homo sapien
gcagggactgctttgcgctttgctc

SEQ ID NO: 5551650 - DNA, 25 bp, Homo sapien
ttccctcacttgcgcaaccagacat

SEQ ID NO: 5551651 - DNA, 25 bp, Homo sapien
cacgggtttctaaaaagatgagacc

SEQ ID NO: 5551652 - DNA, 25 bp, Homo sapien
gttccgtgtaagtcagtcaagcgca

SEQ ID NO: 5551653 - DNA, 25 bp, Homo sapien
aatgatgtcacacacaggaaatatc

SEQ ID NO: 5551654 - DNA, 25 bp, Homo sapien
cttccataggctcaccagcagtttt

SEQ ID NO: 5551655 - DNA, 25 bp, Homo sapien
tgtcacacacaggaaatatcagagg

SEQ ID NO: 5551656 - DNA, 25 bp, Homo sapien
cataggctcaccagcagtttttgaa

SEQ ID NO: 5551657 - DNA, 25 bp, Homo sapien
tcacacacaggaaatatcagagggg

SEQ ID NO: 5551658 - DNA, 25 bp, Homo sapien
cacaatgatgtcacacacaggaaat

SEQ ID NO: 5551659 - DNA, 25 bp, Homo sapien
cctcttccataggctcaccagcagt

SEQ ID NO: 5551660 - DNA, 25 bp, Homo sapien
gggggatacacaatgatgtcacaca

SEQ ID NO: 5551661 - DNA, 25 bp, Homo sapien
gctggctcctcttccataggctcac

SEQ ID NO: 5551662 - DNA, 25 bp, Homo sapien
agcagacaagacatgtctgagggta

SEQ ID NO: 5551663 - DNA, 25 bp, Homo sapien
cttggcacttcacaaggctggctcc

SEQ ID NO: 5551664 - DNA, 25 bp, Homo sapien
ttgcattacctgttgtccattcacc

SEQ ID NO: 5551665 - DNA, 25 bp, Homo sapien
caccaggcctttgcttataccactg

SEQ ID NO: 5551666 - DNA, 25 bp, Homo sapien
gctggtactgaggaatttgcattac

SEQ ID NO: 5551667 - DNA, 25 bp, Homo sapien
ccaacattgatgtgatgagtagcat

SEQ ID NO: 5551668 - DNA, 25 bp, Homo sapien
cattcacctgtgacaattgcatcca

SEQ ID NO: 5551669 - DNA, 25 bp, Homo sapien
aactgtatcaaaaaaacgggatgtc

SEQ ID NO: 5551670 - DNA, 25 bp, Homo sapien
agtacgtggtgaagtcctctccttc

SEQ ID NO: 5551671 - DNA, 25 bp, Homo sapien
agtagttgaggaattgcagtacgtg

SEQ ID NO: 5551672 - DNA, 25 bp, Homo sapien
ttgtacatgctggtactgaggaatt

SEQ ID NO: 5551673 - DNA, 25 bp, Homo sapien
attgcatccataagaccaacattga

SEQ ID NO: 5551674 - DNA, 25 bp, Homo sapien
atcaaaaaaacgggatgtccaccag

SEQ ID NO: 5551675 - DNA, 25 bp, Homo sapien
tatgtttaggttaacccagtataag

SEQ ID NO: 5551676 - DNA, 25 bp, Homo sapien
cttatactgggttaacctaaacata

SEQ ID NO: 5551677 - DNA, 25 bp, Homo sapien
tgagtttgcgaaggaaacccttgga

SEQ ID NO: 5551678 - DNA, 25 bp, Homo sapien
gcagacacatctcgggcttgaatcc

SEQ ID NO: 5551679 - DNA, 25 bp, Homo sapien
ccagccttccccagagtcacagtag

SEQ ID NO: 5551680 - DNA, 25 bp, Homo sapien
gaggaaataagcttagtgagtgaca

SEQ ID NO: 5551681 - DNA, 25 bp, Homo sapien
gctgtgaacccatgaggcttgccaa

SEQ ID NO: 5551682 - DNA, 25 bp, Homo sapien
tgccaccgctaccatcgccagaagt

SEQ ID NO: 5551683 - DNA, 25 bp, Homo sapien
tagtaataggtgctggcaagtaagg

SEQ ID NO: 5551684 - DNA, 25 bp, Homo sapien
gccagaagtggaaaactctttgcct

SEQ ID NO: 5551685 - DNA, 25 bp, Homo sapien
tccccaagattggatgaggaaataa

SEQ ID NO: 5551686 - DNA, 25 bp, Homo sapien
ggagagcagcaagctgcatctacct

SEQ ID NO: 5551687 - DNA, 25 bp, Homo sapien
aagccatagccttagttggggcatc

SEQ ID NO: 5551688 - DNA, 25 bp, Homo sapien
agacgacacccccgagttctgtgca

SEQ ID NO: 5551689 - DNA, 25 bp, Homo sapien
actcggccgtccatggcatagagga

SEQ ID NO: 5551690 - DNA, 25 bp, Homo sapien
ggattctggccgaccctcgccttcc

SEQ ID NO: 5551691 - DNA, 25 bp, Homo sapien
tcggacagccccgagatctgccatt

SEQ ID NO: 5551692 - DNA, 25 bp, Homo sapien
cctccccgtgcaagatcctcaagtg

SEQ ID NO: 5551693 - DNA, 25 bp, Homo sapien
gttctgtgcagccttgcgcagctac

SEQ ID NO: 5551694 - DNA, 25 bp, Homo sapien
gaccgcttccagacctgcaaggtgc

SEQ ID NO: 5551695 - DNA, 25 bp, Homo sapien
ggcatagaggacctcatgagccagc

SEQ ID NO: 5551696 - DNA, 25 bp, Homo sapien
cctcaggactttcaccgaccgcttc

SEQ ID NO: 5551697 - DNA, 25 bp, Homo sapien
ggacgttcagccctgggattctggc

SEQ ID NO: 5551698 - DNA, 25 bp, Homo sapien
atctgccattacgagaagagctttc

SEQ ID NO: 5551699 - DNA, 25 bp, Homo sapien
cttggtgcttcctccggacgaccag

SEQ ID NO: 5551700 - DNA, 25 bp, Homo sapien
tgatgcagcccaagttcctacactg

SEQ ID NO: 5551701 - DNA, 25 bp, Homo sapien
tcctacactgggcctgtacaacttc

SEQ ID NO: 5551702 - DNA, 25 bp, Homo sapien
ccaagttcctacactgggcctgtac

SEQ ID NO: 5551703 - DNA, 25 bp, Homo sapien
tccttgagcattgatgcagcccaag

SEQ ID NO: 5551704 - DNA, 25 bp, Homo sapien
acgaccagggtctcttgctggatgg

SEQ ID NO: 5551705 - DNA, 25 bp, Homo sapien
cggacgaccagggtctcttgctgga

SEQ ID NO: 5551706 - DNA, 25 bp, Homo sapien
cagtcaccagcaccttctccaactg

SEQ ID NO: 5551707 - DNA, 25 bp, Homo sapien
ggaacggaattcatggagatgtctt

SEQ ID NO: 5551708 - DNA, 25 bp, Homo sapien
ctgggcctgtacaacttccgagggg

SEQ ID NO: 5551709 - DNA, 25 bp, Homo sapien
gaattcatggagatgtcttcctttc

SEQ ID NO: 5551710 - DNA, 25 bp, Homo sapien
ttatccgagatgaatcggtgctggg

SEQ ID NO: 5551711 - DNA, 25 bp, Homo sapien
ccagaatgattctaccaacatgtcc

SEQ ID NO: 5551712 - DNA, 25 bp, Homo sapien
aaatcctagaataggtgtcaatgac

SEQ ID NO: 5551713 - DNA, 25 bp, Homo sapien
atatacacaatggggaataaaatcc

SEQ ID NO: 5551714 - DNA, 25 bp, Homo sapien
ccaacatgtcctcctagggattttc

SEQ ID NO: 5551715 - DNA, 25 bp, Homo sapien
caatctcgctgtcatggtaacaacc

SEQ ID NO: 5551716 - DNA, 25 bp, Homo sapien
gtgctggggctgcatatcgattttc

SEQ ID NO: 5551717 - DNA, 25 bp, Homo sapien
cttctgagtttagagagagggaagt

SEQ ID NO: 5551718 - DNA, 25 bp, Homo sapien
gccatagcttgaactgcatcaatat

SEQ ID NO: 5551719 - DNA, 25 bp, Homo sapien
atggtaacaaccatcaaaggccata

SEQ ID NO: 5551720 - DNA, 25 bp, Homo sapien
ctggtccatgtcaatctcgctgtca

SEQ ID NO: 5551721 - DNA, 25 bp, Homo sapien
caccacccaccatgtgcttgtctcc

SEQ ID NO: 5551722 - DNA, 25 bp, Homo sapien
ccgtatttgtaagatcaccacccac

SEQ ID NO: 5551723 - DNA, 25 bp, Homo sapien
tatttgtaagatcaccacccaccat

SEQ ID NO: 5551724 - DNA, 25 bp, Homo sapien
tgtctccagaacacacaattgctgc

SEQ ID NO: 5551725 - DNA, 25 bp, Homo sapien
cacccaccatgtgcttgtctccaga

SEQ ID NO: 5551726 - DNA, 25 bp, Homo sapien
ctccagaacacacaattgctgcaaa

SEQ ID NO: 5551727 - DNA, 25 bp, Homo sapien
cagaacacacaattgctgcaaaagc

SEQ ID NO: 5551728 - DNA, 25 bp, Homo sapien
tttgtaagatcaccacccaccatgt

SEQ ID NO: 5551729 - DNA, 25 bp, Homo sapien
acccgtatttgtaagatcaccaccc

SEQ ID NO: 5551730 - DNA, 25 bp, Homo sapien
gtaagatcaccacccaccatgtgct

SEQ ID NO: 5551731 - DNA, 25 bp, Homo sapien
gatcaccacccaccatgtgcttgtc

SEQ ID NO: 5551732 - DNA, 25 bp, Homo sapien
tactatataaacgttatattctacg

SEQ ID NO: 5551733 - DNA, 25 bp, Homo sapien
cgtagaatataacgtttatatagta

SEQ ID NO: 5551734 - DNA, 25 bp, Homo sapien
ggccgcgccgccactgccgccggcc

SEQ ID NO: 5551735 - DNA, 25 bp, Homo sapien
ggccggcggcagtggcggcgcggcc

SEQ ID NO: 5551736 - DNA, 25 bp, Homo sapien
ccgccactgccgccggccctgctac

SEQ ID NO: 5551737 - DNA, 25 bp, Homo sapien
gtagcagggccggcggcagtggcgg

SEQ ID NO: 5551738 - DNA, 25 bp, Homo sapien
agttcaagaacaatgggcatgaagc

SEQ ID NO: 5551739 - DNA, 25 bp, Homo sapien
aagataatggcaggtaaaatagttc

SEQ ID NO: 5551740 - DNA, 25 bp, Homo sapien
catagctgcagtatcattggtgtcc

SEQ ID NO: 5551741 - DNA, 25 bp, Homo sapien
aagggaggggttataatttcatcta

SEQ ID NO: 5551742 - DNA, 25 bp, Homo sapien
gtaaagacctggccatgtagatgtc

SEQ ID NO: 5551743 - DNA, 25 bp, Homo sapien
tgggattgcatctggctttaggcct

SEQ ID NO: 5551744 - DNA, 25 bp, Homo sapien
gggcatgaagctgtgattagatctg

SEQ ID NO: 5551745 - DNA, 25 bp, Homo sapien
atcagggagataatgtaaagtacta

SEQ ID NO: 5551746 - DNA, 25 bp, Homo sapien
tgttgtaggaattacggacgaatca

SEQ ID NO: 5551747 - DNA, 25 bp, Homo sapien
ggggattgattgtagtaaagacctg

SEQ ID NO: 5551748 - DNA, 25 bp, Homo sapien
attattagggtgtggtcatgaaagt

SEQ ID NO: 5551749 - DNA, 25 bp, Homo sapien
ccttagctcgaacaacaaagaggag

SEQ ID NO: 5551750 - DNA, 25 bp, Homo sapien
ctcctctttgttgttcgagctaagg

SEQ ID NO: 5551751 - DNA, 25 bp, Homo sapien
ggagcaccgtgagaaatctgtaggt

SEQ ID NO: 5551752 - DNA, 25 bp, Homo sapien
cagacagtttccaaacatcatagtt

SEQ ID NO: 5551753 - DNA, 25 bp, Homo sapien
gcaccgtgagaaatctgtaggtagc

SEQ ID NO: 5551754 - DNA, 25 bp, Homo sapien
cttccaacgttgtttgtgtttccac

SEQ ID NO: 5551755 - DNA, 25 bp, Homo sapien
cagcataacttccaacgttgtttgt

SEQ ID NO: 5551756 - DNA, 25 bp, Homo sapien
tgagaaatctgtaggtagcagccca

SEQ ID NO: 5551757 - DNA, 25 bp, Homo sapien
tgtcccacggtccctgacaccgagg

SEQ ID NO: 5551758 - DNA, 25 bp, Homo sapien
gtgtttccactacaggagagggtga

SEQ ID NO: 5551759 - DNA, 25 bp, Homo sapien
aggagagggtgaccctctgtcccac

SEQ ID NO: 5551760 - DNA, 25 bp, Homo sapien
gaaatctgtaggtagcagcccacag

SEQ ID NO: 5551761 - DNA, 25 bp, Homo sapien
ctctgtcccacggtccctgacaccg

SEQ ID NO: 5551762 - DNA, 25 bp, Homo sapien
cctaggagaacctctaccagtctga

SEQ ID NO: 5551763 - DNA, 25 bp, Homo sapien
agtgtatctacagtgctatggggac

SEQ ID NO: 5551764 - DNA, 25 bp, Homo sapien
cacctgttctttgagctacccccac

SEQ ID NO: 5551765 - DNA, 25 bp, Homo sapien
gcacccatgtaagaagcaatctgct

SEQ ID NO: 5551766 - DNA, 25 bp, Homo sapien
ataaaatagttttgaaggggctgaa

SEQ ID NO: 5551767 - DNA, 25 bp, Homo sapien
ggggctccagtactgagtgtatcta

SEQ ID NO: 5551768 - DNA, 25 bp, Homo sapien
aacctctaccagtctgagatgggct

SEQ ID NO: 5551769 - DNA, 25 bp, Homo sapien
gtatctacagtgctatggggacacc

SEQ ID NO: 5551770 - DNA, 25 bp, Homo sapien
cctgcacccatgtaagaagcaatct

SEQ ID NO: 5551771 - DNA, 25 bp, Homo sapien
tctaccagtctgagatgggcttgct

SEQ ID NO: 5551772 - DNA, 25 bp, Homo sapien
ttctttgagctacccccacccctgc

SEQ ID NO: 5551773 - DNA, 25 bp, Homo sapien
acgggttcatcactgattccacctc

SEQ ID NO: 5551774 - DNA, 25 bp, Homo sapien
gtgatcttacaaatacgggttcatc

SEQ ID NO: 5551775 - DNA, 25 bp, Homo sapien
acaaatacgggttcatcactgattc

SEQ ID NO: 5551776 - DNA, 25 bp, Homo sapien
aatacgggttcatcactgattccac

SEQ ID NO: 5551777 - DNA, 25 bp, Homo sapien
tcttacaaatacgggttcatcactg

SEQ ID NO: 5551778 - DNA, 25 bp, Homo sapien
atacgggttcatcactgattccacc

SEQ ID NO: 5551779 - DNA, 25 bp, Homo sapien
ttacaaatacgggttcatcactgat

SEQ ID NO: 5551780 - DNA, 25 bp, Homo sapien
actgattccacctccacacagatag

SEQ ID NO: 5551781 - DNA, 25 bp, Homo sapien
gtgggtggtgatcttacaaatacgg

SEQ ID NO: 5551782 - DNA, 25 bp, Homo sapien
cgggttcatcactgattccacctcc

SEQ ID NO: 5551783 - DNA, 25 bp, Homo sapien
gtggtgatcttacaaatacgggttc

SEQ ID NO: 5551784 - DNA, 25 bp, Homo sapien
gtatgaaaccatttcagccccttcc

SEQ ID NO: 5551785 - DNA, 25 bp, Homo sapien
gcctggcggatccaggtcatgtagt

SEQ ID NO: 5551786 - DNA, 25 bp, Homo sapien
ttcagccccttccctggagcctggc

SEQ ID NO: 5551787 - DNA, 25 bp, Homo sapien
ggatccaggtcatgtagtagtcact

SEQ ID NO: 5551788 - DNA, 25 bp, Homo sapien
ccatttcagccccttccctggagcc

SEQ ID NO: 5551789 - DNA, 25 bp, Homo sapien
tactactaatgtatgaaaccatttc

SEQ ID NO: 5551790 - DNA, 25 bp, Homo sapien
cactactactaatgtatgaaaccat

SEQ ID NO: 5551791 - DNA, 25 bp, Homo sapien
taatgtatgaaaccatttcagcccc

SEQ ID NO: 5551792 - DNA, 25 bp, Homo sapien
cggatccaggtcatgtagtagtcac

SEQ ID NO: 5551793 - DNA, 25 bp, Homo sapien
atttcagccccttccctggagcctg

SEQ ID NO: 5551794 - DNA, 25 bp, Homo sapien
gagcctggcggatccaggtcatgta

SEQ ID NO: 5551795 - DNA, 25 bp, Homo sapien
caataaatacgtctttagggacaat

SEQ ID NO: 5551796 - DNA, 25 bp, Homo sapien
catatatgaaaggattggtataatt

SEQ ID NO: 5551797 - DNA, 25 bp, Homo sapien
attttagggcatagccaagcgcaca

SEQ ID NO: 5551798 - DNA, 25 bp, Homo sapien
tagccaagcgcacataaaataatat

SEQ ID NO: 5551799 - DNA, 25 bp, Homo sapien
cttcaataaaagacagatgaccaac

SEQ ID NO: 5551800 - DNA, 25 bp, Homo sapien
cagatgaccaactcaaacatttttt

SEQ ID NO: 5551801 - DNA, 25 bp, Homo sapien
agggcatagccaagcgcacataaaa

SEQ ID NO: 5551802 - DNA, 25 bp, Homo sapien
aactgacattttagggcatagccaa

SEQ ID NO: 5551803 - DNA, 25 bp, Homo sapien
gaaaggattggtataattaataatg

SEQ ID NO: 5551804 - DNA, 25 bp, Homo sapien
gtctttagggacaataaactgacat

SEQ ID NO: 5551805 - DNA, 25 bp, Homo sapien
taatattcaatttcacagatgctat

SEQ ID NO: 5551806 - DNA, 25 bp, Homo sapien
ggtcaaattgactgcgatggctcta

SEQ ID NO: 5551807 - DNA, 25 bp, Homo sapien
ttggagcttacagcacagcagagaa

SEQ ID NO: 5551808 - DNA, 25 bp, Homo sapien
gtagacactgagctagttcccgcac

SEQ ID NO: 5551809 - DNA, 25 bp, Homo sapien
caaacgcaggtcctccgcacatact

SEQ ID NO: 5551810 - DNA, 25 bp, Homo sapien
agcagcccgtgctggcttgaaatcc

SEQ ID NO: 5551811 - DNA, 25 bp, Homo sapien
gcatgtggtatgctacagcgttacc

SEQ ID NO: 5551812 - DNA, 25 bp, Homo sapien
ccctcaactctgtgcacgtgacgcc

SEQ ID NO: 5551813 - DNA, 25 bp, Homo sapien
atctgtgcagcatgtaggtaaactt

SEQ ID NO: 5551814 - DNA, 25 bp, Homo sapien
atggctctaagtggcgtcttcctgt

SEQ ID NO: 5551815 - DNA, 25 bp, Homo sapien
gttcccgcacacacagccccttcct

SEQ ID NO: 5551816 - DNA, 25 bp, Homo sapien
agcagagaatgcagaaccctaaatc

SEQ ID NO: 5551817 - DNA, 25 bp, Homo sapien
tgcagaaggtggcactttccagaaa

SEQ ID NO: 5551818 - DNA, 25 bp, Homo sapien
cgcaaattgaagagtcggtctcact

SEQ ID NO: 5551819 - DNA, 25 bp, Homo sapien
taaggccctagaactcccaagagta

SEQ ID NO: 5551820 - DNA, 25 bp, Homo sapien
cagcagttataggcctcacccagct

SEQ ID NO: 5551821 - DNA, 25 bp, Homo sapien
tccccacctgtggagtctgcatacc

SEQ ID NO: 5551822 - DNA, 25 bp, Homo sapien
tgaagttgtgtgcctaggaggatta

SEQ ID NO: 5551823 - DNA, 25 bp, Homo sapien
ctgtgctgagtcatgcaggttgtca

SEQ ID NO: 5551824 - DNA, 25 bp, Homo sapien
gactctccttgggtgggtcttgctg

SEQ ID NO: 5551825 - DNA, 25 bp, Homo sapien
ttgccccaagttctggccaagaggc

SEQ ID NO: 5551826 - DNA, 25 bp, Homo sapien
ggtctcactcccaccgtgccccacc

SEQ ID NO: 5551827 - DNA, 25 bp, Homo sapien
cagcagttataggcctcacccagca

SEQ ID NO: 5551828 - DNA, 25 bp, Homo sapien
atattattttatgtgcgcttggcta

SEQ ID NO: 5551829 - DNA, 25 bp, Homo sapien
agcatctgtgaaattgaatattatt

SEQ ID NO: 5551830 - DNA, 25 bp, Homo sapien
tggctatgccctaaaatgtcagttt

SEQ ID NO: 5551831 - DNA, 25 bp, Homo sapien
tatatgtagaaaaaatgtttgagtt

SEQ ID NO: 5551832 - DNA, 25 bp, Homo sapien
tatttgaaagataaaatagcatctg

SEQ ID NO: 5551833 - DNA, 25 bp, Homo sapien
tttatgtgcgcttggctatgcccta

SEQ ID NO: 5551834 - DNA, 25 bp, Homo sapien
taccaagaatagaagttggctgggc

SEQ ID NO: 5551835 - DNA, 25 bp, Homo sapien
tgtttaccaagaatagaagttggct

SEQ ID NO: 5551836 - DNA, 25 bp, Homo sapien
gaaaaaatgtttgagttggtcatct

SEQ ID NO: 5551837 - DNA, 25 bp, Homo sapien
cagtttattgtccctaaagacgtat

SEQ ID NO: 5551838 - DNA, 25 bp, Homo sapien
aaagacgtatttattgatgtttacc

SEQ ID NO: 5551839 - DNA, 25 bp, Homo sapien
gtcgtacatcatacagcaacgtgtg

SEQ ID NO: 5551840 - DNA, 25 bp, Homo sapien
cacacgttgctgtatgatgtacgac

SEQ ID NO: 5551841 - DNA, 25 bp, Homo sapien
atgcattaagtggtataaatttctc

SEQ ID NO: 5551842 - DNA, 25 bp, Homo sapien
tctgcctgcttgatttgtacatttc

SEQ ID NO: 5551843 - DNA, 25 bp, Homo sapien
aaataggatatccaagaactgtgag

SEQ ID NO: 5551844 - DNA, 25 bp, Homo sapien
cattgtggtctgagagcagacatta

SEQ ID NO: 5551845 - DNA, 25 bp, Homo sapien
tatgtcactcagaatatgctctatc

SEQ ID NO: 5551846 - DNA, 25 bp, Homo sapien
tctcatcaccgcatcttacacattt

SEQ ID NO: 5551847 - DNA, 25 bp, Homo sapien
gtgttgagttcaactagatccttac

SEQ ID NO: 5551848 - DNA, 25 bp, Homo sapien
tgggtgagagtactgcaaaagtaca

SEQ ID NO: 5551849 - DNA, 25 bp, Homo sapien
catttctgatagatgggtgagagta

SEQ ID NO: 5551850 - DNA, 25 bp, Homo sapien
gaactgtgagacaactacaaaaggt

SEQ ID NO: 5551851 - DNA, 25 bp, Homo sapien
tgaatcaaatagtctacagatgtcc

SEQ ID NO: 5551852 - DNA, 25 bp, Homo sapien
gcgcccggcttcctccgctctccgg

SEQ ID NO: 5551853 - DNA, 25 bp, Homo sapien
ccggagagcggaggaagccgggcgc

SEQ ID NO: 5551854 - DNA, 25 bp, Homo sapien
agcccggagggtctcgcccggcgcc

SEQ ID NO: 5551855 - DNA, 25 bp, Homo sapien
ggcgccgggcgagaccctccgggct

SEQ ID NO: 5551856 - DNA, 25 bp, Homo sapien
ttaaggaactctgagccagggttga

SEQ ID NO: 5551857 - DNA, 25 bp, Homo sapien
ggctgtgcccgagcacccaactaca

SEQ ID NO: 5551858 - DNA, 25 bp, Homo sapien
ttcaccaggcgtctcacagcagcca

SEQ ID NO: 5551859 - DNA, 25 bp, Homo sapien
caaaggcagcacctgatgttaaggc

SEQ ID NO: 5551860 - DNA, 25 bp, Homo sapien
tgaaacccctggaggccttcacttc

SEQ ID NO: 5551861 - DNA, 25 bp, Homo sapien
ggccattggctaaggttaacagaac

SEQ ID NO: 5551862 - DNA, 25 bp, Homo sapien
ctgccagctaagcagcctggcctgc

SEQ ID NO: 5551863 - DNA, 25 bp, Homo sapien
tgggtgagcacaatcatggctttgc

SEQ ID NO: 5551864 - DNA, 25 bp, Homo sapien
ttggagccctaacaaggtcccagaa

SEQ ID NO: 5551865 - DNA, 25 bp, Homo sapien
tgttaaggcatcaagagatagggaa

SEQ ID NO: 5551866 - DNA, 25 bp, Homo sapien
tgagctttggatttgccagaagtcc

SEQ ID NO: 5551867 - DNA, 25 bp, Homo sapien
acaggtattgtagcagcagaagctg

SEQ ID NO: 5551868 - DNA, 25 bp, Homo sapien
gctgtatggtatgacttcgatcggt

SEQ ID NO: 5551869 - DNA, 25 bp, Homo sapien
agaagctgttgcaggtgatagctgt

SEQ ID NO: 5551870 - DNA, 25 bp, Homo sapien
cacgttgttggctgatactggaata

SEQ ID NO: 5551871 - DNA, 25 bp, Homo sapien
tctaggtatgttaattgggaggcac

SEQ ID NO: 5551872 - DNA, 25 bp, Homo sapien
accctgtgcagtgtgtctctccatc

SEQ ID NO: 5551873 - DNA, 25 bp, Homo sapien
gtggctttgctcgtgctgtgtgctt

SEQ ID NO: 5551874 - DNA, 25 bp, Homo sapien
tgaaatgtccagaggtaaacagttc

SEQ ID NO: 5551875 - DNA, 25 bp, Homo sapien
aaaatctaagaggagtacaggtatt

SEQ ID NO: 5551876 - DNA, 25 bp, Homo sapien
ttcaacaaggatacagatgctttac

SEQ ID NO: 5551877 - DNA, 25 bp, Homo sapien
gctgggactgtcctgtcagatcacg

SEQ ID NO: 5551878 - DNA, 25 bp, Homo sapien
gggcaacatgagagatcctacagta

SEQ ID NO: 5551879 - DNA, 25 bp, Homo sapien
tactgccagaaagcatgaaatcaaa

SEQ ID NO: 5551880 - DNA, 25 bp, Homo sapien
cagagcaagagacaaaagtttgaaa

SEQ ID NO: 5551881 - DNA, 25 bp, Homo sapien
aacagcatgggattatgtgaaaaag

SEQ ID NO: 5551882 - DNA, 25 bp, Homo sapien
agtggcactgagtacccctagccct

SEQ ID NO: 5551883 - DNA, 25 bp, Homo sapien
aggatcaatgacaactgagtggcac

SEQ ID NO: 5551884 - DNA, 25 bp, Homo sapien
tacagtaacggaaatactcggcatc

SEQ ID NO: 5551885 - DNA, 25 bp, Homo sapien
ggccaaagtttggacagtcaaagca

SEQ ID NO: 5551886 - DNA, 25 bp, Homo sapien
gttaggaaaaaagatttgcagagca

SEQ ID NO: 5551887 - DNA, 25 bp, Homo sapien
ccacgaactaggaaaggctccttga

SEQ ID NO: 5551888 - DNA, 25 bp, Homo sapien
aaaaagacacaggaatcttgaaggc

SEQ ID NO: 5551889 - DNA, 25 bp, Homo sapien
gtgcagaccctcttggtggaggcat

SEQ ID NO: 5551890 - DNA, 25 bp, Homo sapien
gagaagccacatgcggctccagatt

SEQ ID NO: 5551891 - DNA, 25 bp, Homo sapien
gggcaccaccaactgctgccgtggc

SEQ ID NO: 5551892 - DNA, 25 bp, Homo sapien
ataacccttagcccaggcagggaac

SEQ ID NO: 5551893 - DNA, 25 bp, Homo sapien
gagggaagtcactgaatggtttcag

SEQ ID NO: 5551894 - DNA, 25 bp, Homo sapien
ccttttgtgtgaggatgttcgtgga

SEQ ID NO: 5551895 - DNA, 25 bp, Homo sapien
gggtccctgcctgtacctgcccagc

SEQ ID NO: 5551896 - DNA, 25 bp, Homo sapien
gtagaagcgcccgcagcttattgca

SEQ ID NO: 5551897 - DNA, 25 bp, Homo sapien
cagggaacctaccatggacccagca

SEQ ID NO: 5551898 - DNA, 25 bp, Homo sapien
ggaggcatgtgccataacccttagc

SEQ ID NO: 5551899 - DNA, 25 bp, Homo sapien
aaaatgcagtgttcaccaggttcac

SEQ ID NO: 5551900 - DNA, 25 bp, Homo sapien
ggaattagaagaaggtcaatgtacc

SEQ ID NO: 5551901 - DNA, 25 bp, Homo sapien
agtgtgatgtcttagagagccccta

SEQ ID NO: 5551902 - DNA, 25 bp, Homo sapien
tacagaaagccattggagggtttca

SEQ ID NO: 5551903 - DNA, 25 bp, Homo sapien
gctttcgtgataagaaggagcatgc

SEQ ID NO: 5551904 - DNA, 25 bp, Homo sapien
taatgtaggagggacaaataattta

SEQ ID NO: 5551905 - DNA, 25 bp, Homo sapien
agcacagtcgttaaggtggacagta

SEQ ID NO: 5551906 - DNA, 25 bp, Homo sapien
aaaaggggatttcagctgaagcttt

SEQ ID NO: 5551907 - DNA, 25 bp, Homo sapien
gccttcataggccaggcgaagagtt

SEQ ID NO: 5551908 - DNA, 25 bp, Homo sapien
gtggtgataaatgcagaacaatgac

SEQ ID NO: 5551909 - DNA, 25 bp, Homo sapien
gaatggaatatgagacagtcagaca

SEQ ID NO: 5551910 - DNA, 25 bp, Homo sapien
aagagggtatataactgaacaagct

SEQ ID NO: 5551911 - DNA, 25 bp, Homo sapien
tggtgaaatcagtttggagaatgct

SEQ ID NO: 5551912 - DNA, 25 bp, Homo sapien
agctatgtgacctgaggcagattac

SEQ ID NO: 5551913 - DNA, 25 bp, Homo sapien
agataatttgttgggtgaaaactgt

SEQ ID NO: 5551914 - DNA, 25 bp, Homo sapien
tatagagttattgacaagagggtgg

SEQ ID NO: 5551915 - DNA, 25 bp, Homo sapien
tttccaggcctgtctgaccatagga

SEQ ID NO: 5551916 - DNA, 25 bp, Homo sapien
agttaatagaagggtgtagaaaata

SEQ ID NO: 5551917 - DNA, 25 bp, Homo sapien
acgaaagggaaacatagatataaag

SEQ ID NO: 5551918 - DNA, 25 bp, Homo sapien
agggtgggttgaatatcagaaaacc

SEQ ID NO: 5551919 - DNA, 25 bp, Homo sapien
atctttaattcgaaggaaacaggtc

SEQ ID NO: 5551920 - DNA, 25 bp, Homo sapien
aaacaggtcccaaggaagcattttc

SEQ ID NO: 5551921 - DNA, 25 bp, Homo sapien
agatcttctggcacagtacagtggc

SEQ ID NO: 5551922 - DNA, 25 bp, Homo sapien
atattaaagtctgtgggtgctatct

SEQ ID NO: 5551923 - DNA, 25 bp, Homo sapien
gtgacctccagcaagtcgcagcatt

SEQ ID NO: 5551924 - DNA, 25 bp, Homo sapien
gtggatcaagctggttcagtcttat

SEQ ID NO: 5551925 - DNA, 25 bp, Homo sapien
cctggtcacacagccgtgccatagg

SEQ ID NO: 5551926 - DNA, 25 bp, Homo sapien
tgttagtgttggaagggatctcaca

SEQ ID NO: 5551927 - DNA, 25 bp, Homo sapien
aaaagagagcttgaaatacaccata

SEQ ID NO: 5551928 - DNA, 25 bp, Homo sapien
gtagttgtactggccaagctggctt

SEQ ID NO: 5551929 - DNA, 25 bp, Homo sapien
gaagtctccgcgaaggttgttagtg

SEQ ID NO: 5551930 - DNA, 25 bp, Homo sapien
tgagtccctgagagggccttcctaa

SEQ ID NO: 5551931 - DNA, 25 bp, Homo sapien
tgggaaaagacgccaagtccttaga

SEQ ID NO: 5551932 - DNA, 25 bp, Homo sapien
tcctaaagttacatggctgggccag

SEQ ID NO: 5551933 - DNA, 25 bp, Homo sapien
cacagagccaagagatgcctgtgtc

SEQ ID NO: 5551934 - DNA, 25 bp, Homo sapien
atgagccaagaattcaagcagacaa

SEQ ID NO: 5551935 - DNA, 25 bp, Homo sapien
attctgtctaaggtggggtcatcag

SEQ ID NO: 5551936 - DNA, 25 bp, Homo sapien
ccacaggcactggttgctctgggaa

SEQ ID NO: 5551937 - DNA, 25 bp, Homo sapien
gctgtggtgggtgtgaacccacaag

SEQ ID NO: 5551938 - DNA, 25 bp, Homo sapien
aaacacaagtgtccatgggaggttg

SEQ ID NO: 5551939 - DNA, 25 bp, Homo sapien
ggcctcttagaggtcccagggcctg

SEQ ID NO: 5551940 - DNA, 25 bp, Homo sapien
ctccactgagcattccacaggggaa

SEQ ID NO: 5551941 - DNA, 25 bp, Homo sapien
gcctgtggcgatgcctcactccaac

SEQ ID NO: 5551942 - DNA, 25 bp, Homo sapien
gtctgaaaacagttggcctgtggcg

SEQ ID NO: 5551943 - DNA, 25 bp, Homo sapien
tcttggcatagttcctccccccgtc

SEQ ID NO: 5551944 - DNA, 25 bp, Homo sapien
tttcagacaccaatgccaagttttt

SEQ ID NO: 5551945 - DNA, 25 bp, Homo sapien
ctagttaagtagcaaaatgcccaaa

SEQ ID NO: 5551946 - DNA, 25 bp, Homo sapien
aatgcccaaatccaaaaccaagtct

SEQ ID NO: 5551947 - DNA, 25 bp, Homo sapien
aaaatataaaaggatggtaagagta

SEQ ID NO: 5551948 - DNA, 25 bp, Homo sapien
aattctttcgaagggcactagtgcc

SEQ ID NO: 5551949 - DNA, 25 bp, Homo sapien
acagtcggtaaagtcacagaaaact

SEQ ID NO: 5551950 - DNA, 25 bp, Homo sapien
taacgtgcctaagctagtaacttgc

SEQ ID NO: 5551951 - DNA, 25 bp, Homo sapien
gcagggcctctgcttagaaacatgt

SEQ ID NO: 5551952 - DNA, 25 bp, Homo sapien
cagcaataattgagggtcccagtac

SEQ ID NO: 5551953 - DNA, 25 bp, Homo sapien
tcatcctcaactatgcggtagctat

SEQ ID NO: 5551954 - DNA, 25 bp, Homo sapien
ttgctgtacattagaggagtcaaca

SEQ ID NO: 5551955 - DNA, 25 bp, Homo sapien
ccttgggaacatgctaagtgagagg

SEQ ID NO: 5551956 - DNA, 25 bp, Homo sapien
tggagaaattggcatataaaggcta

SEQ ID NO: 5551957 - DNA, 25 bp, Homo sapien
ccagtcatggtgtagatgatggtgg

SEQ ID NO: 5551958 - DNA, 25 bp, Homo sapien
gctcctccctagggctgaaagggga

SEQ ID NO: 5551959 - DNA, 25 bp, Homo sapien
tgaagtagtgatacaggctacagac

SEQ ID NO: 5551960 - DNA, 25 bp, Homo sapien
ggagaaagcacgttagtggctcctc

SEQ ID NO: 5551961 - DNA, 25 bp, Homo sapien
cctcctgggaccttcctagctgggt

SEQ ID NO: 5551962 - DNA, 25 bp, Homo sapien
cattatcagggagcccagtcatggt

SEQ ID NO: 5551963 - DNA, 25 bp, Homo sapien
gggtgaatcctacagtgtgtgaatt

SEQ ID NO: 5551964 - DNA, 25 bp, Homo sapien
tttacgtgcaatgcccagaagaggg

SEQ ID NO: 5551965 - DNA, 25 bp, Homo sapien
aggagatcacacacagcgattccgt

SEQ ID NO: 5551966 - DNA, 25 bp, Homo sapien
gaccacctgaaatccgcaaagagct

SEQ ID NO: 5551967 - DNA, 25 bp, Homo sapien
ccagctgcagcagtcatactccagt

SEQ ID NO: 5551968 - DNA, 25 bp, Homo sapien
gtcaagtcttgaatggctccagctg

SEQ ID NO: 5551969 - DNA, 25 bp, Homo sapien
tgcccgcaatgagattggcaaagga

SEQ ID NO: 5551970 - DNA, 25 bp, Homo sapien
gcgcgaagccctgtctccagtagtt

SEQ ID NO: 5551971 - DNA, 25 bp, Homo sapien
gccgcgtaaaccatccaagagcaac

SEQ ID NO: 5551972 - DNA, 25 bp, Homo sapien
ggctctgtcgttgctccagggatcc

SEQ ID NO: 5551973 - DNA, 25 bp, Homo sapien
caagagcaacggcactcctctgttc

SEQ ID NO: 5551974 - DNA, 25 bp, Homo sapien
cacccgactcgaatgttggctctgt

SEQ ID NO: 5551975 - DNA, 25 bp, Homo sapien
tactcgggctgttttgccgcgtaaa

SEQ ID NO: 5551976 - DNA, 25 bp, Homo sapien
ccggcggtgtcactgcccgcaatga

SEQ ID NO: 5551977 - DNA, 25 bp, Homo sapien
gctatctcggtcatgcaagtcgctc

SEQ ID NO: 5551978 - DNA, 25 bp, Homo sapien
aactcaaaatgtgcacaagtcagtg

SEQ ID NO: 5551979 - DNA, 25 bp, Homo sapien
atccgctcttcgccagccgagtgca

SEQ ID NO: 5551980 - DNA, 25 bp, Homo sapien
agtcgctccttggttcacgccactc

SEQ ID NO: 5551981 - DNA, 25 bp, Homo sapien
tatataagatatgtgtactgtacac

SEQ ID NO: 5551982 - DNA, 25 bp, Homo sapien
agaagaagcaatgcaaatgaaaggc

SEQ ID NO: 5551983 - DNA, 25 bp, Homo sapien
ccagtaggtggtaagcatcaatctt

SEQ ID NO: 5551984 - DNA, 25 bp, Homo sapien
gcacaagtcagtgtggaaagaagaa

SEQ ID NO: 5551985 - DNA, 25 bp, Homo sapien
tgttgtttgagacgatccgctcttc

SEQ ID NO: 5551986 - DNA, 25 bp, Homo sapien
taaccactgcacaagaaaaatgtat

SEQ ID NO: 5551987 - DNA, 25 bp, Homo sapien
aaatgaaaggcttggcaaccagtag

SEQ ID NO: 5551988 - DNA, 25 bp, Homo sapien
taagaatgcagttgtacctcagtgg

SEQ ID NO: 5551989 - DNA, 25 bp, Homo sapien
agagtgaaagaattatgggcaaaat

SEQ ID NO: 5551990 - DNA, 25 bp, Homo sapien
ctcttgtccagacgcaatgcccatc

SEQ ID NO: 5551991 - DNA, 25 bp, Homo sapien
gggagacacaagtgttgagagattt

SEQ ID NO: 5551992 - DNA, 25 bp, Homo sapien
actaggacacagctaatatgggaga

SEQ ID NO: 5551993 - DNA, 25 bp, Homo sapien
acatagctcatggtaatggggacca

SEQ ID NO: 5551994 - DNA, 25 bp, Homo sapien
tgataggattcacgaatggaggaaa

SEQ ID NO: 5551995 - DNA, 25 bp, Homo sapien
atgggcaaaatggacataaaacctc

SEQ ID NO: 5551996 - DNA, 25 bp, Homo sapien
gaaacagtcataggccaaaacaagc

SEQ ID NO: 5551997 - DNA, 25 bp, Homo sapien
ggaaagagaaaatggacatagctca

SEQ ID NO: 5551998 - DNA, 25 bp, Homo sapien
cacaatatgggtagcagtagagtga

SEQ ID NO: 5551999 - DNA, 25 bp, Homo sapien
atggcttcttcacatggcttgagtc

SEQ ID NO: 5552000 - DNA, 25 bp, Homo sapien
tgagtcttgccaacgaggaccttac

SEQ ID NO: 5552001 - DNA, 25 bp, Homo sapien
gaaattttgcataactcaaggagaa

SEQ ID NO: 5552002 - DNA, 25 bp, Homo sapien
tgtctcatggatccattatggcttc

SEQ ID NO: 5552003 - DNA, 25 bp, Homo sapien
ttgccaacgaggaccttacagctta

SEQ ID NO: 5552004 - DNA, 25 bp, Homo sapien
ctcaaggagaaattgaagccatagt

SEQ ID NO: 5552005 - DNA, 25 bp, Homo sapien
ccccaaagtttgtctcatggatcca

SEQ ID NO: 5552006 - DNA, 25 bp, Homo sapien
cttagttgaagaaattttgcataac

SEQ ID NO: 5552007 - DNA, 25 bp, Homo sapien
cataactcaaggagaaattgaagcc

SEQ ID NO: 5552008 - DNA, 25 bp, Homo sapien
ggcttgagtcttgccaacgaggacc

SEQ ID NO: 5552009 - DNA, 25 bp, Homo sapien
acgaggaccttacagcttagttgaa

SEQ ID NO: 5552010 - DNA, 25 bp, Homo sapien
atcatctcatcatcttcctggggat

SEQ ID NO: 5552011 - DNA, 25 bp, Homo sapien
atgaggaaaactggcatcagaccag

SEQ ID NO: 5552012 - DNA, 25 bp, Homo sapien
tctcctggtgtttagaagatctgta

SEQ ID NO: 5552013 - DNA, 25 bp, Homo sapien
agattgggacagttcagttcttctc

SEQ ID NO: 5552014 - DNA, 25 bp, Homo sapien
tgaggaaaactggcatcagaccagg

SEQ ID NO: 5552015 - DNA, 25 bp, Homo sapien
catcatcttcctggggatgaggaaa

SEQ ID NO: 5552016 - DNA, 25 bp, Homo sapien
cagaagattgggacagttcagttct

SEQ ID NO: 5552017 - DNA, 25 bp, Homo sapien
gtctacccgtgagcatcatctcatc

SEQ ID NO: 5552018 - DNA, 25 bp, Homo sapien
aggaaaactggcatcagaccaggcg

SEQ ID NO: 5552019 - DNA, 25 bp, Homo sapien
ctggcatcagaccaggcgactcaga

SEQ ID NO: 5552020 - DNA, 25 bp, Homo sapien
aagtctacccgtgagcatcatctca

SEQ ID NO: 5552021 - DNA, 25 bp, Homo sapien
ctaagcaaccactaagtgttttgtc

SEQ ID NO: 5552022 - DNA, 25 bp, Homo sapien
gtgtacaattcgatgctttctagca

SEQ ID NO: 5552023 - DNA, 25 bp, Homo sapien
ccaccaagtccagccaaccctcctg

SEQ ID NO: 5552024 - DNA, 25 bp, Homo sapien
aactcacataccatacacttcattc

SEQ ID NO: 5552025 - DNA, 25 bp, Homo sapien
ctgaacccccacccctaagcaacca

SEQ ID NO: 5552026 - DNA, 25 bp, Homo sapien
ccccatccccattagcagacactac

SEQ ID NO: 5552027 - DNA, 25 bp, Homo sapien
ccattagcagacactaccattctcc

SEQ ID NO: 5552028 - DNA, 25 bp, Homo sapien
ccatgcctggtccattgtatttgtt

SEQ ID NO: 5552029 - DNA, 25 bp, Homo sapien
ctaccattctcctgaacccccaccc

SEQ ID NO: 5552030 - DNA, 25 bp, Homo sapien
caagtccagccaaccctcctgcatt

SEQ ID NO: 5552031 - DNA, 25 bp, Homo sapien
ctggatattttatacaaacggaatc

SEQ ID NO: 5552032 - DNA, 25 bp, Homo sapien
ggatccacagaatggcgacttgctc

SEQ ID NO: 5552033 - DNA, 25 bp, Homo sapien
gctcttaaacgagcagctggaccgg

SEQ ID NO: 5552034 - DNA, 25 bp, Homo sapien
tccaaatagatagtgcgcaggactt

SEQ ID NO: 5552035 - DNA, 25 bp, Homo sapien
cttaaattacgggatagcgatgagg

SEQ ID NO: 5552036 - DNA, 25 bp, Homo sapien
tgggaaagaatggtgttcaaaacta

SEQ ID NO: 5552037 - DNA, 25 bp, Homo sapien
ccagagttggtactggaccaatccc

SEQ ID NO: 5552038 - DNA, 25 bp, Homo sapien
gagaccgggagctattccatagcag

SEQ ID NO: 5552039 - DNA, 25 bp, Homo sapien
gagggtctttggtgtgttctgagac

SEQ ID NO: 5552040 - DNA, 25 bp, Homo sapien
tcgtgctgagcttttggtcaaagac

SEQ ID NO: 5552041 - DNA, 25 bp, Homo sapien
ctccgaaggtgctactctaggaacc

SEQ ID NO: 5552042 - DNA, 25 bp, Homo sapien
aatggaggtcggtacctttatagcc

SEQ ID NO: 5552043 - DNA, 25 bp, Homo sapien
gatagttgggatagtaagctttgca

SEQ ID NO: 5552044 - DNA, 25 bp, Homo sapien
tggtgctgaactaataaatatggaa

SEQ ID NO: 5552045 - DNA, 25 bp, Homo sapien
tgagggcctattatatacttggtgc

SEQ ID NO: 5552046 - DNA, 25 bp, Homo sapien
ttgtcgaagatagttgggatagtaa

SEQ ID NO: 5552047 - DNA, 25 bp, Homo sapien
aatataggaaaaccaaacagggcta

SEQ ID NO: 5552048 - DNA, 25 bp, Homo sapien
caaaagtaaatgtggaaagctggaa

SEQ ID NO: 5552049 - DNA, 25 bp, Homo sapien
cagggctattatttaatgagggcct

SEQ ID NO: 5552050 - DNA, 25 bp, Homo sapien
actgaactgcgtaacctttgaggtc

SEQ ID NO: 5552051 - DNA, 25 bp, Homo sapien
taagctgccctagagatgtttaagc

SEQ ID NO: 5552052 - DNA, 25 bp, Homo sapien
attttgtggcaggctaatgaattat

SEQ ID NO: 5552053 - DNA, 25 bp, Homo sapien
aaaaggaattcaaatactgaactgc

SEQ ID NO: 5552054 - DNA, 25 bp, Homo sapien
aagggtctcctgttttcagagcccc

SEQ ID NO: 5552055 - DNA, 25 bp, Homo sapien
tattgcacgtcaggagctctctgtc

SEQ ID NO: 5552056 - DNA, 25 bp, Homo sapien
aacaacgccaacagcagacactggc

SEQ ID NO: 5552057 - DNA, 25 bp, Homo sapien
gagggagaggtgactcctcctcttt

SEQ ID NO: 5552058 - DNA, 25 bp, Homo sapien
ctgccatggtgttcacaggcagcat

SEQ ID NO: 5552059 - DNA, 25 bp, Homo sapien
agagcccctattgcacgtcaggagc

SEQ ID NO: 5552060 - DNA, 25 bp, Homo sapien
tggccgagctcctgctgtatgcctg

SEQ ID NO: 5552061 - DNA, 25 bp, Homo sapien
gcaactgactggagaatgaaaacaa

SEQ ID NO: 5552062 - DNA, 25 bp, Homo sapien
ggatgcagcagagttagaatgcaac

SEQ ID NO: 5552063 - DNA, 25 bp, Homo sapien
gctgtatgcctggcctgccatggtg

SEQ ID NO: 5552064 - DNA, 25 bp, Homo sapien
ctcacaagaaccctgagagggagag

SEQ ID NO: 5552065 - DNA, 25 bp, Homo sapien
ctgtttgggaccccatgctggtgtc

SEQ ID NO: 5552066 - DNA, 25 bp, Homo sapien
ctagtgacctggtgtgaacatggtg

SEQ ID NO: 5552067 - DNA, 25 bp, Homo sapien
acaactagacggactctgcagtgtg

SEQ ID NO: 5552068 - DNA, 25 bp, Homo sapien
gcctctcacagctatggactgcagc

SEQ ID NO: 5552069 - DNA, 25 bp, Homo sapien
actctgcagtgtgcccacctgtcct

SEQ ID NO: 5552070 - DNA, 25 bp, Homo sapien
ctcgaagctgatgatgcttgatgcc

SEQ ID NO: 5552071 - DNA, 25 bp, Homo sapien
atggactgcagcctatgcatgccta

SEQ ID NO: 5552072 - DNA, 25 bp, Homo sapien
taaaaaatcgtggcataaggtaatg

SEQ ID NO: 5552073 - DNA, 25 bp, Homo sapien
ggtgtccatgtgttaaacgtacaac

SEQ ID NO: 5552074 - DNA, 25 bp, Homo sapien
taaggtaatgcaaaaaggtgtccat

SEQ ID NO: 5552075 - DNA, 25 bp, Homo sapien
ggggattcggatgtctgtcctctca

SEQ ID NO: 5552076 - DNA, 25 bp, Homo sapien
tgggcctctctgcaatggtgccacc

SEQ ID NO: 5552077 - DNA, 25 bp, Homo sapien
tctgcaatggtgccaccagcgtcct

SEQ ID NO: 5552078 - DNA, 25 bp, Homo sapien
gtgtggccgacatcggttggattac

SEQ ID NO: 5552079 - DNA, 25 bp, Homo sapien
ccaccagcgtcctttttgagagcac

SEQ ID NO: 5552080 - DNA, 25 bp, Homo sapien
gtggtgtatgggcctctctgcaatg

SEQ ID NO: 5552081 - DNA, 25 bp, Homo sapien
agcttgtgtttgaccaccagccagg

SEQ ID NO: 5552082 - DNA, 25 bp, Homo sapien
caggtgacatctttggctgtgtggc

SEQ ID NO: 5552083 - DNA, 25 bp, Homo sapien
tgtgtttgaccaccagccaggtgac

SEQ ID NO: 5552084 - DNA, 25 bp, Homo sapien
caggacacagctacgtggtgtatgg

SEQ ID NO: 5552085 - DNA, 25 bp, Homo sapien
tttgagagcaccccagtttatccca

SEQ ID NO: 5552086 - DNA, 25 bp, Homo sapien
tggattacaggacacagctacgtgg

SEQ ID NO: 5552087 - DNA, 25 bp, Homo sapien
ttcagatcccagactggtaggtcca

SEQ ID NO: 5552088 - DNA, 25 bp, Homo sapien
ctgcagatgcacagccctcatggag

SEQ ID NO: 5552089 - DNA, 25 bp, Homo sapien
gccttgggagcccactcttgcatca

SEQ ID NO: 5552090 - DNA, 25 bp, Homo sapien
agaggatgtatggaaactcctggat

SEQ ID NO: 5552091 - DNA, 25 bp, Homo sapien
tggagcccttacacagagtctgcac

SEQ ID NO: 5552092 - DNA, 25 bp, Homo sapien
ggtaggtccattgacagcttgcacc

SEQ ID NO: 5552093 - DNA, 25 bp, Homo sapien
cagtgtactaggatgtgagatatgg

SEQ ID NO: 5552094 - DNA, 25 bp, Homo sapien
gaaatctgaggttggagcccttaca

SEQ ID NO: 5552095 - DNA, 25 bp, Homo sapien
acccccgttgtatctaggcagtaat

SEQ ID NO: 5552096 - DNA, 25 bp, Homo sapien
tggatttcaaacttgcatggggcct

SEQ ID NO: 5552097 - DNA, 25 bp, Homo sapien
aaaagggttgccatctttcagatcc

SEQ ID NO: 5552098 - DNA, 25 bp, Homo sapien
tggcttagagctgtttatgatattc

SEQ ID NO: 5552099 - DNA, 25 bp, Homo sapien
tctattgctcctgggtaataatttg

SEQ ID NO: 5552100 - DNA, 25 bp, Homo sapien
ccatatgatcgacagtgatgtctcc

SEQ ID NO: 5552101 - DNA, 25 bp, Homo sapien
tcaatatagggatactaaaattttc

SEQ ID NO: 5552102 - DNA, 25 bp, Homo sapien
tagtatcacagtaacaatgatagtt

SEQ ID NO: 5552103 - DNA, 25 bp, Homo sapien
attagtgtggccatttaggcttcac

SEQ ID NO: 5552104 - DNA, 25 bp, Homo sapien
ttataaggccttttaatgtccatat

SEQ ID NO: 5552105 - DNA, 25 bp, Homo sapien
tgataaaatttattagtgtggccat

SEQ ID NO: 5552106 - DNA, 25 bp, Homo sapien
ctatatccatgaagaatactgattc

SEQ ID NO: 5552107 - DNA, 25 bp, Homo sapien
aggcttcacattgtcttggtggaat

SEQ ID NO: 5552108 - DNA, 25 bp, Homo sapien
tggaagactttacataagattcaca

SEQ ID NO: 5552109 - DNA, 25 bp, Homo sapien
ggcagggctttgatcaaaagaacac

SEQ ID NO: 5552110 - DNA, 25 bp, Homo sapien
aggaagatcgctgaaggattcaatg

SEQ ID NO: 5552111 - DNA, 25 bp, Homo sapien
tagtcaacagtcggcttggcagaca

SEQ ID NO: 5552112 - DNA, 25 bp, Homo sapien
ccatcagctggagctctgagactgt

SEQ ID NO: 5552113 - DNA, 25 bp, Homo sapien
tgctacttgaaagaaaggcaacccc

SEQ ID NO: 5552114 - DNA, 25 bp, Homo sapien
tctggggatgctgaaatcttcctgg

SEQ ID NO: 5552115 - DNA, 25 bp, Homo sapien
tcaaaaaaggaaagctgatgagaaa

SEQ ID NO: 5552116 - DNA, 25 bp, Homo sapien
ggcatcccggaattcacacccaaac

SEQ ID NO: 5552117 - DNA, 25 bp, Homo sapien
tcttccaagatgagaagcaagccag

SEQ ID NO: 5552118 - DNA, 25 bp, Homo sapien
ccccaaggaagccctctgaaaatgc

SEQ ID NO: 5552119 - DNA, 25 bp, Homo sapien
tgatgagaaattgggcatcccggaa

SEQ ID NO: 5552120 - DNA, 25 bp, Homo sapien
ctagacacaggtaagttgaaaataa

SEQ ID NO: 5552121 - DNA, 25 bp, Homo sapien
tcaggtaaaatagattgcaacagaa

SEQ ID NO: 5552122 - DNA, 25 bp, Homo sapien
acaaaagttcatcaggaggacatat

SEQ ID NO: 5552123 - DNA, 25 bp, Homo sapien
ttacagagaaatactagacacaggt

SEQ ID NO: 5552124 - DNA, 25 bp, Homo sapien
ttcgtctgagggattgatctgtatg

SEQ ID NO: 5552125 - DNA, 25 bp, Homo sapien
caggaggacatatcaatcataagtg

SEQ ID NO: 5552126 - DNA, 25 bp, Homo sapien
ttagcaggaagcattcatgatcaac

SEQ ID NO: 5552127 - DNA, 25 bp, Homo sapien
atacatgaaaactgactaaaggcag

SEQ ID NO: 5552128 - DNA, 25 bp, Homo sapien
gaaaacagtaaaagattgaagtgac

SEQ ID NO: 5552129 - DNA, 25 bp, Homo sapien
ttgtatcaggtaatgtggattcttc

SEQ ID NO: 5552130 - DNA, 25 bp, Homo sapien
aagaaaaatggtattcagtcagcta

SEQ ID NO: 5552131 - DNA, 25 bp, Homo sapien
gagccaagattgtgtcactgcactc

SEQ ID NO: 5552132 - DNA, 25 bp, Homo sapien
gcaggagaattgctcgaatccagga

SEQ ID NO: 5552133 - DNA, 25 bp, Homo sapien
gtgatggcatacgactgtagtccca

SEQ ID NO: 5552134 - DNA, 25 bp, Homo sapien
caaaaattagcctggagtgatggca

SEQ ID NO: 5552135 - DNA, 25 bp, Homo sapien
attattgaattgtaagtgggctggg

SEQ ID NO: 5552136 - DNA, 25 bp, Homo sapien
agaattgctcgaatccaggaggtgg

SEQ ID NO: 5552137 - DNA, 25 bp, Homo sapien
acatggtgaaaccccctctccatta

SEQ ID NO: 5552138 - DNA, 25 bp, Homo sapien
agcgagactccatctgaaagaagga

SEQ ID NO: 5552139 - DNA, 25 bp, Homo sapien
agttacttaaacattggtcattcat

SEQ ID NO: 5552140 - DNA, 25 bp, Homo sapien
actccatctgaaagaaggaaggaag

SEQ ID NO: 5552141 - DNA, 25 bp, Homo sapien
attagcctggagtgatggcatacga

SEQ ID NO: 5552142 - DNA, 25 bp, Homo sapien
ttcaataaattggggccagagaatt

SEQ ID NO: 5552143 - DNA, 25 bp, Homo sapien
gtttgtgaagcagagaatattgaca

SEQ ID NO: 5552144 - DNA, 25 bp, Homo sapien
gagccactgctcatggccagttctt

SEQ ID NO: 5552145 - DNA, 25 bp, Homo sapien
ttgtcaaaggcatgtgttcaataaa

SEQ ID NO: 5552146 - DNA, 25 bp, Homo sapien
tgtgaagcagagaatattgacacac

SEQ ID NO: 5552147 - DNA, 25 bp, Homo sapien
tgtgttcaataaattggggccagag

SEQ ID NO: 5552148 - DNA, 25 bp, Homo sapien
ccccagatccttttaaaggtctcta

SEQ ID NO: 5552149 - DNA, 25 bp, Homo sapien
tcatactgcacacatacaggcacaa

SEQ ID NO: 5552150 - DNA, 25 bp, Homo sapien
ataaattggggccagagaatttaaa

SEQ ID NO: 5552151 - DNA, 25 bp, Homo sapien
tgatctaaagtttaccactggtttc

SEQ ID NO: 5552152 - DNA, 25 bp, Homo sapien
actgcacacatacaggcacaataac

SEQ ID NO: 5552153 - DNA, 25 bp, Homo sapien
ggatgcatagtatgggcacctctca

SEQ ID NO: 5552154 - DNA, 25 bp, Homo sapien
gtagaaggtctagatatgaggaata

SEQ ID NO: 5552155 - DNA, 25 bp, Homo sapien
tgtgagtttcaggtaatggagaccg

SEQ ID NO: 5552156 - DNA, 25 bp, Homo sapien
ccaccaggaaacatgatggaggtgt

SEQ ID NO: 5552157 - DNA, 25 bp, Homo sapien
tcaaaactgttgcagggtagaaggt

SEQ ID NO: 5552158 - DNA, 25 bp, Homo sapien
gctgtaggtctcatagagaagggct

SEQ ID NO: 5552159 - DNA, 25 bp, Homo sapien
acctcacactgcggccccagaatgg

SEQ ID NO: 5552160 - DNA, 25 bp, Homo sapien
tggaccactgtgataaggtgtgttt

SEQ ID NO: 5552161 - DNA, 25 bp, Homo sapien
ggtcagagctcaatggtcaagatca

SEQ ID NO: 5552162 - DNA, 25 bp, Homo sapien
tggtcaagatcaaggtgtgagtttc

SEQ ID NO: 5552163 - DNA, 25 bp, Homo sapien
gtgttttcacagaaggagaagtcaa

SEQ ID NO: 5552164 - DNA, 25 bp, Homo sapien
atcagaatggactttacctcatatt

SEQ ID NO: 5552165 - DNA, 25 bp, Homo sapien
tggggtttcatcatgttgaccaggc

SEQ ID NO: 5552166 - DNA, 25 bp, Homo sapien
ctttccacagaatcctagaccacaa

SEQ ID NO: 5552167 - DNA, 25 bp, Homo sapien
aggaagagccaagctgcacctttaa

SEQ ID NO: 5552168 - DNA, 25 bp, Homo sapien
taccactctgtaacaaggattgttt

SEQ ID NO: 5552169 - DNA, 25 bp, Homo sapien
tagaccacaaatacagttcaacaag

SEQ ID NO: 5552170 - DNA, 25 bp, Homo sapien
gtctgttcatggttacttaggtatt

SEQ ID NO: 5552171 - DNA, 25 bp, Homo sapien
tactttgcttagaaatagctccagc

SEQ ID NO: 5552172 - DNA, 25 bp, Homo sapien
tgccttagcctcctgagtagcgggg

SEQ ID NO: 5552173 - DNA, 25 bp, Homo sapien
aagattgaggctttttctctagctc

SEQ ID NO: 5552174 - DNA, 25 bp, Homo sapien
tagctccagctaaatatgcaatttc

SEQ ID NO: 5552175 - DNA, 25 bp, Homo sapien
agagtttacactgggaagatttgat

SEQ ID NO: 5552176 - DNA, 25 bp, Homo sapien
aggaggcatgttaagcccagagttt

SEQ ID NO: 5552177 - DNA, 25 bp, Homo sapien
cagggcagcaaaaattgagcttctc

SEQ ID NO: 5552178 - DNA, 25 bp, Homo sapien
tcaattagtggttcaggagagatga

SEQ ID NO: 5552179 - DNA, 25 bp, Homo sapien
taagccaatggaggataccagaatt

SEQ ID NO: 5552180 - DNA, 25 bp, Homo sapien
tggcagcaagcaatggataatctca

SEQ ID NO: 5552181 - DNA, 25 bp, Homo sapien
tcaggagagatgaagatattccctt

SEQ ID NO: 5552182 - DNA, 25 bp, Homo sapien
gcatgcaagtttagtaaagaggaac

SEQ ID NO: 5552183 - DNA, 25 bp, Homo sapien
ggtgagtctaaatctggcttaagcc

SEQ ID NO: 5552184 - DNA, 25 bp, Homo sapien
aagaatagataaggcccctaccatc

SEQ ID NO: 5552185 - DNA, 25 bp, Homo sapien
ataaggccctggaaataaaatatcc

SEQ ID NO: 5552186 - DNA, 25 bp, Homo sapien
gtaggaagatgtctcaaaaatttat

SEQ ID NO: 5552187 - DNA, 25 bp, Homo sapien
ataaatttttgagacatcttcctac

SEQ ID NO: 5552188 - DNA, 25 bp, Homo sapien
ttccacactgtaccttccctgcccc

SEQ ID NO: 5552189 - DNA, 25 bp, Homo sapien
aatgcagtgatgcaatcggtatcac

SEQ ID NO: 5552190 - DNA, 25 bp, Homo sapien
aggtatgagtcattgcaccagaccc

SEQ ID NO: 5552191 - DNA, 25 bp, Homo sapien
ggacacagcctctcagccctagcct

SEQ ID NO: 5552192 - DNA, 25 bp, Homo sapien
tgcaatcggtatcactgtagcctca

SEQ ID NO: 5552193 - DNA, 25 bp, Homo sapien
cccaaaagcactggaattataggta

SEQ ID NO: 5552194 - DNA, 25 bp, Homo sapien
acacatcagcaaagtcactagcatc

SEQ ID NO: 5552195 - DNA, 25 bp, Homo sapien
ctttcagtgctggaagcacagggag

SEQ ID NO: 5552196 - DNA, 25 bp, Homo sapien
ctcttaagtgtcatgggagacagtc

SEQ ID NO: 5552197 - DNA, 25 bp, Homo sapien
catgggagacagtccacattattcc

SEQ ID NO: 5552198 - DNA, 25 bp, Homo sapien
ccaagtaatagggactataggagca

SEQ ID NO: 5552199 - DNA, 25 bp, Homo sapien
ataaaaaaagaactgaagagatgga

SEQ ID NO: 5552200 - DNA, 25 bp, Homo sapien
cacccatggtagggatgaaaaagta

SEQ ID NO: 5552201 - DNA, 25 bp, Homo sapien
gaaaaagaccttgaatagctaacac

SEQ ID NO: 5552202 - DNA, 25 bp, Homo sapien
tgtcctttggtcaaggtagagggag

SEQ ID NO: 5552203 - DNA, 25 bp, Homo sapien
aaagcttatatggggaagaaaaaga

SEQ ID NO: 5552204 - DNA, 25 bp, Homo sapien
gctgaagcaacaggtgtccctcctg

SEQ ID NO: 5552205 - DNA, 25 bp, Homo sapien
ttagacacatggccctcagaggtga

SEQ ID NO: 5552206 - DNA, 25 bp, Homo sapien
ctcagcacatgccagcaggtgttgg

SEQ ID NO: 5552207 - DNA, 25 bp, Homo sapien
ctcactaaagtcaagaggcacacac

SEQ ID NO: 5552208 - DNA, 25 bp, Homo sapien
aggtagagggagttatgtaatttca

SEQ ID NO: 5552209 - DNA, 25 bp, Homo sapien
tttatggatatagaaaaagtaattc

SEQ ID NO: 5552210 - DNA, 25 bp, Homo sapien
acaaaagcaaagagctcagtggata

SEQ ID NO: 5552211 - DNA, 25 bp, Homo sapien
tcatgacgaaacatggagagacaaa

SEQ ID NO: 5552212 - DNA, 25 bp, Homo sapien
tgatgaactggaaagtaggttagaa

SEQ ID NO: 5552213 - DNA, 25 bp, Homo sapien
tacacatacggagataaaagacagt

SEQ ID NO: 5552214 - DNA, 25 bp, Homo sapien
agagatatggagataaaatgagaat

SEQ ID NO: 5552215 - DNA, 25 bp, Homo sapien
gtaggttagaagacaacatcatgac

SEQ ID NO: 5552216 - DNA, 25 bp, Homo sapien
agctgtagggaaaattgatgaactg

SEQ ID NO: 5552217 - DNA, 25 bp, Homo sapien
agcaatgctacagagagtaagagat

SEQ ID NO: 5552218 - DNA, 25 bp, Homo sapien
agaaaacatgagatccagtagaaac

SEQ ID NO: 5552219 - DNA, 25 bp, Homo sapien
aaagagaatggtgcagcatcaatat

SEQ ID NO: 5552220 - DNA, 25 bp, Homo sapien
cacaagagaataaccaggcccataa

SEQ ID NO: 5552221 - DNA, 25 bp, Homo sapien
gatataatgagcacaagatacgttt

SEQ ID NO: 5552222 - DNA, 25 bp, Homo sapien
attacaaatgatagctaggtttctt

SEQ ID NO: 5552223 - DNA, 25 bp, Homo sapien
ttatgcagaaatatagccaaaatac

SEQ ID NO: 5552224 - DNA, 25 bp, Homo sapien
ctttgctgatgtgtcaaggctaggg

SEQ ID NO: 5552225 - DNA, 25 bp, Homo sapien
tccagatagaaatccaaagagagag

SEQ ID NO: 5552226 - DNA, 25 bp, Homo sapien
cccaattttgctgtcctgagaggaa

SEQ ID NO: 5552227 - DNA, 25 bp, Homo sapien
gacacttaagaggtcatgtgatgct

SEQ ID NO: 5552228 - DNA, 25 bp, Homo sapien
atgtgatgctagtgactttgctgat

SEQ ID NO: 5552229 - DNA, 25 bp, Homo sapien
tgagaggctgtgtccagcactgtca

SEQ ID NO: 5552230 - DNA, 25 bp, Homo sapien
agataattggagaaagtgctgtgta

SEQ ID NO: 5552231 - DNA, 25 bp, Homo sapien
gtgtggaataatgtggactgtctcc

SEQ ID NO: 5552232 - DNA, 25 bp, Homo sapien
gagatcatgaggcatttcagagtgc

SEQ ID NO: 5552233 - DNA, 25 bp, Homo sapien
ttatcaagtgagcaggcttggtgca

SEQ ID NO: 5552234 - DNA, 25 bp, Homo sapien
tggaagaggactatgacatcatcag

SEQ ID NO: 5552235 - DNA, 25 bp, Homo sapien
aaaaggactagaaagtgtgaaatct

SEQ ID NO: 5552236 - DNA, 25 bp, Homo sapien
cagcggaccctttggaaaaggacta

SEQ ID NO: 5552237 - DNA, 25 bp, Homo sapien
ttcatgatatcagccaaagtggaac

SEQ ID NO: 5552238 - DNA, 25 bp, Homo sapien
aaagtggaactaaaaacagctcctg

SEQ ID NO: 5552239 - DNA, 25 bp, Homo sapien
tgcactgggactcaacgtgacctta

SEQ ID NO: 5552240 - DNA, 25 bp, Homo sapien
gccctatgccgtaacctgtgtctgc

SEQ ID NO: 5552241 - DNA, 25 bp, Homo sapien
aattgtactacgagatgcactggga

SEQ ID NO: 5552242 - DNA, 25 bp, Homo sapien
cctactcctagggcagcaaaaagtg

SEQ ID NO: 5552243 - DNA, 25 bp, Homo sapien
tagtaacctaaccagcaagtagaac

SEQ ID NO: 5552244 - DNA, 25 bp, Homo sapien
actggggactatttaagctaggtta

SEQ ID NO: 5552245 - DNA, 25 bp, Homo sapien
gagagaactactggggactatttaa

SEQ ID NO: 5552246 - DNA, 25 bp, Homo sapien
attgggtagctctggtgtctttcct

SEQ ID NO: 5552247 - DNA, 25 bp, Homo sapien
acacccaattcaaggaaggtcgtac

SEQ ID NO: 5552248 - DNA, 25 bp, Homo sapien
aagcaaactcagaatatgatcaccc

SEQ ID NO: 5552249 - DNA, 25 bp, Homo sapien
tttagcagcctgtcaattgggtagc

SEQ ID NO: 5552250 - DNA, 25 bp, Homo sapien
agcccttctggccaataaacaccca

SEQ ID NO: 5552251 - DNA, 25 bp, Homo sapien
ggtcccacaggcatcagtgaatccc

SEQ ID NO: 5552252 - DNA, 25 bp, Homo sapien
caagtagaacttgagagagaactac

SEQ ID NO: 5552253 - DNA, 25 bp, Homo sapien
aaattggactatcacaagcaaactc

SEQ ID NO: 5552254 - DNA, 25 bp, Homo sapien
ttatcaagtcaaatctcactctttc

SEQ ID NO: 5552255 - DNA, 25 bp, Homo sapien
acttcaaccctggagtgatatagtg

SEQ ID NO: 5552256 - DNA, 25 bp, Homo sapien
tttattaattggctgattcattcag

SEQ ID NO: 5552257 - DNA, 25 bp, Homo sapien
cattcagaaacataattatcaagtc

SEQ ID NO: 5552258 - DNA, 25 bp, Homo sapien
tcccttccgtttagctgagaaaatc

SEQ ID NO: 5552259 - DNA, 25 bp, Homo sapien
acatatacgattattcgagtgtggt

SEQ ID NO: 5552260 - DNA, 25 bp, Homo sapien
tacgattattcgagtgtggtggcac

SEQ ID NO: 5552261 - DNA, 25 bp, Homo sapien
tggcatgcaccactgtcctggcctg

SEQ ID NO: 5552262 - DNA, 25 bp, Homo sapien
ttaactatatcatgtctcctgcctc

SEQ ID NO: 5552263 - DNA, 25 bp, Homo sapien
ccttagcatttcccttccgtttagc

SEQ ID NO: 5552264 - DNA, 25 bp, Homo sapien
accctggagtgatatagtggttata

SEQ ID NO: 5552265 - DNA, 25 bp, Homo sapien
aatgtgtgccagtgaacggggcgcg

SEQ ID NO: 5552266 - DNA, 25 bp, Homo sapien
cgcgccccgttcactggcacacatt

SEQ ID NO: 5552267 - DNA, 25 bp, Homo sapien
ctcctcactctctcaccgtacttag

SEQ ID NO: 5552268 - DNA, 25 bp, Homo sapien
ctaagtacggtgagagagtgaggag

SEQ ID NO: 5552269 - DNA, 25 bp, Homo sapien
ttcgactcgatacttagcatgttct

SEQ ID NO: 5552270 - DNA, 25 bp, Homo sapien
agaacatgctaagtatcgagtcgaa

SEQ ID NO: 5552271 - DNA, 25 bp, Homo sapien
atagcaagacatagttgagttttgt

SEQ ID NO: 5552272 - DNA, 25 bp, Homo sapien
tgtcctaggtgcaagattatattta

SEQ ID NO: 5552273 - DNA, 25 bp, Homo sapien
attagattttaaagtggggtctgga

SEQ ID NO: 5552274 - DNA, 25 bp, Homo sapien
aaggcgagaattgtgttaagcattt

SEQ ID NO: 5552275 - DNA, 25 bp, Homo sapien
gaaactaagctctttggtggactgc

SEQ ID NO: 5552276 - DNA, 25 bp, Homo sapien
ctttggtggactgctactgtttatt

SEQ ID NO: 5552277 - DNA, 25 bp, Homo sapien
gagtatcaggtgaacaagtttacat

SEQ ID NO: 5552278 - DNA, 25 bp, Homo sapien
gaggtggaagacagcttatttctgc

SEQ ID NO: 5552279 - DNA, 25 bp, Homo sapien
tacatttaaaggcgagaattgtgtt

SEQ ID NO: 5552280 - DNA, 25 bp, Homo sapien
tttgaaggattgaattgtgaaaatt

SEQ ID NO: 5552281 - DNA, 25 bp, Homo sapien
cggccttggtggtggtcttattgaa

SEQ ID NO: 5552282 - DNA, 25 bp, Homo sapien
acaccatgaaggtaggatatctctg

SEQ ID NO: 5552283 - DNA, 25 bp, Homo sapien
cactccgagtagagtatattgtttc

SEQ ID NO: 5552284 - DNA, 25 bp, Homo sapien
catgaaggtaggatatctctgtttt

SEQ ID NO: 5552285 - DNA, 25 bp, Homo sapien
aaaagtgctaggcatcgttggtgtg

SEQ ID NO: 5552286 - DNA, 25 bp, Homo sapien
tctacaaatgggtacagaaaaggaa

SEQ ID NO: 5552287 - DNA, 25 bp, Homo sapien
cagggttatggaataatgctgtaat

SEQ ID NO: 5552288 - DNA, 25 bp, Homo sapien
tccttgagtgaacaaaaagtgctag

SEQ ID NO: 5552289 - DNA, 25 bp, Homo sapien
gtgaacaaaaagtgctaggcatcgt

SEQ ID NO: 5552290 - DNA, 25 bp, Homo sapien
aacaaaatattacctcactccgagt

SEQ ID NO: 5552291 - DNA, 25 bp, Homo sapien
atagtgagaactacagggttatgga

SEQ ID NO: 5552292 - DNA, 25 bp, Homo sapien
tttgaatccttgagtgaacaaaaag

SEQ ID NO: 5552293 - DNA, 25 bp, Homo sapien
gtgcagtgtagaacaacaagaagat

SEQ ID NO: 5552294 - DNA, 25 bp, Homo sapien
cccctgtaggcaatttggaaaatta

SEQ ID NO: 5552295 - DNA, 25 bp, Homo sapien
cacatgagacatttttgctggaaga

SEQ ID NO: 5552296 - DNA, 25 bp, Homo sapien
tatctgtaggataagtcgaatatat

SEQ ID NO: 5552297 - DNA, 25 bp, Homo sapien
ataaaaaatggcaaaccaaagacta

SEQ ID NO: 5552298 - DNA, 25 bp, Homo sapien
acgtccccagtgtatggttgcacct

SEQ ID NO: 5552299 - DNA, 25 bp, Homo sapien
atcacgcaataggatctgtagcctc

SEQ ID NO: 5552300 - DNA, 25 bp, Homo sapien
aagatagaaaactgatagaaaaggg

SEQ ID NO: 5552301 - DNA, 25 bp, Homo sapien
atgtttgtcagtgaggctgtttgtt

SEQ ID NO: 5552302 - DNA, 25 bp, Homo sapien
cctcttggtaattaatgacacggcc

SEQ ID NO: 5552303 - DNA, 25 bp, Homo sapien
aaagactagtgggaggttcttgtta

SEQ ID NO: 5552304 - DNA, 25 bp, Homo sapien
cataactcagggagacacttacatt

SEQ ID NO: 5552305 - DNA, 25 bp, Homo sapien
atagattaaagtatggaagaaggga

SEQ ID NO: 5552306 - DNA, 25 bp, Homo sapien
tgtacctggagataacatcagaccc

SEQ ID NO: 5552307 - DNA, 25 bp, Homo sapien
ccgacagagcagccataaatcaggg

SEQ ID NO: 5552308 - DNA, 25 bp, Homo sapien
ccacttcagatgccaactgcaagcc

SEQ ID NO: 5552309 - DNA, 25 bp, Homo sapien
agaccccacaggttgagtgctcagt

SEQ ID NO: 5552310 - DNA, 25 bp, Homo sapien
gctcagtcccccaagagtgtcctcc

SEQ ID NO: 5552311 - DNA, 25 bp, Homo sapien
ttctccataggttagggctgaaagt

SEQ ID NO: 5552312 - DNA, 25 bp, Homo sapien
gctgggtgtcgtgtagttcaattca

SEQ ID NO: 5552313 - DNA, 25 bp, Homo sapien
agatgaacaaccagatggaaaagtg

SEQ ID NO: 5552314 - DNA, 25 bp, Homo sapien
agcagacacaagctgggtgtcgtgt

SEQ ID NO: 5552315 - DNA, 25 bp, Homo sapien
cagcacccaatcctgggatatttat

SEQ ID NO: 5552316 - DNA, 25 bp, Homo sapien
agattgcgtctccactttcaccctg

SEQ ID NO: 5552317 - DNA, 25 bp, Homo sapien
ttcaccctggtactgagaggttgag

SEQ ID NO: 5552318 - DNA, 25 bp, Homo sapien
aacgtcttccaagggagattgcgtc

SEQ ID NO: 5552319 - DNA, 25 bp, Homo sapien
aattggtaaccaatgctgcgcttcc

SEQ ID NO: 5552320 - DNA, 25 bp, Homo sapien
aattttcccaccagcacccaatcct

SEQ ID NO: 5552321 - DNA, 25 bp, Homo sapien
gcagtcgcggggtatatccccctga

SEQ ID NO: 5552322 - DNA, 25 bp, Homo sapien
gcgcttccagcaaattttcccacca

SEQ ID NO: 5552323 - DNA, 25 bp, Homo sapien
ttagagatggagactaacgtcttcc

SEQ ID NO: 5552324 - DNA, 25 bp, Homo sapien
agaggttgagcacaaaattggtaac

SEQ ID NO: 5552325 - DNA, 25 bp, Homo sapien
cacatcctacaggaacgcagtcgcg

SEQ ID NO: 5552326 - DNA, 25 bp, Homo sapien
aagctgcttggtaaaatacatactt

SEQ ID NO: 5552327 - DNA, 25 bp, Homo sapien
aatacatacttagaacaattgggtt

SEQ ID NO: 5552328 - DNA, 25 bp, Homo sapien
ctttggggactctgtgtacttattc

SEQ ID NO: 5552329 - DNA, 25 bp, Homo sapien
tggaaaatgactcacacatcttggc

SEQ ID NO: 5552330 - DNA, 25 bp, Homo sapien
tcaaaggatccacccgcctgaatct

SEQ ID NO: 5552331 - DNA, 25 bp, Homo sapien
cttggcctcactagtctttggggac

SEQ ID NO: 5552332 - DNA, 25 bp, Homo sapien
cacacatcttggcctcactagtctt

SEQ ID NO: 5552333 - DNA, 25 bp, Homo sapien
tgtgatggaaaatgactcacacatc

SEQ ID NO: 5552334 - DNA, 25 bp, Homo sapien
aaaggatccacccgcctgaatctcc

SEQ ID NO: 5552335 - DNA, 25 bp, Homo sapien
tgcccaggcaacagttgtgcagtga

SEQ ID NO: 5552336 - DNA, 25 bp, Homo sapien
caggcaacagttgtgcagtgataca

SEQ ID NO: 5552337 - DNA, 25 bp, Homo sapien
taacgtccctgcaaaatgttgaatc

SEQ ID NO: 5552338 - DNA, 25 bp, Homo sapien
tttagaccctcttcaggcatcccct

SEQ ID NO: 5552339 - DNA, 25 bp, Homo sapien
aggcatcccctgttgaataagttcc

SEQ ID NO: 5552340 - DNA, 25 bp, Homo sapien
cacagaaacaaatatgggcacattg

SEQ ID NO: 5552341 - DNA, 25 bp, Homo sapien
attggcacataaaggaacaaaaatg

SEQ ID NO: 5552342 - DNA, 25 bp, Homo sapien
taagttccatgatttacaggcctac

SEQ ID NO: 5552343 - DNA, 25 bp, Homo sapien
acaaaaaattggcacataaaggaac

SEQ ID NO: 5552344 - DNA, 25 bp, Homo sapien
tatacttgcagcaccaatcggcaaa

SEQ ID NO: 5552345 - DNA, 25 bp, Homo sapien
tatgggcacattgagacatgttttc

SEQ ID NO: 5552346 - DNA, 25 bp, Homo sapien
actgtgtaaagagatattagtgtac

SEQ ID NO: 5552347 - DNA, 25 bp, Homo sapien
acaaaaggagtaaaagacagtaata

SEQ ID NO: 5552348 - DNA, 25 bp, Homo sapien
ttagaggtataaagcatgtcgagaa

SEQ ID NO: 5552349 - DNA, 25 bp, Homo sapien
ttgataatggacttggatgatgaat

SEQ ID NO: 5552350 - DNA, 25 bp, Homo sapien
gtgtgcagaaggccaattgtttcaa

SEQ ID NO: 5552351 - DNA, 25 bp, Homo sapien
tcctcctatgcatgtaggggctggc

SEQ ID NO: 5552352 - DNA, 25 bp, Homo sapien
ctgaagaatgaccctcccccagcac

SEQ ID NO: 5552353 - DNA, 25 bp, Homo sapien
cttcaagtaaagagctaagcactcc

SEQ ID NO: 5552354 - DNA, 25 bp, Homo sapien
ttgcaagacttcaaaaagagtgtgc

SEQ ID NO: 5552355 - DNA, 25 bp, Homo sapien
aacgggagttaggtgttcacttgat

SEQ ID NO: 5552356 - DNA, 25 bp, Homo sapien
agtgaccaaccccgaaatgcttgtc

SEQ ID NO: 5552357 - DNA, 25 bp, Homo sapien
ttttccagtagacatggagaggaga

SEQ ID NO: 5552358 - DNA, 25 bp, Homo sapien
tcttgaaggccgtaagttgtgctga

SEQ ID NO: 5552359 - DNA, 25 bp, Homo sapien
gcgcttgccttcacagggttggagt

SEQ ID NO: 5552360 - DNA, 25 bp, Homo sapien
ttagccagtgtcaggcatagagaag

SEQ ID NO: 5552361 - DNA, 25 bp, Homo sapien
ttggagtgagcattgcacgagataa

SEQ ID NO: 5552362 - DNA, 25 bp, Homo sapien
ttactcagttaggaggtgtgcttac

SEQ ID NO: 5552363 - DNA, 25 bp, Homo sapien
aggcaggaaagcatgttttatgagc

SEQ ID NO: 5552364 - DNA, 25 bp, Homo sapien
ttcagataagaaacgagatcacata

SEQ ID NO: 5552365 - DNA, 25 bp, Homo sapien
gataatgcatatgaagggctttagc

SEQ ID NO: 5552366 - DNA, 25 bp, Homo sapien
tgaatttgctatgtggaagggaaaa

SEQ ID NO: 5552367 - DNA, 25 bp, Homo sapien
tgtactagctactgccgctgggctt

SEQ ID NO: 5552368 - DNA, 25 bp, Homo sapien
tgatgataaaggatttggagtctca

SEQ ID NO: 5552369 - DNA, 25 bp, Homo sapien
catcaactgtataggaggcaggaaa

SEQ ID NO: 5552370 - DNA, 25 bp, Homo sapien
tagaagggaactcttcaacctgatc

SEQ ID NO: 5552371 - DNA, 25 bp, Homo sapien
aaaacacatttgacagaatccaatt

SEQ ID NO: 5552372 - DNA, 25 bp, Homo sapien
tgatgtagcaggtgccttactggca

SEQ ID NO: 5552373 - DNA, 25 bp, Homo sapien
caagtttgggctccttttgcctctt

SEQ ID NO: 5552374 - DNA, 25 bp, Homo sapien
ctgtgacatgatgatgtagcaggtg

SEQ ID NO: 5552375 - DNA, 25 bp, Homo sapien
tttagctttgactgatgcagatatc

SEQ ID NO: 5552376 - DNA, 25 bp, Homo sapien
cattataaaagagcaagtttgggct

SEQ ID NO: 5552377 - DNA, 25 bp, Homo sapien
cctgatcaaagataagatttacacc

SEQ ID NO: 5552378 - DNA, 25 bp, Homo sapien
accgagtctcaggtatgctgttata

SEQ ID NO: 5552379 - DNA, 25 bp, Homo sapien
ataaactacaaatagaagggaactc

SEQ ID NO: 5552380 - DNA, 25 bp, Homo sapien
atgcagatatcaatgcagaaaacac

SEQ ID NO: 5552381 - DNA, 25 bp, Homo sapien
gaccgtcgtccgaggccaggtgtgg

SEQ ID NO: 5552382 - DNA, 25 bp, Homo sapien
ccacacctggcctcggacgacggtc

SEQ ID NO: 5552383 - DNA, 25 bp, Homo sapien
gaagcagcacctatgccaagcctca

SEQ ID NO: 5552384 - DNA, 25 bp, Homo sapien
tctgagtgcccaccctctctggtcc

SEQ ID NO: 5552385 - DNA, 25 bp, Homo sapien
ctgctctctctgagtgcccaccctc

SEQ ID NO: 5552386 - DNA, 25 bp, Homo sapien
cccccaggacctccagtccctctgc

SEQ ID NO: 5552387 - DNA, 25 bp, Homo sapien
cgtctccccgtcctgtagccaaacc

SEQ ID NO: 5552388 - DNA, 25 bp, Homo sapien
accccagacgaacatacaggaagga

SEQ ID NO: 5552389 - DNA, 25 bp, Homo sapien
gccaggacctcgctcctccccaacc

SEQ ID NO: 5552390 - DNA, 25 bp, Homo sapien
agaacccagatttgtcccccaggac

SEQ ID NO: 5552391 - DNA, 25 bp, Homo sapien
cttctgcaaaccagaacccagctgc

SEQ ID NO: 5552392 - DNA, 25 bp, Homo sapien
gggatctccctagtttctggccgcc

SEQ ID NO: 5552393 - DNA, 25 bp, Homo sapien
cgcctcctccctgacagtcatcgcc

SEQ ID NO: 5552394 - DNA, 25 bp, Homo sapien
tcaaggtaacagtatacaggaaatc

SEQ ID NO: 5552395 - DNA, 25 bp, Homo sapien
cagccagtattttccacagccagtc

SEQ ID NO: 5552396 - DNA, 25 bp, Homo sapien
acaggaaatcatgggtttcgagcat

SEQ ID NO: 5552397 - DNA, 25 bp, Homo sapien
gagcgtgccttgtctatgggccacc

SEQ ID NO: 5552398 - DNA, 25 bp, Homo sapien
gtgtctacatgtggtctgctcactc

SEQ ID NO: 5552399 - DNA, 25 bp, Homo sapien
ggcttccctgaaatggtgctgatgt

SEQ ID NO: 5552400 - DNA, 25 bp, Homo sapien
aggagggcttgtccacaagttgctg

SEQ ID NO: 5552401 - DNA, 25 bp, Homo sapien
tccctagaccagcatctgagcgtgc

SEQ ID NO: 5552402 - DNA, 25 bp, Homo sapien
taaatgccagccttagccttgttca

SEQ ID NO: 5552403 - DNA, 25 bp, Homo sapien
agagaagagtgatagtgtctacatg

SEQ ID NO: 5552404 - DNA, 25 bp, Homo sapien
tatctgggccttctgagactgttcc

SEQ ID NO: 5552405 - DNA, 25 bp, Homo sapien
agctagggaattagatttcaggtgt

SEQ ID NO: 5552406 - DNA, 25 bp, Homo sapien
ttgagtagctacatcaagcagaaac

SEQ ID NO: 5552407 - DNA, 25 bp, Homo sapien
gaatggagaaactttgattagtggt

SEQ ID NO: 5552408 - DNA, 25 bp, Homo sapien
agaaacagatgcttcacaatccagc

SEQ ID NO: 5552409 - DNA, 25 bp, Homo sapien
aatgctagtcaacatgaatggagaa

SEQ ID NO: 5552410 - DNA, 25 bp, Homo sapien
ttgcatacggtcatatggtgccaat

SEQ ID NO: 5552411 - DNA, 25 bp, Homo sapien
attcccgaaatagacacgtaaatac

SEQ ID NO: 5552412 - DNA, 25 bp, Homo sapien
caacaaagcagtcctcttgggggaa

SEQ ID NO: 5552413 - DNA, 25 bp, Homo sapien
aatccagcatagaatcccttgactt

SEQ ID NO: 5552414 - DNA, 25 bp, Homo sapien
cactgtcagaaaaaaatagggtctc

SEQ ID NO: 5552415 - DNA, 25 bp, Homo sapien
agtgtgttataatgcagctagggaa

SEQ ID NO: 5552416 - DNA, 25 bp, Homo sapien
tacactataaaacatctatcatatt

SEQ ID NO: 5552417 - DNA, 25 bp, Homo sapien
aatatgatagatgttttatagtgta

SEQ ID NO: 5552418 - DNA, 25 bp, Homo sapien
ttttttatcgtatacactataaaac

SEQ ID NO: 5552419 - DNA, 25 bp, Homo sapien
gttttatagtgtatacgataaaaaa

SEQ ID NO: 5552420 - DNA, 25 bp, Homo sapien
cagttattgcaggaagattacaacc

SEQ ID NO: 5552421 - DNA, 25 bp, Homo sapien
gtggttcataaccagaaagtagaaa

SEQ ID NO: 5552422 - DNA, 25 bp, Homo sapien
cacattcctcagctgcaagagcagt

SEQ ID NO: 5552423 - DNA, 25 bp, Homo sapien
ccagaaagtagaaattctgagaaaa

SEQ ID NO: 5552424 - DNA, 25 bp, Homo sapien
gcccaaagattgctaaaagagatcc

SEQ ID NO: 5552425 - DNA, 25 bp, Homo sapien
ctgcaagagcagttatccaaagcca

SEQ ID NO: 5552426 - DNA, 25 bp, Homo sapien
caagaggccaagaaacacattcctc

SEQ ID NO: 5552427 - DNA, 25 bp, Homo sapien
tacaaccgaacacctgcccaaagat

SEQ ID NO: 5552428 - DNA, 25 bp, Homo sapien
gattgctaaaagagatccaagaggc

SEQ ID NO: 5552429 - DNA, 25 bp, Homo sapien
tgcaggaagattacaaccgaacacc

SEQ ID NO: 5552430 - DNA, 25 bp, Homo sapien
agcagttatccaaagccacaggctc

SEQ ID NO: 5552431 - DNA, 25 bp, Homo sapien
caggaacggctacaggtattaaatg

SEQ ID NO: 5552432 - DNA, 25 bp, Homo sapien
tgtcagagaatgttgcagttgcctt

SEQ ID NO: 5552433 - DNA, 25 bp, Homo sapien
ggatgttacagaagtaatgattaac

SEQ ID NO: 5552434 - DNA, 25 bp, Homo sapien
caacaggatgtcccgttaaggatgt

SEQ ID NO: 5552435 - DNA, 25 bp, Homo sapien
gaagtagggctgtttacaggccaat

SEQ ID NO: 5552436 - DNA, 25 bp, Homo sapien
ttttctagcgtaggacaacaggatg

SEQ ID NO: 5552437 - DNA, 25 bp, Homo sapien
atcaagcagcattgtaaccattgcc

SEQ ID NO: 5552438 - DNA, 25 bp, Homo sapien
caggccaataaaaatgtgagtgggc

SEQ ID NO: 5552439 - DNA, 25 bp, Homo sapien
caggctctgctcaggtagcatcact

SEQ ID NO: 5552440 - DNA, 25 bp, Homo sapien
ttcttctgggagtgtgtcagagaat

SEQ ID NO: 5552441 - DNA, 25 bp, Homo sapien
gtttatcagtcacaatcaagcagca

SEQ ID NO: 5552442 - DNA, 25 bp, Homo sapien
atacccagtgcttgagtggcagttg

SEQ ID NO: 5552443 - DNA, 25 bp, Homo sapien
tgattagttccaagagccggtagtt

SEQ ID NO: 5552444 - DNA, 25 bp, Homo sapien
tttatgatcggtgcaaaagtcagca

SEQ ID NO: 5552445 - DNA, 25 bp, Homo sapien
catcgagggcattcttaagttaaac

SEQ ID NO: 5552446 - DNA, 25 bp, Homo sapien
tgtgcagcacagagctccgtatgca

SEQ ID NO: 5552447 - DNA, 25 bp, Homo sapien
ttcaagtgacaggctcatttaagat

SEQ ID NO: 5552448 - DNA, 25 bp, Homo sapien
aatgtctgccagatacccagtgctt

SEQ ID NO: 5552449 - DNA, 25 bp, Homo sapien
tgagaaccactgatgtctaagcctc

SEQ ID NO: 5552450 - DNA, 25 bp, Homo sapien
ataacagtggtttgtgaaaatgttc

SEQ ID NO: 5552451 - DNA, 25 bp, Homo sapien
aataagacctctgtcaagggttgat

SEQ ID NO: 5552452 - DNA, 25 bp, Homo sapien
tttaaaacacagagtgaggaatcac

SEQ ID NO: 5552453 - DNA, 25 bp, Homo sapien
ggtccacagtcgatgaggaatcaga

SEQ ID NO: 5552454 - DNA, 25 bp, Homo sapien
cactgcatgcctacaggcacgggga

SEQ ID NO: 5552455 - DNA, 25 bp, Homo sapien
aagttaatggcagcatgcatgagcc

SEQ ID NO: 5552456 - DNA, 25 bp, Homo sapien
ataaatgctgcagacgttgtgaatg

SEQ ID NO: 5552457 - DNA, 25 bp, Homo sapien
gaatacggagaatacaaggtccaca

SEQ ID NO: 5552458 - DNA, 25 bp, Homo sapien
ctcagcactgtagagaagatgcgaa

SEQ ID NO: 5552459 - DNA, 25 bp, Homo sapien
ggcacggggatccataatagtctca

SEQ ID NO: 5552460 - DNA, 25 bp, Homo sapien
cgttgtgaatgcagccagtgcaatc

SEQ ID NO: 5552461 - DNA, 25 bp, Homo sapien
tgagtgttggaggtatcacagtata

SEQ ID NO: 5552462 - DNA, 25 bp, Homo sapien
tcttcccacagagaggtatggagaa

SEQ ID NO: 5552463 - DNA, 25 bp, Homo sapien
tgagaaactcaaagcctgcagctga

SEQ ID NO: 5552464 - DNA, 25 bp, Homo sapien
aaggaaaacctgtctacaccattct

SEQ ID NO: 5552465 - DNA, 25 bp, Homo sapien
aggagaacaacagaggccatttaag

SEQ ID NO: 5552466 - DNA, 25 bp, Homo sapien
ataagagaactatcatttactgagc

SEQ ID NO: 5552467 - DNA, 25 bp, Homo sapien
gaacaacagaggccatttaaggaaa

SEQ ID NO: 5552468 - DNA, 25 bp, Homo sapien
agaggccatttaaggaaaacctgtc

SEQ ID NO: 5552469 - DNA, 25 bp, Homo sapien
aaaaccaataatagtgggaaagata

SEQ ID NO: 5552470 - DNA, 25 bp, Homo sapien
ccaataatagtgggaaagataagag

SEQ ID NO: 5552471 - DNA, 25 bp, Homo sapien
gtgggaaagataagagaactatcat

SEQ ID NO: 5552472 - DNA, 25 bp, Homo sapien
ttaagacatgagggtcttattatgt

SEQ ID NO: 5552473 - DNA, 25 bp, Homo sapien
tttactgagcatatataatacacaa

SEQ ID NO: 5552474 - DNA, 25 bp, Homo sapien
aattagacaaaattaataatgaata

SEQ ID NO: 5552475 - DNA, 25 bp, Homo sapien
caatcagccagaaataattacagtt

SEQ ID NO: 5552476 - DNA, 25 bp, Homo sapien
gcaagttctatgaaataaaaagcag

SEQ ID NO: 5552477 - DNA, 25 bp, Homo sapien
agtgtgttaatgaccatgcaagttc

SEQ ID NO: 5552478 - DNA, 25 bp, Homo sapien
agtgaacaaaagaaacatgagtccc

SEQ ID NO: 5552479 - DNA, 25 bp, Homo sapien
cagctaacacgtactaaccatccgc

SEQ ID NO: 5552480 - DNA, 25 bp, Homo sapien
tactgcagtgaacaaaagaaacatg

SEQ ID NO: 5552481 - DNA, 25 bp, Homo sapien
agtcccttcgttgtggagctttcca

SEQ ID NO: 5552482 - DNA, 25 bp, Homo sapien
cctgcaacacgtgattatttgattc

SEQ ID NO: 5552483 - DNA, 25 bp, Homo sapien
ctgttctatatgctagagatactgc

SEQ ID NO: 5552484 - DNA, 25 bp, Homo sapien
catccgctatagttaggtactgttc

SEQ ID NO: 5552485 - DNA, 25 bp, Homo sapien
gtacagttttaagcaggtggtcgga

SEQ ID NO: 5552486 - DNA, 25 bp, Homo sapien
tctttcttagtcagaagagccctcc

SEQ ID NO: 5552487 - DNA, 25 bp, Homo sapien
tgagaggcatttggtaggttttaca

SEQ ID NO: 5552488 - DNA, 25 bp, Homo sapien
tgtaaagaaactggcatgtttgttc

SEQ ID NO: 5552489 - DNA, 25 bp, Homo sapien
aattcgctgagtcaaacaacgcagg

SEQ ID NO: 5552490 - DNA, 25 bp, Homo sapien
aacaacgcaggcagagctaaattta

SEQ ID NO: 5552491 - DNA, 25 bp, Homo sapien
cccatttgccacaggtcagaccagc

SEQ ID NO: 5552492 - DNA, 25 bp, Homo sapien
ccttcccttgggtcaggcccacttc

SEQ ID NO: 5552493 - DNA, 25 bp, Homo sapien
acttttagagagcccacagcagtat

SEQ ID NO: 5552494 - DNA, 25 bp, Homo sapien
tttacagatgcccagtgacaattgc

SEQ ID NO: 5552495 - DNA, 25 bp, Homo sapien
cagcagtatctggtaggtatcaaac

SEQ ID NO: 5552496 - DNA, 25 bp, Homo sapien
agccctcagaagattaatgcatttt

SEQ ID NO: 5552497 - DNA, 25 bp, Homo sapien
aaccattggattcatatagctgctc

SEQ ID NO: 5552498 - DNA, 25 bp, Homo sapien
aggtagagcaaagcagtgcattcaa

SEQ ID NO: 5552499 - DNA, 25 bp, Homo sapien
ggtcaaggataacgcaaagtctttc

SEQ ID NO: 5552500 - DNA, 25 bp, Homo sapien
aggaacaaatccagaggcagtacct

SEQ ID NO: 5552501 - DNA, 25 bp, Homo sapien
gggaagaaccctagagctagctgtc

SEQ ID NO: 5552502 - DNA, 25 bp, Homo sapien
gcaactgactggagctgtcgctcta

SEQ ID NO: 5552503 - DNA, 25 bp, Homo sapien
aaaaaaatcaagctaggtcaaggat

SEQ ID NO: 5552504 - DNA, 25 bp, Homo sapien
taagtatctcctgagggaagaaccc

SEQ ID NO: 5552505 - DNA, 25 bp, Homo sapien
cgcgcccagccacatctacgcttac

SEQ ID NO: 5552506 - DNA, 25 bp, Homo sapien
ttaggccattagtagaagattttct

SEQ ID NO: 5552507 - DNA, 25 bp, Homo sapien
cattcaacaggcctagacacaactc

SEQ ID NO: 5552508 - DNA, 25 bp, Homo sapien
gagcccacagttatgaaagagcagt

SEQ ID NO: 5552509 - DNA, 25 bp, Homo sapien
tagagattggagagaaattttgtca

SEQ ID NO: 5552510 - DNA, 25 bp, Homo sapien
ccctggttctaaacgtgaggcgcaa

SEQ ID NO: 5552511 - DNA, 25 bp, Homo sapien
catgaagtcactttcggaagagccc

SEQ ID NO: 5552512 - DNA, 25 bp, Homo sapien
ttgtcaaaagatcccaggagtctcc

SEQ ID NO: 5552513 - DNA, 25 bp, Homo sapien
gagggactcccctggagtgtgtctg

SEQ ID NO: 5552514 - DNA, 25 bp, Homo sapien
tgtacttagagattggagagaaatt

SEQ ID NO: 5552515 - DNA, 25 bp, Homo sapien
ctttcggaagagcccacagttatga

SEQ ID NO: 5552516 - DNA, 25 bp, Homo sapien
actgaggcactgagccatgaagtca

SEQ ID NO: 5552517 - DNA, 25 bp, Homo sapien
catctggccctttgtaggagcatcc

SEQ ID NO: 5552518 - DNA, 25 bp, Homo sapien
agtgtgtctgcctcccgtcaccacc

SEQ ID NO: 5552519 - DNA, 25 bp, Homo sapien
gggacattctcacatggaaggagcc

SEQ ID NO: 5552520 - DNA, 25 bp, Homo sapien
gtaagttgcagagttgtacacacta

SEQ ID NO: 5552521 - DNA, 25 bp, Homo sapien
tccatttgggtactctgtcggcttc

SEQ ID NO: 5552522 - DNA, 25 bp, Homo sapien
cataaaaccaaattgagaaggctcc

SEQ ID NO: 5552523 - DNA, 25 bp, Homo sapien
gccgagatcgtggcataattaccac

SEQ ID NO: 5552524 - DNA, 25 bp, Homo sapien
gccatgccaatcagaagccaatgtt

SEQ ID NO: 5552525 - DNA, 25 bp, Homo sapien
cccttccatagggtggccatgccaa

SEQ ID NO: 5552526 - DNA, 25 bp, Homo sapien
tccaggagctttccattgggtctgc

SEQ ID NO: 5552527 - DNA, 25 bp, Homo sapien
aaggctccatgggtgtgtcatttag

SEQ ID NO: 5552528 - DNA, 25 bp, Homo sapien
tagcacaaagttgggaaacaatacc

SEQ ID NO: 5552529 - DNA, 25 bp, Homo sapien
gagagcaatggtagaggcttttgta

SEQ ID NO: 5552530 - DNA, 25 bp, Homo sapien
gtggggttcccatacactcaggctc

SEQ ID NO: 5552531 - DNA, 25 bp, Homo sapien
ctcaggcaagcaccgagcttgtgtt

SEQ ID NO: 5552532 - DNA, 25 bp, Homo sapien
aacgcgcttgagaatgttggcattt

SEQ ID NO: 5552533 - DNA, 25 bp, Homo sapien
tttcacacgacttgggccctgctcg

SEQ ID NO: 5552534 - DNA, 25 bp, Homo sapien
ggcattttcactttggcgggcactc

SEQ ID NO: 5552535 - DNA, 25 bp, Homo sapien
cgggcactcatcccggctgggtcag

SEQ ID NO: 5552536 - DNA, 25 bp, Homo sapien
cagtggatccgtgttggctcaattc

SEQ ID NO: 5552537 - DNA, 25 bp, Homo sapien
ctgtgcggcctgttccccacacgtg

SEQ ID NO: 5552538 - DNA, 25 bp, Homo sapien
ggggttctgccagcaactgtctgtc

SEQ ID NO: 5552539 - DNA, 25 bp, Homo sapien
acaagccgtatcccagccgctgtgt

SEQ ID NO: 5552540 - DNA, 25 bp, Homo sapien
taggaggagtccatttagaaagcca

SEQ ID NO: 5552541 - DNA, 25 bp, Homo sapien
ttgctgttggggaaacctccatttg

SEQ ID NO: 5552542 - DNA, 25 bp, Homo sapien
ccagaactaggcttggatgcttctc

SEQ ID NO: 5552543 - DNA, 25 bp, Homo sapien
gaaggtagattgaaagaggttcttg

SEQ ID NO: 5552544 - DNA, 25 bp, Homo sapien
actgggttccttactgagtcgtagc

SEQ ID NO: 5552545 - DNA, 25 bp, Homo sapien
tggggcccaagatgcttttctgaca

SEQ ID NO: 5552546 - DNA, 25 bp, Homo sapien
gtgtctaaggtaggcccagtatacc

SEQ ID NO: 5552547 - DNA, 25 bp, Homo sapien
tcctcttggtgcagtccagagacca

SEQ ID NO: 5552548 - DNA, 25 bp, Homo sapien
tggaagttggaattgaaccagcttt

SEQ ID NO: 5552549 - DNA, 25 bp, Homo sapien
tggacttcgaatcacctgggatgtc

SEQ ID NO: 5552550 - DNA, 25 bp, Homo sapien
ctggctcagttgttggtcaagactc

SEQ ID NO: 5552551 - DNA, 25 bp, Homo sapien
aagtttcctggtgatgcaatgttgc

SEQ ID NO: 5552552 - DNA, 25 bp, Homo sapien
attattgtgttcatgtaagagaaaa

SEQ ID NO: 5552553 - DNA, 25 bp, Homo sapien
ttttctcttacatgaacacaataat

SEQ ID NO: 5552554 - DNA, 25 bp, Homo sapien
gattgtgcattttgacgggcaggct

SEQ ID NO: 5552555 - DNA, 25 bp, Homo sapien
gttgtgcatgtgacccagctgtaac

SEQ ID NO: 5552556 - DNA, 25 bp, Homo sapien
tcttacctctgacaggccacagggg

SEQ ID NO: 5552557 - DNA, 25 bp, Homo sapien
ggaggagtgacctgaactccaggtt

SEQ ID NO: 5552558 - DNA, 25 bp, Homo sapien
tgggttcctgctgaaggaatgagat

SEQ ID NO: 5552559 - DNA, 25 bp, Homo sapien
ccctgcaagaaccaggattgtgcat

SEQ ID NO: 5552560 - DNA, 25 bp, Homo sapien
aaccagttataaaagtgtcaggatc

SEQ ID NO: 5552561 - DNA, 25 bp, Homo sapien
acctcgttagtggtgactgaggcct

SEQ ID NO: 5552562 - DNA, 25 bp, Homo sapien
agatgttggaaaacagttgtgcatg

SEQ ID NO: 5552563 - DNA, 25 bp, Homo sapien
ttatgtggcccattgaaagatgttg

SEQ ID NO: 5552564 - DNA, 25 bp, Homo sapien
cactcggataaagaccccctgtcca

SEQ ID NO: 5552565 - DNA, 25 bp, Homo sapien
cctgagctacagagctgggttttaa

SEQ ID NO: 5552566 - DNA, 25 bp, Homo sapien
gggatggcactgctccacacaccat

SEQ ID NO: 5552567 - DNA, 25 bp, Homo sapien
tctactggtttttcgaggctgggtg

SEQ ID NO: 5552568 - DNA, 25 bp, Homo sapien
atgccctagagatgtcccaccttat

SEQ ID NO: 5552569 - DNA, 25 bp, Homo sapien
ccaaagcgctcaaattataggcctg

SEQ ID NO: 5552570 - DNA, 25 bp, Homo sapien
tggatgttctcagctgacaggatat

SEQ ID NO: 5552571 - DNA, 25 bp, Homo sapien
gctggcatcttgcgcctagacaaac

SEQ ID NO: 5552572 - DNA, 25 bp, Homo sapien
ccgtatagaactgagggttagtgta

SEQ ID NO: 5552573 - DNA, 25 bp, Homo sapien
gtgggcatcttgacaatataggctt

SEQ ID NO: 5552574 - DNA, 25 bp, Homo sapien
ctggtttattgcttggctcgctgcc

SEQ ID NO: 5552575 - DNA, 25 bp, Homo sapien
ctccaggaatggtgattctgggacg

SEQ ID NO: 5552576 - DNA, 25 bp, Homo sapien
agactcaggtttctggtgtgcatgc

SEQ ID NO: 5552577 - DNA, 25 bp, Homo sapien
tatcacaaaagcaaaacagttattc

SEQ ID NO: 5552578 - DNA, 25 bp, Homo sapien
cctatatgagagactttcggcatta

SEQ ID NO: 5552579 - DNA, 25 bp, Homo sapien
cccactcactgtgttgcagtccctc

SEQ ID NO: 5552580 - DNA, 25 bp, Homo sapien
aggattactcttggaaagatgttcc

SEQ ID NO: 5552581 - DNA, 25 bp, Homo sapien
gtgtaagcacacagcacaaacttat

SEQ ID NO: 5552582 - DNA, 25 bp, Homo sapien
atcaaacaaacgggttttctgcatt

SEQ ID NO: 5552583 - DNA, 25 bp, Homo sapien
tttagatgagtaaccacaaggtggc

SEQ ID NO: 5552584 - DNA, 25 bp, Homo sapien
tgtgtgtgtgactgtatgtctgtgt

SEQ ID NO: 5552585 - DNA, 25 bp, Homo sapien
gaaaataatagacaggccacttagc

SEQ ID NO: 5552586 - DNA, 25 bp, Homo sapien
cacaaggtggcaatatagcaccaaa

SEQ ID NO: 5552587 - DNA, 25 bp, Homo sapien
agtttagcaggtaccaccgtagcac

SEQ ID NO: 5552588 - DNA, 25 bp, Homo sapien
taataaggtataggagtttggatct

SEQ ID NO: 5552589 - DNA, 25 bp, Homo sapien
ctggggcaggtatatcactcatttt

SEQ ID NO: 5552590 - DNA, 25 bp, Homo sapien
atcagcccaagtttccccacgcatc

SEQ ID NO: 5552591 - DNA, 25 bp, Homo sapien
ggccgcagaaagcttacctttggta

SEQ ID NO: 5552592 - DNA, 25 bp, Homo sapien
gccaatagctccgtcaggtcagaac

SEQ ID NO: 5552593 - DNA, 25 bp, Homo sapien
tatgttggatccagactgcggtttc

SEQ ID NO: 5552594 - DNA, 25 bp, Homo sapien
tgccttgggatttgtgctatcagcc

SEQ ID NO: 5552595 - DNA, 25 bp, Homo sapien
caggtcagaacgccacttgcacaag

SEQ ID NO: 5552596 - DNA, 25 bp, Homo sapien
tatactggtgatagtggatgcaaag

SEQ ID NO: 5552597 - DNA, 25 bp, Homo sapien
tcacacagagtagaaagcactcagg

SEQ ID NO: 5552598 - DNA, 25 bp, Homo sapien
cttccttaccatgggttcgaacttc

SEQ ID NO: 5552599 - DNA, 25 bp, Homo sapien
gatcgaattggctactgaggcttgt

SEQ ID NO: 5552600 - DNA, 25 bp, Homo sapien
tcttccggttgatcgaattggctac

SEQ ID NO: 5552601 - DNA, 25 bp, Homo sapien
atgggttcgaacttcctcctttagc

SEQ ID NO: 5552602 - DNA, 25 bp, Homo sapien
agctcggagaagtttgattgtctga

SEQ ID NO: 5552603 - DNA, 25 bp, Homo sapien
ctttcttccggttgatcgaattggc

SEQ ID NO: 5552604 - DNA, 25 bp, Homo sapien
ctcggcccagctttgttctgttgct

SEQ ID NO: 5552605 - DNA, 25 bp, Homo sapien
ttagctcggagaagtttgattgtct

SEQ ID NO: 5552606 - DNA, 25 bp, Homo sapien
ctcgtcaaagccattctcggcccag

SEQ ID NO: 5552607 - DNA, 25 bp, Homo sapien
attggctactgaggcttgtgcattc

SEQ ID NO: 5552608 - DNA, 25 bp, Homo sapien
tcaactcgtcaaagccattctcggc

SEQ ID NO: 5552609 - DNA, 25 bp, Homo sapien
gtagtcaactaaaagctccagatgt

SEQ ID NO: 5552610 - DNA, 25 bp, Homo sapien
cagttctcattcggagccagcaacc

SEQ ID NO: 5552611 - DNA, 25 bp, Homo sapien
ttgtattgaatatgtgccagtccct

SEQ ID NO: 5552612 - DNA, 25 bp, Homo sapien
gcctgaatgagggataaatatgtga

SEQ ID NO: 5552613 - DNA, 25 bp, Homo sapien
gatgtgtagttgcctgaatgaggga

SEQ ID NO: 5552614 - DNA, 25 bp, Homo sapien
aacaagcagagaactcagatgtgta

SEQ ID NO: 5552615 - DNA, 25 bp, Homo sapien
ctgaagcacagacaatttaagtaac

SEQ ID NO: 5552616 - DNA, 25 bp, Homo sapien
tcattccagaattgaggctcataat

SEQ ID NO: 5552617 - DNA, 25 bp, Homo sapien
gtgccagtccctattctaagagctc

SEQ ID NO: 5552618 - DNA, 25 bp, Homo sapien
tgtaagaagcacagccaggatttaa

SEQ ID NO: 5552619 - DNA, 25 bp, Homo sapien
gccagcaaccatgagctctagtaac

SEQ ID NO: 5552620 - DNA, 25 bp, Homo sapien
tggctctgcattgaggttagggcat

SEQ ID NO: 5552621 - DNA, 25 bp, Homo sapien
cagcactttgcaagaaggatgattg

SEQ ID NO: 5552622 - DNA, 25 bp, Homo sapien
tgctaagctaacgaagacaagatga

SEQ ID NO: 5552623 - DNA, 25 bp, Homo sapien
aaaggaggcaagaatcctctgtgtg

SEQ ID NO: 5552624 - DNA, 25 bp, Homo sapien
ctatagctagagactcgtgggtata

SEQ ID NO: 5552625 - DNA, 25 bp, Homo sapien
acgaagacaagatgagcattgattc

SEQ ID NO: 5552626 - DNA, 25 bp, Homo sapien
gttggcatggtatgatctgagactc

SEQ ID NO: 5552627 - DNA, 25 bp, Homo sapien
tcctctgtgtggtccagccaacatc

SEQ ID NO: 5552628 - DNA, 25 bp, Homo sapien
tcgtgggtataaagaagctgttccc

SEQ ID NO: 5552629 - DNA, 25 bp, Homo sapien
gagcattgattctttgagggggtac

SEQ ID NO: 5552630 - DNA, 25 bp, Homo sapien
gctgcaggcctctaatagggtcatc

SEQ ID NO: 5552631 - DNA, 25 bp, Homo sapien
ctctacaggtagctcccattccttc

SEQ ID NO: 5552632 - DNA, 25 bp, Homo sapien
tcaaagcttggtaaaataatctgtt

SEQ ID NO: 5552633 - DNA, 25 bp, Homo sapien
ttaaaagaaagcacactattccagt

SEQ ID NO: 5552634 - DNA, 25 bp, Homo sapien
ctgcagcctccacttcccaggttca

SEQ ID NO: 5552635 - DNA, 25 bp, Homo sapien
tcaccactttgtacaggctggtctt

SEQ ID NO: 5552636 - DNA, 25 bp, Homo sapien
caatggtgtggtctcacttcactgc

SEQ ID NO: 5552637 - DNA, 25 bp, Homo sapien
tgatgccatactctacaggtagctc

SEQ ID NO: 5552638 - DNA, 25 bp, Homo sapien
tatcacagatattgatgccatactc

SEQ ID NO: 5552639 - DNA, 25 bp, Homo sapien
gctgggattataggcttgcaccacc

SEQ ID NO: 5552640 - DNA, 25 bp, Homo sapien
ctcaggtaatccaccgaccttggcc

SEQ ID NO: 5552641 - DNA, 25 bp, Homo sapien
gagagaaacaaatatcacaaaaatc

SEQ ID NO: 5552642 - DNA, 25 bp, Homo sapien
ttctatagttcagtagggacaaaac

SEQ ID NO: 5552643 - DNA, 25 bp, Homo sapien
ttcaatcccaggggaaatattcaga

SEQ ID NO: 5552644 - DNA, 25 bp, Homo sapien
attcagagactagtgtttggtttgc

SEQ ID NO: 5552645 - DNA, 25 bp, Homo sapien
ttcatgctactagatggagggatgg

SEQ ID NO: 5552646 - DNA, 25 bp, Homo sapien
gactctgtgctcaaggtctcgtagt

SEQ ID NO: 5552647 - DNA, 25 bp, Homo sapien
gtaactattgtgaaaaagatgcatt

SEQ ID NO: 5552648 - DNA, 25 bp, Homo sapien
ggtttgctgataaacaagccattgc

SEQ ID NO: 5552649 - DNA, 25 bp, Homo sapien
agtagggacaaaacttatagcaaat

SEQ ID NO: 5552650 - DNA, 25 bp, Homo sapien
cccaggaggaataagttcagactct

SEQ ID NO: 5552651 - DNA, 25 bp, Homo sapien
aggaagtacctctacctggggagta

SEQ ID NO: 5552652 - DNA, 25 bp, Homo sapien
gatggcttttaaatcccaggaggaa

SEQ ID NO: 5552653 - DNA, 25 bp, Homo sapien
tctgatgtgctgcgtggcactcttc

SEQ ID NO: 5552654 - DNA, 25 bp, Homo sapien
atgaaactgatgccaagctcgtgtc

SEQ ID NO: 5552655 - DNA, 25 bp, Homo sapien
tatagattgtagaactgcagtcact

SEQ ID NO: 5552656 - DNA, 25 bp, Homo sapien
tgtgtatctgtggaaagaccaggag

SEQ ID NO: 5552657 - DNA, 25 bp, Homo sapien
acgacactcaggtaagaaacagatt

SEQ ID NO: 5552658 - DNA, 25 bp, Homo sapien
tagagcaagaggtggatttacttta

SEQ ID NO: 5552659 - DNA, 25 bp, Homo sapien
gaaatggtcttgcaggagatgattt

SEQ ID NO: 5552660 - DNA, 25 bp, Homo sapien
attcagttgtgaggtgccatctgtg

SEQ ID NO: 5552661 - DNA, 25 bp, Homo sapien
ggaagcgtaagccatacgacactca

SEQ ID NO: 5552662 - DNA, 25 bp, Homo sapien
ttctcaagtgcccaaccccggatca

SEQ ID NO: 5552663 - DNA, 25 bp, Homo sapien
aagctcgtgtcaagtggattataga

SEQ ID NO: 5552664 - DNA, 25 bp, Homo sapien
gggcgccggatttggctcatttcaa

SEQ ID NO: 5552665 - DNA, 25 bp, Homo sapien
gcattccaggagaatgtatgggcaa

SEQ ID NO: 5552666 - DNA, 25 bp, Homo sapien
gagcattcactgtcacaggcggctt

SEQ ID NO: 5552667 - DNA, 25 bp, Homo sapien
ccttccaactagcgcctgcaggtgg

SEQ ID NO: 5552668 - DNA, 25 bp, Homo sapien
gtgaggtgtttgtgaaccgatcctt

SEQ ID NO: 5552669 - DNA, 25 bp, Homo sapien
gtcccagcttcccgatggggagatc

SEQ ID NO: 5552670 - DNA, 25 bp, Homo sapien
cttccctcacctccctcgggcggcc

SEQ ID NO: 5552671 - DNA, 25 bp, Homo sapien
gaaccaagtagagactcggactgag

SEQ ID NO: 5552672 - DNA, 25 bp, Homo sapien
gggcctggcagactttcccagggac

SEQ ID NO: 5552673 - DNA, 25 bp, Homo sapien
atccttgtcctccgcctcggggagc

SEQ ID NO: 5552674 - DNA, 25 bp, Homo sapien
caggcggcttaaacaagtaatgtcc

SEQ ID NO: 5552675 - DNA, 25 bp, Homo sapien
agtcggtgcatagaaaacagctttt

SEQ ID NO: 5552676 - DNA, 25 bp, Homo sapien
aggctaattgttgaaaagatactcc

SEQ ID NO: 5552677 - DNA, 25 bp, Homo sapien
agcccaagtatgcagactcctgtcc

SEQ ID NO: 5552678 - DNA, 25 bp, Homo sapien
ctgaggagtcagtttaaatgatact

SEQ ID NO: 5552679 - DNA, 25 bp, Homo sapien
ctttatcagttgtggtgagactctg

SEQ ID NO: 5552680 - DNA, 25 bp, Homo sapien
gggcactggaataagagtctcctga

SEQ ID NO: 5552681 - DNA, 25 bp, Homo sapien
atagatgttacaagggcaacaggaa

SEQ ID NO: 5552682 - DNA, 25 bp, Homo sapien
attcagaagttccgagtatacatat

SEQ ID NO: 5552683 - DNA, 25 bp, Homo sapien
gtcatggtcagcagcccaagtatgc

SEQ ID NO: 5552684 - DNA, 25 bp, Homo sapien
aattaggagttccctctgaggagtc

SEQ ID NO: 5552685 - DNA, 25 bp, Homo sapien
acttgtaactgacctgagctctttc

SEQ ID NO: 5552686 - DNA, 25 bp, Homo sapien
cctgaggcagagttttttactctcc

SEQ ID NO: 5552687 - DNA, 25 bp, Homo sapien
tgggtcaccatgccctaccctatat

SEQ ID NO: 5552688 - DNA, 25 bp, Homo sapien
aaataaccgggtcatgctactgtgg

SEQ ID NO: 5552689 - DNA, 25 bp, Homo sapien
aatttaaataaccgggtcatgctac

SEQ ID NO: 5552690 - DNA, 25 bp, Homo sapien
attagatgaggcccacacacattgc

SEQ ID NO: 5552691 - DNA, 25 bp, Homo sapien
tggcactgtaatcctgaggcagagt

SEQ ID NO: 5552692 - DNA, 25 bp, Homo sapien
gagttggcactgtaatcctgaggca

SEQ ID NO: 5552693 - DNA, 25 bp, Homo sapien
ctggcaagtcccaaatccataaggt

SEQ ID NO: 5552694 - DNA, 25 bp, Homo sapien
cacacattgcagataataatcgttt

SEQ ID NO: 5552695 - DNA, 25 bp, Homo sapien
tgaggcccacacacattgcagataa

SEQ ID NO: 5552696 - DNA, 25 bp, Homo sapien
catatggcatatgtatacttttata

SEQ ID NO: 5552697 - DNA, 25 bp, Homo sapien
cttccaatatcgcagggtgtgtaca

SEQ ID NO: 5552698 - DNA, 25 bp, Homo sapien
gggggaagaggatcatattacttcc

SEQ ID NO: 5552699 - DNA, 25 bp, Homo sapien
caaaggaaatgtacaccacccctgc

SEQ ID NO: 5552700 - DNA, 25 bp, Homo sapien
actcccaatgtcgcagagggtagac

SEQ ID NO: 5552701 - DNA, 25 bp, Homo sapien
aacagcgtaggaaatgtatacccgt

SEQ ID NO: 5552702 - DNA, 25 bp, Homo sapien
agacacccccctgggatattgttcc

SEQ ID NO: 5552703 - DNA, 25 bp, Homo sapien
ctcccaatatcgcagggggagtaca

SEQ ID NO: 5552704 - DNA, 25 bp, Homo sapien
gagccaaagaggatgatatgactct

SEQ ID NO: 5552705 - DNA, 25 bp, Homo sapien
atatcccaatggagagaggatgata

SEQ ID NO: 5552706 - DNA, 25 bp, Homo sapien
ggtttagggaggatgacattactcc

SEQ ID NO: 5552707 - DNA, 25 bp, Homo sapien
ctcttagtatcgcagagggtgtaca

SEQ ID NO: 5552708 - DNA, 25 bp, Homo sapien
ggtttctaacagacagaccatggcc

SEQ ID NO: 5552709 - DNA, 25 bp, Homo sapien
ctgctctgtgacccgatagggctca

SEQ ID NO: 5552710 - DNA, 25 bp, Homo sapien
tgtgataatctaatggcgcccccga

SEQ ID NO: 5552711 - DNA, 25 bp, Homo sapien
tcgggctcgcttgcctgccactcat

SEQ ID NO: 5552712 - DNA, 25 bp, Homo sapien
catggcccgatagcagtccatgacc

SEQ ID NO: 5552713 - DNA, 25 bp, Homo sapien
cagttcacaacagggtttgcgatcc

SEQ ID NO: 5552714 - DNA, 25 bp, Homo sapien
ttggccaggatcgtttctatctctt

SEQ ID NO: 5552715 - DNA, 25 bp, Homo sapien
agcatgcaacctggatccctcgtgt

SEQ ID NO: 5552716 - DNA, 25 bp, Homo sapien
agattgtcataagcagcatgcaacc

SEQ ID NO: 5552717 - DNA, 25 bp, Homo sapien
ggaccctgttgtaaaggacttcaga

SEQ ID NO: 5552718 - DNA, 25 bp, Homo sapien
gtgacccgatagggctcatggtttc

SEQ ID NO: 5552719 - DNA, 25 bp, Homo sapien
tgcactgcagagaatggagtgttaa

SEQ ID NO: 5552720 - DNA, 25 bp, Homo sapien
acaagatcctcgaggtagggattca

SEQ ID NO: 5552721 - DNA, 25 bp, Homo sapien
cgggccacctctcaggtccctcctg

SEQ ID NO: 5552722 - DNA, 25 bp, Homo sapien
ttcctgagggcacacaacatggaag

SEQ ID NO: 5552723 - DNA, 25 bp, Homo sapien
aggtgggtctcacatccctggtctc

SEQ ID NO: 5552724 - DNA, 25 bp, Homo sapien
tttggagagatgaaatggctcattt

SEQ ID NO: 5552725 - DNA, 25 bp, Homo sapien
tctcccatccagagaaccagccggg

SEQ ID NO: 5552726 - DNA, 25 bp, Homo sapien
gtgcatgtcgtatagataaggaatc

SEQ ID NO: 5552727 - DNA, 25 bp, Homo sapien
cctggccttggtttcctggactccc

SEQ ID NO: 5552728 - DNA, 25 bp, Homo sapien
ccgaggtccgtgctccttgcctaca

SEQ ID NO: 5552729 - DNA, 25 bp, Homo sapien
ctgcaacccaagctgatgtggaggg

SEQ ID NO: 5552730 - DNA, 25 bp, Homo sapien
cagtgacaccgccgggttcacactg

SEQ ID NO: 5552731 - DNA, 25 bp, Homo sapien
acatgaatatcaagacccacggacc

SEQ ID NO: 5552732 - DNA, 25 bp, Homo sapien
gacagagccaacattcgagtcgggt

SEQ ID NO: 5552733 - DNA, 25 bp, Homo sapien
ccaatctcattgcgggcagtgacac

SEQ ID NO: 5552734 - DNA, 25 bp, Homo sapien
aaggccaatctatgagggtgcaaat

SEQ ID NO: 5552735 - DNA, 25 bp, Homo sapien
cactggagtatgactgctgcagctg

SEQ ID NO: 5552736 - DNA, 25 bp, Homo sapien
gacttgacaactactggagacaggg

SEQ ID NO: 5552737 - DNA, 25 bp, Homo sapien
cagctggagccattcaagacttgac

SEQ ID NO: 5552738 - DNA, 25 bp, Homo sapien
gcggcaaaacagcccgagtagttca

SEQ ID NO: 5552739 - DNA, 25 bp, Homo sapien
gctcttggatggtttacgcggcaaa

SEQ ID NO: 5552740 - DNA, 25 bp, Homo sapien
tccagagcaactggaagaagctctt

SEQ ID NO: 5552741 - DNA, 25 bp, Homo sapien
aagactgaccataccaataattggc

SEQ ID NO: 5552742 - DNA, 25 bp, Homo sapien
aaccatgagatactactacacacct

SEQ ID NO: 5552743 - DNA, 25 bp, Homo sapien
acttaaacgtacactaacatatgat

SEQ ID NO: 5552744 - DNA, 25 bp, Homo sapien
agcacgtgaaaccatgtaaaacatc

SEQ ID NO: 5552745 - DNA, 25 bp, Homo sapien
tattgcaaaaccacatgatctggcc

SEQ ID NO: 5552746 - DNA, 25 bp, Homo sapien
ccagtaagcacgtgaaaccatgtaa

SEQ ID NO: 5552747 - DNA, 25 bp, Homo sapien
tgagaaaggtttagcagtctcttaa

SEQ ID NO: 5552748 - DNA, 25 bp, Homo sapien
tatactgctcatggaaatgtcaaat

SEQ ID NO: 5552749 - DNA, 25 bp, Homo sapien
aatggcataactacttgagaaaggt

SEQ ID NO: 5552750 - DNA, 25 bp, Homo sapien
aaaggcttaaagaaggccagtaagc

SEQ ID NO: 5552751 - DNA, 25 bp, Homo sapien
acatgatctggccacgcacttcagc

SEQ ID NO: 5552752 - DNA, 25 bp, Homo sapien
agacaatgcccggcctgagttgttg

SEQ ID NO: 5552753 - DNA, 25 bp, Homo sapien
tgcccggcctgagttgttgatttca

SEQ ID NO: 5552754 - DNA, 25 bp, Homo sapien
aacaatcatatcatcggcaaacagc

SEQ ID NO: 5552755 - DNA, 25 bp, Homo sapien
ctgaaggagcctttagggttttcta

SEQ ID NO: 5552756 - DNA, 25 bp, Homo sapien
gcttggtcgctgttggtgtatagaa

SEQ ID NO: 5552757 - DNA, 25 bp, Homo sapien
cgctgttggtgtatagaagagctac

SEQ ID NO: 5552758 - DNA, 25 bp, Homo sapien
attataggcatgagagacaatgccc

SEQ ID NO: 5552759 - DNA, 25 bp, Homo sapien
gaagagctactgatttgtgtacatt

SEQ ID NO: 5552760 - DNA, 25 bp, Homo sapien
aggcacgccatcacagccccgctaa

SEQ ID NO: 5552761 - DNA, 25 bp, Homo sapien
tatccagaaactttgcagaattatt

SEQ ID NO: 5552762 - DNA, 25 bp, Homo sapien
ccaggagctttctgaaggagccttt

SEQ ID NO: 5552763 - DNA, 25 bp, Homo sapien
caggttaattgaagtgtgggttttc

SEQ ID NO: 5552764 - DNA, 25 bp, Homo sapien
gattgactgttcctagcactgtgtt

SEQ ID NO: 5552765 - DNA, 25 bp, Homo sapien
taggccatgcttagtggagactcat

SEQ ID NO: 5552766 - DNA, 25 bp, Homo sapien
tgcttaggctcagtaaagttgatcc

SEQ ID NO: 5552767 - DNA, 25 bp, Homo sapien
tcgaaagctagagttattgaaagga

SEQ ID NO: 5552768 - DNA, 25 bp, Homo sapien
tatactgctcagtgggaaaagattt

SEQ ID NO: 5552769 - DNA, 25 bp, Homo sapien
tttatttcagagacataggccatgc

SEQ ID NO: 5552770 - DNA, 25 bp, Homo sapien
tagtgctgagatcctgtggtttgaa

SEQ ID NO: 5552771 - DNA, 25 bp, Homo sapien
tatgtgaaaggtaaatcatgataaa

SEQ ID NO: 5552772 - DNA, 25 bp, Homo sapien
tcccaggttctgatagcaatatact

SEQ ID NO: 5552773 - DNA, 25 bp, Homo sapien
tcttgggtcaagaaaagcactaatt

SEQ ID NO: 5552774 - DNA, 25 bp, Homo sapien
ctgtcccaggtaccttggcagagtg

SEQ ID NO: 5552775 - DNA, 25 bp, Homo sapien
cccagacagtataatggggccagag

SEQ ID NO: 5552776 - DNA, 25 bp, Homo sapien
caactccctggtgactaaggaagga

SEQ ID NO: 5552777 - DNA, 25 bp, Homo sapien
gccatggcaacaaggcctgcttcct

SEQ ID NO: 5552778 - DNA, 25 bp, Homo sapien
agctacacctcatgggcagagagtc

SEQ ID NO: 5552779 - DNA, 25 bp, Homo sapien
agcttggagctctggtatccctgct

SEQ ID NO: 5552780 - DNA, 25 bp, Homo sapien
tataagttattaggggcaacaggca

SEQ ID NO: 5552781 - DNA, 25 bp, Homo sapien
acgcatctgtgccccaccagctgac

SEQ ID NO: 5552782 - DNA, 25 bp, Homo sapien
aggggcaccctgacctgttcatacc

SEQ ID NO: 5552783 - DNA, 25 bp, Homo sapien
gagctatgaatatgtggactgccga

SEQ ID NO: 5552784 - DNA, 25 bp, Homo sapien
ttgggaatagcaagtctagcccctt

SEQ ID NO: 5552785 - DNA, 25 bp, Homo sapien
tgtcctagcctattggtcagaaaac

SEQ ID NO: 5552786 - DNA, 25 bp, Homo sapien
ccaccagcatcaaaaattatccgtc

SEQ ID NO: 5552787 - DNA, 25 bp, Homo sapien
tgtttggtgccaagatcatcaagtt

SEQ ID NO: 5552788 - DNA, 25 bp, Homo sapien
tacctgtgaacaatgcaaaagcatc

SEQ ID NO: 5552789 - DNA, 25 bp, Homo sapien
atgaacgttaaggtaggacttggaa

SEQ ID NO: 5552790 - DNA, 25 bp, Homo sapien
ccagttgatacaagtgacagaatga

SEQ ID NO: 5552791 - DNA, 25 bp, Homo sapien
tatccagagttatggtacaggacat

SEQ ID NO: 5552792 - DNA, 25 bp, Homo sapien
atggtacaggacatattaatgagac

SEQ ID NO: 5552793 - DNA, 25 bp, Homo sapien
atcccaagcccaggaatttggataa

SEQ ID NO: 5552794 - DNA, 25 bp, Homo sapien
gtcagaaaacaggtccagttgatac

SEQ ID NO: 5552795 - DNA, 25 bp, Homo sapien
gaatgaactaataaaattggctacc

SEQ ID NO: 5552796 - DNA, 25 bp, Homo sapien
gccttgaatacccatatgcagatta

SEQ ID NO: 5552797 - DNA, 25 bp, Homo sapien
tggtttgaattattgaggcaggttc

SEQ ID NO: 5552798 - DNA, 25 bp, Homo sapien
gatcagatcatatgttagtgtacgt

SEQ ID NO: 5552799 - DNA, 25 bp, Homo sapien
aaccagatggtttcctcatgccctt

SEQ ID NO: 5552800 - DNA, 25 bp, Homo sapien
ttaagtttggacacatacacatatg

SEQ ID NO: 5552801 - DNA, 25 bp, Homo sapien
cattgcaaggcataccacaagctat

SEQ ID NO: 5552802 - DNA, 25 bp, Homo sapien
tctgcctgtcactctcctgatccac

SEQ ID NO: 5552803 - DNA, 25 bp, Homo sapien
ttgtagggtccatttcactgctgaa

SEQ ID NO: 5552804 - DNA, 25 bp, Homo sapien
cagatccatttatgttgtagggtcc

SEQ ID NO: 5552805 - DNA, 25 bp, Homo sapien
cagtaagtttgagatataattgcca

SEQ ID NO: 5552806 - DNA, 25 bp, Homo sapien
tggaatcatatagtctggcatcttt

SEQ ID NO: 5552807 - DNA, 25 bp, Homo sapien
aaaaaccaatagactgacagtaaca

SEQ ID NO: 5552808 - DNA, 25 bp, Homo sapien
tcggagacctaactgaattttcatg

SEQ ID NO: 5552809 - DNA, 25 bp, Homo sapien
tggaggtaatccaaagaacagctga

SEQ ID NO: 5552810 - DNA, 25 bp, Homo sapien
tgaaatataagtatacctcagcttc

SEQ ID NO: 5552811 - DNA, 25 bp, Homo sapien
ttaccttgattgcagtgacagtctc

SEQ ID NO: 5552812 - DNA, 25 bp, Homo sapien
aaacctacaaaatgatcacagacct

SEQ ID NO: 5552813 - DNA, 25 bp, Homo sapien
gtaatccaaagaacagctgagagag

SEQ ID NO: 5552814 - DNA, 25 bp, Homo sapien
ctcagcttcccttcggagacctaac

SEQ ID NO: 5552815 - DNA, 25 bp, Homo sapien
tatgtatgcaatttggaggtaatcc

SEQ ID NO: 5552816 - DNA, 25 bp, Homo sapien
tgcagtgacagtctcatgagtcctc

SEQ ID NO: 5552817 - DNA, 25 bp, Homo sapien
atgagtcctcggatatgtccaaact

SEQ ID NO: 5552818 - DNA, 25 bp, Homo sapien
gtgttgaaaggatcttggcctaatc

SEQ ID NO: 5552819 - DNA, 25 bp, Homo sapien
atcctaatggcagggtgtataagct

SEQ ID NO: 5552820 - DNA, 25 bp, Homo sapien
gaagaacactagagaccaacatcct

SEQ ID NO: 5552821 - DNA, 25 bp, Homo sapien
ttgtgagactgaccgtatgaggtcc

SEQ ID NO: 5552822 - DNA, 25 bp, Homo sapien
acatccataggaagagacgttggtt

SEQ ID NO: 5552823 - DNA, 25 bp, Homo sapien
gtgggagagagctgctcaaataaca

SEQ ID NO: 5552824 - DNA, 25 bp, Homo sapien
agcctgtgtcactggtcactgcctt

SEQ ID NO: 5552825 - DNA, 25 bp, Homo sapien
tcctcaggctcagaatggtagaaaa

SEQ ID NO: 5552826 - DNA, 25 bp, Homo sapien
agagactctgagagactctgccatg

SEQ ID NO: 5552827 - DNA, 25 bp, Homo sapien
ggtagaaaatcagcattagggcatc

SEQ ID NO: 5552828 - DNA, 25 bp, Homo sapien
taagtttgactaggtggtgactgga

SEQ ID NO: 5552829 - DNA, 25 bp, Homo sapien
gaaggtggccttggcctcactgcct

SEQ ID NO: 5552830 - DNA, 25 bp, Homo sapien
gtgagcacttgctgactgagcgact

SEQ ID NO: 5552831 - DNA, 25 bp, Homo sapien
gcacctggtaggttccagctggcca

SEQ ID NO: 5552832 - DNA, 25 bp, Homo sapien
tgagcaacgaggccttcccgttctc

SEQ ID NO: 5552833 - DNA, 25 bp, Homo sapien
atcccactcatggcaggtccccggg

SEQ ID NO: 5552834 - DNA, 25 bp, Homo sapien
ggcggccctcctacaggctgttggg

SEQ ID NO: 5552835 - DNA, 25 bp, Homo sapien
tgtatcccctcctgaaaggcgcggg

SEQ ID NO: 5552836 - DNA, 25 bp, Homo sapien
tgaggacagggacttatcccactca

SEQ ID NO: 5552837 - DNA, 25 bp, Homo sapien
cctgggcctcggtccccaactgtga

SEQ ID NO: 5552838 - DNA, 25 bp, Homo sapien
gtggatcaaagtcacagcgtcttcc

SEQ ID NO: 5552839 - DNA, 25 bp, Homo sapien
tcctcggtgcctggtgcatgccagg

SEQ ID NO: 5552840 - DNA, 25 bp, Homo sapien
tgaggattaccaaaatgtaacagag

SEQ ID NO: 5552841 - DNA, 25 bp, Homo sapien
aatgtaacagagacttgaagtgagc

SEQ ID NO: 5552842 - DNA, 25 bp, Homo sapien
ttttagttttgtggtgtatcagaga

SEQ ID NO: 5552843 - DNA, 25 bp, Homo sapien
agtcagaacgcacacaacagtctta

SEQ ID NO: 5552844 - DNA, 25 bp, Homo sapien
tggtacaagaggcttagctttcagc

SEQ ID NO: 5552845 - DNA, 25 bp, Homo sapien
tatcgtatggtaattagttggccta

SEQ ID NO: 5552846 - DNA, 25 bp, Homo sapien
gaacacttagtggctatcgtatggt

SEQ ID NO: 5552847 - DNA, 25 bp, Homo sapien
ttggctaactggtacaagaggctta

SEQ ID NO: 5552848 - DNA, 25 bp, Homo sapien
atggattcactggagtagaacttta

SEQ ID NO: 5552849 - DNA, 25 bp, Homo sapien
ctttcagcctatgtcaacttgcaac

SEQ ID NO: 5552850 - DNA, 25 bp, Homo sapien
ggcatgattccgggtgtcccaaaac

SEQ ID NO: 5552851 - DNA, 25 bp, Homo sapien
tagagccctggtccccaggagctga

SEQ ID NO: 5552852 - DNA, 25 bp, Homo sapien
agagcctgcaggtgtccacaccttt

SEQ ID NO: 5552853 - DNA, 25 bp, Homo sapien
cggacctcagcctagagccctggtc

SEQ ID NO: 5552854 - DNA, 25 bp, Homo sapien
gagtacaatggtgtgatctcggctc

SEQ ID NO: 5552855 - DNA, 25 bp, Homo sapien
tggataagaccaaggtagcctcttc

SEQ ID NO: 5552856 - DNA, 25 bp, Homo sapien
ggccggctcattggaatagtcattt

SEQ ID NO: 5552857 - DNA, 25 bp, Homo sapien
agagagccctaggccggctcattgg

SEQ ID NO: 5552858 - DNA, 25 bp, Homo sapien
tcttctctaaggagctcagccggac

SEQ ID NO: 5552859 - DNA, 25 bp, Homo sapien
ccatgttgagcactgactggagcag

SEQ ID NO: 5552860 - DNA, 25 bp, Homo sapien
ctgactggagcaggtcctgttctgg

SEQ ID NO: 5552861 - DNA, 25 bp, Homo sapien
cgagttcaagcgaccctcctgcctc

SEQ ID NO: 5552862 - DNA, 25 bp, Homo sapien
agaacccaaggtttgttgtctccat

SEQ ID NO: 5552863 - DNA, 25 bp, Homo sapien
cgcccccccgaccatagaatttgct

SEQ ID NO: 5552864 - DNA, 25 bp, Homo sapien
aggcccagaggagtcataatctatt

SEQ ID NO: 5552865 - DNA, 25 bp, Homo sapien
acgcacacacggacagtgtagtaac

SEQ ID NO: 5552866 - DNA, 25 bp, Homo sapien
catagaatttgctgggagtaacaac

SEQ ID NO: 5552867 - DNA, 25 bp, Homo sapien
actgtatgccctagagatagaacac

SEQ ID NO: 5552868 - DNA, 25 bp, Homo sapien
tactcaaggagtttaggcccatggg

SEQ ID NO: 5552869 - DNA, 25 bp, Homo sapien
gagatagaacactgaagtagacatt

SEQ ID NO: 5552870 - DNA, 25 bp, Homo sapien
aatctattaaacgtggtggaggaag

SEQ ID NO: 5552871 - DNA, 25 bp, Homo sapien
agaagcagtgcaccacagctatgca

SEQ ID NO: 5552872 - DNA, 25 bp, Homo sapien
cacctgaactggacctttggggaag

SEQ ID NO: 5552873 - DNA, 25 bp, Homo sapien
ccctagtcggtgacaacacgttgac

SEQ ID NO: 5552874 - DNA, 25 bp, Homo sapien
gtcaacgtgttgtcaccgactaggg

SEQ ID NO: 5552875 - DNA, 25 bp, Homo sapien
tgccccatttaggaaggtggtgttg

SEQ ID NO: 5552876 - DNA, 25 bp, Homo sapien
gcttggccaggccacattgtcaggg

SEQ ID NO: 5552877 - DNA, 25 bp, Homo sapien
ttcaagttatgtaggtgatgggaac

SEQ ID NO: 5552878 - DNA, 25 bp, Homo sapien
tgcccgacttcagcgcccttttgcc

SEQ ID NO: 5552879 - DNA, 25 bp, Homo sapien
ccagcaagaattctctgtcacagcc

SEQ ID NO: 5552880 - DNA, 25 bp, Homo sapien
ccagtttgcagctgctctgcccgac

SEQ ID NO: 5552881 - DNA, 25 bp, Homo sapien
aaactgttaggactgataagcaagc

SEQ ID NO: 5552882 - DNA, 25 bp, Homo sapien
cagcaaggtgacaaaacataagatc

SEQ ID NO: 5552883 - DNA, 25 bp, Homo sapien
acagccttgggaattcatgccagtt

SEQ ID NO: 5552884 - DNA, 25 bp, Homo sapien
agtggcaacagttgagaaaatggag

SEQ ID NO: 5552885 - DNA, 25 bp, Homo sapien
ataagcaagctcagcaaggtgacaa

SEQ ID NO: 5552886 - DNA, 25 bp, Homo sapien
taggtggggttctactcccagccac

SEQ ID NO: 5552887 - DNA, 25 bp, Homo sapien
ggacagaggacataagctatgccta

SEQ ID NO: 5552888 - DNA, 25 bp, Homo sapien
ccgttagatagcatgatgtgatgtt

SEQ ID NO: 5552889 - DNA, 25 bp, Homo sapien
agcctttcctgaagctgggtctacc

SEQ ID NO: 5552890 - DNA, 25 bp, Homo sapien
agttagactttgggtgagaatttgg

SEQ ID NO: 5552891 - DNA, 25 bp, Homo sapien
gtaatatggccaattggacatgtac

SEQ ID NO: 5552892 - DNA, 25 bp, Homo sapien
ccatcagttatggaatagggcttgg

SEQ ID NO: 5552893 - DNA, 25 bp, Homo sapien
agaggaaccaaagccaagattttaa

SEQ ID NO: 5552894 - DNA, 25 bp, Homo sapien
atcagcacagcatattactggccat

SEQ ID NO: 5552895 - DNA, 25 bp, Homo sapien
catagaaattggccagtaatatggc

SEQ ID NO: 5552896 - DNA, 25 bp, Homo sapien
catgttccatgggatctaggtgggg

SEQ ID NO: 5552897 - DNA, 25 bp, Homo sapien
accactcagagtatgacgacagtac

SEQ ID NO: 5552898 - DNA, 25 bp, Homo sapien
tcggaagctgcacaagactgcaaca

SEQ ID NO: 5552899 - DNA, 25 bp, Homo sapien
agactgcaacacggtgacagcttct

SEQ ID NO: 5552900 - DNA, 25 bp, Homo sapien
caggaaccaaaataaaacggataga

SEQ ID NO: 5552901 - DNA, 25 bp, Homo sapien
aaggagtaagctggaatccacaatt

SEQ ID NO: 5552902 - DNA, 25 bp, Homo sapien
aacccaaaagtgatacagaggggag

SEQ ID NO: 5552903 - DNA, 25 bp, Homo sapien
atagtaaatgatggagaatgaaaat

SEQ ID NO: 5552904 - DNA, 25 bp, Homo sapien
gacgacagtactcaaagcaactcac

SEQ ID NO: 5552905 - DNA, 25 bp, Homo sapien
gcaactcacgagcatttccccacgc

SEQ ID NO: 5552906 - DNA, 25 bp, Homo sapien
aaaacactatggggatcatgctttc

SEQ ID NO: 5552907 - DNA, 25 bp, Homo sapien
gccacattggagaactgctatgagc

SEQ ID NO: 5552908 - DNA, 25 bp, Homo sapien
gtggtgcacagagctctcgtcatgt

SEQ ID NO: 5552909 - DNA, 25 bp, Homo sapien
aaggctccgcaaaattgatgacacc

SEQ ID NO: 5552910 - DNA, 25 bp, Homo sapien
acacgatctaaaagaagtggtgcac

SEQ ID NO: 5552911 - DNA, 25 bp, Homo sapien
gtccaagcacatgtaaggctccgca

SEQ ID NO: 5552912 - DNA, 25 bp, Homo sapien
aatgtgatgtcttgccaggaatgat

SEQ ID NO: 5552913 - DNA, 25 bp, Homo sapien
aacaggacccttgaatgagcactta

SEQ ID NO: 5552914 - DNA, 25 bp, Homo sapien
gatgacaccataaaggagtccagtt

SEQ ID NO: 5552915 - DNA, 25 bp, Homo sapien
ctctggagggctttgaatgcctctc

SEQ ID NO: 5552916 - DNA, 25 bp, Homo sapien
gaggagcacatcccagtcgcctctc

SEQ ID NO: 5552917 - DNA, 25 bp, Homo sapien
cgattgagttaaaagcgctgctgtc

SEQ ID NO: 5552918 - DNA, 25 bp, Homo sapien
gtggcagcaggtagtacatacttac

SEQ ID NO: 5552919 - DNA, 25 bp, Homo sapien
taaccttgccaagactccaatcagc

SEQ ID NO: 5552920 - DNA, 25 bp, Homo sapien
ggcctcctcctgtggtgctaggatt

SEQ ID NO: 5552921 - DNA, 25 bp, Homo sapien
gtgaaatacttaacatacagatctc

SEQ ID NO: 5552922 - DNA, 25 bp, Homo sapien
acccagcccagtgaactcttaagtc

SEQ ID NO: 5552923 - DNA, 25 bp, Homo sapien
cacttgactcctagcccagggaatc

SEQ ID NO: 5552924 - DNA, 25 bp, Homo sapien
tgcacacaggttttctaagatgatc

SEQ ID NO: 5552925 - DNA, 25 bp, Homo sapien
agcccagggaatctttctgtgaaat

SEQ ID NO: 5552926 - DNA, 25 bp, Homo sapien
atgttaggttggttgtccacaaaat

SEQ ID NO: 5552927 - DNA, 25 bp, Homo sapien
ttccccaaactggtgctaatatgtt

SEQ ID NO: 5552928 - DNA, 25 bp, Homo sapien
ccaatcagccttacagtagtttacc

SEQ ID NO: 5552929 - DNA, 25 bp, Homo sapien
aagaaaacacttgactcctagccca

SEQ ID NO: 5552930 - DNA, 25 bp, Homo sapien
cacaactgttggtgataaatctgct

SEQ ID NO: 5552931 - DNA, 25 bp, Homo sapien
tcagacatcatctctggagatcacc

SEQ ID NO: 5552932 - DNA, 25 bp, Homo sapien
cctaggacttctttgaatgagtatg

SEQ ID NO: 5552933 - DNA, 25 bp, Homo sapien
attactatgtacaggtctcaatttc

SEQ ID NO: 5552934 - DNA, 25 bp, Homo sapien
attctgcttgagacaatgtactcct

SEQ ID NO: 5552935 - DNA, 25 bp, Homo sapien
taaatctgctgacaggatgatagtc

SEQ ID NO: 5552936 - DNA, 25 bp, Homo sapien
gatggtttagctaggtatagaattc

SEQ ID NO: 5552937 - DNA, 25 bp, Homo sapien
gaatgagtatgtgtgcatcctaaat

SEQ ID NO: 5552938 - DNA, 25 bp, Homo sapien
tctgggtctctgaacttacctttcc

SEQ ID NO: 5552939 - DNA, 25 bp, Homo sapien
gctgacaggatgatagtcatttctc

SEQ ID NO: 5552940 - DNA, 25 bp, Homo sapien
ctcttgaaagatggtttagctaggt

SEQ ID NO: 5552941 - DNA, 25 bp, Homo sapien
gtgaatagttctcacaggggaaaat

SEQ ID NO: 5552942 - DNA, 25 bp, Homo sapien
gcttctgccttcaaatgagagtacc

SEQ ID NO: 5552943 - DNA, 25 bp, Homo sapien
ctgtgcacatccactctagagttcc

SEQ ID NO: 5552944 - DNA, 25 bp, Homo sapien
aggttcttggaaagtaaggagatgt

SEQ ID NO: 5552945 - DNA, 25 bp, Homo sapien
cttcatcagtaatgcccaatgcctg

SEQ ID NO: 5552946 - DNA, 25 bp, Homo sapien
tgagagtacctagaggaattgtttc

SEQ ID NO: 5552947 - DNA, 25 bp, Homo sapien
attggtgagtttaatgatctgttta

SEQ ID NO: 5552948 - DNA, 25 bp, Homo sapien
ttagcccagacctgagaaggttctt

SEQ ID NO: 5552949 - DNA, 25 bp, Homo sapien
taaggagatgttttgatctggcacc

SEQ ID NO: 5552950 - DNA, 25 bp, Homo sapien
agcagatcagctgggttcatgagtt

SEQ ID NO: 5552951 - DNA, 25 bp, Homo sapien
ttgtttcaaatggcaggttatctcc

SEQ ID NO: 5552952 - DNA, 25 bp, Homo sapien
tgaaaaatctttatattggtagcta

SEQ ID NO: 5552953 - DNA, 25 bp, Homo sapien
attttagggtattacataatctttc

SEQ ID NO: 5552954 - DNA, 25 bp, Homo sapien
caagtttgacttaaccagtaaaata

SEQ ID NO: 5552955 - DNA, 25 bp, Homo sapien
atcagtcttaggattttgaaaaatc

SEQ ID NO: 5552956 - DNA, 25 bp, Homo sapien
tgcacaattcatttgtcctggtgta

SEQ ID NO: 5552957 - DNA, 25 bp, Homo sapien
ttatattggtagctaactcattttt

SEQ ID NO: 5552958 - DNA, 25 bp, Homo sapien
tactgtttcattataagaaggattt

SEQ ID NO: 5552959 - DNA, 25 bp, Homo sapien
ccatttttaggtaatctgcaatctt

SEQ ID NO: 5552960 - DNA, 25 bp, Homo sapien
actctcaaattttagggtattacat

SEQ ID NO: 5552961 - DNA, 25 bp, Homo sapien
tattgcccaaagataggtatgaatc

SEQ ID NO: 5552962 - DNA, 25 bp, Homo sapien
gcccaaagataggtatgaatcagtc

SEQ ID NO: 5552963 - DNA, 25 bp, Homo sapien
tagtagtcttttagagtttatccta

SEQ ID NO: 5552964 - DNA, 25 bp, Homo sapien
ccataatagtacaaggaccttagaa

SEQ ID NO: 5552965 - DNA, 25 bp, Homo sapien
gggtctctgagttagcaaaggctaa

SEQ ID NO: 5552966 - DNA, 25 bp, Homo sapien
aatacaaatgttttaggtatgtttc

SEQ ID NO: 5552967 - DNA, 25 bp, Homo sapien
agatcacagtatgggtctctgagtt

SEQ ID NO: 5552968 - DNA, 25 bp, Homo sapien
ttcttccataatagtacaaggacct

SEQ ID NO: 5552969 - DNA, 25 bp, Homo sapien
caactgtctcacatgctctctgttc

SEQ ID NO: 5552970 - DNA, 25 bp, Homo sapien
ataaacagtatgcagattgttatcc

SEQ ID NO: 5552971 - DNA, 25 bp, Homo sapien
aaaggctaataatgttaattggcac

SEQ ID NO: 5552972 - DNA, 25 bp, Homo sapien
tatcctatagatcacagtatgggtc

SEQ ID NO: 5552973 - DNA, 25 bp, Homo sapien
caaggaccttagaacgtttcaattc

SEQ ID NO: 5552974 - DNA, 25 bp, Homo sapien
aaagagaatagacttggaaattgtc

SEQ ID NO: 5552975 - DNA, 25 bp, Homo sapien
aggatggttgaagaaatcaaagaat

SEQ ID NO: 5552976 - DNA, 25 bp, Homo sapien
aatagctgttatctaggggtgtgga

SEQ ID NO: 5552977 - DNA, 25 bp, Homo sapien
atgctgtaacctaaggaaaggagct

SEQ ID NO: 5552978 - DNA, 25 bp, Homo sapien
aggaaaggagctagatagatagctt

SEQ ID NO: 5552979 - DNA, 25 bp, Homo sapien
caaagaatgaaggagttacttggag

SEQ ID NO: 5552980 - DNA, 25 bp, Homo sapien
ggtgtggagaaggttacctcttcaa

SEQ ID NO: 5552981 - DNA, 25 bp, Homo sapien
cgttgagctaatgttaagaggataa

SEQ ID NO: 5552982 - DNA, 25 bp, Homo sapien
gatagctttgaacatcaggaccttc

SEQ ID NO: 5552983 - DNA, 25 bp, Homo sapien
gagattgtcccacatgggtgacccc

SEQ ID NO: 5552984 - DNA, 25 bp, Homo sapien
ttgttatcggctaagaaagagaata

SEQ ID NO: 5552985 - DNA, 25 bp, Homo sapien
ctgtactacgatgaggtaggagtgt

SEQ ID NO: 5552986 - DNA, 25 bp, Homo sapien
aatgaggtcacaagtcctgtactac

SEQ ID NO: 5552987 - DNA, 25 bp, Homo sapien
tgaaagcacaagagctcagtgttct

SEQ ID NO: 5552988 - DNA, 25 bp, Homo sapien
ggagtgtgtgaaataccatggtggt

SEQ ID NO: 5552989 - DNA, 25 bp, Homo sapien
ttggtgaatttacgctgcaacccac

SEQ ID NO: 5552990 - DNA, 25 bp, Homo sapien
catctcactggggagtgtcagaaag

SEQ ID NO: 5552991 - DNA, 25 bp, Homo sapien
aagaaacattagtgagttggaattc

SEQ ID NO: 5552992 - DNA, 25 bp, Homo sapien
ttacagccaggttgtatggaaatac

SEQ ID NO: 5552993 - DNA, 25 bp, Homo sapien
ttctgaaataggagtgtgttggtga

SEQ ID NO: 5552994 - DNA, 25 bp, Homo sapien
tggaaatacaggttgagtgtcttac

SEQ ID NO: 5552995 - DNA, 25 bp, Homo sapien
tacacacaaggcacatctgaaagca

SEQ ID NO: 5552996 - DNA, 25 bp, Homo sapien
atataaatcagaatggagttgtttc

SEQ ID NO: 5552997 - DNA, 25 bp, Homo sapien
ctcaaggggataatagtgtgatgaa

SEQ ID NO: 5552998 - DNA, 25 bp, Homo sapien
cagtgaaataaatctcaaggggata

SEQ ID NO: 5552999 - DNA, 25 bp, Homo sapien
tatctgtcgaaaagtaaatgctgtt

SEQ ID NO: 5553000 - DNA, 25 bp, Homo sapien
tgtgccatggaaactatgcagtgaa

SEQ ID NO: 5553001 - DNA, 25 bp, Homo sapien
cagatgcactgagttagttggtctc

SEQ ID NO: 5553002 - DNA, 25 bp, Homo sapien
aaaaaattgttgcttgttgggagaa

SEQ ID NO: 5553003 - DNA, 25 bp, Homo sapien
ggaatgcaggacaaattcttggcac

SEQ ID NO: 5553004 - DNA, 25 bp, Homo sapien
ggagtggataaggtattaagacttc

SEQ ID NO: 5553005 - DNA, 25 bp, Homo sapien
accttagaatgtgcatagcagcatc

SEQ ID NO: 5553006 - DNA, 25 bp, Homo sapien
taatctaatgaggaaggcatcaatc

SEQ ID NO: 5553007 - DNA, 25 bp, Homo sapien
gagctgagatcgcacaaatgcactt

SEQ ID NO: 5553008 - DNA, 25 bp, Homo sapien
cagtggtccccagactaacccgtat

SEQ ID NO: 5553009 - DNA, 25 bp, Homo sapien
gtccagattcctaacccacaacgct

SEQ ID NO: 5553010 - DNA, 25 bp, Homo sapien
tgaggtgaccgcgacttttacgtag

SEQ ID NO: 5553011 - DNA, 25 bp, Homo sapien
agaatggtgtctgacttgaggtgac

SEQ ID NO: 5553012 - DNA, 25 bp, Homo sapien
cacaacgctgtgagatataataaaa

SEQ ID NO: 5553013 - DNA, 25 bp, Homo sapien
ttacgtagcagtaggtaactggaac

SEQ ID NO: 5553014 - DNA, 25 bp, Homo sapien
aggtaactggaacagatgtccaacc

SEQ ID NO: 5553015 - DNA, 25 bp, Homo sapien
cagactaacccgtatgccagccaag

SEQ ID NO: 5553016 - DNA, 25 bp, Homo sapien
gccagccaagcaccctcaagtgatc

SEQ ID NO: 5553017 - DNA, 25 bp, Homo sapien
agaactgaagattaaccctgccctc

SEQ ID NO: 5553018 - DNA, 25 bp, Homo sapien
tacctacctggactgctgtgagcaa

SEQ ID NO: 5553019 - DNA, 25 bp, Homo sapien
gcacagcccaagatcagcaagtctt

SEQ ID NO: 5553020 - DNA, 25 bp, Homo sapien
agttgggcacgttaggtgctcagta

SEQ ID NO: 5553021 - DNA, 25 bp, Homo sapien
gcgcattcttagaggaaaacaggcc

SEQ ID NO: 5553022 - DNA, 25 bp, Homo sapien
ctcacgtataaaacgggaatccagt

SEQ ID NO: 5553023 - DNA, 25 bp, Homo sapien
agtgtgcaagggtctctcctctcct

SEQ ID NO: 5553024 - DNA, 25 bp, Homo sapien
ggccaggagctaactacgccttgcc

SEQ ID NO: 5553025 - DNA, 25 bp, Homo sapien
ggacatccctagcactagcgccgcc

SEQ ID NO: 5553026 - DNA, 25 bp, Homo sapien
ctaggtagtccaggacgtagttggg

SEQ ID NO: 5553027 - DNA, 25 bp, Homo sapien
gaagtagtcgcagtgactccctgga

SEQ ID NO: 5553028 - DNA, 25 bp, Homo sapien
ctcagttcacaaatggagcaaggaa

SEQ ID NO: 5553029 - DNA, 25 bp, Homo sapien
agccagcattctagcgagagagaat

SEQ ID NO: 5553030 - DNA, 25 bp, Homo sapien
tgtgctgaatcagacagttggtgct

SEQ ID NO: 5553031 - DNA, 25 bp, Homo sapien
ctatgttccaggtgcgattccaggc

SEQ ID NO: 5553032 - DNA, 25 bp, Homo sapien
ttactagagatcagggttcaaccag

SEQ ID NO: 5553033 - DNA, 25 bp, Homo sapien
tattgtatggccacgcaaaaccttt

SEQ ID NO: 5553034 - DNA, 25 bp, Homo sapien
gaatcaaactgataatgcccccctc

SEQ ID NO: 5553035 - DNA, 25 bp, Homo sapien
ccgtgtgaatgatagtggccacttg

SEQ ID NO: 5553036 - DNA, 25 bp, Homo sapien
attgctgcatagcttggtgggtgaa

SEQ ID NO: 5553037 - DNA, 25 bp, Homo sapien
cagctttagctgcatgacccagaac

SEQ ID NO: 5553038 - DNA, 25 bp, Homo sapien
tcctagaagacatcgattgctgcat

SEQ ID NO: 5553039 - DNA, 25 bp, Homo sapien
tggccacttggggatctccatctgc

SEQ ID NO: 5553040 - DNA, 25 bp, Homo sapien
caggcaatgtactaggcactgcgtt

SEQ ID NO: 5553041 - DNA, 25 bp, Homo sapien
ctcttgcggttaggctaagtccctt

SEQ ID NO: 5553042 - DNA, 25 bp, Homo sapien
agcaattggaagatctgggacttga

SEQ ID NO: 5553043 - DNA, 25 bp, Homo sapien
agtataaaaagactgtggaagcggt

SEQ ID NO: 5553044 - DNA, 25 bp, Homo sapien
ttaagatccacgcccccatagcaat

SEQ ID NO: 5553045 - DNA, 25 bp, Homo sapien
gaagacaaagaggcctcttccaacc

SEQ ID NO: 5553046 - DNA, 25 bp, Homo sapien
gcggtgatcaagaccaggatatgaa

SEQ ID NO: 5553047 - DNA, 25 bp, Homo sapien
taaattgccaagtgggccaagtata

SEQ ID NO: 5553048 - DNA, 25 bp, Homo sapien
aggaaacacagacataggatagcta

SEQ ID NO: 5553049 - DNA, 25 bp, Homo sapien
acaggaaacatgaatctcttgcggt

SEQ ID NO: 5553050 - DNA, 25 bp, Homo sapien
taagagaagtataaacacagccaca

SEQ ID NO: 5553051 - DNA, 25 bp, Homo sapien
atttcttaggagcaattgagcccga

SEQ ID NO: 5553052 - DNA, 25 bp, Homo sapien
cggctccaattttgggttcgaatac

SEQ ID NO: 5553053 - DNA, 25 bp, Homo sapien
tcgaatacagacacgggtctgaacg

SEQ ID NO: 5553054 - DNA, 25 bp, Homo sapien
tccctctctagaaattagtctcatc

SEQ ID NO: 5553055 - DNA, 25 bp, Homo sapien
tgagcccgagagctcactcgtctcc

SEQ ID NO: 5553056 - DNA, 25 bp, Homo sapien
gagcaattgagcccgagagctcact

SEQ ID NO: 5553057 - DNA, 25 bp, Homo sapien
tttatttcttaggagcaattgagcc

SEQ ID NO: 5553058 - DNA, 25 bp, Homo sapien
attttgggttcgaatacagacacgg

SEQ ID NO: 5553059 - DNA, 25 bp, Homo sapien
ttagtctcatcaattcggctccaat

SEQ ID NO: 5553060 - DNA, 25 bp, Homo sapien
tctgaacgtgaccagacctggagtg

SEQ ID NO: 5553061 - DNA, 25 bp, Homo sapien
acgggtctgaacgtgaccagacctg

SEQ ID NO: 5553062 - DNA, 25 bp, Homo sapien
atacactgggtgcataatactttat

SEQ ID NO: 5553063 - DNA, 25 bp, Homo sapien
taagagagcttgactcatgagaaaa

SEQ ID NO: 5553064 - DNA, 25 bp, Homo sapien
ttagcccttggagacactgttagaa

SEQ ID NO: 5553065 - DNA, 25 bp, Homo sapien
gtagccacccaccttgtacgagagc

SEQ ID NO: 5553066 - DNA, 25 bp, Homo sapien
gttggttgacagctttggaacaatg

SEQ ID NO: 5553067 - DNA, 25 bp, Homo sapien
gaatatgtgtcagccgctgtgtgac

SEQ ID NO: 5553068 - DNA, 25 bp, Homo sapien
ggggagaggcattaccgtcatttcc

SEQ ID NO: 5553069 - DNA, 25 bp, Homo sapien
aaagccaataggatcaccaacagtt

SEQ ID NO: 5553070 - DNA, 25 bp, Homo sapien
agagtttcattatttggggagaggc

SEQ ID NO: 5553071 - DNA, 25 bp, Homo sapien
cctctagaaaaagctgaacgtagcc

SEQ ID NO: 5553072 - DNA, 25 bp, Homo sapien
atagccatgtgcctgaatatgtgtc

SEQ ID NO: 5553073 - DNA, 25 bp, Homo sapien
cttattaacgagattccagagagct

SEQ ID NO: 5553074 - DNA, 25 bp, Homo sapien
ctttggtagctgattaggtcatgag

SEQ ID NO: 5553075 - DNA, 25 bp, Homo sapien
atgggaagatgctataacatatgtc

SEQ ID NO: 5553076 - DNA, 25 bp, Homo sapien
acatagaaaccacctaaatgcccac

SEQ ID NO: 5553077 - DNA, 25 bp, Homo sapien
atgaatgagattagtaaccttatta

SEQ ID NO: 5553078 - DNA, 25 bp, Homo sapien
aaatgcccacaatatgggaagatgc

SEQ ID NO: 5553079 - DNA, 25 bp, Homo sapien
acgagattccagagagctcctgtgg

SEQ ID NO: 5553080 - DNA, 25 bp, Homo sapien
ctggtaagaccatggtaaaacaggt

SEQ ID NO: 5553081 - DNA, 25 bp, Homo sapien
aatgtgatcgtattaggagatgggg

SEQ ID NO: 5553082 - DNA, 25 bp, Homo sapien
cctgtggcccttcagcaacatgagg

SEQ ID NO: 5553083 - DNA, 25 bp, Homo sapien
gcttgagccactgccccccacctag

SEQ ID NO: 5553084 - DNA, 25 bp, Homo sapien
gaaagcatagggtgttatgaaagca

SEQ ID NO: 5553085 - DNA, 25 bp, Homo sapien
ggtgagttttaagtaggccgagtca

SEQ ID NO: 5553086 - DNA, 25 bp, Homo sapien
gcgcccacgagctaatgtgacttcc

SEQ ID NO: 5553087 - DNA, 25 bp, Homo sapien
tcttgagaaggtaagtttgagatgg

SEQ ID NO: 5553088 - DNA, 25 bp, Homo sapien
cctgtaaaggtcatacggttcggga

SEQ ID NO: 5553089 - DNA, 25 bp, Homo sapien
atgaaagcatgaaatagtgggatct

SEQ ID NO: 5553090 - DNA, 25 bp, Homo sapien
ctcagctgatgagcaacagagctgg

SEQ ID NO: 5553091 - DNA, 25 bp, Homo sapien
gccaccgtgaacctcagagcacatt

SEQ ID NO: 5553092 - DNA, 25 bp, Homo sapien
ggaaatgtgagaagtgttctggaga

SEQ ID NO: 5553093 - DNA, 25 bp, Homo sapien
tgggactacaggacatagccatctt

SEQ ID NO: 5553094 - DNA, 25 bp, Homo sapien
aaccttgttgaaacaggcagagtgg

SEQ ID NO: 5553095 - DNA, 25 bp, Homo sapien
aggggaagatagaagacttaatgaa

SEQ ID NO: 5553096 - DNA, 25 bp, Homo sapien
tgtgtctgtgcatgacaaatcactg

SEQ ID NO: 5553097 - DNA, 25 bp, Homo sapien
aaatgtggagttatgtgctgtgtct

SEQ ID NO: 5553098 - DNA, 25 bp, Homo sapien
aagaatcacaaaaagttaaggcata

SEQ ID NO: 5553099 - DNA, 25 bp, Homo sapien
tctgaaagtgctagaaatgttagtt

SEQ ID NO: 5553100 - DNA, 25 bp, Homo sapien
taaggcataaaatacttgatgtgaa

SEQ ID NO: 5553101 - DNA, 25 bp, Homo sapien
ttcacttgaacagagaaaacacagg

SEQ ID NO: 5553102 - DNA, 25 bp, Homo sapien
acacacaaaaagagctgttacctga

SEQ ID NO: 5553103 - DNA, 25 bp, Homo sapien
atgtgtatagagacttattaaatcc

SEQ ID NO: 5553104 - DNA, 25 bp, Homo sapien
gagctgttacctgaaatgtggagtt

SEQ ID NO: 5553105 - DNA, 25 bp, Homo sapien
agagatgatgctgttaacattttga

SEQ ID NO: 5553106 - DNA, 25 bp, Homo sapien
gtggattccaaaagggattgaagaa

SEQ ID NO: 5553107 - DNA, 25 bp, Homo sapien
gaatgtactgactgggcaagaagta

SEQ ID NO: 5553108 - DNA, 25 bp, Homo sapien
aataaaggacactgtaagaattttc

SEQ ID NO: 5553109 - DNA, 25 bp, Homo sapien
ttcatgggagattaacaactgaagc

SEQ ID NO: 5553110 - DNA, 25 bp, Homo sapien
tacagaattctgcataaggtggctc

SEQ ID NO: 5553111 - DNA, 25 bp, Homo sapien
atagaagccaattgtaaagaaagca

SEQ ID NO: 5553112 - DNA, 25 bp, Homo sapien
aaagaaagcaacatggctctctact

SEQ ID NO: 5553113 - DNA, 25 bp, Homo sapien
ctgggcaagaagtagtcaataattt

SEQ ID NO: 5553114 - DNA, 25 bp, Homo sapien
gtggttgctcatatggaaattgctt

SEQ ID NO: 5553115 - DNA, 25 bp, Homo sapien
ccagagataaacagataatcactac

SEQ ID NO: 5553116 - DNA, 25 bp, Homo sapien
ctgggaggaagatgtgaatcttcca

SEQ ID NO: 5553117 - DNA, 25 bp, Homo sapien
ggcccggatacgaatctagtgatct

SEQ ID NO: 5553118 - DNA, 25 bp, Homo sapien
aaacccagggtaattcatgccactc

SEQ ID NO: 5553119 - DNA, 25 bp, Homo sapien
caggatgcagaagactgcaagttca

SEQ ID NO: 5553120 - DNA, 25 bp, Homo sapien
cactgatcacgtggttagtacctgc

SEQ ID NO: 5553121 - DNA, 25 bp, Homo sapien
aaaaccaagggaatgcataacccta

SEQ ID NO: 5553122 - DNA, 25 bp, Homo sapien
ttgcaaatgtatggactgtggtgag

SEQ ID NO: 5553123 - DNA, 25 bp, Homo sapien
atgatttacctgtgaagaggggagg

SEQ ID NO: 5553124 - DNA, 25 bp, Homo sapien
actgacttctgcgagctggaacaag

SEQ ID NO: 5553125 - DNA, 25 bp, Homo sapien
ggaacaagcttagcagcaagaaacc

SEQ ID NO: 5553126 - DNA, 25 bp, Homo sapien
aacagcggtgaccataccctcctca

SEQ ID NO: 5553127 - DNA, 25 bp, Homo sapien
tgaatataccagaaagcccccttat

SEQ ID NO: 5553128 - DNA, 25 bp, Homo sapien
agctggtccctgaaaactgcaagcc

SEQ ID NO: 5553129 - DNA, 25 bp, Homo sapien
agtattttagaagccaaatggccac

SEQ ID NO: 5553130 - DNA, 25 bp, Homo sapien
cctaatcctagcgcggctcagctgg

SEQ ID NO: 5553131 - DNA, 25 bp, Homo sapien
cttgcctaaggtaagaagtctaatg

SEQ ID NO: 5553132 - DNA, 25 bp, Homo sapien
tagaccaatgtccagaagagtttta

SEQ ID NO: 5553133 - DNA, 25 bp, Homo sapien
ctgggtcccctgggtctatcaaatt

SEQ ID NO: 5553134 - DNA, 25 bp, Homo sapien
tttagctccgtggtacaggacattc

SEQ ID NO: 5553135 - DNA, 25 bp, Homo sapien
agaaataagtattgaacatggccca

SEQ ID NO: 5553136 - DNA, 25 bp, Homo sapien
ctcccccacagaaatgctctacttt

SEQ ID NO: 5553137 - DNA, 25 bp, Homo sapien
gttgggcttccttatgtggaaatgc

SEQ ID NO: 5553138 - DNA, 25 bp, Homo sapien
ctaatgaaatggaatcctgggtccc

SEQ ID NO: 5553139 - DNA, 25 bp, Homo sapien
taggccatgaaatcagatgactggt

SEQ ID NO: 5553140 - DNA, 25 bp, Homo sapien
ctgtggctttgaagataaaaaggtc

SEQ ID NO: 5553141 - DNA, 25 bp, Homo sapien
ttaaaatagtggttgagcctgtagg

SEQ ID NO: 5553142 - DNA, 25 bp, Homo sapien
atatttctgtagtagctaggctctt

SEQ ID NO: 5553143 - DNA, 25 bp, Homo sapien
ctatgctgcatatggacagagttcc

SEQ ID NO: 5553144 - DNA, 25 bp, Homo sapien
gaaaacagtacatgagacctgacct

SEQ ID NO: 5553145 - DNA, 25 bp, Homo sapien
aaaaggtctaagagagacaatcttc

SEQ ID NO: 5553146 - DNA, 25 bp, Homo sapien
tgttatccaggactgagaaaacagt

SEQ ID NO: 5553147 - DNA, 25 bp, Homo sapien
ggcctctggattgtcaatgatgttc

SEQ ID NO: 5553148 - DNA, 25 bp, Homo sapien
ctgctggaagcaacacagtgtaagt

SEQ ID NO: 5553149 - DNA, 25 bp, Homo sapien
ttcagttgtgttctcagtggcctct

SEQ ID NO: 5553150 - DNA, 25 bp, Homo sapien
aagtacgccctagcctgaggtttcc

SEQ ID NO: 5553151 - DNA, 25 bp, Homo sapien
gctcttcaggtagatgctacgtgac

SEQ ID NO: 5553152 - DNA, 25 bp, Homo sapien
gccctggtccccagcctggcctact

SEQ ID NO: 5553153 - DNA, 25 bp, Homo sapien
agagggtttgagccatctgttgccc

SEQ ID NO: 5553154 - DNA, 25 bp, Homo sapien
tttccatactagcaaggtgggtgag

SEQ ID NO: 5553155 - DNA, 25 bp, Homo sapien
cctttcttccaggatggcaggagaa

SEQ ID NO: 5553156 - DNA, 25 bp, Homo sapien
ttcagcagttgcagtaagaaagtgg

SEQ ID NO: 5553157 - DNA, 25 bp, Homo sapien
ctgtgaacctgcagcaccaagtctg

SEQ ID NO: 5553158 - DNA, 25 bp, Homo sapien
tgggctcagcctgttcagcagttgc

SEQ ID NO: 5553159 - DNA, 25 bp, Homo sapien
cctggcacgttgagtctgtgtttcc

SEQ ID NO: 5553160 - DNA, 25 bp, Homo sapien
gaatgtaattagagtaagtacgccc

SEQ ID NO: 5553161 - DNA, 25 bp, Homo sapien
catagtgccgtagtctaaccttgtc

SEQ ID NO: 5553162 - DNA, 25 bp, Homo sapien
aggttatccagtttgttggcctgtg

SEQ ID NO: 5553163 - DNA, 25 bp, Homo sapien
agtgccgtagtctaaccttgtcttt

SEQ ID NO: 5553164 - DNA, 25 bp, Homo sapien
tgtgatttttcatagtgccgtagtc

SEQ ID NO: 5553165 - DNA, 25 bp, Homo sapien
taggttatccagtttgttggcctgt

SEQ ID NO: 5553166 - DNA, 25 bp, Homo sapien
tttcatagtgccgtagtctaacctt

SEQ ID NO: 5553167 - DNA, 25 bp, Homo sapien
ggttgtatgtttctaggaatgtatc

SEQ ID NO: 5553168 - DNA, 25 bp, Homo sapien
catagtgccatagtctaaccttgtc

SEQ ID NO: 5553169 - DNA, 25 bp, Homo sapien
tcatagtgccgtagtctaaccttgt

SEQ ID NO: 5553170 - DNA, 25 bp, Homo sapien
tatccagtttgttggcctgtgattt

SEQ ID NO: 5553171 - DNA, 25 bp, Homo sapien
ttcatagtgccgtagtctaaccttg

SEQ ID NO: 5553172 - DNA, 25 bp, Homo sapien
tgcatgtagattgtggtagagttgg

SEQ ID NO: 5553173 - DNA, 25 bp, Homo sapien
tatgcatgaaatagaaggttacctg

SEQ ID NO: 5553174 - DNA, 25 bp, Homo sapien
ccccaaagttgacacctggtcccta

SEQ ID NO: 5553175 - DNA, 25 bp, Homo sapien
tttagtagcaaaatggagatgttat

SEQ ID NO: 5553176 - DNA, 25 bp, Homo sapien
ttaagggacaaagtgaactgcatta

SEQ ID NO: 5553177 - DNA, 25 bp, Homo sapien
atgcagaacagaataaatccctcgg

SEQ ID NO: 5553178 - DNA, 25 bp, Homo sapien
aggggatacgccagacttagtatat

SEQ ID NO: 5553179 - DNA, 25 bp, Homo sapien
gtggtagagttggtatgtttcagat

SEQ ID NO: 5553180 - DNA, 25 bp, Homo sapien
gagagtagtcaaaagcctggcttta

SEQ ID NO: 5553181 - DNA, 25 bp, Homo sapien
ggtttctcaatagcagtggaacacc

SEQ ID NO: 5553182 - DNA, 25 bp, Homo sapien
tgcattaggctgaaaaacgaaaagg

SEQ ID NO: 5553183 - DNA, 25 bp, Homo sapien
agtggctctgagcctaggcaatggg

SEQ ID NO: 5553184 - DNA, 25 bp, Homo sapien
tacattgcactgccagcccagacag

SEQ ID NO: 5553185 - DNA, 25 bp, Homo sapien
tgcaaagtggctaagtcccacgacc

SEQ ID NO: 5553186 - DNA, 25 bp, Homo sapien
gtggctctgagcctaggcaattcat

SEQ ID NO: 5553187 - DNA, 25 bp, Homo sapien
agtggctctgggcctaggcaattta

SEQ ID NO: 5553188 - DNA, 25 bp, Homo sapien
gtttggcacagctctgggttgtgaa

SEQ ID NO: 5553189 - DNA, 25 bp, Homo sapien
acaatgctggcaagttcctgctctg

SEQ ID NO: 5553190 - DNA, 25 bp, Homo sapien
agcacccaagaacaatgcaggtaag

SEQ ID NO: 5553191 - DNA, 25 bp, Homo sapien
cacacccccaatagcacccaaaaac

SEQ ID NO: 5553192 - DNA, 25 bp, Homo sapien
tctgggttgtgaaataatggtatcc

SEQ ID NO: 5553193 - DNA, 25 bp, Homo sapien
gtaagctggtccatagtggctctgg

SEQ ID NO: 5553194 - DNA, 25 bp, Homo sapien
agacaaggttagactacggcactat

SEQ ID NO: 5553195 - DNA, 25 bp, Homo sapien
taacctagcagaaaccaaagacaag

SEQ ID NO: 5553196 - DNA, 25 bp, Homo sapien
acaaggttagactacggcactatga

SEQ ID NO: 5553197 - DNA, 25 bp, Homo sapien
tcacaggccaacaaactggataacc

SEQ ID NO: 5553198 - DNA, 25 bp, Homo sapien
ccaaagacaaggttagactacggca

SEQ ID NO: 5553199 - DNA, 25 bp, Homo sapien
ggataacctagcagaaaccaaagac

SEQ ID NO: 5553200 - DNA, 25 bp, Homo sapien
agataacctagcagaaaccaaagac

SEQ ID NO: 5553201 - DNA, 25 bp, Homo sapien
tatgaaaaatcacaggccaacaaac

SEQ ID NO: 5553202 - DNA, 25 bp, Homo sapien
atgaaaaatcataggccaacaaacc

SEQ ID NO: 5553203 - DNA, 25 bp, Homo sapien
accaaagacaaggttagactacggc

SEQ ID NO: 5553204 - DNA, 25 bp, Homo sapien
gacaaggttagactacggcactatg

SEQ ID NO: 5553205 - DNA, 25 bp, Homo sapien
cctatctaaggggcttagggagtta

SEQ ID NO: 5553206 - DNA, 25 bp, Homo sapien
taaccctgtatatcaagacttactt

SEQ ID NO: 5553207 - DNA, 25 bp, Homo sapien
tcagactctggcataacaagaagaa

SEQ ID NO: 5553208 - DNA, 25 bp, Homo sapien
gagacggaattttgctctgttgccc

SEQ ID NO: 5553209 - DNA, 25 bp, Homo sapien
ttgccataccttgaaattgccctgc

SEQ ID NO: 5553210 - DNA, 25 bp, Homo sapien
aaagtctcttgtaggaaaaatccac

SEQ ID NO: 5553211 - DNA, 25 bp, Homo sapien
actacaggcaggcacttccatgcct

SEQ ID NO: 5553212 - DNA, 25 bp, Homo sapien
tccacattctataaagaaccccatt

SEQ ID NO: 5553213 - DNA, 25 bp, Homo sapien
gtgcctggcctaagctctaattttt

SEQ ID NO: 5553214 - DNA, 25 bp, Homo sapien
ggggcttagggagttatgccctaca

SEQ ID NO: 5553215 - DNA, 25 bp, Homo sapien
ggcataacaagaagaaaatcaaaat

SEQ ID NO: 5553216 - DNA, 25 bp, Homo sapien
ttcctgcccagagacctggatgggc

SEQ ID NO: 5553217 - DNA, 25 bp, Homo sapien
ggcactgttctcacccacccaggcc

SEQ ID NO: 5553218 - DNA, 25 bp, Homo sapien
ctctgtaaaatgtgatgattccttc

SEQ ID NO: 5553219 - DNA, 25 bp, Homo sapien
caccgcgcccggccttgaaattctt

SEQ ID NO: 5553220 - DNA, 25 bp, Homo sapien
agggtctccttgtgggcactgttct

SEQ ID NO: 5553221 - DNA, 25 bp, Homo sapien
cccacccaggccttggtgggcgatg

SEQ ID NO: 5553222 - DNA, 25 bp, Homo sapien
tggcctggtgcacacacttccccca

SEQ ID NO: 5553223 - DNA, 25 bp, Homo sapien
tgctctggacagacttgcctgtggc

SEQ ID NO: 5553224 - DNA, 25 bp, Homo sapien
tcctaccagtgctctggacagactt

SEQ ID NO: 5553225 - DNA, 25 bp, Homo sapien
tcccccactctgagctgcagtctcc

SEQ ID NO: 5553226 - DNA, 25 bp, Homo sapien
gatgggctgtgagtctctgttactc

SEQ ID NO: 5553227 - DNA, 25 bp, Homo sapien
gcctcccaggtctgatgtggagtcc

SEQ ID NO: 5553228 - DNA, 25 bp, Homo sapien
ccaccgcaactggcctaccccatct

SEQ ID NO: 5553229 - DNA, 25 bp, Homo sapien
cagaagcaaaccattttgtggactg

SEQ ID NO: 5553230 - DNA, 25 bp, Homo sapien
ttaggaataatcttggatgtaagac

SEQ ID NO: 5553231 - DNA, 25 bp, Homo sapien
gtactcagaaatgcaaaacacagcc

SEQ ID NO: 5553232 - DNA, 25 bp, Homo sapien
atgtggagtccacagtacagcatgg

SEQ ID NO: 5553233 - DNA, 25 bp, Homo sapien
ttggatgtaagactactactgcttt

SEQ ID NO: 5553234 - DNA, 25 bp, Homo sapien
tggctttgccaatgtaggcagtttc

SEQ ID NO: 5553235 - DNA, 25 bp, Homo sapien
acagcctcatccactgagtcctgcc

SEQ ID NO: 5553236 - DNA, 25 bp, Homo sapien
ttgtggactgtactcagaaatgcaa

SEQ ID NO: 5553237 - DNA, 25 bp, Homo sapien
attatatatgtgggtcgaaacttta

SEQ ID NO: 5553238 - DNA, 25 bp, Homo sapien
atagagcagatatttgctagggctc

SEQ ID NO: 5553239 - DNA, 25 bp, Homo sapien
gggagagattgaggaatcttccgaa

SEQ ID NO: 5553240 - DNA, 25 bp, Homo sapien
ataaggtagggatgttagaattcta

SEQ ID NO: 5553241 - DNA, 25 bp, Homo sapien
accctatgggcttgtctggagctca

SEQ ID NO: 5553242 - DNA, 25 bp, Homo sapien
tttggccttggtatatttgagatgc

SEQ ID NO: 5553243 - DNA, 25 bp, Homo sapien
aaatatgtagtgtgaagaaaaatgg

SEQ ID NO: 5553244 - DNA, 25 bp, Homo sapien
gcaagggatcttgacgtgcctcttt

SEQ ID NO: 5553245 - DNA, 25 bp, Homo sapien
tatttgagatgcttctgagacaccc

SEQ ID NO: 5553246 - DNA, 25 bp, Homo sapien
gcaaatgcagagtggtaaagtttta

SEQ ID NO: 5553247 - DNA, 25 bp, Homo sapien
ggaatcttccgaagagagcagagat

SEQ ID NO: 5553248 - DNA, 25 bp, Homo sapien
aagagatgaatttagtgttttggcc

SEQ ID NO: 5553249 - DNA, 25 bp, Homo sapien
ccctgccagactggcagagtgggtg

SEQ ID NO: 5553250 - DNA, 25 bp, Homo sapien
gtgaccccacactgcgctctaccct

SEQ ID NO: 5553251 - DNA, 25 bp, Homo sapien
gggagcttggccactcctgcccctg

SEQ ID NO: 5553252 - DNA, 25 bp, Homo sapien
ttcctctcttgtggcagcagggact

SEQ ID NO: 5553253 - DNA, 25 bp, Homo sapien
gcgggccttaactgccaaaggtcac

SEQ ID NO: 5553254 - DNA, 25 bp, Homo sapien
ccccatgactgcccggctccctagc

SEQ ID NO: 5553255 - DNA, 25 bp, Homo sapien
gtggtcctaggagaagccaccatta

SEQ ID NO: 5553256 - DNA, 25 bp, Homo sapien
gggactgtagtcagagctcaggttg

SEQ ID NO: 5553257 - DNA, 25 bp, Homo sapien
catcaagatcaatgggagattgtga

SEQ ID NO: 5553258 - DNA, 25 bp, Homo sapien
gctgtcccccagtaacgccccatga

SEQ ID NO: 5553259 - DNA, 25 bp, Homo sapien
gatgggaatttccagagtcaggctg

SEQ ID NO: 5553260 - DNA, 25 bp, Homo sapien
gtcctgcagagtaaacctggtgttc

SEQ ID NO: 5553261 - DNA, 25 bp, Homo sapien
aacaagtcagtataacagccatgcc

SEQ ID NO: 5553262 - DNA, 25 bp, Homo sapien
ccatgccagatctcaggagcctcaa

SEQ ID NO: 5553263 - DNA, 25 bp, Homo sapien
ttcaaaatggaaagtgcagataaaa

SEQ ID NO: 5553264 - DNA, 25 bp, Homo sapien
gaactggtatactggcatttgtgtc

SEQ ID NO: 5553265 - DNA, 25 bp, Homo sapien
gcctcaagccagcagcactcctaca

SEQ ID NO: 5553266 - DNA, 25 bp, Homo sapien
tcttcccccgcctcacacagtctca

SEQ ID NO: 5553267 - DNA, 25 bp, Homo sapien
tcaaagcactgagacacggtaatat

SEQ ID NO: 5553268 - DNA, 25 bp, Homo sapien
ctacagtacatggtagccagaattc

SEQ ID NO: 5553269 - DNA, 25 bp, Homo sapien
gtctgttcagggtttaatgatggca

SEQ ID NO: 5553270 - DNA, 25 bp, Homo sapien
cagaaaaccaagtcaaaaaagcatt

SEQ ID NO: 5553271 - DNA, 25 bp, Homo sapien
gctgtcattgttaagaaaatgaaac

SEQ ID NO: 5553272 - DNA, 25 bp, Homo sapien
ccaggctggtaaaacctctacttta

SEQ ID NO: 5553273 - DNA, 25 bp, Homo sapien
tcaataataagaaaagtctgatttt

SEQ ID NO: 5553274 - DNA, 25 bp, Homo sapien
taggatattcccttcaaagactttc

SEQ ID NO: 5553275 - DNA, 25 bp, Homo sapien
caataccaagtactgataaagatgt

SEQ ID NO: 5553276 - DNA, 25 bp, Homo sapien
atattacaatgtagaaagaactctt

SEQ ID NO: 5553277 - DNA, 25 bp, Homo sapien
acagatacttcaccaaataagatac

SEQ ID NO: 5553278 - DNA, 25 bp, Homo sapien
ggcaagcaccaccttacttggctaa

SEQ ID NO: 5553279 - DNA, 25 bp, Homo sapien
gaccacaatgagacatgatacaact

SEQ ID NO: 5553280 - DNA, 25 bp, Homo sapien
ttcatagtagttacgaaggaaatgc

SEQ ID NO: 5553281 - DNA, 25 bp, Homo sapien
gatgttcatagtagttacgaaggaa

SEQ ID NO: 5553282 - DNA, 25 bp, Homo sapien
aagaggatctcatatttagtgtgtc

SEQ ID NO: 5553283 - DNA, 25 bp, Homo sapien
ttccaaattcaaagtgagagccttt

SEQ ID NO: 5553284 - DNA, 25 bp, Homo sapien
ttcacattttagacatccagcccac

SEQ ID NO: 5553285 - DNA, 25 bp, Homo sapien
ccactggactgctgcaatagcttcc

SEQ ID NO: 5553286 - DNA, 25 bp, Homo sapien
gttcaggcttaaaaagatggagtct

SEQ ID NO: 5553287 - DNA, 25 bp, Homo sapien
tcttgctttgaacacaacctgtatc

SEQ ID NO: 5553288 - DNA, 25 bp, Homo sapien
actctaaaattacgtcaccagctct

SEQ ID NO: 5553289 - DNA, 25 bp, Homo sapien
catagtagccagagtgatccttcca

SEQ ID NO: 5553290 - DNA, 25 bp, Homo sapien
cttgtcccacacatagtagccagag

SEQ ID NO: 5553291 - DNA, 25 bp, Homo sapien
aaccatccaaagactccagtgatat

SEQ ID NO: 5553292 - DNA, 25 bp, Homo sapien
ccactggagggctttacctacccag

SEQ ID NO: 5553293 - DNA, 25 bp, Homo sapien
tctggctatcgtgaataatgctgct

SEQ ID NO: 5553294 - DNA, 25 bp, Homo sapien
accccatcatccccggccaaaactc

SEQ ID NO: 5553295 - DNA, 25 bp, Homo sapien
tgaatctgactactctaggcacctc

SEQ ID NO: 5553296 - DNA, 25 bp, Homo sapien
actgacactgtgtacaaccatcacc

SEQ ID NO: 5553297 - DNA, 25 bp, Homo sapien
tccccggccaaaactctgcagccat

SEQ ID NO: 5553298 - DNA, 25 bp, Homo sapien
tccaactctgtgaattcgactaccc

SEQ ID NO: 5553299 - DNA, 25 bp, Homo sapien
ctaggcacctcatctaagtggaatc

SEQ ID NO: 5553300 - DNA, 25 bp, Homo sapien
tgagtagcattaagtacactgacac

SEQ ID NO: 5553301 - DNA, 25 bp, Homo sapien
ggttcattaatgatgcagcatgtgt

SEQ ID NO: 5553302 - DNA, 25 bp, Homo sapien
agtgtacagttgagtagcattaagt

SEQ ID NO: 5553303 - DNA, 25 bp, Homo sapien
catccatcttcagaatgaccccatc

SEQ ID NO: 5553304 - DNA, 25 bp, Homo sapien
tcaaccctgagacctttaacaaaag

SEQ ID NO: 5553305 - DNA, 25 bp, Homo sapien
cttttgttaaaggtctcagggttga

SEQ ID NO: 5553306 - DNA, 25 bp, Homo sapien
gttcaatagtattttgtgtggagat

SEQ ID NO: 5553307 - DNA, 25 bp, Homo sapien
gccaggtttgtccatactagtgtta

SEQ ID NO: 5553308 - DNA, 25 bp, Homo sapien
accagtgttattgagtttgacctac

SEQ ID NO: 5553309 - DNA, 25 bp, Homo sapien
gggaaagtcatgattctggtgctcc

SEQ ID NO: 5553310 - DNA, 25 bp, Homo sapien
tatagtaggagacttaaagagtatc

SEQ ID NO: 5553311 - DNA, 25 bp, Homo sapien
tgatactgtagtaaaggtcatcttt

SEQ ID NO: 5553312 - DNA, 25 bp, Homo sapien
gatggttgccagatgattatttttc

SEQ ID NO: 5553313 - DNA, 25 bp, Homo sapien
caagtattactgtgatggttgccag

SEQ ID NO: 5553314 - DNA, 25 bp, Homo sapien
gatcttgcaaatgaacaccagtgtt

SEQ ID NO: 5553315 - DNA, 25 bp, Homo sapien
gtgtggagatactttgaagctctgt

SEQ ID NO: 5553316 - DNA, 25 bp, Homo sapien
taaagagtatctgccaggtttgtcc

SEQ ID NO: 5553317 - DNA, 25 bp, Homo sapien
cagtggcgccatctccgctcactgc

SEQ ID NO: 5553318 - DNA, 25 bp, Homo sapien
atggtgagaaagaaagattatgtaa

SEQ ID NO: 5553319 - DNA, 25 bp, Homo sapien
tctccgcaagagaaggatctttttt

SEQ ID NO: 5553320 - DNA, 25 bp, Homo sapien
ctgaattatcagaatacaatggtat

SEQ ID NO: 5553321 - DNA, 25 bp, Homo sapien
ctgggttcacgttgttctcctgcct

SEQ ID NO: 5553322 - DNA, 25 bp, Homo sapien
ttcaaagcctgtaattctccgcaag

SEQ ID NO: 5553323 - DNA, 25 bp, Homo sapien
tggcatctagcactctcgtccaggc

SEQ ID NO: 5553324 - DNA, 25 bp, Homo sapien
accctaaaatttgagagtaaagata

SEQ ID NO: 5553325 - DNA, 25 bp, Homo sapien
aaaccacagttgtataggctgaatt

SEQ ID NO: 5553326 - DNA, 25 bp, Homo sapien
aagtaaaagtaacagatggtgagaa

SEQ ID NO: 5553327 - DNA, 25 bp, Homo sapien
cacccggccgacctatcagtagttt

SEQ ID NO: 5553328 - DNA, 25 bp, Homo sapien
aggttcagtgattcaacagaagcac

SEQ ID NO: 5553329 - DNA, 25 bp, Homo sapien
acagaagcactcacaaggctcagca

SEQ ID NO: 5553330 - DNA, 25 bp, Homo sapien
aattgtgacaacaggtgtgaaatgt

SEQ ID NO: 5553331 - DNA, 25 bp, Homo sapien
ctgtggaatcacacaggctgtggtt

SEQ ID NO: 5553332 - DNA, 25 bp, Homo sapien
ccagaggaaacctgacacaagattc

SEQ ID NO: 5553333 - DNA, 25 bp, Homo sapien
caaggctcagcatatagtcatactc

SEQ ID NO: 5553334 - DNA, 25 bp, Homo sapien
agtgcgattggtttaaaggccctgt

SEQ ID NO: 5553335 - DNA, 25 bp, Homo sapien
agagaaaagtactacaaagcaaatc

SEQ ID NO: 5553336 - DNA, 25 bp, Homo sapien
ttcagcaaatactcaagaggaaaac

SEQ ID NO: 5553337 - DNA, 25 bp, Homo sapien
ttccataatggaagaagtagctgca

SEQ ID NO: 5553338 - DNA, 25 bp, Homo sapien
tgtgaaatgttgtctgccagggatg

SEQ ID NO: 5553339 - DNA, 25 bp, Homo sapien
tgaccgtcggcacccctagaccccc

SEQ ID NO: 5553340 - DNA, 25 bp, Homo sapien
gggggtctaggggtgccgacggtca

SEQ ID NO: 5553341 - DNA, 25 bp, Homo sapien
gacacctggcacatgcaagtcctcc

SEQ ID NO: 5553342 - DNA, 25 bp, Homo sapien
tagatgagttaatgacacctggcac

SEQ ID NO: 5553343 - DNA, 25 bp, Homo sapien
gagttccaggaaatctatgtgccat

SEQ ID NO: 5553344 - DNA, 25 bp, Homo sapien
agattcagctggtttaggacattcc

SEQ ID NO: 5553345 - DNA, 25 bp, Homo sapien
aggaactacaaccaaacgaaggagc

SEQ ID NO: 5553346 - DNA, 25 bp, Homo sapien
tgaagttatgtggattagatgagtt

SEQ ID NO: 5553347 - DNA, 25 bp, Homo sapien
aaggtcaccagagtcagattcagct

SEQ ID NO: 5553348 - DNA, 25 bp, Homo sapien
ggaatcctgggtatggtgtttcgta

SEQ ID NO: 5553349 - DNA, 25 bp, Homo sapien
tctactgtgacgcgtaccgtgtgag

SEQ ID NO: 5553350 - DNA, 25 bp, Homo sapien
acgaaggagcccatgtggcttctgt

SEQ ID NO: 5553351 - DNA, 25 bp, Homo sapien
agtcctccacagtatcggcacgcac

SEQ ID NO: 5553352 - DNA, 25 bp, Homo sapien
ctggtatagatacacgatgttacta

SEQ ID NO: 5553353 - DNA, 25 bp, Homo sapien
actatgagcccggatcgcttgtctg

SEQ ID NO: 5553354 - DNA, 25 bp, Homo sapien
tcgcttgtctgccaagggtaagcca

SEQ ID NO: 5553355 - DNA, 25 bp, Homo sapien
ctgatcacggctgaccttcagggga

SEQ ID NO: 5553356 - DNA, 25 bp, Homo sapien
aagcctctatggccagtggcgcctt

SEQ ID NO: 5553357 - DNA, 25 bp, Homo sapien
gggtacacctttaactgatcacggc

SEQ ID NO: 5553358 - DNA, 25 bp, Homo sapien
ttgctctggatctctggtcttgttc

SEQ ID NO: 5553359 - DNA, 25 bp, Homo sapien
tgctacgggatccttgaggtattac

SEQ ID NO: 5553360 - DNA, 25 bp, Homo sapien
tgcatctggtattgctacgggatcc

SEQ ID NO: 5553361 - DNA, 25 bp, Homo sapien
agttcccactatgagcccggatcgc

SEQ ID NO: 5553362 - DNA, 25 bp, Homo sapien
ggcaggctgtgctcagttcccacta

SEQ ID NO: 5553363 - DNA, 25 bp, Homo sapien
ttggcagctgcttgttttcggtcac

SEQ ID NO: 5553364 - DNA, 25 bp, Homo sapien
ggcagctgcttgttttcggtcacta

SEQ ID NO: 5553365 - DNA, 25 bp, Homo sapien
tctttaggacaagaaagctataaaa

SEQ ID NO: 5553366 - DNA, 25 bp, Homo sapien
tggctcagctcaatagccagctgtt

SEQ ID NO: 5553367 - DNA, 25 bp, Homo sapien
aatatctgcatagggagcactctgg

SEQ ID NO: 5553368 - DNA, 25 bp, Homo sapien
caatagccagctgtttctttaggac

SEQ ID NO: 5553369 - DNA, 25 bp, Homo sapien
agcactctggctcagctcaatagcc

SEQ ID NO: 5553370 - DNA, 25 bp, Homo sapien
taatatctgcatagggagcactctg

SEQ ID NO: 5553371 - DNA, 25 bp, Homo sapien
ataaaatttggcagctgcttgtttt

SEQ ID NO: 5553372 - DNA, 25 bp, Homo sapien
taggacaagaaagctataaaatttg

SEQ ID NO: 5553373 - DNA, 25 bp, Homo sapien
tacagagcttcatcagactaaagga

SEQ ID NO: 5553374 - DNA, 25 bp, Homo sapien
cactcatgtgtcctggtggccctac

SEQ ID NO: 5553375 - DNA, 25 bp, Homo sapien
ccagcatctgcagtcaatggcaaac

SEQ ID NO: 5553376 - DNA, 25 bp, Homo sapien
aaggagcactggctcacatgctggg

SEQ ID NO: 5553377 - DNA, 25 bp, Homo sapien
gacagccagtgttagtaggtgctgc

SEQ ID NO: 5553378 - DNA, 25 bp, Homo sapien
tgggcatgcgcacttatacacacac

SEQ ID NO: 5553379 - DNA, 25 bp, Homo sapien
ccaggtaaacaatatgggcatgcgc

SEQ ID NO: 5553380 - DNA, 25 bp, Homo sapien
gtaggtcaccatgacaaggagcact

SEQ ID NO: 5553381 - DNA, 25 bp, Homo sapien
gggaaaatccagctgttgtgagaca

SEQ ID NO: 5553382 - DNA, 25 bp, Homo sapien
ggggccgacagccttgtgcattcct

SEQ ID NO: 5553383 - DNA, 25 bp, Homo sapien
caggcagcaggcttatcccttcacc

SEQ ID NO: 5553384 - DNA, 25 bp, Homo sapien
gcaggcacacatgggtcccctaaac

SEQ ID NO: 5553385 - DNA, 25 bp, Homo sapien
tacaaaaagtagagactcagagcaa

SEQ ID NO: 5553386 - DNA, 25 bp, Homo sapien
ctcagagcaaaaagtcataacacat

SEQ ID NO: 5553387 - DNA, 25 bp, Homo sapien
ggaggaagaagttactactgacaga

SEQ ID NO: 5553388 - DNA, 25 bp, Homo sapien
caaagcttaactagagaagtgctac

SEQ ID NO: 5553389 - DNA, 25 bp, Homo sapien
gctcagaggcaataagcatggaaat

SEQ ID NO: 5553390 - DNA, 25 bp, Homo sapien
actagagaagtgctacaaacaaggg

SEQ ID NO: 5553391 - DNA, 25 bp, Homo sapien
atcatgaaggaaatttggatagata

SEQ ID NO: 5553392 - DNA, 25 bp, Homo sapien
ccaaaagcctgcccttgctaggttc

SEQ ID NO: 5553393 - DNA, 25 bp, Homo sapien
gatgtgcttccaaagggaaggacac

SEQ ID NO: 5553394 - DNA, 25 bp, Homo sapien
taggtcttagacatcaggtaggatt

SEQ ID NO: 5553395 - DNA, 25 bp, Homo sapien
aaggacacatgaaccagcagacatg

SEQ ID NO: 5553396 - DNA, 25 bp, Homo sapien
caaccaattacggggatggaaaatg

SEQ ID NO: 5553397 - DNA, 25 bp, Homo sapien
gctttggcatctggtatctggaggc

SEQ ID NO: 5553398 - DNA, 25 bp, Homo sapien
ctacttataagagcagagaatggca

SEQ ID NO: 5553399 - DNA, 25 bp, Homo sapien
ttactgtcagtatagaaaagggcca

SEQ ID NO: 5553400 - DNA, 25 bp, Homo sapien
cctagcctggtattgtccgggagta

SEQ ID NO: 5553401 - DNA, 25 bp, Homo sapien
ggaggcaaagatacacgcctagcct

SEQ ID NO: 5553402 - DNA, 25 bp, Homo sapien
aaccccagtatcatgtggaacactt

SEQ ID NO: 5553403 - DNA, 25 bp, Homo sapien
agagcagagaatggcagttcatttt

SEQ ID NO: 5553404 - DNA, 25 bp, Homo sapien
cattaggccaggattctcagttttc

SEQ ID NO: 5553405 - DNA, 25 bp, Homo sapien
tgtccgggagtatagagtaacttta

SEQ ID NO: 5553406 - DNA, 25 bp, Homo sapien
atggctacaattttgaggaaagatt

SEQ ID NO: 5553407 - DNA, 25 bp, Homo sapien
ttctggggtagaaatgctccattat

SEQ ID NO: 5553408 - DNA, 25 bp, Homo sapien
agataatgatttggtgaggaaactt

SEQ ID NO: 5553409 - DNA, 25 bp, Homo sapien
aggcagagcacagatttctggggta

SEQ ID NO: 5553410 - DNA, 25 bp, Homo sapien
agtgggagcaaccaagatgttattc

SEQ ID NO: 5553411 - DNA, 25 bp, Homo sapien
caaactcatgaaagtgcaagagcaa

SEQ ID NO: 5553412 - DNA, 25 bp, Homo sapien
ggcaactgtaaccaaagtgggagca

SEQ ID NO: 5553413 - DNA, 25 bp, Homo sapien
aaatcagtgattgacaggagttggg

SEQ ID NO: 5553414 - DNA, 25 bp, Homo sapien
ggacactgataatatggaaggctac

SEQ ID NO: 5553415 - DNA, 25 bp, Homo sapien
ggggatgaataataataggcagagc

SEQ ID NO: 5553416 - DNA, 25 bp, Homo sapien
gataatgatgtgccaaggtaggttc

SEQ ID NO: 5553417 - DNA, 25 bp, Homo sapien
tccacactctggtatggtgggggac

SEQ ID NO: 5553418 - DNA, 25 bp, Homo sapien
gttgctgtgtctgctgttgcacttg

SEQ ID NO: 5553419 - DNA, 25 bp, Homo sapien
atataactgcctacccctaaaagcc

SEQ ID NO: 5553420 - DNA, 25 bp, Homo sapien
tgggccacttgttgctgtgtctgct

SEQ ID NO: 5553421 - DNA, 25 bp, Homo sapien
acttgatataactgcctacccctaa

SEQ ID NO: 5553422 - DNA, 25 bp, Homo sapien
tgctgttgcacttgatataactgcc

SEQ ID NO: 5553423 - DNA, 25 bp, Homo sapien
gctgtgtctgctgttgcacttgata

SEQ ID NO: 5553424 - DNA, 25 bp, Homo sapien
gatataactgcctacccctaaaagc

SEQ ID NO: 5553425 - DNA, 25 bp, Homo sapien
gcacttgatataactgcctacccct

SEQ ID NO: 5553426 - DNA, 25 bp, Homo sapien
cttgttgctgtgtctgctgttgcac

SEQ ID NO: 5553427 - DNA, 25 bp, Homo sapien
ggctgggccacttgttgctgtgtct

SEQ ID NO: 5553428 - DNA, 25 bp, Homo sapien
ttgatataactgcctacccctaaaa

SEQ ID NO: 5553429 - DNA, 25 bp, Homo sapien
ttccatacagtgggcagtctgcaca

SEQ ID NO: 5553430 - DNA, 25 bp, Homo sapien
ttctcttggtctttaggaggggctg

SEQ ID NO: 5553431 - DNA, 25 bp, Homo sapien
tactgttatgaccaaaaggcatgtg

SEQ ID NO: 5553432 - DNA, 25 bp, Homo sapien
attaatggacaaggatctgaactgc

SEQ ID NO: 5553433 - DNA, 25 bp, Homo sapien
gagaaatacaaaagcaagccagcat

SEQ ID NO: 5553434 - DNA, 25 bp, Homo sapien
ggaatatagtatacagatgctgctc

SEQ ID NO: 5553435 - DNA, 25 bp, Homo sapien
gcatggagtgattggatagaactct

SEQ ID NO: 5553436 - DNA, 25 bp, Homo sapien
agccatctagcaaaaagccagaatt

SEQ ID NO: 5553437 - DNA, 25 bp, Homo sapien
ctttatgcttgaggcaggcatggag

SEQ ID NO: 5553438 - DNA, 25 bp, Homo sapien
ttcatggtggttaaaactaaggatg

SEQ ID NO: 5553439 - DNA, 25 bp, Homo sapien
gtgatactgggtggcttctattcca

SEQ ID NO: 5553440 - DNA, 25 bp, Homo sapien
cccgattctcatggaacaaagagct

SEQ ID NO: 5553441 - DNA, 25 bp, Homo sapien
cacccgtgatgaagtatgaaaagag

SEQ ID NO: 5553442 - DNA, 25 bp, Homo sapien
cttggtccagaatgaaaagtgggac

SEQ ID NO: 5553443 - DNA, 25 bp, Homo sapien
cagaagagtaagccttctggacgaa

SEQ ID NO: 5553444 - DNA, 25 bp, Homo sapien
gaacaaagagctgataaaccagagt

SEQ ID NO: 5553445 - DNA, 25 bp, Homo sapien
tggacgatgaaagatggccttcata

SEQ ID NO: 5553446 - DNA, 25 bp, Homo sapien
atgtaggaacagcaattcaagtgat

SEQ ID NO: 5553447 - DNA, 25 bp, Homo sapien
cataaaatgcaaagtgaacacgttt

SEQ ID NO: 5553448 - DNA, 25 bp, Homo sapien
tgcagcgtgttaagtgtttatcctc

SEQ ID NO: 5553449 - DNA, 25 bp, Homo sapien
tacaaacaaagtggtgctaaaggtg

SEQ ID NO: 5553450 - DNA, 25 bp, Homo sapien
tctggacgaaggaatttacacctgc

SEQ ID NO: 5553451 - DNA, 25 bp, Homo sapien
gtggaaggaagacagtatgtttaat

SEQ ID NO: 5553452 - DNA, 25 bp, Homo sapien
gtgaggggattcaatgtcataggaa

SEQ ID NO: 5553453 - DNA, 25 bp, Homo sapien
aaaaactatgtatggatagggccac

SEQ ID NO: 5553454 - DNA, 25 bp, Homo sapien
gagaggctatgggaagatttccatt

SEQ ID NO: 5553455 - DNA, 25 bp, Homo sapien
gatagggccacgactagcttataca

SEQ ID NO: 5553456 - DNA, 25 bp, Homo sapien
cattcagattatagtgaggggattc

SEQ ID NO: 5553457 - DNA, 25 bp, Homo sapien
ataggacctagagtaccccagaaat

SEQ ID NO: 5553458 - DNA, 25 bp, Homo sapien
tcccaaagatggaagggattgcttt

SEQ ID NO: 5553459 - DNA, 25 bp, Homo sapien
ggagagcatgtgccctgcctaaagt

SEQ ID NO: 5553460 - DNA, 25 bp, Homo sapien
ttaagagtgtaagatcatagggagt

SEQ ID NO: 5553461 - DNA, 25 bp, Homo sapien
caaataagtaagagagtgcgcttta

SEQ ID NO: 5553462 - DNA, 25 bp, Homo sapien
aaaggatatgaacagacacgtctca

SEQ ID NO: 5553463 - DNA, 25 bp, Homo sapien
ctacagaatgggagaaaatttttgc

SEQ ID NO: 5553464 - DNA, 25 bp, Homo sapien
ggaagattaaatagaactactggta

SEQ ID NO: 5553465 - DNA, 25 bp, Homo sapien
taagaatattagcaatggcaacaaa

SEQ ID NO: 5553466 - DNA, 25 bp, Homo sapien
ctgcacagcaaaagaaactaccatc

SEQ ID NO: 5553467 - DNA, 25 bp, Homo sapien
tcagagtgaacaggcaacctacaga

SEQ ID NO: 5553468 - DNA, 25 bp, Homo sapien
accccatcgaaaagtgggcaaagga

SEQ ID NO: 5553469 - DNA, 25 bp, Homo sapien
tgcagccaacagacacatgaaaaaa

SEQ ID NO: 5553470 - DNA, 25 bp, Homo sapien
actggccatcagagaaatgcaaatc

SEQ ID NO: 5553471 - DNA, 25 bp, Homo sapien
tggtatcctggagtattaaacacat

SEQ ID NO: 5553472 - DNA, 25 bp, Homo sapien
aagccaaaatagacaaatgggatct

SEQ ID NO: 5553473 - DNA, 25 bp, Homo sapien
attgctgcaccaactgcaaggggta

SEQ ID NO: 5553474 - DNA, 25 bp, Homo sapien
gattaaaatcagccaagggaggaag

SEQ ID NO: 5553475 - DNA, 25 bp, Homo sapien
caaggggtaccctagaccaccctca

SEQ ID NO: 5553476 - DNA, 25 bp, Homo sapien
aacacaggaaagacttgcctccatg

SEQ ID NO: 5553477 - DNA, 25 bp, Homo sapien
aagggagcaccatccacataagacc

SEQ ID NO: 5553478 - DNA, 25 bp, Homo sapien
aggacgcagaactcatcaaaagctc

SEQ ID NO: 5553479 - DNA, 25 bp, Homo sapien
ggaaggtaccagacatggagcttcc

SEQ ID NO: 5553480 - DNA, 25 bp, Homo sapien
ccacctgtcaagttaaagggagcac

SEQ ID NO: 5553481 - DNA, 25 bp, Homo sapien
ttcaattatcttcgactgggtccct

SEQ ID NO: 5553482 - DNA, 25 bp, Homo sapien
cactatcgtgagaacaacacaggaa

SEQ ID NO: 5553483 - DNA, 25 bp, Homo sapien
gatcattcactggaaggacgcagaa

SEQ ID NO: 5553484 - DNA, 25 bp, Homo sapien
gggcctgcagcatggcctgcagtct

SEQ ID NO: 5553485 - DNA, 25 bp, Homo sapien
caccagctccacccgctgctcctcc

SEQ ID NO: 5553486 - DNA, 25 bp, Homo sapien
ggcctcatcccagtgggcctgcagc

SEQ ID NO: 5553487 - DNA, 25 bp, Homo sapien
gtcccttgcttcccggctctgctgc

SEQ ID NO: 5553488 - DNA, 25 bp, Homo sapien
ggcctgcagtctttccaccagctcc

SEQ ID NO: 5553489 - DNA, 25 bp, Homo sapien
cgctccaggtagctcgtcccttgct

SEQ ID NO: 5553490 - DNA, 25 bp, Homo sapien
agcagctggttggcctcatcccagt

SEQ ID NO: 5553491 - DNA, 25 bp, Homo sapien
ccttctcgggctcctgaggcccggg

SEQ ID NO: 5553492 - DNA, 25 bp, Homo sapien
ctccagctgctggttcccactctgc

SEQ ID NO: 5553493 - DNA, 25 bp, Homo sapien
actctgcagttcgcacactcgcgct

SEQ ID NO: 5553494 - DNA, 25 bp, Homo sapien
tgctgcaatacaggcttcaggccac

SEQ ID NO: 5553495 - DNA, 25 bp, Homo sapien
ggagaacaccaaagcctgcaatcag

SEQ ID NO: 5553496 - DNA, 25 bp, Homo sapien
gctcaattgaggtgacgctaagaat

SEQ ID NO: 5553497 - DNA, 25 bp, Homo sapien
atggcgaaattcaaggtgtagataa

SEQ ID NO: 5553498 - DNA, 25 bp, Homo sapien
gtcccatggtcttgcaaggagcttt

SEQ ID NO: 5553499 - DNA, 25 bp, Homo sapien
agtgagcagcaagcatttgaacagt

SEQ ID NO: 5553500 - DNA, 25 bp, Homo sapien
attaagcccagaacgcccagctcaa

SEQ ID NO: 5553501 - DNA, 25 bp, Homo sapien
gtcaggttcgaaggcacaaatagaa

SEQ ID NO: 5553502 - DNA, 25 bp, Homo sapien
acaggcactgtgacagacaagctgt

SEQ ID NO: 5553503 - DNA, 25 bp, Homo sapien
gtagataaggcacaagatagaaatg

SEQ ID NO: 5553504 - DNA, 25 bp, Homo sapien
ttcgggtgtgctcagttgctaatac

SEQ ID NO: 5553505 - DNA, 25 bp, Homo sapien
gtcaggattaacaccaggagaacac

SEQ ID NO: 5553506 - DNA, 25 bp, Homo sapien
atttatcctaaggatgcagggttgg

SEQ ID NO: 5553507 - DNA, 25 bp, Homo sapien
aaaatcaggattaggaagcattgag

SEQ ID NO: 5553508 - DNA, 25 bp, Homo sapien
agggacaaaaatggaagttacttca

SEQ ID NO: 5553509 - DNA, 25 bp, Homo sapien
tccggagtagcctacaaggtcactg

SEQ ID NO: 5553510 - DNA, 25 bp, Homo sapien
tagaagacagatgaaaatgtgactc

SEQ ID NO: 5553511 - DNA, 25 bp, Homo sapien
gacaaaaaccatgagaaaagccaga

SEQ ID NO: 5553512 - DNA, 25 bp, Homo sapien
gaataatcatgaggacttaggatac

SEQ ID NO: 5553513 - DNA, 25 bp, Homo sapien
gatgccttgagaggatgagatattc

SEQ ID NO: 5553514 - DNA, 25 bp, Homo sapien
atattcaagttctaaagccccccac

SEQ ID NO: 5553515 - DNA, 25 bp, Homo sapien
aggaaaggaagattatcagacacaa

SEQ ID NO: 5553516 - DNA, 25 bp, Homo sapien
agatgaaaatgtgactccggagtag

SEQ ID NO: 5553517 - DNA, 25 bp, Homo sapien
aaagttcatatcgattatgtaaacc

SEQ ID NO: 5553518 - DNA, 25 bp, Homo sapien
ggtttacataatcgatatgaacttt

SEQ ID NO: 5553519 - DNA, 25 bp, Homo sapien
ttcaaagtgttcaaatgttgccctc

SEQ ID NO: 5553520 - DNA, 25 bp, Homo sapien
aactagagtatgccaactttctgtc

SEQ ID NO: 5553521 - DNA, 25 bp, Homo sapien
caagcaaagtagacatcaaaaaaac

SEQ ID NO: 5553522 - DNA, 25 bp, Homo sapien
aggtggatggcataacccttgttgc

SEQ ID NO: 5553523 - DNA, 25 bp, Homo sapien
gaactttagagagagtccaaatgtt

SEQ ID NO: 5553524 - DNA, 25 bp, Homo sapien
gaaaaactatgcttggaatgaactt

SEQ ID NO: 5553525 - DNA, 25 bp, Homo sapien
tgggttataactatgcaattgctac

SEQ ID NO: 5553526 - DNA, 25 bp, Homo sapien
tcatgacaacaatgccaaaagaaaa

SEQ ID NO: 5553527 - DNA, 25 bp, Homo sapien
ctcagttttgtaaggtggatggcat

SEQ ID NO: 5553528 - DNA, 25 bp, Homo sapien
catgtcaatatataaagagaagctc

SEQ ID NO: 5553529 - DNA, 25 bp, Homo sapien
agttcagttgaaataaatgggttat

SEQ ID NO: 5553530 - DNA, 25 bp, Homo sapien
ttgtccccagagaactgctgaatac

SEQ ID NO: 5553531 - DNA, 25 bp, Homo sapien
aaaactggagctctgcacaatattt

SEQ ID NO: 5553532 - DNA, 25 bp, Homo sapien
agctggtggcttaaaatggagccgt

SEQ ID NO: 5553533 - DNA, 25 bp, Homo sapien
gcacagcaaatggagccattgggag

SEQ ID NO: 5553534 - DNA, 25 bp, Homo sapien
attttaggtggactgatctgtaatt

SEQ ID NO: 5553535 - DNA, 25 bp, Homo sapien
aagatctgtgtaggagccatgcttt

SEQ ID NO: 5553536 - DNA, 25 bp, Homo sapien
tgttagaataatgaccttagcagtc

SEQ ID NO: 5553537 - DNA, 25 bp, Homo sapien
tggagccgtttacaaccccgcacag

SEQ ID NO: 5553538 - DNA, 25 bp, Homo sapien
ctgcagacgacaaagtattcaccca

SEQ ID NO: 5553539 - DNA, 25 bp, Homo sapien
tagcagtcaaaggctcctggaattt

SEQ ID NO: 5553540 - DNA, 25 bp, Homo sapien
gtgctagggcttccttcagcctccc

SEQ ID NO: 5553541 - DNA, 25 bp, Homo sapien
agcgcctcctgttctttgcagttcc

SEQ ID NO: 5553542 - DNA, 25 bp, Homo sapien
ggcctgaagcctgtattgcagcaga

SEQ ID NO: 5553543 - DNA, 25 bp, Homo sapien
agcctcctgttgggcccctcttttc

SEQ ID NO: 5553544 - DNA, 25 bp, Homo sapien
ctcctcctgatggaccctccagccc

SEQ ID NO: 5553545 - DNA, 25 bp, Homo sapien
ccctcaagctcctcctgatggaccc

SEQ ID NO: 5553546 - DNA, 25 bp, Homo sapien
cagctgctcagcaccactctcccgc

SEQ ID NO: 5553547 - DNA, 25 bp, Homo sapien
tgcagttcctcctcagatcttagcc

SEQ ID NO: 5553548 - DNA, 25 bp, Homo sapien
cactctcccgccgcccaaccctcaa

SEQ ID NO: 5553549 - DNA, 25 bp, Homo sapien
agatcttagcctcctgttgggcccc

SEQ ID NO: 5553550 - DNA, 25 bp, Homo sapien
gccgtggcctgaagcctgtattgca

SEQ ID NO: 5553551 - DNA, 25 bp, Homo sapien
cgagctacctggagcgcctcctgtt

SEQ ID NO: 5553552 - DNA, 25 bp, Homo sapien
aagggtagacttgtgatggttaatt

SEQ ID NO: 5553553 - DNA, 25 bp, Homo sapien
tgtcaacttgaataggccacagggt

SEQ ID NO: 5553554 - DNA, 25 bp, Homo sapien
atttgaactgggggactcagtaaag

SEQ ID NO: 5553555 - DNA, 25 bp, Homo sapien
cgtgttagatggaattatgaccttg

SEQ ID NO: 5553556 - DNA, 25 bp, Homo sapien
gccacagggtgccagatatctgttt

SEQ ID NO: 5553557 - DNA, 25 bp, Homo sapien
gagtgtgtttacagacgagatttgc

SEQ ID NO: 5553558 - DNA, 25 bp, Homo sapien
agtaaaggagatagccatccccaag

SEQ ID NO: 5553559 - DNA, 25 bp, Homo sapien
atccagtttgttgagggcgtaaata

SEQ ID NO: 5553560 - DNA, 25 bp, Homo sapien
tgacagatcatgggacctcttagcc

SEQ ID NO: 5553561 - DNA, 25 bp, Homo sapien
ttaaagagatgtttatgggtgccaa

SEQ ID NO: 5553562 - DNA, 25 bp, Homo sapien
aggtgggtggacatcatccagtttg

SEQ ID NO: 5553563 - DNA, 25 bp, Homo sapien
acgacgtcaaggtgcctgcctgtcg

SEQ ID NO: 5553564 - DNA, 25 bp, Homo sapien
cgacaggcaggcaccttgacgtcgt

SEQ ID NO: 5553565 - DNA, 25 bp, Homo sapien
aaaacacaaaaatgaggaagataat

SEQ ID NO: 5553566 - DNA, 25 bp, Homo sapien
gcagacattagagttgaacaaaaac

SEQ ID NO: 5553567 - DNA, 25 bp, Homo sapien
agtgctttgcagacattagagttga

SEQ ID NO: 5553568 - DNA, 25 bp, Homo sapien
atgaggaagataatattctgttctc

SEQ ID NO: 5553569 - DNA, 25 bp, Homo sapien
aaatgaggaagataatattctgttc

SEQ ID NO: 5553570 - DNA, 25 bp, Homo sapien
caaaaacacaaaaatgaggaagata

SEQ ID NO: 5553571 - DNA, 25 bp, Homo sapien
cattagagttgaacaaaaacacaaa

SEQ ID NO: 5553572 - DNA, 25 bp, Homo sapien
gctttgcagacattagagttgaaca

SEQ ID NO: 5553573 - DNA, 25 bp, Homo sapien
cacaaaaatgaggaagataatattc

SEQ ID NO: 5553574 - DNA, 25 bp, Homo sapien
caaaaatgaggaagataatattctg

SEQ ID NO: 5553575 - DNA, 25 bp, Homo sapien
acatacgcaagtgctttgcagacat

SEQ ID NO: 5553576 - DNA, 25 bp, Homo sapien
agcttagtgatgtgtgtcagacctc

SEQ ID NO: 5553577 - DNA, 25 bp, Homo sapien
cctgaagcaagtgaagaatcacaaa

SEQ ID NO: 5553578 - DNA, 25 bp, Homo sapien
aggaatgaaggccaaacaattaaaa

SEQ ID NO: 5553579 - DNA, 25 bp, Homo sapien
tcgtgccgtatgtacgaagctagca

SEQ ID NO: 5553580 - DNA, 25 bp, Homo sapien
gaggcgaatccatagagtaagctta

SEQ ID NO: 5553581 - DNA, 25 bp, Homo sapien
gcaccagtactgattgcagggagca

SEQ ID NO: 5553582 - DNA, 25 bp, Homo sapien
gagatgcagaggatactcagtcaac

SEQ ID NO: 5553583 - DNA, 25 bp, Homo sapien
tacgaagctagcaaatatgtacagc

SEQ ID NO: 5553584 - DNA, 25 bp, Homo sapien
ctgagcgattaacctgtgaacttcc

SEQ ID NO: 5553585 - DNA, 25 bp, Homo sapien
caggatgtgatgtcaccgagatgca

SEQ ID NO: 5553586 - DNA, 25 bp, Homo sapien
caaacaattaaaagcggagcgtgga

SEQ ID NO: 5553587 - DNA, 25 bp, Homo sapien
gccttacatgtgcttggacgggaat

SEQ ID NO: 5553588 - DNA, 25 bp, Homo sapien
gaatgccaggctgaaagctaacttc

SEQ ID NO: 5553589 - DNA, 25 bp, Homo sapien
gacgagagctctgtgcaccacttct

SEQ ID NO: 5553590 - DNA, 25 bp, Homo sapien
gagaaagcgctggaaaaccaattac

SEQ ID NO: 5553591 - DNA, 25 bp, Homo sapien
gcaaattaaggacagcagcgctttt

SEQ ID NO: 5553592 - DNA, 25 bp, Homo sapien
ttcaaagccctccagagagaggcga

SEQ ID NO: 5553593 - DNA, 25 bp, Homo sapien
tctgaaaagattactggcacaatga

SEQ ID NO: 5553594 - DNA, 25 bp, Homo sapien
gcgactgggatgtgctcctctttga

SEQ ID NO: 5553595 - DNA, 25 bp, Homo sapien
gtggtggaaactggactcctttatg

SEQ ID NO: 5553596 - DNA, 25 bp, Homo sapien
ctgttgactgatcagagaggcattc

SEQ ID NO: 5553597 - DNA, 25 bp, Homo sapien
ataagtgctcattcaagggtcctgt

SEQ ID NO: 5553598 - DNA, 25 bp, Homo sapien
tgcgtatgtaatgatgctcagtgtc

SEQ ID NO: 5553599 - DNA, 25 bp, Homo sapien
cacttgcgtatgtaatgatgctcag

SEQ ID NO: 5553600 - DNA, 25 bp, Homo sapien
tgctcagtgtcataggagcaggcag

SEQ ID NO: 5553601 - DNA, 25 bp, Homo sapien
tgttcaactctaatgtctgcaaagc

SEQ ID NO: 5553602 - DNA, 25 bp, Homo sapien
tcaactctaatgtctgcaaagcact

SEQ ID NO: 5553603 - DNA, 25 bp, Homo sapien
cttgcgtatgtaatgatgctcagtg

SEQ ID NO: 5553604 - DNA, 25 bp, Homo sapien
gatgctcagtgtcataggagcaggc

SEQ ID NO: 5553605 - DNA, 25 bp, Homo sapien
gcaaagcacttgcgtatgtaatgat

SEQ ID NO: 5553606 - DNA, 25 bp, Homo sapien
aaagcacttgcgtatgtaatgatgc

SEQ ID NO: 5553607 - DNA, 25 bp, Homo sapien
agcacttgcgtatgtaatgatgctc

SEQ ID NO: 5553608 - DNA, 25 bp, Homo sapien
gtctgcaaagcacttgcgtatgtaa

SEQ ID NO: 5553609 - DNA, 25 bp, Homo sapien
gcggcatggacatatgccccaggct

SEQ ID NO: 5553610 - DNA, 25 bp, Homo sapien
tgtgtaggtcctcccgccccattct

SEQ ID NO: 5553611 - DNA, 25 bp, Homo sapien
tggaccttttggcatggcccagact

SEQ ID NO: 5553612 - DNA, 25 bp, Homo sapien
actacgtgactcgctactgccaggg

SEQ ID NO: 5553613 - DNA, 25 bp, Homo sapien
tcctgggcatgaaccctggaccttt

SEQ ID NO: 5553614 - DNA, 25 bp, Homo sapien
acaatcccgtggagtatgcatggta

SEQ ID NO: 5553615 - DNA, 25 bp, Homo sapien
gaggagcttcggctcaatgctgagc

SEQ ID NO: 5553616 - DNA, 25 bp, Homo sapien
catatactggctcctgtggtccggg

SEQ ID NO: 5553617 - DNA, 25 bp, Homo sapien
atggctgtagacatgtgtaggtcct

SEQ ID NO: 5553618 - DNA, 25 bp, Homo sapien
gccagctgcagttttcggagcctgt

SEQ ID NO: 5553619 - DNA, 25 bp, Homo sapien
gtatgcatggtagccacatcgcaac

SEQ ID NO: 5553620 - DNA, 25 bp, Homo sapien
ctctaggtcttaagtctgctgctct

SEQ ID NO: 5553621 - DNA, 25 bp, Homo sapien
tgggtcgagtggtaagattcaccct

SEQ ID NO: 5553622 - DNA, 25 bp, Homo sapien
gaagagagaattctgcctctagatt

SEQ ID NO: 5553623 - DNA, 25 bp, Homo sapien
ttcatcagcaacaccacaccctcct

SEQ ID NO: 5553624 - DNA, 25 bp, Homo sapien
attacctgctgaagacaagagggat

SEQ ID NO: 5553625 - DNA, 25 bp, Homo sapien
aaattgacatcggccagtctgaatt

SEQ ID NO: 5553626 - DNA, 25 bp, Homo sapien
acaatttgaactggaacatcagctg

SEQ ID NO: 5553627 - DNA, 25 bp, Homo sapien
tcagatttgcagtctggggaagaca

SEQ ID NO: 5553628 - DNA, 25 bp, Homo sapien
tagtattgacgtaaggtgacgagga

SEQ ID NO: 5553629 - DNA, 25 bp, Homo sapien
ttagaacctgagatatggtggtgga

SEQ ID NO: 5553630 - DNA, 25 bp, Homo sapien
tggacatgccaatctccacagtcac

SEQ ID NO: 5553631 - DNA, 25 bp, Homo sapien
cagcaacagcctcagcagtctcctt

SEQ ID NO: 5553632 - DNA, 25 bp, Homo sapien
ctcagcagtctcctttgccgtcgac

SEQ ID NO: 5553633 - DNA, 25 bp, Homo sapien
agcctcagcagtctcctttgccgtc

SEQ ID NO: 5553634 - DNA, 25 bp, Homo sapien
tcatcagcaacagcctcagcagtct

SEQ ID NO: 5553635 - DNA, 25 bp, Homo sapien
tcagcaacagcctcagcagtctcct

SEQ ID NO: 5553636 - DNA, 25 bp, Homo sapien
cagcagtctcctttgccgtcgacgc

SEQ ID NO: 5553637 - DNA, 25 bp, Homo sapien
catcagcaacagcctcagcagtctc

SEQ ID NO: 5553638 - DNA, 25 bp, Homo sapien
agcagtctcctttgccgtcgacgcg

SEQ ID NO: 5553639 - DNA, 25 bp, Homo sapien
tcagcagtctcctttgccgtcgacg

SEQ ID NO: 5553640 - DNA, 25 bp, Homo sapien
agcaacagcctcagcagtctccttt

SEQ ID NO: 5553641 - DNA, 25 bp, Homo sapien
caacagcctcagcagtctcctttgc

SEQ ID NO: 5553642 - DNA, 25 bp, Homo sapien
tagccctgcccagctgcagcaggag

SEQ ID NO: 5553643 - DNA, 25 bp, Homo sapien
cccgctcttgaaagtattgactact

SEQ ID NO: 5553644 - DNA, 25 bp, Homo sapien
ggaggccccgctcttgaaagtattg

SEQ ID NO: 5553645 - DNA, 25 bp, Homo sapien
tctctcttgctgaactcctgtgtcc

SEQ ID NO: 5553646 - DNA, 25 bp, Homo sapien
gctagagagattggctacatcctgg

SEQ ID NO: 5553647 - DNA, 25 bp, Homo sapien
tcctgtgtccagggttctctagccc

SEQ ID NO: 5553648 - DNA, 25 bp, Homo sapien
gtctccgcagggccccctgaaagga

SEQ ID NO: 5553649 - DNA, 25 bp, Homo sapien
gtgtccagggttctctagccctgcc

SEQ ID NO: 5553650 - DNA, 25 bp, Homo sapien
ctacatcctggctctggctggtgac

SEQ ID NO: 5553651 - DNA, 25 bp, Homo sapien
actgtctccgcagggccccctgaaa

SEQ ID NO: 5553652 - DNA, 25 bp, Homo sapien
tgctgaactcctgtgtccagggttc

SEQ ID NO: 5553653 - DNA, 25 bp, Homo sapien
tttcccaagccaggagatactaatc

SEQ ID NO: 5553654 - DNA, 25 bp, Homo sapien
ttgatattattcgcctgctgtgatc

SEQ ID NO: 5553655 - DNA, 25 bp, Homo sapien
tcccaagccaggagatactaatcta

SEQ ID NO: 5553656 - DNA, 25 bp, Homo sapien
caagccaggagatactaatctatgc

SEQ ID NO: 5553657 - DNA, 25 bp, Homo sapien
ttttttcccaagccaggagatacta

SEQ ID NO: 5553658 - DNA, 25 bp, Homo sapien
attattcgcctgctgtgatcgtggt

SEQ ID NO: 5553659 - DNA, 25 bp, Homo sapien
agccaggagatactaatctatgcat

SEQ ID NO: 5553660 - DNA, 25 bp, Homo sapien
atgcatattgatattattcgcctgc

SEQ ID NO: 5553661 - DNA, 25 bp, Homo sapien
tattcgcctgctgtgatcgtggtga

SEQ ID NO: 5553662 - DNA, 25 bp, Homo sapien
attcgcctgctgtgatcgtggtgat

SEQ ID NO: 5553663 - DNA, 25 bp, Homo sapien
ttttcccaagccaggagatactaat

SEQ ID NO: 5553664 - DNA, 25 bp, Homo sapien
cctaggaacatgtagggttcaaggg

SEQ ID NO: 5553665 - DNA, 25 bp, Homo sapien
caccttcaggccaaagccagctggg

SEQ ID NO: 5553666 - DNA, 25 bp, Homo sapien
gatgtcgtcaggctctcagcacacc

SEQ ID NO: 5553667 - DNA, 25 bp, Homo sapien
agagacacgcacatgcacgtaagca

SEQ ID NO: 5553668 - DNA, 25 bp, Homo sapien
tgtgtgagcagttcagcctgcagca

SEQ ID NO: 5553669 - DNA, 25 bp, Homo sapien
acacccacatggcgtgctgtctgtc

SEQ ID NO: 5553670 - DNA, 25 bp, Homo sapien
tcgtgatgttcctgagcgtcctcgt

SEQ ID NO: 5553671 - DNA, 25 bp, Homo sapien
gcgtgcaactggcagccagaacctc

SEQ ID NO: 5553672 - DNA, 25 bp, Homo sapien
agaagctcaagctgatggatgagcc

SEQ ID NO: 5553673 - DNA, 25 bp, Homo sapien
ggacatcagcgaccagatcaagaaa

SEQ ID NO: 5553674 - DNA, 25 bp, Homo sapien
gcgtcctcgtggactggatgattcc

SEQ ID NO: 5553675 - DNA, 25 bp, Homo sapien
ttgatgacccaaggatggcaatatt

SEQ ID NO: 5553676 - DNA, 25 bp, Homo sapien
taggaatgtctgctagctccctttc

SEQ ID NO: 5553677 - DNA, 25 bp, Homo sapien
ggcaatattatcagctaggaatgtc

SEQ ID NO: 5553678 - DNA, 25 bp, Homo sapien
acaaaatttgagcttcgaggtaggc

SEQ ID NO: 5553679 - DNA, 25 bp, Homo sapien
gcctggatgaggctctttcaacaac

SEQ ID NO: 5553680 - DNA, 25 bp, Homo sapien
cagtcctggaatcgtaattgaagcc

SEQ ID NO: 5553681 - DNA, 25 bp, Homo sapien
tgtgctaaacagggttaggatgcta

SEQ ID NO: 5553682 - DNA, 25 bp, Homo sapien
cattatgtggtaggacatggtagtg

SEQ ID NO: 5553683 - DNA, 25 bp, Homo sapien
gaaattaacagaaacaaacagtgcc

SEQ ID NO: 5553684 - DNA, 25 bp, Homo sapien
gtagtggataagacagatgcatctt

SEQ ID NO: 5553685 - DNA, 25 bp, Homo sapien
ttacgcctcaactagtgccagacac

SEQ ID NO: 5553686 - DNA, 25 bp, Homo sapien
acagtagcaatgatggtacctgact

SEQ ID NO: 5553687 - DNA, 25 bp, Homo sapien
cctgtgggtttgtcactgctcgacc

SEQ ID NO: 5553688 - DNA, 25 bp, Homo sapien
acatcactacgactacggctgagag

SEQ ID NO: 5553689 - DNA, 25 bp, Homo sapien
tcgactgccctgatgggttggatta

SEQ ID NO: 5553690 - DNA, 25 bp, Homo sapien
caatgaaccctgggtatgctgggcg

SEQ ID NO: 5553691 - DNA, 25 bp, Homo sapien
aaagaggtattaatgcaggtgctga

SEQ ID NO: 5553692 - DNA, 25 bp, Homo sapien
ttggaagtactctctgtggttgctc

SEQ ID NO: 5553693 - DNA, 25 bp, Homo sapien
gactgttatcttgtggagcctgggc

SEQ ID NO: 5553694 - DNA, 25 bp, Homo sapien
tgagggaactgaactaaaacttgac

SEQ ID NO: 5553695 - DNA, 25 bp, Homo sapien
gggcgatcagaactgccagataacc

SEQ ID NO: 5553696 - DNA, 25 bp, Homo sapien
atcgcttgtgttcagagcagctgtc

SEQ ID NO: 5553697 - DNA, 25 bp, Homo sapien
gattttgtcagggagaaaaagtatc

SEQ ID NO: 5553698 - DNA, 25 bp, Homo sapien
ggcatcctggatcgacacagctgat

SEQ ID NO: 5553699 - DNA, 25 bp, Homo sapien
actagcatggtccaactgcagggtg

SEQ ID NO: 5553700 - DNA, 25 bp, Homo sapien
gaactggttccagccaaaccgcacc

SEQ ID NO: 5553701 - DNA, 25 bp, Homo sapien
aaccgcaccaacctgtggcagggaa

SEQ ID NO: 5553702 - DNA, 25 bp, Homo sapien
caaagccacccagccaatgaaggtc

SEQ ID NO: 5553703 - DNA, 25 bp, Homo sapien
ccccgcccagaacaactacgggctc

SEQ ID NO: 5553704 - DNA, 25 bp, Homo sapien
ggacagcatcaccgtaccaggctgc

SEQ ID NO: 5553705 - DNA, 25 bp, Homo sapien
ggagtctcccccagtgaatgctttc

SEQ ID NO: 5553706 - DNA, 25 bp, Homo sapien
agctgagatgtttggatggagcttt

SEQ ID NO: 5553707 - DNA, 25 bp, Homo sapien
tacgggctctatgacctcctgggga

SEQ ID NO: 5553708 - DNA, 25 bp, Homo sapien
ggactgccagccatggtatgctctc

SEQ ID NO: 5553709 - DNA, 25 bp, Homo sapien
gacaccgcacctgggctcaaactaa

SEQ ID NO: 5553710 - DNA, 25 bp, Homo sapien
agcagggtcgatgattaaaagctga

SEQ ID NO: 5553711 - DNA, 25 bp, Homo sapien
aatgaaacctgaaagcagggtcgat

SEQ ID NO: 5553712 - DNA, 25 bp, Homo sapien
actccagaagagatatccttgttgt

SEQ ID NO: 5553713 - DNA, 25 bp, Homo sapien
tataggccatatactaagaactaaa

SEQ ID NO: 5553714 - DNA, 25 bp, Homo sapien
tgacttgagatactccagaagagat

SEQ ID NO: 5553715 - DNA, 25 bp, Homo sapien
gatttagagtaaaggccaaataagc

SEQ ID NO: 5553716 - DNA, 25 bp, Homo sapien
ataagcacactgatgtcttcccctc

SEQ ID NO: 5553717 - DNA, 25 bp, Homo sapien
ataagctaatataaaagggataaat

SEQ ID NO: 5553718 - DNA, 25 bp, Homo sapien
aattaaagttagattataggccata

SEQ ID NO: 5553719 - DNA, 25 bp, Homo sapien
gaactacggtcaaaatgcaacaagt

SEQ ID NO: 5553720 - DNA, 25 bp, Homo sapien
acttgttgcattttgaccgtagttc

SEQ ID NO: 5553721 - DNA, 25 bp, Homo sapien
ggtacctgaacctcctacaactaaa

SEQ ID NO: 5553722 - DNA, 25 bp, Homo sapien
tttagttgtaggaggttcaggtacc

SEQ ID NO: 5553723 - DNA, 25 bp, Homo sapien
ttaaatggtcaactacagaaaagta

SEQ ID NO: 5553724 - DNA, 25 bp, Homo sapien
tgtatggaaagctgtaagtgttatc

SEQ ID NO: 5553725 - DNA, 25 bp, Homo sapien
ataagctgcttaccatgatgccttc

SEQ ID NO: 5553726 - DNA, 25 bp, Homo sapien
tattataggtgtatggaaagctgta

SEQ ID NO: 5553727 - DNA, 25 bp, Homo sapien
ggggatgattgatgaggttttcact

SEQ ID NO: 5553728 - DNA, 25 bp, Homo sapien
ggcttaagagaggcaacccatttgt

SEQ ID NO: 5553729 - DNA, 25 bp, Homo sapien
attgctactggagagataagctgct

SEQ ID NO: 5553730 - DNA, 25 bp, Homo sapien
tattatgtgaagttaaatggtcaac

SEQ ID NO: 5553731 - DNA, 25 bp, Homo sapien
agaaaagtagttggttttcgacata

SEQ ID NO: 5553732 - DNA, 25 bp, Homo sapien
taagacaggcattcttgccagtgtt

SEQ ID NO: 5553733 - DNA, 25 bp, Homo sapien
tttggtgatgtgacagttgttagct

SEQ ID NO: 5553734 - DNA, 25 bp, Homo sapien
ctgattcgactgttcttggagactc

SEQ ID NO: 5553735 - DNA, 25 bp, Homo sapien
cctcgcgcgagtcacaacctctgaa

SEQ ID NO: 5553736 - DNA, 25 bp, Homo sapien
tgacgcgtgtgaaggcattaaatgt

SEQ ID NO: 5553737 - DNA, 25 bp, Homo sapien
ccaatttggcagctgttaggtttgc

SEQ ID NO: 5553738 - DNA, 25 bp, Homo sapien
ttaggtttgctgggattgacagtga

SEQ ID NO: 5553739 - DNA, 25 bp, Homo sapien
acttttgagaaatcccagccagcca

SEQ ID NO: 5553740 - DNA, 25 bp, Homo sapien
tgtcacgttggtggcattcgagcca

SEQ ID NO: 5553741 - DNA, 25 bp, Homo sapien
ccccgctgctccgtagccttgggac

SEQ ID NO: 5553742 - DNA, 25 bp, Homo sapien
gcagctcctccccgcgggctgcttc

SEQ ID NO: 5553743 - DNA, 25 bp, Homo sapien
aggtagccaagcagcccttcgatag

SEQ ID NO: 5553744 - DNA, 25 bp, Homo sapien
aagacgaatgtccgggttgtcactt

SEQ ID NO: 5553745 - DNA, 25 bp, Homo sapien
gccctagtcgcgtgtcgttgtccaa

SEQ ID NO: 5553746 - DNA, 25 bp, Homo sapien
atttaaagaatccgcgtcgtgaagg

SEQ ID NO: 5553747 - DNA, 25 bp, Homo sapien
ctagtcgcgtgtcgttgtccaatgc

SEQ ID NO: 5553748 - DNA, 25 bp, Homo sapien
agccaggatgtagccaatctctcta

SEQ ID NO: 5553749 - DNA, 25 bp, Homo sapien
tctagccctagtcgcgtgtcgttgt

SEQ ID NO: 5553750 - DNA, 25 bp, Homo sapien
gagtgaaatttaaagaatccgcgtc

SEQ ID NO: 5553751 - DNA, 25 bp, Homo sapien
gtcgcgtgtcgttgtccaatgctct

SEQ ID NO: 5553752 - DNA, 25 bp, Homo sapien
tctctagccctagtcgcgtgtcgtt

SEQ ID NO: 5553753 - DNA, 25 bp, Homo sapien
aggatgtagccaatctctctagccc

SEQ ID NO: 5553754 - DNA, 25 bp, Homo sapien
agagagagtgaaatttaaagaatcc

SEQ ID NO: 5553755 - DNA, 25 bp, Homo sapien
ttaaagaatccgcgtcgtgaaggcg

SEQ ID NO: 5553756 - DNA, 25 bp, Homo sapien
accaaagaaaggagtaaatagaaca

SEQ ID NO: 5553757 - DNA, 25 bp, Homo sapien
aaatcttgagaaaatctaaacgtct

SEQ ID NO: 5553758 - DNA, 25 bp, Homo sapien
acattttctagggatgggcatagtt

SEQ ID NO: 5553759 - DNA, 25 bp, Homo sapien
agttatacattttctagggatgggc

SEQ ID NO: 5553760 - DNA, 25 bp, Homo sapien
gagtaaatagaacaaggcaaacaga

SEQ ID NO: 5553761 - DNA, 25 bp, Homo sapien
aaacagaggggcattcacttgtcta

SEQ ID NO: 5553762 - DNA, 25 bp, Homo sapien
tgagaaaatctaaacgtcttgaatt

SEQ ID NO: 5553763 - DNA, 25 bp, Homo sapien
agggatgggcatagttaaagctttt

SEQ ID NO: 5553764 - DNA, 25 bp, Homo sapien
tttctagggatgggcatagttaaag

SEQ ID NO: 5553765 - DNA, 25 bp, Homo sapien
gaggggcattcacttgtctaaggaa

SEQ ID NO: 5553766 - DNA, 25 bp, Homo sapien
tctaaggaaaaatcttgagaaaatc

SEQ ID NO: 5553767 - DNA, 25 bp, Homo sapien
gaggaacttccataatagctgtact

SEQ ID NO: 5553768 - DNA, 25 bp, Homo sapien
ggatatatacctactagtgggattg

SEQ ID NO: 5553769 - DNA, 25 bp, Homo sapien
agctgggctataaaccgaaatctgc

SEQ ID NO: 5553770 - DNA, 25 bp, Homo sapien
aatagtgcagcaataaacactggag

SEQ ID NO: 5553771 - DNA, 25 bp, Homo sapien
actggagtacaggtatctctttgac

SEQ ID NO: 5553772 - DNA, 25 bp, Homo sapien
tataaagctaacagagctgggctat

SEQ ID NO: 5553773 - DNA, 25 bp, Homo sapien
ttaatgccatgctcgcgcctcaact

SEQ ID NO: 5553774 - DNA, 25 bp, Homo sapien
tgccattacggtttcccaagcccat

SEQ ID NO: 5553775 - DNA, 25 bp, Homo sapien
attagtggacacttagggtgattcc

SEQ ID NO: 5553776 - DNA, 25 bp, Homo sapien
actgcggctactcctatcagggttc

SEQ ID NO: 5553777 - DNA, 25 bp, Homo sapien
tggaggagttactgcggctactcct

SEQ ID NO: 5553778 - DNA, 25 bp, Homo sapien
tagatacactcagtactggagcccc

SEQ ID NO: 5553779 - DNA, 25 bp, Homo sapien
attttttaggtgtggcagcacaagg

SEQ ID NO: 5553780 - DNA, 25 bp, Homo sapien
tgcttcttacatgggtgcaggagcc

SEQ ID NO: 5553781 - DNA, 25 bp, Homo sapien
gtccccatagcactgtagatacact

SEQ ID NO: 5553782 - DNA, 25 bp, Homo sapien
cagcaagcccatctcagactggtag

SEQ ID NO: 5553783 - DNA, 25 bp, Homo sapien
tttagcttcagccccttcaaaacta

SEQ ID NO: 5553784 - DNA, 25 bp, Homo sapien
aggttctcctaggtgtccccatagc

SEQ ID NO: 5553785 - DNA, 25 bp, Homo sapien
agctcccaggctttttctcactcat

SEQ ID NO: 5553786 - DNA, 25 bp, Homo sapien
gggtgcaggagccattttttaggtg

SEQ ID NO: 5553787 - DNA, 25 bp, Homo sapien
atggctgagaaagcagattgcttct

SEQ ID NO: 5553788 - DNA, 25 bp, Homo sapien
tcactgtcttacccacagcaagccc

SEQ ID NO: 5553789 - DNA, 25 bp, Homo sapien
ctatgaaaagtaagtgatttgcatg

SEQ ID NO: 5553790 - DNA, 25 bp, Homo sapien
catgaaagaatgtcagaccattgtt

SEQ ID NO: 5553791 - DNA, 25 bp, Homo sapien
taatatcaggaaaattaagcatccc

SEQ ID NO: 5553792 - DNA, 25 bp, Homo sapien
gcatgatgttcaagaccggcccttg

SEQ ID NO: 5553793 - DNA, 25 bp, Homo sapien
aagaccggcccttggctgttgttac

SEQ ID NO: 5553794 - DNA, 25 bp, Homo sapien
tgaaatctcagtacgacatgaaaga

SEQ ID NO: 5553795 - DNA, 25 bp, Homo sapien
aagcatcccaagtgtgactggacaa

SEQ ID NO: 5553796 - DNA, 25 bp, Homo sapien
gctgctcaggcgttttatacctacc

SEQ ID NO: 5553797 - DNA, 25 bp, Homo sapien
agggtcgactcatggatgatacctc

SEQ ID NO: 5553798 - DNA, 25 bp, Homo sapien
gctgttgttacagagatgttgggca

SEQ ID NO: 5553799 - DNA, 25 bp, Homo sapien
tttttgtcaagccacagggtcgact

SEQ ID NO: 5553800 - DNA, 25 bp, Homo sapien
ctgctgctggcagctgaagtagtac

SEQ ID NO: 5553801 - DNA, 25 bp, Homo sapien
ttttccttagacaagtgaatgcccc

SEQ ID NO: 5553802 - DNA, 25 bp, Homo sapien
ttagacaagtgaatgcccctctgtt

SEQ ID NO: 5553803 - DNA, 25 bp, Homo sapien
gcccatccctagaaaatgtataact

SEQ ID NO: 5553804 - DNA, 25 bp, Homo sapien
ccaaaatagaaattcaagacgttta

SEQ ID NO: 5553805 - DNA, 25 bp, Homo sapien
gaaattagctttcttaaacgcctgc

SEQ ID NO: 5553806 - DNA, 25 bp, Homo sapien
aattcaagacgtttagattttctca

SEQ ID NO: 5553807 - DNA, 25 bp, Homo sapien
acaagtgaatgcccctctgtttgcc

SEQ ID NO: 5553808 - DNA, 25 bp, Homo sapien
tccttagacaagtgaatgcccctct

SEQ ID NO: 5553809 - DNA, 25 bp, Homo sapien
tcttaaacgcctgctgctggcagct

SEQ ID NO: 5553810 - DNA, 25 bp, Homo sapien
aactatgcccatccctagaaaatgt

SEQ ID NO: 5553811 - DNA, 25 bp, Homo sapien
tggtccttctacttcggcgggctgt

SEQ ID NO: 5553812 - DNA, 25 bp, Homo sapien
cgcgtctacaagtccaagaggaaca

SEQ ID NO: 5553813 - DNA, 25 bp, Homo sapien
gcaggcctgagcaacatcatcggcg

SEQ ID NO: 5553814 - DNA, 25 bp, Homo sapien
ggcgtctgcgtgaagatcaatcatt

SEQ ID NO: 5553815 - DNA, 25 bp, Homo sapien
atcatttcccggaggacacggacta

SEQ ID NO: 5553816 - DNA, 25 bp, Homo sapien
cctcacgcactcgggcctctggagg

SEQ ID NO: 5553817 - DNA, 25 bp, Homo sapien
gctctacacgcgcgccctcatctgc

SEQ ID NO: 5553818 - DNA, 25 bp, Homo sapien
cactactcgtacggctggtccttct

SEQ ID NO: 5553819 - DNA, 25 bp, Homo sapien
gccgccttcggcctcatgaccatcg

SEQ ID NO: 5553820 - DNA, 25 bp, Homo sapien
atctactccgagttgtccgggcctc

SEQ ID NO: 5553821 - DNA, 25 bp, Homo sapien
tcggcgtgatcgtgtacatctccgc

SEQ ID NO: 5553822 - DNA, 25 bp, Homo sapien
gagcagactgtatacaacttcaagc

SEQ ID NO: 5553823 - DNA, 25 bp, Homo sapien
tatacaacttcaagcattgttgcat

SEQ ID NO: 5553824 - DNA, 25 bp, Homo sapien
tgtatacaacttcaagcattgttgc

SEQ ID NO: 5553825 - DNA, 25 bp, Homo sapien
ttcccttcatctcttcaactgcttt

SEQ ID NO: 5553826 - DNA, 25 bp, Homo sapien
acaacttcaagcattgttgcatttc

SEQ ID NO: 5553827 - DNA, 25 bp, Homo sapien
agactgtatacaacttcaagcattg

SEQ ID NO: 5553828 - DNA, 25 bp, Homo sapien
caggaaagagcagactgtatacaac

SEQ ID NO: 5553829 - DNA, 25 bp, Homo sapien
gcagactgtatacaacttcaagcat

SEQ ID NO: 5553830 - DNA, 25 bp, Homo sapien
aacttcaagcattgttgcatttctt

SEQ ID NO: 5553831 - DNA, 25 bp, Homo sapien
ggaaagagcagactgtatacaactt

SEQ ID NO: 5553832 - DNA, 25 bp, Homo sapien
aggaaagagcagactgtatacaact

SEQ ID NO: 5553833 - DNA, 25 bp, Homo sapien
ccctccaccccatgacaggccctgg

SEQ ID NO: 5553834 - DNA, 25 bp, Homo sapien
tgccatgttgttgtgttgcaccaat

SEQ ID NO: 5553835 - DNA, 25 bp, Homo sapien
cccatccctccaccccatgacaggc

SEQ ID NO: 5553836 - DNA, 25 bp, Homo sapien
gctatccctcccccatccctccacc

SEQ ID NO: 5553837 - DNA, 25 bp, Homo sapien
gtgttgcaccaattaactcgtcatt

SEQ ID NO: 5553838 - DNA, 25 bp, Homo sapien
acatgtgccatgttgttgtgttgca

SEQ ID NO: 5553839 - DNA, 25 bp, Homo sapien
gttgtgttgcaccaattaactcgtc

SEQ ID NO: 5553840 - DNA, 25 bp, Homo sapien
ctccaccccatgacaggccctggtg

SEQ ID NO: 5553841 - DNA, 25 bp, Homo sapien
atccctccaccccatgacaggccct

SEQ ID NO: 5553842 - DNA, 25 bp, Homo sapien
gtgacaacatgcggtgttgggtttt

SEQ ID NO: 5553843 - DNA, 25 bp, Homo sapien
gagtgacaacatgcggtgttgggtt

SEQ ID NO: 5553844 - DNA, 25 bp, Homo sapien
atagcttcaggtttatacactccat

SEQ ID NO: 5553845 - DNA, 25 bp, Homo sapien
ttgagtcagagccttttagtgaaag

SEQ ID NO: 5553846 - DNA, 25 bp, Homo sapien
atttaatagcttcaggtttatacac

SEQ ID NO: 5553847 - DNA, 25 bp, Homo sapien
tgcataaatgtcttcgtttgcgaag

SEQ ID NO: 5553848 - DNA, 25 bp, Homo sapien
aaattgagtcagagccttttagtga

SEQ ID NO: 5553849 - DNA, 25 bp, Homo sapien
ctccacatcctcatcaacattagtt

SEQ ID NO: 5553850 - DNA, 25 bp, Homo sapien
cttcgtttgcgaagtgtctgttcat

SEQ ID NO: 5553851 - DNA, 25 bp, Homo sapien
tatatggcacctttaaaattgagtc

SEQ ID NO: 5553852 - DNA, 25 bp, Homo sapien
aacgctttaatatatggcaccttta

SEQ ID NO: 5553853 - DNA, 25 bp, Homo sapien
gcacctttaaaattgagtcagagcc

SEQ ID NO: 5553854 - DNA, 25 bp, Homo sapien
ttagtgaaagaatctgttttcccta

SEQ ID NO: 5553855 - DNA, 25 bp, Homo sapien
gagggggtagaatctagaaccctga

SEQ ID NO: 5553856 - DNA, 25 bp, Homo sapien
tgaacaacagggtataagtaactcc

SEQ ID NO: 5553857 - DNA, 25 bp, Homo sapien
attaataggtatcagtcacatgtcc

SEQ ID NO: 5553858 - DNA, 25 bp, Homo sapien
cacagaagaaacagcatacagcatt

SEQ ID NO: 5553859 - DNA, 25 bp, Homo sapien
ttcaagtaccagagaccatgccaag

SEQ ID NO: 5553860 - DNA, 25 bp, Homo sapien
tctagaaccctgataggagtagccg

SEQ ID NO: 5553861 - DNA, 25 bp, Homo sapien
ctccatgtttaaaggagggcagggt

SEQ ID NO: 5553862 - DNA, 25 bp, Homo sapien
gcgatgaccttgaacaacagggtat

SEQ ID NO: 5553863 - DNA, 25 bp, Homo sapien
caaatgtatttagttgaggcgcgag

SEQ ID NO: 5553864 - DNA, 25 bp, Homo sapien
gagcatggcattaaagaacatgggc

SEQ ID NO: 5553865 - DNA, 25 bp, Homo sapien
taggagtagccgcagtaactcctcc

SEQ ID NO: 5553866 - DNA, 25 bp, Homo sapien
tttgggtgtatatccagcaatggga

SEQ ID NO: 5553867 - DNA, 25 bp, Homo sapien
aggacatgatcgcattcttttgtat

SEQ ID NO: 5553868 - DNA, 25 bp, Homo sapien
tcatgggggtttggtattcaaatta

SEQ ID NO: 5553869 - DNA, 25 bp, Homo sapien
cacttgtacgtgagaacattcaata

SEQ ID NO: 5553870 - DNA, 25 bp, Homo sapien
ataggccccagtatgtgtccatgtg

SEQ ID NO: 5553871 - DNA, 25 bp, Homo sapien
ttgaatagcaacgaatacacatgtg

SEQ ID NO: 5553872 - DNA, 25 bp, Homo sapien
ccacagtggtggacctaatttacat

SEQ ID NO: 5553873 - DNA, 25 bp, Homo sapien
atctcgtctaccattgatgatcctt

SEQ ID NO: 5553874 - DNA, 25 bp, Homo sapien
tgtcatatagggaaacttgtgtcat

SEQ ID NO: 5553875 - DNA, 25 bp, Homo sapien
ctgggtcaaatgttagtcctgtttt

SEQ ID NO: 5553876 - DNA, 25 bp, Homo sapien
atgcaagtttgtcatatagggaaac

SEQ ID NO: 5553877 - DNA, 25 bp, Homo sapien
gagacacagtggttcgatgcacttc

SEQ ID NO: 5553878 - DNA, 25 bp, Homo sapien
gaagtgcatcgaaccactgtgtctc

SEQ ID NO: 5553879 - DNA, 25 bp, Homo sapien
aacgcagtctcacagaaaaagcctg

SEQ ID NO: 5553880 - DNA, 25 bp, Homo sapien
tactagagataagctttcaccatgt

SEQ ID NO: 5553881 - DNA, 25 bp, Homo sapien
ttcacatctgggttctgacactttc

SEQ ID NO: 5553882 - DNA, 25 bp, Homo sapien
ccctggtgctaggctgtgttcacat

SEQ ID NO: 5553883 - DNA, 25 bp, Homo sapien
ttcataaaagagagataaaactagt

SEQ ID NO: 5553884 - DNA, 25 bp, Homo sapien
ataaaagcctgaagcaatagtattg

SEQ ID NO: 5553885 - DNA, 25 bp, Homo sapien
tgtcttagactcccatgcctcagcc

SEQ ID NO: 5553886 - DNA, 25 bp, Homo sapien
gtatgagccaccgcatgttattcta

SEQ ID NO: 5553887 - DNA, 25 bp, Homo sapien
agccttgggcatgctactccatctg

SEQ ID NO: 5553888 - DNA, 25 bp, Homo sapien
caaggtaactggatctccctggtgc

SEQ ID NO: 5553889 - DNA, 25 bp, Homo sapien
agaagcaatactagccctggcagaa

SEQ ID NO: 5553890 - DNA, 25 bp, Homo sapien
ataattggctaaaacttggaagcag

SEQ ID NO: 5553891 - DNA, 25 bp, Homo sapien
aaaccatgaaaaggcaatggaagga

SEQ ID NO: 5553892 - DNA, 25 bp, Homo sapien
gatttttgcagtgtaggagccagtc

SEQ ID NO: 5553893 - DNA, 25 bp, Homo sapien
gtgtagcaaagaggcttggcaataa

SEQ ID NO: 5553894 - DNA, 25 bp, Homo sapien
ggcttggcaataacatcatcccccc

SEQ ID NO: 5553895 - DNA, 25 bp, Homo sapien
attggcaaagtaactaatggtgatt

SEQ ID NO: 5553896 - DNA, 25 bp, Homo sapien
acttattggtgtagcaaagaggctt

SEQ ID NO: 5553897 - DNA, 25 bp, Homo sapien
actgaaatattgagagacaaaatgc

SEQ ID NO: 5553898 - DNA, 25 bp, Homo sapien
atggataaagtgtgggtaccattcc

SEQ ID NO: 5553899 - DNA, 25 bp, Homo sapien
ttagaattatagaaagccccatatc

SEQ ID NO: 5553900 - DNA, 25 bp, Homo sapien
ttgcggaggttaccgtagatgttgt

SEQ ID NO: 5553901 - DNA, 25 bp, Homo sapien
cgacagacggtatccacagtccaat

SEQ ID NO: 5553902 - DNA, 25 bp, Homo sapien
attggactgtggataccgtctgtcg

SEQ ID NO: 5553903 - DNA, 25 bp, Homo sapien
gaagctgctgatgaattggcagcac

SEQ ID NO: 5553904 - DNA, 25 bp, Homo sapien
tgtggagccaggcatctgtcagaaa

SEQ ID NO: 5553905 - DNA, 25 bp, Homo sapien
ttataccagtggcattagagcagga

SEQ ID NO: 5553906 - DNA, 25 bp, Homo sapien
gaagaagatactgtccactgtcacc

SEQ ID NO: 5553907 - DNA, 25 bp, Homo sapien
tcccccacaaaaagcgctatttctg

SEQ ID NO: 5553908 - DNA, 25 bp, Homo sapien
actggagccacaccatgaccatcca

SEQ ID NO: 5553909 - DNA, 25 bp, Homo sapien
ggcagcactgataaaccaagacgaa

SEQ ID NO: 5553910 - DNA, 25 bp, Homo sapien
ggctgagacctgcctactggagcca

SEQ ID NO: 5553911 - DNA, 25 bp, Homo sapien
tgaccatccagtgtctgggaagccc

SEQ ID NO: 5553912 - DNA, 25 bp, Homo sapien
tggagatgatctatgcattagtccc

SEQ ID NO: 5553913 - DNA, 25 bp, Homo sapien
tctgtgacataaaaagtggattatt

SEQ ID NO: 5553914 - DNA, 25 bp, Homo sapien
gccgcaggttctcgatgcttgtggt

SEQ ID NO: 5553915 - DNA, 25 bp, Homo sapien
tggttttactgttcagggtagctga

SEQ ID NO: 5553916 - DNA, 25 bp, Homo sapien
cgcaggttctcgatgcttgtggttt

SEQ ID NO: 5553917 - DNA, 25 bp, Homo sapien
agccgcaggttctcgatgcttgtgg

SEQ ID NO: 5553918 - DNA, 25 bp, Homo sapien
ttactgttcagggtagctgatgcag

SEQ ID NO: 5553919 - DNA, 25 bp, Homo sapien
ttttactgttcagggtagctgatgc

SEQ ID NO: 5553920 - DNA, 25 bp, Homo sapien
tgcttgtggttttactgttcagggt

SEQ ID NO: 5553921 - DNA, 25 bp, Homo sapien
aggttctcgatgcttgtggttttac

SEQ ID NO: 5553922 - DNA, 25 bp, Homo sapien
gagccgcaggttctcgatgcttgtg

SEQ ID NO: 5553923 - DNA, 25 bp, Homo sapien
ctcgatgcttgtggttttactgttc

SEQ ID NO: 5553924 - DNA, 25 bp, Homo sapien
ttgtggttttactgttcagggtagc

SEQ ID NO: 5553925 - DNA, 25 bp, Homo sapien
tatctctcccgacgaagggaattga

SEQ ID NO: 5553926 - DNA, 25 bp, Homo sapien
tcaattcccttcgtcgggagagata

SEQ ID NO: 5553927 - DNA, 25 bp, Homo sapien
aatggtgatcattaaaagacaagta

SEQ ID NO: 5553928 - DNA, 25 bp, Homo sapien
ttagggaaaacagattctttcacta

SEQ ID NO: 5553929 - DNA, 25 bp, Homo sapien
gttagaatggtgatcattaaaagac

SEQ ID NO: 5553930 - DNA, 25 bp, Homo sapien
aaaggtgccatatattaaagcgttt

SEQ ID NO: 5553931 - DNA, 25 bp, Homo sapien
gaaagcttcataattcctggtgaga

SEQ ID NO: 5553932 - DNA, 25 bp, Homo sapien
ttcactaaaaggctctgactcaatt

SEQ ID NO: 5553933 - DNA, 25 bp, Homo sapien
taattcctggtgagaatataaaata

SEQ ID NO: 5553934 - DNA, 25 bp, Homo sapien
tctgactcaattttaaaggtgccat

SEQ ID NO: 5553935 - DNA, 25 bp, Homo sapien
aagacaagtaataactaatgttgat

SEQ ID NO: 5553936 - DNA, 25 bp, Homo sapien
cttcgcaaacgaagacatttatgca

SEQ ID NO: 5553937 - DNA, 25 bp, Homo sapien
atgaacagacacttcgcaaacgaag

SEQ ID NO: 5553938 - DNA, 25 bp, Homo sapien
caccagaagccacacgtgggtgttt

SEQ ID NO: 5553939 - DNA, 25 bp, Homo sapien
tcccaataaacacgaaagatagatg

SEQ ID NO: 5553940 - DNA, 25 bp, Homo sapien
gagggtctttgagtggtcaaccaat

SEQ ID NO: 5553941 - DNA, 25 bp, Homo sapien
tggcttcagagtgcacattattttc

SEQ ID NO: 5553942 - DNA, 25 bp, Homo sapien
ttacaaatacatgtgcgtgcgtgtg

SEQ ID NO: 5553943 - DNA, 25 bp, Homo sapien
gtcagaactgagatttgataatgtc

SEQ ID NO: 5553944 - DNA, 25 bp, Homo sapien
tgtctcccccaaaggaaagcagaaa

SEQ ID NO: 5553945 - DNA, 25 bp, Homo sapien
cacgaaagatagatgtcattggcca

SEQ ID NO: 5553946 - DNA, 25 bp, Homo sapien
atgacatcattcactgagcacatac

SEQ ID NO: 5553947 - DNA, 25 bp, Homo sapien
acacgtgggtgtttagtcatgacca

SEQ ID NO: 5553948 - DNA, 25 bp, Homo sapien
tgtgtgtgtatcatgttcctccaaa

SEQ ID NO: 5553949 - DNA, 25 bp, Homo sapien
tatgatgtgcacagacacaaacata

SEQ ID NO: 5553950 - DNA, 25 bp, Homo sapien
agggaagaggattaaatcactgcct

SEQ ID NO: 5553951 - DNA, 25 bp, Homo sapien
acagaatgcagtgggatttccttcc

SEQ ID NO: 5553952 - DNA, 25 bp, Homo sapien
gtgtctaaagaagtataccacattc

SEQ ID NO: 5553953 - DNA, 25 bp, Homo sapien
cagtccaagattatgtattagtgtc

SEQ ID NO: 5553954 - DNA, 25 bp, Homo sapien
tctttggactctgggctatctttac

SEQ ID NO: 5553955 - DNA, 25 bp, Homo sapien
gggttgtcccaaaatatgatgtgca

SEQ ID NO: 5553956 - DNA, 25 bp, Homo sapien
tggccatatggcagtagacttcttt

SEQ ID NO: 5553957 - DNA, 25 bp, Homo sapien
tcttgtggatatagtctaggtcttc

SEQ ID NO: 5553958 - DNA, 25 bp, Homo sapien
atacatagctggaaaatgtgtggaa

SEQ ID NO: 5553959 - DNA, 25 bp, Homo sapien
tgattaacacagaatgcagtgggat

SEQ ID NO: 5553960 - DNA, 25 bp, Homo sapien
gttatggtcccgtccagcatacctc

SEQ ID NO: 5553961 - DNA, 25 bp, Homo sapien
ttcatcatgcagtcaagggcaccag

SEQ ID NO: 5553962 - DNA, 25 bp, Homo sapien
atcagtaagactgagaaagtcctga

SEQ ID NO: 5553963 - DNA, 25 bp, Homo sapien
agcatacctctctggaaaacagcac

SEQ ID NO: 5553964 - DNA, 25 bp, Homo sapien
ctgtgcagccggagatttttgcagt

SEQ ID NO: 5553965 - DNA, 25 bp, Homo sapien
gaaagtcctgaaaatctagcctgcc

SEQ ID NO: 5553966 - DNA, 25 bp, Homo sapien
agggcaagccacagctacaccatca

SEQ ID NO: 5553967 - DNA, 25 bp, Homo sapien
gtgaaggcaaccagtacagtgttca

SEQ ID NO: 5553968 - DNA, 25 bp, Homo sapien
ccatgcaatctctgtgcagccggag

SEQ ID NO: 5553969 - DNA, 25 bp, Homo sapien
gagagtttgcagctgttatggtccc

SEQ ID NO: 5553970 - DNA, 25 bp, Homo sapien
agcctgcccatcacagttgaagtcc

SEQ ID NO: 5553971 - DNA, 25 bp, Homo sapien
atgctttactctgcctggaggggaa

SEQ ID NO: 5553972 - DNA, 25 bp, Homo sapien
ggaaacagaagtatacggaatgctt

SEQ ID NO: 5553973 - DNA, 25 bp, Homo sapien
aatgtgtctgaaaatgctacccgtc

SEQ ID NO: 5553974 - DNA, 25 bp, Homo sapien
cctccctgaaggatcctcccctctg

SEQ ID NO: 5553975 - DNA, 25 bp, Homo sapien
tgagaagataatagtagtttgagtt

SEQ ID NO: 5553976 - DNA, 25 bp, Homo sapien
tctgagatggcctctgagaagataa

SEQ ID NO: 5553977 - DNA, 25 bp, Homo sapien
agggttaataggaaacagaagtata

SEQ ID NO: 5553978 - DNA, 25 bp, Homo sapien
tttaggacaaattgactcagatatc

SEQ ID NO: 5553979 - DNA, 25 bp, Homo sapien
gcccagcctacacagttgagtctcg

SEQ ID NO: 5553980 - DNA, 25 bp, Homo sapien
gagggcacaaaggctcaatacctag

SEQ ID NO: 5553981 - DNA, 25 bp, Homo sapien
gggcagaggtgacctctgagatggc

SEQ ID NO: 5553982 - DNA, 25 bp, Homo sapien
ctctgtcaccaggttggagtacagt

SEQ ID NO: 5553983 - DNA, 25 bp, Homo sapien
tctctcccaaggagctaggaatgca

SEQ ID NO: 5553984 - DNA, 25 bp, Homo sapien
aattagctgtggaaaggtgtatgta

SEQ ID NO: 5553985 - DNA, 25 bp, Homo sapien
aggttggtctagaactcatagcttc

SEQ ID NO: 5553986 - DNA, 25 bp, Homo sapien
aaatgccaagttgcccaggttggtc

SEQ ID NO: 5553987 - DNA, 25 bp, Homo sapien
cttccaaagggttaggattacaggc

SEQ ID NO: 5553988 - DNA, 25 bp, Homo sapien
gcaggatagcaatgataggattcat

SEQ ID NO: 5553989 - DNA, 25 bp, Homo sapien
actgcagccttgaacttgtggactc

SEQ ID NO: 5553990 - DNA, 25 bp, Homo sapien
atgagccaccacacccagcctatta

SEQ ID NO: 5553991 - DNA, 25 bp, Homo sapien
tatgagacttaaaagaccaaatgct

SEQ ID NO: 5553992 - DNA, 25 bp, Homo sapien
tagcttcaagcaatcctctggcctc

SEQ ID NO: 5553993 - DNA, 25 bp, Homo sapien
accgcacctggccttaatttgattt

SEQ ID NO: 5553994 - DNA, 25 bp, Homo sapien
tctctaggtagtggaatttttagtg

SEQ ID NO: 5553995 - DNA, 25 bp, Homo sapien
tatcctacctaaagatgaattgttc

SEQ ID NO: 5553996 - DNA, 25 bp, Homo sapien
agatgaattgttccaaccctgatgc

SEQ ID NO: 5553997 - DNA, 25 bp, Homo sapien
aatttggataaagggcttctgcttt

SEQ ID NO: 5553998 - DNA, 25 bp, Homo sapien
caaccctgatgctttggtaatcatc

SEQ ID NO: 5553999 - DNA, 25 bp, Homo sapien
caaccagaacagcttaacttttctc

SEQ ID NO: 5554000 - DNA, 25 bp, Homo sapien
ttcattagcagttctctaggtagtg

SEQ ID NO: 5554001 - DNA, 25 bp, Homo sapien
aagcaagagtaacccaccaaatttg

SEQ ID NO: 5554002 - DNA, 25 bp, Homo sapien
ttgttagaagacattctttagagtc

SEQ ID NO: 5554003 - DNA, 25 bp, Homo sapien
tcatatttgaaacaggctggggtgc

SEQ ID NO: 5554004 - DNA, 25 bp, Homo sapien
gctatgatcttggaagacagggcat

SEQ ID NO: 5554005 - DNA, 25 bp, Homo sapien
tttgggctgtttagttgatcgttgt

SEQ ID NO: 5554006 - DNA, 25 bp, Homo sapien
agctaggcatacgagatccagcatt

SEQ ID NO: 5554007 - DNA, 25 bp, Homo sapien
ctctggaattaagggaatggcccag

SEQ ID NO: 5554008 - DNA, 25 bp, Homo sapien
tggaagatgcttttgaatgaatgat

SEQ ID NO: 5554009 - DNA, 25 bp, Homo sapien
tgacatacagcagtcttggggcttc

SEQ ID NO: 5554010 - DNA, 25 bp, Homo sapien
tgtagccttgtgtggcaccaggcaa

SEQ ID NO: 5554011 - DNA, 25 bp, Homo sapien
agaggtgcccacagataaaatggtc

SEQ ID NO: 5554012 - DNA, 25 bp, Homo sapien
aagacagggcatagcttctctggaa

SEQ ID NO: 5554013 - DNA, 25 bp, Homo sapien
gaggaaatatttaactggaagatgc

SEQ ID NO: 5554014 - DNA, 25 bp, Homo sapien
aatgaatgatcagctacccaggtac

SEQ ID NO: 5554015 - DNA, 25 bp, Homo sapien
aggaccagactccttcaaggtgatc

SEQ ID NO: 5554016 - DNA, 25 bp, Homo sapien
gggtttcatcagcgtaggaccagac

SEQ ID NO: 5554017 - DNA, 25 bp, Homo sapien
atcagcgtaggaccagactccttca

SEQ ID NO: 5554018 - DNA, 25 bp, Homo sapien
cagcccacacccactgcactagtgc

SEQ ID NO: 5554019 - DNA, 25 bp, Homo sapien
gggctgacggatccagcccacaccc

SEQ ID NO: 5554020 - DNA, 25 bp, Homo sapien
tgtgggtttcatcagcgtaggacca

SEQ ID NO: 5554021 - DNA, 25 bp, Homo sapien
acccactgcactagtgctgagtgag

SEQ ID NO: 5554022 - DNA, 25 bp, Homo sapien
ctgtgtgggtttcatcagcgtagga

SEQ ID NO: 5554023 - DNA, 25 bp, Homo sapien
gggtctgtgtgggtttcatcagcgt

SEQ ID NO: 5554024 - DNA, 25 bp, Homo sapien
actgcactagtgctgagtgagaacc

SEQ ID NO: 5554025 - DNA, 25 bp, Homo sapien
ggatccagcccacacccactgcact

SEQ ID NO: 5554026 - DNA, 25 bp, Homo sapien
tttggatatagttttgcagtagctc

SEQ ID NO: 5554027 - DNA, 25 bp, Homo sapien
ttgaggttactagggttgcaaaatc

SEQ ID NO: 5554028 - DNA, 25 bp, Homo sapien
ttaggttcatttcagccggtcattc

SEQ ID NO: 5554029 - DNA, 25 bp, Homo sapien
aagcaaggcaatattctggcagtga

SEQ ID NO: 5554030 - DNA, 25 bp, Homo sapien
aacatggcataccagaactgactac

SEQ ID NO: 5554031 - DNA, 25 bp, Homo sapien
tcctggaaggacagataaaagataa

SEQ ID NO: 5554032 - DNA, 25 bp, Homo sapien
aagtttgagaattatagtgctagat

SEQ ID NO: 5554033 - DNA, 25 bp, Homo sapien
agacatttacaggcttttgggcatt

SEQ ID NO: 5554034 - DNA, 25 bp, Homo sapien
agctgacattgagcacatgtgtcct

SEQ ID NO: 5554035 - DNA, 25 bp, Homo sapien
gatttatgggtgaaatggattacac

SEQ ID NO: 5554036 - DNA, 25 bp, Homo sapien
tagtacttgtcagagctcctggaag

SEQ ID NO: 5554037 - DNA, 25 bp, Homo sapien
attttgagcttttgatatgatatcc

SEQ ID NO: 5554038 - DNA, 25 bp, Homo sapien
attgtgtcttcttggtaccctcatc

SEQ ID NO: 5554039 - DNA, 25 bp, Homo sapien
gccagtgtccaggagcttttcccct

SEQ ID NO: 5554040 - DNA, 25 bp, Homo sapien
ggatttgtttctggggtctctattc

SEQ ID NO: 5554041 - DNA, 25 bp, Homo sapien
caggagcttggatgtagtcccattt

SEQ ID NO: 5554042 - DNA, 25 bp, Homo sapien
ttgtgtgtaatagaagatatgggtc

SEQ ID NO: 5554043 - DNA, 25 bp, Homo sapien
tttgcatgtggaaatctagtttatt

SEQ ID NO: 5554044 - DNA, 25 bp, Homo sapien
agaagatatgggtccagtttcattc

SEQ ID NO: 5554045 - DNA, 25 bp, Homo sapien
tagttgacccatatgtgtttggatt

SEQ ID NO: 5554046 - DNA, 25 bp, Homo sapien
tctcctgcctccgcccatttcatct

SEQ ID NO: 5554047 - DNA, 25 bp, Homo sapien
tttattgaagggattatcttttctc

SEQ ID NO: 5554048 - DNA, 25 bp, Homo sapien
gcaatgaagcggactcactatccac

SEQ ID NO: 5554049 - DNA, 25 bp, Homo sapien
ttccgcaatacagcccctgccccat

SEQ ID NO: 5554050 - DNA, 25 bp, Homo sapien
ggggcctcctcaccaactgaccaag

SEQ ID NO: 5554051 - DNA, 25 bp, Homo sapien
aggaagcagcaatgccccctgctcc

SEQ ID NO: 5554052 - DNA, 25 bp, Homo sapien
agcacagtgctcaccctcaccagtc

SEQ ID NO: 5554053 - DNA, 25 bp, Homo sapien
cggaggattctctggcaagaccagc

SEQ ID NO: 5554054 - DNA, 25 bp, Homo sapien
gggcagaggtttgctctctttccgc

SEQ ID NO: 5554055 - DNA, 25 bp, Homo sapien
cagactagagtctgcagtaatgggg

SEQ ID NO: 5554056 - DNA, 25 bp, Homo sapien
atcccgagtcaccccatggaccttt

SEQ ID NO: 5554057 - DNA, 25 bp, Homo sapien
gcaacatttctgagggagacaagac

SEQ ID NO: 5554058 - DNA, 25 bp, Homo sapien
accaagggtgttcaccagcacagca

SEQ ID NO: 5554059 - DNA, 25 bp, Homo sapien
tgggcagttgctatgctctggtcct

SEQ ID NO: 5554060 - DNA, 25 bp, Homo sapien
ctttgggcagttgctatgctccggt

SEQ ID NO: 5554061 - DNA, 25 bp, Homo sapien
cgtaggatcactttgggcagttgct

SEQ ID NO: 5554062 - DNA, 25 bp, Homo sapien
gacgtccgtaggatcactttgggca

SEQ ID NO: 5554063 - DNA, 25 bp, Homo sapien
ccggtcctgcatgacgtccgtagga

SEQ ID NO: 5554064 - DNA, 25 bp, Homo sapien
ggtcctgcatgacgtccgtaggatc

SEQ ID NO: 5554065 - DNA, 25 bp, Homo sapien
gtaggatcactttgggcagttgcta

SEQ ID NO: 5554066 - DNA, 25 bp, Homo sapien
tccgtaggatcactttgggcagttg

SEQ ID NO: 5554067 - DNA, 25 bp, Homo sapien
gctccggtcctgcatgacgtccgta

SEQ ID NO: 5554068 - DNA, 25 bp, Homo sapien
ctgcatgacgtccgtaggatcactt

SEQ ID NO: 5554069 - DNA, 25 bp, Homo sapien
tgctccggtcctgcatgacgtccat

SEQ ID NO: 5554070 - DNA, 25 bp, Homo sapien
acgtaatccacttaatttttagata

SEQ ID NO: 5554071 - DNA, 25 bp, Homo sapien
tatctaaaaattaagtggattacgt

SEQ ID NO: 5554072 - DNA, 25 bp, Homo sapien
gaagagcatcatttgttaggtcctt

SEQ ID NO: 5554073 - DNA, 25 bp, Homo sapien
gaaatgtacacctcatgataggctc

SEQ ID NO: 5554074 - DNA, 25 bp, Homo sapien
agtgaaaaagcaatgattagaaatg

SEQ ID NO: 5554075 - DNA, 25 bp, Homo sapien
tgcatgcagccatctctagagtgtc

SEQ ID NO: 5554076 - DNA, 25 bp, Homo sapien
gaccttgggtaaggagtatactcca

SEQ ID NO: 5554077 - DNA, 25 bp, Homo sapien
ttcagtggtagagaatttgcaaagg

SEQ ID NO: 5554078 - DNA, 25 bp, Homo sapien
atagtcttcctggcatgctgtattc

SEQ ID NO: 5554079 - DNA, 25 bp, Homo sapien
gtaaaggctacagttacacaaagac

SEQ ID NO: 5554080 - DNA, 25 bp, Homo sapien
caaagggactgcttagttaagtagt

SEQ ID NO: 5554081 - DNA, 25 bp, Homo sapien
ccacatcatgggttaaagagaacat

SEQ ID NO: 5554082 - DNA, 25 bp, Homo sapien
aagagaacattgccagtaggccttc

SEQ ID NO: 5554083 - DNA, 25 bp, Homo sapien
cgaccgtccggtgctcgggagggga

SEQ ID NO: 5554084 - DNA, 25 bp, Homo sapien
tcccctcccgagcaccggacggtcg

SEQ ID NO: 5554085 - DNA, 25 bp, Homo sapien
ttgtaccattctttgacaaataaac

SEQ ID NO: 5554086 - DNA, 25 bp, Homo sapien
gtttatttgtcaaagaatggtacaa

SEQ ID NO: 5554087 - DNA, 25 bp, Homo sapien
agggtaggggcgtgtcctcggactc

SEQ ID NO: 5554088 - DNA, 25 bp, Homo sapien
gagtccgaggacacgcccctaccct

SEQ ID NO: 5554089 - DNA, 25 bp, Homo sapien
acaccaaaagcatgatccatcaaaa

SEQ ID NO: 5554090 - DNA, 25 bp, Homo sapien
aaataaatgtgtaagttggacttaa

SEQ ID NO: 5554091 - DNA, 25 bp, Homo sapien
tatagaagaaaatctaggtgacctt

SEQ ID NO: 5554092 - DNA, 25 bp, Homo sapien
agcgacttgcatgaccgagatagca

SEQ ID NO: 5554093 - DNA, 25 bp, Homo sapien
tctaggtgaccttggacttgattaa

SEQ ID NO: 5554094 - DNA, 25 bp, Homo sapien
agttggacttaaaattcctggctgg

SEQ ID NO: 5554095 - DNA, 25 bp, Homo sapien
aaacggaccaacacagactgtaatt

SEQ ID NO: 5554096 - DNA, 25 bp, Homo sapien
aatggatcacaaatacacatgtaaa

SEQ ID NO: 5554097 - DNA, 25 bp, Homo sapien
caaaaaaacggaccaacacagactg

SEQ ID NO: 5554098 - DNA, 25 bp, Homo sapien
ttaacacaaaatggatcacaaatac

SEQ ID NO: 5554099 - DNA, 25 bp, Homo sapien
gacttgcatgaccgagatagcacca

SEQ ID NO: 5554100 - DNA, 25 bp, Homo sapien
gcaagtggtggtttaatgatcccag

SEQ ID NO: 5554101 - DNA, 25 bp, Homo sapien
taagacggactagatccgtggaaac

SEQ ID NO: 5554102 - DNA, 25 bp, Homo sapien
gaatctcccaggcacgtggtcctgt

SEQ ID NO: 5554103 - DNA, 25 bp, Homo sapien
ggacagcctgtcggaatctcccagg

SEQ ID NO: 5554104 - DNA, 25 bp, Homo sapien
atgatcccagtgagtgactggaatg

SEQ ID NO: 5554105 - DNA, 25 bp, Homo sapien
ggggcatatacttcctagtagaaca

SEQ ID NO: 5554106 - DNA, 25 bp, Homo sapien
cctgtcggaatctcccaggcacgtg

SEQ ID NO: 5554107 - DNA, 25 bp, Homo sapien
cggactagatccgtggaaacacgcg

SEQ ID NO: 5554108 - DNA, 25 bp, Homo sapien
cttcctagtagaacaaagaaagccc

SEQ ID NO: 5554109 - DNA, 25 bp, Homo sapien
gaatggcagtttggtgcagataaga

SEQ ID NO: 5554110 - DNA, 25 bp, Homo sapien
tgcagataagacggactagatccgt

SEQ ID NO: 5554111 - DNA, 25 bp, Homo sapien
aggtattggagtaaacctttgttca

SEQ ID NO: 5554112 - DNA, 25 bp, Homo sapien
aagaatggtgtagacaggttttcct

SEQ ID NO: 5554113 - DNA, 25 bp, Homo sapien
tggttttaaagaatggtgtagacag

SEQ ID NO: 5554114 - DNA, 25 bp, Homo sapien
taagaaatttgtaggtattggagta

SEQ ID NO: 5554115 - DNA, 25 bp, Homo sapien
atatgctcagtaaatgatagttctc

SEQ ID NO: 5554116 - DNA, 25 bp, Homo sapien
attattggttttaaagaatggtgta

SEQ ID NO: 5554117 - DNA, 25 bp, Homo sapien
tccttaaatggcctctgttgttctc

SEQ ID NO: 5554118 - DNA, 25 bp, Homo sapien
ttaaatggcctctgttgttctcctt

SEQ ID NO: 5554119 - DNA, 25 bp, Homo sapien
taaagaatggtgtagacaggttttc

SEQ ID NO: 5554120 - DNA, 25 bp, Homo sapien
caggttttccttaaatggcctctgt

SEQ ID NO: 5554121 - DNA, 25 bp, Homo sapien
gtgtattatatatgctcagtaaatg

SEQ ID NO: 5554122 - DNA, 25 bp, Homo sapien
atgtggaggaactccgactgatcca

SEQ ID NO: 5554123 - DNA, 25 bp, Homo sapien
aggaggtggctacattgtgtctatt

SEQ ID NO: 5554124 - DNA, 25 bp, Homo sapien
caaggctcgtttgaaggctgagttt

SEQ ID NO: 5554125 - DNA, 25 bp, Homo sapien
gcccctaccgcacaggctcatagcc

SEQ ID NO: 5554126 - DNA, 25 bp, Homo sapien
ggagtaagctacctgcccccagtcc

SEQ ID NO: 5554127 - DNA, 25 bp, Homo sapien
acatctctcgggacgtgaaattgac

SEQ ID NO: 5554128 - DNA, 25 bp, Homo sapien
ggcagatgagcaagaaatcatgtgc

SEQ ID NO: 5554129 - DNA, 25 bp, Homo sapien
tctgagaatgacctaaacaagctgc

SEQ ID NO: 5554130 - DNA, 25 bp, Homo sapien
ccctgacttgtgtgaagaagaggag

SEQ ID NO: 5554131 - DNA, 25 bp, Homo sapien
gccctgcgcatgactctgggcctgc

SEQ ID NO: 5554132 - DNA, 25 bp, Homo sapien
attgacagtgaaaagtatggcagat

SEQ ID NO: 5554133 - DNA, 25 bp, Homo sapien
tcgggtcatcaaaagtatgtccact

SEQ ID NO: 5554134 - DNA, 25 bp, Homo sapien
agtggacatacttttgatgacccga

SEQ ID NO: 5554135 - DNA, 25 bp, Homo sapien
gtcgctatcccaggaacacgggagg

SEQ ID NO: 5554136 - DNA, 25 bp, Homo sapien
ctggtgcagtcacgctctgcgtaac

SEQ ID NO: 5554137 - DNA, 25 bp, Homo sapien
ccaccccgtgacttccagcgttatc

SEQ ID NO: 5554138 - DNA, 25 bp, Homo sapien
cccggtggtactttatgtgagcagc

SEQ ID NO: 5554139 - DNA, 25 bp, Homo sapien
tcagtgaggtgttcccctgatcctc

SEQ ID NO: 5554140 - DNA, 25 bp, Homo sapien
gtgaaggagaaccgtgatccctttg

SEQ ID NO: 5554141 - DNA, 25 bp, Homo sapien
aaatggtggtcctatgtgattgtaa

SEQ ID NO: 5554142 - DNA, 25 bp, Homo sapien
gagggacctcatgtaaaatggtggt

SEQ ID NO: 5554143 - DNA, 25 bp, Homo sapien
ctaaggtctcacaacccggtggtac

SEQ ID NO: 5554144 - DNA, 25 bp, Homo sapien
agtgtttctgtcaacgagggacctc

SEQ ID NO: 5554145 - DNA, 25 bp, Homo sapien
tggggcacccaaaattcttcactac

SEQ ID NO: 5554146 - DNA, 25 bp, Homo sapien
aggcctgaagagattgacttgtcta

SEQ ID NO: 5554147 - DNA, 25 bp, Homo sapien
gtaataagcactaggaaagcaaatt

SEQ ID NO: 5554148 - DNA, 25 bp, Homo sapien
gatgtaacatggcgcccacctcttc

SEQ ID NO: 5554149 - DNA, 25 bp, Homo sapien
tttcagttgccacttgaggggaaca

SEQ ID NO: 5554150 - DNA, 25 bp, Homo sapien
gttagaagaaccagaaatagattgc

SEQ ID NO: 5554151 - DNA, 25 bp, Homo sapien
tccaaccacgctgttgcaggaagct

SEQ ID NO: 5554152 - DNA, 25 bp, Homo sapien
gtagaagagtagtgagcaacttaca

SEQ ID NO: 5554153 - DNA, 25 bp, Homo sapien
gcacaaaaaggccagatgtaacatg

SEQ ID NO: 5554154 - DNA, 25 bp, Homo sapien
gcaggctgatatcataggccaggtt

SEQ ID NO: 5554155 - DNA, 25 bp, Homo sapien
aggaagctccgagatgaaactacct

SEQ ID NO: 5554156 - DNA, 25 bp, Homo sapien
taccataggccaagttaccaggatt

SEQ ID NO: 5554157 - DNA, 25 bp, Homo sapien
gggactgggacccttgactcgtcat

SEQ ID NO: 5554158 - DNA, 25 bp, Homo sapien
gagttctgatattgtgttgataccc

SEQ ID NO: 5554159 - DNA, 25 bp, Homo sapien
ggttggaagctaattgagttctgat

SEQ ID NO: 5554160 - DNA, 25 bp, Homo sapien
acctgctgatggttggaagctaatt

SEQ ID NO: 5554161 - DNA, 25 bp, Homo sapien
gcccaggtgcttcctggtggtcctt

SEQ ID NO: 5554162 - DNA, 25 bp, Homo sapien
caccacacccaggaatgccggttaa

SEQ ID NO: 5554163 - DNA, 25 bp, Homo sapien
acaaagattcagctgaagccctcac

SEQ ID NO: 5554164 - DNA, 25 bp, Homo sapien
actgcttatgtcgctgaggtgccaa

SEQ ID NO: 5554165 - DNA, 25 bp, Homo sapien
tcattgtatgcacacctgaaactgc

SEQ ID NO: 5554166 - DNA, 25 bp, Homo sapien
ggaggagcaacaaagattcagctga

SEQ ID NO: 5554167 - DNA, 25 bp, Homo sapien
caggaatgccggttaagttttatat

SEQ ID NO: 5554168 - DNA, 25 bp, Homo sapien
ccagctccgtttccaaggacgagga

SEQ ID NO: 5554169 - DNA, 25 bp, Homo sapien
acatccctgcacggtagatacaacc

SEQ ID NO: 5554170 - DNA, 25 bp, Homo sapien
ctccgtttccaaggacgaggagcaa

SEQ ID NO: 5554171 - DNA, 25 bp, Homo sapien
tccctgcacggtagatacaaccagc

SEQ ID NO: 5554172 - DNA, 25 bp, Homo sapien
tgcacggtagatacaaccagctccg

SEQ ID NO: 5554173 - DNA, 25 bp, Homo sapien
catttccctgagttacactgaagat

SEQ ID NO: 5554174 - DNA, 25 bp, Homo sapien
agcaacagagtgaggtcatttccct

SEQ ID NO: 5554175 - DNA, 25 bp, Homo sapien
cctgagttacactgaagatggtccc

SEQ ID NO: 5554176 - DNA, 25 bp, Homo sapien
tccctgagttacactgaagatggtc

SEQ ID NO: 5554177 - DNA, 25 bp, Homo sapien
ggtagatacaaccagctccgtttcc

SEQ ID NO: 5554178 - DNA, 25 bp, Homo sapien
caaccagctccgtttccaaggacga

SEQ ID NO: 5554179 - DNA, 25 bp, Homo sapien
gaggcttcacgagcatgtcaggtga

SEQ ID NO: 5554180 - DNA, 25 bp, Homo sapien
atcagagtgttaccagtagagggtg

SEQ ID NO: 5554181 - DNA, 25 bp, Homo sapien
caataggactattaaccagaagcta

SEQ ID NO: 5554182 - DNA, 25 bp, Homo sapien
gtcaggtgatttatggcaggcttga

SEQ ID NO: 5554183 - DNA, 25 bp, Homo sapien
attggagcttaatcagagtgttacc

SEQ ID NO: 5554184 - DNA, 25 bp, Homo sapien
aatttaggcctgcagagagatgttt

SEQ ID NO: 5554185 - DNA, 25 bp, Homo sapien
tgggagaaaatgctgattgaaaatt

SEQ ID NO: 5554186 - DNA, 25 bp, Homo sapien
tatggcaggcttgaattggagctta

SEQ ID NO: 5554187 - DNA, 25 bp, Homo sapien
atgacaggagtcactatcaatataa

SEQ ID NO: 5554188 - DNA, 25 bp, Homo sapien
accctggtaagagtgggcatctatt

SEQ ID NO: 5554189 - DNA, 25 bp, Homo sapien
gaagacacatgtagagactctgcct

SEQ ID NO: 5554190 - DNA, 25 bp, Homo sapien
tgtagaaggacagaaaacaattgca

SEQ ID NO: 5554191 - DNA, 25 bp, Homo sapien
tatcgactttgcctcttatagacaa

SEQ ID NO: 5554192 - DNA, 25 bp, Homo sapien
tagacaagaaaacaccataggaatg

SEQ ID NO: 5554193 - DNA, 25 bp, Homo sapien
cccagcctacatccatcctttttat

SEQ ID NO: 5554194 - DNA, 25 bp, Homo sapien
ataaacccaatgcttggcagggcat

SEQ ID NO: 5554195 - DNA, 25 bp, Homo sapien
tcaaaatactagacaagaaaacacc

SEQ ID NO: 5554196 - DNA, 25 bp, Homo sapien
aaataaatatttgatcagataacca

SEQ ID NO: 5554197 - DNA, 25 bp, Homo sapien
aaaccaaataaacccaatgcttggc

SEQ ID NO: 5554198 - DNA, 25 bp, Homo sapien
aacaattgcaccaaggacaaaataa

SEQ ID NO: 5554199 - DNA, 25 bp, Homo sapien
tatagacaaacaatattcaaaatac

SEQ ID NO: 5554200 - DNA, 25 bp, Homo sapien
caccataggaatgagtgtagaagga

SEQ ID NO: 5554201 - DNA, 25 bp, Homo sapien
atgagaatacaaagtgagataaaaa

SEQ ID NO: 5554202 - DNA, 25 bp, Homo sapien
aaggatctttgcagctgacagcagt

SEQ ID NO: 5554203 - DNA, 25 bp, Homo sapien
gttgcttacacatgagagactggaa

SEQ ID NO: 5554204 - DNA, 25 bp, Homo sapien
ttgagcaaatgaatagatggaaaat

SEQ ID NO: 5554205 - DNA, 25 bp, Homo sapien
acattagatcggatatagttggtat

SEQ ID NO: 5554206 - DNA, 25 bp, Homo sapien
ttgatctaagaggtatttccccgac

SEQ ID NO: 5554207 - DNA, 25 bp, Homo sapien
atgagagactggaattaaccaacat

SEQ ID NO: 5554208 - DNA, 25 bp, Homo sapien
aatacagtgtgatagtacccctgtc

SEQ ID NO: 5554209 - DNA, 25 bp, Homo sapien
accattgtggtcattaggccatagg

SEQ ID NO: 5554210 - DNA, 25 bp, Homo sapien
cagtggatagaccttatgagaatac

SEQ ID NO: 5554211 - DNA, 25 bp, Homo sapien
taaccattacaaggtgattgagcaa

SEQ ID NO: 5554212 - DNA, 25 bp, Homo sapien
taacagattcagggctgttgggtgg

SEQ ID NO: 5554213 - DNA, 25 bp, Homo sapien
tgggagtgagaccgactcttcaatt

SEQ ID NO: 5554214 - DNA, 25 bp, Homo sapien
atactcttgggagttctagggcctt

SEQ ID NO: 5554215 - DNA, 25 bp, Homo sapien
ctcttcaatttgcgtgggagctggg

SEQ ID NO: 5554216 - DNA, 25 bp, Homo sapien
aaagtgccaccttctgcaggaggtc

SEQ ID NO: 5554217 - DNA, 25 bp, Homo sapien
aggcacaaatctggtatgcagactc

SEQ ID NO: 5554218 - DNA, 25 bp, Homo sapien
gggtgaggcctataactgctggctt

SEQ ID NO: 5554219 - DNA, 25 bp, Homo sapien
gtagcctggggcaagttttcatgcc

SEQ ID NO: 5554220 - DNA, 25 bp, Homo sapien
ggagagtctgagctcagacacgcct

SEQ ID NO: 5554221 - DNA, 25 bp, Homo sapien
gactcagcacaggcagccataatcc

SEQ ID NO: 5554222 - DNA, 25 bp, Homo sapien
atgtccctgacaacctgcatgactc

SEQ ID NO: 5554223 - DNA, 25 bp, Homo sapien
tcctggtgattgggtttacaagtac

SEQ ID NO: 5554224 - DNA, 25 bp, Homo sapien
tgttggtattggaggcttcaaaaac

SEQ ID NO: 5554225 - DNA, 25 bp, Homo sapien
agtgattaccagcaaacctcaggcc

SEQ ID NO: 5554226 - DNA, 25 bp, Homo sapien
ggtgtagtaaccatggtatgtcagc

SEQ ID NO: 5554227 - DNA, 25 bp, Homo sapien
agcaaagagatggccccactcatta

SEQ ID NO: 5554228 - DNA, 25 bp, Homo sapien
caggccaggctcactcaggactggc

SEQ ID NO: 5554229 - DNA, 25 bp, Homo sapien
tagctagacatgtgtagtgattacc

SEQ ID NO: 5554230 - DNA, 25 bp, Homo sapien
aaaattgtgcagaacccagattatc

SEQ ID NO: 5554231 - DNA, 25 bp, Homo sapien
tggcatgccagtaaggaacctggcc

SEQ ID NO: 5554232 - DNA, 25 bp, Homo sapien
cgtgacgataaattggtgtagtaac

SEQ ID NO: 5554233 - DNA, 25 bp, Homo sapien
actcaggactggctacccccaggaa

SEQ ID NO: 5554234 - DNA, 25 bp, Homo sapien
gtcagagctgtgcgtcatgtgctta

SEQ ID NO: 5554235 - DNA, 25 bp, Homo sapien
tgttgccctgttttgtaagagtgac

SEQ ID NO: 5554236 - DNA, 25 bp, Homo sapien
gagtgactgatggctacgtgacatc

SEQ ID NO: 5554237 - DNA, 25 bp, Homo sapien
tcatttatgccgtggagtgtgatgc

SEQ ID NO: 5554238 - DNA, 25 bp, Homo sapien
gacacttaggggacagtgtactgtc

SEQ ID NO: 5554239 - DNA, 25 bp, Homo sapien
ctgggaatagatgagataataagga

SEQ ID NO: 5554240 - DNA, 25 bp, Homo sapien
agcacagggacttcacgtctggact

SEQ ID NO: 5554241 - DNA, 25 bp, Homo sapien
catacgtcgatgtctgccgcctcag

SEQ ID NO: 5554242 - DNA, 25 bp, Homo sapien
gatgctgggaaatgaatgcttgctt

SEQ ID NO: 5554243 - DNA, 25 bp, Homo sapien
acctagaatggtacctggctcctgc

SEQ ID NO: 5554244 - DNA, 25 bp, Homo sapien
gtgatgcgtccagtagggacactta

SEQ ID NO: 5554245 - DNA, 25 bp, Homo sapien
ctcactctgttgctcctcgtccttg

SEQ ID NO: 5554246 - DNA, 25 bp, Homo sapien
gttgtatctaccgtgcagggatgta

SEQ ID NO: 5554247 - DNA, 25 bp, Homo sapien
gtatctaccgtgcagggatgtagag

SEQ ID NO: 5554248 - DNA, 25 bp, Homo sapien
ggagctggttgtatctaccgtgcag

SEQ ID NO: 5554249 - DNA, 25 bp, Homo sapien
acggagctggttgtatctaccgtgc

SEQ ID NO: 5554250 - DNA, 25 bp, Homo sapien
gggcttaaattaagatgctccaagc

SEQ ID NO: 5554251 - DNA, 25 bp, Homo sapien
gaaacggagctggttgtatctaccg

SEQ ID NO: 5554252 - DNA, 25 bp, Homo sapien
tcctcgtccttggaaacggagctgg

SEQ ID NO: 5554253 - DNA, 25 bp, Homo sapien
gttgctcctcgtccttggaaacgga

SEQ ID NO: 5554254 - DNA, 25 bp, Homo sapien
ctggttgtatctaccgtgcagggat

SEQ ID NO: 5554255 - DNA, 25 bp, Homo sapien
gggatgtagagggcttaaattaaga

SEQ ID NO: 5554256 - DNA, 25 bp, Homo sapien
aggctgttaaggataggtaactgac

SEQ ID NO: 5554257 - DNA, 25 bp, Homo sapien
agtatctgttacacggaggatggga

SEQ ID NO: 5554258 - DNA, 25 bp, Homo sapien
attcttttatagaggtagggtggta

SEQ ID NO: 5554259 - DNA, 25 bp, Homo sapien
acggctacagcaacttcaggtaagc

SEQ ID NO: 5554260 - DNA, 25 bp, Homo sapien
ccattcacagaagttgggagtggaa

SEQ ID NO: 5554261 - DNA, 25 bp, Homo sapien
tatggggttcgttattcagaagctc

SEQ ID NO: 5554262 - DNA, 25 bp, Homo sapien
gtctccccagacttgccaaacggct

SEQ ID NO: 5554263 - DNA, 25 bp, Homo sapien
tcaggtaagcttcatataggattgt

SEQ ID NO: 5554264 - DNA, 25 bp, Homo sapien
aaaaatgaagatggcaatatgcagt

SEQ ID NO: 5554265 - DNA, 25 bp, Homo sapien
agcaaaaataccagcagggacataa

SEQ ID NO: 5554266 - DNA, 25 bp, Homo sapien
gtcggaagtagcattgaaaaggtta

SEQ ID NO: 5554267 - DNA, 25 bp, Homo sapien
ggctgatgggagcattttaccgcct

SEQ ID NO: 5554268 - DNA, 25 bp, Homo sapien
accgcctggatgttgtaccttgact

SEQ ID NO: 5554269 - DNA, 25 bp, Homo sapien
atctctaagcatcagtttctccatc

SEQ ID NO: 5554270 - DNA, 25 bp, Homo sapien
ctccacatctctaagcatcagtttc

SEQ ID NO: 5554271 - DNA, 25 bp, Homo sapien
gagccactgcgccagtaagtggctg

SEQ ID NO: 5554272 - DNA, 25 bp, Homo sapien
ggggagtcaggcactcactccacat

SEQ ID NO: 5554273 - DNA, 25 bp, Homo sapien
gtgccaagccaggcaacttctgggg

SEQ ID NO: 5554274 - DNA, 25 bp, Homo sapien
gatgggagcattttaccgcctggat

SEQ ID NO: 5554275 - DNA, 25 bp, Homo sapien
cactgcgccagtaagtggctgatgg

SEQ ID NO: 5554276 - DNA, 25 bp, Homo sapien
aaccccaaccaagccctgaagctgg

SEQ ID NO: 5554277 - DNA, 25 bp, Homo sapien
agagtgccaagccaggcaacttctg

SEQ ID NO: 5554278 - DNA, 25 bp, Homo sapien
ggcaggaacttgtcctgtctgggac

SEQ ID NO: 5554279 - DNA, 25 bp, Homo sapien
tcgaggcctgtcccacctgtgccca

SEQ ID NO: 5554280 - DNA, 25 bp, Homo sapien
ggactcgaggcctgtcccacctgtg

SEQ ID NO: 5554281 - DNA, 25 bp, Homo sapien
gcggcccacccctgccttcgtgcca

SEQ ID NO: 5554282 - DNA, 25 bp, Homo sapien
ccactgctggctcacctgtgacacc

SEQ ID NO: 5554283 - DNA, 25 bp, Homo sapien
gcctggtggatcaccactcctgtct

SEQ ID NO: 5554284 - DNA, 25 bp, Homo sapien
ctcactgtggctcccttcagcgggg

SEQ ID NO: 5554285 - DNA, 25 bp, Homo sapien
gctcacctgtgacaccccaggcagc

SEQ ID NO: 5554286 - DNA, 25 bp, Homo sapien
acccctgccttcgtgccatccttcc

SEQ ID NO: 5554287 - DNA, 25 bp, Homo sapien
catgacacgtcacttcccacccgcc

SEQ ID NO: 5554288 - DNA, 25 bp, Homo sapien
ccagggctcactgtggctcccttca

SEQ ID NO: 5554289 - DNA, 25 bp, Homo sapien
ctctgtttaagggtggtatcaaagg

SEQ ID NO: 5554290 - DNA, 25 bp, Homo sapien
tcacgtatgagtagcaagaaaacag

SEQ ID NO: 5554291 - DNA, 25 bp, Homo sapien
ttcacccagtccacttgaagccaca

SEQ ID NO: 5554292 - DNA, 25 bp, Homo sapien
ctgaatgttcagggcctcggaattc

SEQ ID NO: 5554293 - DNA, 25 bp, Homo sapien
gtatgctggggaatagtttgtatag

SEQ ID NO: 5554294 - DNA, 25 bp, Homo sapien
aaaggtgaccttcagtctttctttc

SEQ ID NO: 5554295 - DNA, 25 bp, Homo sapien
cagggtggccgttttaccctcctga

SEQ ID NO: 5554296 - DNA, 25 bp, Homo sapien
agggcctcttcctggatcttgtcgg

SEQ ID NO: 5554297 - DNA, 25 bp, Homo sapien
ggatcttgtcggtaccactgtaagt

SEQ ID NO: 5554298 - DNA, 25 bp, Homo sapien
gttcagggcctcggaattctgttct

SEQ ID NO: 5554299 - DNA, 25 bp, Homo sapien
cactgtaagtatgctggggaatagt

SEQ ID NO: 5554300 - DNA, 25 bp, Homo sapien
cgacattgtagatcatggatttggg

SEQ ID NO: 5554301 - DNA, 25 bp, Homo sapien
aggccgtattgccagacttggactc

SEQ ID NO: 5554302 - DNA, 25 bp, Homo sapien
ggactgtgcctgggtattgttggta

SEQ ID NO: 5554303 - DNA, 25 bp, Homo sapien
tagtcataacgcccaacatcaccac

SEQ ID NO: 5554304 - DNA, 25 bp, Homo sapien
ctgagggctgaatatcgacattgta

SEQ ID NO: 5554305 - DNA, 25 bp, Homo sapien
ttgtagatcatggatttggggactg

SEQ ID NO: 5554306 - DNA, 25 bp, Homo sapien
tgccagacttggactcagagaaacg

SEQ ID NO: 5554307 - DNA, 25 bp, Homo sapien
gagacatagtcataacgcccaacat

SEQ ID NO: 5554308 - DNA, 25 bp, Homo sapien
gttggtacccggagacatagtcata

SEQ ID NO: 5554309 - DNA, 25 bp, Homo sapien
gtattgttggtacccggagacatag

SEQ ID NO: 5554310 - DNA, 25 bp, Homo sapien
acttggactcagagaaacgatgagg

SEQ ID NO: 5554311 - DNA, 25 bp, Homo sapien
ctgggatcattaaaccaccacttgc

SEQ ID NO: 5554312 - DNA, 25 bp, Homo sapien
agtcactcactgggatcattaaacc

SEQ ID NO: 5554313 - DNA, 25 bp, Homo sapien
tttcaaacagaattaacagaattta

SEQ ID NO: 5554314 - DNA, 25 bp, Homo sapien
actaggaagtatatgcccccaaatt

SEQ ID NO: 5554315 - DNA, 25 bp, Homo sapien
gctgtccttccgccccccaccgaga

SEQ ID NO: 5554316 - DNA, 25 bp, Homo sapien
ggatctagtccgtcttatctgcacc

SEQ ID NO: 5554317 - DNA, 25 bp, Homo sapien
gtccgtcttatctgcaccaaactgc

SEQ ID NO: 5554318 - DNA, 25 bp, Homo sapien
ccacttgcagttttccagggctttc

SEQ ID NO: 5554319 - DNA, 25 bp, Homo sapien
tgcaccaaactgccattccagtcac

SEQ ID NO: 5554320 - DNA, 25 bp, Homo sapien
cgggcgcgtgtttccacggatctag

SEQ ID NO: 5554321 - DNA, 25 bp, Homo sapien
tgttctactaggaagtatatgcccc

SEQ ID NO: 5554322 - DNA, 25 bp, Homo sapien
atgccataaaagagagccatgatct

SEQ ID NO: 5554323 - DNA, 25 bp, Homo sapien
gacaatgccataaaagagagccatg

SEQ ID NO: 5554324 - DNA, 25 bp, Homo sapien
cttcccccggtcatgagaatagcta

SEQ ID NO: 5554325 - DNA, 25 bp, Homo sapien
ggtgtgacaatgccataaaagagag

SEQ ID NO: 5554326 - DNA, 25 bp, Homo sapien
cttctcagggcagctttcacatcct

SEQ ID NO: 5554327 - DNA, 25 bp, Homo sapien
ggaggctggacatacatactgatgg

SEQ ID NO: 5554328 - DNA, 25 bp, Homo sapien
gagagccatgatcttcccccggtca

SEQ ID NO: 5554329 - DNA, 25 bp, Homo sapien
cccggtcatgagaatagctagaggg

SEQ ID NO: 5554330 - DNA, 25 bp, Homo sapien
atactgatggctgtgaagtagaaga

SEQ ID NO: 5554331 - DNA, 25 bp, Homo sapien
acatacatactgatggctgtgaagt

SEQ ID NO: 5554332 - DNA, 25 bp, Homo sapien
ccttgtttctcaatgtgtagatgaa

SEQ ID NO: 5554333 - DNA, 25 bp, Homo sapien
gccgtcccggagttcactgctggca

SEQ ID NO: 5554334 - DNA, 25 bp, Homo sapien
ggaattaactccataggaatagtgg

SEQ ID NO: 5554335 - DNA, 25 bp, Homo sapien
ttctggagactgttgactcagagga

SEQ ID NO: 5554336 - DNA, 25 bp, Homo sapien
tccgtccttattctggagactgttg

SEQ ID NO: 5554337 - DNA, 25 bp, Homo sapien
ttaactccataggaatagtggatga

SEQ ID NO: 5554338 - DNA, 25 bp, Homo sapien
tggagactgttgactcagaggaaag

SEQ ID NO: 5554339 - DNA, 25 bp, Homo sapien
tctgtggaattaactccataggaat

SEQ ID NO: 5554340 - DNA, 25 bp, Homo sapien
gtcaggggaaaatgctccgtcctta

SEQ ID NO: 5554341 - DNA, 25 bp, Homo sapien
cttattctggagactgttgactcag

SEQ ID NO: 5554342 - DNA, 25 bp, Homo sapien
ctcccttctctgtggaattaactcc

SEQ ID NO: 5554343 - DNA, 25 bp, Homo sapien
agaggaaagatctcccttctctgtg

SEQ ID NO: 5554344 - DNA, 25 bp, Homo sapien
caaatgctcgttctctccagggttc

SEQ ID NO: 5554345 - DNA, 25 bp, Homo sapien
aagagattaaagtttcaatgctgtt

SEQ ID NO: 5554346 - DNA, 25 bp, Homo sapien
cttatggataagtctcagaatggag

SEQ ID NO: 5554347 - DNA, 25 bp, Homo sapien
agaagtcggattaaagtgagtattc

SEQ ID NO: 5554348 - DNA, 25 bp, Homo sapien
aagaaaattcttggcaatgccaccc

SEQ ID NO: 5554349 - DNA, 25 bp, Homo sapien
gataagtctcagaatggagagaagg

SEQ ID NO: 5554350 - DNA, 25 bp, Homo sapien
tcgttctctccagggttcagtgaat

SEQ ID NO: 5554351 - DNA, 25 bp, Homo sapien
agaaggtgaatacaattgtgaaacc

SEQ ID NO: 5554352 - DNA, 25 bp, Homo sapien
tgtgaaaccatatcaaagaaaattc

SEQ ID NO: 5554353 - DNA, 25 bp, Homo sapien
gcaatgccaccctttttaagaagtc

SEQ ID NO: 5554354 - DNA, 25 bp, Homo sapien
aatcatatctcttaagtgaaccctt

SEQ ID NO: 5554355 - DNA, 25 bp, Homo sapien
ggccgccctgcactgtaccggtgtt

SEQ ID NO: 5554356 - DNA, 25 bp, Homo sapien
aacaccggtacagtgcagggcggcc

SEQ ID NO: 5554357 - DNA, 25 bp, Homo sapien
tgggctctggtgaaccgtcacattc

SEQ ID NO: 5554358 - DNA, 25 bp, Homo sapien
acagttcctaagccaggcaaagggg

SEQ ID NO: 5554359 - DNA, 25 bp, Homo sapien
ttcccaaaggaagttgtgaggatga

SEQ ID NO: 5554360 - DNA, 25 bp, Homo sapien
aaggggctgatttgagtaagcctcc

SEQ ID NO: 5554361 - DNA, 25 bp, Homo sapien
tccacaatggatgatgctgttgcgg

SEQ ID NO: 5554362 - DNA, 25 bp, Homo sapien
gccgctccaatggcatgtgggcaca

SEQ ID NO: 5554363 - DNA, 25 bp, Homo sapien
tcagtacacaataaggtgccgacct

SEQ ID NO: 5554364 - DNA, 25 bp, Homo sapien
aaagaaagaagaacctcaggaatta

SEQ ID NO: 5554365 - DNA, 25 bp, Homo sapien
gacatcaaagagagtttagagagtg

SEQ ID NO: 5554366 - DNA, 25 bp, Homo sapien
atcaggatctcatagaccgaggatg

SEQ ID NO: 5554367 - DNA, 25 bp, Homo sapien
caagatttcgtaggagagaagttgg

SEQ ID NO: 5554368 - DNA, 25 bp, Homo sapien
gatccctgagcgattctccggctcc

SEQ ID NO: 5554369 - DNA, 25 bp, Homo sapien
gacagacagccaccatcccctgctc

SEQ ID NO: 5554370 - DNA, 25 bp, Homo sapien
cctgctctggagataatttggggga

SEQ ID NO: 5554371 - DNA, 25 bp, Homo sapien
agccactctgaccatcagcgggacc

SEQ ID NO: 5554372 - DNA, 25 bp, Homo sapien
atttgggggataaatatgcttcctg

SEQ ID NO: 5554373 - DNA, 25 bp, Homo sapien
tgggacaccaacactgcggtattcg

SEQ ID NO: 5554374 - DNA, 25 bp, Homo sapien
cctggtttcagcagaagccaggcca

SEQ ID NO: 5554375 - DNA, 25 bp, Homo sapien
caagcggccctcagggatccctgag

SEQ ID NO: 5554376 - DNA, 25 bp, Homo sapien
cggctccaactctgggagcacagcc

SEQ ID NO: 5554377 - DNA, 25 bp, Homo sapien
aggctatggatgaggctgactatta

SEQ ID NO: 5554378 - DNA, 25 bp, Homo sapien
gactattactgtcaggcgtgggaca

SEQ ID NO: 5554379 - DNA, 25 bp, Homo sapien
gcgtactttctttgggcaatggcag

SEQ ID NO: 5554380 - DNA, 25 bp, Homo sapien
ctaatgccgagatttcacttccccc

SEQ ID NO: 5554381 - DNA, 25 bp, Homo sapien
cccccggcgccttccctcctgcgta

SEQ ID NO: 5554382 - DNA, 25 bp, Homo sapien
tgccgagatttcacttccccccgac

SEQ ID NO: 5554383 - DNA, 25 bp, Homo sapien
cctgcgtactttctttgggcaatgg

SEQ ID NO: 5554384 - DNA, 25 bp, Homo sapien
cccggcgccttccctcctgcgtact

SEQ ID NO: 5554385 - DNA, 25 bp, Homo sapien
tactttctttgggcaatggcagagg

SEQ ID NO: 5554386 - DNA, 25 bp, Homo sapien
aatgccgagatttcacttccccccg

SEQ ID NO: 5554387 - DNA, 25 bp, Homo sapien
tttcacttccccccgactcctgcgc

SEQ ID NO: 5554388 - DNA, 25 bp, Homo sapien
cgggggttctaatgccgagatttca

SEQ ID NO: 5554389 - DNA, 25 bp, Homo sapien
gggggttctaatgccgagatttcac

SEQ ID NO: 5554390 - DNA, 25 bp, Homo sapien
gccccgtccagcacagacggggaac

SEQ ID NO: 5554391 - DNA, 25 bp, Homo sapien
ttgctcctgggccatgtgtgtttgg

SEQ ID NO: 5554392 - DNA, 25 bp, Homo sapien
ccatgttgttacccaccccagcccg

SEQ ID NO: 5554393 - DNA, 25 bp, Homo sapien
tctgaccatcccccactgtccagtc

SEQ ID NO: 5554394 - DNA, 25 bp, Homo sapien
aggaccttcgcccactccacggccc

SEQ ID NO: 5554395 - DNA, 25 bp, Homo sapien
ccacaaacacggacccacaggttct

SEQ ID NO: 5554396 - DNA, 25 bp, Homo sapien
gtggatctgtaggtttccccgaggc

SEQ ID NO: 5554397 - DNA, 25 bp, Homo sapien
gcaggctgaggtctccccatttgct

SEQ ID NO: 5554398 - DNA, 25 bp, Homo sapien
ccagcccgatgttcggggtcctgtg

SEQ ID NO: 5554399 - DNA, 25 bp, Homo sapien
ccagcgtccatccctgtcctcgggc

SEQ ID NO: 5554400 - DNA, 25 bp, Homo sapien
ctgtcctgttgacctcccagcgtcc

SEQ ID NO: 5554401 - DNA, 25 bp, Homo sapien
atcgctcagggatccctgagggccg

SEQ ID NO: 5554402 - DNA, 25 bp, Homo sapien
ctgagggccgcttgttatcttgata

SEQ ID NO: 5554403 - DNA, 25 bp, Homo sapien
acgcctgacagtaatagtcagcctc

SEQ ID NO: 5554404 - DNA, 25 bp, Homo sapien
gtcagcctcatccatagcctgggtc

SEQ ID NO: 5554405 - DNA, 25 bp, Homo sapien
ctgaaaccaggaagcatatttatcc

SEQ ID NO: 5554406 - DNA, 25 bp, Homo sapien
aaattatctccagagcaggggatgg

SEQ ID NO: 5554407 - DNA, 25 bp, Homo sapien
tgtgctcccagagttggagccggag

SEQ ID NO: 5554408 - DNA, 25 bp, Homo sapien
tccatagcctgggtcccgctgatgg

SEQ ID NO: 5554409 - DNA, 25 bp, Homo sapien
ggactggcctggcttctgctgaaac

SEQ ID NO: 5554410 - DNA, 25 bp, Homo sapien
cagtgttggtgtcccacgcctgaca

SEQ ID NO: 5554411 - DNA, 25 bp, Homo sapien
tatcttgatagatgaccaggacagg

SEQ ID NO: 5554412 - DNA, 25 bp, Homo sapien
ttgagggctcacttcagaaatgtcc

SEQ ID NO: 5554413 - DNA, 25 bp, Homo sapien
gaaatgtccctcactgctgtggcct

SEQ ID NO: 5554414 - DNA, 25 bp, Homo sapien
caagtgaatggcatgaccattgttc

SEQ ID NO: 5554415 - DNA, 25 bp, Homo sapien
ggtacaattcgcacagcaatatagc

SEQ ID NO: 5554416 - DNA, 25 bp, Homo sapien
agcttgggaaacactgtgagcattg

SEQ ID NO: 5554417 - DNA, 25 bp, Homo sapien
cacaggtctaaatagtggtaggggt

SEQ ID NO: 5554418 - DNA, 25 bp, Homo sapien
ttgcaggcttcacgagatcaattcc

SEQ ID NO: 5554419 - DNA, 25 bp, Homo sapien
gaaacactgtgagcattgagggctc

SEQ ID NO: 5554420 - DNA, 25 bp, Homo sapien
ttgctgtgaatggtacaattcgcac

SEQ ID NO: 5554421 - DNA, 25 bp, Homo sapien
gcagtgaacaggctgcaagtgaatg

SEQ ID NO: 5554422 - DNA, 25 bp, Homo sapien
ctgggcatgcattgagcacagttct

SEQ ID NO: 5554423 - DNA, 25 bp, Homo sapien
cttgtgaactactgggaacgtaagg

SEQ ID NO: 5554424 - DNA, 25 bp, Homo sapien
aggtcttgtgaactactgggaacgt

SEQ ID NO: 5554425 - DNA, 25 bp, Homo sapien
tgttgccccaggtcttgtgaactac

SEQ ID NO: 5554426 - DNA, 25 bp, Homo sapien
acgggtgccaactgaaacttggatg

SEQ ID NO: 5554427 - DNA, 25 bp, Homo sapien
gggggagaatctcatcgtagtggta

SEQ ID NO: 5554428 - DNA, 25 bp, Homo sapien
agtggccccacttcagggtctccct

SEQ ID NO: 5554429 - DNA, 25 bp, Homo sapien
accatacgggtgccaactgaaactt

SEQ ID NO: 5554430 - DNA, 25 bp, Homo sapien
ataggatctaatttaattggtgcat

SEQ ID NO: 5554431 - DNA, 25 bp, Homo sapien
atgggaagacttaagtggccccact

SEQ ID NO: 5554432 - DNA, 25 bp, Homo sapien
gtctccctgttgccccaggtcttgt

SEQ ID NO: 5554433 - DNA, 25 bp, Homo sapien
gagaatctcatcgtagtggtaggtg

SEQ ID NO: 5554434 - DNA, 25 bp, Homo sapien
acaggaatacctcccagtgccctag

SEQ ID NO: 5554435 - DNA, 25 bp, Homo sapien
cttagacctggatacccccccctca

SEQ ID NO: 5554436 - DNA, 25 bp, Homo sapien
cggtcgtcacggtacacactgtcga

SEQ ID NO: 5554437 - DNA, 25 bp, Homo sapien
tgggaaaccatgatgaggacttaga

SEQ ID NO: 5554438 - DNA, 25 bp, Homo sapien
tagccaccacttacaggcggtcgtc

SEQ ID NO: 5554439 - DNA, 25 bp, Homo sapien
aagaaccggcttaaaacccacagca

SEQ ID NO: 5554440 - DNA, 25 bp, Homo sapien
gtcgatgcagaatgctaacaatctc

SEQ ID NO: 5554441 - DNA, 25 bp, Homo sapien
taggttacagcaccatgagcccaca

SEQ ID NO: 5554442 - DNA, 25 bp, Homo sapien
accccttgtcagccggggtcgatgt

SEQ ID NO: 5554443 - DNA, 25 bp, Homo sapien
gagatctgggagctacagaatgttc

SEQ ID NO: 5554444 - DNA, 25 bp, Homo sapien
cctccacgccaagatgagatctggg

SEQ ID NO: 5554445 - DNA, 25 bp, Homo sapien
ataagagttgaccaggtgaaatacc

SEQ ID NO: 5554446 - DNA, 25 bp, Homo sapien
tagggttgagattagtcatggacag

SEQ ID NO: 5554447 - DNA, 25 bp, Homo sapien
gcgctacagcttgcaatgtgccgat

SEQ ID NO: 5554448 - DNA, 25 bp, Homo sapien
tgggcctgtagtgtattcgatgtta

SEQ ID NO: 5554449 - DNA, 25 bp, Homo sapien
aatggccagggtaacttcgtataaa

SEQ ID NO: 5554450 - DNA, 25 bp, Homo sapien
ctagaaaaatgatagtggttagggt

SEQ ID NO: 5554451 - DNA, 25 bp, Homo sapien
gaagaatacaggaaatgggcctgta

SEQ ID NO: 5554452 - DNA, 25 bp, Homo sapien
aacgctagtgtaagagatagaaatc

SEQ ID NO: 5554453 - DNA, 25 bp, Homo sapien
tctgatgataggattgagtagacga

SEQ ID NO: 5554454 - DNA, 25 bp, Homo sapien
tgaaaggtgtcatacgcataacgct

SEQ ID NO: 5554455 - DNA, 25 bp, Homo sapien
aggacttatagtaatggccagggta

SEQ ID NO: 5554456 - DNA, 25 bp, Homo sapien
taccgcggctcagccctggactaag

SEQ ID NO: 5554457 - DNA, 25 bp, Homo sapien
gctcgccctgaactactcctgcccc

SEQ ID NO: 5554458 - DNA, 25 bp, Homo sapien
gaccctcgcctgaacacgccctaca

SEQ ID NO: 5554459 - DNA, 25 bp, Homo sapien
cgtgccccggactacagcacggaag

SEQ ID NO: 5554460 - DNA, 25 bp, Homo sapien
gactatgctactgaaggacctctac

SEQ ID NO: 5554461 - DNA, 25 bp, Homo sapien
acctgcaacgccgtgcgctagacta

SEQ ID NO: 5554462 - DNA, 25 bp, Homo sapien
gccctggactgtggttccagaggac

SEQ ID NO: 5554463 - DNA, 25 bp, Homo sapien
ccacaccttgccgtgccccggacta

SEQ ID NO: 5554464 - DNA, 25 bp, Homo sapien
accctggactactgcacgccaagac

SEQ ID NO: 5554465 - DNA, 25 bp, Homo sapien
tgtcctggactgtgcactgcagaac

SEQ ID NO: 5554466 - DNA, 25 bp, Homo sapien
ttccacgccctagaccaaggcacgg

SEQ ID NO: 5554467 - DNA, 25 bp, Homo sapien
acaatagtgcaaaggtaattcattt

SEQ ID NO: 5554468 - DNA, 25 bp, Homo sapien
agcaatggtctcaagtggtagtaac

SEQ ID NO: 5554469 - DNA, 25 bp, Homo sapien
gtaaagagtgtatgggaatgctttt

SEQ ID NO: 5554470 - DNA, 25 bp, Homo sapien
aatggtgatgaaacacttggatatc

SEQ ID NO: 5554471 - DNA, 25 bp, Homo sapien
tgcagaccagggatgtcactaaata

SEQ ID NO: 5554472 - DNA, 25 bp, Homo sapien
tcaccatcacacacacgaaaatgcc

SEQ ID NO: 5554473 - DNA, 25 bp, Homo sapien
aactcttcagggcaatagactatac

SEQ ID NO: 5554474 - DNA, 25 bp, Homo sapien
tattggagaaaggatacatagatca

SEQ ID NO: 5554475 - DNA, 25 bp, Homo sapien
gagcagagcagagcatccataaata

SEQ ID NO: 5554476 - DNA, 25 bp, Homo sapien
gaacagaaacttggtaaagagtgta

SEQ ID NO: 5554477 - DNA, 25 bp, Homo sapien
atacaacttctagagcaatggtctc

SEQ ID NO: 5554478 - DNA, 25 bp, Homo sapien
tgattccatctgcacgggcacctcc

SEQ ID NO: 5554479 - DNA, 25 bp, Homo sapien
gatggggaatgagttgaccttccta

SEQ ID NO: 5554480 - DNA, 25 bp, Homo sapien
gcataggcaacggaacccagattta

SEQ ID NO: 5554481 - DNA, 25 bp, Homo sapien
catctccaggcaaagccactgaggt

SEQ ID NO: 5554482 - DNA, 25 bp, Homo sapien
aacaggggtctatgtgaaaatgccc

SEQ ID NO: 5554483 - DNA, 25 bp, Homo sapien
actgaagtctgtgcggcaacctaca

SEQ ID NO: 5554484 - DNA, 25 bp, Homo sapien
tggacacgggactctacatctgcaa

SEQ ID NO: 5554485 - DNA, 25 bp, Homo sapien
ctcactatccaaggactgagggcca

SEQ ID NO: 5554486 - DNA, 25 bp, Homo sapien
ggagctcatgtacccaccgccatac

SEQ ID NO: 5554487 - DNA, 25 bp, Homo sapien
cgaggcatcgccagctttgtgtgtg

SEQ ID NO: 5554488 - DNA, 25 bp, Homo sapien
tccagtggaaatcaagtgaacctca

SEQ ID NO: 5554489 - DNA, 25 bp, Homo sapien
ggtcaactttaggattctagaaggc

SEQ ID NO: 5554490 - DNA, 25 bp, Homo sapien
ctttaggattctagaaggcataacc

SEQ ID NO: 5554491 - DNA, 25 bp, Homo sapien
tcttcttggcttcaggtcaacttta

SEQ ID NO: 5554492 - DNA, 25 bp, Homo sapien
ttaggattctagaaggcataaccat

SEQ ID NO: 5554493 - DNA, 25 bp, Homo sapien
cttggcttcaggtcaactttaggat

SEQ ID NO: 5554494 - DNA, 25 bp, Homo sapien
tggcttcaggtcaactttaggattc

SEQ ID NO: 5554495 - DNA, 25 bp, Homo sapien
tcaccagaattttcttcttggcttc

SEQ ID NO: 5554496 - DNA, 25 bp, Homo sapien
actttaggattctagaaggcataac

SEQ ID NO: 5554497 - DNA, 25 bp, Homo sapien
ttcaggtcaactttaggattctaga

SEQ ID NO: 5554498 - DNA, 25 bp, Homo sapien
ggctccacttctcccatcaccagaa

SEQ ID NO: 5554499 - DNA, 25 bp, Homo sapien
caactttaggattctagaaggcata

SEQ ID NO: 5554500 - DNA, 25 bp, Homo sapien
ggagcgcctgtagttgtatgaatga

SEQ ID NO: 5554501 - DNA, 25 bp, Homo sapien
ctatcccccaaggtccgtaatccca

SEQ ID NO: 5554502 - DNA, 25 bp, Homo sapien
cagtgtccgccatattgatcagaac

SEQ ID NO: 5554503 - DNA, 25 bp, Homo sapien
tggaggatcaagtgtctgctgttca

SEQ ID NO: 5554504 - DNA, 25 bp, Homo sapien
ttgaagtaagtccctgtggcattgg

SEQ ID NO: 5554505 - DNA, 25 bp, Homo sapien
ggacccagccctagactggggtgga

SEQ ID NO: 5554506 - DNA, 25 bp, Homo sapien
ctccctacgttggttctgggtcctc

SEQ ID NO: 5554507 - DNA, 25 bp, Homo sapien
ctgtggcattgggattcgtactttt

SEQ ID NO: 5554508 - DNA, 25 bp, Homo sapien
agttgtatgaatgacagtgtccgcc

SEQ ID NO: 5554509 - DNA, 25 bp, Homo sapien
tttcctggggcagtgattttgaact

SEQ ID NO: 5554510 - DNA, 25 bp, Homo sapien
ttttgaacttggctaacatggaggg

SEQ ID NO: 5554511 - DNA, 25 bp, Homo sapien
gaagaaacagagatatgtgaccttt

SEQ ID NO: 5554512 - DNA, 25 bp, Homo sapien
tgaactaaataagacaccaggaacc

SEQ ID NO: 5554513 - DNA, 25 bp, Homo sapien
ggtacaaacaagcccagatagagaa

SEQ ID NO: 5554514 - DNA, 25 bp, Homo sapien
ttctagagttggaaaacgcaattaa

SEQ ID NO: 5554515 - DNA, 25 bp, Homo sapien
aacataagcatccagaccatccaag

SEQ ID NO: 5554516 - DNA, 25 bp, Homo sapien
agcccagatagagaagactacaata

SEQ ID NO: 5554517 - DNA, 25 bp, Homo sapien
ccaagactaccaaggcagtacctct

SEQ ID NO: 5554518 - DNA, 25 bp, Homo sapien
gtttgagagaacataatggaaaaga

SEQ ID NO: 5554519 - DNA, 25 bp, Homo sapien
gcctttccaagaaggatgggtacaa

SEQ ID NO: 5554520 - DNA, 25 bp, Homo sapien
cacatcactattgggcttggggtgc

SEQ ID NO: 5554521 - DNA, 25 bp, Homo sapien
atgcagatatgacttagaccacaac

SEQ ID NO: 5554522 - DNA, 25 bp, Homo sapien
actattcaggtgtattgatgtagac

SEQ ID NO: 5554523 - DNA, 25 bp, Homo sapien
tccaactattcaggtgtattgatgt

SEQ ID NO: 5554524 - DNA, 25 bp, Homo sapien
attcaggtgtattgatgtagacagc

SEQ ID NO: 5554525 - DNA, 25 bp, Homo sapien
agcctaactttctatttcactgtgc

SEQ ID NO: 5554526 - DNA, 25 bp, Homo sapien
gtattgatgtagacagcagaatctc

SEQ ID NO: 5554527 - DNA, 25 bp, Homo sapien
agttagaattagttaaaagatttca

SEQ ID NO: 5554528 - DNA, 25 bp, Homo sapien
tgatgtagacagcagaatctcttct

SEQ ID NO: 5554529 - DNA, 25 bp, Homo sapien
ttctgtccaactattcaggtgtatt

SEQ ID NO: 5554530 - DNA, 25 bp, Homo sapien
tcaggtgtattgatgtagacagcag

SEQ ID NO: 5554531 - DNA, 25 bp, Homo sapien
ttcactgtgcttcatagttagaatt

SEQ ID NO: 5554532 - DNA, 25 bp, Homo sapien
tcatagttagaattagttaaaagat

SEQ ID NO: 5554533 - DNA, 25 bp, Homo sapien
gtcagtggaagcctctcctctgggc

SEQ ID NO: 5554534 - DNA, 25 bp, Homo sapien
aatacaacagcaactgagacgcttc

SEQ ID NO: 5554535 - DNA, 25 bp, Homo sapien
aacaaagaggaatacatggcattca

SEQ ID NO: 5554536 - DNA, 25 bp, Homo sapien
tggttacattgatctgggccgagag

SEQ ID NO: 5554537 - DNA, 25 bp, Homo sapien
tgccaaggtcattcagaacctggcc

SEQ ID NO: 5554538 - DNA, 25 bp, Homo sapien
cagcgagaggctcatcagtgcctca

SEQ ID NO: 5554539 - DNA, 25 bp, Homo sapien
caggagtatcctgatgaccgcacat

SEQ ID NO: 5554540 - DNA, 25 bp, Homo sapien
tttttagaacatgaatggggtggaa

SEQ ID NO: 5554541 - DNA, 25 bp, Homo sapien
gggtggaatgaagcgctttcttttg

SEQ ID NO: 5554542 - DNA, 25 bp, Homo sapien
tccttcctacaggcgaccgtggcaa

SEQ ID NO: 5554543 - DNA, 25 bp, Homo sapien
tggcaaaattggggcctctccctcg

SEQ ID NO: 5554544 - DNA, 25 bp, Homo sapien
gggcctctcctcggagccggggcat

SEQ ID NO: 5554545 - DNA, 25 bp, Homo sapien
atgccccggctccgaggagaggccc

SEQ ID NO: 5554546 - DNA, 25 bp, Homo sapien
tactgctggctttgttgctggctgc

SEQ ID NO: 5554547 - DNA, 25 bp, Homo sapien
cgacccctcccgtgatcagagcagg

SEQ ID NO: 5554548 - DNA, 25 bp, Homo sapien
agggagtttccggagattttgccca

SEQ ID NO: 5554549 - DNA, 25 bp, Homo sapien
aggggcaccttcagaacttcacacc

SEQ ID NO: 5554550 - DNA, 25 bp, Homo sapien
gctttcccatccctggggcctcggc

SEQ ID NO: 5554551 - DNA, 25 bp, Homo sapien
cccaggtgagaaccaaggcctgggt

SEQ ID NO: 5554552 - DNA, 25 bp, Homo sapien
gcccaggcggcctttactgctggct

SEQ ID NO: 5554553 - DNA, 25 bp, Homo sapien
gcccacagcaacggccattagagcc

SEQ ID NO: 5554554 - DNA, 25 bp, Homo sapien
gagtgcgggccgcttatctcggccc

SEQ ID NO: 5554555 - DNA, 25 bp, Homo sapien
atctccagcctgggtttagggctcc

SEQ ID NO: 5554556 - DNA, 25 bp, Homo sapien
gcccagcagttcaacccgggatctg

SEQ ID NO: 5554557 - DNA, 25 bp, Homo sapien
ccatgaggcctgcctgactgcatgc

SEQ ID NO: 5554558 - DNA, 25 bp, Homo sapien
gcgtcccggccattgtctggaagct

SEQ ID NO: 5554559 - DNA, 25 bp, Homo sapien
tcccgaagcccccctgcaagttgga

SEQ ID NO: 5554560 - DNA, 25 bp, Homo sapien
agcagctttcgccgcacccacgtgt

SEQ ID NO: 5554561 - DNA, 25 bp, Homo sapien
cacgcagacgctgccatccagcagc

SEQ ID NO: 5554562 - DNA, 25 bp, Homo sapien
tgagtgagtcaaccaggaaattcgt

SEQ ID NO: 5554563 - DNA, 25 bp, Homo sapien
gcacccacgtgtacactgcgtccac

SEQ ID NO: 5554564 - DNA, 25 bp, Homo sapien
gttcactgcaccgtgccaggcatgc

SEQ ID NO: 5554565 - DNA, 25 bp, Homo sapien
cggatggggtgttattgtgcccatt

SEQ ID NO: 5554566 - DNA, 25 bp, Homo sapien
ctgccctcaaggaattgccaccatt

SEQ ID NO: 5554567 - DNA, 25 bp, Homo sapien
tatgggtacagaaactgagtctcag

SEQ ID NO: 5554568 - DNA, 25 bp, Homo sapien
atatggaatcgtttatactgacaaa

SEQ ID NO: 5554569 - DNA, 25 bp, Homo sapien
agaattgctctcaagaatatccaac

SEQ ID NO: 5554570 - DNA, 25 bp, Homo sapien
agaatatccaacttcaggccgagtg

SEQ ID NO: 5554571 - DNA, 25 bp, Homo sapien
aatcgtagctcaaggcttacccagc

SEQ ID NO: 5554572 - DNA, 25 bp, Homo sapien
tgttggtaaaggttcagaattgctc

SEQ ID NO: 5554573 - DNA, 25 bp, Homo sapien
gcttacccagcatcaaaaaattcac

SEQ ID NO: 5554574 - DNA, 25 bp, Homo sapien
acctgttcaataaagcctgtgtccc

SEQ ID NO: 5554575 - DNA, 25 bp, Homo sapien
ttcacatgggatagaccacttacat

SEQ ID NO: 5554576 - DNA, 25 bp, Homo sapien
acatgtagaatgttggtaaaggttc

SEQ ID NO: 5554577 - DNA, 25 bp, Homo sapien
tgaaatgtttgaccttaacctgttc

SEQ ID NO: 5554578 - DNA, 25 bp, Homo sapien
ttatactgacaaacatgtagaatgt

SEQ ID NO: 5554579 - DNA, 25 bp, Homo sapien
gttcgatgccatgccccgctccttg

SEQ ID NO: 5554580 - DNA, 25 bp, Homo sapien
tgccatgccccgctccttgacagag

SEQ ID NO: 5554581 - DNA, 25 bp, Homo sapien
cgaagatgctgttcgatgccatgcc

SEQ ID NO: 5554582 - DNA, 25 bp, Homo sapien
aggagtcgaagatgctgttcgatgc

SEQ ID NO: 5554583 - DNA, 25 bp, Homo sapien
gatgccatgccccgctccttgacag

SEQ ID NO: 5554584 - DNA, 25 bp, Homo sapien
catgccccgctccttgacagagccc

SEQ ID NO: 5554585 - DNA, 25 bp, Homo sapien
tcgatgccatgccccgctccttgac

SEQ ID NO: 5554586 - DNA, 25 bp, Homo sapien
ccccgctccttgacagagcccaggc

SEQ ID NO: 5554587 - DNA, 25 bp, Homo sapien
acagagcccaggctctggtgggtac

SEQ ID NO: 5554588 - DNA, 25 bp, Homo sapien
tgccccgctccttgacagagcccag

SEQ ID NO: 5554589 - DNA, 25 bp, Homo sapien
ttcgatgccatgccccgctccttga

SEQ ID NO: 5554590 - DNA, 25 bp, Homo sapien
gggtttgagtcctgagatttgctgt

SEQ ID NO: 5554591 - DNA, 25 bp, Homo sapien
tcccagaacccatctccccagagtg

SEQ ID NO: 5554592 - DNA, 25 bp, Homo sapien
ctgtccgtccagatgtccttgagat

SEQ ID NO: 5554593 - DNA, 25 bp, Homo sapien
aaaggtatgaaatgatgatgatgga

SEQ ID NO: 5554594 - DNA, 25 bp, Homo sapien
aggctggtcccagacctcagagttc

SEQ ID NO: 5554595 - DNA, 25 bp, Homo sapien
tggctgtgcccatctgtaactctct

SEQ ID NO: 5554596 - DNA, 25 bp, Homo sapien
gaccacccagatctgaccctggctg

SEQ ID NO: 5554597 - DNA, 25 bp, Homo sapien
gtaagttagactactgcgagtgcgg

SEQ ID NO: 5554598 - DNA, 25 bp, Homo sapien
ggaagtgttttgtgcctagaaaggc

SEQ ID NO: 5554599 - DNA, 25 bp, Homo sapien
gagttcaggtcttcatgctggaatc

SEQ ID NO: 5554600 - DNA, 25 bp, Homo sapien
cgcagctctgtggatctcgacatac

SEQ ID NO: 5554601 - DNA, 25 bp, Homo sapien
cagttgttgctaggtgagaatgtga

SEQ ID NO: 5554602 - DNA, 25 bp, Homo sapien
cccacctgtggctatgttgtcttgc

SEQ ID NO: 5554603 - DNA, 25 bp, Homo sapien
gtccgcaagctaaacaaaacatccc

SEQ ID NO: 5554604 - DNA, 25 bp, Homo sapien
agcctctcctgtgggagtcagtggc

SEQ ID NO: 5554605 - DNA, 25 bp, Homo sapien
cagcaccccaaagatgtcctggtcc

SEQ ID NO: 5554606 - DNA, 25 bp, Homo sapien
gccccagcatggccagatcttctga

SEQ ID NO: 5554607 - DNA, 25 bp, Homo sapien
tttaagtgttagagtccgcaagcta

SEQ ID NO: 5554608 - DNA, 25 bp, Homo sapien
gtcttgcatggcaaaaggctcttcc

SEQ ID NO: 5554609 - DNA, 25 bp, Homo sapien
gtgcgccagatcattttgtagcctc

SEQ ID NO: 5554610 - DNA, 25 bp, Homo sapien
cctggtgaagtggacaccccttcta

SEQ ID NO: 5554611 - DNA, 25 bp, Homo sapien
tgaaggatctttagatggagagatt

SEQ ID NO: 5554612 - DNA, 25 bp, Homo sapien
acgggataatctagcaataagcctg

SEQ ID NO: 5554613 - DNA, 25 bp, Homo sapien
tacaactgagtcccaccgatgcttc

SEQ ID NO: 5554614 - DNA, 25 bp, Homo sapien
gggatcctcggagatgtgaataaca

SEQ ID NO: 5554615 - DNA, 25 bp, Homo sapien
ccaaatgaatataaggaaggcaaac

SEQ ID NO: 5554616 - DNA, 25 bp, Homo sapien
aaatttaacagatagcagcgagtgc

SEQ ID NO: 5554617 - DNA, 25 bp, Homo sapien
cagtgacacaactctgggctgtacc

SEQ ID NO: 5554618 - DNA, 25 bp, Homo sapien
acaaactagcaaagatacgggataa

SEQ ID NO: 5554619 - DNA, 25 bp, Homo sapien
agcgagtgcctcacagatgactgta

SEQ ID NO: 5554620 - DNA, 25 bp, Homo sapien
ttgaaagatgatttgcagcagacac

SEQ ID NO: 5554621 - DNA, 25 bp, Homo sapien
tgcatcatggctgtttaaggcggcg

SEQ ID NO: 5554622 - DNA, 25 bp, Homo sapien
gaggaagacccagaactgaatactc

SEQ ID NO: 5554623 - DNA, 25 bp, Homo sapien
tctgattaacgagcccctggtgata

SEQ ID NO: 5554624 - DNA, 25 bp, Homo sapien
tttgtgcaactacaggccaaggaga

SEQ ID NO: 5554625 - DNA, 25 bp, Homo sapien
gatggactttgccgtcctgggcctc

SEQ ID NO: 5554626 - DNA, 25 bp, Homo sapien
ctcactgagatccctcccggagtcc

SEQ ID NO: 5554627 - DNA, 25 bp, Homo sapien
ctggactcctacccggtggtgaatc

SEQ ID NO: 5554628 - DNA, 25 bp, Homo sapien
agcccgcagcttctggtgctcttcg

SEQ ID NO: 5554629 - DNA, 25 bp, Homo sapien
tcaacttcgtggccaagaagctgca

SEQ ID NO: 5554630 - DNA, 25 bp, Homo sapien
ctgcaccgacggctactgcagcttg

SEQ ID NO: 5554631 - DNA, 25 bp, Homo sapien
cggggactcctcatacgccaagttc

SEQ ID NO: 5554632 - DNA, 25 bp, Homo sapien
caaggagacccccctgacaacatga

SEQ ID NO: 5554633 - DNA, 25 bp, Homo sapien
gtgctcttcggcagccagacaggca

SEQ ID NO: 5554634 - DNA, 25 bp, Homo sapien
atggtgacccgtacaacacgtgacg

SEQ ID NO: 5554635 - DNA, 25 bp, Homo sapien
cgtcacgtgttgtacgggtcaccat

SEQ ID NO: 5554636 - DNA, 25 bp, Homo sapien
atgagaagtagagcacatagctgct

SEQ ID NO: 5554637 - DNA, 25 bp, Homo sapien
ctgacatgaattctgggcaaaggca

SEQ ID NO: 5554638 - DNA, 25 bp, Homo sapien
agatggcagcacaccactacctacg

SEQ ID NO: 5554639 - DNA, 25 bp, Homo sapien
gcctgggtttgtaagtcagagctgt

SEQ ID NO: 5554640 - DNA, 25 bp, Homo sapien
caggacaatggctggaacatagtag

SEQ ID NO: 5554641 - DNA, 25 bp, Homo sapien
gaagtttaacacaggaatgagaagt

SEQ ID NO: 5554642 - DNA, 25 bp, Homo sapien
atgtaatcatcgcaaggccaggaga

SEQ ID NO: 5554643 - DNA, 25 bp, Homo sapien
ggagatggcagctaatgagtaatca

SEQ ID NO: 5554644 - DNA, 25 bp, Homo sapien
aaaggcaagcagtagctgacttgga

SEQ ID NO: 5554645 - DNA, 25 bp, Homo sapien
atagctgctaagataaggctggagt

SEQ ID NO: 5554646 - DNA, 25 bp, Homo sapien
gtttgttgaacgttgctgatggcgg

SEQ ID NO: 5554647 - DNA, 25 bp, Homo sapien
tgggactcctgcttggaacataacc

SEQ ID NO: 5554648 - DNA, 25 bp, Homo sapien
ttcatggaataagaagtatacctcc

SEQ ID NO: 5554649 - DNA, 25 bp, Homo sapien
gagagtgtcaatgaagacctcaaag

SEQ ID NO: 5554650 - DNA, 25 bp, Homo sapien
gatgactctgagattgaagacagcc

SEQ ID NO: 5554651 - DNA, 25 bp, Homo sapien
tggaacacatgactctgggtctgta

SEQ ID NO: 5554652 - DNA, 25 bp, Homo sapien
gaatcacaacagccatcagagagac

SEQ ID NO: 5554653 - DNA, 25 bp, Homo sapien
acgagctggggacctcttctcctta

SEQ ID NO: 5554654 - DNA, 25 bp, Homo sapien
agactggttttgggacaaaaagatc

SEQ ID NO: 5554655 - DNA, 25 bp, Homo sapien
tgggtctgtagaaagtcaactgatc

SEQ ID NO: 5554656 - DNA, 25 bp, Homo sapien
acaatgaccaggcagtagttgaaat

SEQ ID NO: 5554657 - DNA, 25 bp, Homo sapien
aaaagatctttcacgagctggggac

SEQ ID NO: 5554658 - DNA, 25 bp, Homo sapien
ttgagctgcttcagtgaatgtacag

SEQ ID NO: 5554659 - DNA, 25 bp, Homo sapien
cggcacgagctgaacctcatgtgtt

SEQ ID NO: 5554660 - DNA, 25 bp, Homo sapien
gctgaacctcatgtgttccactccc

SEQ ID NO: 5554661 - DNA, 25 bp, Homo sapien
gctgcttcagtgaatgtacagtgcc

SEQ ID NO: 5554662 - DNA, 25 bp, Homo sapien
gaatgtacagtgcccggcacgagct

SEQ ID NO: 5554663 - DNA, 25 bp, Homo sapien
cagtcccagaaccaagctctcggtg

SEQ ID NO: 5554664 - DNA, 25 bp, Homo sapien
catcctgctcagtgtggcgtcagtg

SEQ ID NO: 5554665 - DNA, 25 bp, Homo sapien
tgcttcagtgaatgtacagtgcccg

SEQ ID NO: 5554666 - DNA, 25 bp, Homo sapien
agtcccagaaccaagctctcggtgt

SEQ ID NO: 5554667 - DNA, 25 bp, Homo sapien
cgtgcatcctgctcagtgtggcgtc

SEQ ID NO: 5554668 - DNA, 25 bp, Homo sapien
gggccgtgcatcctgctcagtgtgg

SEQ ID NO: 5554669 - DNA, 25 bp, Homo sapien
caaattaccaatatgaagagactgc

SEQ ID NO: 5554670 - DNA, 25 bp, Homo sapien
ctaaaagattgaatacccctgtact

SEQ ID NO: 5554671 - DNA, 25 bp, Homo sapien
ataaagaattgataaacctccagct

SEQ ID NO: 5554672 - DNA, 25 bp, Homo sapien
gaagagactgcaatacagattagat

SEQ ID NO: 5554673 - DNA, 25 bp, Homo sapien
aacctccagctagactgactgatcc

SEQ ID NO: 5554674 - DNA, 25 bp, Homo sapien
tgactgatccaggaaaaaacagaaa

SEQ ID NO: 5554675 - DNA, 25 bp, Homo sapien
aaagacacaaattaccaaaactgac

SEQ ID NO: 5554676 - DNA, 25 bp, Homo sapien
ctacagacagtaaaaggatattaaa

SEQ ID NO: 5554677 - DNA, 25 bp, Homo sapien
atgtaaagaagaaatcataccgatc

SEQ ID NO: 5554678 - DNA, 25 bp, Homo sapien
gaaggagacagcacttcccatctaa

SEQ ID NO: 5554679 - DNA, 25 bp, Homo sapien
tgacacccaataaaaccttgacacc

SEQ ID NO: 5554680 - DNA, 25 bp, Homo sapien
ggtgaattaccaacaaaagctttgc

SEQ ID NO: 5554681 - DNA, 25 bp, Homo sapien
gattttctgatgccgaagtaggggt

SEQ ID NO: 5554682 - DNA, 25 bp, Homo sapien
acgctgatgttggcttagatgggaa

SEQ ID NO: 5554683 - DNA, 25 bp, Homo sapien
aaaagctttgccacactcattacac

SEQ ID NO: 5554684 - DNA, 25 bp, Homo sapien
catagggtttctctccagtgtggat

SEQ ID NO: 5554685 - DNA, 25 bp, Homo sapien
catagggtttctcccagtgtggatt

SEQ ID NO: 5554686 - DNA, 25 bp, Homo sapien
ttggcttagatgggaagtccttcca

SEQ ID NO: 5554687 - DNA, 25 bp, Homo sapien
agtgtggattttctgatgccgaagt

SEQ ID NO: 5554688 - DNA, 25 bp, Homo sapien
cctgtgtgaatacgctgatgttggc

SEQ ID NO: 5554689 - DNA, 25 bp, Homo sapien
cacactcattacactcatagggttt

SEQ ID NO: 5554690 - DNA, 25 bp, Homo sapien
acactcattacactcatagggtttc

SEQ ID NO: 5554691 - DNA, 25 bp, Homo sapien
ctggtccttaccccagaggaagaag

SEQ ID NO: 5554692 - DNA, 25 bp, Homo sapien
cttcttcctctggggtaaggaccag

SEQ ID NO: 5554693 - DNA, 25 bp, Homo sapien
ggcagggacaccagtgtgtcatgct

SEQ ID NO: 5554694 - DNA, 25 bp, Homo sapien
aggctttctgtgacctaggggtagg

SEQ ID NO: 5554695 - DNA, 25 bp, Homo sapien
ctccagacagggtacaacttgagaa

SEQ ID NO: 5554696 - DNA, 25 bp, Homo sapien
gcacacttagggaagctgttctctc

SEQ ID NO: 5554697 - DNA, 25 bp, Homo sapien
gtgtggaaacaccaaaccctgagtc

SEQ ID NO: 5554698 - DNA, 25 bp, Homo sapien
gcttcatcttgagtggcacggagca

SEQ ID NO: 5554699 - DNA, 25 bp, Homo sapien
agcacaggtgttgtggcacttgctt

SEQ ID NO: 5554700 - DNA, 25 bp, Homo sapien
ggctgtggtatgtttgaggctttct

SEQ ID NO: 5554701 - DNA, 25 bp, Homo sapien
gcaggggattgcacactgcacacat

SEQ ID NO: 5554702 - DNA, 25 bp, Homo sapien
ccagccagccctgtgatagagatct

SEQ ID NO: 5554703 - DNA, 25 bp, Homo sapien
gatagagatctgaggagttcccctt

SEQ ID NO: 5554704 - DNA, 25 bp, Homo sapien
cccaatgagcatgtcacttctggaa

SEQ ID NO: 5554705 - DNA, 25 bp, Homo sapien
tgacttaacctctgggggctcagtc

SEQ ID NO: 5554706 - DNA, 25 bp, Homo sapien
caggtttatagagaagatactctca

SEQ ID NO: 5554707 - DNA, 25 bp, Homo sapien
gaaaactggaaatgactcgcctttg

SEQ ID NO: 5554708 - DNA, 25 bp, Homo sapien
agaccggggttcagatcttcttctt

SEQ ID NO: 5554709 - DNA, 25 bp, Homo sapien
ctcgcctttgaaaacaacagatgag

SEQ ID NO: 5554710 - DNA, 25 bp, Homo sapien
tcttgattaactgggtaactggatt

SEQ ID NO: 5554711 - DNA, 25 bp, Homo sapien
ccacccctccccaggtttatagaga

SEQ ID NO: 5554712 - DNA, 25 bp, Homo sapien
cttcataatgatgtgacttaacctc

SEQ ID NO: 5554713 - DNA, 25 bp, Homo sapien
tgagtaaatccccaatgagcatgtc

SEQ ID NO: 5554714 - DNA, 25 bp, Homo sapien
actgggtaactggattgagtaaatc

SEQ ID NO: 5554715 - DNA, 25 bp, Homo sapien
tctcactctagcagccggacaacag

SEQ ID NO: 5554716 - DNA, 25 bp, Homo sapien
cagttagccaccagacaattcagac

SEQ ID NO: 5554717 - DNA, 25 bp, Homo sapien
tgcaaaacaccacacccctgtccac

SEQ ID NO: 5554718 - DNA, 25 bp, Homo sapien
agaccccacactattgaagccaatc

SEQ ID NO: 5554719 - DNA, 25 bp, Homo sapien
ctgctacaacgacacgatggatacc

SEQ ID NO: 5554720 - DNA, 25 bp, Homo sapien
cctaagtcacgcctgaagtagttat

SEQ ID NO: 5554721 - DNA, 25 bp, Homo sapien
cgctgttagggatatttccacaccc

SEQ ID NO: 5554722 - DNA, 25 bp, Homo sapien
ggagcccacaccacccctaagtcac

SEQ ID NO: 5554723 - DNA, 25 bp, Homo sapien
tggtagggacagtaatcttcatcac

SEQ ID NO: 5554724 - DNA, 25 bp, Homo sapien
accaaatagacaggaatgaaagatt

SEQ ID NO: 5554725 - DNA, 25 bp, Homo sapien
aagtagttattgagaaagtcacccc

SEQ ID NO: 5554726 - DNA, 25 bp, Homo sapien
agcacaaagaaggatgatcaacttc

SEQ ID NO: 5554727 - DNA, 25 bp, Homo sapien
aagatagcttgaagatcgaggtaaa

SEQ ID NO: 5554728 - DNA, 25 bp, Homo sapien
tcacagaggaataaccaccccaagg

SEQ ID NO: 5554729 - DNA, 25 bp, Homo sapien
ggtccttcactgagtgtgggccagg

SEQ ID NO: 5554730 - DNA, 25 bp, Homo sapien
tggccaatcgagttgtcacagagga

SEQ ID NO: 5554731 - DNA, 25 bp, Homo sapien
catggtctgttaggaactgcatagc

SEQ ID NO: 5554732 - DNA, 25 bp, Homo sapien
gggaaggtcaggatttgtactactc

SEQ ID NO: 5554733 - DNA, 25 bp, Homo sapien
ataggttgtgtctcaggaaagcata

SEQ ID NO: 5554734 - DNA, 25 bp, Homo sapien
ctgattggttcaggcatggccacat

SEQ ID NO: 5554735 - DNA, 25 bp, Homo sapien
acggactggtaccggtccatggtct

SEQ ID NO: 5554736 - DNA, 25 bp, Homo sapien
ggccacataatggagggccatctgc

SEQ ID NO: 5554737 - DNA, 25 bp, Homo sapien
cgcaccggctccgaccggctcaaaa

SEQ ID NO: 5554738 - DNA, 25 bp, Homo sapien
cggtagcgacgaacaagtttttgct

SEQ ID NO: 5554739 - DNA, 25 bp, Homo sapien
accagttctaagatctcggcggcca

SEQ ID NO: 5554740 - DNA, 25 bp, Homo sapien
ggacgcctccctgagcaatagtgac

SEQ ID NO: 5554741 - DNA, 25 bp, Homo sapien
ggtactgtaagtacactggcgcacc

SEQ ID NO: 5554742 - DNA, 25 bp, Homo sapien
attttggcaacaggacggcctgaat

SEQ ID NO: 5554743 - DNA, 25 bp, Homo sapien
aaaagatgacggactctgccctatt

SEQ ID NO: 5554744 - DNA, 25 bp, Homo sapien
aatagtgacgttgcccagctgcttg

SEQ ID NO: 5554745 - DNA, 25 bp, Homo sapien
ctgccctattgggaactgcaagccc

SEQ ID NO: 5554746 - DNA, 25 bp, Homo sapien
tcctcgtcgtcgtttcggatggcca

SEQ ID NO: 5554747 - DNA, 25 bp, Homo sapien
cggcctgaatattggacaggacgcc

SEQ ID NO: 5554748 - DNA, 25 bp, Homo sapien
aaaactgccataccctgtaggatcc

SEQ ID NO: 5554749 - DNA, 25 bp, Homo sapien
tgaacatacttttccaggcaacggt

SEQ ID NO: 5554750 - DNA, 25 bp, Homo sapien
tttgccagcaatacaaataccttgt

SEQ ID NO: 5554751 - DNA, 25 bp, Homo sapien
tttaaaactgccataccctgtagga

SEQ ID NO: 5554752 - DNA, 25 bp, Homo sapien
ccaggcaacggtacaatgtctttgt

SEQ ID NO: 5554753 - DNA, 25 bp, Homo sapien
ctttgtacaacccattcctttggcc

SEQ ID NO: 5554754 - DNA, 25 bp, Homo sapien
tttccaggcaacggtacaatgtctt

SEQ ID NO: 5554755 - DNA, 25 bp, Homo sapien
ccttgtagctcttgaacatactttt

SEQ ID NO: 5554756 - DNA, 25 bp, Homo sapien
acttttccaggcaacggtacaatgt

SEQ ID NO: 5554757 - DNA, 25 bp, Homo sapien
ctttggccttgtatatctgcctttc

SEQ ID NO: 5554758 - DNA, 25 bp, Homo sapien
tctctgccttgtatttttgccagca

SEQ ID NO: 5554759 - DNA, 25 bp, Homo sapien
taattgcaaagtgggcagactgata

SEQ ID NO: 5554760 - DNA, 25 bp, Homo sapien
ggatcacccaaattcaaaatgacac

SEQ ID NO: 5554761 - DNA, 25 bp, Homo sapien
ctgagctttgggcttctattgaacc

SEQ ID NO: 5554762 - DNA, 25 bp, Homo sapien
aatgtctgtctcatagcagctgctc

SEQ ID NO: 5554763 - DNA, 25 bp, Homo sapien
taaccttataaaatcaggatcaccc

SEQ ID NO: 5554764 - DNA, 25 bp, Homo sapien
tgcataattgcaaagtgggcagact

SEQ ID NO: 5554765 - DNA, 25 bp, Homo sapien
atgttacagataagggtactgacac

SEQ ID NO: 5554766 - DNA, 25 bp, Homo sapien
gtaacagtatgaggtaggtacattt

SEQ ID NO: 5554767 - DNA, 25 bp, Homo sapien
aatgacacccaacactctctgaccc

SEQ ID NO: 5554768 - DNA, 25 bp, Homo sapien
tattgaacctgtcacccaaatagtg

SEQ ID NO: 5554769 - DNA, 25 bp, Homo sapien
atctatagacaataacctgcataat

SEQ ID NO: 5554770 - DNA, 25 bp, Homo sapien
tgaccttccccaagcaagagagaac

SEQ ID NO: 5554771 - DNA, 25 bp, Homo sapien
gaccggtaccagtccgtgacctggc

SEQ ID NO: 5554772 - DNA, 25 bp, Homo sapien
ggcctggcccacactcagtgaagga

SEQ ID NO: 5554773 - DNA, 25 bp, Homo sapien
ctgagtagtacaaatcctgaccttc

SEQ ID NO: 5554774 - DNA, 25 bp, Homo sapien
agagagaacttccaaggctgatggc

SEQ ID NO: 5554775 - DNA, 25 bp, Homo sapien
acttccacacacagacacgtcccac

SEQ ID NO: 5554776 - DNA, 25 bp, Homo sapien
tgatggcccttgggtgtgaattgca

SEQ ID NO: 5554777 - DNA, 25 bp, Homo sapien
agaataaagtagggacaaagtttga

SEQ ID NO: 5554778 - DNA, 25 bp, Homo sapien
tgagggtgtttttgagtgagactaa

SEQ ID NO: 5554779 - DNA, 25 bp, Homo sapien
agtgaaggaccggataaaacttcca

SEQ ID NO: 5554780 - DNA, 25 bp, Homo sapien
tcgattggccaggtgcccagatatt

SEQ ID NO: 5554781 - DNA, 25 bp, Homo sapien
accacgtctcgggtcattccacacc

SEQ ID NO: 5554782 - DNA, 25 bp, Homo sapien
acatcagcattatctcggacacatc

SEQ ID NO: 5554783 - DNA, 25 bp, Homo sapien
ccgcacgcctgaacccccaggtgcg

SEQ ID NO: 5554784 - DNA, 25 bp, Homo sapien
aaggaatcctattgctccagggctc

SEQ ID NO: 5554785 - DNA, 25 bp, Homo sapien
agggccggaatttatggatctgctc

SEQ ID NO: 5554786 - DNA, 25 bp, Homo sapien
ccagccaccgcaacgacatcatgtt

SEQ ID NO: 5554787 - DNA, 25 bp, Homo sapien
cagagcaactacggaccacgtctcg

SEQ ID NO: 5554788 - DNA, 25 bp, Homo sapien
tcattccacacccgcgctacgaagc

SEQ ID NO: 5554789 - DNA, 25 bp, Homo sapien
ccagtgagtctcccagatacgttgc

SEQ ID NO: 5554790 - DNA, 25 bp, Homo sapien
ggtgtcccacaacgagcctgggacc

SEQ ID NO: 5554791 - DNA, 25 bp, Homo sapien
atgttgctgcgcctagtccagcccg

SEQ ID NO: 5554792 - DNA, 25 bp, Homo sapien
actcaagccatgtgaagaagccata

SEQ ID NO: 5554793 - DNA, 25 bp, Homo sapien
ttcaactaagctgtaaggtcctcgt

SEQ ID NO: 5554794 - DNA, 25 bp, Homo sapien
taagctgtaaggtcctcgttggcaa

SEQ ID NO: 5554795 - DNA, 25 bp, Homo sapien
caagccatgtgaagaagccataatg

SEQ ID NO: 5554796 - DNA, 25 bp, Homo sapien
caagactcaagccatgtgaagaagc

SEQ ID NO: 5554797 - DNA, 25 bp, Homo sapien
atgtgaagaagccataatggatcca

SEQ ID NO: 5554798 - DNA, 25 bp, Homo sapien
ggtcctcgttggcaagactcaagcc

SEQ ID NO: 5554799 - DNA, 25 bp, Homo sapien
tttcttcaactaagctgtaaggtcc

SEQ ID NO: 5554800 - DNA, 25 bp, Homo sapien
tgtaaggtcctcgttggcaagactc

SEQ ID NO: 5554801 - DNA, 25 bp, Homo sapien
tggatccatgagacaaactttgggg

SEQ ID NO: 5554802 - DNA, 25 bp, Homo sapien
ataatggatccatgagacaaacttt

SEQ ID NO: 5554803 - DNA, 25 bp, Homo sapien
ttttttcatactataggaataaagt

SEQ ID NO: 5554804 - DNA, 25 bp, Homo sapien
actttattcctatagtatgaaaaaa

SEQ ID NO: 5554805 - DNA, 25 bp, Homo sapien
attttttcatactataggaataaag

SEQ ID NO: 5554806 - DNA, 25 bp, Homo sapien
ctttattcctatagtatgaaaaaat

SEQ ID NO: 5554807 - DNA, 25 bp, Homo sapien
gattttttcatactataggaataaa

SEQ ID NO: 5554808 - DNA, 25 bp, Homo sapien
tttattcctatagtatgaaaaaatc

SEQ ID NO: 5554809 - DNA, 25 bp, Homo sapien
gtaattttactaaatctaatgttat

SEQ ID NO: 5554810 - DNA, 25 bp, Homo sapien
ataacattagatttagtaaaattac

SEQ ID NO: 5554811 - DNA, 25 bp, Homo sapien
gagcgacctcccactctcagtgttt

SEQ ID NO: 5554812 - DNA, 25 bp, Homo sapien
aaacactgagagtgggaggtcgctc

SEQ ID NO: 5554813 - DNA, 25 bp, Homo sapien
agttaatgtcctcagcagggaatta

SEQ ID NO: 5554814 - DNA, 25 bp, Homo sapien
aaaaagaaacaacattggctaagtc

SEQ ID NO: 5554815 - DNA, 25 bp, Homo sapien
actaggtgaatatattggtgaaaat

SEQ ID NO: 5554816 - DNA, 25 bp, Homo sapien
tggctaagtcacgaataggcatttc

SEQ ID NO: 5554817 - DNA, 25 bp, Homo sapien
ttaccaggggtatgacaaaaatgga

SEQ ID NO: 5554818 - DNA, 25 bp, Homo sapien
gcagccttggaaaccagttaatgtc

SEQ ID NO: 5554819 - DNA, 25 bp, Homo sapien
aaacaagaacagagatccattagca

SEQ ID NO: 5554820 - DNA, 25 bp, Homo sapien
atatgtacatgataaatggccaatc

SEQ ID NO: 5554821 - DNA, 25 bp, Homo sapien
tcaaaataaggaatggggctcattc

SEQ ID NO: 5554822 - DNA, 25 bp, Homo sapien
taatatcacagggttaccaggggta

SEQ ID NO: 5554823 - DNA, 25 bp, Homo sapien
cacacaaatgcattacacaggcctc

SEQ ID NO: 5554824 - DNA, 25 bp, Homo sapien
gcagaaaagcgagtgagattaactc

SEQ ID NO: 5554825 - DNA, 25 bp, Homo sapien
taaaaaagcattagtaggcatccct

SEQ ID NO: 5554826 - DNA, 25 bp, Homo sapien
ctggttggcgtagatttaggcaatg

SEQ ID NO: 5554827 - DNA, 25 bp, Homo sapien
aaaccctgccgctttggtgtcctat

SEQ ID NO: 5554828 - DNA, 25 bp, Homo sapien
atgtcaatttcaaggtagagggagc

SEQ ID NO: 5554829 - DNA, 25 bp, Homo sapien
acaaaaagcaacgacacacaacctt

SEQ ID NO: 5554830 - DNA, 25 bp, Homo sapien
ctgagtcaggtaataggccagtcat

SEQ ID NO: 5554831 - DNA, 25 bp, Homo sapien
aataggccagtcatcacagtgtaac

SEQ ID NO: 5554832 - DNA, 25 bp, Homo sapien
cctggttggaatgagttaaaaaata

SEQ ID NO: 5554833 - DNA, 25 bp, Homo sapien
tgctaaaataaaacacggatctcat

SEQ ID NO: 5554834 - DNA, 25 bp, Homo sapien
aaagagatgagactattttctggtt

SEQ ID NO: 5554835 - DNA, 25 bp, Homo sapien
aggactacagaatctcagagtaaac

SEQ ID NO: 5554836 - DNA, 25 bp, Homo sapien
gttgttttgcagacagcacaatgat

SEQ ID NO: 5554837 - DNA, 25 bp, Homo sapien
gtaaccttgtaaatagcacagcgtt

SEQ ID NO: 5554838 - DNA, 25 bp, Homo sapien
aacagttgcaaagaacataaagtac

SEQ ID NO: 5554839 - DNA, 25 bp, Homo sapien
cataatggaaacagttgcaaagaac

SEQ ID NO: 5554840 - DNA, 25 bp, Homo sapien
gatacaatattaggactacagaatc

SEQ ID NO: 5554841 - DNA, 25 bp, Homo sapien
tgcagacagcacaatgatacaatat

SEQ ID NO: 5554842 - DNA, 25 bp, Homo sapien
cgcccggctaatttcacccggctaa

SEQ ID NO: 5554843 - DNA, 25 bp, Homo sapien
cataaagtacagctgcgttacatgt

SEQ ID NO: 5554844 - DNA, 25 bp, Homo sapien
agcacagcgttctcataatggaaac

SEQ ID NO: 5554845 - DNA, 25 bp, Homo sapien
gcgttacatgtaacaaaagatgcaa

SEQ ID NO: 5554846 - DNA, 25 bp, Homo sapien
tcatgcattataattccaggaaact

SEQ ID NO: 5554847 - DNA, 25 bp, Homo sapien
gctaatgtggagaatttcaggggaa

SEQ ID NO: 5554848 - DNA, 25 bp, Homo sapien
gtgccttaagggtgaaataacatct

SEQ ID NO: 5554849 - DNA, 25 bp, Homo sapien
agtagactttccagttcttggcact

SEQ ID NO: 5554850 - DNA, 25 bp, Homo sapien
ttgcattgctctaccacaggcataa

SEQ ID NO: 5554851 - DNA, 25 bp, Homo sapien
gtgctgtagaacactataatacact

SEQ ID NO: 5554852 - DNA, 25 bp, Homo sapien
caggaaactaaagaacataaaatta

SEQ ID NO: 5554853 - DNA, 25 bp, Homo sapien
tacctttaaaagctaatgtggagaa

SEQ ID NO: 5554854 - DNA, 25 bp, Homo sapien
aagaaaacttcaaatactgtacagt

SEQ ID NO: 5554855 - DNA, 25 bp, Homo sapien
attcttagtcaaataagcctgaaaa

SEQ ID NO: 5554856 - DNA, 25 bp, Homo sapien
tcaggggaaaatcagtattaactta

SEQ ID NO: 5554857 - DNA, 25 bp, Homo sapien
aatcagaagcaaattcaatggactt

SEQ ID NO: 5554858 - DNA, 25 bp, Homo sapien
gtgagagctaacttatgggtacaaa

SEQ ID NO: 5554859 - DNA, 25 bp, Homo sapien
tgggtacaaaaaggtatacagagtg

SEQ ID NO: 5554860 - DNA, 25 bp, Homo sapien
ctggaacgaaaaaaccaagacagta

SEQ ID NO: 5554861 - DNA, 25 bp, Homo sapien
gtaatcataggagtacatacatgtt

SEQ ID NO: 5554862 - DNA, 25 bp, Homo sapien
ttaatattgactgacctggaacgaa

SEQ ID NO: 5554863 - DNA, 25 bp, Homo sapien
aatttaaatggagaggagtgttcat

SEQ ID NO: 5554864 - DNA, 25 bp, Homo sapien
aggtatacagagtgacataatggac

SEQ ID NO: 5554865 - DNA, 25 bp, Homo sapien
catctatatgaccaaaagccatttg

SEQ ID NO: 5554866 - DNA, 25 bp, Homo sapien
tggagaggagtgttcattgtaatca

SEQ ID NO: 5554867 - DNA, 25 bp, Homo sapien
ggacactagagactcaaagtgggga

SEQ ID NO: 5554868 - DNA, 25 bp, Homo sapien
aatgctggaagcaggcatctgattt

SEQ ID NO: 5554869 - DNA, 25 bp, Homo sapien
caataaaccgaagacaaaaaagaca

SEQ ID NO: 5554870 - DNA, 25 bp, Homo sapien
ggagaaagctccatgaaacaggttt

SEQ ID NO: 5554871 - DNA, 25 bp, Homo sapien
tttgtgctaagggctgaaatcaata

SEQ ID NO: 5554872 - DNA, 25 bp, Homo sapien
gtagatgatactggggttatttcgg

SEQ ID NO: 5554873 - DNA, 25 bp, Homo sapien
agaaagatgtcttgaaagaggacta

SEQ ID NO: 5554874 - DNA, 25 bp, Homo sapien
aacagatggtaagtagtagatgata

SEQ ID NO: 5554875 - DNA, 25 bp, Homo sapien
aagaggactaaacacaagaaaaata

SEQ ID NO: 5554876 - DNA, 25 bp, Homo sapien
ttactgaaaggcttagaaagatgtc

SEQ ID NO: 5554877 - DNA, 25 bp, Homo sapien
ttggcggcactcagtacaataaacc

SEQ ID NO: 5554878 - DNA, 25 bp, Homo sapien
gaaatcaatactggcctctggctcc

SEQ ID NO: 5554879 - DNA, 25 bp, Homo sapien
acagcactacagccaccactaattc

SEQ ID NO: 5554880 - DNA, 25 bp, Homo sapien
actgaagactttaaagagggcaaaa

SEQ ID NO: 5554881 - DNA, 25 bp, Homo sapien
tagattatttggcactgtagtaaat

SEQ ID NO: 5554882 - DNA, 25 bp, Homo sapien
tacatttaaacaaacactgcattcc

SEQ ID NO: 5554883 - DNA, 25 bp, Homo sapien
aagcaataaatacagcactacagcc

SEQ ID NO: 5554884 - DNA, 25 bp, Homo sapien
tgaataaatgcattggaaattaact

SEQ ID NO: 5554885 - DNA, 25 bp, Homo sapien
acaatcaaaaaatagagatatactc

SEQ ID NO: 5554886 - DNA, 25 bp, Homo sapien
tttacagataactagtggtttctac

SEQ ID NO: 5554887 - DNA, 25 bp, Homo sapien
ttgttaattttgagaagtatcccat

SEQ ID NO: 5554888 - DNA, 25 bp, Homo sapien
ctagcagattaaaaccaagagaaaa

SEQ ID NO: 5554889 - DNA, 25 bp, Homo sapien
atactctaggcataacataaattgt

SEQ ID NO: 5554890 - DNA, 25 bp, Homo sapien
ttcctcaaaggtgacggcacagaaa

SEQ ID NO: 5554891 - DNA, 25 bp, Homo sapien
tggctcagggaaaattactatcctc

SEQ ID NO: 5554892 - DNA, 25 bp, Homo sapien
agaaaacatgcaaaagctcaacgct

SEQ ID NO: 5554893 - DNA, 25 bp, Homo sapien
ataaagaaatgagtcttggataatt

SEQ ID NO: 5554894 - DNA, 25 bp, Homo sapien
ataaaagcctgtgtgcgtggctcag

SEQ ID NO: 5554895 - DNA, 25 bp, Homo sapien
agagaagccctaaatctgttagagt

SEQ ID NO: 5554896 - DNA, 25 bp, Homo sapien
atacatgccaaataatcagacaatc

SEQ ID NO: 5554897 - DNA, 25 bp, Homo sapien
tagagtaatgataaaggtgtaggtt

SEQ ID NO: 5554898 - DNA, 25 bp, Homo sapien
gaaaaagaatgagggcataattcag

SEQ ID NO: 5554899 - DNA, 25 bp, Homo sapien
ttacttagctgtagagaaagagaag

SEQ ID NO: 5554900 - DNA, 25 bp, Homo sapien
catccaactgtaaaggtttcaggtc

SEQ ID NO: 5554901 - DNA, 25 bp, Homo sapien
acaactacttggtctgtttcaaggt

SEQ ID NO: 5554902 - DNA, 25 bp, Homo sapien
accttgaaacagaccaagtagttgt

SEQ ID NO: 5554903 - DNA, 25 bp, Homo sapien
aagacggattctggcccaatcatgc

SEQ ID NO: 5554904 - DNA, 25 bp, Homo sapien
gaagcaagaacaatcacaggtcaaa

SEQ ID NO: 5554905 - DNA, 25 bp, Homo sapien
tgaagtttcagagtgtcagcctaca

SEQ ID NO: 5554906 - DNA, 25 bp, Homo sapien
ttactagaagagctcaaaagacgga

SEQ ID NO: 5554907 - DNA, 25 bp, Homo sapien
caattcgctgagggaagtttagatg

SEQ ID NO: 5554908 - DNA, 25 bp, Homo sapien
aatagtgccaacatatggagattcc

SEQ ID NO: 5554909 - DNA, 25 bp, Homo sapien
ttagatgctcaaagggcatgccaac

SEQ ID NO: 5554910 - DNA, 25 bp, Homo sapien
cacaggtcaaacaacttctagcatc

SEQ ID NO: 5554911 - DNA, 25 bp, Homo sapien
tgaatttgggttagaacagcaagtt

SEQ ID NO: 5554912 - DNA, 25 bp, Homo sapien
agaagctgaagactacactgaattt

SEQ ID NO: 5554913 - DNA, 25 bp, Homo sapien
acacataggtagcactggtaagctc

SEQ ID NO: 5554914 - DNA, 25 bp, Homo sapien
tgaaagtgtactcccctccgcctgc

SEQ ID NO: 5554915 - DNA, 25 bp, Homo sapien
aggaaccccttatgactagaaccca

SEQ ID NO: 5554916 - DNA, 25 bp, Homo sapien
atgactagaacccaagaccagtacc

SEQ ID NO: 5554917 - DNA, 25 bp, Homo sapien
ctagagacggcacctaagattctgt

SEQ ID NO: 5554918 - DNA, 25 bp, Homo sapien
attccatttgtgggcaatggggatg

SEQ ID NO: 5554919 - DNA, 25 bp, Homo sapien
caggtgatctgcacccccgcttggc

SEQ ID NO: 5554920 - DNA, 25 bp, Homo sapien
accatagaagtagtgaagaaacctt

SEQ ID NO: 5554921 - DNA, 25 bp, Homo sapien
ccaagaccagtacccacagcctgaa

SEQ ID NO: 5554922 - DNA, 25 bp, Homo sapien
tgaaagggaatttcagacaacccta

SEQ ID NO: 5554923 - DNA, 25 bp, Homo sapien
cctccctcacagactagagacggca

SEQ ID NO: 5554924 - DNA, 25 bp, Homo sapien
aatctcctagtggatacagtgagga

SEQ ID NO: 5554925 - DNA, 25 bp, Homo sapien
gctccaaatcctgggaacgtctgaa

SEQ ID NO: 5554926 - DNA, 25 bp, Homo sapien
gtggggtttagttaagcacagattg

SEQ ID NO: 5554927 - DNA, 25 bp, Homo sapien
cctagcaactacgcctgcggatggc

SEQ ID NO: 5554928 - DNA, 25 bp, Homo sapien
ctccgcctgccaggtcaaacaattc

SEQ ID NO: 5554929 - DNA, 25 bp, Homo sapien
ttcctagcaactacgcctgcggatg

SEQ ID NO: 5554930 - DNA, 25 bp, Homo sapien
aaccttcctagcaactacgcctgcg

SEQ ID NO: 5554931 - DNA, 25 bp, Homo sapien
ccgcgcctggccttccttgctcttc

SEQ ID NO: 5554932 - DNA, 25 bp, Homo sapien
cttgctccaaatcctgggaacgtct

SEQ ID NO: 5554933 - DNA, 25 bp, Homo sapien
ccaaatcctgggaacgtctgaatca

SEQ ID NO: 5554934 - DNA, 25 bp, Homo sapien
gcctgccaggtcaaacaattctcct

SEQ ID NO: 5554935 - DNA, 25 bp, Homo sapien
gacagtggggtttagttaagcacag

SEQ ID NO: 5554936 - DNA, 25 bp, Homo sapien
agggtctgttaagaccagtcgtcgg

SEQ ID NO: 5554937 - DNA, 25 bp, Homo sapien
ccgacgactggtcttaacagaccct

SEQ ID NO: 5554938 - DNA, 25 bp, Homo sapien
gagttctgactctgagttgggtgtc

SEQ ID NO: 5554939 - DNA, 25 bp, Homo sapien
agggagtgcttgaatcaagtgatgt

SEQ ID NO: 5554940 - DNA, 25 bp, Homo sapien
actctgagcagataaaaaaggcttt

SEQ ID NO: 5554941 - DNA, 25 bp, Homo sapien
cacactgatgtggctgtcatttcac

SEQ ID NO: 5554942 - DNA, 25 bp, Homo sapien
gggagatatgcagctgtaccaagat

SEQ ID NO: 5554943 - DNA, 25 bp, Homo sapien
ctagtgttatttgtggggagtaacc

SEQ ID NO: 5554944 - DNA, 25 bp, Homo sapien
gttgggtgtcaactctgagcagata

SEQ ID NO: 5554945 - DNA, 25 bp, Homo sapien
aacattgatttcgggggtgttcctc

SEQ ID NO: 5554946 - DNA, 25 bp, Homo sapien
ggctttgaaagctccagggagtgct

SEQ ID NO: 5554947 - DNA, 25 bp, Homo sapien
ttgtggggagtaaccacactgatgt

SEQ ID NO: 5554948 - DNA, 25 bp, Homo sapien
aagagcatccgagtttgggagatat

SEQ ID NO: 5554949 - DNA, 25 bp, Homo sapien
gtttcacaaactatgcctcagactt

SEQ ID NO: 5554950 - DNA, 25 bp, Homo sapien
aggctgaggttcttaggaacagagc

SEQ ID NO: 5554951 - DNA, 25 bp, Homo sapien
tgaggttcttaggaacagagctgta

SEQ ID NO: 5554952 - DNA, 25 bp, Homo sapien
tcaatagaggtgcctagagtcaatt

SEQ ID NO: 5554953 - DNA, 25 bp, Homo sapien
tgaaacatgtttcacaaactatgcc

SEQ ID NO: 5554954 - DNA, 25 bp, Homo sapien
tatttcaatagaggtgcctagagtc

SEQ ID NO: 5554955 - DNA, 25 bp, Homo sapien
cagagctgtaatctacaggtttatt

SEQ ID NO: 5554956 - DNA, 25 bp, Homo sapien
tcagacttatttcaatagaggtgcc

SEQ ID NO: 5554957 - DNA, 25 bp, Homo sapien
taagacacaataaaggctgaggttc

SEQ ID NO: 5554958 - DNA, 25 bp, Homo sapien
aaacatgggccaaattttattcaac

SEQ ID NO: 5554959 - DNA, 25 bp, Homo sapien
agaggtgcctagagtcaattaaaac

SEQ ID NO: 5554960 - DNA, 25 bp, Homo sapien
aaagaaatctgctcaccagagttgc

SEQ ID NO: 5554961 - DNA, 25 bp, Homo sapien
gggaggttgcctacgcattaagacc

SEQ ID NO: 5554962 - DNA, 25 bp, Homo sapien
caaagccctaggcagtttctgggaa

SEQ ID NO: 5554963 - DNA, 25 bp, Homo sapien
ctttgtagtgctgttaggaggtaac

SEQ ID NO: 5554964 - DNA, 25 bp, Homo sapien
tcagcgttcatagtgagctgggagg

SEQ ID NO: 5554965 - DNA, 25 bp, Homo sapien
atacagggtaactctcatagtggag

SEQ ID NO: 5554966 - DNA, 25 bp, Homo sapien
agtaaaaggaatgtatctggaattc

SEQ ID NO: 5554967 - DNA, 25 bp, Homo sapien
ataggtaacggtctaatacagggta

SEQ ID NO: 5554968 - DNA, 25 bp, Homo sapien
taggatcaattcaaggttcagtaaa

SEQ ID NO: 5554969 - DNA, 25 bp, Homo sapien
aaaatgactcaaagccctaggcagt

SEQ ID NO: 5554970 - DNA, 25 bp, Homo sapien
agtggagaacttgagaagcattagt

SEQ ID NO: 5554971 - DNA, 25 bp, Homo sapien
ttagagctcatatccccaagagtga

SEQ ID NO: 5554972 - DNA, 25 bp, Homo sapien
ccaagagtgagatattgacagtacc

SEQ ID NO: 5554973 - DNA, 25 bp, Homo sapien
agagggtttgctttgtccgtcagct

SEQ ID NO: 5554974 - DNA, 25 bp, Homo sapien
gaacaggatgaagaataacatacgt

SEQ ID NO: 5554975 - DNA, 25 bp, Homo sapien
gtagaatatggccataacagtccca

SEQ ID NO: 5554976 - DNA, 25 bp, Homo sapien
tttgaaataccttcttggaggattc

SEQ ID NO: 5554977 - DNA, 25 bp, Homo sapien
gaagaataacatacgtgaggtgttt

SEQ ID NO: 5554978 - DNA, 25 bp, Homo sapien
ttcaccggctgtattccacacacgt

SEQ ID NO: 5554979 - DNA, 25 bp, Homo sapien
tacacaaatgagtatgctgcacttt

SEQ ID NO: 5554980 - DNA, 25 bp, Homo sapien
tcaggtgaacacatataacttgctt

SEQ ID NO: 5554981 - DNA, 25 bp, Homo sapien
acagtcccaatgggaagaacaggat

SEQ ID NO: 5554982 - DNA, 25 bp, Homo sapien
cctctgaaagacagttgaaaaggac

SEQ ID NO: 5554983 - DNA, 25 bp, Homo sapien
tggatattcaaggagtcagctgcct

SEQ ID NO: 5554984 - DNA, 25 bp, Homo sapien
ggagtcagctgcctagtgtgtgtca

SEQ ID NO: 5554985 - DNA, 25 bp, Homo sapien
agtgtgtgtcaattacagctgcaac

SEQ ID NO: 5554986 - DNA, 25 bp, Homo sapien
aaaaggacacaaatgattcacaaca

SEQ ID NO: 5554987 - DNA, 25 bp, Homo sapien
aatcaagtgtggttctgaagacctt

SEQ ID NO: 5554988 - DNA, 25 bp, Homo sapien
agaggtttatgtttgaggtgatcac

SEQ ID NO: 5554989 - DNA, 25 bp, Homo sapien
tacaggcagttttgatgatgctagt

SEQ ID NO: 5554990 - DNA, 25 bp, Homo sapien
gaccttgaaaaagaagtctgacttc

SEQ ID NO: 5554991 - DNA, 25 bp, Homo sapien
taagatccggtattaacagactatt

SEQ ID NO: 5554992 - DNA, 25 bp, Homo sapien
taactggtaggtaactgctctattc

SEQ ID NO: 5554993 - DNA, 25 bp, Homo sapien
gaaaattatgtctatggtgagcaac

SEQ ID NO: 5554994 - DNA, 25 bp, Homo sapien
tatgtctatggtgagcaacaggcaa

SEQ ID NO: 5554995 - DNA, 25 bp, Homo sapien
cacaagatgattctaagccaggagc

SEQ ID NO: 5554996 - DNA, 25 bp, Homo sapien
agacctcatgacttatgaaacgttc

SEQ ID NO: 5554997 - DNA, 25 bp, Homo sapien
aataacatacaatacacgcactgtg

SEQ ID NO: 5554998 - DNA, 25 bp, Homo sapien
acaaaaactggattcaatagcattc

SEQ ID NO: 5554999 - DNA, 25 bp, Homo sapien
acacgcactgtgaaattactcacgt

SEQ ID NO: 5555000 - DNA, 25 bp, Homo sapien
atacacagcagagaaaatagatttg

SEQ ID NO: 5555001 - DNA, 25 bp, Homo sapien
atttgcacaagatgattctaagcca

SEQ ID NO: 5555002 - DNA, 25 bp, Homo sapien
ctgaggtgattatacaaagaatgtt

SEQ ID NO: 5555003 - DNA, 25 bp, Homo sapien
gagaccacaggccaatttcaaaaag

SEQ ID NO: 5555004 - DNA, 25 bp, Homo sapien
ttgtgagtttccagtagaaagcact

SEQ ID NO: 5555005 - DNA, 25 bp, Homo sapien
agtatgtggcatattcagaattggt

SEQ ID NO: 5555006 - DNA, 25 bp, Homo sapien
agaaagcactgagaatatccatagg

SEQ ID NO: 5555007 - DNA, 25 bp, Homo sapien
tgcctttgtactggaaaccagacct

SEQ ID NO: 5555008 - DNA, 25 bp, Homo sapien
catagggcaaaatggaatactaata

SEQ ID NO: 5555009 - DNA, 25 bp, Homo sapien
ctttgtactggaaaccagaccttac

SEQ ID NO: 5555010 - DNA, 25 bp, Homo sapien
gactcacaattagggccaattgggt

SEQ ID NO: 5555011 - DNA, 25 bp, Homo sapien
tattcagaattggttgtgagtttcc

SEQ ID NO: 5555012 - DNA, 25 bp, Homo sapien
agggcaaaatggaatactaataatc

SEQ ID NO: 5555013 - DNA, 25 bp, Homo sapien
gcactgagaatatccatagggcaaa

SEQ ID NO: 5555014 - DNA, 25 bp, Homo sapien
agcaagggcaaatcacacagtatgt

SEQ ID NO: 5555015 - DNA, 25 bp, Homo sapien
taagatctggggccctcctatttta

SEQ ID NO: 5555016 - DNA, 25 bp, Homo sapien
gtgatccttaggtactgtaaagcgt

SEQ ID NO: 5555017 - DNA, 25 bp, Homo sapien
tacctcattaggctcagaaacaatt

SEQ ID NO: 5555018 - DNA, 25 bp, Homo sapien
tgtcagatactacaagtgatcctta

SEQ ID NO: 5555019 - DNA, 25 bp, Homo sapien
taggtactgtaaagcgtaaggacca

SEQ ID NO: 5555020 - DNA, 25 bp, Homo sapien
ccattcttcttagatagccagtagg

SEQ ID NO: 5555021 - DNA, 25 bp, Homo sapien
acttaggagcaacttaaactagact

SEQ ID NO: 5555022 - DNA, 25 bp, Homo sapien
tcatctgtctacttaggagcaactt

SEQ ID NO: 5555023 - DNA, 25 bp, Homo sapien
caggcttgagctaccacaccctgcc

SEQ ID NO: 5555024 - DNA, 25 bp, Homo sapien
ctgtaaagcgtaaggaccattaaaa

SEQ ID NO: 5555025 - DNA, 25 bp, Homo sapien
acttgaaggtgttcctcaaggacag

SEQ ID NO: 5555026 - DNA, 25 bp, Homo sapien
catcaaacattaggtctgacaggtc

SEQ ID NO: 5555027 - DNA, 25 bp, Homo sapien
atacttaccatgggctggatttggc

SEQ ID NO: 5555028 - DNA, 25 bp, Homo sapien
atggctactcagcactaccacggta

SEQ ID NO: 5555029 - DNA, 25 bp, Homo sapien
cattaggtctctgtcatggctactc

SEQ ID NO: 5555030 - DNA, 25 bp, Homo sapien
tgcttttgagattgattgaattgac

SEQ ID NO: 5555031 - DNA, 25 bp, Homo sapien
aaatgagtataattgtgttccagta

SEQ ID NO: 5555032 - DNA, 25 bp, Homo sapien
cataccagggttcagcaaagttctt

SEQ ID NO: 5555033 - DNA, 25 bp, Homo sapien
tgacaggtcaagaaaaggctttata

SEQ ID NO: 5555034 - DNA, 25 bp, Homo sapien
tagtgtgaaagcatcaatagataat

SEQ ID NO: 5555035 - DNA, 25 bp, Homo sapien
tgcataacataaattcgacgatagt

SEQ ID NO: 5555036 - DNA, 25 bp, Homo sapien
tttccagtaagagtatgtgcataga

SEQ ID NO: 5555037 - DNA, 25 bp, Homo sapien
gatggccagagccgcacaattttgt

SEQ ID NO: 5555038 - DNA, 25 bp, Homo sapien
ggcagctgacgtcagacccactgca

SEQ ID NO: 5555039 - DNA, 25 bp, Homo sapien
tggagtggggtagcatccactttat

SEQ ID NO: 5555040 - DNA, 25 bp, Homo sapien
agcaaagcaaaccccccaccaagct

SEQ ID NO: 5555041 - DNA, 25 bp, Homo sapien
gcttttgattctggagtggggtagc

SEQ ID NO: 5555042 - DNA, 25 bp, Homo sapien
gcctttgaagctcagggctcagaag

SEQ ID NO: 5555043 - DNA, 25 bp, Homo sapien
attatctgatgaggtttttggaaca

SEQ ID NO: 5555044 - DNA, 25 bp, Homo sapien
aacagaatagcaaatggcctcccag

SEQ ID NO: 5555045 - DNA, 25 bp, Homo sapien
ctgtcagggaaactgtttagtctgc

SEQ ID NO: 5555046 - DNA, 25 bp, Homo sapien
atcatttttaacaagggctcccaac

SEQ ID NO: 5555047 - DNA, 25 bp, Homo sapien
caaaataagacaatccagcctgcct

SEQ ID NO: 5555048 - DNA, 25 bp, Homo sapien
ggcaaaccaaatcttagtgcagtgt

SEQ ID NO: 5555049 - DNA, 25 bp, Homo sapien
ctcgtccccttacccagaacatgat

SEQ ID NO: 5555050 - DNA, 25 bp, Homo sapien
cttagtgcagtgttcgctcctcgtc

SEQ ID NO: 5555051 - DNA, 25 bp, Homo sapien
aaagaatctgatttggcaaaccaaa

SEQ ID NO: 5555052 - DNA, 25 bp, Homo sapien
gcctggccccaaactgactcttgac

SEQ ID NO: 5555053 - DNA, 25 bp, Homo sapien
gtgcagtgttcgctcctcgtcccct

SEQ ID NO: 5555054 - DNA, 25 bp, Homo sapien
aatattgagataatgttcacgattc

SEQ ID NO: 5555055 - DNA, 25 bp, Homo sapien
caaatcttagtgcagtgttcgctcc

SEQ ID NO: 5555056 - DNA, 25 bp, Homo sapien
cccagaacatgattcagatcctaac

SEQ ID NO: 5555057 - DNA, 25 bp, Homo sapien
tctcgaagcttcgaaacacttcatt

SEQ ID NO: 5555058 - DNA, 25 bp, Homo sapien
gactcttgaccaaagaatctgattt

SEQ ID NO: 5555059 - DNA, 25 bp, Homo sapien
aaacaaggaaagtgagatcaacatt

SEQ ID NO: 5555060 - DNA, 25 bp, Homo sapien
gccatcagagatcagagaaatgtat

SEQ ID NO: 5555061 - DNA, 25 bp, Homo sapien
ccctctggtatcagtgtgggtggca

SEQ ID NO: 5555062 - DNA, 25 bp, Homo sapien
agaaagcaattaagaagcctcagcc

SEQ ID NO: 5555063 - DNA, 25 bp, Homo sapien
tcactgtatgaggctaaggatcaac

SEQ ID NO: 5555064 - DNA, 25 bp, Homo sapien
ttccccgagatagtgacaatacaat

SEQ ID NO: 5555065 - DNA, 25 bp, Homo sapien
gacaaacaccaggtagccacaggtg

SEQ ID NO: 5555066 - DNA, 25 bp, Homo sapien
tggccccagtcatcagagtgcttca

SEQ ID NO: 5555067 - DNA, 25 bp, Homo sapien
cctcagccagagaaattacaagtca

SEQ ID NO: 5555068 - DNA, 25 bp, Homo sapien
cagagtgcttcagcctagccccttc

SEQ ID NO: 5555069 - DNA, 25 bp, Homo sapien
aacccccagccacctcacagccttc

SEQ ID NO: 5555070 - DNA, 25 bp, Homo sapien
ggtagcctggatcagagtggcaata

SEQ ID NO: 5555071 - DNA, 25 bp, Homo sapien
tctagttgctgtatggagaatgaat

SEQ ID NO: 5555072 - DNA, 25 bp, Homo sapien
atggaaggatcaggtccgcaatttt

SEQ ID NO: 5555073 - DNA, 25 bp, Homo sapien
gttaggaagttgcttcagaagccta

SEQ ID NO: 5555074 - DNA, 25 bp, Homo sapien
gaaataaggagatagattctagctg

SEQ ID NO: 5555075 - DNA, 25 bp, Homo sapien
gaagttatctgtggaaagggaagat

SEQ ID NO: 5555076 - DNA, 25 bp, Homo sapien
gaatgattagatatggggaaaagta

SEQ ID NO: 5555077 - DNA, 25 bp, Homo sapien
atactcatgagaacaggaagcaaat

SEQ ID NO: 5555078 - DNA, 25 bp, Homo sapien
agatatcaagttgttaacagaagtt

SEQ ID NO: 5555079 - DNA, 25 bp, Homo sapien
tggcatactcatgagaacaggaagc

SEQ ID NO: 5555080 - DNA, 25 bp, Homo sapien
gcaaatgaaaagcgttcagctggga

SEQ ID NO: 5555081 - DNA, 25 bp, Homo sapien
gacgaaacccacgccagaggtcccc

SEQ ID NO: 5555082 - DNA, 25 bp, Homo sapien
ggggacctctggcgtgggtttcgtc

SEQ ID NO: 5555083 - DNA, 25 bp, Homo sapien
tgtatgtatgcagtgaaatgagagt

SEQ ID NO: 5555084 - DNA, 25 bp, Homo sapien
aggtcatcattgatcgcgtcctttc

SEQ ID NO: 5555085 - DNA, 25 bp, Homo sapien
acacacagtgtacaatgaatatggt

SEQ ID NO: 5555086 - DNA, 25 bp, Homo sapien
tgaatatggtttacacagaacaata

SEQ ID NO: 5555087 - DNA, 25 bp, Homo sapien
ttgagtcaatgttacctgtgagtgc

SEQ ID NO: 5555088 - DNA, 25 bp, Homo sapien
acaaaaatgatatctcttaaatgcc

SEQ ID NO: 5555089 - DNA, 25 bp, Homo sapien
agtgcccatacagttatatgcaaac

SEQ ID NO: 5555090 - DNA, 25 bp, Homo sapien
taaaatatccacacgagaagtatgt

SEQ ID NO: 5555091 - DNA, 25 bp, Homo sapien
acgagaagtatgtgtatacaaagta

SEQ ID NO: 5555092 - DNA, 25 bp, Homo sapien
cctgtgagtgcaataggtcatcatt

SEQ ID NO: 5555093 - DNA, 25 bp, Homo sapien
atgttgatagtgacataaaaacatc

SEQ ID NO: 5555094 - DNA, 25 bp, Homo sapien
taaaaacacagaccaggaaacaatc

SEQ ID NO: 5555095 - DNA, 25 bp, Homo sapien
gaaaggctagttccttggaaatgac

SEQ ID NO: 5555096 - DNA, 25 bp, Homo sapien
gtcttcagagtacaaccaatgtgat

SEQ ID NO: 5555097 - DNA, 25 bp, Homo sapien
aagaaaacaaacataggtactccag

SEQ ID NO: 5555098 - DNA, 25 bp, Homo sapien
atactggaagttttagaacacatac

SEQ ID NO: 5555099 - DNA, 25 bp, Homo sapien
taatataaatgggtgatgtgtggat

SEQ ID NO: 5555100 - DNA, 25 bp, Homo sapien
catacagacgcttaggaaaagaaag

SEQ ID NO: 5555101 - DNA, 25 bp, Homo sapien
tctagaaggcgaataaaaatactga

SEQ ID NO: 5555102 - DNA, 25 bp, Homo sapien
atcacttgatgacagaaggtaagcc

SEQ ID NO: 5555103 - DNA, 25 bp, Homo sapien
tggaaatgacgatccaggatgatac

SEQ ID NO: 5555104 - DNA, 25 bp, Homo sapien
tcttcatgaggaaaactgaaggaaa

SEQ ID NO: 5555105 - DNA, 25 bp, Homo sapien
tgcgcccggcctgatttcctgattt

SEQ ID NO: 5555106 - DNA, 25 bp, Homo sapien
ttcccagtccattgtgaagcacaac

SEQ ID NO: 5555107 - DNA, 25 bp, Homo sapien
agagaatgaagctgacagacactca

SEQ ID NO: 5555108 - DNA, 25 bp, Homo sapien
cccaagaaggtcacctgtctgttgt

SEQ ID NO: 5555109 - DNA, 25 bp, Homo sapien
ttccactgcacagctgagagagaat

SEQ ID NO: 5555110 - DNA, 25 bp, Homo sapien
tgtgaagcacaacccaagaaggtca

SEQ ID NO: 5555111 - DNA, 25 bp, Homo sapien
cagtgctgatgtagtagatgataaa

SEQ ID NO: 5555112 - DNA, 25 bp, Homo sapien
agttagtgcctcaatgcccctggac

SEQ ID NO: 5555113 - DNA, 25 bp, Homo sapien
aagaaaatggaacctagttagtgcc

SEQ ID NO: 5555114 - DNA, 25 bp, Homo sapien
gtagctgggacataccagtcccgcc

SEQ ID NO: 5555115 - DNA, 25 bp, Homo sapien
aatgcccctggacttcagtgctgat

SEQ ID NO: 5555116 - DNA, 25 bp, Homo sapien
agcgatgcttatacaaaggcaagac

SEQ ID NO: 5555117 - DNA, 25 bp, Homo sapien
attagggtgaagattttacagccaa

SEQ ID NO: 5555118 - DNA, 25 bp, Homo sapien
taactttgagagaaagtgatgagca

SEQ ID NO: 5555119 - DNA, 25 bp, Homo sapien
atatgttgacctagatccaagtggt

SEQ ID NO: 5555120 - DNA, 25 bp, Homo sapien
atagtgggtatttccaatttggcac

SEQ ID NO: 5555121 - DNA, 25 bp, Homo sapien
tggtattccccaaagcgatgcttat

SEQ ID NO: 5555122 - DNA, 25 bp, Homo sapien
ttcaggacacattagagaagaaaag

SEQ ID NO: 5555123 - DNA, 25 bp, Homo sapien
cggggttaatgaatcaggtccagaa

SEQ ID NO: 5555124 - DNA, 25 bp, Homo sapien
tgaatgcaccatattatagtgggta

SEQ ID NO: 5555125 - DNA, 25 bp, Homo sapien
acttgtggagtaaactgaatgcacc

SEQ ID NO: 5555126 - DNA, 25 bp, Homo sapien
tagatccaagtggtcattgccattc

SEQ ID NO: 5555127 - DNA, 25 bp, Homo sapien
catctgtaaattgctgaggtctgtc

SEQ ID NO: 5555128 - DNA, 25 bp, Homo sapien
tagctggctgcattccacacagggt

SEQ ID NO: 5555129 - DNA, 25 bp, Homo sapien
acaaataaagcaccgggcatagtct

SEQ ID NO: 5555130 - DNA, 25 bp, Homo sapien
agggtgaagatactagcatggtaat

SEQ ID NO: 5555131 - DNA, 25 bp, Homo sapien
gaggaaagtacactgggatccatct

SEQ ID NO: 5555132 - DNA, 25 bp, Homo sapien
agctatagcatctcccagggtgaag

SEQ ID NO: 5555133 - DNA, 25 bp, Homo sapien
gctgaggtctgtcatgaactggttt

SEQ ID NO: 5555134 - DNA, 25 bp, Homo sapien
ggaaaaaagcaggtgattactcaag

SEQ ID NO: 5555135 - DNA, 25 bp, Homo sapien
aggtcacatgttatggtaatgaagc

SEQ ID NO: 5555136 - DNA, 25 bp, Homo sapien
atagtctccaaagcaggaaagtgac

SEQ ID NO: 5555137 - DNA, 25 bp, Homo sapien
tctttggctgacatgtgtagacatt

SEQ ID NO: 5555138 - DNA, 25 bp, Homo sapien
gagagactgatcagtgggatactca

SEQ ID NO: 5555139 - DNA, 25 bp, Homo sapien
gggatactcaagcagagtgagacag

SEQ ID NO: 5555140 - DNA, 25 bp, Homo sapien
gatgactgagaaccaagtgcacaaa

SEQ ID NO: 5555141 - DNA, 25 bp, Homo sapien
aggggccactggaatgtccatttcc

SEQ ID NO: 5555142 - DNA, 25 bp, Homo sapien
acagagcggaaccttccaagtggta

SEQ ID NO: 5555143 - DNA, 25 bp, Homo sapien
tcaagggatcatataggaaagtcat

SEQ ID NO: 5555144 - DNA, 25 bp, Homo sapien
cagggtcccttgcagagatgactga

SEQ ID NO: 5555145 - DNA, 25 bp, Homo sapien
taatacgaataagtggacagatgag

SEQ ID NO: 5555146 - DNA, 25 bp, Homo sapien
aagcacagatgaagctgctacaggc

SEQ ID NO: 5555147 - DNA, 25 bp, Homo sapien
agggtaagattaggagatgataatt

SEQ ID NO: 5555148 - DNA, 25 bp, Homo sapien
agtgccataaagggtcagtggctct

SEQ ID NO: 5555149 - DNA, 25 bp, Homo sapien
tgtcaccagcctttcctcagtatcc

SEQ ID NO: 5555150 - DNA, 25 bp, Homo sapien
cctcagtatccacaggtgacaccac

SEQ ID NO: 5555151 - DNA, 25 bp, Homo sapien
gccacccctcttccggtcaccgaca

SEQ ID NO: 5555152 - DNA, 25 bp, Homo sapien
ccctcttcctgtcaccgacgcttcc

SEQ ID NO: 5555153 - DNA, 25 bp, Homo sapien
gcatcctcaggtcacaccacccctc

SEQ ID NO: 5555154 - DNA, 25 bp, Homo sapien
ctgtcaccgacgctttctcagtgtc

SEQ ID NO: 5555155 - DNA, 25 bp, Homo sapien
ggtccacaggtcacgccacctttct

SEQ ID NO: 5555156 - DNA, 25 bp, Homo sapien
cggtcaccgacacttcctcagtatc

SEQ ID NO: 5555157 - DNA, 25 bp, Homo sapien
gacgcttcctcagggtccacaggtc

SEQ ID NO: 5555158 - DNA, 25 bp, Homo sapien
cacaggtcacgccacccctcttcct

SEQ ID NO: 5555159 - DNA, 25 bp, Homo sapien
ttctcagtgtccacaggtcacgcca

SEQ ID NO: 5555160 - DNA, 25 bp, Homo sapien
tcatggtgtcatagcgttcaggaag

SEQ ID NO: 5555161 - DNA, 25 bp, Homo sapien
tattggaatgagcgccttctatttc

SEQ ID NO: 5555162 - DNA, 25 bp, Homo sapien
tgtgtttgttaggtgtggaattttc

SEQ ID NO: 5555163 - DNA, 25 bp, Homo sapien
taaagactatattggaatgagcgcc

SEQ ID NO: 5555164 - DNA, 25 bp, Homo sapien
actgagaggctctaatcctagcaac

SEQ ID NO: 5555165 - DNA, 25 bp, Homo sapien
tgctcaacctgtatctgaatgggaa

SEQ ID NO: 5555166 - DNA, 25 bp, Homo sapien
tggctgaaggtatcatcctaagtct

SEQ ID NO: 5555167 - DNA, 25 bp, Homo sapien
tatctgaatgggaaataaagactat

SEQ ID NO: 5555168 - DNA, 25 bp, Homo sapien
cagtaagagactgagttcttgcact

SEQ ID NO: 5555169 - DNA, 25 bp, Homo sapien
cattgaaccataagaaagcaaatgt

SEQ ID NO: 5555170 - DNA, 25 bp, Homo sapien
tcatagcgttcaggaaggtttggat

SEQ ID NO: 5555171 - DNA, 25 bp, Homo sapien
tggtagatatttatgtctgcggtct

SEQ ID NO: 5555172 - DNA, 25 bp, Homo sapien
agccctatagaactagggccagggc

SEQ ID NO: 5555173 - DNA, 25 bp, Homo sapien
agggccagggctacttcaaatataa

SEQ ID NO: 5555174 - DNA, 25 bp, Homo sapien
agtttggaccaaaatttaagatagc

SEQ ID NO: 5555175 - DNA, 25 bp, Homo sapien
cataaaatattaaatagccagccct

SEQ ID NO: 5555176 - DNA, 25 bp, Homo sapien
ttaagatagcatttggtagatattt

SEQ ID NO: 5555177 - DNA, 25 bp, Homo sapien
tctaaaagcaagttagttcagattt

SEQ ID NO: 5555178 - DNA, 25 bp, Homo sapien
caatgcttacaaagaaaaagacttc

SEQ ID NO: 5555179 - DNA, 25 bp, Homo sapien
tctaggtccctaaatgaatcatgaa

SEQ ID NO: 5555180 - DNA, 25 bp, Homo sapien
gaatcatgaagcattatatagaacc

SEQ ID NO: 5555181 - DNA, 25 bp, Homo sapien
gggagatcccaggctgcaaaaatat

SEQ ID NO: 5555182 - DNA, 25 bp, Homo sapien
gttgtatggtcaaactggcaaattt

SEQ ID NO: 5555183 - DNA, 25 bp, Homo sapien
ccccaagttgagaacaataatgaac

SEQ ID NO: 5555184 - DNA, 25 bp, Homo sapien
tttgtgttgaagatatgaatgaatg

SEQ ID NO: 5555185 - DNA, 25 bp, Homo sapien
gcagggcagcctttaaggacctgta

SEQ ID NO: 5555186 - DNA, 25 bp, Homo sapien
ggtagtaagtaatagtggcttggac

SEQ ID NO: 5555187 - DNA, 25 bp, Homo sapien
actggttaatgcagaaaggaagtct

SEQ ID NO: 5555188 - DNA, 25 bp, Homo sapien
agtgtcagagatagttaaaagtcca

SEQ ID NO: 5555189 - DNA, 25 bp, Homo sapien
gcgttatggttttgttggcagggca

SEQ ID NO: 5555190 - DNA, 25 bp, Homo sapien
ggaagaatagtgaatagtgtcagag

SEQ ID NO: 5555191 - DNA, 25 bp, Homo sapien
acaatagtagagaaggtagtaagta

SEQ ID NO: 5555192 - DNA, 25 bp, Homo sapien
tttatgtggagacctgataagtaag

SEQ ID NO: 5555193 - DNA, 25 bp, Homo sapien
cttgaaagatagtggaaattgatat

SEQ ID NO: 5555194 - DNA, 25 bp, Homo sapien
gatttaacttttctggtagactgaa

SEQ ID NO: 5555195 - DNA, 25 bp, Homo sapien
agccccctacgtccaacaacagatt

SEQ ID NO: 5555196 - DNA, 25 bp, Homo sapien
atgtttctgaaagccccctacgtcc

SEQ ID NO: 5555197 - DNA, 25 bp, Homo sapien
ggaaattgatataagaggcatgttt

SEQ ID NO: 5555198 - DNA, 25 bp, Homo sapien
gcctggtgcctttaggtaacttgaa

SEQ ID NO: 5555199 - DNA, 25 bp, Homo sapien
taggtaacttgaaagatagtggaaa

SEQ ID NO: 5555200 - DNA, 25 bp, Homo sapien
ttaaagactgaacagtgtgatttaa

SEQ ID NO: 5555201 - DNA, 25 bp, Homo sapien
cacataatttgcactctaggccttt

SEQ ID NO: 5555202 - DNA, 25 bp, Homo sapien
tgtttctggctatcacaatgagaca

SEQ ID NO: 5555203 - DNA, 25 bp, Homo sapien
ctggctatcacaatgagacaaattt

SEQ ID NO: 5555204 - DNA, 25 bp, Homo sapien
agaaaatctaggaagtctagggcta

SEQ ID NO: 5555205 - DNA, 25 bp, Homo sapien
atgacaagagatcctaatgccagaa

SEQ ID NO: 5555206 - DNA, 25 bp, Homo sapien
cagaaatcaatgttactcatgggag

SEQ ID NO: 5555207 - DNA, 25 bp, Homo sapien
ccaatagttctatgacaagagatcc

SEQ ID NO: 5555208 - DNA, 25 bp, Homo sapien
gtatttggtggatagaaggaaacca

SEQ ID NO: 5555209 - DNA, 25 bp, Homo sapien
tgctgaattcaggaactctgctatc

SEQ ID NO: 5555210 - DNA, 25 bp, Homo sapien
aggataatagagcatttgccccaga

SEQ ID NO: 5555211 - DNA, 25 bp, Homo sapien
tacaatgtcctacagaatgccacag

SEQ ID NO: 5555212 - DNA, 25 bp, Homo sapien
aatggaaattctgatgatatgctga

SEQ ID NO: 5555213 - DNA, 25 bp, Homo sapien
cacaggtttctccattaaagctgcc

SEQ ID NO: 5555214 - DNA, 25 bp, Homo sapien
aagtgaagaataaagttacattagc

SEQ ID NO: 5555215 - DNA, 25 bp, Homo sapien
gtctgggttacaaagtaccaactgc

SEQ ID NO: 5555216 - DNA, 25 bp, Homo sapien
ttataaagaaatacttcagtccaac

SEQ ID NO: 5555217 - DNA, 25 bp, Homo sapien
gaatgcctactgcttgaagggtcct

SEQ ID NO: 5555218 - DNA, 25 bp, Homo sapien
ctatagatataactctgcgaaatgt

SEQ ID NO: 5555219 - DNA, 25 bp, Homo sapien
aatcttaagcctacatgaagcccat

SEQ ID NO: 5555220 - DNA, 25 bp, Homo sapien
ctgaactcagtccatttttgcctac

SEQ ID NO: 5555221 - DNA, 25 bp, Homo sapien
ttaaggaggtgtaacttacagtatc

SEQ ID NO: 5555222 - DNA, 25 bp, Homo sapien
tattataatgaaacatcagctaact

SEQ ID NO: 5555223 - DNA, 25 bp, Homo sapien
ttccagaaggtcgacaaatgacttt

SEQ ID NO: 5555224 - DNA, 25 bp, Homo sapien
caaatatgattgttaaggaggtgta

SEQ ID NO: 5555225 - DNA, 25 bp, Homo sapien
aactgctctgtaactgaatgcctac

SEQ ID NO: 5555226 - DNA, 25 bp, Homo sapien
ttccagaatcaagcaaaataacaac

SEQ ID NO: 5555227 - DNA, 25 bp, Homo sapien
aataggtacagaaaggaattttgta

SEQ ID NO: 5555228 - DNA, 25 bp, Homo sapien
tttacaaatgaagacacgacagcag

SEQ ID NO: 5555229 - DNA, 25 bp, Homo sapien
catccagaccgattatacaggcatc

SEQ ID NO: 5555230 - DNA, 25 bp, Homo sapien
gcagggtcatctgtattcgatcatc

SEQ ID NO: 5555231 - DNA, 25 bp, Homo sapien
aggcatctacagaataggtacagaa

SEQ ID NO: 5555232 - DNA, 25 bp, Homo sapien
acgccacagtgaaacctaccaatcc

SEQ ID NO: 5555233 - DNA, 25 bp, Homo sapien
tcctgcaaacatggtaaagggtgaa

SEQ ID NO: 5555234 - DNA, 25 bp, Homo sapien
aacagcaaaaccacgccacagtgaa

SEQ ID NO: 5555235 - DNA, 25 bp, Homo sapien
gtaaagggtgaaccattgaacttca

SEQ ID NO: 5555236 - DNA, 25 bp, Homo sapien
acacacaaatcatgaacagcagctt

SEQ ID NO: 5555237 - DNA, 25 bp, Homo sapien
tatgacatgagttaaacagtttttc

SEQ ID NO: 5555238 - DNA, 25 bp, Homo sapien
gctagttaactatatctgaggagac

SEQ ID NO: 5555239 - DNA, 25 bp, Homo sapien
tctgaatacaattaaggatgaataa

SEQ ID NO: 5555240 - DNA, 25 bp, Homo sapien
ttacacgggtatgaagtaacagaaa

SEQ ID NO: 5555241 - DNA, 25 bp, Homo sapien
tattagcttagagacttaaaaaatc

SEQ ID NO: 5555242 - DNA, 25 bp, Homo sapien
aagtgaggcacttttgaggtcagaa

SEQ ID NO: 5555243 - DNA, 25 bp, Homo sapien
gctctaggagaataagaaaaagtcc

SEQ ID NO: 5555244 - DNA, 25 bp, Homo sapien
catgacaggtttaatcaggtaattc

SEQ ID NO: 5555245 - DNA, 25 bp, Homo sapien
ctgaggagacacattatgacatgag

SEQ ID NO: 5555246 - DNA, 25 bp, Homo sapien
gctatgtccaattacacgggtatga

SEQ ID NO: 5555247 - DNA, 25 bp, Homo sapien
ataatttgataagctctaggagaat

SEQ ID NO: 5555248 - DNA, 25 bp, Homo sapien
ggtctcgtgctgaaacgtaccttac

SEQ ID NO: 5555249 - DNA, 25 bp, Homo sapien
gtaaggtacgtttcagcacgagacc

SEQ ID NO: 5555250 - DNA, 25 bp, Homo sapien
agatcctactcttacagatacaccc

SEQ ID NO: 5555251 - DNA, 25 bp, Homo sapien
atttatgaacctcaattgcatctat

SEQ ID NO: 5555252 - DNA, 25 bp, Homo sapien
tacagatacacccacgtattcgttc

SEQ ID NO: 5555253 - DNA, 25 bp, Homo sapien
tactgacagtcttatgactaatcct

SEQ ID NO: 5555254 - DNA, 25 bp, Homo sapien
catcttcaggattactgacagtctt

SEQ ID NO: 5555255 - DNA, 25 bp, Homo sapien
actaatcctaacagatcctactctt

SEQ ID NO: 5555256 - DNA, 25 bp, Homo sapien
acagtggcagaagatacagccttgt

SEQ ID NO: 5555257 - DNA, 25 bp, Homo sapien
tgttttggagccaggtatgtctctc

SEQ ID NO: 5555258 - DNA, 25 bp, Homo sapien
ggaacctgggcctggattatctcat

SEQ ID NO: 5555259 - DNA, 25 bp, Homo sapien
attacagtggcagaagatacagcct

SEQ ID NO: 5555260 - DNA, 25 bp, Homo sapien
acagccttgttttggagccaggtat

SEQ ID NO: 5555261 - DNA, 25 bp, Homo sapien
ggaaagaatgtattgcaccaaacta

SEQ ID NO: 5555262 - DNA, 25 bp, Homo sapien
taatcatgctatacagaaacaaatc

SEQ ID NO: 5555263 - DNA, 25 bp, Homo sapien
tgcaccaaactaacagtaacttaac

SEQ ID NO: 5555264 - DNA, 25 bp, Homo sapien
aatatttaagtagcagcacaatttc

SEQ ID NO: 5555265 - DNA, 25 bp, Homo sapien
agcagcacaatttccaagtactttc

SEQ ID NO: 5555266 - DNA, 25 bp, Homo sapien
gtcacagtttgcacagtcaataatt

SEQ ID NO: 5555267 - DNA, 25 bp, Homo sapien
tccagtagaataagtgagaaggaac

SEQ ID NO: 5555268 - DNA, 25 bp, Homo sapien
aagtgagaaggaacattttaagata

SEQ ID NO: 5555269 - DNA, 25 bp, Homo sapien
aatgtttttggggggcatacaaata

SEQ ID NO: 5555270 - DNA, 25 bp, Homo sapien
acagaaacaaatcaagtattagctc

SEQ ID NO: 5555271 - DNA, 25 bp, Homo sapien
ggggggcatacaaatatccactgag

SEQ ID NO: 5555272 - DNA, 25 bp, Homo sapien
aaggacaactttagacactgggtga

SEQ ID NO: 5555273 - DNA, 25 bp, Homo sapien
aaggctataagctaaacttgctgaa

SEQ ID NO: 5555274 - DNA, 25 bp, Homo sapien
tttatttaggaggaaagatgcttga

SEQ ID NO: 5555275 - DNA, 25 bp, Homo sapien
gggtgaatcttcagcttaaaaggcc

SEQ ID NO: 5555276 - DNA, 25 bp, Homo sapien
cagcttaaaaggcccagtgctggat

SEQ ID NO: 5555277 - DNA, 25 bp, Homo sapien
gctggatgaatgactcacaacagca

SEQ ID NO: 5555278 - DNA, 25 bp, Homo sapien
ccaaatgcagagctgctaagcagag

SEQ ID NO: 5555279 - DNA, 25 bp, Homo sapien
agaggaatttatcaaggctataagc

SEQ ID NO: 5555280 - DNA, 25 bp, Homo sapien
ttatggttaagtagctagtaaatat

SEQ ID NO: 5555281 - DNA, 25 bp, Homo sapien
cacaccccagaaaaggttttgtcca

SEQ ID NO: 5555282 - DNA, 25 bp, Homo sapien
gaggaaagatgcttgaaagctagct

SEQ ID NO: 5555283 - DNA, 25 bp, Homo sapien
cagttaggccattggtttcttttta

SEQ ID NO: 5555284 - DNA, 25 bp, Homo sapien
tttcttttagagatgggagccttgc

SEQ ID NO: 5555285 - DNA, 25 bp, Homo sapien
ttccataactttcctgcaccccaat

SEQ ID NO: 5555286 - DNA, 25 bp, Homo sapien
ttcagtggcatgaccatggctcact

SEQ ID NO: 5555287 - DNA, 25 bp, Homo sapien
acttaggctggaattcagtggcatg

SEQ ID NO: 5555288 - DNA, 25 bp, Homo sapien
tcctgcaccccaattaatctccaat

SEQ ID NO: 5555289 - DNA, 25 bp, Homo sapien
taatgatttatctagcaggacttat

SEQ ID NO: 5555290 - DNA, 25 bp, Homo sapien
gcctggctgctctgtaagtgtctga

SEQ ID NO: 5555291 - DNA, 25 bp, Homo sapien
tgctctgtcacttaggctggaattc

SEQ ID NO: 5555292 - DNA, 25 bp, Homo sapien
ctcactgcagccttgccctcctagg

SEQ ID NO: 5555293 - DNA, 25 bp, Homo sapien
gctgctctgtaagtgtctgaatttc

SEQ ID NO: 5555294 - DNA, 25 bp, Homo sapien
ccgccttcaccgaactgcagttgcc

SEQ ID NO: 5555295 - DNA, 25 bp, Homo sapien
aggtcggtgtcccctcgtcattgtc

SEQ ID NO: 5555296 - DNA, 25 bp, Homo sapien
gccgcgctacatcatggccgggttc

SEQ ID NO: 5555297 - DNA, 25 bp, Homo sapien
tttccgctggtataaggaagccaag

SEQ ID NO: 5555298 - DNA, 25 bp, Homo sapien
cttcttggactgagactgatgtgga

SEQ ID NO: 5555299 - DNA, 25 bp, Homo sapien
tcggcgatgttaagtacaaggtgga

SEQ ID NO: 5555300 - DNA, 25 bp, Homo sapien
tccaatgccgacatcgggctaaggc

SEQ ID NO: 5555301 - DNA, 25 bp, Homo sapien
agcttcactgcaccccaggcgatgg

SEQ ID NO: 5555302 - DNA, 25 bp, Homo sapien
aactcagcctcgaatttggggatcc

SEQ ID NO: 5555303 - DNA, 25 bp, Homo sapien
aggagcgtgtctacaccccgtccaa

SEQ ID NO: 5555304 - DNA, 25 bp, Homo sapien
gttccctgtgtgccccaaactcagc

SEQ ID NO: 5555305 - DNA, 25 bp, Homo sapien
gggggtgctccgtccctgactctcg

SEQ ID NO: 5555306 - DNA, 25 bp, Homo sapien
cgagagtcagggacggagcaccccc

SEQ ID NO: 5555307 - DNA, 25 bp, Homo sapien
tctcccaactagacggtcttgctcc

SEQ ID NO: 5555308 - DNA, 25 bp, Homo sapien
gaagccgagttaattgtcctccagc

SEQ ID NO: 5555309 - DNA, 25 bp, Homo sapien
tgccctgggagaggttttccctctc

SEQ ID NO: 5555310 - DNA, 25 bp, Homo sapien
acaggattagaggcttcaaccaagg

SEQ ID NO: 5555311 - DNA, 25 bp, Homo sapien
ctgtgtcggttaagtgtgagaaaga

SEQ ID NO: 5555312 - DNA, 25 bp, Homo sapien
ctgagggccattttgaagccgagtt

SEQ ID NO: 5555313 - DNA, 25 bp, Homo sapien
gcttcaaccaaggcccatgctgcag

SEQ ID NO: 5555314 - DNA, 25 bp, Homo sapien
cagaccggctaccgattgaggctta

SEQ ID NO: 5555315 - DNA, 25 bp, Homo sapien
tccatctggctgggcatcttttgcc

SEQ ID NO: 5555316 - DNA, 25 bp, Homo sapien
aagcagcccttacaggattagaggc

SEQ ID NO: 5555317 - DNA, 25 bp, Homo sapien
gattgaggcttacaccgggtttcta

SEQ ID NO: 5555318 - DNA, 25 bp, Homo sapien
gagtagagtccgtagacgtcgtgtg

SEQ ID NO: 5555319 - DNA, 25 bp, Homo sapien
cacacgacgtctacggactctactc

SEQ ID NO: 5555320 - DNA, 25 bp, Homo sapien
aaaacccatgtctcccgtctgcccc

SEQ ID NO: 5555321 - DNA, 25 bp, Homo sapien
agcctctgaggctggcctacttttc

SEQ ID NO: 5555322 - DNA, 25 bp, Homo sapien
aggccacacgagcagaaaaatttgg

SEQ ID NO: 5555323 - DNA, 25 bp, Homo sapien
agaaactcataagatgcttgtggct

SEQ ID NO: 5555324 - DNA, 25 bp, Homo sapien
aggaaaagctagcaagcaccttctc

SEQ ID NO: 5555325 - DNA, 25 bp, Homo sapien
acgagcagaaaaatttgggcattac

SEQ ID NO: 5555326 - DNA, 25 bp, Homo sapien
gaaaatgtaccaaggaaaagctagc

SEQ ID NO: 5555327 - DNA, 25 bp, Homo sapien
ctaaggcctcggtgccacctcccta

SEQ ID NO: 5555328 - DNA, 25 bp, Homo sapien
gaacataactaggacaatgggacac

SEQ ID NO: 5555329 - DNA, 25 bp, Homo sapien
ttcagctcagcagcctctgaggctg

SEQ ID NO: 5555330 - DNA, 25 bp, Homo sapien
cttcatcctgacagcacagcagtgc

SEQ ID NO: 5555331 - DNA, 25 bp, Homo sapien
tgagaatacctaactcctaggatac

SEQ ID NO: 5555332 - DNA, 25 bp, Homo sapien
ggcacaaagtagatacttggaaaac

SEQ ID NO: 5555333 - DNA, 25 bp, Homo sapien
gagctgtcaggcaccgtgctagaca

SEQ ID NO: 5555334 - DNA, 25 bp, Homo sapien
tcccctcccagtagagatgttcatc

SEQ ID NO: 5555335 - DNA, 25 bp, Homo sapien
aggcaccgtgctagacactacacat

SEQ ID NO: 5555336 - DNA, 25 bp, Homo sapien
caacaccatttctggcacaaagtag

SEQ ID NO: 5555337 - DNA, 25 bp, Homo sapien
tcaaggtgccagcatttcttccctc

SEQ ID NO: 5555338 - DNA, 25 bp, Homo sapien
aatcagtaaattgcccaacaccatt

SEQ ID NO: 5555339 - DNA, 25 bp, Homo sapien
ggggattttctgtgagctgtcaggc

SEQ ID NO: 5555340 - DNA, 25 bp, Homo sapien
ctttccccaaatgtcaaggtgccag

SEQ ID NO: 5555341 - DNA, 25 bp, Homo sapien
aactcctaggatacgtcaaaggatt

SEQ ID NO: 5555342 - DNA, 25 bp, Homo sapien
tccgaggcctgaccttgcacctgcc

SEQ ID NO: 5555343 - DNA, 25 bp, Homo sapien
ggcaggtgcaaggtcaggcctcgga

SEQ ID NO: 5555344 - DNA, 25 bp, Homo sapien
atcaagaaggaaaaaccactcagac

SEQ ID NO: 5555345 - DNA, 25 bp, Homo sapien
ctctgtcattgagccatcaagaagg

SEQ ID NO: 5555346 - DNA, 25 bp, Homo sapien
aacaggaggcgaaaacctttctcgc

SEQ ID NO: 5555347 - DNA, 25 bp, Homo sapien
cggagtttacgagctagtctctgtc

SEQ ID NO: 5555348 - DNA, 25 bp, Homo sapien
gccatcaagaaggaaaaaccactca

SEQ ID NO: 5555349 - DNA, 25 bp, Homo sapien
ttgagccatcaagaaggaaaaacca

SEQ ID NO: 5555350 - DNA, 25 bp, Homo sapien
ccccggagtttacgagctagtctct

SEQ ID NO: 5555351 - DNA, 25 bp, Homo sapien
tcaagaaggaaaaaccactcagacc

SEQ ID NO: 5555352 - DNA, 25 bp, Homo sapien
ctagtctctgtcattgagccatcaa

SEQ ID NO: 5555353 - DNA, 25 bp, Homo sapien
cattgagccatcaagaaggaaaaac

SEQ ID NO: 5555354 - DNA, 25 bp, Homo sapien
atcccccgcctcgcgccaagactaa

SEQ ID NO: 5555355 - DNA, 25 bp, Homo sapien
acaataatcttaggagctgcatctt

SEQ ID NO: 5555356 - DNA, 25 bp, Homo sapien
cataaaagtgggtttcaaaacaaga

SEQ ID NO: 5555357 - DNA, 25 bp, Homo sapien
gatgagctacataaaagtgggtttc

SEQ ID NO: 5555358 - DNA, 25 bp, Homo sapien
agtaagataaaccatgatgagctac

SEQ ID NO: 5555359 - DNA, 25 bp, Homo sapien
taactactgtgaaatggaaacagta

SEQ ID NO: 5555360 - DNA, 25 bp, Homo sapien
ttgagtgaaaatccagatgataatc

SEQ ID NO: 5555361 - DNA, 25 bp, Homo sapien
aaagttgagaactgaatgaacaaac

SEQ ID NO: 5555362 - DNA, 25 bp, Homo sapien
gatgttggaatgacaagaggtaaat

SEQ ID NO: 5555363 - DNA, 25 bp, Homo sapien
cagaacttcactttaaggttagcac

SEQ ID NO: 5555364 - DNA, 25 bp, Homo sapien
gaaagccacagaatatgaaatcaat

SEQ ID NO: 5555365 - DNA, 25 bp, Homo sapien
aaaactgtacatactcaaagactcc

SEQ ID NO: 5555366 - DNA, 25 bp, Homo sapien
ggtccactgtcgttgcgaatccgtg

SEQ ID NO: 5555367 - DNA, 25 bp, Homo sapien
cacggattcgcaacgacagtggacc

SEQ ID NO: 5555368 - DNA, 25 bp, Homo sapien
taaaaatgcaatagtgtatgaatta

SEQ ID NO: 5555369 - DNA, 25 bp, Homo sapien
tcttgacccaacatcccaagttttc

SEQ ID NO: 5555370 - DNA, 25 bp, Homo sapien
gagaagcatttagcagggcatttca

SEQ ID NO: 5555371 - DNA, 25 bp, Homo sapien
tattcaaataattaagagaagcatt

SEQ ID NO: 5555372 - DNA, 25 bp, Homo sapien
aaatgctaaagctgggttataaaat

SEQ ID NO: 5555373 - DNA, 25 bp, Homo sapien
tatctgtatgtagagtgatcttttc

SEQ ID NO: 5555374 - DNA, 25 bp, Homo sapien
agcaagaagcgcccttaaaagaagg

SEQ ID NO: 5555375 - DNA, 25 bp, Homo sapien
tactgtctcatatataggatcacaa

SEQ ID NO: 5555376 - DNA, 25 bp, Homo sapien
ctttcttgtgtctctgtgagggcag

SEQ ID NO: 5555377 - DNA, 25 bp, Homo sapien
atttagcagggcatttcagagagca

SEQ ID NO: 5555378 - DNA, 25 bp, Homo sapien
gctgggttataaaatatggtgctgc

SEQ ID NO: 5555379 - DNA, 25 bp, Homo sapien
aatatatatgtatcccctgaacctc

SEQ ID NO: 5555380 - DNA, 25 bp, Homo sapien
cagtctttggtgctggcccagaagg

SEQ ID NO: 5555381 - DNA, 25 bp, Homo sapien
gaaggtggcccacaaaccaatgtta

SEQ ID NO: 5555382 - DNA, 25 bp, Homo sapien
ttaccttctgacagagcaatgtgat

SEQ ID NO: 5555383 - DNA, 25 bp, Homo sapien
aatggctgttcacggtgctgacctt

SEQ ID NO: 5555384 - DNA, 25 bp, Homo sapien
agagcaatgtgatttgacaagactc

SEQ ID NO: 5555385 - DNA, 25 bp, Homo sapien
ggtgctgaccttgctctcagtccac

SEQ ID NO: 5555386 - DNA, 25 bp, Homo sapien
agatcttctagactgggcacatggc

SEQ ID NO: 5555387 - DNA, 25 bp, Homo sapien
cagtccacactgatttgtcttacct

SEQ ID NO: 5555388 - DNA, 25 bp, Homo sapien
gttaaaggaaccgcaatggctgttc

SEQ ID NO: 5555389 - DNA, 25 bp, Homo sapien
ccagaaggtggcccacaaaccaatg

SEQ ID NO: 5555390 - DNA, 25 bp, Homo sapien
agtgacaacagacctcaggcacgaa

SEQ ID NO: 5555391 - DNA, 25 bp, Homo sapien
tcctcaagtggctcacctaattgtc

SEQ ID NO: 5555392 - DNA, 25 bp, Homo sapien
cctaattgtcagaaagtgagtgagt

SEQ ID NO: 5555393 - DNA, 25 bp, Homo sapien
gagtgtcttggactggtctgaagga

SEQ ID NO: 5555394 - DNA, 25 bp, Homo sapien
taccttaggacagatgccaagtttt

SEQ ID NO: 5555395 - DNA, 25 bp, Homo sapien
agacctcaggcacgaaactattttc

SEQ ID NO: 5555396 - DNA, 25 bp, Homo sapien
caccaattacactgtggggggttac

SEQ ID NO: 5555397 - DNA, 25 bp, Homo sapien
tgaatgtcaaagtcagaacagtctc

SEQ ID NO: 5555398 - DNA, 25 bp, Homo sapien
acttcaggccagaaaatcctcaagt

SEQ ID NO: 5555399 - DNA, 25 bp, Homo sapien
aaagacaacttggctggaaatgctg

SEQ ID NO: 5555400 - DNA, 25 bp, Homo sapien
aaggaagaacatctgaaaggtctga

SEQ ID NO: 5555401 - DNA, 25 bp, Homo sapien
atgggacacgttttgaaaagaattg

SEQ ID NO: 5555402 - DNA, 25 bp, Homo sapien
ctcaccccgagtaaccaaatcagcg

SEQ ID NO: 5555403 - DNA, 25 bp, Homo sapien
acaatgctgatcacccctagggaga

SEQ ID NO: 5555404 - DNA, 25 bp, Homo sapien
aagctaagatgccttgcgaagctcc

SEQ ID NO: 5555405 - DNA, 25 bp, Homo sapien
ttttagtgcaggatgcctcagatgc

SEQ ID NO: 5555406 - DNA, 25 bp, Homo sapien
ggacatgggtgcagttcaccactgc

SEQ ID NO: 5555407 - DNA, 25 bp, Homo sapien
aggatgcctcagatgctgtgtggaa

SEQ ID NO: 5555408 - DNA, 25 bp, Homo sapien
gcgaagctccatgagtcggtgatat

SEQ ID NO: 5555409 - DNA, 25 bp, Homo sapien
ctgagatcttaggagatgtgagcag

SEQ ID NO: 5555410 - DNA, 25 bp, Homo sapien
tttccacgaggcataccatgggaca

SEQ ID NO: 5555411 - DNA, 25 bp, Homo sapien
agcccacgctagaacctcaggcaat

SEQ ID NO: 5555412 - DNA, 25 bp, Homo sapien
accttataccatgtgagagagcgag

SEQ ID NO: 5555413 - DNA, 25 bp, Homo sapien
atcaacactaggacatgaatgggca

SEQ ID NO: 5555414 - DNA, 25 bp, Homo sapien
caggcctccaaaagacagaattgtc

SEQ ID NO: 5555415 - DNA, 25 bp, Homo sapien
aaggaaactgtactgaaagaaaatg

SEQ ID NO: 5555416 - DNA, 25 bp, Homo sapien
cccttaagtttggggagctcgagaa

SEQ ID NO: 5555417 - DNA, 25 bp, Homo sapien
cctctgtaaatcctgcccaggcctc

SEQ ID NO: 5555418 - DNA, 25 bp, Homo sapien
gagctcgagaactggcattaagtgc

SEQ ID NO: 5555419 - DNA, 25 bp, Homo sapien
cccagacaacctggagatgaaggaa

SEQ ID NO: 5555420 - DNA, 25 bp, Homo sapien
atgaatgggcaggtgtttaccctac

SEQ ID NO: 5555421 - DNA, 25 bp, Homo sapien
gagctggcatggagccctctgtaaa

SEQ ID NO: 5555422 - DNA, 25 bp, Homo sapien
cctactgcttgttgacctgtgtccc

SEQ ID NO: 5555423 - DNA, 25 bp, Homo sapien
ggacaagaggatctgtgctcaatgc

SEQ ID NO: 5555424 - DNA, 25 bp, Homo sapien
atcagcacaagcaaagagtttccaa

SEQ ID NO: 5555425 - DNA, 25 bp, Homo sapien
atctagaacatggcacaagcaaatc

SEQ ID NO: 5555426 - DNA, 25 bp, Homo sapien
gacagcttaggacaagaggatctgt

SEQ ID NO: 5555427 - DNA, 25 bp, Homo sapien
tctctcagacaacaaaatcaaagga

SEQ ID NO: 5555428 - DNA, 25 bp, Homo sapien
aggacaactttggatagatgctaac

SEQ ID NO: 5555429 - DNA, 25 bp, Homo sapien
gcccaggatgacagaaaactaatgt

SEQ ID NO: 5555430 - DNA, 25 bp, Homo sapien
tggatagatgctaacctgagcctct

SEQ ID NO: 5555431 - DNA, 25 bp, Homo sapien
ctgagcctctaggacagcttaggac

SEQ ID NO: 5555432 - DNA, 25 bp, Homo sapien
ctgtaatgaggtacttggcccagga

SEQ ID NO: 5555433 - DNA, 25 bp, Homo sapien
aattcaagctttgggaaacttatcc

SEQ ID NO: 5555434 - DNA, 25 bp, Homo sapien
aaaacataaagcaagacattctctg

SEQ ID NO: 5555435 - DNA, 25 bp, Homo sapien
gagttccctgaccatgggagagctc

SEQ ID NO: 5555436 - DNA, 25 bp, Homo sapien
gaggttaactccacgacacaaagtc

SEQ ID NO: 5555437 - DNA, 25 bp, Homo sapien
gtaagtcacttagcacagtgctggc

SEQ ID NO: 5555438 - DNA, 25 bp, Homo sapien
gcttatgacttggtgttggaaggag

SEQ ID NO: 5555439 - DNA, 25 bp, Homo sapien
agcttagaggaacgggtctttatgt

SEQ ID NO: 5555440 - DNA, 25 bp, Homo sapien
tccttagccagatgaaaggtcacag

SEQ ID NO: 5555441 - DNA, 25 bp, Homo sapien
gaggaaaagtcatgaacatgaggtt

SEQ ID NO: 5555442 - DNA, 25 bp, Homo sapien
gcatgcatgctggctcaaaaatggc

SEQ ID NO: 5555443 - DNA, 25 bp, Homo sapien
ctctgtgatgatttagcaaagcaat

SEQ ID NO: 5555444 - DNA, 25 bp, Homo sapien
tacagaataggaacctagctcagct

SEQ ID NO: 5555445 - DNA, 25 bp, Homo sapien
ggtaaagagcagaaattgttgacgc

SEQ ID NO: 5555446 - DNA, 25 bp, Homo sapien
accaaatagaactgaaagtgagatg

SEQ ID NO: 5555447 - DNA, 25 bp, Homo sapien
taacaagctgactatgtggaagaat

SEQ ID NO: 5555448 - DNA, 25 bp, Homo sapien
gcgtaagaggcagatataatagttt

SEQ ID NO: 5555449 - DNA, 25 bp, Homo sapien
gaagcctaggcaagttagctaggtc

SEQ ID NO: 5555450 - DNA, 25 bp, Homo sapien
atgtggaagaatagactagtacgca

SEQ ID NO: 5555451 - DNA, 25 bp, Homo sapien
ttgacataaaactgagtaagctgta

SEQ ID NO: 5555452 - DNA, 25 bp, Homo sapien
cgcaggccagaagattataccgtag

SEQ ID NO: 5555453 - DNA, 25 bp, Homo sapien
taaaaacagctgttgggagtgaaaa

SEQ ID NO: 5555454 - DNA, 25 bp, Homo sapien
gtgagatgatcagaaaaagattgtc

SEQ ID NO: 5555455 - DNA, 25 bp, Homo sapien
gtgtgtgactcatgaaataaaggac

SEQ ID NO: 5555456 - DNA, 25 bp, Homo sapien
aatgtcgaacacagttaacaggtgc

SEQ ID NO: 5555457 - DNA, 25 bp, Homo sapien
tcagaaataggcaatcaaaagtgta

SEQ ID NO: 5555458 - DNA, 25 bp, Homo sapien
gttaacaggtgcaggtgtcaatgaa

SEQ ID NO: 5555459 - DNA, 25 bp, Homo sapien
tttgctgaaagaatggctgcatctc

SEQ ID NO: 5555460 - DNA, 25 bp, Homo sapien
tctgacccttctgactccctccccc

SEQ ID NO: 5555461 - DNA, 25 bp, Homo sapien
actgaactaagagtttcttgagtcc

SEQ ID NO: 5555462 - DNA, 25 bp, Homo sapien
cttgagtccagagtgcacatcttgc

SEQ ID NO: 5555463 - DNA, 25 bp, Homo sapien
gccaagacagctctccgttttcaag

SEQ ID NO: 5555464 - DNA, 25 bp, Homo sapien
caggtgtcaatgaagctttgctgaa

SEQ ID NO: 5555465 - DNA, 25 bp, Homo sapien
ttcaataggcccagggttaccagca

SEQ ID NO: 5555466 - DNA, 25 bp, Homo sapien
aggctgagcttaaaggcctgaagcc

SEQ ID NO: 5555467 - DNA, 25 bp, Homo sapien
catgacatattttaagcgccgctaa

SEQ ID NO: 5555468 - DNA, 25 bp, Homo sapien
agagtagattcaataactgtgtttc

SEQ ID NO: 5555469 - DNA, 25 bp, Homo sapien
tctgacaagactttactgaaagatg

SEQ ID NO: 5555470 - DNA, 25 bp, Homo sapien
agactttactgaaagatgaagtgca

SEQ ID NO: 5555471 - DNA, 25 bp, Homo sapien
aaatgttaatgacaagagtagattc

SEQ ID NO: 5555472 - DNA, 25 bp, Homo sapien
aatgtccaacagataactaaaattc

SEQ ID NO: 5555473 - DNA, 25 bp, Homo sapien
tgaagtgcaaatgggaaccctgtaa

SEQ ID NO: 5555474 - DNA, 25 bp, Homo sapien
tgtttataagagttgtacatgacat

SEQ ID NO: 5555475 - DNA, 25 bp, Homo sapien
taagcgccgctaagtacacattgaa

SEQ ID NO: 5555476 - DNA, 25 bp, Homo sapien
tgcaagtgtcatgtaccaaatatta

SEQ ID NO: 5555477 - DNA, 25 bp, Homo sapien
ataggcatatcaacatgcaagtgtc

SEQ ID NO: 5555478 - DNA, 25 bp, Homo sapien
ggggtacaggtctacatggcaaccc

SEQ ID NO: 5555479 - DNA, 25 bp, Homo sapien
actgcctgctgaatatggatcatag

SEQ ID NO: 5555480 - DNA, 25 bp, Homo sapien
tttgtttgcaaaagtcaatctcacc

SEQ ID NO: 5555481 - DNA, 25 bp, Homo sapien
agatgcccaaagcacctggggtaca

SEQ ID NO: 5555482 - DNA, 25 bp, Homo sapien
tgtggataacatctctggtagtgcc

SEQ ID NO: 5555483 - DNA, 25 bp, Homo sapien
cattaccaggaaggactcatcttca

SEQ ID NO: 5555484 - DNA, 25 bp, Homo sapien
gtggtcaggaagcattaccaggaag

SEQ ID NO: 5555485 - DNA, 25 bp, Homo sapien
acccaatgccacataggaaaagaaa

SEQ ID NO: 5555486 - DNA, 25 bp, Homo sapien
tcaccccatgtagatgttaactgat

SEQ ID NO: 5555487 - DNA, 25 bp, Homo sapien
acaggtctacatggcaacccaatgc

SEQ ID NO: 5555488 - DNA, 25 bp, Homo sapien
aagcacctggggtacaggtctacat

SEQ ID NO: 5555489 - DNA, 25 bp, Homo sapien
ccaaagtgttggtgttaaggacatg

SEQ ID NO: 5555490 - DNA, 25 bp, Homo sapien
caaaaatgccatagagagacaaatt

SEQ ID NO: 5555491 - DNA, 25 bp, Homo sapien
tctctcatcccatgagccagccatg

SEQ ID NO: 5555492 - DNA, 25 bp, Homo sapien
catatttaaacggtctaagaaggaa

SEQ ID NO: 5555493 - DNA, 25 bp, Homo sapien
tgccatagagagacaaattgaaaca

SEQ ID NO: 5555494 - DNA, 25 bp, Homo sapien
cagagactacttgtttcgtggccat

SEQ ID NO: 5555495 - DNA, 25 bp, Homo sapien
cagaggaacaggtgaattatcatcc

SEQ ID NO: 5555496 - DNA, 25 bp, Homo sapien
ccagccaaccagagactacttgttt

SEQ ID NO: 5555497 - DNA, 25 bp, Homo sapien
ggattaccggtgtgcaccaccgcac

SEQ ID NO: 5555498 - DNA, 25 bp, Homo sapien
tcagaagcttgaagacagaatgttg

SEQ ID NO: 5555499 - DNA, 25 bp, Homo sapien
gttggtgttaaggacatgagccaca

SEQ ID NO: 5555500 - DNA, 25 bp, Homo sapien
actgacatcagctaagtaaagctaa

SEQ ID NO: 5555501 - DNA, 25 bp, Homo sapien
acacaaattaatgagtacagtcctt

SEQ ID NO: 5555502 - DNA, 25 bp, Homo sapien
attatgaaaagttatagagaagtac

SEQ ID NO: 5555503 - DNA, 25 bp, Homo sapien
aagttatagagaagtacattaaatg

SEQ ID NO: 5555504 - DNA, 25 bp, Homo sapien
ggctaaagagccagtgcaatttttt

SEQ ID NO: 5555505 - DNA, 25 bp, Homo sapien
ctcattaggaacaaagtagggatgt

SEQ ID NO: 5555506 - DNA, 25 bp, Homo sapien
aatacatccatgttacagtgcttat

SEQ ID NO: 5555507 - DNA, 25 bp, Homo sapien
acatttaggagacagaaacatttac

SEQ ID NO: 5555508 - DNA, 25 bp, Homo sapien
gtaaagctaatacatggttgttcac

SEQ ID NO: 5555509 - DNA, 25 bp, Homo sapien
aggcttacaggaattattaagaatt

SEQ ID NO: 5555510 - DNA, 25 bp, Homo sapien
cagtgcttattttggctaaagagcc

SEQ ID NO: 5555511 - DNA, 25 bp, Homo sapien
tcaatcatgtttggaaataagttcc

SEQ ID NO: 5555512 - DNA, 25 bp, Homo sapien
ggagcctggcaacaaaacaacaata

SEQ ID NO: 5555513 - DNA, 25 bp, Homo sapien
tgtactgttgcacatgcaaatgcac

SEQ ID NO: 5555514 - DNA, 25 bp, Homo sapien
gttggagcctggcaacaaaacaaca

SEQ ID NO: 5555515 - DNA, 25 bp, Homo sapien
ataaaaaaccacttaacacagacat

SEQ ID NO: 5555516 - DNA, 25 bp, Homo sapien
ttaacacagacatttctaggctgaa

SEQ ID NO: 5555517 - DNA, 25 bp, Homo sapien
ttttgagagtagattgcatacatta

SEQ ID NO: 5555518 - DNA, 25 bp, Homo sapien
tcgtattttgtgagttggagcctgg

SEQ ID NO: 5555519 - DNA, 25 bp, Homo sapien
tatgtatgtttgtgtgtactgttgc

SEQ ID NO: 5555520 - DNA, 25 bp, Homo sapien
taagttgcaagaatcagactgtctc

SEQ ID NO: 5555521 - DNA, 25 bp, Homo sapien
tgtgtatcagattattgttaaatgt

SEQ ID NO: 5555522 - DNA, 25 bp, Homo sapien
agtctccagcatgggcctcttcatt

SEQ ID NO: 5555523 - DNA, 25 bp, Homo sapien
cctcaatgtctaggacaagggaacc

SEQ ID NO: 5555524 - DNA, 25 bp, Homo sapien
gtgggacctgacgcttctcaggctc

SEQ ID NO: 5555525 - DNA, 25 bp, Homo sapien
agggctcatagtagctgcatggcag

SEQ ID NO: 5555526 - DNA, 25 bp, Homo sapien
gttttggtcttatctgggcccctca

SEQ ID NO: 5555527 - DNA, 25 bp, Homo sapien
caagggaacccttccagtctccagc

SEQ ID NO: 5555528 - DNA, 25 bp, Homo sapien
attgttgctaacgggttgaaataag

SEQ ID NO: 5555529 - DNA, 25 bp, Homo sapien
ggccgtgagatctgagacagtttct

SEQ ID NO: 5555530 - DNA, 25 bp, Homo sapien
tccagcatgataaaatctgggtgag

SEQ ID NO: 5555531 - DNA, 25 bp, Homo sapien
ctgctcttgcctctgtaccacatgc

SEQ ID NO: 5555532 - DNA, 25 bp, Homo sapien
ttaggtatgtatctgggcaagctga

SEQ ID NO: 5555533 - DNA, 25 bp, Homo sapien
tcatcggcaacttcccatgtcgaag

SEQ ID NO: 5555534 - DNA, 25 bp, Homo sapien
cttcgacatgggaagttgccgatga

SEQ ID NO: 5555535 - DNA, 25 bp, Homo sapien
atagaacccagaaagcatgtctcct

SEQ ID NO: 5555536 - DNA, 25 bp, Homo sapien
tctgcaatagcacaagatgcttgtc

SEQ ID NO: 5555537 - DNA, 25 bp, Homo sapien
ttcaattgcaggctaaaaccatctc

SEQ ID NO: 5555538 - DNA, 25 bp, Homo sapien
cttgaaacatcgagggcaagtaaga

SEQ ID NO: 5555539 - DNA, 25 bp, Homo sapien
acatgaaaggcacttaaataagcat

SEQ ID NO: 5555540 - DNA, 25 bp, Homo sapien
tgaaatatcaacccagaatgctctg

SEQ ID NO: 5555541 - DNA, 25 bp, Homo sapien
cttggacatgccatgtggcctctcg

SEQ ID NO: 5555542 - DNA, 25 bp, Homo sapien
tgggaaaaagttagcaaggcttcaa

SEQ ID NO: 5555543 - DNA, 25 bp, Homo sapien
ttcctggggtttatgagatcaaaaa

SEQ ID NO: 5555544 - DNA, 25 bp, Homo sapien
tcctgggtagaaaagtctctgcaat

SEQ ID NO: 5555545 - DNA, 25 bp, Homo sapien
tggcctctcggtttcaccaggcatc

SEQ ID NO: 5555546 - DNA, 25 bp, Homo sapien
cgtggggcttgttctcatctcactt

SEQ ID NO: 5555547 - DNA, 25 bp, Homo sapien
aagtgagatgagaacaagccccacg

SEQ ID NO: 5555548 - DNA, 25 bp, Homo sapien
atgcacaggattgctaagtagggga

SEQ ID NO: 5555549 - DNA, 25 bp, Homo sapien
cttgcctagagtcgcacacaggaag

SEQ ID NO: 5555550 - DNA, 25 bp, Homo sapien
ctgctttgcatggtggtttgttatc

SEQ ID NO: 5555551 - DNA, 25 bp, Homo sapien
tacctcatcagtagtcaaaagcatt

SEQ ID NO: 5555552 - DNA, 25 bp, Homo sapien
caaccccttcagctgtacgggcatc

SEQ ID NO: 5555553 - DNA, 25 bp, Homo sapien
cttcagctgtacgggcatctggatg

SEQ ID NO: 5555554 - DNA, 25 bp, Homo sapien
gctaagtaggggaatcctgctttgc

SEQ ID NO: 5555555 - DNA, 25 bp, Homo sapien
atgattaacttaaaggccacacccc

SEQ ID NO: 5555556 - DNA, 25 bp, Homo sapien
tctgtgttagcagatgcgagcaagt

SEQ ID NO: 5555557 - DNA, 25 bp, Homo sapien
caggcccagctccaaaccaattgtt

SEQ ID NO: 5555558 - DNA, 25 bp, Homo sapien
cacacaggaagtgaccacaacacta

SEQ ID NO: 5555559 - DNA, 25 bp, Homo sapien
gggaagtgcagagtagattatttcc

SEQ ID NO: 5555560 - DNA, 25 bp, Homo sapien
ctaatgagaattgagagaacttatc

SEQ ID NO: 5555561 - DNA, 25 bp, Homo sapien
acaggtaactgtaatggttgtaaca

SEQ ID NO: 5555562 - DNA, 25 bp, Homo sapien
gacagccttgcatcatgatccattc

SEQ ID NO: 5555563 - DNA, 25 bp, Homo sapien
ggggatgcagatctcaagccttaca

SEQ ID NO: 5555564 - DNA, 25 bp, Homo sapien
tcttgatatgtgagctcagtaaaat

SEQ ID NO: 5555565 - DNA, 25 bp, Homo sapien
ttcagtctggcatgggtctatttgt

SEQ ID NO: 5555566 - DNA, 25 bp, Homo sapien
acaatgttgccagtcataccaccac

SEQ ID NO: 5555567 - DNA, 25 bp, Homo sapien
aataacacaggtaattgctaattcc

SEQ ID NO: 5555568 - DNA, 25 bp, Homo sapien
caccactaaaactatgggaaactgg

SEQ ID NO: 5555569 - DNA, 25 bp, Homo sapien
tgctaattccaatcagaggtgtatt

SEQ ID NO: 5555570 - DNA, 25 bp, Homo sapien
aggcccaggatgttacagattgctg

SEQ ID NO: 5555571 - DNA, 25 bp, Homo sapien
gagctcagagtcaccctccacccac

SEQ ID NO: 5555572 - DNA, 25 bp, Homo sapien
tacagattgctggttagggcaagga

SEQ ID NO: 5555573 - DNA, 25 bp, Homo sapien
ttctctgagctgcttggtagggagt

SEQ ID NO: 5555574 - DNA, 25 bp, Homo sapien
tctgcgcacgcttcttccctcccta

SEQ ID NO: 5555575 - DNA, 25 bp, Homo sapien
tagacactggccaggttcctcatgc

SEQ ID NO: 5555576 - DNA, 25 bp, Homo sapien
gtcagggtaagagaaattttgaggc

SEQ ID NO: 5555577 - DNA, 25 bp, Homo sapien
ggcaggactcaccagaaatcaatcc

SEQ ID NO: 5555578 - DNA, 25 bp, Homo sapien
ttgaggtttggggctccctatgaac

SEQ ID NO: 5555579 - DNA, 25 bp, Homo sapien
agagaaggaagagagttccttagct

SEQ ID NO: 5555580 - DNA, 25 bp, Homo sapien
gaagcacttgccaccatagacactg

SEQ ID NO: 5555581 - DNA, 25 bp, Homo sapien
ataaaaaccagggagtgcattcagt

SEQ ID NO: 5555582 - DNA, 25 bp, Homo sapien
tcccataaggggcctcatgtttccc

SEQ ID NO: 5555583 - DNA, 25 bp, Homo sapien
agcacagcctacaaagccatggaat

SEQ ID NO: 5555584 - DNA, 25 bp, Homo sapien
atgcacctagggattgaccacaaca

SEQ ID NO: 5555585 - DNA, 25 bp, Homo sapien
tcaagaacatgcacagtgaacacag

SEQ ID NO: 5555586 - DNA, 25 bp, Homo sapien
agggctcaatacataaaagagaaag

SEQ ID NO: 5555587 - DNA, 25 bp, Homo sapien
gtgaaatgttaacacagggctcaat

SEQ ID NO: 5555588 - DNA, 25 bp, Homo sapien
gcaggtgactgaaactttaatgcac

SEQ ID NO: 5555589 - DNA, 25 bp, Homo sapien
aaagagaaagtgaagttgttccatt

SEQ ID NO: 5555590 - DNA, 25 bp, Homo sapien
agggagtgcattcagtgaccacaac

SEQ ID NO: 5555591 - DNA, 25 bp, Homo sapien
accccttcagacacagcacagccta

SEQ ID NO: 5555592 - DNA, 25 bp, Homo sapien
aaaacagatagctttacagtgtata

SEQ ID NO: 5555593 - DNA, 25 bp, Homo sapien
ggtatttagcacaaacactgaacat

SEQ ID NO: 5555594 - DNA, 25 bp, Homo sapien
cactgaacattagctagaggtgtgt

SEQ ID NO: 5555595 - DNA, 25 bp, Homo sapien
cataaacatatcactaacgccacca

SEQ ID NO: 5555596 - DNA, 25 bp, Homo sapien
aatgcataaaacagatagctttaca

SEQ ID NO: 5555597 - DNA, 25 bp, Homo sapien
aaaaaaagaaataggcataaacata

SEQ ID NO: 5555598 - DNA, 25 bp, Homo sapien
tttaagctctgaataattaaatccc

SEQ ID NO: 5555599 - DNA, 25 bp, Homo sapien
atcactaacgccaccaaagttcact

SEQ ID NO: 5555600 - DNA, 25 bp, Homo sapien
acattagctagaggtgtgttaattt

SEQ ID NO: 5555601 - DNA, 25 bp, Homo sapien
ccaaagttcactatgtaaagattat

SEQ ID NO: 5555602 - DNA, 25 bp, Homo sapien
aaatgagtaaacataaatataatct

SEQ ID NO: 5555603 - DNA, 25 bp, Homo sapien
cacacacacaataaatgcccacaaa

SEQ ID NO: 5555604 - DNA, 25 bp, Homo sapien
gcatgggctaaaagttaacagtgaa

SEQ ID NO: 5555605 - DNA, 25 bp, Homo sapien
tataattattaaggtttgaagagaa

SEQ ID NO: 5555606 - DNA, 25 bp, Homo sapien
ataaattatgaaaatgcatgggcta

SEQ ID NO: 5555607 - DNA, 25 bp, Homo sapien
atatggcccacacaatgaaaatgta

SEQ ID NO: 5555608 - DNA, 25 bp, Homo sapien
aaaaaaggactgtagtataactatg

SEQ ID NO: 5555609 - DNA, 25 bp, Homo sapien
caacgtagaaaatatttgtagttcc

SEQ ID NO: 5555610 - DNA, 25 bp, Homo sapien
cactgaagccgatcactgtacaaat

SEQ ID NO: 5555611 - DNA, 25 bp, Homo sapien
acagtataaacgaaatatggcccac

SEQ ID NO: 5555612 - DNA, 25 bp, Homo sapien
caatactcagaggcctacttaatat

SEQ ID NO: 5555613 - DNA, 25 bp, Homo sapien
gcccacaaaaaccatcactgaagcc

SEQ ID NO: 5555614 - DNA, 25 bp, Homo sapien
taggacaaacacagtagacatgctt

SEQ ID NO: 5555615 - DNA, 25 bp, Homo sapien
aaaacaatcaaggtgcattactttc

SEQ ID NO: 5555616 - DNA, 25 bp, Homo sapien
ttaggctgacatgaaactaagtagt

SEQ ID NO: 5555617 - DNA, 25 bp, Homo sapien
atgacaccacaatggggtgaagatc

SEQ ID NO: 5555618 - DNA, 25 bp, Homo sapien
ctgcaacaagcctcacaataaacat

SEQ ID NO: 5555619 - DNA, 25 bp, Homo sapien
cagagttgctaactactgcctaaac

SEQ ID NO: 5555620 - DNA, 25 bp, Homo sapien
aaataatggcacctgctttggattc

SEQ ID NO: 5555621 - DNA, 25 bp, Homo sapien
gttttgatgtgaataagccaatttc

SEQ ID NO: 5555622 - DNA, 25 bp, Homo sapien
gtgcatgtgctaaccttaaaacacc

SEQ ID NO: 5555623 - DNA, 25 bp, Homo sapien
aagatctacagggaatttacaattt

SEQ ID NO: 5555624 - DNA, 25 bp, Homo sapien
cacagagcacgttttgttgaaatat

SEQ ID NO: 5555625 - DNA, 25 bp, Homo sapien
agtaaacaggtgggacacagtttat

SEQ ID NO: 5555626 - DNA, 25 bp, Homo sapien
tgctgtcttgaaaacgaagagccgt

SEQ ID NO: 5555627 - DNA, 25 bp, Homo sapien
gtcttcactagagatgtagaacact

SEQ ID NO: 5555628 - DNA, 25 bp, Homo sapien
ggaaaatggtaggtgcatactcatc

SEQ ID NO: 5555629 - DNA, 25 bp, Homo sapien
gcaggaactgaatccgtaaaaggga

SEQ ID NO: 5555630 - DNA, 25 bp, Homo sapien
tcacgagaagcatttcccgtgtctc

SEQ ID NO: 5555631 - DNA, 25 bp, Homo sapien
taaatcgtgaacttgccatgctgtc

SEQ ID NO: 5555632 - DNA, 25 bp, Homo sapien
tctgatacaacatcctagcaggaac

SEQ ID NO: 5555633 - DNA, 25 bp, Homo sapien
agtgatcacaataaaggaaaatggt

SEQ ID NO: 5555634 - DNA, 25 bp, Homo sapien
ttctcacctcctaaaccttggcctc

SEQ ID NO: 5555635 - DNA, 25 bp, Homo sapien
cgaagagccgtagtccctctggttc

SEQ ID NO: 5555636 - DNA, 25 bp, Homo sapien
tggtttggattgtgaaagctgctta

SEQ ID NO: 5555637 - DNA, 25 bp, Homo sapien
tctcaatgaatggagaaaaagtaac

SEQ ID NO: 5555638 - DNA, 25 bp, Homo sapien
acagtactgctttgaagaaagacta

SEQ ID NO: 5555639 - DNA, 25 bp, Homo sapien
aaggcagccacactctcagcactat

SEQ ID NO: 5555640 - DNA, 25 bp, Homo sapien
gggctctgccttgacatatacctct

SEQ ID NO: 5555641 - DNA, 25 bp, Homo sapien
agattctaggtctgctaactaagcc

SEQ ID NO: 5555642 - DNA, 25 bp, Homo sapien
gctgcttagaccaagatgggctgag

SEQ ID NO: 5555643 - DNA, 25 bp, Homo sapien
ctaggtctcacctgggcagattcta

SEQ ID NO: 5555644 - DNA, 25 bp, Homo sapien
gtctccagagggatataatagggaa

SEQ ID NO: 5555645 - DNA, 25 bp, Homo sapien
cacatacagtgggcatataagttct

SEQ ID NO: 5555646 - DNA, 25 bp, Homo sapien
ctctagattaggtgtacggtgctga

SEQ ID NO: 5555647 - DNA, 25 bp, Homo sapien
agcaagttacaaagcagtacataga

SEQ ID NO: 5555648 - DNA, 25 bp, Homo sapien
aaaccaggaattataaaatcaaaga

SEQ ID NO: 5555649 - DNA, 25 bp, Homo sapien
tcttaactggtcattttggggtaga

SEQ ID NO: 5555650 - DNA, 25 bp, Homo sapien
atgcaaaggtgtacatagttgtata

SEQ ID NO: 5555651 - DNA, 25 bp, Homo sapien
gaaggtcattctacgcacgtcggga

SEQ ID NO: 5555652 - DNA, 25 bp, Homo sapien
tctatggtcatgtacaaatgttctc

SEQ ID NO: 5555653 - DNA, 25 bp, Homo sapien
atgcacagagttgtctgaaagtaaa

SEQ ID NO: 5555654 - DNA, 25 bp, Homo sapien
gtgatctcatctatgcaaaggtgta

SEQ ID NO: 5555655 - DNA, 25 bp, Homo sapien
aacatggtaaaaaatttgcaacaca

SEQ ID NO: 5555656 - DNA, 25 bp, Homo sapien
cattctacgcacgtcgggaaaacca

SEQ ID NO: 5555657 - DNA, 25 bp, Homo sapien
aaagcagtacatagagtgtgatctc

SEQ ID NO: 5555658 - DNA, 25 bp, Homo sapien
gcagatgtctagccagggtagatta

SEQ ID NO: 5555659 - DNA, 25 bp, Homo sapien
acctacggctaaatttctaatcttc

SEQ ID NO: 5555660 - DNA, 25 bp, Homo sapien
agagggagaaaagtctatttgaaga

SEQ ID NO: 5555661 - DNA, 25 bp, Homo sapien
acttttatcagaccaacctctcacc

SEQ ID NO: 5555662 - DNA, 25 bp, Homo sapien
ttcaaagtctcggcattaacatata

SEQ ID NO: 5555663 - DNA, 25 bp, Homo sapien
tctaatcttcaaaatgcctacattc

SEQ ID NO: 5555664 - DNA, 25 bp, Homo sapien
ctagccagggtagattacttttatc

SEQ ID NO: 5555665 - DNA, 25 bp, Homo sapien
tcgcactctaattcaaagtctcggc

SEQ ID NO: 5555666 - DNA, 25 bp, Homo sapien
gaagacatcaaggatttgatgagct

SEQ ID NO: 5555667 - DNA, 25 bp, Homo sapien
ctcatgggataaattctaaggtaaa

SEQ ID NO: 5555668 - DNA, 25 bp, Homo sapien
atagtaacctgattctacatttctc

SEQ ID NO: 5555669 - DNA, 25 bp, Homo sapien
ttcttgtacagttaagttttttcaa

SEQ ID NO: 5555670 - DNA, 25 bp, Homo sapien
ttgaaaaaacttaactgtacaagaa

SEQ ID NO: 5555671 - DNA, 25 bp, Homo sapien
atactgcagataacaaaaaatatac

SEQ ID NO: 5555672 - DNA, 25 bp, Homo sapien
aagaagctcctttcctttggacatc

SEQ ID NO: 5555673 - DNA, 25 bp, Homo sapien
atctaacactgatacacggttcttc

SEQ ID NO: 5555674 - DNA, 25 bp, Homo sapien
cttccagagagtaatgactgtattc

SEQ ID NO: 5555675 - DNA, 25 bp, Homo sapien
agcatgacaattgttattccaagac

SEQ ID NO: 5555676 - DNA, 25 bp, Homo sapien
aatgacaaaacgggatgcacatcta

SEQ ID NO: 5555677 - DNA, 25 bp, Homo sapien
acacggttcttcagaaaagactagt

SEQ ID NO: 5555678 - DNA, 25 bp, Homo sapien
ttcaaagtctgagggaatgacaaaa

SEQ ID NO: 5555679 - DNA, 25 bp, Homo sapien
actgtattcaaagtctgagggaatg

SEQ ID NO: 5555680 - DNA, 25 bp, Homo sapien
actgtactgacttaaatttggaatt

SEQ ID NO: 5555681 - DNA, 25 bp, Homo sapien
tggaatttactaattactggggata

SEQ ID NO: 5555682 - DNA, 25 bp, Homo sapien
ctggtggaaacataagttgattcac

SEQ ID NO: 5555683 - DNA, 25 bp, Homo sapien
attcaccatagcattcatagcatta

SEQ ID NO: 5555684 - DNA, 25 bp, Homo sapien
acaggcactctctgaaactgctggt

SEQ ID NO: 5555685 - DNA, 25 bp, Homo sapien
tctgaaactgctggtggaaacataa

SEQ ID NO: 5555686 - DNA, 25 bp, Homo sapien
atgcagcccttaatgtttaggaacc

SEQ ID NO: 5555687 - DNA, 25 bp, Homo sapien
cccaacagtgtaaaacaatagtgta

SEQ ID NO: 5555688 - DNA, 25 bp, Homo sapien
tcaagaatatgcaatactggggagg

SEQ ID NO: 5555689 - DNA, 25 bp, Homo sapien
ttcacaaagtgggatacaaacatat

SEQ ID NO: 5555690 - DNA, 25 bp, Homo sapien
ctagttcacatagaatgatgttcac

SEQ ID NO: 5555691 - DNA, 25 bp, Homo sapien
aactatgatacagctatatgcagcc

SEQ ID NO: 5555692 - DNA, 25 bp, Homo sapien
atcaaagaataaaagactcaagaat

SEQ ID NO: 5555693 - DNA, 25 bp, Homo sapien
agcactcacattggagtggggtggg

SEQ ID NO: 5555694 - DNA, 25 bp, Homo sapien
gtattgtgggaggctttcttagact

SEQ ID NO: 5555695 - DNA, 25 bp, Homo sapien
gaggaggttcagtttgctcagtccc

SEQ ID NO: 5555696 - DNA, 25 bp, Homo sapien
tggtctaatgcttagggccaaggag

SEQ ID NO: 5555697 - DNA, 25 bp, Homo sapien
acggttgggattaagcactccatct

SEQ ID NO: 5555698 - DNA, 25 bp, Homo sapien
ccagcagcaaaagagtaagtaaagg

SEQ ID NO: 5555699 - DNA, 25 bp, Homo sapien
aaggctaaggaagtcagatttgaga

SEQ ID NO: 5555700 - DNA, 25 bp, Homo sapien
gagcagaccagaagacctggttctg

SEQ ID NO: 5555701 - DNA, 25 bp, Homo sapien
ctttaaggagcctctcagtgtggag

SEQ ID NO: 5555702 - DNA, 25 bp, Homo sapien
ggcagctagctagagtgcttgtgta

SEQ ID NO: 5555703 - DNA, 25 bp, Homo sapien
gtgtctgtttggtggttcaggctgt

SEQ ID NO: 5555704 - DNA, 25 bp, Homo sapien
gacgtcgtagagggcatctccttaa

SEQ ID NO: 5555705 - DNA, 25 bp, Homo sapien
ttaaggagatgccctctacgacgtc

SEQ ID NO: 5555706 - DNA, 25 bp, Homo sapien
cttgcaggatacaaaaatgggtagt

SEQ ID NO: 5555707 - DNA, 25 bp, Homo sapien
acagccacacggtcacaacataaat

SEQ ID NO: 5555708 - DNA, 25 bp, Homo sapien
taagtgctttgaaaatgttaactca

SEQ ID NO: 5555709 - DNA, 25 bp, Homo sapien
acaaataatgatgataacctctaac

SEQ ID NO: 5555710 - DNA, 25 bp, Homo sapien
cctaagatgttgtcactatcactac

SEQ ID NO: 5555711 - DNA, 25 bp, Homo sapien
tagtgtagtcaggatctgcccctaa

SEQ ID NO: 5555712 - DNA, 25 bp, Homo sapien
tgtcaaaccctgacttagtgtagtc

SEQ ID NO: 5555713 - DNA, 25 bp, Homo sapien
gatattaagtagcatgccccatgct

SEQ ID NO: 5555714 - DNA, 25 bp, Homo sapien
cagatctgtctgatggactgtcatt

SEQ ID NO: 5555715 - DNA, 25 bp, Homo sapien
gggaatgaatgttgggtagccaaca

SEQ ID NO: 5555716 - DNA, 25 bp, Homo sapien
agacctcaaagcaatcctaagatgt

SEQ ID NO: 5555717 - DNA, 25 bp, Homo sapien
ttgttgatagctcgagaacattatc

SEQ ID NO: 5555718 - DNA, 25 bp, Homo sapien
aagatacagaacaaaattcacagtt

SEQ ID NO: 5555719 - DNA, 25 bp, Homo sapien
tccatgaatgcgtaccagataaatc

SEQ ID NO: 5555720 - DNA, 25 bp, Homo sapien
aattcatagctcacaaaagtacata

SEQ ID NO: 5555721 - DNA, 25 bp, Homo sapien
aaaatcgaagttcatttagtgataa

SEQ ID NO: 5555722 - DNA, 25 bp, Homo sapien
ttatcgtataaccaggatctattgg

SEQ ID NO: 5555723 - DNA, 25 bp, Homo sapien
aaattgtagtaaaatactgacattt

SEQ ID NO: 5555724 - DNA, 25 bp, Homo sapien
aaacagagatctacttgaaaatacc

SEQ ID NO: 5555725 - DNA, 25 bp, Homo sapien
cttgaaataattgattcagcctacc

SEQ ID NO: 5555726 - DNA, 25 bp, Homo sapien
cacagttaggcttgacatttagtac

SEQ ID NO: 5555727 - DNA, 25 bp, Homo sapien
gaaaataccattgatagataccctt

SEQ ID NO: 5555728 - DNA, 25 bp, Homo sapien
cggttctttcgcctcgaccgagact

SEQ ID NO: 5555729 - DNA, 25 bp, Homo sapien
agtctcggtcgaggcgaaagaaccg

SEQ ID NO: 5555730 - DNA, 25 bp, Homo sapien
gtatgtcgctatttccgtaccgtcg

SEQ ID NO: 5555731 - DNA, 25 bp, Homo sapien
cgacggtacggaaatagcgacatac

SEQ ID NO: 5555732 - DNA, 25 bp, Homo sapien
aaagcaaatgtttacgcgtgatatg

SEQ ID NO: 5555733 - DNA, 25 bp, Homo sapien
aagggcagtttccctgcacgtgctc

SEQ ID NO: 5555734 - DNA, 25 bp, Homo sapien
gccatggaagacatacctttttgct

SEQ ID NO: 5555735 - DNA, 25 bp, Homo sapien
actacccgagacatcttaggagatt

SEQ ID NO: 5555736 - DNA, 25 bp, Homo sapien
tgtaatagctgtaatgccaggtcca

SEQ ID NO: 5555737 - DNA, 25 bp, Homo sapien
tagcaactcaagtagtaaccctatc

SEQ ID NO: 5555738 - DNA, 25 bp, Homo sapien
cagctggagccatagcaactcaagt

SEQ ID NO: 5555739 - DNA, 25 bp, Homo sapien
acgcgtgatatgactgcacgggctt

SEQ ID NO: 5555740 - DNA, 25 bp, Homo sapien
ctacccgatatggtttggctgcgtc

SEQ ID NO: 5555741 - DNA, 25 bp, Homo sapien
ccagccttgtggaactgtgagtaca

SEQ ID NO: 5555742 - DNA, 25 bp, Homo sapien
ttaggagatttgtaatagctgtaat

SEQ ID NO: 5555743 - DNA, 25 bp, Homo sapien
aaagggacaactatactggaatgat

SEQ ID NO: 5555744 - DNA, 25 bp, Homo sapien
gctggaaggccactagtaaacaagc

SEQ ID NO: 5555745 - DNA, 25 bp, Homo sapien
atgaagagtaagccacaataaagaa

SEQ ID NO: 5555746 - DNA, 25 bp, Homo sapien
gagcccatacaaaaccaccccattc

SEQ ID NO: 5555747 - DNA, 25 bp, Homo sapien
tttaccccaaacaggagcccataca

SEQ ID NO: 5555748 - DNA, 25 bp, Homo sapien
caagacaagacctaatatgggtatg

SEQ ID NO: 5555749 - DNA, 25 bp, Homo sapien
aaggaaggtcattgtcctcagcaac

SEQ ID NO: 5555750 - DNA, 25 bp, Homo sapien
aaactaaatgttataaggaaggtca

SEQ ID NO: 5555751 - DNA, 25 bp, Homo sapien
aaacaagcacatataaagggtcctc

SEQ ID NO: 5555752 - DNA, 25 bp, Homo sapien
aggaaaaaaaggtaagaatgctatg

SEQ ID NO: 5555753 - DNA, 25 bp, Homo sapien
aaaggtaagaatgctatggctggaa

SEQ ID NO: 5555754 - DNA, 25 bp, Homo sapien
ctctgattcagcaacaacagatcac

SEQ ID NO: 5555755 - DNA, 25 bp, Homo sapien
atgcccacctataaaaaagaatctc

SEQ ID NO: 5555756 - DNA, 25 bp, Homo sapien
ttccacagaaaggggcataaataat

SEQ ID NO: 5555757 - DNA, 25 bp, Homo sapien
aacagatcacttgctttcacatgtg

SEQ ID NO: 5555758 - DNA, 25 bp, Homo sapien
tgagagttaaattacatcaattgct

SEQ ID NO: 5555759 - DNA, 25 bp, Homo sapien
ctcttccacagaaaggggcataaat

SEQ ID NO: 5555760 - DNA, 25 bp, Homo sapien
tacataaaagcacaatcaacaaaat

SEQ ID NO: 5555761 - DNA, 25 bp, Homo sapien
actgcaaaagaatgttagtctgaac

SEQ ID NO: 5555762 - DNA, 25 bp, Homo sapien
ctgaagtatcagtgccttatgcctt

SEQ ID NO: 5555763 - DNA, 25 bp, Homo sapien
taatcacaaagagcatctctacatt

SEQ ID NO: 5555764 - DNA, 25 bp, Homo sapien
ctcactatactgcaaaagaatgtta

SEQ ID NO: 5555765 - DNA, 25 bp, Homo sapien
gagttaaggatgagattttgagcct

SEQ ID NO: 5555766 - DNA, 25 bp, Homo sapien
gagtgaggagccacaagttcttttt

SEQ ID NO: 5555767 - DNA, 25 bp, Homo sapien
cagaaaaattggctcagtcagggaa

SEQ ID NO: 5555768 - DNA, 25 bp, Homo sapien
atcacctgaacatgtttcctagctt

SEQ ID NO: 5555769 - DNA, 25 bp, Homo sapien
gcagtgtcttttgcacctgtctcgc

SEQ ID NO: 5555770 - DNA, 25 bp, Homo sapien
tgacatctgattcaacatggtggga

SEQ ID NO: 5555771 - DNA, 25 bp, Homo sapien
ttgagcctgagttctgcagtgtctt

SEQ ID NO: 5555772 - DNA, 25 bp, Homo sapien
tttgcaagcttaaaaaatgccatat

SEQ ID NO: 5555773 - DNA, 25 bp, Homo sapien
cccagaattcaggcctaccttatct

SEQ ID NO: 5555774 - DNA, 25 bp, Homo sapien
gtttttcgtctgtgatggagtgata

SEQ ID NO: 5555775 - DNA, 25 bp, Homo sapien
tcagagtaccaaaccttagcttttg

SEQ ID NO: 5555776 - DNA, 25 bp, Homo sapien
acacaatttggaagaagagtagatg

SEQ ID NO: 5555777 - DNA, 25 bp, Homo sapien
aacgtccaagaagtatttgttgacc

SEQ ID NO: 5555778 - DNA, 25 bp, Homo sapien
attaacataatggtcaaggagtgat

SEQ ID NO: 5555779 - DNA, 25 bp, Homo sapien
gggaaagaaattaacataatggtca

SEQ ID NO: 5555780 - DNA, 25 bp, Homo sapien
tgcatataaacgtccaagaagtatt

SEQ ID NO: 5555781 - DNA, 25 bp, Homo sapien
aaatacatttaaacgaaggctagaa

SEQ ID NO: 5555782 - DNA, 25 bp, Homo sapien
aagaagagtagatgagttggtcatt

SEQ ID NO: 5555783 - DNA, 25 bp, Homo sapien
actgataagcacacttgcaaagtaa

SEQ ID NO: 5555784 - DNA, 25 bp, Homo sapien
aatggtcaaggagtgataattaaac

SEQ ID NO: 5555785 - DNA, 25 bp, Homo sapien
atgcgtcaccttgttagggaaagaa

SEQ ID NO: 5555786 - DNA, 25 bp, Homo sapien
gttccgaaacgccataatattgcaa

SEQ ID NO: 5555787 - DNA, 25 bp, Homo sapien
tccaacagatcactctcactagcca

SEQ ID NO: 5555788 - DNA, 25 bp, Homo sapien
tgtcacaagttgcttagtgggggag

SEQ ID NO: 5555789 - DNA, 25 bp, Homo sapien
ggttgttctctgcgggcagaggtgg

SEQ ID NO: 5555790 - DNA, 25 bp, Homo sapien
aggtgggtgtcacaagttgcttagt

SEQ ID NO: 5555791 - DNA, 25 bp, Homo sapien
tataaatacccaatagtagaattgc

SEQ ID NO: 5555792 - DNA, 25 bp, Homo sapien
ttttgatatacaattccaacagatc

SEQ ID NO: 5555793 - DNA, 25 bp, Homo sapien
tcactagccaatatgagacacagtc

SEQ ID NO: 5555794 - DNA, 25 bp, Homo sapien
aatttccctaactctgtgccagctc

SEQ ID NO: 5555795 - DNA, 25 bp, Homo sapien
cctaactctgtgccagctcactgtc

SEQ ID NO: 5555796 - DNA, 25 bp, Homo sapien
ggagataggttgggaccattttaca

SEQ ID NO: 5555797 - DNA, 25 bp, Homo sapien
agccaatatgagacacagtcaattt

SEQ ID NO: 5555798 - DNA, 25 bp, Homo sapien
atttaaaagaaataagtgcagaaaa

SEQ ID NO: 5555799 - DNA, 25 bp, Homo sapien
cgggaagcctcttcttttggcaatc

SEQ ID NO: 5555800 - DNA, 25 bp, Homo sapien
cggccgggaagcctcttcttttggc

SEQ ID NO: 5555801 - DNA, 25 bp, Homo sapien
ttaacttacaggcaaataaaatgaa

SEQ ID NO: 5555802 - DNA, 25 bp, Homo sapien
aacaaaagcattaagcaaacaaaat

SEQ ID NO: 5555803 - DNA, 25 bp, Homo sapien
caggcttttaaattttggaaacatg

SEQ ID NO: 5555804 - DNA, 25 bp, Homo sapien
tggaaacatgttaacttacaggcaa

SEQ ID NO: 5555805 - DNA, 25 bp, Homo sapien
ataagtgcagaaaatagcattaaaa

SEQ ID NO: 5555806 - DNA, 25 bp, Homo sapien
taaaagaaataagtgcagaaaatag

SEQ ID NO: 5555807 - DNA, 25 bp, Homo sapien
ttaattgattcataacaaaagcatt

SEQ ID NO: 5555808 - DNA, 25 bp, Homo sapien
tccacattcttttggggacccaggc

SEQ ID NO: 5555809 - DNA, 25 bp, Homo sapien
ctcacggtaaatatttcatgacgaa

SEQ ID NO: 5555810 - DNA, 25 bp, Homo sapien
ttcgtcatgaaatatttaccgtgag

SEQ ID NO: 5555811 - DNA, 25 bp, Homo sapien
acccacacatgaacaaggtctggcc

SEQ ID NO: 5555812 - DNA, 25 bp, Homo sapien
tgtagtgtgatctctcagctggata

SEQ ID NO: 5555813 - DNA, 25 bp, Homo sapien
atatatgtatgtgcaggatgaaggg

SEQ ID NO: 5555814 - DNA, 25 bp, Homo sapien
tcaaatacatttaggaaacactgcc

SEQ ID NO: 5555815 - DNA, 25 bp, Homo sapien
gtgggatgtaaatagaaaggatact

SEQ ID NO: 5555816 - DNA, 25 bp, Homo sapien
catagtcaccagttctgtgggatgt

SEQ ID NO: 5555817 - DNA, 25 bp, Homo sapien
tatttgggggtattagatcatctct

SEQ ID NO: 5555818 - DNA, 25 bp, Homo sapien
tgctgattggcataaggaagacaga

SEQ ID NO: 5555819 - DNA, 25 bp, Homo sapien
aatagtaacagtatgcaagagtgat

SEQ ID NO: 5555820 - DNA, 25 bp, Homo sapien
ggggctctggatgcctgatcactat

SEQ ID NO: 5555821 - DNA, 25 bp, Homo sapien
aacccagtgttcaccagagtgtttc

SEQ ID NO: 5555822 - DNA, 25 bp, Homo sapien
cttctgaacctgctaggacatgagc

SEQ ID NO: 5555823 - DNA, 25 bp, Homo sapien
tctactgttttggggccgtttagca

SEQ ID NO: 5555824 - DNA, 25 bp, Homo sapien
cctttggaaaagtgctacttcttgt

SEQ ID NO: 5555825 - DNA, 25 bp, Homo sapien
aagttctaccccataggaccaggtc

SEQ ID NO: 5555826 - DNA, 25 bp, Homo sapien
gctaggacatgagcagaaattctac

SEQ ID NO: 5555827 - DNA, 25 bp, Homo sapien
acatctgaacttggctgcagtcttc

SEQ ID NO: 5555828 - DNA, 25 bp, Homo sapien
aggaccaggtcatattaacaattgc

SEQ ID NO: 5555829 - DNA, 25 bp, Homo sapien
tccctacccagtctgaagaagagac

SEQ ID NO: 5555830 - DNA, 25 bp, Homo sapien
ggggccgtttagcagaatgatagca

SEQ ID NO: 5555831 - DNA, 25 bp, Homo sapien
atttaaaaccagtcctcagctttgt

SEQ ID NO: 5555832 - DNA, 25 bp, Homo sapien
tgcttgatgcacaataatccgtgac

SEQ ID NO: 5555833 - DNA, 25 bp, Homo sapien
gataaacatagttgactttggaagt

SEQ ID NO: 5555834 - DNA, 25 bp, Homo sapien
atcacgttatggcatcgataaacat

SEQ ID NO: 5555835 - DNA, 25 bp, Homo sapien
aaaacaacaccggaaagcaaatgta

SEQ ID NO: 5555836 - DNA, 25 bp, Homo sapien
tgaggaactgaaagcaagctattac

SEQ ID NO: 5555837 - DNA, 25 bp, Homo sapien
caccggaaagcaaatgtatcacgtt

SEQ ID NO: 5555838 - DNA, 25 bp, Homo sapien
taaagtaacaaaatctgtgatggta

SEQ ID NO: 5555839 - DNA, 25 bp, Homo sapien
aatatctggccacattataagcctc

SEQ ID NO: 5555840 - DNA, 25 bp, Homo sapien
ttggaagtaacagagaatgttttca

SEQ ID NO: 5555841 - DNA, 25 bp, Homo sapien
ctgtgatggtaaggtaaaatttccc

SEQ ID NO: 5555842 - DNA, 25 bp, Homo sapien
ccaactcaagatattgcacaatgct

SEQ ID NO: 5555843 - DNA, 25 bp, Homo sapien
atggtgcaaaaatagaatgtatttc

SEQ ID NO: 5555844 - DNA, 25 bp, Homo sapien
ggtttccgcatccgtctgattcctt

SEQ ID NO: 5555845 - DNA, 25 bp, Homo sapien
cttggatctgaggaaaaagctccag

SEQ ID NO: 5555846 - DNA, 25 bp, Homo sapien
ttggtgaccaattggatcttggatc

SEQ ID NO: 5555847 - DNA, 25 bp, Homo sapien
gatcttggatctgaggaaaaagctc

SEQ ID NO: 5555848 - DNA, 25 bp, Homo sapien
atctgaggaaaaagctccagcttca

SEQ ID NO: 5555849 - DNA, 25 bp, Homo sapien
gaaatcacgaattggtgaccaattg

SEQ ID NO: 5555850 - DNA, 25 bp, Homo sapien
ccgtctgattccttatgatgttgag

SEQ ID NO: 5555851 - DNA, 25 bp, Homo sapien
tcgaagttttgcccagagcaaacgg

SEQ ID NO: 5555852 - DNA, 25 bp, Homo sapien
aagttttgcccagagcaaacggagg

SEQ ID NO: 5555853 - DNA, 25 bp, Homo sapien
gaggaaaaagctccagcttcagagg

SEQ ID NO: 5555854 - DNA, 25 bp, Homo sapien
cagagggaactctcgaagttttgcc

SEQ ID NO: 5555855 - DNA, 25 bp, Homo sapien
tatccccctggcatgtgtctagtca

SEQ ID NO: 5555856 - DNA, 25 bp, Homo sapien
ctcccaaccccgctgggacactagg

SEQ ID NO: 5555857 - DNA, 25 bp, Homo sapien
ggagaatgttatccccctggcatgt

SEQ ID NO: 5555858 - DNA, 25 bp, Homo sapien
ttcgccctcacatgcctctcccaac

SEQ ID NO: 5555859 - DNA, 25 bp, Homo sapien
gaatgttatccccctggcatgtgtc

SEQ ID NO: 5555860 - DNA, 25 bp, Homo sapien
gcctctcccaaccccgctgggacac

SEQ ID NO: 5555861 - DNA, 25 bp, Homo sapien
caacttcgccctcacatgcctctcc

SEQ ID NO: 5555862 - DNA, 25 bp, Homo sapien
cccctggcatgtgtctagtcagcgg

SEQ ID NO: 5555863 - DNA, 25 bp, Homo sapien
acagggggcaacttcgccctcacat

SEQ ID NO: 5555864 - DNA, 25 bp, Homo sapien
cctggcatgtgtctagtcagcggag

SEQ ID NO: 5555865 - DNA, 25 bp, Homo sapien
ccaccccgaagtagccattcggcag

SEQ ID NO: 5555866 - DNA, 25 bp, Homo sapien
tacaagaccgactttcagaaggcag

SEQ ID NO: 5555867 - DNA, 25 bp, Homo sapien
ggcggtgaacaagaaacgccttgta

SEQ ID NO: 5555868 - DNA, 25 bp, Homo sapien
ttttatgtggtcgtggttcttgaac

SEQ ID NO: 5555869 - DNA, 25 bp, Homo sapien
agcctgcttccctccggcggtgaac

SEQ ID NO: 5555870 - DNA, 25 bp, Homo sapien
acaaacgaagtgtacgtcaagacga

SEQ ID NO: 5555871 - DNA, 25 bp, Homo sapien
gcagaaggggagcaatgtttttatg

SEQ ID NO: 5555872 - DNA, 25 bp, Homo sapien
ggcagtcactccggagcctgcttcc

SEQ ID NO: 5555873 - DNA, 25 bp, Homo sapien
tcttgaacattaggactgcacgctg

SEQ ID NO: 5555874 - DNA, 25 bp, Homo sapien
tagctggagccgaacactttcccta

SEQ ID NO: 5555875 - DNA, 25 bp, Homo sapien
taacaagatgtgtattgcgaggacg

SEQ ID NO: 5555876 - DNA, 25 bp, Homo sapien
gtcaagacgacctggcaacttctac

SEQ ID NO: 5555877 - DNA, 25 bp, Homo sapien
tgacttaatgcacacgagccaacca

SEQ ID NO: 5555878 - DNA, 25 bp, Homo sapien
ctcatttgtcagtggaaagaacaca

SEQ ID NO: 5555879 - DNA, 25 bp, Homo sapien
tcctgtggcccttggagttccttga

SEQ ID NO: 5555880 - DNA, 25 bp, Homo sapien
ttgaaaaacctgtcagctcctgtgg

SEQ ID NO: 5555881 - DNA, 25 bp, Homo sapien
cccttctccacgtggcagcaggaag

SEQ ID NO: 5555882 - DNA, 25 bp, Homo sapien
tatagtactgtaaagatgcaccata

SEQ ID NO: 5555883 - DNA, 25 bp, Homo sapien
ccccaacaaagcaggtactagcctt

SEQ ID NO: 5555884 - DNA, 25 bp, Homo sapien
gaaactgaggaatgaggcatctcat

SEQ ID NO: 5555885 - DNA, 25 bp, Homo sapien
tcccatgtcacgtggggattacggg

SEQ ID NO: 5555886 - DNA, 25 bp, Homo sapien
agccttatagtacacgtgaggaaac

SEQ ID NO: 5555887 - DNA, 25 bp, Homo sapien
cgagccaaccataccccaacaaagc

SEQ ID NO: 5555888 - DNA, 25 bp, Homo sapien
tccaggagcagtagcttgtttacca

SEQ ID NO: 5555889 - DNA, 25 bp, Homo sapien
tttgctgcaatgattacccactgac

SEQ ID NO: 5555890 - DNA, 25 bp, Homo sapien
taaaccaaatggccaaacagcaacc

SEQ ID NO: 5555891 - DNA, 25 bp, Homo sapien
gatgacctagattagttccaggagc

SEQ ID NO: 5555892 - DNA, 25 bp, Homo sapien
ggtcagttcagggataaattaagcc

SEQ ID NO: 5555893 - DNA, 25 bp, Homo sapien
ttaataacaatgggaatgagacaac

SEQ ID NO: 5555894 - DNA, 25 bp, Homo sapien
aagaaagatttctgtgaagctgatt

SEQ ID NO: 5555895 - DNA, 25 bp, Homo sapien
aatgggaatgagacaactcttgatc

SEQ ID NO: 5555896 - DNA, 25 bp, Homo sapien
tcaaaagattttgggttatgatgac

SEQ ID NO: 5555897 - DNA, 25 bp, Homo sapien
tgtgatgttaggtcagttcagggat

SEQ ID NO: 5555898 - DNA, 25 bp, Homo sapien
tacctaagagacttaattgggactc

SEQ ID NO: 5555899 - DNA, 25 bp, Homo sapien
taccacaaggaaacgtcacatgaac

SEQ ID NO: 5555900 - DNA, 25 bp, Homo sapien
gggatgggatattggcatcgcttca

SEQ ID NO: 5555901 - DNA, 25 bp, Homo sapien
cgcagacccagaacctaccacaagg

SEQ ID NO: 5555902 - DNA, 25 bp, Homo sapien
ccagcaggaggctaactgcattggg

SEQ ID NO: 5555903 - DNA, 25 bp, Homo sapien
ttagagtgcaagctcattccaataa

SEQ ID NO: 5555904 - DNA, 25 bp, Homo sapien
ccagaaagtaaagaaacagctaaag

SEQ ID NO: 5555905 - DNA, 25 bp, Homo sapien
agctaaagaactgtaggtacataac

SEQ ID NO: 5555906 - DNA, 25 bp, Homo sapien
gcatcgcttcacactacctccccac

SEQ ID NO: 5555907 - DNA, 25 bp, Homo sapien
cctgagcctgagagtaaatgtcata

SEQ ID NO: 5555908 - DNA, 25 bp, Homo sapien
ttcattacaaaggggtcgttcactg

SEQ ID NO: 5555909 - DNA, 25 bp, Homo sapien
catgaacacaacctgggagccatgg

SEQ ID NO: 5555910 - DNA, 25 bp, Homo sapien
attccactgcttttgcgagtaagtc

SEQ ID NO: 5555911 - DNA, 25 bp, Homo sapien
tttcttgactcgggcagtggttaga

SEQ ID NO: 5555912 - DNA, 25 bp, Homo sapien
ggcagtggttagacaagtgttcact

SEQ ID NO: 5555913 - DNA, 25 bp, Homo sapien
gtcagttaaagcaaccttgagatac

SEQ ID NO: 5555914 - DNA, 25 bp, Homo sapien
tatagccataattcatctcgaccaa

SEQ ID NO: 5555915 - DNA, 25 bp, Homo sapien
gtgttaaagaaatgtcagttaaagc

SEQ ID NO: 5555916 - DNA, 25 bp, Homo sapien
ttgcgagtaagtcttctactggaac

SEQ ID NO: 5555917 - DNA, 25 bp, Homo sapien
tcaagagatacaaataagcacacat

SEQ ID NO: 5555918 - DNA, 25 bp, Homo sapien
cgacaaaactgtgtgttgtatgcac

SEQ ID NO: 5555919 - DNA, 25 bp, Homo sapien
caagtatttgaaagtgtaatgggta

SEQ ID NO: 5555920 - DNA, 25 bp, Homo sapien
cctgtaacagaaaatactaagaaaa

SEQ ID NO: 5555921 - DNA, 25 bp, Homo sapien
ctctcaaactccaagaccaagaaga

SEQ ID NO: 5555922 - DNA, 25 bp, Homo sapien
tgggcatacaagggtatctccagtt

SEQ ID NO: 5555923 - DNA, 25 bp, Homo sapien
gggttgagagcaactgattgaaacc

SEQ ID NO: 5555924 - DNA, 25 bp, Homo sapien
aaaaaaatactgatgaccaggtctt

SEQ ID NO: 5555925 - DNA, 25 bp, Homo sapien
gaccaagaagagtcgaactacactt

SEQ ID NO: 5555926 - DNA, 25 bp, Homo sapien
ctgagaagaatgtcctataaatata

SEQ ID NO: 5555927 - DNA, 25 bp, Homo sapien
ttagcagtaacttatggaggggtaa

SEQ ID NO: 5555928 - DNA, 25 bp, Homo sapien
gaaggaagaggaaacacatttaata

SEQ ID NO: 5555929 - DNA, 25 bp, Homo sapien
attacatgaaaatgggaatcaagat

SEQ ID NO: 5555930 - DNA, 25 bp, Homo sapien
tactgttccttgactgagaagaatg

SEQ ID NO: 5555931 - DNA, 25 bp, Homo sapien
tctaaaatgcagtcagggttgagag

SEQ ID NO: 5555932 - DNA, 25 bp, Homo sapien
aggaggtctgcctggaaccatatct

SEQ ID NO: 5555933 - DNA, 25 bp, Homo sapien
ttagaagaataacatgtgaatcagt

SEQ ID NO: 5555934 - DNA, 25 bp, Homo sapien
caataactggagtaagttcacttcc

SEQ ID NO: 5555935 - DNA, 25 bp, Homo sapien
ggtctctaaggaggtctgcctggaa

SEQ ID NO: 5555936 - DNA, 25 bp, Homo sapien
gcactataaagagagtgaaactttt

SEQ ID NO: 5555937 - DNA, 25 bp, Homo sapien
aataccttcaatgttggaaaaatgc

SEQ ID NO: 5555938 - DNA, 25 bp, Homo sapien
tggcacccagtaacagtaatgaaat

SEQ ID NO: 5555939 - DNA, 25 bp, Homo sapien
aataaggccctgaaaaagttgtatc

SEQ ID NO: 5555940 - DNA, 25 bp, Homo sapien
tccaaatgaaagacacttggcaccc

SEQ ID NO: 5555941 - DNA, 25 bp, Homo sapien
ctgaaaaagttgtatcctgaagcac

SEQ ID NO: 5555942 - DNA, 25 bp, Homo sapien
ataaaagaatgaatctcttagtgac

SEQ ID NO: 5555943 - DNA, 25 bp, Homo sapien
tgtgctggaggttgaaattagtcca

SEQ ID NO: 5555944 - DNA, 25 bp, Homo sapien
taccatcattggccaggaacagttc

SEQ ID NO: 5555945 - DNA, 25 bp, Homo sapien
atgaaatactgggaaatcattcatc

SEQ ID NO: 5555946 - DNA, 25 bp, Homo sapien
gcagaactgcagacaattatgctgg

SEQ ID NO: 5555947 - DNA, 25 bp, Homo sapien
taggtacttgagttctagcagtaaa

SEQ ID NO: 5555948 - DNA, 25 bp, Homo sapien
tgctattcattggtggtgtgctgga

SEQ ID NO: 5555949 - DNA, 25 bp, Homo sapien
gaaaatggggtcctgctaagttgtc

SEQ ID NO: 5555950 - DNA, 25 bp, Homo sapien
agcaccacacccaacctgaccacat

SEQ ID NO: 5555951 - DNA, 25 bp, Homo sapien
agagcacgtatctcagcagaactgc

SEQ ID NO: 5555952 - DNA, 25 bp, Homo sapien
gccaataaaatagagcacgtatctc

SEQ ID NO: 5555953 - DNA, 25 bp, Homo sapien
agctagaactatagacatgcatcac

SEQ ID NO: 5555954 - DNA, 25 bp, Homo sapien
acgggaacgtatgttaagctctagc

SEQ ID NO: 5555955 - DNA, 25 bp, Homo sapien
ccaacaatttggcctgtgcaagtct

SEQ ID NO: 5555956 - DNA, 25 bp, Homo sapien
gagcttagtttgcaagaaccggttc

SEQ ID NO: 5555957 - DNA, 25 bp, Homo sapien
tatcaagacttggcacagcacatga

SEQ ID NO: 5555958 - DNA, 25 bp, Homo sapien
atcatagttttggggtttggaattg

SEQ ID NO: 5555959 - DNA, 25 bp, Homo sapien
gtgcaagtctttgaagggagtgtat

SEQ ID NO: 5555960 - DNA, 25 bp, Homo sapien
tggcacagcacatgaaaagcaacat

SEQ ID NO: 5555961 - DNA, 25 bp, Homo sapien
tttggaattgtcaagaaaaccagca

SEQ ID NO: 5555962 - DNA, 25 bp, Homo sapien
caggttatgaggtcccttggttggg

SEQ ID NO: 5555963 - DNA, 25 bp, Homo sapien
ttccatcacatggaacgggaacgta

SEQ ID NO: 5555964 - DNA, 25 bp, Homo sapien
gtgtgatagatgactgggtatctct

SEQ ID NO: 5555965 - DNA, 25 bp, Homo sapien
tatgagtcagtgccttacaacttcc

SEQ ID NO: 5555966 - DNA, 25 bp, Homo sapien
ttacaagtaattaacatgctaaaac

SEQ ID NO: 5555967 - DNA, 25 bp, Homo sapien
tgtttatgaaggattaatatactaa

SEQ ID NO: 5555968 - DNA, 25 bp, Homo sapien
caacttccaaaggtaaacatgaggc

SEQ ID NO: 5555969 - DNA, 25 bp, Homo sapien
ttcttggtactttcatggctttatt

SEQ ID NO: 5555970 - DNA, 25 bp, Homo sapien
aggtaaacatgaggcttctttcctt

SEQ ID NO: 5555971 - DNA, 25 bp, Homo sapien
taattcgcttcaataacgtgtatag

SEQ ID NO: 5555972 - DNA, 25 bp, Homo sapien
taagcatcatcatgaactcttagat

SEQ ID NO: 5555973 - DNA, 25 bp, Homo sapien
ccttaggctacatgatcacagacaa

SEQ ID NO: 5555974 - DNA, 25 bp, Homo sapien
ttgccaatttttatgagtcagtgcc

SEQ ID NO: 5555975 - DNA, 25 bp, Homo sapien
tcacagacaagctgatgtaattaaa

SEQ ID NO: 5555976 - DNA, 25 bp, Homo sapien
attaaactaattgatgtcatccgta

SEQ ID NO: 5555977 - DNA, 25 bp, Homo sapien
tacggatgacatcaattagtttaat

SEQ ID NO: 5555978 - DNA, 25 bp, Homo sapien
tatgagcttctggtgaatgattatc

SEQ ID NO: 5555979 - DNA, 25 bp, Homo sapien
tagtatgttagtaggatatggtctc

SEQ ID NO: 5555980 - DNA, 25 bp, Homo sapien
gttagtaactgagtcagcagagggc

SEQ ID NO: 5555981 - DNA, 25 bp, Homo sapien
caaagaaagggaactgtagttcctg

SEQ ID NO: 5555982 - DNA, 25 bp, Homo sapien
ccaaaaaaacaagtcatcacatacc

SEQ ID NO: 5555983 - DNA, 25 bp, Homo sapien
gtgaatgcatgaatggaaaatggat

SEQ ID NO: 5555984 - DNA, 25 bp, Homo sapien
gttcctgaggcaggttcccacacca

SEQ ID NO: 5555985 - DNA, 25 bp, Homo sapien
ttacagatgatgagtacatttggaa

SEQ ID NO: 5555986 - DNA, 25 bp, Homo sapien
atggataattacagattgatgttcc

SEQ ID NO: 5555987 - DNA, 25 bp, Homo sapien
ttcccagcactcccagacacatatc

SEQ ID NO: 5555988 - DNA, 25 bp, Homo sapien
acatttggaaaaacaactggttgca

SEQ ID NO: 5555989 - DNA, 25 bp, Homo sapien
aggggccatcagagctacagctcat

SEQ ID NO: 5555990 - DNA, 25 bp, Homo sapien
agcaaagggttctcgagcatctcct

SEQ ID NO: 5555991 - DNA, 25 bp, Homo sapien
aggactttctccagatgggcccctc

SEQ ID NO: 5555992 - DNA, 25 bp, Homo sapien
agctgagtcaactcaggaggccagc

SEQ ID NO: 5555993 - DNA, 25 bp, Homo sapien
tcctagtttgaccaagcgagaggac

SEQ ID NO: 5555994 - DNA, 25 bp, Homo sapien
gagctacagctcatcagggtcaatc

SEQ ID NO: 5555995 - DNA, 25 bp, Homo sapien
agcatctccttcgcgccagacggtg

SEQ ID NO: 5555996 - DNA, 25 bp, Homo sapien
aggccggtgctatcgccctcctagt

SEQ ID NO: 5555997 - DNA, 25 bp, Homo sapien
gaacccacagagccgcatttccctt

SEQ ID NO: 5555998 - DNA, 25 bp, Homo sapien
aggacacgcgaaaaataacaacagc

SEQ ID NO: 5555999 - DNA, 25 bp, Homo sapien
ctttgtcatcgtcgcagtaaggccg

SEQ ID NO: 5556000 - DNA, 25 bp, Homo sapien
cccagctgtaacacatagcaaaacc

SEQ ID NO: 5556001 - DNA, 25 bp, Homo sapien
tgtcccctacactggcgaatgttta

SEQ ID NO: 5556002 - DNA, 25 bp, Homo sapien
gcagaggcttagacaaacaccagct

SEQ ID NO: 5556003 - DNA, 25 bp, Homo sapien
aagaagcacttcacaggagatcctg

SEQ ID NO: 5556004 - DNA, 25 bp, Homo sapien
cagatagctaacgcgtaagagcatt

SEQ ID NO: 5556005 - DNA, 25 bp, Homo sapien
tctgggtctcaggattatttgtgcc

SEQ ID NO: 5556006 - DNA, 25 bp, Homo sapien
caggttagataaggattacagaagt

SEQ ID NO: 5556007 - DNA, 25 bp, Homo sapien
gctcctattcaactggggaagaagc

SEQ ID NO: 5556008 - DNA, 25 bp, Homo sapien
cccttggctcagcaatctgggtctc

SEQ ID NO: 5556009 - DNA, 25 bp, Homo sapien
actggcaggtagttagattttccac

SEQ ID NO: 5556010 - DNA, 25 bp, Homo sapien
tacagaagtgatactcccaagttcc

SEQ ID NO: 5556011 - DNA, 25 bp, Homo sapien
ataaagaaaagtgataattcacgtc

SEQ ID NO: 5556012 - DNA, 25 bp, Homo sapien
aatactgaggaaagtactgaataaa

SEQ ID NO: 5556013 - DNA, 25 bp, Homo sapien
gataattcacgtcaaagcctggctt

SEQ ID NO: 5556014 - DNA, 25 bp, Homo sapien
ttgcccataaaatactgaggaaagt

SEQ ID NO: 5556015 - DNA, 25 bp, Homo sapien
aaaaaaacaacagcatagcggttta

SEQ ID NO: 5556016 - DNA, 25 bp, Homo sapien
taaggatgattaagtgctgaagttc

SEQ ID NO: 5556017 - DNA, 25 bp, Homo sapien
aactgaaccagaaatagctataaac

SEQ ID NO: 5556018 - DNA, 25 bp, Homo sapien
aaactgaacacaaaagagaatttcc

SEQ ID NO: 5556019 - DNA, 25 bp, Homo sapien
caaaagcctggttgataaggatgat

SEQ ID NO: 5556020 - DNA, 25 bp, Homo sapien
tccccaaatgagttttctgagccaa

SEQ ID NO: 5556021 - DNA, 25 bp, Homo sapien
cagcatagcggtttaggctaccaaa

SEQ ID NO: 5556022 - DNA, 25 bp, Homo sapien
ctaagcaccattagagtgctagaat

SEQ ID NO: 5556023 - DNA, 25 bp, Homo sapien
tggccaggctggttttgaacccctg

SEQ ID NO: 5556024 - DNA, 25 bp, Homo sapien
ctgcctccagtctccccagtagctg

SEQ ID NO: 5556025 - DNA, 25 bp, Homo sapien
agagtgctagaatttagacatactg

SEQ ID NO: 5556026 - DNA, 25 bp, Homo sapien
ataatgggtaattaatgaaagtagt

SEQ ID NO: 5556027 - DNA, 25 bp, Homo sapien
taaccttagatcatacccaactttc

SEQ ID NO: 5556028 - DNA, 25 bp, Homo sapien
tagggtgagggaaaataatctctat

SEQ ID NO: 5556029 - DNA, 25 bp, Homo sapien
ttggatctacccctctgtacgttac

SEQ ID NO: 5556030 - DNA, 25 bp, Homo sapien
attgccaccaatagggtgagggaaa

SEQ ID NO: 5556031 - DNA, 25 bp, Homo sapien
gacatactgtgtttggatctacccc

SEQ ID NO: 5556032 - DNA, 25 bp, Homo sapien
ttagggtgccctttatgaactccaa

SEQ ID NO: 5556033 - DNA, 25 bp, Homo sapien
tcggccgtcggtccggcgcctgacg

SEQ ID NO: 5556034 - DNA, 25 bp, Homo sapien
cgtcaggcgccggaccgacggccga

SEQ ID NO: 5556035 - DNA, 25 bp, Homo sapien
tatcatgtgaaactaatgctggggc

SEQ ID NO: 5556036 - DNA, 25 bp, Homo sapien
tacacagggccaaatcacattatat

SEQ ID NO: 5556037 - DNA, 25 bp, Homo sapien
tatacactcactacacccactctac

SEQ ID NO: 5556038 - DNA, 25 bp, Homo sapien
aacagcaatgatatatatacatccc

SEQ ID NO: 5556039 - DNA, 25 bp, Homo sapien
agccactgagcccagccccatttta

SEQ ID NO: 5556040 - DNA, 25 bp, Homo sapien
caatgattcgggtttaaagggtata

SEQ ID NO: 5556041 - DNA, 25 bp, Homo sapien
tactgatatactagcccctttcccc

SEQ ID NO: 5556042 - DNA, 25 bp, Homo sapien
gggtttaaagggtatatcatgtgaa

SEQ ID NO: 5556043 - DNA, 25 bp, Homo sapien
caggaaataaaacaatgattcgggt

SEQ ID NO: 5556044 - DNA, 25 bp, Homo sapien
atatcataatacacagggccaaatc

SEQ ID NO: 5556045 - DNA, 25 bp, Homo sapien
aacacaaaaaacaactactgaaatg

SEQ ID NO: 5556046 - DNA, 25 bp, Homo sapien
ggcatcagagtacagaaagtcacaa

SEQ ID NO: 5556047 - DNA, 25 bp, Homo sapien
acagaaactggaactacgttggcag

SEQ ID NO: 5556048 - DNA, 25 bp, Homo sapien
gtgcctgaaaatggagtcaggttcc

SEQ ID NO: 5556049 - DNA, 25 bp, Homo sapien
tgcaccaacgttaacagacagacag

SEQ ID NO: 5556050 - DNA, 25 bp, Homo sapien
gggagttggcccttggattatgccc

SEQ ID NO: 5556051 - DNA, 25 bp, Homo sapien
gtccagacaagtgactccaagctga

SEQ ID NO: 5556052 - DNA, 25 bp, Homo sapien
gaggggaatagcagtatctgcacca

SEQ ID NO: 5556053 - DNA, 25 bp, Homo sapien
gctggactagtcggcccttcccata

SEQ ID NO: 5556054 - DNA, 25 bp, Homo sapien
gggaagacttcctggagtccttgac

SEQ ID NO: 5556055 - DNA, 25 bp, Homo sapien
ttgacattaagggctgtttgtgaac

SEQ ID NO: 5556056 - DNA, 25 bp, Homo sapien
tcaggttccaaacatgggagttggc

SEQ ID NO: 5556057 - DNA, 25 bp, Homo sapien
taagtaggaaggaagatttcttgct

SEQ ID NO: 5556058 - DNA, 25 bp, Homo sapien
gccagtagacccaaacaataagaca

SEQ ID NO: 5556059 - DNA, 25 bp, Homo sapien
cacacagtgtaacttttggggtggg

SEQ ID NO: 5556060 - DNA, 25 bp, Homo sapien
gagagagactatgtacagtgcatca

SEQ ID NO: 5556061 - DNA, 25 bp, Homo sapien
tttaagacataagtaggaaggaaga

SEQ ID NO: 5556062 - DNA, 25 bp, Homo sapien
gtacagtgcatcagcaagcttcaat

SEQ ID NO: 5556063 - DNA, 25 bp, Homo sapien
tggcctggaactatccttttggacc

SEQ ID NO: 5556064 - DNA, 25 bp, Homo sapien
acccgttaactgcaccaagccattc

SEQ ID NO: 5556065 - DNA, 25 bp, Homo sapien
aagtgcacaaagcgcaagaacattc

SEQ ID NO: 5556066 - DNA, 25 bp, Homo sapien
cacacacaaccaagaaagtgcatat

SEQ ID NO: 5556067 - DNA, 25 bp, Homo sapien
aagtgcatatgtagttgggttttcc

SEQ ID NO: 5556068 - DNA, 25 bp, Homo sapien
gtctcccgtgaacaccggtccttga

SEQ ID NO: 5556069 - DNA, 25 bp, Homo sapien
tcaaggaccggtgttcacgggagac

SEQ ID NO: 5556070 - DNA, 25 bp, Homo sapien
gacacttcagcataaagagacattc

SEQ ID NO: 5556071 - DNA, 25 bp, Homo sapien
ttacctttgagatagttactgggac

SEQ ID NO: 5556072 - DNA, 25 bp, Homo sapien
aagtgcagcaactgaaaaacacctg

SEQ ID NO: 5556073 - DNA, 25 bp, Homo sapien
ttgagatagttactgggactgagca

SEQ ID NO: 5556074 - DNA, 25 bp, Homo sapien
actgggactgagcaagattaaataa

SEQ ID NO: 5556075 - DNA, 25 bp, Homo sapien
gctgtgatgacagtttgtaaagtac

SEQ ID NO: 5556076 - DNA, 25 bp, Homo sapien
tagtataactagaaagcaaaagtgt

SEQ ID NO: 5556077 - DNA, 25 bp, Homo sapien
cctgcaagttacagtttaaggtata

SEQ ID NO: 5556078 - DNA, 25 bp, Homo sapien
gcttgcccctgaagtgtcaacgtgg

SEQ ID NO: 5556079 - DNA, 25 bp, Homo sapien
taaggtatacacaagctagagctct

SEQ ID NO: 5556080 - DNA, 25 bp, Homo sapien
gtaaagtacaggaatgcaaaataac

SEQ ID NO: 5556081 - DNA, 25 bp, Homo sapien
acagttacacagttatacagttgcc

SEQ ID NO: 5556082 - DNA, 25 bp, Homo sapien
tggttgagcttaagttctgtgtttc

SEQ ID NO: 5556083 - DNA, 25 bp, Homo sapien
ttgttggctgcttctgattggttga

SEQ ID NO: 5556084 - DNA, 25 bp, Homo sapien
gagtacctgaaacaacggaggtgat

SEQ ID NO: 5556085 - DNA, 25 bp, Homo sapien
agctccccagagagaacatgaggag

SEQ ID NO: 5556086 - DNA, 25 bp, Homo sapien
gcaaggttaaggtcacttaggaggc

SEQ ID NO: 5556087 - DNA, 25 bp, Homo sapien
atttggtctatcccatgaggaagtc

SEQ ID NO: 5556088 - DNA, 25 bp, Homo sapien
tgtctgctcaaggattcttctggcc

SEQ ID NO: 5556089 - DNA, 25 bp, Homo sapien
ggaggcccaactggctctgtctgct

SEQ ID NO: 5556090 - DNA, 25 bp, Homo sapien
gaggaggctttttaggacaaataga

SEQ ID NO: 5556091 - DNA, 25 bp, Homo sapien
aggccaagcttggagtgttgctctt

SEQ ID NO: 5556092 - DNA, 25 bp, Homo sapien
tggcttgcatatgtctcaccccatc

SEQ ID NO: 5556093 - DNA, 25 bp, Homo sapien
cattgcaactgcttatgcacatacc

SEQ ID NO: 5556094 - DNA, 25 bp, Homo sapien
catctaggatcatctagaccagggc

SEQ ID NO: 5556095 - DNA, 25 bp, Homo sapien
agaaagacaaatgcctactaccaag

SEQ ID NO: 5556096 - DNA, 25 bp, Homo sapien
ctacattcaacaacaggtgccataa

SEQ ID NO: 5556097 - DNA, 25 bp, Homo sapien
tactaccaagtcagcctaaggttca

SEQ ID NO: 5556098 - DNA, 25 bp, Homo sapien
gcttatgcacataccaatggcttgc

SEQ ID NO: 5556099 - DNA, 25 bp, Homo sapien
gggctgtaagggaacctacattcaa

SEQ ID NO: 5556100 - DNA, 25 bp, Homo sapien
ggatcatctagaccagggctgtaag

SEQ ID NO: 5556101 - DNA, 25 bp, Homo sapien
taggatcatctagaccagggctgta

SEQ ID NO: 5556102 - DNA, 25 bp, Homo sapien
tcagcctaaggttcattgcaactgc

SEQ ID NO: 5556103 - DNA, 25 bp, Homo sapien
taaacaggctgtttgaggaaatctc

SEQ ID NO: 5556104 - DNA, 25 bp, Homo sapien
accaacagaaaacctaaacaagcag

SEQ ID NO: 5556105 - DNA, 25 bp, Homo sapien
acgttggtattcacgagggctcttc

SEQ ID NO: 5556106 - DNA, 25 bp, Homo sapien
ggctattggaagaccaggaaaacaa

SEQ ID NO: 5556107 - DNA, 25 bp, Homo sapien
agggatgagatgtgccttcctagat

SEQ ID NO: 5556108 - DNA, 25 bp, Homo sapien
gatgcacacacgaccttaaaaccct

SEQ ID NO: 5556109 - DNA, 25 bp, Homo sapien
gaacctgagctagcacgttggtatt

SEQ ID NO: 5556110 - DNA, 25 bp, Homo sapien
aaaccacaatagggatgagatgtgc

SEQ ID NO: 5556111 - DNA, 25 bp, Homo sapien
agtagattcagtctgagacagcaat

SEQ ID NO: 5556112 - DNA, 25 bp, Homo sapien
ccaatagctctgatggaggaaagaa

SEQ ID NO: 5556113 - DNA, 25 bp, Homo sapien
gacattggaagcatgatgcacacac

SEQ ID NO: 5556114 - DNA, 25 bp, Homo sapien
attgagctcagagacgagaggttgt

SEQ ID NO: 5556115 - DNA, 25 bp, Homo sapien
acaacctctcgtctctgagctcaat

SEQ ID NO: 5556116 - DNA, 25 bp, Homo sapien
gagggggccatctgatttgaataaa

SEQ ID NO: 5556117 - DNA, 25 bp, Homo sapien
cagtcttaaggagtcacgtttgagt

SEQ ID NO: 5556118 - DNA, 25 bp, Homo sapien
ttagcatctacactgaagacgctcc

SEQ ID NO: 5556119 - DNA, 25 bp, Homo sapien
gcgctgaacgcactgcagcctcctg

SEQ ID NO: 5556120 - DNA, 25 bp, Homo sapien
ttgtgtatgtggcctggaatgaagg

SEQ ID NO: 5556121 - DNA, 25 bp, Homo sapien
atatttgaaggcgcccttgggatgt

SEQ ID NO: 5556122 - DNA, 25 bp, Homo sapien
aaagttgaaagaacatgttaaagtc

SEQ ID NO: 5556123 - DNA, 25 bp, Homo sapien
tgaaggcaaacaggattaaagtgaa

SEQ ID NO: 5556124 - DNA, 25 bp, Homo sapien
aacaggattaaagtgaacatcacct

SEQ ID NO: 5556125 - DNA, 25 bp, Homo sapien
ttgggatgtccaatagggacagcta

SEQ ID NO: 5556126 - DNA, 25 bp, Homo sapien
agttcagaaatgaaagctcattagc

SEQ ID NO: 5556127 - DNA, 25 bp, Homo sapien
gctctaagcactgcccgctgagccc

SEQ ID NO: 5556128 - DNA, 25 bp, Homo sapien
aggcaacggaccactaaatgttttg

SEQ ID NO: 5556129 - DNA, 25 bp, Homo sapien
aacagcttcaggcaaaggaagcctg

SEQ ID NO: 5556130 - DNA, 25 bp, Homo sapien
gctttagaagtctccctggggccta

SEQ ID NO: 5556131 - DNA, 25 bp, Homo sapien
caagggcagactgctctcctcccca

SEQ ID NO: 5556132 - DNA, 25 bp, Homo sapien
gtcaccagatagacagacaaaggcg

SEQ ID NO: 5556133 - DNA, 25 bp, Homo sapien
atgaccaaagcttgggagatcagtg

SEQ ID NO: 5556134 - DNA, 25 bp, Homo sapien
aacggcccccatttacttgtctctc

SEQ ID NO: 5556135 - DNA, 25 bp, Homo sapien
aggggcctgtgctctaagcactgcc

SEQ ID NO: 5556136 - DNA, 25 bp, Homo sapien
gtgtggagacccttcccaaaacagc

SEQ ID NO: 5556137 - DNA, 25 bp, Homo sapien
tcaaatggtaaaagacatcatgacc

SEQ ID NO: 5556138 - DNA, 25 bp, Homo sapien
cactatggttgtgagaagcccagtt

SEQ ID NO: 5556139 - DNA, 25 bp, Homo sapien
aatgttatacaagattgactgcatc

SEQ ID NO: 5556140 - DNA, 25 bp, Homo sapien
aaggccattaagattgaaaatagat

SEQ ID NO: 5556141 - DNA, 25 bp, Homo sapien
gaaatttcaggggtgctggaaatgt

SEQ ID NO: 5556142 - DNA, 25 bp, Homo sapien
gactgacatctttgagagcaagagt

SEQ ID NO: 5556143 - DNA, 25 bp, Homo sapien
gtggtgacatgggtgttaacataca

SEQ ID NO: 5556144 - DNA, 25 bp, Homo sapien
gaaatgtcctaaacatggtggtgac

SEQ ID NO: 5556145 - DNA, 25 bp, Homo sapien
ttgactgcatcaatactggagtgtt

SEQ ID NO: 5556146 - DNA, 25 bp, Homo sapien
tccatccaccatgccagtgccctgc

SEQ ID NO: 5556147 - DNA, 25 bp, Homo sapien
ctgaagtattaggttagacgttgac

SEQ ID NO: 5556148 - DNA, 25 bp, Homo sapien
agacgttgacaacccagctgtttct

SEQ ID NO: 5556149 - DNA, 25 bp, Homo sapien
agacctcccaggtggctcatcagtg

SEQ ID NO: 5556150 - DNA, 25 bp, Homo sapien
ttctctattcaggtaggagtggaag

SEQ ID NO: 5556151 - DNA, 25 bp, Homo sapien
ctaaccctcaggacaagagaggcag

SEQ ID NO: 5556152 - DNA, 25 bp, Homo sapien
gcatacctccagaaatggggctctt

SEQ ID NO: 5556153 - DNA, 25 bp, Homo sapien
gaccccatcaccgcacccctcagca

SEQ ID NO: 5556154 - DNA, 25 bp, Homo sapien
aatgtcccacaggtatagaagtgcc

SEQ ID NO: 5556155 - DNA, 25 bp, Homo sapien
tgtttatcatgtgttgtgggtgggt

SEQ ID NO: 5556156 - DNA, 25 bp, Homo sapien
tcagagctggctgtccagtcaagat

SEQ ID NO: 5556157 - DNA, 25 bp, Homo sapien
gtgggtgcagtgagttctctattca

SEQ ID NO: 5556158 - DNA, 25 bp, Homo sapien
ggcaggccctcagccgcaatcagta

SEQ ID NO: 5556159 - DNA, 25 bp, Homo sapien
ctgttgggcacctccaatggtcagc

SEQ ID NO: 5556160 - DNA, 25 bp, Homo sapien
tgagggcatgtcaggatctattttc

SEQ ID NO: 5556161 - DNA, 25 bp, Homo sapien
tttgctgtgaggtcaacttgaatat

SEQ ID NO: 5556162 - DNA, 25 bp, Homo sapien
ttggatgaagcttccaggaaagatc

SEQ ID NO: 5556163 - DNA, 25 bp, Homo sapien
gccttggacacaggaacaaacgaaa

SEQ ID NO: 5556164 - DNA, 25 bp, Homo sapien
cagacagcaggttgcctgcccaaca

SEQ ID NO: 5556165 - DNA, 25 bp, Homo sapien
agaggtatgtagaagcccttggatg

SEQ ID NO: 5556166 - DNA, 25 bp, Homo sapien
tgcccaacaagcgattctgcccttc

SEQ ID NO: 5556167 - DNA, 25 bp, Homo sapien
cttgcagacagaatggtcacagaga

SEQ ID NO: 5556168 - DNA, 25 bp, Homo sapien
cagacacctgaatcctgagggcatg

SEQ ID NO: 5556169 - DNA, 25 bp, Homo sapien
ggaacagagccgtaaccacacttcc

SEQ ID NO: 5556170 - DNA, 25 bp, Homo sapien
tgtgacaagttgagacctgtaggac

SEQ ID NO: 5556171 - DNA, 25 bp, Homo sapien
caagtggcacccggggtgacattta

SEQ ID NO: 5556172 - DNA, 25 bp, Homo sapien
ttcctagtcaggctgttcggtagcg

SEQ ID NO: 5556173 - DNA, 25 bp, Homo sapien
gtagcggagtgtcaccctgatttcc

SEQ ID NO: 5556174 - DNA, 25 bp, Homo sapien
ccagcaaaccccaaacaggaaccta

SEQ ID NO: 5556175 - DNA, 25 bp, Homo sapien
tcaaggaaagtcaaaggacaaacta

SEQ ID NO: 5556176 - DNA, 25 bp, Homo sapien
cctgatttccagccccgcagcacac

SEQ ID NO: 5556177 - DNA, 25 bp, Homo sapien
cctgcctggcgtgattcagaggcaa

SEQ ID NO: 5556178 - DNA, 25 bp, Homo sapien
agctgtccgctgcatcaccccctcg

SEQ ID NO: 5556179 - DNA, 25 bp, Homo sapien
aaactaaagccggcagcgtctttct

SEQ ID NO: 5556180 - DNA, 25 bp, Homo sapien
gtgcagtgtggaagtgctctatctt

SEQ ID NO: 5556181 - DNA, 25 bp, Homo sapien
gggggtcatcagccatagctgtccg

SEQ ID NO: 5556182 - DNA, 25 bp, Homo sapien
cctatggaattgtgatagacaaaat

SEQ ID NO: 5556183 - DNA, 25 bp, Homo sapien
attttgtctatcacaattccatagg

SEQ ID NO: 5556184 - DNA, 25 bp, Homo sapien
gacacccaggcctggcttagcacag

SEQ ID NO: 5556185 - DNA, 25 bp, Homo sapien
gccagtggcaaaaaaacccgataca

SEQ ID NO: 5556186 - DNA, 25 bp, Homo sapien
ctaggtttgcacgctgatgagatcc

SEQ ID NO: 5556187 - DNA, 25 bp, Homo sapien
ctgcatagcacaaactccaactggc

SEQ ID NO: 5556188 - DNA, 25 bp, Homo sapien
acttcgagttagacagaaacccagg

SEQ ID NO: 5556189 - DNA, 25 bp, Homo sapien
gccacagaagatgctaggtttgcac

SEQ ID NO: 5556190 - DNA, 25 bp, Homo sapien
ctagctaggattcaagacttcgagt

SEQ ID NO: 5556191 - DNA, 25 bp, Homo sapien
ttagcacagagggcatgttcttgcc

SEQ ID NO: 5556192 - DNA, 25 bp, Homo sapien
gatgacagagggtgttttgatttgg

SEQ ID NO: 5556193 - DNA, 25 bp, Homo sapien
gacatggagagatcaactttgctac

SEQ ID NO: 5556194 - DNA, 25 bp, Homo sapien
aaaaaagcaagtgtgtggcttgtgg

SEQ ID NO: 5556195 - DNA, 25 bp, Homo sapien
ttgtggaagcatcagctctaggtga

SEQ ID NO: 5556196 - DNA, 25 bp, Homo sapien
cagctaacagtgccctgaagtcttg

SEQ ID NO: 5556197 - DNA, 25 bp, Homo sapien
tatgacagaccctggagcaaagtaa

SEQ ID NO: 5556198 - DNA, 25 bp, Homo sapien
cacaagtgcccgacatgacaccttt

SEQ ID NO: 5556199 - DNA, 25 bp, Homo sapien
tcctagggatgaagtagttaccatt

SEQ ID NO: 5556200 - DNA, 25 bp, Homo sapien
actctgagacctgaccagcactgct

SEQ ID NO: 5556201 - DNA, 25 bp, Homo sapien
aaaaaagtggccccatgagaattac

SEQ ID NO: 5556202 - DNA, 25 bp, Homo sapien
gtcacggctgtgtcaacgctgttca

SEQ ID NO: 5556203 - DNA, 25 bp, Homo sapien
gaagcataactttgagagcagaatc

SEQ ID NO: 5556204 - DNA, 25 bp, Homo sapien
tgagaagaggtgttaatttagaaag

SEQ ID NO: 5556205 - DNA, 25 bp, Homo sapien
ctctaggtgaaagcaactctgagac

SEQ ID NO: 5556206 - DNA, 25 bp, Homo sapien
tgctcatgtctcaggagggtatcac

SEQ ID NO: 5556207 - DNA, 25 bp, Homo sapien
tttgaaaagcatgtaaaccacaccc

SEQ ID NO: 5556208 - DNA, 25 bp, Homo sapien
aacgatattcaaagctcagaacagc

SEQ ID NO: 5556209 - DNA, 25 bp, Homo sapien
tggtgacttttatagaagaatctaa

SEQ ID NO: 5556210 - DNA, 25 bp, Homo sapien
aagctcagaacagcaagtagtaacc

SEQ ID NO: 5556211 - DNA, 25 bp, Homo sapien
ctataggatacaatatggtgacttt

SEQ ID NO: 5556212 - DNA, 25 bp, Homo sapien
ttggattacaatggttaggtacaaa

SEQ ID NO: 5556213 - DNA, 25 bp, Homo sapien
cttaataaggaaaagtaccaattca

SEQ ID NO: 5556214 - DNA, 25 bp, Homo sapien
cctatagtaggaggctgttatttac

SEQ ID NO: 5556215 - DNA, 25 bp, Homo sapien
gttctattaggttctcaggcctctc

SEQ ID NO: 5556216 - DNA, 25 bp, Homo sapien
ccacaattcctttgacagcactggg

SEQ ID NO: 5556217 - DNA, 25 bp, Homo sapien
ttggcccataccgcaacagtgcaac

SEQ ID NO: 5556218 - DNA, 25 bp, Homo sapien
caataaacgtaggtagaattgggac

SEQ ID NO: 5556219 - DNA, 25 bp, Homo sapien
tgctgagatcagaactgttgaccct

SEQ ID NO: 5556220 - DNA, 25 bp, Homo sapien
gtaggctgtatgtaaagaccattag

SEQ ID NO: 5556221 - DNA, 25 bp, Homo sapien
atcaaggaccgtaaatctgaatgtc

SEQ ID NO: 5556222 - DNA, 25 bp, Homo sapien
tggagtgacagtactagatcttagc

SEQ ID NO: 5556223 - DNA, 25 bp, Homo sapien
ctgtgaaacaagcccatgcaagagt

SEQ ID NO: 5556224 - DNA, 25 bp, Homo sapien
cagcgggtattatgttggatttggc

SEQ ID NO: 5556225 - DNA, 25 bp, Homo sapien
tccagctgatgtcccaggcatatgt

SEQ ID NO: 5556226 - DNA, 25 bp, Homo sapien
tagttctctagaggtacagcgggta

SEQ ID NO: 5556227 - DNA, 25 bp, Homo sapien
ttgtgccaagcctgacatacagaat

SEQ ID NO: 5556228 - DNA, 25 bp, Homo sapien
gaactgacagtaactgtgacatcac

SEQ ID NO: 5556229 - DNA, 25 bp, Homo sapien
aaccttgtccccaccagaatattcc

SEQ ID NO: 5556230 - DNA, 25 bp, Homo sapien
tgtgacatcacaggcatgtgcggag

SEQ ID NO: 5556231 - DNA, 25 bp, Homo sapien
aggttcgctgtgaactgacagtaac

SEQ ID NO: 5556232 - DNA, 25 bp, Homo sapien
tgtcatgagaccctctcagcaactc

SEQ ID NO: 5556233 - DNA, 25 bp, Homo sapien
ggccagtaccttcatgtcatgagac

SEQ ID NO: 5556234 - DNA, 25 bp, Homo sapien
tcagcaactctgtaaccttgtcccc

SEQ ID NO: 5556235 - DNA, 25 bp, Homo sapien
cagctgagaaaacaacagcacagag

SEQ ID NO: 5556236 - DNA, 25 bp, Homo sapien
cgagacgttagtttactccagagtc

SEQ ID NO: 5556237 - DNA, 25 bp, Homo sapien
ttcacagctgagaaaacaacagcac

SEQ ID NO: 5556238 - DNA, 25 bp, Homo sapien
ctgtgccaaggccagtaccttcatg

SEQ ID NO: 5556239 - DNA, 25 bp, Homo sapien
ggtacacgatacataaaactgccta

SEQ ID NO: 5556240 - DNA, 25 bp, Homo sapien
gcctaaaatcagtcttgaaaaacac

SEQ ID NO: 5556241 - DNA, 25 bp, Homo sapien
tcagaatgaatctttgctagtctac

SEQ ID NO: 5556242 - DNA, 25 bp, Homo sapien
gggtcaaagaccaagtctattttgc

SEQ ID NO: 5556243 - DNA, 25 bp, Homo sapien
tgctagtctacaagtctttgaaata

SEQ ID NO: 5556244 - DNA, 25 bp, Homo sapien
aatgaggcaggagtccttcatacat

SEQ ID NO: 5556245 - DNA, 25 bp, Homo sapien
tttatgtaattgggtaatgaggcag

SEQ ID NO: 5556246 - DNA, 25 bp, Homo sapien
cagttacaccttaaagggtcaaaga

SEQ ID NO: 5556247 - DNA, 25 bp, Homo sapien
gtcttgaaaaacacaacagtcagtc

SEQ ID NO: 5556248 - DNA, 25 bp, Homo sapien
cacaacagtcagtcagttacacctt

SEQ ID NO: 5556249 - DNA, 25 bp, Homo sapien
cttcatacatgcaatcagattattt

SEQ ID NO: 5556250 - DNA, 25 bp, Homo sapien
acgtgcggcatctcgccctgcatgt

SEQ ID NO: 5556251 - DNA, 25 bp, Homo sapien
ggcctggtctggacagccaacttcg

SEQ ID NO: 5556252 - DNA, 25 bp, Homo sapien
taatgaaccagcagctgatggacca

SEQ ID NO: 5556253 - DNA, 25 bp, Homo sapien
gaccacaccggacacgacttcaaca

SEQ ID NO: 5556254 - DNA, 25 bp, Homo sapien
cagtacttaagagaaggctataatg

SEQ ID NO: 5556255 - DNA, 25 bp, Homo sapien
aacttcgtggcctaccgctgccgga

SEQ ID NO: 5556256 - DNA, 25 bp, Homo sapien
acttcaacatgttccgcagccaggc

SEQ ID NO: 5556257 - DNA, 25 bp, Homo sapien
tggacagccaacttcgtggcctacc

SEQ ID NO: 5556258 - DNA, 25 bp, Homo sapien
tctcgccctgcatgtcgctgtgcgc

SEQ ID NO: 5556259 - DNA, 25 bp, Homo sapien
gtccctaaagacttactgatgatgt

SEQ ID NO: 5556260 - DNA, 25 bp, Homo sapien
gagaaggctataatgaaccagcagc

SEQ ID NO: 5556261 - DNA, 25 bp, Homo sapien
acaaaagactgacaggcaccaaata

SEQ ID NO: 5556262 - DNA, 25 bp, Homo sapien
gcagtatgactgcataagattgcat

SEQ ID NO: 5556263 - DNA, 25 bp, Homo sapien
ggtaatgatattcaagcagtatgac

SEQ ID NO: 5556264 - DNA, 25 bp, Homo sapien
aagattgcataagaaagaatacatt

SEQ ID NO: 5556265 - DNA, 25 bp, Homo sapien
caggcaccaaataagtagagtgtaa

SEQ ID NO: 5556266 - DNA, 25 bp, Homo sapien
tccaaatccaaaacaatatcatcct

SEQ ID NO: 5556267 - DNA, 25 bp, Homo sapien
gactttaaagtcacagaacaaaaca

SEQ ID NO: 5556268 - DNA, 25 bp, Homo sapien
actgacgacaaaagactgacaggca

SEQ ID NO: 5556269 - DNA, 25 bp, Homo sapien
agaatataaactgacgacaaaagac

SEQ ID NO: 5556270 - DNA, 25 bp, Homo sapien
aataagtagagtgtaaaacaacaac

SEQ ID NO: 5556271 - DNA, 25 bp, Homo sapien
tttatgtaaaatattgcaagacttt

SEQ ID NO: 5556272 - DNA, 25 bp, Homo sapien
actccagcagaaacttttaacgtta

SEQ ID NO: 5556273 - DNA, 25 bp, Homo sapien
tgcaataaaaatttcagtaaacagg

SEQ ID NO: 5556274 - DNA, 25 bp, Homo sapien
tggagagacctctatcagtgtagtt

SEQ ID NO: 5556275 - DNA, 25 bp, Homo sapien
tcttctgagacaatctggagagacc

SEQ ID NO: 5556276 - DNA, 25 bp, Homo sapien
ccctgtgtgtggaattgtctcccac

SEQ ID NO: 5556277 - DNA, 25 bp, Homo sapien
tggccaaccctgtctagaagcaaag

SEQ ID NO: 5556278 - DNA, 25 bp, Homo sapien
ataccaaagaaataataatcctact

SEQ ID NO: 5556279 - DNA, 25 bp, Homo sapien
gatttgccatcagcttttcagagtt

SEQ ID NO: 5556280 - DNA, 25 bp, Homo sapien
ctatcagtgtagttggtttatggcc

SEQ ID NO: 5556281 - DNA, 25 bp, Homo sapien
ttgcaaagttcggtataccaaagaa

SEQ ID NO: 5556282 - DNA, 25 bp, Homo sapien
tcatgtcattaagtttcagggtaaa

SEQ ID NO: 5556283 - DNA, 25 bp, Homo sapien
ttgccaacaatttacaccctgcccc

SEQ ID NO: 5556284 - DNA, 25 bp, Homo sapien
cacaccactgctctaggaccgtgta

SEQ ID NO: 5556285 - DNA, 25 bp, Homo sapien
gcttgataagtcatttaagttgaag

SEQ ID NO: 5556286 - DNA, 25 bp, Homo sapien
taatttcagcaagtaacataaccac

SEQ ID NO: 5556287 - DNA, 25 bp, Homo sapien
atagacaatgaaagcataattagtc

SEQ ID NO: 5556288 - DNA, 25 bp, Homo sapien
actgctctaggaccgtgtactcttt

SEQ ID NO: 5556289 - DNA, 25 bp, Homo sapien
agcaagtaacataaccacacagaat

SEQ ID NO: 5556290 - DNA, 25 bp, Homo sapien
cacacagaatagacaatgaaagcat

SEQ ID NO: 5556291 - DNA, 25 bp, Homo sapien
tatcatgcagcttctacaattatca

SEQ ID NO: 5556292 - DNA, 25 bp, Homo sapien
tcagtatgcctgagagattcttgtt

SEQ ID NO: 5556293 - DNA, 25 bp, Homo sapien
aaagaatgtgtatctatcatgcagc

SEQ ID NO: 5556294 - DNA, 25 bp, Homo sapien
gcctcagttagaagttagtgactac

SEQ ID NO: 5556295 - DNA, 25 bp, Homo sapien
tgggaggaaagaaccaatatcatac

SEQ ID NO: 5556296 - DNA, 25 bp, Homo sapien
gagataaacaggccatgccctgagc

SEQ ID NO: 5556297 - DNA, 25 bp, Homo sapien
tagtgactacgaatcccctgctgac

SEQ ID NO: 5556298 - DNA, 25 bp, Homo sapien
ggccagtattgcaccgcaaggacca

SEQ ID NO: 5556299 - DNA, 25 bp, Homo sapien
cagtagatctgaaacaaccaccacc

SEQ ID NO: 5556300 - DNA, 25 bp, Homo sapien
ttttgcctgttgtatgcgtcctctc

SEQ ID NO: 5556301 - DNA, 25 bp, Homo sapien
aatctgcctcttgctacactgcctc

SEQ ID NO: 5556302 - DNA, 25 bp, Homo sapien
tatgtcagacatcccaaagatttgt

SEQ ID NO: 5556303 - DNA, 25 bp, Homo sapien
accaagactgctgggcattcctctt

SEQ ID NO: 5556304 - DNA, 25 bp, Homo sapien
cccctgctgacttggcctcaaggcc

SEQ ID NO: 5556305 - DNA, 25 bp, Homo sapien
acgtggcagattaaatgtgaaaagt

SEQ ID NO: 5556306 - DNA, 25 bp, Homo sapien
gtaaaatggtgggctcctttaggca

SEQ ID NO: 5556307 - DNA, 25 bp, Homo sapien
ctttgggatttcctgtccagtcacc

SEQ ID NO: 5556308 - DNA, 25 bp, Homo sapien
ggaactacccatctgcacaaaatct

SEQ ID NO: 5556309 - DNA, 25 bp, Homo sapien
tggttaagcaagatgtttatacccc

SEQ ID NO: 5556310 - DNA, 25 bp, Homo sapien
gtgggctcctttaggcagcaagtct

SEQ ID NO: 5556311 - DNA, 25 bp, Homo sapien
gtccagtcacctgcgagtcaggttt

SEQ ID NO: 5556312 - DNA, 25 bp, Homo sapien
taagcatagaaatggtggaactttg

SEQ ID NO: 5556313 - DNA, 25 bp, Homo sapien
cacaaaatctttgggagtgcagggt

SEQ ID NO: 5556314 - DNA, 25 bp, Homo sapien
tagttctggtcatgaagtaagtcac

SEQ ID NO: 5556315 - DNA, 25 bp, Homo sapien
caattgattcaacgtggcagattaa

SEQ ID NO: 5556316 - DNA, 25 bp, Homo sapien
aatgccagtatcaaagccagtgccc

SEQ ID NO: 5556317 - DNA, 25 bp, Homo sapien
aaagccagtgcccacatgtgtgtag

SEQ ID NO: 5556318 - DNA, 25 bp, Homo sapien
ctctgaatttcccaagtgcccttcc

SEQ ID NO: 5556319 - DNA, 25 bp, Homo sapien
accaccacaccttgcctcgtgccga

SEQ ID NO: 5556320 - DNA, 25 bp, Homo sapien
aagcggggatttccaagcatatttc

SEQ ID NO: 5556321 - DNA, 25 bp, Homo sapien
caatgatttgaactgggcaggtcca

SEQ ID NO: 5556322 - DNA, 25 bp, Homo sapien
actgggcaggtccacttgttcatgg

SEQ ID NO: 5556323 - DNA, 25 bp, Homo sapien
gcccacatgtgtgtagaaagttcag

SEQ ID NO: 5556324 - DNA, 25 bp, Homo sapien
aggagatttcaagcggggatttcca

SEQ ID NO: 5556325 - DNA, 25 bp, Homo sapien
gggccagtcacccactggactggtt

SEQ ID NO: 5556326 - DNA, 25 bp, Homo sapien
tggactggtttccaaccaaggagat

SEQ ID NO: 5556327 - DNA, 25 bp, Homo sapien
aatcctggcatgctgaatttgggca

SEQ ID NO: 5556328 - DNA, 25 bp, Homo sapien
aaacatccacatcacccttcacctt

SEQ ID NO: 5556329 - DNA, 25 bp, Homo sapien
ggcatagagattttgggagctttga

SEQ ID NO: 5556330 - DNA, 25 bp, Homo sapien
ctcaggcatcttaaatttgggcccc

SEQ ID NO: 5556331 - DNA, 25 bp, Homo sapien
atcacccttcaccttgggacctttc

SEQ ID NO: 5556332 - DNA, 25 bp, Homo sapien
gcaaatcaaagtcaggcatagagat

SEQ ID NO: 5556333 - DNA, 25 bp, Homo sapien
gggagctttgatgttcatctcaggc

SEQ ID NO: 5556334 - DNA, 25 bp, Homo sapien
agagattttgggagctttgatgttc

SEQ ID NO: 5556335 - DNA, 25 bp, Homo sapien
tcaggtgcaaatcaaagtcaggcat

SEQ ID NO: 5556336 - DNA, 25 bp, Homo sapien
aggcatcttaaatttgggccccttc

SEQ ID NO: 5556337 - DNA, 25 bp, Homo sapien
ccttgggacctttcaggtgcaaatc

SEQ ID NO: 5556338 - DNA, 25 bp, Homo sapien
cagtacatcagaaggacacacaaat

SEQ ID NO: 5556339 - DNA, 25 bp, Homo sapien
caattacttagcctaggaaggaaaa

SEQ ID NO: 5556340 - DNA, 25 bp, Homo sapien
ttgtgctagaaatcaaaggaacatt

SEQ ID NO: 5556341 - DNA, 25 bp, Homo sapien
gtgtggtaaacgcaaagcctcagta

SEQ ID NO: 5556342 - DNA, 25 bp, Homo sapien
ttggcaagtctaaacagtgtattaa

SEQ ID NO: 5556343 - DNA, 25 bp, Homo sapien
atttggagagaaaaagtccatcaac

SEQ ID NO: 5556344 - DNA, 25 bp, Homo sapien
tgtgacgagaaagatataaaccatt

SEQ ID NO: 5556345 - DNA, 25 bp, Homo sapien
ggcttcgacaatattgaacaaagtc

SEQ ID NO: 5556346 - DNA, 25 bp, Homo sapien
aaaagaaataggatagaacaagact

SEQ ID NO: 5556347 - DNA, 25 bp, Homo sapien
ctcagttaagagttgttggcaagtc

SEQ ID NO: 5556348 - DNA, 25 bp, Homo sapien
agtccatcaacagagtatgtcttcc

SEQ ID NO: 5556349 - DNA, 25 bp, Homo sapien
agttcattgatcgttaaatcgatcc

SEQ ID NO: 5556350 - DNA, 25 bp, Homo sapien
ggatcgatttaacgatcaatgaact

SEQ ID NO: 5556351 - DNA, 25 bp, Homo sapien
attgatctacacgcgagtttctcca

SEQ ID NO: 5556352 - DNA, 25 bp, Homo sapien
gacgggggcaccctctgcatcataa

SEQ ID NO: 5556353 - DNA, 25 bp, Homo sapien
cagatccaagatccaattggtcacc

SEQ ID NO: 5556354 - DNA, 25 bp, Homo sapien
catcataaggaatcagacggatgcg

SEQ ID NO: 5556355 - DNA, 25 bp, Homo sapien
ccctccgtttgctctgggcaaaact

SEQ ID NO: 5556356 - DNA, 25 bp, Homo sapien
ctctgggcaaaacttcgagagttcc

SEQ ID NO: 5556357 - DNA, 25 bp, Homo sapien
tcaacatcataaggaatcagacgga

SEQ ID NO: 5556358 - DNA, 25 bp, Homo sapien
gaagctggagctttttcctcagatc

SEQ ID NO: 5556359 - DNA, 25 bp, Homo sapien
ttgctctgggcaaaacttcgagagt

SEQ ID NO: 5556360 - DNA, 25 bp, Homo sapien
ggcaaaacttcgagagttccctctg

SEQ ID NO: 5556361 - DNA, 25 bp, Homo sapien
ccctcaacatcataaggaatcagac

SEQ ID NO: 5556362 - DNA, 25 bp, Homo sapien
tataggctgacactagcatggacta

SEQ ID NO: 5556363 - DNA, 25 bp, Homo sapien
cactatggcaaggaaagactatttt

SEQ ID NO: 5556364 - DNA, 25 bp, Homo sapien
tagctcaataaaggccgacactggg

SEQ ID NO: 5556365 - DNA, 25 bp, Homo sapien
ctgataaaaacgtaaggtgtattcc

SEQ ID NO: 5556366 - DNA, 25 bp, Homo sapien
tagccacatgcaaaggattgatgac

SEQ ID NO: 5556367 - DNA, 25 bp, Homo sapien
tgataatgaataaccagctctggct

SEQ ID NO: 5556368 - DNA, 25 bp, Homo sapien
agctgagaagcttaaaatagccaca

SEQ ID NO: 5556369 - DNA, 25 bp, Homo sapien
agggattgggttttcgccagcacta

SEQ ID NO: 5556370 - DNA, 25 bp, Homo sapien
gcctcccaaaagaaagctgagaagc

SEQ ID NO: 5556371 - DNA, 25 bp, Homo sapien
ttcatagtcactaggagttgaggga

SEQ ID NO: 5556372 - DNA, 25 bp, Homo sapien
taataagttacacatgaagcctccc

SEQ ID NO: 5556373 - DNA, 25 bp, Homo sapien
aaacattttggtctataagttctta

SEQ ID NO: 5556374 - DNA, 25 bp, Homo sapien
taagaacttatagaccaaaatgttt

SEQ ID NO: 5556375 - DNA, 25 bp, Homo sapien
atccctattgatctgaaatccaacc

SEQ ID NO: 5556376 - DNA, 25 bp, Homo sapien
aacagctgctgattatctcaacatc

SEQ ID NO: 5556377 - DNA, 25 bp, Homo sapien
acacagtatagaaggataaaataat

SEQ ID NO: 5556378 - DNA, 25 bp, Homo sapien
ccattgaattggtgcttccttctct

SEQ ID NO: 5556379 - DNA, 25 bp, Homo sapien
aaattctcagatgtagttcggtctc

SEQ ID NO: 5556380 - DNA, 25 bp, Homo sapien
ccccaacccaaccttagtctctctc

SEQ ID NO: 5556381 - DNA, 25 bp, Homo sapien
atcacagtacagtggcctgtattgt

SEQ ID NO: 5556382 - DNA, 25 bp, Homo sapien
actagaaagaagtctgtatatatac

SEQ ID NO: 5556383 - DNA, 25 bp, Homo sapien
aaaaaagcacacagtatagaaggat

SEQ ID NO: 5556384 - DNA, 25 bp, Homo sapien
aaacagtgaggaagagcctcagttt

SEQ ID NO: 5556385 - DNA, 25 bp, Homo sapien
cagatgtagttcggtctcttgagac

SEQ ID NO: 5556386 - DNA, 25 bp, Homo sapien
acgatttcttaagatgtattttaac

SEQ ID NO: 5556387 - DNA, 25 bp, Homo sapien
gttaaaatacatcttaagaaatcgt

SEQ ID NO: 5556388 - DNA, 25 bp, Homo sapien
cacagttaccagatgaccttagtat

SEQ ID NO: 5556389 - DNA, 25 bp, Homo sapien
caatgaacgttcttaggcatgtgta

SEQ ID NO: 5556390 - DNA, 25 bp, Homo sapien
cttggcacactttggtagcctcaat

SEQ ID NO: 5556391 - DNA, 25 bp, Homo sapien
tgagatatagggatgtattaaaatt

SEQ ID NO: 5556392 - DNA, 25 bp, Homo sapien
acttaatggacatgataaatggttt

SEQ ID NO: 5556393 - DNA, 25 bp, Homo sapien
ggtaatttagtttgcttgggacagc

SEQ ID NO: 5556394 - DNA, 25 bp, Homo sapien
catgataaatggttttgggtaaggt

SEQ ID NO: 5556395 - DNA, 25 bp, Homo sapien
tgcttttgaggaaaacagcatttct

SEQ ID NO: 5556396 - DNA, 25 bp, Homo sapien
agggatgtattaaaattgggttgtg

SEQ ID NO: 5556397 - DNA, 25 bp, Homo sapien
taaggacttacatttcttggcacac

SEQ ID NO: 5556398 - DNA, 25 bp, Homo sapien
aagtattgcttcatgtggttgcctc

SEQ ID NO: 5556399 - DNA, 25 bp, Homo sapien
agttattataggtaaagtggggatg

SEQ ID NO: 5556400 - DNA, 25 bp, Homo sapien
aaacccagtgctgtgtggttaggct

SEQ ID NO: 5556401 - DNA, 25 bp, Homo sapien
tggaatttagtaataatacagcagg

SEQ ID NO: 5556402 - DNA, 25 bp, Homo sapien
caaaatcctttgcatacctgggggt

SEQ ID NO: 5556403 - DNA, 25 bp, Homo sapien
tcacatgctaagaacagttgaattt

SEQ ID NO: 5556404 - DNA, 25 bp, Homo sapien
tttcctaaggcatcagcttgccctt

SEQ ID NO: 5556405 - DNA, 25 bp, Homo sapien
tacacacaaacaagatcggccatat

SEQ ID NO: 5556406 - DNA, 25 bp, Homo sapien
aagtggggatggatttcattactct

SEQ ID NO: 5556407 - DNA, 25 bp, Homo sapien
gaagaaaggcggcaaaatcctttgc

SEQ ID NO: 5556408 - DNA, 25 bp, Homo sapien
gtatatgttaggcaacacaaatgtc

SEQ ID NO: 5556409 - DNA, 25 bp, Homo sapien
cagtgcctggcagctttattcccac

SEQ ID NO: 5556410 - DNA, 25 bp, Homo sapien
ggtagctaagttggtgttcagatgt

SEQ ID NO: 5556411 - DNA, 25 bp, Homo sapien
caacaagtatgtttctagcaggtga

SEQ ID NO: 5556412 - DNA, 25 bp, Homo sapien
gatgtatacagtacttttcaggcac

SEQ ID NO: 5556413 - DNA, 25 bp, Homo sapien
cctggtatgcattgccataaagtgc

SEQ ID NO: 5556414 - DNA, 25 bp, Homo sapien
caggcacttgacctcacttggtagc

SEQ ID NO: 5556415 - DNA, 25 bp, Homo sapien
tttctacctgttctaaggaggagaa

SEQ ID NO: 5556416 - DNA, 25 bp, Homo sapien
actgaaagccaatgctaaactgtcc

SEQ ID NO: 5556417 - DNA, 25 bp, Homo sapien
tctagcaggtgaaagcctggtatgc

SEQ ID NO: 5556418 - DNA, 25 bp, Homo sapien
gttcggtcattgctgaaaatagtcc

SEQ ID NO: 5556419 - DNA, 25 bp, Homo sapien
gcttcaagccatgttcccatagaac

SEQ ID NO: 5556420 - DNA, 25 bp, Homo sapien
tagatggcaaagttggcaacaagta

SEQ ID NO: 5556421 - DNA, 25 bp, Homo sapien
tatgtgaaacaacagttctgataaa

SEQ ID NO: 5556422 - DNA, 25 bp, Homo sapien
ttacctgtctgatgaggaagacttt

SEQ ID NO: 5556423 - DNA, 25 bp, Homo sapien
atatttaatgagactttgggtgtgt

SEQ ID NO: 5556424 - DNA, 25 bp, Homo sapien
tggtcattcaggatgctgtccgaga

SEQ ID NO: 5556425 - DNA, 25 bp, Homo sapien
cttgtaacaagctctgatataaaat

SEQ ID NO: 5556426 - DNA, 25 bp, Homo sapien
aagcaatatctagataaaggctatt

SEQ ID NO: 5556427 - DNA, 25 bp, Homo sapien
gctgtccgagatttgtcctatgtga

SEQ ID NO: 5556428 - DNA, 25 bp, Homo sapien
gtctgtgtgtgtgaagaatttccta

SEQ ID NO: 5556429 - DNA, 25 bp, Homo sapien
tggggataaaagccatggtcattca

SEQ ID NO: 5556430 - DNA, 25 bp, Homo sapien
tcaggatgctgtccgagatttgtcc

SEQ ID NO: 5556431 - DNA, 25 bp, Homo sapien
tctagataaaggctattacttacct

SEQ ID NO: 5556432 - DNA, 25 bp, Homo sapien
gcccgtttttgtacagcccagtagc

SEQ ID NO: 5556433 - DNA, 25 bp, Homo sapien
ctttccccccatgatctgcagtact

SEQ ID NO: 5556434 - DNA, 25 bp, Homo sapien
aacaccacgtaaggctgtctagccc

SEQ ID NO: 5556435 - DNA, 25 bp, Homo sapien
aatgaaatagctaaccctgcctctt

SEQ ID NO: 5556436 - DNA, 25 bp, Homo sapien
cacaagtctccctgcctgatgttcc

SEQ ID NO: 5556437 - DNA, 25 bp, Homo sapien
aaagaaagctaataactcatgaccc

SEQ ID NO: 5556438 - DNA, 25 bp, Homo sapien
tacaataccacagcagaggtgacta

SEQ ID NO: 5556439 - DNA, 25 bp, Homo sapien
gcagaggtgactaactacaacagac

SEQ ID NO: 5556440 - DNA, 25 bp, Homo sapien
ggaaatttggctcaatccattggcc

SEQ ID NO: 5556441 - DNA, 25 bp, Homo sapien
cagcccagtagctaataatggtttc

SEQ ID NO: 5556442 - DNA, 25 bp, Homo sapien
ccatgcctggtctcctttgcccgtt

SEQ ID NO: 5556443 - DNA, 25 bp, Homo sapien
tacactgctgaatatactgtgctaa

SEQ ID NO: 5556444 - DNA, 25 bp, Homo sapien
tctatttcagtaggtcagggaagca

SEQ ID NO: 5556445 - DNA, 25 bp, Homo sapien
gctaactattacacaatggggccta

SEQ ID NO: 5556446 - DNA, 25 bp, Homo sapien
taagtactaatgaagtggttggcac

SEQ ID NO: 5556447 - DNA, 25 bp, Homo sapien
ttatgactcttgtgaggaccacttg

SEQ ID NO: 5556448 - DNA, 25 bp, Homo sapien
tgaattctcaagtttaaagtccctc

SEQ ID NO: 5556449 - DNA, 25 bp, Homo sapien
aggaattgtttgagatgattagaat

SEQ ID NO: 5556450 - DNA, 25 bp, Homo sapien
tacacaatggggcctagactagata

SEQ ID NO: 5556451 - DNA, 25 bp, Homo sapien
tgaatccaattatgcataaggtatt

SEQ ID NO: 5556452 - DNA, 25 bp, Homo sapien
aaaatcagtgtctttaggaattgtt

SEQ ID NO: 5556453 - DNA, 25 bp, Homo sapien
atgaagtggttggcacatagactat

SEQ ID NO: 5556454 - DNA, 25 bp, Homo sapien
gaagaatgcctcatctgggccagtc

SEQ ID NO: 5556455 - DNA, 25 bp, Homo sapien
tccaagaaggaaccatttcatcatc

SEQ ID NO: 5556456 - DNA, 25 bp, Homo sapien
attctgaggaattactgagaccagg

SEQ ID NO: 5556457 - DNA, 25 bp, Homo sapien
ttctattgaacttggaaagcggtca

SEQ ID NO: 5556458 - DNA, 25 bp, Homo sapien
ataagaagttaaggactgtcactac

SEQ ID NO: 5556459 - DNA, 25 bp, Homo sapien
tcactgagaggcaatcttgaacttc

SEQ ID NO: 5556460 - DNA, 25 bp, Homo sapien
tactgagaccaggagctttaaaagc

SEQ ID NO: 5556461 - DNA, 25 bp, Homo sapien
gcgatatagcagtgcataaaaattc

SEQ ID NO: 5556462 - DNA, 25 bp, Homo sapien
ctttctaccaagaggctaatgagcc

SEQ ID NO: 5556463 - DNA, 25 bp, Homo sapien
ggaaagcggtcaagactcactccat

SEQ ID NO: 5556464 - DNA, 25 bp, Homo sapien
tgtcactacttaaggtggaaaccta

SEQ ID NO: 5556465 - DNA, 25 bp, Homo sapien
agtcaaagtagcaatgatatgatct

SEQ ID NO: 5556466 - DNA, 25 bp, Homo sapien
caagagcttggttagcaacagtttc

SEQ ID NO: 5556467 - DNA, 25 bp, Homo sapien
tgatgcaaatgctaagtcaaagtag

SEQ ID NO: 5556468 - DNA, 25 bp, Homo sapien
gtagcaaataaggtataacaaagtc

SEQ ID NO: 5556469 - DNA, 25 bp, Homo sapien
gtatcattaagggaaacagagtcaa

SEQ ID NO: 5556470 - DNA, 25 bp, Homo sapien
tggtaattaacataaagcgctggta

SEQ ID NO: 5556471 - DNA, 25 bp, Homo sapien
tgatgcaggagagttttggtaatta

SEQ ID NO: 5556472 - DNA, 25 bp, Homo sapien
taaagcgctggtacagagacttgta

SEQ ID NO: 5556473 - DNA, 25 bp, Homo sapien
ggaaacagagtcaagagcttggtta

SEQ ID NO: 5556474 - DNA, 25 bp, Homo sapien
tcatgctctgatgcaggagagtttt

SEQ ID NO: 5556475 - DNA, 25 bp, Homo sapien
ataaattggtgaaatgtatacagat

SEQ ID NO: 5556476 - DNA, 25 bp, Homo sapien
gagcccaggacaaatccatggacaa

SEQ ID NO: 5556477 - DNA, 25 bp, Homo sapien
tcaagggcagtgctactgctgtgct

SEQ ID NO: 5556478 - DNA, 25 bp, Homo sapien
cttatgtcattaggaaaggggtttc

SEQ ID NO: 5556479 - DNA, 25 bp, Homo sapien
cgagtctccactctgagctgagccc

SEQ ID NO: 5556480 - DNA, 25 bp, Homo sapien
ccctcagggtctggtatcaaaggtg

SEQ ID NO: 5556481 - DNA, 25 bp, Homo sapien
gctggggcgagcattccttttagaa

SEQ ID NO: 5556482 - DNA, 25 bp, Homo sapien
aggggtttcataaggtcccagagcc

SEQ ID NO: 5556483 - DNA, 25 bp, Homo sapien
tttcacacgtgagacttgtagggga

SEQ ID NO: 5556484 - DNA, 25 bp, Homo sapien
tgggtggattgcaccttggcctctt

SEQ ID NO: 5556485 - DNA, 25 bp, Homo sapien
aaagaaaacccatcagcaggtatga

SEQ ID NO: 5556486 - DNA, 25 bp, Homo sapien
gcttaagacttgacagcgagtctcc

SEQ ID NO: 5556487 - DNA, 25 bp, Homo sapien
agggtggtagcaatgatagatttta

SEQ ID NO: 5556488 - DNA, 25 bp, Homo sapien
gaaaacctggatgttagggacttca

SEQ ID NO: 5556489 - DNA, 25 bp, Homo sapien
agagtactggcattatgaaaacctg

SEQ ID NO: 5556490 - DNA, 25 bp, Homo sapien
tgcagctgtacaaccttagaaatgt

SEQ ID NO: 5556491 - DNA, 25 bp, Homo sapien
ttgcagttggcttcctctcagtgaa

SEQ ID NO: 5556492 - DNA, 25 bp, Homo sapien
taaaatagagataggaatatccatc

SEQ ID NO: 5556493 - DNA, 25 bp, Homo sapien
ttggtacatttggagggtcataaac

SEQ ID NO: 5556494 - DNA, 25 bp, Homo sapien
tcagtgaattagttaggtagttttg

SEQ ID NO: 5556495 - DNA, 25 bp, Homo sapien
gtgtttgtgcactggaatgtgtaat

SEQ ID NO: 5556496 - DNA, 25 bp, Homo sapien
tcaggatataataaacggaggtttc

SEQ ID NO: 5556497 - DNA, 25 bp, Homo sapien
aacatgtcatagaaagagtactggc

SEQ ID NO: 5556498 - DNA, 25 bp, Homo sapien
tctatgtactggttaagaagacccc

SEQ ID NO: 5556499 - DNA, 25 bp, Homo sapien
agtggcatagttttgaacaactccc

SEQ ID NO: 5556500 - DNA, 25 bp, Homo sapien
tgcatgaccaaaataaaagggaaat

SEQ ID NO: 5556501 - DNA, 25 bp, Homo sapien
catatgaaaataggttttagtgaag

SEQ ID NO: 5556502 - DNA, 25 bp, Homo sapien
atccatgacactataaacaaactac

SEQ ID NO: 5556503 - DNA, 25 bp, Homo sapien
gctaaagttaattcataaagagttc

SEQ ID NO: 5556504 - DNA, 25 bp, Homo sapien
cacagaatggtgagtataataaata

SEQ ID NO: 5556505 - DNA, 25 bp, Homo sapien
aaaagggaaatttaacatgtatatc

SEQ ID NO: 5556506 - DNA, 25 bp, Homo sapien
aaataatgttggctctttagtactt

SEQ ID NO: 5556507 - DNA, 25 bp, Homo sapien
gtgaagaaataaaaactgagtttga

SEQ ID NO: 5556508 - DNA, 25 bp, Homo sapien
agaagaccccagaaactaagaaatg

SEQ ID NO: 5556509 - DNA, 25 bp, Homo sapien
attaaaacagtgtggtaccatgcac

SEQ ID NO: 5556510 - DNA, 25 bp, Homo sapien
ataccgaaccagaaaaacaacatta

SEQ ID NO: 5556511 - DNA, 25 bp, Homo sapien
ttttggatcaagagcccctgagaat

SEQ ID NO: 5556512 - DNA, 25 bp, Homo sapien
ctctggctggtgagcttttgcttgg

SEQ ID NO: 5556513 - DNA, 25 bp, Homo sapien
ggggactagccttgccagttgttaa

SEQ ID NO: 5556514 - DNA, 25 bp, Homo sapien
attactgggaaaacagctacaattc

SEQ ID NO: 5556515 - DNA, 25 bp, Homo sapien
aaacccagaaagacccaagtacata

SEQ ID NO: 5556516 - DNA, 25 bp, Homo sapien
taccatgcacaagtagaccagtgga

SEQ ID NO: 5556517 - DNA, 25 bp, Homo sapien
catgtatgaatagccagaagcacaa

SEQ ID NO: 5556518 - DNA, 25 bp, Homo sapien
tgtcaggctaacatggaacaccaga

SEQ ID NO: 5556519 - DNA, 25 bp, Homo sapien
agagggaataaatcgccactgctca

SEQ ID NO: 5556520 - DNA, 25 bp, Homo sapien
gggaagacaaatgtgtatcaggcat

SEQ ID NO: 5556521 - DNA, 25 bp, Homo sapien
atgggctggatgatccctgttcagg

SEQ ID NO: 5556522 - DNA, 25 bp, Homo sapien
aacacagaatgaatcagacatagcc

SEQ ID NO: 5556523 - DNA, 25 bp, Homo sapien
gctccaataaaaagctcagagggtg

SEQ ID NO: 5556524 - DNA, 25 bp, Homo sapien
attgacccaggatcatcagtgctcc

SEQ ID NO: 5556525 - DNA, 25 bp, Homo sapien
ccctttctttgtgccaagccctgtg

SEQ ID NO: 5556526 - DNA, 25 bp, Homo sapien
ccatggggctcagtctcatggggaa

SEQ ID NO: 5556527 - DNA, 25 bp, Homo sapien
ccctgttcaggcctaatccgctggc

SEQ ID NO: 5556528 - DNA, 25 bp, Homo sapien
gcctaatccgctggcctccctgggg

SEQ ID NO: 5556529 - DNA, 25 bp, Homo sapien
tatcaggcattattgacccaggatc

SEQ ID NO: 5556530 - DNA, 25 bp, Homo sapien
ctggggcctccctttctttgtgcca

SEQ ID NO: 5556531 - DNA, 25 bp, Homo sapien
actgtgtctaggattgttgggattg

SEQ ID NO: 5556532 - DNA, 25 bp, Homo sapien
aggatcttcagttattcgaggggaa

SEQ ID NO: 5556533 - DNA, 25 bp, Homo sapien
actgtggataaatgttccgagagtc

SEQ ID NO: 5556534 - DNA, 25 bp, Homo sapien
gtttgcgctgcatggtacttgtgaa

SEQ ID NO: 5556535 - DNA, 25 bp, Homo sapien
ttctagagaaatcacgaactgcttt

SEQ ID NO: 5556536 - DNA, 25 bp, Homo sapien
tgttgggattgtacatatggtactc

SEQ ID NO: 5556537 - DNA, 25 bp, Homo sapien
gtcaagccgatgctagccactagtt

SEQ ID NO: 5556538 - DNA, 25 bp, Homo sapien
cacgcctgcacatcccggcgcacgt

SEQ ID NO: 5556539 - DNA, 25 bp, Homo sapien
tgtgtgcaccgcatgtgtgctttcc

SEQ ID NO: 5556540 - DNA, 25 bp, Homo sapien
ccgagagtctccattgttgtacagg

SEQ ID NO: 5556541 - DNA, 25 bp, Homo sapien
ggggcgtctctgcgtccacgcctgc

SEQ ID NO: 5556542 - DNA, 25 bp, Homo sapien
tgtggctcagcgaagacactgaata

SEQ ID NO: 5556543 - DNA, 25 bp, Homo sapien
tccacaagaatatatcctgacactt

SEQ ID NO: 5556544 - DNA, 25 bp, Homo sapien
tatgaaatcagacaacgtggtaggt

SEQ ID NO: 5556545 - DNA, 25 bp, Homo sapien
gggaagaagcctgccattcgtcttt

SEQ ID NO: 5556546 - DNA, 25 bp, Homo sapien
gacactgaataaatacgatagccac

SEQ ID NO: 5556547 - DNA, 25 bp, Homo sapien
cctcttgattgtgctgaggctgtgg

SEQ ID NO: 5556548 - DNA, 25 bp, Homo sapien
aacataggtgcaaatttctgatatc

SEQ ID NO: 5556549 - DNA, 25 bp, Homo sapien
aatacgatagccactgttgcttgtt

SEQ ID NO: 5556550 - DNA, 25 bp, Homo sapien
ctggtaaacgtcacttttgcccctc

SEQ ID NO: 5556551 - DNA, 25 bp, Homo sapien
tttcccacaccaccgaacccactgc

SEQ ID NO: 5556552 - DNA, 25 bp, Homo sapien
aaagattgttggaaataatccttct

SEQ ID NO: 5556553 - DNA, 25 bp, Homo sapien
atcctagggcttacaatgctggcat

SEQ ID NO: 5556554 - DNA, 25 bp, Homo sapien
ttacagatacggatgctgaggttac

SEQ ID NO: 5556555 - DNA, 25 bp, Homo sapien
tggttaaacaagccagagccctgtg

SEQ ID NO: 5556556 - DNA, 25 bp, Homo sapien
ggaccagagacacgatggttaaaca

SEQ ID NO: 5556557 - DNA, 25 bp, Homo sapien
attctgctgctggaccccaaaactc

SEQ ID NO: 5556558 - DNA, 25 bp, Homo sapien
gtgtccagaaagaaaccgacgattc

SEQ ID NO: 5556559 - DNA, 25 bp, Homo sapien
atcaacatgtaagcgactgaggcat

SEQ ID NO: 5556560 - DNA, 25 bp, Homo sapien
actgaggcatccctacacaccaggt

SEQ ID NO: 5556561 - DNA, 25 bp, Homo sapien
gactgtcatgtgccaagtgcgcttt

SEQ ID NO: 5556562 - DNA, 25 bp, Homo sapien
cccaaacatcagaggccccaaacat

SEQ ID NO: 5556563 - DNA, 25 bp, Homo sapien
ctcaacttggggataggttttgtat

SEQ ID NO: 5556564 - DNA, 25 bp, Homo sapien
attggtgtgtgctctagaagagacc

SEQ ID NO: 5556565 - DNA, 25 bp, Homo sapien
ggtctcttctagagcacacaccaat

SEQ ID NO: 5556566 - DNA, 25 bp, Homo sapien
ctctatgatgttcccacaacgatga

SEQ ID NO: 5556567 - DNA, 25 bp, Homo sapien
actatagatagcatcagtaatgttt

SEQ ID NO: 5556568 - DNA, 25 bp, Homo sapien
gcaataggctatatacatgtcctac

SEQ ID NO: 5556569 - DNA, 25 bp, Homo sapien
gtttgaataaacagacacttgccat

SEQ ID NO: 5556570 - DNA, 25 bp, Homo sapien
ttaaaaatgctgcctgaataatcaa

SEQ ID NO: 5556571 - DNA, 25 bp, Homo sapien
cccacaacgatgaaataacctaatt

SEQ ID NO: 5556572 - DNA, 25 bp, Homo sapien
ttctcagagtgcatctccatcatta

SEQ ID NO: 5556573 - DNA, 25 bp, Homo sapien
ttatacagagtagcaccatcggaca

SEQ ID NO: 5556574 - DNA, 25 bp, Homo sapien
atgtcctacatgtgtagcaggctac

SEQ ID NO: 5556575 - DNA, 25 bp, Homo sapien
tagagtataaggctgtctgtattat

SEQ ID NO: 5556576 - DNA, 25 bp, Homo sapien
acatgattcagaacagcaacatgct

SEQ ID NO: 5556577 - DNA, 25 bp, Homo sapien
agaccccggtaaacatcgaagagaa

SEQ ID NO: 5556578 - DNA, 25 bp, Homo sapien
ttctcttcgatgtttaccggggtct

SEQ ID NO: 5556579 - DNA, 25 bp, Homo sapien
attgcctgaaatgcccagtgctgct

SEQ ID NO: 5556580 - DNA, 25 bp, Homo sapien
cacagccaaaagctcagtggaattc

SEQ ID NO: 5556581 - DNA, 25 bp, Homo sapien
tgggccaacccttgtgccgagctca

SEQ ID NO: 5556582 - DNA, 25 bp, Homo sapien
atgaggcaggtactattgctctccc

SEQ ID NO: 5556583 - DNA, 25 bp, Homo sapien
ccatgtatcgtaaggggcatctgta

SEQ ID NO: 5556584 - DNA, 25 bp, Homo sapien
aggctcagcgagacatatgccacgt

SEQ ID NO: 5556585 - DNA, 25 bp, Homo sapien
tggaaacagtgaagaaatcagcaaa

SEQ ID NO: 5556586 - DNA, 25 bp, Homo sapien
gagctcccagcctgccaagcctcat

SEQ ID NO: 5556587 - DNA, 25 bp, Homo sapien
gtgttgagtctgctctgtgccccac

SEQ ID NO: 5556588 - DNA, 25 bp, Homo sapien
atgccacgtccccatgggtccacag

SEQ ID NO: 5556589 - DNA, 25 bp, Homo sapien
tcacgttagctgaatgaggcaggta

SEQ ID NO: 5556590 - DNA, 25 bp, Homo sapien
catgaggtgactagaaatgcactta

SEQ ID NO: 5556591 - DNA, 25 bp, Homo sapien
aggccacacaaagcggtttctactg

SEQ ID NO: 5556592 - DNA, 25 bp, Homo sapien
ctgtggttcaaagagttcaactaac

SEQ ID NO: 5556593 - DNA, 25 bp, Homo sapien
aatagcttgtagtggcatgaggtga

SEQ ID NO: 5556594 - DNA, 25 bp, Homo sapien
cttcctaaaacgatggacagttgtt

SEQ ID NO: 5556595 - DNA, 25 bp, Homo sapien
tcgggagtaaaagctgtaatcactt

SEQ ID NO: 5556596 - DNA, 25 bp, Homo sapien
aagcttataatctcacaggccacac

SEQ ID NO: 5556597 - DNA, 25 bp, Homo sapien
ataatctcacaggccacacaaagcg

SEQ ID NO: 5556598 - DNA, 25 bp, Homo sapien
aatcaaagcatgagattaagagatt

SEQ ID NO: 5556599 - DNA, 25 bp, Homo sapien
taaggaacagagctaaaattcaatc

SEQ ID NO: 5556600 - DNA, 25 bp, Homo sapien
caaagcggtttctactgtggttcaa

SEQ ID NO: 5556601 - DNA, 25 bp, Homo sapien
gcacctccagggaggaatgtacagg

SEQ ID NO: 5556602 - DNA, 25 bp, Homo sapien
cttctgaagcgcctcgtgagaagca

SEQ ID NO: 5556603 - DNA, 25 bp, Homo sapien
aggcccttggacgcagggcttctct

SEQ ID NO: 5556604 - DNA, 25 bp, Homo sapien
tggggtctgtacagtgctctgcaca

SEQ ID NO: 5556605 - DNA, 25 bp, Homo sapien
gctccaaacagccaccccccaagca

SEQ ID NO: 5556606 - DNA, 25 bp, Homo sapien
caagacctgactccacctggcccgt

SEQ ID NO: 5556607 - DNA, 25 bp, Homo sapien
tcaattgctaacaggacaaaaggcc

SEQ ID NO: 5556608 - DNA, 25 bp, Homo sapien
gcaagaaaatagggtgccgatttct

SEQ ID NO: 5556609 - DNA, 25 bp, Homo sapien
gattaacaaaatctgagctgcaaga

SEQ ID NO: 5556610 - DNA, 25 bp, Homo sapien
gagaagcatccctccatggccctgc

SEQ ID NO: 5556611 - DNA, 25 bp, Homo sapien
atagggtgccgatttctgtacagtc

SEQ ID NO: 5556612 - DNA, 25 bp, Homo sapien
catggtcaccccacgatccaggatc

SEQ ID NO: 5556613 - DNA, 25 bp, Homo sapien
tcctctccatcccatcccaagcttc

SEQ ID NO: 5556614 - DNA, 25 bp, Homo sapien
ttgaacaacagacatgacacacagc

SEQ ID NO: 5556615 - DNA, 25 bp, Homo sapien
tgtccacgactacccagggtgggga

SEQ ID NO: 5556616 - DNA, 25 bp, Homo sapien
ggtaaattcaggccaatcaaaagct

SEQ ID NO: 5556617 - DNA, 25 bp, Homo sapien
tgagacctgcccccccatctctaca

SEQ ID NO: 5556618 - DNA, 25 bp, Homo sapien
tgagccacctgtaattccggcgcat

SEQ ID NO: 5556619 - DNA, 25 bp, Homo sapien
gagtgccaggatggtaaattcaggc

SEQ ID NO: 5556620 - DNA, 25 bp, Homo sapien
cctttccaagcacaggataccctgc

SEQ ID NO: 5556621 - DNA, 25 bp, Homo sapien
gatccaggatcacccccaaggtcac

SEQ ID NO: 5556622 - DNA, 25 bp, Homo sapien
atgacacacagcacgatctctcctc

SEQ ID NO: 5556623 - DNA, 25 bp, Homo sapien
tttggctgagtaaactgctatttgt

SEQ ID NO: 5556624 - DNA, 25 bp, Homo sapien
gtgaaattgaaaggtcacagacaat

SEQ ID NO: 5556625 - DNA, 25 bp, Homo sapien
tgttggctcaggaataaataaaatc

SEQ ID NO: 5556626 - DNA, 25 bp, Homo sapien
tttacaatggaacaatgaggaaaat

SEQ ID NO: 5556627 - DNA, 25 bp, Homo sapien
acagtcagaaacatggaaaatatgc

SEQ ID NO: 5556628 - DNA, 25 bp, Homo sapien
tcacaaggccagctgagttcatttc

SEQ ID NO: 5556629 - DNA, 25 bp, Homo sapien
cagacaattgaaaggtacaggttta

SEQ ID NO: 5556630 - DNA, 25 bp, Homo sapien
aaatctcaggattaaaaagagttcc

SEQ ID NO: 5556631 - DNA, 25 bp, Homo sapien
gggggtagagacaagatattttcaa

SEQ ID NO: 5556632 - DNA, 25 bp, Homo sapien
gtaatggcaatatccaaagtgattt

SEQ ID NO: 5556633 - DNA, 25 bp, Homo sapien
aaaagagttccaacaagaggaatat

SEQ ID NO: 5556634 - DNA, 25 bp, Homo sapien
ggccagtctggattgccctaacgcc

SEQ ID NO: 5556635 - DNA, 25 bp, Homo sapien
acaactcggtcttccagaggagcga

SEQ ID NO: 5556636 - DNA, 25 bp, Homo sapien
cttctgtgtaaagtgatcggcaggc

SEQ ID NO: 5556637 - DNA, 25 bp, Homo sapien
gagcgaacgttcggactgcttggta

SEQ ID NO: 5556638 - DNA, 25 bp, Homo sapien
gccttgcagtggatcttcggtgtcc

SEQ ID NO: 5556639 - DNA, 25 bp, Homo sapien
gccccgactcgctctggccagcggg

SEQ ID NO: 5556640 - DNA, 25 bp, Homo sapien
acgccctgtaccatgccggccagtc

SEQ ID NO: 5556641 - DNA, 25 bp, Homo sapien
tcaggaaaggggctccttctgtgta

SEQ ID NO: 5556642 - DNA, 25 bp, Homo sapien
cgcagccgcccacaactcggtcttc

SEQ ID NO: 5556643 - DNA, 25 bp, Homo sapien
atcacatacagtaaaagggctattt

SEQ ID NO: 5556644 - DNA, 25 bp, Homo sapien
gtcaaaactgggatatataacctct

SEQ ID NO: 5556645 - DNA, 25 bp, Homo sapien
catttgaggcaacctgggatagtaa

SEQ ID NO: 5556646 - DNA, 25 bp, Homo sapien
tccatgctggactcaactcatttgc

SEQ ID NO: 5556647 - DNA, 25 bp, Homo sapien
gaggcaacctgggatagtaaaagta

SEQ ID NO: 5556648 - DNA, 25 bp, Homo sapien
tggcctggctgatgctagcagccta

SEQ ID NO: 5556649 - DNA, 25 bp, Homo sapien
agctgtgtagccataaataagttat

SEQ ID NO: 5556650 - DNA, 25 bp, Homo sapien
gatgctagcagcctacaatcagata

SEQ ID NO: 5556651 - DNA, 25 bp, Homo sapien
ggaatacaagcaggctgcaggaata

SEQ ID NO: 5556652 - DNA, 25 bp, Homo sapien
gccattagtatctagctgtgtagcc

SEQ ID NO: 5556653 - DNA, 25 bp, Homo sapien
tagaaggtcctcaggaaatggtatt

SEQ ID NO: 5556654 - DNA, 25 bp, Homo sapien
ggggctatagcttgtgccatcatgc

SEQ ID NO: 5556655 - DNA, 25 bp, Homo sapien
gctgcaggaatacagttgtccatgc

SEQ ID NO: 5556656 - DNA, 25 bp, Homo sapien
ccctgagtctgggtcaccggactga

SEQ ID NO: 5556657 - DNA, 25 bp, Homo sapien
tcagtccggtgacccagactcaggg

SEQ ID NO: 5556658 - DNA, 25 bp, Homo sapien
aaccacaggtctaagttcagttttg

SEQ ID NO: 5556659 - DNA, 25 bp, Homo sapien
taaagtaactgccaactgggactgt

SEQ ID NO: 5556660 - DNA, 25 bp, Homo sapien
acatccagccagtgtctttgaaaac

SEQ ID NO: 5556661 - DNA, 25 bp, Homo sapien
atgtcacctaagtcaggataactcc

SEQ ID NO: 5556662 - DNA, 25 bp, Homo sapien
aaatgtgaatcttgccatgttgggc

SEQ ID NO: 5556663 - DNA, 25 bp, Homo sapien
gagtcttgaggttatgctagggctc

SEQ ID NO: 5556664 - DNA, 25 bp, Homo sapien
ctgccaactgggactgtatgtcacc

SEQ ID NO: 5556665 - DNA, 25 bp, Homo sapien
tgctagggctcctggttaaagtaac

SEQ ID NO: 5556666 - DNA, 25 bp, Homo sapien
gtaacagtgacttctagtgaacacc

SEQ ID NO: 5556667 - DNA, 25 bp, Homo sapien
caaccctgaatatggacaagaccgg

SEQ ID NO: 5556668 - DNA, 25 bp, Homo sapien
gacaagaccggttagtgtgacctgt

SEQ ID NO: 5556669 - DNA, 25 bp, Homo sapien
aaaggagtcctggctaaaagtgcct

SEQ ID NO: 5556670 - DNA, 25 bp, Homo sapien
aaagtgcctttatgagtatgtgtgt

SEQ ID NO: 5556671 - DNA, 25 bp, Homo sapien
caagaaaagttgctaaaagggaata

SEQ ID NO: 5556672 - DNA, 25 bp, Homo sapien
acacagccccagaggttttccaagt

SEQ ID NO: 5556673 - DNA, 25 bp, Homo sapien
actaacactaagcaggagtcacgtg

SEQ ID NO: 5556674 - DNA, 25 bp, Homo sapien
ctataaagattcggtgaaaaaacag

SEQ ID NO: 5556675 - DNA, 25 bp, Homo sapien
tccaagtgtactaaaactcgagatt

SEQ ID NO: 5556676 - DNA, 25 bp, Homo sapien
aaatgaggtctctgaacgttcgact

SEQ ID NO: 5556677 - DNA, 25 bp, Homo sapien
aaagtatggaaactgtgacatattt

SEQ ID NO: 5556678 - DNA, 25 bp, Homo sapien
ctctgaacgttcgactgaaaaggag

SEQ ID NO: 5556679 - DNA, 25 bp, Homo sapien
agggaataaggtgagtttaaatata

SEQ ID NO: 5556680 - DNA, 25 bp, Homo sapien
ccccaggaagcaccaactaataagc

SEQ ID NO: 5556681 - DNA, 25 bp, Homo sapien
caacctacaaagaagaagtaaaatc

SEQ ID NO: 5556682 - DNA, 25 bp, Homo sapien
acatttgagttcatggggcctacag

SEQ ID NO: 5556683 - DNA, 25 bp, Homo sapien
gccagaccctgtacatggctgcccc

SEQ ID NO: 5556684 - DNA, 25 bp, Homo sapien
taaggtatcattagaaagcagaaat

SEQ ID NO: 5556685 - DNA, 25 bp, Homo sapien
ctgcccacatttggaccagcctgaa

SEQ ID NO: 5556686 - DNA, 25 bp, Homo sapien
gggatcctggcactgagccagaccc

SEQ ID NO: 5556687 - DNA, 25 bp, Homo sapien
gaacagctctggcatcccaaaaggc

SEQ ID NO: 5556688 - DNA, 25 bp, Homo sapien
acaaagcaatcagggatttgcctcc

SEQ ID NO: 5556689 - DNA, 25 bp, Homo sapien
ctttgaatcaggcacaaggatgtgg

SEQ ID NO: 5556690 - DNA, 25 bp, Homo sapien
aaggatgtggttatagcattctgtc

SEQ ID NO: 5556691 - DNA, 25 bp, Homo sapien
aggaagcctccagaaagagaatatt

SEQ ID NO: 5556692 - DNA, 25 bp, Homo sapien
tagttctctcaaccggcatacttgc

SEQ ID NO: 5556693 - DNA, 25 bp, Homo sapien
agaaagagaatattgtattggacat

SEQ ID NO: 5556694 - DNA, 25 bp, Homo sapien
aagtgggatacaagaaattactagc

SEQ ID NO: 5556695 - DNA, 25 bp, Homo sapien
cagtgcatttatgtagaagcctttc

SEQ ID NO: 5556696 - DNA, 25 bp, Homo sapien
ataaaataatcttaagtacacttcc

SEQ ID NO: 5556697 - DNA, 25 bp, Homo sapien
ttctgataaacaatactataaccat

SEQ ID NO: 5556698 - DNA, 25 bp, Homo sapien
accggcatacttgcaaatacaagac

SEQ ID NO: 5556699 - DNA, 25 bp, Homo sapien
aagaagtgggatacaagaaattact

SEQ ID NO: 5556700 - DNA, 25 bp, Homo sapien
tctgctttcacttgtaggaagcctc

SEQ ID NO: 5556701 - DNA, 25 bp, Homo sapien
tatcagtatcttggctggcaaaagg

SEQ ID NO: 5556702 - DNA, 25 bp, Homo sapien
gggaaaaacagtctgtatggcaatt

SEQ ID NO: 5556703 - DNA, 25 bp, Homo sapien
tggggcttagtaatgtttatgggtg

SEQ ID NO: 5556704 - DNA, 25 bp, Homo sapien
aaggcctttatccaagatggcacac

SEQ ID NO: 5556705 - DNA, 25 bp, Homo sapien
ttccaacgatagaactggggcttag

SEQ ID NO: 5556706 - DNA, 25 bp, Homo sapien
tgtcaaaattgcagaagagagtagg

SEQ ID NO: 5556707 - DNA, 25 bp, Homo sapien
aacattctataagttgagcctggct

SEQ ID NO: 5556708 - DNA, 25 bp, Homo sapien
atgggtgtgaatattgaggtgtcaa

SEQ ID NO: 5556709 - DNA, 25 bp, Homo sapien
aagagagtaggcaaaaggcctttat

SEQ ID NO: 5556710 - DNA, 25 bp, Homo sapien
actagtaaagacctacaagtgcttc

SEQ ID NO: 5556711 - DNA, 25 bp, Homo sapien
tgcataagggaacaacaaaagaata

SEQ ID NO: 5556712 - DNA, 25 bp, Homo sapien
agatggcacactttaatgatagctc

SEQ ID NO: 5556713 - DNA, 25 bp, Homo sapien
aagtcatgcgcagaaagataaatac

SEQ ID NO: 5556714 - DNA, 25 bp, Homo sapien
gctagaaaaggatttcgagtgttcc

SEQ ID NO: 5556715 - DNA, 25 bp, Homo sapien
atagtgctatgtggtgaatacagtt

SEQ ID NO: 5556716 - DNA, 25 bp, Homo sapien
taactatttgaggtgattgatgtgc

SEQ ID NO: 5556717 - DNA, 25 bp, Homo sapien
cagggacttaagaaatgagctcata

SEQ ID NO: 5556718 - DNA, 25 bp, Homo sapien
aggtaagcaaagcaagtcatgcgca

SEQ ID NO: 5556719 - DNA, 25 bp, Homo sapien
gaatctggagataattaggtaagca

SEQ ID NO: 5556720 - DNA, 25 bp, Homo sapien
aggagtaggggacatatatgtaata

SEQ ID NO: 5556721 - DNA, 25 bp, Homo sapien
gaattgtggttatgagagattggga

SEQ ID NO: 5556722 - DNA, 25 bp, Homo sapien
cttctcactcaaatgcagggactta

SEQ ID NO: 5556723 - DNA, 25 bp, Homo sapien
tccatccctcaggagtaggggacat

SEQ ID NO: 5556724 - DNA, 25 bp, Homo sapien
aggagggccactctgaacacttttc

SEQ ID NO: 5556725 - DNA, 25 bp, Homo sapien
gtgaagtattatttgaacaggccca

SEQ ID NO: 5556726 - DNA, 25 bp, Homo sapien
gacaattgtccaaatgatcctactc

SEQ ID NO: 5556727 - DNA, 25 bp, Homo sapien
gtttggcatttggtttctgtgaagt

SEQ ID NO: 5556728 - DNA, 25 bp, Homo sapien
aaaggacaaaacattactagactat

SEQ ID NO: 5556729 - DNA, 25 bp, Homo sapien
ggaatacagtttagcaggaagagtt

SEQ ID NO: 5556730 - DNA, 25 bp, Homo sapien
gtagaccaaatacatagtaactatt

SEQ ID NO: 5556731 - DNA, 25 bp, Homo sapien
cttggaaactggaatacagtttagc

SEQ ID NO: 5556732 - DNA, 25 bp, Homo sapien
aaagctttatcttggagaaactggg

SEQ ID NO: 5556733 - DNA, 25 bp, Homo sapien
aacaggcccaagtcaattagtaaac

SEQ ID NO: 5556734 - DNA, 25 bp, Homo sapien
atctattagctaagttttgaacatc

SEQ ID NO: 5556735 - DNA, 25 bp, Homo sapien
gattacatgttttaccgacccactg

SEQ ID NO: 5556736 - DNA, 25 bp, Homo sapien
cagtgggtcggtaaaacatgtaatc

SEQ ID NO: 5556737 - DNA, 25 bp, Homo sapien
ggcatcaagatctggtagaagggcc

SEQ ID NO: 5556738 - DNA, 25 bp, Homo sapien
agaaaatcagaggcatcaagatctg

SEQ ID NO: 5556739 - DNA, 25 bp, Homo sapien
gaagccttgatagaaggagaaacag

SEQ ID NO: 5556740 - DNA, 25 bp, Homo sapien
acaacagtggaaatatagccagacc

SEQ ID NO: 5556741 - DNA, 25 bp, Homo sapien
taagatagggtgaagccttgataga

SEQ ID NO: 5556742 - DNA, 25 bp, Homo sapien
tagccagacctgactaaccttgcct

SEQ ID NO: 5556743 - DNA, 25 bp, Homo sapien
ttaaaaggtaagaagaacatatctc

SEQ ID NO: 5556744 - DNA, 25 bp, Homo sapien
acatatctcaagaggagatgccatc

SEQ ID NO: 5556745 - DNA, 25 bp, Homo sapien
cagacctttaagatagggtgaagcc

SEQ ID NO: 5556746 - DNA, 25 bp, Homo sapien
aacagaagctgcccactgtctttac

SEQ ID NO: 5556747 - DNA, 25 bp, Homo sapien
gtatacaaagactgaatagttcact

SEQ ID NO: 5556748 - DNA, 25 bp, Homo sapien
atatagttaaaagtgatggtgtgcc

SEQ ID NO: 5556749 - DNA, 25 bp, Homo sapien
attggtatgcatgctaaaatctttc

SEQ ID NO: 5556750 - DNA, 25 bp, Homo sapien
agtgatggtgtgccaaaatgtctac

SEQ ID NO: 5556751 - DNA, 25 bp, Homo sapien
gagtgtgtataaattaaatggaaat

SEQ ID NO: 5556752 - DNA, 25 bp, Homo sapien
attatgggcacaaaaccattggtat

SEQ ID NO: 5556753 - DNA, 25 bp, Homo sapien
acatgctaacttaaatacagcggtt

SEQ ID NO: 5556754 - DNA, 25 bp, Homo sapien
ataatcataaacaagtccacatggc

SEQ ID NO: 5556755 - DNA, 25 bp, Homo sapien
ccaatacgtaacattcaacaggttt

SEQ ID NO: 5556756 - DNA, 25 bp, Homo sapien
atacagcggttaaagtaatttttgc

SEQ ID NO: 5556757 - DNA, 25 bp, Homo sapien
ctgttgaaattaaagataccaatac

SEQ ID NO: 5556758 - DNA, 25 bp, Homo sapien
attaggtgtgcttatatattgcgta

SEQ ID NO: 5556759 - DNA, 25 bp, Homo sapien
tcaaaacagcacaacatacagtcta

SEQ ID NO: 5556760 - DNA, 25 bp, Homo sapien
acaaggttgtacataaaactatagc

SEQ ID NO: 5556761 - DNA, 25 bp, Homo sapien
cgaaataaagtgtactcaaaacagc

SEQ ID NO: 5556762 - DNA, 25 bp, Homo sapien
aaaaaatgtattggccagaacaaag

SEQ ID NO: 5556763 - DNA, 25 bp, Homo sapien
tatagcttacaaaagactcaggtat

SEQ ID NO: 5556764 - DNA, 25 bp, Homo sapien
tagaaaaagtgaaatgctcatgatt

SEQ ID NO: 5556765 - DNA, 25 bp, Homo sapien
gatttcagagtgtatagaaaatact

SEQ ID NO: 5556766 - DNA, 25 bp, Homo sapien
aaagactcaggtatagtaagaattc

SEQ ID NO: 5556767 - DNA, 25 bp, Homo sapien
tacaagtgatgagaaaaacattaac

SEQ ID NO: 5556768 - DNA, 25 bp, Homo sapien
taacttgaaacatgcacttactggc

SEQ ID NO: 5556769 - DNA, 25 bp, Homo sapien
gttagaaacatacaagtgatgagaa

SEQ ID NO: 5556770 - DNA, 25 bp, Homo sapien
caaattatctgaagcagcaaaggtt

SEQ ID NO: 5556771 - DNA, 25 bp, Homo sapien
ctagtgaagaaacattgcattaatt

SEQ ID NO: 5556772 - DNA, 25 bp, Homo sapien
gtttaacacagtattagctggcctt

SEQ ID NO: 5556773 - DNA, 25 bp, Homo sapien
atgaagggttgggttttctagtgaa

SEQ ID NO: 5556774 - DNA, 25 bp, Homo sapien
ctcaagaaaatggaattggcctgtt

SEQ ID NO: 5556775 - DNA, 25 bp, Homo sapien
caagggcaatatttcgtgcaggata

SEQ ID NO: 5556776 - DNA, 25 bp, Homo sapien
agaggaaacaagggcaatatttcgt

SEQ ID NO: 5556777 - DNA, 25 bp, Homo sapien
tatactggatcaggaggactatgta

SEQ ID NO: 5556778 - DNA, 25 bp, Homo sapien
agctggccttgatgaagtaacacac

SEQ ID NO: 5556779 - DNA, 25 bp, Homo sapien
ctgggttttggagcaatgaaaagaa

SEQ ID NO: 5556780 - DNA, 25 bp, Homo sapien
tacagccacgtacaaggaagacttt

SEQ ID NO: 5556781 - DNA, 25 bp, Homo sapien
agcagatactagtttgccaagcttc

SEQ ID NO: 5556782 - DNA, 25 bp, Homo sapien
tccttgccctagagactctggcagt

SEQ ID NO: 5556783 - DNA, 25 bp, Homo sapien
aagcgatgaaagccacgttttgctc

SEQ ID NO: 5556784 - DNA, 25 bp, Homo sapien
ttcagatggcaaaatgctaagttgt

SEQ ID NO: 5556785 - DNA, 25 bp, Homo sapien
tttgctcaggaatactacggttcac

SEQ ID NO: 5556786 - DNA, 25 bp, Homo sapien
tgagtattgtccagctagttgtttc

SEQ ID NO: 5556787 - DNA, 25 bp, Homo sapien
tctggcagtatgacttttgagagac

SEQ ID NO: 5556788 - DNA, 25 bp, Homo sapien
gagagactgccttattgctgccact

SEQ ID NO: 5556789 - DNA, 25 bp, Homo sapien
ttcgctaagcaataaacccaacata

SEQ ID NO: 5556790 - DNA, 25 bp, Homo sapien
gctaagttgtgaattgagtattgtc

SEQ ID NO: 5556791 - DNA, 25 bp, Homo sapien
atataggttgttttacagcagatac

SEQ ID NO: 5556792 - DNA, 25 bp, Homo sapien
cccgaagcccccatttccactgaca

SEQ ID NO: 5556793 - DNA, 25 bp, Homo sapien
tacacgccactgaagtgttggcttt

SEQ ID NO: 5556794 - DNA, 25 bp, Homo sapien
tgcactgtgtatatagaaaggcttc

SEQ ID NO: 5556795 - DNA, 25 bp, Homo sapien
aaaacgaaatttgctgtaaaccatc

SEQ ID NO: 5556796 - DNA, 25 bp, Homo sapien
gtaaaccatctcaactgcactgtgt

SEQ ID NO: 5556797 - DNA, 25 bp, Homo sapien
aaagtggcgtacaggcaatttaaaa

SEQ ID NO: 5556798 - DNA, 25 bp, Homo sapien
actgctgagctgtagaaagtaagag

SEQ ID NO: 5556799 - DNA, 25 bp, Homo sapien
cgcatagtcacacatcattagtcac

SEQ ID NO: 5556800 - DNA, 25 bp, Homo sapien
tgaatgtcaatgtgtaaagtggcgt

SEQ ID NO: 5556801 - DNA, 25 bp, Homo sapien
tcacctttgccaagggaaccacacc

SEQ ID NO: 5556802 - DNA, 25 bp, Homo sapien
gaaagtaagagaaatcgcaaactcc

SEQ ID NO: 5556803 - DNA, 25 bp, Homo sapien
tgtaaatgtttgcttgccatggtta

SEQ ID NO: 5556804 - DNA, 25 bp, Homo sapien
taagaataaacagaagtacatttca

SEQ ID NO: 5556805 - DNA, 25 bp, Homo sapien
ttggcaaaaatgtatagactagtat

SEQ ID NO: 5556806 - DNA, 25 bp, Homo sapien
gcttgccatggttagcacacaatgt

SEQ ID NO: 5556807 - DNA, 25 bp, Homo sapien
tggttagcacacaatgtactatgac

SEQ ID NO: 5556808 - DNA, 25 bp, Homo sapien
tggaggtatatttgcgccatttggc

SEQ ID NO: 5556809 - DNA, 25 bp, Homo sapien
taaaatatggcaaataacaaaaata

SEQ ID NO: 5556810 - DNA, 25 bp, Homo sapien
ccaatttgctaaaactatgtgtgta

SEQ ID NO: 5556811 - DNA, 25 bp, Homo sapien
agactagtattaagatgactgcatt

SEQ ID NO: 5556812 - DNA, 25 bp, Homo sapien
cattatgaaatgggattaacttatt

SEQ ID NO: 5556813 - DNA, 25 bp, Homo sapien
atacgctgtactgacagaaataatt

SEQ ID NO: 5556814 - DNA, 25 bp, Homo sapien
catgggtcattcatatgcgggtcat

SEQ ID NO: 5556815 - DNA, 25 bp, Homo sapien
ccaaaatgattgaagcagcatgggt

SEQ ID NO: 5556816 - DNA, 25 bp, Homo sapien
acaaaaggagacatacctctaatgc

SEQ ID NO: 5556817 - DNA, 25 bp, Homo sapien
agaggtcacttgcgatggcttgtca

SEQ ID NO: 5556818 - DNA, 25 bp, Homo sapien
gactacaaagtgatcttgagaagga

SEQ ID NO: 5556819 - DNA, 25 bp, Homo sapien
tctgagtgaccctgtatatagaggt

SEQ ID NO: 5556820 - DNA, 25 bp, Homo sapien
gaaatcattgaaggaataagcattc

SEQ ID NO: 5556821 - DNA, 25 bp, Homo sapien
gatacgtgggtcattgatatgtggg

SEQ ID NO: 5556822 - DNA, 25 bp, Homo sapien
gatatgtgggtcattgatacacggg

SEQ ID NO: 5556823 - DNA, 25 bp, Homo sapien
gctcattaagcatttgtaagggtgc

SEQ ID NO: 5556824 - DNA, 25 bp, Homo sapien
atgcaaatgtaatgactgaagccac

SEQ ID NO: 5556825 - DNA, 25 bp, Homo sapien
tgaaatctgaggattccaccaagat

SEQ ID NO: 5556826 - DNA, 25 bp, Homo sapien
gaaggagttattcagggaccctctc

SEQ ID NO: 5556827 - DNA, 25 bp, Homo sapien
ccaccaagataatatgataagaact

SEQ ID NO: 5556828 - DNA, 25 bp, Homo sapien
tcagtgatttggggccatatcctac

SEQ ID NO: 5556829 - DNA, 25 bp, Homo sapien
atttcctgagagcttggtacagcag

SEQ ID NO: 5556830 - DNA, 25 bp, Homo sapien
agcaaatgttgccgggacaaagttt

SEQ ID NO: 5556831 - DNA, 25 bp, Homo sapien
gcacaggcaataatgccatctctgc

SEQ ID NO: 5556832 - DNA, 25 bp, Homo sapien
cagatgaggatgaaacaagtactct

SEQ ID NO: 5556833 - DNA, 25 bp, Homo sapien
ctctgcctcaagaaggagttattca

SEQ ID NO: 5556834 - DNA, 25 bp, Homo sapien
acttagactaatgtggaatttccag

SEQ ID NO: 5556835 - DNA, 25 bp, Homo sapien
actgcttgctaatcagcacaggcaa

SEQ ID NO: 5556836 - DNA, 25 bp, Homo sapien
tttctaatgatatgaccagagccac

SEQ ID NO: 5556837 - DNA, 25 bp, Homo sapien
tgagtacctggaatgttatatgatc

SEQ ID NO: 5556838 - DNA, 25 bp, Homo sapien
caaacgggaccaaaatctactctgt

SEQ ID NO: 5556839 - DNA, 25 bp, Homo sapien
ccgtttggatgtactacacagtggt

SEQ ID NO: 5556840 - DNA, 25 bp, Homo sapien
tatgatcttgagtgggatatttccc

SEQ ID NO: 5556841 - DNA, 25 bp, Homo sapien
tgtaccagtacatgaagactagcta

SEQ ID NO: 5556842 - DNA, 25 bp, Homo sapien
atagataccccactggggaacaaac

SEQ ID NO: 5556843 - DNA, 25 bp, Homo sapien
gccaccatgtaggcttgtgccctgc

SEQ ID NO: 5556844 - DNA, 25 bp, Homo sapien
gagttgctactacgtacaaggcatc

SEQ ID NO: 5556845 - DNA, 25 bp, Homo sapien
aaggcatcatgcaaacagactgtgc

SEQ ID NO: 5556846 - DNA, 25 bp, Homo sapien
cttcagctgtaagatgacactgttc

SEQ ID NO: 5556847 - DNA, 25 bp, Homo sapien
ggtctaatagaggagtaaatgtaag

SEQ ID NO: 5556848 - DNA, 25 bp, Homo sapien
ctcctcaggtaaatcagagagaaat

SEQ ID NO: 5556849 - DNA, 25 bp, Homo sapien
cctggaaggttttgatgggtccttg

SEQ ID NO: 5556850 - DNA, 25 bp, Homo sapien
ctacagaaataacagctacgcaaat

SEQ ID NO: 5556851 - DNA, 25 bp, Homo sapien
tgtagccgtccgagatggtaaaaaa

SEQ ID NO: 5556852 - DNA, 25 bp, Homo sapien
ccttctcaccgtggaagagacgctg

SEQ ID NO: 5556853 - DNA, 25 bp, Homo sapien
ttatcacaaatgacacgactggggc

SEQ ID NO: 5556854 - DNA, 25 bp, Homo sapien
gtctgtgggtgtgagtacctactat

SEQ ID NO: 5556855 - DNA, 25 bp, Homo sapien
cacgactggggccttcctcttactc

SEQ ID NO: 5556856 - DNA, 25 bp, Homo sapien
cagagagaaatgatttcgcattagc

SEQ ID NO: 5556857 - DNA, 25 bp, Homo sapien
agctacgcaaatgctccaatgccat

SEQ ID NO: 5556858 - DNA, 25 bp, Homo sapien
aagccacaataaatacacgaatttc

SEQ ID NO: 5556859 - DNA, 25 bp, Homo sapien
acaacataaggtccaggttaagttc

SEQ ID NO: 5556860 - DNA, 25 bp, Homo sapien
aacttatacacaagagaaatcaatc

SEQ ID NO: 5556861 - DNA, 25 bp, Homo sapien
acagaagactacagctaatatgaat

SEQ ID NO: 5556862 - DNA, 25 bp, Homo sapien
taaggataagacttaaaaatgctta

SEQ ID NO: 5556863 - DNA, 25 bp, Homo sapien
gaaatcaatctagaaactgtgtgac

SEQ ID NO: 5556864 - DNA, 25 bp, Homo sapien
aagtacagcataatacaagtgccac

SEQ ID NO: 5556865 - DNA, 25 bp, Homo sapien
ataaaaatcagttgaaagataaaac

SEQ ID NO: 5556866 - DNA, 25 bp, Homo sapien
actgttgatattgagtaaaagtaac

SEQ ID NO: 5556867 - DNA, 25 bp, Homo sapien
ataaatacagaagactacagctaat

SEQ ID NO: 5556868 - DNA, 25 bp, Homo sapien
actgtgtgacatacaacatgacatc

SEQ ID NO: 5556869 - DNA, 25 bp, Homo sapien
tttgggtatgtacaacagaagcaca

SEQ ID NO: 5556870 - DNA, 25 bp, Homo sapien
aggagcagagttgatgtcctcaatt

SEQ ID NO: 5556871 - DNA, 25 bp, Homo sapien
gcctcgctcctgtcgaggacgccgc

SEQ ID NO: 5556872 - DNA, 25 bp, Homo sapien
atgagcgttcttccgagagatggca

SEQ ID NO: 5556873 - DNA, 25 bp, Homo sapien
aaaacaaaacagcagaatgagcgtt

SEQ ID NO: 5556874 - DNA, 25 bp, Homo sapien
tgctaaacccacggaacagactctc

SEQ ID NO: 5556875 - DNA, 25 bp, Homo sapien
agataaaaagggcagttgctaaacc

SEQ ID NO: 5556876 - DNA, 25 bp, Homo sapien
gggggtctttttgacaggagcagag

SEQ ID NO: 5556877 - DNA, 25 bp, Homo sapien
ccatagaaataggaagttagacgga

SEQ ID NO: 5556878 - DNA, 25 bp, Homo sapien
ccacggctttgatgaggacgatttg

SEQ ID NO: 5556879 - DNA, 25 bp, Homo sapien
ccacgtcagaaagtgacacgtcaac

SEQ ID NO: 5556880 - DNA, 25 bp, Homo sapien
tggcagcggctcttgatgacctgaa

SEQ ID NO: 5556881 - DNA, 25 bp, Homo sapien
tttaccaagataatgaggatgaatt

SEQ ID NO: 5556882 - DNA, 25 bp, Homo sapien
tggcagagaaagtgtcctgttgtgt

SEQ ID NO: 5556883 - DNA, 25 bp, Homo sapien
ttgtgtgcggaccgaatttcgagtc

SEQ ID NO: 5556884 - DNA, 25 bp, Homo sapien
tgatgacctgaagcagaggcttctt

SEQ ID NO: 5556885 - DNA, 25 bp, Homo sapien
gctcccacttgcagtcccgaggcac

SEQ ID NO: 5556886 - DNA, 25 bp, Homo sapien
caccccacagcagtcatatggattc

SEQ ID NO: 5556887 - DNA, 25 bp, Homo sapien
gaatttcgagtcttggcacacagcc

SEQ ID NO: 5556888 - DNA, 25 bp, Homo sapien
gcagctccgtcacgcggatgatctt

SEQ ID NO: 5556889 - DNA, 25 bp, Homo sapien
gcttcttaaaagtgaggacgatgac

SEQ ID NO: 5556890 - DNA, 25 bp, Homo sapien
gcgatgaggaatggaaacatattaa

SEQ ID NO: 5556891 - DNA, 25 bp, Homo sapien
aagcccagactcctgcaccccactc

SEQ ID NO: 5556892 - DNA, 25 bp, Homo sapien
taaagacatgcaattgactagcgtt

SEQ ID NO: 5556893 - DNA, 25 bp, Homo sapien
attccacagggtgctgtgatgagct

SEQ ID NO: 5556894 - DNA, 25 bp, Homo sapien
gcatgattcaaaaagacaaccaacc

SEQ ID NO: 5556895 - DNA, 25 bp, Homo sapien
gttcatcttagaggaggtgtgatct

SEQ ID NO: 5556896 - DNA, 25 bp, Homo sapien
tgtgatgagctcactgtggaagaag

SEQ ID NO: 5556897 - DNA, 25 bp, Homo sapien
ctgaggagcttgacaaaagcccaga

SEQ ID NO: 5556898 - DNA, 25 bp, Homo sapien
gggcatgtaaggacttcagtgacca

SEQ ID NO: 5556899 - DNA, 25 bp, Homo sapien
aatggaaaaagatctagcatgattc

SEQ ID NO: 5556900 - DNA, 25 bp, Homo sapien
ctagaaagaaccatcatgaaggaac

SEQ ID NO: 5556901 - DNA, 25 bp, Homo sapien
acacacaagtcttcatggggcatgt

SEQ ID NO: 5556902 - DNA, 25 bp, Homo sapien
aaatgagataatgtttggaagatat

SEQ ID NO: 5556903 - DNA, 25 bp, Homo sapien
cccctcaacggacatgaaatctacc

SEQ ID NO: 5556904 - DNA, 25 bp, Homo sapien
tgggatctcagggattgaaatctgt

SEQ ID NO: 5556905 - DNA, 25 bp, Homo sapien
ttgtaactccagggaagtaaatgag

SEQ ID NO: 5556906 - DNA, 25 bp, Homo sapien
tcctaggtgtgcaccagaaagtggt

SEQ ID NO: 5556907 - DNA, 25 bp, Homo sapien
atgatctcttctggcacagtagctg

SEQ ID NO: 5556908 - DNA, 25 bp, Homo sapien
agctggtatttggcaaacataggtt

SEQ ID NO: 5556909 - DNA, 25 bp, Homo sapien
ggttcaactatgatgttttggctcc

SEQ ID NO: 5556910 - DNA, 25 bp, Homo sapien
acctcggccaggattcttaagtctc

SEQ ID NO: 5556911 - DNA, 25 bp, Homo sapien
ttgaaatctgtcctaggtgtgcacc

SEQ ID NO: 5556912 - DNA, 25 bp, Homo sapien
tctagtctaccagctgctcaggcgg

SEQ ID NO: 5556913 - DNA, 25 bp, Homo sapien
agctatatgctgggtgctcttcggg

SEQ ID NO: 5556914 - DNA, 25 bp, Homo sapien
agagaagtactcaatgggaaatctt

SEQ ID NO: 5556915 - DNA, 25 bp, Homo sapien
taaaagactctaaagcaactgctta

SEQ ID NO: 5556916 - DNA, 25 bp, Homo sapien
attaaacaggtagacaagaaaacaa

SEQ ID NO: 5556917 - DNA, 25 bp, Homo sapien
caaatgagagctatatgctgggtgc

SEQ ID NO: 5556918 - DNA, 25 bp, Homo sapien
taaaactgacaaacactcggcattt

SEQ ID NO: 5556919 - DNA, 25 bp, Homo sapien
ccactgatgtggccaccttgttttt

SEQ ID NO: 5556920 - DNA, 25 bp, Homo sapien
tgacaaacactcggcatttaggtgc

SEQ ID NO: 5556921 - DNA, 25 bp, Homo sapien
ttatatatagccccagattgactga

SEQ ID NO: 5556922 - DNA, 25 bp, Homo sapien
acagaatcaacaaatgagagctata

SEQ ID NO: 5556923 - DNA, 25 bp, Homo sapien
ctggagtgctaaagagaagtactca

SEQ ID NO: 5556924 - DNA, 25 bp, Homo sapien
gtactcaagagtagaaccgagtggg

SEQ ID NO: 5556925 - DNA, 25 bp, Homo sapien
gatctggggacaaactgtccggaac

SEQ ID NO: 5556926 - DNA, 25 bp, Homo sapien
tggtggccatagacaactagatcga

SEQ ID NO: 5556927 - DNA, 25 bp, Homo sapien
aggtttgcctgggaccttgtaggcc

SEQ ID NO: 5556928 - DNA, 25 bp, Homo sapien
gccacaactgccatgtactcaagag

SEQ ID NO: 5556929 - DNA, 25 bp, Homo sapien
atagacaactagatcgaacaggcca

SEQ ID NO: 5556930 - DNA, 25 bp, Homo sapien
tcctagctagcttcagagccgggta

SEQ ID NO: 5556931 - DNA, 25 bp, Homo sapien
gtttgcatattgcccgagcaggcca

SEQ ID NO: 5556932 - DNA, 25 bp, Homo sapien
cgcacagccccattgtttgcatatt

SEQ ID NO: 5556933 - DNA, 25 bp, Homo sapien
tttgtcttggcagtgcttccggagc

SEQ ID NO: 5556934 - DNA, 25 bp, Homo sapien
cagccgagaaggaattcctagctag

SEQ ID NO: 5556935 - DNA, 25 bp, Homo sapien
gagttctgatttaggcaaaagggaa

SEQ ID NO: 5556936 - DNA, 25 bp, Homo sapien
caaaagggaaaaaccatgtatgact

SEQ ID NO: 5556937 - DNA, 25 bp, Homo sapien
taatcacagccagtaactacagaga

SEQ ID NO: 5556938 - DNA, 25 bp, Homo sapien
tataagcacacaagcagatttcaat

SEQ ID NO: 5556939 - DNA, 25 bp, Homo sapien
ctgatttatagaatgaaagagaaaa

SEQ ID NO: 5556940 - DNA, 25 bp, Homo sapien
cttcatgaatcttgtgtgggttatc

SEQ ID NO: 5556941 - DNA, 25 bp, Homo sapien
ccatgtatgactgtaagggaagtga

SEQ ID NO: 5556942 - DNA, 25 bp, Homo sapien
ccatagaatggaaaacctttgtaca

SEQ ID NO: 5556943 - DNA, 25 bp, Homo sapien
atctgaagactgggatcctctccat

SEQ ID NO: 5556944 - DNA, 25 bp, Homo sapien
agggaagtgagaactcagtaaattc

SEQ ID NO: 5556945 - DNA, 25 bp, Homo sapien
acagatattagggtgcggcaatatt

SEQ ID NO: 5556946 - DNA, 25 bp, Homo sapien
tccagcacagggaattgaaaacaga

SEQ ID NO: 5556947 - DNA, 25 bp, Homo sapien
agaaaatgcaatttgaccaatgatc

SEQ ID NO: 5556948 - DNA, 25 bp, Homo sapien
ttcaaagctattaaagacctctcct

SEQ ID NO: 5556949 - DNA, 25 bp, Homo sapien
tgcagaatataagattaggttatct

SEQ ID NO: 5556950 - DNA, 25 bp, Homo sapien
gtgtgggtggcatattcctgcagaa

SEQ ID NO: 5556951 - DNA, 25 bp, Homo sapien
tccttaagaggcagggtttgaattg

SEQ ID NO: 5556952 - DNA, 25 bp, Homo sapien
ggtactagggatatcacagtgaact

SEQ ID NO: 5556953 - DNA, 25 bp, Homo sapien
cagggattccagcacagggaattga

SEQ ID NO: 5556954 - DNA, 25 bp, Homo sapien
gtgatgagcattcccagggcagtgt

SEQ ID NO: 5556955 - DNA, 25 bp, Homo sapien
acaatgccagctgagtgtgcttcgc

SEQ ID NO: 5556956 - DNA, 25 bp, Homo sapien
aacagacacctgcaattcatttccc

SEQ ID NO: 5556957 - DNA, 25 bp, Homo sapien
tcagttcatgcaatcaggtgtcccc

SEQ ID NO: 5556958 - DNA, 25 bp, Homo sapien
tttagcagttcagcagatggcagtg

SEQ ID NO: 5556959 - DNA, 25 bp, Homo sapien
gtgaggtaggtaagtcattgtttca

SEQ ID NO: 5556960 - DNA, 25 bp, Homo sapien
ctgtgctgtcatgtaggagcttcta

SEQ ID NO: 5556961 - DNA, 25 bp, Homo sapien
caatcccaaacctgaagtgaactat

SEQ ID NO: 5556962 - DNA, 25 bp, Homo sapien
caggtgtccccagaaaagtttactc

SEQ ID NO: 5556963 - DNA, 25 bp, Homo sapien
gcagatggcagtgatctgtgctgtc

SEQ ID NO: 5556964 - DNA, 25 bp, Homo sapien
atcagatacacttgggaaactaaat

SEQ ID NO: 5556965 - DNA, 25 bp, Homo sapien
gtatttgctaacgtgaggcattctc

SEQ ID NO: 5556966 - DNA, 25 bp, Homo sapien
agttttctcaacatggcaccaagca

SEQ ID NO: 5556967 - DNA, 25 bp, Homo sapien
gcaccaagcactttagcagttcagc

SEQ ID NO: 5556968 - DNA, 25 bp, Homo sapien
ctaagtgcaatcgatgaagcaggag

SEQ ID NO: 5556969 - DNA, 25 bp, Homo sapien
tctagaatgtacctgagccctgtgc

SEQ ID NO: 5556970 - DNA, 25 bp, Homo sapien
taactaaagctacccaccacctgac

SEQ ID NO: 5556971 - DNA, 25 bp, Homo sapien
ctgtcctgacacccccactgctagc

SEQ ID NO: 5556972 - DNA, 25 bp, Homo sapien
aagacataaagatcaggagaaactg

SEQ ID NO: 5556973 - DNA, 25 bp, Homo sapien
cttcctagtctgtaggaggagggtt

SEQ ID NO: 5556974 - DNA, 25 bp, Homo sapien
ccaagagtacctgagagttctccct

SEQ ID NO: 5556975 - DNA, 25 bp, Homo sapien
accacctgacagccatctagaatgt

SEQ ID NO: 5556976 - DNA, 25 bp, Homo sapien
agcagggtgcctcttcctagtctgt

SEQ ID NO: 5556977 - DNA, 25 bp, Homo sapien
ctgctagctagatcagagagagatg

SEQ ID NO: 5556978 - DNA, 25 bp, Homo sapien
cttttaatgttgggaagacaggtta

SEQ ID NO: 5556979 - DNA, 25 bp, Homo sapien
tgacgaccgcagagcccaggacaaa

SEQ ID NO: 5556980 - DNA, 25 bp, Homo sapien
tttgtcctgggctctgcggtcgtca

SEQ ID NO: 5556981 - DNA, 25 bp, Homo sapien
gtgatgacagaaaataagttaacta

SEQ ID NO: 5556982 - DNA, 25 bp, Homo sapien
ttaaaatgaagtgcacagaaagcaa

SEQ ID NO: 5556983 - DNA, 25 bp, Homo sapien
tttttgaaagataggaaagtatatg

SEQ ID NO: 5556984 - DNA, 25 bp, Homo sapien
cggcaagcctatttgctgggtgaca

SEQ ID NO: 5556985 - DNA, 25 bp, Homo sapien
agtatatggaaatcagttaaacctt

SEQ ID NO: 5556986 - DNA, 25 bp, Homo sapien
tgctgggtgacaattaagttctagt

SEQ ID NO: 5556987 - DNA, 25 bp, Homo sapien
tcacgaacaaggacgctttgaagag

SEQ ID NO: 5556988 - DNA, 25 bp, Homo sapien
ggtggaattactgtgcaaggagtac

SEQ ID NO: 5556989 - DNA, 25 bp, Homo sapien
tgacaagctgtagacaagatacttc

SEQ ID NO: 5556990 - DNA, 25 bp, Homo sapien
gtagtgcagtgctggcaaatatttc

SEQ ID NO: 5556991 - DNA, 25 bp, Homo sapien
tgtctctaagtagtgcagtgctggc

SEQ ID NO: 5556992 - DNA, 25 bp, Homo sapien
gtgtggcagtttgctagtcgcctcc

SEQ ID NO: 5556993 - DNA, 25 bp, Homo sapien
tgagaaccccagtttttagctggac

SEQ ID NO: 5556994 - DNA, 25 bp, Homo sapien
tgcagtcctgctatacagtacatcc

SEQ ID NO: 5556995 - DNA, 25 bp, Homo sapien
aggtgtggcagtttgctagtcgcct

SEQ ID NO: 5556996 - DNA, 25 bp, Homo sapien
gccaatgagatacaaaggaggtttg

SEQ ID NO: 5556997 - DNA, 25 bp, Homo sapien
ctatacagtacatcccagccttcct

SEQ ID NO: 5556998 - DNA, 25 bp, Homo sapien
attagccaatgagatacaaaggagg

SEQ ID NO: 5556999 - DNA, 25 bp, Homo sapien
atgattagccaatgagatacaaagg

SEQ ID NO: 5557000 - DNA, 25 bp, Homo sapien
agtcgcctcctgctagctattttcc

SEQ ID NO: 5557001 - DNA, 25 bp, Homo sapien
gtcatatgattagccaatgagatac

SEQ ID NO: 5557002 - DNA, 25 bp, Homo sapien
ggacatgatgcagtcctgctataca

SEQ ID NO: 5557003 - DNA, 25 bp, Homo sapien
agttgatagcatacaaatttctggc

SEQ ID NO: 5557004 - DNA, 25 bp, Homo sapien
ctggggatatgcaatatctggagac

SEQ ID NO: 5557005 - DNA, 25 bp, Homo sapien
gtgttcatggcaattacttgtattc

SEQ ID NO: 5557006 - DNA, 25 bp, Homo sapien
ctcaacaaagaattaggtggcccaa

SEQ ID NO: 5557007 - DNA, 25 bp, Homo sapien
attcttagaatgccagtttttgctt

SEQ ID NO: 5557008 - DNA, 25 bp, Homo sapien
ttaatagcactgaggataagaaatc

SEQ ID NO: 5557009 - DNA, 25 bp, Homo sapien
tgatgtagtaactctgagcctatat

SEQ ID NO: 5557010 - DNA, 25 bp, Homo sapien
ctcagccaggcacatttttgccccc

SEQ ID NO: 5557011 - DNA, 25 bp, Homo sapien
taagaaatcctgtactagaagttgt

SEQ ID NO: 5557012 - DNA, 25 bp, Homo sapien
tcatcccccatgggctagatctgat

SEQ ID NO: 5557013 - DNA, 25 bp, Homo sapien
aatgacatgcataatcacatagtac

SEQ ID NO: 5557014 - DNA, 25 bp, Homo sapien
ccagtcagcaaggcacaacaatgtt

SEQ ID NO: 5557015 - DNA, 25 bp, Homo sapien
attgattaggagtaaaaatgttcat

SEQ ID NO: 5557016 - DNA, 25 bp, Homo sapien
actccctggtaaggattaggggcta

SEQ ID NO: 5557017 - DNA, 25 bp, Homo sapien
aaaatgtgtgaagttcagaagtttc

SEQ ID NO: 5557018 - DNA, 25 bp, Homo sapien
ctttaacccatcagagagactccct

SEQ ID NO: 5557019 - DNA, 25 bp, Homo sapien
gttgcatttccatgggagccaatcc

SEQ ID NO: 5557020 - DNA, 25 bp, Homo sapien
gaaatgcaatctcccaaacaggttt

SEQ ID NO: 5557021 - DNA, 25 bp, Homo sapien
atagaatgacttgaaaatgtgtgaa

SEQ ID NO: 5557022 - DNA, 25 bp, Homo sapien
attaggggctaattactggtgcctc

SEQ ID NO: 5557023 - DNA, 25 bp, Homo sapien
gagccaatccacccacccatagaat

SEQ ID NO: 5557024 - DNA, 25 bp, Homo sapien
ggtgcctcttcagctgtcagtccat

SEQ ID NO: 5557025 - DNA, 25 bp, Homo sapien
agagggactccagacaccccgagac

SEQ ID NO: 5557026 - DNA, 25 bp, Homo sapien
gtctcggggtgtctggagtccctct

SEQ ID NO: 5557027 - DNA, 25 bp, Homo sapien
gataggcatctcttagctgtcactt

SEQ ID NO: 5557028 - DNA, 25 bp, Homo sapien
tcttctcatgcaaaggcagtgtgat

SEQ ID NO: 5557029 - DNA, 25 bp, Homo sapien
cctgtgtatcatagataggcatctc

SEQ ID NO: 5557030 - DNA, 25 bp, Homo sapien
tctaagcaactcctctacatgatga

SEQ ID NO: 5557031 - DNA, 25 bp, Homo sapien
gtgggggagtccatttctggatctt

SEQ ID NO: 5557032 - DNA, 25 bp, Homo sapien
tctccactggagtattggtattttc

SEQ ID NO: 5557033 - DNA, 25 bp, Homo sapien
aatgtaaaggagctacctgtgtatc

SEQ ID NO: 5557034 - DNA, 25 bp, Homo sapien
gcacagtgtctgcttaacagtaacc

SEQ ID NO: 5557035 - DNA, 25 bp, Homo sapien
tgagtgtctgcgtaattagtttttc

SEQ ID NO: 5557036 - DNA, 25 bp, Homo sapien
atggcatgacagagcagtccaattt

SEQ ID NO: 5557037 - DNA, 25 bp, Homo sapien
taaaagtcttctgagtgtctgcgta

SEQ ID NO: 5557038 - DNA, 25 bp, Homo sapien
ttacaccccggaggcgtcacgaagg

SEQ ID NO: 5557039 - DNA, 25 bp, Homo sapien
ccttcgtgacgcctccggggtgtaa

SEQ ID NO: 5557040 - DNA, 25 bp, Homo sapien
cagaaggttttgagccatgaagttc

SEQ ID NO: 5557041 - DNA, 25 bp, Homo sapien
ggtctatgaccagaactcaataaat

SEQ ID NO: 5557042 - DNA, 25 bp, Homo sapien
ctggctgttcatgagcatgacgtgc

SEQ ID NO: 5557043 - DNA, 25 bp, Homo sapien
gcaaaaagcacgaggcaagtattca

SEQ ID NO: 5557044 - DNA, 25 bp, Homo sapien
aaaaaaggtgactctcaacagccaa

SEQ ID NO: 5557045 - DNA, 25 bp, Homo sapien
aagcacgaggcaagtattcagtcct

SEQ ID NO: 5557046 - DNA, 25 bp, Homo sapien
aatgattcagaaggttttgagccat

SEQ ID NO: 5557047 - DNA, 25 bp, Homo sapien
atcatccagtggcaaaaagcacgag

SEQ ID NO: 5557048 - DNA, 25 bp, Homo sapien
ttgagccatgaagttccccaataac

SEQ ID NO: 5557049 - DNA, 25 bp, Homo sapien
tataacttatgtataggatagtcat

SEQ ID NO: 5557050 - DNA, 25 bp, Homo sapien
catgacgtgcaagctgctggtctat

SEQ ID NO: 5557051 - DNA, 25 bp, Homo sapien
tgtggccaagtctgagtagcctgtg

SEQ ID NO: 5557052 - DNA, 25 bp, Homo sapien
ttgctttgagcgtatgtaacatctt

SEQ ID NO: 5557053 - DNA, 25 bp, Homo sapien
tatacacaaagtctagaagaggaat

SEQ ID NO: 5557054 - DNA, 25 bp, Homo sapien
ttatacaagaaataggcaaaaagtc

SEQ ID NO: 5557055 - DNA, 25 bp, Homo sapien
aaatatcaccctgaggaggagattt

SEQ ID NO: 5557056 - DNA, 25 bp, Homo sapien
tgacactcagggagaatcctcttgt

SEQ ID NO: 5557057 - DNA, 25 bp, Homo sapien
tgaaaatgtgtaaagtaagttggtc

SEQ ID NO: 5557058 - DNA, 25 bp, Homo sapien
atttggccaaaagacactatgtttc

SEQ ID NO: 5557059 - DNA, 25 bp, Homo sapien
atcaagcatgagaaaactaagctaa

SEQ ID NO: 5557060 - DNA, 25 bp, Homo sapien
ttgtccacgtggtgaagtcccacag

SEQ ID NO: 5557061 - DNA, 25 bp, Homo sapien
tgaggaggagatttgtagttttacc

SEQ ID NO: 5557062 - DNA, 25 bp, Homo sapien
caaagatctggacatggaattggtg

SEQ ID NO: 5557063 - DNA, 25 bp, Homo sapien
ttcattaacagtgtggaatacaaac

SEQ ID NO: 5557064 - DNA, 25 bp, Homo sapien
catggaattggtgtcttaactatca

SEQ ID NO: 5557065 - DNA, 25 bp, Homo sapien
aatatgaaatcaattgtacaatgca

SEQ ID NO: 5557066 - DNA, 25 bp, Homo sapien
tatgttatagtaggaaaattaaggc

SEQ ID NO: 5557067 - DNA, 25 bp, Homo sapien
gtacaatgcatgatacagtcaaaga

SEQ ID NO: 5557068 - DNA, 25 bp, Homo sapien
agtgtggaatacaaacaatgatggt

SEQ ID NO: 5557069 - DNA, 25 bp, Homo sapien
ttaaaatgctaactaggccaggcgt

SEQ ID NO: 5557070 - DNA, 25 bp, Homo sapien
aatcgactcacattaggccaaattg

SEQ ID NO: 5557071 - DNA, 25 bp, Homo sapien
gcatgatacagtcaaagatctggac

SEQ ID NO: 5557072 - DNA, 25 bp, Homo sapien
tatagtaggaaaattaaggcatttc

SEQ ID NO: 5557073 - DNA, 25 bp, Homo sapien
ccacgagcaggtaaacatgcctcaa

SEQ ID NO: 5557074 - DNA, 25 bp, Homo sapien
ttgaagggtatagtcagtcagtcta

SEQ ID NO: 5557075 - DNA, 25 bp, Homo sapien
ttcagggtttcaaaaagtcagaaga

SEQ ID NO: 5557076 - DNA, 25 bp, Homo sapien
aaaagcactgccacaaagctaaatc

SEQ ID NO: 5557077 - DNA, 25 bp, Homo sapien
aatgcaggtagttatttcagatgtt

SEQ ID NO: 5557078 - DNA, 25 bp, Homo sapien
caaacaaccattgctgaaaagcttc

SEQ ID NO: 5557079 - DNA, 25 bp, Homo sapien
aagtcagaagaatagcaaaatcaag

SEQ ID NO: 5557080 - DNA, 25 bp, Homo sapien
tcatgattataaagagccaaggttt

SEQ ID NO: 5557081 - DNA, 25 bp, Homo sapien
aacaatgtccaagcccataaaagtt

SEQ ID NO: 5557082 - DNA, 25 bp, Homo sapien
taacctgccaggaagctatattata

SEQ ID NO: 5557083 - DNA, 25 bp, Homo sapien
agtcagtcagtctacaaaaaagcac

SEQ ID NO: 5557084 - DNA, 25 bp, Homo sapien
aatacagacctggtatttgcacttt

SEQ ID NO: 5557085 - DNA, 25 bp, Homo sapien
aaagtgcaaataccaggtctgtatt

SEQ ID NO: 5557086 - DNA, 25 bp, Homo sapien
tccatgtggagttataagtgatatc

SEQ ID NO: 5557087 - DNA, 25 bp, Homo sapien
ggctgcacccttgcagtgcgtggcc

SEQ ID NO: 5557088 - DNA, 25 bp, Homo sapien
agaatgtcatggctacacctcaacc

SEQ ID NO: 5557089 - DNA, 25 bp, Homo sapien
acattgataaatatgcatgcccatc

SEQ ID NO: 5557090 - DNA, 25 bp, Homo sapien
tctaagtcccccagccaactgagtg

SEQ ID NO: 5557091 - DNA, 25 bp, Homo sapien
caattaaattggaggggcaactatt

SEQ ID NO: 5557092 - DNA, 25 bp, Homo sapien
catgaaccaaggagtacaatgaatc

SEQ ID NO: 5557093 - DNA, 25 bp, Homo sapien
ccaactgagtgcatccccttgcagc

SEQ ID NO: 5557094 - DNA, 25 bp, Homo sapien
ccctgtggcccaaaagtaaatcaat

SEQ ID NO: 5557095 - DNA, 25 bp, Homo sapien
gccgcccacagacaacactttcaca

SEQ ID NO: 5557096 - DNA, 25 bp, Homo sapien
tcaaatcctgctgtaaaccaaaact

SEQ ID NO: 5557097 - DNA, 25 bp, Homo sapien
gactgattttgacacgaactgagac

SEQ ID NO: 5557098 - DNA, 25 bp, Homo sapien
gtctcagttcgtgtcaaaatcagtc

SEQ ID NO: 5557099 - DNA, 25 bp, Homo sapien
acgattccaatatgtctcccacccc

SEQ ID NO: 5557100 - DNA, 25 bp, Homo sapien
tgaaaataagtaggtaagccacaga

SEQ ID NO: 5557101 - DNA, 25 bp, Homo sapien
cacccccacccatactgccctgtaa

SEQ ID NO: 5557102 - DNA, 25 bp, Homo sapien
acctcagagttcgtaaaatttatta

SEQ ID NO: 5557103 - DNA, 25 bp, Homo sapien
tgttacacaggggttgaaaacatta

SEQ ID NO: 5557104 - DNA, 25 bp, Homo sapien
aatactcagggctaatgattaattc

SEQ ID NO: 5557105 - DNA, 25 bp, Homo sapien
ccatagtgatgatcaatgatagtgc

SEQ ID NO: 5557106 - DNA, 25 bp, Homo sapien
ttaaggggaatattctatatctgat

SEQ ID NO: 5557107 - DNA, 25 bp, Homo sapien
tgatcaatgatagtgctttctcctc

SEQ ID NO: 5557108 - DNA, 25 bp, Homo sapien
ctcatgatacatgttacacaggggt

SEQ ID NO: 5557109 - DNA, 25 bp, Homo sapien
aatggaataaattgggacatgtaaa

SEQ ID NO: 5557110 - DNA, 25 bp, Homo sapien
agctgtggagaaattaatctggttg

SEQ ID NO: 5557111 - DNA, 25 bp, Homo sapien
agaagcaggtgcttagcaaacatcc

SEQ ID NO: 5557112 - DNA, 25 bp, Homo sapien
ggtttctgggagtatcattaaatcc

SEQ ID NO: 5557113 - DNA, 25 bp, Homo sapien
ctcctgctgaggcctcatgcagctg

SEQ ID NO: 5557114 - DNA, 25 bp, Homo sapien
gaagaaaggtcagaggtatcattat

SEQ ID NO: 5557115 - DNA, 25 bp, Homo sapien
atccctcggcatccttaagaagcag

SEQ ID NO: 5557116 - DNA, 25 bp, Homo sapien
aggggcttgatcctgaaagtgtagt

SEQ ID NO: 5557117 - DNA, 25 bp, Homo sapien
agtttccaaatgagagtcagagggg

SEQ ID NO: 5557118 - DNA, 25 bp, Homo sapien
agccctgaataagatctcacggccc

SEQ ID NO: 5557119 - DNA, 25 bp, Homo sapien
ttaggtactgctcagacagacctcc

SEQ ID NO: 5557120 - DNA, 25 bp, Homo sapien
caagtcccaacactgagttcagagc

SEQ ID NO: 5557121 - DNA, 25 bp, Homo sapien
aattaagatgacaagtaagaaaaac

SEQ ID NO: 5557122 - DNA, 25 bp, Homo sapien
agaaggttaaggatagaattttgta

SEQ ID NO: 5557123 - DNA, 25 bp, Homo sapien
gcaaagcatggtcgattgttactcc

SEQ ID NO: 5557124 - DNA, 25 bp, Homo sapien
catctttggactcaacagggcacag

SEQ ID NO: 5557125 - DNA, 25 bp, Homo sapien
acgcattgtagaattttcctggcac

SEQ ID NO: 5557126 - DNA, 25 bp, Homo sapien
agaaacctaaacaaattaagatgac

SEQ ID NO: 5557127 - DNA, 25 bp, Homo sapien
aatgcatccaacacataggagaatt

SEQ ID NO: 5557128 - DNA, 25 bp, Homo sapien
acaccaacacaaacatctcaaatac

SEQ ID NO: 5557129 - DNA, 25 bp, Homo sapien
tgccaggtagcatttggtgcctcac

SEQ ID NO: 5557130 - DNA, 25 bp, Homo sapien
tcctggcactgtgcaaagcatggtc

SEQ ID NO: 5557131 - DNA, 25 bp, Homo sapien
aggatgtaaatgtgccaggtagcat

SEQ ID NO: 5557132 - DNA, 25 bp, Homo sapien
caggctcaattgatccccctacctc

SEQ ID NO: 5557133 - DNA, 25 bp, Homo sapien
ggaagatttgtgagatgtttagaac

SEQ ID NO: 5557134 - DNA, 25 bp, Homo sapien
gtaagctcttctagggcaacaccca

SEQ ID NO: 5557135 - DNA, 25 bp, Homo sapien
aactgctgggctgaagttacccacc

SEQ ID NO: 5557136 - DNA, 25 bp, Homo sapien
taactggaagatttgtgagatgttt

SEQ ID NO: 5557137 - DNA, 25 bp, Homo sapien
attgtgcaaagaacataaactaaat

SEQ ID NO: 5557138 - DNA, 25 bp, Homo sapien
attgtaagctcttctagggcaacac

SEQ ID NO: 5557139 - DNA, 25 bp, Homo sapien
ctgaagttacccacctgcctcaccc

SEQ ID NO: 5557140 - DNA, 25 bp, Homo sapien
ttactccaggctcaattgatccccc

SEQ ID NO: 5557141 - DNA, 25 bp, Homo sapien
ggggtttcaccgtatggcccatgct

SEQ ID NO: 5557142 - DNA, 25 bp, Homo sapien
gtggcacaatcagcttactccaggc

SEQ ID NO: 5557143 - DNA, 25 bp, Homo sapien
taggaagcagtgtttacattttgcc

SEQ ID NO: 5557144 - DNA, 25 bp, Homo sapien
agcagtgtattgtaaaggaaccagc

SEQ ID NO: 5557145 - DNA, 25 bp, Homo sapien
taagagaatcataggaaagtttaac

SEQ ID NO: 5557146 - DNA, 25 bp, Homo sapien
taagaaagcagtgtattgtaaagga

SEQ ID NO: 5557147 - DNA, 25 bp, Homo sapien
atagtcactatgccacaagatgtta

SEQ ID NO: 5557148 - DNA, 25 bp, Homo sapien
tctctagatagtggccttacaggca

SEQ ID NO: 5557149 - DNA, 25 bp, Homo sapien
acatatccttcaagtgagattgttt

SEQ ID NO: 5557150 - DNA, 25 bp, Homo sapien
tccacaacaaacatgaaatagtaaa

SEQ ID NO: 5557151 - DNA, 25 bp, Homo sapien
ccacaagatgttaagaatagttttc

SEQ ID NO: 5557152 - DNA, 25 bp, Homo sapien
acttgcacagtaataggaagcagtg

SEQ ID NO: 5557153 - DNA, 25 bp, Homo sapien
attttgaagagggaactcatattct

SEQ ID NO: 5557154 - DNA, 25 bp, Homo sapien
actgccatatggaaagaggttacct

SEQ ID NO: 5557155 - DNA, 25 bp, Homo sapien
tggaaagaggttacctaaagcactc

SEQ ID NO: 5557156 - DNA, 25 bp, Homo sapien
atacactgtatgatctataggctca

SEQ ID NO: 5557157 - DNA, 25 bp, Homo sapien
tacctaaagcactcactagaggaaa

SEQ ID NO: 5557158 - DNA, 25 bp, Homo sapien
ttacttagttgggaagtacatacac

SEQ ID NO: 5557159 - DNA, 25 bp, Homo sapien
ggagagagaagaactatcaactgaa

SEQ ID NO: 5557160 - DNA, 25 bp, Homo sapien
tcagggcctcaatcaaatattataa

SEQ ID NO: 5557161 - DNA, 25 bp, Homo sapien
ggtggaattttctggtgatggtagt

SEQ ID NO: 5557162 - DNA, 25 bp, Homo sapien
ggagtttagcgacttgctggagaga

SEQ ID NO: 5557163 - DNA, 25 bp, Homo sapien
gaagaactatcaactgaaggctcag

SEQ ID NO: 5557164 - DNA, 25 bp, Homo sapien
gtacatacacatcacacaaagagaa

SEQ ID NO: 5557165 - DNA, 25 bp, Homo sapien
gcccaaagtacagcagacaggctca

SEQ ID NO: 5557166 - DNA, 25 bp, Homo sapien
tcctccacaaggaggacctacccgc

SEQ ID NO: 5557167 - DNA, 25 bp, Homo sapien
ctctgccccagggcaaggctttagg

SEQ ID NO: 5557168 - DNA, 25 bp, Homo sapien
cggccaggtcagcacattagaaagt

SEQ ID NO: 5557169 - DNA, 25 bp, Homo sapien
gaggtgggagctgtcgctccacttt

SEQ ID NO: 5557170 - DNA, 25 bp, Homo sapien
tatagcgtccctatgaggtgggagc

SEQ ID NO: 5557171 - DNA, 25 bp, Homo sapien
ctggggtccgaaaagttcccagaca

SEQ ID NO: 5557172 - DNA, 25 bp, Homo sapien
ctgtcctccatccccagggcaggaa

SEQ ID NO: 5557173 - DNA, 25 bp, Homo sapien
tcagcctacctgaaacagaacaagt

SEQ ID NO: 5557174 - DNA, 25 bp, Homo sapien
gaacaagtatcaacaagcggaagag

SEQ ID NO: 5557175 - DNA, 25 bp, Homo sapien
gcccggtccccacatcgctagttct

SEQ ID NO: 5557176 - DNA, 25 bp, Homo sapien
aaagatgctgcaacttaagtcccta

SEQ ID NO: 5557177 - DNA, 25 bp, Homo sapien
gtcatacatctaaggggtgcaagga

SEQ ID NO: 5557178 - DNA, 25 bp, Homo sapien
gcttgacagtcatgagtgctctctc

SEQ ID NO: 5557179 - DNA, 25 bp, Homo sapien
tcacagatcagacagcttgacagtc

SEQ ID NO: 5557180 - DNA, 25 bp, Homo sapien
gtgcaaggaccaggctttgatttca

SEQ ID NO: 5557181 - DNA, 25 bp, Homo sapien
aagagcaaagatataaggtcaattc

SEQ ID NO: 5557182 - DNA, 25 bp, Homo sapien
ccaggcatggtgctaaacactctct

SEQ ID NO: 5557183 - DNA, 25 bp, Homo sapien
ctctcccaggccttgaatgtcacag

SEQ ID NO: 5557184 - DNA, 25 bp, Homo sapien
gagtgcttagagtgtaccaggcatg

SEQ ID NO: 5557185 - DNA, 25 bp, Homo sapien
ggtctcttcgtatgggtcaaacttc

SEQ ID NO: 5557186 - DNA, 25 bp, Homo sapien
cacgttgcccagggtcatacatcta

SEQ ID NO: 5557187 - DNA, 25 bp, Homo sapien
gaaaatggcatactaatttgagttt

SEQ ID NO: 5557188 - DNA, 25 bp, Homo sapien
gagggactggaccaatctgctcaag

SEQ ID NO: 5557189 - DNA, 25 bp, Homo sapien
gggattcttgtgactaatgtgtttc

SEQ ID NO: 5557190 - DNA, 25 bp, Homo sapien
taaaacagtgaagtgtggctattac

SEQ ID NO: 5557191 - DNA, 25 bp, Homo sapien
ataaaggagaatgtcatatctatat

SEQ ID NO: 5557192 - DNA, 25 bp, Homo sapien
tttgagtttgaggtaaatgaagaga

SEQ ID NO: 5557193 - DNA, 25 bp, Homo sapien
tacacaatgtagacagaacagaaag

SEQ ID NO: 5557194 - DNA, 25 bp, Homo sapien
gaagagacagatttaggccatctaa

SEQ ID NO: 5557195 - DNA, 25 bp, Homo sapien
aaagagcttgacctgttactgcatt

SEQ ID NO: 5557196 - DNA, 25 bp, Homo sapien
atttaggccatctaagaaggaagat

SEQ ID NO: 5557197 - DNA, 25 bp, Homo sapien
tcaaagaatgctaaagagcttgacc

SEQ ID NO: 5557198 - DNA, 25 bp, Homo sapien
ggtgatagggatactgacctctctc

SEQ ID NO: 5557199 - DNA, 25 bp, Homo sapien
tctctaaaagaacatcagcgaagtt

SEQ ID NO: 5557200 - DNA, 25 bp, Homo sapien
aagtgcaggtttgagaaaatcaatt

SEQ ID NO: 5557201 - DNA, 25 bp, Homo sapien
taggtggccattatctgcaaagtgc

SEQ ID NO: 5557202 - DNA, 25 bp, Homo sapien
caaggctgacaacaatttgacactt

SEQ ID NO: 5557203 - DNA, 25 bp, Homo sapien
gggagcatacaagaggaaattttta

SEQ ID NO: 5557204 - DNA, 25 bp, Homo sapien
gatcggtgtcagagacttcccaata

SEQ ID NO: 5557205 - DNA, 25 bp, Homo sapien
ttcaggaattggtcactatcaaagc

SEQ ID NO: 5557206 - DNA, 25 bp, Homo sapien
cacctaacccaagatcaggatcctc

SEQ ID NO: 5557207 - DNA, 25 bp, Homo sapien
cagcgaagttcatcactagatttcc

SEQ ID NO: 5557208 - DNA, 25 bp, Homo sapien
ctctaaccaggttctgatcggtgtc

SEQ ID NO: 5557209 - DNA, 25 bp, Homo sapien
ttaggatcagctctgtcgtgtgctc

SEQ ID NO: 5557210 - DNA, 25 bp, Homo sapien
tcaagtaatacggaaaaactgggca

SEQ ID NO: 5557211 - DNA, 25 bp, Homo sapien
gaatgacgatgacacaggcgttttc

SEQ ID NO: 5557212 - DNA, 25 bp, Homo sapien
tcgggttgttttaacagtcgtcatc

SEQ ID NO: 5557213 - DNA, 25 bp, Homo sapien
tttatcccagggacgtgtgtgtaca

SEQ ID NO: 5557214 - DNA, 25 bp, Homo sapien
gctcaagaaggattgctgtactctg

SEQ ID NO: 5557215 - DNA, 25 bp, Homo sapien
tttcagcagtaaagattgtaactac

SEQ ID NO: 5557216 - DNA, 25 bp, Homo sapien
catgtgaaggttgtagctcaagaag

SEQ ID NO: 5557217 - DNA, 25 bp, Homo sapien
ttaaagaatgaatgacgatgacaca

SEQ ID NO: 5557218 - DNA, 25 bp, Homo sapien
aaactgggcagagcttttaaagaat

SEQ ID NO: 5557219 - DNA, 25 bp, Homo sapien
gttttgtgctcaagaagttggtatc

SEQ ID NO: 5557220 - DNA, 25 bp, Homo sapien
taaattgcttttccccaagagccac

SEQ ID NO: 5557221 - DNA, 25 bp, Homo sapien
tcacgcggtgtgttgcacatagcaa

SEQ ID NO: 5557222 - DNA, 25 bp, Homo sapien
tagcaaacacttgggaacagttagc

SEQ ID NO: 5557223 - DNA, 25 bp, Homo sapien
aacagttagctattcatcgtggtac

SEQ ID NO: 5557224 - DNA, 25 bp, Homo sapien
agcctaatgtaataatgcaggtaac

SEQ ID NO: 5557225 - DNA, 25 bp, Homo sapien
tgcaggtaacactgctcacgcggtg

SEQ ID NO: 5557226 - DNA, 25 bp, Homo sapien
agtcaaatagacgttaagttcaaac

SEQ ID NO: 5557227 - DNA, 25 bp, Homo sapien
ctgaaaattacaagtggcagggtgc

SEQ ID NO: 5557228 - DNA, 25 bp, Homo sapien
agggtgcaggaccttaagtcaaata

SEQ ID NO: 5557229 - DNA, 25 bp, Homo sapien
agttcaaaccatcagtccattcgtc

SEQ ID NO: 5557230 - DNA, 25 bp, Homo sapien
gtcactagctgtatgtcttcgggca

SEQ ID NO: 5557231 - DNA, 25 bp, Homo sapien
tctaattgagaggtcttttgaggat

SEQ ID NO: 5557232 - DNA, 25 bp, Homo sapien
cattagaaaggaacacagtgataag

SEQ ID NO: 5557233 - DNA, 25 bp, Homo sapien
ctactagactaagctcaggacagag

SEQ ID NO: 5557234 - DNA, 25 bp, Homo sapien
gtcagctgttctaccaggcagagat

SEQ ID NO: 5557235 - DNA, 25 bp, Homo sapien
aagatttcagtaacaaagtagagaa

SEQ ID NO: 5557236 - DNA, 25 bp, Homo sapien
acagaggctgtgtctcaatcacctt

SEQ ID NO: 5557237 - DNA, 25 bp, Homo sapien
ggtgctcagtaagtgaatgtttgct

SEQ ID NO: 5557238 - DNA, 25 bp, Homo sapien
acacattgtgtaaggcacagggttt

SEQ ID NO: 5557239 - DNA, 25 bp, Homo sapien
caggcagagattttatgatagggtt

SEQ ID NO: 5557240 - DNA, 25 bp, Homo sapien
gaagggagatccaatgactggttct

SEQ ID NO: 5557241 - DNA, 25 bp, Homo sapien
gtgataagtaatgttctacaggttc

SEQ ID NO: 5557242 - DNA, 25 bp, Homo sapien
tgcgcctgcaaaaagcctcagcact

SEQ ID NO: 5557243 - DNA, 25 bp, Homo sapien
agttcgcctgctaactgcgcctgca

SEQ ID NO: 5557244 - DNA, 25 bp, Homo sapien
ctaaactgtgagttgcctggaaagg

SEQ ID NO: 5557245 - DNA, 25 bp, Homo sapien
agggcccctgtcacgcaaatctacg

SEQ ID NO: 5557246 - DNA, 25 bp, Homo sapien
gagaaagttcagattgtgaaggtat

SEQ ID NO: 5557247 - DNA, 25 bp, Homo sapien
atctgtgcccatctagagaaagttc

SEQ ID NO: 5557248 - DNA, 25 bp, Homo sapien
taaaagagctgtaagacaagatgtt

SEQ ID NO: 5557249 - DNA, 25 bp, Homo sapien
aggagtgtctgacgctgagactttt

SEQ ID NO: 5557250 - DNA, 25 bp, Homo sapien
attccttagcaacacagggcccctg

SEQ ID NO: 5557251 - DNA, 25 bp, Homo sapien
acccaagagcttgaacacacacaac

SEQ ID NO: 5557252 - DNA, 25 bp, Homo sapien
cagaaaccctgctgaccagttcgcc

SEQ ID NO: 5557253 - DNA, 25 bp, Homo sapien
aaagtcgttgtgtaataaatctgat

SEQ ID NO: 5557254 - DNA, 25 bp, Homo sapien
aggggttaccatggagaaattcatt

SEQ ID NO: 5557255 - DNA, 25 bp, Homo sapien
tgcatttcccaagcaaggcaaagcg

SEQ ID NO: 5557256 - DNA, 25 bp, Homo sapien
aggtgacacgaaactgcatttccca

SEQ ID NO: 5557257 - DNA, 25 bp, Homo sapien
gctgtgtgacttagaagttggtcca

SEQ ID NO: 5557258 - DNA, 25 bp, Homo sapien
tgcatcttagcaacagtctagagaa

SEQ ID NO: 5557259 - DNA, 25 bp, Homo sapien
aaatctgataatgatgctgtgtgac

SEQ ID NO: 5557260 - DNA, 25 bp, Homo sapien
atacaaagcagcctttgtggggggg

SEQ ID NO: 5557261 - DNA, 25 bp, Homo sapien
tttcctcagaaatagagtgaaaaca

SEQ ID NO: 5557262 - DNA, 25 bp, Homo sapien
gaaaagtcttgccggttgttgcttc

SEQ ID NO: 5557263 - DNA, 25 bp, Homo sapien
attcattacggatttcgggaaggct

SEQ ID NO: 5557264 - DNA, 25 bp, Homo sapien
cagtggttgcctaaagaactgggtg

SEQ ID NO: 5557265 - DNA, 25 bp, Homo sapien
gccagaagcaagttaacacagtaga

SEQ ID NO: 5557266 - DNA, 25 bp, Homo sapien
atacaataatgtgccaagatcttca

SEQ ID NO: 5557267 - DNA, 25 bp, Homo sapien
agaaaatgctatcagtggttgccta

SEQ ID NO: 5557268 - DNA, 25 bp, Homo sapien
acacagtagaagaaattagagcctt

SEQ ID NO: 5557269 - DNA, 25 bp, Homo sapien
tgcatagacgatatctggaagaata

SEQ ID NO: 5557270 - DNA, 25 bp, Homo sapien
cacaagtcaacaaacagcatacaat

SEQ ID NO: 5557271 - DNA, 25 bp, Homo sapien
accagtagatatttagggcagatgc

SEQ ID NO: 5557272 - DNA, 25 bp, Homo sapien
ttcaccagatctgtaagatgcactc

SEQ ID NO: 5557273 - DNA, 25 bp, Homo sapien
aaggtgcaaaccagcaagtatgata

SEQ ID NO: 5557274 - DNA, 25 bp, Homo sapien
atttagggcagatgcaaaaatttgc

SEQ ID NO: 5557275 - DNA, 25 bp, Homo sapien
cataccttcggggaaaaggatctaa

SEQ ID NO: 5557276 - DNA, 25 bp, Homo sapien
attgtccacatgcccttagaacctt

SEQ ID NO: 5557277 - DNA, 25 bp, Homo sapien
cagcagccttggagttaatgatctt

SEQ ID NO: 5557278 - DNA, 25 bp, Homo sapien
cactggaaggcaatctgatacaagt

SEQ ID NO: 5557279 - DNA, 25 bp, Homo sapien
ttacacgagctaagtaagcccttac

SEQ ID NO: 5557280 - DNA, 25 bp, Homo sapien
taagggtcctaacatccagcagcct

SEQ ID NO: 5557281 - DNA, 25 bp, Homo sapien
cagtctacagaataatgatggacgt

SEQ ID NO: 5557282 - DNA, 25 bp, Homo sapien
ctggttgaactaataaatgtgaatc

SEQ ID NO: 5557283 - DNA, 25 bp, Homo sapien
aatgatggacgttatgaacaatact

SEQ ID NO: 5557284 - DNA, 25 bp, Homo sapien
gctacaggtatgtaactggttgaac

SEQ ID NO: 5557285 - DNA, 25 bp, Homo sapien
aaggatctaaaataggagagaacat

SEQ ID NO: 5557286 - DNA, 25 bp, Homo sapien
ggacgacggaggctcctcttagtaa

SEQ ID NO: 5557287 - DNA, 25 bp, Homo sapien
ctcagcttcaagagccttcgcaggc

SEQ ID NO: 5557288 - DNA, 25 bp, Homo sapien
ctggtatccctgggaagctcagctt

SEQ ID NO: 5557289 - DNA, 25 bp, Homo sapien
cgtcccccagtcagggggaacttgc

SEQ ID NO: 5557290 - DNA, 25 bp, Homo sapien
gcacgagagtgtcccttctggtatc

SEQ ID NO: 5557291 - DNA, 25 bp, Homo sapien
gtgcgctgcaccaagcttcccgctc

SEQ ID NO: 5557292 - DNA, 25 bp, Homo sapien
aacatgggatcccacgtctggagag

SEQ ID NO: 5557293 - DNA, 25 bp, Homo sapien
ggggagatttctggaaaatgcgtgt

SEQ ID NO: 5557294 - DNA, 25 bp, Homo sapien
ttccctagccggaattgcacgagag

SEQ ID NO: 5557295 - DNA, 25 bp, Homo sapien
ccccctctaccggaccttggtgcgc

SEQ ID NO: 5557296 - DNA, 25 bp, Homo sapien
ccaagcttcccgctcggagcaaggg

SEQ ID NO: 5557297 - DNA, 25 bp, Homo sapien
gtcacaatcccatgccacaaactac

SEQ ID NO: 5557298 - DNA, 25 bp, Homo sapien
ggattattgtttctagaggctgggg

SEQ ID NO: 5557299 - DNA, 25 bp, Homo sapien
tttccaagaattacagcatgagata

SEQ ID NO: 5557300 - DNA, 25 bp, Homo sapien
taggagagatataaagataaaactg

SEQ ID NO: 5557301 - DNA, 25 bp, Homo sapien
gaagatgaggaaacctaggatatgt

SEQ ID NO: 5557302 - DNA, 25 bp, Homo sapien
gatgagaattctgcacttgagctac

SEQ ID NO: 5557303 - DNA, 25 bp, Homo sapien
aaaggggcaaattttatggcttgtg

SEQ ID NO: 5557304 - DNA, 25 bp, Homo sapien
atcaggtaaagtgtttaggagagat

SEQ ID NO: 5557305 - DNA, 25 bp, Homo sapien
ctggtatggagtttctaggtagatg

SEQ ID NO: 5557306 - DNA, 25 bp, Homo sapien
tatttatgtgtatgccaggctcttc

SEQ ID NO: 5557307 - DNA, 25 bp, Homo sapien
aaagtaaggtcatgaatgtatcaaa

SEQ ID NO: 5557308 - DNA, 25 bp, Homo sapien
tacaataggtcatttggagagtcaa

SEQ ID NO: 5557309 - DNA, 25 bp, Homo sapien
tcaaccaccagaaaagtatttagaa

SEQ ID NO: 5557310 - DNA, 25 bp, Homo sapien
aataactgttaaagcaaaagtgttc

SEQ ID NO: 5557311 - DNA, 25 bp, Homo sapien
accaaacagagtgtacctgaacaat

SEQ ID NO: 5557312 - DNA, 25 bp, Homo sapien
tctcagatcatagttacaatagctc

SEQ ID NO: 5557313 - DNA, 25 bp, Homo sapien
agaataatcaaccaccagaaaagta

SEQ ID NO: 5557314 - DNA, 25 bp, Homo sapien
tatacaacactgacctacaataggt

SEQ ID NO: 5557315 - DNA, 25 bp, Homo sapien
aaattcccaccaaaccagcttcgtc

SEQ ID NO: 5557316 - DNA, 25 bp, Homo sapien
ggagccagatcaaaggccacaatga

SEQ ID NO: 5557317 - DNA, 25 bp, Homo sapien
aggccacaatgagggaaaattttaa

SEQ ID NO: 5557318 - DNA, 25 bp, Homo sapien
acaaaataatcaatagtgctaataa

SEQ ID NO: 5557319 - DNA, 25 bp, Homo sapien
aaagtgatgatgatgacttgaggga

SEQ ID NO: 5557320 - DNA, 25 bp, Homo sapien
ttctgaaatgagagacagcaagatt

SEQ ID NO: 5557321 - DNA, 25 bp, Homo sapien
catttaagggattcagagcaagaga

SEQ ID NO: 5557322 - DNA, 25 bp, Homo sapien
agagaagacagaatagatttgaagg

SEQ ID NO: 5557323 - DNA, 25 bp, Homo sapien
gcctgaagccagtgaagtctgttaa

SEQ ID NO: 5557324 - DNA, 25 bp, Homo sapien
gatatgggggttgaaaatatgaata

SEQ ID NO: 5557325 - DNA, 25 bp, Homo sapien
gagtggtgaagagtcaataatgaca

SEQ ID NO: 5557326 - DNA, 25 bp, Homo sapien
ttacagtaacccagaaaagtgatga

SEQ ID NO: 5557327 - DNA, 25 bp, Homo sapien
acttgagggagagtaattataggat

SEQ ID NO: 5557328 - DNA, 25 bp, Homo sapien
gacagcaagattgacagtgagcaaa

SEQ ID NO: 5557329 - DNA, 25 bp, Homo sapien
aataaaacaaatggtgcctgaagcc

SEQ ID NO: 5557330 - DNA, 25 bp, Homo sapien
acatctctgtggcagggaaacaaat

SEQ ID NO: 5557331 - DNA, 25 bp, Homo sapien
cctgccagtttgtgagaggcagctg

SEQ ID NO: 5557332 - DNA, 25 bp, Homo sapien
taaaattatgagagaactgcagctg

SEQ ID NO: 5557333 - DNA, 25 bp, Homo sapien
ggcagacacatggatccactaattc

SEQ ID NO: 5557334 - DNA, 25 bp, Homo sapien
attacagatgatggtacaagtgatc

SEQ ID NO: 5557335 - DNA, 25 bp, Homo sapien
gccctctgagagcttccagtctagc

SEQ ID NO: 5557336 - DNA, 25 bp, Homo sapien
tacaagtgatcaaggaaaggtaatg

SEQ ID NO: 5557337 - DNA, 25 bp, Homo sapien
tagctgtggttaagtgagattattt

SEQ ID NO: 5557338 - DNA, 25 bp, Homo sapien
agaagcctctgaagaagtgacattt

SEQ ID NO: 5557339 - DNA, 25 bp, Homo sapien
gagaggcagctgttgcttagtgatc

SEQ ID NO: 5557340 - DNA, 25 bp, Homo sapien
ctgacttgtgctgtcaagaagcctc

SEQ ID NO: 5557341 - DNA, 25 bp, Homo sapien
cctgtggcggagaggtttggaccct

SEQ ID NO: 5557342 - DNA, 25 bp, Homo sapien
agggtccaaacctctccgccacagg

SEQ ID NO: 5557343 - DNA, 25 bp, Homo sapien
ggagaggacactgcatgtccagatg

SEQ ID NO: 5557344 - DNA, 25 bp, Homo sapien
cacctggccataagtcagagaaggg

SEQ ID NO: 5557345 - DNA, 25 bp, Homo sapien
caggcgggtcctaccttcaacgaca

SEQ ID NO: 5557346 - DNA, 25 bp, Homo sapien
gggcacgcaaaatgatacctccacc

SEQ ID NO: 5557347 - DNA, 25 bp, Homo sapien
acattacgttctgggaagacggcta

SEQ ID NO: 5557348 - DNA, 25 bp, Homo sapien
tcaacaatataaagcgcagggagct

SEQ ID NO: 5557349 - DNA, 25 bp, Homo sapien
tcagcatgacggatttaagacacat

SEQ ID NO: 5557350 - DNA, 25 bp, Homo sapien
atcaaggtactagtgccatcagctc

SEQ ID NO: 5557351 - DNA, 25 bp, Homo sapien
gtgacctcacttgataaaagggcct

SEQ ID NO: 5557352 - DNA, 25 bp, Homo sapien
aaccagcagcagttatcgctcccac

SEQ ID NO: 5557353 - DNA, 25 bp, Homo sapien
gattatcctaggtttcaggcgggtc

SEQ ID NO: 5557354 - DNA, 25 bp, Homo sapien
gtgctacagagaatgtcatcttggc

SEQ ID NO: 5557355 - DNA, 25 bp, Homo sapien
caagattggcaaatttaataggtta

SEQ ID NO: 5557356 - DNA, 25 bp, Homo sapien
actaaagagttttatgtgatcattc

SEQ ID NO: 5557357 - DNA, 25 bp, Homo sapien
taaacaaatgaagtagagtaataat

SEQ ID NO: 5557358 - DNA, 25 bp, Homo sapien
agtattagacttgcaaagcacttgc

SEQ ID NO: 5557359 - DNA, 25 bp, Homo sapien
taataatatacagcactcctccttc

SEQ ID NO: 5557360 - DNA, 25 bp, Homo sapien
ttaaaatagtgctacagagaatgtc

SEQ ID NO: 5557361 - DNA, 25 bp, Homo sapien
ttactctagcaagtagtataaacaa

SEQ ID NO: 5557362 - DNA, 25 bp, Homo sapien
atttaagccaaaaagttcaaacatc

SEQ ID NO: 5557363 - DNA, 25 bp, Homo sapien
aaaaatgcacattctaagggcatgt

SEQ ID NO: 5557364 - DNA, 25 bp, Homo sapien
aattgtgtagagtttttcatgtatt

SEQ ID NO: 5557365 - DNA, 25 bp, Homo sapien
ttgtggaaacaatggtcgtgtccgt

SEQ ID NO: 5557366 - DNA, 25 bp, Homo sapien
acggacacgaccattgtttccacaa

SEQ ID NO: 5557367 - DNA, 25 bp, Homo sapien
ttctatgcgtgaaaggcccttccta

SEQ ID NO: 5557368 - DNA, 25 bp, Homo sapien
agaagacagaatcaggagttctgtg

SEQ ID NO: 5557369 - DNA, 25 bp, Homo sapien
gccagagccctctagaaggttgctg

SEQ ID NO: 5557370 - DNA, 25 bp, Homo sapien
ttggaagcatcaattagaagactgc

SEQ ID NO: 5557371 - DNA, 25 bp, Homo sapien
acaagaaagcagctatggtatattt

SEQ ID NO: 5557372 - DNA, 25 bp, Homo sapien
aagctatctgcccagccagagccct

SEQ ID NO: 5557373 - DNA, 25 bp, Homo sapien
ccggtctatcagatgaacagaattc

SEQ ID NO: 5557374 - DNA, 25 bp, Homo sapien
tctctcaaaggccactgacaagaaa

SEQ ID NO: 5557375 - DNA, 25 bp, Homo sapien
tagaagactgcggcaatttgtcctt

SEQ ID NO: 5557376 - DNA, 25 bp, Homo sapien
gggcttggggctattttacactgga

SEQ ID NO: 5557377 - DNA, 25 bp, Homo sapien
attgccccgcactccctcaccccta

SEQ ID NO: 5557378 - DNA, 25 bp, Homo sapien
ctaacataatggtgcctttctgtac

SEQ ID NO: 5557379 - DNA, 25 bp, Homo sapien
gacaggatttggaaacaaggccaaa

SEQ ID NO: 5557380 - DNA, 25 bp, Homo sapien
cttttaaatgagccacagaagtgct

SEQ ID NO: 5557381 - DNA, 25 bp, Homo sapien
aactttaagccaccagaaatctttc

SEQ ID NO: 5557382 - DNA, 25 bp, Homo sapien
tgaaataacagcctactccagtttc

SEQ ID NO: 5557383 - DNA, 25 bp, Homo sapien
ttatagaaatgcactcagaagtaac

SEQ ID NO: 5557384 - DNA, 25 bp, Homo sapien
ctcagaagtaacagacacacaaggt

SEQ ID NO: 5557385 - DNA, 25 bp, Homo sapien
tttttataagagtggtcaggaagtg

SEQ ID NO: 5557386 - DNA, 25 bp, Homo sapien
gtaatgacagatttcagagtctgaa

SEQ ID NO: 5557387 - DNA, 25 bp, Homo sapien
caagcacttgattgtaatgacagat

SEQ ID NO: 5557388 - DNA, 25 bp, Homo sapien
aatctttcagctgtgacaagcactt

SEQ ID NO: 5557389 - DNA, 25 bp, Homo sapien
gaggtccaacacagcgtcagaactc

SEQ ID NO: 5557390 - DNA, 25 bp, Homo sapien
ggaacataaatctgacaggtggctc

SEQ ID NO: 5557391 - DNA, 25 bp, Homo sapien
tgctgttgaacaggcacatcgagga

SEQ ID NO: 5557392 - DNA, 25 bp, Homo sapien
ttctcaacttggattgaccggaccc

SEQ ID NO: 5557393 - DNA, 25 bp, Homo sapien
cgggaccagcctgagttgctgtcag

SEQ ID NO: 5557394 - DNA, 25 bp, Homo sapien
gcaaatgtcgtggacatggtgagct

SEQ ID NO: 5557395 - DNA, 25 bp, Homo sapien
ttgctgtcagtcacgtcgcaggaga

SEQ ID NO: 5557396 - DNA, 25 bp, Homo sapien
ggcagagtccgttttgaggctcctg

SEQ ID NO: 5557397 - DNA, 25 bp, Homo sapien
acctgggccatgctcgccatcttca

SEQ ID NO: 5557398 - DNA, 25 bp, Homo sapien
gtggctcgccaggtcacttggagcc

SEQ ID NO: 5557399 - DNA, 25 bp, Homo sapien
gacgagcagccctgaaaactgttcc

SEQ ID NO: 5557400 - DNA, 25 bp, Homo sapien
gtgctgggcttctcaaactatctgt

SEQ ID NO: 5557401 - DNA, 25 bp, Homo sapien
aatctgccttctccgagtccgttac

SEQ ID NO: 5557402 - DNA, 25 bp, Homo sapien
agtggaggcagttttaactccttta

SEQ ID NO: 5557403 - DNA, 25 bp, Homo sapien
agtccgttactctgaagcaaccctt

SEQ ID NO: 5557404 - DNA, 25 bp, Homo sapien
ttagcagtttgatgaatatccttca

SEQ ID NO: 5557405 - DNA, 25 bp, Homo sapien
tgcaccagcatttgttgagtggcag

SEQ ID NO: 5557406 - DNA, 25 bp, Homo sapien
attgcaaccgctcatattcagtcct

SEQ ID NO: 5557407 - DNA, 25 bp, Homo sapien
tacaagtgatacaatacagagttcc

SEQ ID NO: 5557408 - DNA, 25 bp, Homo sapien
tcattgttacaaattgcaaccgctc

SEQ ID NO: 5557409 - DNA, 25 bp, Homo sapien
atccatagcagactcacacatttgt

SEQ ID NO: 5557410 - DNA, 25 bp, Homo sapien
atattcagtcctaagcaagtttttc

SEQ ID NO: 5557411 - DNA, 25 bp, Homo sapien
atttgggtcttgaaatgtccagttt

SEQ ID NO: 5557412 - DNA, 25 bp, Homo sapien
tttgatccaagtgtagcacctatgc

SEQ ID NO: 5557413 - DNA, 25 bp, Homo sapien
tcatggcaattgatacagtgacttt

SEQ ID NO: 5557414 - DNA, 25 bp, Homo sapien
ccaaggaagacggtcccttttatca

SEQ ID NO: 5557415 - DNA, 25 bp, Homo sapien
tgggtgcaggattctttatctcagg

SEQ ID NO: 5557416 - DNA, 25 bp, Homo sapien
gtactgtcttctggggactatgtcc

SEQ ID NO: 5557417 - DNA, 25 bp, Homo sapien
agcacctatgcatgggataaaaaat

SEQ ID NO: 5557418 - DNA, 25 bp, Homo sapien
caaaggggttcactaaatccaagga

SEQ ID NO: 5557419 - DNA, 25 bp, Homo sapien
cactcaaactggtcctgctgcctta

SEQ ID NO: 5557420 - DNA, 25 bp, Homo sapien
aatcggtagattcaggtccctcaag

SEQ ID NO: 5557421 - DNA, 25 bp, Homo sapien
tgctgccttaagatgaatcggtaga

SEQ ID NO: 5557422 - DNA, 25 bp, Homo sapien
gcataactcggcttagggctagtcg

SEQ ID NO: 5557423 - DNA, 25 bp, Homo sapien
tggaggaaaagtggccgccatttta

SEQ ID NO: 5557424 - DNA, 25 bp, Homo sapien
cctaccgctttggcagagaatgact

SEQ ID NO: 5557425 - DNA, 25 bp, Homo sapien
tgctaagttaaactagggaggcaag

SEQ ID NO: 5557426 - DNA, 25 bp, Homo sapien
gggccgcggatacctgctttgattt

SEQ ID NO: 5557427 - DNA, 25 bp, Homo sapien
ccttagcccatcggggtatcggata

SEQ ID NO: 5557428 - DNA, 25 bp, Homo sapien
catcggagcttcggatacctgcttt

SEQ ID NO: 5557429 - DNA, 25 bp, Homo sapien
agttaagctaagggcgtgttcagat

SEQ ID NO: 5557430 - DNA, 25 bp, Homo sapien
gctgctgatcatttggtggtgtgtg

SEQ ID NO: 5557431 - DNA, 25 bp, Homo sapien
ggtgtgtgagtgtacctaccgcttt

SEQ ID NO: 5557432 - DNA, 25 bp, Homo sapien
tccttgcccatcggggcctcggata

SEQ ID NO: 5557433 - DNA, 25 bp, Homo sapien
taggtagagaaaatagacttcatcg

SEQ ID NO: 5557434 - DNA, 25 bp, Homo sapien
cgatgaagtctattttctctaccta

SEQ ID NO: 5557435 - DNA, 25 bp, Homo sapien
cctaggggccatatccccttaagga

SEQ ID NO: 5557436 - DNA, 25 bp, Homo sapien
tgtcagatttttcatgggaagcttc

SEQ ID NO: 5557437 - DNA, 25 bp, Homo sapien
gcagatcctagctcacgacaacctc

SEQ ID NO: 5557438 - DNA, 25 bp, Homo sapien
gcacaaattccacaaagggggagaa

SEQ ID NO: 5557439 - DNA, 25 bp, Homo sapien
ctgggattacagctctctttctgag

SEQ ID NO: 5557440 - DNA, 25 bp, Homo sapien
tactgcacaaattccacaaaggggg

SEQ ID NO: 5557441 - DNA, 25 bp, Homo sapien
gttttccacagagctttggagcagc

SEQ ID NO: 5557442 - DNA, 25 bp, Homo sapien
ttggagcagcatttactgcacaaat

SEQ ID NO: 5557443 - DNA, 25 bp, Homo sapien
ttatctctaggtattccaaagaatt

SEQ ID NO: 5557444 - DNA, 25 bp, Homo sapien
agtggcagatcctagctcacgacaa

SEQ ID NO: 5557445 - DNA, 25 bp, Homo sapien
aatttgtggaatttacttaatgctt

SEQ ID NO: 5557446 - DNA, 25 bp, Homo sapien
ggccccggcctcacagcggaccgag

SEQ ID NO: 5557447 - DNA, 25 bp, Homo sapien
ctcggtccgctgtgaggccggggcc

SEQ ID NO: 5557448 - DNA, 25 bp, Homo sapien
atattcgttgatgggtgagtgtttt

SEQ ID NO: 5557449 - DNA, 25 bp, Homo sapien
ttgggagactagcttccacataagt

SEQ ID NO: 5557450 - DNA, 25 bp, Homo sapien
ttcttcacaagagcagaaaggacaa

SEQ ID NO: 5557451 - DNA, 25 bp, Homo sapien
tcactgataggtaaattaggtcatt

SEQ ID NO: 5557452 - DNA, 25 bp, Homo sapien
aaaggcaccagaaaataaagctttc

SEQ ID NO: 5557453 - DNA, 25 bp, Homo sapien
atcatcgataaatgagagaagagtc

SEQ ID NO: 5557454 - DNA, 25 bp, Homo sapien
aatgagagaagagtctatattcgtt

SEQ ID NO: 5557455 - DNA, 25 bp, Homo sapien
taaatggatattttggagttcgttc

SEQ ID NO: 5557456 - DNA, 25 bp, Homo sapien
aatggaaaaagaggatcatcgataa

SEQ ID NO: 5557457 - DNA, 25 bp, Homo sapien
aaacagaagaatgatatgactccat

SEQ ID NO: 5557458 - DNA, 25 bp, Homo sapien
gacagctcctgagaaaaaaactggt

SEQ ID NO: 5557459 - DNA, 25 bp, Homo sapien
ttgcccttgcaaaacaggaacccaa

SEQ ID NO: 5557460 - DNA, 25 bp, Homo sapien
atagcagaaattgcctcagcagcac

SEQ ID NO: 5557461 - DNA, 25 bp, Homo sapien
ggaacccaaacagagcaatgaagta

SEQ ID NO: 5557462 - DNA, 25 bp, Homo sapien
attatagaagcagtagcacttttac

SEQ ID NO: 5557463 - DNA, 25 bp, Homo sapien
aacaaacccaaggaagttcagagga

SEQ ID NO: 5557464 - DNA, 25 bp, Homo sapien
gcaatgaagtaaaataaggctcttg

SEQ ID NO: 5557465 - DNA, 25 bp, Homo sapien
gctctcaggagcatgggattatata

SEQ ID NO: 5557466 - DNA, 25 bp, Homo sapien
gtggctggaaaatagaatgctataa

SEQ ID NO: 5557467 - DNA, 25 bp, Homo sapien
aagttcagaggaacgaatagcagaa

SEQ ID NO: 5557468 - DNA, 25 bp, Homo sapien
agagctgaggaccacatttgtggct

SEQ ID NO: 5557469 - DNA, 25 bp, Homo sapien
tagggaagtccaaattatagaagca

SEQ ID NO: 5557470 - DNA, 25 bp, Homo sapien
tctgctttcagagctcaaatgctaa

SEQ ID NO: 5557471 - DNA, 25 bp, Homo sapien
gaaatgagctgcattacataatgtt

SEQ ID NO: 5557472 - DNA, 25 bp, Homo sapien
ctttgttaggtcgagatcattttac

SEQ ID NO: 5557473 - DNA, 25 bp, Homo sapien
aatggaacagaccctttgttaggtc

SEQ ID NO: 5557474 - DNA, 25 bp, Homo sapien
aatccaggattatggtaatagtcta

SEQ ID NO: 5557475 - DNA, 25 bp, Homo sapien
ctgaacatcaaaacctctgagaatc

SEQ ID NO: 5557476 - DNA, 25 bp, Homo sapien
ggtcgagatcattttactagagttc

SEQ ID NO: 5557477 - DNA, 25 bp, Homo sapien
gaacatggtccgtcagtactgaaca

SEQ ID NO: 5557478 - DNA, 25 bp, Homo sapien
ggtaatagtctatataatggaacag

SEQ ID NO: 5557479 - DNA, 25 bp, Homo sapien
aacccagttgaaataatccaggatt

SEQ ID NO: 5557480 - DNA, 25 bp, Homo sapien
ttctataactagttggtcaagaaat

SEQ ID NO: 5557481 - DNA, 25 bp, Homo sapien
gagtgttttgtgagcttggatcttt

SEQ ID NO: 5557482 - DNA, 25 bp, Homo sapien
tcgatgaaatggcgccattgcgttc

SEQ ID NO: 5557483 - DNA, 25 bp, Homo sapien
gagtaacggttttatctgggtctgc

SEQ ID NO: 5557484 - DNA, 25 bp, Homo sapien
atatcgtttcgaggtggatttggag

SEQ ID NO: 5557485 - DNA, 25 bp, Homo sapien
ggatctttagagtcctgcgcacctc

SEQ ID NO: 5557486 - DNA, 25 bp, Homo sapien
aagatatcaccacccagggcgtcgg

SEQ ID NO: 5557487 - DNA, 25 bp, Homo sapien
atcaagaagtagaagtggttaacta

SEQ ID NO: 5557488 - DNA, 25 bp, Homo sapien
cgcacctcattaaaggcgctcagcc

SEQ ID NO: 5557489 - DNA, 25 bp, Homo sapien
gtcagtaaaacgacagatgaaccgc

SEQ ID NO: 5557490 - DNA, 25 bp, Homo sapien
ggcccggtttcagagaagatatcac

SEQ ID NO: 5557491 - DNA, 25 bp, Homo sapien
agatgaaccgcggcaaaataaacat

SEQ ID NO: 5557492 - DNA, 25 bp, Homo sapien
aatcaaggaccaagggataatcaaa

SEQ ID NO: 5557493 - DNA, 25 bp, Homo sapien
taactgacagaattagaaggagaat

SEQ ID NO: 5557494 - DNA, 25 bp, Homo sapien
atgcacttgactacagaaccactac

SEQ ID NO: 5557495 - DNA, 25 bp, Homo sapien
aaccaagtacatttgaaaaagaaca

SEQ ID NO: 5557496 - DNA, 25 bp, Homo sapien
ctaggatttgaacaagacaataagc

SEQ ID NO: 5557497 - DNA, 25 bp, Homo sapien
aataaaacaatcaaggaccaaggga

SEQ ID NO: 5557498 - DNA, 25 bp, Homo sapien
agaaaatagacaagctgactaaaca

SEQ ID NO: 5557499 - DNA, 25 bp, Homo sapien
aatgacaagagaatgctgtgtaact

SEQ ID NO: 5557500 - DNA, 25 bp, Homo sapien
catttgacacagaaaacatcccttc

SEQ ID NO: 5557501 - DNA, 25 bp, Homo sapien
ttcaaagcacacgttggacaatttc

SEQ ID NO: 5557502 - DNA, 25 bp, Homo sapien
aggaacataactacaaaaagggaga

SEQ ID NO: 5557503 - DNA, 25 bp, Homo sapien
tgtagtcgcggcctacaccccggtg

SEQ ID NO: 5557504 - DNA, 25 bp, Homo sapien
caccggggtgtaggccgcgactaca

SEQ ID NO: 5557505 - DNA, 25 bp, Homo sapien
agtgtagagctaaaaataaaccatc

SEQ ID NO: 5557506 - DNA, 25 bp, Homo sapien
acaatgtgcacagcagaagaatcaa

SEQ ID NO: 5557507 - DNA, 25 bp, Homo sapien
cacagtagactacatgcaacaagga

SEQ ID NO: 5557508 - DNA, 25 bp, Homo sapien
tgactcacaggagtgtaactgggaa

SEQ ID NO: 5557509 - DNA, 25 bp, Homo sapien
gcaacaaggaccaatacaatgtgca

SEQ ID NO: 5557510 - DNA, 25 bp, Homo sapien
aataagacacaagaactatgggttt

SEQ ID NO: 5557511 - DNA, 25 bp, Homo sapien
taaaatcggaaaacacacagtagac

SEQ ID NO: 5557512 - DNA, 25 bp, Homo sapien
tacagtaacatggaggagccataca

SEQ ID NO: 5557513 - DNA, 25 bp, Homo sapien
tgcatattagcatacaaaaggtagc

SEQ ID NO: 5557514 - DNA, 25 bp, Homo sapien
aacaaggattgaaacctggaatgct

SEQ ID NO: 5557515 - DNA, 25 bp, Homo sapien
gtgctggcagatatatacagtaaca

SEQ ID NO: 5557516 - DNA, 25 bp, Homo sapien
tagggactaagttctttgcaggtag

SEQ ID NO: 5557517 - DNA, 25 bp, Homo sapien
ctgggtgacagtgttctttctactc

SEQ ID NO: 5557518 - DNA, 25 bp, Homo sapien
caagtgggcataactgtattccaat

SEQ ID NO: 5557519 - DNA, 25 bp, Homo sapien
tctgacctataacaagtaacacttc

SEQ ID NO: 5557520 - DNA, 25 bp, Homo sapien
cttaaaagtttagaacaggttggca

SEQ ID NO: 5557521 - DNA, 25 bp, Homo sapien
catcagaatcaggagctttatcgtc

SEQ ID NO: 5557522 - DNA, 25 bp, Homo sapien
taagacaattccaggtgcagtagcc

SEQ ID NO: 5557523 - DNA, 25 bp, Homo sapien
ttgcaggtaggtgccattttgctac

SEQ ID NO: 5557524 - DNA, 25 bp, Homo sapien
tgatacccatcagaatcaggagctt

SEQ ID NO: 5557525 - DNA, 25 bp, Homo sapien
cagtggggttgtaacctgtagtttg

SEQ ID NO: 5557526 - DNA, 25 bp, Homo sapien
aacagattaagacaattccaggtgc

SEQ ID NO: 5557527 - DNA, 25 bp, Homo sapien
agataggaaggacgctgcttttatg

SEQ ID NO: 5557528 - DNA, 25 bp, Homo sapien
atccagcgcccctgacctgctctgt

SEQ ID NO: 5557529 - DNA, 25 bp, Homo sapien
gccccacttggcctcagtcagcatg

SEQ ID NO: 5557530 - DNA, 25 bp, Homo sapien
gagctgttcaccacatcagcctggc

SEQ ID NO: 5557531 - DNA, 25 bp, Homo sapien
cagtcagcatggcttggctctgagg

SEQ ID NO: 5557532 - DNA, 25 bp, Homo sapien
tcctctgcagctatgcctgtgtctt

SEQ ID NO: 5557533 - DNA, 25 bp, Homo sapien
ccttgtagtccactccagcctagcc

SEQ ID NO: 5557534 - DNA, 25 bp, Homo sapien
cttttctggagagttccgaccctgt

SEQ ID NO: 5557535 - DNA, 25 bp, Homo sapien
ccaccaaagtccctccgtggcaggc

SEQ ID NO: 5557536 - DNA, 25 bp, Homo sapien
agaggacaggttaagccccctcagt

SEQ ID NO: 5557537 - DNA, 25 bp, Homo sapien
ctgcatcctgcacggcacttccctc

SEQ ID NO: 5557538 - DNA, 25 bp, Homo sapien
agagatcatcgtagaaccggaaaca

SEQ ID NO: 5557539 - DNA, 25 bp, Homo sapien
ggaatcccaggaactatgaatcaga

SEQ ID NO: 5557540 - DNA, 25 bp, Homo sapien
tatatgaaagtgaaacctaagtagc

SEQ ID NO: 5557541 - DNA, 25 bp, Homo sapien
tgaaacctaagtagcacctatatcc

SEQ ID NO: 5557542 - DNA, 25 bp, Homo sapien
accggaaacatgggaatcccaggaa

SEQ ID NO: 5557543 - DNA, 25 bp, Homo sapien
actcgctcaactccatcactgactc

SEQ ID NO: 5557544 - DNA, 25 bp, Homo sapien
gtcatagcaccaccgaaatttactc

SEQ ID NO: 5557545 - DNA, 25 bp, Homo sapien
aatcttggattgaagataatgtgtt

SEQ ID NO: 5557546 - DNA, 25 bp, Homo sapien
ccgttttctggtaatgtcatagcac

SEQ ID NO: 5557547 - DNA, 25 bp, Homo sapien
ctgaaacagtctccctggagcaacc

SEQ ID NO: 5557548 - DNA, 25 bp, Homo sapien
tcagaacagacaacaatagtaatac

SEQ ID NO: 5557549 - DNA, 25 bp, Homo sapien
ttagagctgaacgagactcttgcac

SEQ ID NO: 5557550 - DNA, 25 bp, Homo sapien
ctagttcgtccggtttaaatggtca

SEQ ID NO: 5557551 - DNA, 25 bp, Homo sapien
aaagaaagcaaacctatttagagct

SEQ ID NO: 5557552 - DNA, 25 bp, Homo sapien
atattctaagacagtacaaatgcaa

SEQ ID NO: 5557553 - DNA, 25 bp, Homo sapien
atgggcactgtaactaaaagaaagc

SEQ ID NO: 5557554 - DNA, 25 bp, Homo sapien
taggcaatttcaaaatgggcactgt

SEQ ID NO: 5557555 - DNA, 25 bp, Homo sapien
agcatgcctacaaagagagaatggt

SEQ ID NO: 5557556 - DNA, 25 bp, Homo sapien
gaacgagactcttgcactgggtttt

SEQ ID NO: 5557557 - DNA, 25 bp, Homo sapien
ttgaacatgaagagtgaaaattaaa

SEQ ID NO: 5557558 - DNA, 25 bp, Homo sapien
tggtgctgagatattatgaaaggaa

SEQ ID NO: 5557559 - DNA, 25 bp, Homo sapien
gcctacaaagagagaatggtaattc

SEQ ID NO: 5557560 - DNA, 25 bp, Homo sapien
ggtctcttgtgaaaagtattagctc

SEQ ID NO: 5557561 - DNA, 25 bp, Homo sapien
tcaaagcctctcagcatactaaaat

SEQ ID NO: 5557562 - DNA, 25 bp, Homo sapien
tgaatgactctaggaaggagtggta

SEQ ID NO: 5557563 - DNA, 25 bp, Homo sapien
taaaaatgtaagcaagtgatgcttt

SEQ ID NO: 5557564 - DNA, 25 bp, Homo sapien
gtaattcaaatgagcatgtttctgc

SEQ ID NO: 5557565 - DNA, 25 bp, Homo sapien
ctccaccacaagtagaccctagggc

SEQ ID NO: 5557566 - DNA, 25 bp, Homo sapien
tatgcagaacatattaggcattcac

SEQ ID NO: 5557567 - DNA, 25 bp, Homo sapien
agtggtacagtgaattcaaagcctc

SEQ ID NO: 5557568 - DNA, 25 bp, Homo sapien
tactaaacaaagacctgagaagcat

SEQ ID NO: 5557569 - DNA, 25 bp, Homo sapien
aaagacctgagaagcatgtaatttc

SEQ ID NO: 5557570 - DNA, 25 bp, Homo sapien
ctttaccggccgcattagaaagatt

SEQ ID NO: 5557571 - DNA, 25 bp, Homo sapien
tctgccaatcagtggtcccctctgc

SEQ ID NO: 5557572 - DNA, 25 bp, Homo sapien
aaatgttaacagctggataaacggt

SEQ ID NO: 5557573 - DNA, 25 bp, Homo sapien
tgaacgtagggaagttttctgccaa

SEQ ID NO: 5557574 - DNA, 25 bp, Homo sapien
cagctggataaacggtaaaatatgc

SEQ ID NO: 5557575 - DNA, 25 bp, Homo sapien
catgtctagctataagaccagattt

SEQ ID NO: 5557576 - DNA, 25 bp, Homo sapien
cagaatcgcttcccattacagtaca

SEQ ID NO: 5557577 - DNA, 25 bp, Homo sapien
acagaacatcaatggtttggggacc

SEQ ID NO: 5557578 - DNA, 25 bp, Homo sapien
aggtaaatacctggctctttcagct

SEQ ID NO: 5557579 - DNA, 25 bp, Homo sapien
ggaggtattttccacacagtgatac

SEQ ID NO: 5557580 - DNA, 25 bp, Homo sapien
atctaacaactgaacgtagggaagt

SEQ ID NO: 5557581 - DNA, 25 bp, Homo sapien
tttggggaccatcatcatgtctagc

SEQ ID NO: 5557582 - DNA, 25 bp, Homo sapien
cacgttggtgccgctttaagagagg

SEQ ID NO: 5557583 - DNA, 25 bp, Homo sapien
tgtctctctcacgttggtgccgctt

SEQ ID NO: 5557584 - DNA, 25 bp, Homo sapien
tcttcgatgtacaatggaacagaac

SEQ ID NO: 5557585 - DNA, 25 bp, Homo sapien
tgagtctttcccagcgaaaagattc

SEQ ID NO: 5557586 - DNA, 25 bp, Homo sapien
agcgaaaagattcttgtctgggttc

SEQ ID NO: 5557587 - DNA, 25 bp, Homo sapien
gtacaatggaacagaacatcagacc

SEQ ID NO: 5557588 - DNA, 25 bp, Homo sapien
gaacatcagacccagatggctctgg

SEQ ID NO: 5557589 - DNA, 25 bp, Homo sapien
ctgtgcaaacaaggatatctgagtc

SEQ ID NO: 5557590 - DNA, 25 bp, Homo sapien
cttgtctgggttccagagtttccct

SEQ ID NO: 5557591 - DNA, 25 bp, Homo sapien
tgcactacacacaagagtataatat

SEQ ID NO: 5557592 - DNA, 25 bp, Homo sapien
caccagtcctgtgcaaacaaggata

SEQ ID NO: 5557593 - DNA, 25 bp, Homo sapien
aaactcttaagtcattagcatatta

SEQ ID NO: 5557594 - DNA, 25 bp, Homo sapien
gaggactaaaacagttcttgtcgat

SEQ ID NO: 5557595 - DNA, 25 bp, Homo sapien
tctaagctaccacataattccaaac

SEQ ID NO: 5557596 - DNA, 25 bp, Homo sapien
cattactatataaaaatacgcaaat

SEQ ID NO: 5557597 - DNA, 25 bp, Homo sapien
ctcaaaacattcctcaaaaagtctc

SEQ ID NO: 5557598 - DNA, 25 bp, Homo sapien
ataattccaaacaatccacacaacc

SEQ ID NO: 5557599 - DNA, 25 bp, Homo sapien
tcaaaaagtctcaacaaccagtatc

SEQ ID NO: 5557600 - DNA, 25 bp, Homo sapien
aaaatacgcaaattaaaagcatctt

SEQ ID NO: 5557601 - DNA, 25 bp, Homo sapien
ttgaatcatgctaccaatcactatt

SEQ ID NO: 5557602 - DNA, 25 bp, Homo sapien
atccacacaaccaagaaaactactc

SEQ ID NO: 5557603 - DNA, 25 bp, Homo sapien
gtatcatatgaggactaaaacagtt

SEQ ID NO: 5557604 - DNA, 25 bp, Homo sapien
aatcaattctgtggggttagagact

SEQ ID NO: 5557605 - DNA, 25 bp, Homo sapien
tcttgtagagatatggtagtcagtg

SEQ ID NO: 5557606 - DNA, 25 bp, Homo sapien
gcaggtaagtgctaggtcttttaat

SEQ ID NO: 5557607 - DNA, 25 bp, Homo sapien
acacagctgctgaaccacaacgagt

SEQ ID NO: 5557608 - DNA, 25 bp, Homo sapien
aatagctgtttacggttatgtcctc

SEQ ID NO: 5557609 - DNA, 25 bp, Homo sapien
gttagagactcatcccagcaggtaa

SEQ ID NO: 5557610 - DNA, 25 bp, Homo sapien
cattggcctttgactacctggaata

SEQ ID NO: 5557611 - DNA, 25 bp, Homo sapien
taaaaagctgacaagacctatattt

SEQ ID NO: 5557612 - DNA, 25 bp, Homo sapien
tacaacccaagaagatagctgttat

SEQ ID NO: 5557613 - DNA, 25 bp, Homo sapien
gtgggacagacgcttaaaaagctga

SEQ ID NO: 5557614 - DNA, 25 bp, Homo sapien
tatgaggtaatgactatacaagtac

SEQ ID NO: 5557615 - DNA, 25 bp, Homo sapien
ttgggaacattactgtagggctaag

SEQ ID NO: 5557616 - DNA, 25 bp, Homo sapien
cacagctatatagagggcacaactc

SEQ ID NO: 5557617 - DNA, 25 bp, Homo sapien
ttgaaaatgcagactggctttagca

SEQ ID NO: 5557618 - DNA, 25 bp, Homo sapien
gaggaatgagacacaggtgttatcc

SEQ ID NO: 5557619 - DNA, 25 bp, Homo sapien
gaattctatgggaagttaagtcgtc

SEQ ID NO: 5557620 - DNA, 25 bp, Homo sapien
agggctaagttggtggacaaatatt

SEQ ID NO: 5557621 - DNA, 25 bp, Homo sapien
tgaaagccttaaatagtgaagaaat

SEQ ID NO: 5557622 - DNA, 25 bp, Homo sapien
ctagaactggcaagattcattatcc

SEQ ID NO: 5557623 - DNA, 25 bp, Homo sapien
tagcatgaatgtcaacacagagcat

SEQ ID NO: 5557624 - DNA, 25 bp, Homo sapien
gtaaaggcagaccagtttgctccca

SEQ ID NO: 5557625 - DNA, 25 bp, Homo sapien
tagagggcacaactcataccccagc

SEQ ID NO: 5557626 - DNA, 25 bp, Homo sapien
ggttacagactaaaactgcaaagac

SEQ ID NO: 5557627 - DNA, 25 bp, Homo sapien
ggatgaaggtgattaagcgttaaaa

SEQ ID NO: 5557628 - DNA, 25 bp, Homo sapien
aagttacacgattacaatgagtttt

SEQ ID NO: 5557629 - DNA, 25 bp, Homo sapien
tgtcagttgaaaaggcctagaagca

SEQ ID NO: 5557630 - DNA, 25 bp, Homo sapien
ctgcaaagacaagtgattaccataa

SEQ ID NO: 5557631 - DNA, 25 bp, Homo sapien
tgaacatcacagacataaaagaagt

SEQ ID NO: 5557632 - DNA, 25 bp, Homo sapien
taccataaaactgaggatgaaggtg

SEQ ID NO: 5557633 - DNA, 25 bp, Homo sapien
gtagcaatgaacatacccagcacgc

SEQ ID NO: 5557634 - DNA, 25 bp, Homo sapien
ggagcttctggggtactagcaaagt

SEQ ID NO: 5557635 - DNA, 25 bp, Homo sapien
acccagcacgcagatcttgatttcc

SEQ ID NO: 5557636 - DNA, 25 bp, Homo sapien
tttagggatgcatggttacagacta

SEQ ID NO: 5557637 - DNA, 25 bp, Homo sapien
acttaaagacctcatcccaactaca

SEQ ID NO: 5557638 - DNA, 25 bp, Homo sapien
tgtagttgggatgaggtctttaagt

SEQ ID NO: 5557639 - DNA, 25 bp, Homo sapien
atggtttctctagtaacaatagtat

SEQ ID NO: 5557640 - DNA, 25 bp, Homo sapien
atactattgttactagagaaaccat

SEQ ID NO: 5557641 - DNA, 25 bp, Homo sapien
aatggtttctctagtaacaatagta

SEQ ID NO: 5557642 - DNA, 25 bp, Homo sapien
tactattgttactagagaaaccatt

SEQ ID NO: 5557643 - DNA, 25 bp, Homo sapien
tggtttctctagtaacaatagtatt

SEQ ID NO: 5557644 - DNA, 25 bp, Homo sapien
aatactattgttactagagaaacca

SEQ ID NO: 5557645 - DNA, 25 bp, Homo sapien
atcacaaagccaagacacagtcaga

SEQ ID NO: 5557646 - DNA, 25 bp, Homo sapien
ttgggctgtgatccttgggaaagcc

SEQ ID NO: 5557647 - DNA, 25 bp, Homo sapien
tcccaggaagtagtgtaactgacct

SEQ ID NO: 5557648 - DNA, 25 bp, Homo sapien
agggaaaataccagtgaagtgagaa

SEQ ID NO: 5557649 - DNA, 25 bp, Homo sapien
acagtcagaacacatcaagcctcag

SEQ ID NO: 5557650 - DNA, 25 bp, Homo sapien
agtgagaaccccaaatcaaggcttg

SEQ ID NO: 5557651 - DNA, 25 bp, Homo sapien
cagggacaaccaagcttaagccaga

SEQ ID NO: 5557652 - DNA, 25 bp, Homo sapien
ctccctacagcggaactccccctag

SEQ ID NO: 5557653 - DNA, 25 bp, Homo sapien
cttggcttgattaggctgctcactc

SEQ ID NO: 5557654 - DNA, 25 bp, Homo sapien
gaatatacattgagggtgagtgttc

SEQ ID NO: 5557655 - DNA, 25 bp, Homo sapien
taactgaccttgaagcaggccagaa

SEQ ID NO: 5557656 - DNA, 25 bp, Homo sapien
gaaatatttacttccaacttatttg

SEQ ID NO: 5557657 - DNA, 25 bp, Homo sapien
caaataagttggaagtaaatatttc

SEQ ID NO: 5557658 - DNA, 25 bp, Homo sapien
tggaataccagggatgataatttga

SEQ ID NO: 5557659 - DNA, 25 bp, Homo sapien
ctttgtgagcatgtcaaatgaagag

SEQ ID NO: 5557660 - DNA, 25 bp, Homo sapien
tttcctgtgtttgaggcgcactgtc

SEQ ID NO: 5557661 - DNA, 25 bp, Homo sapien
gagcagcatccaatcagtatagtta

SEQ ID NO: 5557662 - DNA, 25 bp, Homo sapien
atgtaggctgattttgagcagcatc

SEQ ID NO: 5557663 - DNA, 25 bp, Homo sapien
tatcatagttagaataggaattggt

SEQ ID NO: 5557664 - DNA, 25 bp, Homo sapien
aggcgcactgtcacctcactgtttc

SEQ ID NO: 5557665 - DNA, 25 bp, Homo sapien
cgtaccaaagatggcatgtaggctg

SEQ ID NO: 5557666 - DNA, 25 bp, Homo sapien
gatctcattctgagggtcaggagtc

SEQ ID NO: 5557667 - DNA, 25 bp, Homo sapien
cactgtttctgggttagcttgcttt

SEQ ID NO: 5557668 - DNA, 25 bp, Homo sapien
actttgacagtttggtgtgctgctt

SEQ ID NO: 5557669 - DNA, 25 bp, Homo sapien
caagcagtttttgaggagtgtcctt

SEQ ID NO: 5557670 - DNA, 25 bp, Homo sapien
accagatgcctgaagaatgttttcc

SEQ ID NO: 5557671 - DNA, 25 bp, Homo sapien
gttgacctatggtaaggcaatgacc

SEQ ID NO: 5557672 - DNA, 25 bp, Homo sapien
taacaggtaaagattcaatgccagt

SEQ ID NO: 5557673 - DNA, 25 bp, Homo sapien
ctataggatgaccatgatgttgacc

SEQ ID NO: 5557674 - DNA, 25 bp, Homo sapien
ataagatgggtaagatctgtccagt

SEQ ID NO: 5557675 - DNA, 25 bp, Homo sapien
tctgtccagtgtgtgtcagtcaact

SEQ ID NO: 5557676 - DNA, 25 bp, Homo sapien
ttctgcaattagggcacttgagtgg

SEQ ID NO: 5557677 - DNA, 25 bp, Homo sapien
ttgcctgtaatgttcagggcaggtg

SEQ ID NO: 5557678 - DNA, 25 bp, Homo sapien
ggcaggtgacaatatctggatggtc

SEQ ID NO: 5557679 - DNA, 25 bp, Homo sapien
ttgagtggaattcgtaaaggtctcc

SEQ ID NO: 5557680 - DNA, 25 bp, Homo sapien
ccaaacgcctccagaaaaaagaaca

SEQ ID NO: 5557681 - DNA, 25 bp, Homo sapien
cgcaccaagacagcatctggccttc

SEQ ID NO: 5557682 - DNA, 25 bp, Homo sapien
cagtagccctcgacaagcgagtagt

SEQ ID NO: 5557683 - DNA, 25 bp, Homo sapien
gagaattcctgcaggactcagcctc

SEQ ID NO: 5557684 - DNA, 25 bp, Homo sapien
cgtgcaattctgtgaggttggcctg

SEQ ID NO: 5557685 - DNA, 25 bp, Homo sapien
gaacaggatgcacgtgccccgtgca

SEQ ID NO: 5557686 - DNA, 25 bp, Homo sapien
cataaacgtgtaaccagactccatt

SEQ ID NO: 5557687 - DNA, 25 bp, Homo sapien
tggaaggattgcgaatgtctcccat

SEQ ID NO: 5557688 - DNA, 25 bp, Homo sapien
ctcgcttcctcgaggagctctcagc

SEQ ID NO: 5557689 - DNA, 25 bp, Homo sapien
cgcgatacggactgtgcttgtatta

SEQ ID NO: 5557690 - DNA, 25 bp, Homo sapien
tgcctccaccggctgtggaaggatt

SEQ ID NO: 5557691 - DNA, 25 bp, Homo sapien
tttagttggaattgggtcacctata

SEQ ID NO: 5557692 - DNA, 25 bp, Homo sapien
ttttagacagtggtagattattata

SEQ ID NO: 5557693 - DNA, 25 bp, Homo sapien
agagcagaactgtagatgatgatct

SEQ ID NO: 5557694 - DNA, 25 bp, Homo sapien
cattcttaatgagtgcagcagccaa

SEQ ID NO: 5557695 - DNA, 25 bp, Homo sapien
tcagtagtcttcaccatggcaccac

SEQ ID NO: 5557696 - DNA, 25 bp, Homo sapien
ctagaaagacacaagcatggctaca

SEQ ID NO: 5557697 - DNA, 25 bp, Homo sapien
gcatggctacatatctggagttgtc

SEQ ID NO: 5557698 - DNA, 25 bp, Homo sapien
gcttcaaactgaagggtaggttgag

SEQ ID NO: 5557699 - DNA, 25 bp, Homo sapien
gcagcagccaaatttggttggtaac

SEQ ID NO: 5557700 - DNA, 25 bp, Homo sapien
gttgagctgtgactagaaagacaca

SEQ ID NO: 5557701 - DNA, 25 bp, Homo sapien
agtaataagaaccgagattcaaagc

SEQ ID NO: 5557702 - DNA, 25 bp, Homo sapien
gacaaaaaaccacaaattgtacaca

SEQ ID NO: 5557703 - DNA, 25 bp, Homo sapien
tgtgtacaatttgtggttttttgtc

SEQ ID NO: 5557704 - DNA, 25 bp, Homo sapien
cagaaccttccgtggatccagcctc

SEQ ID NO: 5557705 - DNA, 25 bp, Homo sapien
agtcatcccagtagctcagggccag

SEQ ID NO: 5557706 - DNA, 25 bp, Homo sapien
acatgcgccatgattaagctcctgc

SEQ ID NO: 5557707 - DNA, 25 bp, Homo sapien
ccagcccctgggatgtgtctaagaa

SEQ ID NO: 5557708 - DNA, 25 bp, Homo sapien
tggttctcccatcacagaggggcca

SEQ ID NO: 5557709 - DNA, 25 bp, Homo sapien
tgtggtacagacagtgctgacatca

SEQ ID NO: 5557710 - DNA, 25 bp, Homo sapien
taagaacatgagtggacaaatagat

SEQ ID NO: 5557711 - DNA, 25 bp, Homo sapien
tgtgaccagtcacctgatccagccc

SEQ ID NO: 5557712 - DNA, 25 bp, Homo sapien
ggacaaatagatggactgcccagag

SEQ ID NO: 5557713 - DNA, 25 bp, Homo sapien
gctggctttgagaaatactgacacc

SEQ ID NO: 5557714 - DNA, 25 bp, Homo sapien
tcatcgccctgcagaaaactacccc

SEQ ID NO: 5557715 - DNA, 25 bp, Homo sapien
ggtagctgatccgttaagctcttgc

SEQ ID NO: 5557716 - DNA, 25 bp, Homo sapien
tagcgcctctacagtcacggtggtc

SEQ ID NO: 5557717 - DNA, 25 bp, Homo sapien
gcgcctctacagtcacggtggtcca

SEQ ID NO: 5557718 - DNA, 25 bp, Homo sapien
gtgtagcgcctctacagtcacggtg

SEQ ID NO: 5557719 - DNA, 25 bp, Homo sapien
tgcgtcactgttcgcggagtttggt

SEQ ID NO: 5557720 - DNA, 25 bp, Homo sapien
tgatccgttaagctcttgcggtagc

SEQ ID NO: 5557721 - DNA, 25 bp, Homo sapien
gggtctgcgtcactgttcgcggagt

SEQ ID NO: 5557722 - DNA, 25 bp, Homo sapien
gtcactgttcgcggagtttggtatc

SEQ ID NO: 5557723 - DNA, 25 bp, Homo sapien
gggccgtgtagcgcctctacagtca

SEQ ID NO: 5557724 - DNA, 25 bp, Homo sapien
cccaggtagctgatccgttaagctc

SEQ ID NO: 5557725 - DNA, 25 bp, Homo sapien
tctgcgtcactgttcgcggagtttg

SEQ ID NO: 5557726 - DNA, 25 bp, Homo sapien
tttagcaaaaggaaccgatgacaaa

SEQ ID NO: 5557727 - DNA, 25 bp, Homo sapien
ttcttactgctagtgaatgagggcc

SEQ ID NO: 5557728 - DNA, 25 bp, Homo sapien
tagctccagctccgtttgcccagat

SEQ ID NO: 5557729 - DNA, 25 bp, Homo sapien
agaaaacagcactgaccaaaatatt

SEQ ID NO: 5557730 - DNA, 25 bp, Homo sapien
tctagtacagtgctatgtgccatgc

SEQ ID NO: 5557731 - DNA, 25 bp, Homo sapien
gagggagagtgtttggctctatgtt

SEQ ID NO: 5557732 - DNA, 25 bp, Homo sapien
gacaaaagttagaactgcgtggcct

SEQ ID NO: 5557733 - DNA, 25 bp, Homo sapien
ccagacccaaccagctgcagtcttc

SEQ ID NO: 5557734 - DNA, 25 bp, Homo sapien
gacaataggcaaggaacataccctt

SEQ ID NO: 5557735 - DNA, 25 bp, Homo sapien
aataaggtatcaaacaaagaataat

SEQ ID NO: 5557736 - DNA, 25 bp, Homo sapien
gggccccctaggactcagatcctca

SEQ ID NO: 5557737 - DNA, 25 bp, Homo sapien
atgcctgaccctgcaccatagatta

SEQ ID NO: 5557738 - DNA, 25 bp, Homo sapien
aaaacaatattgacggcagcttact

SEQ ID NO: 5557739 - DNA, 25 bp, Homo sapien
atcgaagtcatgcatcaagaacctc

SEQ ID NO: 5557740 - DNA, 25 bp, Homo sapien
aacagtaagttaatctaagaatgca

SEQ ID NO: 5557741 - DNA, 25 bp, Homo sapien
aaaaacaacatatgccaaagtacaa

SEQ ID NO: 5557742 - DNA, 25 bp, Homo sapien
atggcagaatatagtagctgagaac

SEQ ID NO: 5557743 - DNA, 25 bp, Homo sapien
gccaaagtacaatactgacagtggt

SEQ ID NO: 5557744 - DNA, 25 bp, Homo sapien
tcgccaggaggcaatgcctaattac

SEQ ID NO: 5557745 - DNA, 25 bp, Homo sapien
tgacagtggtcacctcagtcagcag

SEQ ID NO: 5557746 - DNA, 25 bp, Homo sapien
catgcatcaagaacctcgccaggag

SEQ ID NO: 5557747 - DNA, 25 bp, Homo sapien
cagcagccagcatcgaagtcatgca

SEQ ID NO: 5557748 - DNA, 25 bp, Homo sapien
atgatgcccctgaagatgtgcacct

SEQ ID NO: 5557749 - DNA, 25 bp, Homo sapien
ggtcattcccgaagcccggcaactg

SEQ ID NO: 5557750 - DNA, 25 bp, Homo sapien
acttccccagtctcgcccgggtgga

SEQ ID NO: 5557751 - DNA, 25 bp, Homo sapien
tattattgaggagagtcagaaagta

SEQ ID NO: 5557752 - DNA, 25 bp, Homo sapien
aggagacaagagtcacccttcctcc

SEQ ID NO: 5557753 - DNA, 25 bp, Homo sapien
aaagttggaaatgagtcccctgtac

SEQ ID NO: 5557754 - DNA, 25 bp, Homo sapien
gcgggtgtgtcctataaatggcgtc

SEQ ID NO: 5557755 - DNA, 25 bp, Homo sapien
acagatctgagcaatatacccggac

SEQ ID NO: 5557756 - DNA, 25 bp, Homo sapien
gacaccgaggaattctatgatgccc

SEQ ID NO: 5557757 - DNA, 25 bp, Homo sapien
atcaagtactaccggaagaatccca

SEQ ID NO: 5557758 - DNA, 25 bp, Homo sapien
atacccggactgttagccatagatc

SEQ ID NO: 5557759 - DNA, 25 bp, Homo sapien
acaacaaggacaataacagcaactc

SEQ ID NO: 5557760 - DNA, 25 bp, Homo sapien
agaccagtttaaagtgagttgatca

SEQ ID NO: 5557761 - DNA, 25 bp, Homo sapien
atggtgtcatggaacatgtgactgt

SEQ ID NO: 5557762 - DNA, 25 bp, Homo sapien
gggaagtacagagggtcttatactc

SEQ ID NO: 5557763 - DNA, 25 bp, Homo sapien
ctctgttcccggcagaggctaagga

SEQ ID NO: 5557764 - DNA, 25 bp, Homo sapien
cagcaactccagatgaggctagatc

SEQ ID NO: 5557765 - DNA, 25 bp, Homo sapien
ttaattcagcagataggaggagcta

SEQ ID NO: 5557766 - DNA, 25 bp, Homo sapien
tttccttggcaaaacatggtgtcat

SEQ ID NO: 5557767 - DNA, 25 bp, Homo sapien
ttttcacccagagttaaagcacatg

SEQ ID NO: 5557768 - DNA, 25 bp, Homo sapien
aaaatcaccatgggaagtacagagg

SEQ ID NO: 5557769 - DNA, 25 bp, Homo sapien
aggctaaggacgtacaaagttcatt

SEQ ID NO: 5557770 - DNA, 25 bp, Homo sapien
gtgtggccagaactcggttctgcct

SEQ ID NO: 5557771 - DNA, 25 bp, Homo sapien
cagcccatctcaccacatccgtccc

SEQ ID NO: 5557772 - DNA, 25 bp, Homo sapien
ggttctgcctgctagcagagggcag

SEQ ID NO: 5557773 - DNA, 25 bp, Homo sapien
gcctggcatctagtggcagcacaat

SEQ ID NO: 5557774 - DNA, 25 bp, Homo sapien
gccaaccccaacctgccatgtactt

SEQ ID NO: 5557775 - DNA, 25 bp, Homo sapien
tccttgcagcccccaagcctagcac

SEQ ID NO: 5557776 - DNA, 25 bp, Homo sapien
ttaaccagctgccaccgcaggcttc

SEQ ID NO: 5557777 - DNA, 25 bp, Homo sapien
gtggcagcacaataaggaacctgat

SEQ ID NO: 5557778 - DNA, 25 bp, Homo sapien
ccaagcctagcacatgcctggcatc

SEQ ID NO: 5557779 - DNA, 25 bp, Homo sapien
gtcccaagccctttgagccagccaa

SEQ ID NO: 5557780 - DNA, 25 bp, Homo sapien
aatgaaggaccaaacattgcagttg

SEQ ID NO: 5557781 - DNA, 25 bp, Homo sapien
aaatccaagacctgggttgaggtgg

SEQ ID NO: 5557782 - DNA, 25 bp, Homo sapien
ccaatggctcccacaggggagcagc

SEQ ID NO: 5557783 - DNA, 25 bp, Homo sapien
gagggacctgaaatccaagacctgg

SEQ ID NO: 5557784 - DNA, 25 bp, Homo sapien
tcatccgctccctctggtgaaccag

SEQ ID NO: 5557785 - DNA, 25 bp, Homo sapien
gctgccatccttcatccgctccctc

SEQ ID NO: 5557786 - DNA, 25 bp, Homo sapien
ctgaaatccaagacctgggttgagg

SEQ ID NO: 5557787 - DNA, 25 bp, Homo sapien
acattccaatggctcccacagggga

SEQ ID NO: 5557788 - DNA, 25 bp, Homo sapien
gacctgaaatccaagacctgggttg

SEQ ID NO: 5557789 - DNA, 25 bp, Homo sapien
gggcatgtgagatgctgccatcctt

SEQ ID NO: 5557790 - DNA, 25 bp, Homo sapien
gctccctctggtgaaccagggggca

SEQ ID NO: 5557791 - DNA, 25 bp, Homo sapien
ggatacattccaatggctcccacag

SEQ ID NO: 5557792 - DNA, 25 bp, Homo sapien
ctaatagctttggtagaaacatgct

SEQ ID NO: 5557793 - DNA, 25 bp, Homo sapien
aatttggtatggattagtaaggcct

SEQ ID NO: 5557794 - DNA, 25 bp, Homo sapien
gtttgtcgtggcaatacatggaaaa

SEQ ID NO: 5557795 - DNA, 25 bp, Homo sapien
aatcaggccactactaagcatctat

SEQ ID NO: 5557796 - DNA, 25 bp, Homo sapien
tatggattagtaaggcctgagtgaa

SEQ ID NO: 5557797 - DNA, 25 bp, Homo sapien
tcttataatcgggcattcagaggta

SEQ ID NO: 5557798 - DNA, 25 bp, Homo sapien
tggcaaaaatgtggacctgcaacaa

SEQ ID NO: 5557799 - DNA, 25 bp, Homo sapien
aatactgtaaaagatggatcctgcc

SEQ ID NO: 5557800 - DNA, 25 bp, Homo sapien
ggacctgcaacaattcagatggttt

SEQ ID NO: 5557801 - DNA, 25 bp, Homo sapien
aggttcaaaaatcatggctctgtaa

SEQ ID NO: 5557802 - DNA, 25 bp, Homo sapien
gcattcagaggtacgtgttggttct

SEQ ID NO: 5557803 - DNA, 25 bp, Homo sapien
agctccaatgctccttccagacctc

SEQ ID NO: 5557804 - DNA, 25 bp, Homo sapien
cctggctgcgctattccaaggatac

SEQ ID NO: 5557805 - DNA, 25 bp, Homo sapien
cccaagtctctaatgcagaagctcc

SEQ ID NO: 5557806 - DNA, 25 bp, Homo sapien
agacctcctggctcaaggactttcc

SEQ ID NO: 5557807 - DNA, 25 bp, Homo sapien
gttagaaataccatcagaagagggg

SEQ ID NO: 5557808 - DNA, 25 bp, Homo sapien
gccaacgccccagagttagaaatac

SEQ ID NO: 5557809 - DNA, 25 bp, Homo sapien
ggtcttatgtcttgcggctggtgcc

SEQ ID NO: 5557810 - DNA, 25 bp, Homo sapien
gagagactgtccagcacttcccgct

SEQ ID NO: 5557811 - DNA, 25 bp, Homo sapien
caaaagacccctgcagatgggggaa

SEQ ID NO: 5557812 - DNA, 25 bp, Homo sapien
gagcacaaactccacgaagccaacg

SEQ ID NO: 5557813 - DNA, 25 bp, Homo sapien
gcgtggaccttcccccagtggggca

SEQ ID NO: 5557814 - DNA, 25 bp, Homo sapien
aatacgaccctctcttgtgcatagt

SEQ ID NO: 5557815 - DNA, 25 bp, Homo sapien
aaaggagagaccccatatacccttc

SEQ ID NO: 5557816 - DNA, 25 bp, Homo sapien
atggtagtattgaattaacagattt

SEQ ID NO: 5557817 - DNA, 25 bp, Homo sapien
atagtccattattcaaagtgctcgc

SEQ ID NO: 5557818 - DNA, 25 bp, Homo sapien
actatgatgcccatgctaagatttc

SEQ ID NO: 5557819 - DNA, 25 bp, Homo sapien
aaatgctagaaatggatgttgaagt

SEQ ID NO: 5557820 - DNA, 25 bp, Homo sapien
tatttatggaaaggatcatatgttc

SEQ ID NO: 5557821 - DNA, 25 bp, Homo sapien
acatggagttgtatgaaaaaaggag

SEQ ID NO: 5557822 - DNA, 25 bp, Homo sapien
tcctcccagatcagccttgcaagta

SEQ ID NO: 5557823 - DNA, 25 bp, Homo sapien
tccctccaatggttaacactttgca

SEQ ID NO: 5557824 - DNA, 25 bp, Homo sapien
caaagtgctcgcagacactatatgt

SEQ ID NO: 5557825 - DNA, 25 bp, Homo sapien
ataacactgttaataaggagaattc

SEQ ID NO: 5557826 - DNA, 25 bp, Homo sapien
aaaatggccatgtgtttgtatcttc

SEQ ID NO: 5557827 - DNA, 25 bp, Homo sapien
tactccaagtaaatacttagggagc

SEQ ID NO: 5557828 - DNA, 25 bp, Homo sapien
gaagagcagagcattcatacgtgta

SEQ ID NO: 5557829 - DNA, 25 bp, Homo sapien
aaccaagagcaggatttatacaccc

SEQ ID NO: 5557830 - DNA, 25 bp, Homo sapien
aaatccacctaataaacaaaaatga

SEQ ID NO: 5557831 - DNA, 25 bp, Homo sapien
ttcacagagctagtacccagggaaa

SEQ ID NO: 5557832 - DNA, 25 bp, Homo sapien
aacacacattgcgctttttatctcc

SEQ ID NO: 5557833 - DNA, 25 bp, Homo sapien
aaggagaattctaaccaagagcagg

SEQ ID NO: 5557834 - DNA, 25 bp, Homo sapien
tgtctacagggctgaaaaaaggaat

SEQ ID NO: 5557835 - DNA, 25 bp, Homo sapien
tcaagggaagatcagttcatgtcta

SEQ ID NO: 5557836 - DNA, 25 bp, Homo sapien
ctgccatagtacactggggcatgcc

SEQ ID NO: 5557837 - DNA, 25 bp, Homo sapien
ggggcatgccatgcaaatgcagctg

SEQ ID NO: 5557838 - DNA, 25 bp, Homo sapien
ctgcagacccagtgttcctccattc

SEQ ID NO: 5557839 - DNA, 25 bp, Homo sapien
tggactaaggcaccgatgaattgac

SEQ ID NO: 5557840 - DNA, 25 bp, Homo sapien
cacatggaaacatggggtccacttg

SEQ ID NO: 5557841 - DNA, 25 bp, Homo sapien
caagacgggcacttcacatccactt

SEQ ID NO: 5557842 - DNA, 25 bp, Homo sapien
gacacgcttgtcatttctggggctc

SEQ ID NO: 5557843 - DNA, 25 bp, Homo sapien
gtgtgctggctctgccaagacacgc

SEQ ID NO: 5557844 - DNA, 25 bp, Homo sapien
accaaaaggacattctcagggcctc

SEQ ID NO: 5557845 - DNA, 25 bp, Homo sapien
cagctggagcaagccccagtctatt

SEQ ID NO: 5557846 - DNA, 25 bp, Homo sapien
acaagacgggctgtccagccccgaa

SEQ ID NO: 5557847 - DNA, 25 bp, Homo sapien
attctggctcacgcagtggatggaa

SEQ ID NO: 5557848 - DNA, 25 bp, Homo sapien
tctcacatgatcacctgaagttccc

SEQ ID NO: 5557849 - DNA, 25 bp, Homo sapien
ccatcaaggcattaactacacattt

SEQ ID NO: 5557850 - DNA, 25 bp, Homo sapien
cttaatagagagcttaaccgacctc

SEQ ID NO: 5557851 - DNA, 25 bp, Homo sapien
gagtgtacgctttctgtggatagac

SEQ ID NO: 5557852 - DNA, 25 bp, Homo sapien
attgaaggagctcttaagtcctctc

SEQ ID NO: 5557853 - DNA, 25 bp, Homo sapien
tcttagtgttctaggtgtaggttat

SEQ ID NO: 5557854 - DNA, 25 bp, Homo sapien
gccatgcaaatacatgagtgtacgc

SEQ ID NO: 5557855 - DNA, 25 bp, Homo sapien
aagcctcgctgtttgtgatgtgatc

SEQ ID NO: 5557856 - DNA, 25 bp, Homo sapien
aaaatagaaaagaatccatcaaggc

SEQ ID NO: 5557857 - DNA, 25 bp, Homo sapien
gtggatagacataaatattgctaga

SEQ ID NO: 5557858 - DNA, 25 bp, Homo sapien
cgctcaagacccatcagcgcagcca

SEQ ID NO: 5557859 - DNA, 25 bp, Homo sapien
ggcccacttaggacgcgtgctatga

SEQ ID NO: 5557860 - DNA, 25 bp, Homo sapien
ctgcttccggctcctgccatggttc

SEQ ID NO: 5557861 - DNA, 25 bp, Homo sapien
ctcgcgttcctccctcgggaccctc

SEQ ID NO: 5557862 - DNA, 25 bp, Homo sapien
gcggcggccctacttctgcccccgc

SEQ ID NO: 5557863 - DNA, 25 bp, Homo sapien
cgcagctccctctctagatgggatc

SEQ ID NO: 5557864 - DNA, 25 bp, Homo sapien
ctctctagatgggatcccgggagag

SEQ ID NO: 5557865 - DNA, 25 bp, Homo sapien
cgcccgctcgcgttcctccctcggg

SEQ ID NO: 5557866 - DNA, 25 bp, Homo sapien
cttctctggcccatccggcctagag

SEQ ID NO: 5557867 - DNA, 25 bp, Homo sapien
cacttaggacgcgtgctatgatgcg

SEQ ID NO: 5557868 - DNA, 25 bp, Homo sapien
cgagggctcgctcaagacccatcag

SEQ ID NO: 5557869 - DNA, 25 bp, Homo sapien
tgaattagaataggactgaagggta

SEQ ID NO: 5557870 - DNA, 25 bp, Homo sapien
tgtgccaggagtcaacctgcctgtc

SEQ ID NO: 5557871 - DNA, 25 bp, Homo sapien
tcagtaaaataaggggattggacta

SEQ ID NO: 5557872 - DNA, 25 bp, Homo sapien
gtccaagggtcactagacgacctcc

SEQ ID NO: 5557873 - DNA, 25 bp, Homo sapien
cctgggactaagagcctagccaggc

SEQ ID NO: 5557874 - DNA, 25 bp, Homo sapien
aagggtacaaggctattgtaggcct

SEQ ID NO: 5557875 - DNA, 25 bp, Homo sapien
aaggggcaggtacctgttacatgtg

SEQ ID NO: 5557876 - DNA, 25 bp, Homo sapien
tttaatagaaaagaactgtgccagg

SEQ ID NO: 5557877 - DNA, 25 bp, Homo sapien
tacatgtggaatctgggctatagga

SEQ ID NO: 5557878 - DNA, 25 bp, Homo sapien
tgtggtaaaactccatgaaggggca

SEQ ID NO: 5557879 - DNA, 25 bp, Homo sapien
ctgaaatgggttactgagaaagaaa

SEQ ID NO: 5557880 - DNA, 25 bp, Homo sapien
tgtaaattagaatcacttgggaaac

SEQ ID NO: 5557881 - DNA, 25 bp, Homo sapien
agcaaatgaaaaaatcatgtctagg

SEQ ID NO: 5557882 - DNA, 25 bp, Homo sapien
ctgagctaagtccttcttgaaacta

SEQ ID NO: 5557883 - DNA, 25 bp, Homo sapien
ctgcaagccctcactatacaaactc

SEQ ID NO: 5557884 - DNA, 25 bp, Homo sapien
gtaggcatcaaagctgagaaccaca

SEQ ID NO: 5557885 - DNA, 25 bp, Homo sapien
actcaacccaagacatgagcacatc

SEQ ID NO: 5557886 - DNA, 25 bp, Homo sapien
tcctccagcaatttaaatcagaatc

SEQ ID NO: 5557887 - DNA, 25 bp, Homo sapien
tcagaatctctgtaggcatcaaagc

SEQ ID NO: 5557888 - DNA, 25 bp, Homo sapien
tcatgtctaggatactcaacccaag

SEQ ID NO: 5557889 - DNA, 25 bp, Homo sapien
acaaatgtttaatatgcagcaaatg

SEQ ID NO: 5557890 - DNA, 25 bp, Homo sapien
cttgggaaacttaaaaaatgtatgc

SEQ ID NO: 5557891 - DNA, 25 bp, Homo sapien
ctctctgaacgcatagtgctgcttc

SEQ ID NO: 5557892 - DNA, 25 bp, Homo sapien
gtgacataagctagaggttgaactc

SEQ ID NO: 5557893 - DNA, 25 bp, Homo sapien
catgaggagtaaatgtgaaaatgaa

SEQ ID NO: 5557894 - DNA, 25 bp, Homo sapien
gcttccaaagaccaggattgagggc

SEQ ID NO: 5557895 - DNA, 25 bp, Homo sapien
aacaagtgtgtcctggtgctaacgg

SEQ ID NO: 5557896 - DNA, 25 bp, Homo sapien
agaaatgttggaactcatgaggagt

SEQ ID NO: 5557897 - DNA, 25 bp, Homo sapien
tgaacaaactcagaacaagtgtgtc

SEQ ID NO: 5557898 - DNA, 25 bp, Homo sapien
ggagagactaacagtggacttccat

SEQ ID NO: 5557899 - DNA, 25 bp, Homo sapien
tccagaccccaaaggagatcatgtg

SEQ ID NO: 5557900 - DNA, 25 bp, Homo sapien
tcagccagcacagtgagaatactct

SEQ ID NO: 5557901 - DNA, 25 bp, Homo sapien
gtggaagaggcttggaagcttccaa

SEQ ID NO: 5557902 - DNA, 25 bp, Homo sapien
ctagggtacctagatgaaccatcac

SEQ ID NO: 5557903 - DNA, 25 bp, Homo sapien
agggtacctagatgaaccatcacac

SEQ ID NO: 5557904 - DNA, 25 bp, Homo sapien
ctacacatcaaaacttagggaaatg

SEQ ID NO: 5557905 - DNA, 25 bp, Homo sapien
atcaaaacttagggaaatgtggtta

SEQ ID NO: 5557906 - DNA, 25 bp, Homo sapien
gatttccaactccagcaatgacagg

SEQ ID NO: 5557907 - DNA, 25 bp, Homo sapien
gaaaacactacacatcaaaacttag

SEQ ID NO: 5557908 - DNA, 25 bp, Homo sapien
gacaggctagggtacctagatgaac

SEQ ID NO: 5557909 - DNA, 25 bp, Homo sapien
aacttagggaaatgtggttagtgtg

SEQ ID NO: 5557910 - DNA, 25 bp, Homo sapien
caacagagatttccaactccagcaa

SEQ ID NO: 5557911 - DNA, 25 bp, Homo sapien
caatgacaggctagggtacctagat

SEQ ID NO: 5557912 - DNA, 25 bp, Homo sapien
tgaaaacacatgctgcagtaaatac

SEQ ID NO: 5557913 - DNA, 25 bp, Homo sapien
acattcaaggcagtgtagtagatac

SEQ ID NO: 5557914 - DNA, 25 bp, Homo sapien
ctgcaatatgtgtcaagagccttaa

SEQ ID NO: 5557915 - DNA, 25 bp, Homo sapien
gtattctagccacatcccaccctcc

SEQ ID NO: 5557916 - DNA, 25 bp, Homo sapien
tagggtcctacgaagtgttctctta

SEQ ID NO: 5557917 - DNA, 25 bp, Homo sapien
actctacaggttggatgtacaaatt

SEQ ID NO: 5557918 - DNA, 25 bp, Homo sapien
attttattataagtgtgagagatgg

SEQ ID NO: 5557919 - DNA, 25 bp, Homo sapien
atcaaatgcttggtactgaagtact

SEQ ID NO: 5557920 - DNA, 25 bp, Homo sapien
aatgtgactataagtaatgaaacca

SEQ ID NO: 5557921 - DNA, 25 bp, Homo sapien
tcagagaacatgcattgaactacat

SEQ ID NO: 5557922 - DNA, 25 bp, Homo sapien
atgggacagttagggtctctcagtt

SEQ ID NO: 5557923 - DNA, 25 bp, Homo sapien
ctctaaatcccagaacacagaaaat

SEQ ID NO: 5557924 - DNA, 25 bp, Homo sapien
catccacgttaataaaacagggaac

SEQ ID NO: 5557925 - DNA, 25 bp, Homo sapien
caatcctagtgaagcctgttgagct

SEQ ID NO: 5557926 - DNA, 25 bp, Homo sapien
cagccgtctgtgcctgcctcacctg

SEQ ID NO: 5557927 - DNA, 25 bp, Homo sapien
agggaaaatatctgagctgctgcca

SEQ ID NO: 5557928 - DNA, 25 bp, Homo sapien
tctatcgttctgtgtctggctctgc

SEQ ID NO: 5557929 - DNA, 25 bp, Homo sapien
acacggacccaagagctgcttctct

SEQ ID NO: 5557930 - DNA, 25 bp, Homo sapien
acagctgatggagcactttcccttg

SEQ ID NO: 5557931 - DNA, 25 bp, Homo sapien
aactgctggtatgtaaaagaccctc

SEQ ID NO: 5557932 - DNA, 25 bp, Homo sapien
ccctctttccagacaggccacgaac

SEQ ID NO: 5557933 - DNA, 25 bp, Homo sapien
tgctggagctagatgcccaactcct

SEQ ID NO: 5557934 - DNA, 25 bp, Homo sapien
tcccaacctccctgacacaccctcc

SEQ ID NO: 5557935 - DNA, 25 bp, Homo sapien
gatgctcaatttcaaggtacaagga

SEQ ID NO: 5557936 - DNA, 25 bp, Homo sapien
cctgatgtaggaaatagtaaaattt

SEQ ID NO: 5557937 - DNA, 25 bp, Homo sapien
atataccaaagggataagttaggaa

SEQ ID NO: 5557938 - DNA, 25 bp, Homo sapien
ttcagagcctatggcattggctttc

SEQ ID NO: 5557939 - DNA, 25 bp, Homo sapien
tttagcacttttggtacacatttcc

SEQ ID NO: 5557940 - DNA, 25 bp, Homo sapien
ggaaaaccatgagaatataaagtca

SEQ ID NO: 5557941 - DNA, 25 bp, Homo sapien
agggataagttaggaacaccagaaa

SEQ ID NO: 5557942 - DNA, 25 bp, Homo sapien
agtaaaatttcagagcctatggcat

SEQ ID NO: 5557943 - DNA, 25 bp, Homo sapien
tctggggctccaattcaagtgatgc

SEQ ID NO: 5557944 - DNA, 25 bp, Homo sapien
taggaacaccagaaactcagtagta

SEQ ID NO: 5557945 - DNA, 25 bp, Homo sapien
gagaatataaagtcataatgccatt

SEQ ID NO: 5557946 - DNA, 25 bp, Homo sapien
agcccagctttatgaccccccgtct

SEQ ID NO: 5557947 - DNA, 25 bp, Homo sapien
tggcccatgatacttctgcagagca

SEQ ID NO: 5557948 - DNA, 25 bp, Homo sapien
gatagccgatatactgaacacctcc

SEQ ID NO: 5557949 - DNA, 25 bp, Homo sapien
gtgacaaatgactcctgcaagatac

SEQ ID NO: 5557950 - DNA, 25 bp, Homo sapien
tgcaagaaacaatatgctctggccc

SEQ ID NO: 5557951 - DNA, 25 bp, Homo sapien
tatacatgattgtggccagttactc

SEQ ID NO: 5557952 - DNA, 25 bp, Homo sapien
gtcaggacttgaatcgaggactcca

SEQ ID NO: 5557953 - DNA, 25 bp, Homo sapien
gaacacctcctgtgagcgtcctgtg

SEQ ID NO: 5557954 - DNA, 25 bp, Homo sapien
aagccagaaggaataacatcctaga

SEQ ID NO: 5557955 - DNA, 25 bp, Homo sapien
tgcagagcagcctccgtttttggca

SEQ ID NO: 5557956 - DNA, 25 bp, Homo sapien
cccgtctggttggtcctgtaaaatc

SEQ ID NO: 5557957 - DNA, 25 bp, Homo sapien
tatacacataagactacattgaaac

SEQ ID NO: 5557958 - DNA, 25 bp, Homo sapien
gtttcaatgtagtcttatgtgtata

SEQ ID NO: 5557959 - DNA, 25 bp, Homo sapien
ccagtggccataggcgtctacctta

SEQ ID NO: 5557960 - DNA, 25 bp, Homo sapien
ggttcagcaatttagtcccaaattc

SEQ ID NO: 5557961 - DNA, 25 bp, Homo sapien
agcagctgaagcccaagaactgctg

SEQ ID NO: 5557962 - DNA, 25 bp, Homo sapien
ctgcactgccagcatttacatttgc

SEQ ID NO: 5557963 - DNA, 25 bp, Homo sapien
ttgacttccaaggtggtcaagccag

SEQ ID NO: 5557964 - DNA, 25 bp, Homo sapien
gctgaagcccaagaactgctgatac

SEQ ID NO: 5557965 - DNA, 25 bp, Homo sapien
atagtcattgacttccaaggtggtc

SEQ ID NO: 5557966 - DNA, 25 bp, Homo sapien
atgtttacaaacagtctgggacaat

SEQ ID NO: 5557967 - DNA, 25 bp, Homo sapien
aggcgtctaccttacacatgtctga

SEQ ID NO: 5557968 - DNA, 25 bp, Homo sapien
cccttgaaatgagttactacaccta

SEQ ID NO: 5557969 - DNA, 25 bp, Homo sapien
acaaacagtctgggacaatgtacaa

SEQ ID NO: 5557970 - DNA, 25 bp, Homo sapien
ctctggatggtgctcaatgcaatga

SEQ ID NO: 5557971 - DNA, 25 bp, Homo sapien
tgctgaatatctttaagtgaacatc

SEQ ID NO: 5557972 - DNA, 25 bp, Homo sapien
aaaattgctaaacataagcacaaca

SEQ ID NO: 5557973 - DNA, 25 bp, Homo sapien
ggatggtgctcaatgcaatgaaaac

SEQ ID NO: 5557974 - DNA, 25 bp, Homo sapien
tgtagccagagggaattgcttctat

SEQ ID NO: 5557975 - DNA, 25 bp, Homo sapien
aaactagaatactctgaaaattttc

SEQ ID NO: 5557976 - DNA, 25 bp, Homo sapien
taggtagttgtaatgagttgtaata

SEQ ID NO: 5557977 - DNA, 25 bp, Homo sapien
tttctggctatgaaatgcaaaaata

SEQ ID NO: 5557978 - DNA, 25 bp, Homo sapien
aaatttaggtagttgtaatgagttg

SEQ ID NO: 5557979 - DNA, 25 bp, Homo sapien
gtactttctagatggcagatagctc

SEQ ID NO: 5557980 - DNA, 25 bp, Homo sapien
ctagatggcagatagctctggatgg

SEQ ID NO: 5557981 - DNA, 25 bp, Homo sapien
tgtaccatttataaggaagagcaca

SEQ ID NO: 5557982 - DNA, 25 bp, Homo sapien
cagaatatgctgtatcactagtgat

SEQ ID NO: 5557983 - DNA, 25 bp, Homo sapien
aatgaagtagatgacaatgagaaag

SEQ ID NO: 5557984 - DNA, 25 bp, Homo sapien
ctgaacaaccagaatcatagtttcc

SEQ ID NO: 5557985 - DNA, 25 bp, Homo sapien
tttataaggaagagcacaattagtg

SEQ ID NO: 5557986 - DNA, 25 bp, Homo sapien
ataataataacaatcctgaacaacc

SEQ ID NO: 5557987 - DNA, 25 bp, Homo sapien
ttgaaatcgaccaatgcaagaattt

SEQ ID NO: 5557988 - DNA, 25 bp, Homo sapien
gtctgtgtcagtaatatgtaccatt

SEQ ID NO: 5557989 - DNA, 25 bp, Homo sapien
acagctaaaaaatgagtgcaaaaat

SEQ ID NO: 5557990 - DNA, 25 bp, Homo sapien
acaattagtgcatttcccgcccccc

SEQ ID NO: 5557991 - DNA, 25 bp, Homo sapien
atttgctacaggattattgacattc

SEQ ID NO: 5557992 - DNA, 25 bp, Homo sapien
cgtgacatagagagtgttggcatta

SEQ ID NO: 5557993 - DNA, 25 bp, Homo sapien
agcctctccgcccggaacgtgacat

SEQ ID NO: 5557994 - DNA, 25 bp, Homo sapien
ccacggaccacctaacagcctctcc

SEQ ID NO: 5557995 - DNA, 25 bp, Homo sapien
gggggtgtccgatttcacttcagac

SEQ ID NO: 5557996 - DNA, 25 bp, Homo sapien
gcctccctgtcgggcatggggagga

SEQ ID NO: 5557997 - DNA, 25 bp, Homo sapien
ttgatcgcctgccttcccgtggttt

SEQ ID NO: 5557998 - DNA, 25 bp, Homo sapien
ccgtggtttaagacaaaaacacata

SEQ ID NO: 5557999 - DNA, 25 bp, Homo sapien
gaggaatgtgtcaagacagcccctc

SEQ ID NO: 5558000 - DNA, 25 bp, Homo sapien
actgattgtatgattctgggaattc

SEQ ID NO: 5558001 - DNA, 25 bp, Homo sapien
ggcacctggacacacccagcccttt

SEQ ID NO: 5558002 - DNA, 25 bp, Homo sapien
agagtgttggcattaactcgggggg

SEQ ID NO: 5558003 - DNA, 25 bp, Homo sapien
tctgtaagaagagttttgccaattc

SEQ ID NO: 5558004 - DNA, 25 bp, Homo sapien
tatatgagcaagaaacaagtgcatt

SEQ ID NO: 5558005 - DNA, 25 bp, Homo sapien
ggcccaagacagagcatgtaataat

SEQ ID NO: 5558006 - DNA, 25 bp, Homo sapien
taccaataagtagctacacgaaatc

SEQ ID NO: 5558007 - DNA, 25 bp, Homo sapien
tgttaatgataggcccaagacagag

SEQ ID NO: 5558008 - DNA, 25 bp, Homo sapien
aatggtctggacaagtatgaaatta

SEQ ID NO: 5558009 - DNA, 25 bp, Homo sapien
ataaaatggacatcagcacaatttc

SEQ ID NO: 5558010 - DNA, 25 bp, Homo sapien
tccagaggaattacattaatggcta

SEQ ID NO: 5558011 - DNA, 25 bp, Homo sapien
aagaaatgtcttggagtttgtaata

SEQ ID NO: 5558012 - DNA, 25 bp, Homo sapien
aatggctaagaaggtattatgtatt

SEQ ID NO: 5558013 - DNA, 25 bp, Homo sapien
tgtattagatgtatagaaatgtaac

SEQ ID NO: 5558014 - DNA, 25 bp, Homo sapien
acaaaaggcccaagaacccttctga

SEQ ID NO: 5558015 - DNA, 25 bp, Homo sapien
aatacacaattgaacaaaaggccca

SEQ ID NO: 5558016 - DNA, 25 bp, Homo sapien
aaaaattctaagtacgccaatacac

SEQ ID NO: 5558017 - DNA, 25 bp, Homo sapien
cggaaagacgtacacttagtcatcc

SEQ ID NO: 5558018 - DNA, 25 bp, Homo sapien
agcaaggaatgaagaactctcaaaa

SEQ ID NO: 5558019 - DNA, 25 bp, Homo sapien
ctcgggagccataatgtaagaacaa

SEQ ID NO: 5558020 - DNA, 25 bp, Homo sapien
accagcatacacacacggaaagacg

SEQ ID NO: 5558021 - DNA, 25 bp, Homo sapien
tcacattgaaaactcgactagaaaa

SEQ ID NO: 5558022 - DNA, 25 bp, Homo sapien
taaatctgactgttcaccagcatac

SEQ ID NO: 5558023 - DNA, 25 bp, Homo sapien
aaagtaatcgcttcccctcgggagc

SEQ ID NO: 5558024 - DNA, 25 bp, Homo sapien
cagttttgccggatgttacaaacct

SEQ ID NO: 5558025 - DNA, 25 bp, Homo sapien
aaaaaatatgctgataacttgccac

SEQ ID NO: 5558026 - DNA, 25 bp, Homo sapien
cccaccaagcaatggggtatagatg

SEQ ID NO: 5558027 - DNA, 25 bp, Homo sapien
tgaaaagcaggcatgaacattactc

SEQ ID NO: 5558028 - DNA, 25 bp, Homo sapien
ccagtgtatacagaagtgtctttcc

SEQ ID NO: 5558029 - DNA, 25 bp, Homo sapien
tgaaaataatattgtgcaacctttt

SEQ ID NO: 5558030 - DNA, 25 bp, Homo sapien
aaaaatgcatgcagagaatcagagt

SEQ ID NO: 5558031 - DNA, 25 bp, Homo sapien
tgcagattaataggataaatggcaa

SEQ ID NO: 5558032 - DNA, 25 bp, Homo sapien
aatcagagtgatcaccccaccaagc

SEQ ID NO: 5558033 - DNA, 25 bp, Homo sapien
gatttccagtgtatacagaagtgtc

SEQ ID NO: 5558034 - DNA, 25 bp, Homo sapien
atatacccttgtccttaggggagag

SEQ ID NO: 5558035 - DNA, 25 bp, Homo sapien
aaatttcctgagatttccagtgtat

SEQ ID NO: 5558036 - DNA, 25 bp, Homo sapien
tttggttgatttagtgcggttgagg

SEQ ID NO: 5558037 - DNA, 25 bp, Homo sapien
gttagattgaaggagatttagtgct

SEQ ID NO: 5558038 - DNA, 25 bp, Homo sapien
aagttggacttcaatgaggcctttc

SEQ ID NO: 5558039 - DNA, 25 bp, Homo sapien
gacatcccaggataccaggagtcca

SEQ ID NO: 5558040 - DNA, 25 bp, Homo sapien
tgcatttgacgagtcgggcttgttg

SEQ ID NO: 5558041 - DNA, 25 bp, Homo sapien
ggattttaagtgaggaccaaggtga

SEQ ID NO: 5558042 - DNA, 25 bp, Homo sapien
agtgtggaggttcaccccgttcttg

SEQ ID NO: 5558043 - DNA, 25 bp, Homo sapien
tggctagggtagatataattggcat

SEQ ID NO: 5558044 - DNA, 25 bp, Homo sapien
agcaaggtatagggttagaccacta

SEQ ID NO: 5558045 - DNA, 25 bp, Homo sapien
tgattcctgagtgtgggaagtgtag

SEQ ID NO: 5558046 - DNA, 25 bp, Homo sapien
ttagtgctcactctcagggaacggt

SEQ ID NO: 5558047 - DNA, 25 bp, Homo sapien
cacatttaaagatcaggaggaaaac

SEQ ID NO: 5558048 - DNA, 25 bp, Homo sapien
tccgaagctgtaaacttaatgactt

SEQ ID NO: 5558049 - DNA, 25 bp, Homo sapien
taagtggcagccaggttactcaaaa

SEQ ID NO: 5558050 - DNA, 25 bp, Homo sapien
gcttatatgattgggaaaggtcttc

SEQ ID NO: 5558051 - DNA, 25 bp, Homo sapien
tgggcaagatcgcttgggtctagta

SEQ ID NO: 5558052 - DNA, 25 bp, Homo sapien
agtccgagctactgtagtggtggtg

SEQ ID NO: 5558053 - DNA, 25 bp, Homo sapien
ccaaacaggtgtctgatatcctagc

SEQ ID NO: 5558054 - DNA, 25 bp, Homo sapien
tactcaaaagtgtggatcaattcct

SEQ ID NO: 5558055 - DNA, 25 bp, Homo sapien
tatcacctggagttttctgtcacgc

SEQ ID NO: 5558056 - DNA, 25 bp, Homo sapien
aaggtcttcaaggtcgtctagttta

SEQ ID NO: 5558057 - DNA, 25 bp, Homo sapien
tgggtctagtagttggagaccagcc

SEQ ID NO: 5558058 - DNA, 25 bp, Homo sapien
attccaattcataaagccataaaaa

SEQ ID NO: 5558059 - DNA, 25 bp, Homo sapien
attgtatggaaacatctgcaaaaaa

SEQ ID NO: 5558060 - DNA, 25 bp, Homo sapien
aaaaaggttatgtgaattgtatgga

SEQ ID NO: 5558061 - DNA, 25 bp, Homo sapien
agccataaaaatgttcccacccctc

SEQ ID NO: 5558062 - DNA, 25 bp, Homo sapien
atttgggaattcagatatgctagtg

SEQ ID NO: 5558063 - DNA, 25 bp, Homo sapien
ggataaggcttaaatgaaagtggta

SEQ ID NO: 5558064 - DNA, 25 bp, Homo sapien
acattatgggaaacattcatctatt

SEQ ID NO: 5558065 - DNA, 25 bp, Homo sapien
aaataagcctatgaaattccaattc

SEQ ID NO: 5558066 - DNA, 25 bp, Homo sapien
ttcacaaggataaggcttaaatgaa

SEQ ID NO: 5558067 - DNA, 25 bp, Homo sapien
tatgctagtgatttacattccagtt

SEQ ID NO: 5558068 - DNA, 25 bp, Homo sapien
tctgaaggctttcaaatgaatcttt

SEQ ID NO: 5558069 - DNA, 25 bp, Homo sapien
cccagggcactggttttcagtttgc

SEQ ID NO: 5558070 - DNA, 25 bp, Homo sapien
gctcactgtgctgccaagacataac

SEQ ID NO: 5558071 - DNA, 25 bp, Homo sapien
tgtcttataggagtaacagtgaccc

SEQ ID NO: 5558072 - DNA, 25 bp, Homo sapien
tgttcgcctagtccgacctgctcac

SEQ ID NO: 5558073 - DNA, 25 bp, Homo sapien
gttccagagggtactcagctcccct

SEQ ID NO: 5558074 - DNA, 25 bp, Homo sapien
aattcttgccagagacagacagaag

SEQ ID NO: 5558075 - DNA, 25 bp, Homo sapien
gtgaatccgcactccctataagggc

SEQ ID NO: 5558076 - DNA, 25 bp, Homo sapien
tattggggttacacataagagttta

SEQ ID NO: 5558077 - DNA, 25 bp, Homo sapien
tgggtcacacagcagttagaagcca

SEQ ID NO: 5558078 - DNA, 25 bp, Homo sapien
gacataaccaaggttagggaggaga

SEQ ID NO: 5558079 - DNA, 25 bp, Homo sapien
cccggccccgtaattgtgaatccgc

SEQ ID NO: 5558080 - DNA, 25 bp, Homo sapien
agtaactctctagaggctaagctgt

SEQ ID NO: 5558081 - DNA, 25 bp, Homo sapien
ctctgcctcccggattcaagcgatt

SEQ ID NO: 5558082 - DNA, 25 bp, Homo sapien
tacattcccaaggtaaccacgttca

SEQ ID NO: 5558083 - DNA, 25 bp, Homo sapien
tagaggctaagctgttaaaatttcc

SEQ ID NO: 5558084 - DNA, 25 bp, Homo sapien
tttcgctcttgaccccgaggctgga

SEQ ID NO: 5558085 - DNA, 25 bp, Homo sapien
ccaggctggtctcaactctttacct

SEQ ID NO: 5558086 - DNA, 25 bp, Homo sapien
aaggtaaccacgttcagtaactctc

SEQ ID NO: 5558087 - DNA, 25 bp, Homo sapien
agagtttcgctcttgaccccgaggc

SEQ ID NO: 5558088 - DNA, 25 bp, Homo sapien
gattacaggcatgaccacctcacat

SEQ ID NO: 5558089 - DNA, 25 bp, Homo sapien
ccttacccagttgaagtggccagtc

SEQ ID NO: 5558090 - DNA, 25 bp, Homo sapien
gaagtggccagtcattttaatttgc

SEQ ID NO: 5558091 - DNA, 25 bp, Homo sapien
cgtggtatgatcatggatcacggca

SEQ ID NO: 5558092 - DNA, 25 bp, Homo sapien
agaagggactaagttgctgttaacc

SEQ ID NO: 5558093 - DNA, 25 bp, Homo sapien
cggcaaccatgatcttcttgggctc

SEQ ID NO: 5558094 - DNA, 25 bp, Homo sapien
gccagaagagccatatatcacctat

SEQ ID NO: 5558095 - DNA, 25 bp, Homo sapien
tgccagtgctaaagcttctagagct

SEQ ID NO: 5558096 - DNA, 25 bp, Homo sapien
tattagatcagagaaatttggggtt

SEQ ID NO: 5558097 - DNA, 25 bp, Homo sapien
aaacagtgggattaattcgggccaa

SEQ ID NO: 5558098 - DNA, 25 bp, Homo sapien
aattgtgaacccagaagggccattc

SEQ ID NO: 5558099 - DNA, 25 bp, Homo sapien
gttgttagagcagcataatccagcc

SEQ ID NO: 5558100 - DNA, 25 bp, Homo sapien
atccccacaggcatagaagggacta

SEQ ID NO: 5558101 - DNA, 25 bp, Homo sapien
gctgttaaccgacggaagcagaatt

SEQ ID NO: 5558102 - DNA, 25 bp, Homo sapien
aatggtaccgcctcactagtgcctg

SEQ ID NO: 5558103 - DNA, 25 bp, Homo sapien
ggcagccctgacttgtgcgtgggcg

SEQ ID NO: 5558104 - DNA, 25 bp, Homo sapien
tctgagtgccacaaggatctgctga

SEQ ID NO: 5558105 - DNA, 25 bp, Homo sapien
taccagtctcagtggcccaggatga

SEQ ID NO: 5558106 - DNA, 25 bp, Homo sapien
ccaaagatgtaagatggctgggtat

SEQ ID NO: 5558107 - DNA, 25 bp, Homo sapien
ctggagttagagatgtgttagcttt

SEQ ID NO: 5558108 - DNA, 25 bp, Homo sapien
gtgaagacaacccaggtgactggca

SEQ ID NO: 5558109 - DNA, 25 bp, Homo sapien
gagcttttggtgtggtcacatggcc

SEQ ID NO: 5558110 - DNA, 25 bp, Homo sapien
cacagtgcaaaatggatgttctgag

SEQ ID NO: 5558111 - DNA, 25 bp, Homo sapien
ataacaaatgaggaataatggtacc

SEQ ID NO: 5558112 - DNA, 25 bp, Homo sapien
tggctgggtatatatgagaatgaat

SEQ ID NO: 5558113 - DNA, 25 bp, Homo sapien
tatgccagcatgcacactttgagca

SEQ ID NO: 5558114 - DNA, 25 bp, Homo sapien
aaaagcagttcagcaagtcaacttc

SEQ ID NO: 5558115 - DNA, 25 bp, Homo sapien
cactgcagagcaacagcaattgaac

SEQ ID NO: 5558116 - DNA, 25 bp, Homo sapien
tgggatttgaacctaagtgatctat

SEQ ID NO: 5558117 - DNA, 25 bp, Homo sapien
tatgatcaaaggtagtcaaacattt

SEQ ID NO: 5558118 - DNA, 25 bp, Homo sapien
cttaaaataggctatgaaggaaaag

SEQ ID NO: 5558119 - DNA, 25 bp, Homo sapien
actgcatgaatgcacactgcagagc

SEQ ID NO: 5558120 - DNA, 25 bp, Homo sapien
aaatagcttggctaaaaagcagttc

SEQ ID NO: 5558121 - DNA, 25 bp, Homo sapien
agtgacttgttctatgccagcatgc

SEQ ID NO: 5558122 - DNA, 25 bp, Homo sapien
tgctcaggatcatgcactgggattt

SEQ ID NO: 5558123 - DNA, 25 bp, Homo sapien
taaaggcttgtaaacagtgacttgt

SEQ ID NO: 5558124 - DNA, 25 bp, Homo sapien
aatatctcgtgagaagctctggcag

SEQ ID NO: 5558125 - DNA, 25 bp, Homo sapien
tgcctgtgacctgctgaaaccattc

SEQ ID NO: 5558126 - DNA, 25 bp, Homo sapien
aataggacagtgtgtatacccagtt

SEQ ID NO: 5558127 - DNA, 25 bp, Homo sapien
gccagacccagaaactcaaaggcag

SEQ ID NO: 5558128 - DNA, 25 bp, Homo sapien
ttgggaagccactgcacgtttgtaa

SEQ ID NO: 5558129 - DNA, 25 bp, Homo sapien
tgtaaggagtcaggttgtccacaca

SEQ ID NO: 5558130 - DNA, 25 bp, Homo sapien
gcacatgacagatgatgaactaccc

SEQ ID NO: 5558131 - DNA, 25 bp, Homo sapien
tggcgctattttgggattccggctt

SEQ ID NO: 5558132 - DNA, 25 bp, Homo sapien
ttttgaaacgagaatcgactcaatc

SEQ ID NO: 5558133 - DNA, 25 bp, Homo sapien
gaacagcagggtgtctggattctta

SEQ ID NO: 5558134 - DNA, 25 bp, Homo sapien
atgacaagcgtctatgagaaataaa

SEQ ID NO: 5558135 - DNA, 25 bp, Homo sapien
ggcccagaactggttaggcagcttt

SEQ ID NO: 5558136 - DNA, 25 bp, Homo sapien
ggtggggccctcccatagcaatttc

SEQ ID NO: 5558137 - DNA, 25 bp, Homo sapien
gttgtaactagccagggcccagaac

SEQ ID NO: 5558138 - DNA, 25 bp, Homo sapien
gtgggtggaaacatgtatagctaaa

SEQ ID NO: 5558139 - DNA, 25 bp, Homo sapien
ttgagtgcttaagtagagaccagat

SEQ ID NO: 5558140 - DNA, 25 bp, Homo sapien
ggtgcaggtacatgtaggatacaca

SEQ ID NO: 5558141 - DNA, 25 bp, Homo sapien
ccttgtggagcagttttcttgagtg

SEQ ID NO: 5558142 - DNA, 25 bp, Homo sapien
aatgtcgcataaccaagctgcagaa

SEQ ID NO: 5558143 - DNA, 25 bp, Homo sapien
tagagaccagattcaaaaaaggatt

SEQ ID NO: 5558144 - DNA, 25 bp, Homo sapien
aaacagccagtcaagagctgtgggg

SEQ ID NO: 5558145 - DNA, 25 bp, Homo sapien
aaaaggattaagagaatgtcgcata

SEQ ID NO: 5558146 - DNA, 25 bp, Homo sapien
gcctggcctgagttcttggcttgtc

SEQ ID NO: 5558147 - DNA, 25 bp, Homo sapien
taacagatgaatctggggcatagag

SEQ ID NO: 5558148 - DNA, 25 bp, Homo sapien
tgtcccccaacaaccctctgaggta

SEQ ID NO: 5558149 - DNA, 25 bp, Homo sapien
ggtgtggttagttgctgttcaggaa

SEQ ID NO: 5558150 - DNA, 25 bp, Homo sapien
aagcttggtgattgggctcgccaag

SEQ ID NO: 5558151 - DNA, 25 bp, Homo sapien
tgctgttcaggaagcttggtgattg

SEQ ID NO: 5558152 - DNA, 25 bp, Homo sapien
tctgaggtaggtttattctgtctcc

SEQ ID NO: 5558153 - DNA, 25 bp, Homo sapien
cctctgtcagtgccatgatgagtct

SEQ ID NO: 5558154 - DNA, 25 bp, Homo sapien
aagcaggacgacattggattatgcc

SEQ ID NO: 5558155 - DNA, 25 bp, Homo sapien
gtgccatgatgagtctaggtgagag

SEQ ID NO: 5558156 - DNA, 25 bp, Homo sapien
gggggcgttcctattcactgaaatg

SEQ ID NO: 5558157 - DNA, 25 bp, Homo sapien
agggtgtagactagatggactagat

SEQ ID NO: 5558158 - DNA, 25 bp, Homo sapien
aatataggacattgagtcaggatgt

SEQ ID NO: 5558159 - DNA, 25 bp, Homo sapien
atggactagatgatcacagagttgc

SEQ ID NO: 5558160 - DNA, 25 bp, Homo sapien
ggatcctaaatcagacagttgtgtg

SEQ ID NO: 5558161 - DNA, 25 bp, Homo sapien
tctaaagcatcaaaaaggcaagaaa

SEQ ID NO: 5558162 - DNA, 25 bp, Homo sapien
ccacaaaggaggctatacaacaaat

SEQ ID NO: 5558163 - DNA, 25 bp, Homo sapien
tgagagcaagaccatattgagcaga

SEQ ID NO: 5558164 - DNA, 25 bp, Homo sapien
taagtgcagccattaaaacctcagc

SEQ ID NO: 5558165 - DNA, 25 bp, Homo sapien
accagcagacctatcaagagttcaa

SEQ ID NO: 5558166 - DNA, 25 bp, Homo sapien
gattcccttgaggaaaccagcagac

SEQ ID NO: 5558167 - DNA, 25 bp, Homo sapien
gctgaggacacaattcaaagagatt

SEQ ID NO: 5558168 - DNA, 25 bp, Homo sapien
acacatcaaaaagctacaggggttc

SEQ ID NO: 5558169 - DNA, 25 bp, Homo sapien
caagacggaatattcaagtatggtt

SEQ ID NO: 5558170 - DNA, 25 bp, Homo sapien
acatcctattgccttgagacattgc

SEQ ID NO: 5558171 - DNA, 25 bp, Homo sapien
aatatgccattatacgacctgccct

SEQ ID NO: 5558172 - DNA, 25 bp, Homo sapien
accaaacaggaattcaaagagataa

SEQ ID NO: 5558173 - DNA, 25 bp, Homo sapien
aaagataccaggagtaatacagttc

SEQ ID NO: 5558174 - DNA, 25 bp, Homo sapien
agctacaggggttctagattaagtc

SEQ ID NO: 5558175 - DNA, 25 bp, Homo sapien
atcaaaaaggatacatacttgcaat

SEQ ID NO: 5558176 - DNA, 25 bp, Homo sapien
caggagtaatacagttcacaaaccc

SEQ ID NO: 5558177 - DNA, 25 bp, Homo sapien
cacagtttacaaagtcaagacggaa

SEQ ID NO: 5558178 - DNA, 25 bp, Homo sapien
tggaagccaagtaaccaaacaggaa

SEQ ID NO: 5558179 - DNA, 25 bp, Homo sapien
cgaggtggcctggtctcgtttgtta

SEQ ID NO: 5558180 - DNA, 25 bp, Homo sapien
gtctcgtttgttaccgtcagagggc

SEQ ID NO: 5558181 - DNA, 25 bp, Homo sapien
agcgcccttgagcccggcgctctcg

SEQ ID NO: 5558182 - DNA, 25 bp, Homo sapien
tctcgtttgttaccgtcagagggcc

SEQ ID NO: 5558183 - DNA, 25 bp, Homo sapien
gaggtggcctggtctcgtttgttac

SEQ ID NO: 5558184 - DNA, 25 bp, Homo sapien
ggttccaggggtcccccacagatga

SEQ ID NO: 5558185 - DNA, 25 bp, Homo sapien
gttccaggggtcccccacagatgag

SEQ ID NO: 5558186 - DNA, 25 bp, Homo sapien
ctcgtttgttaccgtcagagggccc

SEQ ID NO: 5558187 - DNA, 25 bp, Homo sapien
cgagcgcccttgagcccggcgctct

SEQ ID NO: 5558188 - DNA, 25 bp, Homo sapien
aggtggcctggtctcgtttgttacc

SEQ ID NO: 5558189 - DNA, 25 bp, Homo sapien
tggcctggtctcgtttgttaccgtc

SEQ ID NO: 5558190 - DNA, 25 bp, Homo sapien
tccagcgcagaagccagggcttctg

SEQ ID NO: 5558191 - DNA, 25 bp, Homo sapien
ggaagaaatgctacacagcagcact

SEQ ID NO: 5558192 - DNA, 25 bp, Homo sapien
ggttggagtggcgtgtctctactaa

SEQ ID NO: 5558193 - DNA, 25 bp, Homo sapien
tccccacactcgtggctcccgtggc

SEQ ID NO: 5558194 - DNA, 25 bp, Homo sapien
agcgccagcaactcgagatacgtaa

SEQ ID NO: 5558195 - DNA, 25 bp, Homo sapien
gcagaattgtggagagctcaaccac

SEQ ID NO: 5558196 - DNA, 25 bp, Homo sapien
ggctcacaccaggaagaaatgctac

SEQ ID NO: 5558197 - DNA, 25 bp, Homo sapien
ccactcaacaggcttgtggagaggc

SEQ ID NO: 5558198 - DNA, 25 bp, Homo sapien
tcacctgggccctaacatggaggta

SEQ ID NO: 5558199 - DNA, 25 bp, Homo sapien
tcccctctggtggtcaaacatggca

SEQ ID NO: 5558200 - DNA, 25 bp, Homo sapien
ctctactaaaggctcctgggaagga

SEQ ID NO: 5558201 - DNA, 25 bp, Homo sapien
tttgaggaccatagttctaagaaat

SEQ ID NO: 5558202 - DNA, 25 bp, Homo sapien
acataagccttacttcaaaagcatt

SEQ ID NO: 5558203 - DNA, 25 bp, Homo sapien
taaagttttgctggtaagtaatgac

SEQ ID NO: 5558204 - DNA, 25 bp, Homo sapien
tacagcaactcacaatttgaggacc

SEQ ID NO: 5558205 - DNA, 25 bp, Homo sapien
tatctcatagtgcaaaagatggcat

SEQ ID NO: 5558206 - DNA, 25 bp, Homo sapien
acacccagccttgtgacagtgattc

SEQ ID NO: 5558207 - DNA, 25 bp, Homo sapien
agataatcatctgcggtaactttcc

SEQ ID NO: 5558208 - DNA, 25 bp, Homo sapien
agctacttggcatataaagttttgc

SEQ ID NO: 5558209 - DNA, 25 bp, Homo sapien
cagaaaagttccattctacagcaac

SEQ ID NO: 5558210 - DNA, 25 bp, Homo sapien
atccacaaagtcagttgaactatga

SEQ ID NO: 5558211 - DNA, 25 bp, Homo sapien
tctaagaaatatccacaaagtcagt

SEQ ID NO: 5558212 - DNA, 25 bp, Homo sapien
ctggtgaccccgacctctccctagg

SEQ ID NO: 5558213 - DNA, 25 bp, Homo sapien
gggggtgagtcattggcccccagtc

SEQ ID NO: 5558214 - DNA, 25 bp, Homo sapien
caccatgatgacagtcccctctgag

SEQ ID NO: 5558215 - DNA, 25 bp, Homo sapien
aagggcttccctctgaaaccatcat

SEQ ID NO: 5558216 - DNA, 25 bp, Homo sapien
gtggaagcaatttcagcaggctgac

SEQ ID NO: 5558217 - DNA, 25 bp, Homo sapien
gggcccaaagatacacattcggaga

SEQ ID NO: 5558218 - DNA, 25 bp, Homo sapien
aatttcacagtgtacagatgaggcc

SEQ ID NO: 5558219 - DNA, 25 bp, Homo sapien
gctgcctagatgtcgccatgtagcc

SEQ ID NO: 5558220 - DNA, 25 bp, Homo sapien
tctgagcagaggacaccaatatatt

SEQ ID NO: 5558221 - DNA, 25 bp, Homo sapien
cccacacagtctcagggaggaaaag

SEQ ID NO: 5558222 - DNA, 25 bp, Homo sapien
ccaggatgccagttaatttcacagt

SEQ ID NO: 5558223 - DNA, 25 bp, Homo sapien
atacagaaaatggccatagcttaac

SEQ ID NO: 5558224 - DNA, 25 bp, Homo sapien
gcagcccattcgagtacctgggact

SEQ ID NO: 5558225 - DNA, 25 bp, Homo sapien
gccagcctagctggaagacattttt

SEQ ID NO: 5558226 - DNA, 25 bp, Homo sapien
agcaagcagcccattcgagtacctg

SEQ ID NO: 5558227 - DNA, 25 bp, Homo sapien
gaaaatggccatagcttaacagcag

SEQ ID NO: 5558228 - DNA, 25 bp, Homo sapien
gtgtgagccgccagcctagctggaa

SEQ ID NO: 5558229 - DNA, 25 bp, Homo sapien
gcttaaaagatcagtgggcttgaag

SEQ ID NO: 5558230 - DNA, 25 bp, Homo sapien
atggccatagcttaacagcagctta

SEQ ID NO: 5558231 - DNA, 25 bp, Homo sapien
gagccgccagcctagctggaagaca

SEQ ID NO: 5558232 - DNA, 25 bp, Homo sapien
cagcagcttaaaagatcagtgggct

SEQ ID NO: 5558233 - DNA, 25 bp, Homo sapien
ggctcatacagaaaatggccatagc

SEQ ID NO: 5558234 - DNA, 25 bp, Homo sapien
caaaagaagagactgattttaggtc

SEQ ID NO: 5558235 - DNA, 25 bp, Homo sapien
taataaaaggcaattgcagttccaa

SEQ ID NO: 5558236 - DNA, 25 bp, Homo sapien
tcaagaatgataatagtataatttc

SEQ ID NO: 5558237 - DNA, 25 bp, Homo sapien
tagtcccaaaatgtataaaccaagc

SEQ ID NO: 5558238 - DNA, 25 bp, Homo sapien
gagcacagaacggccattaaaatcc

SEQ ID NO: 5558239 - DNA, 25 bp, Homo sapien
taggtatatatgagcacagaacggc

SEQ ID NO: 5558240 - DNA, 25 bp, Homo sapien
atgaggtatcttgtcgctgcctctc

SEQ ID NO: 5558241 - DNA, 25 bp, Homo sapien
aaggtcaatccaagttcaagtccac

SEQ ID NO: 5558242 - DNA, 25 bp, Homo sapien
cataacaagtttaaaggtgtatgtc

SEQ ID NO: 5558243 - DNA, 25 bp, Homo sapien
agagaagtgacagcataaagtctta

SEQ ID NO: 5558244 - DNA, 25 bp, Homo sapien
accaagcatctgataatgaggtatc

SEQ ID NO: 5558245 - DNA, 25 bp, Homo sapien
tgcatggccgctacccacactgtct

SEQ ID NO: 5558246 - DNA, 25 bp, Homo sapien
accacaacttaacacggaagcaaac

SEQ ID NO: 5558247 - DNA, 25 bp, Homo sapien
gagacaggaggggtttcctgtacat

SEQ ID NO: 5558248 - DNA, 25 bp, Homo sapien
tatccaagtggagacgtcatctctc

SEQ ID NO: 5558249 - DNA, 25 bp, Homo sapien
gcacaagaagaatccagtagacagg

SEQ ID NO: 5558250 - DNA, 25 bp, Homo sapien
tgtttcaaaagaggcagtacagctt

SEQ ID NO: 5558251 - DNA, 25 bp, Homo sapien
tttgacagaggtgaattcccctagt

SEQ ID NO: 5558252 - DNA, 25 bp, Homo sapien
actaatcacattaggagacaggagg

SEQ ID NO: 5558253 - DNA, 25 bp, Homo sapien
attgaacccttgctgagctcaggcc

SEQ ID NO: 5558254 - DNA, 25 bp, Homo sapien
tttaatccaggtgaagcacaagaag

SEQ ID NO: 5558255 - DNA, 25 bp, Homo sapien
ctccagggtcactccatagctcaac

SEQ ID NO: 5558256 - DNA, 25 bp, Homo sapien
gtaagtacattcaccactggctccc

SEQ ID NO: 5558257 - DNA, 25 bp, Homo sapien
aagtcctcaaagtggtatctaattt

SEQ ID NO: 5558258 - DNA, 25 bp, Homo sapien
ggtggacatcagctcaatacactat

SEQ ID NO: 5558259 - DNA, 25 bp, Homo sapien
aagaccaatctggatttgaattctt

SEQ ID NO: 5558260 - DNA, 25 bp, Homo sapien
ctatgtttacatggatcatggtgga

SEQ ID NO: 5558261 - DNA, 25 bp, Homo sapien
tatgatacactggcaattacatctt

SEQ ID NO: 5558262 - DNA, 25 bp, Homo sapien
ttctatcacacatgagagctcacta

SEQ ID NO: 5558263 - DNA, 25 bp, Homo sapien
tcatctgtggagtaggtttaattat

SEQ ID NO: 5558264 - DNA, 25 bp, Homo sapien
tttagagcctaaagtaagtacattc

SEQ ID NO: 5558265 - DNA, 25 bp, Homo sapien
tgagagctcactattaagaccaatc

SEQ ID NO: 5558266 - DNA, 25 bp, Homo sapien
attcaccactggctcccaaagtcct

SEQ ID NO: 5558267 - DNA, 25 bp, Homo sapien
agaacaatgcccacctgaatccctc

SEQ ID NO: 5558268 - DNA, 25 bp, Homo sapien
tggggagaattcaaggatcccagtc

SEQ ID NO: 5558269 - DNA, 25 bp, Homo sapien
cctgacctcataaagagttggaatt

SEQ ID NO: 5558270 - DNA, 25 bp, Homo sapien
ttatcaaaagtcaaagtctggggag

SEQ ID NO: 5558271 - DNA, 25 bp, Homo sapien
acctggccttgaagtgcaagggagt

SEQ ID NO: 5558272 - DNA, 25 bp, Homo sapien
tgatgtcctggttccctgggcaaag

SEQ ID NO: 5558273 - DNA, 25 bp, Homo sapien
cagtttagagagctttgtcctttcc

SEQ ID NO: 5558274 - DNA, 25 bp, Homo sapien
gaagtgcaagggagtcaaattctcc

SEQ ID NO: 5558275 - DNA, 25 bp, Homo sapien
atgtgtgcattcagcatggagccac

SEQ ID NO: 5558276 - DNA, 25 bp, Homo sapien
ggggacagttaaagaccaagacata

SEQ ID NO: 5558277 - DNA, 25 bp, Homo sapien
ctaccctagctccccgttgtccttc

SEQ ID NO: 5558278 - DNA, 25 bp, Homo sapien
gaaggaatagggagataattcaatg

SEQ ID NO: 5558279 - DNA, 25 bp, Homo sapien
gacaaagactaagatagagacagga

SEQ ID NO: 5558280 - DNA, 25 bp, Homo sapien
gtcccctctggacaaactgcagcac

SEQ ID NO: 5558281 - DNA, 25 bp, Homo sapien
gagactctgagatcggattggctaa

SEQ ID NO: 5558282 - DNA, 25 bp, Homo sapien
gagcggctcagttccaaggaagttt

SEQ ID NO: 5558283 - DNA, 25 bp, Homo sapien
agggagataattcaatgcagcaaac

SEQ ID NO: 5558284 - DNA, 25 bp, Homo sapien
ctcatccctgaccccacatctgtgt

SEQ ID NO: 5558285 - DNA, 25 bp, Homo sapien
aaggaggccactcagagactctgag

SEQ ID NO: 5558286 - DNA, 25 bp, Homo sapien
ggaagacagacaaagactaagatag

SEQ ID NO: 5558287 - DNA, 25 bp, Homo sapien
cttagggacctcctcaaagagaaat

SEQ ID NO: 5558288 - DNA, 25 bp, Homo sapien
tttgcaatgcctcttagggacctcc

SEQ ID NO: 5558289 - DNA, 25 bp, Homo sapien
taaaactgtgttcaatggtagacta

SEQ ID NO: 5558290 - DNA, 25 bp, Homo sapien
aatggattaaacaactggacatccc

SEQ ID NO: 5558291 - DNA, 25 bp, Homo sapien
taattaagcactagaaagactgttt

SEQ ID NO: 5558292 - DNA, 25 bp, Homo sapien
ctttgccagagggttttggaataat

SEQ ID NO: 5558293 - DNA, 25 bp, Homo sapien
atctgctgatgcttcaactgaaagt

SEQ ID NO: 5558294 - DNA, 25 bp, Homo sapien
caaaatagtgccatccatctccaag

SEQ ID NO: 5558295 - DNA, 25 bp, Homo sapien
atatcacatttgaagatggtgactg

SEQ ID NO: 5558296 - DNA, 25 bp, Homo sapien
agatggtgactgctccctcttggat

SEQ ID NO: 5558297 - DNA, 25 bp, Homo sapien
ccatctccaagttttgccaagtgtc

SEQ ID NO: 5558298 - DNA, 25 bp, Homo sapien
tcaatggtagactataaaagcatct

SEQ ID NO: 5558299 - DNA, 25 bp, Homo sapien
tggaataattatctgctgatgcttc

SEQ ID NO: 5558300 - DNA, 25 bp, Homo sapien
taggagtggtaccaggtttccatgt

SEQ ID NO: 5558301 - DNA, 25 bp, Homo sapien
aatgagcatattactgggtccaaag

SEQ ID NO: 5558302 - DNA, 25 bp, Homo sapien
aagaaagcagtttatccatccacac

SEQ ID NO: 5558303 - DNA, 25 bp, Homo sapien
agtcagtgtgcaagtgttaaccact

SEQ ID NO: 5558304 - DNA, 25 bp, Homo sapien
atagtatcagcgttacagagaattc

SEQ ID NO: 5558305 - DNA, 25 bp, Homo sapien
aaatcttggttagagaagaaaacta

SEQ ID NO: 5558306 - DNA, 25 bp, Homo sapien
aagacctagatgtgatagtaaaccc

SEQ ID NO: 5558307 - DNA, 25 bp, Homo sapien
ctttccaaaagtaggagtggtacca

SEQ ID NO: 5558308 - DNA, 25 bp, Homo sapien
atccacacagcccaacccttgctcc

SEQ ID NO: 5558309 - DNA, 25 bp, Homo sapien
actgggtccaaagtatacagctttc

SEQ ID NO: 5558310 - DNA, 25 bp, Homo sapien
atgacatagtaaaaaagacctagat

SEQ ID NO: 5558311 - DNA, 25 bp, Homo sapien
cagaaggatctgtgtcactatgtgt

SEQ ID NO: 5558312 - DNA, 25 bp, Homo sapien
cgtcaggctcttaggaagtaactcc

SEQ ID NO: 5558313 - DNA, 25 bp, Homo sapien
gagcgtcaggctcttaggaagtaac

SEQ ID NO: 5558314 - DNA, 25 bp, Homo sapien
agcacatcatccactcacctccacc

SEQ ID NO: 5558315 - DNA, 25 bp, Homo sapien
gagtccctagcctatgatagataat

SEQ ID NO: 5558316 - DNA, 25 bp, Homo sapien
atccctaactcagcacatcatccac

SEQ ID NO: 5558317 - DNA, 25 bp, Homo sapien
acacctcctgggaaagaccagaagg

SEQ ID NO: 5558318 - DNA, 25 bp, Homo sapien
ttaggtcacacctcctgggaaagac

SEQ ID NO: 5558319 - DNA, 25 bp, Homo sapien
ccaaccaaacctttgcggcatataa

SEQ ID NO: 5558320 - DNA, 25 bp, Homo sapien
acaacaaacctcattaggtcacacc

SEQ ID NO: 5558321 - DNA, 25 bp, Homo sapien
ggaaagaccagaaggatctgtgtca

SEQ ID NO: 5558322 - DNA, 25 bp, Homo sapien
attgcccacctaacaaaaaagaatg

SEQ ID NO: 5558323 - DNA, 25 bp, Homo sapien
agtaaggtggaatagttgaattatg

SEQ ID NO: 5558324 - DNA, 25 bp, Homo sapien
tggaatagttgaattatggcatgat

SEQ ID NO: 5558325 - DNA, 25 bp, Homo sapien
atcatgcatcctacattgtaatgtc

SEQ ID NO: 5558326 - DNA, 25 bp, Homo sapien
tgtgaatagaatgaaaagcatgaag

SEQ ID NO: 5558327 - DNA, 25 bp, Homo sapien
tagaatgaaaagcatgaagtaattt

SEQ ID NO: 5558328 - DNA, 25 bp, Homo sapien
gaatgcagaatattcctctgaacac

SEQ ID NO: 5558329 - DNA, 25 bp, Homo sapien
tagttaaagtccttgcaagagaatt

SEQ ID NO: 5558330 - DNA, 25 bp, Homo sapien
ttttcactagaatgcagaatattcc

SEQ ID NO: 5558331 - DNA, 25 bp, Homo sapien
gttagccactctgttattaatagta

SEQ ID NO: 5558332 - DNA, 25 bp, Homo sapien
cctctgaacacttccctcatacatc

SEQ ID NO: 5558333 - DNA, 25 bp, Homo sapien
tattaacactaccaatcagagatcc

SEQ ID NO: 5558334 - DNA, 25 bp, Homo sapien
tatattctgaagtactagtgtttta

SEQ ID NO: 5558335 - DNA, 25 bp, Homo sapien
atcagagatccaatgacagaaacac

SEQ ID NO: 5558336 - DNA, 25 bp, Homo sapien
ggtcttggaacgtatgtcccatggg

SEQ ID NO: 5558337 - DNA, 25 bp, Homo sapien
ttcttcaagatggtgtacttgtatc

SEQ ID NO: 5558338 - DNA, 25 bp, Homo sapien
catttgaattgccctgaaaaactcc

SEQ ID NO: 5558339 - DNA, 25 bp, Homo sapien
gtatgtcccatgggtaagagggaac

SEQ ID NO: 5558340 - DNA, 25 bp, Homo sapien
agaggtgtctatactatccatggtt

SEQ ID NO: 5558341 - DNA, 25 bp, Homo sapien
ccatggtttcagacgttcactgggg

SEQ ID NO: 5558342 - DNA, 25 bp, Homo sapien
taagagggaactactatattttcta

SEQ ID NO: 5558343 - DNA, 25 bp, Homo sapien
gaaacactgtctggaatacaaaaag

SEQ ID NO: 5558344 - DNA, 25 bp, Homo sapien
tacgctcacagataactgggtatcc

SEQ ID NO: 5558345 - DNA, 25 bp, Homo sapien
aagcggtccgacgcacacacatcat

SEQ ID NO: 5558346 - DNA, 25 bp, Homo sapien
ggtccgacgcacacacatcatacac

SEQ ID NO: 5558347 - DNA, 25 bp, Homo sapien
cccacccccatacgctcacagataa

SEQ ID NO: 5558348 - DNA, 25 bp, Homo sapien
acctgaccctcagcccacccccata

SEQ ID NO: 5558349 - DNA, 25 bp, Homo sapien
tccacactataaagaacaaccaaac

SEQ ID NO: 5558350 - DNA, 25 bp, Homo sapien
aacaaccaaacttagaagcagtgtc

SEQ ID NO: 5558351 - DNA, 25 bp, Homo sapien
actgggtatccacactataaagaac

SEQ ID NO: 5558352 - DNA, 25 bp, Homo sapien
cattgacacttagtagcctagaagc

SEQ ID NO: 5558353 - DNA, 25 bp, Homo sapien
gacacttagtagcctagaagcggtc

SEQ ID NO: 5558354 - DNA, 25 bp, Homo sapien
tagaagcagtgtcttaagtcatgtt

SEQ ID NO: 5558355 - DNA, 25 bp, Homo sapien
aagacaaggatataagtaacagaga

SEQ ID NO: 5558356 - DNA, 25 bp, Homo sapien
tctctgttacttatatccttgtctt

SEQ ID NO: 5558357 - DNA, 25 bp, Homo sapien
ctctcacctgcacaggtcagaagcc

SEQ ID NO: 5558358 - DNA, 25 bp, Homo sapien
gtcagaagcccctggcctaccttgc

SEQ ID NO: 5558359 - DNA, 25 bp, Homo sapien
gatgtaaaacactcctggcggcctt

SEQ ID NO: 5558360 - DNA, 25 bp, Homo sapien
gacaaggacctgccctcaaaaagct

SEQ ID NO: 5558361 - DNA, 25 bp, Homo sapien
taccttgccccagggtctggagcat

SEQ ID NO: 5558362 - DNA, 25 bp, Homo sapien
gaatggtctttcctgggtatggccc

SEQ ID NO: 5558363 - DNA, 25 bp, Homo sapien
tcccaggcccctgtagttgagtcaa

SEQ ID NO: 5558364 - DNA, 25 bp, Homo sapien
cagaacgtacaaagacaaggacctg

SEQ ID NO: 5558365 - DNA, 25 bp, Homo sapien
ggggctggtccatcaccctagaggc

SEQ ID NO: 5558366 - DNA, 25 bp, Homo sapien
ccgaggcctgatcacctggctccta

SEQ ID NO: 5558367 - DNA, 25 bp, Homo sapien
ttccattctaaggagacagggacag

SEQ ID NO: 5558368 - DNA, 25 bp, Homo sapien
tgaatatggactgaaacaagggttt

SEQ ID NO: 5558369 - DNA, 25 bp, Homo sapien
agagataacatatttgagggaggag

SEQ ID NO: 5558370 - DNA, 25 bp, Homo sapien
tccatgacagtcagagacagcagta

SEQ ID NO: 5558371 - DNA, 25 bp, Homo sapien
aatcttagaccagagggtttgaaac

SEQ ID NO: 5558372 - DNA, 25 bp, Homo sapien
agagacagcagtacaaaaatgctct

SEQ ID NO: 5558373 - DNA, 25 bp, Homo sapien
gggagatggttgctaatttgactgt

SEQ ID NO: 5558374 - DNA, 25 bp, Homo sapien
caagggttttaaaagaagctgtgtc

SEQ ID NO: 5558375 - DNA, 25 bp, Homo sapien
ttgactgtggtacagatgaagaaat

SEQ ID NO: 5558376 - DNA, 25 bp, Homo sapien
tccactgatctacagaaagcccaag

SEQ ID NO: 5558377 - DNA, 25 bp, Homo sapien
cctgaaaagcatggaataacttatt

SEQ ID NO: 5558378 - DNA, 25 bp, Homo sapien
aaatggaagcatttgtgtccagaat

SEQ ID NO: 5558379 - DNA, 25 bp, Homo sapien
gcaagaagctgcccatacattcccc

SEQ ID NO: 5558380 - DNA, 25 bp, Homo sapien
tggcacaatccatagacagtattaa

SEQ ID NO: 5558381 - DNA, 25 bp, Homo sapien
tcactcccttggagccaccactgcc

SEQ ID NO: 5558382 - DNA, 25 bp, Homo sapien
ccatgaaatagatattggcacaatc

SEQ ID NO: 5558383 - DNA, 25 bp, Homo sapien
actcgctccaaactcaagtccaacc

SEQ ID NO: 5558384 - DNA, 25 bp, Homo sapien
taatggcctctgtgtgagtatgtgt

SEQ ID NO: 5558385 - DNA, 25 bp, Homo sapien
tctgccacaggcctagatgccgtca

SEQ ID NO: 5558386 - DNA, 25 bp, Homo sapien
atttacaggaaattgcaacaacaac

SEQ ID NO: 5558387 - DNA, 25 bp, Homo sapien
aagataaagagctagataagcatct

SEQ ID NO: 5558388 - DNA, 25 bp, Homo sapien
tgagtatgtgtaagcagcccctctc

SEQ ID NO: 5558389 - DNA, 25 bp, Homo sapien
agatgccgtcaacctcctggacctt

SEQ ID NO: 5558390 - DNA, 25 bp, Homo sapien
gcagctgggaagtgttgtattttaa

SEQ ID NO: 5558391 - DNA, 25 bp, Homo sapien
cagggaaccaggctcctgtcatccc

SEQ ID NO: 5558392 - DNA, 25 bp, Homo sapien
cacatacatttcactggccagacct

SEQ ID NO: 5558393 - DNA, 25 bp, Homo sapien
catccctaaaggacggcactcgtct

SEQ ID NO: 5558394 - DNA, 25 bp, Homo sapien
gtttgtgctgatatctggctctgcc

SEQ ID NO: 5558395 - DNA, 25 bp, Homo sapien
ttggtatctgtcatagaaaaccccc

SEQ ID NO: 5558396 - DNA, 25 bp, Homo sapien
tacacgtggcagtatggctgccagg

SEQ ID NO: 5558397 - DNA, 25 bp, Homo sapien
cagcagcttacacaaggtagaagtt

SEQ ID NO: 5558398 - DNA, 25 bp, Homo sapien
gacggcactcgtctgtacacgtggc

SEQ ID NO: 5558399 - DNA, 25 bp, Homo sapien
ggtagaagttgagattggttctccc

SEQ ID NO: 5558400 - DNA, 25 bp, Homo sapien
ccacattccaggaaataggaagggg

SEQ ID NO: 5558401 - DNA, 25 bp, Homo sapien
ggccagactgactgatgctccctcc

SEQ ID NO: 5558402 - DNA, 25 bp, Homo sapien
gcccgcatccaaaagcgcagtacac

SEQ ID NO: 5558403 - DNA, 25 bp, Homo sapien
gtacacagaacacaaacctatcttc

SEQ ID NO: 5558404 - DNA, 25 bp, Homo sapien
gtagggaaatgttgaatagctgaca

SEQ ID NO: 5558405 - DNA, 25 bp, Homo sapien
aggttctattttaggacaggaggaa

SEQ ID NO: 5558406 - DNA, 25 bp, Homo sapien
aaccaaagaaacatattaactgcat

SEQ ID NO: 5558407 - DNA, 25 bp, Homo sapien
agctagaaattataaagtagggaaa

SEQ ID NO: 5558408 - DNA, 25 bp, Homo sapien
catgacaatacttttgcccgcatcc

SEQ ID NO: 5558409 - DNA, 25 bp, Homo sapien
aaactggtgcatatctttgagatcc

SEQ ID NO: 5558410 - DNA, 25 bp, Homo sapien
cgcagtacactgatttaggccagac

SEQ ID NO: 5558411 - DNA, 25 bp, Homo sapien
gctaaatggtaaagcagctagaaat

SEQ ID NO: 5558412 - DNA, 25 bp, Homo sapien
ggtctcagtactcatgaaaacggtc

SEQ ID NO: 5558413 - DNA, 25 bp, Homo sapien
gggttcctaagtagtagacacacgc

SEQ ID NO: 5558414 - DNA, 25 bp, Homo sapien
atttccagaccacccactgcccagt

SEQ ID NO: 5558415 - DNA, 25 bp, Homo sapien
tctcctaacacatatgggttcactt

SEQ ID NO: 5558416 - DNA, 25 bp, Homo sapien
catgaaaacggtctgaaggtttgtt

SEQ ID NO: 5558417 - DNA, 25 bp, Homo sapien
gctgatggaactttccggtgatggc

SEQ ID NO: 5558418 - DNA, 25 bp, Homo sapien
ttggtgcctttgatccgtattagaa

SEQ ID NO: 5558419 - DNA, 25 bp, Homo sapien
tcaaacaggtgctgtccagcgtgag

SEQ ID NO: 5558420 - DNA, 25 bp, Homo sapien
atttcttggaaactaaatcagccct

SEQ ID NO: 5558421 - DNA, 25 bp, Homo sapien
ttccatgactcattactggagtacc

SEQ ID NO: 5558422 - DNA, 25 bp, Homo sapien
ggtgatggcatcattccgtagctgc

SEQ ID NO: 5558423 - DNA, 25 bp, Homo sapien
caggatgacgagtctctgcagtgtg

SEQ ID NO: 5558424 - DNA, 25 bp, Homo sapien
ggatggcggctcatctgcaaatagc

SEQ ID NO: 5558425 - DNA, 25 bp, Homo sapien
ctccacgaagataaatgcagaactc

SEQ ID NO: 5558426 - DNA, 25 bp, Homo sapien
tgaaatagaaagtctgggataaggg

SEQ ID NO: 5558427 - DNA, 25 bp, Homo sapien
caggctcccatcccggtggagtcct

SEQ ID NO: 5558428 - DNA, 25 bp, Homo sapien
aatagccagtgcacacctccaggca

SEQ ID NO: 5558429 - DNA, 25 bp, Homo sapien
gctgagttcgagaataagcaccagg

SEQ ID NO: 5558430 - DNA, 25 bp, Homo sapien
aaaagccaagcttgcaggctcttcc

SEQ ID NO: 5558431 - DNA, 25 bp, Homo sapien
aaacagacccaggtgcactgctgga

SEQ ID NO: 5558432 - DNA, 25 bp, Homo sapien
tggtcaaatgaatggagacccggag

SEQ ID NO: 5558433 - DNA, 25 bp, Homo sapien
gtgtgccctgagaccctgcagctaa

SEQ ID NO: 5558434 - DNA, 25 bp, Homo sapien
aaaagtgaagagtcaaataaggata

SEQ ID NO: 5558435 - DNA, 25 bp, Homo sapien
aaaggaacgtcaaatttctggtgaa

SEQ ID NO: 5558436 - DNA, 25 bp, Homo sapien
cagcagcactcaggatcctttcatc

SEQ ID NO: 5558437 - DNA, 25 bp, Homo sapien
gcagaaacccagggagcaattttaa

SEQ ID NO: 5558438 - DNA, 25 bp, Homo sapien
aatgtttcatcacggaggtgctcga

SEQ ID NO: 5558439 - DNA, 25 bp, Homo sapien
ttccactctggctgtgaaggactag

SEQ ID NO: 5558440 - DNA, 25 bp, Homo sapien
gctgtgaaggactagccaattgcta

SEQ ID NO: 5558441 - DNA, 25 bp, Homo sapien
tatagtcttgcaaaatgtgtacgga

SEQ ID NO: 5558442 - DNA, 25 bp, Homo sapien
gacttcagttgagaaaaaggtgttc

SEQ ID NO: 5558443 - DNA, 25 bp, Homo sapien
ggaggcattcaggaagacttcagtt

SEQ ID NO: 5558444 - DNA, 25 bp, Homo sapien
atctttcaacagagagacgaaatat

SEQ ID NO: 5558445 - DNA, 25 bp, Homo sapien
ttccatcggtattccgaatgtcacg

SEQ ID NO: 5558446 - DNA, 25 bp, Homo sapien
cgtgacattcggaataccgatggaa

SEQ ID NO: 5558447 - DNA, 25 bp, Homo sapien
gaataatgagtcaataaagggaatt

SEQ ID NO: 5558448 - DNA, 25 bp, Homo sapien
taaagggaattatcatagtactata

SEQ ID NO: 5558449 - DNA, 25 bp, Homo sapien
cagtcccggttgctgctcagtggaa

SEQ ID NO: 5558450 - DNA, 25 bp, Homo sapien
taaggaagtgcatgactctggcaaa

SEQ ID NO: 5558451 - DNA, 25 bp, Homo sapien
aaattgataaataaacgttgggata

SEQ ID NO: 5558452 - DNA, 25 bp, Homo sapien
aacgttgggataaagtccagacatc

SEQ ID NO: 5558453 - DNA, 25 bp, Homo sapien
cgtgaaacaggattgtcaaagcagg

SEQ ID NO: 5558454 - DNA, 25 bp, Homo sapien
tctattgaccagtcccggttgctgc

SEQ ID NO: 5558455 - DNA, 25 bp, Homo sapien
tgataaaagatatattggaagacaa

SEQ ID NO: 5558456 - DNA, 25 bp, Homo sapien
cctatagttataggcacatggcagt

SEQ ID NO: 5558457 - DNA, 25 bp, Homo sapien
tataaatcacagacctccacaagaa

SEQ ID NO: 5558458 - DNA, 25 bp, Homo sapien
tcagccagagtcactatacagttac

SEQ ID NO: 5558459 - DNA, 25 bp, Homo sapien
tgaaaaccccaattatgtaatatgc

SEQ ID NO: 5558460 - DNA, 25 bp, Homo sapien
tagaaaaattagcataatatgaaca

SEQ ID NO: 5558461 - DNA, 25 bp, Homo sapien
aatttaagcaaaacatagcgctttg

SEQ ID NO: 5558462 - DNA, 25 bp, Homo sapien
ttaaacagtgatcctacacagagag

SEQ ID NO: 5558463 - DNA, 25 bp, Homo sapien
acagagagagatttaccaaccatat

SEQ ID NO: 5558464 - DNA, 25 bp, Homo sapien
taacatttcataacaataaggctta

SEQ ID NO: 5558465 - DNA, 25 bp, Homo sapien
caaaacatagcgctttgaaaacccc

SEQ ID NO: 5558466 - DNA, 25 bp, Homo sapien
ttttacagactgacaaatattaact

SEQ ID NO: 5558467 - DNA, 25 bp, Homo sapien
cagtgatcctacacagagagagatt

SEQ ID NO: 5558468 - DNA, 25 bp, Homo sapien
agaactcagccagagtcactataca

SEQ ID NO: 5558469 - DNA, 25 bp, Homo sapien
ttcgatcctttgctactcgggtgta

SEQ ID NO: 5558470 - DNA, 25 bp, Homo sapien
gcgacagtcgccttcgatcctttgc

SEQ ID NO: 5558471 - DNA, 25 bp, Homo sapien
ttatctgaatgaaggatttggtcct

SEQ ID NO: 5558472 - DNA, 25 bp, Homo sapien
agggttgtagcgacagtcgccttcg

SEQ ID NO: 5558473 - DNA, 25 bp, Homo sapien
gttgaggcgaattggtaccctatgc

SEQ ID NO: 5558474 - DNA, 25 bp, Homo sapien
gttttttcttgtaggaagtcagcac

SEQ ID NO: 5558475 - DNA, 25 bp, Homo sapien
tggctaatcaaaggttgaggcgaat

SEQ ID NO: 5558476 - DNA, 25 bp, Homo sapien
cgttaactggctttaggttccctgc

SEQ ID NO: 5558477 - DNA, 25 bp, Homo sapien
ttggtccttggctaatcaaaggttg

SEQ ID NO: 5558478 - DNA, 25 bp, Homo sapien
tcttgtaggaagtcagcacgaattg

SEQ ID NO: 5558479 - DNA, 25 bp, Homo sapien
cacggccactccaaggcactgtcct

SEQ ID NO: 5558480 - DNA, 25 bp, Homo sapien
tatcaaggagtctctatgtagctta

SEQ ID NO: 5558481 - DNA, 25 bp, Homo sapien
catagagtccttcgccaatagtggc

SEQ ID NO: 5558482 - DNA, 25 bp, Homo sapien
tgaagagcagttcccagtggttttt

SEQ ID NO: 5558483 - DNA, 25 bp, Homo sapien
ctccatctaggagtcagtacagttt

SEQ ID NO: 5558484 - DNA, 25 bp, Homo sapien
agcttagagctacatagagtccttc

SEQ ID NO: 5558485 - DNA, 25 bp, Homo sapien
tgtgagagataagtcagtaggtttt

SEQ ID NO: 5558486 - DNA, 25 bp, Homo sapien
agggtacacttcgtatcactgtccc

SEQ ID NO: 5558487 - DNA, 25 bp, Homo sapien
gatttatctaatggggacttcagtt

SEQ ID NO: 5558488 - DNA, 25 bp, Homo sapien
gggacttcagttgtgagagataagt

SEQ ID NO: 5558489 - DNA, 25 bp, Homo sapien
acagctgatctgagcttggattcca

SEQ ID NO: 5558490 - DNA, 25 bp, Homo sapien
ggtctgccaaaagcaaccattgtcc

SEQ ID NO: 5558491 - DNA, 25 bp, Homo sapien
gggaggcttcaagtgtcactggcaa

SEQ ID NO: 5558492 - DNA, 25 bp, Homo sapien
tatgttacctcagagagaccgctgc

SEQ ID NO: 5558493 - DNA, 25 bp, Homo sapien
tacctcagagagaccgctgcttttc

SEQ ID NO: 5558494 - DNA, 25 bp, Homo sapien
gtgtcctgcactgaatctgaggctt

SEQ ID NO: 5558495 - DNA, 25 bp, Homo sapien
tgcactgaatctgaggcttagcctg

SEQ ID NO: 5558496 - DNA, 25 bp, Homo sapien
gaatctgaggcttagcctgggaggt

SEQ ID NO: 5558497 - DNA, 25 bp, Homo sapien
gggcatgagcttgtgtcctgcactg

SEQ ID NO: 5558498 - DNA, 25 bp, Homo sapien
gagagaccgctgcttttctcgttac

SEQ ID NO: 5558499 - DNA, 25 bp, Homo sapien
tggcagaattatgttacctcagaga

SEQ ID NO: 5558500 - DNA, 25 bp, Homo sapien
tgtgtcctgaagcactctgtggaag

SEQ ID NO: 5558501 - DNA, 25 bp, Homo sapien
cttcaagtgtcactggcaagacggg

SEQ ID NO: 5558502 - DNA, 25 bp, Homo sapien
gcagcggagaagttaaatcctgagg

SEQ ID NO: 5558503 - DNA, 25 bp, Homo sapien
gagtcagaaccctaattggccaagc

SEQ ID NO: 5558504 - DNA, 25 bp, Homo sapien
cagaaaacaaagcaagccctttcct

SEQ ID NO: 5558505 - DNA, 25 bp, Homo sapien
tgctgaaacaacacgtctcccacaa

SEQ ID NO: 5558506 - DNA, 25 bp, Homo sapien
tccatgaaaaggaaattcaagcact

SEQ ID NO: 5558507 - DNA, 25 bp, Homo sapien
ctgatttgaccaagagtcagaaccc

SEQ ID NO: 5558508 - DNA, 25 bp, Homo sapien
tagccttcagtgtggcaagagagca

SEQ ID NO: 5558509 - DNA, 25 bp, Homo sapien
ttggccaagcctgaagtcacttgtc

SEQ ID NO: 5558510 - DNA, 25 bp, Homo sapien
ggctcccaagatgtctgggcctcct

SEQ ID NO: 5558511 - DNA, 25 bp, Homo sapien
tccggctatctcagagcactgcatt

SEQ ID NO: 5558512 - DNA, 25 bp, Homo sapien
ttaaatcctgaggtgaatttggggc

SEQ ID NO: 5558513 - DNA, 25 bp, Homo sapien
taatggcatcttttataggcacaac

SEQ ID NO: 5558514 - DNA, 25 bp, Homo sapien
gctttctatgttagtgacaagtgct

SEQ ID NO: 5558515 - DNA, 25 bp, Homo sapien
attttgagcctggtatgttttcccc

SEQ ID NO: 5558516 - DNA, 25 bp, Homo sapien
taatggtgtgcctgtgttaccagtc

SEQ ID NO: 5558517 - DNA, 25 bp, Homo sapien
cttaacaacaaggacagtttctcca

SEQ ID NO: 5558518 - DNA, 25 bp, Homo sapien
aaacgtattagaaggtatttgcata

SEQ ID NO: 5558519 - DNA, 25 bp, Homo sapien
gactggactatcaatacttaccctc

SEQ ID NO: 5558520 - DNA, 25 bp, Homo sapien
tttccccagtaattggagcatcctt

SEQ ID NO: 5558521 - DNA, 25 bp, Homo sapien
catcatacataaaatacggagtttc

SEQ ID NO: 5558522 - DNA, 25 bp, Homo sapien
ttgcataatcagaccattttgagcc

SEQ ID NO: 5558523 - DNA, 25 bp, Homo sapien
ttctggcaagtctccctcttccacc

SEQ ID NO: 5558524 - DNA, 25 bp, Homo sapien
gagcatgagaggcctcgctctccaa

SEQ ID NO: 5558525 - DNA, 25 bp, Homo sapien
tgaactgaccacaagtgggaaaggc

SEQ ID NO: 5558526 - DNA, 25 bp, Homo sapien
gtggggatgccacttagcaccatta

SEQ ID NO: 5558527 - DNA, 25 bp, Homo sapien
ggcatcacggggcatctctcttctt

SEQ ID NO: 5558528 - DNA, 25 bp, Homo sapien
caacccctggggttatcgttccagc

SEQ ID NO: 5558529 - DNA, 25 bp, Homo sapien
taaagcatggcatggcagcatatac

SEQ ID NO: 5558530 - DNA, 25 bp, Homo sapien
cattagcccatgtgtggctggtggg

SEQ ID NO: 5558531 - DNA, 25 bp, Homo sapien
ggtggaggttctgtcctcacaaccc

SEQ ID NO: 5558532 - DNA, 25 bp, Homo sapien
acttgctcttcggcatcacggggca

SEQ ID NO: 5558533 - DNA, 25 bp, Homo sapien
tatcgttccagccagaaagcgaaga

SEQ ID NO: 5558534 - DNA, 25 bp, Homo sapien
agctctcatgctcaggcctccacca

SEQ ID NO: 5558535 - DNA, 25 bp, Homo sapien
ttaaaaatgtccaaacgtgcagaga

SEQ ID NO: 5558536 - DNA, 25 bp, Homo sapien
aggacaacacatatggaaattggac

SEQ ID NO: 5558537 - DNA, 25 bp, Homo sapien
cagagcacatattttaggacaacac

SEQ ID NO: 5558538 - DNA, 25 bp, Homo sapien
tagagctatgcatgtatccttaccc

SEQ ID NO: 5558539 - DNA, 25 bp, Homo sapien
gtgttctcaagggtatgcatgtgtc

SEQ ID NO: 5558540 - DNA, 25 bp, Homo sapien
atccttgccctagacaggggtgtcc

SEQ ID NO: 5558541 - DNA, 25 bp, Homo sapien
tgaagaccaaggccctagaattgtc

SEQ ID NO: 5558542 - DNA, 25 bp, Homo sapien
cgtgcagagactgatctttgagatc

SEQ ID NO: 5558543 - DNA, 25 bp, Homo sapien
ctggaccaggaatttgcatttgaac

SEQ ID NO: 5558544 - DNA, 25 bp, Homo sapien
ataaaaatcatgagggttgcttgtt

SEQ ID NO: 5558545 - DNA, 25 bp, Homo sapien
cctggtccacaatggaagaagaatt

SEQ ID NO: 5558546 - DNA, 25 bp, Homo sapien
gaaagcacaaagttgttgaagcaaa

SEQ ID NO: 5558547 - DNA, 25 bp, Homo sapien
tagtgcctactatgtacaagccagc

SEQ ID NO: 5558548 - DNA, 25 bp, Homo sapien
tattaagggacagatctaaactttc

SEQ ID NO: 5558549 - DNA, 25 bp, Homo sapien
gagtgaacctgagaaccccagattt

SEQ ID NO: 5558550 - DNA, 25 bp, Homo sapien
tacactctggcttaaacaatcaacc

SEQ ID NO: 5558551 - DNA, 25 bp, Homo sapien
caatggtaacaagttaagagcacta

SEQ ID NO: 5558552 - DNA, 25 bp, Homo sapien
agcaaaacattagggatatcttaac

SEQ ID NO: 5558553 - DNA, 25 bp, Homo sapien
acaagccagcatactaaagcaatac

SEQ ID NO: 5558554 - DNA, 25 bp, Homo sapien
tccaaaggagtagtaatatatattt

SEQ ID NO: 5558555 - DNA, 25 bp, Homo sapien
attggtcctcgccctgctcaggctt

SEQ ID NO: 5558556 - DNA, 25 bp, Homo sapien
ttagaaggataatgattaagatttt

SEQ ID NO: 5558557 - DNA, 25 bp, Homo sapien
ttcatgaccccaactttacactccc

SEQ ID NO: 5558558 - DNA, 25 bp, Homo sapien
atacaaaaaccagtcaggagtggcg

SEQ ID NO: 5558559 - DNA, 25 bp, Homo sapien
gtgctgggtttatagtagagaacaa

SEQ ID NO: 5558560 - DNA, 25 bp, Homo sapien
gattttgtgtcatgtgctgggttta

SEQ ID NO: 5558561 - DNA, 25 bp, Homo sapien
gaaataactgatgtgaatgtcttta

SEQ ID NO: 5558562 - DNA, 25 bp, Homo sapien
tccagggctaacagtgttggaaata

SEQ ID NO: 5558563 - DNA, 25 bp, Homo sapien
ctgcaatcccaggaactcggcagac

SEQ ID NO: 5558564 - DNA, 25 bp, Homo sapien
tctttaagtaagacagacagacact

SEQ ID NO: 5558565 - DNA, 25 bp, Homo sapien
tagggatcacaaactagcctgacaa

SEQ ID NO: 5558566 - DNA, 25 bp, Homo sapien
ctgacaaagttcagggatagctttc

SEQ ID NO: 5558567 - DNA, 25 bp, Homo sapien
tgttcttcagggtttggtcttaatc

SEQ ID NO: 5558568 - DNA, 25 bp, Homo sapien
tgtccgctattcagtagcaggtcac

SEQ ID NO: 5558569 - DNA, 25 bp, Homo sapien
tcatagggatttacaggctagagct

SEQ ID NO: 5558570 - DNA, 25 bp, Homo sapien
actagaaatttgagatgaagggtcc

SEQ ID NO: 5558571 - DNA, 25 bp, Homo sapien
tctgccataacttcaggaggaattg

SEQ ID NO: 5558572 - DNA, 25 bp, Homo sapien
atgaagggcaggaattctaacccct

SEQ ID NO: 5558573 - DNA, 25 bp, Homo sapien
aaggggactgtgaagtcctgaatgc

SEQ ID NO: 5558574 - DNA, 25 bp, Homo sapien
gccctctgtgtactggggaaggaaa

SEQ ID NO: 5558575 - DNA, 25 bp, Homo sapien
ctacactcagatgtggatgaagggc

SEQ ID NO: 5558576 - DNA, 25 bp, Homo sapien
gcgggttgcccatcactggtccttt

SEQ ID NO: 5558577 - DNA, 25 bp, Homo sapien
cagcagagatttcaggctccaccca

SEQ ID NO: 5558578 - DNA, 25 bp, Homo sapien
cacccatagtcaatagaaagaaagg

SEQ ID NO: 5558579 - DNA, 25 bp, Homo sapien
aaaaggatgtacagtgaaaagtaca

SEQ ID NO: 5558580 - DNA, 25 bp, Homo sapien
gacccctttagacatctgagctgcc

SEQ ID NO: 5558581 - DNA, 25 bp, Homo sapien
gataactaggatggtgtcagactta

SEQ ID NO: 5558582 - DNA, 25 bp, Homo sapien
ctgcctcctttagatggggcgggtg

SEQ ID NO: 5558583 - DNA, 25 bp, Homo sapien
tgtgtattgtttccagggtcctgag

SEQ ID NO: 5558584 - DNA, 25 bp, Homo sapien
acagatgcatgaggttaggtttaca

SEQ ID NO: 5558585 - DNA, 25 bp, Homo sapien
ggtgtcagacttatggcagatgtac

SEQ ID NO: 5558586 - DNA, 25 bp, Homo sapien
cacttggcatgtctgtcgttagcac

SEQ ID NO: 5558587 - DNA, 25 bp, Homo sapien
gggagattcacagatgcatgaggtt

SEQ ID NO: 5558588 - DNA, 25 bp, Homo sapien
gatccccagactctcagaggctgcc

SEQ ID NO: 5558589 - DNA, 25 bp, Homo sapien
ccccactctgcatcaactggccctc

SEQ ID NO: 5558590 - DNA, 25 bp, Homo sapien
ctctttcagcctcggaaaagcctgc

SEQ ID NO: 5558591 - DNA, 25 bp, Homo sapien
ggagagggcccattgtctaactggt

SEQ ID NO: 5558592 - DNA, 25 bp, Homo sapien
aaacacctgccagctgcatgtggac

SEQ ID NO: 5558593 - DNA, 25 bp, Homo sapien
gtctaactggtgagttggttgagtg

SEQ ID NO: 5558594 - DNA, 25 bp, Homo sapien
ggtgggcacactagcaaacacctgc

SEQ ID NO: 5558595 - DNA, 25 bp, Homo sapien
tgcaaaccatttacagtagaccaca

SEQ ID NO: 5558596 - DNA, 25 bp, Homo sapien
actttttcatatcactgggagcctg

SEQ ID NO: 5558597 - DNA, 25 bp, Homo sapien
ctcggaaaagcctgccattccccca

SEQ ID NO: 5558598 - DNA, 25 bp, Homo sapien
acactagcaaacacctgccagctgc

SEQ ID NO: 5558599 - DNA, 25 bp, Homo sapien
ctgccattcccccatctaaaaaccc

SEQ ID NO: 5558600 - DNA, 25 bp, Homo sapien
attttatagtcctgtttggcacttt

SEQ ID NO: 5558601 - DNA, 25 bp, Homo sapien
ccagaaggtaggcctaaatccagtt

SEQ ID NO: 5558602 - DNA, 25 bp, Homo sapien
tgggcaaacaacaggcatcaataaa

SEQ ID NO: 5558603 - DNA, 25 bp, Homo sapien
aaagggaaagcatttgacagtgttt

SEQ ID NO: 5558604 - DNA, 25 bp, Homo sapien
gtcagggccccgtcctagtcatctt

SEQ ID NO: 5558605 - DNA, 25 bp, Homo sapien
gtaggataaaaagagcacaatcagc

SEQ ID NO: 5558606 - DNA, 25 bp, Homo sapien
acctctacaagaccaagcacagctc

SEQ ID NO: 5558607 - DNA, 25 bp, Homo sapien
acaatcagcggtattccagaaggta

SEQ ID NO: 5558608 - DNA, 25 bp, Homo sapien
aagacagacaaatcaagcaaaactc

SEQ ID NO: 5558609 - DNA, 25 bp, Homo sapien
tctgccaaagtgacaggtcctgagg

SEQ ID NO: 5558610 - DNA, 25 bp, Homo sapien
gaccaagcacagctcaagggtcagg

SEQ ID NO: 5558611 - DNA, 25 bp, Homo sapien
caatatccatcacagtggctgggca

SEQ ID NO: 5558612 - DNA, 25 bp, Homo sapien
agcattgttagtaattagaagaatt

SEQ ID NO: 5558613 - DNA, 25 bp, Homo sapien
gtgttggcaggttatgtagccacag

SEQ ID NO: 5558614 - DNA, 25 bp, Homo sapien
aaatatgaagaagctatacaaaata

SEQ ID NO: 5558615 - DNA, 25 bp, Homo sapien
ggccagagcgagtctaccctggtaa

SEQ ID NO: 5558616 - DNA, 25 bp, Homo sapien
tgaaattcatgagaaaattaacagg

SEQ ID NO: 5558617 - DNA, 25 bp, Homo sapien
taagactaagtgttggcaggttatg

SEQ ID NO: 5558618 - DNA, 25 bp, Homo sapien
aaaatgtgtgataagactaagtgtt

SEQ ID NO: 5558619 - DNA, 25 bp, Homo sapien
agaagaattataagcaatctatgtt

SEQ ID NO: 5558620 - DNA, 25 bp, Homo sapien
catacaacagacaaaatattggttt

SEQ ID NO: 5558621 - DNA, 25 bp, Homo sapien
taccagagatatacacaacaatttc

SEQ ID NO: 5558622 - DNA, 25 bp, Homo sapien
atctagcattgcaaaaaagaaataa

SEQ ID NO: 5558623 - DNA, 25 bp, Homo sapien
tgcatgtctggactggtagtaaacg

SEQ ID NO: 5558624 - DNA, 25 bp, Homo sapien
atagataatttgttgcgtgggaagg

SEQ ID NO: 5558625 - DNA, 25 bp, Homo sapien
gaatctggtggccatagaacatgga

SEQ ID NO: 5558626 - DNA, 25 bp, Homo sapien
catcgggtgctggtaatagataatt

SEQ ID NO: 5558627 - DNA, 25 bp, Homo sapien
aggctgctgacactgcttctgtggc

SEQ ID NO: 5558628 - DNA, 25 bp, Homo sapien
gggaggcgtctgctcaagaccctcc

SEQ ID NO: 5558629 - DNA, 25 bp, Homo sapien
acagctgtgtgtccacccccctcca

SEQ ID NO: 5558630 - DNA, 25 bp, Homo sapien
aggtgagatggtggctcttctccaa

SEQ ID NO: 5558631 - DNA, 25 bp, Homo sapien
ctccactcccacggcatgtgaccgg

SEQ ID NO: 5558632 - DNA, 25 bp, Homo sapien
caaggatcccgacactctcagcaga

SEQ ID NO: 5558633 - DNA, 25 bp, Homo sapien
tttctgcatgacgtgaaaaccgtgg

SEQ ID NO: 5558634 - DNA, 25 bp, Homo sapien
gtcatcagccatagtgcacagcagt

SEQ ID NO: 5558635 - DNA, 25 bp, Homo sapien
cttttcagtggcttaggcagagcag

SEQ ID NO: 5558636 - DNA, 25 bp, Homo sapien
ttcttgaaaataggtgagtggagaa

SEQ ID NO: 5558637 - DNA, 25 bp, Homo sapien
agatgtgcctacatgaacagtacac

SEQ ID NO: 5558638 - DNA, 25 bp, Homo sapien
catatggtaaagagcttggtgtttt

SEQ ID NO: 5558639 - DNA, 25 bp, Homo sapien
gagctcaccctcgtgggaagtctcc

SEQ ID NO: 5558640 - DNA, 25 bp, Homo sapien
ggcagagcagcaaaaaacatacttg

SEQ ID NO: 5558641 - DNA, 25 bp, Homo sapien
taggaaccattaaatgagctcaccc

SEQ ID NO: 5558642 - DNA, 25 bp, Homo sapien
acttgtctcataccgaagggatttc

SEQ ID NO: 5558643 - DNA, 25 bp, Homo sapien
ctgttcaggctggtctaaaggtaat

SEQ ID NO: 5558644 - DNA, 25 bp, Homo sapien
atcaagcatgaccactgacatccac

SEQ ID NO: 5558645 - DNA, 25 bp, Homo sapien
ataaaatgtttgtgggtgaagtcag

SEQ ID NO: 5558646 - DNA, 25 bp, Homo sapien
accggcatctcttgagtgcttggct

SEQ ID NO: 5558647 - DNA, 25 bp, Homo sapien
ttggctgatacaagtgattcctgct

SEQ ID NO: 5558648 - DNA, 25 bp, Homo sapien
tctcctgtcggtaccattgggccaa

SEQ ID NO: 5558649 - DNA, 25 bp, Homo sapien
ccattgggccaactaaagacaaggt

SEQ ID NO: 5558650 - DNA, 25 bp, Homo sapien
gttttactgcaggtggattaaccac

SEQ ID NO: 5558651 - DNA, 25 bp, Homo sapien
aggagagctggtttatcaccccacc

SEQ ID NO: 5558652 - DNA, 25 bp, Homo sapien
gaaagaagatgatgaatggattctt

SEQ ID NO: 5558653 - DNA, 25 bp, Homo sapien
cctaagttgaataagcaccctgtgc

SEQ ID NO: 5558654 - DNA, 25 bp, Homo sapien
gagtcatgtccaatggaggagagct

SEQ ID NO: 5558655 - DNA, 25 bp, Homo sapien
gaagagtcacctactgagcaccctt

SEQ ID NO: 5558656 - DNA, 25 bp, Homo sapien
atgctgggtatgagtcccaatgcat

SEQ ID NO: 5558657 - DNA, 25 bp, Homo sapien
ttaataaaggcactgcagcgttaac

SEQ ID NO: 5558658 - DNA, 25 bp, Homo sapien
caattcgaagagacttgtggtttat

SEQ ID NO: 5558659 - DNA, 25 bp, Homo sapien
acctcagagctccagaattaggaat

SEQ ID NO: 5558660 - DNA, 25 bp, Homo sapien
aacactagctagatcaccttcatgc

SEQ ID NO: 5558661 - DNA, 25 bp, Homo sapien
tttaaagttatggagtagctgtgcc

SEQ ID NO: 5558662 - DNA, 25 bp, Homo sapien
taccaactcaagcactaacactagc

SEQ ID NO: 5558663 - DNA, 25 bp, Homo sapien
ttagagatctcaggtagttaaccaa

SEQ ID NO: 5558664 - DNA, 25 bp, Homo sapien
tgtggtgctaatactaggcaaagaa

SEQ ID NO: 5558665 - DNA, 25 bp, Homo sapien
tcaagagcagcctatgtaactacca

SEQ ID NO: 5558666 - DNA, 25 bp, Homo sapien
agaattaggaatgaatgacaaagtt

SEQ ID NO: 5558667 - DNA, 25 bp, Homo sapien
agttaaccacaaagaacctctccac

SEQ ID NO: 5558668 - DNA, 25 bp, Homo sapien
tgcccatctaatgaagaagaatctc

SEQ ID NO: 5558669 - DNA, 25 bp, Homo sapien
agaatgaagaaacagcagaaaataa

SEQ ID NO: 5558670 - DNA, 25 bp, Homo sapien
tcaagaacaaagtataatctgaata

SEQ ID NO: 5558671 - DNA, 25 bp, Homo sapien
tgtgcatcactcaatagtataagtt

SEQ ID NO: 5558672 - DNA, 25 bp, Homo sapien
agcagaaaataatgagttgagttac

SEQ ID NO: 5558673 - DNA, 25 bp, Homo sapien
gatgcagcaacaaatgatcacaagc

SEQ ID NO: 5558674 - DNA, 25 bp, Homo sapien
cacaagtgaataagaatgaagaaac

SEQ ID NO: 5558675 - DNA, 25 bp, Homo sapien
ggatagcattgggagatatacctaa

SEQ ID NO: 5558676 - DNA, 25 bp, Homo sapien
agcgcaccagcatggcacatgtata

SEQ ID NO: 5558677 - DNA, 25 bp, Homo sapien
ctaatgctagatgacgagttagtgg

SEQ ID NO: 5558678 - DNA, 25 bp, Homo sapien
gcccacagagttcaggaggctctgg

SEQ ID NO: 5558679 - DNA, 25 bp, Homo sapien
acagcctccccgccagccttccatt

SEQ ID NO: 5558680 - DNA, 25 bp, Homo sapien
atctgacaccagctggtggcctgga

SEQ ID NO: 5558681 - DNA, 25 bp, Homo sapien
ccccagttgagccaggttcctcctg

SEQ ID NO: 5558682 - DNA, 25 bp, Homo sapien
gttgaatcaggtacgctccgtgcga

SEQ ID NO: 5558683 - DNA, 25 bp, Homo sapien
taaaccactgccccccagttgagcc

SEQ ID NO: 5558684 - DNA, 25 bp, Homo sapien
tcccggtggcccaatctgacaccag

SEQ ID NO: 5558685 - DNA, 25 bp, Homo sapien
ccctcctaggcctgttctctcccgg

SEQ ID NO: 5558686 - DNA, 25 bp, Homo sapien
gttcctcctggagacctctggggag

SEQ ID NO: 5558687 - DNA, 25 bp, Homo sapien
gctccctgtccagttcgggtggtcc

SEQ ID NO: 5558688 - DNA, 25 bp, Homo sapien
cctgttctctcccggtggcccaatc

SEQ ID NO: 5558689 - DNA, 25 bp, Homo sapien
tagtcaggatagtttagccctacgt

SEQ ID NO: 5558690 - DNA, 25 bp, Homo sapien
ttcaagctatctcagtatcaactcc

SEQ ID NO: 5558691 - DNA, 25 bp, Homo sapien
ctgcaggtagtttagttacttacag

SEQ ID NO: 5558692 - DNA, 25 bp, Homo sapien
agccctacgtatgtaacacacaacc

SEQ ID NO: 5558693 - DNA, 25 bp, Homo sapien
ggactctccactgtggctggatgga

SEQ ID NO: 5558694 - DNA, 25 bp, Homo sapien
tagcgaatgcctggttttcagtcag

SEQ ID NO: 5558695 - DNA, 25 bp, Homo sapien
gtagtgtagtttttagtcaggatag

SEQ ID NO: 5558696 - DNA, 25 bp, Homo sapien
gtgttccgcaatgtacacaatgggg

SEQ ID NO: 5558697 - DNA, 25 bp, Homo sapien
tctgggatctttagcgaatgcctgg

SEQ ID NO: 5558698 - DNA, 25 bp, Homo sapien
aatttggactttgttctgcaggtag

SEQ ID NO: 5558699 - DNA, 25 bp, Homo sapien
gtaacacacaacctttctgggatct

SEQ ID NO: 5558700 - DNA, 25 bp, Homo sapien
aggaatcacggtacgttttaggatc

SEQ ID NO: 5558701 - DNA, 25 bp, Homo sapien
ctatgtacaaaggctaaagaacatt

SEQ ID NO: 5558702 - DNA, 25 bp, Homo sapien
agcgaacccttgatttaacacactt

SEQ ID NO: 5558703 - DNA, 25 bp, Homo sapien
ctaaagaacattaagcgaacccttg

SEQ ID NO: 5558704 - DNA, 25 bp, Homo sapien
cttaatgaaacgcctaacggtgtta

SEQ ID NO: 5558705 - DNA, 25 bp, Homo sapien
tgaaacgcctaacggtgttacaaga

SEQ ID NO: 5558706 - DNA, 25 bp, Homo sapien
atgcaagttacctgcttcttcgacc

SEQ ID NO: 5558707 - DNA, 25 bp, Homo sapien
gatgactcacgacatttatatattc

SEQ ID NO: 5558708 - DNA, 25 bp, Homo sapien
ccttaagatatgcaagttacctgct

SEQ ID NO: 5558709 - DNA, 25 bp, Homo sapien
caccttaatgaaacgcctaacggtg

SEQ ID NO: 5558710 - DNA, 25 bp, Homo sapien
attattagtaacgtaaaggaatcac

SEQ ID NO: 5558711 - DNA, 25 bp, Homo sapien
ggtctcttccggtacgacggtgaca

SEQ ID NO: 5558712 - DNA, 25 bp, Homo sapien
tgtcaccgtcgtaccggaagagacc

SEQ ID NO: 5558713 - DNA, 25 bp, Homo sapien
aaatggaagcaaagacatacctata

SEQ ID NO: 5558714 - DNA, 25 bp, Homo sapien
tatgacttagcaaatcagtggcaga

SEQ ID NO: 5558715 - DNA, 25 bp, Homo sapien
aagggtgtggtgattgccaatatga

SEQ ID NO: 5558716 - DNA, 25 bp, Homo sapien
aaatatataatactagatgggatct

SEQ ID NO: 5558717 - DNA, 25 bp, Homo sapien
aattccctgaagggtgtggtgattg

SEQ ID NO: 5558718 - DNA, 25 bp, Homo sapien
atcgactcagaatatcaacagacat

SEQ ID NO: 5558719 - DNA, 25 bp, Homo sapien
ataccagaggagataaattgtttca

SEQ ID NO: 5558720 - DNA, 25 bp, Homo sapien
ccaggtgtagagcccaagtctcttg

SEQ ID NO: 5558721 - DNA, 25 bp, Homo sapien
aaagcaaatgaaaatcgactcagaa

SEQ ID NO: 5558722 - DNA, 25 bp, Homo sapien
gtttaagaataataccagaggagat

SEQ ID NO: 5558723 - DNA, 25 bp, Homo sapien
gaactacgcttagagttgtaacatc

SEQ ID NO: 5558724 - DNA, 25 bp, Homo sapien
aaatcccacagctaataaatggcag

SEQ ID NO: 5558725 - DNA, 25 bp, Homo sapien
gtgtcaagtaccagaatttatatca

SEQ ID NO: 5558726 - DNA, 25 bp, Homo sapien
gacttcaaactttggtgtcaagtac

SEQ ID NO: 5558727 - DNA, 25 bp, Homo sapien
gcccagttctgaattcctatgctat

SEQ ID NO: 5558728 - DNA, 25 bp, Homo sapien
ctcctctgggagtaataataatgaa

SEQ ID NO: 5558729 - DNA, 25 bp, Homo sapien
tttacagctaagaaaactgaagcac

SEQ ID NO: 5558730 - DNA, 25 bp, Homo sapien
aaatctgattctagagcccagttct

SEQ ID NO: 5558731 - DNA, 25 bp, Homo sapien
taaatggcagatctagaattcaact

SEQ ID NO: 5558732 - DNA, 25 bp, Homo sapien
ttgcccaaaatcccacagctaataa

SEQ ID NO: 5558733 - DNA, 25 bp, Homo sapien
aaatttattggcatgacttgacttc

SEQ ID NO: 5558734 - DNA, 25 bp, Homo sapien
agaattcaactctcaggaaatctga

SEQ ID NO: 5558735 - DNA, 25 bp, Homo sapien
ttttaagcattaagttgatctacac

SEQ ID NO: 5558736 - DNA, 25 bp, Homo sapien
acacagctacacagtatactcaaat

SEQ ID NO: 5558737 - DNA, 25 bp, Homo sapien
cataccaatcctggaaaaataaaat

SEQ ID NO: 5558738 - DNA, 25 bp, Homo sapien
attccccaacagtgtgttacctacc

SEQ ID NO: 5558739 - DNA, 25 bp, Homo sapien
aataaccaccacctatgcagcatgt

SEQ ID NO: 5558740 - DNA, 25 bp, Homo sapien
aataaaccaagaatagaaggtacta

SEQ ID NO: 5558741 - DNA, 25 bp, Homo sapien
caagaatagaaggtactactcctcc

SEQ ID NO: 5558742 - DNA, 25 bp, Homo sapien
gtgtgttacctaccagtaccctcaa

SEQ ID NO: 5558743 - DNA, 25 bp, Homo sapien
gtagtcctactcacaaataaccacc

SEQ ID NO: 5558744 - DNA, 25 bp, Homo sapien
gtgaaatctcccaaaagttggcaat

SEQ ID NO: 5558745 - DNA, 25 bp, Homo sapien
taatctaatcattaaggaggtaatt

SEQ ID NO: 5558746 - DNA, 25 bp, Homo sapien
gaaagatgaaaccagcacactctac

SEQ ID NO: 5558747 - DNA, 25 bp, Homo sapien
tagttttacaaaagtgggctcatat

SEQ ID NO: 5558748 - DNA, 25 bp, Homo sapien
tttaattagagactgtacgtgattc

SEQ ID NO: 5558749 - DNA, 25 bp, Homo sapien
attacggaaaacaataaagaggcta

SEQ ID NO: 5558750 - DNA, 25 bp, Homo sapien
caaaagtgggctcatatgctatatt

SEQ ID NO: 5558751 - DNA, 25 bp, Homo sapien
tccccacaagagaatctagtcttgt

SEQ ID NO: 5558752 - DNA, 25 bp, Homo sapien
atagacagtgttcataatatttgac

SEQ ID NO: 5558753 - DNA, 25 bp, Homo sapien
tctctcttaatcatacaggcacata

SEQ ID NO: 5558754 - DNA, 25 bp, Homo sapien
atcagccagaaagaagtactatctg

SEQ ID NO: 5558755 - DNA, 25 bp, Homo sapien
agaaagaagtactatctggtgaact

SEQ ID NO: 5558756 - DNA, 25 bp, Homo sapien
agagactgtacgtgattcctgctat

SEQ ID NO: 5558757 - DNA, 25 bp, Homo sapien
acttataaagtcctactggctgcac

SEQ ID NO: 5558758 - DNA, 25 bp, Homo sapien
cttgtgtacagaaacatgagaatgg

SEQ ID NO: 5558759 - DNA, 25 bp, Homo sapien
aaagcaagagacaatcctgatatag

SEQ ID NO: 5558760 - DNA, 25 bp, Homo sapien
gaatggaaaagacgtgataagtacg

SEQ ID NO: 5558761 - DNA, 25 bp, Homo sapien
aacatgcccgttttcaagggagaaa

SEQ ID NO: 5558762 - DNA, 25 bp, Homo sapien
agacgtgataagtacgatgacctac

SEQ ID NO: 5558763 - DNA, 25 bp, Homo sapien
tttttaaatggtcaggcactaagac

SEQ ID NO: 5558764 - DNA, 25 bp, Homo sapien
agcccaaaaagtttagataagattc

SEQ ID NO: 5558765 - DNA, 25 bp, Homo sapien
agagaaggaaaagtagcattcaaaa

SEQ ID NO: 5558766 - DNA, 25 bp, Homo sapien
tcatggtcagtttttagagaaggaa

SEQ ID NO: 5558767 - DNA, 25 bp, Homo sapien
gatgccagctccttgtgtacagaaa

SEQ ID NO: 5558768 - DNA, 25 bp, Homo sapien
gcctgggccccatggatcatcagga

SEQ ID NO: 5558769 - DNA, 25 bp, Homo sapien
ggccccatggatcatcaggaaagtg

SEQ ID NO: 5558770 - DNA, 25 bp, Homo sapien
ccctgggccaagactcgttgatggg

SEQ ID NO: 5558771 - DNA, 25 bp, Homo sapien
atgccctctaggcctgggccccatg

SEQ ID NO: 5558772 - DNA, 25 bp, Homo sapien
gatgccctctaggcctgggccccat

SEQ ID NO: 5558773 - DNA, 25 bp, Homo sapien
ccctgagaaggaaccccaggttgta

SEQ ID NO: 5558774 - DNA, 25 bp, Homo sapien
cctcggatgccctctaggcctgggc

SEQ ID NO: 5558775 - DNA, 25 bp, Homo sapien
cacagccagctcttcagccccaggg

SEQ ID NO: 5558776 - DNA, 25 bp, Homo sapien
ctgggccccatggatcatcaggaaa

SEQ ID NO: 5558777 - DNA, 25 bp, Homo sapien
cctgggccccatggatcatcaggaa

SEQ ID NO: 5558778 - DNA, 25 bp, Homo sapien
atcttatatcatgatttcccgtcaa

SEQ ID NO: 5558779 - DNA, 25 bp, Homo sapien
ttgacgggaaatcatgatataagat

SEQ ID NO: 5558780 - DNA, 25 bp, Homo sapien
tgagcaagtaatggatatgagttat

SEQ ID NO: 5558781 - DNA, 25 bp, Homo sapien
tagacgcaatagttctgaatgtcac

SEQ ID NO: 5558782 - DNA, 25 bp, Homo sapien
taagcatgccaataataaatcaatc

SEQ ID NO: 5558783 - DNA, 25 bp, Homo sapien
atcatttctccaagtacacagtgtt

SEQ ID NO: 5558784 - DNA, 25 bp, Homo sapien
gccaactcctttagtgaagagattt

SEQ ID NO: 5558785 - DNA, 25 bp, Homo sapien
tccccatttcagtactagacgcaat

SEQ ID NO: 5558786 - DNA, 25 bp, Homo sapien
acatacagttggcaaactcaggttt

SEQ ID NO: 5558787 - DNA, 25 bp, Homo sapien
cccttgggaaggactgttatttcac

SEQ ID NO: 5558788 - DNA, 25 bp, Homo sapien
accaagactaacttaaagccaactc

SEQ ID NO: 5558789 - DNA, 25 bp, Homo sapien
tgaatgtcactgagcaagtaatgga

SEQ ID NO: 5558790 - DNA, 25 bp, Homo sapien
atgcctaaacagtgataccagtaat

SEQ ID NO: 5558791 - DNA, 25 bp, Homo sapien
ttactgccacattgtccatagaccc

SEQ ID NO: 5558792 - DNA, 25 bp, Homo sapien
tacacactcatgcatgcacactgtc

SEQ ID NO: 5558793 - DNA, 25 bp, Homo sapien
ccatagaccctggaaaataacagtg

SEQ ID NO: 5558794 - DNA, 25 bp, Homo sapien
taagttcagcggcttgcgcctgtga

SEQ ID NO: 5558795 - DNA, 25 bp, Homo sapien
tcttcacacacccctcctcaccact

SEQ ID NO: 5558796 - DNA, 25 bp, Homo sapien
atggaaaagcaacagaatgcaagca

SEQ ID NO: 5558797 - DNA, 25 bp, Homo sapien
aaccaagcaggcacattttgggggt

SEQ ID NO: 5558798 - DNA, 25 bp, Homo sapien
gcaagattcaaacaaccaagcaggc

SEQ ID NO: 5558799 - DNA, 25 bp, Homo sapien
tggggactgtctgggttatccagtt

SEQ ID NO: 5558800 - DNA, 25 bp, Homo sapien
gaaatctgtgacctgaaagaaattc

SEQ ID NO: 5558801 - DNA, 25 bp, Homo sapien
ataacctgagaagtgacagatggaa

SEQ ID NO: 5558802 - DNA, 25 bp, Homo sapien
cacaagcaaggtgaataagaaaagt

SEQ ID NO: 5558803 - DNA, 25 bp, Homo sapien
gttccagggtgtgatcttgttttac

SEQ ID NO: 5558804 - DNA, 25 bp, Homo sapien
cagggcagcaagcaatcctccaatt

SEQ ID NO: 5558805 - DNA, 25 bp, Homo sapien
aaaaattacaaacaagtagccatgt

SEQ ID NO: 5558806 - DNA, 25 bp, Homo sapien
tcatttccctgggcgaggaacatct

SEQ ID NO: 5558807 - DNA, 25 bp, Homo sapien
tagatgaacataagtgtttaagcac

SEQ ID NO: 5558808 - DNA, 25 bp, Homo sapien
tgtttaagcacaagcaaggtgaata

SEQ ID NO: 5558809 - DNA, 25 bp, Homo sapien
gctttgctgctagaatacgccttaa

SEQ ID NO: 5558810 - DNA, 25 bp, Homo sapien
tgccccaagtcagtgcatcacaagc

SEQ ID NO: 5558811 - DNA, 25 bp, Homo sapien
tacgccttaagatgcagggcagcaa

SEQ ID NO: 5558812 - DNA, 25 bp, Homo sapien
ctccaattgttccagggtgtgatct

SEQ ID NO: 5558813 - DNA, 25 bp, Homo sapien
aactggtattgatcaattcaagcct

SEQ ID NO: 5558814 - DNA, 25 bp, Homo sapien
aataggtaaatatagttcacataca

SEQ ID NO: 5558815 - DNA, 25 bp, Homo sapien
ataataatgttgagaatgcttgttc

SEQ ID NO: 5558816 - DNA, 25 bp, Homo sapien
tggtttaatagcaaaaagctgtagt

SEQ ID NO: 5558817 - DNA, 25 bp, Homo sapien
gatcccattctgtaaactgagtagt

SEQ ID NO: 5558818 - DNA, 25 bp, Homo sapien
aacataacaaataatgctgttttgc

SEQ ID NO: 5558819 - DNA, 25 bp, Homo sapien
tagcaaaaagctgtagtttcagatc

SEQ ID NO: 5558820 - DNA, 25 bp, Homo sapien
ttcaaggtaattagaacataatatt

SEQ ID NO: 5558821 - DNA, 25 bp, Homo sapien
tgctcaaacaaagtagatcacaagt

SEQ ID NO: 5558822 - DNA, 25 bp, Homo sapien
aaagtagatcacaagtatttggttt

SEQ ID NO: 5558823 - DNA, 25 bp, Homo sapien
gagactgactctcgctctgttgctc

SEQ ID NO: 5558824 - DNA, 25 bp, Homo sapien
gggcggtggctccatcacttgtccc

SEQ ID NO: 5558825 - DNA, 25 bp, Homo sapien
tgaaaggtttatttgctggtgcaga

SEQ ID NO: 5558826 - DNA, 25 bp, Homo sapien
tgtcccaaactgctgttaggatttc

SEQ ID NO: 5558827 - DNA, 25 bp, Homo sapien
gctggaatgtgttgccttagggtct

SEQ ID NO: 5558828 - DNA, 25 bp, Homo sapien
gtcttgtcatgccagtttacgcttc

SEQ ID NO: 5558829 - DNA, 25 bp, Homo sapien
cttagggtctaagtgaaagttgtaa

SEQ ID NO: 5558830 - DNA, 25 bp, Homo sapien
gccctgttgaagattgatagctgtt

SEQ ID NO: 5558831 - DNA, 25 bp, Homo sapien
tttttgagtactgagagtgacagcg

SEQ ID NO: 5558832 - DNA, 25 bp, Homo sapien
cacctaactgaacccctccttgccc

SEQ ID NO: 5558833 - DNA, 25 bp, Homo sapien
ttcctaataaaagacacagctgatc

SEQ ID NO: 5558834 - DNA, 25 bp, Homo sapien
actgacagtgaaattggtgtagggt

SEQ ID NO: 5558835 - DNA, 25 bp, Homo sapien
caccaaacccaactgtatgcgagtc

SEQ ID NO: 5558836 - DNA, 25 bp, Homo sapien
cagatggatgcctaatatgcccttc

SEQ ID NO: 5558837 - DNA, 25 bp, Homo sapien
ccttctcaatgaaggaggtgactgg

SEQ ID NO: 5558838 - DNA, 25 bp, Homo sapien
gaataggcccactgaccccaactac

SEQ ID NO: 5558839 - DNA, 25 bp, Homo sapien
gagctacccaccaatgagtaagaac

SEQ ID NO: 5558840 - DNA, 25 bp, Homo sapien
tatgcgagtcttatccaatggaaaa

SEQ ID NO: 5558841 - DNA, 25 bp, Homo sapien
caccttgctcaggggtcatttatcc

SEQ ID NO: 5558842 - DNA, 25 bp, Homo sapien
ccaggttcagagtagaatgtgggta

SEQ ID NO: 5558843 - DNA, 25 bp, Homo sapien
ggtaggtgggctaacaccttgctca

SEQ ID NO: 5558844 - DNA, 25 bp, Homo sapien
agcattctgggatcacacgcatgag

SEQ ID NO: 5558845 - DNA, 25 bp, Homo sapien
aatcagcttttgggctgggccccgt

SEQ ID NO: 5558846 - DNA, 25 bp, Homo sapien
tgccctcctagaactgccggccact

SEQ ID NO: 5558847 - DNA, 25 bp, Homo sapien
tggtgccacaggatgtgtctttata

SEQ ID NO: 5558848 - DNA, 25 bp, Homo sapien
gcaaccgacccgcatcccacaggtc

SEQ ID NO: 5558849 - DNA, 25 bp, Homo sapien
agagtggagggcataccttttgttt

SEQ ID NO: 5558850 - DNA, 25 bp, Homo sapien
ggccacttggatggtgccctctggc

SEQ ID NO: 5558851 - DNA, 25 bp, Homo sapien
tcacaaatgcagagcaagtgagaga

SEQ ID NO: 5558852 - DNA, 25 bp, Homo sapien
cattcagaaaaaaaacgtgtgtaaa

SEQ ID NO: 5558853 - DNA, 25 bp, Homo sapien
gccgcccaaacagctcaaccaagac

SEQ ID NO: 5558854 - DNA, 25 bp, Homo sapien
cggggaactgaatgccctcctagaa

SEQ ID NO: 5558855 - DNA, 25 bp, Homo sapien
agagatgacactatgtgcactcagc

SEQ ID NO: 5558856 - DNA, 25 bp, Homo sapien
tgtgtgacatgcttcctggatgccc

SEQ ID NO: 5558857 - DNA, 25 bp, Homo sapien
aatcagcgcccctcgagtcagtaca

SEQ ID NO: 5558858 - DNA, 25 bp, Homo sapien
ttccagagtgcactgccgtcacagt

SEQ ID NO: 5558859 - DNA, 25 bp, Homo sapien
cagaattgcagtagaaaatatggcc

SEQ ID NO: 5558860 - DNA, 25 bp, Homo sapien
cttccagtcctatgcaggaaggggc

SEQ ID NO: 5558861 - DNA, 25 bp, Homo sapien
ccagatcctatgaaatcagcgcccc

SEQ ID NO: 5558862 - DNA, 25 bp, Homo sapien
atatggccataaaaaaacttcggtc

SEQ ID NO: 5558863 - DNA, 25 bp, Homo sapien
gacggttacctacactgagaagagt

SEQ ID NO: 5558864 - DNA, 25 bp, Homo sapien
ccagggccagtcacttgcttccaga

SEQ ID NO: 5558865 - DNA, 25 bp, Homo sapien
acagtttgtgagaaatgaacacttc

SEQ ID NO: 5558866 - DNA, 25 bp, Homo sapien
ggctccaactcctgagacccccgac

SEQ ID NO: 5558867 - DNA, 25 bp, Homo sapien
aagaaggtccgttcagttagagctt

SEQ ID NO: 5558868 - DNA, 25 bp, Homo sapien
cacttttggatttgcagaaaccctg

SEQ ID NO: 5558869 - DNA, 25 bp, Homo sapien
aatcatgtcatcagaatagtcaaat

SEQ ID NO: 5558870 - DNA, 25 bp, Homo sapien
cagctgatctctacacgccaccacc

SEQ ID NO: 5558871 - DNA, 25 bp, Homo sapien
ggttctgtggaatatctaaaagtca

SEQ ID NO: 5558872 - DNA, 25 bp, Homo sapien
tgcagaaaccctggatacaaagtag

SEQ ID NO: 5558873 - DNA, 25 bp, Homo sapien
ccacacctggccaatgggccatttc

SEQ ID NO: 5558874 - DNA, 25 bp, Homo sapien
atgtacatgggaagagtaaaaaatg

SEQ ID NO: 5558875 - DNA, 25 bp, Homo sapien
tggagtagactgttaggaatagatc

SEQ ID NO: 5558876 - DNA, 25 bp, Homo sapien
tcaaataagtctggttctgtggaat

SEQ ID NO: 5558877 - DNA, 25 bp, Homo sapien
gaatagatcctagatgaaaaatcac

SEQ ID NO: 5558878 - DNA, 25 bp, Homo sapien
cataaaacaaggatcagctgatctc

SEQ ID NO: 5558879 - DNA, 25 bp, Homo sapien
tttagatatgacaacccatgcagtc

SEQ ID NO: 5558880 - DNA, 25 bp, Homo sapien
gggggctgagatctcaacttcgccc

SEQ ID NO: 5558881 - DNA, 25 bp, Homo sapien
cttccagccaaggtctaaaggaaaa

SEQ ID NO: 5558882 - DNA, 25 bp, Homo sapien
cttcagcagagatcctacacacagc

SEQ ID NO: 5558883 - DNA, 25 bp, Homo sapien
ggaaaaccttcagagagaagctggc

SEQ ID NO: 5558884 - DNA, 25 bp, Homo sapien
tgggccctgaagaactaaaatgaat

SEQ ID NO: 5558885 - DNA, 25 bp, Homo sapien
gagatcctacacacagcagagagtc

SEQ ID NO: 5558886 - DNA, 25 bp, Homo sapien
agctggcatttcagatgggccctga

SEQ ID NO: 5558887 - DNA, 25 bp, Homo sapien
tcccagctatgttgccagcccctta

SEQ ID NO: 5558888 - DNA, 25 bp, Homo sapien
aagagaaagagatatcttccagcca

SEQ ID NO: 5558889 - DNA, 25 bp, Homo sapien
cttacacataagggggaatacaaag

SEQ ID NO: 5558890 - DNA, 25 bp, Homo sapien
ggggacactcagaacagatctattc

SEQ ID NO: 5558891 - DNA, 25 bp, Homo sapien
aatatctgaacaagacaaagaagag

SEQ ID NO: 5558892 - DNA, 25 bp, Homo sapien
ttggacaagatgaactcaagagtct

SEQ ID NO: 5558893 - DNA, 25 bp, Homo sapien
acaaataaatggtggatagcatgtc

SEQ ID NO: 5558894 - DNA, 25 bp, Homo sapien
aatgctagaagatttggacaagatg

SEQ ID NO: 5558895 - DNA, 25 bp, Homo sapien
ataaggaatggaaatcagtctcccc

SEQ ID NO: 5558896 - DNA, 25 bp, Homo sapien
tgcctgagaaattcagccccaagcc

SEQ ID NO: 5558897 - DNA, 25 bp, Homo sapien
aattcagccccaagcccaaagatcc

SEQ ID NO: 5558898 - DNA, 25 bp, Homo sapien
caaagatcccacagaggcttcatcc

SEQ ID NO: 5558899 - DNA, 25 bp, Homo sapien
gtggatagcatgtctgttatgtgtc

SEQ ID NO: 5558900 - DNA, 25 bp, Homo sapien
ttttttggggacactcagaacagat

SEQ ID NO: 5558901 - DNA, 25 bp, Homo sapien
tagggttggccgttcattgccgtct

SEQ ID NO: 5558902 - DNA, 25 bp, Homo sapien
acctttcgaggcctctgtgcttgag

SEQ ID NO: 5558903 - DNA, 25 bp, Homo sapien
agaccatcccttcccaagaggcttc

SEQ ID NO: 5558904 - DNA, 25 bp, Homo sapien
cggttggctctaggagactcctcta

SEQ ID NO: 5558905 - DNA, 25 bp, Homo sapien
gtgctgaggatgtctgatcaacctt

SEQ ID NO: 5558906 - DNA, 25 bp, Homo sapien
gtagctggccctgtgttttatttcc

SEQ ID NO: 5558907 - DNA, 25 bp, Homo sapien
aatgggaagacaccactaggtctaa

SEQ ID NO: 5558908 - DNA, 25 bp, Homo sapien
tcattgccgtcttgtgtgccaggcc

SEQ ID NO: 5558909 - DNA, 25 bp, Homo sapien
ttgaacaagggaacttgcatcttca

SEQ ID NO: 5558910 - DNA, 25 bp, Homo sapien
gcactgggccccacaaattttgtag

SEQ ID NO: 5558911 - DNA, 25 bp, Homo sapien
gggacatccctaggcctctgcagaa

SEQ ID NO: 5558912 - DNA, 25 bp, Homo sapien
ccgatcgagggtagcttgctattct

SEQ ID NO: 5558913 - DNA, 25 bp, Homo sapien
tcacaagctctatggggctagtacc

SEQ ID NO: 5558914 - DNA, 25 bp, Homo sapien
gcagggctgccttgtatccaactcc

SEQ ID NO: 5558915 - DNA, 25 bp, Homo sapien
ggagggaattctgccaggcttcatg

SEQ ID NO: 5558916 - DNA, 25 bp, Homo sapien
tccaactccaaggtgaaaggaggca

SEQ ID NO: 5558917 - DNA, 25 bp, Homo sapien
cctggaagagaatggaatgttctag

SEQ ID NO: 5558918 - DNA, 25 bp, Homo sapien
tgatagaaaacgtaacagcaaccct

SEQ ID NO: 5558919 - DNA, 25 bp, Homo sapien
aatacacgttgagtgaatggacttc

SEQ ID NO: 5558920 - DNA, 25 bp, Homo sapien
tctcatccccagggagtgctgatgg

SEQ ID NO: 5558921 - DNA, 25 bp, Homo sapien
ccagcaaacacttgtggagggaatt

SEQ ID NO: 5558922 - DNA, 25 bp, Homo sapien
cccaccagtaaaaaaggctcccaca

SEQ ID NO: 5558923 - DNA, 25 bp, Homo sapien
acctcaaggctgacaaatggtggtt

SEQ ID NO: 5558924 - DNA, 25 bp, Homo sapien
caatacgggacaaaaaccaccttgc

SEQ ID NO: 5558925 - DNA, 25 bp, Homo sapien
cagttagcatccacaaaagcaccat

SEQ ID NO: 5558926 - DNA, 25 bp, Homo sapien
aactgaagtagtacgtggtatggtc

SEQ ID NO: 5558927 - DNA, 25 bp, Homo sapien
aggcagtgggttgaaattatccctc

SEQ ID NO: 5558928 - DNA, 25 bp, Homo sapien
ttagcaccacagaattttaggacct

SEQ ID NO: 5558929 - DNA, 25 bp, Homo sapien
aatgtttctggtaagaggcagtggg

SEQ ID NO: 5558930 - DNA, 25 bp, Homo sapien
gttcagcatgtgtgcagttagcatc

SEQ ID NO: 5558931 - DNA, 25 bp, Homo sapien
gtatgggagaattagcaccacagaa

SEQ ID NO: 5558932 - DNA, 25 bp, Homo sapien
ggtttgaaaacgaaaggcttgatga

SEQ ID NO: 5558933 - DNA, 25 bp, Homo sapien
aagcaccattgggtatgggagaatt

SEQ ID NO: 5558934 - DNA, 25 bp, Homo sapien
actaagagccccaaagttaaagctg

SEQ ID NO: 5558935 - DNA, 25 bp, Homo sapien
caggagggccgttattaaattgttc

SEQ ID NO: 5558936 - DNA, 25 bp, Homo sapien
agaaaatgatctggtgagcaaatac

SEQ ID NO: 5558937 - DNA, 25 bp, Homo sapien
aacttgcagcaagtacctagaaaat

SEQ ID NO: 5558938 - DNA, 25 bp, Homo sapien
aagaatctggagaaaagaaactaag

SEQ ID NO: 5558939 - DNA, 25 bp, Homo sapien
ttaaagctggtaaaatagttcaaga

SEQ ID NO: 5558940 - DNA, 25 bp, Homo sapien
agttcaaggtcccaagaaaatgatc

SEQ ID NO: 5558941 - DNA, 25 bp, Homo sapien
aatggttaggacaaaacattcacag

SEQ ID NO: 5558942 - DNA, 25 bp, Homo sapien
aaataacaagaatctggagaaaaga

SEQ ID NO: 5558943 - DNA, 25 bp, Homo sapien
tctggatgaattagtgaagcaatga

SEQ ID NO: 5558944 - DNA, 25 bp, Homo sapien
acattcacagttcaaggtcccaaga

SEQ ID NO: 5558945 - DNA, 25 bp, Homo sapien
aggtttttgtttacgggatctcaga

SEQ ID NO: 5558946 - DNA, 25 bp, Homo sapien
tctgagatcccgtaaacaaaaacct

SEQ ID NO: 5558947 - DNA, 25 bp, Homo sapien
ccacggcctctatcatgaatgcacc

SEQ ID NO: 5558948 - DNA, 25 bp, Homo sapien
aggatgaactggatttcagcaacct

SEQ ID NO: 5558949 - DNA, 25 bp, Homo sapien
gagggtgctaaatgatggacacaaa

SEQ ID NO: 5558950 - DNA, 25 bp, Homo sapien
tatgttctggctggagaacaaacct

SEQ ID NO: 5558951 - DNA, 25 bp, Homo sapien
aagtgaattttggcaagaagagtcc

SEQ ID NO: 5558952 - DNA, 25 bp, Homo sapien
ctggcagtgctaaatgcttgctcaa

SEQ ID NO: 5558953 - DNA, 25 bp, Homo sapien
tcctgaggccttaggatgaactgga

SEQ ID NO: 5558954 - DNA, 25 bp, Homo sapien
ggcaggctctagaccacggcctcta

SEQ ID NO: 5558955 - DNA, 25 bp, Homo sapien
ttcacagaacatcctgaggccttag

SEQ ID NO: 5558956 - DNA, 25 bp, Homo sapien
agaagagtccccagaaacccaatat

SEQ ID NO: 5558957 - DNA, 25 bp, Homo sapien
ggaaatcccgtagctcagaaagcca

SEQ ID NO: 5558958 - DNA, 25 bp, Homo sapien
ccagaactgctaagtctaagcccag

SEQ ID NO: 5558959 - DNA, 25 bp, Homo sapien
taatgaggagaaagcctttagctgt

SEQ ID NO: 5558960 - DNA, 25 bp, Homo sapien
ctttagctgtacctccacagtggcc

SEQ ID NO: 5558961 - DNA, 25 bp, Homo sapien
gaactgctaagtctaagcccagagg

SEQ ID NO: 5558962 - DNA, 25 bp, Homo sapien
cctccacagtggccataccctaggc

SEQ ID NO: 5558963 - DNA, 25 bp, Homo sapien
tccacagtggccataccctaggcag

SEQ ID NO: 5558964 - DNA, 25 bp, Homo sapien
acccctctcccagaactgctaagtc

SEQ ID NO: 5558965 - DNA, 25 bp, Homo sapien
tgaggagaaagcctttagctgtacc

SEQ ID NO: 5558966 - DNA, 25 bp, Homo sapien
agttaatgaggagaaagcctttagc

SEQ ID NO: 5558967 - DNA, 25 bp, Homo sapien
agtggccataccctaggcagcattc

SEQ ID NO: 5558968 - DNA, 25 bp, Homo sapien
ctcccagaactgctaagtctaagcc

SEQ ID NO: 5558969 - DNA, 25 bp, Homo sapien
taggtatttgtgggccaagtcttgc

SEQ ID NO: 5558970 - DNA, 25 bp, Homo sapien
atctgtgagtaccttgagagttgtc

SEQ ID NO: 5558971 - DNA, 25 bp, Homo sapien
agccgatgtaatatgtctatgtgat

SEQ ID NO: 5558972 - DNA, 25 bp, Homo sapien
aagctttgaactgatgaaaggtctt

SEQ ID NO: 5558973 - DNA, 25 bp, Homo sapien
tgagagttgtcatgtagaataagat

SEQ ID NO: 5558974 - DNA, 25 bp, Homo sapien
ttactacaatgcttatgaggaatgc

SEQ ID NO: 5558975 - DNA, 25 bp, Homo sapien
atgaggaatgcaaatggaattagtt

SEQ ID NO: 5558976 - DNA, 25 bp, Homo sapien
gtgggttaaacagatctgtgagtac

SEQ ID NO: 5558977 - DNA, 25 bp, Homo sapien
ttgggattccctatgtaacttcagc

SEQ ID NO: 5558978 - DNA, 25 bp, Homo sapien
tgtagaataagatgctaagagggca

SEQ ID NO: 5558979 - DNA, 25 bp, Homo sapien
tttcatcagcagaagagagagaata

SEQ ID NO: 5558980 - DNA, 25 bp, Homo sapien
gaggaagttgcagctgatcaccaac

SEQ ID NO: 5558981 - DNA, 25 bp, Homo sapien
taataagcgataaagacaacaataa

SEQ ID NO: 5558982 - DNA, 25 bp, Homo sapien
ctggaagcagcagtggtctttctga

SEQ ID NO: 5558983 - DNA, 25 bp, Homo sapien
aagtgatgtaatggaaaatagaagt

SEQ ID NO: 5558984 - DNA, 25 bp, Homo sapien
agacaacaataataccagggagctg

SEQ ID NO: 5558985 - DNA, 25 bp, Homo sapien
accaacctgaatgaagtgatgtaat

SEQ ID NO: 5558986 - DNA, 25 bp, Homo sapien
ccgtgaggctgttgagatcactcag

SEQ ID NO: 5558987 - DNA, 25 bp, Homo sapien
gtcaggcactattggtgctgctggt

SEQ ID NO: 5558988 - DNA, 25 bp, Homo sapien
cagggagctgagtaatctaatacaa

SEQ ID NO: 5558989 - DNA, 25 bp, Homo sapien
tttcaatgtgccgtgaggctgttga

SEQ ID NO: 5558990 - DNA, 25 bp, Homo sapien
tgctttagtaactgaggaggagaga

SEQ ID NO: 5558991 - DNA, 25 bp, Homo sapien
tagttgtgaaagtagttcgtatata

SEQ ID NO: 5558992 - DNA, 25 bp, Homo sapien
ggaaggaatgtgccttttcccactc

SEQ ID NO: 5558993 - DNA, 25 bp, Homo sapien
aactttggctgcacactggaatctc

SEQ ID NO: 5558994 - DNA, 25 bp, Homo sapien
ataatgctcaaaggatcatagattt

SEQ ID NO: 5558995 - DNA, 25 bp, Homo sapien
ctccacactaagcccatgggacatg

SEQ ID NO: 5558996 - DNA, 25 bp, Homo sapien
ggggctgccttggccatcttgccat

SEQ ID NO: 5558997 - DNA, 25 bp, Homo sapien
gaatatctgggtgcttccaggatat

SEQ ID NO: 5558998 - DNA, 25 bp, Homo sapien
ttgttggcctgcctctccaccccac

SEQ ID NO: 5558999 - DNA, 25 bp, Homo sapien
tcatgctccctgactatgccctcac

SEQ ID NO: 5559000 - DNA, 25 bp, Homo sapien
gccttgctctgtgagaagccccttc

SEQ ID NO: 5559001 - DNA, 25 bp, Homo sapien
gccatctgcatggcagtggcagagg

SEQ ID NO: 5559002 - DNA, 25 bp, Homo sapien
acaaagtcaagggctcatatgtccc

SEQ ID NO: 5559003 - DNA, 25 bp, Homo sapien
ttctgcattctcttggacggggcct

SEQ ID NO: 5559004 - DNA, 25 bp, Homo sapien
atagtaaatggaagttggttaggat

SEQ ID NO: 5559005 - DNA, 25 bp, Homo sapien
aggtcagttgtctggggtacaaata

SEQ ID NO: 5559006 - DNA, 25 bp, Homo sapien
aggtcatgtagttaggtgctgtgtg

SEQ ID NO: 5559007 - DNA, 25 bp, Homo sapien
ctgtgtgttggtgcaaaacaaagtc

SEQ ID NO: 5559008 - DNA, 25 bp, Homo sapien
agttggttaggatggattgctaaat

SEQ ID NO: 5559009 - DNA, 25 bp, Homo sapien
cacagagctagtgagactgtcatat

SEQ ID NO: 5559010 - DNA, 25 bp, Homo sapien
taccccaggatcaggttcattcccc

SEQ ID NO: 5559011 - DNA, 25 bp, Homo sapien
ccccattgttgtcagaaaggtcagt

SEQ ID NO: 5559012 - DNA, 25 bp, Homo sapien
gtacctggaaggtttcacagagcta

SEQ ID NO: 5559013 - DNA, 25 bp, Homo sapien
gggttcatggttaaatggcgtcagc

SEQ ID NO: 5559014 - DNA, 25 bp, Homo sapien
tgttagttgattgcaaaagtgcagc

SEQ ID NO: 5559015 - DNA, 25 bp, Homo sapien
gcttgttaagaagtccaaagcattt

SEQ ID NO: 5559016 - DNA, 25 bp, Homo sapien
ccaggaaatgtcaccgggttcatgg

SEQ ID NO: 5559017 - DNA, 25 bp, Homo sapien
tccttagccccagcaagtcaagtcc

SEQ ID NO: 5559018 - DNA, 25 bp, Homo sapien
gcttcaatgtagcgtgagctgtgac

SEQ ID NO: 5559019 - DNA, 25 bp, Homo sapien
acaggcaaaatgaacctccagattt

SEQ ID NO: 5559020 - DNA, 25 bp, Homo sapien
aggtttgtaacacaagcagacactc

SEQ ID NO: 5559021 - DNA, 25 bp, Homo sapien
agctgtgacccttggatggtgtgaa

SEQ ID NO: 5559022 - DNA, 25 bp, Homo sapien
aacaaatgtaacaaggagacaagca

SEQ ID NO: 5559023 - DNA, 25 bp, Homo sapien
attagtaggaacactgaattgcttt

SEQ ID NO: 5559024 - DNA, 25 bp, Homo sapien
aggcgtgaatgctgactagctagta

SEQ ID NO: 5559025 - DNA, 25 bp, Homo sapien
aattgttgtagcctttgtgatctcc

SEQ ID NO: 5559026 - DNA, 25 bp, Homo sapien
ctagtattattactgaggagcaggt

SEQ ID NO: 5559027 - DNA, 25 bp, Homo sapien
ctgagtagttttgaagaggattttt

SEQ ID NO: 5559028 - DNA, 25 bp, Homo sapien
actggaagatttagcctgtgatttt

SEQ ID NO: 5559029 - DNA, 25 bp, Homo sapien
ctgtttaactgcttgaacttgaccc

SEQ ID NO: 5559030 - DNA, 25 bp, Homo sapien
gaccttgtactcatgcgtgtttcca

SEQ ID NO: 5559031 - DNA, 25 bp, Homo sapien
ttttgtgtcctggtaggcgtgaatg

SEQ ID NO: 5559032 - DNA, 25 bp, Homo sapien
tgaatatcccctcacagtcaccgta

SEQ ID NO: 5559033 - DNA, 25 bp, Homo sapien
gatgctgcctttgatgaccttgtac

SEQ ID NO: 5559034 - DNA, 25 bp, Homo sapien
actgcgtaacgaccttcttgaaacc

SEQ ID NO: 5559035 - DNA, 25 bp, Homo sapien
gagtgtggcttttgtctaatggagt

SEQ ID NO: 5559036 - DNA, 25 bp, Homo sapien
aaagaactcaggtaaaaacacactc

SEQ ID NO: 5559037 - DNA, 25 bp, Homo sapien
cggagggctgattgtgctattcagt

SEQ ID NO: 5559038 - DNA, 25 bp, Homo sapien
aaaatagagaccactagttccccta

SEQ ID NO: 5559039 - DNA, 25 bp, Homo sapien
tctaatggagtaaatcccaaggaga

SEQ ID NO: 5559040 - DNA, 25 bp, Homo sapien
tttcaaccgaaaaacagagtctgta

SEQ ID NO: 5559041 - DNA, 25 bp, Homo sapien
tctagctttgatgaaaaaggaagac

SEQ ID NO: 5559042 - DNA, 25 bp, Homo sapien
gaagcttaggtctcataaagaagat

SEQ ID NO: 5559043 - DNA, 25 bp, Homo sapien
accacaccaggctctcaagtatttt

SEQ ID NO: 5559044 - DNA, 25 bp, Homo sapien
agtagaaacactgccatcttggatc

SEQ ID NO: 5559045 - DNA, 25 bp, Homo sapien
acagagtctgtaagaagcttaggtc

SEQ ID NO: 5559046 - DNA, 25 bp, Homo sapien
catgcctacctgtacagagacactt

SEQ ID NO: 5559047 - DNA, 25 bp, Homo sapien
ggaggaagagaaggattcatttcat

SEQ ID NO: 5559048 - DNA, 25 bp, Homo sapien
cacagaatgcgaaacagtggataag

SEQ ID NO: 5559049 - DNA, 25 bp, Homo sapien
acttcaagacattgcaggagaaggg

SEQ ID NO: 5559050 - DNA, 25 bp, Homo sapien
gtggcacaatctcgatctcaactca

SEQ ID NO: 5559051 - DNA, 25 bp, Homo sapien
ggatgcagtgcattgctcttctgta

SEQ ID NO: 5559052 - DNA, 25 bp, Homo sapien
cggggtagcaaaagcatatagaaag

SEQ ID NO: 5559053 - DNA, 25 bp, Homo sapien
attcttctgttaacggggtagcaaa

SEQ ID NO: 5559054 - DNA, 25 bp, Homo sapien
atgagtaacacaaaccacagaatgc

SEQ ID NO: 5559055 - DNA, 25 bp, Homo sapien
aagagagggactactgtacatactt

SEQ ID NO: 5559056 - DNA, 25 bp, Homo sapien
acatactttcgcctaagacagttct

SEQ ID NO: 5559057 - DNA, 25 bp, Homo sapien
ctacggaagtggtaactcttaggta

SEQ ID NO: 5559058 - DNA, 25 bp, Homo sapien
ttgatgttataggctacggaagtgg

SEQ ID NO: 5559059 - DNA, 25 bp, Homo sapien
cttaggtaagtaacaactaactgct

SEQ ID NO: 5559060 - DNA, 25 bp, Homo sapien
aagcaagacacaaaataattcatga

SEQ ID NO: 5559061 - DNA, 25 bp, Homo sapien
gaaaatacactactgccacatgcaa

SEQ ID NO: 5559062 - DNA, 25 bp, Homo sapien
catcaataggataaacagcaatata

SEQ ID NO: 5559063 - DNA, 25 bp, Homo sapien
ataaactatttgagtcagtaggaag

SEQ ID NO: 5559064 - DNA, 25 bp, Homo sapien
agcttcatagctgatagagttcaat

SEQ ID NO: 5559065 - DNA, 25 bp, Homo sapien
atatgctagtaaacagtagacagtt

SEQ ID NO: 5559066 - DNA, 25 bp, Homo sapien
cagagtgcaatgagaaatatagttc

SEQ ID NO: 5559067 - DNA, 25 bp, Homo sapien
aattgagtgaaataagcaagacaca

SEQ ID NO: 5559068 - DNA, 25 bp, Homo sapien
ggtgaaagtttgtggtacagtgtgg

SEQ ID NO: 5559069 - DNA, 25 bp, Homo sapien
tggtctctaaggcactgaatttcag

SEQ ID NO: 5559070 - DNA, 25 bp, Homo sapien
ctgaagaatggtgaaagtttgtggt

SEQ ID NO: 5559071 - DNA, 25 bp, Homo sapien
aaacctgaagaatggtgaaagtttg

SEQ ID NO: 5559072 - DNA, 25 bp, Homo sapien
tcaaaaaaaggattctacgactatg

SEQ ID NO: 5559073 - DNA, 25 bp, Homo sapien
gcagtgagtacagcctggaattcca

SEQ ID NO: 5559074 - DNA, 25 bp, Homo sapien
atcagtggatatgtgagatgcaatg

SEQ ID NO: 5559075 - DNA, 25 bp, Homo sapien
ggagtgtgtggtctctaaggcactg

SEQ ID NO: 5559076 - DNA, 25 bp, Homo sapien
tccctggtaatgagcgaggatatga

SEQ ID NO: 5559077 - DNA, 25 bp, Homo sapien
gaaaacagtaagtgtggctttgggc

SEQ ID NO: 5559078 - DNA, 25 bp, Homo sapien
attagtagaatggtcaagactgggg

SEQ ID NO: 5559079 - DNA, 25 bp, Homo sapien
acatgtcaagtgcttagagtaatgc

SEQ ID NO: 5559080 - DNA, 25 bp, Homo sapien
tttctcaaggagcacatagacaaca

SEQ ID NO: 5559081 - DNA, 25 bp, Homo sapien
aaggagctgggctttagttataaac

SEQ ID NO: 5559082 - DNA, 25 bp, Homo sapien
acaagcctgggtcataacgtcattt

SEQ ID NO: 5559083 - DNA, 25 bp, Homo sapien
acagttaaactctcagcatcatgcc

SEQ ID NO: 5559084 - DNA, 25 bp, Homo sapien
tggcaaagatagcaagggcttttga

SEQ ID NO: 5559085 - DNA, 25 bp, Homo sapien
tagagtaatgcatggcaaagatagc

SEQ ID NO: 5559086 - DNA, 25 bp, Homo sapien
gagcacatagacaacaagcctgggt

SEQ ID NO: 5559087 - DNA, 25 bp, Homo sapien
cccataaggcaaacaattacagctt

SEQ ID NO: 5559088 - DNA, 25 bp, Homo sapien
tttaggtaccagggtatgatgcaag

SEQ ID NO: 5559089 - DNA, 25 bp, Homo sapien
gcacctgaagtgagtttttatgtct

SEQ ID NO: 5559090 - DNA, 25 bp, Homo sapien
aaggctctcagaagaaggtaacaat

SEQ ID NO: 5559091 - DNA, 25 bp, Homo sapien
ttgttaggagccaagcttccacttg

SEQ ID NO: 5559092 - DNA, 25 bp, Homo sapien
gcagcttgtgcttgttaggagccaa

SEQ ID NO: 5559093 - DNA, 25 bp, Homo sapien
ggggaataaaaaagatggattcatg

SEQ ID NO: 5559094 - DNA, 25 bp, Homo sapien
ctgcagggagactcacaatagcatg

SEQ ID NO: 5559095 - DNA, 25 bp, Homo sapien
cctataagagttttcccagagttac

SEQ ID NO: 5559096 - DNA, 25 bp, Homo sapien
agcatgaggcccccagcttgtctca

SEQ ID NO: 5559097 - DNA, 25 bp, Homo sapien
caatctgcttagaggatgtttcttc

SEQ ID NO: 5559098 - DNA, 25 bp, Homo sapien
aaacagtagtattaaggatagaatt

SEQ ID NO: 5559099 - DNA, 25 bp, Homo sapien
gatggattcatggtcaggaacctat

SEQ ID NO: 5559100 - DNA, 25 bp, Homo sapien
gaagaaggtaacaattggcagcttg

SEQ ID NO: 5559101 - DNA, 25 bp, Homo sapien
aatttaacacagtgaatgctttttc

SEQ ID NO: 5559102 - DNA, 25 bp, Homo sapien
gaacgtgtacaggagtaaccagtac

SEQ ID NO: 5559103 - DNA, 25 bp, Homo sapien
aaattgtgaacgtgtacaggagtaa

SEQ ID NO: 5559104 - DNA, 25 bp, Homo sapien
attaataaatatgtgtgcacatgac

SEQ ID NO: 5559105 - DNA, 25 bp, Homo sapien
tgttctccaggttgggaagaatgta

SEQ ID NO: 5559106 - DNA, 25 bp, Homo sapien
ggaagaatgtaattgacctcagctg

SEQ ID NO: 5559107 - DNA, 25 bp, Homo sapien
aaatagaaattaatctgcatccttc

SEQ ID NO: 5559108 - DNA, 25 bp, Homo sapien
tatgtgtgcacatgacatttgtcaa

SEQ ID NO: 5559109 - DNA, 25 bp, Homo sapien
gaaaattgtgaacgtgtacaggagt

SEQ ID NO: 5559110 - DNA, 25 bp, Homo sapien
ctgttctccaggttgggaagaatgt

SEQ ID NO: 5559111 - DNA, 25 bp, Homo sapien
gtgtacaggagtaaccagtacaggg

SEQ ID NO: 5559112 - DNA, 25 bp, Homo sapien
tcagtgataggtcacatgaaggaag

SEQ ID NO: 5559113 - DNA, 25 bp, Homo sapien
tcacatcatgcctctgagcagaccc

SEQ ID NO: 5559114 - DNA, 25 bp, Homo sapien
agaacaaagcttttatcccagacat

SEQ ID NO: 5559115 - DNA, 25 bp, Homo sapien
tcccagacatgtttcacatcatgcc

SEQ ID NO: 5559116 - DNA, 25 bp, Homo sapien
cttaacacaaaaaggtttgctgtca

SEQ ID NO: 5559117 - DNA, 25 bp, Homo sapien
ttgacctcagctggtgagctcagtg

SEQ ID NO: 5559118 - DNA, 25 bp, Homo sapien
gtggtgtttgcctaatggctgctcc

SEQ ID NO: 5559119 - DNA, 25 bp, Homo sapien
aggtttgctgtcaatagaacaaagc

SEQ ID NO: 5559120 - DNA, 25 bp, Homo sapien
ctctgagcagacccaaattctgttc

SEQ ID NO: 5559121 - DNA, 25 bp, Homo sapien
atggctgctcctggactgctcagta

SEQ ID NO: 5559122 - DNA, 25 bp, Homo sapien
gcaaggagtggtgtttgcctaatgg

SEQ ID NO: 5559123 - DNA, 25 bp, Homo sapien
agtgtcctgggttactcagaggtcg

SEQ ID NO: 5559124 - DNA, 25 bp, Homo sapien
atttcccaaacaggagtgtcctggg

SEQ ID NO: 5559125 - DNA, 25 bp, Homo sapien
tccagaacacaatgtatagggtggc

SEQ ID NO: 5559126 - DNA, 25 bp, Homo sapien
gtatgccatgaggttggtcagattt

SEQ ID NO: 5559127 - DNA, 25 bp, Homo sapien
attgtgcccctgccgtatggatggt

SEQ ID NO: 5559128 - DNA, 25 bp, Homo sapien
tcaaggggtttcacaattgcttccc

SEQ ID NO: 5559129 - DNA, 25 bp, Homo sapien
gccatggagccctcccttggccgtt

SEQ ID NO: 5559130 - DNA, 25 bp, Homo sapien
atagggtggcaattatatgttgact

SEQ ID NO: 5559131 - DNA, 25 bp, Homo sapien
gtcacagtacagcatgtccagatcc

SEQ ID NO: 5559132 - DNA, 25 bp, Homo sapien
aaccattcccgtgacaggatcaatc

SEQ ID NO: 5559133 - DNA, 25 bp, Homo sapien
agtctttcccggtagacacagctac

SEQ ID NO: 5559134 - DNA, 25 bp, Homo sapien
tggtagtttagtgacattctgctgt

SEQ ID NO: 5559135 - DNA, 25 bp, Homo sapien
tgtttgacatgaactgaatcactta

SEQ ID NO: 5559136 - DNA, 25 bp, Homo sapien
ggggtaagaatcctgtgaaatgttg

SEQ ID NO: 5559137 - DNA, 25 bp, Homo sapien
tctagtcaaatacaggtgctccatc

SEQ ID NO: 5559138 - DNA, 25 bp, Homo sapien
gagcaaaaaacgtgtctgtcactcc

SEQ ID NO: 5559139 - DNA, 25 bp, Homo sapien
tcactattgtgagatgacgtggagc

SEQ ID NO: 5559140 - DNA, 25 bp, Homo sapien
ttgatcactgatccaacttgggcct

SEQ ID NO: 5559141 - DNA, 25 bp, Homo sapien
gagccaaatgaagggccactttgat

SEQ ID NO: 5559142 - DNA, 25 bp, Homo sapien
tatagacattaggcagattaggtac

SEQ ID NO: 5559143 - DNA, 25 bp, Homo sapien
aggcagattaggtactatgtctttc

SEQ ID NO: 5559144 - DNA, 25 bp, Homo sapien
tagccaaagttattttagatgccac

SEQ ID NO: 5559145 - DNA, 25 bp, Homo sapien
atcattaattatagacaccaggcat

SEQ ID NO: 5559146 - DNA, 25 bp, Homo sapien
atgcctggtgtctataattaatgat

SEQ ID NO: 5559147 - DNA, 25 bp, Homo sapien
ttttctaccaagacagaaggacagg

SEQ ID NO: 5559148 - DNA, 25 bp, Homo sapien
gtggtggcactagacatatactgag

SEQ ID NO: 5559149 - DNA, 25 bp, Homo sapien
gccagacggactcacagctgtctct

SEQ ID NO: 5559150 - DNA, 25 bp, Homo sapien
aaggaggccctttacaaggctagct

SEQ ID NO: 5559151 - DNA, 25 bp, Homo sapien
aggaaccttccaaacagggcagcct

SEQ ID NO: 5559152 - DNA, 25 bp, Homo sapien
atgaagccccttaccacccactgtg

SEQ ID NO: 5559153 - DNA, 25 bp, Homo sapien
tatactgagagacccccaagaggga

SEQ ID NO: 5559154 - DNA, 25 bp, Homo sapien
ccttcaggccccattctcagacacc

SEQ ID NO: 5559155 - DNA, 25 bp, Homo sapien
gccagtcccgcataaaccctccagc

SEQ ID NO: 5559156 - DNA, 25 bp, Homo sapien
tctatctcgctacacaaggaggccc

SEQ ID NO: 5559157 - DNA, 25 bp, Homo sapien
acaaccccttaagccagacggactc

SEQ ID NO: 5559158 - DNA, 25 bp, Homo sapien
tgagcgactgctgccctgtgatttc

SEQ ID NO: 5559159 - DNA, 25 bp, Homo sapien
ttaggccttcgactacaaaagtatc

SEQ ID NO: 5559160 - DNA, 25 bp, Homo sapien
tgtaataagaaatatcaggtaagtc

SEQ ID NO: 5559161 - DNA, 25 bp, Homo sapien
taaaagagtgatggcaatatgctag

SEQ ID NO: 5559162 - DNA, 25 bp, Homo sapien
cagcagtgtgggctaaccttccttt

SEQ ID NO: 5559163 - DNA, 25 bp, Homo sapien
atgtggacatcatgtttggggcaat

SEQ ID NO: 5559164 - DNA, 25 bp, Homo sapien
ttcttgtctacaaaggcagggtgag

SEQ ID NO: 5559165 - DNA, 25 bp, Homo sapien
tctggcactcccagtggaaaggaag

SEQ ID NO: 5559166 - DNA, 25 bp, Homo sapien
catcctgggaaaacacatcttgctc

SEQ ID NO: 5559167 - DNA, 25 bp, Homo sapien
ggtaagtcttaggatgtggacatca

SEQ ID NO: 5559168 - DNA, 25 bp, Homo sapien
ttggggcaatgtctccctcaccgcc

SEQ ID NO: 5559169 - DNA, 25 bp, Homo sapien
ctcgcacttgcctttcccactcaga

SEQ ID NO: 5559170 - DNA, 25 bp, Homo sapien
caggtccccctaccctgggctagag

SEQ ID NO: 5559171 - DNA, 25 bp, Homo sapien
acaaggagctaacaattcaaggaca

SEQ ID NO: 5559172 - DNA, 25 bp, Homo sapien
ctctctctcactcaggtccccctac

SEQ ID NO: 5559173 - DNA, 25 bp, Homo sapien
tcttggaggcctttatctctcgcac

SEQ ID NO: 5559174 - DNA, 25 bp, Homo sapien
gggcccgcgtgtctcaatcttgctg

SEQ ID NO: 5559175 - DNA, 25 bp, Homo sapien
aaaccgcatgaaggacttgcggctt

SEQ ID NO: 5559176 - DNA, 25 bp, Homo sapien
tcttgctttggagactgctgaggtc

SEQ ID NO: 5559177 - DNA, 25 bp, Homo sapien
acatataaaaaggtagcggagttgt

SEQ ID NO: 5559178 - DNA, 25 bp, Homo sapien
tgctgaggtcaaagtttaaaccgca

SEQ ID NO: 5559179 - DNA, 25 bp, Homo sapien
cttgcggcttggagtttttgtgtat

SEQ ID NO: 5559180 - DNA, 25 bp, Homo sapien
ccccaatcccaggagagtgactcct

SEQ ID NO: 5559181 - DNA, 25 bp, Homo sapien
aattatcaggcagctaactacttag

SEQ ID NO: 5559182 - DNA, 25 bp, Homo sapien
gcagctaactacttagaggcagggc

SEQ ID NO: 5559183 - DNA, 25 bp, Homo sapien
ggttcaagccaatcataatggtctc

SEQ ID NO: 5559184 - DNA, 25 bp, Homo sapien
gctggcacgcagtggtactatcata

SEQ ID NO: 5559185 - DNA, 25 bp, Homo sapien
gtaagtaaaatgccccatgctgtgg

SEQ ID NO: 5559186 - DNA, 25 bp, Homo sapien
cctcccttgctaatagaagccagct

SEQ ID NO: 5559187 - DNA, 25 bp, Homo sapien
tctgtagcagaaactaagtattacc

SEQ ID NO: 5559188 - DNA, 25 bp, Homo sapien
gagtgactcctaattggttcaagcc

SEQ ID NO: 5559189 - DNA, 25 bp, Homo sapien
catgctgtggcctgacaatagtcat

SEQ ID NO: 5559190 - DNA, 25 bp, Homo sapien
agaagccagcttttgcagaattatc

SEQ ID NO: 5559191 - DNA, 25 bp, Homo sapien
agagtgagccccactgcagtgtggg

SEQ ID NO: 5559192 - DNA, 25 bp, Homo sapien
gccccactgcagtgtggggcgcaac

SEQ ID NO: 5559193 - DNA, 25 bp, Homo sapien
cgcaacttcatccgaggggtgcttg

SEQ ID NO: 5559194 - DNA, 25 bp, Homo sapien
gggctcacccgtgcggtctggtgag

SEQ ID NO: 5559195 - DNA, 25 bp, Homo sapien
gggtggcactccaagttcttcccca

SEQ ID NO: 5559196 - DNA, 25 bp, Homo sapien
gatgagctcaggctcacaggtgtgg

SEQ ID NO: 5559197 - DNA, 25 bp, Homo sapien
ttgttcccggtgcttatggagagga

SEQ ID NO: 5559198 - DNA, 25 bp, Homo sapien
gccccagcagggtccttcctgtcac

SEQ ID NO: 5559199 - DNA, 25 bp, Homo sapien
cgagctctccaggtgtgtccaaacc

SEQ ID NO: 5559200 - DNA, 25 bp, Homo sapien
tcctgtcacaccccgtgcaacgcag

SEQ ID NO: 5559201 - DNA, 25 bp, Homo sapien
ggtgttggatgagctcaggctcaca

SEQ ID NO: 5559202 - DNA, 25 bp, Homo sapien
tggcggtggccctctacctacaaag

SEQ ID NO: 5559203 - DNA, 25 bp, Homo sapien
agaggccatgggtgcctcacccata

SEQ ID NO: 5559204 - DNA, 25 bp, Homo sapien
caagctggccctagttccaagtagc

SEQ ID NO: 5559205 - DNA, 25 bp, Homo sapien
ttaaaaacaatgtagcagaggccat

SEQ ID NO: 5559206 - DNA, 25 bp, Homo sapien
gcagagtttctgtgataggaccatt

SEQ ID NO: 5559207 - DNA, 25 bp, Homo sapien
aggggacaactctgcagcatgttcc

SEQ ID NO: 5559208 - DNA, 25 bp, Homo sapien
ttggatagagtaattgtaaaatgtt

SEQ ID NO: 5559209 - DNA, 25 bp, Homo sapien
tctacctacaaaggatgggagtgga

SEQ ID NO: 5559210 - DNA, 25 bp, Homo sapien
aaagggcaggttatataactgtcca

SEQ ID NO: 5559211 - DNA, 25 bp, Homo sapien
gttccaagtagctaagagcctggcg

SEQ ID NO: 5559212 - DNA, 25 bp, Homo sapien
tatatgcatggaaaaacttgtgtaa

SEQ ID NO: 5559213 - DNA, 25 bp, Homo sapien
ggataccgagacttagatcacctcc

SEQ ID NO: 5559214 - DNA, 25 bp, Homo sapien
ttctccggacccaaaagatgcacat

SEQ ID NO: 5559215 - DNA, 25 bp, Homo sapien
gatgctttgatggactgccgtgagc

SEQ ID NO: 5559216 - DNA, 25 bp, Homo sapien
ccctgtgcaatagggatgtcaggcg

SEQ ID NO: 5559217 - DNA, 25 bp, Homo sapien
atacactgcctcagcggtgtggatg

SEQ ID NO: 5559218 - DNA, 25 bp, Homo sapien
ccgatgtgagatttcccctgggttc

SEQ ID NO: 5559219 - DNA, 25 bp, Homo sapien
aggcgcgcagttttgcacacgattg

SEQ ID NO: 5559220 - DNA, 25 bp, Homo sapien
cctcagtgcaagtactagatgggct

SEQ ID NO: 5559221 - DNA, 25 bp, Homo sapien
gggctgtaaaaccgcacatcgcgac

SEQ ID NO: 5559222 - DNA, 25 bp, Homo sapien
tcctggggtcataaacatggatacc

SEQ ID NO: 5559223 - DNA, 25 bp, Homo sapien
ggtactttgggctgcacacgcttct

SEQ ID NO: 5559224 - DNA, 25 bp, Homo sapien
atacagatagaccctcagaggagca

SEQ ID NO: 5559225 - DNA, 25 bp, Homo sapien
aacaagagtcgagttctaagaatgc

SEQ ID NO: 5559226 - DNA, 25 bp, Homo sapien
ttgctggaaggtttgcctgacctca

SEQ ID NO: 5559227 - DNA, 25 bp, Homo sapien
tgaaggcaatcggcaatgctctaac

SEQ ID NO: 5559228 - DNA, 25 bp, Homo sapien
tatgaattatgaaggcaatcggcaa

SEQ ID NO: 5559229 - DNA, 25 bp, Homo sapien
gtcgtcagtatgttctctgggcaga

SEQ ID NO: 5559230 - DNA, 25 bp, Homo sapien
cgctcagtgtgttctctgtcgtcag

SEQ ID NO: 5559231 - DNA, 25 bp, Homo sapien
tctaagaatgcagtttcaggggtga

SEQ ID NO: 5559232 - DNA, 25 bp, Homo sapien
tcaggggtgactagtacatattatt

SEQ ID NO: 5559233 - DNA, 25 bp, Homo sapien
agaggagcacagcacattatgaatt

SEQ ID NO: 5559234 - DNA, 25 bp, Homo sapien
aaaacccagctgcaagaatttaaaa

SEQ ID NO: 5559235 - DNA, 25 bp, Homo sapien
gtgacaggaaggctttaccaacctg

SEQ ID NO: 5559236 - DNA, 25 bp, Homo sapien
gccattcagagcggccacatgactt

SEQ ID NO: 5559237 - DNA, 25 bp, Homo sapien
atgaaagggcattgcaaagttgttc

SEQ ID NO: 5559238 - DNA, 25 bp, Homo sapien
tccccaccgagtcctgtggccattc

SEQ ID NO: 5559239 - DNA, 25 bp, Homo sapien
taaaagcgggtaatgaacattccta

SEQ ID NO: 5559240 - DNA, 25 bp, Homo sapien
ctccaaaagagcagaatcctcccac

SEQ ID NO: 5559241 - DNA, 25 bp, Homo sapien
aaagcataggtggctttgtgtgtgt

SEQ ID NO: 5559242 - DNA, 25 bp, Homo sapien
cacaattttaccggaagggtgacag

SEQ ID NO: 5559243 - DNA, 25 bp, Homo sapien
taatttaatggaagatgaaagggca

SEQ ID NO: 5559244 - DNA, 25 bp, Homo sapien
acaaaaaacgggtattctagtcatc

SEQ ID NO: 5559245 - DNA, 25 bp, Homo sapien
aggtagataggctcaggccacactt

SEQ ID NO: 5559246 - DNA, 25 bp, Homo sapien
atgacagaccacttccggagagtgg

SEQ ID NO: 5559247 - DNA, 25 bp, Homo sapien
ataattcaacgccaccacctacgat

SEQ ID NO: 5559248 - DNA, 25 bp, Homo sapien
caattactgctgggacagagtaaga

SEQ ID NO: 5559249 - DNA, 25 bp, Homo sapien
ccggagagtggtaactgtcaattac

SEQ ID NO: 5559250 - DNA, 25 bp, Homo sapien
aataccaagagaatggaagagataa

SEQ ID NO: 5559251 - DNA, 25 bp, Homo sapien
gggggcagatgtctgtactgtgtga

SEQ ID NO: 5559252 - DNA, 25 bp, Homo sapien
cttgacatggcaaatgtctgggctc

SEQ ID NO: 5559253 - DNA, 25 bp, Homo sapien
tggctagagaagctgatagaaaaca

SEQ ID NO: 5559254 - DNA, 25 bp, Homo sapien
gctggtggcataagaatgcccctcc

SEQ ID NO: 5559255 - DNA, 25 bp, Homo sapien
tgtctgtactgtgtgagtggccaca

SEQ ID NO: 5559256 - DNA, 25 bp, Homo sapien
gagtaagacaatgcagcaaagagat

SEQ ID NO: 5559257 - DNA, 25 bp, Homo sapien
atggacagtctgtaccgaactctcc

SEQ ID NO: 5559258 - DNA, 25 bp, Homo sapien
tcttttggtgcagtaatggacagtc

SEQ ID NO: 5559259 - DNA, 25 bp, Homo sapien
cattacgccacactgagatggttcc

SEQ ID NO: 5559260 - DNA, 25 bp, Homo sapien
agctagtatgtggcagagtcaagat

SEQ ID NO: 5559261 - DNA, 25 bp, Homo sapien
ataaaacgtgaggaattaaaatgta

SEQ ID NO: 5559262 - DNA, 25 bp, Homo sapien
aaaccaaggttcagtcagacagcta

SEQ ID NO: 5559263 - DNA, 25 bp, Homo sapien
aatctaagaaacaggatctggaatc

SEQ ID NO: 5559264 - DNA, 25 bp, Homo sapien
taatggttccaagcaaagaaaatgc

SEQ ID NO: 5559265 - DNA, 25 bp, Homo sapien
caggaagaagaagtgttctttccct

SEQ ID NO: 5559266 - DNA, 25 bp, Homo sapien
aaaatgtatatagagcctgaaaact

SEQ ID NO: 5559267 - DNA, 25 bp, Homo sapien
aacaacaataatgaacaaagcactt

SEQ ID NO: 5559268 - DNA, 25 bp, Homo sapien
ggaaaatggctcaggcccctgacac

SEQ ID NO: 5559269 - DNA, 25 bp, Homo sapien
ctcagttcgcacgcagctatgggag

SEQ ID NO: 5559270 - DNA, 25 bp, Homo sapien
gccccgtgtgagagactctaacagt

SEQ ID NO: 5559271 - DNA, 25 bp, Homo sapien
gcccctgacaccggaatccagacta

SEQ ID NO: 5559272 - DNA, 25 bp, Homo sapien
taggcgtcttaggaacatactcagt

SEQ ID NO: 5559273 - DNA, 25 bp, Homo sapien
caccggcctcagtgtcctagccctc

SEQ ID NO: 5559274 - DNA, 25 bp, Homo sapien
gccgaattccccactgagaccctcc

SEQ ID NO: 5559275 - DNA, 25 bp, Homo sapien
tcggggtgttaatgatgacagcccc

SEQ ID NO: 5559276 - DNA, 25 bp, Homo sapien
tctaacagttatcctgggggtgagg

SEQ ID NO: 5559277 - DNA, 25 bp, Homo sapien
agcattccagacataaagactcctc

SEQ ID NO: 5559278 - DNA, 25 bp, Homo sapien
aatcctgccctcacagcccgcctgg

SEQ ID NO: 5559279 - DNA, 25 bp, Homo sapien
ctccccagatggttgtgatgctcag

SEQ ID NO: 5559280 - DNA, 25 bp, Homo sapien
aatgacaagcagatacaaaccggtc

SEQ ID NO: 5559281 - DNA, 25 bp, Homo sapien
cagcccttgccgtaagtgggatgga

SEQ ID NO: 5559282 - DNA, 25 bp, Homo sapien
agcagttctcaacggctgagcaact

SEQ ID NO: 5559283 - DNA, 25 bp, Homo sapien
gagggaaaccacacacttaccagaa

SEQ ID NO: 5559284 - DNA, 25 bp, Homo sapien
ccggtctggaaaacatgcatcagcc

SEQ ID NO: 5559285 - DNA, 25 bp, Homo sapien
tcatcccagcaacacaccaggactg

SEQ ID NO: 5559286 - DNA, 25 bp, Homo sapien
tcagggttagcctgctcactgggag

SEQ ID NO: 5559287 - DNA, 25 bp, Homo sapien
gctgtcattgcccccaaggactggc

SEQ ID NO: 5559288 - DNA, 25 bp, Homo sapien
atggagagaacagttctagggctct

SEQ ID NO: 5559289 - DNA, 25 bp, Homo sapien
cagagtccacccaagcaaacaactt

SEQ ID NO: 5559290 - DNA, 25 bp, Homo sapien
ggttaagtaaaatcaaatggctcca

SEQ ID NO: 5559291 - DNA, 25 bp, Homo sapien
ctggtagttacctccatgggtttta

SEQ ID NO: 5559292 - DNA, 25 bp, Homo sapien
aatgtgataaaattaatatgacctc

SEQ ID NO: 5559293 - DNA, 25 bp, Homo sapien
ttctctggagcaatgacttctaact

SEQ ID NO: 5559294 - DNA, 25 bp, Homo sapien
atgaaaacagtcctgcgacttgttc

SEQ ID NO: 5559295 - DNA, 25 bp, Homo sapien
ctctaacagaaataaactatgattc

SEQ ID NO: 5559296 - DNA, 25 bp, Homo sapien
aaaatataaagatgctgagtcccaa

SEQ ID NO: 5559297 - DNA, 25 bp, Homo sapien
aaatggttaagtaaaatcaaatggc

SEQ ID NO: 5559298 - DNA, 25 bp, Homo sapien
tttaatgaatgagtgtaacttttta

SEQ ID NO: 5559299 - DNA, 25 bp, Homo sapien
aaagatgctgagtcccaaaaatgtg

SEQ ID NO: 5559300 - DNA, 25 bp, Homo sapien
ttccaagtataacacattgcctttc

SEQ ID NO: 5559301 - DNA, 25 bp, Homo sapien
cagtgcataaaccagccaacgatta

SEQ ID NO: 5559302 - DNA, 25 bp, Homo sapien
acagcaatatgtaatcagatggacc

SEQ ID NO: 5559303 - DNA, 25 bp, Homo sapien
tatgattatgatcccagagcaagga

SEQ ID NO: 5559304 - DNA, 25 bp, Homo sapien
tcaatcatctctgctcatgggaaac

SEQ ID NO: 5559305 - DNA, 25 bp, Homo sapien
gcaaggaggttcagtgcataaacca

SEQ ID NO: 5559306 - DNA, 25 bp, Homo sapien
taagaaatgaattgtacgagggaat

SEQ ID NO: 5559307 - DNA, 25 bp, Homo sapien
acaaataaatgtattgggtagcaaa

SEQ ID NO: 5559308 - DNA, 25 bp, Homo sapien
cagatggacccaggtctcaatcatc

SEQ ID NO: 5559309 - DNA, 25 bp, Homo sapien
ctgtaaggatgtattcagccctgtc

SEQ ID NO: 5559310 - DNA, 25 bp, Homo sapien
tttcccagtgcttgtcagatataac

SEQ ID NO: 5559311 - DNA, 25 bp, Homo sapien
ggaatgccactgaccagggctgtaa

SEQ ID NO: 5559312 - DNA, 25 bp, Homo sapien
ggaggaatgcttgctggaatagcaa

SEQ ID NO: 5559313 - DNA, 25 bp, Homo sapien
aaaagtagatggtcaataaaatgct

SEQ ID NO: 5559314 - DNA, 25 bp, Homo sapien
ctggaagtgctgaaccaggtaaaat

SEQ ID NO: 5559315 - DNA, 25 bp, Homo sapien
ctctagtacctgaacaaagtgtgaa

SEQ ID NO: 5559316 - DNA, 25 bp, Homo sapien
gacaattgccctggaagtgctgaac

SEQ ID NO: 5559317 - DNA, 25 bp, Homo sapien
aatggaacttgttggggactctatt

SEQ ID NO: 5559318 - DNA, 25 bp, Homo sapien
tacaatataacgtgcttgagggcag

SEQ ID NO: 5559319 - DNA, 25 bp, Homo sapien
ctggtaaagctgttgggctatattc

SEQ ID NO: 5559320 - DNA, 25 bp, Homo sapien
tggacaagggacaattgccctggaa

SEQ ID NO: 5559321 - DNA, 25 bp, Homo sapien
tggtacatcccaaccaggagcctgc

SEQ ID NO: 5559322 - DNA, 25 bp, Homo sapien
ctgaatgaccaaatggaacttgttg

SEQ ID NO: 5559323 - DNA, 25 bp, Homo sapien
gaccctcgatcgtccgtggttcccc

SEQ ID NO: 5559324 - DNA, 25 bp, Homo sapien
ggggaaccacggacgatcgagggtc

SEQ ID NO: 5559325 - DNA, 25 bp, Homo sapien
acctgcgattgaagatgccaccttt

SEQ ID NO: 5559326 - DNA, 25 bp, Homo sapien
ctgagattcggtcaagaatgtgaac

SEQ ID NO: 5559327 - DNA, 25 bp, Homo sapien
ttctccaaggggctttccagttggc

SEQ ID NO: 5559328 - DNA, 25 bp, Homo sapien
cacccctaagaaacctcacggaaca

SEQ ID NO: 5559329 - DNA, 25 bp, Homo sapien
aaagattaactgagctactgagatt

SEQ ID NO: 5559330 - DNA, 25 bp, Homo sapien
atgaactgttgagaataaggctgga

SEQ ID NO: 5559331 - DNA, 25 bp, Homo sapien
tatggtgtgaagtacaggtctaact

SEQ ID NO: 5559332 - DNA, 25 bp, Homo sapien
ggtgtcagatccccggcattgggaa

SEQ ID NO: 5559333 - DNA, 25 bp, Homo sapien
ggaacatatgacccaagagcagagc

SEQ ID NO: 5559334 - DNA, 25 bp, Homo sapien
agcagagcagacataaaaagattaa

SEQ ID NO: 5559335 - DNA, 25 bp, Homo sapien
tcctggatccagatggagttcattc

SEQ ID NO: 5559336 - DNA, 25 bp, Homo sapien
tgcagaaaggaggtcatatgaccag

SEQ ID NO: 5559337 - DNA, 25 bp, Homo sapien
aaacaaagcaaccctgctcctccac

SEQ ID NO: 5559338 - DNA, 25 bp, Homo sapien
caggagaaactcccacaatagcttt

SEQ ID NO: 5559339 - DNA, 25 bp, Homo sapien
tcactctacatggcaggagaaactc

SEQ ID NO: 5559340 - DNA, 25 bp, Homo sapien
agagaggaagcataaaccaagattt

SEQ ID NO: 5559341 - DNA, 25 bp, Homo sapien
aggcaaggagcattctgtgtcttat

SEQ ID NO: 5559342 - DNA, 25 bp, Homo sapien
cacacacagattttacagtaggtac

SEQ ID NO: 5559343 - DNA, 25 bp, Homo sapien
ttccagctgagtacaacaaagacaa

SEQ ID NO: 5559344 - DNA, 25 bp, Homo sapien
cattttagccaggcaaggagcattc

SEQ ID NO: 5559345 - DNA, 25 bp, Homo sapien
gtaggtacaagctctagcctggcac

SEQ ID NO: 5559346 - DNA, 25 bp, Homo sapien
tcctactgtcagagaggaagcataa

SEQ ID NO: 5559347 - DNA, 25 bp, Homo sapien
cggtacatatataagcatctgaggc

SEQ ID NO: 5559348 - DNA, 25 bp, Homo sapien
cgatactgaaaagcatggcatcaac

SEQ ID NO: 5559349 - DNA, 25 bp, Homo sapien
cctactgaacagatgatggccacga

SEQ ID NO: 5559350 - DNA, 25 bp, Homo sapien
tctctgctggcaaccacgtaccatc

SEQ ID NO: 5559351 - DNA, 25 bp, Homo sapien
tttcactctgaatccccacggtaca

SEQ ID NO: 5559352 - DNA, 25 bp, Homo sapien
gatggccacgatactgaaaagcatg

SEQ ID NO: 5559353 - DNA, 25 bp, Homo sapien
tcccattacagaagtacacctcccc

SEQ ID NO: 5559354 - DNA, 25 bp, Homo sapien
gacaactgcatcctgaaagatcagc

SEQ ID NO: 5559355 - DNA, 25 bp, Homo sapien
tctgggtggcgttatccatcccttt

SEQ ID NO: 5559356 - DNA, 25 bp, Homo sapien
tcccacaggctaacttaagacacca

SEQ ID NO: 5559357 - DNA, 25 bp, Homo sapien
tgtcagacaggctctccctaacccc

SEQ ID NO: 5559358 - DNA, 25 bp, Homo sapien
acgttgcctaggctgtagcgcagaa

SEQ ID NO: 5559359 - DNA, 25 bp, Homo sapien
aggagaaattgcagagaccatgtta

SEQ ID NO: 5559360 - DNA, 25 bp, Homo sapien
aaatagctgattatatagggtttat

SEQ ID NO: 5559361 - DNA, 25 bp, Homo sapien
tctaagaatagaaggaagtttagta

SEQ ID NO: 5559362 - DNA, 25 bp, Homo sapien
tgtataacattattagcaaaactgg

SEQ ID NO: 5559363 - DNA, 25 bp, Homo sapien
acagaatctgttactatagaaaaac

SEQ ID NO: 5559364 - DNA, 25 bp, Homo sapien
gaagctatacacaggcatgatggca

SEQ ID NO: 5559365 - DNA, 25 bp, Homo sapien
catgatggcagcacactacagtctc

SEQ ID NO: 5559366 - DNA, 25 bp, Homo sapien
tttaaggaaattatgaggaatagat

SEQ ID NO: 5559367 - DNA, 25 bp, Homo sapien
gcgcagaagctatacacaggcatga

SEQ ID NO: 5559368 - DNA, 25 bp, Homo sapien
ggctgtagcgcagaagctatacaca

SEQ ID NO: 5559369 - DNA, 25 bp, Homo sapien
ctgagctcacagcctgacattccag

SEQ ID NO: 5559370 - DNA, 25 bp, Homo sapien
agccccttgtctactagctaaattt

SEQ ID NO: 5559371 - DNA, 25 bp, Homo sapien
ctccttgccactcggacctcggtgc

SEQ ID NO: 5559372 - DNA, 25 bp, Homo sapien
ccgctttataaggccgactgtccct

SEQ ID NO: 5559373 - DNA, 25 bp, Homo sapien
cacagcctgacattccaggccgatc

SEQ ID NO: 5559374 - DNA, 25 bp, Homo sapien
gagggctgagctcacagcctgacat

SEQ ID NO: 5559375 - DNA, 25 bp, Homo sapien
ctaaatttaggcctgtccatggccc

SEQ ID NO: 5559376 - DNA, 25 bp, Homo sapien
ccctgctgacagcccgacacgcagg

SEQ ID NO: 5559377 - DNA, 25 bp, Homo sapien
tagctaaatttaggcctgtccatgg

SEQ ID NO: 5559378 - DNA, 25 bp, Homo sapien
cctgtctccttgccactcggacctc

SEQ ID NO: 5559379 - DNA, 25 bp, Homo sapien
gcctgacattccaggccgatcacag

SEQ ID NO: 5559380 - DNA, 25 bp, Homo sapien
cacagcccaaggtgtgaaacaatgt

SEQ ID NO: 5559381 - DNA, 25 bp, Homo sapien
cagagtaatctgtaccgagaagtaa

SEQ ID NO: 5559382 - DNA, 25 bp, Homo sapien
tgctcataatggtctcatgggatac

SEQ ID NO: 5559383 - DNA, 25 bp, Homo sapien
tgtgctgttaaggcctaaaagaacc

SEQ ID NO: 5559384 - DNA, 25 bp, Homo sapien
actgagtgatttaaccagagtaatc

SEQ ID NO: 5559385 - DNA, 25 bp, Homo sapien
ttgactgaaggaacccatcacatca

SEQ ID NO: 5559386 - DNA, 25 bp, Homo sapien
cctaacccccagacttccacacagc

SEQ ID NO: 5559387 - DNA, 25 bp, Homo sapien
cagattgtgagcatgaaaagatttc

SEQ ID NO: 5559388 - DNA, 25 bp, Homo sapien
cgagaagtaaatagtcacagcccaa

SEQ ID NO: 5559389 - DNA, 25 bp, Homo sapien
agtatctggcacacaataactgctc

SEQ ID NO: 5559390 - DNA, 25 bp, Homo sapien
ggtgtgaaacaatgtcgtgtcctgc

SEQ ID NO: 5559391 - DNA, 25 bp, Homo sapien
caactccagttgatctcagctctga

SEQ ID NO: 5559392 - DNA, 25 bp, Homo sapien
gtaatagatattgtgcgttgctcat

SEQ ID NO: 5559393 - DNA, 25 bp, Homo sapien
ttcctataccaaatcccaaacactc

SEQ ID NO: 5559394 - DNA, 25 bp, Homo sapien
aaagttgggacctaggtatctgtac

SEQ ID NO: 5559395 - DNA, 25 bp, Homo sapien
attatgcatcagaacaccctgtgag

SEQ ID NO: 5559396 - DNA, 25 bp, Homo sapien
ccctgacatactgggtggcaagaaa

SEQ ID NO: 5559397 - DNA, 25 bp, Homo sapien
atatatccctcatgtggcctccact

SEQ ID NO: 5559398 - DNA, 25 bp, Homo sapien
tctcagctccagtggacctgactgc

SEQ ID NO: 5559399 - DNA, 25 bp, Homo sapien
ctgccctaaaggttattctagaccc

SEQ ID NO: 5559400 - DNA, 25 bp, Homo sapien
tggcaagaaaagtcaagatcagatt

SEQ ID NO: 5559401 - DNA, 25 bp, Homo sapien
tgaatcagtctacaaagttgggacc

SEQ ID NO: 5559402 - DNA, 25 bp, Homo sapien
tatacggtccatctggtaaagaaaa

SEQ ID NO: 5559403 - DNA, 25 bp, Homo sapien
ttttctttaccagatggaccgtata

SEQ ID NO: 5559404 - DNA, 25 bp, Homo sapien
tttacgtttgcaggcagagtgacca

SEQ ID NO: 5559405 - DNA, 25 bp, Homo sapien
cggattctggggagaatccgagcca

SEQ ID NO: 5559406 - DNA, 25 bp, Homo sapien
gagtgtgtttgaagagggcttttat

SEQ ID NO: 5559407 - DNA, 25 bp, Homo sapien
gcatattcaaggtgtttagttttcc

SEQ ID NO: 5559408 - DNA, 25 bp, Homo sapien
ggcagagtgaccacatgttcaaaga

SEQ ID NO: 5559409 - DNA, 25 bp, Homo sapien
gttcaaagaaactatataacaaata

SEQ ID NO: 5559410 - DNA, 25 bp, Homo sapien
ttgctttcagcatattcaaggtgtt

SEQ ID NO: 5559411 - DNA, 25 bp, Homo sapien
tttaatacacggattctggggagaa

SEQ ID NO: 5559412 - DNA, 25 bp, Homo sapien
gcctgtgctttaatacacggattct

SEQ ID NO: 5559413 - DNA, 25 bp, Homo sapien
gcatatttaccaaacactcacttca

SEQ ID NO: 5559414 - DNA, 25 bp, Homo sapien
ggagaatccgagccataagccataa

SEQ ID NO: 5559415 - DNA, 25 bp, Homo sapien
ttcataggtgaaacgtggataatca

SEQ ID NO: 5559416 - DNA, 25 bp, Homo sapien
ataatcacatgcacccactgaggcc

SEQ ID NO: 5559417 - DNA, 25 bp, Homo sapien
ttcactaagcacttactctgggcca

SEQ ID NO: 5559418 - DNA, 25 bp, Homo sapien
atttcaccagtgacggtaatggagg

SEQ ID NO: 5559419 - DNA, 25 bp, Homo sapien
ggttcggagttagaaagcattcact

SEQ ID NO: 5559420 - DNA, 25 bp, Homo sapien
tgaaggccccttttgctcaacaccc

SEQ ID NO: 5559421 - DNA, 25 bp, Homo sapien
tgggccaagaacatgcactgcctca

SEQ ID NO: 5559422 - DNA, 25 bp, Homo sapien
agggactactggagtttaaaacaga

SEQ ID NO: 5559423 - DNA, 25 bp, Homo sapien
tttaaaacagaatcgaggccctgtc

SEQ ID NO: 5559424 - DNA, 25 bp, Homo sapien
gtgccttgaacatcttgaaggcccc

SEQ ID NO: 5559425 - DNA, 25 bp, Homo sapien
gggaggtgagccgcatttcaccagt

SEQ ID NO: 5559426 - DNA, 25 bp, Homo sapien
cacgcgaacaccttgctcgggagga

SEQ ID NO: 5559427 - DNA, 25 bp, Homo sapien
tcctcccgagcaaggtgttcgcgtg

SEQ ID NO: 5559428 - DNA, 25 bp, Homo sapien
cttttaagacacaggacatagggga

SEQ ID NO: 5559429 - DNA, 25 bp, Homo sapien
caaaaagcctaacatagacgatatg

SEQ ID NO: 5559430 - DNA, 25 bp, Homo sapien
gtacagcattgtaaagacaagcaga

SEQ ID NO: 5559431 - DNA, 25 bp, Homo sapien
tgcctacatggtgccagtcagaagc

SEQ ID NO: 5559432 - DNA, 25 bp, Homo sapien
ttaataaatgcagtttggtaaacat

SEQ ID NO: 5559433 - DNA, 25 bp, Homo sapien
agttggaaaccactgaattaaatta

SEQ ID NO: 5559434 - DNA, 25 bp, Homo sapien
aatctggagtttacaagtcatagtt

SEQ ID NO: 5559435 - DNA, 25 bp, Homo sapien
tgctttgggctggaattttagtacc

SEQ ID NO: 5559436 - DNA, 25 bp, Homo sapien
gtcagaagcatgatttgtgttgtac

SEQ ID NO: 5559437 - DNA, 25 bp, Homo sapien
agacaagcagaagagttagactttt

SEQ ID NO: 5559438 - DNA, 25 bp, Homo sapien
agactaatgaaaatggtaaattatt

SEQ ID NO: 5559439 - DNA, 25 bp, Homo sapien
tacaatgttgtgtgaccactgtcac

SEQ ID NO: 5559440 - DNA, 25 bp, Homo sapien
gtcatcttcgtgtgggaagaatgcc

SEQ ID NO: 5559441 - DNA, 25 bp, Homo sapien
cctttggacaaaattagcaagtcat

SEQ ID NO: 5559442 - DNA, 25 bp, Homo sapien
atattgggtcaattgtgtcatcttc

SEQ ID NO: 5559443 - DNA, 25 bp, Homo sapien
acactcctaggtcccaaagaaatgt

SEQ ID NO: 5559444 - DNA, 25 bp, Homo sapien
gtcactgtcatactactggaaaaac

SEQ ID NO: 5559445 - DNA, 25 bp, Homo sapien
ataagctaaagtagattaaaatgac

SEQ ID NO: 5559446 - DNA, 25 bp, Homo sapien
ctttgaccatacaacaggagcagtc

SEQ ID NO: 5559447 - DNA, 25 bp, Homo sapien
tttgtacctcaaatctggctgctat

SEQ ID NO: 5559448 - DNA, 25 bp, Homo sapien
ggagcagtcaggcttagattgctgc

SEQ ID NO: 5559449 - DNA, 25 bp, Homo sapien
ggtcctgcggttgacacaccgtcac

SEQ ID NO: 5559450 - DNA, 25 bp, Homo sapien
tctccatagatgcctggtcgagtcc

SEQ ID NO: 5559451 - DNA, 25 bp, Homo sapien
atgaagctagacataccaacttctc

SEQ ID NO: 5559452 - DNA, 25 bp, Homo sapien
gggggaagacatcagctctctacat

SEQ ID NO: 5559453 - DNA, 25 bp, Homo sapien
atgttgccagtgttccatgagggtg

SEQ ID NO: 5559454 - DNA, 25 bp, Homo sapien
ggtagcggctcgtccagttccttga

SEQ ID NO: 5559455 - DNA, 25 bp, Homo sapien
gttccttgatgcagaatcctcttgc

SEQ ID NO: 5559456 - DNA, 25 bp, Homo sapien
ccttatacaaaggaagccaatggcc

SEQ ID NO: 5559457 - DNA, 25 bp, Homo sapien
catgagggtgttccaaccgctcaat

SEQ ID NO: 5559458 - DNA, 25 bp, Homo sapien
agccaatggcctctatgagggggaa

SEQ ID NO: 5559459 - DNA, 25 bp, Homo sapien
tggtcgagtccatgctgaatgcaaa

SEQ ID NO: 5559460 - DNA, 25 bp, Homo sapien
atcctcttgctgggtagcccgaggg

SEQ ID NO: 5559461 - DNA, 25 bp, Homo sapien
caagaacataggctactaaggtatt

SEQ ID NO: 5559462 - DNA, 25 bp, Homo sapien
ggcagacccaactcaagctggtgat

SEQ ID NO: 5559463 - DNA, 25 bp, Homo sapien
agtgcatgttgggattttggagact

SEQ ID NO: 5559464 - DNA, 25 bp, Homo sapien
ccctctgagtttggtttacttgtcc

SEQ ID NO: 5559465 - DNA, 25 bp, Homo sapien
aaacgtatacagaagagtgcatgtt

SEQ ID NO: 5559466 - DNA, 25 bp, Homo sapien
ttaggtgctgttatggcagacccaa

SEQ ID NO: 5559467 - DNA, 25 bp, Homo sapien
ttcctagaggtaatattaagcttcc

SEQ ID NO: 5559468 - DNA, 25 bp, Homo sapien
gcagtatgttgcttccaagactact

SEQ ID NO: 5559469 - DNA, 25 bp, Homo sapien
ttggaatcgtgctagttgctttgac

SEQ ID NO: 5559470 - DNA, 25 bp, Homo sapien
ctaaggtatttaatctgcagtatgt

SEQ ID NO: 5559471 - DNA, 25 bp, Homo sapien
ttagtggatacgttttaggtgctgt

SEQ ID NO: 5559472 - DNA, 25 bp, Homo sapien
aacgatccgatcagaatacattcaa

SEQ ID NO: 5559473 - DNA, 25 bp, Homo sapien
tgaagagacgagccctcactcaaca

SEQ ID NO: 5559474 - DNA, 25 bp, Homo sapien
catagcatcgctatagaatgcaatt

SEQ ID NO: 5559475 - DNA, 25 bp, Homo sapien
aactattgcctggcgctgaagagac

SEQ ID NO: 5559476 - DNA, 25 bp, Homo sapien
atgcaactcgcaagatgtaaatgtc

SEQ ID NO: 5559477 - DNA, 25 bp, Homo sapien
gagacaagacaaactattgcctggc

SEQ ID NO: 5559478 - DNA, 25 bp, Homo sapien
tgtaaatgtcatgtggacacagaaa

SEQ ID NO: 5559479 - DNA, 25 bp, Homo sapien
aatcttcaagagtaactgcattgta

SEQ ID NO: 5559480 - DNA, 25 bp, Homo sapien
gtaaataaccataaacgatccgatc

SEQ ID NO: 5559481 - DNA, 25 bp, Homo sapien
gcggggacctctctctagccccacc

SEQ ID NO: 5559482 - DNA, 25 bp, Homo sapien
agacgagccctcactcaacacagcc

SEQ ID NO: 5559483 - DNA, 25 bp, Homo sapien
acagagatgatgtgatccatgttca

SEQ ID NO: 5559484 - DNA, 25 bp, Homo sapien
ccatcaatgagaataaagggaaaag

SEQ ID NO: 5559485 - DNA, 25 bp, Homo sapien
tgaggcgcgtcgcacgttccttatg

SEQ ID NO: 5559486 - DNA, 25 bp, Homo sapien
aaaggtataaaagatgttcagtgtt

SEQ ID NO: 5559487 - DNA, 25 bp, Homo sapien
tgaacacgtacttctgaggcgcgtc

SEQ ID NO: 5559488 - DNA, 25 bp, Homo sapien
gatgcagtcctggtgacgatgaaca

SEQ ID NO: 5559489 - DNA, 25 bp, Homo sapien
agtcatacaacgaggactgggttac

SEQ ID NO: 5559490 - DNA, 25 bp, Homo sapien
tcacagtaatcaaggaatcaggaca

SEQ ID NO: 5559491 - DNA, 25 bp, Homo sapien
gggaaggtaacaacaatggctacca

SEQ ID NO: 5559492 - DNA, 25 bp, Homo sapien
gaaacgaggtgcactgctaccatca

SEQ ID NO: 5559493 - DNA, 25 bp, Homo sapien
gtcgtgtgtgcctagaagacggcac

SEQ ID NO: 5559494 - DNA, 25 bp, Homo sapien
acagcctgtgtatacaggaccacgc

SEQ ID NO: 5559495 - DNA, 25 bp, Homo sapien
cagcagttaatggattctgggtatt

SEQ ID NO: 5559496 - DNA, 25 bp, Homo sapien
aaagacagttaaataccaccagccc

SEQ ID NO: 5559497 - DNA, 25 bp, Homo sapien
ggttccataatggtcacccacagcc

SEQ ID NO: 5559498 - DNA, 25 bp, Homo sapien
gacaggacaagcagtaaaccttctc

SEQ ID NO: 5559499 - DNA, 25 bp, Homo sapien
cctgacagcataggtatccacccct

SEQ ID NO: 5559500 - DNA, 25 bp, Homo sapien
acacagagctaaaattccaggtgcc

SEQ ID NO: 5559501 - DNA, 25 bp, Homo sapien
acatgaactacgatgacaggacaag

SEQ ID NO: 5559502 - DNA, 25 bp, Homo sapien
ctggcaaagactgttggctttggtt

SEQ ID NO: 5559503 - DNA, 25 bp, Homo sapien
aggaccacgcataatgggaatcagc

SEQ ID NO: 5559504 - DNA, 25 bp, Homo sapien
cccacagaaacccatttggggccca

SEQ ID NO: 5559505 - DNA, 25 bp, Homo sapien
aaaatgagccagtgcatgttgcttc

SEQ ID NO: 5559506 - DNA, 25 bp, Homo sapien
tagttctgtgaaactggcatatgtt

SEQ ID NO: 5559507 - DNA, 25 bp, Homo sapien
tgccataaaaagtacaataagggga

SEQ ID NO: 5559508 - DNA, 25 bp, Homo sapien
ctggcatatgttagctgaaagtata

SEQ ID NO: 5559509 - DNA, 25 bp, Homo sapien
ctgagtacaagacaaaatttatggc

SEQ ID NO: 5559510 - DNA, 25 bp, Homo sapien
actgtaggcttaagaaagtgctttt

SEQ ID NO: 5559511 - DNA, 25 bp, Homo sapien
tatggcaatgggcaattagacttat

SEQ ID NO: 5559512 - DNA, 25 bp, Homo sapien
gtgagacaccatacctagccaagtt

SEQ ID NO: 5559513 - DNA, 25 bp, Homo sapien
ataaggggacttaatagttctgtga

SEQ ID NO: 5559514 - DNA, 25 bp, Homo sapien
cccattgatctgatactgtaggctt

SEQ ID NO: 5559515 - DNA, 25 bp, Homo sapien
aaaagtcactagtagttcaaccatc

SEQ ID NO: 5559516 - DNA, 25 bp, Homo sapien
agactctcttaaaggtgaggcatgt

SEQ ID NO: 5559517 - DNA, 25 bp, Homo sapien
ctggaggaagtgttttcgtgtcttt

SEQ ID NO: 5559518 - DNA, 25 bp, Homo sapien
ggtggccaagcgcgaattaataaaa

SEQ ID NO: 5559519 - DNA, 25 bp, Homo sapien
cttaaaggcaaagtggacacatgcc

SEQ ID NO: 5559520 - DNA, 25 bp, Homo sapien
gactggtaagtcaagagaatccatc

SEQ ID NO: 5559521 - DNA, 25 bp, Homo sapien
gtcaaggagtctacgaagcactttt

SEQ ID NO: 5559522 - DNA, 25 bp, Homo sapien
ctgaatgcagaaagtctgtccaccc

SEQ ID NO: 5559523 - DNA, 25 bp, Homo sapien
cgtacaaaggaggcaaactccgtca

SEQ ID NO: 5559524 - DNA, 25 bp, Homo sapien
tgaggcatgttcacgcagcgtacaa

SEQ ID NO: 5559525 - DNA, 25 bp, Homo sapien
caaaaggggttgccactgctcatta

SEQ ID NO: 5559526 - DNA, 25 bp, Homo sapien
cttctaggcgccctaaggcccaaag

SEQ ID NO: 5559527 - DNA, 25 bp, Homo sapien
atggtagggactttaggttacatac

SEQ ID NO: 5559528 - DNA, 25 bp, Homo sapien
taggggacttaagccatgacagata

SEQ ID NO: 5559529 - DNA, 25 bp, Homo sapien
caggtgcctggaagctctatcaact

SEQ ID NO: 5559530 - DNA, 25 bp, Homo sapien
gcatctctcaggtgcctggaagctc

SEQ ID NO: 5559531 - DNA, 25 bp, Homo sapien
gctcttaggaagtaatgttaaactc

SEQ ID NO: 5559532 - DNA, 25 bp, Homo sapien
caatatgatttatggtagggacttt

SEQ ID NO: 5559533 - DNA, 25 bp, Homo sapien
cttgataatgatttactaggggact

SEQ ID NO: 5559534 - DNA, 25 bp, Homo sapien
gatttactaggggacttaagccatg

SEQ ID NO: 5559535 - DNA, 25 bp, Homo sapien
agccatgacagataagtctaccaat

SEQ ID NO: 5559536 - DNA, 25 bp, Homo sapien
ggcctaacacttcaactagcacggt

SEQ ID NO: 5559537 - DNA, 25 bp, Homo sapien
ctagcacggtatgtagtaaagaatt

SEQ ID NO: 5559538 - DNA, 25 bp, Homo sapien
taacaagaaacacaatcagtcccac

SEQ ID NO: 5559539 - DNA, 25 bp, Homo sapien
tttgagagggttgccaccattccat

SEQ ID NO: 5559540 - DNA, 25 bp, Homo sapien
ctggtaggcatggttcaagttattc

SEQ ID NO: 5559541 - DNA, 25 bp, Homo sapien
ctggtatcggtgacagttaaaaacc

SEQ ID NO: 5559542 - DNA, 25 bp, Homo sapien
tgatgatccaggacacaccagagag

SEQ ID NO: 5559543 - DNA, 25 bp, Homo sapien
tacagttaccttggagatgagctat

SEQ ID NO: 5559544 - DNA, 25 bp, Homo sapien
aagaagactgagccaacagttttct

SEQ ID NO: 5559545 - DNA, 25 bp, Homo sapien
gagactgcaaatcttagaaaggact

SEQ ID NO: 5559546 - DNA, 25 bp, Homo sapien
cagagggatggtacctacatgatta

SEQ ID NO: 5559547 - DNA, 25 bp, Homo sapien
aaaggactgcttataagactggcct

SEQ ID NO: 5559548 - DNA, 25 bp, Homo sapien
atcttgatatgtaccagagggatgg

SEQ ID NO: 5559549 - DNA, 25 bp, Homo sapien
gagttaatcactaaggcacacgcac

SEQ ID NO: 5559550 - DNA, 25 bp, Homo sapien
gcccgatgtccctgcacagtgcacg

SEQ ID NO: 5559551 - DNA, 25 bp, Homo sapien
gtgaacaaactgatcccagcccgat

SEQ ID NO: 5559552 - DNA, 25 bp, Homo sapien
cactcatgtcagcaaaaggagggag

SEQ ID NO: 5559553 - DNA, 25 bp, Homo sapien
acaagctagaggtgaataaaaatgg

SEQ ID NO: 5559554 - DNA, 25 bp, Homo sapien
ggcacacgcacacatgaagtattac

SEQ ID NO: 5559555 - DNA, 25 bp, Homo sapien
aaaatgaagcaggtctctaggtact

SEQ ID NO: 5559556 - DNA, 25 bp, Homo sapien
tggttatgtgtacctggcacgtggg

SEQ ID NO: 5559557 - DNA, 25 bp, Homo sapien
cagacacacctgcacatggaccaaa

SEQ ID NO: 5559558 - DNA, 25 bp, Homo sapien
gagggtatctcccgcagcgctgtat

SEQ ID NO: 5559559 - DNA, 25 bp, Homo sapien
acaaacattggaagcacaagctaga

SEQ ID NO: 5559560 - DNA, 25 bp, Homo sapien
tcttgggccactaagatgtggttac

SEQ ID NO: 5559561 - DNA, 25 bp, Homo sapien
aattgacctgtatgctttgaagctc

SEQ ID NO: 5559562 - DNA, 25 bp, Homo sapien
aggactgtggcatccaggtgccaaa

SEQ ID NO: 5559563 - DNA, 25 bp, Homo sapien
ggcaagaggctagagttacatcttt

SEQ ID NO: 5559564 - DNA, 25 bp, Homo sapien
ttacatctttggagtcatcagccta

SEQ ID NO: 5559565 - DNA, 25 bp, Homo sapien
ctgaatacacaggattaaggaggaa

SEQ ID NO: 5559566 - DNA, 25 bp, Homo sapien
gagaaagtatcaaggatgactccca

SEQ ID NO: 5559567 - DNA, 25 bp, Homo sapien
ggatgactcccaggttcctagcttg

SEQ ID NO: 5559568 - DNA, 25 bp, Homo sapien
tctccacatgatgggttggaggtac

SEQ ID NO: 5559569 - DNA, 25 bp, Homo sapien
gagagaggggctttcttaattgacc

SEQ ID NO: 5559570 - DNA, 25 bp, Homo sapien
tcatcagcctaatggaggactgtgg

SEQ ID NO: 5559571 - DNA, 25 bp, Homo sapien
tttttggattcttgtgcgatgatgg

SEQ ID NO: 5559572 - DNA, 25 bp, Homo sapien
agtatgatagagcatgagccagatt

SEQ ID NO: 5559573 - DNA, 25 bp, Homo sapien
actagtaaaataatgcccaagtggc

SEQ ID NO: 5559574 - DNA, 25 bp, Homo sapien
atggtaaaccagcaagttagaaaag

SEQ ID NO: 5559575 - DNA, 25 bp, Homo sapien
tatagttgtgattctccaggttgtt

SEQ ID NO: 5559576 - DNA, 25 bp, Homo sapien
aaagagacagtgaaggttaatttgt

SEQ ID NO: 5559577 - DNA, 25 bp, Homo sapien
taggggagtttatggtaaaccagca

SEQ ID NO: 5559578 - DNA, 25 bp, Homo sapien
ttgtgaactgtgagtacgagatact

SEQ ID NO: 5559579 - DNA, 25 bp, Homo sapien
aggggggcatgctttaagcataagc

SEQ ID NO: 5559580 - DNA, 25 bp, Homo sapien
tctcagtactgggttaggaatttta

SEQ ID NO: 5559581 - DNA, 25 bp, Homo sapien
catgtagtcacactgtactggcctc

SEQ ID NO: 5559582 - DNA, 25 bp, Homo sapien
agagaggccatgaaccatcccttgc

SEQ ID NO: 5559583 - DNA, 25 bp, Homo sapien
ccccttaaaaaggagaggtactgca

SEQ ID NO: 5559584 - DNA, 25 bp, Homo sapien
ctatatgcctcagaccacttccaca

SEQ ID NO: 5559585 - DNA, 25 bp, Homo sapien
ggagtgaagatcagtgaaatgctac

SEQ ID NO: 5559586 - DNA, 25 bp, Homo sapien
gaaaggcaaggctagttactgcaat

SEQ ID NO: 5559587 - DNA, 25 bp, Homo sapien
atcttacataggcaggtcaaaattt

SEQ ID NO: 5559588 - DNA, 25 bp, Homo sapien
gtagccactggtgaaggattgtgaa

SEQ ID NO: 5559589 - DNA, 25 bp, Homo sapien
atggtagtgttcttggcatatactc

SEQ ID NO: 5559590 - DNA, 25 bp, Homo sapien
tattgtccctagtgactggagtgaa

SEQ ID NO: 5559591 - DNA, 25 bp, Homo sapien
ttctacagaatagaaaggcaaggct

SEQ ID NO: 5559592 - DNA, 25 bp, Homo sapien
aatccacagccttgtgcagtcttcc

SEQ ID NO: 5559593 - DNA, 25 bp, Homo sapien
ccatctggagtgtgtagtgtttact

SEQ ID NO: 5559594 - DNA, 25 bp, Homo sapien
tagaaatgcccaactagtgataggc

SEQ ID NO: 5559595 - DNA, 25 bp, Homo sapien
ggggccaaaattccaagatgggtca

SEQ ID NO: 5559596 - DNA, 25 bp, Homo sapien
caaattgtcaggtttcataggcccc

SEQ ID NO: 5559597 - DNA, 25 bp, Homo sapien
agtgataggcattaatggaattggg

SEQ ID NO: 5559598 - DNA, 25 bp, Homo sapien
gagaaagtcatgttgagtctgaggc

SEQ ID NO: 5559599 - DNA, 25 bp, Homo sapien
gagcttaaagtattgatggagctac

SEQ ID NO: 5559600 - DNA, 25 bp, Homo sapien
catggtgataggtttttggcaagca

SEQ ID NO: 5559601 - DNA, 25 bp, Homo sapien
cataggcccctgtgctaattggttt

SEQ ID NO: 5559602 - DNA, 25 bp, Homo sapien
aagggcacaactggtttaaggcaat

SEQ ID NO: 5559603 - DNA, 25 bp, Homo sapien
ctaagtgtttagggatgccaaaagt

SEQ ID NO: 5559604 - DNA, 25 bp, Homo sapien
gaaacacaggacttgggtcctggga

SEQ ID NO: 5559605 - DNA, 25 bp, Homo sapien
tgaatgtctcctaatgaatccctac

SEQ ID NO: 5559606 - DNA, 25 bp, Homo sapien
tgatcgtagtagctttgcagaattc

SEQ ID NO: 5559607 - DNA, 25 bp, Homo sapien
cagccaacaggagacatttgaatgt

SEQ ID NO: 5559608 - DNA, 25 bp, Homo sapien
tgcaggcaccttccagttctccctc

SEQ ID NO: 5559609 - DNA, 25 bp, Homo sapien
acacatggtagtaacgatgaaacac

SEQ ID NO: 5559610 - DNA, 25 bp, Homo sapien
atgggaccaaatggctcaacaggtt

SEQ ID NO: 5559611 - DNA, 25 bp, Homo sapien
tgtgatgtcagccaacaggagacat

SEQ ID NO: 5559612 - DNA, 25 bp, Homo sapien
caggccttttgaagaatcacacacc

SEQ ID NO: 5559613 - DNA, 25 bp, Homo sapien
catcactcacagtcctgcaggcacc

SEQ ID NO: 5559614 - DNA, 25 bp, Homo sapien
ctccctcacggaacacatggtagta

SEQ ID NO: 5559615 - DNA, 25 bp, Homo sapien
agtgactgacaggtcttctggccct

SEQ ID NO: 5559616 - DNA, 25 bp, Homo sapien
cagcagtgagctgcttaccccaagg

SEQ ID NO: 5559617 - DNA, 25 bp, Homo sapien
ctaccgttaaggattggacagaagc

SEQ ID NO: 5559618 - DNA, 25 bp, Homo sapien
cgggttgagtcccccttccccatca

SEQ ID NO: 5559619 - DNA, 25 bp, Homo sapien
ggtgagacggacaacagtgttttta

SEQ ID NO: 5559620 - DNA, 25 bp, Homo sapien
ttagaacctttggcaaggaagagct

SEQ ID NO: 5559621 - DNA, 25 bp, Homo sapien
ctgggacctctgctgtcccgtgtag

SEQ ID NO: 5559622 - DNA, 25 bp, Homo sapien
gaaggaaaccaagcttatgcttctc

SEQ ID NO: 5559623 - DNA, 25 bp, Homo sapien
ataagtgaagaaatacgttctatct

SEQ ID NO: 5559624 - DNA, 25 bp, Homo sapien
taacttgccggatgttagaaggaaa

SEQ ID NO: 5559625 - DNA, 25 bp, Homo sapien
ggacagaagcttagctttttgggtg

SEQ ID NO: 5559626 - DNA, 25 bp, Homo sapien
ctgagtagctcagcttacaggtgca

SEQ ID NO: 5559627 - DNA, 25 bp, Homo sapien
tgaactctgcattaggaatcaggct

SEQ ID NO: 5559628 - DNA, 25 bp, Homo sapien
attaggaatcaggctataagaagtc

SEQ ID NO: 5559629 - DNA, 25 bp, Homo sapien
aacaaatcagtaactattagtaaac

SEQ ID NO: 5559630 - DNA, 25 bp, Homo sapien
ttatataaagaggacaaatgctagg

SEQ ID NO: 5559631 - DNA, 25 bp, Homo sapien
ggaatcaggctataagaagtccttt

SEQ ID NO: 5559632 - DNA, 25 bp, Homo sapien
ttctcaaaagctgttaccaaataaa

SEQ ID NO: 5559633 - DNA, 25 bp, Homo sapien
aaagaggacaaatgctaggctaatc

SEQ ID NO: 5559634 - DNA, 25 bp, Homo sapien
tctccatctcctgactccttgatct

SEQ ID NO: 5559635 - DNA, 25 bp, Homo sapien
actggaagaataaactgccaagtat

SEQ ID NO: 5559636 - DNA, 25 bp, Homo sapien
taactggaagaataaactgccaagt

SEQ ID NO: 5559637 - DNA, 25 bp, Homo sapien
gggattgttccatcaggctaattta

SEQ ID NO: 5559638 - DNA, 25 bp, Homo sapien
tgcatgcgtttttgcccaagtgggc

SEQ ID NO: 5559639 - DNA, 25 bp, Homo sapien
ctgtgtgcctgaagatttctagtgg

SEQ ID NO: 5559640 - DNA, 25 bp, Homo sapien
cagaatcccaccactagagataagt

SEQ ID NO: 5559641 - DNA, 25 bp, Homo sapien
atggggtcatgctataattgttgtt

SEQ ID NO: 5559642 - DNA, 25 bp, Homo sapien
gccacttcaaaggttatagaaattg

SEQ ID NO: 5559643 - DNA, 25 bp, Homo sapien
gataagtagttatatgtcctctccc

SEQ ID NO: 5559644 - DNA, 25 bp, Homo sapien
agaaattgaattgatacgttaatga

SEQ ID NO: 5559645 - DNA, 25 bp, Homo sapien
tgcccaagtgggcaactatctccca

SEQ ID NO: 5559646 - DNA, 25 bp, Homo sapien
attataaaactgaaagatactttgt

SEQ ID NO: 5559647 - DNA, 25 bp, Homo sapien
taaaaactccaccttctgcatgcgt

SEQ ID NO: 5559648 - DNA, 25 bp, Homo sapien
gagagcatgctgataacgcagcccc

SEQ ID NO: 5559649 - DNA, 25 bp, Homo sapien
tcttgggggaatctctggatcatta

SEQ ID NO: 5559650 - DNA, 25 bp, Homo sapien
agacactgagtatctgtactgactg

SEQ ID NO: 5559651 - DNA, 25 bp, Homo sapien
atttcccccaaagcagtggtgacac

SEQ ID NO: 5559652 - DNA, 25 bp, Homo sapien
caccccaaagagtcagaattctgct

SEQ ID NO: 5559653 - DNA, 25 bp, Homo sapien
tatctgtactgactgatgggcaggc

SEQ ID NO: 5559654 - DNA, 25 bp, Homo sapien
gctggccagaaaccagacactgagt

SEQ ID NO: 5559655 - DNA, 25 bp, Homo sapien
tccagacactcctcttgggggaatc

SEQ ID NO: 5559656 - DNA, 25 bp, Homo sapien
cgcagccccctgaaaatataaatat

SEQ ID NO: 5559657 - DNA, 25 bp, Homo sapien
tgaatgtattagcctcatcccagcc

SEQ ID NO: 5559658 - DNA, 25 bp, Homo sapien
aatattgcatgaatgtattagcctc

SEQ ID NO: 5559659 - DNA, 25 bp, Homo sapien
atgaggcctcatcttgtgaagttga

SEQ ID NO: 5559660 - DNA, 25 bp, Homo sapien
tgagatcgagttcgccctccctgac

SEQ ID NO: 5559661 - DNA, 25 bp, Homo sapien
ggtaaacactcttccatgaggcctc

SEQ ID NO: 5559662 - DNA, 25 bp, Homo sapien
atttctgggtacctcaacgtaatcc

SEQ ID NO: 5559663 - DNA, 25 bp, Homo sapien
agtcatgatgatatttggttggcaa

SEQ ID NO: 5559664 - DNA, 25 bp, Homo sapien
aaaggggtggttagctctgctttta

SEQ ID NO: 5559665 - DNA, 25 bp, Homo sapien
tccctgatgaaaataaaactctgag

SEQ ID NO: 5559666 - DNA, 25 bp, Homo sapien
ttagagaaaacaagtgaaaatgaga

SEQ ID NO: 5559667 - DNA, 25 bp, Homo sapien
ccagaggaaactgggttctggtctg

SEQ ID NO: 5559668 - DNA, 25 bp, Homo sapien
ggttggcaaagagttcgcttgattt

SEQ ID NO: 5559669 - DNA, 25 bp, Homo sapien
ccccaaaacagtatgatgagacttc

SEQ ID NO: 5559670 - DNA, 25 bp, Homo sapien
aggttaagggagaactgtatctgat

SEQ ID NO: 5559671 - DNA, 25 bp, Homo sapien
atgaacacacacagccggctccatg

SEQ ID NO: 5559672 - DNA, 25 bp, Homo sapien
ctcctccccggcacccgaagttcag

SEQ ID NO: 5559673 - DNA, 25 bp, Homo sapien
ctggcagcgattccagaacagggta

SEQ ID NO: 5559674 - DNA, 25 bp, Homo sapien
acggggagctcacatcagcccaatt

SEQ ID NO: 5559675 - DNA, 25 bp, Homo sapien
gaacacacacagccggctccatggc

SEQ ID NO: 5559676 - DNA, 25 bp, Homo sapien
agggagaactgtatctgatgaacac

SEQ ID NO: 5559677 - DNA, 25 bp, Homo sapien
catcagcccaatttctcctccccgg

SEQ ID NO: 5559678 - DNA, 25 bp, Homo sapien
ccaccctaggtcctttctcggcttg

SEQ ID NO: 5559679 - DNA, 25 bp, Homo sapien
cagtctggcagcgattccagaacag

SEQ ID NO: 5559680 - DNA, 25 bp, Homo sapien
ttaggaatcaagagaccctcccttc

SEQ ID NO: 5559681 - DNA, 25 bp, Homo sapien
agatgcaatctatagaagaaatatt

SEQ ID NO: 5559682 - DNA, 25 bp, Homo sapien
cgtaataatttaggtagtaggaaca

SEQ ID NO: 5559683 - DNA, 25 bp, Homo sapien
ggtagtaggaacattagatgcaatc

SEQ ID NO: 5559684 - DNA, 25 bp, Homo sapien
catggctagatggaacaattaagtt

SEQ ID NO: 5559685 - DNA, 25 bp, Homo sapien
aaaaaactagagctttcattcctgc

SEQ ID NO: 5559686 - DNA, 25 bp, Homo sapien
tagactcaatctatgaagaacatga

SEQ ID NO: 5559687 - DNA, 25 bp, Homo sapien
taagttgaaacttcacaggaaaaca

SEQ ID NO: 5559688 - DNA, 25 bp, Homo sapien
acaacctataatggatcctgatacc

SEQ ID NO: 5559689 - DNA, 25 bp, Homo sapien
ataccaacaagcaaaaaactagagc

SEQ ID NO: 5559690 - DNA, 25 bp, Homo sapien
tgtaatacagaatgatagagaaatg

SEQ ID NO: 5559691 - DNA, 25 bp, Homo sapien
aaatcgataacacataagttgaaac

SEQ ID NO: 5559692 - DNA, 25 bp, Homo sapien
atcctacaggaataataacaacaga

SEQ ID NO: 5559693 - DNA, 25 bp, Homo sapien
tcctccccgtagaacaaatgaagaa

SEQ ID NO: 5559694 - DNA, 25 bp, Homo sapien
ggtgaaaagataaagctcctagaca

SEQ ID NO: 5559695 - DNA, 25 bp, Homo sapien
aaatactgtgaggtacaataaatcc

SEQ ID NO: 5559696 - DNA, 25 bp, Homo sapien
tggcaaatttaacggaagtgaatgc

SEQ ID NO: 5559697 - DNA, 25 bp, Homo sapien
tagcatcctctgaaggaggtgaaaa

SEQ ID NO: 5559698 - DNA, 25 bp, Homo sapien
acaaatgaagaattaaaatggaccc

SEQ ID NO: 5559699 - DNA, 25 bp, Homo sapien
aaatggaccccatagcatcctctga

SEQ ID NO: 5559700 - DNA, 25 bp, Homo sapien
atgctgatgtgaacatagaaaaaat

SEQ ID NO: 5559701 - DNA, 25 bp, Homo sapien
acatgaaaaatggaaacgacataaa

SEQ ID NO: 5559702 - DNA, 25 bp, Homo sapien
acaacaaaaatactgaatccccaac

SEQ ID NO: 5559703 - DNA, 25 bp, Homo sapien
gggaccgtgttgccatctacatgcc

SEQ ID NO: 5559704 - DNA, 25 bp, Homo sapien
cagccaggctcgtatcccgcgctga

SEQ ID NO: 5559705 - DNA, 25 bp, Homo sapien
ctgggaggccagttaaatgtctctg

SEQ ID NO: 5559706 - DNA, 25 bp, Homo sapien
ttggaccagcatgttcggaagtccc

SEQ ID NO: 5559707 - DNA, 25 bp, Homo sapien
cctaccacaccgtctgggactgcga

SEQ ID NO: 5559708 - DNA, 25 bp, Homo sapien
aagtcccccgagagcgttgctttga

SEQ ID NO: 5559709 - DNA, 25 bp, Homo sapien
tacatgcccgtgtccccattggctg

SEQ ID NO: 5559710 - DNA, 25 bp, Homo sapien
gtgaggatcacctacagggaactac

SEQ ID NO: 5559711 - DNA, 25 bp, Homo sapien
ggatcggagctgtccacacagtcat

SEQ ID NO: 5559712 - DNA, 25 bp, Homo sapien
gagcgttgctttgatctgggagcgc

SEQ ID NO: 5559713 - DNA, 25 bp, Homo sapien
gacttcagcactggcaagatcggct

SEQ ID NO: 5559714 - DNA, 25 bp, Homo sapien
caccaccaaatctgtccccaacccc

SEQ ID NO: 5559715 - DNA, 25 bp, Homo sapien
aaacagttgggaaataccaccacca

SEQ ID NO: 5559716 - DNA, 25 bp, Homo sapien
gagttctcaagaaaggttcgactat

SEQ ID NO: 5559717 - DNA, 25 bp, Homo sapien
ttcttctaaactgggctctgcagcc

SEQ ID NO: 5559718 - DNA, 25 bp, Homo sapien
gaactcctgggactttcaactgacc

SEQ ID NO: 5559719 - DNA, 25 bp, Homo sapien
cagaaagccacaaaggaactcctgg

SEQ ID NO: 5559720 - DNA, 25 bp, Homo sapien
cctctgaatttaggggaggaaacag

SEQ ID NO: 5559721 - DNA, 25 bp, Homo sapien
actgaccagttgtccccaaagcaga

SEQ ID NO: 5559722 - DNA, 25 bp, Homo sapien
gcaacagcagctggtttcatccctt

SEQ ID NO: 5559723 - DNA, 25 bp, Homo sapien
ggcttctggcatagctgcattcctc

SEQ ID NO: 5559724 - DNA, 25 bp, Homo sapien
gcaaaagtatacagaaagccacaaa

SEQ ID NO: 5559725 - DNA, 25 bp, Homo sapien
atggtcaggtacaacaggtcactaa

SEQ ID NO: 5559726 - DNA, 25 bp, Homo sapien
acatgggcatagcttcaaaaattct

SEQ ID NO: 5559727 - DNA, 25 bp, Homo sapien
tgagatatctgggtaagacatgaag

SEQ ID NO: 5559728 - DNA, 25 bp, Homo sapien
attctgaagggtatttctgggtatt

SEQ ID NO: 5559729 - DNA, 25 bp, Homo sapien
ctcccaagtaagtcgaagagggagg

SEQ ID NO: 5559730 - DNA, 25 bp, Homo sapien
ccagtcacgactgtggtcagatgct

SEQ ID NO: 5559731 - DNA, 25 bp, Homo sapien
agataggacttttaagattgaggcc

SEQ ID NO: 5559732 - DNA, 25 bp, Homo sapien
gaaaattttgtacatgggcatagct

SEQ ID NO: 5559733 - DNA, 25 bp, Homo sapien
aagattgaggcctgtgcggtttttt

SEQ ID NO: 5559734 - DNA, 25 bp, Homo sapien
gtcagatgctgactcccaagtaagt

SEQ ID NO: 5559735 - DNA, 25 bp, Homo sapien
atttctgggtatttagataggactt

SEQ ID NO: 5559736 - DNA, 25 bp, Homo sapien
ataggccaaggcatgtcactttctg

SEQ ID NO: 5559737 - DNA, 25 bp, Homo sapien
tgtgctacagagaaagaagtgcata

SEQ ID NO: 5559738 - DNA, 25 bp, Homo sapien
ttaggactataggccaaggcatgtc

SEQ ID NO: 5559739 - DNA, 25 bp, Homo sapien
tagaggtgttgtactgcaaagatcc

SEQ ID NO: 5559740 - DNA, 25 bp, Homo sapien
aaaatacgactgggctagatcatgg

SEQ ID NO: 5559741 - DNA, 25 bp, Homo sapien
gctagatcatgggtagctgtctacc

SEQ ID NO: 5559742 - DNA, 25 bp, Homo sapien
ccattgcctcacaaagaaaggtaac

SEQ ID NO: 5559743 - DNA, 25 bp, Homo sapien
caaagaaaggtaacatgtgctacag

SEQ ID NO: 5559744 - DNA, 25 bp, Homo sapien
aatctccatactacagctgtgaacc

SEQ ID NO: 5559745 - DNA, 25 bp, Homo sapien
aagtgcatagaggtgttgtactgca

SEQ ID NO: 5559746 - DNA, 25 bp, Homo sapien
ttgctcaatcctagaccactccatt

SEQ ID NO: 5559747 - DNA, 25 bp, Homo sapien
gctcgcttcaagcttcagaggctcc

SEQ ID NO: 5559748 - DNA, 25 bp, Homo sapien
tgatatctggggagaaatgatctct

SEQ ID NO: 5559749 - DNA, 25 bp, Homo sapien
agccttctcggaaggcacgaggctg

SEQ ID NO: 5559750 - DNA, 25 bp, Homo sapien
agtggacactctgaaatagcctaaa

SEQ ID NO: 5559751 - DNA, 25 bp, Homo sapien
cagatagtgccgacatgtgagtttg

SEQ ID NO: 5559752 - DNA, 25 bp, Homo sapien
aagaaaattaggataacagtgattc

SEQ ID NO: 5559753 - DNA, 25 bp, Homo sapien
gagagagctggataactcagcgtat

SEQ ID NO: 5559754 - DNA, 25 bp, Homo sapien
aggaggcaatgtgtgctcgcttcaa

SEQ ID NO: 5559755 - DNA, 25 bp, Homo sapien
aagatgctagggttttgtatgtgga

SEQ ID NO: 5559756 - DNA, 25 bp, Homo sapien
gaggtgaagcagtggtaattttact

SEQ ID NO: 5559757 - DNA, 25 bp, Homo sapien
tacttggtaacgaagactcatgagg

SEQ ID NO: 5559758 - DNA, 25 bp, Homo sapien
cgtctcgcccagccttcagccgttc

SEQ ID NO: 5559759 - DNA, 25 bp, Homo sapien
cagcgagtcccctccactccagatt

SEQ ID NO: 5559760 - DNA, 25 bp, Homo sapien
ccaaacctcctcgcgcgcgtagtac

SEQ ID NO: 5559761 - DNA, 25 bp, Homo sapien
aaggattaggctgcccaaacactcc

SEQ ID NO: 5559762 - DNA, 25 bp, Homo sapien
aaaaatgcacatgagcccgacagtg

SEQ ID NO: 5559763 - DNA, 25 bp, Homo sapien
gccccataacagacgctaggcctct

SEQ ID NO: 5559764 - DNA, 25 bp, Homo sapien
taccaagcaggcaaacccttttcca

SEQ ID NO: 5559765 - DNA, 25 bp, Homo sapien
gcagacgcattggcccgcgtctcgc

SEQ ID NO: 5559766 - DNA, 25 bp, Homo sapien
caaacactcctcgtccctccggccc

SEQ ID NO: 5559767 - DNA, 25 bp, Homo sapien
agccgttctcggttaacagcaagcc

SEQ ID NO: 5559768 - DNA, 25 bp, Homo sapien
acagatcgatgaataaggattaggc

SEQ ID NO: 5559769 - DNA, 25 bp, Homo sapien
tgaagcataacatcagggcctacat

SEQ ID NO: 5559770 - DNA, 25 bp, Homo sapien
ccaagttggatatagctagagaaat

SEQ ID NO: 5559771 - DNA, 25 bp, Homo sapien
tagagaaatctcatggctaccccaa

SEQ ID NO: 5559772 - DNA, 25 bp, Homo sapien
cctcgcggaactggttttctgagag

SEQ ID NO: 5559773 - DNA, 25 bp, Homo sapien
catctcaaacggcttgtcaaggtcc

SEQ ID NO: 5559774 - DNA, 25 bp, Homo sapien
agaggtgtttgaagcaggaatatat

SEQ ID NO: 5559775 - DNA, 25 bp, Homo sapien
agatgttcctccaaagatgatgtac

SEQ ID NO: 5559776 - DNA, 25 bp, Homo sapien
gctaccccaatcaggagagaggttg

SEQ ID NO: 5559777 - DNA, 25 bp, Homo sapien
tgacaaactttgctggagtcctact

SEQ ID NO: 5559778 - DNA, 25 bp, Homo sapien
ggtatagcagggaagcttccatctt

SEQ ID NO: 5559779 - DNA, 25 bp, Homo sapien
agatgatgtacagatgccaagttgg

SEQ ID NO: 5559780 - DNA, 25 bp, Homo sapien
gaggacatgtttcatatacgctcat

SEQ ID NO: 5559781 - DNA, 25 bp, Homo sapien
atgagcgtatatgaaacatgtcctc

SEQ ID NO: 5559782 - DNA, 25 bp, Homo sapien
tccaaagaaagtccggtcattccta

SEQ ID NO: 5559783 - DNA, 25 bp, Homo sapien
agccctttccctgagtgtcccacac

SEQ ID NO: 5559784 - DNA, 25 bp, Homo sapien
tggaagtgaagtttctaggaggtaa

SEQ ID NO: 5559785 - DNA, 25 bp, Homo sapien
tatcacatggaaaaagcaatcaggt

SEQ ID NO: 5559786 - DNA, 25 bp, Homo sapien
gtcccacactagacagctggagatc

SEQ ID NO: 5559787 - DNA, 25 bp, Homo sapien
agcaatcaggtgatgataaggcttc

SEQ ID NO: 5559788 - DNA, 25 bp, Homo sapien
gagacctgggtttgaattgtgcatc

SEQ ID NO: 5559789 - DNA, 25 bp, Homo sapien
tgctttccatgccggccagacttgc

SEQ ID NO: 5559790 - DNA, 25 bp, Homo sapien
aaaatgaagaaaggagtttgctttc

SEQ ID NO: 5559791 - DNA, 25 bp, Homo sapien
aggaggtaggaatatgtgatatttt

SEQ ID NO: 5559792 - DNA, 25 bp, Homo sapien
tcctgtagcacggtaaaatgaaaac

SEQ ID NO: 5559793 - DNA, 25 bp, Homo sapien
cacttggttagctcagacacggttc

SEQ ID NO: 5559794 - DNA, 25 bp, Homo sapien
gtgactggggtctacgattcctccc

SEQ ID NO: 5559795 - DNA, 25 bp, Homo sapien
ctagcacatgcaaatgaccctcttc

SEQ ID NO: 5559796 - DNA, 25 bp, Homo sapien
gggaagacagctcctagcacatgca

SEQ ID NO: 5559797 - DNA, 25 bp, Homo sapien
acagaagaaaattgatagcgttaac

SEQ ID NO: 5559798 - DNA, 25 bp, Homo sapien
tcccccagggcatttaacagaagaa

SEQ ID NO: 5559799 - DNA, 25 bp, Homo sapien
agtaaatacaaatccgtgggcattc

SEQ ID NO: 5559800 - DNA, 25 bp, Homo sapien
tttatatgccaagagaaggagaagg

SEQ ID NO: 5559801 - DNA, 25 bp, Homo sapien
atttcattctgaacagggaagacag

SEQ ID NO: 5559802 - DNA, 25 bp, Homo sapien
atgaccctcttccaactccggctcc

SEQ ID NO: 5559803 - DNA, 25 bp, Homo sapien
ttcaatcaggatggcgaaataaaga

SEQ ID NO: 5559804 - DNA, 25 bp, Homo sapien
cccggcgtcgaaccgctatgcaagg

SEQ ID NO: 5559805 - DNA, 25 bp, Homo sapien
ccttgcatagcggttcgacgccggg

SEQ ID NO: 5559806 - DNA, 25 bp, Homo sapien
taaagcatgttgaggtcaaagcctt

SEQ ID NO: 5559807 - DNA, 25 bp, Homo sapien
caggcttatagacatttgagtacac

SEQ ID NO: 5559808 - DNA, 25 bp, Homo sapien
tttagcaacaaacagtgatggtatg

SEQ ID NO: 5559809 - DNA, 25 bp, Homo sapien
tccactagatacatctgaggttgta

SEQ ID NO: 5559810 - DNA, 25 bp, Homo sapien
gatacagtgaaacaaattagtcatc

SEQ ID NO: 5559811 - DNA, 25 bp, Homo sapien
tgaggttgtagaatatcaggcttat

SEQ ID NO: 5559812 - DNA, 25 bp, Homo sapien
tcaagcatagtatataaacagatca

SEQ ID NO: 5559813 - DNA, 25 bp, Homo sapien
agtgatggtatgcagacagaagcat

SEQ ID NO: 5559814 - DNA, 25 bp, Homo sapien
tgtcagcacagaacataaaagtctc

SEQ ID NO: 5559815 - DNA, 25 bp, Homo sapien
taaaagtctcacataaggtataatt

SEQ ID NO: 5559816 - DNA, 25 bp, Homo sapien
tgagtacacattgtcagcacagaac

SEQ ID NO: 5559817 - DNA, 25 bp, Homo sapien
cttcctgggaagctgtcccctggca

SEQ ID NO: 5559818 - DNA, 25 bp, Homo sapien
tgctcggtcctgtagatcccgggag

SEQ ID NO: 5559819 - DNA, 25 bp, Homo sapien
gatgtgacgggttgccacttgaaat

SEQ ID NO: 5559820 - DNA, 25 bp, Homo sapien
gaggcgctcttgagcccctcccgat

SEQ ID NO: 5559821 - DNA, 25 bp, Homo sapien
gggaggccatgttataaaaggagac

SEQ ID NO: 5559822 - DNA, 25 bp, Homo sapien
ccccacccccaagcggaaatgtgaa

SEQ ID NO: 5559823 - DNA, 25 bp, Homo sapien
gcctagcaagcaagttgcgactggc

SEQ ID NO: 5559824 - DNA, 25 bp, Homo sapien
gggtttttctcaaggatcgaggcgc

SEQ ID NO: 5559825 - DNA, 25 bp, Homo sapien
tgtgccccaaacgtccctccgtgtc

SEQ ID NO: 5559826 - DNA, 25 bp, Homo sapien
ttgcctttgctggtgcccaaggacc

SEQ ID NO: 5559827 - DNA, 25 bp, Homo sapien
aaggaccgccttccactgcagtgac

SEQ ID NO: 5559828 - DNA, 25 bp, Homo sapien
tcctagacgaccgtcaggggcgacg

SEQ ID NO: 5559829 - DNA, 25 bp, Homo sapien
cgtcgcccctgacggtcgtctagga

SEQ ID NO: 5559830 - DNA, 25 bp, Homo sapien
ttcatatgatttttttacagaagat

SEQ ID NO: 5559831 - DNA, 25 bp, Homo sapien
atcttctgtaaaaaaatcatatgaa

SEQ ID NO: 5559832 - DNA, 25 bp, Homo sapien
ttgcttcttagacatagtgcgtata

SEQ ID NO: 5559833 - DNA, 25 bp, Homo sapien
cacactaggatgaacatactgtatt

SEQ ID NO: 5559834 - DNA, 25 bp, Homo sapien
ttgggtgatccataaggtctttttc

SEQ ID NO: 5559835 - DNA, 25 bp, Homo sapien
atactgtattctctactaggtagcg

SEQ ID NO: 5559836 - DNA, 25 bp, Homo sapien
caacacttgggtgatccataaggtc

SEQ ID NO: 5559837 - DNA, 25 bp, Homo sapien
agaacagtggaaatcaaagtagaaa

SEQ ID NO: 5559838 - DNA, 25 bp, Homo sapien
tgagtagctgacctgtgatatcatt

SEQ ID NO: 5559839 - DNA, 25 bp, Homo sapien
atttattcatttcagctgggcacag

SEQ ID NO: 5559840 - DNA, 25 bp, Homo sapien
tgacctgtgatatcattaggagttg

SEQ ID NO: 5559841 - DNA, 25 bp, Homo sapien
gtgcgtataagaacagtggaaatca

SEQ ID NO: 5559842 - DNA, 25 bp, Homo sapien
agacatagtgcgtataagaacagtg

SEQ ID NO: 5559843 - DNA, 25 bp, Homo sapien
ctgaacatgtaattaaaggtgattc

SEQ ID NO: 5559844 - DNA, 25 bp, Homo sapien
aaataaaagcctgacagttactcaa

SEQ ID NO: 5559845 - DNA, 25 bp, Homo sapien
gaaatgcctgttacaagcatgatgc

SEQ ID NO: 5559846 - DNA, 25 bp, Homo sapien
atatagtaatgacatgtacatggta

SEQ ID NO: 5559847 - DNA, 25 bp, Homo sapien
tagataaattactgaacggcttaca

SEQ ID NO: 5559848 - DNA, 25 bp, Homo sapien
ctgccttgaaatagagactccgtcc

SEQ ID NO: 5559849 - DNA, 25 bp, Homo sapien
tagggtaagttaaggcattctgaac

SEQ ID NO: 5559850 - DNA, 25 bp, Homo sapien
tatgccaatttaggaatagtagata

SEQ ID NO: 5559851 - DNA, 25 bp, Homo sapien
tgaacggcttacaaatgaataactc

SEQ ID NO: 5559852 - DNA, 25 bp, Homo sapien
tgtcaagttagggtaagttaaggca

SEQ ID NO: 5559853 - DNA, 25 bp, Homo sapien
cccaccgcgtctaccaaaagaattc

SEQ ID NO: 5559854 - DNA, 25 bp, Homo sapien
ctccaagagtacagacagttattta

SEQ ID NO: 5559855 - DNA, 25 bp, Homo sapien
ggcctcacctcgaacccatgcggga

SEQ ID NO: 5559856 - DNA, 25 bp, Homo sapien
taaatgaatgtaaaccaggccctat

SEQ ID NO: 5559857 - DNA, 25 bp, Homo sapien
atgcgggatcttccaagagtgcaat

SEQ ID NO: 5559858 - DNA, 25 bp, Homo sapien
gaacacggacaaatttgccacgctc

SEQ ID NO: 5559859 - DNA, 25 bp, Homo sapien
gtcagtgctctactgggacacctgg

SEQ ID NO: 5559860 - DNA, 25 bp, Homo sapien
caggtgctctcccacgaggagacag

SEQ ID NO: 5559861 - DNA, 25 bp, Homo sapien
aagaggtcattaaacagaacacgga

SEQ ID NO: 5559862 - DNA, 25 bp, Homo sapien
aaatccacagctgagtgaaggtcat

SEQ ID NO: 5559863 - DNA, 25 bp, Homo sapien
tgaggttctgaagcggcctcacctc

SEQ ID NO: 5559864 - DNA, 25 bp, Homo sapien
tccaaagagttcacacggtggctgg

SEQ ID NO: 5559865 - DNA, 25 bp, Homo sapien
catagttaatgtggtttaagtctga

SEQ ID NO: 5559866 - DNA, 25 bp, Homo sapien
tgatggagtttggaagttaccgtat

SEQ ID NO: 5559867 - DNA, 25 bp, Homo sapien
ttctgagctgtgtagggccttaatt

SEQ ID NO: 5559868 - DNA, 25 bp, Homo sapien
actgtctgcctccccacttgtcccc

SEQ ID NO: 5559869 - DNA, 25 bp, Homo sapien
ttaatgtttgatggagtttggaagt

SEQ ID NO: 5559870 - DNA, 25 bp, Homo sapien
agagagaagagattccatcttccag

SEQ ID NO: 5559871 - DNA, 25 bp, Homo sapien
cttccagaggttgccactgtctgcc

SEQ ID NO: 5559872 - DNA, 25 bp, Homo sapien
tcactgaaaattgcctttgagtttg

SEQ ID NO: 5559873 - DNA, 25 bp, Homo sapien
ggccacatgcctataataatggaat

SEQ ID NO: 5559874 - DNA, 25 bp, Homo sapien
cacttgtccccatccacagtcatct

SEQ ID NO: 5559875 - DNA, 25 bp, Homo sapien
accatttctgagctgtgtagggcct

SEQ ID NO: 5559876 - DNA, 25 bp, Homo sapien
taccaaggaagcctctgcagagata

SEQ ID NO: 5559877 - DNA, 25 bp, Homo sapien
gagcacatagatggaccccaggctc

SEQ ID NO: 5559878 - DNA, 25 bp, Homo sapien
tcctccaaaagctgtattgtggtac

SEQ ID NO: 5559879 - DNA, 25 bp, Homo sapien
gcctcccttgtaggtgggactacac

SEQ ID NO: 5559880 - DNA, 25 bp, Homo sapien
atgtggtgaccactgtttaagacac

SEQ ID NO: 5559881 - DNA, 25 bp, Homo sapien
accattcatcacttggggacggagg

SEQ ID NO: 5559882 - DNA, 25 bp, Homo sapien
gagatagtgctattggaactgagtc

SEQ ID NO: 5559883 - DNA, 25 bp, Homo sapien
ttttgactctgggacaagaggaaga

SEQ ID NO: 5559884 - DNA, 25 bp, Homo sapien
tagttgagacaaccacaggcactta

SEQ ID NO: 5559885 - DNA, 25 bp, Homo sapien
aaacttggaaaccacagaacagcac

SEQ ID NO: 5559886 - DNA, 25 bp, Homo sapien
ggactacacggcacctggcccttgt

SEQ ID NO: 5559887 - DNA, 25 bp, Homo sapien
ttttccgaccagaagtcctgacacg

SEQ ID NO: 5559888 - DNA, 25 bp, Homo sapien
cgtgtcaggacttctggtcggaaaa

SEQ ID NO: 5559889 - DNA, 25 bp, Homo sapien
agagctccaaagtcaagccatcccc

SEQ ID NO: 5559890 - DNA, 25 bp, Homo sapien
atccacagatccaaagagctccaaa

SEQ ID NO: 5559891 - DNA, 25 bp, Homo sapien
caaaaagagaagtccaataactgac

SEQ ID NO: 5559892 - DNA, 25 bp, Homo sapien
tgggagatgacttacagacatgact

SEQ ID NO: 5559893 - DNA, 25 bp, Homo sapien
tatcattcaaggcaccccaggccac

SEQ ID NO: 5559894 - DNA, 25 bp, Homo sapien
tgacccgttagacctcggttgcctc

SEQ ID NO: 5559895 - DNA, 25 bp, Homo sapien
atcaaacgggtatcagaaatccaaa

SEQ ID NO: 5559896 - DNA, 25 bp, Homo sapien
gggcaggaaaacctgacctgtgttg

SEQ ID NO: 5559897 - DNA, 25 bp, Homo sapien
tctctggaagaaaccagctcttggc

SEQ ID NO: 5559898 - DNA, 25 bp, Homo sapien
cagacatgactgacacgcttggtgt

SEQ ID NO: 5559899 - DNA, 25 bp, Homo sapien
tgaccttcacggatatgggaaagtc

SEQ ID NO: 5559900 - DNA, 25 bp, Homo sapien
attgcagcctactggagccagcagt

SEQ ID NO: 5559901 - DNA, 25 bp, Homo sapien
tataagatacagtgtgctgagccgt

SEQ ID NO: 5559902 - DNA, 25 bp, Homo sapien
ctctacccaggcactgtggtccgag

SEQ ID NO: 5559903 - DNA, 25 bp, Homo sapien
cgatgtgaggccagcctccactcgc

SEQ ID NO: 5559904 - DNA, 25 bp, Homo sapien
ggcaaccggccccacatctactgtc

SEQ ID NO: 5559905 - DNA, 25 bp, Homo sapien
ccagacatataccgcgtggtggtgg

SEQ ID NO: 5559906 - DNA, 25 bp, Homo sapien
gcccttctggtgccaagtgccaagc

SEQ ID NO: 5559907 - DNA, 25 bp, Homo sapien
gcacgtgcagaccgtgcactcgcca

SEQ ID NO: 5559908 - DNA, 25 bp, Homo sapien
tggtccgagggttactggacctgga

SEQ ID NO: 5559909 - DNA, 25 bp, Homo sapien
actgtctggagcagttgctgcagga

SEQ ID NO: 5559910 - DNA, 25 bp, Homo sapien
ggggacttgatcaccgtggagtttg

SEQ ID NO: 5559911 - DNA, 25 bp, Homo sapien
gtgaccgagaagtctccgtgttgcc

SEQ ID NO: 5559912 - DNA, 25 bp, Homo sapien
taaaaatctcagaagcctggcaaaa

SEQ ID NO: 5559913 - DNA, 25 bp, Homo sapien
gtcagctaattcagaggcagatgtt

SEQ ID NO: 5559914 - DNA, 25 bp, Homo sapien
tgctgagggccttagctcctctacc

SEQ ID NO: 5559915 - DNA, 25 bp, Homo sapien
gtgacactggtttgaaaagaattgc

SEQ ID NO: 5559916 - DNA, 25 bp, Homo sapien
gtttggaagacaaccgtgccaatac

SEQ ID NO: 5559917 - DNA, 25 bp, Homo sapien
atgtctccaccaagggagcacatgg

SEQ ID NO: 5559918 - DNA, 25 bp, Homo sapien
aagaattgcaaaatcctaaggggag

SEQ ID NO: 5559919 - DNA, 25 bp, Homo sapien
gataggaagctgaaaccaatggtta

SEQ ID NO: 5559920 - DNA, 25 bp, Homo sapien
cctctacctgtcaagtgggcaaagc

SEQ ID NO: 5559921 - DNA, 25 bp, Homo sapien
ggaacctgttccatgctgagggcct

SEQ ID NO: 5559922 - DNA, 25 bp, Homo sapien
ccactcaccagacacaatagaaatc

SEQ ID NO: 5559923 - DNA, 25 bp, Homo sapien
ttgagggactgtgatacacccttcc

SEQ ID NO: 5559924 - DNA, 25 bp, Homo sapien
tagcaagaactgagcctaatgacct

SEQ ID NO: 5559925 - DNA, 25 bp, Homo sapien
taaatccctaagtcagctaggttcc

SEQ ID NO: 5559926 - DNA, 25 bp, Homo sapien
cacccttcccatgagaggcacgttt

SEQ ID NO: 5559927 - DNA, 25 bp, Homo sapien
cccatgtgagatagctttgagggac

SEQ ID NO: 5559928 - DNA, 25 bp, Homo sapien
acaacagagctgcacttacaatttt

SEQ ID NO: 5559929 - DNA, 25 bp, Homo sapien
aatgacctacggacactcttgcatc

SEQ ID NO: 5559930 - DNA, 25 bp, Homo sapien
ttaagggacctactattgcccactc

SEQ ID NO: 5559931 - DNA, 25 bp, Homo sapien
aattgagaattaccgactggatcca

SEQ ID NO: 5559932 - DNA, 25 bp, Homo sapien
cctcacccgtcaagaagagtctatt

SEQ ID NO: 5559933 - DNA, 25 bp, Homo sapien
ggaagatttcgggagaataatcacc

SEQ ID NO: 5559934 - DNA, 25 bp, Homo sapien
ggtgattattctcccgaaatcttcc

SEQ ID NO: 5559935 - DNA, 25 bp, Homo sapien
tcacacttaacagagcaaggagagt

SEQ ID NO: 5559936 - DNA, 25 bp, Homo sapien
aaaaggtaactcctggaaccagaca

SEQ ID NO: 5559937 - DNA, 25 bp, Homo sapien
agtgtcacacttaacagagcaagga

SEQ ID NO: 5559938 - DNA, 25 bp, Homo sapien
tttatcagagactgtgtgtcaaaca

SEQ ID NO: 5559939 - DNA, 25 bp, Homo sapien
agatggacttctcataaaaggtaac

SEQ ID NO: 5559940 - DNA, 25 bp, Homo sapien
gggatacatagctgtcgccagattc

SEQ ID NO: 5559941 - DNA, 25 bp, Homo sapien
agggtcacaccttcaaaaaagccta

SEQ ID NO: 5559942 - DNA, 25 bp, Homo sapien
gattctcaaagggacagtgtcacac

SEQ ID NO: 5559943 - DNA, 25 bp, Homo sapien
agcctaatttccattccagagcaat

SEQ ID NO: 5559944 - DNA, 25 bp, Homo sapien
gtgatgggatacatagctgtcgcca

SEQ ID NO: 5559945 - DNA, 25 bp, Homo sapien
aatgaacaaaaagggtcacaccttc

SEQ ID NO: 5559946 - DNA, 25 bp, Homo sapien
ttagggtgaatacttttctggactc

SEQ ID NO: 5559947 - DNA, 25 bp, Homo sapien
ttataaactgatagtaacttactga

SEQ ID NO: 5559948 - DNA, 25 bp, Homo sapien
agactgtcatgtgctcatgtgagtt

SEQ ID NO: 5559949 - DNA, 25 bp, Homo sapien
caaagatatttagacaatacgtttc

SEQ ID NO: 5559950 - DNA, 25 bp, Homo sapien
tgacattctcttagggtgaatactt

SEQ ID NO: 5559951 - DNA, 25 bp, Homo sapien
agtaacttactgatgattgattctc

SEQ ID NO: 5559952 - DNA, 25 bp, Homo sapien
ttggcataaaagtatctaaagtcac

SEQ ID NO: 5559953 - DNA, 25 bp, Homo sapien
tatagagctcagactgtcatgtgct

SEQ ID NO: 5559954 - DNA, 25 bp, Homo sapien
caaacactgagtaaccaactgaatt

SEQ ID NO: 5559955 - DNA, 25 bp, Homo sapien
actgattatagagctcagactgtca

SEQ ID NO: 5559956 - DNA, 25 bp, Homo sapien
ctgcacagcagaagcacactgatta

SEQ ID NO: 5559957 - DNA, 25 bp, Homo sapien
atgcatgagttgactgtaataggtc

SEQ ID NO: 5559958 - DNA, 25 bp, Homo sapien
ttaaagaggcacatttcctcctacc

SEQ ID NO: 5559959 - DNA, 25 bp, Homo sapien
tatgcactgcatataagtgatactc

SEQ ID NO: 5559960 - DNA, 25 bp, Homo sapien
atacacgcaaacaaatgtcaatatc

SEQ ID NO: 5559961 - DNA, 25 bp, Homo sapien
ggtgcaactgctgattataatttac

SEQ ID NO: 5559962 - DNA, 25 bp, Homo sapien
gaatacttccatggtgcaactgctg

SEQ ID NO: 5559963 - DNA, 25 bp, Homo sapien
cctacctacccacttccacatattc

SEQ ID NO: 5559964 - DNA, 25 bp, Homo sapien
tatttgagcaaagtaatgcacttac

SEQ ID NO: 5559965 - DNA, 25 bp, Homo sapien
gactgtaataggtcagaagatattt

SEQ ID NO: 5559966 - DNA, 25 bp, Homo sapien
tataagtgatactcttcagacacac

SEQ ID NO: 5559967 - DNA, 25 bp, Homo sapien
aacagaaactaaggctgtaagacct

SEQ ID NO: 5559968 - DNA, 25 bp, Homo sapien
tcaaactctgcgaacaccacctcaa

SEQ ID NO: 5559969 - DNA, 25 bp, Homo sapien
agcaacgatcttttaaaaggcacct

SEQ ID NO: 5559970 - DNA, 25 bp, Homo sapien
cacacagctctaacaacacgctctg

SEQ ID NO: 5559971 - DNA, 25 bp, Homo sapien
aagagtgaaacgcttgcggcttttt

SEQ ID NO: 5559972 - DNA, 25 bp, Homo sapien
caaattgaaggggattataaaaata

SEQ ID NO: 5559973 - DNA, 25 bp, Homo sapien
gccaacaacccaaacacccgctcac

SEQ ID NO: 5559974 - DNA, 25 bp, Homo sapien
actcctttggttcggaagaggtctc

SEQ ID NO: 5559975 - DNA, 25 bp, Homo sapien
ttttcacttcacagcaacgatcttt

SEQ ID NO: 5559976 - DNA, 25 bp, Homo sapien
cccaaacacccgctcacacagctct

SEQ ID NO: 5559977 - DNA, 25 bp, Homo sapien
tcctccgaatgaatgatctttcttc

SEQ ID NO: 5559978 - DNA, 25 bp, Homo sapien
gctcgctctgcgtcccactccaaac

SEQ ID NO: 5559979 - DNA, 25 bp, Homo sapien
tgatgcacaaaaaatatagtacttc

SEQ ID NO: 5559980 - DNA, 25 bp, Homo sapien
cactgctgtgtgattatgaccctgc

SEQ ID NO: 5559981 - DNA, 25 bp, Homo sapien
tatagaatatgccctgatatgtagc

SEQ ID NO: 5559982 - DNA, 25 bp, Homo sapien
tatggcaactatataaggcactgct

SEQ ID NO: 5559983 - DNA, 25 bp, Homo sapien
taaaggtggcttttgtgtgtgcact

SEQ ID NO: 5559984 - DNA, 25 bp, Homo sapien
tactgcactgaagtcttatggcaac

SEQ ID NO: 5559985 - DNA, 25 bp, Homo sapien
taacacaaatacaccatatagaata

SEQ ID NO: 5559986 - DNA, 25 bp, Homo sapien
acataggcttgtaaatagaaaaata

SEQ ID NO: 5559987 - DNA, 25 bp, Homo sapien
ttgtatgtttaaggccagtggaatc

SEQ ID NO: 5559988 - DNA, 25 bp, Homo sapien
aaggccagtggaatctatagctaat

SEQ ID NO: 5559989 - DNA, 25 bp, Homo sapien
tgaaaactgaaacatgcaaacattc

SEQ ID NO: 5559990 - DNA, 25 bp, Homo sapien
tcctcttagatccaacttcaatgac

SEQ ID NO: 5559991 - DNA, 25 bp, Homo sapien
gtaaggaacagtttataattgctga

SEQ ID NO: 5559992 - DNA, 25 bp, Homo sapien
tatttttgagacaaagtcttgctct

SEQ ID NO: 5559993 - DNA, 25 bp, Homo sapien
tagttaactcttggaatgtctaaac

SEQ ID NO: 5559994 - DNA, 25 bp, Homo sapien
ctcggcctcccaaatagctgagatt

SEQ ID NO: 5559995 - DNA, 25 bp, Homo sapien
agcaaccgataaccactttcctctt

SEQ ID NO: 5559996 - DNA, 25 bp, Homo sapien
cttcaatgaccacattctcagaact

SEQ ID NO: 5559997 - DNA, 25 bp, Homo sapien
ataaataaaaagcaaccgataacca

SEQ ID NO: 5559998 - DNA, 25 bp, Homo sapien
attctcagaactaccaaaagacttc

SEQ ID NO: 5559999 - DNA, 25 bp, Homo sapien
tcaagtacactgtctgtaaggaaca

SEQ ID NO: 5560000 - DNA, 25 bp, Homo sapien
accaaaagacttcaagtacactgtc

SEQ ID NO: 5560001 - DNA, 25 bp, Homo sapien
aaagtttggctttgacaacagcagt

SEQ ID NO: 5560002 - DNA, 25 bp, Homo sapien
ctgtagcagcacatgactcacttgc

SEQ ID NO: 5560003 - DNA, 25 bp, Homo sapien
agaaattagcaagataaagtttggc

SEQ ID NO: 5560004 - DNA, 25 bp, Homo sapien
tagaaatccctggggtcagaaggta

SEQ ID NO: 5560005 - DNA, 25 bp, Homo sapien
taggtgccaagctgtgagaaattag

SEQ ID NO: 5560006 - DNA, 25 bp, Homo sapien
cctgtcttggaggccagactatggg

SEQ ID NO: 5560007 - DNA, 25 bp, Homo sapien
gatgttcaaggaatatcatgcagtc

SEQ ID NO: 5560008 - DNA, 25 bp, Homo sapien
ggagtttggtgtaacctgtagcagc

SEQ ID NO: 5560009 - DNA, 25 bp, Homo sapien
aatactgcaggtgaagacagatttg

SEQ ID NO: 5560010 - DNA, 25 bp, Homo sapien
gctcgaaggcattggatgtcctgcc

SEQ ID NO: 5560011 - DNA, 25 bp, Homo sapien
ggggacattgtgctgaagcattggc

SEQ ID NO: 5560012 - DNA, 25 bp, Homo sapien
tcagccagcgctccaacctactgag

SEQ ID NO: 5560013 - DNA, 25 bp, Homo sapien
gccgagtgcggaaaggctttccgcg

SEQ ID NO: 5560014 - DNA, 25 bp, Homo sapien
ggctttccgcgagagctcgcagctc

SEQ ID NO: 5560015 - DNA, 25 bp, Homo sapien
agctccaacctggccgagcacctga

SEQ ID NO: 5560016 - DNA, 25 bp, Homo sapien
gctccaacctactgagccaccggcg

SEQ ID NO: 5560017 - DNA, 25 bp, Homo sapien
tttcgtcatgggctcctacctggcg

SEQ ID NO: 5560018 - DNA, 25 bp, Homo sapien
caggctttcgtcatgggctcctacc

SEQ ID NO: 5560019 - DNA, 25 bp, Homo sapien
gcggaaaggctttccgcgagagctc

SEQ ID NO: 5560020 - DNA, 25 bp, Homo sapien
tcatgggctcctacctggcggagca

SEQ ID NO: 5560021 - DNA, 25 bp, Homo sapien
aaggctttccgcgagagctcgcagc

SEQ ID NO: 5560022 - DNA, 25 bp, Homo sapien
cagcgctccaacctactgagccacc

SEQ ID NO: 5560023 - DNA, 25 bp, Homo sapien
gcttccggtgcgacgcggccgggcg

SEQ ID NO: 5560024 - DNA, 25 bp, Homo sapien
cgcccggccgcgtcgcaccggaagc

SEQ ID NO: 5560025 - DNA, 25 bp, Homo sapien
gaggcttccggtgcgacgcggccgg

SEQ ID NO: 5560026 - DNA, 25 bp, Homo sapien
ccggccgcgtcgcaccggaagcctc

SEQ ID NO: 5560027 - DNA, 25 bp, Homo sapien
ctccagagggagcataagttgaacc

SEQ ID NO: 5560028 - DNA, 25 bp, Homo sapien
ggttcaacttatgctccctctggag

SEQ ID NO: 5560029 - DNA, 25 bp, Homo sapien
gaaggagagaacattgcatatacct

SEQ ID NO: 5560030 - DNA, 25 bp, Homo sapien
taggtaatctttggaaggagagaac

SEQ ID NO: 5560031 - DNA, 25 bp, Homo sapien
aacaattaccacaaaaaagctagat

SEQ ID NO: 5560032 - DNA, 25 bp, Homo sapien
caaagctatgcaatgacaaaaaaca

SEQ ID NO: 5560033 - DNA, 25 bp, Homo sapien
tcccatcaagttaaagaaacgccaa

SEQ ID NO: 5560034 - DNA, 25 bp, Homo sapien
aagaaacgccaagaacgaaactgat

SEQ ID NO: 5560035 - DNA, 25 bp, Homo sapien
tccctgaaggctatgattctgtctc

SEQ ID NO: 5560036 - DNA, 25 bp, Homo sapien
cagtggatgttcagtatatactggc

SEQ ID NO: 5560037 - DNA, 25 bp, Homo sapien
cttagaaactaactcatgctgaaat

SEQ ID NO: 5560038 - DNA, 25 bp, Homo sapien
tctcaagagtaatgtagacagtacc

SEQ ID NO: 5560039 - DNA, 25 bp, Homo sapien
tgtacctactggagcaccccataat

SEQ ID NO: 5560040 - DNA, 25 bp, Homo sapien
tattcttctataggtgggcattact

SEQ ID NO: 5560041 - DNA, 25 bp, Homo sapien
gttgggcaacaggataaatatattt

SEQ ID NO: 5560042 - DNA, 25 bp, Homo sapien
ctcaggattagaatcgttgggcaac

SEQ ID NO: 5560043 - DNA, 25 bp, Homo sapien
ggtaattatctagtgtgcatacact

SEQ ID NO: 5560044 - DNA, 25 bp, Homo sapien
taaattatgtcagtagaaaatattc

SEQ ID NO: 5560045 - DNA, 25 bp, Homo sapien
tctcacagccagtccctacttcccc

SEQ ID NO: 5560046 - DNA, 25 bp, Homo sapien
tctttttaagtggctggacaatatc

SEQ ID NO: 5560047 - DNA, 25 bp, Homo sapien
ctataggtgggcattactttatttc

SEQ ID NO: 5560048 - DNA, 25 bp, Homo sapien
aagtggctggacaatatctggtatt

SEQ ID NO: 5560049 - DNA, 25 bp, Homo sapien
atatatgttgttatgaactggtatt

SEQ ID NO: 5560050 - DNA, 25 bp, Homo sapien
tagaatcgttgggcaacaggataaa

SEQ ID NO: 5560051 - DNA, 25 bp, Homo sapien
aagggaatccttgcacataagtgtc

SEQ ID NO: 5560052 - DNA, 25 bp, Homo sapien
cccaaactgggtcacacgtatgctg

SEQ ID NO: 5560053 - DNA, 25 bp, Homo sapien
tgaccaagtgtcatgtgagaccaag

SEQ ID NO: 5560054 - DNA, 25 bp, Homo sapien
tgaggcagccattcaccacgtggtg

SEQ ID NO: 5560055 - DNA, 25 bp, Homo sapien
aagtgtggactttcaggagctaaat

SEQ ID NO: 5560056 - DNA, 25 bp, Homo sapien
gaatgaggttcaacttcaggcagat

SEQ ID NO: 5560057 - DNA, 25 bp, Homo sapien
gagaccaagaatttacatgaaggga

SEQ ID NO: 5560058 - DNA, 25 bp, Homo sapien
ttagcacataggagtgaccagtgcc

SEQ ID NO: 5560059 - DNA, 25 bp, Homo sapien
aatactacagagacagcactttccc

SEQ ID NO: 5560060 - DNA, 25 bp, Homo sapien
tggtagagggtagatggtttctacc

SEQ ID NO: 5560061 - DNA, 25 bp, Homo sapien
taagtgtccagcagaaccaaggctg

SEQ ID NO: 5560062 - DNA, 25 bp, Homo sapien
acgggtttgttgttaaatatcattc

SEQ ID NO: 5560063 - DNA, 25 bp, Homo sapien
ggagaaacaggtaattttcagttgc

SEQ ID NO: 5560064 - DNA, 25 bp, Homo sapien
acaaaaacactaatgccataggaac

SEQ ID NO: 5560065 - DNA, 25 bp, Homo sapien
tctctgtgaagaagttgataacgga

SEQ ID NO: 5560066 - DNA, 25 bp, Homo sapien
ttgcaaagaactggcttaatgcatc

SEQ ID NO: 5560067 - DNA, 25 bp, Homo sapien
tggagaggctgatcatatatacatg

SEQ ID NO: 5560068 - DNA, 25 bp, Homo sapien
ctaatgccataggaacactactttc

SEQ ID NO: 5560069 - DNA, 25 bp, Homo sapien
gttgataacggactagtgttttgtc

SEQ ID NO: 5560070 - DNA, 25 bp, Homo sapien
tatatacatggagtgtgaaagggaa

SEQ ID NO: 5560071 - DNA, 25 bp, Homo sapien
aaatatgtagggtatagtatagcta

SEQ ID NO: 5560072 - DNA, 25 bp, Homo sapien
tctttttaatggagaggctgatcat

SEQ ID NO: 5560073 - DNA, 25 bp, Homo sapien
tttagggcttttcataacaggatcc

SEQ ID NO: 5560074 - DNA, 25 bp, Homo sapien
catactacaggctttacatggaatt

SEQ ID NO: 5560075 - DNA, 25 bp, Homo sapien
aagctgtctgtctcctaggaccaat

SEQ ID NO: 5560076 - DNA, 25 bp, Homo sapien
tacctctgaaatatggcccaaactc

SEQ ID NO: 5560077 - DNA, 25 bp, Homo sapien
tcctctgctaggagatccccctcac

SEQ ID NO: 5560078 - DNA, 25 bp, Homo sapien
cctaggaccaattcatactacaggc

SEQ ID NO: 5560079 - DNA, 25 bp, Homo sapien
acaggatccctgctttatacgtctc

SEQ ID NO: 5560080 - DNA, 25 bp, Homo sapien
gatccccctcaccttgccctgtctt

SEQ ID NO: 5560081 - DNA, 25 bp, Homo sapien
cttgattggcgcatgttgtttcctc

SEQ ID NO: 5560082 - DNA, 25 bp, Homo sapien
ctctatgcccctgaagctgtctgtc

SEQ ID NO: 5560083 - DNA, 25 bp, Homo sapien
ttatacgtctccatctgccactgtc

SEQ ID NO: 5560084 - DNA, 25 bp, Homo sapien
tagccactaaccagagagacaataa

SEQ ID NO: 5560085 - DNA, 25 bp, Homo sapien
aataaggttttctggtgtcattctt

SEQ ID NO: 5560086 - DNA, 25 bp, Homo sapien
aaacaaaagtacaccaaatatcctg

SEQ ID NO: 5560087 - DNA, 25 bp, Homo sapien
gagtaagagatggggataattttat

SEQ ID NO: 5560088 - DNA, 25 bp, Homo sapien
atagagaatgattggcaaatcgagg

SEQ ID NO: 5560089 - DNA, 25 bp, Homo sapien
ttggcaaatcgaggccaatgcataa

SEQ ID NO: 5560090 - DNA, 25 bp, Homo sapien
ttgggaaatggttaatacaatctaa

SEQ ID NO: 5560091 - DNA, 25 bp, Homo sapien
cataatacagagccttttaatggca

SEQ ID NO: 5560092 - DNA, 25 bp, Homo sapien
aaggtgcccaggatttagactgtta

SEQ ID NO: 5560093 - DNA, 25 bp, Homo sapien
gggaaaacagaatattgtgatataa

SEQ ID NO: 5560094 - DNA, 25 bp, Homo sapien
cattcttctaaggtgcccaggattt

SEQ ID NO: 5560095 - DNA, 25 bp, Homo sapien
gtagaaacaacagcagaatccaaag

SEQ ID NO: 5560096 - DNA, 25 bp, Homo sapien
gctcactatgagattcaggggacat

SEQ ID NO: 5560097 - DNA, 25 bp, Homo sapien
ctcaggcagcaaactagtcaatcac

SEQ ID NO: 5560098 - DNA, 25 bp, Homo sapien
tccagatgcagacaactgggtgatg

SEQ ID NO: 5560099 - DNA, 25 bp, Homo sapien
gcctagaagagtctagacaagccag

SEQ ID NO: 5560100 - DNA, 25 bp, Homo sapien
ccaaagtcaggaaaacaagacataa

SEQ ID NO: 5560101 - DNA, 25 bp, Homo sapien
ggggacatatatgatagccggagaa

SEQ ID NO: 5560102 - DNA, 25 bp, Homo sapien
ctacagccactgcttgactggttcc

SEQ ID NO: 5560103 - DNA, 25 bp, Homo sapien
ccaaagtttggctgataaatatgac

SEQ ID NO: 5560104 - DNA, 25 bp, Homo sapien
aagtaggtcccagttgtgttgcatg

SEQ ID NO: 5560105 - DNA, 25 bp, Homo sapien
ctgggtgatgcacttcaaatttggc

SEQ ID NO: 5560106 - DNA, 25 bp, Homo sapien
tgtggggaagatagtttaactgaaa

SEQ ID NO: 5560107 - DNA, 25 bp, Homo sapien
ggcagaaaaaagagtagtggttctg

SEQ ID NO: 5560108 - DNA, 25 bp, Homo sapien
tttggctcagaaagaatcatgacaa

SEQ ID NO: 5560109 - DNA, 25 bp, Homo sapien
tttgcctcccaacaggaaacaatga

SEQ ID NO: 5560110 - DNA, 25 bp, Homo sapien
tacaacatagaactctccagtaggc

SEQ ID NO: 5560111 - DNA, 25 bp, Homo sapien
tcaaactgaagctaagcaacactaa

SEQ ID NO: 5560112 - DNA, 25 bp, Homo sapien
ttcttcaagcttctcagtctcactc

SEQ ID NO: 5560113 - DNA, 25 bp, Homo sapien
tgtggggaagatagtttaactgaag

SEQ ID NO: 5560114 - DNA, 25 bp, Homo sapien
gaaaaaagagtagtggttctgtcac

SEQ ID NO: 5560115 - DNA, 25 bp, Homo sapien
actctccagtaggcagaatggcaga

SEQ ID NO: 5560116 - DNA, 25 bp, Homo sapien
agaacatttcgtgacagtttggctc

SEQ ID NO: 5560117 - DNA, 25 bp, Homo sapien
atcagatccgcagccctggtttgga

SEQ ID NO: 5560118 - DNA, 25 bp, Homo sapien
cctggcatccatcagatccgcagcc

SEQ ID NO: 5560119 - DNA, 25 bp, Homo sapien
gcagccagtggaagttggctgacaa

SEQ ID NO: 5560120 - DNA, 25 bp, Homo sapien
aatccctctgccaaggggtacccag

SEQ ID NO: 5560121 - DNA, 25 bp, Homo sapien
cgcagaattcaatggccacccaggc

SEQ ID NO: 5560122 - DNA, 25 bp, Homo sapien
acaaggtggacaaaaatctaccatt

SEQ ID NO: 5560123 - DNA, 25 bp, Homo sapien
aactgaggcaatccacgcagaattc

SEQ ID NO: 5560124 - DNA, 25 bp, Homo sapien
acaaaagcaaatagaacaaggtgga

SEQ ID NO: 5560125 - DNA, 25 bp, Homo sapien
gtggacactttagacgctggctctc

SEQ ID NO: 5560126 - DNA, 25 bp, Homo sapien
ttagagtcaccaaggataaaacctc

SEQ ID NO: 5560127 - DNA, 25 bp, Homo sapien
caaatagaacaatgtgggctggatg

SEQ ID NO: 5560128 - DNA, 25 bp, Homo sapien
agcccataggtccaagtcaagttcc

SEQ ID NO: 5560129 - DNA, 25 bp, Homo sapien
gtttagtagacttgaagagagccta

SEQ ID NO: 5560130 - DNA, 25 bp, Homo sapien
acacactcagagacatgtaaacagc

SEQ ID NO: 5560131 - DNA, 25 bp, Homo sapien
tcatggcctgacttaagtataggtc

SEQ ID NO: 5560132 - DNA, 25 bp, Homo sapien
cattaagtgtaatgccaaggcaggg

SEQ ID NO: 5560133 - DNA, 25 bp, Homo sapien
tgaagagagcctagaaacacactca

SEQ ID NO: 5560134 - DNA, 25 bp, Homo sapien
cctggtgtatgaatacgaatctatc

SEQ ID NO: 5560135 - DNA, 25 bp, Homo sapien
ccaccatgtctagctggaagttaga

SEQ ID NO: 5560136 - DNA, 25 bp, Homo sapien
ttttcaggtggcttcccagttctcc

SEQ ID NO: 5560137 - DNA, 25 bp, Homo sapien
gagtggtttggagctcatgactgtt

SEQ ID NO: 5560138 - DNA, 25 bp, Homo sapien
caagttccaggaagccccctatgaa

SEQ ID NO: 5560139 - DNA, 25 bp, Homo sapien
ggactcgagatagaaagataagctc

SEQ ID NO: 5560140 - DNA, 25 bp, Homo sapien
catctgttatggaaagctgaggttc

SEQ ID NO: 5560141 - DNA, 25 bp, Homo sapien
ggccagagaggtcaagaccattcaa

SEQ ID NO: 5560142 - DNA, 25 bp, Homo sapien
aacacccaatatgagccagtcagtc

SEQ ID NO: 5560143 - DNA, 25 bp, Homo sapien
cagggcagcagacatgccccagtta

SEQ ID NO: 5560144 - DNA, 25 bp, Homo sapien
ggctcccaggtgctatgtgctcctt

SEQ ID NO: 5560145 - DNA, 25 bp, Homo sapien
ggaaagctgaggttccaagagttca

SEQ ID NO: 5560146 - DNA, 25 bp, Homo sapien
tatgtcaggcccaatgctaagcttt

SEQ ID NO: 5560147 - DNA, 25 bp, Homo sapien
ctgaccacttagagtggactcgaga

SEQ ID NO: 5560148 - DNA, 25 bp, Homo sapien
ccattcaacaagctagggtaggagc

SEQ ID NO: 5560149 - DNA, 25 bp, Homo sapien
caaaaacaccggatctggaatggga

SEQ ID NO: 5560150 - DNA, 25 bp, Homo sapien
aatggtaaggctgctaaatattcac

SEQ ID NO: 5560151 - DNA, 25 bp, Homo sapien
tctgaattactgagcatgggtctgc

SEQ ID NO: 5560152 - DNA, 25 bp, Homo sapien
gaatccaaaatgaatataatgctgt

SEQ ID NO: 5560153 - DNA, 25 bp, Homo sapien
cagacaattgaatcagtctcgttgc

SEQ ID NO: 5560154 - DNA, 25 bp, Homo sapien
ttctgggaatacaccctacttggtc

SEQ ID NO: 5560155 - DNA, 25 bp, Homo sapien
cacgtgtacactgcaatgatagatt

SEQ ID NO: 5560156 - DNA, 25 bp, Homo sapien
accattaatggtaaggctgctaaat

SEQ ID NO: 5560157 - DNA, 25 bp, Homo sapien
ttcaactggttatcactggggcata

SEQ ID NO: 5560158 - DNA, 25 bp, Homo sapien
ctggggcatagaaaaacaattatct

SEQ ID NO: 5560159 - DNA, 25 bp, Homo sapien
ctaagttattgagtggtcaaatttc

SEQ ID NO: 5560160 - DNA, 25 bp, Homo sapien
ctacttggtcatgatgtatttctcc

SEQ ID NO: 5560161 - DNA, 25 bp, Homo sapien
agtggttcccacaacagacccaatc

SEQ ID NO: 5560162 - DNA, 25 bp, Homo sapien
tttgaatgcttacaggcaaatcctg

SEQ ID NO: 5560163 - DNA, 25 bp, Homo sapien
tttatcaaatgaaacaagaatcttt

SEQ ID NO: 5560164 - DNA, 25 bp, Homo sapien
agtactaaagtacggctaactatgt

SEQ ID NO: 5560165 - DNA, 25 bp, Homo sapien
ttcaaggatgtcaatttactgtttc

SEQ ID NO: 5560166 - DNA, 25 bp, Homo sapien
ttaagtgcaaattatggcatcagtc

SEQ ID NO: 5560167 - DNA, 25 bp, Homo sapien
tggcatcagtcagtggttcccacaa

SEQ ID NO: 5560168 - DNA, 25 bp, Homo sapien
aaggtaggaattagttcaaggatgt

SEQ ID NO: 5560169 - DNA, 25 bp, Homo sapien
atttctgtgaaactaggaatatggc

SEQ ID NO: 5560170 - DNA, 25 bp, Homo sapien
ttagagaaggcaaaatgaaatccaa

SEQ ID NO: 5560171 - DNA, 25 bp, Homo sapien
ttttcagtgcccctcaagaatagtt

SEQ ID NO: 5560172 - DNA, 25 bp, Homo sapien
gggtcttactctgtcccccgagtgc

SEQ ID NO: 5560173 - DNA, 25 bp, Homo sapien
caaaagagggcatctacattgaaag

SEQ ID NO: 5560174 - DNA, 25 bp, Homo sapien
atggtgcttgacaccttgtagaagc

SEQ ID NO: 5560175 - DNA, 25 bp, Homo sapien
aaatggggtctaataccagctcctt

SEQ ID NO: 5560176 - DNA, 25 bp, Homo sapien
tggtgccaaggcctttgctcaatcc

SEQ ID NO: 5560177 - DNA, 25 bp, Homo sapien
ttaaagaggtctgtagtaaccatca

SEQ ID NO: 5560178 - DNA, 25 bp, Homo sapien
atttactgaacaagtgaatggattc

SEQ ID NO: 5560179 - DNA, 25 bp, Homo sapien
gggagggagctacagttttctatca

SEQ ID NO: 5560180 - DNA, 25 bp, Homo sapien
atcactgatacagagatcatggtgc

SEQ ID NO: 5560181 - DNA, 25 bp, Homo sapien
ggcacactgtaaaatggggtctaat

SEQ ID NO: 5560182 - DNA, 25 bp, Homo sapien
cagactccttctgaggaaactgagg

SEQ ID NO: 5560183 - DNA, 25 bp, Homo sapien
aatgttaacctggctgcatagcaca

SEQ ID NO: 5560184 - DNA, 25 bp, Homo sapien
ccagagcatgcagtttagattttac

SEQ ID NO: 5560185 - DNA, 25 bp, Homo sapien
aagaggactaatggaattaagtggc

SEQ ID NO: 5560186 - DNA, 25 bp, Homo sapien
aatcagtgtgcattgtaacagttta

SEQ ID NO: 5560187 - DNA, 25 bp, Homo sapien
attgcccacataaaacgggaaaaca

SEQ ID NO: 5560188 - DNA, 25 bp, Homo sapien
tcagtataaaaagaggactaatgga

SEQ ID NO: 5560189 - DNA, 25 bp, Homo sapien
ctaatggaattaagtggcccctttc

SEQ ID NO: 5560190 - DNA, 25 bp, Homo sapien
aaaagggaataacatgtatctaata

SEQ ID NO: 5560191 - DNA, 25 bp, Homo sapien
aaaagtgtttccagagcatgcagtt

SEQ ID NO: 5560192 - DNA, 25 bp, Homo sapien
ccagatgcatctgaaaaaagtgttt

SEQ ID NO: 5560193 - DNA, 25 bp, Homo sapien
tggccgttttggattctgaaaagtg

SEQ ID NO: 5560194 - DNA, 25 bp, Homo sapien
ctggtcggttagtacagtcgggtgt

SEQ ID NO: 5560195 - DNA, 25 bp, Homo sapien
acacccgactgtactaaccgaccag

SEQ ID NO: 5560196 - DNA, 25 bp, Homo sapien
tgtagaataatttcagtcctgtccc

SEQ ID NO: 5560197 - DNA, 25 bp, Homo sapien
tacacacataagtaagacagtttac

SEQ ID NO: 5560198 - DNA, 25 bp, Homo sapien
agatgcccgctaccacgcctggcta

SEQ ID NO: 5560199 - DNA, 25 bp, Homo sapien
agctgggattacagatgcccgctac

SEQ ID NO: 5560200 - DNA, 25 bp, Homo sapien
aatgggcacatgggttaacaatttt

SEQ ID NO: 5560201 - DNA, 25 bp, Homo sapien
agagtctgccctactcaggaatggg

SEQ ID NO: 5560202 - DNA, 25 bp, Homo sapien
agacaaaggtctatattaaagttca

SEQ ID NO: 5560203 - DNA, 25 bp, Homo sapien
ccctactcaggaatgggcacatggg

SEQ ID NO: 5560204 - DNA, 25 bp, Homo sapien
catgggcctttgtgaagagtctgcc

SEQ ID NO: 5560205 - DNA, 25 bp, Homo sapien
aagtaagacagtttacaagacaaac

SEQ ID NO: 5560206 - DNA, 25 bp, Homo sapien
accgtgcccggccgaatcttattct

SEQ ID NO: 5560207 - DNA, 25 bp, Homo sapien
acctgtaaaggtaatgttttcctgc

SEQ ID NO: 5560208 - DNA, 25 bp, Homo sapien
gacctcctggttcctccgctgcttc

SEQ ID NO: 5560209 - DNA, 25 bp, Homo sapien
agggctgatttagaaatgctgtgat

SEQ ID NO: 5560210 - DNA, 25 bp, Homo sapien
tggagtcagtcctgctcttccctgc

SEQ ID NO: 5560211 - DNA, 25 bp, Homo sapien
tttagaaatgctgtgattcggggga

SEQ ID NO: 5560212 - DNA, 25 bp, Homo sapien
gcagtggaagatgacataacttctc

SEQ ID NO: 5560213 - DNA, 25 bp, Homo sapien
ttgatagccttttgagaactcccac

SEQ ID NO: 5560214 - DNA, 25 bp, Homo sapien
ttgccacagatttgagtgacaccgc

SEQ ID NO: 5560215 - DNA, 25 bp, Homo sapien
agtgacaccgctgacctcctggttc

SEQ ID NO: 5560216 - DNA, 25 bp, Homo sapien
ctgcttcacttgtggaatccagggc

SEQ ID NO: 5560217 - DNA, 25 bp, Homo sapien
agccataacaagttgagaaagacac

SEQ ID NO: 5560218 - DNA, 25 bp, Homo sapien
tctcactgacagaagtaggaagttg

SEQ ID NO: 5560219 - DNA, 25 bp, Homo sapien
gggcagtaagccaatgaagccatct

SEQ ID NO: 5560220 - DNA, 25 bp, Homo sapien
ctggaaagtccctaggtgtgtttga

SEQ ID NO: 5560221 - DNA, 25 bp, Homo sapien
gtggtgcagtgctatgctgtccaat

SEQ ID NO: 5560222 - DNA, 25 bp, Homo sapien
tcatggcagcacaaaagaaatctca

SEQ ID NO: 5560223 - DNA, 25 bp, Homo sapien
aaccacatatggctaccgtgcccct

SEQ ID NO: 5560224 - DNA, 25 bp, Homo sapien
gccctgagggctaccttgggctcat

SEQ ID NO: 5560225 - DNA, 25 bp, Homo sapien
gtaggaagttgccctcacacgtgag

SEQ ID NO: 5560226 - DNA, 25 bp, Homo sapien
aagactctaagagaaaagttggctt

SEQ ID NO: 5560227 - DNA, 25 bp, Homo sapien
gccagtgtgactgagaacatgaatc

SEQ ID NO: 5560228 - DNA, 25 bp, Homo sapien
gcccctgaattatggccagtgtgac

SEQ ID NO: 5560229 - DNA, 25 bp, Homo sapien
tcagcgagaccttgggtcaacacga

SEQ ID NO: 5560230 - DNA, 25 bp, Homo sapien
aagcttggtccacgccacctgctgt

SEQ ID NO: 5560231 - DNA, 25 bp, Homo sapien
ggagcgtcatcgtctcccgccccgt

SEQ ID NO: 5560232 - DNA, 25 bp, Homo sapien
catcgtctcccgccccgtgcgtcag

SEQ ID NO: 5560233 - DNA, 25 bp, Homo sapien
cccggccacacctggtggtgtcatt

SEQ ID NO: 5560234 - DNA, 25 bp, Homo sapien
ctgttgcaatataaagggatttttt

SEQ ID NO: 5560235 - DNA, 25 bp, Homo sapien
acgccacctgctgtggcaagcggag

SEQ ID NO: 5560236 - DNA, 25 bp, Homo sapien
ctggtggtgtcattctgaaccctgt

SEQ ID NO: 5560237 - DNA, 25 bp, Homo sapien
gggtcaacacgaccctgcgcacagc

SEQ ID NO: 5560238 - DNA, 25 bp, Homo sapien
agcccggatcagacctccaggtctg

SEQ ID NO: 5560239 - DNA, 25 bp, Homo sapien
ggtctgatccgcccctcagtgggag

SEQ ID NO: 5560240 - DNA, 25 bp, Homo sapien
agaaaatgagaatggtgaaaaataa

SEQ ID NO: 5560241 - DNA, 25 bp, Homo sapien
aagatcaacatctctaggctaaact

SEQ ID NO: 5560242 - DNA, 25 bp, Homo sapien
ttctccaggaaattatgctatatac

SEQ ID NO: 5560243 - DNA, 25 bp, Homo sapien
gtgtgtatcagtaaagagttcaccc

SEQ ID NO: 5560244 - DNA, 25 bp, Homo sapien
aatggtcctgtgattagacactgaa

SEQ ID NO: 5560245 - DNA, 25 bp, Homo sapien
cctgtatattacaaagaggagagcc

SEQ ID NO: 5560246 - DNA, 25 bp, Homo sapien
agacactgaatgatagtaattgtgc

SEQ ID NO: 5560247 - DNA, 25 bp, Homo sapien
ctctaggctaaactgatgcttactg

SEQ ID NO: 5560248 - DNA, 25 bp, Homo sapien
actgcaaaatttgtgttctccagga

SEQ ID NO: 5560249 - DNA, 25 bp, Homo sapien
tgagatttgtacatgaattgggaaa

SEQ ID NO: 5560250 - DNA, 25 bp, Homo sapien
taacagttgtcttgtgtgtatcagt

SEQ ID NO: 5560251 - DNA, 25 bp, Homo sapien
caggtccctgtactctctctggccc

SEQ ID NO: 5560252 - DNA, 25 bp, Homo sapien
ctgtccaccttgtctctgggcacat

SEQ ID NO: 5560253 - DNA, 25 bp, Homo sapien
tgaaaggatcagatgtcccccataa

SEQ ID NO: 5560254 - DNA, 25 bp, Homo sapien
taaatggtgtcagaacaggtggtta

SEQ ID NO: 5560255 - DNA, 25 bp, Homo sapien
tccacagcaaatgcccctgtccacc

SEQ ID NO: 5560256 - DNA, 25 bp, Homo sapien
cagtttttgggaggtaacactgtcc

SEQ ID NO: 5560257 - DNA, 25 bp, Homo sapien
acccacaaaacaatagcattagttc

SEQ ID NO: 5560258 - DNA, 25 bp, Homo sapien
ggtgctggagccatctatccaggtc

SEQ ID NO: 5560259 - DNA, 25 bp, Homo sapien
aacaggtggttagctctctggaaga

SEQ ID NO: 5560260 - DNA, 25 bp, Homo sapien
tgtccctatgggaagacttggtatt

SEQ ID NO: 5560261 - DNA, 25 bp, Homo sapien
tatcaagatggcatatgggtgtagg

SEQ ID NO: 5560262 - DNA, 25 bp, Homo sapien
caaaagtgtgagaaacaatgttgta

SEQ ID NO: 5560263 - DNA, 25 bp, Homo sapien
gatcagattgcatatgccagatata

SEQ ID NO: 5560264 - DNA, 25 bp, Homo sapien
tccatccaagcctccacatgctgtc

SEQ ID NO: 5560265 - DNA, 25 bp, Homo sapien
cattctcgcagaaacaccagttgcc

SEQ ID NO: 5560266 - DNA, 25 bp, Homo sapien
ttaccgtgtttccatccaagcctcc

SEQ ID NO: 5560267 - DNA, 25 bp, Homo sapien
tatcactttggtgcaaaagtgtgag

SEQ ID NO: 5560268 - DNA, 25 bp, Homo sapien
attgtaataacccccacgtgtcaag

SEQ ID NO: 5560269 - DNA, 25 bp, Homo sapien
caccagttgcctcagctctgcgatt

SEQ ID NO: 5560270 - DNA, 25 bp, Homo sapien
gcctcagctctgcgatttgtatcac

SEQ ID NO: 5560271 - DNA, 25 bp, Homo sapien
tgatttttatggaagaatgacaaat

SEQ ID NO: 5560272 - DNA, 25 bp, Homo sapien
tggaagaatgacaaatagttgcaaa

SEQ ID NO: 5560273 - DNA, 25 bp, Homo sapien
taactgcaagataattctgagattt

SEQ ID NO: 5560274 - DNA, 25 bp, Homo sapien
tttgaaaagatagcattcatcctgc

SEQ ID NO: 5560275 - DNA, 25 bp, Homo sapien
tctaagtacatgaactaggagaatt

SEQ ID NO: 5560276 - DNA, 25 bp, Homo sapien
catcctgctagcatacacattgccc

SEQ ID NO: 5560277 - DNA, 25 bp, Homo sapien
ttgtaaaatttgacctgagagtctc

SEQ ID NO: 5560278 - DNA, 25 bp, Homo sapien
tctgagatttaaggatacaaacaaa

SEQ ID NO: 5560279 - DNA, 25 bp, Homo sapien
tttgggagtatgattataaacttac

SEQ ID NO: 5560280 - DNA, 25 bp, Homo sapien
acttgataaacatgccccagtaggc

SEQ ID NO: 5560281 - DNA, 25 bp, Homo sapien
tagtgataggcagtgatcaaatgat

SEQ ID NO: 5560282 - DNA, 25 bp, Homo sapien
taagaattacaggtcaagttctgcc

SEQ ID NO: 5560283 - DNA, 25 bp, Homo sapien
attgccctgggatataacttgataa

SEQ ID NO: 5560284 - DNA, 25 bp, Homo sapien
acctaggtgtaaaattatgaggtct

SEQ ID NO: 5560285 - DNA, 25 bp, Homo sapien
gaccaataattggcattgtgagact

SEQ ID NO: 5560286 - DNA, 25 bp, Homo sapien
tttgcctaaatgtaccttgttgtgg

SEQ ID NO: 5560287 - DNA, 25 bp, Homo sapien
gaggtcttcttagagtattggatcc

SEQ ID NO: 5560288 - DNA, 25 bp, Homo sapien
cgctgataggtaataacaaactttc

SEQ ID NO: 5560289 - DNA, 25 bp, Homo sapien
cctatcagtggacctagttatttcc

SEQ ID NO: 5560290 - DNA, 25 bp, Homo sapien
tatggacatatgtgaagtttgtaaa

SEQ ID NO: 5560291 - DNA, 25 bp, Homo sapien
tattggatccatacgctgataggta

SEQ ID NO: 5560292 - DNA, 25 bp, Homo sapien
gtggcacaatcatgtctccagtctc

SEQ ID NO: 5560293 - DNA, 25 bp, Homo sapien
gccttccaaggagtatatgagtttc

SEQ ID NO: 5560294 - DNA, 25 bp, Homo sapien
aacaaactttccacaagatgattct

SEQ ID NO: 5560295 - DNA, 25 bp, Homo sapien
ctgagccatcagactagattttgcc

SEQ ID NO: 5560296 - DNA, 25 bp, Homo sapien
agcacctaggtctcagccagctctc

SEQ ID NO: 5560297 - DNA, 25 bp, Homo sapien
ccttccctacactgctgctgtcctc

SEQ ID NO: 5560298 - DNA, 25 bp, Homo sapien
ccctctcagatcagcaggagagcac

SEQ ID NO: 5560299 - DNA, 25 bp, Homo sapien
ttttcactggaagcactgctccctc

SEQ ID NO: 5560300 - DNA, 25 bp, Homo sapien
ttccatccaatctggcccctgtgtg

SEQ ID NO: 5560301 - DNA, 25 bp, Homo sapien
tcacttgcagtgatctccctcagca

SEQ ID NO: 5560302 - DNA, 25 bp, Homo sapien
cccacactcctcctgcccggggttg

SEQ ID NO: 5560303 - DNA, 25 bp, Homo sapien
cagctctctatggcaggcctctgca

SEQ ID NO: 5560304 - DNA, 25 bp, Homo sapien
ctctgcagcagcacttgtgaagtgc

SEQ ID NO: 5560305 - DNA, 25 bp, Homo sapien
tggcccctgtgtggaataccaaaac

SEQ ID NO: 5560306 - DNA, 25 bp, Homo sapien
gctttggttactggggacttctaga

SEQ ID NO: 5560307 - DNA, 25 bp, Homo sapien
tactgagagccatgaagagacagta

SEQ ID NO: 5560308 - DNA, 25 bp, Homo sapien
acaatggaaggaatcaacgatacca

SEQ ID NO: 5560309 - DNA, 25 bp, Homo sapien
tggggagctccaaatatcatactat

SEQ ID NO: 5560310 - DNA, 25 bp, Homo sapien
agcatacaaggatcctgagagcaga

SEQ ID NO: 5560311 - DNA, 25 bp, Homo sapien
aaggattgaaatatactgagagcca

SEQ ID NO: 5560312 - DNA, 25 bp, Homo sapien
gaagagacagtagtgatttcagctg

SEQ ID NO: 5560313 - DNA, 25 bp, Homo sapien
gaatttaggtggctcagagataacc

SEQ ID NO: 5560314 - DNA, 25 bp, Homo sapien
agagataaccacagccttaggcaac

SEQ ID NO: 5560315 - DNA, 25 bp, Homo sapien
cagccttaggcaacccaaagcaaag

SEQ ID NO: 5560316 - DNA, 25 bp, Homo sapien
tcatattcaggagcatacaaggatc

SEQ ID NO: 5560317 - DNA, 25 bp, Homo sapien
gaaatccacgtcccagttctggctc

SEQ ID NO: 5560318 - DNA, 25 bp, Homo sapien
ctgtgggtaagggaccacctttaca

SEQ ID NO: 5560319 - DNA, 25 bp, Homo sapien
acacctaggaattatggagagcctt

SEQ ID NO: 5560320 - DNA, 25 bp, Homo sapien
atgcataaagagtggtacatgacca

SEQ ID NO: 5560321 - DNA, 25 bp, Homo sapien
gacttagctggcacagcccctgctc

SEQ ID NO: 5560322 - DNA, 25 bp, Homo sapien
tgtggcattggagctatgcaagcag

SEQ ID NO: 5560323 - DNA, 25 bp, Homo sapien
tatggtctcaatagcagtgcatgat

SEQ ID NO: 5560324 - DNA, 25 bp, Homo sapien
atacacagcgtttgggtaagtcaat

SEQ ID NO: 5560325 - DNA, 25 bp, Homo sapien
agggtcctaaggacttagctggcac

SEQ ID NO: 5560326 - DNA, 25 bp, Homo sapien
aagggcataggctttgaaatccacg

SEQ ID NO: 5560327 - DNA, 25 bp, Homo sapien
tacatgaccacaacctgggaaagcc

SEQ ID NO: 5560328 - DNA, 25 bp, Homo sapien
catgttggctcaggccaaacagtgc

SEQ ID NO: 5560329 - DNA, 25 bp, Homo sapien
cacaattgtctaagtcaggggaaac

SEQ ID NO: 5560330 - DNA, 25 bp, Homo sapien
agatggtaaagtaacagagaagtaa

SEQ ID NO: 5560331 - DNA, 25 bp, Homo sapien
cacacttcgctcaccagcagggagt

SEQ ID NO: 5560332 - DNA, 25 bp, Homo sapien
ccaaacagtgcagcatccagtggac

SEQ ID NO: 5560333 - DNA, 25 bp, Homo sapien
atagtcctagattggtccaggggtg

SEQ ID NO: 5560334 - DNA, 25 bp, Homo sapien
agtagaagcaagacaggttcttggc

SEQ ID NO: 5560335 - DNA, 25 bp, Homo sapien
caggttggactacaaaggagatata

SEQ ID NO: 5560336 - DNA, 25 bp, Homo sapien
tttgaagcacttgatagaagctctt

SEQ ID NO: 5560337 - DNA, 25 bp, Homo sapien
atggaaatactgaggattaaagaac

SEQ ID NO: 5560338 - DNA, 25 bp, Homo sapien
actttagcaagggaacaaatatagt

SEQ ID NO: 5560339 - DNA, 25 bp, Homo sapien
tcacaaacgctgcattaatgaatac

SEQ ID NO: 5560340 - DNA, 25 bp, Homo sapien
gttgtctacccaggagtaggctgta

SEQ ID NO: 5560341 - DNA, 25 bp, Homo sapien
atgaaaggatacagttgtctccctc

SEQ ID NO: 5560342 - DNA, 25 bp, Homo sapien
gatatggtgtcatttaaacagcttc

SEQ ID NO: 5560343 - DNA, 25 bp, Homo sapien
caggagtaggctgtatgaatatacc

SEQ ID NO: 5560344 - DNA, 25 bp, Homo sapien
ttgaaaaggtagtacatccacatag

SEQ ID NO: 5560345 - DNA, 25 bp, Homo sapien
atataccacaatttagggaaccaga

SEQ ID NO: 5560346 - DNA, 25 bp, Homo sapien
tatatacaaatggcagtcactgtcc

SEQ ID NO: 5560347 - DNA, 25 bp, Homo sapien
gggaaccagaaccctgatatggtgt

SEQ ID NO: 5560348 - DNA, 25 bp, Homo sapien
taaactgaaggttatcccacatcac

SEQ ID NO: 5560349 - DNA, 25 bp, Homo sapien
ctcccaaggtaatcagggttaccag

SEQ ID NO: 5560350 - DNA, 25 bp, Homo sapien
actgacttggcacaacacatgttgc

SEQ ID NO: 5560351 - DNA, 25 bp, Homo sapien
ttcccatgagaaacaaagagtggga

SEQ ID NO: 5560352 - DNA, 25 bp, Homo sapien
agcctagctgtgtcatatctgttgc

SEQ ID NO: 5560353 - DNA, 25 bp, Homo sapien
tgaaatcattcttggggaaaaagtc

SEQ ID NO: 5560354 - DNA, 25 bp, Homo sapien
gcatctgagcataaagcataagtta

SEQ ID NO: 5560355 - DNA, 25 bp, Homo sapien
atggaggccagaagcaattttgcct

SEQ ID NO: 5560356 - DNA, 25 bp, Homo sapien
ggtataaggccacgctggccactcc

SEQ ID NO: 5560357 - DNA, 25 bp, Homo sapien
cttcagtagtacagtaagtgaatac

SEQ ID NO: 5560358 - DNA, 25 bp, Homo sapien
ctgggttctagtaaggtataaggcc

SEQ ID NO: 5560359 - DNA, 25 bp, Homo sapien
tacgatggctgtttactgacttggc

SEQ ID NO: 5560360 - DNA, 25 bp, Homo sapien
tactgaaattggtggaagcagatga

SEQ ID NO: 5560361 - DNA, 25 bp, Homo sapien
agggctattatagtacatgcggcta

SEQ ID NO: 5560362 - DNA, 25 bp, Homo sapien
tttatacaagtgaaagctaagatga

SEQ ID NO: 5560363 - DNA, 25 bp, Homo sapien
agttattctggtgaaggcataggat

SEQ ID NO: 5560364 - DNA, 25 bp, Homo sapien
gactctagtttctggcaccactccc

SEQ ID NO: 5560365 - DNA, 25 bp, Homo sapien
aacaggtaaaaggcacctccagtac

SEQ ID NO: 5560366 - DNA, 25 bp, Homo sapien
aatggcagccttgttaaaaagcttt

SEQ ID NO: 5560367 - DNA, 25 bp, Homo sapien
gtgaaggcataggatgaccaattac

SEQ ID NO: 5560368 - DNA, 25 bp, Homo sapien
ctaaacagtgagaattgtagactct

SEQ ID NO: 5560369 - DNA, 25 bp, Homo sapien
aatctaataaacaggtaaaaggcac

SEQ ID NO: 5560370 - DNA, 25 bp, Homo sapien
gagctgagggttttattgctgcagt

SEQ ID NO: 5560371 - DNA, 25 bp, Homo sapien
tacacctgtgcaacactagtgtcac

SEQ ID NO: 5560372 - DNA, 25 bp, Homo sapien
taaacttggcaatagcaagagggga

SEQ ID NO: 5560373 - DNA, 25 bp, Homo sapien
tatggaatagctaagtgaatatatc

SEQ ID NO: 5560374 - DNA, 25 bp, Homo sapien
gagtagtgtattaggtgggaaataa

SEQ ID NO: 5560375 - DNA, 25 bp, Homo sapien
agataggtgtgtcatgtggtacatt

SEQ ID NO: 5560376 - DNA, 25 bp, Homo sapien
aggggcatggtaatgatttggatgt

SEQ ID NO: 5560377 - DNA, 25 bp, Homo sapien
gcacagacagatttacaggtgaaat

SEQ ID NO: 5560378 - DNA, 25 bp, Homo sapien
aagtgaatatatcgagtagctgaac

SEQ ID NO: 5560379 - DNA, 25 bp, Homo sapien
aggggagcagataatgaactaaata

SEQ ID NO: 5560380 - DNA, 25 bp, Homo sapien
atttgaagtgcttatggaatagctt

SEQ ID NO: 5560381 - DNA, 25 bp, Homo sapien
gtggtacattatctgagagtagtgt

SEQ ID NO: 5560382 - DNA, 25 bp, Homo sapien
ttcagagcttaagagattggcctac

SEQ ID NO: 5560383 - DNA, 25 bp, Homo sapien
ctctagctgaccgcgttgctgctga

SEQ ID NO: 5560384 - DNA, 25 bp, Homo sapien
tctgtaggagctcgtccatggacaa

SEQ ID NO: 5560385 - DNA, 25 bp, Homo sapien
ccaggaagctctcggcctctagctg

SEQ ID NO: 5560386 - DNA, 25 bp, Homo sapien
cagttcatacagatgcgtgcgcatt

SEQ ID NO: 5560387 - DNA, 25 bp, Homo sapien
tccatggacaacatccagttcatac

SEQ ID NO: 5560388 - DNA, 25 bp, Homo sapien
gagcggagcttccactagggctccc

SEQ ID NO: 5560389 - DNA, 25 bp, Homo sapien
gatgcgtgcgcatttcgcagcagcc

SEQ ID NO: 5560390 - DNA, 25 bp, Homo sapien
actagggctcccagtttccccgcac

SEQ ID NO: 5560391 - DNA, 25 bp, Homo sapien
gactggcatctttagatggatggtc

SEQ ID NO: 5560392 - DNA, 25 bp, Homo sapien
gcatttcgcagcagccatacacgcc

SEQ ID NO: 5560393 - DNA, 25 bp, Homo sapien
agatggatggtcctcagtccagtcc

SEQ ID NO: 5560394 - DNA, 25 bp, Homo sapien
ctgggcaatccaggtgcaactgtaa

SEQ ID NO: 5560395 - DNA, 25 bp, Homo sapien
tatgaagacttagactcccccccac

SEQ ID NO: 5560396 - DNA, 25 bp, Homo sapien
taatggtcccctagtgcaggggcag

SEQ ID NO: 5560397 - DNA, 25 bp, Homo sapien
gccccaccactgcataggaaaagtc

SEQ ID NO: 5560398 - DNA, 25 bp, Homo sapien
tctaataccgcccataagcagagaa

SEQ ID NO: 5560399 - DNA, 25 bp, Homo sapien
ttataaataggaaatggacattacc

SEQ ID NO: 5560400 - DNA, 25 bp, Homo sapien
catgaaaagtaagcctccaagtgtc

SEQ ID NO: 5560401 - DNA, 25 bp, Homo sapien
cattgttcaggggttttcttggctc

SEQ ID NO: 5560402 - DNA, 25 bp, Homo sapien
tcttgtgacagtgaaaagggtactg

SEQ ID NO: 5560403 - DNA, 25 bp, Homo sapien
ccaaattgttagtgaggatgaagag

SEQ ID NO: 5560404 - DNA, 25 bp, Homo sapien
agacgagacagccccattgcaattt

SEQ ID NO: 5560405 - DNA, 25 bp, Homo sapien
cagccacactcactctccgccccac

SEQ ID NO: 5560406 - DNA, 25 bp, Homo sapien
agggccatcaggtgccctgacccct

SEQ ID NO: 5560407 - DNA, 25 bp, Homo sapien
ccaggcacacgctcccctggctggg

SEQ ID NO: 5560408 - DNA, 25 bp, Homo sapien
gccccacagtggctcctggggctga

SEQ ID NO: 5560409 - DNA, 25 bp, Homo sapien
cccttctccacgtgcccacgagggc

SEQ ID NO: 5560410 - DNA, 25 bp, Homo sapien
gccagcctcacaggtgcccgctggt

SEQ ID NO: 5560411 - DNA, 25 bp, Homo sapien
gggtccccaggctcttccgattggc

SEQ ID NO: 5560412 - DNA, 25 bp, Homo sapien
tggttctgtgacccatcccaggcac

SEQ ID NO: 5560413 - DNA, 25 bp, Homo sapien
gtctcctgaaccagggagtctgacc

SEQ ID NO: 5560414 - DNA, 25 bp, Homo sapien
ccgtccgctgtctgtctcctgaacc

SEQ ID NO: 5560415 - DNA, 25 bp, Homo sapien
gattggctcaggtgccctctcctgc

SEQ ID NO: 5560416 - DNA, 25 bp, Homo sapien
aatggctggcctctcttgtgtacaa

SEQ ID NO: 5560417 - DNA, 25 bp, Homo sapien
tcagggaagggattttatcatttgt

SEQ ID NO: 5560418 - DNA, 25 bp, Homo sapien
aacaattcttaatggctggcctctc

SEQ ID NO: 5560419 - DNA, 25 bp, Homo sapien
ctcttgtgtacaatgagccaatatt

SEQ ID NO: 5560420 - DNA, 25 bp, Homo sapien
ctagaggatctctggccaagtattc

SEQ ID NO: 5560421 - DNA, 25 bp, Homo sapien
gcacccagcccaaatgagatgtttc

SEQ ID NO: 5560422 - DNA, 25 bp, Homo sapien
tgtcctcaggtgattcatttgcctc

SEQ ID NO: 5560423 - DNA, 25 bp, Homo sapien
cataaaacgtttgtgtatttgcttc

SEQ ID NO: 5560424 - DNA, 25 bp, Homo sapien
tatcatttgttcagagatgtcttta

SEQ ID NO: 5560425 - DNA, 25 bp, Homo sapien
ctgaacaaagcatatttagagtctc

SEQ ID NO: 5560426 - DNA, 25 bp, Homo sapien
atttttcagggaagggattttatca

SEQ ID NO: 5560427 - DNA, 25 bp, Homo sapien
gggcctggtgcaacccgattttctc

SEQ ID NO: 5560428 - DNA, 25 bp, Homo sapien
gcctccgacagctaagcgaatcggc

SEQ ID NO: 5560429 - DNA, 25 bp, Homo sapien
agtgtccacgttccgaccctgcgct

SEQ ID NO: 5560430 - DNA, 25 bp, Homo sapien
aatttaaggatgtagataagctatc

SEQ ID NO: 5560431 - DNA, 25 bp, Homo sapien
gcgtgggcggaaattagtgtccacg

SEQ ID NO: 5560432 - DNA, 25 bp, Homo sapien
caaacgctgcttcgggagctgttta

SEQ ID NO: 5560433 - DNA, 25 bp, Homo sapien
ttgagaggagttaaaagccatcatt

SEQ ID NO: 5560434 - DNA, 25 bp, Homo sapien
gcagagggtagctacagccattaat

SEQ ID NO: 5560435 - DNA, 25 bp, Homo sapien
ctgcgctgtgccaaacgctgcttcg

SEQ ID NO: 5560436 - DNA, 25 bp, Homo sapien
ttttctcgtgcagactcgcagccgg

SEQ ID NO: 5560437 - DNA, 25 bp, Homo sapien
aagaaagtaagaatggtgtgaatta

SEQ ID NO: 5560438 - DNA, 25 bp, Homo sapien
cacaccattgcagggaaattctgac

SEQ ID NO: 5560439 - DNA, 25 bp, Homo sapien
tgcaaattcagtaagaacctagctc

SEQ ID NO: 5560440 - DNA, 25 bp, Homo sapien
atggagtgagctgttatccagcctt

SEQ ID NO: 5560441 - DNA, 25 bp, Homo sapien
ctccgggctctgcataagatagttc

SEQ ID NO: 5560442 - DNA, 25 bp, Homo sapien
ggtttgagacttgccctccgggctc

SEQ ID NO: 5560443 - DNA, 25 bp, Homo sapien
tgaatttcaaatggagtgagctgtt

SEQ ID NO: 5560444 - DNA, 25 bp, Homo sapien
cagaagagatcattcatggagtgaa

SEQ ID NO: 5560445 - DNA, 25 bp, Homo sapien
acccattgccagaataatccctagt

SEQ ID NO: 5560446 - DNA, 25 bp, Homo sapien
tcaacccatgggtttgagacttgcc

SEQ ID NO: 5560447 - DNA, 25 bp, Homo sapien
aaaaccaatggcgactgggttattc

SEQ ID NO: 5560448 - DNA, 25 bp, Homo sapien
taatttgtagatggcaggtgttttc

SEQ ID NO: 5560449 - DNA, 25 bp, Homo sapien
tccacaccaggcctctgcatctctc

SEQ ID NO: 5560450 - DNA, 25 bp, Homo sapien
atgcagtgattcagtgatccaggct

SEQ ID NO: 5560451 - DNA, 25 bp, Homo sapien
cagtgatccaggctgatccaatctc

SEQ ID NO: 5560452 - DNA, 25 bp, Homo sapien
aatactgctaactccacaccaggcc

SEQ ID NO: 5560453 - DNA, 25 bp, Homo sapien
gcagggtaggcaattgccttcgtcc

SEQ ID NO: 5560454 - DNA, 25 bp, Homo sapien
ctgtgctgatatcctgagcagggag

SEQ ID NO: 5560455 - DNA, 25 bp, Homo sapien
tgcatctctcaagcagggtaggcaa

SEQ ID NO: 5560456 - DNA, 25 bp, Homo sapien
tgtctgatcttggcacaagaaactc

SEQ ID NO: 5560457 - DNA, 25 bp, Homo sapien
ggacagagagagaatattttggcag

SEQ ID NO: 5560458 - DNA, 25 bp, Homo sapien
gtcctacatgcagtgattcagtgat

SEQ ID NO: 5560459 - DNA, 25 bp, Homo sapien
ctccatagtgtgtcctacatgcagt

SEQ ID NO: 5560460 - DNA, 25 bp, Homo sapien
gtcaactgccaaccagggtagctca

SEQ ID NO: 5560461 - DNA, 25 bp, Homo sapien
caacaagacaaggttagacagatct

SEQ ID NO: 5560462 - DNA, 25 bp, Homo sapien
agggatctcaaggtgtaaagttttc

SEQ ID NO: 5560463 - DNA, 25 bp, Homo sapien
cagtgctggtcctcggatgtcaact

SEQ ID NO: 5560464 - DNA, 25 bp, Homo sapien
cctgtgcacctgtgggcattcccac

SEQ ID NO: 5560465 - DNA, 25 bp, Homo sapien
tcggtcagataatttcagaaactcc

SEQ ID NO: 5560466 - DNA, 25 bp, Homo sapien
atccagaactactgaggctccaagc

SEQ ID NO: 5560467 - DNA, 25 bp, Homo sapien
aatgcatctttggggtatccgtttc

SEQ ID NO: 5560468 - DNA, 25 bp, Homo sapien
atggttacaacctcccgtacagctc

SEQ ID NO: 5560469 - DNA, 25 bp, Homo sapien
tctttctgtgcgatgaccagtgctg

SEQ ID NO: 5560470 - DNA, 25 bp, Homo sapien
cgtttctgagtaccaacaagggaac

SEQ ID NO: 5560471 - DNA, 25 bp, Homo sapien
ggacctaggagcgagtaacatgact

SEQ ID NO: 5560472 - DNA, 25 bp, Homo sapien
agtcatgttactcgctcctaggtcc

SEQ ID NO: 5560473 - DNA, 25 bp, Homo sapien
ttgattccacaaaccaagcgaagaa

SEQ ID NO: 5560474 - DNA, 25 bp, Homo sapien
accataactctcagaacaggagtat

SEQ ID NO: 5560475 - DNA, 25 bp, Homo sapien
cagtcgtgttatataggtttaccat

SEQ ID NO: 5560476 - DNA, 25 bp, Homo sapien
tgataaatagtcatgagacgtgttc

SEQ ID NO: 5560477 - DNA, 25 bp, Homo sapien
ttggcacttggaacagtcgtgttat

SEQ ID NO: 5560478 - DNA, 25 bp, Homo sapien
gaggatataatggctaaggatgttc

SEQ ID NO: 5560479 - DNA, 25 bp, Homo sapien
cagaacaggagtatattacaaacaa

SEQ ID NO: 5560480 - DNA, 25 bp, Homo sapien
ttgaaaacattgcctatggattatc

SEQ ID NO: 5560481 - DNA, 25 bp, Homo sapien
aggatgttcctagagctgctgaagg

SEQ ID NO: 5560482 - DNA, 25 bp, Homo sapien
tggattatctacagaagagaggaaa

SEQ ID NO: 5560483 - DNA, 25 bp, Homo sapien
tcatgagacgtgttctgtgagtcac

SEQ ID NO: 5560484 - DNA, 25 bp, Homo sapien
tcgggccagcagatcttcgcgctgg

SEQ ID NO: 5560485 - DNA, 25 bp, Homo sapien
ccgaccttctcgggccagcagatct

SEQ ID NO: 5560486 - DNA, 25 bp, Homo sapien
ggcgcccgcccatcttctggcccgg

SEQ ID NO: 5560487 - DNA, 25 bp, Homo sapien
gcccatcttctggcccggcgtggtg

SEQ ID NO: 5560488 - DNA, 25 bp, Homo sapien
atctatttttgcagaatccgggggc

SEQ ID NO: 5560489 - DNA, 25 bp, Homo sapien
cgcgcgcgtctcgcctactcgctgg

SEQ ID NO: 5560490 - DNA, 25 bp, Homo sapien
agaagcactcgcgcccgaccttctc

SEQ ID NO: 5560491 - DNA, 25 bp, Homo sapien
accttcgagcagaccaagtacctgg

SEQ ID NO: 5560492 - DNA, 25 bp, Homo sapien
gcctactcgctgggcatgaccgaga

SEQ ID NO: 5560493 - DNA, 25 bp, Homo sapien
gcagatcttcgcgctggagaaaacc

SEQ ID NO: 5560494 - DNA, 25 bp, Homo sapien
gagaaaaccttcgagcagaccaagt

SEQ ID NO: 5560495 - DNA, 25 bp, Homo sapien
tcccataaatgatcgtccggccccg

SEQ ID NO: 5560496 - DNA, 25 bp, Homo sapien
acaggctgctttgagccgaaactgg

SEQ ID NO: 5560497 - DNA, 25 bp, Homo sapien
tctctgccagaatgtcttcccgcac

SEQ ID NO: 5560498 - DNA, 25 bp, Homo sapien
ctgctcccgaagggagcgaaaagga

SEQ ID NO: 5560499 - DNA, 25 bp, Homo sapien
tttcttgccacgagagcagaagatt

SEQ ID NO: 5560500 - DNA, 25 bp, Homo sapien
caagtgaggtgtatcaactctatcc

SEQ ID NO: 5560501 - DNA, 25 bp, Homo sapien
caaccacagatgagccgtgcctatt

SEQ ID NO: 5560502 - DNA, 25 bp, Homo sapien
tccaggccaacttcaagtgaggtgt

SEQ ID NO: 5560503 - DNA, 25 bp, Homo sapien
cgtccaggagtccgacgcctctttt

SEQ ID NO: 5560504 - DNA, 25 bp, Homo sapien
tgagccgaaactggtgaccgtttcc

SEQ ID NO: 5560505 - DNA, 25 bp, Homo sapien
tttgtaatgggagattcttgccttc

SEQ ID NO: 5560506 - DNA, 25 bp, Homo sapien
ggtatacaacagcacagggaaatgc

SEQ ID NO: 5560507 - DNA, 25 bp, Homo sapien
ctggtgcatccatatagtggactat

SEQ ID NO: 5560508 - DNA, 25 bp, Homo sapien
aatgcagtcttgcagacagaaaaaa

SEQ ID NO: 5560509 - DNA, 25 bp, Homo sapien
caggccacatgaatttgtgtcaccc

SEQ ID NO: 5560510 - DNA, 25 bp, Homo sapien
gataataaagaagcagcatgtatgc

SEQ ID NO: 5560511 - DNA, 25 bp, Homo sapien
catgttggcaaatcagggttttgac

SEQ ID NO: 5560512 - DNA, 25 bp, Homo sapien
tctcgggaaaaaattctggtgcatc

SEQ ID NO: 5560513 - DNA, 25 bp, Homo sapien
taagctgaggtctacatgttggcaa

SEQ ID NO: 5560514 - DNA, 25 bp, Homo sapien
tgcaagtctacattaagctgaggtc

SEQ ID NO: 5560515 - DNA, 25 bp, Homo sapien
agggaaatgctcgtgataccacgct

SEQ ID NO: 5560516 - DNA, 25 bp, Homo sapien
ctcaaagcttacaaacatttccccc

SEQ ID NO: 5560517 - DNA, 25 bp, Homo sapien
ctgcccatgcggctgtttgagacac

SEQ ID NO: 5560518 - DNA, 25 bp, Homo sapien
ttcatgagtcatgagccatgggcag

SEQ ID NO: 5560519 - DNA, 25 bp, Homo sapien
tatgagtgacacataggtctgcatg

SEQ ID NO: 5560520 - DNA, 25 bp, Homo sapien
gaggccttagggcaacaagacaaat

SEQ ID NO: 5560521 - DNA, 25 bp, Homo sapien
agatcacaagattcagtccaagcct

SEQ ID NO: 5560522 - DNA, 25 bp, Homo sapien
tgtggaggttctcaaagaaactacc

SEQ ID NO: 5560523 - DNA, 25 bp, Homo sapien
tcaaccaaaactggactgagcactc

SEQ ID NO: 5560524 - DNA, 25 bp, Homo sapien
tgtgcgtttagaacagacatgtccc

SEQ ID NO: 5560525 - DNA, 25 bp, Homo sapien
tgtcagtctttcataggaggcctta

SEQ ID NO: 5560526 - DNA, 25 bp, Homo sapien
agccctggcaggtctgaaccagtta

SEQ ID NO: 5560527 - DNA, 25 bp, Homo sapien
gcccacaggtgacccttggtgtcca

SEQ ID NO: 5560528 - DNA, 25 bp, Homo sapien
gaactgcagatactgatgagtgaca

SEQ ID NO: 5560529 - DNA, 25 bp, Homo sapien
gtggggagccagctaattgtatcca

SEQ ID NO: 5560530 - DNA, 25 bp, Homo sapien
actgggagttgatagaaaatttgtc

SEQ ID NO: 5560531 - DNA, 25 bp, Homo sapien
gtaacaaatcagccacggcagagag

SEQ ID NO: 5560532 - DNA, 25 bp, Homo sapien
aggccctgaaacgtctctagcaagc

SEQ ID NO: 5560533 - DNA, 25 bp, Homo sapien
agcaagcaggctttggtaaacagaa

SEQ ID NO: 5560534 - DNA, 25 bp, Homo sapien
gttgtaggttactcttaaagcagct

SEQ ID NO: 5560535 - DNA, 25 bp, Homo sapien
ttcttcagggtcattggaaaaggtg

SEQ ID NO: 5560536 - DNA, 25 bp, Homo sapien
gtggttaccgtcagtccaggaagtg

SEQ ID NO: 5560537 - DNA, 25 bp, Homo sapien
ctgatgagtgacagtccactgctat

SEQ ID NO: 5560538 - DNA, 25 bp, Homo sapien
aaggaaaaccagtaacaaatcagcc

SEQ ID NO: 5560539 - DNA, 25 bp, Homo sapien
taacacgtttataaacggagacgac

SEQ ID NO: 5560540 - DNA, 25 bp, Homo sapien
gtcgtctccgtttataaacgtgtta

SEQ ID NO: 5560541 - DNA, 25 bp, Homo sapien
gaagcaaagggctgttttgaaaata

SEQ ID NO: 5560542 - DNA, 25 bp, Homo sapien
aatggctaagatgaacatgaacttc

SEQ ID NO: 5560543 - DNA, 25 bp, Homo sapien
ctcaaggggtaaaatctgaagattc

SEQ ID NO: 5560544 - DNA, 25 bp, Homo sapien
ggaacactgtgggctcagaacatta

SEQ ID NO: 5560545 - DNA, 25 bp, Homo sapien
gagaatgaagaagttccaaatggct

SEQ ID NO: 5560546 - DNA, 25 bp, Homo sapien
gtcaatattagaatgagggaaccag

SEQ ID NO: 5560547 - DNA, 25 bp, Homo sapien
gaatgaaagctctaggattatgtcc

SEQ ID NO: 5560548 - DNA, 25 bp, Homo sapien
cacatacccaggaacactgtgggct

SEQ ID NO: 5560549 - DNA, 25 bp, Homo sapien
acctctgcagaatcatggaccccca

SEQ ID NO: 5560550 - DNA, 25 bp, Homo sapien
gcaggtattgctggcacgttgtttg

SEQ ID NO: 5560551 - DNA, 25 bp, Homo sapien
gacacaatgatttgcagacaagccc

SEQ ID NO: 5560552 - DNA, 25 bp, Homo sapien
gaggcgacgctcaatccgccagaca

SEQ ID NO: 5560553 - DNA, 25 bp, Homo sapien
gcgctggctcagtgaaaacatcgcc

SEQ ID NO: 5560554 - DNA, 25 bp, Homo sapien
tccgccagacacagatatccgtgac

SEQ ID NO: 5560555 - DNA, 25 bp, Homo sapien
cgaccccgagcgtatcaccatcttt

SEQ ID NO: 5560556 - DNA, 25 bp, Homo sapien
ctcacaaaaaaacgtgacgaggcga

SEQ ID NO: 5560557 - DNA, 25 bp, Homo sapien
tcgatggctcagtcctggctgccta

SEQ ID NO: 5560558 - DNA, 25 bp, Homo sapien
gatatccgtgaccctgggaagaagc

SEQ ID NO: 5560559 - DNA, 25 bp, Homo sapien
gaccggaaacatgttcgatggctca

SEQ ID NO: 5560560 - DNA, 25 bp, Homo sapien
tcaactaccgtcttggggtgctcgg

SEQ ID NO: 5560561 - DNA, 25 bp, Homo sapien
cggttttctcagcaccggggaccag

SEQ ID NO: 5560562 - DNA, 25 bp, Homo sapien
ctcccaccattcagaagggctgttc

SEQ ID NO: 5560563 - DNA, 25 bp, Homo sapien
atctgctgcctggcacacgacgtga

SEQ ID NO: 5560564 - DNA, 25 bp, Homo sapien
agccgcaccagctctcattcctgcc

SEQ ID NO: 5560565 - DNA, 25 bp, Homo sapien
caccacgctgttcccgccaccctga

SEQ ID NO: 5560566 - DNA, 25 bp, Homo sapien
taaaagcaagtcaaatgtcccagta

SEQ ID NO: 5560567 - DNA, 25 bp, Homo sapien
cctggcacagccttgctttgcagcc

SEQ ID NO: 5560568 - DNA, 25 bp, Homo sapien
tgtcccagtaacatggcaggtgtga

SEQ ID NO: 5560569 - DNA, 25 bp, Homo sapien
ggagaatccttgggcgcccatgtca

SEQ ID NO: 5560570 - DNA, 25 bp, Homo sapien
ccgacaccctccgccatctgctgcc

SEQ ID NO: 5560571 - DNA, 25 bp, Homo sapien
aggcatccctgaccagcacagcctc

SEQ ID NO: 5560572 - DNA, 25 bp, Homo sapien
aaacccacccacggcatgagcgtga

SEQ ID NO: 5560573 - DNA, 25 bp, Homo sapien
ccaccctgaatgcccccttccaggc

SEQ ID NO: 5560574 - DNA, 25 bp, Homo sapien
aagccttggaaactagcataaaaac

SEQ ID NO: 5560575 - DNA, 25 bp, Homo sapien
aacagggacttggatagttctataa

SEQ ID NO: 5560576 - DNA, 25 bp, Homo sapien
ataaatatggaagagattgctggtg

SEQ ID NO: 5560577 - DNA, 25 bp, Homo sapien
ggaataaggtgaagcgcttacacaa

SEQ ID NO: 5560578 - DNA, 25 bp, Homo sapien
agattgctggtgccagaaaccgagt

SEQ ID NO: 5560579 - DNA, 25 bp, Homo sapien
tgataagacctgagctgcgactgaa

SEQ ID NO: 5560580 - DNA, 25 bp, Homo sapien
tgagaaatgtgagtagatgcaataa

SEQ ID NO: 5560581 - DNA, 25 bp, Homo sapien
gctgcgactgaagcccttgctgcat

SEQ ID NO: 5560582 - DNA, 25 bp, Homo sapien
aaaccttgaaggaccaagccttgga

SEQ ID NO: 5560583 - DNA, 25 bp, Homo sapien
tcaaaggtgaccagaaaagtcttgt

SEQ ID NO: 5560584 - DNA, 25 bp, Homo sapien
caaaatacatacagcaggagataat

SEQ ID NO: 5560585 - DNA, 25 bp, Homo sapien
ctgcatcctgagtgcctcatgtctc

SEQ ID NO: 5560586 - DNA, 25 bp, Homo sapien
tagggtaccgtgaatatttagtgcc

SEQ ID NO: 5560587 - DNA, 25 bp, Homo sapien
agagtgctgcctcccttcacacccc

SEQ ID NO: 5560588 - DNA, 25 bp, Homo sapien
ttctacagcagaattggatattccc

SEQ ID NO: 5560589 - DNA, 25 bp, Homo sapien
agctgaactgtgggtcatgcagtgt

SEQ ID NO: 5560590 - DNA, 25 bp, Homo sapien
aaacagtcagcaagccctgcccatt

SEQ ID NO: 5560591 - DNA, 25 bp, Homo sapien
tagtttcaaacagtcagcaagccct

SEQ ID NO: 5560592 - DNA, 25 bp, Homo sapien
gtgggtcatgcagtgtgcatccatc

SEQ ID NO: 5560593 - DNA, 25 bp, Homo sapien
tgtcaaattgaaacctcctgcatcc

SEQ ID NO: 5560594 - DNA, 25 bp, Homo sapien
gcaagtctggtgtttatcctagagt

SEQ ID NO: 5560595 - DNA, 25 bp, Homo sapien
ggtgtttatcctagagtgctgcctc

SEQ ID NO: 5560596 - DNA, 25 bp, Homo sapien
agagatttggagaagttcggtaact

SEQ ID NO: 5560597 - DNA, 25 bp, Homo sapien
agggactgaatgagtagtcagactt

SEQ ID NO: 5560598 - DNA, 25 bp, Homo sapien
taagtaaagcttctagttcaatgcc

SEQ ID NO: 5560599 - DNA, 25 bp, Homo sapien
gaatgagtagtcagacttgggtctt

SEQ ID NO: 5560600 - DNA, 25 bp, Homo sapien
aaaagtgtttgttgacgtggaagga

SEQ ID NO: 5560601 - DNA, 25 bp, Homo sapien
aatgacatcatgtaagtaaagcttc

SEQ ID NO: 5560602 - DNA, 25 bp, Homo sapien
tccagatgccggaagacacaaaata

SEQ ID NO: 5560603 - DNA, 25 bp, Homo sapien
gaaggaggtagatttgttcccattc

SEQ ID NO: 5560604 - DNA, 25 bp, Homo sapien
gcccatgctctttccatcctgctcc

SEQ ID NO: 5560605 - DNA, 25 bp, Homo sapien
tcagcagacttcttcgtggagccca

SEQ ID NO: 5560606 - DNA, 25 bp, Homo sapien
cttgggtcttttgctggccagagcc

SEQ ID NO: 5560607 - DNA, 25 bp, Homo sapien
gctagaaagtgacagctagacagtg

SEQ ID NO: 5560608 - DNA, 25 bp, Homo sapien
actaaacccaattacaggactgatc

SEQ ID NO: 5560609 - DNA, 25 bp, Homo sapien
atagaatatgagattaaaagcatgc

SEQ ID NO: 5560610 - DNA, 25 bp, Homo sapien
aaaagcatgctccattaccaccaat

SEQ ID NO: 5560611 - DNA, 25 bp, Homo sapien
agctagacagtgattaaaccctgaa

SEQ ID NO: 5560612 - DNA, 25 bp, Homo sapien
gataagcaactacagagcagcaaac

SEQ ID NO: 5560613 - DNA, 25 bp, Homo sapien
aatacagaagaattcaagaagctta

SEQ ID NO: 5560614 - DNA, 25 bp, Homo sapien
agcagcaaactgacttgtgaggtcc

SEQ ID NO: 5560615 - DNA, 25 bp, Homo sapien
tgaggtcctgtagctagaaagtgac

SEQ ID NO: 5560616 - DNA, 25 bp, Homo sapien
gagcaggaggagatattacatccat

SEQ ID NO: 5560617 - DNA, 25 bp, Homo sapien
tattagggataagcaactacagagc

SEQ ID NO: 5560618 - DNA, 25 bp, Homo sapien
ctgtagtgacccctgagttaaagta

SEQ ID NO: 5560619 - DNA, 25 bp, Homo sapien
agcctggctccattttgggaggcag

SEQ ID NO: 5560620 - DNA, 25 bp, Homo sapien
ctgtacaaagcccaaaccggtccta

SEQ ID NO: 5560621 - DNA, 25 bp, Homo sapien
ctgggaactgggtccctatgtccga

SEQ ID NO: 5560622 - DNA, 25 bp, Homo sapien
aaacccgaccgcttagtacagccac

SEQ ID NO: 5560623 - DNA, 25 bp, Homo sapien
ttcacgctgcaactgctgatcactt

SEQ ID NO: 5560624 - DNA, 25 bp, Homo sapien
gtccctatgtccgaaggcagcggaa

SEQ ID NO: 5560625 - DNA, 25 bp, Homo sapien
cccccgaaactgtaggtctccctga

SEQ ID NO: 5560626 - DNA, 25 bp, Homo sapien
ctgtagctctgcatggagctgaaga

SEQ ID NO: 5560627 - DNA, 25 bp, Homo sapien
ttcaacggggtcttcctgtagtgac

SEQ ID NO: 5560628 - DNA, 25 bp, Homo sapien
tagcgaaaacccgagcactgtttca

SEQ ID NO: 5560629 - DNA, 25 bp, Homo sapien
tcaggatgtcattataaatcacagc

SEQ ID NO: 5560630 - DNA, 25 bp, Homo sapien
tgacattactccaaaagaaggcaca

SEQ ID NO: 5560631 - DNA, 25 bp, Homo sapien
ctccaaaagaaggcacatgaaaaaa

SEQ ID NO: 5560632 - DNA, 25 bp, Homo sapien
tactaatatattggatgaaataatc

SEQ ID NO: 5560633 - DNA, 25 bp, Homo sapien
cataagtaaagatagaacagggtag

SEQ ID NO: 5560634 - DNA, 25 bp, Homo sapien
gaaagataggaaagtggctatccac

SEQ ID NO: 5560635 - DNA, 25 bp, Homo sapien
tacattcatatggataagagaaaga

SEQ ID NO: 5560636 - DNA, 25 bp, Homo sapien
aatcacagctagtttagaaaatcat

SEQ ID NO: 5560637 - DNA, 25 bp, Homo sapien
tagaacagggtagaatgactcctta

SEQ ID NO: 5560638 - DNA, 25 bp, Homo sapien
tagaaaatcataagttgtaacaaca

SEQ ID NO: 5560639 - DNA, 25 bp, Homo sapien
tcacataagtaaagatagaacaggg

SEQ ID NO: 5560640 - DNA, 25 bp, Homo sapien
gcaccccatccaagcctgatcttcc

SEQ ID NO: 5560641 - DNA, 25 bp, Homo sapien
tctaagtttgtgctcctgggatctc

SEQ ID NO: 5560642 - DNA, 25 bp, Homo sapien
tcaggccacatcaaaatagacatta

SEQ ID NO: 5560643 - DNA, 25 bp, Homo sapien
aggcccacctatggcaccccatcca

SEQ ID NO: 5560644 - DNA, 25 bp, Homo sapien
tgaagtgaaatattcaggccacatc

SEQ ID NO: 5560645 - DNA, 25 bp, Homo sapien
agggcaccagtcgcaatcagctttt

SEQ ID NO: 5560646 - DNA, 25 bp, Homo sapien
taatcctaacatggagcatccgacc

SEQ ID NO: 5560647 - DNA, 25 bp, Homo sapien
atctcatgttgcccctcaggcccac

SEQ ID NO: 5560648 - DNA, 25 bp, Homo sapien
acaaagacatctatagtgaagaaaa

SEQ ID NO: 5560649 - DNA, 25 bp, Homo sapien
cattattgacctacaagggcaccag

SEQ ID NO: 5560650 - DNA, 25 bp, Homo sapien
gcatccgaccatataaaatgaagtg

SEQ ID NO: 5560651 - DNA, 25 bp, Homo sapien
atccatataaaaacagaatctgaat

SEQ ID NO: 5560652 - DNA, 25 bp, Homo sapien
atacagatgaaaacaaatacaatcc

SEQ ID NO: 5560653 - DNA, 25 bp, Homo sapien
caacacctgcattctcttcgcttaa

SEQ ID NO: 5560654 - DNA, 25 bp, Homo sapien
ttaagaacagataagttagcaattt

SEQ ID NO: 5560655 - DNA, 25 bp, Homo sapien
gaagatgtatcaaccaaagtaaatt

SEQ ID NO: 5560656 - DNA, 25 bp, Homo sapien
tcataaaaaacagtccacagcattc

SEQ ID NO: 5560657 - DNA, 25 bp, Homo sapien
caaagtaaattcagagttttcacac

SEQ ID NO: 5560658 - DNA, 25 bp, Homo sapien
gtggcagaagaaataaaaagacact

SEQ ID NO: 5560659 - DNA, 25 bp, Homo sapien
aaaaagacacttttcaggtggattc

SEQ ID NO: 5560660 - DNA, 25 bp, Homo sapien
agcattcataaaacagggtggcaga

SEQ ID NO: 5560661 - DNA, 25 bp, Homo sapien
tttcacacatgcaactcaacacctg

SEQ ID NO: 5560662 - DNA, 25 bp, Homo sapien
atgtaaaaagcagaacacgatctcc

SEQ ID NO: 5560663 - DNA, 25 bp, Homo sapien
tacatatatgggctctggcaaggga

SEQ ID NO: 5560664 - DNA, 25 bp, Homo sapien
aagaatgacctagggccatattggc

SEQ ID NO: 5560665 - DNA, 25 bp, Homo sapien
ttgtcagccaggagtgttgctgttc

SEQ ID NO: 5560666 - DNA, 25 bp, Homo sapien
atagcaattggtcagaaagagagtt

SEQ ID NO: 5560667 - DNA, 25 bp, Homo sapien
gaggcctatgagtttgagattcccc

SEQ ID NO: 5560668 - DNA, 25 bp, Homo sapien
acaggtgatcgtgtatctgaggcct

SEQ ID NO: 5560669 - DNA, 25 bp, Homo sapien
aagcatattggaagcaagaatgacc

SEQ ID NO: 5560670 - DNA, 25 bp, Homo sapien
gcgtcaaagtggcatcgtttcaccc

SEQ ID NO: 5560671 - DNA, 25 bp, Homo sapien
acatttaaggagtggcaagcatatt

SEQ ID NO: 5560672 - DNA, 25 bp, Homo sapien
gaggtgggtctgcactcacttgcta

SEQ ID NO: 5560673 - DNA, 25 bp, Homo sapien
atttaactgaaagcaacaagggcaa

SEQ ID NO: 5560674 - DNA, 25 bp, Homo sapien
ctgcccactttacctacggagacat

SEQ ID NO: 5560675 - DNA, 25 bp, Homo sapien
tacggagacatgataaacacgcaaa

SEQ ID NO: 5560676 - DNA, 25 bp, Homo sapien
taggggcagatcttgaattctggcc

SEQ ID NO: 5560677 - DNA, 25 bp, Homo sapien
gaggactatgagatatcagagttac

SEQ ID NO: 5560678 - DNA, 25 bp, Homo sapien
atatcagagttactagtagggtagg

SEQ ID NO: 5560679 - DNA, 25 bp, Homo sapien
acaagggcaaaactgtctccttttg

SEQ ID NO: 5560680 - DNA, 25 bp, Homo sapien
ttgtggtaccttatagtagtgctca

SEQ ID NO: 5560681 - DNA, 25 bp, Homo sapien
acccataaagagatagtcactatat

SEQ ID NO: 5560682 - DNA, 25 bp, Homo sapien
gataaatctgaggactatgagatat

SEQ ID NO: 5560683 - DNA, 25 bp, Homo sapien
aataggagaataacacaaatgagaa

SEQ ID NO: 5560684 - DNA, 25 bp, Homo sapien
ataaaactggagaatgacatttgtc

SEQ ID NO: 5560685 - DNA, 25 bp, Homo sapien
aaacacattttcctgctggctggcc

SEQ ID NO: 5560686 - DNA, 25 bp, Homo sapien
tgaccaaaagaattacacagcatta

SEQ ID NO: 5560687 - DNA, 25 bp, Homo sapien
gaaaaaacaaagacattcacaaatc

SEQ ID NO: 5560688 - DNA, 25 bp, Homo sapien
actataaggagatggcctttcctcc

SEQ ID NO: 5560689 - DNA, 25 bp, Homo sapien
ctgctggctggccacattgagagtg

SEQ ID NO: 5560690 - DNA, 25 bp, Homo sapien
aaaaggttaactataaggagatggc

SEQ ID NO: 5560691 - DNA, 25 bp, Homo sapien
aaaatgtaatgaaatgaccaaaaga

SEQ ID NO: 5560692 - DNA, 25 bp, Homo sapien
gctctaaggagacttttcctccagg

SEQ ID NO: 5560693 - DNA, 25 bp, Homo sapien
aatcagataaaactggagaatgaca

SEQ ID NO: 5560694 - DNA, 25 bp, Homo sapien
caagtgacatttagttgtttggttt

SEQ ID NO: 5560695 - DNA, 25 bp, Homo sapien
ttgctaaggcacactagaagaaatg

SEQ ID NO: 5560696 - DNA, 25 bp, Homo sapien
gggaattagcacttagaccttggtg

SEQ ID NO: 5560697 - DNA, 25 bp, Homo sapien
aacaactagactctttccagcagat

SEQ ID NO: 5560698 - DNA, 25 bp, Homo sapien
ttccagcagatttgctaaggcacac

SEQ ID NO: 5560699 - DNA, 25 bp, Homo sapien
gaattgacaaattgagagacacatt

SEQ ID NO: 5560700 - DNA, 25 bp, Homo sapien
atacatgggagaatattactaatac

SEQ ID NO: 5560701 - DNA, 25 bp, Homo sapien
cattactgtggatagtttctgcctt

SEQ ID NO: 5560702 - DNA, 25 bp, Homo sapien
cctctctccaggcactaccaaactc

SEQ ID NO: 5560703 - DNA, 25 bp, Homo sapien
tgagtcatgatatctaaagccagtc

SEQ ID NO: 5560704 - DNA, 25 bp, Homo sapien
atttgtggttgccttatacatctcc

SEQ ID NO: 5560705 - DNA, 25 bp, Homo sapien
gcctttacaggcttagaattgacaa

SEQ ID NO: 5560706 - DNA, 25 bp, Homo sapien
aaagggcaaccacttgtataccctc

SEQ ID NO: 5560707 - DNA, 25 bp, Homo sapien
ccaaggcagccctggtactttccta

SEQ ID NO: 5560708 - DNA, 25 bp, Homo sapien
gccggcatttggcctgctgctggtg

SEQ ID NO: 5560709 - DNA, 25 bp, Homo sapien
ttttctgcaagcagggatcccagac

SEQ ID NO: 5560710 - DNA, 25 bp, Homo sapien
tcctaagtggcccctcctacagagc

SEQ ID NO: 5560711 - DNA, 25 bp, Homo sapien
gtataccctctggtggccactcctc

SEQ ID NO: 5560712 - DNA, 25 bp, Homo sapien
tcctacagagcacttgccggcattt

SEQ ID NO: 5560713 - DNA, 25 bp, Homo sapien
tagccacacatgcatgacttcaggc

SEQ ID NO: 5560714 - DNA, 25 bp, Homo sapien
gctggtgaagacgccccttactagc

SEQ ID NO: 5560715 - DNA, 25 bp, Homo sapien
aaagacatgtctgctcctgagcctc

SEQ ID NO: 5560716 - DNA, 25 bp, Homo sapien
cttcaggctagcataaagacatgtc

SEQ ID NO: 5560717 - DNA, 25 bp, Homo sapien
agcaggctttcaacagcccggaact

SEQ ID NO: 5560718 - DNA, 25 bp, Homo sapien
ttgaaaccagtaactggaagaagac

SEQ ID NO: 5560719 - DNA, 25 bp, Homo sapien
tgggaggttctagcaaagctgaaca

SEQ ID NO: 5560720 - DNA, 25 bp, Homo sapien
ccactgataacagaaccaagcgtca

SEQ ID NO: 5560721 - DNA, 25 bp, Homo sapien
gcccggaactcagctaaaatctgca

SEQ ID NO: 5560722 - DNA, 25 bp, Homo sapien
tctgcagacctcagaaccgccagca

SEQ ID NO: 5560723 - DNA, 25 bp, Homo sapien
gacctgaggattgcacaactccggg

SEQ ID NO: 5560724 - DNA, 25 bp, Homo sapien
agaaccaagcgtcagcaggctttca

SEQ ID NO: 5560725 - DNA, 25 bp, Homo sapien
gcatggactctggtccttggggtgc

SEQ ID NO: 5560726 - DNA, 25 bp, Homo sapien
gaggtgtagctggacaacagctcat

SEQ ID NO: 5560727 - DNA, 25 bp, Homo sapien
cacaactccgggaaagtcacctcat

SEQ ID NO: 5560728 - DNA, 25 bp, Homo sapien
ccaggaagatcccagtgactcaaac

SEQ ID NO: 5560729 - DNA, 25 bp, Homo sapien
ttgtaaatcatgaccagtgagaaat

SEQ ID NO: 5560730 - DNA, 25 bp, Homo sapien
agtgagaaataatgtgtgccccacc

SEQ ID NO: 5560731 - DNA, 25 bp, Homo sapien
agcaaccaagagttccatacaggcc

SEQ ID NO: 5560732 - DNA, 25 bp, Homo sapien
ggcggccttgggccttccccagcta

SEQ ID NO: 5560733 - DNA, 25 bp, Homo sapien
tcctggctacgtggtgatgcatata

SEQ ID NO: 5560734 - DNA, 25 bp, Homo sapien
tgtgcgtgagtatcccacccgctct

SEQ ID NO: 5560735 - DNA, 25 bp, Homo sapien
tcacagacactgtagtcagcaacac

SEQ ID NO: 5560736 - DNA, 25 bp, Homo sapien
caacacagatatgaaccaggatgcc

SEQ ID NO: 5560737 - DNA, 25 bp, Homo sapien
aggcccagctaagcccagtgacttc

SEQ ID NO: 5560738 - DNA, 25 bp, Homo sapien
aacaggtccatggttgcctcagcaa

SEQ ID NO: 5560739 - DNA, 25 bp, Homo sapien
atcctccctgtccgtcgtagctgcc

SEQ ID NO: 5560740 - DNA, 25 bp, Homo sapien
gtctgaaactgcatttggcccactc

SEQ ID NO: 5560741 - DNA, 25 bp, Homo sapien
tccctgttacagtgagaaaggtccc

SEQ ID NO: 5560742 - DNA, 25 bp, Homo sapien
cacaaaaaccgtaaaactgagagga

SEQ ID NO: 5560743 - DNA, 25 bp, Homo sapien
ccccgtacacgactcccagaatctg

SEQ ID NO: 5560744 - DNA, 25 bp, Homo sapien
gagcaccagctccggtccctgttac

SEQ ID NO: 5560745 - DNA, 25 bp, Homo sapien
ggctcccttactgagtgggtgagac

SEQ ID NO: 5560746 - DNA, 25 bp, Homo sapien
gtgggtgagacaagttcacaaaaac

SEQ ID NO: 5560747 - DNA, 25 bp, Homo sapien
gaggctcacaggtgattgtcgctca

SEQ ID NO: 5560748 - DNA, 25 bp, Homo sapien
gtcgctcacacagttagggtcgtca

SEQ ID NO: 5560749 - DNA, 25 bp, Homo sapien
gaggcggcgcttcttcccgtgttca

SEQ ID NO: 5560750 - DNA, 25 bp, Homo sapien
tttagctaggtaagaccagaagcac

SEQ ID NO: 5560751 - DNA, 25 bp, Homo sapien
ttcaggaatcagagcagtttgtttt

SEQ ID NO: 5560752 - DNA, 25 bp, Homo sapien
acagaggaaagaatctgaccacctt

SEQ ID NO: 5560753 - DNA, 25 bp, Homo sapien
taggcataagagagactgatatcaa

SEQ ID NO: 5560754 - DNA, 25 bp, Homo sapien
ttaaatccctagtaaagagagagtg

SEQ ID NO: 5560755 - DNA, 25 bp, Homo sapien
gaagcacgtgaaaagtaaaatatgt

SEQ ID NO: 5560756 - DNA, 25 bp, Homo sapien
ggaatggtacagatagtaaaagtta

SEQ ID NO: 5560757 - DNA, 25 bp, Homo sapien
tcaggacagctgattaggcataaga

SEQ ID NO: 5560758 - DNA, 25 bp, Homo sapien
gagagtggatggataatctgtaaac

SEQ ID NO: 5560759 - DNA, 25 bp, Homo sapien
ggtaatgtcagagtacaggaatggt

SEQ ID NO: 5560760 - DNA, 25 bp, Homo sapien
aaaggcataggcaggtctatctact

SEQ ID NO: 5560761 - DNA, 25 bp, Homo sapien
catttggaaggcatgtgtatgtgtg

SEQ ID NO: 5560762 - DNA, 25 bp, Homo sapien
gtctgctgaacgccgaacaaaagga

SEQ ID NO: 5560763 - DNA, 25 bp, Homo sapien
caggacgtcgattacagcgaacaca

SEQ ID NO: 5560764 - DNA, 25 bp, Homo sapien
aggatgtggccgtcgtctcttaaac

SEQ ID NO: 5560765 - DNA, 25 bp, Homo sapien
aaggcgggtccatccggattctttg

SEQ ID NO: 5560766 - DNA, 25 bp, Homo sapien
cagccccgtgaaacaacagagggca

SEQ ID NO: 5560767 - DNA, 25 bp, Homo sapien
aatacgcgaatcccaagccatgcac

SEQ ID NO: 5560768 - DNA, 25 bp, Homo sapien
gcctcagtcgggagaaatcccggaa

SEQ ID NO: 5560769 - DNA, 25 bp, Homo sapien
cagccctcggccattcaccggagag

SEQ ID NO: 5560770 - DNA, 25 bp, Homo sapien
gcttttgtttgagtcagaggggagc

SEQ ID NO: 5560771 - DNA, 25 bp, Homo sapien
tcctccgagagtactgagacggaga

SEQ ID NO: 5560772 - DNA, 25 bp, Homo sapien
cccttcgcgtgactcccagcgctgg

SEQ ID NO: 5560773 - DNA, 25 bp, Homo sapien
ccctctctccgaggcctctccttgg

SEQ ID NO: 5560774 - DNA, 25 bp, Homo sapien
ggcggcccgtggcctctcctctttc

SEQ ID NO: 5560775 - DNA, 25 bp, Homo sapien
cgcggcttcccctctctccgaggcc

SEQ ID NO: 5560776 - DNA, 25 bp, Homo sapien
ttctccttccgcggcttcccctctc

SEQ ID NO: 5560777 - DNA, 25 bp, Homo sapien
ggcccccttcgcgtgactcccagcg

SEQ ID NO: 5560778 - DNA, 25 bp, Homo sapien
tcgcgtgactcccagcgctggggta

SEQ ID NO: 5560779 - DNA, 25 bp, Homo sapien
cttaggtctctcctccttccgcggc

SEQ ID NO: 5560780 - DNA, 25 bp, Homo sapien
gtctctcctccttccgcggcttctc

SEQ ID NO: 5560781 - DNA, 25 bp, Homo sapien
gcggcttctccttccgcggcttccc

SEQ ID NO: 5560782 - DNA, 25 bp, Homo sapien
ctcctctttccgcggcctctctttc

SEQ ID NO: 5560783 - DNA, 25 bp, Homo sapien
tccagctgtgctctttgacttgtca

SEQ ID NO: 5560784 - DNA, 25 bp, Homo sapien
atctagggtcctttggcttgttgct

SEQ ID NO: 5560785 - DNA, 25 bp, Homo sapien
atacttgacttgcattccagctgtg

SEQ ID NO: 5560786 - DNA, 25 bp, Homo sapien
caaaggtcataaatcatacaccaac

SEQ ID NO: 5560787 - DNA, 25 bp, Homo sapien
ccacaggagaaatctagggtccttt

SEQ ID NO: 5560788 - DNA, 25 bp, Homo sapien
ttaacaaggccaatacattccaggt

SEQ ID NO: 5560789 - DNA, 25 bp, Homo sapien
caggtatttaagaagccacaggaga

SEQ ID NO: 5560790 - DNA, 25 bp, Homo sapien
gtggaaaaccactaatctggatccc

SEQ ID NO: 5560791 - DNA, 25 bp, Homo sapien
taacaaatgctaaactataaagtca

SEQ ID NO: 5560792 - DNA, 25 bp, Homo sapien
cctgtcaccacagttcagctttcca

SEQ ID NO: 5560793 - DNA, 25 bp, Homo sapien
ctcctagaaaggcagtacgtaattc

SEQ ID NO: 5560794 - DNA, 25 bp, Homo sapien
gcaacacctagtggcttgagaaggc

SEQ ID NO: 5560795 - DNA, 25 bp, Homo sapien
aggtagcacctagacgtcggctata

SEQ ID NO: 5560796 - DNA, 25 bp, Homo sapien
ccaaagacggttctgaaaatgcctt

SEQ ID NO: 5560797 - DNA, 25 bp, Homo sapien
agttgcccagatgattttaatgtgc

SEQ ID NO: 5560798 - DNA, 25 bp, Homo sapien
aggctaagagctacttatctagacc

SEQ ID NO: 5560799 - DNA, 25 bp, Homo sapien
agctttgaagacctcaggtagcacc

SEQ ID NO: 5560800 - DNA, 25 bp, Homo sapien
cggctgggaaacactgacctttagc

SEQ ID NO: 5560801 - DNA, 25 bp, Homo sapien
ccccgcccacagagtatgtttcagt

SEQ ID NO: 5560802 - DNA, 25 bp, Homo sapien
tgtcaaataatcagaatcgcgtttc

SEQ ID NO: 5560803 - DNA, 25 bp, Homo sapien
gaggtatgcatttacggctgggaaa

SEQ ID NO: 5560804 - DNA, 25 bp, Homo sapien
ataaccgcataacaatggtccccat

SEQ ID NO: 5560805 - DNA, 25 bp, Homo sapien
aattagggacatttaggctgattta

SEQ ID NO: 5560806 - DNA, 25 bp, Homo sapien
gcaccaaagttgggatggtcacttc

SEQ ID NO: 5560807 - DNA, 25 bp, Homo sapien
taagcaaaacccatgggggtgctaa

SEQ ID NO: 5560808 - DNA, 25 bp, Homo sapien
aagttttgccaaagggactccatct

SEQ ID NO: 5560809 - DNA, 25 bp, Homo sapien
acccatgagtgcctaagcaaaaccc

SEQ ID NO: 5560810 - DNA, 25 bp, Homo sapien
gggtcttgaaagcaggttgccagta

SEQ ID NO: 5560811 - DNA, 25 bp, Homo sapien
agaggcagtataggcactgtcttgc

SEQ ID NO: 5560812 - DNA, 25 bp, Homo sapien
tggcagaagctgggaagtcttctgt

SEQ ID NO: 5560813 - DNA, 25 bp, Homo sapien
gcccagatgagagaagtaacatttt

SEQ ID NO: 5560814 - DNA, 25 bp, Homo sapien
agtaaggcgtctgtgttctgtgtct

SEQ ID NO: 5560815 - DNA, 25 bp, Homo sapien
gggtactacagctgtgcatgcctaa

SEQ ID NO: 5560816 - DNA, 25 bp, Homo sapien
agtgtcatcagttgctctctaggtt

SEQ ID NO: 5560817 - DNA, 25 bp, Homo sapien
actttctagatgttcagcccgcccc

SEQ ID NO: 5560818 - DNA, 25 bp, Homo sapien
aagcaactacaaagcgtgataaagc

SEQ ID NO: 5560819 - DNA, 25 bp, Homo sapien
cctgatgcccccaacataatctctc

SEQ ID NO: 5560820 - DNA, 25 bp, Homo sapien
ggatgtggtaaaactggcagtttat

SEQ ID NO: 5560821 - DNA, 25 bp, Homo sapien
ttgccttgcggctgaaaatgtattc

SEQ ID NO: 5560822 - DNA, 25 bp, Homo sapien
aatctctctccaagggaaacgtgtt

SEQ ID NO: 5560823 - DNA, 25 bp, Homo sapien
gtccagacttggtgtgtgactaacg

SEQ ID NO: 5560824 - DNA, 25 bp, Homo sapien
ggttttcagaactttgggcgatgtc

SEQ ID NO: 5560825 - DNA, 25 bp, Homo sapien
aactttgggcgatgtctctgagtgt

SEQ ID NO: 5560826 - DNA, 25 bp, Homo sapien
gtgtgtgactaacggcaagtacttc

SEQ ID NO: 5560827 - DNA, 25 bp, Homo sapien
cccagacccaacagataacacaata

SEQ ID NO: 5560828 - DNA, 25 bp, Homo sapien
aatcagagaattcaccctatagtcc

SEQ ID NO: 5560829 - DNA, 25 bp, Homo sapien
tcttaaagcagtaaaacagttatta

SEQ ID NO: 5560830 - DNA, 25 bp, Homo sapien
ttgtcctaaaaatgtagcacctcat

SEQ ID NO: 5560831 - DNA, 25 bp, Homo sapien
gatcttaaaatgtctcagcttccct

SEQ ID NO: 5560832 - DNA, 25 bp, Homo sapien
tgtggctttcaacacatgatcattc

SEQ ID NO: 5560833 - DNA, 25 bp, Homo sapien
tccctatgcatacatgaaaagtcca

SEQ ID NO: 5560834 - DNA, 25 bp, Homo sapien
tgtatagcataaaataatgtggctt

SEQ ID NO: 5560835 - DNA, 25 bp, Homo sapien
agtcctcatacaaaagctggatttt

SEQ ID NO: 5560836 - DNA, 25 bp, Homo sapien
gtgaagtgtcttccctatgcataca

SEQ ID NO: 5560837 - DNA, 25 bp, Homo sapien
aactaaactaaatgtcccagaccca

SEQ ID NO: 5560838 - DNA, 25 bp, Homo sapien
aaggaggtacgtccagcacacctcc

SEQ ID NO: 5560839 - DNA, 25 bp, Homo sapien
caccagtccttgagaaggaggtacg

SEQ ID NO: 5560840 - DNA, 25 bp, Homo sapien
tggccacaccctactatgctactgc

SEQ ID NO: 5560841 - DNA, 25 bp, Homo sapien
tgaaaactacaaactttagagccca

SEQ ID NO: 5560842 - DNA, 25 bp, Homo sapien
agagcccaaaggaatgttagaaacc

SEQ ID NO: 5560843 - DNA, 25 bp, Homo sapien
aattagcacgagcagtgaaaaaaac

SEQ ID NO: 5560844 - DNA, 25 bp, Homo sapien
agaatctgtggggacttctgtccat

SEQ ID NO: 5560845 - DNA, 25 bp, Homo sapien
gaggtcaactggagatcataagcat

SEQ ID NO: 5560846 - DNA, 25 bp, Homo sapien
agagccctgggcctaggctctgtcc

SEQ ID NO: 5560847 - DNA, 25 bp, Homo sapien
ggaaaggctcagagcatggtttgct

SEQ ID NO: 5560848 - DNA, 25 bp, Homo sapien
actgggcaacagacaaaatcctaat

SEQ ID NO: 5560849 - DNA, 25 bp, Homo sapien
gatgtcaagttggagccccacttct

SEQ ID NO: 5560850 - DNA, 25 bp, Homo sapien
actatttgagaaatgagatgtcagg

SEQ ID NO: 5560851 - DNA, 25 bp, Homo sapien
tgaggaagacagtctagacacctta

SEQ ID NO: 5560852 - DNA, 25 bp, Homo sapien
tacgggcacacaatatatgctgaat

SEQ ID NO: 5560853 - DNA, 25 bp, Homo sapien
caaacagctaagaaacagtattaac

SEQ ID NO: 5560854 - DNA, 25 bp, Homo sapien
tcaggaatcctgatgtcaagttgga

SEQ ID NO: 5560855 - DNA, 25 bp, Homo sapien
aaataaggagttacttgaaagtcaa

SEQ ID NO: 5560856 - DNA, 25 bp, Homo sapien
gaatggctatgtactccctagtccc

SEQ ID NO: 5560857 - DNA, 25 bp, Homo sapien
gcaggattcgagaatgaatggctat

SEQ ID NO: 5560858 - DNA, 25 bp, Homo sapien
tttggatatgtgttaagaaaatgtc

SEQ ID NO: 5560859 - DNA, 25 bp, Homo sapien
actgcaacaaccatgaaatagagtt

SEQ ID NO: 5560860 - DNA, 25 bp, Homo sapien
ttcaagtagtgcaaagttcctgtct

SEQ ID NO: 5560861 - DNA, 25 bp, Homo sapien
gcagctagctggcagtctcagatcc

SEQ ID NO: 5560862 - DNA, 25 bp, Homo sapien
cttcgctttacagactaggaggccg

SEQ ID NO: 5560863 - DNA, 25 bp, Homo sapien
gcaatgcaggtcgtgaagaactgca

SEQ ID NO: 5560864 - DNA, 25 bp, Homo sapien
tagaccctggagttcaagtagtgca

SEQ ID NO: 5560865 - DNA, 25 bp, Homo sapien
caacagtactggagtttcaacgttc

SEQ ID NO: 5560866 - DNA, 25 bp, Homo sapien
gaagaactgcagggtcgtttatcga

SEQ ID NO: 5560867 - DNA, 25 bp, Homo sapien
cagacctgagaatatcagctgaatc

SEQ ID NO: 5560868 - DNA, 25 bp, Homo sapien
ccgtcttgtggtctgttctgggtcc

SEQ ID NO: 5560869 - DNA, 25 bp, Homo sapien
cccgggctaattaaagcgctcaggc

SEQ ID NO: 5560870 - DNA, 25 bp, Homo sapien
tgttggaggaacccatcaagacaca

SEQ ID NO: 5560871 - DNA, 25 bp, Homo sapien
gctggctgagcatcctgtatataat

SEQ ID NO: 5560872 - DNA, 25 bp, Homo sapien
taggcagtctgcaggtgattttttt

SEQ ID NO: 5560873 - DNA, 25 bp, Homo sapien
gagacttgggcccaaatctcaccac

SEQ ID NO: 5560874 - DNA, 25 bp, Homo sapien
gggagacagagactgttaaagctat

SEQ ID NO: 5560875 - DNA, 25 bp, Homo sapien
gttaaagctataggcagtctgcagg

SEQ ID NO: 5560876 - DNA, 25 bp, Homo sapien
gacagagactgttaaagctataggc

SEQ ID NO: 5560877 - DNA, 25 bp, Homo sapien
gtcggagacttgggcccaaatctca

SEQ ID NO: 5560878 - DNA, 25 bp, Homo sapien
ttttctccaccggaaggatgtgaag

SEQ ID NO: 5560879 - DNA, 25 bp, Homo sapien
agctataggcagtctgcaggtgatt

SEQ ID NO: 5560880 - DNA, 25 bp, Homo sapien
caaacttttctccaccggaaggatg

SEQ ID NO: 5560881 - DNA, 25 bp, Homo sapien
taaatcactgtgtaagtctcattat

SEQ ID NO: 5560882 - DNA, 25 bp, Homo sapien
tagaagtctgctattaacgtaagtc

SEQ ID NO: 5560883 - DNA, 25 bp, Homo sapien
tggatttctgaaatagctaatacac

SEQ ID NO: 5560884 - DNA, 25 bp, Homo sapien
cttagcaacagatttattacgatac

SEQ ID NO: 5560885 - DNA, 25 bp, Homo sapien
ctattaacgtaagtcacctgggagc

SEQ ID NO: 5560886 - DNA, 25 bp, Homo sapien
ctttagtaacatacccattgacttc

SEQ ID NO: 5560887 - DNA, 25 bp, Homo sapien
tagagaaactaagtatttagagtat

SEQ ID NO: 5560888 - DNA, 25 bp, Homo sapien
attcctcgttgtcatgtattcccat

SEQ ID NO: 5560889 - DNA, 25 bp, Homo sapien
gcacgtaagcaatttaagtctcagc

SEQ ID NO: 5560890 - DNA, 25 bp, Homo sapien
aagtctcagcttgaatacgctctta

SEQ ID NO: 5560891 - DNA, 25 bp, Homo sapien
acacctaaatctatagcacgtaagc

SEQ ID NO: 5560892 - DNA, 25 bp, Homo sapien
ttggcataaaataatgcacctttgc

SEQ ID NO: 5560893 - DNA, 25 bp, Homo sapien
agggtccaagaggctattctgatga

SEQ ID NO: 5560894 - DNA, 25 bp, Homo sapien
tgtaggccagcatttcaggtgtcca

SEQ ID NO: 5560895 - DNA, 25 bp, Homo sapien
caggtgtccatgtttctaaggcttt

SEQ ID NO: 5560896 - DNA, 25 bp, Homo sapien
cctcaagcaggcaggttgttctgag

SEQ ID NO: 5560897 - DNA, 25 bp, Homo sapien
agacgagaagtgtgagacacttgct

SEQ ID NO: 5560898 - DNA, 25 bp, Homo sapien
tgcttaaattgcccattggagctct

SEQ ID NO: 5560899 - DNA, 25 bp, Homo sapien
ggaatctgacttggagtagacgaga

SEQ ID NO: 5560900 - DNA, 25 bp, Homo sapien
aatcacttccagatggagaaaatga

SEQ ID NO: 5560901 - DNA, 25 bp, Homo sapien
tcatcgtacccttcatgtaggccag

SEQ ID NO: 5560902 - DNA, 25 bp, Homo sapien
caggcaggttgttctgagtgctctt

SEQ ID NO: 5560903 - DNA, 25 bp, Homo sapien
ctcccaaaggtgtagaacttcgagg

SEQ ID NO: 5560904 - DNA, 25 bp, Homo sapien
tgaagggtagaaaccctgaagtcag

SEQ ID NO: 5560905 - DNA, 25 bp, Homo sapien
atgaagggctggatatttttgatga

SEQ ID NO: 5560906 - DNA, 25 bp, Homo sapien
gtcatacaggcagcagattacagca

SEQ ID NO: 5560907 - DNA, 25 bp, Homo sapien
ggtttggcgtctgagtgcttctgcc

SEQ ID NO: 5560908 - DNA, 25 bp, Homo sapien
gagatcataagctcagggactcatc

SEQ ID NO: 5560909 - DNA, 25 bp, Homo sapien
gatgatcattcagggaaggcatgta

SEQ ID NO: 5560910 - DNA, 25 bp, Homo sapien
tgaagatgataagctgtacggtgta

SEQ ID NO: 5560911 - DNA, 25 bp, Homo sapien
ggtggaatggggcttatttcagtag

SEQ ID NO: 5560912 - DNA, 25 bp, Homo sapien
acggtgtaaaccagatcgcatgtca

SEQ ID NO: 5560913 - DNA, 25 bp, Homo sapien
gaaattagaccagagaactacctcc

SEQ ID NO: 5560914 - DNA, 25 bp, Homo sapien
ccctcctgaatagcaaggtggaaac

SEQ ID NO: 5560915 - DNA, 25 bp, Homo sapien
ctgcagagtctaccaggaagcagga

SEQ ID NO: 5560916 - DNA, 25 bp, Homo sapien
acatgaggcagaaagttgcccttgg

SEQ ID NO: 5560917 - DNA, 25 bp, Homo sapien
gacatgaggcagaaagttgcccttg

SEQ ID NO: 5560918 - DNA, 25 bp, Homo sapien
atttttggcctaaggaggctgccag

SEQ ID NO: 5560919 - DNA, 25 bp, Homo sapien
ctgggcaaaaacaggttgttgttag

SEQ ID NO: 5560920 - DNA, 25 bp, Homo sapien
ctgaaggaaatttttggcctaagga

SEQ ID NO: 5560921 - DNA, 25 bp, Homo sapien
gaaatttttggcctaaggaggctgc

SEQ ID NO: 5560922 - DNA, 25 bp, Homo sapien
agctgggcaaaaacaggttgttgtt

SEQ ID NO: 5560923 - DNA, 25 bp, Homo sapien
ggcctgcagagtctaccaggaagca

SEQ ID NO: 5560924 - DNA, 25 bp, Homo sapien
agacatgaagcaaaagctggccttt

SEQ ID NO: 5560925 - DNA, 25 bp, Homo sapien
ttgttaggcaggatttgggctcata

SEQ ID NO: 5560926 - DNA, 25 bp, Homo sapien
aggggactaggatatatatacattt

SEQ ID NO: 5560927 - DNA, 25 bp, Homo sapien
ttagaatgtcataaaagtaagtctc

SEQ ID NO: 5560928 - DNA, 25 bp, Homo sapien
aagctaattaataaaggtaagtgtc

SEQ ID NO: 5560929 - DNA, 25 bp, Homo sapien
tttataagtatcccaataggtcagg

SEQ ID NO: 5560930 - DNA, 25 bp, Homo sapien
cctctcagtagttatgctgtgcaac

SEQ ID NO: 5560931 - DNA, 25 bp, Homo sapien
tcagtgatggtattattgaagttgt

SEQ ID NO: 5560932 - DNA, 25 bp, Homo sapien
atgctgtgcaactttgtaatcatat

SEQ ID NO: 5560933 - DNA, 25 bp, Homo sapien
attaagtccaatcaaatacagtttc

SEQ ID NO: 5560934 - DNA, 25 bp, Homo sapien
ccaataggtcaggatttggttaggg

SEQ ID NO: 5560935 - DNA, 25 bp, Homo sapien
acaagtaattacaaacagatcaatc

SEQ ID NO: 5560936 - DNA, 25 bp, Homo sapien
ggtaagtgtcagtgatggtattatt

SEQ ID NO: 5560937 - DNA, 25 bp, Homo sapien
atgcacacgtgcaccgtgctcaagg

SEQ ID NO: 5560938 - DNA, 25 bp, Homo sapien
gacaggctgaccatgcccttctttg

SEQ ID NO: 5560939 - DNA, 25 bp, Homo sapien
atcctgtaagatgcatgcctgtccc

SEQ ID NO: 5560940 - DNA, 25 bp, Homo sapien
acttccaggagatatgctgcaggca

SEQ ID NO: 5560941 - DNA, 25 bp, Homo sapien
tttgtgagtcacagtggattaggtg

SEQ ID NO: 5560942 - DNA, 25 bp, Homo sapien
atgcaactccctcccagacaggctg

SEQ ID NO: 5560943 - DNA, 25 bp, Homo sapien
gcattatgtagggctttgggaaata

SEQ ID NO: 5560944 - DNA, 25 bp, Homo sapien
ttttgccccagcacacttccaggag

SEQ ID NO: 5560945 - DNA, 25 bp, Homo sapien
gtggtctgggatgagttttgcccca

SEQ ID NO: 5560946 - DNA, 25 bp, Homo sapien
agatgcacacatgcaactccctccc

SEQ ID NO: 5560947 - DNA, 25 bp, Homo sapien
agtggattaggtgattcctgaaacc

SEQ ID NO: 5560948 - DNA, 25 bp, Homo sapien
gtcaaagtatccacagaaacccctg

SEQ ID NO: 5560949 - DNA, 25 bp, Homo sapien
tctctcgccaccaccaaccccacaa

SEQ ID NO: 5560950 - DNA, 25 bp, Homo sapien
tgccttgctgtctgccggacctgga

SEQ ID NO: 5560951 - DNA, 25 bp, Homo sapien
acctctgtcaggaaatgcccagcct

SEQ ID NO: 5560952 - DNA, 25 bp, Homo sapien
gagtatcccctcacccgaggccacc

SEQ ID NO: 5560953 - DNA, 25 bp, Homo sapien
tgagactgctcaggtccgacatgga

SEQ ID NO: 5560954 - DNA, 25 bp, Homo sapien
ccaggcagctgagtagtctctgagt

SEQ ID NO: 5560955 - DNA, 25 bp, Homo sapien
ggtccgacatggatatttgcagccc

SEQ ID NO: 5560956 - DNA, 25 bp, Homo sapien
gccacacttatctgcagaggggcct

SEQ ID NO: 5560957 - DNA, 25 bp, Homo sapien
cttggttagctgacctaaggcctgg

SEQ ID NO: 5560958 - DNA, 25 bp, Homo sapien
ggacgctcctggtttgaggcccagg

SEQ ID NO: 5560959 - DNA, 25 bp, Homo sapien
ttgagaattattggaaagccatgaa

SEQ ID NO: 5560960 - DNA, 25 bp, Homo sapien
ttcagtatctggttagggatgctgt

SEQ ID NO: 5560961 - DNA, 25 bp, Homo sapien
agccatgaaagtgaaagtagaaaga

SEQ ID NO: 5560962 - DNA, 25 bp, Homo sapien
tagtttgtgctgctgtaagaatatg

SEQ ID NO: 5560963 - DNA, 25 bp, Homo sapien
ggtctggcttatacatggattgaac

SEQ ID NO: 5560964 - DNA, 25 bp, Homo sapien
ttgagccctgcatatcctgaggatc

SEQ ID NO: 5560965 - DNA, 25 bp, Homo sapien
cctgaggatctagtcactatccacc

SEQ ID NO: 5560966 - DNA, 25 bp, Homo sapien
tatacaggttcttgagcaaatgttt

SEQ ID NO: 5560967 - DNA, 25 bp, Homo sapien
agaccatttcgaagataattgtgac

SEQ ID NO: 5560968 - DNA, 25 bp, Homo sapien
aggtgccaacaggttcagtatctgg

SEQ ID NO: 5560969 - DNA, 25 bp, Homo sapien
atggattgaacctcagttagggcag

SEQ ID NO: 5560970 - DNA, 25 bp, Homo sapien
agaagggtattagcaaatgtgtgaa

SEQ ID NO: 5560971 - DNA, 25 bp, Homo sapien
atcaaactgttatgatggtcccata

SEQ ID NO: 5560972 - DNA, 25 bp, Homo sapien
ggtcccataaccatctgaatgttaa

SEQ ID NO: 5560973 - DNA, 25 bp, Homo sapien
cccggccaggaatgacaatttcaat

SEQ ID NO: 5560974 - DNA, 25 bp, Homo sapien
gtgtgaaaaagtcaagtactgttta

SEQ ID NO: 5560975 - DNA, 25 bp, Homo sapien
aacttatgagaagggtattagcaaa

SEQ ID NO: 5560976 - DNA, 25 bp, Homo sapien
tctatgctggaagagttttatgttc

SEQ ID NO: 5560977 - DNA, 25 bp, Homo sapien
cttatgagaagggtattagcaaatg

SEQ ID NO: 5560978 - DNA, 25 bp, Homo sapien
gcaaatgtgtgaaaaagtcaagtac

SEQ ID NO: 5560979 - DNA, 25 bp, Homo sapien
ccatctgaatgttaacagtacccat

SEQ ID NO: 5560980 - DNA, 25 bp, Homo sapien
taactcagtgttagctgaaacatca

SEQ ID NO: 5560981 - DNA, 25 bp, Homo sapien
gatctgctacggattatactaggta

SEQ ID NO: 5560982 - DNA, 25 bp, Homo sapien
agttctagcaactgcagtggcttat

SEQ ID NO: 5560983 - DNA, 25 bp, Homo sapien
aaaatgaaagcatgtcagttctagc

SEQ ID NO: 5560984 - DNA, 25 bp, Homo sapien
atttcattgatgacaaagcactttg

SEQ ID NO: 5560985 - DNA, 25 bp, Homo sapien
tacaagttaggacaattaagcatta

SEQ ID NO: 5560986 - DNA, 25 bp, Homo sapien
ctcaagcttataaggattctaatcc

SEQ ID NO: 5560987 - DNA, 25 bp, Homo sapien
tgaatatattggtaaaacagtaaac

SEQ ID NO: 5560988 - DNA, 25 bp, Homo sapien
ggaaaagtatacaatgcaggatatt

SEQ ID NO: 5560989 - DNA, 25 bp, Homo sapien
cagcagagaaaagcaccataaaact

SEQ ID NO: 5560990 - DNA, 25 bp, Homo sapien
caaagcactttggtacagcagagaa

SEQ ID NO: 5560991 - DNA, 25 bp, Homo sapien
attctaatccttaggagtccaaccc

SEQ ID NO: 5560992 - DNA, 25 bp, Homo sapien
ctaatgccaatagtaaaacatacat

SEQ ID NO: 5560993 - DNA, 25 bp, Homo sapien
actgggttctgtctacagtatcctc

SEQ ID NO: 5560994 - DNA, 25 bp, Homo sapien
ttcatggtactattgggtaggagga

SEQ ID NO: 5560995 - DNA, 25 bp, Homo sapien
ctaaatagtgtagtcacaaggaata

SEQ ID NO: 5560996 - DNA, 25 bp, Homo sapien
gaagacagaagcactctaaaagaaa

SEQ ID NO: 5560997 - DNA, 25 bp, Homo sapien
tctaaaagaaattgcataaagggaa

SEQ ID NO: 5560998 - DNA, 25 bp, Homo sapien
atagtgattctaccaaccacacacc

SEQ ID NO: 5560999 - DNA, 25 bp, Homo sapien
acaaggaataaaacatcagttatat

SEQ ID NO: 5561000 - DNA, 25 bp, Homo sapien
gattgatgtctaaggtttaagtcac

SEQ ID NO: 5561001 - DNA, 25 bp, Homo sapien
agggaaaataattactaatgccaat

SEQ ID NO: 5561002 - DNA, 25 bp, Homo sapien
acttaaggctccatcactgggttct

SEQ ID NO: 5561003 - DNA, 25 bp, Homo sapien
aaataccatcagatttagaaggttc

SEQ ID NO: 5561004 - DNA, 25 bp, Homo sapien
gccgttcccagtaacctcagggctc

SEQ ID NO: 5561005 - DNA, 25 bp, Homo sapien
tagaaggttcttcacaggattgttc

SEQ ID NO: 5561006 - DNA, 25 bp, Homo sapien
acttagaaatctatcagagtacagc

SEQ ID NO: 5561007 - DNA, 25 bp, Homo sapien
atcagagtacagctagtacccttcc

SEQ ID NO: 5561008 - DNA, 25 bp, Homo sapien
catattgcagccatagtagcctttc

SEQ ID NO: 5561009 - DNA, 25 bp, Homo sapien
atgagatatttgcacctgccgttcc

SEQ ID NO: 5561010 - DNA, 25 bp, Homo sapien
aacctcagggctcagtgcatgagtt

SEQ ID NO: 5561011 - DNA, 25 bp, Homo sapien
gatgagaaatcaattgcaaacataa

SEQ ID NO: 5561012 - DNA, 25 bp, Homo sapien
cacaggattgttctaaggattaaat

SEQ ID NO: 5561013 - DNA, 25 bp, Homo sapien
gctcagtgcatgagttgaagctgcc

SEQ ID NO: 5561014 - DNA, 25 bp, Homo sapien
gagcacaaagagaagcctgcctctt

SEQ ID NO: 5561015 - DNA, 25 bp, Homo sapien
gagttgggctcagcttgtctgtctc

SEQ ID NO: 5561016 - DNA, 25 bp, Homo sapien
gaactgtcaatcgctgagcccctgc

SEQ ID NO: 5561017 - DNA, 25 bp, Homo sapien
gggaaatacttgggtgcaatcacac

SEQ ID NO: 5561018 - DNA, 25 bp, Homo sapien
ctgcctcactgatggagggaaatac

SEQ ID NO: 5561019 - DNA, 25 bp, Homo sapien
aggggagactgtcaaccagtatctt

SEQ ID NO: 5561020 - DNA, 25 bp, Homo sapien
cccgtgaggcctattaacacagggc

SEQ ID NO: 5561021 - DNA, 25 bp, Homo sapien
cggattaactgtggcaacgtcgtat

SEQ ID NO: 5561022 - DNA, 25 bp, Homo sapien
agcagagatcagaacggattaactg

SEQ ID NO: 5561023 - DNA, 25 bp, Homo sapien
ggcaagcagctgattggctacttca

SEQ ID NO: 5561024 - DNA, 25 bp, Homo sapien
acacagggccctaactagctcttga

SEQ ID NO: 5561025 - DNA, 25 bp, Homo sapien
tccaaattcctagcctgaaagattc

SEQ ID NO: 5561026 - DNA, 25 bp, Homo sapien
tagctccctcaggcacccaaaaccc

SEQ ID NO: 5561027 - DNA, 25 bp, Homo sapien
tgaggaatactgtggaatgtcagaa

SEQ ID NO: 5561028 - DNA, 25 bp, Homo sapien
gccttagggtttgcagtcaacgaag

SEQ ID NO: 5561029 - DNA, 25 bp, Homo sapien
aaggtttaagataagccaccaaata

SEQ ID NO: 5561030 - DNA, 25 bp, Homo sapien
aagatggaaatgcctcacagaactg

SEQ ID NO: 5561031 - DNA, 25 bp, Homo sapien
agtggtccaaacaggccttcttgcc

SEQ ID NO: 5561032 - DNA, 25 bp, Homo sapien
aagaaaagtttgggtgagaaacata

SEQ ID NO: 5561033 - DNA, 25 bp, Homo sapien
catgggtacataagatatgacaacc

SEQ ID NO: 5561034 - DNA, 25 bp, Homo sapien
cacagaactgctcactgaggaatac

SEQ ID NO: 5561035 - DNA, 25 bp, Homo sapien
cagagataagatggaaatgcctcac

SEQ ID NO: 5561036 - DNA, 25 bp, Homo sapien
cctcagctgcctgaagaaaacactc

SEQ ID NO: 5561037 - DNA, 25 bp, Homo sapien
tgcctgaagaaaacactcacctggc

SEQ ID NO: 5561038 - DNA, 25 bp, Homo sapien
gacctctctagtgggggatcaggtc

SEQ ID NO: 5561039 - DNA, 25 bp, Homo sapien
gctcagcaagaaaactaaacgcaca

SEQ ID NO: 5561040 - DNA, 25 bp, Homo sapien
cagctccagtgagatgccccagctg

SEQ ID NO: 5561041 - DNA, 25 bp, Homo sapien
tgagcttcgtttcaaaaggaaggat

SEQ ID NO: 5561042 - DNA, 25 bp, Homo sapien
gctgtgcacaccggacctctctagt

SEQ ID NO: 5561043 - DNA, 25 bp, Homo sapien
tgcacaccggacctctctagtgggg

SEQ ID NO: 5561044 - DNA, 25 bp, Homo sapien
tcagctgcctgaagaaaacactcac

SEQ ID NO: 5561045 - DNA, 25 bp, Homo sapien
cagcaagaaaactaaacgcacagaa

SEQ ID NO: 5561046 - DNA, 25 bp, Homo sapien
ctggaacagctccagtgagatgccc

SEQ ID NO: 5561047 - DNA, 25 bp, Homo sapien
aggcaaaaacgggccacatgttcat

SEQ ID NO: 5561048 - DNA, 25 bp, Homo sapien
agactgaaggacatgtataaaaaaa

SEQ ID NO: 5561049 - DNA, 25 bp, Homo sapien
aagtgagttttgccatggaaatgag

SEQ ID NO: 5561050 - DNA, 25 bp, Homo sapien
tgtcataaactggcaggcactgcat

SEQ ID NO: 5561051 - DNA, 25 bp, Homo sapien
tgtttgtaccagaaagggcaaaaga

SEQ ID NO: 5561052 - DNA, 25 bp, Homo sapien
aatgagttgaagggtttatggaccc

SEQ ID NO: 5561053 - DNA, 25 bp, Homo sapien
ctgacaaaattaagagactgaagga

SEQ ID NO: 5561054 - DNA, 25 bp, Homo sapien
aatatttttgatcagaggaggagac

SEQ ID NO: 5561055 - DNA, 25 bp, Homo sapien
taagggcagctctgactgcactggt

SEQ ID NO: 5561056 - DNA, 25 bp, Homo sapien
aagggcaaaagaaacaccactctta

SEQ ID NO: 5561057 - DNA, 25 bp, Homo sapien
ggttaaaattaagatcaagctccac

SEQ ID NO: 5561058 - DNA, 25 bp, Homo sapien
accaacaactaggccaccaagtcat

SEQ ID NO: 5561059 - DNA, 25 bp, Homo sapien
taatctggaacctactggagcggaa

SEQ ID NO: 5561060 - DNA, 25 bp, Homo sapien
ttgaatcaagatctagacagggacg

SEQ ID NO: 5561061 - DNA, 25 bp, Homo sapien
aggactggctcaagaaagcagattt

SEQ ID NO: 5561062 - DNA, 25 bp, Homo sapien
ggcctagcccaggccaccagatgca

SEQ ID NO: 5561063 - DNA, 25 bp, Homo sapien
ctgattcctgacacgggagagaaag

SEQ ID NO: 5561064 - DNA, 25 bp, Homo sapien
atagcagtgggctaattgctgttcc

SEQ ID NO: 5561065 - DNA, 25 bp, Homo sapien
gagaaagcctaagctccgaatcatc

SEQ ID NO: 5561066 - DNA, 25 bp, Homo sapien
cactcacctggaaaagacaaagttc

SEQ ID NO: 5561067 - DNA, 25 bp, Homo sapien
ttccaggagacctgagacccatgaa

SEQ ID NO: 5561068 - DNA, 25 bp, Homo sapien
gcgtgcagcaggcttcatctgactg

SEQ ID NO: 5561069 - DNA, 25 bp, Homo sapien
tttacatgtttactgcacgccccaa

SEQ ID NO: 5561070 - DNA, 25 bp, Homo sapien
acttttgagtatcatcacaccctcc

SEQ ID NO: 5561071 - DNA, 25 bp, Homo sapien
ccacctcctcctagtctggccttcc

SEQ ID NO: 5561072 - DNA, 25 bp, Homo sapien
gtgaggcaatgatagaaccagtttt

SEQ ID NO: 5561073 - DNA, 25 bp, Homo sapien
cacaggctgagtctgacttcttcct

SEQ ID NO: 5561074 - DNA, 25 bp, Homo sapien
tggcttctgccaaggttagcgtctg

SEQ ID NO: 5561075 - DNA, 25 bp, Homo sapien
ttagcgtctgttcacaggctgagtc

SEQ ID NO: 5561076 - DNA, 25 bp, Homo sapien
aaatcaccttgctgtttcgctcttc

SEQ ID NO: 5561077 - DNA, 25 bp, Homo sapien
aatatataaagtgaggcaatgatag

SEQ ID NO: 5561078 - DNA, 25 bp, Homo sapien
aaagtagtatgtataactctgtaat

SEQ ID NO: 5561079 - DNA, 25 bp, Homo sapien
gacaacactgtctgactgttttggc

SEQ ID NO: 5561080 - DNA, 25 bp, Homo sapien
tccatgtctgaccagcaaaggaggt

SEQ ID NO: 5561081 - DNA, 25 bp, Homo sapien
ctgaagccacaaagccttacacatg

SEQ ID NO: 5561082 - DNA, 25 bp, Homo sapien
ttggtgttacactaaggaagataaa

SEQ ID NO: 5561083 - DNA, 25 bp, Homo sapien
tgaacaccagctatcagagaggtag

SEQ ID NO: 5561084 - DNA, 25 bp, Homo sapien
attaactgccatgtaggggatggaa

SEQ ID NO: 5561085 - DNA, 25 bp, Homo sapien
ctatcagagaggtagtttggtgtta

SEQ ID NO: 5561086 - DNA, 25 bp, Homo sapien
catatagaagggtattaactgccat

SEQ ID NO: 5561087 - DNA, 25 bp, Homo sapien
aaaagaaaagatatgggctattgat

SEQ ID NO: 5561088 - DNA, 25 bp, Homo sapien
accttagccactggtacctgaagcc

SEQ ID NO: 5561089 - DNA, 25 bp, Homo sapien
gaatgggctaccttcgggctttatc

SEQ ID NO: 5561090 - DNA, 25 bp, Homo sapien
atcatctgtgaccaactgcaggctc

SEQ ID NO: 5561091 - DNA, 25 bp, Homo sapien
aagggtaccctgataaagacagtaa

SEQ ID NO: 5561092 - DNA, 25 bp, Homo sapien
tgataagtcagggcacaaattagca

SEQ ID NO: 5561093 - DNA, 25 bp, Homo sapien
gcagttgcccagtgggcctagcatc

SEQ ID NO: 5561094 - DNA, 25 bp, Homo sapien
cactggttcccattaggttctacac

SEQ ID NO: 5561095 - DNA, 25 bp, Homo sapien
gcctagcatctaggaagactctagc

SEQ ID NO: 5561096 - DNA, 25 bp, Homo sapien
catataattctcaaagggtaccctg

SEQ ID NO: 5561097 - DNA, 25 bp, Homo sapien
ttccttgcaggtcttcttgagatag

SEQ ID NO: 5561098 - DNA, 25 bp, Homo sapien
agttggctatatgctggatatgaag

SEQ ID NO: 5561099 - DNA, 25 bp, Homo sapien
gactctagctgagtctaggaagact

SEQ ID NO: 5561100 - DNA, 25 bp, Homo sapien
gtatgggggccaaagttggctatat

SEQ ID NO: 5561101 - DNA, 25 bp, Homo sapien
attaatgaaactggaaggttgtggt

SEQ ID NO: 5561102 - DNA, 25 bp, Homo sapien
agtagtattgttctgggctaatatc

SEQ ID NO: 5561103 - DNA, 25 bp, Homo sapien
tgtaaaacgttaacatgagaggacc

SEQ ID NO: 5561104 - DNA, 25 bp, Homo sapien
tataaacagagcacacaaaaggaaa

SEQ ID NO: 5561105 - DNA, 25 bp, Homo sapien
tgtcaaacatgagtatatcagaaat

SEQ ID NO: 5561106 - DNA, 25 bp, Homo sapien
ggacctgagtaaagggtatgcaaaa

SEQ ID NO: 5561107 - DNA, 25 bp, Homo sapien
ttaacatgagaggacctgagtaaag

SEQ ID NO: 5561108 - DNA, 25 bp, Homo sapien
aaaacagagacacacagatctttaa

SEQ ID NO: 5561109 - DNA, 25 bp, Homo sapien
agtaaagggtatgcaaaagaactct

SEQ ID NO: 5561110 - DNA, 25 bp, Homo sapien
gaccaattatcttgaccaacagtac

SEQ ID NO: 5561111 - DNA, 25 bp, Homo sapien
aaaccaacatggattattgaccaat

SEQ ID NO: 5561112 - DNA, 25 bp, Homo sapien
atggatcatggtataaacagagcac

SEQ ID NO: 5561113 - DNA, 25 bp, Homo sapien
ggccactgctgagttcctcgagtcc

SEQ ID NO: 5561114 - DNA, 25 bp, Homo sapien
agggccggcctttcagaacctctct

SEQ ID NO: 5561115 - DNA, 25 bp, Homo sapien
gctgtgcccagggatgggcactaag

SEQ ID NO: 5561116 - DNA, 25 bp, Homo sapien
ctcagaggcctgagtcccacctctc

SEQ ID NO: 5561117 - DNA, 25 bp, Homo sapien
gccaggctattgacgggcaccctgg

SEQ ID NO: 5561118 - DNA, 25 bp, Homo sapien
ttctgcctgccccggaatctgggct

SEQ ID NO: 5561119 - DNA, 25 bp, Homo sapien
tcctcgagtcctgcaggatccaggg

SEQ ID NO: 5561120 - DNA, 25 bp, Homo sapien
ccctctagggagcccttctgcctgc

SEQ ID NO: 5561121 - DNA, 25 bp, Homo sapien
tggaggctaccctaggatagctctc

SEQ ID NO: 5561122 - DNA, 25 bp, Homo sapien
acactgggccctactcctgcctgtc

SEQ ID NO: 5561123 - DNA, 25 bp, Homo sapien
ctctagccccctgtggttgtgggag

SEQ ID NO: 5561124 - DNA, 25 bp, Homo sapien
aagcttaatagtggataataggggg

SEQ ID NO: 5561125 - DNA, 25 bp, Homo sapien
gactttttcataggacagttggccg

SEQ ID NO: 5561126 - DNA, 25 bp, Homo sapien
tgggtccccacagtaccaaagcatt

SEQ ID NO: 5561127 - DNA, 25 bp, Homo sapien
tctagacttcctagcatgggctgtt

SEQ ID NO: 5561128 - DNA, 25 bp, Homo sapien
cggggatggacctccagatttcctt

SEQ ID NO: 5561129 - DNA, 25 bp, Homo sapien
ttaaggaatgagataagttactgct

SEQ ID NO: 5561130 - DNA, 25 bp, Homo sapien
ctgaaggtcggaggcctaattttaa

SEQ ID NO: 5561131 - DNA, 25 bp, Homo sapien
ggggcagtatcaagggataatttgg

SEQ ID NO: 5561132 - DNA, 25 bp, Homo sapien
aagctctagaatgcacccctcttcc

SEQ ID NO: 5561133 - DNA, 25 bp, Homo sapien
atcttgtggatacctgagtgaattc

SEQ ID NO: 5561134 - DNA, 25 bp, Homo sapien
actgtaaaatgtgggcacaatattt

SEQ ID NO: 5561135 - DNA, 25 bp, Homo sapien
cttgattgatgtgtcgtccggtcct

SEQ ID NO: 5561136 - DNA, 25 bp, Homo sapien
aggaccggacgacacatcaatcaag

SEQ ID NO: 5561137 - DNA, 25 bp, Homo sapien
cacaagcttcggctccgagcaccag

SEQ ID NO: 5561138 - DNA, 25 bp, Homo sapien
acaagcttcggctccgagcaccagg

SEQ ID NO: 5561139 - DNA, 25 bp, Homo sapien
gcgggcgatgctatttatttcactc

SEQ ID NO: 5561140 - DNA, 25 bp, Homo sapien
ttggcgggcgatgctatttatttca

SEQ ID NO: 5561141 - DNA, 25 bp, Homo sapien
ttcactcggattccgacttgggtgg

SEQ ID NO: 5561142 - DNA, 25 bp, Homo sapien
ccttccctcagccctcgccctgcgg

SEQ ID NO: 5561143 - DNA, 25 bp, Homo sapien
cagggccaccggcccctcccttgga

SEQ ID NO: 5561144 - DNA, 25 bp, Homo sapien
tcactcggattccgacttgggtggt

SEQ ID NO: 5561145 - DNA, 25 bp, Homo sapien
atttcactcggattccgacttgggt

SEQ ID NO: 5561146 - DNA, 25 bp, Homo sapien
gcacaagcttcggctccgagcacca

SEQ ID NO: 5561147 - DNA, 25 bp, Homo sapien
tggcgggcgatgctatttatttcac

SEQ ID NO: 5561148 - DNA, 25 bp, Homo sapien
tagcccagagttagccacacagaaa

SEQ ID NO: 5561149 - DNA, 25 bp, Homo sapien
tgaaaaaaccaagcaatcgtcaggt

SEQ ID NO: 5561150 - DNA, 25 bp, Homo sapien
atccagcgtcacttacactgcaccc

SEQ ID NO: 5561151 - DNA, 25 bp, Homo sapien
ttacactgcacccacgcaggccaca

SEQ ID NO: 5561152 - DNA, 25 bp, Homo sapien
accttcaatggccacggcacgctag

SEQ ID NO: 5561153 - DNA, 25 bp, Homo sapien
acttctcaccgcacaaaactccctt

SEQ ID NO: 5561154 - DNA, 25 bp, Homo sapien
gccacaccttcaatggccacggcac

SEQ ID NO: 5561155 - DNA, 25 bp, Homo sapien
ttcattagcactgacacagcagggg

SEQ ID NO: 5561156 - DNA, 25 bp, Homo sapien
tgctgccacctgacaatccagcgtc

SEQ ID NO: 5561157 - DNA, 25 bp, Homo sapien
cacacagaaacacacttctcaccgc

SEQ ID NO: 5561158 - DNA, 25 bp, Homo sapien
aaaccaagcaatcgtcaggtcggag

SEQ ID NO: 5561159 - DNA, 25 bp, Homo sapien
acttttggatagatatgggctgtac

SEQ ID NO: 5561160 - DNA, 25 bp, Homo sapien
ctggacaagggcatccttcacacac

SEQ ID NO: 5561161 - DNA, 25 bp, Homo sapien
acttcccaggggctcatatacaatg

SEQ ID NO: 5561162 - DNA, 25 bp, Homo sapien
tgcccggaaggactgacattcttcg

SEQ ID NO: 5561163 - DNA, 25 bp, Homo sapien
tactcatcttgcagcctcgggctac

SEQ ID NO: 5561164 - DNA, 25 bp, Homo sapien
tcacatgaccctaaagctgccggtg

SEQ ID NO: 5561165 - DNA, 25 bp, Homo sapien
ccggtggagctctcaaaagtcccta

SEQ ID NO: 5561166 - DNA, 25 bp, Homo sapien
gtccgtctctaggtggagcctggac

SEQ ID NO: 5561167 - DNA, 25 bp, Homo sapien
agtccctagatccactgcgtccgtc

SEQ ID NO: 5561168 - DNA, 25 bp, Homo sapien
tcgggctactcaccatcaggaagtc

SEQ ID NO: 5561169 - DNA, 25 bp, Homo sapien
aatgaagatgagaactctgctgccc

SEQ ID NO: 5561170 - DNA, 25 bp, Homo sapien
caggaaagactttacagaaacatct

SEQ ID NO: 5561171 - DNA, 25 bp, Homo sapien
tctggccccgtcatgtcctaccgtc

SEQ ID NO: 5561172 - DNA, 25 bp, Homo sapien
ctgtcagcattttggatctggcccc

SEQ ID NO: 5561173 - DNA, 25 bp, Homo sapien
tctggccccgttatgttctactgtc

SEQ ID NO: 5561174 - DNA, 25 bp, Homo sapien
gtgtgaagtgttgcttccagtctac

SEQ ID NO: 5561175 - DNA, 25 bp, Homo sapien
atgaatcataggaatataccagctc

SEQ ID NO: 5561176 - DNA, 25 bp, Homo sapien
ataatatgcttctcaggaaagactt

SEQ ID NO: 5561177 - DNA, 25 bp, Homo sapien
ctcatagaatctggtgcagccactc

SEQ ID NO: 5561178 - DNA, 25 bp, Homo sapien
taaggtaataagcaagtaacaagat

SEQ ID NO: 5561179 - DNA, 25 bp, Homo sapien
ttgatactcttgaacgcactctgat

SEQ ID NO: 5561180 - DNA, 25 bp, Homo sapien
ttgaacttggtgaaaaatgtccttc

SEQ ID NO: 5561181 - DNA, 25 bp, Homo sapien
ataggggtaggaaacttcatcctca

SEQ ID NO: 5561182 - DNA, 25 bp, Homo sapien
ggtgtctgagaccagaatttcactc

SEQ ID NO: 5561183 - DNA, 25 bp, Homo sapien
tactcgaaagtgcctcttcagtgcc

SEQ ID NO: 5561184 - DNA, 25 bp, Homo sapien
gagactctggtctcctggtgtctga

SEQ ID NO: 5561185 - DNA, 25 bp, Homo sapien
tctgtggtccatgatctacttgccc

SEQ ID NO: 5561186 - DNA, 25 bp, Homo sapien
gcctcagagaaagcccataaagact

SEQ ID NO: 5561187 - DNA, 25 bp, Homo sapien
acccaatggcaaaagttagatactc

SEQ ID NO: 5561188 - DNA, 25 bp, Homo sapien
cagtgccaagataaactaacaagtg

SEQ ID NO: 5561189 - DNA, 25 bp, Homo sapien
gccctgtgacccaaggtttgtcctc

SEQ ID NO: 5561190 - DNA, 25 bp, Homo sapien
aaaagtttcattcgctggtggcagc

SEQ ID NO: 5561191 - DNA, 25 bp, Homo sapien
gactggccccgtagcactgattttc

SEQ ID NO: 5561192 - DNA, 25 bp, Homo sapien
taatgggttgaggcttttgcacttt

SEQ ID NO: 5561193 - DNA, 25 bp, Homo sapien
aaaatataggaacacacagaaacag

SEQ ID NO: 5561194 - DNA, 25 bp, Homo sapien
caactcagtaatgggttgaggcttt

SEQ ID NO: 5561195 - DNA, 25 bp, Homo sapien
ctgaaaccttgctctgcacgtggag

SEQ ID NO: 5561196 - DNA, 25 bp, Homo sapien
agaatattcatgaggcaaaaccacc

SEQ ID NO: 5561197 - DNA, 25 bp, Homo sapien
tatatgcagtacactcagatgtttt

SEQ ID NO: 5561198 - DNA, 25 bp, Homo sapien
tccctcaccctctgcagtgcctgct

SEQ ID NO: 5561199 - DNA, 25 bp, Homo sapien
gcagagcatgtgcttgttctcacct

SEQ ID NO: 5561200 - DNA, 25 bp, Homo sapien
cggaaaaaatgctggtcaatcctgt

SEQ ID NO: 5561201 - DNA, 25 bp, Homo sapien
cctgagggcttcccagtccactgct

SEQ ID NO: 5561202 - DNA, 25 bp, Homo sapien
catacaaagatattaactgagttcc

SEQ ID NO: 5561203 - DNA, 25 bp, Homo sapien
ctcctcccccgaggcggcgtgaact

SEQ ID NO: 5561204 - DNA, 25 bp, Homo sapien
agttcacgccgcctcgggggaggag

SEQ ID NO: 5561205 - DNA, 25 bp, Homo sapien
aatataaaaattagctgggcatggt

SEQ ID NO: 5561206 - DNA, 25 bp, Homo sapien
agtcttagctactcgggaggatgag

SEQ ID NO: 5561207 - DNA, 25 bp, Homo sapien
ctacagcaaaattaaagagaaatct

SEQ ID NO: 5561208 - DNA, 25 bp, Homo sapien
aagagaaatctaaatacagtccaaa

SEQ ID NO: 5561209 - DNA, 25 bp, Homo sapien
tatttaattagaagatgaacaaggc

SEQ ID NO: 5561210 - DNA, 25 bp, Homo sapien
aagaaaagaaaatgaacacaactac

SEQ ID NO: 5561211 - DNA, 25 bp, Homo sapien
aaacacatcataaccactttaaatc

SEQ ID NO: 5561212 - DNA, 25 bp, Homo sapien
atagtaagccttcataaaacacatc

SEQ ID NO: 5561213 - DNA, 25 bp, Homo sapien
aacacaactactacagagtgattcc

SEQ ID NO: 5561214 - DNA, 25 bp, Homo sapien
tttaattagaagatgaacaaggcca

SEQ ID NO: 5561215 - DNA, 25 bp, Homo sapien
taagtacaatataaaatagtaagcc

SEQ ID NO: 5561216 - DNA, 25 bp, Homo sapien
gagtgcgtggttactgtgcaacttc

SEQ ID NO: 5561217 - DNA, 25 bp, Homo sapien
atacaaatgtaaacaggagtgcgtg

SEQ ID NO: 5561218 - DNA, 25 bp, Homo sapien
gcgtaaaggataacagagtacacat

SEQ ID NO: 5561219 - DNA, 25 bp, Homo sapien
caaacaacctagaattaaatggagt

SEQ ID NO: 5561220 - DNA, 25 bp, Homo sapien
ttgactatgccatgtaggcgactcc

SEQ ID NO: 5561221 - DNA, 25 bp, Homo sapien
ggcgactccaacacttcaggaatac

SEQ ID NO: 5561222 - DNA, 25 bp, Homo sapien
ttcatgtccacactagagagctatt

SEQ ID NO: 5561223 - DNA, 25 bp, Homo sapien
cacattgataataggtcagacacat

SEQ ID NO: 5561224 - DNA, 25 bp, Homo sapien
atatgctacgtataggtaaacaagt

SEQ ID NO: 5561225 - DNA, 25 bp, Homo sapien
agcagacaaaaccgctgtcaatagc

SEQ ID NO: 5561226 - DNA, 25 bp, Homo sapien
ttctagggtgcacacacgcatatat

SEQ ID NO: 5561227 - DNA, 25 bp, Homo sapien
tgtctgcaacctttccccaggatcc

SEQ ID NO: 5561228 - DNA, 25 bp, Homo sapien
atggggagaatgatatattccgact

SEQ ID NO: 5561229 - DNA, 25 bp, Homo sapien
aaagttcctgataagctgtgggggt

SEQ ID NO: 5561230 - DNA, 25 bp, Homo sapien
cagctcaggttaaaatggggagaat

SEQ ID NO: 5561231 - DNA, 25 bp, Homo sapien
gagaggtgacaacccttcctgtgtc

SEQ ID NO: 5561232 - DNA, 25 bp, Homo sapien
aactctctgtaaagccccaggtaga

SEQ ID NO: 5561233 - DNA, 25 bp, Homo sapien
tgggggtgcttcacttgccagctca

SEQ ID NO: 5561234 - DNA, 25 bp, Homo sapien
ccattccctctgaaacaaggtgtct

SEQ ID NO: 5561235 - DNA, 25 bp, Homo sapien
cttgccagctcatgcccattccctc

SEQ ID NO: 5561236 - DNA, 25 bp, Homo sapien
aggatccatgattcaaccctggctc

SEQ ID NO: 5561237 - DNA, 25 bp, Homo sapien
gcacaccctccgtgtgtcaggcagc

SEQ ID NO: 5561238 - DNA, 25 bp, Homo sapien
aggctaacgtggccgaaaaactaca

SEQ ID NO: 5561239 - DNA, 25 bp, Homo sapien
tgtgaaaaccactgatgaaactgtc

SEQ ID NO: 5561240 - DNA, 25 bp, Homo sapien
ggccaggaactgatgttgcaaaaac

SEQ ID NO: 5561241 - DNA, 25 bp, Homo sapien
cttaagaaacgtcactgaggccttc

SEQ ID NO: 5561242 - DNA, 25 bp, Homo sapien
caccttcagtaactgggccaggaac

SEQ ID NO: 5561243 - DNA, 25 bp, Homo sapien
ccaaatgcagagaattgtgaaaacc

SEQ ID NO: 5561244 - DNA, 25 bp, Homo sapien
ctacacaaatagagtcaggaaggtt

SEQ ID NO: 5561245 - DNA, 25 bp, Homo sapien
agggcactcccacaggtgtttcgta

SEQ ID NO: 5561246 - DNA, 25 bp, Homo sapien
cagaggtgcttgattcatgagttgt

SEQ ID NO: 5561247 - DNA, 25 bp, Homo sapien
tgccctgagttcatactgggggaaa

SEQ ID NO: 5561248 - DNA, 25 bp, Homo sapien
aagaagtgagtagcccttatgtggg

SEQ ID NO: 5561249 - DNA, 25 bp, Homo sapien
acgggtatcaggtggtattaaaaca

SEQ ID NO: 5561250 - DNA, 25 bp, Homo sapien
aacacagtaagttaaacgggtatca

SEQ ID NO: 5561251 - DNA, 25 bp, Homo sapien
tccatcaggtaaaaacaagaataat

SEQ ID NO: 5561252 - DNA, 25 bp, Homo sapien
tgtactcacatccctcaccaccatc

SEQ ID NO: 5561253 - DNA, 25 bp, Homo sapien
caggtggtattaaaacaggaaagga

SEQ ID NO: 5561254 - DNA, 25 bp, Homo sapien
ttgctttgacagaaccttgaacata

SEQ ID NO: 5561255 - DNA, 25 bp, Homo sapien
ggaggtaaatttaagaagagctggc

SEQ ID NO: 5561256 - DNA, 25 bp, Homo sapien
gaagagctggctcattgtaggaaaa

SEQ ID NO: 5561257 - DNA, 25 bp, Homo sapien
aatgtccccaagaatcaaacacagt

SEQ ID NO: 5561258 - DNA, 25 bp, Homo sapien
tagggtttctgtcaaaagagatttg

SEQ ID NO: 5561259 - DNA, 25 bp, Homo sapien
tttaatacagggagagaaatttatg

SEQ ID NO: 5561260 - DNA, 25 bp, Homo sapien
taaacctgatttcagacaggctgcc

SEQ ID NO: 5561261 - DNA, 25 bp, Homo sapien
gacaaaatacgtaacttggagccat

SEQ ID NO: 5561262 - DNA, 25 bp, Homo sapien
cattaagcacagacctaaactaggc

SEQ ID NO: 5561263 - DNA, 25 bp, Homo sapien
ctgacaaaacgagtcagctggagac

SEQ ID NO: 5561264 - DNA, 25 bp, Homo sapien
gataggaatcattgtacacactagc

SEQ ID NO: 5561265 - DNA, 25 bp, Homo sapien
tattagcaaactgatgattcctggt

SEQ ID NO: 5561266 - DNA, 25 bp, Homo sapien
tactgacgatataggaaaagatgtt

SEQ ID NO: 5561267 - DNA, 25 bp, Homo sapien
atgccagaggaccctgacaaaatac

SEQ ID NO: 5561268 - DNA, 25 bp, Homo sapien
gacaggctgcctgcacagtagttct

SEQ ID NO: 5561269 - DNA, 25 bp, Homo sapien
caagttttacagcaagataggaatc

SEQ ID NO: 5561270 - DNA, 25 bp, Homo sapien
tccacccacaacgctacataatcac

SEQ ID NO: 5561271 - DNA, 25 bp, Homo sapien
tctgtgcaattagctgtctacccat

SEQ ID NO: 5561272 - DNA, 25 bp, Homo sapien
ccatagatccaagaccagaaacaaa

SEQ ID NO: 5561273 - DNA, 25 bp, Homo sapien
gatgggtgcagtagcttatgcctat

SEQ ID NO: 5561274 - DNA, 25 bp, Homo sapien
gaagcctgggcctgagtaaatcagg

SEQ ID NO: 5561275 - DNA, 25 bp, Homo sapien
atgctcaataaacaactacaaggat

SEQ ID NO: 5561276 - DNA, 25 bp, Homo sapien
acatagacaaattctgagatgggtg

SEQ ID NO: 5561277 - DNA, 25 bp, Homo sapien
tacacaggcccatagatccaagacc

SEQ ID NO: 5561278 - DNA, 25 bp, Homo sapien
acaactacaaggattttcaagaaat

SEQ ID NO: 5561279 - DNA, 25 bp, Homo sapien
ttttagctaagtgacaaagatttac

SEQ ID NO: 5561280 - DNA, 25 bp, Homo sapien
agtaaatcaggaattaaggaaaatg

SEQ ID NO: 5561281 - DNA, 25 bp, Homo sapien
gacaaagatttacacaggcccatag

SEQ ID NO: 5561282 - DNA, 25 bp, Homo sapien
gcccataaatcgcgggtgtcagggc

SEQ ID NO: 5561283 - DNA, 25 bp, Homo sapien
gagacaccaaatacttcgtatcgcc

SEQ ID NO: 5561284 - DNA, 25 bp, Homo sapien
atgggaacacattttccgcggccat

SEQ ID NO: 5561285 - DNA, 25 bp, Homo sapien
tgtcagggcgaaaaactctctttat

SEQ ID NO: 5561286 - DNA, 25 bp, Homo sapien
ttccgcggccataattcatgttttt

SEQ ID NO: 5561287 - DNA, 25 bp, Homo sapien
gtatcgcctttaaatgggaacacat

SEQ ID NO: 5561288 - DNA, 25 bp, Homo sapien
gggacgagacaccaaatacttcgta

SEQ ID NO: 5561289 - DNA, 25 bp, Homo sapien
ctttattgtctgcgtgatggatggg

SEQ ID NO: 5561290 - DNA, 25 bp, Homo sapien
tcgtatcgcctttaaatgggaacac

SEQ ID NO: 5561291 - DNA, 25 bp, Homo sapien
ctctctttattgtctgcgtgatgga

SEQ ID NO: 5561292 - DNA, 25 bp, Homo sapien
ggcgcccataaatcgcgggtgtcag

SEQ ID NO: 5561293 - DNA, 25 bp, Homo sapien
gaatagccgtatccggaaaccgagc

SEQ ID NO: 5561294 - DNA, 25 bp, Homo sapien
atcattacttaaagcgccggggaga

SEQ ID NO: 5561295 - DNA, 25 bp, Homo sapien
cacagccgccctgggacgtttttcg

SEQ ID NO: 5561296 - DNA, 25 bp, Homo sapien
gggggccatctccctaaagggcaga

SEQ ID NO: 5561297 - DNA, 25 bp, Homo sapien
aatgttgcctatatttcaccagccc

SEQ ID NO: 5561298 - DNA, 25 bp, Homo sapien
gtgcggtgaatagccgtatccggaa

SEQ ID NO: 5561299 - DNA, 25 bp, Homo sapien
cagccgccctgggacgtttttcgag

SEQ ID NO: 5561300 - DNA, 25 bp, Homo sapien
tcaccagccctgacatatttatgaa

SEQ ID NO: 5561301 - DNA, 25 bp, Homo sapien
ccgggcttctttcccgccgccagac

SEQ ID NO: 5561302 - DNA, 25 bp, Homo sapien
gacatatttatgaatcgctccctgc

SEQ ID NO: 5561303 - DNA, 25 bp, Homo sapien
gaatcgctccctgcatgcaaatatc

SEQ ID NO: 5561304 - DNA, 25 bp, Homo sapien
caagtccaatacaaaaggagcttat

SEQ ID NO: 5561305 - DNA, 25 bp, Homo sapien
catttaacccaaagtcaatgccctt

SEQ ID NO: 5561306 - DNA, 25 bp, Homo sapien
tcaaggagcttacactctacagggc

SEQ ID NO: 5561307 - DNA, 25 bp, Homo sapien
attggatattttcacctctgggata

SEQ ID NO: 5561308 - DNA, 25 bp, Homo sapien
aggaagctaacctctcaggcaggga

SEQ ID NO: 5561309 - DNA, 25 bp, Homo sapien
ctgaatgagcaattacaagtccaat

SEQ ID NO: 5561310 - DNA, 25 bp, Homo sapien
acactctacagggcaatactaacac

SEQ ID NO: 5561311 - DNA, 25 bp, Homo sapien
agggcaatactaacactgaatgagc

SEQ ID NO: 5561312 - DNA, 25 bp, Homo sapien
tgtgtgagatgtcaaagtgtatcat

SEQ ID NO: 5561313 - DNA, 25 bp, Homo sapien
ggagcttatatgtaggaagctaacc

SEQ ID NO: 5561314 - DNA, 25 bp, Homo sapien
agaagcattcttggccctcaaggag

SEQ ID NO: 5561315 - DNA, 25 bp, Homo sapien
ggacagggtgtgtccacacactggt

SEQ ID NO: 5561316 - DNA, 25 bp, Homo sapien
ccgggtccacactcgatgctctcct

SEQ ID NO: 5561317 - DNA, 25 bp, Homo sapien
cgggtccacactcgatgctctcctc

SEQ ID NO: 5561318 - DNA, 25 bp, Homo sapien
gggtgtgtccacacactggtagctg

SEQ ID NO: 5561319 - DNA, 25 bp, Homo sapien
gggtccacactcgatgctctcctcc

SEQ ID NO: 5561320 - DNA, 25 bp, Homo sapien
ggctccagcatgctgagctcggtgc

SEQ ID NO: 5561321 - DNA, 25 bp, Homo sapien
gctccagcatgctgagctcggtgcg

SEQ ID NO: 5561322 - DNA, 25 bp, Homo sapien
tcctcctcgcactcgttgatgtcct

SEQ ID NO: 5561323 - DNA, 25 bp, Homo sapien
ctctcctcctcgcactcgttgatgt

SEQ ID NO: 5561324 - DNA, 25 bp, Homo sapien
gtccacactcgatgctctcctcctc

SEQ ID NO: 5561325 - DNA, 25 bp, Homo sapien
aggacagggtgtgtccacacactgg

SEQ ID NO: 5561326 - DNA, 25 bp, Homo sapien
gggtgccctcgcgttgctgttgggc

SEQ ID NO: 5561327 - DNA, 25 bp, Homo sapien
gcaggcttagctgccctagaccggc

SEQ ID NO: 5561328 - DNA, 25 bp, Homo sapien
agcaggcaggcttagctgccctaga

SEQ ID NO: 5561329 - DNA, 25 bp, Homo sapien
gctcccctgaccagggaggatggaa

SEQ ID NO: 5561330 - DNA, 25 bp, Homo sapien
cttccacttccaagggagaaaccgc

SEQ ID NO: 5561331 - DNA, 25 bp, Homo sapien
ttagctgccctagaccggccctaga

SEQ ID NO: 5561332 - DNA, 25 bp, Homo sapien
cttcatgcacggaagtttctcgggg

SEQ ID NO: 5561333 - DNA, 25 bp, Homo sapien
gccctcgcgttgctgttgggctccc

SEQ ID NO: 5561334 - DNA, 25 bp, Homo sapien
ctggaagcagatctgacttccactt

SEQ ID NO: 5561335 - DNA, 25 bp, Homo sapien
agctaggtttccgcgtggtccgcgt

SEQ ID NO: 5561336 - DNA, 25 bp, Homo sapien
ttgctgttgggctcccctgaccagg

SEQ ID NO: 5561337 - DNA, 25 bp, Homo sapien
agggctcagtgttgatgacatccag

SEQ ID NO: 5561338 - DNA, 25 bp, Homo sapien
ctcccgactgctgagctacgaggaa

SEQ ID NO: 5561339 - DNA, 25 bp, Homo sapien
tgatgacatccagcctcctcgtgcc

SEQ ID NO: 5561340 - DNA, 25 bp, Homo sapien
gagcccaggtagaacctggcaccct

SEQ ID NO: 5561341 - DNA, 25 bp, Homo sapien
agggccttggcaggtctgtcttaaa

SEQ ID NO: 5561342 - DNA, 25 bp, Homo sapien
tagtacaacaaaggtagcccagttc

SEQ ID NO: 5561343 - DNA, 25 bp, Homo sapien
gcaccctgttgcctccaagaccacc

SEQ ID NO: 5561344 - DNA, 25 bp, Homo sapien
agcagaagctgctcaggatcctgca

SEQ ID NO: 5561345 - DNA, 25 bp, Homo sapien
atgctggtttggccgcctcccatgc

SEQ ID NO: 5561346 - DNA, 25 bp, Homo sapien
tcagtccttcaagagcagggccttg

SEQ ID NO: 5561347 - DNA, 25 bp, Homo sapien
tggcctagcactgctgtgccctgtc

SEQ ID NO: 5561348 - DNA, 25 bp, Homo sapien
tattccaatagacaggctcccttac

SEQ ID NO: 5561349 - DNA, 25 bp, Homo sapien
agacaactataaagaatggataatc

SEQ ID NO: 5561350 - DNA, 25 bp, Homo sapien
ttacaaagtggtagaataaattatc

SEQ ID NO: 5561351 - DNA, 25 bp, Homo sapien
gaatggtactacagcaaaacaaaat

SEQ ID NO: 5561352 - DNA, 25 bp, Homo sapien
tttacattctaaggctgcacccagc

SEQ ID NO: 5561353 - DNA, 25 bp, Homo sapien
cagccagtggaatcagatataaaaa

SEQ ID NO: 5561354 - DNA, 25 bp, Homo sapien
tcttggcatgattatgactgacata

SEQ ID NO: 5561355 - DNA, 25 bp, Homo sapien
catgcaacttgaaagactgggagaa

SEQ ID NO: 5561356 - DNA, 25 bp, Homo sapien
gttaagattcaactaggaatggtac

SEQ ID NO: 5561357 - DNA, 25 bp, Homo sapien
gcccatgagtggccagacacaatca

SEQ ID NO: 5561358 - DNA, 25 bp, Homo sapien
cccttacagggaaactaaatcattc

SEQ ID NO: 5561359 - DNA, 25 bp, Homo sapien
gcccacatggagcttacattatagc

SEQ ID NO: 5561360 - DNA, 25 bp, Homo sapien
tacattatagccaggggaaacaaca

SEQ ID NO: 5561361 - DNA, 25 bp, Homo sapien
aggggtatgggatttctcgatctgg

SEQ ID NO: 5561362 - DNA, 25 bp, Homo sapien
attggtccacttgcacagaaaagaa

SEQ ID NO: 5561363 - DNA, 25 bp, Homo sapien
caggggaaacaacagtaaacaataa

SEQ ID NO: 5561364 - DNA, 25 bp, Homo sapien
tgattctcaaaggtatacgattctc

SEQ ID NO: 5561365 - DNA, 25 bp, Homo sapien
atttctcgatctggaaggtagacag

SEQ ID NO: 5561366 - DNA, 25 bp, Homo sapien
ggaaggtagacagctgcagtattaa

SEQ ID NO: 5561367 - DNA, 25 bp, Homo sapien
atatgaaaaacatagagcaggtgaa

SEQ ID NO: 5561368 - DNA, 25 bp, Homo sapien
atgtgaagtatctagggtgataggt

SEQ ID NO: 5561369 - DNA, 25 bp, Homo sapien
taaaatgtaggtaggaaagtatatg

SEQ ID NO: 5561370 - DNA, 25 bp, Homo sapien
cgagacaacgttaccagactgccgg

SEQ ID NO: 5561371 - DNA, 25 bp, Homo sapien
ccggcagtctggtaacgttgtctcg

SEQ ID NO: 5561372 - DNA, 25 bp, Homo sapien
tttacaagaacagcattcatatatc

SEQ ID NO: 5561373 - DNA, 25 bp, Homo sapien
cacgatttccgtcaactacatgtcc

SEQ ID NO: 5561374 - DNA, 25 bp, Homo sapien
taaagttgggaatacatagcgatgt

SEQ ID NO: 5561375 - DNA, 25 bp, Homo sapien
aagattagtcacataaggcatgatt

SEQ ID NO: 5561376 - DNA, 25 bp, Homo sapien
tcaaaactaaacaggcagacaaatg

SEQ ID NO: 5561377 - DNA, 25 bp, Homo sapien
tttgttgcccaagatagaatgcaat

SEQ ID NO: 5561378 - DNA, 25 bp, Homo sapien
acatagcgatgtcaggaattttttt

SEQ ID NO: 5561379 - DNA, 25 bp, Homo sapien
caaatgattaaggtatactgaaaat

SEQ ID NO: 5561380 - DNA, 25 bp, Homo sapien
tacacacctcaagaaaatatatcag

SEQ ID NO: 5561381 - DNA, 25 bp, Homo sapien
caaatgataaagttgggaatacata

SEQ ID NO: 5561382 - DNA, 25 bp, Homo sapien
aaggcatgattagttttgggaaatt

SEQ ID NO: 5561383 - DNA, 25 bp, Homo sapien
tggcaaactttggtcggatcctccc

SEQ ID NO: 5561384 - DNA, 25 bp, Homo sapien
ggcatttgcgcagttgggcttgcct

SEQ ID NO: 5561385 - DNA, 25 bp, Homo sapien
cctaagctcagtggccttcagggtg

SEQ ID NO: 5561386 - DNA, 25 bp, Homo sapien
tggcctggcgaccccctcatttcaa

SEQ ID NO: 5561387 - DNA, 25 bp, Homo sapien
tcgaggactttgtgtagattggtac

SEQ ID NO: 5561388 - DNA, 25 bp, Homo sapien
ctggagctaaaaagcggcatttgcg

SEQ ID NO: 5561389 - DNA, 25 bp, Homo sapien
tcggatcctcccctgcagagcgagg

SEQ ID NO: 5561390 - DNA, 25 bp, Homo sapien
gttgggcttgcctggaaacttggca

SEQ ID NO: 5561391 - DNA, 25 bp, Homo sapien
ctttctttgtgccctggggcgacgg

SEQ ID NO: 5561392 - DNA, 25 bp, Homo sapien
aagaacaaaggacgaattcgttcga

SEQ ID NO: 5561393 - DNA, 25 bp, Homo sapien
gacaccctgtaggcgcgctctttct

SEQ ID NO: 5561394 - DNA, 25 bp, Homo sapien
tctggaacgtaaaagttatgaagct

SEQ ID NO: 5561395 - DNA, 25 bp, Homo sapien
agaaaatgcacactaaggtaatata

SEQ ID NO: 5561396 - DNA, 25 bp, Homo sapien
tatgaagctaactggatgaaagttt

SEQ ID NO: 5561397 - DNA, 25 bp, Homo sapien
aaatagaatacatcttggcaattgc

SEQ ID NO: 5561398 - DNA, 25 bp, Homo sapien
tcataagtggttcagctgatctcac

SEQ ID NO: 5561399 - DNA, 25 bp, Homo sapien
ttttataaaagagtccatcaagata

SEQ ID NO: 5561400 - DNA, 25 bp, Homo sapien
catgtacagtgtattgacgtgtaat

SEQ ID NO: 5561401 - DNA, 25 bp, Homo sapien
atgccatgtacaactgacgtgaggg

SEQ ID NO: 5561402 - DNA, 25 bp, Homo sapien
ttatttaggctgattttagtgtaac

SEQ ID NO: 5561403 - DNA, 25 bp, Homo sapien
caaacctgtcccactggtatcttta

SEQ ID NO: 5561404 - DNA, 25 bp, Homo sapien
cttggcaattgcttagagtctatta

SEQ ID NO: 5561405 - DNA, 25 bp, Homo sapien
catggacttgtacaaagaataaaca

SEQ ID NO: 5561406 - DNA, 25 bp, Homo sapien
tctcaagctaaggttgatggggaga

SEQ ID NO: 5561407 - DNA, 25 bp, Homo sapien
ggagaaatgaggcacaatgcaaata

SEQ ID NO: 5561408 - DNA, 25 bp, Homo sapien
ttattagagaaccaaaaggccaagc

SEQ ID NO: 5561409 - DNA, 25 bp, Homo sapien
tttccctgcatggacctcagctcac

SEQ ID NO: 5561410 - DNA, 25 bp, Homo sapien
tccttcatgtgccaagagcttgctc

SEQ ID NO: 5561411 - DNA, 25 bp, Homo sapien
tcataggatagtgtagatgctataa

SEQ ID NO: 5561412 - DNA, 25 bp, Homo sapien
acattgccacccggctctatgcctc

SEQ ID NO: 5561413 - DNA, 25 bp, Homo sapien
accacaaaaatccaagagagctatt

SEQ ID NO: 5561414 - DNA, 25 bp, Homo sapien
ggtctaagccgcctaaatagctgtt

SEQ ID NO: 5561415 - DNA, 25 bp, Homo sapien
tcttagtgagattgccatgaggtaa

SEQ ID NO: 5561416 - DNA, 25 bp, Homo sapien
tccaacattagttgttaccgggcgc

SEQ ID NO: 5561417 - DNA, 25 bp, Homo sapien
ttgcagattcggactttcaattgtt

SEQ ID NO: 5561418 - DNA, 25 bp, Homo sapien
atctatgaatgtaggcatcactttc

SEQ ID NO: 5561419 - DNA, 25 bp, Homo sapien
acattagttgttaccgggcgcagtg

SEQ ID NO: 5561420 - DNA, 25 bp, Homo sapien
tgtctacagcagtgttattctaacc

SEQ ID NO: 5561421 - DNA, 25 bp, Homo sapien
ggttctcagagatgaacttgcagat

SEQ ID NO: 5561422 - DNA, 25 bp, Homo sapien
ttctcagagatgaacttgcagattc

SEQ ID NO: 5561423 - DNA, 25 bp, Homo sapien
atgaatgtaggcatcactttctctt

SEQ ID NO: 5561424 - DNA, 25 bp, Homo sapien
cagagatgaacttgcagattcggac

SEQ ID NO: 5561425 - DNA, 25 bp, Homo sapien
gatgaacttgcagattcggactttc

SEQ ID NO: 5561426 - DNA, 25 bp, Homo sapien
agtggctgtaaaattcggttctcag

SEQ ID NO: 5561427 - DNA, 25 bp, Homo sapien
atgtcagagagaatctagagtgctg

SEQ ID NO: 5561428 - DNA, 25 bp, Homo sapien
tataaatagtacactgatgccagaa

SEQ ID NO: 5561429 - DNA, 25 bp, Homo sapien
tctagagtgctgaattcaacacaag

SEQ ID NO: 5561430 - DNA, 25 bp, Homo sapien
caagctcatttgaaagtaagtctcc

SEQ ID NO: 5561431 - DNA, 25 bp, Homo sapien
ataaaagaattagatggtacctttc

SEQ ID NO: 5561432 - DNA, 25 bp, Homo sapien
agacatttcagaagtagctatcttt

SEQ ID NO: 5561433 - DNA, 25 bp, Homo sapien
atcatcacatgtaagaaaaccagct

SEQ ID NO: 5561434 - DNA, 25 bp, Homo sapien
aagaaaaccagctatgcaatactac

SEQ ID NO: 5561435 - DNA, 25 bp, Homo sapien
ctacatgcctaagtctgggtcttcc

SEQ ID NO: 5561436 - DNA, 25 bp, Homo sapien
aatcctatagatgaaaaagtttaca

SEQ ID NO: 5561437 - DNA, 25 bp, Homo sapien
taaagcacatgacatacttaggtcc

SEQ ID NO: 5561438 - DNA, 25 bp, Homo sapien
ggctgtccccgaagagcccaaacct

SEQ ID NO: 5561439 - DNA, 25 bp, Homo sapien
aggtttgggctcttcggggacagcc

SEQ ID NO: 5561440 - DNA, 25 bp, Homo sapien
tggccttatcaactgaatatgaaac

SEQ ID NO: 5561441 - DNA, 25 bp, Homo sapien
cagtccagctgtctttgatctctct

SEQ ID NO: 5561442 - DNA, 25 bp, Homo sapien
tatggagtttatcatgaacagagtt

SEQ ID NO: 5561443 - DNA, 25 bp, Homo sapien
agttcctatgaaatacccagactat

SEQ ID NO: 5561444 - DNA, 25 bp, Homo sapien
acttggaagtgcataaaaaactaag

SEQ ID NO: 5561445 - DNA, 25 bp, Homo sapien
ttacacaaacaggtacagtccagct

SEQ ID NO: 5561446 - DNA, 25 bp, Homo sapien
tatcttagttacatggagggaatta

SEQ ID NO: 5561447 - DNA, 25 bp, Homo sapien
atgaacagagtttaacagtctcagt

SEQ ID NO: 5561448 - DNA, 25 bp, Homo sapien
catggagggaattaatctgttcacc

SEQ ID NO: 5561449 - DNA, 25 bp, Homo sapien
taaataatgtaaatagagtatctta

SEQ ID NO: 5561450 - DNA, 25 bp, Homo sapien
cctatgcaatgaataacttgtagct

SEQ ID NO: 5561451 - DNA, 25 bp, Homo sapien
ttctaacggcaacaacagctaacat

SEQ ID NO: 5561452 - DNA, 25 bp, Homo sapien
cagcatgcaaagtgtgcaatgcact

SEQ ID NO: 5561453 - DNA, 25 bp, Homo sapien
cttccctgacccagcatgcaaagtg

SEQ ID NO: 5561454 - DNA, 25 bp, Homo sapien
gtatggtattctagctatggtgttc

SEQ ID NO: 5561455 - DNA, 25 bp, Homo sapien
agacagtgcggcaggcactattaca

SEQ ID NO: 5561456 - DNA, 25 bp, Homo sapien
taagtgaatgccaggtatggtattc

SEQ ID NO: 5561457 - DNA, 25 bp, Homo sapien
ttacaacctcattttgcggagacaa

SEQ ID NO: 5561458 - DNA, 25 bp, Homo sapien
aggacatacccccacgcagtctatg

SEQ ID NO: 5561459 - DNA, 25 bp, Homo sapien
ggaaaccaggtgcactgtcctctct

SEQ ID NO: 5561460 - DNA, 25 bp, Homo sapien
ctagctatggtgttctaacggcaac

SEQ ID NO: 5561461 - DNA, 25 bp, Homo sapien
gagcctaggattgagtccttatgct

SEQ ID NO: 5561462 - DNA, 25 bp, Homo sapien
aaaagtgagttttcatctgaggtgc

SEQ ID NO: 5561463 - DNA, 25 bp, Homo sapien
taagaggtattaaagtgagggatta

SEQ ID NO: 5561464 - DNA, 25 bp, Homo sapien
ttggcatgcaggatgctgctgtgta

SEQ ID NO: 5561465 - DNA, 25 bp, Homo sapien
aaaatataggaaagcacaaatgttt

SEQ ID NO: 5561466 - DNA, 25 bp, Homo sapien
tctgaggtgcttggaatgattcaca

SEQ ID NO: 5561467 - DNA, 25 bp, Homo sapien
gcttgtagaggcattctttggttcc

SEQ ID NO: 5561468 - DNA, 25 bp, Homo sapien
aacggtgaagctactttggcatgca

SEQ ID NO: 5561469 - DNA, 25 bp, Homo sapien
tattttctataggggcacacaactt

SEQ ID NO: 5561470 - DNA, 25 bp, Homo sapien
tactaacatggtgtggcagaaagaa

SEQ ID NO: 5561471 - DNA, 25 bp, Homo sapien
ttggaactagataaacctgagtttg

SEQ ID NO: 5561472 - DNA, 25 bp, Homo sapien
gattcacaaacaacttggcacactc

SEQ ID NO: 5561473 - DNA, 25 bp, Homo sapien
aaaaaattgtgtaggactcaggcta

SEQ ID NO: 5561474 - DNA, 25 bp, Homo sapien
ccttaaacaaaggacacagtgttcg

SEQ ID NO: 5561475 - DNA, 25 bp, Homo sapien
agtgaaactcccatcatcatcctca

SEQ ID NO: 5561476 - DNA, 25 bp, Homo sapien
gtaggactcaggctagaacattgaa

SEQ ID NO: 5561477 - DNA, 25 bp, Homo sapien
ggacacagtgttcgaatactttgcc

SEQ ID NO: 5561478 - DNA, 25 bp, Homo sapien
ccccaaaaccatacatagacgataa

SEQ ID NO: 5561479 - DNA, 25 bp, Homo sapien
tcaatatggagagtctaccatcaat

SEQ ID NO: 5561480 - DNA, 25 bp, Homo sapien
ttgaccaaaatgaaaatgtttggaa

SEQ ID NO: 5561481 - DNA, 25 bp, Homo sapien
tacatagacgataaataccatgcta

SEQ ID NO: 5561482 - DNA, 25 bp, Homo sapien
tacatatttaagtgactcatgatct

SEQ ID NO: 5561483 - DNA, 25 bp, Homo sapien
tttgcctaagtggtagtttgaatta

SEQ ID NO: 5561484 - DNA, 25 bp, Homo sapien
attgtgttaggcgttgttatcattt

SEQ ID NO: 5561485 - DNA, 25 bp, Homo sapien
tagagaataacagtgttgagggtcg

SEQ ID NO: 5561486 - DNA, 25 bp, Homo sapien
ctcatcagcattacaatcagggatt

SEQ ID NO: 5561487 - DNA, 25 bp, Homo sapien
aagaagaaagtagactctgaccaag

SEQ ID NO: 5561488 - DNA, 25 bp, Homo sapien
ttcaattcccagagtattgtggtgt

SEQ ID NO: 5561489 - DNA, 25 bp, Homo sapien
taagctagagaataacagtgttgag

SEQ ID NO: 5561490 - DNA, 25 bp, Homo sapien
aagaaataatacaagaatcaaagac

SEQ ID NO: 5561491 - DNA, 25 bp, Homo sapien
acaagagcctatgaaacagcatact

SEQ ID NO: 5561492 - DNA, 25 bp, Homo sapien
aaacatgacaaacagagtcagtttc

SEQ ID NO: 5561493 - DNA, 25 bp, Homo sapien
cagggatttagaaaacgttcaattc

SEQ ID NO: 5561494 - DNA, 25 bp, Homo sapien
gggtaggggtacaatgcctcatatg

SEQ ID NO: 5561495 - DNA, 25 bp, Homo sapien
cagctgtaatgtcttgtcctaatac

SEQ ID NO: 5561496 - DNA, 25 bp, Homo sapien
gtattaggacaagacattacagctg

SEQ ID NO: 5561497 - DNA, 25 bp, Homo sapien
gaagaatccgtgtttcattgaaggc

SEQ ID NO: 5561498 - DNA, 25 bp, Homo sapien
taagacaggtgttaagacaatggaa

SEQ ID NO: 5561499 - DNA, 25 bp, Homo sapien
atatgccgacaggcaatgaagcatt

SEQ ID NO: 5561500 - DNA, 25 bp, Homo sapien
ttatgaagaaatagttgagacttaa

SEQ ID NO: 5561501 - DNA, 25 bp, Homo sapien
caaagacagatagtgataatatgcc

SEQ ID NO: 5561502 - DNA, 25 bp, Homo sapien
agatagtgataatatgccgacaggc

SEQ ID NO: 5561503 - DNA, 25 bp, Homo sapien
tgagggttcagtgcaaacaacatac

SEQ ID NO: 5561504 - DNA, 25 bp, Homo sapien
ggtgattgatacaaatacgatccat

SEQ ID NO: 5561505 - DNA, 25 bp, Homo sapien
ttgaaggctattaggcaaactgaac

SEQ ID NO: 5561506 - DNA, 25 bp, Homo sapien
aggtgttaagacaatggaaaccact

SEQ ID NO: 5561507 - DNA, 25 bp, Homo sapien
catacccgttttaagacaggtgtta

SEQ ID NO: 5561508 - DNA, 25 bp, Homo sapien
tcttgcttgcttatgggtgcctctg

SEQ ID NO: 5561509 - DNA, 25 bp, Homo sapien
cctagagcacaggaagttaactgtt

SEQ ID NO: 5561510 - DNA, 25 bp, Homo sapien
atgggtgcctctgttgatattattc

SEQ ID NO: 5561511 - DNA, 25 bp, Homo sapien
aatggaagagttactttaagaagct

SEQ ID NO: 5561512 - DNA, 25 bp, Homo sapien
tgacctttggtattggtgcatttcc

SEQ ID NO: 5561513 - DNA, 25 bp, Homo sapien
acagcataggggcaaacatgcccat

SEQ ID NO: 5561514 - DNA, 25 bp, Homo sapien
agccagattagattacacagtataa

SEQ ID NO: 5561515 - DNA, 25 bp, Homo sapien
gtagcccacttcatgtagaaaattc

SEQ ID NO: 5561516 - DNA, 25 bp, Homo sapien
ttcccaggccacagatcaaaaggag

SEQ ID NO: 5561517 - DNA, 25 bp, Homo sapien
tctgtctcagttgtgtcttgcttgc

SEQ ID NO: 5561518 - DNA, 25 bp, Homo sapien
taagaagctagtgaaatatacaatc

SEQ ID NO: 5561519 - DNA, 25 bp, Homo sapien
aaaactgcacaaaacccggcgctaa

SEQ ID NO: 5561520 - DNA, 25 bp, Homo sapien
acaaaacgcactggaatcttaagag

SEQ ID NO: 5561521 - DNA, 25 bp, Homo sapien
aacagtccgctaacgaaccaggtac

SEQ ID NO: 5561522 - DNA, 25 bp, Homo sapien
taggcatcgcagttgtaaaatacac

SEQ ID NO: 5561523 - DNA, 25 bp, Homo sapien
aggaggagctgacacttcacacatt

SEQ ID NO: 5561524 - DNA, 25 bp, Homo sapien
ggccccacctcggcgattgccacat

SEQ ID NO: 5561525 - DNA, 25 bp, Homo sapien
gccacattcccgataggcatcgcag

SEQ ID NO: 5561526 - DNA, 25 bp, Homo sapien
aaagcgtctgcaggcgctgtctata

SEQ ID NO: 5561527 - DNA, 25 bp, Homo sapien
cggtatatacggtacaaaactgcac

SEQ ID NO: 5561528 - DNA, 25 bp, Homo sapien
tttgtcaagattactgtcaggcccc

SEQ ID NO: 5561529 - DNA, 25 bp, Homo sapien
agctgggtgtgtcgaaatcattttt

SEQ ID NO: 5561530 - DNA, 25 bp, Homo sapien
gggcaacagagcaaaaccttgtctc

SEQ ID NO: 5561531 - DNA, 25 bp, Homo sapien
agtaactctctagaggctaagctgt

SEQ ID NO: 5561532 - DNA, 25 bp, Homo sapien
ctctgcctcccggattcaagcgatt

SEQ ID NO: 5561533 - DNA, 25 bp, Homo sapien
tacattcccaaggtaaccacgttca

SEQ ID NO: 5561534 - DNA, 25 bp, Homo sapien
aaggtaaccacgttcagtaactctc

SEQ ID NO: 5561535 - DNA, 25 bp, Homo sapien
tagaggctaagctgttaaaatttcc

SEQ ID NO: 5561536 - DNA, 25 bp, Homo sapien
gagtttcgctcttgaccccgaggct

SEQ ID NO: 5561537 - DNA, 25 bp, Homo sapien
cttacccagttgaagtggccagtca

SEQ ID NO: 5561538 - DNA, 25 bp, Homo sapien
tatacaaatagcaaagatatttctt

SEQ ID NO: 5561539 - DNA, 25 bp, Homo sapien
gaagtggccagtcattttaatttgc

SEQ ID NO: 5561540 - DNA, 25 bp, Homo sapien
ccaggaaagttcgagtccaagctgg

SEQ ID NO: 5561541 - DNA, 25 bp, Homo sapien
agggacttgagggacctcatcccga

SEQ ID NO: 5561542 - DNA, 25 bp, Homo sapien
gcgccttcggagctctcagggcgcc

SEQ ID NO: 5561543 - DNA, 25 bp, Homo sapien
ctctgacctgcttgtgcagggactt

SEQ ID NO: 5561544 - DNA, 25 bp, Homo sapien
tcatgaatactttgaaagggccatt

SEQ ID NO: 5561545 - DNA, 25 bp, Homo sapien
tggcttctccactggtggggatggg

SEQ ID NO: 5561546 - DNA, 25 bp, Homo sapien
gcaacaatcgcggttctggcttctc

SEQ ID NO: 5561547 - DNA, 25 bp, Homo sapien
aaataagagccaatttgggtcattt

SEQ ID NO: 5561548 - DNA, 25 bp, Homo sapien
tgttttatgacacagcatcaatttc

SEQ ID NO: 5561549 - DNA, 25 bp, Homo sapien
gggttttcccagatgcaacaatcgc

SEQ ID NO: 5561550 - DNA, 25 bp, Homo sapien
ttcccagatgcaacaatcgcggttc

SEQ ID NO: 5561551 - DNA, 25 bp, Homo sapien
gacctcatcccgatggccgaggcag

SEQ ID NO: 5561552 - DNA, 25 bp, Homo sapien
gcagcctgttgggaccttcctggct

SEQ ID NO: 5561553 - DNA, 25 bp, Homo sapien
aggggcctacacctgtggcttcccc

SEQ ID NO: 5561554 - DNA, 25 bp, Homo sapien
gcctgtctccatccgaagcacctgc

SEQ ID NO: 5561555 - DNA, 25 bp, Homo sapien
ccttcctggctgtgaggaactgagg

SEQ ID NO: 5561556 - DNA, 25 bp, Homo sapien
ttggttcctgaatgtggtgtgtcct

SEQ ID NO: 5561557 - DNA, 25 bp, Homo sapien
cgagtgcatgtgtccccccacacct

SEQ ID NO: 5561558 - DNA, 25 bp, Homo sapien
ggacctggcacttggcagatcagtt

SEQ ID NO: 5561559 - DNA, 25 bp, Homo sapien
cacccaccccctctgaacctgtccc

SEQ ID NO: 5561560 - DNA, 25 bp, Homo sapien
tccgaagcacctgccactgcatgca

SEQ ID NO: 5561561 - DNA, 25 bp, Homo sapien
ctggcacttggcagatcagttggca

SEQ ID NO: 5561562 - DNA, 25 bp, Homo sapien
gtcagtgtcccctgcctgtctccat

SEQ ID NO: 5561563 - DNA, 25 bp, Homo sapien
tgtgctacatgagtctagtgtcctc

SEQ ID NO: 5561564 - DNA, 25 bp, Homo sapien
ggatacgagtgagctccacttagct

SEQ ID NO: 5561565 - DNA, 25 bp, Homo sapien
tgccacagaaccattggcagctgcc

SEQ ID NO: 5561566 - DNA, 25 bp, Homo sapien
gagccagtctgtgccacagaaccat

SEQ ID NO: 5561567 - DNA, 25 bp, Homo sapien
aacctaagggatgctgtggtttggt

SEQ ID NO: 5561568 - DNA, 25 bp, Homo sapien
accgcaacgatggaaaatcaggcga

SEQ ID NO: 5561569 - DNA, 25 bp, Homo sapien
cgtctgggttctcaggagccagtct

SEQ ID NO: 5561570 - DNA, 25 bp, Homo sapien
agctctaggcaaagctgccccgttt

SEQ ID NO: 5561571 - DNA, 25 bp, Homo sapien
gcggctggataccgcaacgatggaa

SEQ ID NO: 5561572 - DNA, 25 bp, Homo sapien
aaggtttaacatacgagagagcgag

SEQ ID NO: 5561573 - DNA, 25 bp, Homo sapien
cggtgcgtgtggcttcatgtttctg

SEQ ID NO: 5561574 - DNA, 25 bp, Homo sapien
aaacttccaatccacttacacattc

SEQ ID NO: 5561575 - DNA, 25 bp, Homo sapien
attttctcgacctgctgtcctggtg

SEQ ID NO: 5561576 - DNA, 25 bp, Homo sapien
ggaaagacattttctcgacctgctg

SEQ ID NO: 5561577 - DNA, 25 bp, Homo sapien
gccatttccgcataaacagaacagg

SEQ ID NO: 5561578 - DNA, 25 bp, Homo sapien
ctctcagaatagcagcatttatggt

SEQ ID NO: 5561579 - DNA, 25 bp, Homo sapien
tgaataatcacaaaccccagaagca

SEQ ID NO: 5561580 - DNA, 25 bp, Homo sapien
cagtacaaagtaaaattgaaatttc

SEQ ID NO: 5561581 - DNA, 25 bp, Homo sapien
tccgcataaacagaacagggaacaa

SEQ ID NO: 5561582 - DNA, 25 bp, Homo sapien
cacaaaccccagaagcaagtgaaag

SEQ ID NO: 5561583 - DNA, 25 bp, Homo sapien
tcagcttccttaagtccaataatac

SEQ ID NO: 5561584 - DNA, 25 bp, Homo sapien
ggagcagtgcagtttaaaatggctc

SEQ ID NO: 5561585 - DNA, 25 bp, Homo sapien
gcacataagggttgctttcaccttc

SEQ ID NO: 5561586 - DNA, 25 bp, Homo sapien
aaagttatgggttgattattaccta

SEQ ID NO: 5561587 - DNA, 25 bp, Homo sapien
tactgattactgtgaagtcaatagc

SEQ ID NO: 5561588 - DNA, 25 bp, Homo sapien
ttgaaagtttaacataaaggtcatc

SEQ ID NO: 5561589 - DNA, 25 bp, Homo sapien
ttaatgtaaatatagtgtgaggaat

SEQ ID NO: 5561590 - DNA, 25 bp, Homo sapien
taagtctgctgaaacgggatttttc

SEQ ID NO: 5561591 - DNA, 25 bp, Homo sapien
aaatagtaactggtaactaaattca

SEQ ID NO: 5561592 - DNA, 25 bp, Homo sapien
cttaatagaatcactggggagaagg

SEQ ID NO: 5561593 - DNA, 25 bp, Homo sapien
agtcaatagcaaaatgatccctgat

SEQ ID NO: 5561594 - DNA, 25 bp, Homo sapien
agtactaaaatgctgcaaattaact

SEQ ID NO: 5561595 - DNA, 25 bp, Homo sapien
tgtaaagtttttggtcaggtcatct

SEQ ID NO: 5561596 - DNA, 25 bp, Homo sapien
aaagtacagtagagtgaaactgctc

SEQ ID NO: 5561597 - DNA, 25 bp, Homo sapien
ctaatgaatagtgacccagagttac

SEQ ID NO: 5561598 - DNA, 25 bp, Homo sapien
tgagtatgttatgaaacacggccat

SEQ ID NO: 5561599 - DNA, 25 bp, Homo sapien
gacccagtttaaagaattgtatatc

SEQ ID NO: 5561600 - DNA, 25 bp, Homo sapien
tatttcgacagtagaatagggaaga

SEQ ID NO: 5561601 - DNA, 25 bp, Homo sapien
tgatgatacattatagcgttccagc

SEQ ID NO: 5561602 - DNA, 25 bp, Homo sapien
tatccacgcccaccactttgccctc

SEQ ID NO: 5561603 - DNA, 25 bp, Homo sapien
tgtgtataatcgcccatttcgccca

SEQ ID NO: 5561604 - DNA, 25 bp, Homo sapien
gagttacatggtaatcaatggctac

SEQ ID NO: 5561605 - DNA, 25 bp, Homo sapien
ttctatgatgaaagaccactggggg

SEQ ID NO: 5561606 - DNA, 25 bp, Homo sapien
agtttgggggctgatctcattctta

SEQ ID NO: 5561607 - DNA, 25 bp, Homo sapien
tctgcaactcgtgacaggaatctcc

SEQ ID NO: 5561608 - DNA, 25 bp, Homo sapien
cctaaaagatccaccgctcccactc

SEQ ID NO: 5561609 - DNA, 25 bp, Homo sapien
tgtgtgccttcaaacccagtcctcc

SEQ ID NO: 5561610 - DNA, 25 bp, Homo sapien
cagtgcatggaggataatttgaaat

SEQ ID NO: 5561611 - DNA, 25 bp, Homo sapien
gtccaggaaacaagacgcctttctc

SEQ ID NO: 5561612 - DNA, 25 bp, Homo sapien
aggaatctccggactccaaggcctt

SEQ ID NO: 5561613 - DNA, 25 bp, Homo sapien
gttgaaagtatccagagtgtgaaaa

SEQ ID NO: 5561614 - DNA, 25 bp, Homo sapien
aaaattgaaaaccgatgtgtgcctt

SEQ ID NO: 5561615 - DNA, 25 bp, Homo sapien
ggccacgcacaggtggttgaaagta

SEQ ID NO: 5561616 - DNA, 25 bp, Homo sapien
caagattcttgaaagggttccccca

SEQ ID NO: 5561617 - DNA, 25 bp, Homo sapien
gattcttgtatttgtggctgtggcc

SEQ ID NO: 5561618 - DNA, 25 bp, Homo sapien
catgtgattgagggaatatcctagt

SEQ ID NO: 5561619 - DNA, 25 bp, Homo sapien
tcagaggttaaataccagatggcta

SEQ ID NO: 5561620 - DNA, 25 bp, Homo sapien
catatgggtataacagtgcagctat

SEQ ID NO: 5561621 - DNA, 25 bp, Homo sapien
gaaaaaagcgtatagaagattgtgt

SEQ ID NO: 5561622 - DNA, 25 bp, Homo sapien
atgcaaactgaggaactggttctca

SEQ ID NO: 5561623 - DNA, 25 bp, Homo sapien
tgatgagaaatgaggggatttttat

SEQ ID NO: 5561624 - DNA, 25 bp, Homo sapien
tggtgagggcatctgcaacattttc

SEQ ID NO: 5561625 - DNA, 25 bp, Homo sapien
acctcgtggagcattgacctacagt

SEQ ID NO: 5561626 - DNA, 25 bp, Homo sapien
tatgttgaagttagggatgcatttc

SEQ ID NO: 5561627 - DNA, 25 bp, Homo sapien
aagattgtgtggttttcagaggtta

SEQ ID NO: 5561628 - DNA, 25 bp, Homo sapien
attttctgaggcctggattgtaacc

SEQ ID NO: 5561629 - DNA, 25 bp, Homo sapien
ttgctactgatttatggcatctatc

SEQ ID NO: 5561630 - DNA, 25 bp, Homo sapien
ctagtcatatttacagcagaatctc

SEQ ID NO: 5561631 - DNA, 25 bp, Homo sapien
ttacagcagaatctcagtagcattt

SEQ ID NO: 5561632 - DNA, 25 bp, Homo sapien
ttgaaaggcacccaagaataattac

SEQ ID NO: 5561633 - DNA, 25 bp, Homo sapien
atgccttcttgtaaaataaagctac

SEQ ID NO: 5561634 - DNA, 25 bp, Homo sapien
atggcatctatcaatgtacatcaat

SEQ ID NO: 5561635 - DNA, 25 bp, Homo sapien
ttatggtcattcagatttacaaaga

SEQ ID NO: 5561636 - DNA, 25 bp, Homo sapien
aactttgagcataaatgacatactt

SEQ ID NO: 5561637 - DNA, 25 bp, Homo sapien
catactttagttcacagcagcactg

SEQ ID NO: 5561638 - DNA, 25 bp, Homo sapien
tacctttagaagtgccttttgctac

SEQ ID NO: 5561639 - DNA, 25 bp, Homo sapien
tttacaactgtgaattacttgccac

SEQ ID NO: 5561640 - DNA, 25 bp, Homo sapien
tttacttcaggaaggctcgtggaga

SEQ ID NO: 5561641 - DNA, 25 bp, Homo sapien
aggcagaatcatgaagaaataactg

SEQ ID NO: 5561642 - DNA, 25 bp, Homo sapien
ctgattccaagaactgtgtgacctt

SEQ ID NO: 5561643 - DNA, 25 bp, Homo sapien
gtatgttgctctcgtctgcgtcatc

SEQ ID NO: 5561644 - DNA, 25 bp, Homo sapien
ccctgacccggttcctgatgcgtga

SEQ ID NO: 5561645 - DNA, 25 bp, Homo sapien
atgacatttaaagagtgaggaagag

SEQ ID NO: 5561646 - DNA, 25 bp, Homo sapien
tgatgcgtgatgtttctaagtgctc

SEQ ID NO: 5561647 - DNA, 25 bp, Homo sapien
actcagaaagccaggcagaatcatg

SEQ ID NO: 5561648 - DNA, 25 bp, Homo sapien
aagagaaagcaacaggttccaagta

SEQ ID NO: 5561649 - DNA, 25 bp, Homo sapien
tccaaatggaaatggcattgataac

SEQ ID NO: 5561650 - DNA, 25 bp, Homo sapien
gagagagcacgatgtgatcatagtt

SEQ ID NO: 5561651 - DNA, 25 bp, Homo sapien
agtatgtataagattcggtactatc

SEQ ID NO: 5561652 - DNA, 25 bp, Homo sapien
agcgggtataaaatgtgagcacttg

SEQ ID NO: 5561653 - DNA, 25 bp, Homo sapien
aggatttaatattcagtaatggtac

SEQ ID NO: 5561654 - DNA, 25 bp, Homo sapien
ttagaatgtacccctgtggataagg

SEQ ID NO: 5561655 - DNA, 25 bp, Homo sapien
aacgcactaagacagagcgggtata

SEQ ID NO: 5561656 - DNA, 25 bp, Homo sapien
tataaaatgtgagcacttgggccag

SEQ ID NO: 5561657 - DNA, 25 bp, Homo sapien
tatactcctctcttgcaacgcacta

SEQ ID NO: 5561658 - DNA, 25 bp, Homo sapien
ctgtagctatggtaaagaaggattt

SEQ ID NO: 5561659 - DNA, 25 bp, Homo sapien
ttgctgtggacaatttcactacatt

SEQ ID NO: 5561660 - DNA, 25 bp, Homo sapien
gggggaactactgtatatactcctc

SEQ ID NO: 5561661 - DNA, 25 bp, Homo sapien
tcagtcacccaccgggggtcttaga

SEQ ID NO: 5561662 - DNA, 25 bp, Homo sapien
aaaaaatgagtacacaatatggata

SEQ ID NO: 5561663 - DNA, 25 bp, Homo sapien
aaggtggcatggaatcacccctgtt

SEQ ID NO: 5561664 - DNA, 25 bp, Homo sapien
tatggcaagtgatacctccttttaa

SEQ ID NO: 5561665 - DNA, 25 bp, Homo sapien
acatcaggaatgtgggaatcttatc

SEQ ID NO: 5561666 - DNA, 25 bp, Homo sapien
tttaaggacatgatataaagttttc

SEQ ID NO: 5561667 - DNA, 25 bp, Homo sapien
gaggtcagtgcatgtcaaatcagtc

SEQ ID NO: 5561668 - DNA, 25 bp, Homo sapien
aatatggataatacaaggacagagt

SEQ ID NO: 5561669 - DNA, 25 bp, Homo sapien
tcaagtatcttcttcggcccactgc

SEQ ID NO: 5561670 - DNA, 25 bp, Homo sapien
aaatcagtctgagtctttaacatcc

SEQ ID NO: 5561671 - DNA, 25 bp, Homo sapien
tgaggtctgtgatctgtgcccttct

SEQ ID NO: 5561672 - DNA, 25 bp, Homo sapien
ccttctccagtgaggggtataggag

SEQ ID NO: 5561673 - DNA, 25 bp, Homo sapien
tctgcctccttgccaacctagaaaa

SEQ ID NO: 5561674 - DNA, 25 bp, Homo sapien
agttgtgtacaaattaagtcagaaa

SEQ ID NO: 5561675 - DNA, 25 bp, Homo sapien
tcaacccaattaggtctgaggactg

SEQ ID NO: 5561676 - DNA, 25 bp, Homo sapien
gtacttacctacatgaggaatggag

SEQ ID NO: 5561677 - DNA, 25 bp, Homo sapien
tgaaacaatgaaggttttctgcctc

SEQ ID NO: 5561678 - DNA, 25 bp, Homo sapien
attaggtctgaggactgaatcacac

SEQ ID NO: 5561679 - DNA, 25 bp, Homo sapien
cataagttaaattgaacaagggact

SEQ ID NO: 5561680 - DNA, 25 bp, Homo sapien
gaatacctaaaagtatacatggttc

SEQ ID NO: 5561681 - DNA, 25 bp, Homo sapien
tctgaggactgaatcacactgaaac

SEQ ID NO: 5561682 - DNA, 25 bp, Homo sapien
taaggttgcagatagattcatagac

SEQ ID NO: 5561683 - DNA, 25 bp, Homo sapien
agattaaataaggttgcagatagat

SEQ ID NO: 5561684 - DNA, 25 bp, Homo sapien
tcggtggggccactcccccacacgg

SEQ ID NO: 5561685 - DNA, 25 bp, Homo sapien
ccgtgtgggggagtggccccaccga

SEQ ID NO: 5561686 - DNA, 25 bp, Homo sapien
ctcggtggggccactcccccacacg

SEQ ID NO: 5561687 - DNA, 25 bp, Homo sapien
cgtgtgggggagtggccccaccgag

SEQ ID NO: 5561688 - DNA, 25 bp, Homo sapien
ataaaagaagacacactgtatttat

SEQ ID NO: 5561689 - DNA, 25 bp, Homo sapien
taattttggatgtggtataggttgg

SEQ ID NO: 5561690 - DNA, 25 bp, Homo sapien
tctaggggctgtaatagatacataa

SEQ ID NO: 5561691 - DNA, 25 bp, Homo sapien
gaagtcctgcagagtcactaacctt

SEQ ID NO: 5561692 - DNA, 25 bp, Homo sapien
tctgtgaagtcctgcagagtcacta

SEQ ID NO: 5561693 - DNA, 25 bp, Homo sapien
tcgatgatccatgtaagtagcgggg

SEQ ID NO: 5561694 - DNA, 25 bp, Homo sapien
taagtggagtcacaataacttttta

SEQ ID NO: 5561695 - DNA, 25 bp, Homo sapien
ctgtatttataaagcttctaggggc

SEQ ID NO: 5561696 - DNA, 25 bp, Homo sapien
atgatgggcacagctctctctgtga

SEQ ID NO: 5561697 - DNA, 25 bp, Homo sapien
agttctaatttggtaacagtgactc

SEQ ID NO: 5561698 - DNA, 25 bp, Homo sapien
tttaggtggaaactcgatgatccat

SEQ ID NO: 5561699 - DNA, 25 bp, Homo sapien
acgccagcgcctagcgcccattact

SEQ ID NO: 5561700 - DNA, 25 bp, Homo sapien
cactcatcctaaaagacagggctcc

SEQ ID NO: 5561701 - DNA, 25 bp, Homo sapien
caaaatcaattgcaagaaaagccca

SEQ ID NO: 5561702 - DNA, 25 bp, Homo sapien
tacatcacagatggcgactgaagct

SEQ ID NO: 5561703 - DNA, 25 bp, Homo sapien
ggctccagatggatgctgtatggca

SEQ ID NO: 5561704 - DNA, 25 bp, Homo sapien
gatggcgactgaagcttaaggttta

SEQ ID NO: 5561705 - DNA, 25 bp, Homo sapien
tgcccgaccctaaagccactcatcc

SEQ ID NO: 5561706 - DNA, 25 bp, Homo sapien
agaagctgccaagcctcagatgtgc

SEQ ID NO: 5561707 - DNA, 25 bp, Homo sapien
tttcaagatatgtggcatctggctc

SEQ ID NO: 5561708 - DNA, 25 bp, Homo sapien
actaaaaaggacatgtgcgaatatc

SEQ ID NO: 5561709 - DNA, 25 bp, Homo sapien
gctgggctgaataccgacgccagcg

SEQ ID NO: 5561710 - DNA, 25 bp, Homo sapien
ttgtctacgaaattagcaaaaatta

SEQ ID NO: 5561711 - DNA, 25 bp, Homo sapien
tagactgccaaacttaagggaatgt

SEQ ID NO: 5561712 - DNA, 25 bp, Homo sapien
aggtgcatgtcctcccagcaatcct

SEQ ID NO: 5561713 - DNA, 25 bp, Homo sapien
aatatggaaaaatactatcaaactc

SEQ ID NO: 5561714 - DNA, 25 bp, Homo sapien
aaggcatatagacacatgtacaacc

SEQ ID NO: 5561715 - DNA, 25 bp, Homo sapien
acagtaacctaaggcatatagacac

SEQ ID NO: 5561716 - DNA, 25 bp, Homo sapien
caaactcttgaagggcaattttggc

SEQ ID NO: 5561717 - DNA, 25 bp, Homo sapien
ccacacttggccagcattttttgtt

SEQ ID NO: 5561718 - DNA, 25 bp, Homo sapien
ttatgccaaagatacagattagact

SEQ ID NO: 5561719 - DNA, 25 bp, Homo sapien
taagggaatgtgcaaaaaaacttca

SEQ ID NO: 5561720 - DNA, 25 bp, Homo sapien
atgaagaaagcatatgaagagtcaa

SEQ ID NO: 5561721 - DNA, 25 bp, Homo sapien
tggtttaaagaacaaggagctagaa

SEQ ID NO: 5561722 - DNA, 25 bp, Homo sapien
ccttcaggtgaaggaccttgtcctg

SEQ ID NO: 5561723 - DNA, 25 bp, Homo sapien
atgtttgttgaatgagtatctacct

SEQ ID NO: 5561724 - DNA, 25 bp, Homo sapien
cctaactggtcccacccaggctgtc

SEQ ID NO: 5561725 - DNA, 25 bp, Homo sapien
tgggcgcatggaccctacagcccat

SEQ ID NO: 5561726 - DNA, 25 bp, Homo sapien
tccccaagctaagtcaggagcattc

SEQ ID NO: 5561727 - DNA, 25 bp, Homo sapien
ttaatgggaacctcatagctaaagg

SEQ ID NO: 5561728 - DNA, 25 bp, Homo sapien
aaccagtatgtaattccgcatcccc

SEQ ID NO: 5561729 - DNA, 25 bp, Homo sapien
aatgcttggcatctggcaaccagtt

SEQ ID NO: 5561730 - DNA, 25 bp, Homo sapien
gggtggttcaaaacagctgtttctc

SEQ ID NO: 5561731 - DNA, 25 bp, Homo sapien
ccctcagccttgcaagggcagaatc

SEQ ID NO: 5561732 - DNA, 25 bp, Homo sapien
agactaagagtcacataatgtagcg

SEQ ID NO: 5561733 - DNA, 25 bp, Homo sapien
gtcacataatgtagcggtggaacct

SEQ ID NO: 5561734 - DNA, 25 bp, Homo sapien
ttataaataatcagaccaaagaaat

SEQ ID NO: 5561735 - DNA, 25 bp, Homo sapien
cagtgcactttcctctacatgctac

SEQ ID NO: 5561736 - DNA, 25 bp, Homo sapien
cagaccaaagaaattacaccaaaag

SEQ ID NO: 5561737 - DNA, 25 bp, Homo sapien
cataatgtagcggtggaacctcaaa

SEQ ID NO: 5561738 - DNA, 25 bp, Homo sapien
aagagtcacataatgtagcggtgga

SEQ ID NO: 5561739 - DNA, 25 bp, Homo sapien
ggtttagactaagagtcacataatg

SEQ ID NO: 5561740 - DNA, 25 bp, Homo sapien
tggccttggattatcccagtgcact

SEQ ID NO: 5561741 - DNA, 25 bp, Homo sapien
cctgcaaaggcactctgcttgtgtg

SEQ ID NO: 5561742 - DNA, 25 bp, Homo sapien
aacctgcaaaggcactctgcttgtg

SEQ ID NO: 5561743 - DNA, 25 bp, Homo sapien
catagaaaactattgaaggggattg

SEQ ID NO: 5561744 - DNA, 25 bp, Homo sapien
cctcataacccccacccagggcaca

SEQ ID NO: 5561745 - DNA, 25 bp, Homo sapien
aaggggattgatgctgtctgatttt

SEQ ID NO: 5561746 - DNA, 25 bp, Homo sapien
ctaagagagattaaggttatccatg

SEQ ID NO: 5561747 - DNA, 25 bp, Homo sapien
gtaataaggtaacaagcatgtatgt

SEQ ID NO: 5561748 - DNA, 25 bp, Homo sapien
ctttaatggtgacctcagggtggag

SEQ ID NO: 5561749 - DNA, 25 bp, Homo sapien
gatctaagatatggtgttcagctgt

SEQ ID NO: 5561750 - DNA, 25 bp, Homo sapien
catgaccgttcaatgacccagaatt

SEQ ID NO: 5561751 - DNA, 25 bp, Homo sapien
caaggcagggtcatatgaactccca

SEQ ID NO: 5561752 - DNA, 25 bp, Homo sapien
agagctactcagcaggactcctgtc

SEQ ID NO: 5561753 - DNA, 25 bp, Homo sapien
atgtcactcccaccaaggcagggtc

SEQ ID NO: 5561754 - DNA, 25 bp, Homo sapien
ggaacaccatcgccactgtgagcac

SEQ ID NO: 5561755 - DNA, 25 bp, Homo sapien
tatgacagaaacagctggggatata

SEQ ID NO: 5561756 - DNA, 25 bp, Homo sapien
aatggtccgaaatggtctatggcac

SEQ ID NO: 5561757 - DNA, 25 bp, Homo sapien
aggctgcgtggaacttgctacctat

SEQ ID NO: 5561758 - DNA, 25 bp, Homo sapien
gccataggagaaactaggttccaaa

SEQ ID NO: 5561759 - DNA, 25 bp, Homo sapien
actctaagaattggggaagagacaa

SEQ ID NO: 5561760 - DNA, 25 bp, Homo sapien
gaagagaggcatggatcattaatag

SEQ ID NO: 5561761 - DNA, 25 bp, Homo sapien
cggaggttgacagacacttatgact

SEQ ID NO: 5561762 - DNA, 25 bp, Homo sapien
acttatgactgaggagatgaatgca

SEQ ID NO: 5561763 - DNA, 25 bp, Homo sapien
ggtgacaaagaatactaactgctcc

SEQ ID NO: 5561764 - DNA, 25 bp, Homo sapien
gggatatacatgtggggaatcttcc

SEQ ID NO: 5561765 - DNA, 25 bp, Homo sapien
gcactgtgccaccttggaaagctcc

SEQ ID NO: 5561766 - DNA, 25 bp, Homo sapien
tgacaaggacctaggacatttttgc

SEQ ID NO: 5561767 - DNA, 25 bp, Homo sapien
gccttctactacaacgcgcggcggc

SEQ ID NO: 5561768 - DNA, 25 bp, Homo sapien
ttgctcctgcccagcctatcgggag

SEQ ID NO: 5561769 - DNA, 25 bp, Homo sapien
tgtgtgactttgaggttgttgctcc

SEQ ID NO: 5561770 - DNA, 25 bp, Homo sapien
gagccccagtccctgacaaggacct

SEQ ID NO: 5561771 - DNA, 25 bp, Homo sapien
gccaccttggaaagctcccatgggc

SEQ ID NO: 5561772 - DNA, 25 bp, Homo sapien
tgcacactgcttcagacactcctgc

SEQ ID NO: 5561773 - DNA, 25 bp, Homo sapien
ttcagtggaaagcactgtgccacct

SEQ ID NO: 5561774 - DNA, 25 bp, Homo sapien
ggccctgggtgccctgtcttcagtg

SEQ ID NO: 5561775 - DNA, 25 bp, Homo sapien
ctcctggaagcgcgccttctactac

SEQ ID NO: 5561776 - DNA, 25 bp, Homo sapien
aggagtgggtttatgaaaacaagtg

SEQ ID NO: 5561777 - DNA, 25 bp, Homo sapien
aacaagtgtgggcattttcaaaggc

SEQ ID NO: 5561778 - DNA, 25 bp, Homo sapien
gtgggcattttcaaaggcccgagtg

SEQ ID NO: 5561779 - DNA, 25 bp, Homo sapien
cattttcaaaggcccgagtgtgtcc

SEQ ID NO: 5561780 - DNA, 25 bp, Homo sapien
ccgctttcccgcttccttccctctg

SEQ ID NO: 5561781 - DNA, 25 bp, Homo sapien
tccctccgattcggcgcgctggagg

SEQ ID NO: 5561782 - DNA, 25 bp, Homo sapien
tctccctccgattcggcgcgctgga

SEQ ID NO: 5561783 - DNA, 25 bp, Homo sapien
cccggttctccctccgattcggcgc

SEQ ID NO: 5561784 - DNA, 25 bp, Homo sapien
gcattttcaaaggcccgagtgtgtc

SEQ ID NO: 5561785 - DNA, 25 bp, Homo sapien
agtgggtttatgaaaacaagtgtgg

SEQ ID NO: 5561786 - DNA, 25 bp, Homo sapien
gaacggatttcgatattcagaaaaa

SEQ ID NO: 5561787 - DNA, 25 bp, Homo sapien
tctgaagtgtggttattttgcctgc

SEQ ID NO: 5561788 - DNA, 25 bp, Homo sapien
gaggggcttcttctgtgacctgggc

SEQ ID NO: 5561789 - DNA, 25 bp, Homo sapien
aggtgatgttggcatgttaggatct

SEQ ID NO: 5561790 - DNA, 25 bp, Homo sapien
gagagccgccttttccagggtttgc

SEQ ID NO: 5561791 - DNA, 25 bp, Homo sapien
tgggcacctgcctggtagctcccaa

SEQ ID NO: 5561792 - DNA, 25 bp, Homo sapien
actggtgctacatagtgagaagccc

SEQ ID NO: 5561793 - DNA, 25 bp, Homo sapien
tgcaaaacagctccatgtgggacca

SEQ ID NO: 5561794 - DNA, 25 bp, Homo sapien
cttccctgaatgcactgggcacctg

SEQ ID NO: 5561795 - DNA, 25 bp, Homo sapien
gaggagcttccagacacacccatcc

SEQ ID NO: 5561796 - DNA, 25 bp, Homo sapien
tcccctctccagtgggtgctgggag

SEQ ID NO: 5561797 - DNA, 25 bp, Homo sapien
tataaagtatgatcaccaagagggc

SEQ ID NO: 5561798 - DNA, 25 bp, Homo sapien
gaaatgactcccgctggccctgtct

SEQ ID NO: 5561799 - DNA, 25 bp, Homo sapien
ctgccccctagtggctgcaggaaat

SEQ ID NO: 5561800 - DNA, 25 bp, Homo sapien
tggcccattctgctgagacagggat

SEQ ID NO: 5561801 - DNA, 25 bp, Homo sapien
tgctctcacctgcggaccctcggaa

SEQ ID NO: 5561802 - DNA, 25 bp, Homo sapien
attttcttggctgaagcacgaggga

SEQ ID NO: 5561803 - DNA, 25 bp, Homo sapien
ctgtctcttccggaacctgccaggc

SEQ ID NO: 5561804 - DNA, 25 bp, Homo sapien
gacctgcgtgaccttggcccattct

SEQ ID NO: 5561805 - DNA, 25 bp, Homo sapien
gactcccgctggccctgtctcttcc

SEQ ID NO: 5561806 - DNA, 25 bp, Homo sapien
ttctgctgagacagggattttccca

SEQ ID NO: 5561807 - DNA, 25 bp, Homo sapien
gggcaggctgctctcacctgcggac

SEQ ID NO: 5561808 - DNA, 25 bp, Homo sapien
cccaaacaccctacttgcaccccca

SEQ ID NO: 5561809 - DNA, 25 bp, Homo sapien
atccataattaagataagcagactt

SEQ ID NO: 5561810 - DNA, 25 bp, Homo sapien
ttatgccatcagtttgagggagagc

SEQ ID NO: 5561811 - DNA, 25 bp, Homo sapien
gactgatttcagtggatgagaatac

SEQ ID NO: 5561812 - DNA, 25 bp, Homo sapien
ggagagcatgtatgccaacattgta

SEQ ID NO: 5561813 - DNA, 25 bp, Homo sapien
ttctccaaggtaaagctggactgat

SEQ ID NO: 5561814 - DNA, 25 bp, Homo sapien
ccccactgtactataaagttagagt

SEQ ID NO: 5561815 - DNA, 25 bp, Homo sapien
aaaatagaatgtagcttgtaaagat

SEQ ID NO: 5561816 - DNA, 25 bp, Homo sapien
aggtaaagctggactgatttcagtg

SEQ ID NO: 5561817 - DNA, 25 bp, Homo sapien
gccaacattgtagagactaagtgcc

SEQ ID NO: 5561818 - DNA, 25 bp, Homo sapien
gtagagactaagtgcccatttatcc

SEQ ID NO: 5561819 - DNA, 25 bp, Homo sapien
gtggatgagaatacagtgataagca

SEQ ID NO: 5561820 - DNA, 25 bp, Homo sapien
gcaagttagtggccttctactctcc

SEQ ID NO: 5561821 - DNA, 25 bp, Homo sapien
ccaaagagaagtcatgcaattgtga

SEQ ID NO: 5561822 - DNA, 25 bp, Homo sapien
aaaggatggataaaaagaacaatac

SEQ ID NO: 5561823 - DNA, 25 bp, Homo sapien
tctactctccagtggtggtgtataa

SEQ ID NO: 5561824 - DNA, 25 bp, Homo sapien
tggaaagccacattagcccaccttt

SEQ ID NO: 5561825 - DNA, 25 bp, Homo sapien
aagagctgtagtggaaagccacatt

SEQ ID NO: 5561826 - DNA, 25 bp, Homo sapien
gaacaatactcaacctaccagcctc

SEQ ID NO: 5561827 - DNA, 25 bp, Homo sapien
aatattccagccaaatcacactgaa

SEQ ID NO: 5561828 - DNA, 25 bp, Homo sapien
aactgcctgcaagttagtggccttc

SEQ ID NO: 5561829 - DNA, 25 bp, Homo sapien
atgcaattgtgaatacatgtcaacc

SEQ ID NO: 5561830 - DNA, 25 bp, Homo sapien
ttgtaaagatataagttaactgcct

SEQ ID NO: 5561831 - DNA, 25 bp, Homo sapien
ctgtagttggcctaaaggaggaaaa

SEQ ID NO: 5561832 - DNA, 25 bp, Homo sapien
ctgcgctgtagttggcctaaaggag

SEQ ID NO: 5561833 - DNA, 25 bp, Homo sapien
aaagggtgactaccccttataagca

SEQ ID NO: 5561834 - DNA, 25 bp, Homo sapien
ctaaaggaggaaaactcccagaatg

SEQ ID NO: 5561835 - DNA, 25 bp, Homo sapien
actcccagaatgtttggaaggtcga

SEQ ID NO: 5561836 - DNA, 25 bp, Homo sapien
cgctcctctgcgctgtagttggcct

SEQ ID NO: 5561837 - DNA, 25 bp, Homo sapien
tagtagtgaagcccgcgtctaccaa

SEQ ID NO: 5561838 - DNA, 25 bp, Homo sapien
gcaggagaaagcgctcctctgcgct

SEQ ID NO: 5561839 - DNA, 25 bp, Homo sapien
aatggaatcatatacaaggtcagtt

SEQ ID NO: 5561840 - DNA, 25 bp, Homo sapien
agaatgtttggaaggtcgaaataaa

SEQ ID NO: 5561841 - DNA, 25 bp, Homo sapien
ggagaaggaatggaatcatatacaa

SEQ ID NO: 5561842 - DNA, 25 bp, Homo sapien
ttatccaggaccacccagtttgtaa

SEQ ID NO: 5561843 - DNA, 25 bp, Homo sapien
tacagaagggaatgaacactgattg

SEQ ID NO: 5561844 - DNA, 25 bp, Homo sapien
tgaacattcaaaaccaagggcacat

SEQ ID NO: 5561845 - DNA, 25 bp, Homo sapien
aaaccaagggcacatggacaattca

SEQ ID NO: 5561846 - DNA, 25 bp, Homo sapien
ttataggtagagacaattccatgaa

SEQ ID NO: 5561847 - DNA, 25 bp, Homo sapien
atcaggcctgtgtgacttcaaagac

SEQ ID NO: 5561848 - DNA, 25 bp, Homo sapien
tgataatctgaaggcacagtcacat

SEQ ID NO: 5561849 - DNA, 25 bp, Homo sapien
caataaccctacaaagttgggagga

SEQ ID NO: 5561850 - DNA, 25 bp, Homo sapien
caagcaactgagtaggcattcctgc

SEQ ID NO: 5561851 - DNA, 25 bp, Homo sapien
tggaacttttggatactggcgactc

SEQ ID NO: 5561852 - DNA, 25 bp, Homo sapien
tccatgaaaaggccattataagtct

SEQ ID NO: 5561853 - DNA, 25 bp, Homo sapien
agaacacaatcaatgcagctgactt

SEQ ID NO: 5561854 - DNA, 25 bp, Homo sapien
aaggaatatgtatgggcatatggtc

SEQ ID NO: 5561855 - DNA, 25 bp, Homo sapien
gtgggctgataatggcaaagcatat

SEQ ID NO: 5561856 - DNA, 25 bp, Homo sapien
cactaacagagagctgacttccacc

SEQ ID NO: 5561857 - DNA, 25 bp, Homo sapien
ttggtagtctctgaagtgaggattt

SEQ ID NO: 5561858 - DNA, 25 bp, Homo sapien
tatgggaagcatctaagagcaaaat

SEQ ID NO: 5561859 - DNA, 25 bp, Homo sapien
tggcaagaatgaatggctccctgat

SEQ ID NO: 5561860 - DNA, 25 bp, Homo sapien
tttttgaagcttagaaggctggtgg

SEQ ID NO: 5561861 - DNA, 25 bp, Homo sapien
agcagcaccacaacaggcatgatat

SEQ ID NO: 5561862 - DNA, 25 bp, Homo sapien
acagactgagttactaagggatcac

SEQ ID NO: 5561863 - DNA, 25 bp, Homo sapien
agtgaggatttaaaggtgtcccaaa

SEQ ID NO: 5561864 - DNA, 25 bp, Homo sapien
aagtggaagatcattaacatgactg

SEQ ID NO: 5561865 - DNA, 25 bp, Homo sapien
cacccagataccagaattgcaaaat

SEQ ID NO: 5561866 - DNA, 25 bp, Homo sapien
aacatgactggataggaacctcttt

SEQ ID NO: 5561867 - DNA, 25 bp, Homo sapien
gccaagctcacctaaaaatggtctc

SEQ ID NO: 5561868 - DNA, 25 bp, Homo sapien
aaaactggctgggtcaccccattac

SEQ ID NO: 5561869 - DNA, 25 bp, Homo sapien
cctgacacacctagaaaatacaccc

SEQ ID NO: 5561870 - DNA, 25 bp, Homo sapien
gtgccatttaaatcagcaggattcc

SEQ ID NO: 5561871 - DNA, 25 bp, Homo sapien
caaagggctctgaccatcgactgat

SEQ ID NO: 5561872 - DNA, 25 bp, Homo sapien
attcaggaagaatgcactgcacact

SEQ ID NO: 5561873 - DNA, 25 bp, Homo sapien
agcacaggatagtacaagtggaaga

SEQ ID NO: 5561874 - DNA, 25 bp, Homo sapien
tcgaggttaacaacgaagcacagga

SEQ ID NO: 5561875 - DNA, 25 bp, Homo sapien
cagatatgactcagtgaaaggaggc

SEQ ID NO: 5561876 - DNA, 25 bp, Homo sapien
gacgtcagcgtctccaagattctat

SEQ ID NO: 5561877 - DNA, 25 bp, Homo sapien
tagcttgtcctcagacgtcagcgtc

SEQ ID NO: 5561878 - DNA, 25 bp, Homo sapien
cctcttgaaggcatagcttgtcctc

SEQ ID NO: 5561879 - DNA, 25 bp, Homo sapien
gcccatgtcttcgctgagcaagatc

SEQ ID NO: 5561880 - DNA, 25 bp, Homo sapien
gggaagtcaggcacagattgtgatt

SEQ ID NO: 5561881 - DNA, 25 bp, Homo sapien
gctgggttcattgggtcatgcattt

SEQ ID NO: 5561882 - DNA, 25 bp, Homo sapien
actctaagttatatctccagccaat

SEQ ID NO: 5561883 - DNA, 25 bp, Homo sapien
gagcaagatctatcttgggggatcc

SEQ ID NO: 5561884 - DNA, 25 bp, Homo sapien
ttgcttataacagtgattactctaa

SEQ ID NO: 5561885 - DNA, 25 bp, Homo sapien
aggagcccacagatatgactcagtg

SEQ ID NO: 5561886 - DNA, 25 bp, Homo sapien
acgggcaccatcagtgtccccaact

SEQ ID NO: 5561887 - DNA, 25 bp, Homo sapien
tcagcttccaggagccgcacttcta

SEQ ID NO: 5561888 - DNA, 25 bp, Homo sapien
tgtccagcttcatctcgcggcgcca

SEQ ID NO: 5561889 - DNA, 25 bp, Homo sapien
agcgtcaccatcggccgcaactcgt

SEQ ID NO: 5561890 - DNA, 25 bp, Homo sapien
tgcagctgcccaagcagtgtacctt

SEQ ID NO: 5561891 - DNA, 25 bp, Homo sapien
gcggccactgtacccccagatctcc

SEQ ID NO: 5561892 - DNA, 25 bp, Homo sapien
ttcctcatgcgccagcccagcgtca

SEQ ID NO: 5561893 - DNA, 25 bp, Homo sapien
catcaagatccagttcacgtcgctc

SEQ ID NO: 5561894 - DNA, 25 bp, Homo sapien
gtttcccagcacggccatcaagatc

SEQ ID NO: 5561895 - DNA, 25 bp, Homo sapien
gccgcgagttcgagttcctcatgcg

SEQ ID NO: 5561896 - DNA, 25 bp, Homo sapien
gatccacatcccggagccggacctc

SEQ ID NO: 5561897 - DNA, 25 bp, Homo sapien
aagaccacaatgagatgctacttca

SEQ ID NO: 5561898 - DNA, 25 bp, Homo sapien
acgctaactaggatggccataagca

SEQ ID NO: 5561899 - DNA, 25 bp, Homo sapien
cagcctagaaccatccccaaaagtc

SEQ ID NO: 5561900 - DNA, 25 bp, Homo sapien
ctggataaacaaagaaatttcaaac

SEQ ID NO: 5561901 - DNA, 25 bp, Homo sapien
gtatcacatccagcctagaaccatc

SEQ ID NO: 5561902 - DNA, 25 bp, Homo sapien
tctggtctctgccttgcttggtgta

SEQ ID NO: 5561903 - DNA, 25 bp, Homo sapien
tagacctgaaggtcatgagaacttt

SEQ ID NO: 5561904 - DNA, 25 bp, Homo sapien
tgttcatcccaaggtggtgattatc

SEQ ID NO: 5561905 - DNA, 25 bp, Homo sapien
ctctgcagctcaccagccatgttca

SEQ ID NO: 5561906 - DNA, 25 bp, Homo sapien
aaaccaaaccaaagtgatgatctga

SEQ ID NO: 5561907 - DNA, 25 bp, Homo sapien
cttgcttggtgtaggtcaaaattct

SEQ ID NO: 5561908 - DNA, 25 bp, Homo sapien
aggaagatttcctggcacagtaaat

SEQ ID NO: 5561909 - DNA, 25 bp, Homo sapien
ctagggaaagctgcatttccgaggt

SEQ ID NO: 5561910 - DNA, 25 bp, Homo sapien
agttcaaggagttcaggaagatttc

SEQ ID NO: 5561911 - DNA, 25 bp, Homo sapien
tcttaatagaagagtaagtgcaggc

SEQ ID NO: 5561912 - DNA, 25 bp, Homo sapien
aggtgaccgcatctgcagtgctttc

SEQ ID NO: 5561913 - DNA, 25 bp, Homo sapien
taatagaaaacccaggtggtcagtc

SEQ ID NO: 5561914 - DNA, 25 bp, Homo sapien
cctgtgtgtatgagttcaaggagtt

SEQ ID NO: 5561915 - DNA, 25 bp, Homo sapien
gcatgaaatgatgctgagcagagga

SEQ ID NO: 5561916 - DNA, 25 bp, Homo sapien
tcaaaacaccatgcaatagactcac

SEQ ID NO: 5561917 - DNA, 25 bp, Homo sapien
gtggtcagtcaggtgaccgcatctg

SEQ ID NO: 5561918 - DNA, 25 bp, Homo sapien
agcagcccatagcagcactttggca

SEQ ID NO: 5561919 - DNA, 25 bp, Homo sapien
gatgacgctagtgcaggtgtcaaat

SEQ ID NO: 5561920 - DNA, 25 bp, Homo sapien
ctcttggccctcggctcgcagatga

SEQ ID NO: 5561921 - DNA, 25 bp, Homo sapien
aacaagtatgttcaaggcaatgctg

SEQ ID NO: 5561922 - DNA, 25 bp, Homo sapien
agaataccgttcgacagccagattt

SEQ ID NO: 5561923 - DNA, 25 bp, Homo sapien
ttacaagcaccgtgacaacccgtac

SEQ ID NO: 5561924 - DNA, 25 bp, Homo sapien
atgcaagacgtcggcttaagaatac

SEQ ID NO: 5561925 - DNA, 25 bp, Homo sapien
tgtcctggacagtcctcacgcccgc

SEQ ID NO: 5561926 - DNA, 25 bp, Homo sapien
ccaccaagaccgagaagatactctt

SEQ ID NO: 5561927 - DNA, 25 bp, Homo sapien
cccctcaaggacaacctcggcctga

SEQ ID NO: 5561928 - DNA, 25 bp, Homo sapien
taagctgggctttgagaataaagtt

SEQ ID NO: 5561929 - DNA, 25 bp, Homo sapien
gtcttcaacaagctcagcggtgcgg

SEQ ID NO: 5561930 - DNA, 25 bp, Homo sapien
gttaagccctccaaatgtgcaaatc

SEQ ID NO: 5561931 - DNA, 25 bp, Homo sapien
atgcagaatttaggttaagccagtc

SEQ ID NO: 5561932 - DNA, 25 bp, Homo sapien
tcttggagtataaaatgcagaattt

SEQ ID NO: 5561933 - DNA, 25 bp, Homo sapien
acttagaaagctgccacgaagagct

SEQ ID NO: 5561934 - DNA, 25 bp, Homo sapien
tcatgaagtcagttgttgttccagc

SEQ ID NO: 5561935 - DNA, 25 bp, Homo sapien
gttgttccagcaaggtttgcccagc

SEQ ID NO: 5561936 - DNA, 25 bp, Homo sapien
attctggcaaatagaaagttccatc

SEQ ID NO: 5561937 - DNA, 25 bp, Homo sapien
tcatttgcaaagacgttaagccctc

SEQ ID NO: 5561938 - DNA, 25 bp, Homo sapien
ttagagaagtgtaggtcattctggc

SEQ ID NO: 5561939 - DNA, 25 bp, Homo sapien
tgtagatgaaattgtacactggcaa

SEQ ID NO: 5561940 - DNA, 25 bp, Homo sapien
ttgcccagcggtaaaaaacaagata

SEQ ID NO: 5561941 - DNA, 25 bp, Homo sapien
agacagcttgagtaaggtgtccttc

SEQ ID NO: 5561942 - DNA, 25 bp, Homo sapien
cgcccacttatcaggcccaaggtcc

SEQ ID NO: 5561943 - DNA, 25 bp, Homo sapien
tttgggaactaaagacagcttgagt

SEQ ID NO: 5561944 - DNA, 25 bp, Homo sapien
ggttcccgcactactgcagtcgccc

SEQ ID NO: 5561945 - DNA, 25 bp, Homo sapien
agaacttaggggtactcctgctgtc

SEQ ID NO: 5561946 - DNA, 25 bp, Homo sapien
tcctgctgtctcggtcatgcccatc

SEQ ID NO: 5561947 - DNA, 25 bp, Homo sapien
gcccgcaactcaaaccacacgtctt

SEQ ID NO: 5561948 - DNA, 25 bp, Homo sapien
gcatggggtccctacacttcctgtc

SEQ ID NO: 5561949 - DNA, 25 bp, Homo sapien
aaccacacgtcttaggatgccggac

SEQ ID NO: 5561950 - DNA, 25 bp, Homo sapien
caccatccatcaagcatggggtccc

SEQ ID NO: 5561951 - DNA, 25 bp, Homo sapien
tcaacactgagactaccacactata

SEQ ID NO: 5561952 - DNA, 25 bp, Homo sapien
ctacacacacgtatctaagaacttc

SEQ ID NO: 5561953 - DNA, 25 bp, Homo sapien
ccctagagatggcatttgatcccac

SEQ ID NO: 5561954 - DNA, 25 bp, Homo sapien
caaaaaccacagaacttccctctcc

SEQ ID NO: 5561955 - DNA, 25 bp, Homo sapien
taatgccacacaaagctacacacac

SEQ ID NO: 5561956 - DNA, 25 bp, Homo sapien
gtgtcctccagtttcccatgctatc

SEQ ID NO: 5561957 - DNA, 25 bp, Homo sapien
ctctcacaccacaataaagacagaa

SEQ ID NO: 5561958 - DNA, 25 bp, Homo sapien
cttaaaacaaagtctgagcggaaaa

SEQ ID NO: 5561959 - DNA, 25 bp, Homo sapien
ttagtgactgcaatagatccacatt

SEQ ID NO: 5561960 - DNA, 25 bp, Homo sapien
agtagataagggtagaaaataatat

SEQ ID NO: 5561961 - DNA, 25 bp, Homo sapien
ccatgctatcccctagagatggcat

SEQ ID NO: 5561962 - DNA, 25 bp, Homo sapien
ttctgtatgagtagataagggtaga

SEQ ID NO: 5561963 - DNA, 25 bp, Homo sapien
tggccctgaccacttgctgagcagc

SEQ ID NO: 5561964 - DNA, 25 bp, Homo sapien
tgtctgacctttatgtgtgtgagcc

SEQ ID NO: 5561965 - DNA, 25 bp, Homo sapien
acagaaagatagttaaaaagaattc

SEQ ID NO: 5561966 - DNA, 25 bp, Homo sapien
tcaaaaggcaagtgacaagtaatga

SEQ ID NO: 5561967 - DNA, 25 bp, Homo sapien
tttggtatgtaaaaggcttaagaca

SEQ ID NO: 5561968 - DNA, 25 bp, Homo sapien
tgtgccacagcaggtaaatttctac

SEQ ID NO: 5561969 - DNA, 25 bp, Homo sapien
ctaaacctgaaagtaagctaaggaa

SEQ ID NO: 5561970 - DNA, 25 bp, Homo sapien
ggaaagggctccatcatgtctgacc

SEQ ID NO: 5561971 - DNA, 25 bp, Homo sapien
cacttgctgagcagctgtgccacag

SEQ ID NO: 5561972 - DNA, 25 bp, Homo sapien
acaggggcacacttaaagaaaatca

SEQ ID NO: 5561973 - DNA, 25 bp, Homo sapien
agggctgtaacaaggaccaaattct

SEQ ID NO: 5561974 - DNA, 25 bp, Homo sapien
gcggcgtgttcgccgtgcacaagcc

SEQ ID NO: 5561975 - DNA, 25 bp, Homo sapien
atactgccattggagaactggggaa

SEQ ID NO: 5561976 - DNA, 25 bp, Homo sapien
gtccttgagcggcgtgttcgccgtg

SEQ ID NO: 5561977 - DNA, 25 bp, Homo sapien
tgcacaagcccaaagggcccacttc

SEQ ID NO: 5561978 - DNA, 25 bp, Homo sapien
ccgagctgctgaatcggttgaagga

SEQ ID NO: 5561979 - DNA, 25 bp, Homo sapien
taatgcaagtgccccccctctattc

SEQ ID NO: 5561980 - DNA, 25 bp, Homo sapien
agggtccaagagatatactgccatt

SEQ ID NO: 5561981 - DNA, 25 bp, Homo sapien
cgaggagttctggttgttggaattg

SEQ ID NO: 5561982 - DNA, 25 bp, Homo sapien
agggcccacttcagccgagctgctg

SEQ ID NO: 5561983 - DNA, 25 bp, Homo sapien
aaggccgctttggctaccaagctgc

SEQ ID NO: 5561984 - DNA, 25 bp, Homo sapien
tctccagaatggaccaagaggaaaa

SEQ ID NO: 5561985 - DNA, 25 bp, Homo sapien
tgcccacacacttgaatacacctac

SEQ ID NO: 5561986 - DNA, 25 bp, Homo sapien
aacattccttacactgcccacacac

SEQ ID NO: 5561987 - DNA, 25 bp, Homo sapien
acctacacaacacagtgaaggggca

SEQ ID NO: 5561988 - DNA, 25 bp, Homo sapien
actgatacaattaatagatggtggt

SEQ ID NO: 5561989 - DNA, 25 bp, Homo sapien
atcacttcccgtctcaggctgggtc

SEQ ID NO: 5561990 - DNA, 25 bp, Homo sapien
ctcacatcaccatatacccaaacac

SEQ ID NO: 5561991 - DNA, 25 bp, Homo sapien
atagatggtggtaatttttattccc

SEQ ID NO: 5561992 - DNA, 25 bp, Homo sapien
aatacataaggcaaaattggctttt

SEQ ID NO: 5561993 - DNA, 25 bp, Homo sapien
tgagggcccagcaatcacttcccgt

SEQ ID NO: 5561994 - DNA, 25 bp, Homo sapien
ggggtctggattgtctgtgccttta

SEQ ID NO: 5561995 - DNA, 25 bp, Homo sapien
gttcgctttatgcatccctgatctc

SEQ ID NO: 5561996 - DNA, 25 bp, Homo sapien
tcattttattcctgtaattatgtac

SEQ ID NO: 5561997 - DNA, 25 bp, Homo sapien
gtacataattacaggaataaaatga

SEQ ID NO: 5561998 - DNA, 25 bp, Homo sapien
cacccccgtccaaactactgccacc

SEQ ID NO: 5561999 - DNA, 25 bp, Homo sapien
tccaattatggaagagaacatgaac

SEQ ID NO: 5562000 - DNA, 25 bp, Homo sapien
tgagggaccatccttctcaggtgac

SEQ ID NO: 5562001 - DNA, 25 bp, Homo sapien
agaatgtgccgctcctcaaaggttc

SEQ ID NO: 5562002 - DNA, 25 bp, Homo sapien
acttcaggctcacagaaaacgtgcc

SEQ ID NO: 5562003 - DNA, 25 bp, Homo sapien
cctggccccacttcaaggtctccgc

SEQ ID NO: 5562004 - DNA, 25 bp, Homo sapien
aaggtctccgcctgtaagaggatgt

SEQ ID NO: 5562005 - DNA, 25 bp, Homo sapien
tctgtaaatgaaggacagttctggt

SEQ ID NO: 5562006 - DNA, 25 bp, Homo sapien
aagaggatgtaggaaattgacctcc

SEQ ID NO: 5562007 - DNA, 25 bp, Homo sapien
cagaaaacgtgcctgccagaatgtg

SEQ ID NO: 5562008 - DNA, 25 bp, Homo sapien
ttctcaggtgacaggtcaaattgtc

SEQ ID NO: 5562009 - DNA, 25 bp, Homo sapien
aattggaaacaggctgagctgtgaa

SEQ ID NO: 5562010 - DNA, 25 bp, Homo sapien
cttagctcaggctccctcgttcctc

SEQ ID NO: 5562011 - DNA, 25 bp, Homo sapien
aggagcagagacactatgattcaca

SEQ ID NO: 5562012 - DNA, 25 bp, Homo sapien
ctcctaacatgaagccgaccaccaa

SEQ ID NO: 5562013 - DNA, 25 bp, Homo sapien
ggcttgggcaagtcctcagagctta

SEQ ID NO: 5562014 - DNA, 25 bp, Homo sapien
ctcttgtttgcttggagacaggctg

SEQ ID NO: 5562015 - DNA, 25 bp, Homo sapien
taagcaggtattcaaacaaatagcc

SEQ ID NO: 5562016 - DNA, 25 bp, Homo sapien
gaggtttgtattgaaatctgggctt

SEQ ID NO: 5562017 - DNA, 25 bp, Homo sapien
agatggaggggtgtcctcctaacat

SEQ ID NO: 5562018 - DNA, 25 bp, Homo sapien
ttggagacaggctgtcaagtgtaat

SEQ ID NO: 5562019 - DNA, 25 bp, Homo sapien
ccattgtgtaccactgtaagcaggt

SEQ ID NO: 5562020 - DNA, 25 bp, Homo sapien
catacgaatacaaagtggtcaaatc

SEQ ID NO: 5562021 - DNA, 25 bp, Homo sapien
gtcttggccacatttctgcagcact

SEQ ID NO: 5562022 - DNA, 25 bp, Homo sapien
ttgcacaccccccagaggtgctgtc

SEQ ID NO: 5562023 - DNA, 25 bp, Homo sapien
ggtgatgcagatgctttgaaaatca

SEQ ID NO: 5562024 - DNA, 25 bp, Homo sapien
ggggcaagtgtttcatggagtttta

SEQ ID NO: 5562025 - DNA, 25 bp, Homo sapien
agtgaagccccattccaccgtgccc

SEQ ID NO: 5562026 - DNA, 25 bp, Homo sapien
caaaccgaggcttccatgaggttgc

SEQ ID NO: 5562027 - DNA, 25 bp, Homo sapien
aaggccacgagtccgtgacctgatg

SEQ ID NO: 5562028 - DNA, 25 bp, Homo sapien
gctgaaatcacagcagcgcgactgg

SEQ ID NO: 5562029 - DNA, 25 bp, Homo sapien
ctttcaaaagcccccagtgaagccc

SEQ ID NO: 5562030 - DNA, 25 bp, Homo sapien
caaatacgtttgtagccagggatgc

SEQ ID NO: 5562031 - DNA, 25 bp, Homo sapien
ccacagtgagattgcaataagccta

SEQ ID NO: 5562032 - DNA, 25 bp, Homo sapien
aacagcttatggcctaatgcactag

SEQ ID NO: 5562033 - DNA, 25 bp, Homo sapien
tgcactagttccatgataaacacac

SEQ ID NO: 5562034 - DNA, 25 bp, Homo sapien
aacaaggacaattcagggttgaaag

SEQ ID NO: 5562035 - DNA, 25 bp, Homo sapien
tggttaagccatgtatcatcaatac

SEQ ID NO: 5562036 - DNA, 25 bp, Homo sapien
aataccatgaagctagcctatcagt

SEQ ID NO: 5562037 - DNA, 25 bp, Homo sapien
tttacaatttagagagggaaagcag

SEQ ID NO: 5562038 - DNA, 25 bp, Homo sapien
aagcaagcagtgaaccaaaaataaa

SEQ ID NO: 5562039 - DNA, 25 bp, Homo sapien
cccagctatgctcaagcaagcagtg

SEQ ID NO: 5562040 - DNA, 25 bp, Homo sapien
ggaaagcagcttttagtatggttaa

SEQ ID NO: 5562041 - DNA, 25 bp, Homo sapien
gaaaatgggctacaaatcccagcta

SEQ ID NO: 5562042 - DNA, 25 bp, Homo sapien
aaatggatggaaacaaggtacataa

SEQ ID NO: 5562043 - DNA, 25 bp, Homo sapien
atggaaatatgtggtaaatggatgg

SEQ ID NO: 5562044 - DNA, 25 bp, Homo sapien
taaaactagtttccagaactgccca

SEQ ID NO: 5562045 - DNA, 25 bp, Homo sapien
tcattgggataccttcctctgagcc

SEQ ID NO: 5562046 - DNA, 25 bp, Homo sapien
gaaatatgtggtaaatggatggaaa

SEQ ID NO: 5562047 - DNA, 25 bp, Homo sapien
aattgatattcattgggataccttc

SEQ ID NO: 5562048 - DNA, 25 bp, Homo sapien
caaggtacataaacttaggaggcag

SEQ ID NO: 5562049 - DNA, 25 bp, Homo sapien
ttcaccagattggacaatttttaac

SEQ ID NO: 5562050 - DNA, 25 bp, Homo sapien
ttcctctgagccctaatggttttgg

SEQ ID NO: 5562051 - DNA, 25 bp, Homo sapien
ctttagggttagacattcaccagat

SEQ ID NO: 5562052 - DNA, 25 bp, Homo sapien
aacatgacttaaatgtcgttttgac

SEQ ID NO: 5562053 - DNA, 25 bp, Homo sapien
tatgagttggtgtactgcttgataa

SEQ ID NO: 5562054 - DNA, 25 bp, Homo sapien
aagggacaagaagcctattactttg

SEQ ID NO: 5562055 - DNA, 25 bp, Homo sapien
agattagaatatacatacaggtcac

SEQ ID NO: 5562056 - DNA, 25 bp, Homo sapien
attgcaccttcctgagttgaacttc

SEQ ID NO: 5562057 - DNA, 25 bp, Homo sapien
gcataggtagtgcgattaagaaact

SEQ ID NO: 5562058 - DNA, 25 bp, Homo sapien
ctacaggcatgttaaaaactactat

SEQ ID NO: 5562059 - DNA, 25 bp, Homo sapien
tacagaaaatctggaacggtagtac

SEQ ID NO: 5562060 - DNA, 25 bp, Homo sapien
ttgcagttagcaatactacaggcat

SEQ ID NO: 5562061 - DNA, 25 bp, Homo sapien
ccataacatgccagaaaaaaaaggg

SEQ ID NO: 5562062 - DNA, 25 bp, Homo sapien
tacacagtgttgcataggtagtgcg

SEQ ID NO: 5562063 - DNA, 25 bp, Homo sapien
ggatgataaacctaatacacagtgt

SEQ ID NO: 5562064 - DNA, 25 bp, Homo sapien
ccagcaatatatgcaggaacaatcc

SEQ ID NO: 5562065 - DNA, 25 bp, Homo sapien
tttggcagttacaaacctgtacact

SEQ ID NO: 5562066 - DNA, 25 bp, Homo sapien
catttccttaagggacaaaatccac

SEQ ID NO: 5562067 - DNA, 25 bp, Homo sapien
aatacttaataactgggcaaaacac

SEQ ID NO: 5562068 - DNA, 25 bp, Homo sapien
tctaagtgttagctttcccctttgc

SEQ ID NO: 5562069 - DNA, 25 bp, Homo sapien
aataactgggcaaaacacattcttt

SEQ ID NO: 5562070 - DNA, 25 bp, Homo sapien
gaaaaagaacacaagactgaatact

SEQ ID NO: 5562071 - DNA, 25 bp, Homo sapien
tgaggtgaatgtgcatgtatatgaa

SEQ ID NO: 5562072 - DNA, 25 bp, Homo sapien
gactgaatactgccaccagcaatat

SEQ ID NO: 5562073 - DNA, 25 bp, Homo sapien
taagggacaaaatccactctaagtg

SEQ ID NO: 5562074 - DNA, 25 bp, Homo sapien
gtgtgcaagttgaggtgaatgtgca

SEQ ID NO: 5562075 - DNA, 25 bp, Homo sapien
tctccccactccacgctaaggtcac

SEQ ID NO: 5562076 - DNA, 25 bp, Homo sapien
cccctgaagacagagcttctcttcc

SEQ ID NO: 5562077 - DNA, 25 bp, Homo sapien
agccagcacacccaactgccctctc

SEQ ID NO: 5562078 - DNA, 25 bp, Homo sapien
tccaagtttctggaaggtgggcttg

SEQ ID NO: 5562079 - DNA, 25 bp, Homo sapien
agcctctgctgctgtaaggcccctc

SEQ ID NO: 5562080 - DNA, 25 bp, Homo sapien
agacttattgctaaaagaagggaaa

SEQ ID NO: 5562081 - DNA, 25 bp, Homo sapien
agccattccagtaccggccaggaag

SEQ ID NO: 5562082 - DNA, 25 bp, Homo sapien
agctgccaggaacacatgcagaacc

SEQ ID NO: 5562083 - DNA, 25 bp, Homo sapien
catgtctgcataagttcccaacccc

SEQ ID NO: 5562084 - DNA, 25 bp, Homo sapien
gctaaggtcactaccccggacacac

SEQ ID NO: 5562085 - DNA, 25 bp, Homo sapien
cttagcatttcccagctggcccctg

SEQ ID NO: 5562086 - DNA, 25 bp, Homo sapien
cagaagattctgaaaagctagacac

SEQ ID NO: 5562087 - DNA, 25 bp, Homo sapien
tagacactattgagctggactgacg

SEQ ID NO: 5562088 - DNA, 25 bp, Homo sapien
gttgcagaaattaatcagcaccagt

SEQ ID NO: 5562089 - DNA, 25 bp, Homo sapien
aagttaaattaatgtcacctggttc

SEQ ID NO: 5562090 - DNA, 25 bp, Homo sapien
cagtgggccttttcctgaggtggta

SEQ ID NO: 5562091 - DNA, 25 bp, Homo sapien
tacaacactagatgtagtacattta

SEQ ID NO: 5562092 - DNA, 25 bp, Homo sapien
tctgaaaagctagacactattgagc

SEQ ID NO: 5562093 - DNA, 25 bp, Homo sapien
acgcccctggacacagtgggccttt

SEQ ID NO: 5562094 - DNA, 25 bp, Homo sapien
ttggaaggagatgaaatgattatca

SEQ ID NO: 5562095 - DNA, 25 bp, Homo sapien
cacttcttggaaggagatgaaatga

SEQ ID NO: 5562096 - DNA, 25 bp, Homo sapien
taaagaccaaacaatcagaagattc

SEQ ID NO: 5562097 - DNA, 25 bp, Homo sapien
ttcagctgtatcacgagacaaggta

SEQ ID NO: 5562098 - DNA, 25 bp, Homo sapien
aatgggttttgagtgatttaaagat

SEQ ID NO: 5562099 - DNA, 25 bp, Homo sapien
atcacgagacaaggtaaaaaaatgt

SEQ ID NO: 5562100 - DNA, 25 bp, Homo sapien
catagctgaaatgactcaagatttt

SEQ ID NO: 5562101 - DNA, 25 bp, Homo sapien
gagaaacaggctagccagagaatta

SEQ ID NO: 5562102 - DNA, 25 bp, Homo sapien
gatagattgatgagctcagaatatt

SEQ ID NO: 5562103 - DNA, 25 bp, Homo sapien
aaaaacagtatgcacagaacagagg

SEQ ID NO: 5562104 - DNA, 25 bp, Homo sapien
actgagtaaaggcatacaagtttaa

SEQ ID NO: 5562105 - DNA, 25 bp, Homo sapien
tgtgtttcttaggaacaaaggagaa

SEQ ID NO: 5562106 - DNA, 25 bp, Homo sapien
tacctaaagatagattgatgagctc

SEQ ID NO: 5562107 - DNA, 25 bp, Homo sapien
attggaactaactgagtaaaggcat

SEQ ID NO: 5562108 - DNA, 25 bp, Homo sapien
caggattgtgcagaagttgcctttc

SEQ ID NO: 5562109 - DNA, 25 bp, Homo sapien
tcttgggcaggtagtcttatatctt

SEQ ID NO: 5562110 - DNA, 25 bp, Homo sapien
atggcttgctggtgctgtgataaca

SEQ ID NO: 5562111 - DNA, 25 bp, Homo sapien
agtttgcttggatacaggattgtgc

SEQ ID NO: 5562112 - DNA, 25 bp, Homo sapien
aaagattaatagctgaaagataaat

SEQ ID NO: 5562113 - DNA, 25 bp, Homo sapien
tataaagattatggcttgctggtgc

SEQ ID NO: 5562114 - DNA, 25 bp, Homo sapien
tgagaacgtgagaccattgtgcaaa

SEQ ID NO: 5562115 - DNA, 25 bp, Homo sapien
ttgtgcaaaaagtagtgaggaatgc

SEQ ID NO: 5562116 - DNA, 25 bp, Homo sapien
aaagaaaatttgacgattaacatcc

SEQ ID NO: 5562117 - DNA, 25 bp, Homo sapien
aaaaagactgaattcttgggcaggt

SEQ ID NO: 5562118 - DNA, 25 bp, Homo sapien
aatagaactgataggtataaagatt

SEQ ID NO: 5562119 - DNA, 25 bp, Homo sapien
ttggtacttcccttgtaagatccca

SEQ ID NO: 5562120 - DNA, 25 bp, Homo sapien
cctgcaagcctttgacattagtgta

SEQ ID NO: 5562121 - DNA, 25 bp, Homo sapien
gggaactctgagacataattgatgt

SEQ ID NO: 5562122 - DNA, 25 bp, Homo sapien
cattagtgtattctgcaaagtattc

SEQ ID NO: 5562123 - DNA, 25 bp, Homo sapien
tcctacacattaatcctgcaagcct

SEQ ID NO: 5562124 - DNA, 25 bp, Homo sapien
tctaagcaagctgttttgtcactat

SEQ ID NO: 5562125 - DNA, 25 bp, Homo sapien
tcaaaggtatgaccaaaatgaataa

SEQ ID NO: 5562126 - DNA, 25 bp, Homo sapien
tggcatctgccaacattcaaaacaa

SEQ ID NO: 5562127 - DNA, 25 bp, Homo sapien
aaagtttaagggaactctgagacat

SEQ ID NO: 5562128 - DNA, 25 bp, Homo sapien
tcaaatgttaagggctattggcatc

SEQ ID NO: 5562129 - DNA, 25 bp, Homo sapien
atgtaaggacattgaaataaaagcc

SEQ ID NO: 5562130 - DNA, 25 bp, Homo sapien
cagagctcggacgacccgagagtct

SEQ ID NO: 5562131 - DNA, 25 bp, Homo sapien
agactctcgggtcgtccgagctctg

SEQ ID NO: 5562132 - DNA, 25 bp, Homo sapien
aacttcgtgtaaacttctaagcacc

SEQ ID NO: 5562133 - DNA, 25 bp, Homo sapien
ggtgcttagaagtttacacgaagtt

SEQ ID NO: 5562134 - DNA, 25 bp, Homo sapien
atttgcatgaagaggacaaacaact

SEQ ID NO: 5562135 - DNA, 25 bp, Homo sapien
cacatcacatcccagggtgcacacc

SEQ ID NO: 5562136 - DNA, 25 bp, Homo sapien
ctttttcaatagggaggatactggg

SEQ ID NO: 5562137 - DNA, 25 bp, Homo sapien
gggtgcacaccagtaaatgatcaga

SEQ ID NO: 5562138 - DNA, 25 bp, Homo sapien
tgaggatgcttgtaatgtggtgcac

SEQ ID NO: 5562139 - DNA, 25 bp, Homo sapien
accactgtcgtcatgaaggaagcta

SEQ ID NO: 5562140 - DNA, 25 bp, Homo sapien
gattaccagagcacagctgagatac

SEQ ID NO: 5562141 - DNA, 25 bp, Homo sapien
acaactggaaataccaccagggggc

SEQ ID NO: 5562142 - DNA, 25 bp, Homo sapien
gaggagcagaattgcaaccactgtc

SEQ ID NO: 5562143 - DNA, 25 bp, Homo sapien
atgatcagattctggacatggggag

SEQ ID NO: 5562144 - DNA, 25 bp, Homo sapien
gctgagatactgttgggtcctgtct

SEQ ID NO: 5562145 - DNA, 25 bp, Homo sapien
cactagcccattatgagacaagttg

SEQ ID NO: 5562146 - DNA, 25 bp, Homo sapien
agtacgtaagaacacgattgcactt

SEQ ID NO: 5562147 - DNA, 25 bp, Homo sapien
ttcctggaattcacaaccctcattt

SEQ ID NO: 5562148 - DNA, 25 bp, Homo sapien
gtatttcaagagggatataaagtgc

SEQ ID NO: 5562149 - DNA, 25 bp, Homo sapien
tttgcagtgaaatttcctggaattc

SEQ ID NO: 5562150 - DNA, 25 bp, Homo sapien
atgagacaagttgattacgctctcc

SEQ ID NO: 5562151 - DNA, 25 bp, Homo sapien
gtacaaagagaatagaataaagcaa

SEQ ID NO: 5562152 - DNA, 25 bp, Homo sapien
tttagccagtacgtaagaacacgat

SEQ ID NO: 5562153 - DNA, 25 bp, Homo sapien
ctcctaatagaagacaaattccttt

SEQ ID NO: 5562154 - DNA, 25 bp, Homo sapien
ataaagtgctttgaaaggagtaggg

SEQ ID NO: 5562155 - DNA, 25 bp, Homo sapien
ataaccatgttgtaatgactgtttc

SEQ ID NO: 5562156 - DNA, 25 bp, Homo sapien
ttttttcttggggtgagctcttgtc

SEQ ID NO: 5562157 - DNA, 25 bp, Homo sapien
gtacagggtgtgatcagcatctttt

SEQ ID NO: 5562158 - DNA, 25 bp, Homo sapien
tcagaaacatcaggacacagttttc

SEQ ID NO: 5562159 - DNA, 25 bp, Homo sapien
caggatgttctacgtacgggcagtt

SEQ ID NO: 5562160 - DNA, 25 bp, Homo sapien
agttgtgggtcagagtagctttctg

SEQ ID NO: 5562161 - DNA, 25 bp, Homo sapien
aactccacagctggagaggcctttc

SEQ ID NO: 5562162 - DNA, 25 bp, Homo sapien
tggtcggtctgtgtagtccttgctc

SEQ ID NO: 5562163 - DNA, 25 bp, Homo sapien
gtactttctgggattggccacctct

SEQ ID NO: 5562164 - DNA, 25 bp, Homo sapien
taccccaagtgttcctgctctgttc

SEQ ID NO: 5562165 - DNA, 25 bp, Homo sapien
tcatctgcctggaggaatgtttttc

SEQ ID NO: 5562166 - DNA, 25 bp, Homo sapien
cattatctgtgggaggttatctggt

SEQ ID NO: 5562167 - DNA, 25 bp, Homo sapien
cccaaaccagaagtaaccagaagtg

SEQ ID NO: 5562168 - DNA, 25 bp, Homo sapien
taagagatatttaaagcaagtttag

SEQ ID NO: 5562169 - DNA, 25 bp, Homo sapien
aagagaaagctacacaggaaataat

SEQ ID NO: 5562170 - DNA, 25 bp, Homo sapien
aactgtaaaccttcatgtggcaaat

SEQ ID NO: 5562171 - DNA, 25 bp, Homo sapien
tggatgatatccagtggaatttggg

SEQ ID NO: 5562172 - DNA, 25 bp, Homo sapien
aaatgcagaaggtaagacaatattg

SEQ ID NO: 5562173 - DNA, 25 bp, Homo sapien
ggactactgtaaagaacttaacata

SEQ ID NO: 5562174 - DNA, 25 bp, Homo sapien
tatggctaaacaatgaccaaaaacc

SEQ ID NO: 5562175 - DNA, 25 bp, Homo sapien
ggcataagagaaagctacacaggaa

SEQ ID NO: 5562176 - DNA, 25 bp, Homo sapien
caggtaataaaggaggatccaaaac

SEQ ID NO: 5562177 - DNA, 25 bp, Homo sapien
gaagtaaccagaagtggatgatatc

SEQ ID NO: 5562178 - DNA, 25 bp, Homo sapien
aggaaatacataggagctaaggatt

SEQ ID NO: 5562179 - DNA, 25 bp, Homo sapien
cattgttactgtaaagggtgtggag

SEQ ID NO: 5562180 - DNA, 25 bp, Homo sapien
gcagaccccctgattagccttgaat

SEQ ID NO: 5562181 - DNA, 25 bp, Homo sapien
ttccaggttaggatgaaggttacta

SEQ ID NO: 5562182 - DNA, 25 bp, Homo sapien
aatctggcctgacaaaaacaatgaa

SEQ ID NO: 5562183 - DNA, 25 bp, Homo sapien
aaagggaggacattatagatgttga

SEQ ID NO: 5562184 - DNA, 25 bp, Homo sapien
aagtggtagataaacaactcttagc

SEQ ID NO: 5562185 - DNA, 25 bp, Homo sapien
aaggttactagcattgcagaccccc

SEQ ID NO: 5562186 - DNA, 25 bp, Homo sapien
aaacaatgaaacttggtgctctacc

SEQ ID NO: 5562187 - DNA, 25 bp, Homo sapien
gaagcaaacctgacatgatacgcca

SEQ ID NO: 5562188 - DNA, 25 bp, Homo sapien
ctgacatgatacgccactgaaaggg

SEQ ID NO: 5562189 - DNA, 25 bp, Homo sapien
aggaaggtggctgttacagcaaaca

SEQ ID NO: 5562190 - DNA, 25 bp, Homo sapien
cggtgatcccctccagaggcaagct

SEQ ID NO: 5562191 - DNA, 25 bp, Homo sapien
atgtgcccagggcttagtgtccatc

SEQ ID NO: 5562192 - DNA, 25 bp, Homo sapien
gagaaacaactgatgaaaaatacac

SEQ ID NO: 5562193 - DNA, 25 bp, Homo sapien
acagaagcagaagtacgatgacttt

SEQ ID NO: 5562194 - DNA, 25 bp, Homo sapien
aagtagcaggaacaccatcagtgaa

SEQ ID NO: 5562195 - DNA, 25 bp, Homo sapien
ctattgtgttatgatgtcagggtgg

SEQ ID NO: 5562196 - DNA, 25 bp, Homo sapien
aaattcaaggatgttggaagtagac

SEQ ID NO: 5562197 - DNA, 25 bp, Homo sapien
tttcagatagacgaatcggccaagc

SEQ ID NO: 5562198 - DNA, 25 bp, Homo sapien
acaaccatgaaaacataggaaggtg

SEQ ID NO: 5562199 - DNA, 25 bp, Homo sapien
ggaagtagacatttaaagtagcagg

SEQ ID NO: 5562200 - DNA, 25 bp, Homo sapien
ggactgcagtttgaggacagtgtct

SEQ ID NO: 5562201 - DNA, 25 bp, Homo sapien
agccgtcacatggcagcaaaacggg

SEQ ID NO: 5562202 - DNA, 25 bp, Homo sapien
agttccccgcgctcgccactagagg

SEQ ID NO: 5562203 - DNA, 25 bp, Homo sapien
tctgcagccgtcacatggcagcaaa

SEQ ID NO: 5562204 - DNA, 25 bp, Homo sapien
gcagttccccgcgctcgccactaga

SEQ ID NO: 5562205 - DNA, 25 bp, Homo sapien
cttgtctgtgggactgcagtttgag

SEQ ID NO: 5562206 - DNA, 25 bp, Homo sapien
cttcgggtaggtcagaccaaaatac

SEQ ID NO: 5562207 - DNA, 25 bp, Homo sapien
ggaggttcactcggtttgcgaagga

SEQ ID NO: 5562208 - DNA, 25 bp, Homo sapien
ttcactcggtttgcgaaggaacaac

SEQ ID NO: 5562209 - DNA, 25 bp, Homo sapien
atacaaaacttgtctgtgggactgc

SEQ ID NO: 5562210 - DNA, 25 bp, Homo sapien
ggacagtgtctgcagccgtcacatg

SEQ ID NO: 5562211 - DNA, 25 bp, Homo sapien
tggaatgtccaggtcaattgtgatg

SEQ ID NO: 5562212 - DNA, 25 bp, Homo sapien
ttatgaaatcaacacctgccagttc

SEQ ID NO: 5562213 - DNA, 25 bp, Homo sapien
ccaaagtcaagtctgaagcaagcga

SEQ ID NO: 5562214 - DNA, 25 bp, Homo sapien
aagtacaatctcaacccctccccgc

SEQ ID NO: 5562215 - DNA, 25 bp, Homo sapien
aagcaagcgaaattagaaagtacaa

SEQ ID NO: 5562216 - DNA, 25 bp, Homo sapien
gcaaggtttgcagaacaattttgtc

SEQ ID NO: 5562217 - DNA, 25 bp, Homo sapien
accccataattggtgcaaggtttgc

SEQ ID NO: 5562218 - DNA, 25 bp, Homo sapien
cacacagatcatttggtgaagtttt

SEQ ID NO: 5562219 - DNA, 25 bp, Homo sapien
ccaaatgagctgactggactacgga

SEQ ID NO: 5562220 - DNA, 25 bp, Homo sapien
aaagcgcatctaccaaatgagctga

SEQ ID NO: 5562221 - DNA, 25 bp, Homo sapien
gtcaattgtgatgccttcgaacttc

SEQ ID NO: 5562222 - DNA, 25 bp, Homo sapien
ttctaatcagataatcgggtgcatc

SEQ ID NO: 5562223 - DNA, 25 bp, Homo sapien
aatatgctggaaaatttaagtgttt

SEQ ID NO: 5562224 - DNA, 25 bp, Homo sapien
gtacaaagagcaatgctgcctggga

SEQ ID NO: 5562225 - DNA, 25 bp, Homo sapien
cagcgaggctgtattttgtaggaaa

SEQ ID NO: 5562226 - DNA, 25 bp, Homo sapien
tctggttaccagtctaatgcataaa

SEQ ID NO: 5562227 - DNA, 25 bp, Homo sapien
ggaaagttccagtgaacgatgtaac

SEQ ID NO: 5562228 - DNA, 25 bp, Homo sapien
cctgtctcatgtacaaagagcaatg

SEQ ID NO: 5562229 - DNA, 25 bp, Homo sapien
acacgcaaagggacccgtgtgttga

SEQ ID NO: 5562230 - DNA, 25 bp, Homo sapien
ggcaccactctgatgatgctcttcc

SEQ ID NO: 5562231 - DNA, 25 bp, Homo sapien
ataatcgggtgcatctgttctgtta

SEQ ID NO: 5562232 - DNA, 25 bp, Homo sapien
tgcataaaagacagtggtatcctgt

SEQ ID NO: 5562233 - DNA, 25 bp, Homo sapien
aaatacttgggaatgaactgatgaa

SEQ ID NO: 5562234 - DNA, 25 bp, Homo sapien
gggctccaggctaaatgcaagtatc

SEQ ID NO: 5562235 - DNA, 25 bp, Homo sapien
ttgagcagtagtactccagagatgt

SEQ ID NO: 5562236 - DNA, 25 bp, Homo sapien
agttgggtaaatgtctgagaatgtt

SEQ ID NO: 5562237 - DNA, 25 bp, Homo sapien
actttgggtcttcgggttagcacga

SEQ ID NO: 5562238 - DNA, 25 bp, Homo sapien
gaagagccaaggtatactcctgata

SEQ ID NO: 5562239 - DNA, 25 bp, Homo sapien
ccagccagaatacaaatggaactcc

SEQ ID NO: 5562240 - DNA, 25 bp, Homo sapien
attctaaagcataatgaggaagggg

SEQ ID NO: 5562241 - DNA, 25 bp, Homo sapien
gttagcacgacttgccagttgggta

SEQ ID NO: 5562242 - DNA, 25 bp, Homo sapien
cactgggaatcaccctcccccgctc

SEQ ID NO: 5562243 - DNA, 25 bp, Homo sapien
cctgaagcttccccacaaggtgcgg

SEQ ID NO: 5562244 - DNA, 25 bp, Homo sapien
acctatgacctcgtgtcctccaccc

SEQ ID NO: 5562245 - DNA, 25 bp, Homo sapien
cttctcaccagatgacaggcttctt

SEQ ID NO: 5562246 - DNA, 25 bp, Homo sapien
ctggccttctcaccagatgacaggc

SEQ ID NO: 5562247 - DNA, 25 bp, Homo sapien
caggcttcttgtcacactgggggac

SEQ ID NO: 5562248 - DNA, 25 bp, Homo sapien
gcagcacgaccgcccattgtcagat

SEQ ID NO: 5562249 - DNA, 25 bp, Homo sapien
atgacctcgtgtcctccacccgcct

SEQ ID NO: 5562250 - DNA, 25 bp, Homo sapien
cattgtcagatccgcgtctgggacg

SEQ ID NO: 5562251 - DNA, 25 bp, Homo sapien
ggcttcttgtcacactgggggacca

SEQ ID NO: 5562252 - DNA, 25 bp, Homo sapien
tcccccatagcaccaccgtgctggc

SEQ ID NO: 5562253 - DNA, 25 bp, Homo sapien
tccggccactctgcggagatctcca

SEQ ID NO: 5562254 - DNA, 25 bp, Homo sapien
gaccgcccattgtcagatccgcgtc

SEQ ID NO: 5562255 - DNA, 25 bp, Homo sapien
tgctggcccattaggatccacagga

SEQ ID NO: 5562256 - DNA, 25 bp, Homo sapien
ggaacggacagagttcatgctctac

SEQ ID NO: 5562257 - DNA, 25 bp, Homo sapien
ctgcagtcttttgcccgaagctatc

SEQ ID NO: 5562258 - DNA, 25 bp, Homo sapien
aaccaccctgaaaacctggacactc

SEQ ID NO: 5562259 - DNA, 25 bp, Homo sapien
cctgaatgagtgtgcaatgtagata

SEQ ID NO: 5562260 - DNA, 25 bp, Homo sapien
tgtggtcatggttctcatcctgcat

SEQ ID NO: 5562261 - DNA, 25 bp, Homo sapien
gtgaatattctgcgcctctccctgc

SEQ ID NO: 5562262 - DNA, 25 bp, Homo sapien
ctgtgtaacagcctttggagggcgt

SEQ ID NO: 5562263 - DNA, 25 bp, Homo sapien
acatctgaaagtggcgttgacttcc

SEQ ID NO: 5562264 - DNA, 25 bp, Homo sapien
tgactaacaggtctatgctggccca

SEQ ID NO: 5562265 - DNA, 25 bp, Homo sapien
tttcaaggcttacagggtatatttc

SEQ ID NO: 5562266 - DNA, 25 bp, Homo sapien
acaatcccagcgccctcctcacagg

SEQ ID NO: 5562267 - DNA, 25 bp, Homo sapien
ggaagacgttgagaattgaccttac

SEQ ID NO: 5562268 - DNA, 25 bp, Homo sapien
tcctcacaggagcctttcactttac

SEQ ID NO: 5562269 - DNA, 25 bp, Homo sapien
cactctatggatctggacctctgga

SEQ ID NO: 5562270 - DNA, 25 bp, Homo sapien
tctccctgggcactgccttcaggaa

SEQ ID NO: 5562271 - DNA, 25 bp, Homo sapien
aactcctcagaacctccactctatg

SEQ ID NO: 5562272 - DNA, 25 bp, Homo sapien
ctggacctctggattcggctttctc

SEQ ID NO: 5562273 - DNA, 25 bp, Homo sapien
tgccttcaggaagacgttgagaatt

SEQ ID NO: 5562274 - DNA, 25 bp, Homo sapien
gaccttacacaatcccagcgccctc

SEQ ID NO: 5562275 - DNA, 25 bp, Homo sapien
gattcggctttctccctgggcactg

SEQ ID NO: 5562276 - DNA, 25 bp, Homo sapien
ttcactttacagtggcaaggggctg

SEQ ID NO: 5562277 - DNA, 25 bp, Homo sapien
acacttgcagatggttttcttcgaa

SEQ ID NO: 5562278 - DNA, 25 bp, Homo sapien
ttcgaagaaaaccatctgcaagtgt

SEQ ID NO: 5562279 - DNA, 25 bp, Homo sapien
cttaggtaacccagtaggaatgtct

SEQ ID NO: 5562280 - DNA, 25 bp, Homo sapien
gagaccgtcttccgggccacttcgc

SEQ ID NO: 5562281 - DNA, 25 bp, Homo sapien
tgtctgggacacacctacaccctat

SEQ ID NO: 5562282 - DNA, 25 bp, Homo sapien
ctgggtttcgggtccagtccacacg

SEQ ID NO: 5562283 - DNA, 25 bp, Homo sapien
gtgctttcacccacggggctcagcg

SEQ ID NO: 5562284 - DNA, 25 bp, Homo sapien
acaccctatttgggcgtccagtgcc

SEQ ID NO: 5562285 - DNA, 25 bp, Homo sapien
ctgtctacaaggcgtgtgctttcac

SEQ ID NO: 5562286 - DNA, 25 bp, Homo sapien
tccttgaaccgagccagggctttga

SEQ ID NO: 5562287 - DNA, 25 bp, Homo sapien
tgtctgagtttgaccttgggagagg

SEQ ID NO: 5562288 - DNA, 25 bp, Homo sapien
gctgtttgccacccagacggagaag

SEQ ID NO: 5562289 - DNA, 25 bp, Homo sapien
aggtttctggagtggactttctggg

SEQ ID NO: 5562290 - DNA, 25 bp, Homo sapien
ttgggcttctaaatctgtctgggtg

SEQ ID NO: 5562291 - DNA, 25 bp, Homo sapien
ggtgctttggtgtcaccctgaggga

SEQ ID NO: 5562292 - DNA, 25 bp, Homo sapien
accctgagggataatctaatgtgat

SEQ ID NO: 5562293 - DNA, 25 bp, Homo sapien
tccaatcaataagagaaggctaagg

SEQ ID NO: 5562294 - DNA, 25 bp, Homo sapien
atgtgatgagatgaacccagctcca

SEQ ID NO: 5562295 - DNA, 25 bp, Homo sapien
tcaggttccagggtttacatttgac

SEQ ID NO: 5562296 - DNA, 25 bp, Homo sapien
aggctaaggaaagagtccttcccta

SEQ ID NO: 5562297 - DNA, 25 bp, Homo sapien
cagctccattccataggcaggcagg

SEQ ID NO: 5562298 - DNA, 25 bp, Homo sapien
catttcttgggactcaggttccagg

SEQ ID NO: 5562299 - DNA, 25 bp, Homo sapien
gaatgaggagcatgtcagtccctct

SEQ ID NO: 5562300 - DNA, 25 bp, Homo sapien
ccctatgtagactgtggtttacccc

SEQ ID NO: 5562301 - DNA, 25 bp, Homo sapien
atggaagctcggactagtgatccgt

SEQ ID NO: 5562302 - DNA, 25 bp, Homo sapien
tggcccgtcagccgtcgtctttggc

SEQ ID NO: 5562303 - DNA, 25 bp, Homo sapien
ttctgtgaagaagacgaccagataa

SEQ ID NO: 5562304 - DNA, 25 bp, Homo sapien
ccgtcgtctttggcctgagtgtgca

SEQ ID NO: 5562305 - DNA, 25 bp, Homo sapien
acgtctgacgtgtgatctcgagaga

SEQ ID NO: 5562306 - DNA, 25 bp, Homo sapien
gatctcgagagacctgcgtacattc

SEQ ID NO: 5562307 - DNA, 25 bp, Homo sapien
aggcagtgggtctctctgccccggt

SEQ ID NO: 5562308 - DNA, 25 bp, Homo sapien
ccaggatgccatctctgctagagtc

SEQ ID NO: 5562309 - DNA, 25 bp, Homo sapien
tcctttccctgaccggctgtgagac

SEQ ID NO: 5562310 - DNA, 25 bp, Homo sapien
cgggtgccaggtgaattcctttccc

SEQ ID NO: 5562311 - DNA, 25 bp, Homo sapien
gaatgagaagactttgggacatttc

SEQ ID NO: 5562312 - DNA, 25 bp, Homo sapien
cagaccttgttgagcagcccgaagg

SEQ ID NO: 5562313 - DNA, 25 bp, Homo sapien
ggcttgcttctgcaccaccggcccg

SEQ ID NO: 5562314 - DNA, 25 bp, Homo sapien
ctcgctcaggtactcccggaagatg

SEQ ID NO: 5562315 - DNA, 25 bp, Homo sapien
ctgatgagcgacgacttgctgtaga

SEQ ID NO: 5562316 - DNA, 25 bp, Homo sapien
gtacatgcacgtctcgaaccagacc

SEQ ID NO: 5562317 - DNA, 25 bp, Homo sapien
gcggcacagcgcccccttgtccatg

SEQ ID NO: 5562318 - DNA, 25 bp, Homo sapien
gtagagctggccgcttttggagcgg

SEQ ID NO: 5562319 - DNA, 25 bp, Homo sapien
ccgggctctgcgccttctcgctcag

SEQ ID NO: 5562320 - DNA, 25 bp, Homo sapien
cgcgtgatggcttgcttctgcacca

SEQ ID NO: 5562321 - DNA, 25 bp, Homo sapien
ccttgtccatggtctcgaagtccgg

SEQ ID NO: 5562322 - DNA, 25 bp, Homo sapien
cggcgccctgctcctcgagcttgcg

SEQ ID NO: 5562323 - DNA, 25 bp, Homo sapien
ccaccccccaatacaatacatttaa

SEQ ID NO: 5562324 - DNA, 25 bp, Homo sapien
tccatgatcaggccacctgaagacc

SEQ ID NO: 5562325 - DNA, 25 bp, Homo sapien
gtctaagcctctcccacaggggttc

SEQ ID NO: 5562326 - DNA, 25 bp, Homo sapien
atcaggccacctgaagaccatgagc

SEQ ID NO: 5562327 - DNA, 25 bp, Homo sapien
gcctctcccacaggggttcctggtc

SEQ ID NO: 5562328 - DNA, 25 bp, Homo sapien
cttaacataacatagagtgggccct

SEQ ID NO: 5562329 - DNA, 25 bp, Homo sapien
gagtcagggttcactcccagaaggt

SEQ ID NO: 5562330 - DNA, 25 bp, Homo sapien
ttcaggtctaagcctctcccacagg

SEQ ID NO: 5562331 - DNA, 25 bp, Homo sapien
agatgtagatcccatggcccagtga

SEQ ID NO: 5562332 - DNA, 25 bp, Homo sapien
tcccagaaggtaatgcctaactcct

SEQ ID NO: 5562333 - DNA, 25 bp, Homo sapien
gtagatcccatggcccagtgaaatg

SEQ ID NO: 5562334 - DNA, 25 bp, Homo sapien
agagtaatgaaatttcattggaaac

SEQ ID NO: 5562335 - DNA, 25 bp, Homo sapien
tcatggctccccttaactttcaacc

SEQ ID NO: 5562336 - DNA, 25 bp, Homo sapien
taattttgtggaatgtaagacatgt

SEQ ID NO: 5562337 - DNA, 25 bp, Homo sapien
caaagggataaattctgggtcttac

SEQ ID NO: 5562338 - DNA, 25 bp, Homo sapien
tgcaaaaacaacacctcaaccttta

SEQ ID NO: 5562339 - DNA, 25 bp, Homo sapien
ccatgcccagcatttctaaataatt

SEQ ID NO: 5562340 - DNA, 25 bp, Homo sapien
aattttgtactcccagcagagacgg

SEQ ID NO: 5562341 - DNA, 25 bp, Homo sapien
tccaggcaattctcccgccacagcc

SEQ ID NO: 5562342 - DNA, 25 bp, Homo sapien
taaataattttgtggaatgtaagac

SEQ ID NO: 5562343 - DNA, 25 bp, Homo sapien
agacgggacctctccatattggtca

SEQ ID NO: 5562344 - DNA, 25 bp, Homo sapien
tttgtactcccagcagagacgggac

SEQ ID NO: 5562345 - DNA, 25 bp, Homo sapien
gactagagtgtgagacaaatctgag

SEQ ID NO: 5562346 - DNA, 25 bp, Homo sapien
gggacaggcacaagcctggaaatca

SEQ ID NO: 5562347 - DNA, 25 bp, Homo sapien
atccaccctgtccactgaaagtaaa

SEQ ID NO: 5562348 - DNA, 25 bp, Homo sapien
tctgcaactgccacccccctctagc

SEQ ID NO: 5562349 - DNA, 25 bp, Homo sapien
ctgaaatcacataaggtttagatga

SEQ ID NO: 5562350 - DNA, 25 bp, Homo sapien
ctagctacagcttgtcagaaccact

SEQ ID NO: 5562351 - DNA, 25 bp, Homo sapien
tggaaatcaccagactagagtgtga

SEQ ID NO: 5562352 - DNA, 25 bp, Homo sapien
gagacaaatctgaggaaaacactga

SEQ ID NO: 5562353 - DNA, 25 bp, Homo sapien
gacggagaaactgccccttctgcaa

SEQ ID NO: 5562354 - DNA, 25 bp, Homo sapien
ttacatcttaggtcattaacgaacc

SEQ ID NO: 5562355 - DNA, 25 bp, Homo sapien
tgtcagaaccactggagggctttta

SEQ ID NO: 5562356 - DNA, 25 bp, Homo sapien
accagttcttactttcgaaggatct

SEQ ID NO: 5562357 - DNA, 25 bp, Homo sapien
agatccttcgaaagtaagaactggt

SEQ ID NO: 5562358 - DNA, 25 bp, Homo sapien
tgtccactgagccatcaaattaggc

SEQ ID NO: 5562359 - DNA, 25 bp, Homo sapien
cttactgttacgctgggcatggtgg

SEQ ID NO: 5562360 - DNA, 25 bp, Homo sapien
gctggaggcctaggttctagctttg

SEQ ID NO: 5562361 - DNA, 25 bp, Homo sapien
gggaatgtcatgatgtcaccaaggc

SEQ ID NO: 5562362 - DNA, 25 bp, Homo sapien
attaaccaaactcaggggaatgtca

SEQ ID NO: 5562363 - DNA, 25 bp, Homo sapien
agaagtgggaagcctcttagataaa

SEQ ID NO: 5562364 - DNA, 25 bp, Homo sapien
gtttggcgtgagctatcaaattagc

SEQ ID NO: 5562365 - DNA, 25 bp, Homo sapien
atcaaattaggctttggctgctgga

SEQ ID NO: 5562366 - DNA, 25 bp, Homo sapien
ctgtaaagtcagtgaacttagcctt

SEQ ID NO: 5562367 - DNA, 25 bp, Homo sapien
ctttggtcacctatcagaatcttac

SEQ ID NO: 5562368 - DNA, 25 bp, Homo sapien
agaaataaaaaccagccatccataa

SEQ ID NO: 5562369 - DNA, 25 bp, Homo sapien
gagggtctcaggcgaccttcttgga

SEQ ID NO: 5562370 - DNA, 25 bp, Homo sapien
aaagatgaatagagaaatgaactga

SEQ ID NO: 5562371 - DNA, 25 bp, Homo sapien
atgtgagacctgaatcctaacctgg

SEQ ID NO: 5562372 - DNA, 25 bp, Homo sapien
tcttggaaggtgtgaccacttgaaa

SEQ ID NO: 5562373 - DNA, 25 bp, Homo sapien
ctttgacgagcacctgcccctcagg

SEQ ID NO: 5562374 - DNA, 25 bp, Homo sapien
cctaacctggacgcattgttcccct

SEQ ID NO: 5562375 - DNA, 25 bp, Homo sapien
gtctgggtggcagcccattcttctt

SEQ ID NO: 5562376 - DNA, 25 bp, Homo sapien
atctatgaattagcggtctgggtgg

SEQ ID NO: 5562377 - DNA, 25 bp, Homo sapien
aagagaccctacctagacgtgggcc

SEQ ID NO: 5562378 - DNA, 25 bp, Homo sapien
caaaagagggtttaatctgtgcttc

SEQ ID NO: 5562379 - DNA, 25 bp, Homo sapien
ggcccagaacaccgtgaaactatgc

SEQ ID NO: 5562380 - DNA, 25 bp, Homo sapien
cgggtgtccgagtcgcggggaagga

SEQ ID NO: 5562381 - DNA, 25 bp, Homo sapien
tccttccccgcgactcggacacccg

SEQ ID NO: 5562382 - DNA, 25 bp, Homo sapien
ggagaatgcctagaaatgtttgaga

SEQ ID NO: 5562383 - DNA, 25 bp, Homo sapien
atattgtaagattgggagttttttg

SEQ ID NO: 5562384 - DNA, 25 bp, Homo sapien
ctgtaggtctgataaatattgtaag

SEQ ID NO: 5562385 - DNA, 25 bp, Homo sapien
tgtaattcagtagaacaggaaggga

SEQ ID NO: 5562386 - DNA, 25 bp, Homo sapien
caccactggatgactttgaaagaaa

SEQ ID NO: 5562387 - DNA, 25 bp, Homo sapien
agaacagaccacatgaacccatctc

SEQ ID NO: 5562388 - DNA, 25 bp, Homo sapien
tgtttgagacattgattaagtcatc

SEQ ID NO: 5562389 - DNA, 25 bp, Homo sapien
tagatacaatagtagaacagaccac

SEQ ID NO: 5562390 - DNA, 25 bp, Homo sapien
gaaaataatacactgtaggtctgat

SEQ ID NO: 5562391 - DNA, 25 bp, Homo sapien
aagtcatcagaaatggaaacaagtt

SEQ ID NO: 5562392 - DNA, 25 bp, Homo sapien
cttgcaaggttgtaattcagtagaa

SEQ ID NO: 5562393 - DNA, 25 bp, Homo sapien
agaaaaccactcaagtagggccatc

SEQ ID NO: 5562394 - DNA, 25 bp, Homo sapien
tcacacctatgaaagagggcaacac

SEQ ID NO: 5562395 - DNA, 25 bp, Homo sapien
ttctcatgtggcatcaggctttttc

SEQ ID NO: 5562396 - DNA, 25 bp, Homo sapien
gctcttgatccctgagtggagaccc

SEQ ID NO: 5562397 - DNA, 25 bp, Homo sapien
ctctcacgtgacaggacgccctgaa

SEQ ID NO: 5562398 - DNA, 25 bp, Homo sapien
gccagtcaaaaggatcacccttccc

SEQ ID NO: 5562399 - DNA, 25 bp, Homo sapien
ttctgtcttgagtaagggctgtctt

SEQ ID NO: 5562400 - DNA, 25 bp, Homo sapien
cacaactagtgcctccccattcctc

SEQ ID NO: 5562401 - DNA, 25 bp, Homo sapien
ggcaacaatgctaaatgaaactggc

SEQ ID NO: 5562402 - DNA, 25 bp, Homo sapien
gtggggcttccctaccagctccaac

SEQ ID NO: 5562403 - DNA, 25 bp, Homo sapien
tgaaatccccgctaggcaacaatgc

SEQ ID NO: 5562404 - DNA, 25 bp, Homo sapien
ataacagaggtcaagaaagtacata

SEQ ID NO: 5562405 - DNA, 25 bp, Homo sapien
ctaagacttcctgttgttggctggt

SEQ ID NO: 5562406 - DNA, 25 bp, Homo sapien
ttggggccaaaactcagtatgctga

SEQ ID NO: 5562407 - DNA, 25 bp, Homo sapien
gccccaagcctaaaattaatctgat

SEQ ID NO: 5562408 - DNA, 25 bp, Homo sapien
tttccttgctagagatagagacagt

SEQ ID NO: 5562409 - DNA, 25 bp, Homo sapien
tggagaaatataacagaggtcaaga

SEQ ID NO: 5562410 - DNA, 25 bp, Homo sapien
ccaatcactaaaactgccccaagcc

SEQ ID NO: 5562411 - DNA, 25 bp, Homo sapien
attttccccaggcactttggggcca

SEQ ID NO: 5562412 - DNA, 25 bp, Homo sapien
tgggacaggagtctaagacttcctg

SEQ ID NO: 5562413 - DNA, 25 bp, Homo sapien
acagatacctaaaactcaaaagtcc

SEQ ID NO: 5562414 - DNA, 25 bp, Homo sapien
atgctgagactcagaaattgctctc

SEQ ID NO: 5562415 - DNA, 25 bp, Homo sapien
tataccagaagtgtttctgcagaaa

SEQ ID NO: 5562416 - DNA, 25 bp, Homo sapien
taaaacaccttgtgcataatgcaga

SEQ ID NO: 5562417 - DNA, 25 bp, Homo sapien
ctttcattcacactgctccctacgc

SEQ ID NO: 5562418 - DNA, 25 bp, Homo sapien
tcatagttttcatggagaagagtgg

SEQ ID NO: 5562419 - DNA, 25 bp, Homo sapien
ctccctacgcatgagaaagaccaga

SEQ ID NO: 5562420 - DNA, 25 bp, Homo sapien
agagaaaggtatgaatagatgacat

SEQ ID NO: 5562421 - DNA, 25 bp, Homo sapien
agaccagatgtctggtttccagagt

SEQ ID NO: 5562422 - DNA, 25 bp, Homo sapien
tggagtacaatggagcatatggaaa

SEQ ID NO: 5562423 - DNA, 25 bp, Homo sapien
ctggtttccagagtattaagctttt

SEQ ID NO: 5562424 - DNA, 25 bp, Homo sapien
gtacaatggagcatatggaaagaac

SEQ ID NO: 5562425 - DNA, 25 bp, Homo sapien
gaaaaactgtagcttcttctgatct

SEQ ID NO: 5562426 - DNA, 25 bp, Homo sapien
gagacatccgtttagcgatacagct

SEQ ID NO: 5562427 - DNA, 25 bp, Homo sapien
ctgtatttgtgcaggctatgccatc

SEQ ID NO: 5562428 - DNA, 25 bp, Homo sapien
taggagggcacaactccagctctga

SEQ ID NO: 5562429 - DNA, 25 bp, Homo sapien
gcacccggcttcacaagcacccagg

SEQ ID NO: 5562430 - DNA, 25 bp, Homo sapien
ccttgtttgaaagcagtggataggc

SEQ ID NO: 5562431 - DNA, 25 bp, Homo sapien
gacattgggcaccaaggtggtaatc

SEQ ID NO: 5562432 - DNA, 25 bp, Homo sapien
cattttactgcaagagagaatgagg

SEQ ID NO: 5562433 - DNA, 25 bp, Homo sapien
gtgcaggctatgccatctgggctca

SEQ ID NO: 5562434 - DNA, 25 bp, Homo sapien
ggccctctggcacccggcttcacaa

SEQ ID NO: 5562435 - DNA, 25 bp, Homo sapien
tggtaatcagcagaccagatgccca

SEQ ID NO: 5562436 - DNA, 25 bp, Homo sapien
agtgccagactcctgagacatccgt

SEQ ID NO: 5562437 - DNA, 25 bp, Homo sapien
tgtacctagagtcttgcagcgtcat

SEQ ID NO: 5562438 - DNA, 25 bp, Homo sapien
tatgctgggtaagtgattgcaagga

SEQ ID NO: 5562439 - DNA, 25 bp, Homo sapien
gcccctcaggtactcgactaaggcc

SEQ ID NO: 5562440 - DNA, 25 bp, Homo sapien
atctgaaactggagctaggcttttt

SEQ ID NO: 5562441 - DNA, 25 bp, Homo sapien
cagaggaagaaactagtgttcagaa

SEQ ID NO: 5562442 - DNA, 25 bp, Homo sapien
gagaacttgacaagtcccggggatc

SEQ ID NO: 5562443 - DNA, 25 bp, Homo sapien
cagaagggacttgcgattcttgtgc

SEQ ID NO: 5562444 - DNA, 25 bp, Homo sapien
tcccggggatctgaatgcccggagt

SEQ ID NO: 5562445 - DNA, 25 bp, Homo sapien
tctgtattaaggactatgctgggta

SEQ ID NO: 5562446 - DNA, 25 bp, Homo sapien
tgcccggagtcctaaactgtaccta

SEQ ID NO: 5562447 - DNA, 25 bp, Homo sapien
gattgcaaggaggaagtgctttaat

SEQ ID NO: 5562448 - DNA, 25 bp, Homo sapien
tacaggtgcacttggctttagtttt

SEQ ID NO: 5562449 - DNA, 25 bp, Homo sapien
actgcaattttcacctcctaggctc

SEQ ID NO: 5562450 - DNA, 25 bp, Homo sapien
cacattgctaagtggttttaggttt

SEQ ID NO: 5562451 - DNA, 25 bp, Homo sapien
tatgactgtaaatattagacgatta

SEQ ID NO: 5562452 - DNA, 25 bp, Homo sapien
ggtttacaaacctgtgtccctgatg

SEQ ID NO: 5562453 - DNA, 25 bp, Homo sapien
attttacaccagggtaactgggatg

SEQ ID NO: 5562454 - DNA, 25 bp, Homo sapien
tagtaatgagacccttatcggccat

SEQ ID NO: 5562455 - DNA, 25 bp, Homo sapien
ccagggtaactgggatgttttctgt

SEQ ID NO: 5562456 - DNA, 25 bp, Homo sapien
ttgaaagtattctcatgcaggttta

SEQ ID NO: 5562457 - DNA, 25 bp, Homo sapien
tcagtgttttagtaatgagaccctt

SEQ ID NO: 5562458 - DNA, 25 bp, Homo sapien
ccctgatgcatcccacacccaatac

SEQ ID NO: 5562459 - DNA, 25 bp, Homo sapien
tttatagacttattggaaagatgta

SEQ ID NO: 5562460 - DNA, 25 bp, Homo sapien
tacatctttccaataagtctataaa

SEQ ID NO: 5562461 - DNA, 25 bp, Homo sapien
gctgggctgtttgttaacggcatac

SEQ ID NO: 5562462 - DNA, 25 bp, Homo sapien
aagcctgaaaccgcagcccaaagta

SEQ ID NO: 5562463 - DNA, 25 bp, Homo sapien
tgaataaaattacacaacatggatg

SEQ ID NO: 5562464 - DNA, 25 bp, Homo sapien
gcagcccaaagtagagaacttctct

SEQ ID NO: 5562465 - DNA, 25 bp, Homo sapien
tgtacacctacaaggtgcaaggcac

SEQ ID NO: 5562466 - DNA, 25 bp, Homo sapien
acaagtcatttgcatagaaaggtgc

SEQ ID NO: 5562467 - DNA, 25 bp, Homo sapien
aaaatcagtaattccagatgggttt

SEQ ID NO: 5562468 - DNA, 25 bp, Homo sapien
tacacaacatggatgtagcatttta

SEQ ID NO: 5562469 - DNA, 25 bp, Homo sapien
tgggtttacttcaaactagtgatac

SEQ ID NO: 5562470 - DNA, 25 bp, Homo sapien
cacctacaaggtgcaaggcacactg

SEQ ID NO: 5562471 - DNA, 25 bp, Homo sapien
ttgcatagaaaggtgcttgaaattc

SEQ ID NO: 5562472 - DNA, 25 bp, Homo sapien
gctctgtcagacagaagagaaacag

SEQ ID NO: 5562473 - DNA, 25 bp, Homo sapien
actgaaaacattaaggtatgatccc

SEQ ID NO: 5562474 - DNA, 25 bp, Homo sapien
gacatacaatctagtaggagaacgc

SEQ ID NO: 5562475 - DNA, 25 bp, Homo sapien
gggtgttcacgcagttaggcttcat

SEQ ID NO: 5562476 - DNA, 25 bp, Homo sapien
agagcacagttataagtgggacagc

SEQ ID NO: 5562477 - DNA, 25 bp, Homo sapien
aggagaacgcagacatactgaaaac

SEQ ID NO: 5562478 - DNA, 25 bp, Homo sapien
gaaacagaacatgctcttgagggac

SEQ ID NO: 5562479 - DNA, 25 bp, Homo sapien
cacgcagttaggcttcatgggaaag

SEQ ID NO: 5562480 - DNA, 25 bp, Homo sapien
tactgaaagtcaggtataatagtgc

SEQ ID NO: 5562481 - DNA, 25 bp, Homo sapien
ttagcaagttgctaagtggaggaag

SEQ ID NO: 5562482 - DNA, 25 bp, Homo sapien
gatccctgagaatgctaagtagagc

SEQ ID NO: 5562483 - DNA, 25 bp, Homo sapien
tgagtataaattgagctcaagaggt

SEQ ID NO: 5562484 - DNA, 25 bp, Homo sapien
aggcaggaagatgactgactttaag

SEQ ID NO: 5562485 - DNA, 25 bp, Homo sapien
gagagcatccatatggtgggacatc

SEQ ID NO: 5562486 - DNA, 25 bp, Homo sapien
tgcaaacaaaatgttccccagctgc

SEQ ID NO: 5562487 - DNA, 25 bp, Homo sapien
aataaaaggcatatacctctcaatc

SEQ ID NO: 5562488 - DNA, 25 bp, Homo sapien
tcatgacaatgattagctgcaaaca

SEQ ID NO: 5562489 - DNA, 25 bp, Homo sapien
ctttgcctgtcaggagggaaaatag

SEQ ID NO: 5562490 - DNA, 25 bp, Homo sapien
gcaaggcacacataaacgatattca

SEQ ID NO: 5562491 - DNA, 25 bp, Homo sapien
gttccccagctgcagacggtggaac

SEQ ID NO: 5562492 - DNA, 25 bp, Homo sapien
tctaagagtttatcccacagacacc

SEQ ID NO: 5562493 - DNA, 25 bp, Homo sapien
tgatgcccaggtgtgcaccaagtca

SEQ ID NO: 5562494 - DNA, 25 bp, Homo sapien
tggttgacttcctgaaagtgtcctc

SEQ ID NO: 5562495 - DNA, 25 bp, Homo sapien
aagattttccaggcagtggcagctt

SEQ ID NO: 5562496 - DNA, 25 bp, Homo sapien
gtaggatgacaattggatgacccaa

SEQ ID NO: 5562497 - DNA, 25 bp, Homo sapien
tagtagctgccagttaggatgccaa

SEQ ID NO: 5562498 - DNA, 25 bp, Homo sapien
ctcagtaagtgaaaaacgtgttgtt

SEQ ID NO: 5562499 - DNA, 25 bp, Homo sapien
ttccaggaatgtcagtcacatcctc

SEQ ID NO: 5562500 - DNA, 25 bp, Homo sapien
acattccgactcacccagcaagaac

SEQ ID NO: 5562501 - DNA, 25 bp, Homo sapien
ccagtcttgagggacctcctgctcc

SEQ ID NO: 5562502 - DNA, 25 bp, Homo sapien
ttttgtggtgacaaggtaaagagta

SEQ ID NO: 5562503 - DNA, 25 bp, Homo sapien
catgtaagaacactggaagatacta

SEQ ID NO: 5562504 - DNA, 25 bp, Homo sapien
tggatgacccaaaacttagacctca

SEQ ID NO: 5562505 - DNA, 25 bp, Homo sapien
tctgcaaaataaacctaggactgga

SEQ ID NO: 5562506 - DNA, 25 bp, Homo sapien
atgagacaagcttcctgaaaaggct

SEQ ID NO: 5562507 - DNA, 25 bp, Homo sapien
gtggagtcatatgaggctgaataac

SEQ ID NO: 5562508 - DNA, 25 bp, Homo sapien
tctgaactgttttggtaaagccgac

SEQ ID NO: 5562509 - DNA, 25 bp, Homo sapien
agtgcagagattctgaaaaagaccc

SEQ ID NO: 5562510 - DNA, 25 bp, Homo sapien
ggagtgaatatgagacaagcttcct

SEQ ID NO: 5562511 - DNA, 25 bp, Homo sapien
gttcccaattgtgtgccaaagtgca

SEQ ID NO: 5562512 - DNA, 25 bp, Homo sapien
taaagccgaccgtggagtcatatga

SEQ ID NO: 5562513 - DNA, 25 bp, Homo sapien
gaaagatgaggaaacatgtttgcat

SEQ ID NO: 5562514 - DNA, 25 bp, Homo sapien
aggactggattgatcctcaggccac

SEQ ID NO: 5562515 - DNA, 25 bp, Homo sapien
aggtgaatgtctcgggagtgaatat

SEQ ID NO: 5562516 - DNA, 25 bp, Homo sapien
ggcccgcgtccccctgggtgtggag

SEQ ID NO: 5562517 - DNA, 25 bp, Homo sapien
ctccacacccagggggacgcgggcc

SEQ ID NO: 5562518 - DNA, 25 bp, Homo sapien
ctacaggtagagcctcagaaaaagg

SEQ ID NO: 5562519 - DNA, 25 bp, Homo sapien
gggtcttgaagatgtctacaggtag

SEQ ID NO: 5562520 - DNA, 25 bp, Homo sapien
acaaacaaaagttcaaggaggcaaa

SEQ ID NO: 5562521 - DNA, 25 bp, Homo sapien
atatgaaacatagggaacagtagga

SEQ ID NO: 5562522 - DNA, 25 bp, Homo sapien
tggataagaaacataaaagtggtac

SEQ ID NO: 5562523 - DNA, 25 bp, Homo sapien
attgtagaggagaatcatgattgat

SEQ ID NO: 5562524 - DNA, 25 bp, Homo sapien
aggggtgttacagaagtatacaaca

SEQ ID NO: 5562525 - DNA, 25 bp, Homo sapien
catggagaaggcttcatgacagttg

SEQ ID NO: 5562526 - DNA, 25 bp, Homo sapien
ggcagctttagtgactggctcggtt

SEQ ID NO: 5562527 - DNA, 25 bp, Homo sapien
tcatgacagttgggttgggtcttga

SEQ ID NO: 5562528 - DNA, 25 bp, Homo sapien
tggggaagatgactatacagataat

SEQ ID NO: 5562529 - DNA, 25 bp, Homo sapien
ttggcggagatgatgcctaatgaga

SEQ ID NO: 5562530 - DNA, 25 bp, Homo sapien
taaaatgtaacatgtaggaaaggca

SEQ ID NO: 5562531 - DNA, 25 bp, Homo sapien
agagtaaaattagagatgttaacgc

SEQ ID NO: 5562532 - DNA, 25 bp, Homo sapien
tcgctgtctagtgctgcagtctctc

SEQ ID NO: 5562533 - DNA, 25 bp, Homo sapien
tttcctgcctagtgggaaccttggc

SEQ ID NO: 5562534 - DNA, 25 bp, Homo sapien
gatgttaacgctgataacggttttc

SEQ ID NO: 5562535 - DNA, 25 bp, Homo sapien
cctgctctcccggtcaccgccgtcg

SEQ ID NO: 5562536 - DNA, 25 bp, Homo sapien
gcccctcctttggcggagagggcta

SEQ ID NO: 5562537 - DNA, 25 bp, Homo sapien
cgcggcgttcctggttttcaccttc

SEQ ID NO: 5562538 - DNA, 25 bp, Homo sapien
gcggagatgatgcctaatgagatat

SEQ ID NO: 5562539 - DNA, 25 bp, Homo sapien
cgcctcgcagcctgctctcccggtc

SEQ ID NO: 5562540 - DNA, 25 bp, Homo sapien
aagatgatatagctagggcattgcc

SEQ ID NO: 5562541 - DNA, 25 bp, Homo sapien
gctagggcattgccaatagaggaga

SEQ ID NO: 5562542 - DNA, 25 bp, Homo sapien
gccaacttgcccaggtgagaagggc

SEQ ID NO: 5562543 - DNA, 25 bp, Homo sapien
aaggagtaagagtttgccaacttgc

SEQ ID NO: 5562544 - DNA, 25 bp, Homo sapien
gagagtcttcttttaggcagaggcc

SEQ ID NO: 5562545 - DNA, 25 bp, Homo sapien
ggagaggacttccaaggagattaag

SEQ ID NO: 5562546 - DNA, 25 bp, Homo sapien
gattaagacagtatgggagttacat

SEQ ID NO: 5562547 - DNA, 25 bp, Homo sapien
agacaaagggaacagcatttacata

SEQ ID NO: 5562548 - DNA, 25 bp, Homo sapien
actagaacccagttggtgaatccaa

SEQ ID NO: 5562549 - DNA, 25 bp, Homo sapien
taggcagaggccttatactgacttt

SEQ ID NO: 5562550 - DNA, 25 bp, Homo sapien
actttctgcaaagttgggcagcaac

SEQ ID NO: 5562551 - DNA, 25 bp, Homo sapien
agagacccatcacagacgcctgcaa

SEQ ID NO: 5562552 - DNA, 25 bp, Homo sapien
gcccacccccgatgatggtgtcagc

SEQ ID NO: 5562553 - DNA, 25 bp, Homo sapien
tctcggccctaaactaccggcagga

SEQ ID NO: 5562554 - DNA, 25 bp, Homo sapien
tcttggcactgtcccagacgctcac

SEQ ID NO: 5562555 - DNA, 25 bp, Homo sapien
gtgtgctccatctgatgcccgacac

SEQ ID NO: 5562556 - DNA, 25 bp, Homo sapien
tcaacaagcctcacagctcacgtcc

SEQ ID NO: 5562557 - DNA, 25 bp, Homo sapien
tgatgcccgacacagccactctaca

SEQ ID NO: 5562558 - DNA, 25 bp, Homo sapien
cgtgaagctagccgtctcggcccta

SEQ ID NO: 5562559 - DNA, 25 bp, Homo sapien
cggaaggtgccctgtcttgtccctt

SEQ ID NO: 5562560 - DNA, 25 bp, Homo sapien
tctccctgacaccaagccacagcgg

SEQ ID NO: 5562561 - DNA, 25 bp, Homo sapien
gatattgtgtaggcatctaggggtc

SEQ ID NO: 5562562 - DNA, 25 bp, Homo sapien
aaacaaaaatagagatcagtatgaa

SEQ ID NO: 5562563 - DNA, 25 bp, Homo sapien
tcaggggttcagttgagaataagaa

SEQ ID NO: 5562564 - DNA, 25 bp, Homo sapien
aaccatttctaggatgtcaacaatc

SEQ ID NO: 5562565 - DNA, 25 bp, Homo sapien
ccctcaaagcatttcggaatcataa

SEQ ID NO: 5562566 - DNA, 25 bp, Homo sapien
agtgagagctgtataaccttaatgc

SEQ ID NO: 5562567 - DNA, 25 bp, Homo sapien
tagtcccagttcagagtcctaggcc

SEQ ID NO: 5562568 - DNA, 25 bp, Homo sapien
ttacatataaggtgaagtgagagct

SEQ ID NO: 5562569 - DNA, 25 bp, Homo sapien
gaataagaatacagacttcccagaa

SEQ ID NO: 5562570 - DNA, 25 bp, Homo sapien
ccagaaaataaacaactagtcccag

SEQ ID NO: 5562571 - DNA, 25 bp, Homo sapien
tcctaggccccatataataccaccc

SEQ ID NO: 5562572 - DNA, 25 bp, Homo sapien
ctaacagcaagcatctcccattatt

SEQ ID NO: 5562573 - DNA, 25 bp, Homo sapien
tgggcaaaggagaaccacttaccaa

SEQ ID NO: 5562574 - DNA, 25 bp, Homo sapien
gcctgggtagagtaagctccttttg

SEQ ID NO: 5562575 - DNA, 25 bp, Homo sapien
cttttgtcctggtaaggtgtgggca

SEQ ID NO: 5562576 - DNA, 25 bp, Homo sapien
cgagaacgtgttcattagtcagaga

SEQ ID NO: 5562577 - DNA, 25 bp, Homo sapien
gaaaacatttgagcttggtggtggt

SEQ ID NO: 5562578 - DNA, 25 bp, Homo sapien
gtgggagattgcttaattgcctggg

SEQ ID NO: 5562579 - DNA, 25 bp, Homo sapien
agagaaatgcagactgaaaccacaa

SEQ ID NO: 5562580 - DNA, 25 bp, Homo sapien
gcaataaggactgttgaacctcaac

SEQ ID NO: 5562581 - DNA, 25 bp, Homo sapien
accacaagataccactacatgccca

SEQ ID NO: 5562582 - DNA, 25 bp, Homo sapien
tacatgcccagaagtcacaatattt

SEQ ID NO: 5562583 - DNA, 25 bp, Homo sapien
ttaatggccaataaacacgagaacg

SEQ ID NO: 5562584 - DNA, 25 bp, Homo sapien
agcaataatacccatgaagaaagga

SEQ ID NO: 5562585 - DNA, 25 bp, Homo sapien
taactccagataaaggtagagagca

SEQ ID NO: 5562586 - DNA, 25 bp, Homo sapien
aaagttggatgatgtctgcacccaa

SEQ ID NO: 5562587 - DNA, 25 bp, Homo sapien
gagcacagctatctgccctccctaa

SEQ ID NO: 5562588 - DNA, 25 bp, Homo sapien
aaactgcaatgagtaaatgtagctt

SEQ ID NO: 5562589 - DNA, 25 bp, Homo sapien
acaagctgccagctcaagccagcct

SEQ ID NO: 5562590 - DNA, 25 bp, Homo sapien
tcaagccagcctgtatcctctgtcc

SEQ ID NO: 5562591 - DNA, 25 bp, Homo sapien
tctgcacccaaaccagccatggaag

SEQ ID NO: 5562592 - DNA, 25 bp, Homo sapien
gctctcaacccacagcacacagaga

SEQ ID NO: 5562593 - DNA, 25 bp, Homo sapien
aaaaccagtatagtcacgtggaaat

SEQ ID NO: 5562594 - DNA, 25 bp, Homo sapien
tcacgtggaaattgactgggtttgg

SEQ ID NO: 5562595 - DNA, 25 bp, Homo sapien
cctgggtttgggttatcgtgattcg

SEQ ID NO: 5562596 - DNA, 25 bp, Homo sapien
ggaggggcatcctgctcttgtcaat

SEQ ID NO: 5562597 - DNA, 25 bp, Homo sapien
gcttagcatcaaaggatgaggtcgg

SEQ ID NO: 5562598 - DNA, 25 bp, Homo sapien
gaagtgtgctcatctaaggacccta

SEQ ID NO: 5562599 - DNA, 25 bp, Homo sapien
atatgccaaggctagtcaatggagg

SEQ ID NO: 5562600 - DNA, 25 bp, Homo sapien
cacaagccggtcaccgaagtgacta

SEQ ID NO: 5562601 - DNA, 25 bp, Homo sapien
aataggaatgagaatttcagagccc

SEQ ID NO: 5562602 - DNA, 25 bp, Homo sapien
tcaagaaattgagcatgtgacttca

SEQ ID NO: 5562603 - DNA, 25 bp, Homo sapien
ataatgcagatacaggaagtgtgct

SEQ ID NO: 5562604 - DNA, 25 bp, Homo sapien
tgccctgcaccaaaaccagcatctc

SEQ ID NO: 5562605 - DNA, 25 bp, Homo sapien
ccgaagtgactacaaagaagaagtg

SEQ ID NO: 5562606 - DNA, 25 bp, Homo sapien
cagagagaatcacagtaatacacag

SEQ ID NO: 5562607 - DNA, 25 bp, Homo sapien
cccttgcatgaaatgtgggagaggg

SEQ ID NO: 5562608 - DNA, 25 bp, Homo sapien
ttggctctgaatgatcaactacatc

SEQ ID NO: 5562609 - DNA, 25 bp, Homo sapien
tggagtttctgaacataggaagaga

SEQ ID NO: 5562610 - DNA, 25 bp, Homo sapien
aagttaggcaacatttagcaatcaa

SEQ ID NO: 5562611 - DNA, 25 bp, Homo sapien
ggctgaatggttgagaccagtgcaa

SEQ ID NO: 5562612 - DNA, 25 bp, Homo sapien
tagcaatcaacagaaccccttccct

SEQ ID NO: 5562613 - DNA, 25 bp, Homo sapien
cacaaattccagtacaaaagatctc

SEQ ID NO: 5562614 - DNA, 25 bp, Homo sapien
ggaagagaatgcaagtcatgtgtta

SEQ ID NO: 5562615 - DNA, 25 bp, Homo sapien
cactcatacatacacgtgggcaagc

SEQ ID NO: 5562616 - DNA, 25 bp, Homo sapien
tcctaccgcagcccaacatggtgca

SEQ ID NO: 5562617 - DNA, 25 bp, Homo sapien
agcctccccctcgggtttgctgctc

SEQ ID NO: 5562618 - DNA, 25 bp, Homo sapien
gaggtgctcccgtactcgcggaaga

SEQ ID NO: 5562619 - DNA, 25 bp, Homo sapien
gcgcaggtttcttccgggccttctc

SEQ ID NO: 5562620 - DNA, 25 bp, Homo sapien
gctgctcgctgcggaactcgttcag

SEQ ID NO: 5562621 - DNA, 25 bp, Homo sapien
actcgttcaggatgtcgaagaagct

SEQ ID NO: 5562622 - DNA, 25 bp, Homo sapien
tgctcgggcatgccctgcacgtcga

SEQ ID NO: 5562623 - DNA, 25 bp, Homo sapien
catgccctgcacgtcgatggacgag

SEQ ID NO: 5562624 - DNA, 25 bp, Homo sapien
tcgggtttgctgctccttagcttcc

SEQ ID NO: 5562625 - DNA, 25 bp, Homo sapien
cttagcttccgaaagatggacgagt

SEQ ID NO: 5562626 - DNA, 25 bp, Homo sapien
gctcttctgacacacccacggcctg

SEQ ID NO: 5562627 - DNA, 25 bp, Homo sapien
ccttctccttcgtgggctgcagtgg

SEQ ID NO: 5562628 - DNA, 25 bp, Homo sapien
caaggaggattccctaccccgactg

SEQ ID NO: 5562629 - DNA, 25 bp, Homo sapien
ccccgactgcctaggtagttacaag

SEQ ID NO: 5562630 - DNA, 25 bp, Homo sapien
atgaatgcaataatggaagtctgtt

SEQ ID NO: 5562631 - DNA, 25 bp, Homo sapien
tagttacaaggtagtacagtgccca

SEQ ID NO: 5562632 - DNA, 25 bp, Homo sapien
ggtcctcaggaatgaacgcactctg

SEQ ID NO: 5562633 - DNA, 25 bp, Homo sapien
actgaaggctagagataatttgttt

SEQ ID NO: 5562634 - DNA, 25 bp, Homo sapien
cagtgcccagtgacacagacactca

SEQ ID NO: 5562635 - DNA, 25 bp, Homo sapien
tttgaaataggcatgagactcatcc

SEQ ID NO: 5562636 - DNA, 25 bp, Homo sapien
tttggcagaaatgtagcaaaaggga

SEQ ID NO: 5562637 - DNA, 25 bp, Homo sapien
tgtgcctggccttacaaagggtact

SEQ ID NO: 5562638 - DNA, 25 bp, Homo sapien
tactgaacccccagagactctatac

SEQ ID NO: 5562639 - DNA, 25 bp, Homo sapien
ccaagacatggaccaagaatgcctt

SEQ ID NO: 5562640 - DNA, 25 bp, Homo sapien
cctcagtctcgacagcacccgctgg

SEQ ID NO: 5562641 - DNA, 25 bp, Homo sapien
agggaacgacgtaccctgagtgttg

SEQ ID NO: 5562642 - DNA, 25 bp, Homo sapien
gccaggccgtgagtttgacagcctg

SEQ ID NO: 5562643 - DNA, 25 bp, Homo sapien
ttggcccaaccagccagatgtggag

SEQ ID NO: 5562644 - DNA, 25 bp, Homo sapien
gctgtggcgcatgatcttagcctac

SEQ ID NO: 5562645 - DNA, 25 bp, Homo sapien
gagagaagccttcaagcagcattac

SEQ ID NO: 5562646 - DNA, 25 bp, Homo sapien
ggccatggccagcctgtatgaccga

SEQ ID NO: 5562647 - DNA, 25 bp, Homo sapien
caccgagtgccgccatcccaattgg

SEQ ID NO: 5562648 - DNA, 25 bp, Homo sapien
gtatgcagggcctggtatgaactga

SEQ ID NO: 5562649 - DNA, 25 bp, Homo sapien
cgaagagcaaggtgaaatcatcttg

SEQ ID NO: 5562650 - DNA, 25 bp, Homo sapien
ttcaaattgctccggtcaccttaac

SEQ ID NO: 5562651 - DNA, 25 bp, Homo sapien
tccacgcaacctaccacagactctg

SEQ ID NO: 5562652 - DNA, 25 bp, Homo sapien
agttttcaaaggctgcacatttcac

SEQ ID NO: 5562653 - DNA, 25 bp, Homo sapien
cacccctgcgttcctgaaacccttc

SEQ ID NO: 5562654 - DNA, 25 bp, Homo sapien
gcctaaactctggccgccgccgaaa

SEQ ID NO: 5562655 - DNA, 25 bp, Homo sapien
gggccgaagctcgtctcccgcttta

SEQ ID NO: 5562656 - DNA, 25 bp, Homo sapien
tgccctttcgaacgcaaccgtccgc

SEQ ID NO: 5562657 - DNA, 25 bp, Homo sapien
ctgtaattagagtggcctgaagaag

SEQ ID NO: 5562658 - DNA, 25 bp, Homo sapien
tctcccgctttaagagcgcgccagc

SEQ ID NO: 5562659 - DNA, 25 bp, Homo sapien
caaatacaatacgcagggaagcttc

SEQ ID NO: 5562660 - DNA, 25 bp, Homo sapien
cggtttgagtcttccggagtcacgc

SEQ ID NO: 5562661 - DNA, 25 bp, Homo sapien
atactgttcaacacagaaccggttc

SEQ ID NO: 5562662 - DNA, 25 bp, Homo sapien
acatgaagaggtggccaaccttatt

SEQ ID NO: 5562663 - DNA, 25 bp, Homo sapien
agaaccggttcaatatttatgacac

SEQ ID NO: 5562664 - DNA, 25 bp, Homo sapien
actttttggtcaggcaatttggaag

SEQ ID NO: 5562665 - DNA, 25 bp, Homo sapien
tgtttgtatactgttcatagaagtt

SEQ ID NO: 5562666 - DNA, 25 bp, Homo sapien
ctaataacctgggaatctcttaatc

SEQ ID NO: 5562667 - DNA, 25 bp, Homo sapien
gttcatagaagttaaattgacataa

SEQ ID NO: 5562668 - DNA, 25 bp, Homo sapien
gtaggtgatggaaaattgtcatgtt

SEQ ID NO: 5562669 - DNA, 25 bp, Homo sapien
atctatgacatgtaaaaaggttttc

SEQ ID NO: 5562670 - DNA, 25 bp, Homo sapien
aaaaagatgaaattacccagagttg

SEQ ID NO: 5562671 - DNA, 25 bp, Homo sapien
ttacccagagttggtgtaggtgatg

SEQ ID NO: 5562672 - DNA, 25 bp, Homo sapien
tacatcaaaactccaacagggcttt

SEQ ID NO: 5562673 - DNA, 25 bp, Homo sapien
ttggcaacacaaaataactaaacga

SEQ ID NO: 5562674 - DNA, 25 bp, Homo sapien
ttgcagtaggttggatttggtcatt

SEQ ID NO: 5562675 - DNA, 25 bp, Homo sapien
tgttagtggtgtatatgccagacat

SEQ ID NO: 5562676 - DNA, 25 bp, Homo sapien
gcttgatagctacatgccatatgat

SEQ ID NO: 5562677 - DNA, 25 bp, Homo sapien
aaggctcagtgtgacaccacgtatc

SEQ ID NO: 5562678 - DNA, 25 bp, Homo sapien
tgtatccagggaaaggatcccaaag

SEQ ID NO: 5562679 - DNA, 25 bp, Homo sapien
tatagaccgaatgttgggcatttaa

SEQ ID NO: 5562680 - DNA, 25 bp, Homo sapien
actagggttatgtatccagggaaag

SEQ ID NO: 5562681 - DNA, 25 bp, Homo sapien
catatgatactaataggcaaaatcc

SEQ ID NO: 5562682 - DNA, 25 bp, Homo sapien
ataactaaacgaaactggcttgata

SEQ ID NO: 5562683 - DNA, 25 bp, Homo sapien
gaggagaaatgccaactcacaggca

SEQ ID NO: 5562684 - DNA, 25 bp, Homo sapien
tcacaggcaagcacagtgatgacaa

SEQ ID NO: 5562685 - DNA, 25 bp, Homo sapien
ctgtgtacccactacccaggttaac

SEQ ID NO: 5562686 - DNA, 25 bp, Homo sapien
ggagctctggtgtgcccagttgttt

SEQ ID NO: 5562687 - DNA, 25 bp, Homo sapien
gtcaacctgttaggaatcgactcca

SEQ ID NO: 5562688 - DNA, 25 bp, Homo sapien
acatattgaagattgggagctctgg

SEQ ID NO: 5562689 - DNA, 25 bp, Homo sapien
aaagcagcttgcagaaacactggat

SEQ ID NO: 5562690 - DNA, 25 bp, Homo sapien
acacatacagaagagtttataaacc

SEQ ID NO: 5562691 - DNA, 25 bp, Homo sapien
cactggattcacacatggaggagaa

SEQ ID NO: 5562692 - DNA, 25 bp, Homo sapien
aggatgtcggtgtatgaaaaagtat

SEQ ID NO: 5562693 - DNA, 25 bp, Homo sapien
atgtaacacacgaaaagcagcttgc

SEQ ID NO: 5562694 - DNA, 25 bp, Homo sapien
tcaaacctattgtggaggatgtggc

SEQ ID NO: 5562695 - DNA, 25 bp, Homo sapien
gcccaggccaaacatgcatatgatg

SEQ ID NO: 5562696 - DNA, 25 bp, Homo sapien
gcatatgatgcaaccccaccctaca

SEQ ID NO: 5562697 - DNA, 25 bp, Homo sapien
tagaccagtcccagaactttcccca

SEQ ID NO: 5562698 - DNA, 25 bp, Homo sapien
cctctgcagaggatcaaacctattg

SEQ ID NO: 5562699 - DNA, 25 bp, Homo sapien
aatggataaaacaccactgtggaaa

SEQ ID NO: 5562700 - DNA, 25 bp, Homo sapien
ggatgcctagggtatctgcttgctt

SEQ ID NO: 5562701 - DNA, 25 bp, Homo sapien
acatcatgactgaaaatggggaaga

SEQ ID NO: 5562702 - DNA, 25 bp, Homo sapien
cactcagagccattagaccagtccc

SEQ ID NO: 5562703 - DNA, 25 bp, Homo sapien
acatttatgtggcacgaagggaaag

SEQ ID NO: 5562704 - DNA, 25 bp, Homo sapien
ggctcaggcagcacatcatgactga

SEQ ID NO: 5562705 - DNA, 25 bp, Homo sapien
aagttaggctggtctatgggttttc

SEQ ID NO: 5562706 - DNA, 25 bp, Homo sapien
taaaagtctacgattccaggacatt

SEQ ID NO: 5562707 - DNA, 25 bp, Homo sapien
tgtctgagccaacaaaggatggtga

SEQ ID NO: 5562708 - DNA, 25 bp, Homo sapien
gcctgcccatcacaggctggaccac

SEQ ID NO: 5562709 - DNA, 25 bp, Homo sapien
atgaacgtgaatgacccttctgact

SEQ ID NO: 5562710 - DNA, 25 bp, Homo sapien
aggccgtcacttggttgaaaggaag

SEQ ID NO: 5562711 - DNA, 25 bp, Homo sapien
aggcatgcgatgtctgagccaacaa

SEQ ID NO: 5562712 - DNA, 25 bp, Homo sapien
tctggacagaaccacgaccaatagg

SEQ ID NO: 5562713 - DNA, 25 bp, Homo sapien
cactcttggcttgtatgacatgtac

SEQ ID NO: 5562714 - DNA, 25 bp, Homo sapien
tctggactaggctttccccaacctc

SEQ ID NO: 5562715 - DNA, 25 bp, Homo sapien
ggaacgaggacatgaacactcttgg

SEQ ID NO: 5562716 - DNA, 25 bp, Homo sapien
atacagcggtatttcacagagcaat

SEQ ID NO: 5562717 - DNA, 25 bp, Homo sapien
tggagagcaatgtgagtactattaa

SEQ ID NO: 5562718 - DNA, 25 bp, Homo sapien
tgagcagaggaaaaagtataatgta

SEQ ID NO: 5562719 - DNA, 25 bp, Homo sapien
actctggaagtttacagaagacacc

SEQ ID NO: 5562720 - DNA, 25 bp, Homo sapien
gtcacagcgattgacgctggggaag

SEQ ID NO: 5562721 - DNA, 25 bp, Homo sapien
ggaggtgggtactcaccactgctgg

SEQ ID NO: 5562722 - DNA, 25 bp, Homo sapien
agaagacaccagtcacagcgattga

SEQ ID NO: 5562723 - DNA, 25 bp, Homo sapien
tatgatccaagtgaaaactgtaggg

SEQ ID NO: 5562724 - DNA, 25 bp, Homo sapien
ccccaagacatagagttgagcagag

SEQ ID NO: 5562725 - DNA, 25 bp, Homo sapien
gctaacacaggatgatccccaagac

SEQ ID NO: 5562726 - DNA, 25 bp, Homo sapien
ggagacagctctaaacgtatgacac

SEQ ID NO: 5562727 - DNA, 25 bp, Homo sapien
aggcatgccacgtggccgctttttc

SEQ ID NO: 5562728 - DNA, 25 bp, Homo sapien
taggcatagcatcacagtcatcact

SEQ ID NO: 5562729 - DNA, 25 bp, Homo sapien
agaatcactactcaaggacagccac

SEQ ID NO: 5562730 - DNA, 25 bp, Homo sapien
gcagcccccatgtccccaaactgtc

SEQ ID NO: 5562731 - DNA, 25 bp, Homo sapien
ataaaaataagatcaggcctgcagc

SEQ ID NO: 5562732 - DNA, 25 bp, Homo sapien
cagtgcagcgtgacttggctctttg

SEQ ID NO: 5562733 - DNA, 25 bp, Homo sapien
agagagacccggctgccttcatgca

SEQ ID NO: 5562734 - DNA, 25 bp, Homo sapien
ggacagccacacacaagctggaatt

SEQ ID NO: 5562735 - DNA, 25 bp, Homo sapien
ctcttctccatcgggaaaggctcca

SEQ ID NO: 5562736 - DNA, 25 bp, Homo sapien
gggccgttcaaacacagtgacagat

SEQ ID NO: 5562737 - DNA, 25 bp, Homo sapien
ttttcttcatacgcaggaggccact

SEQ ID NO: 5562738 - DNA, 25 bp, Homo sapien
taaaagcatgtggtcaagaaacact

SEQ ID NO: 5562739 - DNA, 25 bp, Homo sapien
agaaatcctgtagcgtgcaccgcca

SEQ ID NO: 5562740 - DNA, 25 bp, Homo sapien
tttgcacacgttaactcatctgttc

SEQ ID NO: 5562741 - DNA, 25 bp, Homo sapien
accgccacctccatgtttcctagga

SEQ ID NO: 5562742 - DNA, 25 bp, Homo sapien
gaataatccgcaaccttgaagggaa

SEQ ID NO: 5562743 - DNA, 25 bp, Homo sapien
acagacaggtgtttaaattggggat

SEQ ID NO: 5562744 - DNA, 25 bp, Homo sapien
ccgcaaccttgaagggaatgaagga

SEQ ID NO: 5562745 - DNA, 25 bp, Homo sapien
aggaaaagactaatactcatatttg

SEQ ID NO: 5562746 - DNA, 25 bp, Homo sapien
gtttaaattggggatgtgcaagcaa

SEQ ID NO: 5562747 - DNA, 25 bp, Homo sapien
gcacacattttaacaaggaaaagac

SEQ ID NO: 5562748 - DNA, 25 bp, Homo sapien
tggggatgtgcaagcaatattgcct

SEQ ID NO: 5562749 - DNA, 25 bp, Homo sapien
tggacgggctcatttctccctctcc

SEQ ID NO: 5562750 - DNA, 25 bp, Homo sapien
tttggtttgtgaagagtttgtgctc

SEQ ID NO: 5562751 - DNA, 25 bp, Homo sapien
aggaattcaccttggacgggctcat

SEQ ID NO: 5562752 - DNA, 25 bp, Homo sapien
ttggtgcactcacaatggagaatca

SEQ ID NO: 5562753 - DNA, 25 bp, Homo sapien
catctccgtatctgcaacatctagc

SEQ ID NO: 5562754 - DNA, 25 bp, Homo sapien
acaatggagaatcaaggaattcacc

SEQ ID NO: 5562755 - DNA, 25 bp, Homo sapien
agagtttgtgctccgagtcaaatcc

SEQ ID NO: 5562756 - DNA, 25 bp, Homo sapien
gccccgtgcagcctcttctcagact

SEQ ID NO: 5562757 - DNA, 25 bp, Homo sapien
gttccagatcctggtaggcgagagt

SEQ ID NO: 5562758 - DNA, 25 bp, Homo sapien
ggagggcatccgctttaattaatta

SEQ ID NO: 5562759 - DNA, 25 bp, Homo sapien
aattaatggaaggtgttccagatcc

SEQ ID NO: 5562760 - DNA, 25 bp, Homo sapien
tgaaagaacaattgctcctacaacc

SEQ ID NO: 5562761 - DNA, 25 bp, Homo sapien
tctggcgtggaccttcattcatctc

SEQ ID NO: 5562762 - DNA, 25 bp, Homo sapien
gagacatgagctgctgagattgact

SEQ ID NO: 5562763 - DNA, 25 bp, Homo sapien
agcatgtcactctggcgtggacctt

SEQ ID NO: 5562764 - DNA, 25 bp, Homo sapien
ggccagacatagactccacgggcag

SEQ ID NO: 5562765 - DNA, 25 bp, Homo sapien
gatggtgctttgaaagaacaattgc

SEQ ID NO: 5562766 - DNA, 25 bp, Homo sapien
tctccttctgtagatgaggaatctg

SEQ ID NO: 5562767 - DNA, 25 bp, Homo sapien
ttagaagctgataaagaccttaaaa

SEQ ID NO: 5562768 - DNA, 25 bp, Homo sapien
atttcccctacttagagcatgtcac

SEQ ID NO: 5562769 - DNA, 25 bp, Homo sapien
ccttcctgaggttagaagatggtgc

SEQ ID NO: 5562770 - DNA, 25 bp, Homo sapien
gcctggggttgatccattctccctt

SEQ ID NO: 5562771 - DNA, 25 bp, Homo sapien
gtatacgcggtcacattagcaaatc

SEQ ID NO: 5562772 - DNA, 25 bp, Homo sapien
tatgaatataagtatacgcggtcac

SEQ ID NO: 5562773 - DNA, 25 bp, Homo sapien
tacctgcccttcatgtctaccactt

SEQ ID NO: 5562774 - DNA, 25 bp, Homo sapien
gtatctgaccataaacaatcactta

SEQ ID NO: 5562775 - DNA, 25 bp, Homo sapien
catgtgtggtaagaagcaatgtcaa

SEQ ID NO: 5562776 - DNA, 25 bp, Homo sapien
taggtataggtactcttcttttctc

SEQ ID NO: 5562777 - DNA, 25 bp, Homo sapien
tatcctgagaggacagcttgcttta

SEQ ID NO: 5562778 - DNA, 25 bp, Homo sapien
tagcaaatctgcagttcaggaattt

SEQ ID NO: 5562779 - DNA, 25 bp, Homo sapien
tcttatcaaatgaaggattgcattc

SEQ ID NO: 5562780 - DNA, 25 bp, Homo sapien
cagagttgatttaagatacagagaa

SEQ ID NO: 5562781 - DNA, 25 bp, Homo sapien
tccactttatcctgagaggacagct

SEQ ID NO: 5562782 - DNA, 25 bp, Homo sapien
tggggatctaaggttggttcattgt

SEQ ID NO: 5562783 - DNA, 25 bp, Homo sapien
ttcattgtgacaaaccccagaagag

SEQ ID NO: 5562784 - DNA, 25 bp, Homo sapien
gctgttagaaaccagttcaaacatt

SEQ ID NO: 5562785 - DNA, 25 bp, Homo sapien
tccagccaccatggtaggaaatctt

SEQ ID NO: 5562786 - DNA, 25 bp, Homo sapien
cttacaatggggatctaaggttggt

SEQ ID NO: 5562787 - DNA, 25 bp, Homo sapien
taaaatgaccaactgcttaaacttc

SEQ ID NO: 5562788 - DNA, 25 bp, Homo sapien
aatgagtgagatccttacaatgggg

SEQ ID NO: 5562789 - DNA, 25 bp, Homo sapien
aaatacaacattagatccagccata

SEQ ID NO: 5562790 - DNA, 25 bp, Homo sapien
agaccactggctcctcctgtcagtt

SEQ ID NO: 5562791 - DNA, 25 bp, Homo sapien
atttgggacttgacttcgctgctga

SEQ ID NO: 5562792 - DNA, 25 bp, Homo sapien
gagggaggagtctaattactgcttc

SEQ ID NO: 5562793 - DNA, 25 bp, Homo sapien
tgggggtaaagcagcttgaattaca

SEQ ID NO: 5562794 - DNA, 25 bp, Homo sapien
gcacaataagcacaactgaaaatat

SEQ ID NO: 5562795 - DNA, 25 bp, Homo sapien
ccttcaattccctgggggtaaagca

SEQ ID NO: 5562796 - DNA, 25 bp, Homo sapien
gtgaatagcacctaacatggaaggc

SEQ ID NO: 5562797 - DNA, 25 bp, Homo sapien
tgaagctcaccagcagatatatctt

SEQ ID NO: 5562798 - DNA, 25 bp, Homo sapien
cacagtaactgacacttccggggtt

SEQ ID NO: 5562799 - DNA, 25 bp, Homo sapien
acatggaaggctagtatctgagtta

SEQ ID NO: 5562800 - DNA, 25 bp, Homo sapien
ctgcaaaatgcagttaaccaatcat

SEQ ID NO: 5562801 - DNA, 25 bp, Homo sapien
agaagggtgaaatgccatcatcata

SEQ ID NO: 5562802 - DNA, 25 bp, Homo sapien
cataaaaagcctgaagctcaccagc

SEQ ID NO: 5562803 - DNA, 25 bp, Homo sapien
gttgacactgtaaacagaagggtga

SEQ ID NO: 5562804 - DNA, 25 bp, Homo sapien
acaatctgtgaccatgaaaaggagc

SEQ ID NO: 5562805 - DNA, 25 bp, Homo sapien
agaccaaaagcaaggcattccgagt

SEQ ID NO: 5562806 - DNA, 25 bp, Homo sapien
aaaatagattgggaatctggagggt

SEQ ID NO: 5562807 - DNA, 25 bp, Homo sapien
gggagtcggcattcgatcgcattca

SEQ ID NO: 5562808 - DNA, 25 bp, Homo sapien
gggcggaccctgctaatctcttctg

SEQ ID NO: 5562809 - DNA, 25 bp, Homo sapien
tcgttaggttggaaaaccagtctga

SEQ ID NO: 5562810 - DNA, 25 bp, Homo sapien
tgtcgaatcggtcaatgtccacccc

SEQ ID NO: 5562811 - DNA, 25 bp, Homo sapien
catgaaaaggagcaatcacttattt

SEQ ID NO: 5562812 - DNA, 25 bp, Homo sapien
atatccacgcagacatccttgtaga

SEQ ID NO: 5562813 - DNA, 25 bp, Homo sapien
ctaatctcttctgggagtcggcatt

SEQ ID NO: 5562814 - DNA, 25 bp, Homo sapien
cttagagcccgaacgttgtcgaatc

SEQ ID NO: 5562815 - DNA, 25 bp, Homo sapien
ctcccactacagctgaagggaagat

SEQ ID NO: 5562816 - DNA, 25 bp, Homo sapien
gttgcacaggagggcatttatcctg

SEQ ID NO: 5562817 - DNA, 25 bp, Homo sapien
tagggaagatgcagcctcccactac

SEQ ID NO: 5562818 - DNA, 25 bp, Homo sapien
gctttattggggagaagcaaaagaa

SEQ ID NO: 5562819 - DNA, 25 bp, Homo sapien
ctgctgctggtaagacatctctcct

SEQ ID NO: 5562820 - DNA, 25 bp, Homo sapien
caacgctcaagccagacagaggtta

SEQ ID NO: 5562821 - DNA, 25 bp, Homo sapien
caggataggaaccaccatctacatc

SEQ ID NO: 5562822 - DNA, 25 bp, Homo sapien
catttatcctggcatggtggaggtg

SEQ ID NO: 5562823 - DNA, 25 bp, Homo sapien
caaagcgagattaggcaatgatctg

SEQ ID NO: 5562824 - DNA, 25 bp, Homo sapien
ttaggcaatgatctggctgctcatc

SEQ ID NO: 5562825 - DNA, 25 bp, Homo sapien
cacacttgctctcaggataggaacc

SEQ ID NO: 5562826 - DNA, 25 bp, Homo sapien
tctagataattaggctgaccagttc

SEQ ID NO: 5562827 - DNA, 25 bp, Homo sapien
gatggaatcccaccccgtcatatgc

SEQ ID NO: 5562828 - DNA, 25 bp, Homo sapien
atttcagatgtaagtaaaagaacac

SEQ ID NO: 5562829 - DNA, 25 bp, Homo sapien
aggagtactgagtctgaatcaggtc

SEQ ID NO: 5562830 - DNA, 25 bp, Homo sapien
cataatggcattggagatagacaga

SEQ ID NO: 5562831 - DNA, 25 bp, Homo sapien
gaatcaggtcctaagtatttcagat

SEQ ID NO: 5562832 - DNA, 25 bp, Homo sapien
taggctgaccagttcatagggttgt

SEQ ID NO: 5562833 - DNA, 25 bp, Homo sapien
accttcttggttttgcccgggagca

SEQ ID NO: 5562834 - DNA, 25 bp, Homo sapien
catatgctgactgactctgtactac

SEQ ID NO: 5562835 - DNA, 25 bp, Homo sapien
gatagacagacctgtgatggaatcc

SEQ ID NO: 5562836 - DNA, 25 bp, Homo sapien
cattcaattaaaagtaagggccaaa

SEQ ID NO: 5562837 - DNA, 25 bp, Homo sapien
tcacaagtacaaagccattgatgtt

SEQ ID NO: 5562838 - DNA, 25 bp, Homo sapien
gaggaaataaatggcagatgttaca

SEQ ID NO: 5562839 - DNA, 25 bp, Homo sapien
gttagtgtgtaacagagagaaaaca

SEQ ID NO: 5562840 - DNA, 25 bp, Homo sapien
cccacaactagggcaaggttatctc

SEQ ID NO: 5562841 - DNA, 25 bp, Homo sapien
aattttaaatcttggcacagtgccc

SEQ ID NO: 5562842 - DNA, 25 bp, Homo sapien
acacaggaagcaatataacatggtc

SEQ ID NO: 5562843 - DNA, 25 bp, Homo sapien
aaaaatgaagacatgatcaaggaga

SEQ ID NO: 5562844 - DNA, 25 bp, Homo sapien
cagaggatttgtacagctgaggaaa

SEQ ID NO: 5562845 - DNA, 25 bp, Homo sapien
acagtgcccacaagccgtgtgactt

SEQ ID NO: 5562846 - DNA, 25 bp, Homo sapien
atttttgacaggtacagagcacatt

SEQ ID NO: 5562847 - DNA, 25 bp, Homo sapien
gttcagacaatagcatgtggtgtac

SEQ ID NO: 5562848 - DNA, 25 bp, Homo sapien
tcaattatgattaggaagccaagtc

SEQ ID NO: 5562849 - DNA, 25 bp, Homo sapien
acgtcttatggcagatcagaagatt

SEQ ID NO: 5562850 - DNA, 25 bp, Homo sapien
gcctaatggtatgaaggcaagtagc

SEQ ID NO: 5562851 - DNA, 25 bp, Homo sapien
agaagtagaaatggattaaatgcct

SEQ ID NO: 5562852 - DNA, 25 bp, Homo sapien
ggcaagtagcctaatgtacccattg

SEQ ID NO: 5562853 - DNA, 25 bp, Homo sapien
tcaaagaagtgagatctatgcttag

SEQ ID NO: 5562854 - DNA, 25 bp, Homo sapien
ctgacatctattaggggagacagac

SEQ ID NO: 5562855 - DNA, 25 bp, Homo sapien
ggctgctataggaaaagagcaggag

SEQ ID NO: 5562856 - DNA, 25 bp, Homo sapien
aaagagagaaactgattgaaatttg

SEQ ID NO: 5562857 - DNA, 25 bp, Homo sapien
gggagacagacaaatgattataata

SEQ ID NO: 5562858 - DNA, 25 bp, Homo sapien
tgctgagcactgaatcagaagtaga

SEQ ID NO: 5562859 - DNA, 25 bp, Homo sapien
aagacttgatactgtaaaaatacta

SEQ ID NO: 5562860 - DNA, 25 bp, Homo sapien
tagtatttttacagtatcaagtctt

SEQ ID NO: 5562861 - DNA, 25 bp, Homo sapien
ctgcgcagctgaggtacttcagtca

SEQ ID NO: 5562862 - DNA, 25 bp, Homo sapien
taaaagttagaagaaatgagtacca

SEQ ID NO: 5562863 - DNA, 25 bp, Homo sapien
ttttatctgcagggctaggttaagg

SEQ ID NO: 5562864 - DNA, 25 bp, Homo sapien
gagggaactaaatggagccctgact

SEQ ID NO: 5562865 - DNA, 25 bp, Homo sapien
tgctgatctgagggacagacctcta

SEQ ID NO: 5562866 - DNA, 25 bp, Homo sapien
tagaagaaatgagtaccaacaggaa

SEQ ID NO: 5562867 - DNA, 25 bp, Homo sapien
ggaagagtgtggattagtgccatta

SEQ ID NO: 5562868 - DNA, 25 bp, Homo sapien
agtgccattattcagggctggtatt

SEQ ID NO: 5562869 - DNA, 25 bp, Homo sapien
gccctgactgcaccaaataaagttc

SEQ ID NO: 5562870 - DNA, 25 bp, Homo sapien
ttaaaaaaactggctacaggctgcg

SEQ ID NO: 5562871 - DNA, 25 bp, Homo sapien
aggggctaagacattgctgatctga

SEQ ID NO: 5562872 - DNA, 25 bp, Homo sapien
aatgtgatttatatgagcgcttcct

SEQ ID NO: 5562873 - DNA, 25 bp, Homo sapien
atcaatgcacagtacggatgccaat

SEQ ID NO: 5562874 - DNA, 25 bp, Homo sapien
cagggtaagaaaatggtccaaatga

SEQ ID NO: 5562875 - DNA, 25 bp, Homo sapien
caagggcacttcacatttaaccacc

SEQ ID NO: 5562876 - DNA, 25 bp, Homo sapien
acggatgccaattagatggtaaatt

SEQ ID NO: 5562877 - DNA, 25 bp, Homo sapien
aaagtagatagtaaaacagagaatt

SEQ ID NO: 5562878 - DNA, 25 bp, Homo sapien
atacctgtacaagaacaagggacac

SEQ ID NO: 5562879 - DNA, 25 bp, Homo sapien
tatggaagaataagatgatttggat

SEQ ID NO: 5562880 - DNA, 25 bp, Homo sapien
atgaactagaagacttccagcaagt

SEQ ID NO: 5562881 - DNA, 25 bp, Homo sapien
cccattgccaacagatattgagttc

SEQ ID NO: 5562882 - DNA, 25 bp, Homo sapien
aagaaaaaatcagaagttacacact

SEQ ID NO: 5562883 - DNA, 25 bp, Homo sapien
tttatttgaggacccagtgcagagt

SEQ ID NO: 5562884 - DNA, 25 bp, Homo sapien
gagttcaagcagcaaaaccccaact

SEQ ID NO: 5562885 - DNA, 25 bp, Homo sapien
taggccattttaggtgtatgtgtgt

SEQ ID NO: 5562886 - DNA, 25 bp, Homo sapien
tattgttggggtgtaactgcttctt

SEQ ID NO: 5562887 - DNA, 25 bp, Homo sapien
ttcacatcggtttatttgaggaccc

SEQ ID NO: 5562888 - DNA, 25 bp, Homo sapien
atttgagccaaatactagaagtctt

SEQ ID NO: 5562889 - DNA, 25 bp, Homo sapien
agggtgaaaagtgacctactacatt

SEQ ID NO: 5562890 - DNA, 25 bp, Homo sapien
attttatagctacaagggtgaaaag

SEQ ID NO: 5562891 - DNA, 25 bp, Homo sapien
attacatggatgtctgctttaggcc

SEQ ID NO: 5562892 - DNA, 25 bp, Homo sapien
agatccactgcaaatgaatgaacta

SEQ ID NO: 5562893 - DNA, 25 bp, Homo sapien
agcaaaaccccaacttagcagatct

SEQ ID NO: 5562894 - DNA, 25 bp, Homo sapien
ttatgggaacagtcagccctcatcc

SEQ ID NO: 5562895 - DNA, 25 bp, Homo sapien
tggggacaggcttcccctgcagctg

SEQ ID NO: 5562896 - DNA, 25 bp, Homo sapien
aaaggagatttttgtcacggacact

SEQ ID NO: 5562897 - DNA, 25 bp, Homo sapien
aatgtggaaggaaggcacttccaat

SEQ ID NO: 5562898 - DNA, 25 bp, Homo sapien
ctgggggctcatttgatcccgtctc

SEQ ID NO: 5562899 - DNA, 25 bp, Homo sapien
acagaatataaccacaccccatgcc

SEQ ID NO: 5562900 - DNA, 25 bp, Homo sapien
gacgaaccatgggtccttggcttat

SEQ ID NO: 5562901 - DNA, 25 bp, Homo sapien
actggttcttaggtaatgtggaagg

SEQ ID NO: 5562902 - DNA, 25 bp, Homo sapien
gtcacggacactgaacttaaccatt

SEQ ID NO: 5562903 - DNA, 25 bp, Homo sapien
gtgtcttcagagtcctaactggttc

SEQ ID NO: 5562904 - DNA, 25 bp, Homo sapien
caccaagtgtgagtgtgattgtcac

SEQ ID NO: 5562905 - DNA, 25 bp, Homo sapien
taaaactcactggcaaaaaaaatca

SEQ ID NO: 5562906 - DNA, 25 bp, Homo sapien
gtggaataggttaaagttactggca

SEQ ID NO: 5562907 - DNA, 25 bp, Homo sapien
atggcaattaaaactcactggcaaa

SEQ ID NO: 5562908 - DNA, 25 bp, Homo sapien
ttgaattcatgatagtatttaacat

SEQ ID NO: 5562909 - DNA, 25 bp, Homo sapien
tatatattgtgtgtccgtatcaaaa

SEQ ID NO: 5562910 - DNA, 25 bp, Homo sapien
aatcactagagatgtcagtccatta

SEQ ID NO: 5562911 - DNA, 25 bp, Homo sapien
tatgtacacatattaggtatccaca

SEQ ID NO: 5562912 - DNA, 25 bp, Homo sapien
aataatcctgtagtcaacaacaatt

SEQ ID NO: 5562913 - DNA, 25 bp, Homo sapien
tcactagagatgtcagtccattatc

SEQ ID NO: 5562914 - DNA, 25 bp, Homo sapien
gaggtaatggagaccgcatttagtc

SEQ ID NO: 5562915 - DNA, 25 bp, Homo sapien
tagtctaatgcgattgttatatatt

SEQ ID NO: 5562916 - DNA, 25 bp, Homo sapien
tgggccagaagagctgattattacc

SEQ ID NO: 5562917 - DNA, 25 bp, Homo sapien
tgatcattcctacttgtgggccaga

SEQ ID NO: 5562918 - DNA, 25 bp, Homo sapien
gggcatctgaggtcttctagccata

SEQ ID NO: 5562919 - DNA, 25 bp, Homo sapien
agcacaaaatgaactgaaatagtgt

SEQ ID NO: 5562920 - DNA, 25 bp, Homo sapien
gcaggcaatttaaaggccaccccac

SEQ ID NO: 5562921 - DNA, 25 bp, Homo sapien
tgtagtctggagggatttcacaaac

SEQ ID NO: 5562922 - DNA, 25 bp, Homo sapien
taaataagcatttgaaggcctcttc

SEQ ID NO: 5562923 - DNA, 25 bp, Homo sapien
agggttaccagcagtagatcaatac

SEQ ID NO: 5562924 - DNA, 25 bp, Homo sapien
aatgctgccatcaagcagggttacc

SEQ ID NO: 5562925 - DNA, 25 bp, Homo sapien
gttaggtaagcatgcatgtagtctg

SEQ ID NO: 5562926 - DNA, 25 bp, Homo sapien
ttcacaaacgtgacagctgtgggca

SEQ ID NO: 5562927 - DNA, 25 bp, Homo sapien
tgggaccacaggtgattactacctt

SEQ ID NO: 5562928 - DNA, 25 bp, Homo sapien
gcaaggatgccaacaaaggttttct

SEQ ID NO: 5562929 - DNA, 25 bp, Homo sapien
gtgaacggcactaaatgaaactaat

SEQ ID NO: 5562930 - DNA, 25 bp, Homo sapien
agctaccaaatcctggccccacagc

SEQ ID NO: 5562931 - DNA, 25 bp, Homo sapien
tgacagctgccactggcacagtccc

SEQ ID NO: 5562932 - DNA, 25 bp, Homo sapien
ggaggacctgtgaaagtgctcacaa

SEQ ID NO: 5562933 - DNA, 25 bp, Homo sapien
gcagacagcctgcttagaaagaaaa

SEQ ID NO: 5562934 - DNA, 25 bp, Homo sapien
gaaaacgaacaattgtgaacggcac

SEQ ID NO: 5562935 - DNA, 25 bp, Homo sapien
cagcacatagttcacagaaggttat

SEQ ID NO: 5562936 - DNA, 25 bp, Homo sapien
ggcacaatcataggtcattgcagcc

SEQ ID NO: 5562937 - DNA, 25 bp, Homo sapien
aatgaaagaatactagaaaacgaac

SEQ ID NO: 5562938 - DNA, 25 bp, Homo sapien
agtccgggactgtgaccctaacact

SEQ ID NO: 5562939 - DNA, 25 bp, Homo sapien
aagaaatgatggaaacgtctccctt

SEQ ID NO: 5562940 - DNA, 25 bp, Homo sapien
accccagacaacagggcatgtgtgt

SEQ ID NO: 5562941 - DNA, 25 bp, Homo sapien
gatgagtatgtggtgagtcttccca

SEQ ID NO: 5562942 - DNA, 25 bp, Homo sapien
cctttgataggcatggcaaaaagcc

SEQ ID NO: 5562943 - DNA, 25 bp, Homo sapien
aatgtggaacacagtgctgagtaca

SEQ ID NO: 5562944 - DNA, 25 bp, Homo sapien
gctgagtacagatggcacttcctaa

SEQ ID NO: 5562945 - DNA, 25 bp, Homo sapien
ctccccactgatgcaggtttgcctc

SEQ ID NO: 5562946 - DNA, 25 bp, Homo sapien
cataccaatagagaaacagtctgcc

SEQ ID NO: 5562947 - DNA, 25 bp, Homo sapien
ctttgtgagactgccttcctgaccc

SEQ ID NO: 5562948 - DNA, 25 bp, Homo sapien
ctgacccgcttgtaggctgcttttg

SEQ ID NO: 5562949 - DNA, 25 bp, Homo sapien
aacccaggtttctgactgcaaagcc

SEQ ID NO: 5562950 - DNA, 25 bp, Homo sapien
actccaggcagagaaatagcataag

SEQ ID NO: 5562951 - DNA, 25 bp, Homo sapien
ttacagatcagaaaacagactcaaa

SEQ ID NO: 5562952 - DNA, 25 bp, Homo sapien
aagcccaagctttctccactacgcc

SEQ ID NO: 5562953 - DNA, 25 bp, Homo sapien
gccaggatccgaacccaggtttctg

SEQ ID NO: 5562954 - DNA, 25 bp, Homo sapien
tacagtaggtgtcattatttccatt

SEQ ID NO: 5562955 - DNA, 25 bp, Homo sapien
ttaatccttacagtaggtgtcatta

SEQ ID NO: 5562956 - DNA, 25 bp, Homo sapien
agatgtgtcaggggtagttttcact

SEQ ID NO: 5562957 - DNA, 25 bp, Homo sapien
ttctccactacgccagccagctgga

SEQ ID NO: 5562958 - DNA, 25 bp, Homo sapien
aataataagttgtgaagccaggatc

SEQ ID NO: 5562959 - DNA, 25 bp, Homo sapien
gtcaggggtagttttcactccaggc

SEQ ID NO: 5562960 - DNA, 25 bp, Homo sapien
agttactggcataagaacacttcat

SEQ ID NO: 5562961 - DNA, 25 bp, Homo sapien
aaaaagaataaatgctagaggtaat

SEQ ID NO: 5562962 - DNA, 25 bp, Homo sapien
aaaataactaaaagtgtacaattga

SEQ ID NO: 5562963 - DNA, 25 bp, Homo sapien
atgaccataaaaatgaccctgtaat

SEQ ID NO: 5562964 - DNA, 25 bp, Homo sapien
tgcctgcatcaaaatataccatata

SEQ ID NO: 5562965 - DNA, 25 bp, Homo sapien
aaatgttgaattgaaaagctaagtt

SEQ ID NO: 5562966 - DNA, 25 bp, Homo sapien
ttattatatagagtatgcctgcatc

SEQ ID NO: 5562967 - DNA, 25 bp, Homo sapien
cttgagtaagggaatagcttaaagt

SEQ ID NO: 5562968 - DNA, 25 bp, Homo sapien
aagggaatagcttaaagttactggc

SEQ ID NO: 5562969 - DNA, 25 bp, Homo sapien
agaggtaatggatatctcatttcct

SEQ ID NO: 5562970 - DNA, 25 bp, Homo sapien
aatttaacccataggaacaatattc

SEQ ID NO: 5562971 - DNA, 25 bp, Homo sapien
ggggacaccctagaggacatctttg

SEQ ID NO: 5562972 - DNA, 25 bp, Homo sapien
acctaggccaagaccccactatctg

SEQ ID NO: 5562973 - DNA, 25 bp, Homo sapien
ttccacgcctataagatgaccctct

SEQ ID NO: 5562974 - DNA, 25 bp, Homo sapien
aaaagagacatgtattgtgaggtgg

SEQ ID NO: 5562975 - DNA, 25 bp, Homo sapien
gccaaggttgagaattaatgtgcta

SEQ ID NO: 5562976 - DNA, 25 bp, Homo sapien
ttgggagaataatctacctaggcca

SEQ ID NO: 5562977 - DNA, 25 bp, Homo sapien
atgtgctagattgacacaggtgttt

SEQ ID NO: 5562978 - DNA, 25 bp, Homo sapien
gaactggttggacttctgagctaac

SEQ ID NO: 5562979 - DNA, 25 bp, Homo sapien
aatgggacacaggctttggtatcta

SEQ ID NO: 5562980 - DNA, 25 bp, Homo sapien
ggaaagctggcatacatagcgagtg

SEQ ID NO: 5562981 - DNA, 25 bp, Homo sapien
gaatttctggtaatgggacacaggc

SEQ ID NO: 5562982 - DNA, 25 bp, Homo sapien
gcaagggccagagctctgattttgt

SEQ ID NO: 5562983 - DNA, 25 bp, Homo sapien
gaggcaccccccgcctcacctggca

SEQ ID NO: 5562984 - DNA, 25 bp, Homo sapien
ctctcctaggttgccggaaatcgtc

SEQ ID NO: 5562985 - DNA, 25 bp, Homo sapien
ggtttggggccttcacagagtcaaa

SEQ ID NO: 5562986 - DNA, 25 bp, Homo sapien
ctcagagactggttcgaatccctgg

SEQ ID NO: 5562987 - DNA, 25 bp, Homo sapien
agttttttccgcaagggccagagct

SEQ ID NO: 5562988 - DNA, 25 bp, Homo sapien
gttcgaatccctggtgtccgggtgc

SEQ ID NO: 5562989 - DNA, 25 bp, Homo sapien
cttcacagagtcaaaccccaagcat

SEQ ID NO: 5562990 - DNA, 25 bp, Homo sapien
gcctcacctggcaccacgcggtgcc

SEQ ID NO: 5562991 - DNA, 25 bp, Homo sapien
cgcacacggaaaagtcttcccggtg

SEQ ID NO: 5562992 - DNA, 25 bp, Homo sapien
tcctatcataccccccaactctccc

SEQ ID NO: 5562993 - DNA, 25 bp, Homo sapien
ctgaatcactgaaacacccaaatat

SEQ ID NO: 5562994 - DNA, 25 bp, Homo sapien
tggttccccagcaataaactgagtc

SEQ ID NO: 5562995 - DNA, 25 bp, Homo sapien
cacagggtggcttgacaaatattaa

SEQ ID NO: 5562996 - DNA, 25 bp, Homo sapien
ttaagaaatgtactttgcatgtaaa

SEQ ID NO: 5562997 - DNA, 25 bp, Homo sapien
tgcttaaagttgaatattctgaatc

SEQ ID NO: 5562998 - DNA, 25 bp, Homo sapien
atcaagtaataaagtcatcaaaaat

SEQ ID NO: 5562999 - DNA, 25 bp, Homo sapien
aaagtcatcaaaaattaccagaaat

SEQ ID NO: 5563000 - DNA, 25 bp, Homo sapien
aaagtatatgtatttagtagtccta

SEQ ID NO: 5563001 - DNA, 25 bp, Homo sapien
taacattctgtaagacaaattctgc

SEQ ID NO: 5563002 - DNA, 25 bp, Homo sapien
gtagtcctattttgcagtagatgtc

SEQ ID NO: 5563003 - DNA, 25 bp, Homo sapien
ctgaattactggcttactgaatatt

SEQ ID NO: 5563004 - DNA, 25 bp, Homo sapien
atgtcggccctgaattaaggatttt

SEQ ID NO: 5563005 - DNA, 25 bp, Homo sapien
ttcaaactattcaggttacagacac

SEQ ID NO: 5563006 - DNA, 25 bp, Homo sapien
ttaagtagataatgtcggccctgaa

SEQ ID NO: 5563007 - DNA, 25 bp, Homo sapien
ttgcaattttgtggttcgtaaacta

SEQ ID NO: 5563008 - DNA, 25 bp, Homo sapien
agaattaaggagatttatagtgtac

SEQ ID NO: 5563009 - DNA, 25 bp, Homo sapien
tgtggttcgtaaactaatgaagaat

SEQ ID NO: 5563010 - DNA, 25 bp, Homo sapien
attaagaccatatctcaaagttgtt

SEQ ID NO: 5563011 - DNA, 25 bp, Homo sapien
tatactaaatgacctatatagtctc

SEQ ID NO: 5563012 - DNA, 25 bp, Homo sapien
atagtgtacatcaaagttcatagct

SEQ ID NO: 5563013 - DNA, 25 bp, Homo sapien
ttcaggttacagacacaaatttata

SEQ ID NO: 5563014 - DNA, 25 bp, Homo sapien
caaatttatagaattaaggagattt

SEQ ID NO: 5563015 - DNA, 25 bp, Homo sapien
aggtgaggcacagacactttttccc

SEQ ID NO: 5563016 - DNA, 25 bp, Homo sapien
aatatccctgtgaacagctggaggc

SEQ ID NO: 5563017 - DNA, 25 bp, Homo sapien
gaggtgaaggactatcacagtatcc

SEQ ID NO: 5563018 - DNA, 25 bp, Homo sapien
gctgagctgtgacagacactgctct

SEQ ID NO: 5563019 - DNA, 25 bp, Homo sapien
gggctccccaaagccacaatggccc

SEQ ID NO: 5563020 - DNA, 25 bp, Homo sapien
ggtgcgttgcttgtccctgcctgga

SEQ ID NO: 5563021 - DNA, 25 bp, Homo sapien
agccccttgaatgccaaagccccaa

SEQ ID NO: 5563022 - DNA, 25 bp, Homo sapien
ttgctttcccgatgcaggtgcgttg

SEQ ID NO: 5563023 - DNA, 25 bp, Homo sapien
cctctggccaataggctgcaagcgg

SEQ ID NO: 5563024 - DNA, 25 bp, Homo sapien
acagcagtgcgcccaacgctttcca

SEQ ID NO: 5563025 - DNA, 25 bp, Homo sapien
acagtatcctgggatcctgagctgc

SEQ ID NO: 5563026 - DNA, 25 bp, Homo sapien
gctgcagggtaggatctatcagaaa

SEQ ID NO: 5563027 - DNA, 25 bp, Homo sapien
ctactcttgttgcaggcgaagttct

SEQ ID NO: 5563028 - DNA, 25 bp, Homo sapien
agagcatccaccgcgtgcacctcta

SEQ ID NO: 5563029 - DNA, 25 bp, Homo sapien
tctcctactcttgttgcaggcgaag

SEQ ID NO: 5563030 - DNA, 25 bp, Homo sapien
gctccgacgattggagctttggggg

SEQ ID NO: 5563031 - DNA, 25 bp, Homo sapien
gagcatccaccgcgtgcacctctac

SEQ ID NO: 5563032 - DNA, 25 bp, Homo sapien
ggaaagagctccgacgattggagct

SEQ ID NO: 5563033 - DNA, 25 bp, Homo sapien
tgaaccattgcaacagcatgggcgc

SEQ ID NO: 5563034 - DNA, 25 bp, Homo sapien
ggtaggatctatcagaaagccgagg

SEQ ID NO: 5563035 - DNA, 25 bp, Homo sapien
atccaccgcgtgcacctctactccc

SEQ ID NO: 5563036 - DNA, 25 bp, Homo sapien
aggatctatcagaaagccgaggctg

SEQ ID NO: 5563037 - DNA, 25 bp, Homo sapien
ctgctttgtcagttatgtggttccc

SEQ ID NO: 5563038 - DNA, 25 bp, Homo sapien
gggttgcacaagagttaagcctata

SEQ ID NO: 5563039 - DNA, 25 bp, Homo sapien
attaggacaaaacacctggatggac

SEQ ID NO: 5563040 - DNA, 25 bp, Homo sapien
gaagaaacactataaaagtcaggat

SEQ ID NO: 5563041 - DNA, 25 bp, Homo sapien
gctgcacatgtggtagataaactat

SEQ ID NO: 5563042 - DNA, 25 bp, Homo sapien
ctccaagtaagtcatgctcactcac

SEQ ID NO: 5563043 - DNA, 25 bp, Homo sapien
aacacctggatggacttctgggatg

SEQ ID NO: 5563044 - DNA, 25 bp, Homo sapien
gatggctggaaagaactacttctca

SEQ ID NO: 5563045 - DNA, 25 bp, Homo sapien
tggaaggaagttgtaattaggacaa

SEQ ID NO: 5563046 - DNA, 25 bp, Homo sapien
caagatcaagctcacaagctccctc

SEQ ID NO: 5563047 - DNA, 25 bp, Homo sapien
ttaatgagcaaaactagggtatcta

SEQ ID NO: 5563048 - DNA, 25 bp, Homo sapien
aaaacagcaaccacagatagaagag

SEQ ID NO: 5563049 - DNA, 25 bp, Homo sapien
tcaatagcaattcagggaaagaggt

SEQ ID NO: 5563050 - DNA, 25 bp, Homo sapien
actccttacctgggcagtaatgccc

SEQ ID NO: 5563051 - DNA, 25 bp, Homo sapien
tggagataaccagtgttttagttcc

SEQ ID NO: 5563052 - DNA, 25 bp, Homo sapien
tgctgcagacagcagcacctggagc

SEQ ID NO: 5563053 - DNA, 25 bp, Homo sapien
cagatagaagagagatgacatttct

SEQ ID NO: 5563054 - DNA, 25 bp, Homo sapien
aatttgtgtgactgaagcctccatt

SEQ ID NO: 5563055 - DNA, 25 bp, Homo sapien
atcattggctcactggtgcagaagt

SEQ ID NO: 5563056 - DNA, 25 bp, Homo sapien
aagtgagaagaacgagacttcaata

SEQ ID NO: 5563057 - DNA, 25 bp, Homo sapien
agctgggagatggaccaattctcaa

SEQ ID NO: 5563058 - DNA, 25 bp, Homo sapien
aataagccatgttctgatgggggtc

SEQ ID NO: 5563059 - DNA, 25 bp, Homo sapien
atggacacctggagaatccaagcca

SEQ ID NO: 5563060 - DNA, 25 bp, Homo sapien
agactgtgcacacagtacagtgcac

SEQ ID NO: 5563061 - DNA, 25 bp, Homo sapien
ccataatgatgttgagaccatcctc

SEQ ID NO: 5563062 - DNA, 25 bp, Homo sapien
agaccatcctcctcaacaaagaatc

SEQ ID NO: 5563063 - DNA, 25 bp, Homo sapien
acgcaattttcatgcagactgtgca

SEQ ID NO: 5563064 - DNA, 25 bp, Homo sapien
atgtgctcaacatgactggctagtt

SEQ ID NO: 5563065 - DNA, 25 bp, Homo sapien
ccacactgaagtctacgcaattttc

SEQ ID NO: 5563066 - DNA, 25 bp, Homo sapien
acaaagaatcagtcagttcagcacc

SEQ ID NO: 5563067 - DNA, 25 bp, Homo sapien
agagggcaacacattgtaattcata

SEQ ID NO: 5563068 - DNA, 25 bp, Homo sapien
catgactggctagttaaaaacattt

SEQ ID NO: 5563069 - DNA, 25 bp, Homo sapien
taggactacacagtatgtgctcaac

SEQ ID NO: 5563070 - DNA, 25 bp, Homo sapien
attggaactgttgtgtagcatgtaa

SEQ ID NO: 5563071 - DNA, 25 bp, Homo sapien
catcccaattttaggagacactcct

SEQ ID NO: 5563072 - DNA, 25 bp, Homo sapien
agggaagcactaaaattcaggtttc

SEQ ID NO: 5563073 - DNA, 25 bp, Homo sapien
ttgacagttctaaggtaaaggagtg

SEQ ID NO: 5563074 - DNA, 25 bp, Homo sapien
atgaatgtaataagggaagcactaa

SEQ ID NO: 5563075 - DNA, 25 bp, Homo sapien
caagcacagccaaggcactttcctc

SEQ ID NO: 5563076 - DNA, 25 bp, Homo sapien
gagggtatacagttcacaaaatagc

SEQ ID NO: 5563077 - DNA, 25 bp, Homo sapien
aaataagcgctttcagagggtatac

SEQ ID NO: 5563078 - DNA, 25 bp, Homo sapien
agttctgcaagaattgtggattcac

SEQ ID NO: 5563079 - DNA, 25 bp, Homo sapien
aaattcaggtttcaagcacagccaa

SEQ ID NO: 5563080 - DNA, 25 bp, Homo sapien
aaccaatgaacatagtatagcatac

SEQ ID NO: 5563081 - DNA, 25 bp, Homo sapien
aactagtaaatggttgggctggatt

SEQ ID NO: 5563082 - DNA, 25 bp, Homo sapien
gggctggatttcaaactcaagtgtc

SEQ ID NO: 5563083 - DNA, 25 bp, Homo sapien
acagagaggttgcataacttgatag

SEQ ID NO: 5563084 - DNA, 25 bp, Homo sapien
aaccacagtaacaaagggcagtgat

SEQ ID NO: 5563085 - DNA, 25 bp, Homo sapien
taacttgatagaggtcacacaacta

SEQ ID NO: 5563086 - DNA, 25 bp, Homo sapien
attgtcatacataaaccagagtcat

SEQ ID NO: 5563087 - DNA, 25 bp, Homo sapien
gtcctataagttagaagagagaaat

SEQ ID NO: 5563088 - DNA, 25 bp, Homo sapien
agagagaaattacagcaagtgtttg

SEQ ID NO: 5563089 - DNA, 25 bp, Homo sapien
gtgtcggatgctgtgttaagtgctt

SEQ ID NO: 5563090 - DNA, 25 bp, Homo sapien
atggaataaatagacagaggtagtt

SEQ ID NO: 5563091 - DNA, 25 bp, Homo sapien
tacaatagtcctgtgaggtgttagc

SEQ ID NO: 5563092 - DNA, 25 bp, Homo sapien
aggagattcctaaagtcaagctgtc

SEQ ID NO: 5563093 - DNA, 25 bp, Homo sapien
gggaacagggatctgaatattcagc

SEQ ID NO: 5563094 - DNA, 25 bp, Homo sapien
ccttagtcacaccagagggaacagg

SEQ ID NO: 5563095 - DNA, 25 bp, Homo sapien
atgaggcttcgcatgatggatcagt

SEQ ID NO: 5563096 - DNA, 25 bp, Homo sapien
tcaagcaatggtccacacaggttcc

SEQ ID NO: 5563097 - DNA, 25 bp, Homo sapien
gacatgcgcctgaggctttttggag

SEQ ID NO: 5563098 - DNA, 25 bp, Homo sapien
atacaaaaaaagggtacagaaatga

SEQ ID NO: 5563099 - DNA, 25 bp, Homo sapien
ttggactgcagttgaccacacaggt

SEQ ID NO: 5563100 - DNA, 25 bp, Homo sapien
ggagctgctgtactaggagattcct

SEQ ID NO: 5563101 - DNA, 25 bp, Homo sapien
gaccacacaggtagttgaaaccaca

SEQ ID NO: 5563102 - DNA, 25 bp, Homo sapien
tggatcagtggccgcccattcaagc

SEQ ID NO: 5563103 - DNA, 25 bp, Homo sapien
gtggccaccgtgataacagttgact

SEQ ID NO: 5563104 - DNA, 25 bp, Homo sapien
tacgtagatgcagctgtatggttta

SEQ ID NO: 5563105 - DNA, 25 bp, Homo sapien
aaaaggaacaaactagtgatacatc

SEQ ID NO: 5563106 - DNA, 25 bp, Homo sapien
agccttggatggatctcaagggaat

SEQ ID NO: 5563107 - DNA, 25 bp, Homo sapien
aaaatatgaacatccagatacagtt

SEQ ID NO: 5563108 - DNA, 25 bp, Homo sapien
tgaaagttgcatgaatttgtgtaac

SEQ ID NO: 5563109 - DNA, 25 bp, Homo sapien
aacatctgggtactggtgctatcaa

SEQ ID NO: 5563110 - DNA, 25 bp, Homo sapien
gttgactctcggattgctgtacctc

SEQ ID NO: 5563111 - DNA, 25 bp, Homo sapien
gggtactggtgctatcaaagtgatt

SEQ ID NO: 5563112 - DNA, 25 bp, Homo sapien
caggaagtggcatgttcagtgattt

SEQ ID NO: 5563113 - DNA, 25 bp, Homo sapien
tcatatgtcaacaccgcagacggag

SEQ ID NO: 5563114 - DNA, 25 bp, Homo sapien
ttgtgcaaacacttctgagatctca

SEQ ID NO: 5563115 - DNA, 25 bp, Homo sapien
agttggaggttctgcttgagtattc

SEQ ID NO: 5563116 - DNA, 25 bp, Homo sapien
aatgcatacggtggtcaaagtaaat

SEQ ID NO: 5563117 - DNA, 25 bp, Homo sapien
tgtcattgaccactgtaagaaactc

SEQ ID NO: 5563118 - DNA, 25 bp, Homo sapien
tgcttgcctgtctctgaactccacc

SEQ ID NO: 5563119 - DNA, 25 bp, Homo sapien
gaactccacctctatcagcatactc

SEQ ID NO: 5563120 - DNA, 25 bp, Homo sapien
ttcaaaacccagatacgcaggagga

SEQ ID NO: 5563121 - DNA, 25 bp, Homo sapien
atactgaaaaacatcctgactctta

SEQ ID NO: 5563122 - DNA, 25 bp, Homo sapien
gaagcaagctttgaatgaaattggt

SEQ ID NO: 5563123 - DNA, 25 bp, Homo sapien
gccagaattcaaaacccagatacgc

SEQ ID NO: 5563124 - DNA, 25 bp, Homo sapien
ggaaagtgctatctaagttggaggt

SEQ ID NO: 5563125 - DNA, 25 bp, Homo sapien
gtcagagacagaaatctggaccaac

SEQ ID NO: 5563126 - DNA, 25 bp, Homo sapien
gttggtccagatttctgtctctgac

SEQ ID NO: 5563127 - DNA, 25 bp, Homo sapien
atatataaaatcaagcaaggcacgt

SEQ ID NO: 5563128 - DNA, 25 bp, Homo sapien
gtcttgtaagggtcctacgactctc

SEQ ID NO: 5563129 - DNA, 25 bp, Homo sapien
gtactagagatgctggagcctctga

SEQ ID NO: 5563130 - DNA, 25 bp, Homo sapien
caaggcacgtgacagtcaggcttta

SEQ ID NO: 5563131 - DNA, 25 bp, Homo sapien
gtagtttgcagtgtatctagtagga

SEQ ID NO: 5563132 - DNA, 25 bp, Homo sapien
aaatgcatcgagtggcttgttgggt

SEQ ID NO: 5563133 - DNA, 25 bp, Homo sapien
tggctgctgttcatttggggaatgc

SEQ ID NO: 5563134 - DNA, 25 bp, Homo sapien
ttggggaatgctatattggactatt

SEQ ID NO: 5563135 - DNA, 25 bp, Homo sapien
tttgatggtgggatgtccagataaa

SEQ ID NO: 5563136 - DNA, 25 bp, Homo sapien
agctggaactattgagaatgtgata

SEQ ID NO: 5563137 - DNA, 25 bp, Homo sapien
gtgatagaaaaatgcatcgagtggc

SEQ ID NO: 5563138 - DNA, 25 bp, Homo sapien
ttggagttaagtagccttgacagac

SEQ ID NO: 5563139 - DNA, 25 bp, Homo sapien
agtgtagggctggaatcctaacaat

SEQ ID NO: 5563140 - DNA, 25 bp, Homo sapien
cacaaagccgaaagtatttaccctc

SEQ ID NO: 5563141 - DNA, 25 bp, Homo sapien
cccacagtgttaagcataaaattac

SEQ ID NO: 5563142 - DNA, 25 bp, Homo sapien
aacatgatgctttaagaaccttgac

SEQ ID NO: 5563143 - DNA, 25 bp, Homo sapien
cttgacagacaccatatggcccaca

SEQ ID NO: 5563144 - DNA, 25 bp, Homo sapien
gaaggaaccattgggaacaaacatc

SEQ ID NO: 5563145 - DNA, 25 bp, Homo sapien
tgaagtaatcacaaatgaaggaacc

SEQ ID NO: 5563146 - DNA, 25 bp, Homo sapien
tacagtaatagcagcaacatgatgc

SEQ ID NO: 5563147 - DNA, 25 bp, Homo sapien
ctggccctctgtggaaattgacatc

SEQ ID NO: 5563148 - DNA, 25 bp, Homo sapien
aaaagatgattgtcagtgtagggct

SEQ ID NO: 5563149 - DNA, 25 bp, Homo sapien
cttacacagaatagtgacaagagac

SEQ ID NO: 5563150 - DNA, 25 bp, Homo sapien
caaagctagatgacaataagactgc

SEQ ID NO: 5563151 - DNA, 25 bp, Homo sapien
ttagcccgatactgaacattactcc

SEQ ID NO: 5563152 - DNA, 25 bp, Homo sapien
ttagtaggaacaaagatgtctgatg

SEQ ID NO: 5563153 - DNA, 25 bp, Homo sapien
atgaagaaaaatacatatagtggta

SEQ ID NO: 5563154 - DNA, 25 bp, Homo sapien
attggatgagtgatatccatcgatc

SEQ ID NO: 5563155 - DNA, 25 bp, Homo sapien
gacatatgaaagggcaagtgtatca

SEQ ID NO: 5563156 - DNA, 25 bp, Homo sapien
acagaaagccttgaagagactccaa

SEQ ID NO: 5563157 - DNA, 25 bp, Homo sapien
aagtttaaggccgtggtctaatcca

SEQ ID NO: 5563158 - DNA, 25 bp, Homo sapien
atagtggtatttgggattataatct

SEQ ID NO: 5563159 - DNA, 25 bp, Homo sapien
tagtgacaagagacatatgaaaggg

SEQ ID NO: 5563160 - DNA, 25 bp, Homo sapien
aggaatcgaaggctaacctggtttc

SEQ ID NO: 5563161 - DNA, 25 bp, Homo sapien
accacttcagagaagtttggggacc

SEQ ID NO: 5563162 - DNA, 25 bp, Homo sapien
tggaggaacttgggccaatctgaaa

SEQ ID NO: 5563163 - DNA, 25 bp, Homo sapien
tctggtagtcagcgtcccacctgga

SEQ ID NO: 5563164 - DNA, 25 bp, Homo sapien
gacagagagatacaacgaaaattac

SEQ ID NO: 5563165 - DNA, 25 bp, Homo sapien
cacttcttttggggtcagagctctc

SEQ ID NO: 5563166 - DNA, 25 bp, Homo sapien
cgggtacacagtgtcgacagctact

SEQ ID NO: 5563167 - DNA, 25 bp, Homo sapien
gtcagagctctcaaaagggtgacca

SEQ ID NO: 5563168 - DNA, 25 bp, Homo sapien
gtgaccaaccacagatgaaagaaaa

SEQ ID NO: 5563169 - DNA, 25 bp, Homo sapien
aacagctcagtgaggtccgtgctat

SEQ ID NO: 5563170 - DNA, 25 bp, Homo sapien
gccatggctaactgggcctcagaac

SEQ ID NO: 5563171 - DNA, 25 bp, Homo sapien
tttaaataggtagctgcctggttct

SEQ ID NO: 5563172 - DNA, 25 bp, Homo sapien
agcaatagctcaagagccaggctga

SEQ ID NO: 5563173 - DNA, 25 bp, Homo sapien
caaagtgagatctctgcaggcttcc

SEQ ID NO: 5563174 - DNA, 25 bp, Homo sapien
cgatgtgcagtataaaacacctctc

SEQ ID NO: 5563175 - DNA, 25 bp, Homo sapien
ccagcaacaatgggcccacatttca

SEQ ID NO: 5563176 - DNA, 25 bp, Homo sapien
tattaggcctcaccgatgtgcagta

SEQ ID NO: 5563177 - DNA, 25 bp, Homo sapien
gatgtgaggaaagaaccctccacta

SEQ ID NO: 5563178 - DNA, 25 bp, Homo sapien
atttcaggtacagcagaactgacgg

SEQ ID NO: 5563179 - DNA, 25 bp, Homo sapien
tcttacattagggcccacttgactc

SEQ ID NO: 5563180 - DNA, 25 bp, Homo sapien
gacggcctctgttagagagggcatg

SEQ ID NO: 5563181 - DNA, 25 bp, Homo sapien
aagtgtggaatcgccagcaacaatg

SEQ ID NO: 5563182 - DNA, 25 bp, Homo sapien
tcgctttcgcaactgggactccaat

SEQ ID NO: 5563183 - DNA, 25 bp, Homo sapien
ctgttgatcttgaccacgtggagtg

SEQ ID NO: 5563184 - DNA, 25 bp, Homo sapien
ggactccaatgttcccagtgggagc

SEQ ID NO: 5563185 - DNA, 25 bp, Homo sapien
gaaatgcacacgcctgcggtgctcg

SEQ ID NO: 5563186 - DNA, 25 bp, Homo sapien
ctcccggaatgataatgagaaggct

SEQ ID NO: 5563187 - DNA, 25 bp, Homo sapien
gagattccgggatttccgcccgcgc

SEQ ID NO: 5563188 - DNA, 25 bp, Homo sapien
agaaggagccccccacttatataac

SEQ ID NO: 5563189 - DNA, 25 bp, Homo sapien
ttctcagattcgaagaaatgcacac

SEQ ID NO: 5563190 - DNA, 25 bp, Homo sapien
aaaactatgttgagcgagacacatt

SEQ ID NO: 5563191 - DNA, 25 bp, Homo sapien
gagcccgagttcgctggaattctca

SEQ ID NO: 5563192 - DNA, 25 bp, Homo sapien
aggggccgacttaaactctggtaga

SEQ ID NO: 5563193 - DNA, 25 bp, Homo sapien
atactgaacccaatttgtagtcttt

SEQ ID NO: 5563194 - DNA, 25 bp, Homo sapien
tatgagaacatatgatgtttagttt

SEQ ID NO: 5563195 - DNA, 25 bp, Homo sapien
actgaatagttaatatcgctaaagc

SEQ ID NO: 5563196 - DNA, 25 bp, Homo sapien
cacccgagcagtatatactgaaccc

SEQ ID NO: 5563197 - DNA, 25 bp, Homo sapien
aatcactgaattgctaaactcactt

SEQ ID NO: 5563198 - DNA, 25 bp, Homo sapien
tagcttagggacatatgagaacata

SEQ ID NO: 5563199 - DNA, 25 bp, Homo sapien
atcctcatagcttagggacatatga

SEQ ID NO: 5563200 - DNA, 25 bp, Homo sapien
agttacataagttctttggcgattt

SEQ ID NO: 5563201 - DNA, 25 bp, Homo sapien
catagcttagggacatatgagaaca

SEQ ID NO: 5563202 - DNA, 25 bp, Homo sapien
cttttatcccttacgcccttctcac

SEQ ID NO: 5563203 - DNA, 25 bp, Homo sapien
tatcgctaaagcagaaattatactt

SEQ ID NO: 5563204 - DNA, 25 bp, Homo sapien
ctcactggctcatactttggggtcc

SEQ ID NO: 5563205 - DNA, 25 bp, Homo sapien
ggtccatgggagtatgtcaaacctt

SEQ ID NO: 5563206 - DNA, 25 bp, Homo sapien
gaacagagttggaccaaggttctct

SEQ ID NO: 5563207 - DNA, 25 bp, Homo sapien
aaggatctgtagacagcttggggat

SEQ ID NO: 5563208 - DNA, 25 bp, Homo sapien
acagatgctggtatatgggtcttga

SEQ ID NO: 5563209 - DNA, 25 bp, Homo sapien
tctttgtttcctggggccctcagcc

SEQ ID NO: 5563210 - DNA, 25 bp, Homo sapien
aaccttgtcagaacagagttggacc

SEQ ID NO: 5563211 - DNA, 25 bp, Homo sapien
agaggactgggaaatactccgttag

SEQ ID NO: 5563212 - DNA, 25 bp, Homo sapien
agaaagatccaaaaagtacactgct

SEQ ID NO: 5563213 - DNA, 25 bp, Homo sapien
tgttgcggatgttgcatgtggatat

SEQ ID NO: 5563214 - DNA, 25 bp, Homo sapien
ctcaccatacagaatgggcgagagg

SEQ ID NO: 5563215 - DNA, 25 bp, Homo sapien
actctctgagattgaccctgctggt

SEQ ID NO: 5563216 - DNA, 25 bp, Homo sapien
cctgggcgctgcttcatcacatgtc

SEQ ID NO: 5563217 - DNA, 25 bp, Homo sapien
ccgaacctacaggaagtgtacctca

SEQ ID NO: 5563218 - DNA, 25 bp, Homo sapien
aataataatgagttgacagcggtac

SEQ ID NO: 5563219 - DNA, 25 bp, Homo sapien
cgcctgagcaaaaacaggatcaccc

SEQ ID NO: 5563220 - DNA, 25 bp, Homo sapien
gctggttttgaggacttgccgaacc

SEQ ID NO: 5563221 - DNA, 25 bp, Homo sapien
tgaacaacatcacggaagtgcggaa

SEQ ID NO: 5563222 - DNA, 25 bp, Homo sapien
agccagctgaaggcctacctttcct

SEQ ID NO: 5563223 - DNA, 25 bp, Homo sapien
cggaccgcctataaaggagctcaac

SEQ ID NO: 5563224 - DNA, 25 bp, Homo sapien
ggtctgtcacggtcgctgctaactc

SEQ ID NO: 5563225 - DNA, 25 bp, Homo sapien
gcagcacaacaagattcgcagcgtg

SEQ ID NO: 5563226 - DNA, 25 bp, Homo sapien
ttaccagattggtgccacagtgaat

SEQ ID NO: 5563227 - DNA, 25 bp, Homo sapien
tacacttatgttctgaaggaggcat

SEQ ID NO: 5563228 - DNA, 25 bp, Homo sapien
actaatattagaaaaatgtcacaag

SEQ ID NO: 5563229 - DNA, 25 bp, Homo sapien
cagctttctggaccatgaaagtgtc

SEQ ID NO: 5563230 - DNA, 25 bp, Homo sapien
tatgttctgaaggaggcattatggt

SEQ ID NO: 5563231 - DNA, 25 bp, Homo sapien
gctggaagattcaactaaagtgcct

SEQ ID NO: 5563232 - DNA, 25 bp, Homo sapien
gtcacaagagatgcccaggccttca

SEQ ID NO: 5563233 - DNA, 25 bp, Homo sapien
taaagtgcctaatacgtgaaaatct

SEQ ID NO: 5563234 - DNA, 25 bp, Homo sapien
ccacagtgaataaaagagaaagtag

SEQ ID NO: 5563235 - DNA, 25 bp, Homo sapien
ggtgccacagtgaataaaagagaaa

SEQ ID NO: 5563236 - DNA, 25 bp, Homo sapien
acagcttttgctggaagattcaact

SEQ ID NO: 5563237 - DNA, 25 bp, Homo sapien
gtgtggatgaattgcagctcccaaa

SEQ ID NO: 5563238 - DNA, 25 bp, Homo sapien
acttgaaaatgaatgcgtgtgtgga

SEQ ID NO: 5563239 - DNA, 25 bp, Homo sapien
caaagcctgaactgcaaaccactac

SEQ ID NO: 5563240 - DNA, 25 bp, Homo sapien
tccaaaaggccctctgactgccagc

SEQ ID NO: 5563241 - DNA, 25 bp, Homo sapien
ttcctacaaagctggaaagtggctt

SEQ ID NO: 5563242 - DNA, 25 bp, Homo sapien
tttgaagccaggcttatgtggctcc

SEQ ID NO: 5563243 - DNA, 25 bp, Homo sapien
aagtaccatgaagaccccagtttta

SEQ ID NO: 5563244 - DNA, 25 bp, Homo sapien
gaagcctcagtcaaggccacagtgg

SEQ ID NO: 5563245 - DNA, 25 bp, Homo sapien
cagggacttatggatcaggtctgac

SEQ ID NO: 5563246 - DNA, 25 bp, Homo sapien
aggacatggatcagccccaaaccta

SEQ ID NO: 5563247 - DNA, 25 bp, Homo sapien
cagtggcatttgctccctgggcagg

SEQ ID NO: 5563248 - DNA, 25 bp, Homo sapien
ctggataaagggataacttttatgt

SEQ ID NO: 5563249 - DNA, 25 bp, Homo sapien
cttgctgtaaggttaacaaacgtac

SEQ ID NO: 5563250 - DNA, 25 bp, Homo sapien
aacgtacaccgcaaactggataaag

SEQ ID NO: 5563251 - DNA, 25 bp, Homo sapien
ccaggaccgaccctgtcccgacaaa

SEQ ID NO: 5563252 - DNA, 25 bp, Homo sapien
cgcggaaactacccgactccctgga

SEQ ID NO: 5563253 - DNA, 25 bp, Homo sapien
agagctcctcagtgatccggctttc

SEQ ID NO: 5563254 - DNA, 25 bp, Homo sapien
ccgacaaaatggagttccccgtgtg

SEQ ID NO: 5563255 - DNA, 25 bp, Homo sapien
gagttccccgtgtggcttcagctcg

SEQ ID NO: 5563256 - DNA, 25 bp, Homo sapien
ccctgtcccgacaaaatggagttcc

SEQ ID NO: 5563257 - DNA, 25 bp, Homo sapien
gcgcgttcccagagctcctcagtga

SEQ ID NO: 5563258 - DNA, 25 bp, Homo sapien
ccggctttcggattgttcgcctttc

SEQ ID NO: 5563259 - DNA, 25 bp, Homo sapien
tcctctgccaccaaacatcagctta

SEQ ID NO: 5563260 - DNA, 25 bp, Homo sapien
catgactcaagtctgcaccttgtac

SEQ ID NO: 5563261 - DNA, 25 bp, Homo sapien
ggcaggcagctgttgacactcagca

SEQ ID NO: 5563262 - DNA, 25 bp, Homo sapien
tgtaaaaagtatcatagtcaggtac

SEQ ID NO: 5563263 - DNA, 25 bp, Homo sapien
gcacacacaaagactgtcctacaac

SEQ ID NO: 5563264 - DNA, 25 bp, Homo sapien
agctttgtgcttgactgactctagt

SEQ ID NO: 5563265 - DNA, 25 bp, Homo sapien
gcaatctcttgacagttcacgcaac

SEQ ID NO: 5563266 - DNA, 25 bp, Homo sapien
tcacgcaactaataactcctctgcc

SEQ ID NO: 5563267 - DNA, 25 bp, Homo sapien
gaaaacatcaacacataggcaggca

SEQ ID NO: 5563268 - DNA, 25 bp, Homo sapien
aacagaagaaccctagttttgtgat

SEQ ID NO: 5563269 - DNA, 25 bp, Homo sapien
caacaaagaaaggatgaaaacatca

SEQ ID NO: 5563270 - DNA, 25 bp, Homo sapien
atggtgacagggttacttacagctg

SEQ ID NO: 5563271 - DNA, 25 bp, Homo sapien
acattcctagagaaaaggatcatcc

SEQ ID NO: 5563272 - DNA, 25 bp, Homo sapien
tggagatctgtgcaaatctagcaaa

SEQ ID NO: 5563273 - DNA, 25 bp, Homo sapien
gacttcaacataaaaatgcgaaaat

SEQ ID NO: 5563274 - DNA, 25 bp, Homo sapien
catccatggtgacagggttacttac

SEQ ID NO: 5563275 - DNA, 25 bp, Homo sapien
acaatagaggcttaacgaaaaaata

SEQ ID NO: 5563276 - DNA, 25 bp, Homo sapien
aatgcgaaaatgtagttgtcatctc

SEQ ID NO: 5563277 - DNA, 25 bp, Homo sapien
acacaacctgcaattatggaagtat

SEQ ID NO: 5563278 - DNA, 25 bp, Homo sapien
gttcagcccaatttgatttcaatgc

SEQ ID NO: 5563279 - DNA, 25 bp, Homo sapien
ctaaagtgacattgtccacaaaatg

SEQ ID NO: 5563280 - DNA, 25 bp, Homo sapien
tgcaaattcaattggagatctgtgc

SEQ ID NO: 5563281 - DNA, 25 bp, Homo sapien
tgagtagtaaaaatctctgaggact

SEQ ID NO: 5563282 - DNA, 25 bp, Homo sapien
gggtgaacagaaagaacacaataca

SEQ ID NO: 5563283 - DNA, 25 bp, Homo sapien
agacagtagaggaatcaaatgaaat

SEQ ID NO: 5563284 - DNA, 25 bp, Homo sapien
tgggacgcacacatgttgagtagta

SEQ ID NO: 5563285 - DNA, 25 bp, Homo sapien
tgacagattgaatggcccacaaggc

SEQ ID NO: 5563286 - DNA, 25 bp, Homo sapien
tctgaggacttcttgttaggggatg

SEQ ID NO: 5563287 - DNA, 25 bp, Homo sapien
ctacatatggtcagagtgggtagtt

SEQ ID NO: 5563288 - DNA, 25 bp, Homo sapien
ttctaaccctaagtcagaggaagaa

SEQ ID NO: 5563289 - DNA, 25 bp, Homo sapien
aaagttgtaggatcattgggccatt

SEQ ID NO: 5563290 - DNA, 25 bp, Homo sapien
cacaatacatctgagtgggacgcac

SEQ ID NO: 5563291 - DNA, 25 bp, Homo sapien
agagtgggtagttatgacagattga

SEQ ID NO: 5563292 - DNA, 25 bp, Homo sapien
gaattctcaggctgagtatattggc

SEQ ID NO: 5563293 - DNA, 25 bp, Homo sapien
tctcaggctgagtatattggcttat

SEQ ID NO: 5563294 - DNA, 25 bp, Homo sapien
tcaggctgagtatattggcttatgc

SEQ ID NO: 5563295 - DNA, 25 bp, Homo sapien
tgtaccttgcaatgaatatacattt

SEQ ID NO: 5563296 - DNA, 25 bp, Homo sapien
ctggtagaacatgacaaagtttatc

SEQ ID NO: 5563297 - DNA, 25 bp, Homo sapien
actgtatttactgtagatagacatt

SEQ ID NO: 5563298 - DNA, 25 bp, Homo sapien
aacactggtagaacatgacaaagtt

SEQ ID NO: 5563299 - DNA, 25 bp, Homo sapien
catgtgccctatggatttgtacttt

SEQ ID NO: 5563300 - DNA, 25 bp, Homo sapien
gtaataaaacactggtagaacatga

SEQ ID NO: 5563301 - DNA, 25 bp, Homo sapien
tacagttcacattgtaccttgcaat

SEQ ID NO: 5563302 - DNA, 25 bp, Homo sapien
agttctcatgtgccctatggatttg

SEQ ID NO: 5563303 - DNA, 25 bp, Homo sapien
ccctcgccccgagctcaggagcggg

SEQ ID NO: 5563304 - DNA, 25 bp, Homo sapien
cccgctcctgagctcggggcgaggg

SEQ ID NO: 5563305 - DNA, 25 bp, Homo sapien
atggggacttggctcaacgtcctgg

SEQ ID NO: 5563306 - DNA, 25 bp, Homo sapien
cccgcagcctccgcactgcgagtcc

SEQ ID NO: 5563307 - DNA, 25 bp, Homo sapien
ttggcgagagctaacgtttagtgag

SEQ ID NO: 5563308 - DNA, 25 bp, Homo sapien
aggggctgcgtctgtcttcttcact

SEQ ID NO: 5563309 - DNA, 25 bp, Homo sapien
ttcactgctgtggacgcagcgaata

SEQ ID NO: 5563310 - DNA, 25 bp, Homo sapien
gaatagcacacagccagagaaactt

SEQ ID NO: 5563311 - DNA, 25 bp, Homo sapien
atcagtgatgttattggcgagagct

SEQ ID NO: 5563312 - DNA, 25 bp, Homo sapien
ggctccgccctaaaggcagccactg

SEQ ID NO: 5563313 - DNA, 25 bp, Homo sapien
gcttagcctgtgcccggcgttgttc

SEQ ID NO: 5563314 - DNA, 25 bp, Homo sapien
ctccgcactgcgagtcctaggagat

SEQ ID NO: 5563315 - DNA, 25 bp, Homo sapien
acgtttagtgagcgcttagcctgtg

SEQ ID NO: 5563316 - DNA, 25 bp, Homo sapien
atctgaaagggttaaatattgtgcc

SEQ ID NO: 5563317 - DNA, 25 bp, Homo sapien
tagcctggaaatcctgcctgaaacc

SEQ ID NO: 5563318 - DNA, 25 bp, Homo sapien
ctttctgtgaattaatgtgtgtgcc

SEQ ID NO: 5563319 - DNA, 25 bp, Homo sapien
ataatcatgccatcggagcaggctg

SEQ ID NO: 5563320 - DNA, 25 bp, Homo sapien
tcggagcaggctgtgatagcctgga

SEQ ID NO: 5563321 - DNA, 25 bp, Homo sapien
attgtgcccacgtgactactgttct

SEQ ID NO: 5563322 - DNA, 25 bp, Homo sapien
aaagaagggcatggacttatgttta

SEQ ID NO: 5563323 - DNA, 25 bp, Homo sapien
aagaaatcaagcggtgataaacctc

SEQ ID NO: 5563324 - DNA, 25 bp, Homo sapien
tgtccagaagtgaccaaagaaattc

SEQ ID NO: 5563325 - DNA, 25 bp, Homo sapien
accagtgatgcagatgagctcctaa

SEQ ID NO: 5563326 - DNA, 25 bp, Homo sapien
tatctctgagcgttaagactgattt

SEQ ID NO: 5563327 - DNA, 25 bp, Homo sapien
tgctcgacgccgttacccagcagga

SEQ ID NO: 5563328 - DNA, 25 bp, Homo sapien
tgctccccgcgcagacctcgctaga

SEQ ID NO: 5563329 - DNA, 25 bp, Homo sapien
gcctttggcaagaactagaagtttc

SEQ ID NO: 5563330 - DNA, 25 bp, Homo sapien
gagcaggacttgtcagtacccgagt

SEQ ID NO: 5563331 - DNA, 25 bp, Homo sapien
ggccgcagcctctccggcctgctcc

SEQ ID NO: 5563332 - DNA, 25 bp, Homo sapien
cctcgctagagtacgccctgctcga

SEQ ID NO: 5563333 - DNA, 25 bp, Homo sapien
agaaggacagcctggtctaccagta

SEQ ID NO: 5563334 - DNA, 25 bp, Homo sapien
ggatctatgtggaaaaatagtcgtc

SEQ ID NO: 5563335 - DNA, 25 bp, Homo sapien
taccagtatctgcagaaggtggacg

SEQ ID NO: 5563336 - DNA, 25 bp, Homo sapien
ccctatggttaatgatgcagatgcc

SEQ ID NO: 5563337 - DNA, 25 bp, Homo sapien
ttagaatggctgaacacagaagaac

SEQ ID NO: 5563338 - DNA, 25 bp, Homo sapien
aataaatgacaaagctacgaatttg

SEQ ID NO: 5563339 - DNA, 25 bp, Homo sapien
caaattcgtagctttgtcatttatt

SEQ ID NO: 5563340 - DNA, 25 bp, Homo sapien
tcatcgaatagtacagaatggctgg

SEQ ID NO: 5563341 - DNA, 25 bp, Homo sapien
tttttgagctatactgtgatgtgtg

SEQ ID NO: 5563342 - DNA, 25 bp, Homo sapien
agtacagaatggctggatacaagga

SEQ ID NO: 5563343 - DNA, 25 bp, Homo sapien
taagagacaccaagcatgatttcgt

SEQ ID NO: 5563344 - DNA, 25 bp, Homo sapien
caactttcagattgcgaagagcgcc

SEQ ID NO: 5563345 - DNA, 25 bp, Homo sapien
gaggtgtgggatatagttgacatta

SEQ ID NO: 5563346 - DNA, 25 bp, Homo sapien
tcaacgtggcataagactacattac

SEQ ID NO: 5563347 - DNA, 25 bp, Homo sapien
tttcaggtcttgtgcacaggaaaag

SEQ ID NO: 5563348 - DNA, 25 bp, Homo sapien
actttatgacgcactcactgaggat

SEQ ID NO: 5563349 - DNA, 25 bp, Homo sapien
agtttctgggtgatgcattggatct

SEQ ID NO: 5563350 - DNA, 25 bp, Homo sapien
aaagcagggttttctcaacgtggca

SEQ ID NO: 5563351 - DNA, 25 bp, Homo sapien
ggtggagacgtccaggacttcttta

SEQ ID NO: 5563352 - DNA, 25 bp, Homo sapien
agactagttactcacgggacttggt

SEQ ID NO: 5563353 - DNA, 25 bp, Homo sapien
ggaagaaagtccttggcgttgcttc

SEQ ID NO: 5563354 - DNA, 25 bp, Homo sapien
gcctgagtggccttagactagttac

SEQ ID NO: 5563355 - DNA, 25 bp, Homo sapien
gttttgatgtcagtttggtgtggcc

SEQ ID NO: 5563356 - DNA, 25 bp, Homo sapien
aggtgggcagcaagtctgtttacta

SEQ ID NO: 5563357 - DNA, 25 bp, Homo sapien
tcacgggacttggtttcccagccaa

SEQ ID NO: 5563358 - DNA, 25 bp, Homo sapien
gcgttgcttcttagctgttgggagc

SEQ ID NO: 5563359 - DNA, 25 bp, Homo sapien
gcggttgtcatcgtgagcctctgtg

SEQ ID NO: 5563360 - DNA, 25 bp, Homo sapien
cttcttagctgttgggagctgtgcg

SEQ ID NO: 5563361 - DNA, 25 bp, Homo sapien
attagatgtttaggaatttgagttt

SEQ ID NO: 5563362 - DNA, 25 bp, Homo sapien
gcagggctggtatggtttttacaca

SEQ ID NO: 5563363 - DNA, 25 bp, Homo sapien
gcagatctgggctactagacctcta

SEQ ID NO: 5563364 - DNA, 25 bp, Homo sapien
ggagtagtccactgcggcagatctg

SEQ ID NO: 5563365 - DNA, 25 bp, Homo sapien
gccctcctaccaacaacacacccca

SEQ ID NO: 5563366 - DNA, 25 bp, Homo sapien
gcttcggctgggtttctctcgcact

SEQ ID NO: 5563367 - DNA, 25 bp, Homo sapien
gggaatgcaaagtgattggctcctt

SEQ ID NO: 5563368 - DNA, 25 bp, Homo sapien
gtaaactgggaatgcaaagtgattg

SEQ ID NO: 5563369 - DNA, 25 bp, Homo sapien
tccaacacacaaagtatcagagtcc

SEQ ID NO: 5563370 - DNA, 25 bp, Homo sapien
aaagtatcagagtcctgggctttgc

SEQ ID NO: 5563371 - DNA, 25 bp, Homo sapien
ctcgcactccccaggctgtaagagg

SEQ ID NO: 5563372 - DNA, 25 bp, Homo sapien
aggctttggactgctggatccctta

SEQ ID NO: 5563373 - DNA, 25 bp, Homo sapien
taaagtgagaacacgtctaccgtcg

SEQ ID NO: 5563374 - DNA, 25 bp, Homo sapien
cgacggtagacgtgttctcacttta

SEQ ID NO: 5563375 - DNA, 25 bp, Homo sapien
gcctggaggaacgcctcaacttcta

SEQ ID NO: 5563376 - DNA, 25 bp, Homo sapien
tggtcacatgcatttcatgccgcgc

SEQ ID NO: 5563377 - DNA, 25 bp, Homo sapien
atcaaatccaaaaagtggttgttcc

SEQ ID NO: 5563378 - DNA, 25 bp, Homo sapien
cctcggattgcttaaatgcgggatt

SEQ ID NO: 5563379 - DNA, 25 bp, Homo sapien
gagggaggtctatttgctcgtttcc

SEQ ID NO: 5563380 - DNA, 25 bp, Homo sapien
ctcggttttagaagttgacattgtt

SEQ ID NO: 5563381 - DNA, 25 bp, Homo sapien
gtttgtacagattcaccgagttgct

SEQ ID NO: 5563382 - DNA, 25 bp, Homo sapien
gaaaactggaaggtcccatagacta

SEQ ID NO: 5563383 - DNA, 25 bp, Homo sapien
aagcccaggaggcaaacattttgca

SEQ ID NO: 5563384 - DNA, 25 bp, Homo sapien
caccgagttgctgcgccttatcatc

SEQ ID NO: 5563385 - DNA, 25 bp, Homo sapien
aaggtcccatagactaatgtgttcc

SEQ ID NO: 5563386 - DNA, 25 bp, Homo sapien
actgctaggcaaagaatcccttcat

SEQ ID NO: 5563387 - DNA, 25 bp, Homo sapien
aaaagaaactgccattttgacagaa

SEQ ID NO: 5563388 - DNA, 25 bp, Homo sapien
aatgaaactaggttggataattacc

SEQ ID NO: 5563389 - DNA, 25 bp, Homo sapien
gtatggtattacacaggcttcactg

SEQ ID NO: 5563390 - DNA, 25 bp, Homo sapien
gaataagctctgaaacctccttcta

SEQ ID NO: 5563391 - DNA, 25 bp, Homo sapien
gcttcactgttgagaagtacaatgc

SEQ ID NO: 5563392 - DNA, 25 bp, Homo sapien
aatgctacatcagtttgacggccac

SEQ ID NO: 5563393 - DNA, 25 bp, Homo sapien
taaaaaattagacgacagatacatt

SEQ ID NO: 5563394 - DNA, 25 bp, Homo sapien
gacgacagatacattgagaatagcc

SEQ ID NO: 5563395 - DNA, 25 bp, Homo sapien
ttgacggccactgctaggcaaagaa

SEQ ID NO: 5563396 - DNA, 25 bp, Homo sapien
ttttgacagaatgataggaagagag

SEQ ID NO: 5563397 - DNA, 25 bp, Homo sapien
ataagagacaatgtaggtaaaagta

SEQ ID NO: 5563398 - DNA, 25 bp, Homo sapien
cagttaggaacccatcctaatgacc

SEQ ID NO: 5563399 - DNA, 25 bp, Homo sapien
aggaatagagtcatattggggttta

SEQ ID NO: 5563400 - DNA, 25 bp, Homo sapien
tagggtcatggctaacaagaaacat

SEQ ID NO: 5563401 - DNA, 25 bp, Homo sapien
cttcagagtcctccgcagaaaaggc

SEQ ID NO: 5563402 - DNA, 25 bp, Homo sapien
aattcagtccatagtaaacactttc

SEQ ID NO: 5563403 - DNA, 25 bp, Homo sapien
ttcttatagggtcatggctaacaag

SEQ ID NO: 5563404 - DNA, 25 bp, Homo sapien
ataagtcctgtctaggaatagagtc

SEQ ID NO: 5563405 - DNA, 25 bp, Homo sapien
tatgtggccttaacctaaggtatta

SEQ ID NO: 5563406 - DNA, 25 bp, Homo sapien
gtttagtatcccttcagagtcctcc

SEQ ID NO: 5563407 - DNA, 25 bp, Homo sapien
tggggtttatggcttcaatatatga

SEQ ID NO: 5563408 - DNA, 25 bp, Homo sapien
aagcgttcataacaaacttagaaaa

SEQ ID NO: 5563409 - DNA, 25 bp, Homo sapien
gaggatactgaccatgttcttcaac

SEQ ID NO: 5563410 - DNA, 25 bp, Homo sapien
ttaacttacataagtgagaggatac

SEQ ID NO: 5563411 - DNA, 25 bp, Homo sapien
aacataaccaccaaaccactgtctc

SEQ ID NO: 5563412 - DNA, 25 bp, Homo sapien
accccaatgctatccacttcctgcc

SEQ ID NO: 5563413 - DNA, 25 bp, Homo sapien
aatatagataatgttctttggagtt

SEQ ID NO: 5563414 - DNA, 25 bp, Homo sapien
caaaccactgtctcaccccaatgct

SEQ ID NO: 5563415 - DNA, 25 bp, Homo sapien
aatatcctgaagcgtatagaacttt

SEQ ID NO: 5563416 - DNA, 25 bp, Homo sapien
atccagtacaccaatcatctagtct

SEQ ID NO: 5563417 - DNA, 25 bp, Homo sapien
cttacataagtgagaggatactgac

SEQ ID NO: 5563418 - DNA, 25 bp, Homo sapien
taccacacatgtctatgccattacc

SEQ ID NO: 5563419 - DNA, 25 bp, Homo sapien
gggaagtctagaacaaaagctgatt

SEQ ID NO: 5563420 - DNA, 25 bp, Homo sapien
gttctggaacctgagtctggaacag

SEQ ID NO: 5563421 - DNA, 25 bp, Homo sapien
cactcatctagaactagagtggagg

SEQ ID NO: 5563422 - DNA, 25 bp, Homo sapien
gcctctggggaaagaatcctccata

SEQ ID NO: 5563423 - DNA, 25 bp, Homo sapien
gaacagccaaccccgtgaggctatt

SEQ ID NO: 5563424 - DNA, 25 bp, Homo sapien
tatcccagaaatccccagagcacag

SEQ ID NO: 5563425 - DNA, 25 bp, Homo sapien
tctagaacaaaagctgattgggagc

SEQ ID NO: 5563426 - DNA, 25 bp, Homo sapien
tcatctagaactagagtggaggcgg

SEQ ID NO: 5563427 - DNA, 25 bp, Homo sapien
atatatcccagaaatccccagagca

SEQ ID NO: 5563428 - DNA, 25 bp, Homo sapien
ggggggcacgcctcccactcatcta

SEQ ID NO: 5563429 - DNA, 25 bp, Homo sapien
ctggggaaagaatcctccatatatc

SEQ ID NO: 5563430 - DNA, 25 bp, Homo sapien
attacaggaaacctagcattttaat

SEQ ID NO: 5563431 - DNA, 25 bp, Homo sapien
ggctttaaggcccaaacacagtatc

SEQ ID NO: 5563432 - DNA, 25 bp, Homo sapien
ctgggcttgagtgaaaaattccctg

SEQ ID NO: 5563433 - DNA, 25 bp, Homo sapien
gcattttaattgtgtgaggaaggag

SEQ ID NO: 5563434 - DNA, 25 bp, Homo sapien
tacttgcaaatgagagcctaggagt

SEQ ID NO: 5563435 - DNA, 25 bp, Homo sapien
tggaaggcctgtagatagcagtttt

SEQ ID NO: 5563436 - DNA, 25 bp, Homo sapien
ttgtctacttgcaaatgagagccta

SEQ ID NO: 5563437 - DNA, 25 bp, Homo sapien
tgacatataatatgatgaggattac

SEQ ID NO: 5563438 - DNA, 25 bp, Homo sapien
atctactaagaaataggtagtggaa

SEQ ID NO: 5563439 - DNA, 25 bp, Homo sapien
tctggagtttattttctgggcttga

SEQ ID NO: 5563440 - DNA, 25 bp, Homo sapien
gatgaggattacatatgaaactatt

SEQ ID NO: 5563441 - DNA, 25 bp, Homo sapien
tctaggttgacttcatgaataatgg

SEQ ID NO: 5563442 - DNA, 25 bp, Homo sapien
aaaggtctttatgtattgccaggaa

SEQ ID NO: 5563443 - DNA, 25 bp, Homo sapien
taccagtctgcccttctaggttgac

SEQ ID NO: 5563444 - DNA, 25 bp, Homo sapien
aggaaataaaagttcactactcaga

SEQ ID NO: 5563445 - DNA, 25 bp, Homo sapien
ccaggaagaatgtaccaactcatgt

SEQ ID NO: 5563446 - DNA, 25 bp, Homo sapien
ccaggaagtaatattactaggataa

SEQ ID NO: 5563447 - DNA, 25 bp, Homo sapien
tttatgtattgccaggaagaatgta

SEQ ID NO: 5563448 - DNA, 25 bp, Homo sapien
tcaggtatcttggcttgggacattt

SEQ ID NO: 5563449 - DNA, 25 bp, Homo sapien
aactcatgttattaccagtctgccc

SEQ ID NO: 5563450 - DNA, 25 bp, Homo sapien
agtattctcgcatgagcatttctcc

SEQ ID NO: 5563451 - DNA, 25 bp, Homo sapien
ataaaagttcactactcagaggcaa

SEQ ID NO: 5563452 - DNA, 25 bp, Homo sapien
actcgatgaaaagttgccacaaatc

SEQ ID NO: 5563453 - DNA, 25 bp, Homo sapien
atgaaacaagtgtgtatggtgtgtg

SEQ ID NO: 5563454 - DNA, 25 bp, Homo sapien
cattttagtcaagtgtgcaatagca

SEQ ID NO: 5563455 - DNA, 25 bp, Homo sapien
ctgtgttatgaaaagctatacatgc

SEQ ID NO: 5563456 - DNA, 25 bp, Homo sapien
ataggatctggtcaaatgtgatatc

SEQ ID NO: 5563457 - DNA, 25 bp, Homo sapien
gcaataaaatgaagcgcaatgaaac

SEQ ID NO: 5563458 - DNA, 25 bp, Homo sapien
tgaagcgcaatgaaacaagtgtgta

SEQ ID NO: 5563459 - DNA, 25 bp, Homo sapien
gcatacttcagagatagtgtgaggc

SEQ ID NO: 5563460 - DNA, 25 bp, Homo sapien
tgttcagtaacaataggatctggtc

SEQ ID NO: 5563461 - DNA, 25 bp, Homo sapien
gatgccaatagactcactcgatgaa

SEQ ID NO: 5563462 - DNA, 25 bp, Homo sapien
attcttcgagaagtgcaataaaatg

SEQ ID NO: 5563463 - DNA, 25 bp, Homo sapien
aactggaatttaagctaggcccctg

SEQ ID NO: 5563464 - DNA, 25 bp, Homo sapien
acagttgtgtaccaccatggtgcct

SEQ ID NO: 5563465 - DNA, 25 bp, Homo sapien
gggatctccggggatctcccagcaa

SEQ ID NO: 5563466 - DNA, 25 bp, Homo sapien
ttaagctaggcccctgactccaggc

SEQ ID NO: 5563467 - DNA, 25 bp, Homo sapien
ccaagagatctctgagccaagcttt

SEQ ID NO: 5563468 - DNA, 25 bp, Homo sapien
agcttttgaaggcaccatcagtggt

SEQ ID NO: 5563469 - DNA, 25 bp, Homo sapien
ttcagtttcttaggcacagggcttc

SEQ ID NO: 5563470 - DNA, 25 bp, Homo sapien
gcttgctcaaggtcccacagcctgc

SEQ ID NO: 5563471 - DNA, 25 bp, Homo sapien
tagcaagtggctgaactggaattta

SEQ ID NO: 5563472 - DNA, 25 bp, Homo sapien
agagacccaggaacattctgtggct

SEQ ID NO: 5563473 - DNA, 25 bp, Homo sapien
tccatcagcctcatgaggaggttat

SEQ ID NO: 5563474 - DNA, 25 bp, Homo sapien
cagctacagaacaaggtctacctag

SEQ ID NO: 5563475 - DNA, 25 bp, Homo sapien
tgtagagccattagattaggaagat

SEQ ID NO: 5563476 - DNA, 25 bp, Homo sapien
aagaaacccaagtcagatggaacag

SEQ ID NO: 5563477 - DNA, 25 bp, Homo sapien
gctgccagagaaagcccatacctag

SEQ ID NO: 5563478 - DNA, 25 bp, Homo sapien
gagtatgacctgagttcagggctgc

SEQ ID NO: 5563479 - DNA, 25 bp, Homo sapien
tggtgccctggtgcatctgtagcac

SEQ ID NO: 5563480 - DNA, 25 bp, Homo sapien
aacatgaaggtgaattcagagtacc

SEQ ID NO: 5563481 - DNA, 25 bp, Homo sapien
gatggaacaggttaaacatgaaggt

SEQ ID NO: 5563482 - DNA, 25 bp, Homo sapien
ctggagagaagtgttcagtttgaac

SEQ ID NO: 5563483 - DNA, 25 bp, Homo sapien
aacacttcccctgaagggagaccca

SEQ ID NO: 5563484 - DNA, 25 bp, Homo sapien
tctgtagcactggaaatgactatct

SEQ ID NO: 5563485 - DNA, 25 bp, Homo sapien
tcttactgttttgagaccaggaaac

SEQ ID NO: 5563486 - DNA, 25 bp, Homo sapien
gttgttggaataaataatcagaggt

SEQ ID NO: 5563487 - DNA, 25 bp, Homo sapien
cacgtacatcaggacaccataagac

SEQ ID NO: 5563488 - DNA, 25 bp, Homo sapien
tgccaagaattcaccagatgctgtt

SEQ ID NO: 5563489 - DNA, 25 bp, Homo sapien
tcatcatcatcggaacttaggtttt

SEQ ID NO: 5563490 - DNA, 25 bp, Homo sapien
taaacattatgcagctgagtagggc

SEQ ID NO: 5563491 - DNA, 25 bp, Homo sapien
atcagagtaggccatttataacatt

SEQ ID NO: 5563492 - DNA, 25 bp, Homo sapien
ataatcagaggttgaaggttgtttt

SEQ ID NO: 5563493 - DNA, 25 bp, Homo sapien
taagacaatgtcccgcaataattac

SEQ ID NO: 5563494 - DNA, 25 bp, Homo sapien
gagtagggcattctaaagaacagac

SEQ ID NO: 5563495 - DNA, 25 bp, Homo sapien
gacttttaccctactgaagagctgt

SEQ ID NO: 5563496 - DNA, 25 bp, Homo sapien
ggtggcaaagaaaacaatgtcttta

SEQ ID NO: 5563497 - DNA, 25 bp, Homo sapien
aaaatgcccaacaccatccctgcac

SEQ ID NO: 5563498 - DNA, 25 bp, Homo sapien
tagaaggatgaacatgtagtatgat

SEQ ID NO: 5563499 - DNA, 25 bp, Homo sapien
gtatgattaatggtagaactgttgt

SEQ ID NO: 5563500 - DNA, 25 bp, Homo sapien
ttgagaatatgaaggatttggagga

SEQ ID NO: 5563501 - DNA, 25 bp, Homo sapien
aatgacatttagaaggatgaacatg

SEQ ID NO: 5563502 - DNA, 25 bp, Homo sapien
taatgctaaagttataagtgctact

SEQ ID NO: 5563503 - DNA, 25 bp, Homo sapien
tcactaccaggggataaaatgccca

SEQ ID NO: 5563504 - DNA, 25 bp, Homo sapien
acaggctacctaaattgataatgac

SEQ ID NO: 5563505 - DNA, 25 bp, Homo sapien
gaactgttgtgttaggcaataatgc

SEQ ID NO: 5563506 - DNA, 25 bp, Homo sapien
aaattcaatactcttacaggctacc

SEQ ID NO: 5563507 - DNA, 25 bp, Homo sapien
actgtgggatttgttagttggactc

SEQ ID NO: 5563508 - DNA, 25 bp, Homo sapien
tgtgatgtcattcactgtgggattt

SEQ ID NO: 5563509 - DNA, 25 bp, Homo sapien
ttagaaaacataacagcaatctcat

SEQ ID NO: 5563510 - DNA, 25 bp, Homo sapien
tgctgaagaaatggagttgtttatc

SEQ ID NO: 5563511 - DNA, 25 bp, Homo sapien
tagttggactccagaaaataacaat

SEQ ID NO: 5563512 - DNA, 25 bp, Homo sapien
ccttaatacagtcggtgtcagtttt

SEQ ID NO: 5563513 - DNA, 25 bp, Homo sapien
acctatcgactacttactatgtgcc

SEQ ID NO: 5563514 - DNA, 25 bp, Homo sapien
atggagttgtttatctagtagaagt

SEQ ID NO: 5563515 - DNA, 25 bp, Homo sapien
ttctggatcttgttggttgcatccc

SEQ ID NO: 5563516 - DNA, 25 bp, Homo sapien
aatgtggtaggtacaaacctgacat

SEQ ID NO: 5563517 - DNA, 25 bp, Homo sapien
tgattgcctcatacaaatttggttc

SEQ ID NO: 5563518 - DNA, 25 bp, Homo sapien
taaccctttgacagaatcccaagtc

SEQ ID NO: 5563519 - DNA, 25 bp, Homo sapien
accagatatgaacttgtacacttac

SEQ ID NO: 5563520 - DNA, 25 bp, Homo sapien
gctttagagattggcagcatatcaa

SEQ ID NO: 5563521 - DNA, 25 bp, Homo sapien
tactgccctggaactattagctgtt

SEQ ID NO: 5563522 - DNA, 25 bp, Homo sapien
gaatcccaagtctttaagagcctcc

SEQ ID NO: 5563523 - DNA, 25 bp, Homo sapien
cctagtggtgctcattggtactgaa

SEQ ID NO: 5563524 - DNA, 25 bp, Homo sapien
tcaagttggcttgtataaccctttg

SEQ ID NO: 5563525 - DNA, 25 bp, Homo sapien
ctgagaactgataataaagggaagt

SEQ ID NO: 5563526 - DNA, 25 bp, Homo sapien
taccctacaggttcgattttgttgc

SEQ ID NO: 5563527 - DNA, 25 bp, Homo sapien
cctgtagaaatcccttcaagttggc

SEQ ID NO: 5563528 - DNA, 25 bp, Homo sapien
taaagggaagtgaaatcaagcactt

SEQ ID NO: 5563529 - DNA, 25 bp, Homo sapien
tgttacatgcaggaagatactttat

SEQ ID NO: 5563530 - DNA, 25 bp, Homo sapien
atattgaaagacatttggatcgttt

SEQ ID NO: 5563531 - DNA, 25 bp, Homo sapien
tggaatatggtggctcaaaaaactt

SEQ ID NO: 5563532 - DNA, 25 bp, Homo sapien
acatgcatgggtatatcagtaggtt

SEQ ID NO: 5563533 - DNA, 25 bp, Homo sapien
catggtccccagttgaacacaggaa

SEQ ID NO: 5563534 - DNA, 25 bp, Homo sapien
tcactttaatgagcgtgctggcgga

SEQ ID NO: 5563535 - DNA, 25 bp, Homo sapien
aagcatgtgtactgaagaattccat

SEQ ID NO: 5563536 - DNA, 25 bp, Homo sapien
aaagaaagattccttccagcatgtc

SEQ ID NO: 5563537 - DNA, 25 bp, Homo sapien
tcattgtgagactgtgccataattt

SEQ ID NO: 5563538 - DNA, 25 bp, Homo sapien
agaaactgccaggtcaagagataca

SEQ ID NO: 5563539 - DNA, 25 bp, Homo sapien
tcccataggatctctggggaagctt

SEQ ID NO: 5563540 - DNA, 25 bp, Homo sapien
ttgcggcggattccgaagccgcttt

SEQ ID NO: 5563541 - DNA, 25 bp, Homo sapien
gctgcccattcctcggcgcaccggc

SEQ ID NO: 5563542 - DNA, 25 bp, Homo sapien
gcgtggactacgtccccctgcctcc

SEQ ID NO: 5563543 - DNA, 25 bp, Homo sapien
gtccacgctgcccattcctcggcgc

SEQ ID NO: 5563544 - DNA, 25 bp, Homo sapien
cgcccgtcgaggcgacttttccgca

SEQ ID NO: 5563545 - DNA, 25 bp, Homo sapien
atcgccgagattctcctgtgtggag

SEQ ID NO: 5563546 - DNA, 25 bp, Homo sapien
cccctcctctcttgtccacgctgcc

SEQ ID NO: 5563547 - DNA, 25 bp, Homo sapien
ccgttaatctgagcgcagtcgcgga

SEQ ID NO: 5563548 - DNA, 25 bp, Homo sapien
gctttttctgcgtagcctgggggtg

SEQ ID NO: 5563549 - DNA, 25 bp, Homo sapien
gtcgaggcgacttttccgcacgagg

SEQ ID NO: 5563550 - DNA, 25 bp, Homo sapien
gggtgtaaatcgccgagattctcct

SEQ ID NO: 5563551 - DNA, 25 bp, Homo sapien
ctatggctctggctctactgccctc

SEQ ID NO: 5563552 - DNA, 25 bp, Homo sapien
tttcatttcggaaccactacagcct

SEQ ID NO: 5563553 - DNA, 25 bp, Homo sapien
gaaatgctgtacaggttaggaagac

SEQ ID NO: 5563554 - DNA, 25 bp, Homo sapien
aagaaaatggctactaaactgaact

SEQ ID NO: 5563555 - DNA, 25 bp, Homo sapien
gagatcttcactgtaccaggtgctc

SEQ ID NO: 5563556 - DNA, 25 bp, Homo sapien
agtaagactcaagttgctaagagca

SEQ ID NO: 5563557 - DNA, 25 bp, Homo sapien
aggtgtcaattaaagattggacatc

SEQ ID NO: 5563558 - DNA, 25 bp, Homo sapien
taggaagacctgtattaaagcaatc

SEQ ID NO: 5563559 - DNA, 25 bp, Homo sapien
tctgctggatgatccaccgaactac

SEQ ID NO: 5563560 - DNA, 25 bp, Homo sapien
tccaccgaactacatcacacaaatc

SEQ ID NO: 5563561 - DNA, 25 bp, Homo sapien
aactgtgtaagatgtctaaatcact

SEQ ID NO: 5563562 - DNA, 25 bp, Homo sapien
ttccagcctgagggctttggagagt

SEQ ID NO: 5563563 - DNA, 25 bp, Homo sapien
atgaactctgagagaatagatgggg

SEQ ID NO: 5563564 - DNA, 25 bp, Homo sapien
caggcccccgaccttgttgcacatc

SEQ ID NO: 5563565 - DNA, 25 bp, Homo sapien
aaagtcagatagttgaaagagattt

SEQ ID NO: 5563566 - DNA, 25 bp, Homo sapien
ggggcaggccgccatctttcctgtt

SEQ ID NO: 5563567 - DNA, 25 bp, Homo sapien
accaaatcatggccagaatgcttct

SEQ ID NO: 5563568 - DNA, 25 bp, Homo sapien
gaatgcttctgtaagcaggcccccg

SEQ ID NO: 5563569 - DNA, 25 bp, Homo sapien
ctttggagagtataaaccgacaagg

SEQ ID NO: 5563570 - DNA, 25 bp, Homo sapien
agagaacaagacatgaacaggttta

SEQ ID NO: 5563571 - DNA, 25 bp, Homo sapien
gagatcccacagcacagctagctgc

SEQ ID NO: 5563572 - DNA, 25 bp, Homo sapien
gcacatcactgtacaggacctccca

SEQ ID NO: 5563573 - DNA, 25 bp, Homo sapien
acaataaaagagttcatggctatgc

SEQ ID NO: 5563574 - DNA, 25 bp, Homo sapien
gcatagccatgaactcttttattgt

SEQ ID NO: 5563575 - DNA, 25 bp, Homo sapien
gcttaagtgacaggtgacttgcttc

SEQ ID NO: 5563576 - DNA, 25 bp, Homo sapien
taaagagacctcaagcttaagtgac

SEQ ID NO: 5563577 - DNA, 25 bp, Homo sapien
ttaaaattaatgagaagggcagaat

SEQ ID NO: 5563578 - DNA, 25 bp, Homo sapien
gggcagaatggttgtcaaagcaata

SEQ ID NO: 5563579 - DNA, 25 bp, Homo sapien
attagcgaggatgccctttcccctg

SEQ ID NO: 5563580 - DNA, 25 bp, Homo sapien
gccaggaccgaataagcacaaaaat

SEQ ID NO: 5563581 - DNA, 25 bp, Homo sapien
attaaagacagcctggtgcgaattc

SEQ ID NO: 5563582 - DNA, 25 bp, Homo sapien
gccctttcccctggcggacagaatc

SEQ ID NO: 5563583 - DNA, 25 bp, Homo sapien
caggggatttagtgataatatggca

SEQ ID NO: 5563584 - DNA, 25 bp, Homo sapien
gtgtcacaactgtcaggggatttag

SEQ ID NO: 5563585 - DNA, 25 bp, Homo sapien
acctcagcagcgcaactgtcacctt

SEQ ID NO: 5563586 - DNA, 25 bp, Homo sapien
gaacacctccaaagagctctgagtc

SEQ ID NO: 5563587 - DNA, 25 bp, Homo sapien
gcactttctgccgtgagcgtaactc

SEQ ID NO: 5563588 - DNA, 25 bp, Homo sapien
aaccaataacttggcagggctgtgc

SEQ ID NO: 5563589 - DNA, 25 bp, Homo sapien
ttcctgaggctgccgtaacaatcgc

SEQ ID NO: 5563590 - DNA, 25 bp, Homo sapien
tctgccttggtttgctgtagcactt

SEQ ID NO: 5563591 - DNA, 25 bp, Homo sapien
gcccgtgcattcggtgaacacctcc

SEQ ID NO: 5563592 - DNA, 25 bp, Homo sapien
agtccggtctgtattaggtttcgtc

SEQ ID NO: 5563593 - DNA, 25 bp, Homo sapien
ctacatgttccgcttctggggactt

SEQ ID NO: 5563594 - DNA, 25 bp, Homo sapien
gcctccgggcagcccgtgcattcgg

SEQ ID NO: 5563595 - DNA, 25 bp, Homo sapien
ttcaccacccaaacacacagtcttc

SEQ ID NO: 5563596 - DNA, 25 bp, Homo sapien
acaatcgccacaaacctggtgactt

SEQ ID NO: 5563597 - DNA, 25 bp, Homo sapien
acatatacatgaatggggctgttgt

SEQ ID NO: 5563598 - DNA, 25 bp, Homo sapien
ccttagccccttggtgcctgcatcc

SEQ ID NO: 5563599 - DNA, 25 bp, Homo sapien
gcctgcatcccctgacgtgtgacat

SEQ ID NO: 5563600 - DNA, 25 bp, Homo sapien
agatgggtttagatgaagaaacagg

SEQ ID NO: 5563601 - DNA, 25 bp, Homo sapien
cacacagcacaccggcacatgtgtc

SEQ ID NO: 5563602 - DNA, 25 bp, Homo sapien
gggaaccaagcaggaatcgtatttg

SEQ ID NO: 5563603 - DNA, 25 bp, Homo sapien
tctggcacagcaacctgcgtttgac

SEQ ID NO: 5563604 - DNA, 25 bp, Homo sapien
tgcgagtcgtagtgcttaagcagga

SEQ ID NO: 5563605 - DNA, 25 bp, Homo sapien
gcgtgggggtcttctgatctccacc

SEQ ID NO: 5563606 - DNA, 25 bp, Homo sapien
tgttgtaagtgaacgcacacagcac

SEQ ID NO: 5563607 - DNA, 25 bp, Homo sapien
gatcccaactccggagctgtgtgac

SEQ ID NO: 5563608 - DNA, 25 bp, Homo sapien
ggtgtctggcagttcacatttgtcc

SEQ ID NO: 5563609 - DNA, 25 bp, Homo sapien
taaattagataaatagaagcttggt

SEQ ID NO: 5563610 - DNA, 25 bp, Homo sapien
gagcatctctcaggggtgtgtccct

SEQ ID NO: 5563611 - DNA, 25 bp, Homo sapien
atgtacagctggaaaggctctgctg

SEQ ID NO: 5563612 - DNA, 25 bp, Homo sapien
tcgtctaccaagtctcttccgtttc

SEQ ID NO: 5563613 - DNA, 25 bp, Homo sapien
gtacagctggaaaggctctgctgtc

SEQ ID NO: 5563614 - DNA, 25 bp, Homo sapien
atctctcaggggtgtgtcccttctc

SEQ ID NO: 5563615 - DNA, 25 bp, Homo sapien
taaatagaagcttggtgagcatctc

SEQ ID NO: 5563616 - DNA, 25 bp, Homo sapien
ttagataaatagaagcttggtgagc

SEQ ID NO: 5563617 - DNA, 25 bp, Homo sapien
ggaaggtgtctggcagttcacattt

SEQ ID NO: 5563618 - DNA, 25 bp, Homo sapien
tcttgtcctccttatctcgtctacc

SEQ ID NO: 5563619 - DNA, 25 bp, Homo sapien
aagtggactacaataaagattacat

SEQ ID NO: 5563620 - DNA, 25 bp, Homo sapien
aatggagacgagttcttactatgtt

SEQ ID NO: 5563621 - DNA, 25 bp, Homo sapien
taatccacaaactgtctagaagcaa

SEQ ID NO: 5563622 - DNA, 25 bp, Homo sapien
ctagaagcaaacaaccaaacatatg

SEQ ID NO: 5563623 - DNA, 25 bp, Homo sapien
tgttagcctaggcattctgctagat

SEQ ID NO: 5563624 - DNA, 25 bp, Homo sapien
ttacagatcactggtatgcctgatt

SEQ ID NO: 5563625 - DNA, 25 bp, Homo sapien
aattgcaatccactgaaataacagc

SEQ ID NO: 5563626 - DNA, 25 bp, Homo sapien
tggtaccagatgataattctgtgac

SEQ ID NO: 5563627 - DNA, 25 bp, Homo sapien
tggtatgcctgattaaagtggacta

SEQ ID NO: 5563628 - DNA, 25 bp, Homo sapien
tattgagcattacacctgaccaaat

SEQ ID NO: 5563629 - DNA, 25 bp, Homo sapien
tgccaatagattaacagatgaggga

SEQ ID NO: 5563630 - DNA, 25 bp, Homo sapien
tcagacaaggcccagactcaatcca

SEQ ID NO: 5563631 - DNA, 25 bp, Homo sapien
tgcaaggcctcagtcactccagcca

SEQ ID NO: 5563632 - DNA, 25 bp, Homo sapien
ggagacacaggaacctacatctgat

SEQ ID NO: 5563633 - DNA, 25 bp, Homo sapien
tcaacatagcaaccgcagagcatga

SEQ ID NO: 5563634 - DNA, 25 bp, Homo sapien
aggctttcattttacagggagacac

SEQ ID NO: 5563635 - DNA, 25 bp, Homo sapien
gaaacccacctagactcccagcagc

SEQ ID NO: 5563636 - DNA, 25 bp, Homo sapien
accttgagggttcacgttagcattc

SEQ ID NO: 5563637 - DNA, 25 bp, Homo sapien
gactcaatccagcgctgccacttgc

SEQ ID NO: 5563638 - DNA, 25 bp, Homo sapien
ggaaattccagagtaacccagcttc

SEQ ID NO: 5563639 - DNA, 25 bp, Homo sapien
acttgctagctatgtatccctgggc

SEQ ID NO: 5563640 - DNA, 25 bp, Homo sapien
tcaccaatgtcacgtgcaaggcctc

SEQ ID NO: 5563641 - DNA, 25 bp, Homo sapien
aattctagtggatattgtgtaaatc

SEQ ID NO: 5563642 - DNA, 25 bp, Homo sapien
acacagggaaaccctgactctataa

SEQ ID NO: 5563643 - DNA, 25 bp, Homo sapien
ggcagctcggaggataattttgaat

SEQ ID NO: 5563644 - DNA, 25 bp, Homo sapien
agaatggctttgtaactagtttggg

SEQ ID NO: 5563645 - DNA, 25 bp, Homo sapien
ctagtttgggtataatgttgggagg

SEQ ID NO: 5563646 - DNA, 25 bp, Homo sapien
taagcacaggacactctagttgatc

SEQ ID NO: 5563647 - DNA, 25 bp, Homo sapien
acccgatctctttacagaatggctt

SEQ ID NO: 5563648 - DNA, 25 bp, Homo sapien
gtgccactcaacaaagatccctgcc

SEQ ID NO: 5563649 - DNA, 25 bp, Homo sapien
gaagaaattgtaggtacccgatctc

SEQ ID NO: 5563650 - DNA, 25 bp, Homo sapien
gagctcctgacattaagcagtcctc

SEQ ID NO: 5563651 - DNA, 25 bp, Homo sapien
gaggaatgcttctaacagttttgcc

SEQ ID NO: 5563652 - DNA, 25 bp, Homo sapien
tcaagatatagaaactacgctctgc

SEQ ID NO: 5563653 - DNA, 25 bp, Homo sapien
gttatatagtgtgacattcaagtac

SEQ ID NO: 5563654 - DNA, 25 bp, Homo sapien
ttaggtagctcaagtagtggtttac

SEQ ID NO: 5563655 - DNA, 25 bp, Homo sapien
tgagagttaattcaccttaggtagc

SEQ ID NO: 5563656 - DNA, 25 bp, Homo sapien
ttcactgtgcaaggtaaagaactgg

SEQ ID NO: 5563657 - DNA, 25 bp, Homo sapien
caccctgtaagggctagaagaaaca

SEQ ID NO: 5563658 - DNA, 25 bp, Homo sapien
ttaagaatcacaccctgtaagggct

SEQ ID NO: 5563659 - DNA, 25 bp, Homo sapien
aagggatttaactttctaggtgcca

SEQ ID NO: 5563660 - DNA, 25 bp, Homo sapien
aagagggttccctgagagttaattc

SEQ ID NO: 5563661 - DNA, 25 bp, Homo sapien
aacatgtctctagtgtatgggccta

SEQ ID NO: 5563662 - DNA, 25 bp, Homo sapien
ccttgtatacaccttggacattgtg

SEQ ID NO: 5563663 - DNA, 25 bp, Homo sapien
tggtcaaatccagcatgagcattca

SEQ ID NO: 5563664 - DNA, 25 bp, Homo sapien
tcagtaataactacagggttcaatt

SEQ ID NO: 5563665 - DNA, 25 bp, Homo sapien
cagcatgagcattcagcatagtgat

SEQ ID NO: 5563666 - DNA, 25 bp, Homo sapien
atcctccaagcaattgtaaagatct

SEQ ID NO: 5563667 - DNA, 25 bp, Homo sapien
agtcttcaaaaagaagcatacattt

SEQ ID NO: 5563668 - DNA, 25 bp, Homo sapien
atagcatacacttggaataatttgg

SEQ ID NO: 5563669 - DNA, 25 bp, Homo sapien
tggtgtctaagataaagtgtgtttt

SEQ ID NO: 5563670 - DNA, 25 bp, Homo sapien
gcatagtgatctacatttgaacaac

SEQ ID NO: 5563671 - DNA, 25 bp, Homo sapien
agctgcactgcggtgtatagcatac

SEQ ID NO: 5563672 - DNA, 25 bp, Homo sapien
aaatactgcatactggtcaaatcca

SEQ ID NO: 5563673 - DNA, 25 bp, Homo sapien
aagcagagctgcactgcggtgtata

SEQ ID NO: 5563674 - DNA, 25 bp, Homo sapien
aatgctaataaacaagagaggatgg

SEQ ID NO: 5563675 - DNA, 25 bp, Homo sapien
tgctttattgatgaaggcctggacc

SEQ ID NO: 5563676 - DNA, 25 bp, Homo sapien
catctgacataagaagtgagagatc

SEQ ID NO: 5563677 - DNA, 25 bp, Homo sapien
taggcaagagttatgtgttcaggta

SEQ ID NO: 5563678 - DNA, 25 bp, Homo sapien
aattgcccggctattttggacattc

SEQ ID NO: 5563679 - DNA, 25 bp, Homo sapien
cccacgcatagtcggctgctggtgg

SEQ ID NO: 5563680 - DNA, 25 bp, Homo sapien
tcctcaaggttggctcccacgcata

SEQ ID NO: 5563681 - DNA, 25 bp, Homo sapien
gtgagagatcaggtgtcctcaaggt

SEQ ID NO: 5563682 - DNA, 25 bp, Homo sapien
tgtgaaccatagctgtaggcaagag

SEQ ID NO: 5563683 - DNA, 25 bp, Homo sapien
aagagaggatggatatttagaatta

SEQ ID NO: 5563684 - DNA, 25 bp, Homo sapien
ggcaaagtggcctactagtaagctg

SEQ ID NO: 5563685 - DNA, 25 bp, Homo sapien
cctagaactttgagaagagaaaaat

SEQ ID NO: 5563686 - DNA, 25 bp, Homo sapien
atgatatgcataagtcatagctcta

SEQ ID NO: 5563687 - DNA, 25 bp, Homo sapien
tagtgtcataaagtgtagctaattt

SEQ ID NO: 5563688 - DNA, 25 bp, Homo sapien
agaagagaaaaattcagggataagt

SEQ ID NO: 5563689 - DNA, 25 bp, Homo sapien
tgttcatgtccataccagaccggta

SEQ ID NO: 5563690 - DNA, 25 bp, Homo sapien
ttactgcctagaactttgagaagag

SEQ ID NO: 5563691 - DNA, 25 bp, Homo sapien
ccagatgttagtgtctagaattagc

SEQ ID NO: 5563692 - DNA, 25 bp, Homo sapien
cagctttatctaatttgagggcatt

SEQ ID NO: 5563693 - DNA, 25 bp, Homo sapien
aaattcagggataagttgaaaggca

SEQ ID NO: 5563694 - DNA, 25 bp, Homo sapien
aatttataagctctaagtaatcagc

SEQ ID NO: 5563695 - DNA, 25 bp, Homo sapien
ttgagggcattaaaattactgccta

SEQ ID NO: 5563696 - DNA, 25 bp, Homo sapien
aaacattgccagaaggatagaaagg

SEQ ID NO: 5563697 - DNA, 25 bp, Homo sapien
ggtgctaggtagcttgacaggtatg

SEQ ID NO: 5563698 - DNA, 25 bp, Homo sapien
agaaaggaatttggattatatataa

SEQ ID NO: 5563699 - DNA, 25 bp, Homo sapien
aggtagcttgacaggtatgatatgc

SEQ ID NO: 5563700 - DNA, 25 bp, Homo sapien
ttatttaaggtagtcaggcagtaga

SEQ ID NO: 5563701 - DNA, 25 bp, Homo sapien
ccaagcaagaaattgacactatata

SEQ ID NO: 5563702 - DNA, 25 bp, Homo sapien
atagttatttaaggtagtcaggcag

SEQ ID NO: 5563703 - DNA, 25 bp, Homo sapien
acaaatcggtgtttttaagactatc

SEQ ID NO: 5563704 - DNA, 25 bp, Homo sapien
attagttctattcgtggtgctaggt

SEQ ID NO: 5563705 - DNA, 25 bp, Homo sapien
gtagtcaggcagtagaaacattgcc

SEQ ID NO: 5563706 - DNA, 25 bp, Homo sapien
cagtagaaacattgccagaaggata

SEQ ID NO: 5563707 - DNA, 25 bp, Homo sapien
gtgggtgatctgaagaatgattgtt

SEQ ID NO: 5563708 - DNA, 25 bp, Homo sapien
tgaaagctggatctgaactcagtgc

SEQ ID NO: 5563709 - DNA, 25 bp, Homo sapien
tgatctgaagaatgattgttagctc

SEQ ID NO: 5563710 - DNA, 25 bp, Homo sapien
gataaaatagctagagattccatcc

SEQ ID NO: 5563711 - DNA, 25 bp, Homo sapien
gagattccatccggtgtgggtgatc

SEQ ID NO: 5563712 - DNA, 25 bp, Homo sapien
gacagagatgccaacagtaccctgg

SEQ ID NO: 5563713 - DNA, 25 bp, Homo sapien
ggcagaggctctgcactctttccac

SEQ ID NO: 5563714 - DNA, 25 bp, Homo sapien
ggcctaggcagaggctctgcactct

SEQ ID NO: 5563715 - DNA, 25 bp, Homo sapien
atgccaacagtaccctgggctctgc

SEQ ID NO: 5563716 - DNA, 25 bp, Homo sapien
tctgaactcagtgctagccccaggc

SEQ ID NO: 5563717 - DNA, 25 bp, Homo sapien
gctagccccaggccctactgctttt

SEQ ID NO: 5563718 - DNA, 25 bp, Homo sapien
ctgtacttgttgggtagacacaggg

SEQ ID NO: 5563719 - DNA, 25 bp, Homo sapien
agaaatggctggaagatcacagcac

SEQ ID NO: 5563720 - DNA, 25 bp, Homo sapien
gctgatggaacggcccttgctctaa

SEQ ID NO: 5563721 - DNA, 25 bp, Homo sapien
tgcggcgtcactttctgggctgtga

SEQ ID NO: 5563722 - DNA, 25 bp, Homo sapien
tctaaggccttgcggcgtcactttc

SEQ ID NO: 5563723 - DNA, 25 bp, Homo sapien
ctctggaaggtgccaccatctagaa

SEQ ID NO: 5563724 - DNA, 25 bp, Homo sapien
ccttgctctaaggccttgcggcgtc

SEQ ID NO: 5563725 - DNA, 25 bp, Homo sapien
actcgcagattgagacacatgcagt

SEQ ID NO: 5563726 - DNA, 25 bp, Homo sapien
tgtccatttgacaccacttccttgt

SEQ ID NO: 5563727 - DNA, 25 bp, Homo sapien
gattgagacacatgcagttaatttc

SEQ ID NO: 5563728 - DNA, 25 bp, Homo sapien
gctgcactcgcagattgagacacat

SEQ ID NO: 5563729 - DNA, 25 bp, Homo sapien
tgatcgagtcacagaaggatttgtt

SEQ ID NO: 5563730 - DNA, 25 bp, Homo sapien
tgatcctaagaacagcttgcctccc

SEQ ID NO: 5563731 - DNA, 25 bp, Homo sapien
actttgtggctcatggaacagtatg

SEQ ID NO: 5563732 - DNA, 25 bp, Homo sapien
gtcctgttactatgaagggggtcac

SEQ ID NO: 5563733 - DNA, 25 bp, Homo sapien
ccagaggcctcttacgttgacttga

SEQ ID NO: 5563734 - DNA, 25 bp, Homo sapien
gtggttcagaaataagtaggtcctg

SEQ ID NO: 5563735 - DNA, 25 bp, Homo sapien
ccggtttgtgctattatgaaggcct

SEQ ID NO: 5563736 - DNA, 25 bp, Homo sapien
gttgtcactgtatgggtggttcaga

SEQ ID NO: 5563737 - DNA, 25 bp, Homo sapien
cagtatgaatgcagaatgtagcttt

SEQ ID NO: 5563738 - DNA, 25 bp, Homo sapien
gttgacttgaaaagacggactatgt

SEQ ID NO: 5563739 - DNA, 25 bp, Homo sapien
tttcagagatcttgtgggtatcaca

SEQ ID NO: 5563740 - DNA, 25 bp, Homo sapien
cctcacccacaaaagtcaccgggac

SEQ ID NO: 5563741 - DNA, 25 bp, Homo sapien
ctttgcagtgcacctagcttatggt

SEQ ID NO: 5563742 - DNA, 25 bp, Homo sapien
ccacttaggatcaggctgtggggaa

SEQ ID NO: 5563743 - DNA, 25 bp, Homo sapien
ctagcttatggtaaagatgagaggg

SEQ ID NO: 5563744 - DNA, 25 bp, Homo sapien
ttgctacctggaaatgcctgaactg

SEQ ID NO: 5563745 - DNA, 25 bp, Homo sapien
acaaaagtcaccgggacaattggga

SEQ ID NO: 5563746 - DNA, 25 bp, Homo sapien
cctcggcctcctaacctaggttagc

SEQ ID NO: 5563747 - DNA, 25 bp, Homo sapien
gaaaggccttataggtcttgagtgc

SEQ ID NO: 5563748 - DNA, 25 bp, Homo sapien
ggggctgcctgatccatagttctct

SEQ ID NO: 5563749 - DNA, 25 bp, Homo sapien
ggcggcgtctcccttcctcacccac

SEQ ID NO: 5563750 - DNA, 25 bp, Homo sapien
ggtggtcccttgctacctggaaatg

SEQ ID NO: 5563751 - DNA, 25 bp, Homo sapien
gacaccagatgtgtatgaggtttcc

SEQ ID NO: 5563752 - DNA, 25 bp, Homo sapien
atcaaattgttaataccagaaagac

SEQ ID NO: 5563753 - DNA, 25 bp, Homo sapien
cactcctaaggaatagaatttaaca

SEQ ID NO: 5563754 - DNA, 25 bp, Homo sapien
atgtatgtcagaaatcaaaaaagtc

SEQ ID NO: 5563755 - DNA, 25 bp, Homo sapien
actcacaacatttctgacaccagat

SEQ ID NO: 5563756 - DNA, 25 bp, Homo sapien
aaaaaagtctgataaatgttgccac

SEQ ID NO: 5563757 - DNA, 25 bp, Homo sapien
agatgtgtatgaggtttccccaaac

SEQ ID NO: 5563758 - DNA, 25 bp, Homo sapien
aattaatgatgtaggtactttagct

SEQ ID NO: 5563759 - DNA, 25 bp, Homo sapien
tcagtggaaaactttgcatgtatgt

SEQ ID NO: 5563760 - DNA, 25 bp, Homo sapien
aaatgttgccacttgaaaaaaatat

SEQ ID NO: 5563761 - DNA, 25 bp, Homo sapien
ttagctactgtataggaaaaactta

SEQ ID NO: 5563762 - DNA, 25 bp, Homo sapien
gggtggacacacctagatcgcatct

SEQ ID NO: 5563763 - DNA, 25 bp, Homo sapien
aacacttaagtcccgctggccaatc

SEQ ID NO: 5563764 - DNA, 25 bp, Homo sapien
cccacccacacccgcttcctagacc

SEQ ID NO: 5563765 - DNA, 25 bp, Homo sapien
aggccccaggtccaaatcagctttg

SEQ ID NO: 5563766 - DNA, 25 bp, Homo sapien
tggccaatcgtaaccaaaccacggc

SEQ ID NO: 5563767 - DNA, 25 bp, Homo sapien
cagctttgtactggggcagcatctg

SEQ ID NO: 5563768 - DNA, 25 bp, Homo sapien
tgtgtctgcgcctcgccctaaggcc

SEQ ID NO: 5563769 - DNA, 25 bp, Homo sapien
caaaccacggccttagccacgcttt

SEQ ID NO: 5563770 - DNA, 25 bp, Homo sapien
ccaaccacttcggggtgtgtctgcg

SEQ ID NO: 5563771 - DNA, 25 bp, Homo sapien
catctgcacactccagagaaggtgg

SEQ ID NO: 5563772 - DNA, 25 bp, Homo sapien
tcctagacctaagcgccatttgatg

SEQ ID NO: 5563773 - DNA, 25 bp, Homo sapien
ttgggggatgattctgtacacatgt

SEQ ID NO: 5563774 - DNA, 25 bp, Homo sapien
ctcaggaacctcatcacaggtcctc

SEQ ID NO: 5563775 - DNA, 25 bp, Homo sapien
acacatgtatttgggagaaagattt

SEQ ID NO: 5563776 - DNA, 25 bp, Homo sapien
tacatcaaagtaaggcagttgctct

SEQ ID NO: 5563777 - DNA, 25 bp, Homo sapien
gaagctcagaatagggtattggtga

SEQ ID NO: 5563778 - DNA, 25 bp, Homo sapien
ttgagcagctcagtttagcaaattt

SEQ ID NO: 5563779 - DNA, 25 bp, Homo sapien
cagccctgcacctagagtaagatat

SEQ ID NO: 5563780 - DNA, 25 bp, Homo sapien
tacactctgaaagaacacagtgaga

SEQ ID NO: 5563781 - DNA, 25 bp, Homo sapien
acatgaacaccagagatgaagaaac

SEQ ID NO: 5563782 - DNA, 25 bp, Homo sapien
ctttggcttgccatcagccctgcac

SEQ ID NO: 5563783 - DNA, 25 bp, Homo sapien
atagggtattggtgactctaaacct

SEQ ID NO: 5563784 - DNA, 25 bp, Homo sapien
gtagtagctgtcttacagagaggaa

SEQ ID NO: 5563785 - DNA, 25 bp, Homo sapien
cggttaaatgaaaaggcatataaac

SEQ ID NO: 5563786 - DNA, 25 bp, Homo sapien
agtacagcagtagcatgacaatact

SEQ ID NO: 5563787 - DNA, 25 bp, Homo sapien
tgcaaagcaggacattcacggtgca

SEQ ID NO: 5563788 - DNA, 25 bp, Homo sapien
taattagtgctcagtagtagctgtc

SEQ ID NO: 5563789 - DNA, 25 bp, Homo sapien
agcatgacaatacttctgaaggagt

SEQ ID NO: 5563790 - DNA, 25 bp, Homo sapien
tcacggtgcaacagcctaacctatc

SEQ ID NO: 5563791 - DNA, 25 bp, Homo sapien
aaaacacaagaattgtaggttgtta

SEQ ID NO: 5563792 - DNA, 25 bp, Homo sapien
cagaaagacatgcacagataacctc

SEQ ID NO: 5563793 - DNA, 25 bp, Homo sapien
gagagattaggaaaataagtacagc

SEQ ID NO: 5563794 - DNA, 25 bp, Homo sapien
cagatggcctcaacagtaatgtttg

SEQ ID NO: 5563795 - DNA, 25 bp, Homo sapien
agctcataataatgaattcctgctc

SEQ ID NO: 5563796 - DNA, 25 bp, Homo sapien
ggaaggacctcacttgtttcatcaa

SEQ ID NO: 5563797 - DNA, 25 bp, Homo sapien
tcaagagattgacataccaatgatc

SEQ ID NO: 5563798 - DNA, 25 bp, Homo sapien
tcaaatggagtggtttaaaactgat

SEQ ID NO: 5563799 - DNA, 25 bp, Homo sapien
cttgtttcatcaaatggagtggttt

SEQ ID NO: 5563800 - DNA, 25 bp, Homo sapien
tcagagtgcagcaaaatctcatttc

SEQ ID NO: 5563801 - DNA, 25 bp, Homo sapien
tattatcttatgtcagagtgcagca

SEQ ID NO: 5563802 - DNA, 25 bp, Homo sapien
aaaatgagcaattgccttattgttc

SEQ ID NO: 5563803 - DNA, 25 bp, Homo sapien
taaaactgatcaagcagctcataat

SEQ ID NO: 5563804 - DNA, 25 bp, Homo sapien
acaaaaagacatattcaggtactga

SEQ ID NO: 5563805 - DNA, 25 bp, Homo sapien
attcaggtattgtactcgggaggct

SEQ ID NO: 5563806 - DNA, 25 bp, Homo sapien
tgctgcactaggtctacatgcttaa

SEQ ID NO: 5563807 - DNA, 25 bp, Homo sapien
ccccaattaagaaaggagagttcac

SEQ ID NO: 5563808 - DNA, 25 bp, Homo sapien
tttaggtgattgagcatgacagacc

SEQ ID NO: 5563809 - DNA, 25 bp, Homo sapien
tgagcatgacagaccttgaacaact

SEQ ID NO: 5563810 - DNA, 25 bp, Homo sapien
tacaatggttgggtacaaatgaaat

SEQ ID NO: 5563811 - DNA, 25 bp, Homo sapien
cactgtatctgctgagggtatgttc

SEQ ID NO: 5563812 - DNA, 25 bp, Homo sapien
tgcataaacttcctgagtggctccc

SEQ ID NO: 5563813 - DNA, 25 bp, Homo sapien
gaagagggtgaaattctgcatactt

SEQ ID NO: 5563814 - DNA, 25 bp, Homo sapien
ataagacagttgctgaaaggcagat

SEQ ID NO: 5563815 - DNA, 25 bp, Homo sapien
tgaaaggcagatcacttggtttacc

SEQ ID NO: 5563816 - DNA, 25 bp, Homo sapien
ggtatgttctggaccgcaaacctca

SEQ ID NO: 5563817 - DNA, 25 bp, Homo sapien
gtgaccaagctcaaatgacagctcc

SEQ ID NO: 5563818 - DNA, 25 bp, Homo sapien
ccaacatatacagagtcccatgctc

SEQ ID NO: 5563819 - DNA, 25 bp, Homo sapien
agatacacaagtactaggcaacttc

SEQ ID NO: 5563820 - DNA, 25 bp, Homo sapien
gaggtcaacattcatagcacagcac

SEQ ID NO: 5563821 - DNA, 25 bp, Homo sapien
tcgtaaacatgtcatagctgcttcc

SEQ ID NO: 5563822 - DNA, 25 bp, Homo sapien
aataaacgtctctaaggcaggaact

SEQ ID NO: 5563823 - DNA, 25 bp, Homo sapien
cctgctgtctataggatgaggtcaa

SEQ ID NO: 5563824 - DNA, 25 bp, Homo sapien
catgctctagctccagttgatcctt

SEQ ID NO: 5563825 - DNA, 25 bp, Homo sapien
gcacagcacttaagctccaccatgc

SEQ ID NO: 5563826 - DNA, 25 bp, Homo sapien
ttacgtttgcacatgaagttccctt

SEQ ID NO: 5563827 - DNA, 25 bp, Homo sapien
tccttttagcagagatagtagatac

SEQ ID NO: 5563828 - DNA, 25 bp, Homo sapien
gaagcattaagtgaggaaactgtac

SEQ ID NO: 5563829 - DNA, 25 bp, Homo sapien
aaatgccaacgcagaggcaaatttc

SEQ ID NO: 5563830 - DNA, 25 bp, Homo sapien
tcttccactggcatgaaactgttta

SEQ ID NO: 5563831 - DNA, 25 bp, Homo sapien
tctaaacaggcttccaaccacccac

SEQ ID NO: 5563832 - DNA, 25 bp, Homo sapien
cctcttcagcaataagggcaccagt

SEQ ID NO: 5563833 - DNA, 25 bp, Homo sapien
caatatcactgcactgggaaacacc

SEQ ID NO: 5563834 - DNA, 25 bp, Homo sapien
gctgtgcatgtaacagatggggatg

SEQ ID NO: 5563835 - DNA, 25 bp, Homo sapien
gagagcactccaagtctctgccctg

SEQ ID NO: 5563836 - DNA, 25 bp, Homo sapien
gggatgcacagaactcaaaataccc

SEQ ID NO: 5563837 - DNA, 25 bp, Homo sapien
caatgaagaaatgccaacgcagagg

SEQ ID NO: 5563838 - DNA, 25 bp, Homo sapien
tacggaaaattctaggatagtatcc

SEQ ID NO: 5563839 - DNA, 25 bp, Homo sapien
ttagggaccagaaacctggtgagat

SEQ ID NO: 5563840 - DNA, 25 bp, Homo sapien
actctaagactcaggtaagatcacc

SEQ ID NO: 5563841 - DNA, 25 bp, Homo sapien
aagaggccttaaataaaagacagca

SEQ ID NO: 5563842 - DNA, 25 bp, Homo sapien
ctgttcctggcaaataagaggcctt

SEQ ID NO: 5563843 - DNA, 25 bp, Homo sapien
gcatatgaagcatttagcactgttc

SEQ ID NO: 5563844 - DNA, 25 bp, Homo sapien
gtgtctgctgaacgacctgaatggt

SEQ ID NO: 5563845 - DNA, 25 bp, Homo sapien
ggaaagccattgaaaggttctaagc

SEQ ID NO: 5563846 - DNA, 25 bp, Homo sapien
tctgcatggaatggaaagccattga

SEQ ID NO: 5563847 - DNA, 25 bp, Homo sapien
ttacagattgtgagttcttagggac

SEQ ID NO: 5563848 - DNA, 25 bp, Homo sapien
tagtaagccttaacatgaaagtgtc

SEQ ID NO: 5563849 - DNA, 25 bp, Homo sapien
cagggccagatcgtataaggcttta

SEQ ID NO: 5563850 - DNA, 25 bp, Homo sapien
ttttcaactgcatgcagggccggtg

SEQ ID NO: 5563851 - DNA, 25 bp, Homo sapien
ctcaaggcagagctattaaaaaaac

SEQ ID NO: 5563852 - DNA, 25 bp, Homo sapien
tacagaaaccagagcatttacatac

SEQ ID NO: 5563853 - DNA, 25 bp, Homo sapien
atttgaatacagaaaccagagcatt

SEQ ID NO: 5563854 - DNA, 25 bp, Homo sapien
ctcttctccatatgtaggaaaggaa

SEQ ID NO: 5563855 - DNA, 25 bp, Homo sapien
aaaggttataggagattttcaactg

SEQ ID NO: 5563856 - DNA, 25 bp, Homo sapien
agttgtgggaaaatcaaaggttata

SEQ ID NO: 5563857 - DNA, 25 bp, Homo sapien
actctctaagggctttgctaacttc

SEQ ID NO: 5563858 - DNA, 25 bp, Homo sapien
caaaacatggagtatttgaatacag

SEQ ID NO: 5563859 - DNA, 25 bp, Homo sapien
atttacatactcagctcaaggcaga

SEQ ID NO: 5563860 - DNA, 25 bp, Homo sapien
agggtcagctgtactctctaagggc

SEQ ID NO: 5563861 - DNA, 25 bp, Homo sapien
aatgttactttaccagagatgctgc

SEQ ID NO: 5563862 - DNA, 25 bp, Homo sapien
agatgctgcctccttagccaaccat

SEQ ID NO: 5563863 - DNA, 25 bp, Homo sapien
acctcttctgaaaaggatgcagagt

SEQ ID NO: 5563864 - DNA, 25 bp, Homo sapien
aggggctttgcttgttcactgctgt

SEQ ID NO: 5563865 - DNA, 25 bp, Homo sapien
ctaacaccaatttcccccgactggc

SEQ ID NO: 5563866 - DNA, 25 bp, Homo sapien
gccacactgcctcagtgatgctgca

SEQ ID NO: 5563867 - DNA, 25 bp, Homo sapien
tgctgcaggacaacacctgtttcca

SEQ ID NO: 5563868 - DNA, 25 bp, Homo sapien
aggctggatagctatttgttgaaag

SEQ ID NO: 5563869 - DNA, 25 bp, Homo sapien
ctgaaaaggatgcagagtaaatgag

SEQ ID NO: 5563870 - DNA, 25 bp, Homo sapien
cctgttccactcctgccacactgcc

SEQ ID NO: 5563871 - DNA, 25 bp, Homo sapien
tctctgagtttaccagtctaacacc

SEQ ID NO: 5563872 - DNA, 25 bp, Homo sapien
attaagtggattattttacaggctc

SEQ ID NO: 5563873 - DNA, 25 bp, Homo sapien
ttcttccaaagacctgaggcagcag

SEQ ID NO: 5563874 - DNA, 25 bp, Homo sapien
agttgggttgcaattgagtgagaaa

SEQ ID NO: 5563875 - DNA, 25 bp, Homo sapien
ggcagtgcagcactgtaaatactgc

SEQ ID NO: 5563876 - DNA, 25 bp, Homo sapien
ttgactagctaacggaaacttgtaa

SEQ ID NO: 5563877 - DNA, 25 bp, Homo sapien
cttcagcagcgaatggtatcaatgg

SEQ ID NO: 5563878 - DNA, 25 bp, Homo sapien
taaaagcaggaagataatggtttac

SEQ ID NO: 5563879 - DNA, 25 bp, Homo sapien
gcagtgggctatcactgggccacta

SEQ ID NO: 5563880 - DNA, 25 bp, Homo sapien
aattccagttcagtagctgctgctt

SEQ ID NO: 5563881 - DNA, 25 bp, Homo sapien
ttacaggctctaggagtttcgtatt

SEQ ID NO: 5563882 - DNA, 25 bp, Homo sapien
attaagtgagctatttgggctagtt

SEQ ID NO: 5563883 - DNA, 25 bp, Homo sapien
tcctggttttggaagagctcaaatc

SEQ ID NO: 5563884 - DNA, 25 bp, Homo sapien
aatcagaagttcccagcagggcttt

SEQ ID NO: 5563885 - DNA, 25 bp, Homo sapien
tatgcacatgtggactgcactgcaa

SEQ ID NO: 5563886 - DNA, 25 bp, Homo sapien
gaagtctcttgctgtcgcccacgct

SEQ ID NO: 5563887 - DNA, 25 bp, Homo sapien
gtgaccagtggagcttcagacttta

SEQ ID NO: 5563888 - DNA, 25 bp, Homo sapien
atcaataaaaggagtgaccagtgga

SEQ ID NO: 5563889 - DNA, 25 bp, Homo sapien
tctcccgctccagcctactgagtag

SEQ ID NO: 5563890 - DNA, 25 bp, Homo sapien
cagaattcccaaatacaagctcccc

SEQ ID NO: 5563891 - DNA, 25 bp, Homo sapien
ctatgtgaggcatccatcctggttt

SEQ ID NO: 5563892 - DNA, 25 bp, Homo sapien
gcagggcttttatgttgctctggcc

SEQ ID NO: 5563893 - DNA, 25 bp, Homo sapien
actaggtaggtaaacatcaggaatc

SEQ ID NO: 5563894 - DNA, 25 bp, Homo sapien
aaatatagatgagttatccaacttt

SEQ ID NO: 5563895 - DNA, 25 bp, Homo sapien
tacattcttgggatgttggccattc

SEQ ID NO: 5563896 - DNA, 25 bp, Homo sapien
ggatgttggccattcagacagcatt

SEQ ID NO: 5563897 - DNA, 25 bp, Homo sapien
tcttgggatgttggccattcagaca

SEQ ID NO: 5563898 - DNA, 25 bp, Homo sapien
tatttcaaatatagatgagttatcc

SEQ ID NO: 5563899 - DNA, 25 bp, Homo sapien
actcaaagatagtttgcttagattt

SEQ ID NO: 5563900 - DNA, 25 bp, Homo sapien
gcaggttgctgtttttaatacattc

SEQ ID NO: 5563901 - DNA, 25 bp, Homo sapien
ttaatacattcttgggatgttggcc

SEQ ID NO: 5563902 - DNA, 25 bp, Homo sapien
tgggatgttggccattcagacagca

SEQ ID NO: 5563903 - DNA, 25 bp, Homo sapien
ttggccattcagacagcattatttc

SEQ ID NO: 5563904 - DNA, 25 bp, Homo sapien
cttgggatgttggccattcagacag

SEQ ID NO: 5563905 - DNA, 25 bp, Homo sapien
actgcaaaaattaatgctatgcccc

SEQ ID NO: 5563906 - DNA, 25 bp, Homo sapien
tcaagaagtgtaattttaagactgc

SEQ ID NO: 5563907 - DNA, 25 bp, Homo sapien
tacttttccctcaaaacaggccaca

SEQ ID NO: 5563908 - DNA, 25 bp, Homo sapien
gtcagtgcacgcaaataagagacat

SEQ ID NO: 5563909 - DNA, 25 bp, Homo sapien
gctatgccccttaataacagaactc

SEQ ID NO: 5563910 - DNA, 25 bp, Homo sapien
cacaggccctcctaactccagtgga

SEQ ID NO: 5563911 - DNA, 25 bp, Homo sapien
taacagaactctccaggcttatttt

SEQ ID NO: 5563912 - DNA, 25 bp, Homo sapien
actgcattataaaactggtaaggtt

SEQ ID NO: 5563913 - DNA, 25 bp, Homo sapien
tcacgctgtctaccacaggccctcc

SEQ ID NO: 5563914 - DNA, 25 bp, Homo sapien
aaatagaattttgtcagtgcacgca

SEQ ID NO: 5563915 - DNA, 25 bp, Homo sapien
atattaaaactacttgaccacaact

SEQ ID NO: 5563916 - DNA, 25 bp, Homo sapien
gagatgaataacatagctcagaatt

SEQ ID NO: 5563917 - DNA, 25 bp, Homo sapien
aagattgctaggtcttcgctaagac

SEQ ID NO: 5563918 - DNA, 25 bp, Homo sapien
accatagtaggctcaatagttgtac

SEQ ID NO: 5563919 - DNA, 25 bp, Homo sapien
tgttctcatagaaagggattaattc

SEQ ID NO: 5563920 - DNA, 25 bp, Homo sapien
aggaaatggacagaccagaacttaa

SEQ ID NO: 5563921 - DNA, 25 bp, Homo sapien
aatttcaggaaatggacagaccaga

SEQ ID NO: 5563922 - DNA, 25 bp, Homo sapien
attatagagccaacaacagagatga

SEQ ID NO: 5563923 - DNA, 25 bp, Homo sapien
acggagatctaattaaagtaaccat

SEQ ID NO: 5563924 - DNA, 25 bp, Homo sapien
tcccacgtttagtacggagatctaa

SEQ ID NO: 5563925 - DNA, 25 bp, Homo sapien
actaacaagttgtgatctgcaagtt

SEQ ID NO: 5563926 - DNA, 25 bp, Homo sapien
ttattatgaatagcagcaaacagat

SEQ ID NO: 5563927 - DNA, 25 bp, Homo sapien
tgagcccgatctgctagcagaggac

SEQ ID NO: 5563928 - DNA, 25 bp, Homo sapien
cgggcttgccttctttacgggacga

SEQ ID NO: 5563929 - DNA, 25 bp, Homo sapien
agctgtggccagcttagaaacaaag

SEQ ID NO: 5563930 - DNA, 25 bp, Homo sapien
cattgggacacttaaggctgctcta

SEQ ID NO: 5563931 - DNA, 25 bp, Homo sapien
ccccaggcttgaaaataagcgtcct

SEQ ID NO: 5563932 - DNA, 25 bp, Homo sapien
cgctcgatagcaggcgtgtcattgg

SEQ ID NO: 5563933 - DNA, 25 bp, Homo sapien
tcgaagagtgtgtcgttctccctcc

SEQ ID NO: 5563934 - DNA, 25 bp, Homo sapien
gcacaggccggaattaaccggagaa

SEQ ID NO: 5563935 - DNA, 25 bp, Homo sapien
agcagaggactcaccgctgccttgc

SEQ ID NO: 5563936 - DNA, 25 bp, Homo sapien
catcccgctgtgaaagcgggaggaa

SEQ ID NO: 5563937 - DNA, 25 bp, Homo sapien
taggcgactaggcctgcgcctcttg

SEQ ID NO: 5563938 - DNA, 25 bp, Homo sapien
cattggggatacatttagtacattc

SEQ ID NO: 5563939 - DNA, 25 bp, Homo sapien
gtgaagattatgagagtaaagtttt

SEQ ID NO: 5563940 - DNA, 25 bp, Homo sapien
gccctgtgggtgtaagaaatttgta

SEQ ID NO: 5563941 - DNA, 25 bp, Homo sapien
ccaaaaagcaggtatgtcagtcgct

SEQ ID NO: 5563942 - DNA, 25 bp, Homo sapien
aagttttgaagactcagggatagct

SEQ ID NO: 5563943 - DNA, 25 bp, Homo sapien
tagattggaataattaactggagat

SEQ ID NO: 5563944 - DNA, 25 bp, Homo sapien
gaagactcagggatagctgtaatgc

SEQ ID NO: 5563945 - DNA, 25 bp, Homo sapien
acatctaagaatcaaaggctgctcc

SEQ ID NO: 5563946 - DNA, 25 bp, Homo sapien
ctagatttgatgggtgtgaagatta

SEQ ID NO: 5563947 - DNA, 25 bp, Homo sapien
tagtacattcatgtgagaggaaggc

SEQ ID NO: 5563948 - DNA, 25 bp, Homo sapien
aaaagaataatgaacagttatgttc

SEQ ID NO: 5563949 - DNA, 25 bp, Homo sapien
tatgtcaccatcgcttcggaaagat

SEQ ID NO: 5563950 - DNA, 25 bp, Homo sapien
ctcacccatgctgctcctgaggagt

SEQ ID NO: 5563951 - DNA, 25 bp, Homo sapien
tgtttcccagcatgaccccccagtt

SEQ ID NO: 5563952 - DNA, 25 bp, Homo sapien
cagctttgtgcctcccaacagaaca

SEQ ID NO: 5563953 - DNA, 25 bp, Homo sapien
tcctgaggagtcagccatcctcatc

SEQ ID NO: 5563954 - DNA, 25 bp, Homo sapien
ctcattccttggggcaaatgggaga

SEQ ID NO: 5563955 - DNA, 25 bp, Homo sapien
atcgcttcggaaagattttgtcagg

SEQ ID NO: 5563956 - DNA, 25 bp, Homo sapien
cggccaagccactcatcttttaacc

SEQ ID NO: 5563957 - DNA, 25 bp, Homo sapien
gtcaggtacagaatgtgaatttggc

SEQ ID NO: 5563958 - DNA, 25 bp, Homo sapien
atcctggatggtgcacatgctcttc

SEQ ID NO: 5563959 - DNA, 25 bp, Homo sapien
catcctcatcagctttgtgcctccc

SEQ ID NO: 5563960 - DNA, 25 bp, Homo sapien
aagcgttgtaccgacaggacatttt

SEQ ID NO: 5563961 - DNA, 25 bp, Homo sapien
gaggaggggagttaattcactctcg

SEQ ID NO: 5563962 - DNA, 25 bp, Homo sapien
aaggagctcttaaatgcaacttcac

SEQ ID NO: 5563963 - DNA, 25 bp, Homo sapien
acaggacattttagggtagccgcta

SEQ ID NO: 5563964 - DNA, 25 bp, Homo sapien
gttaattcactctcgcaggggaagc

SEQ ID NO: 5563965 - DNA, 25 bp, Homo sapien
atagttgcttgggatcacaaaatca

SEQ ID NO: 5563966 - DNA, 25 bp, Homo sapien
gtgtccaacggagactcatgaactc

SEQ ID NO: 5563967 - DNA, 25 bp, Homo sapien
aaaagagaaacgaaacttagccatc

SEQ ID NO: 5563968 - DNA, 25 bp, Homo sapien
tgattcaaaaatgtcgttcctaaga

SEQ ID NO: 5563969 - DNA, 25 bp, Homo sapien
acttagccatcagggtagctctgga

SEQ ID NO: 5563970 - DNA, 25 bp, Homo sapien
attaagttgtgtccaacggagactc

SEQ ID NO: 5563971 - DNA, 25 bp, Homo sapien
ggagtggagcaattaaaacagtctt

SEQ ID NO: 5563972 - DNA, 25 bp, Homo sapien
tcaaggagtcaaggctacaattctt

SEQ ID NO: 5563973 - DNA, 25 bp, Homo sapien
tcaaaattacggagtggagcaatta

SEQ ID NO: 5563974 - DNA, 25 bp, Homo sapien
catccatcgatccactcatccactc

SEQ ID NO: 5563975 - DNA, 25 bp, Homo sapien
ataggatgtatcatgatgtcgcttc

SEQ ID NO: 5563976 - DNA, 25 bp, Homo sapien
ttcctggatcgaaatctacagtctc

SEQ ID NO: 5563977 - DNA, 25 bp, Homo sapien
ttccccgtcaaacattcatccatcc

SEQ ID NO: 5563978 - DNA, 25 bp, Homo sapien
aagggtgcttcaaaattacggagtg

SEQ ID NO: 5563979 - DNA, 25 bp, Homo sapien
atccatccaattggtggcttgggga

SEQ ID NO: 5563980 - DNA, 25 bp, Homo sapien
gttgctcaggctggtatctatttct

SEQ ID NO: 5563981 - DNA, 25 bp, Homo sapien
tacagtctcaaggagtcaaggctac

SEQ ID NO: 5563982 - DNA, 25 bp, Homo sapien
atatcctgaacataatggctcccat

SEQ ID NO: 5563983 - DNA, 25 bp, Homo sapien
aaccagtactaagcaaaacagttta

SEQ ID NO: 5563984 - DNA, 25 bp, Homo sapien
aatccacaaggtaataacaaaaatg

SEQ ID NO: 5563985 - DNA, 25 bp, Homo sapien
aataattgattagtggggttgctga

SEQ ID NO: 5563986 - DNA, 25 bp, Homo sapien
ttatctaggatgacagagaacaaga

SEQ ID NO: 5563987 - DNA, 25 bp, Homo sapien
agagctctgctcccacaaacacctc

SEQ ID NO: 5563988 - DNA, 25 bp, Homo sapien
tatactgggccaagtgcaaacattt

SEQ ID NO: 5563989 - DNA, 25 bp, Homo sapien
ccagctacagctgtaaccagtacta

SEQ ID NO: 5563990 - DNA, 25 bp, Homo sapien
gagaacaagattagacaagatggat

SEQ ID NO: 5563991 - DNA, 25 bp, Homo sapien
ccttggggcaggatctaataattga

SEQ ID NO: 5563992 - DNA, 25 bp, Homo sapien
tggctcccatagaaataaactagta

SEQ ID NO: 5563993 - DNA, 25 bp, Homo sapien
actgctatcaagaattgcccaagac

SEQ ID NO: 5563994 - DNA, 25 bp, Homo sapien
atgctaacaagaattacgatggtcc

SEQ ID NO: 5563995 - DNA, 25 bp, Homo sapien
tgcctcctggttagagatgctaaca

SEQ ID NO: 5563996 - DNA, 25 bp, Homo sapien
agttcacgtttggcatttcttggtc

SEQ ID NO: 5563997 - DNA, 25 bp, Homo sapien
aaattacagataaacacaagtgtat

SEQ ID NO: 5563998 - DNA, 25 bp, Homo sapien
tttaccctatgtaaggcaaggagaa

SEQ ID NO: 5563999 - DNA, 25 bp, Homo sapien
tacgatggtcctaagatactggagg

SEQ ID NO: 5564000 - DNA, 25 bp, Homo sapien
ctaagatactggaggaagtaaaaaa

SEQ ID NO: 5564001 - DNA, 25 bp, Homo sapien
aagaattgcccaagactggataatt

SEQ ID NO: 5564002 - DNA, 25 bp, Homo sapien
aaagttgaaggccctacatatttta

SEQ ID NO: 5564003 - DNA, 25 bp, Homo sapien
ttagagatgctaacaagaattacga

SEQ ID NO: 5564004 - DNA, 25 bp, Homo sapien
gctggcagcaaccaccatgcataca

SEQ ID NO: 5564005 - DNA, 25 bp, Homo sapien
acggccacattgccaggtctgtcta

SEQ ID NO: 5564006 - DNA, 25 bp, Homo sapien
ggacactctgccaccgggcctgtcc

SEQ ID NO: 5564007 - DNA, 25 bp, Homo sapien
gctctgctccaaggtgccccagtca

SEQ ID NO: 5564008 - DNA, 25 bp, Homo sapien
tatgcatttagtcatgagggaggct

SEQ ID NO: 5564009 - DNA, 25 bp, Homo sapien
ttctctctgatcgtctgggctgcac

SEQ ID NO: 5564010 - DNA, 25 bp, Homo sapien
ccaggagtgaggatttcccatccgg

SEQ ID NO: 5564011 - DNA, 25 bp, Homo sapien
ctagtgtctctaagcagtggtttcc

SEQ ID NO: 5564012 - DNA, 25 bp, Homo sapien
tgcccggtgcttctggttcgctttc

SEQ ID NO: 5564013 - DNA, 25 bp, Homo sapien
taaatataaagcagtggacgcatct

SEQ ID NO: 5564014 - DNA, 25 bp, Homo sapien
tccgtcaaccctgaatgagaagtcg

SEQ ID NO: 5564015 - DNA, 25 bp, Homo sapien
aaggttgtacaagggaaatatccaa

SEQ ID NO: 5564016 - DNA, 25 bp, Homo sapien
ggcaaaggtcagcattaaaatatac

SEQ ID NO: 5564017 - DNA, 25 bp, Homo sapien
ttttctagttcacaggcaaaggtca

SEQ ID NO: 5564018 - DNA, 25 bp, Homo sapien
aagcgaccaaagccacaatagctat

SEQ ID NO: 5564019 - DNA, 25 bp, Homo sapien
atctggtaggtgtatatgaaaagaa

SEQ ID NO: 5564020 - DNA, 25 bp, Homo sapien
tatgagaatcctaagcgaccaaagc

SEQ ID NO: 5564021 - DNA, 25 bp, Homo sapien
gattgtacagagcatttaaggaaaa

SEQ ID NO: 5564022 - DNA, 25 bp, Homo sapien
ttaaatgaaggcaaatcaacctgac

SEQ ID NO: 5564023 - DNA, 25 bp, Homo sapien
atcaacaaggaataacacaattagt

SEQ ID NO: 5564024 - DNA, 25 bp, Homo sapien
atagcttgaaatctggtaggtgtat

SEQ ID NO: 5564025 - DNA, 25 bp, Homo sapien
gccatgtgtaaatatatgagaatcc

SEQ ID NO: 5564026 - DNA, 25 bp, Homo sapien
caccacaaggcattaaaatggagac

SEQ ID NO: 5564027 - DNA, 25 bp, Homo sapien
gtgggatgacaacttagtgacatgc

SEQ ID NO: 5564028 - DNA, 25 bp, Homo sapien
atcaatttatgtgggatgacaactt

SEQ ID NO: 5564029 - DNA, 25 bp, Homo sapien
tgacatgcataaaaaaacaccacaa

SEQ ID NO: 5564030 - DNA, 25 bp, Homo sapien
aggacctaaacatcatgcttatcta

SEQ ID NO: 5564031 - DNA, 25 bp, Homo sapien
ttacagccccagaggctttgctggc

SEQ ID NO: 5564032 - DNA, 25 bp, Homo sapien
tgaaacatgttaaactcaagggaat

SEQ ID NO: 5564033 - DNA, 25 bp, Homo sapien
ttgcaggcaacaacttgtacatgat

SEQ ID NO: 5564034 - DNA, 25 bp, Homo sapien
aaatgtcaattacagccccagaggc

SEQ ID NO: 5564035 - DNA, 25 bp, Homo sapien
attctagaatatgggaaacaggttt

SEQ ID NO: 5564036 - DNA, 25 bp, Homo sapien
aaaatggagacttaaatacaaatat

SEQ ID NO: 5564037 - DNA, 25 bp, Homo sapien
ttccaaagacagatagacaaattcc

SEQ ID NO: 5564038 - DNA, 25 bp, Homo sapien
tcaaggtacacccgcaagtgctcta

SEQ ID NO: 5564039 - DNA, 25 bp, Homo sapien
tttaggattattatctggctgcccc

SEQ ID NO: 5564040 - DNA, 25 bp, Homo sapien
ttcatgaaagatactactaggttgt

SEQ ID NO: 5564041 - DNA, 25 bp, Homo sapien
gcaaaaaagcaacaatgagagaagc

SEQ ID NO: 5564042 - DNA, 25 bp, Homo sapien
ggctgcccctcaacaataacaagtg

SEQ ID NO: 5564043 - DNA, 25 bp, Homo sapien
attggaaggacatatgatttaaaca

SEQ ID NO: 5564044 - DNA, 25 bp, Homo sapien
ggaatgtcggaacacaacaactagc

SEQ ID NO: 5564045 - DNA, 25 bp, Homo sapien
acatattgcactagagaggaatgaa

SEQ ID NO: 5564046 - DNA, 25 bp, Homo sapien
ttttccctgagggatcaaggtacac

SEQ ID NO: 5564047 - DNA, 25 bp, Homo sapien
atgttggaaacagtggctttaggat

SEQ ID NO: 5564048 - DNA, 25 bp, Homo sapien
ccgcacctggccataacactccttc

SEQ ID NO: 5564049 - DNA, 25 bp, Homo sapien
tgaccacggcgcccagccttcaaat

SEQ ID NO: 5564050 - DNA, 25 bp, Homo sapien
aggtttatccaccctggccttggcc

SEQ ID NO: 5564051 - DNA, 25 bp, Homo sapien
atggacatcaggaagtagagatgaa

SEQ ID NO: 5564052 - DNA, 25 bp, Homo sapien
ggcatgatcacagcatacttcaggc

SEQ ID NO: 5564053 - DNA, 25 bp, Homo sapien
ctatcactgtgtaagagctgagcag

SEQ ID NO: 5564054 - DNA, 25 bp, Homo sapien
tataggtgcatgacgccgcacctgg

SEQ ID NO: 5564055 - DNA, 25 bp, Homo sapien
tctttcaagaatcaccaggcctatg

SEQ ID NO: 5564056 - DNA, 25 bp, Homo sapien
ttcatgacacaccactatggacatc

SEQ ID NO: 5564057 - DNA, 25 bp, Homo sapien
aagtcccatggaacaaacctatcac

SEQ ID NO: 5564058 - DNA, 25 bp, Homo sapien
ggctgggtctctgccctaagtgatt

SEQ ID NO: 5564059 - DNA, 25 bp, Homo sapien
aactactggcctcaaccgagtctcc

SEQ ID NO: 5564060 - DNA, 25 bp, Homo sapien
acactcaaagtgttccatgcaactg

SEQ ID NO: 5564061 - DNA, 25 bp, Homo sapien
ttcccaacatagttcccagtatata

SEQ ID NO: 5564062 - DNA, 25 bp, Homo sapien
tggcctcaaccgagtctcctgcttt

SEQ ID NO: 5564063 - DNA, 25 bp, Homo sapien
ccatgcaactgtggttgaactattc

SEQ ID NO: 5564064 - DNA, 25 bp, Homo sapien
taacaatacaataccagtgataacc

SEQ ID NO: 5564065 - DNA, 25 bp, Homo sapien
ttatcaagaccacataatgcagttg

SEQ ID NO: 5564066 - DNA, 25 bp, Homo sapien
accagtgataaccaaatataattga

SEQ ID NO: 5564067 - DNA, 25 bp, Homo sapien
gaccacataatgcagttgaacactc

SEQ ID NO: 5564068 - DNA, 25 bp, Homo sapien
aaaataaagttactatggcaacatt

SEQ ID NO: 5564069 - DNA, 25 bp, Homo sapien
ttgaactattcagattccagacttc

SEQ ID NO: 5564070 - DNA, 25 bp, Homo sapien
ggaccacttgcaccatctgggaggc

SEQ ID NO: 5564071 - DNA, 25 bp, Homo sapien
ctcctcaaaacgtgtgcaccagctg

SEQ ID NO: 5564072 - DNA, 25 bp, Homo sapien
tgcctctcctcaaaacgtgtgcacc

SEQ ID NO: 5564073 - DNA, 25 bp, Homo sapien
gcggatgatgaggagtttctgtccg

SEQ ID NO: 5564074 - DNA, 25 bp, Homo sapien
cctctcctcaaaacgtgtgcaccag

SEQ ID NO: 5564075 - DNA, 25 bp, Homo sapien
cggggaccacttgcaccatctggga

SEQ ID NO: 5564076 - DNA, 25 bp, Homo sapien
gtagagtctggacaatctggatgga

SEQ ID NO: 5564077 - DNA, 25 bp, Homo sapien
ccacttgcaccatctgggaggctgg

SEQ ID NO: 5564078 - DNA, 25 bp, Homo sapien
cctcaaaacgtgtgcaccagctgga

SEQ ID NO: 5564079 - DNA, 25 bp, Homo sapien
cactgcctctcctcaaaacgtgtgc

SEQ ID NO: 5564080 - DNA, 25 bp, Homo sapien
gggtagagtctggacaatctggatg

SEQ ID NO: 5564081 - DNA, 25 bp, Homo sapien
ttcccaagtgcaaatgcccggaatg

SEQ ID NO: 5564082 - DNA, 25 bp, Homo sapien
cagtgtcctggcagaaaacagaata

SEQ ID NO: 5564083 - DNA, 25 bp, Homo sapien
tgacaatgcatgaatggcagtgtcc

SEQ ID NO: 5564084 - DNA, 25 bp, Homo sapien
taaaggaaattcattgcaaagcagc

SEQ ID NO: 5564085 - DNA, 25 bp, Homo sapien
gacacgaatgccctagggtcccttc

SEQ ID NO: 5564086 - DNA, 25 bp, Homo sapien
gattgataaataggacacgaatgcc

SEQ ID NO: 5564087 - DNA, 25 bp, Homo sapien
aaggcccggtgagctaatcacttga

SEQ ID NO: 5564088 - DNA, 25 bp, Homo sapien
cagagatcttagaggtggtgctgaa

SEQ ID NO: 5564089 - DNA, 25 bp, Homo sapien
caggacaaattggctggcactttgc

SEQ ID NO: 5564090 - DNA, 25 bp, Homo sapien
aggtgaggcaagtttcccaagtgca

SEQ ID NO: 5564091 - DNA, 25 bp, Homo sapien
tgagaggcaacaagtcctaacagct

SEQ ID NO: 5564092 - DNA, 25 bp, Homo sapien
tagctcaactcaggtatatccccac

SEQ ID NO: 5564093 - DNA, 25 bp, Homo sapien
atcacttcctgcagtccgagtccgg

SEQ ID NO: 5564094 - DNA, 25 bp, Homo sapien
ccacacttcccgagacgtcccccat

SEQ ID NO: 5564095 - DNA, 25 bp, Homo sapien
ggaggcaccgtagttaatgaatcaa

SEQ ID NO: 5564096 - DNA, 25 bp, Homo sapien
atccccactattgggccagggagac

SEQ ID NO: 5564097 - DNA, 25 bp, Homo sapien
ggcctccaggtgacccctctggctt

SEQ ID NO: 5564098 - DNA, 25 bp, Homo sapien
ctacgaagggaatataaactaatca

SEQ ID NO: 5564099 - DNA, 25 bp, Homo sapien
ctaatcgattggtccgggtattttg

SEQ ID NO: 5564100 - DNA, 25 bp, Homo sapien
agacgtcccccatcccaacagggat

SEQ ID NO: 5564101 - DNA, 25 bp, Homo sapien
caacagggataaaatcctctagctc

SEQ ID NO: 5564102 - DNA, 25 bp, Homo sapien
ataaaccaaacagccgatcaatcac

SEQ ID NO: 5564103 - DNA, 25 bp, Homo sapien
cggcggcgtcctgaaccgcctgaag

SEQ ID NO: 5564104 - DNA, 25 bp, Homo sapien
gttcacaccggcatttctccgcctc

SEQ ID NO: 5564105 - DNA, 25 bp, Homo sapien
gacagggacagtactttttgagatt

SEQ ID NO: 5564106 - DNA, 25 bp, Homo sapien
ctacagtattgatttcacccgcttc

SEQ ID NO: 5564107 - DNA, 25 bp, Homo sapien
atgtaaacccgaagacaacatctac

SEQ ID NO: 5564108 - DNA, 25 bp, Homo sapien
tatttatgtaaacccgaagacaaca

SEQ ID NO: 5564109 - DNA, 25 bp, Homo sapien
ccttgcgtttcagaccaggaggagg

SEQ ID NO: 5564110 - DNA, 25 bp, Homo sapien
ttgagattgccaaaccttgcgtttc

SEQ ID NO: 5564111 - DNA, 25 bp, Homo sapien
ttcacccgcttcaaaattcgagatt

SEQ ID NO: 5564112 - DNA, 25 bp, Homo sapien
ctcagccgggtcaccgagaattatt

SEQ ID NO: 5564113 - DNA, 25 bp, Homo sapien
caaaattcgagatttggagacaggg

SEQ ID NO: 5564114 - DNA, 25 bp, Homo sapien
catacccaaaaaagtgcgagaaaaa

SEQ ID NO: 5564115 - DNA, 25 bp, Homo sapien
tcccaggctgtcgatcctaattaag

SEQ ID NO: 5564116 - DNA, 25 bp, Homo sapien
atctcaaaaacatttggagtgcgat

SEQ ID NO: 5564117 - DNA, 25 bp, Homo sapien
caaactggtgacacacagaacaaca

SEQ ID NO: 5564118 - DNA, 25 bp, Homo sapien
aaaaacatttggagtgcgatagaag

SEQ ID NO: 5564119 - DNA, 25 bp, Homo sapien
cactgtaagtgttattctatgtctg

SEQ ID NO: 5564120 - DNA, 25 bp, Homo sapien
agtgcgatagaagccatacccaaaa

SEQ ID NO: 5564121 - DNA, 25 bp, Homo sapien
ctgtcgatcctaattaagaaacttc

SEQ ID NO: 5564122 - DNA, 25 bp, Homo sapien
ctttatcccttccatgttgcctcat

SEQ ID NO: 5564123 - DNA, 25 bp, Homo sapien
gaagccatacccaaaaaagtgcgag

SEQ ID NO: 5564124 - DNA, 25 bp, Homo sapien
aggaacaaactggtgacacacagaa

SEQ ID NO: 5564125 - DNA, 25 bp, Homo sapien
tttgattgaatctgagccaagaggg

SEQ ID NO: 5564126 - DNA, 25 bp, Homo sapien
tatttactccaggaaggcaagagcc

SEQ ID NO: 5564127 - DNA, 25 bp, Homo sapien
ggcacacgtggcctatgcacaccac

SEQ ID NO: 5564128 - DNA, 25 bp, Homo sapien
gagagggaagcaacatttgattgaa

SEQ ID NO: 5564129 - DNA, 25 bp, Homo sapien
ggggcaccccctgcatatgtggggc

SEQ ID NO: 5564130 - DNA, 25 bp, Homo sapien
gctctacccagttgggacaaagggc

SEQ ID NO: 5564131 - DNA, 25 bp, Homo sapien
acccacctacaagcttgggcggctc

SEQ ID NO: 5564132 - DNA, 25 bp, Homo sapien
cagggggctgagttctctcaaatga

SEQ ID NO: 5564133 - DNA, 25 bp, Homo sapien
cagcctcctgagcaaacagcacctg

SEQ ID NO: 5564134 - DNA, 25 bp, Homo sapien
cagaggtaagtccagcttagaccag

SEQ ID NO: 5564135 - DNA, 25 bp, Homo sapien
cgaggctcccagcaacagtaaggga

SEQ ID NO: 5564136 - DNA, 25 bp, Homo sapien
tctgtcagtttgaaatgacgtgccc

SEQ ID NO: 5564137 - DNA, 25 bp, Homo sapien
tgacgtgcccagagttcatccacac

SEQ ID NO: 5564138 - DNA, 25 bp, Homo sapien
ctgcaaatatgactctagattctag

SEQ ID NO: 5564139 - DNA, 25 bp, Homo sapien
tcaccctgaaatccctcacagagga

SEQ ID NO: 5564140 - DNA, 25 bp, Homo sapien
tcacagaggaattgattacagggag

SEQ ID NO: 5564141 - DNA, 25 bp, Homo sapien
cactcaccagggtgagctctgggct

SEQ ID NO: 5564142 - DNA, 25 bp, Homo sapien
tggaactgagttatgtacacaaagc

SEQ ID NO: 5564143 - DNA, 25 bp, Homo sapien
ccaaaacagagttaaagtaaacagc

SEQ ID NO: 5564144 - DNA, 25 bp, Homo sapien
tcaagcagacaatttgattagcaaa

SEQ ID NO: 5564145 - DNA, 25 bp, Homo sapien
gtttgaaatgacgtgcccagagttc

SEQ ID NO: 5564146 - DNA, 25 bp, Homo sapien
aatactaactgtgatagcttctcag

SEQ ID NO: 5564147 - DNA, 25 bp, Homo sapien
cttgttgaggacgaaactaagccct

SEQ ID NO: 5564148 - DNA, 25 bp, Homo sapien
agggcttagtttcgtcctcaacaag

SEQ ID NO: 5564149 - DNA, 25 bp, Homo sapien
tatagagtatatagaagatgacata

SEQ ID NO: 5564150 - DNA, 25 bp, Homo sapien
agtaatatgcattgaccaaaacatt

SEQ ID NO: 5564151 - DNA, 25 bp, Homo sapien
accaaaacatttgattgacaagacc

SEQ ID NO: 5564152 - DNA, 25 bp, Homo sapien
tctttccttatgagtggcaattttt

SEQ ID NO: 5564153 - DNA, 25 bp, Homo sapien
atgcaagcctataaagtacacacca

SEQ ID NO: 5564154 - DNA, 25 bp, Homo sapien
tagatgaaagttagtaatatgcatt

SEQ ID NO: 5564155 - DNA, 25 bp, Homo sapien
agaagatgacatactctaggaatta

SEQ ID NO: 5564156 - DNA, 25 bp, Homo sapien
gattgacaagaccataaaggataac

SEQ ID NO: 5564157 - DNA, 25 bp, Homo sapien
tggcttttagcatctgggaagcaca

SEQ ID NO: 5564158 - DNA, 25 bp, Homo sapien
ttaaagtaagcaatatgcaagccta

SEQ ID NO: 5564159 - DNA, 25 bp, Homo sapien
tctaggaattagaacaatatatatt

SEQ ID NO: 5564160 - DNA, 25 bp, Homo sapien
ttcctggggccaatttttgcagctc

SEQ ID NO: 5564161 - DNA, 25 bp, Homo sapien
aggaacaccttgccctgttgctttg

SEQ ID NO: 5564162 - DNA, 25 bp, Homo sapien
gggatgactgcctccaggaatactc

SEQ ID NO: 5564163 - DNA, 25 bp, Homo sapien
caccgctttgaaacaggaacacctt

SEQ ID NO: 5564164 - DNA, 25 bp, Homo sapien
ccacggcccctttaaaattgacagc

SEQ ID NO: 5564165 - DNA, 25 bp, Homo sapien
aattgtccgtgcgattttgttcttc

SEQ ID NO: 5564166 - DNA, 25 bp, Homo sapien
tgacagccaagatttgctggcaaac

SEQ ID NO: 5564167 - DNA, 25 bp, Homo sapien
tttctttggggatgactgcctccag

SEQ ID NO: 5564168 - DNA, 25 bp, Homo sapien
ggatgctacaattccaggttctgcc

SEQ ID NO: 5564169 - DNA, 25 bp, Homo sapien
attgacttcttaggtggtgtatggg

SEQ ID NO: 5564170 - DNA, 25 bp, Homo sapien
tgccctgttgctttgccactcccca

SEQ ID NO: 5564171 - DNA, 25 bp, Homo sapien
aagcacatctgaaaaccctcgtaag

SEQ ID NO: 5564172 - DNA, 25 bp, Homo sapien
tgtgactcttgaggattgcagttcc

SEQ ID NO: 5564173 - DNA, 25 bp, Homo sapien
cagattaataaagtacaaggaaaac

SEQ ID NO: 5564174 - DNA, 25 bp, Homo sapien
gtcatctcctcagagtaggactgtc

SEQ ID NO: 5564175 - DNA, 25 bp, Homo sapien
tgtgtagttccaaatgggtttcttc

SEQ ID NO: 5564176 - DNA, 25 bp, Homo sapien
ctcgtaaggaagtgccattagattc

SEQ ID NO: 5564177 - DNA, 25 bp, Homo sapien
tggtagtcaaaataaaaagcatgtt

SEQ ID NO: 5564178 - DNA, 25 bp, Homo sapien
ttatcaaccacttgaaaggaaggaa

SEQ ID NO: 5564179 - DNA, 25 bp, Homo sapien
agagtaggactgtctgtgtagtcat

SEQ ID NO: 5564180 - DNA, 25 bp, Homo sapien
ttcttttcccagtgagagatctttt

SEQ ID NO: 5564181 - DNA, 25 bp, Homo sapien
ggaaggaatatgaagtgtgactctt

SEQ ID NO: 5564182 - DNA, 25 bp, Homo sapien
ccccttgtaggtacaggtactcttc

SEQ ID NO: 5564183 - DNA, 25 bp, Homo sapien
agctttgtctgaaaggacagtgccc

SEQ ID NO: 5564184 - DNA, 25 bp, Homo sapien
tcaggaaaggtagcttttccccatg

SEQ ID NO: 5564185 - DNA, 25 bp, Homo sapien
tactacatagtgccatttaaaaaat

SEQ ID NO: 5564186 - DNA, 25 bp, Homo sapien
tcctcacctgcctttcatgtctacc

SEQ ID NO: 5564187 - DNA, 25 bp, Homo sapien
gcggttcaggaatttgtacaagctt

SEQ ID NO: 5564188 - DNA, 25 bp, Homo sapien
aggtacaggtactcttctattctca

SEQ ID NO: 5564189 - DNA, 25 bp, Homo sapien
ttatcaaataaagaattgcattcat

SEQ ID NO: 5564190 - DNA, 25 bp, Homo sapien
aaatatatatctgcaaagagacctt

SEQ ID NO: 5564191 - DNA, 25 bp, Homo sapien
agcaaatttgcggttcaggaatttg

SEQ ID NO: 5564192 - DNA, 25 bp, Homo sapien
aggacagtgccctcctcccctttca

SEQ ID NO: 5564193 - DNA, 25 bp, Homo sapien
attttgtgaactgcaaccgggtagt

SEQ ID NO: 5564194 - DNA, 25 bp, Homo sapien
tgtacttttaagaggaactgggcac

SEQ ID NO: 5564195 - DNA, 25 bp, Homo sapien
ggatgggtttattacggctgcaacc

SEQ ID NO: 5564196 - DNA, 25 bp, Homo sapien
cacattacagaacccaaaggcttat

SEQ ID NO: 5564197 - DNA, 25 bp, Homo sapien
agttcagaacacaggctttggagct

SEQ ID NO: 5564198 - DNA, 25 bp, Homo sapien
ggctgcaacccaaggagcatctgta

SEQ ID NO: 5564199 - DNA, 25 bp, Homo sapien
gagactacattcacagaggacacat

SEQ ID NO: 5564200 - DNA, 25 bp, Homo sapien
acgcactcaaagaatgctggctcac

SEQ ID NO: 5564201 - DNA, 25 bp, Homo sapien
ctttggagctgaggcttcaattcta

SEQ ID NO: 5564202 - DNA, 25 bp, Homo sapien
tgcggtaaggcaaatcaagtatgaa

SEQ ID NO: 5564203 - DNA, 25 bp, Homo sapien
caagaacgacttaacacgcccagat

SEQ ID NO: 5564204 - DNA, 25 bp, Homo sapien
ttggcagcattctagagaagtgaat

SEQ ID NO: 5564205 - DNA, 25 bp, Homo sapien
aagtgaatgggaaagacttccgttc

SEQ ID NO: 5564206 - DNA, 25 bp, Homo sapien
aagaacaaaattattgaacaaagtc

SEQ ID NO: 5564207 - DNA, 25 bp, Homo sapien
gtgtgcttgacagaattatcatcca

SEQ ID NO: 5564208 - DNA, 25 bp, Homo sapien
gccaatgcgttccaaccaaagatgc

SEQ ID NO: 5564209 - DNA, 25 bp, Homo sapien
aagatgctgaattccaaacataatt

SEQ ID NO: 5564210 - DNA, 25 bp, Homo sapien
tgaagacaacagaaaagacaaacta

SEQ ID NO: 5564211 - DNA, 25 bp, Homo sapien
ttcaaggccaggccagtgcttgctt

SEQ ID NO: 5564212 - DNA, 25 bp, Homo sapien
caacaagaaaaaaaagccaatgcgt

SEQ ID NO: 5564213 - DNA, 25 bp, Homo sapien
gaacaaagtcataaaatacagcagt

SEQ ID NO: 5564214 - DNA, 25 bp, Homo sapien
tccgttctttcaaggccaggccagt

SEQ ID NO: 5564215 - DNA, 25 bp, Homo sapien
ctgggagattaaagccctagaaggc

SEQ ID NO: 5564216 - DNA, 25 bp, Homo sapien
cacttccggttgagggatttcctgg

SEQ ID NO: 5564217 - DNA, 25 bp, Homo sapien
ggacacgatgcacacagactctgct

SEQ ID NO: 5564218 - DNA, 25 bp, Homo sapien
gtctccagatgagacaggtacaggg

SEQ ID NO: 5564219 - DNA, 25 bp, Homo sapien
gtgcaaggcatttggcagttgctac

SEQ ID NO: 5564220 - DNA, 25 bp, Homo sapien
gcagagtaatatcatgggcacccca

SEQ ID NO: 5564221 - DNA, 25 bp, Homo sapien
ggcacacagtgcccacagctgtctc

SEQ ID NO: 5564222 - DNA, 25 bp, Homo sapien
ccttggcccccatccctgaccaggc

SEQ ID NO: 5564223 - DNA, 25 bp, Homo sapien
agatcaagctgcagaatgctgttgc

SEQ ID NO: 5564224 - DNA, 25 bp, Homo sapien
tagtcccaggtgagtttcgtctcca

SEQ ID NO: 5564225 - DNA, 25 bp, Homo sapien
ccagtgaaggaactaccccattctg

SEQ ID NO: 5564226 - DNA, 25 bp, Homo sapien
gcatgggtttcaaagtgcgtaaggg

SEQ ID NO: 5564227 - DNA, 25 bp, Homo sapien
ctaggcccttgagaatccacagtgc

SEQ ID NO: 5564228 - DNA, 25 bp, Homo sapien
gattgtgctgtgcatcctggacacc

SEQ ID NO: 5564229 - DNA, 25 bp, Homo sapien
gtctacacagctaaaaaggggcaga

SEQ ID NO: 5564230 - DNA, 25 bp, Homo sapien
gcgaggtgctcatagctgtgatctt

SEQ ID NO: 5564231 - DNA, 25 bp, Homo sapien
gaaagggaagtcaaatgtctcgtcc

SEQ ID NO: 5564232 - DNA, 25 bp, Homo sapien
ggcctcatttagagatcgggggttg

SEQ ID NO: 5564233 - DNA, 25 bp, Homo sapien
gtgccaaacagacccagatagctac

SEQ ID NO: 5564234 - DNA, 25 bp, Homo sapien
acaactctcttgggtgacagacgtc

SEQ ID NO: 5564235 - DNA, 25 bp, Homo sapien
tggagcacagtcagatgtattcact

SEQ ID NO: 5564236 - DNA, 25 bp, Homo sapien
gggagaaaacgcatcatggattgtg

SEQ ID NO: 5564237 - DNA, 25 bp, Homo sapien
tctgaacagcaaatatgatgttgat

SEQ ID NO: 5564238 - DNA, 25 bp, Homo sapien
tgattgcagaagtgtaccttttccc

SEQ ID NO: 5564239 - DNA, 25 bp, Homo sapien
tagaaaaaaaggtgtgaactcctca

SEQ ID NO: 5564240 - DNA, 25 bp, Homo sapien
gtgaactcctcagctgattgcagaa

SEQ ID NO: 5564241 - DNA, 25 bp, Homo sapien
ggggcatatgagaaataccctaagc

SEQ ID NO: 5564242 - DNA, 25 bp, Homo sapien
tccggtagcatatggttatcaccaa

SEQ ID NO: 5564243 - DNA, 25 bp, Homo sapien
cggatacgtttattacctgagacac

SEQ ID NO: 5564244 - DNA, 25 bp, Homo sapien
ctggcctggcaagacagtcctattt

SEQ ID NO: 5564245 - DNA, 25 bp, Homo sapien
cactaggtagccaatggggcatatg

SEQ ID NO: 5564246 - DNA, 25 bp, Homo sapien
gttgaggtgagctgaatttgcagct

SEQ ID NO: 5564247 - DNA, 25 bp, Homo sapien
agaccagcctctaacgtttgaaatt

SEQ ID NO: 5564248 - DNA, 25 bp, Homo sapien
cctcatacttcaaggcacagttcca

SEQ ID NO: 5564249 - DNA, 25 bp, Homo sapien
tttatggagacagcgttaatctagc

SEQ ID NO: 5564250 - DNA, 25 bp, Homo sapien
atctttgacgctttatggagacagc

SEQ ID NO: 5564251 - DNA, 25 bp, Homo sapien
gatactgattcttcgaggcattata

SEQ ID NO: 5564252 - DNA, 25 bp, Homo sapien
ggagacagcgttaatctagcagctc

SEQ ID NO: 5564253 - DNA, 25 bp, Homo sapien
tgccttcctaagggatgagactgta

SEQ ID NO: 5564254 - DNA, 25 bp, Homo sapien
tttgaatggtaaactgccttcctaa

SEQ ID NO: 5564255 - DNA, 25 bp, Homo sapien
gtctccctcttggctaacgcacaga

SEQ ID NO: 5564256 - DNA, 25 bp, Homo sapien
gatacctatagccttctgccttgta

SEQ ID NO: 5564257 - DNA, 25 bp, Homo sapien
ttcaaggcacagttccaaagttacc

SEQ ID NO: 5564258 - DNA, 25 bp, Homo sapien
agcagctcacctgctagattaccca

SEQ ID NO: 5564259 - DNA, 25 bp, Homo sapien
aaggaaggcagtttttgcctgactc

SEQ ID NO: 5564260 - DNA, 25 bp, Homo sapien
cctgactcagtctcccacgcttaac

SEQ ID NO: 5564261 - DNA, 25 bp, Homo sapien
ccctttggcatagtgagtttggggt

SEQ ID NO: 5564262 - DNA, 25 bp, Homo sapien
tgactgactacaatcaccaaggatc

SEQ ID NO: 5564263 - DNA, 25 bp, Homo sapien
caagagtccaatcccagatgattcc

SEQ ID NO: 5564264 - DNA, 25 bp, Homo sapien
caacacatatgtaccaaagaccaac

SEQ ID NO: 5564265 - DNA, 25 bp, Homo sapien
acataacgcaagcatgtgaaattac

SEQ ID NO: 5564266 - DNA, 25 bp, Homo sapien
aagaccaacagttctcatgtccacc

SEQ ID NO: 5564267 - DNA, 25 bp, Homo sapien
cttgtggggctctgattagcactca

SEQ ID NO: 5564268 - DNA, 25 bp, Homo sapien
ttcgcatctattgatcaagagtcca

SEQ ID NO: 5564269 - DNA, 25 bp, Homo sapien
cagataggtgctatgtcaaagccac

SEQ ID NO: 5564270 - DNA, 25 bp, Homo sapien
taagtgagcatatcctgtcaccctc

SEQ ID NO: 5564271 - DNA, 25 bp, Homo sapien
cagggccctgcttaatagtgtgttc

SEQ ID NO: 5564272 - DNA, 25 bp, Homo sapien
cagtgtgggcagcttttcccagtgc

SEQ ID NO: 5564273 - DNA, 25 bp, Homo sapien
ttcccagtgctgaggtttctgttac

SEQ ID NO: 5564274 - DNA, 25 bp, Homo sapien
gtcagaactttaaaagccacagagc

SEQ ID NO: 5564275 - DNA, 25 bp, Homo sapien
agtagagctacagggccctgcttaa

SEQ ID NO: 5564276 - DNA, 25 bp, Homo sapien
gtcaccctcagcacatgtttgatat

SEQ ID NO: 5564277 - DNA, 25 bp, Homo sapien
caccattatgtctaaggacagaccc

SEQ ID NO: 5564278 - DNA, 25 bp, Homo sapien
gcagctacgatgtcatttgcagagc

SEQ ID NO: 5564279 - DNA, 25 bp, Homo sapien
cacacacacgagtagagctacaggg

SEQ ID NO: 5564280 - DNA, 25 bp, Homo sapien
gtggagggtcaccattatgtctaag

SEQ ID NO: 5564281 - DNA, 25 bp, Homo sapien
tctaaaccagggacactgaaccttc

SEQ ID NO: 5564282 - DNA, 25 bp, Homo sapien
atgcaacctgggtcttgtgtttgga

SEQ ID NO: 5564283 - DNA, 25 bp, Homo sapien
cctcagagttgtggaggatcaaagg

SEQ ID NO: 5564284 - DNA, 25 bp, Homo sapien
tcttgcttgcctcacaccacctctc

SEQ ID NO: 5564285 - DNA, 25 bp, Homo sapien
agaggtttgctgtgtgatactgagc

SEQ ID NO: 5564286 - DNA, 25 bp, Homo sapien
gtgtgaggaagcatgttaaaagctg

SEQ ID NO: 5564287 - DNA, 25 bp, Homo sapien
tcatctaccaagtggggctaagacc

SEQ ID NO: 5564288 - DNA, 25 bp, Homo sapien
ggctaagacccaccaggtccacctc

SEQ ID NO: 5564289 - DNA, 25 bp, Homo sapien
ttgagttggcaatacatgtaatatc

SEQ ID NO: 5564290 - DNA, 25 bp, Homo sapien
tcccacactaactactgctaaggcc

SEQ ID NO: 5564291 - DNA, 25 bp, Homo sapien
aaagctgaaagttttgagttggcaa

SEQ ID NO: 5564292 - DNA, 25 bp, Homo sapien
tttctgaattgtgcgaccctggaac

SEQ ID NO: 5564293 - DNA, 25 bp, Homo sapien
tgctccccagcttgagaggagccac

SEQ ID NO: 5564294 - DNA, 25 bp, Homo sapien
aggcacaggcgagtcctttcctcat

SEQ ID NO: 5564295 - DNA, 25 bp, Homo sapien
aaggcaggccttgacacagctctgc

SEQ ID NO: 5564296 - DNA, 25 bp, Homo sapien
tattataaggctggagttgtgtgga

SEQ ID NO: 5564297 - DNA, 25 bp, Homo sapien
gagcaccacattaaaggcaggcctt

SEQ ID NO: 5564298 - DNA, 25 bp, Homo sapien
agaggcaaactctttggttttaggc

SEQ ID NO: 5564299 - DNA, 25 bp, Homo sapien
cctggaacctgctatcggctcacca

SEQ ID NO: 5564300 - DNA, 25 bp, Homo sapien
ggaaaacacaccctcttaggactgc

SEQ ID NO: 5564301 - DNA, 25 bp, Homo sapien
ccttcactgtacaacggggaaaaca

SEQ ID NO: 5564302 - DNA, 25 bp, Homo sapien
ttaggcttcttggcaggtgatttcc

SEQ ID NO: 5564303 - DNA, 25 bp, Homo sapien
tatacgtagttctcaggcaaatgtg

SEQ ID NO: 5564304 - DNA, 25 bp, Homo sapien
tcgcttgaaagcaacatcccctctt

SEQ ID NO: 5564305 - DNA, 25 bp, Homo sapien
acctgtccgggttgaataattctgt

SEQ ID NO: 5564306 - DNA, 25 bp, Homo sapien
cagagataagaaaggttcaacttgt

SEQ ID NO: 5564307 - DNA, 25 bp, Homo sapien
tacttaacgaggcactgaatggatg

SEQ ID NO: 5564308 - DNA, 25 bp, Homo sapien
gcactgaatggatgactatacgtag

SEQ ID NO: 5564309 - DNA, 25 bp, Homo sapien
tacgagaaactgagtgcagagataa

SEQ ID NO: 5564310 - DNA, 25 bp, Homo sapien
ggcaaatgtgatgagaaccgtatct

SEQ ID NO: 5564311 - DNA, 25 bp, Homo sapien
ggggatagagtgaacatctaacacc

SEQ ID NO: 5564312 - DNA, 25 bp, Homo sapien
ttaggtccatagatgatgcaaataa

SEQ ID NO: 5564313 - DNA, 25 bp, Homo sapien
ggctgccccggaataatatatagct

SEQ ID NO: 5564314 - DNA, 25 bp, Homo sapien
ttctggcgacctagttaaattactc

SEQ ID NO: 5564315 - DNA, 25 bp, Homo sapien
tggtgaactgctcatctctcctgac

SEQ ID NO: 5564316 - DNA, 25 bp, Homo sapien
gatctgtgaacagactggcagacag

SEQ ID NO: 5564317 - DNA, 25 bp, Homo sapien
ggagtgacgacaacaaaaatagaca

SEQ ID NO: 5564318 - DNA, 25 bp, Homo sapien
tcctgactgcagaaactgactctga

SEQ ID NO: 5564319 - DNA, 25 bp, Homo sapien
aacaaaaataatggtcttctggcga

SEQ ID NO: 5564320 - DNA, 25 bp, Homo sapien
cacaagggactacaaggtgatctgt

SEQ ID NO: 5564321 - DNA, 25 bp, Homo sapien
acccccaattcctggtgaactgctc

SEQ ID NO: 5564322 - DNA, 25 bp, Homo sapien
gtcctgggctgcaatctctaacacc

SEQ ID NO: 5564323 - DNA, 25 bp, Homo sapien
aaggctggaaccatcgaagtcctta

SEQ ID NO: 5564324 - DNA, 25 bp, Homo sapien
atggagtaaaaaccacaagggacta

SEQ ID NO: 5564325 - DNA, 25 bp, Homo sapien
ggtgccagaattggggactccttta

SEQ ID NO: 5564326 - DNA, 25 bp, Homo sapien
tcacgtgtctggaaggaaattgtat

SEQ ID NO: 5564327 - DNA, 25 bp, Homo sapien
ttttagcgtacaagaagaaatagat

SEQ ID NO: 5564328 - DNA, 25 bp, Homo sapien
tatcatagctgttagacccagggga

SEQ ID NO: 5564329 - DNA, 25 bp, Homo sapien
atcagtgtcacgtgtctggaaggaa

SEQ ID NO: 5564330 - DNA, 25 bp, Homo sapien
catttaggtaagcaacacactacat

SEQ ID NO: 5564331 - DNA, 25 bp, Homo sapien
aagaagaaatagatccctctcatta

SEQ ID NO: 5564332 - DNA, 25 bp, Homo sapien
tcagacagcttgaagatgtatgatc

SEQ ID NO: 5564333 - DNA, 25 bp, Homo sapien
ctcctttaattggaagggagctaaa

SEQ ID NO: 5564334 - DNA, 25 bp, Homo sapien
tgcctgacgacagactgaactcctt

SEQ ID NO: 5564335 - DNA, 25 bp, Homo sapien
agtcctcggacttctgatgggaaat

SEQ ID NO: 5564336 - DNA, 25 bp, Homo sapien
taggtgctggtgactccaggcacta

SEQ ID NO: 5564337 - DNA, 25 bp, Homo sapien
cctggcaggccacatccatcaatcc

SEQ ID NO: 5564338 - DNA, 25 bp, Homo sapien
ggcactatgcagccccgtgccaggc

SEQ ID NO: 5564339 - DNA, 25 bp, Homo sapien
atgtgtggatgggattcccttcgca

SEQ ID NO: 5564340 - DNA, 25 bp, Homo sapien
gggaacccgtgctctgagctgtgtg

SEQ ID NO: 5564341 - DNA, 25 bp, Homo sapien
ccggatatggccccagctgtctggg

SEQ ID NO: 5564342 - DNA, 25 bp, Homo sapien
gccacccccaacacccccagcattc

SEQ ID NO: 5564343 - DNA, 25 bp, Homo sapien
ggtgactccaggcactatgcagccc

SEQ ID NO: 5564344 - DNA, 25 bp, Homo sapien
tcgcaacggttgttagcgacaggga

SEQ ID NO: 5564345 - DNA, 25 bp, Homo sapien
cccagcattcctgaaggctggcagc

SEQ ID NO: 5564346 - DNA, 25 bp, Homo sapien
atgggattcccttcgcaacggttgt

SEQ ID NO: 5564347 - DNA, 25 bp, Homo sapien
taggagctcagtatgtatattaacc

SEQ ID NO: 5564348 - DNA, 25 bp, Homo sapien
ggtactctgtgagtggactgatgac

SEQ ID NO: 5564349 - DNA, 25 bp, Homo sapien
caacagtttcttggcacagagtgta

SEQ ID NO: 5564350 - DNA, 25 bp, Homo sapien
cttgagacctgaatctgcaaatgtt

SEQ ID NO: 5564351 - DNA, 25 bp, Homo sapien
atggaatagaaaatggcattcgttc

SEQ ID NO: 5564352 - DNA, 25 bp, Homo sapien
cagatgtgtacagatgctaaactgt

SEQ ID NO: 5564353 - DNA, 25 bp, Homo sapien
acagagtgtaaaagtttcatgggtt

SEQ ID NO: 5564354 - DNA, 25 bp, Homo sapien
ttgtgatgataaagtatggtactct

SEQ ID NO: 5564355 - DNA, 25 bp, Homo sapien
gactgatgaccaaggcagatgtgta

SEQ ID NO: 5564356 - DNA, 25 bp, Homo sapien
atgggttagaatgttggtgaaattg

SEQ ID NO: 5564357 - DNA, 25 bp, Homo sapien
gttgggaaaatgctgcttatgagac

SEQ ID NO: 5564358 - DNA, 25 bp, Homo sapien
gtgttgaaacccagtggtgtggaac

SEQ ID NO: 5564359 - DNA, 25 bp, Homo sapien
ttgatgtgacaaaaactgagaaggg

SEQ ID NO: 5564360 - DNA, 25 bp, Homo sapien
tccatcaacagaatcactgggcccc

SEQ ID NO: 5564361 - DNA, 25 bp, Homo sapien
atcactgggcccccagtcacccagc

SEQ ID NO: 5564362 - DNA, 25 bp, Homo sapien
aaccccattcaggggctagtggctt

SEQ ID NO: 5564363 - DNA, 25 bp, Homo sapien
atagatacaagactgtttggtcaac

SEQ ID NO: 5564364 - DNA, 25 bp, Homo sapien
tgaaaacaataaaccaacacaggca

SEQ ID NO: 5564365 - DNA, 25 bp, Homo sapien
taggtaaggcacagacattaatatc

SEQ ID NO: 5564366 - DNA, 25 bp, Homo sapien
tgtggtgaactgttagtgttgaaac

SEQ ID NO: 5564367 - DNA, 25 bp, Homo sapien
atcctacctgttataaaagtgtgac

SEQ ID NO: 5564368 - DNA, 25 bp, Homo sapien
aggtacctaagtgattgtggtgaac

SEQ ID NO: 5564369 - DNA, 25 bp, Homo sapien
tcatggtgacctggttataggctat

SEQ ID NO: 5564370 - DNA, 25 bp, Homo sapien
tcaagagaagataaagttcccaatt

SEQ ID NO: 5564371 - DNA, 25 bp, Homo sapien
gggctttgcccctgatgagctcatg

SEQ ID NO: 5564372 - DNA, 25 bp, Homo sapien
gctgctagaggtacctggtcttcca

SEQ ID NO: 5564373 - DNA, 25 bp, Homo sapien
tataggctatggtttcaagagaaga

SEQ ID NO: 5564374 - DNA, 25 bp, Homo sapien
tgccctatacatgggtctgggctgc

SEQ ID NO: 5564375 - DNA, 25 bp, Homo sapien
gggccactggcactctatcagctgc

SEQ ID NO: 5564376 - DNA, 25 bp, Homo sapien
tttggttgtgtgattagaagacagc

SEQ ID NO: 5564377 - DNA, 25 bp, Homo sapien
ggtatctgatgggcaaaacaggtac

SEQ ID NO: 5564378 - DNA, 25 bp, Homo sapien
tgtcacacagttgtcggcctgcctg

SEQ ID NO: 5564379 - DNA, 25 bp, Homo sapien
tcccggctatggccaagatgtgtga

SEQ ID NO: 5564380 - DNA, 25 bp, Homo sapien
agctctggagttagatgtgaacata

SEQ ID NO: 5564381 - DNA, 25 bp, Homo sapien
accacaggaagtaagctctggagtt

SEQ ID NO: 5564382 - DNA, 25 bp, Homo sapien
tggcatccaggtaaccagttccaac

SEQ ID NO: 5564383 - DNA, 25 bp, Homo sapien
attgcaacaaatacattggcaccac

SEQ ID NO: 5564384 - DNA, 25 bp, Homo sapien
atgtactgggtgtgtatgaaagtca

SEQ ID NO: 5564385 - DNA, 25 bp, Homo sapien
tacattggcaccacaggaagtaagc

SEQ ID NO: 5564386 - DNA, 25 bp, Homo sapien
gatattatccgctgtacagagctac

SEQ ID NO: 5564387 - DNA, 25 bp, Homo sapien
atcctttgagatgtactgggtgtgt

SEQ ID NO: 5564388 - DNA, 25 bp, Homo sapien
taacagagaaccatggcatccaggt

SEQ ID NO: 5564389 - DNA, 25 bp, Homo sapien
tgaaagacctgagtttaatggcacc

SEQ ID NO: 5564390 - DNA, 25 bp, Homo sapien
gatagatatataaccggaaagacat

SEQ ID NO: 5564391 - DNA, 25 bp, Homo sapien
actcaaaagtgagatgtagagcaga

SEQ ID NO: 5564392 - DNA, 25 bp, Homo sapien
ctgctgtgtcagtctggagttccct

SEQ ID NO: 5564393 - DNA, 25 bp, Homo sapien
tcaccaaagagcacctagagtaaga

SEQ ID NO: 5564394 - DNA, 25 bp, Homo sapien
atgttatgaacaagagaacaaagcc

SEQ ID NO: 5564395 - DNA, 25 bp, Homo sapien
atgaacaagagaacaaagcctgtct

SEQ ID NO: 5564396 - DNA, 25 bp, Homo sapien
tccatagagaattctttgcagagaa

SEQ ID NO: 5564397 - DNA, 25 bp, Homo sapien
tgaaggatcactcatgactacaact

SEQ ID NO: 5564398 - DNA, 25 bp, Homo sapien
gactacaactgaactcaaaagtgag

SEQ ID NO: 5564399 - DNA, 25 bp, Homo sapien
aagagcacctagagtaagagtttac

SEQ ID NO: 5564400 - DNA, 25 bp, Homo sapien
tagagcagatttgtaaattgataaa

SEQ ID NO: 5564401 - DNA, 25 bp, Homo sapien
acaccttacctgaatgaacactttt

SEQ ID NO: 5564402 - DNA, 25 bp, Homo sapien
gcgccggacgtcgagcactcccgcc

SEQ ID NO: 5564403 - DNA, 25 bp, Homo sapien
ggcgggagtgctcgacgtccggcgc

SEQ ID NO: 5564404 - DNA, 25 bp, Homo sapien
ctctgccactgcccctatactctgc

SEQ ID NO: 5564405 - DNA, 25 bp, Homo sapien
acaggctcatttgggaagctccctt

SEQ ID NO: 5564406 - DNA, 25 bp, Homo sapien
ctgctgtaaccaacctaggcgcttg

SEQ ID NO: 5564407 - DNA, 25 bp, Homo sapien
gaatccccagagcctttagacctta

SEQ ID NO: 5564408 - DNA, 25 bp, Homo sapien
ccaacctaggcgcttgaactggaag

SEQ ID NO: 5564409 - DNA, 25 bp, Homo sapien
agatgtcccaaaaggattccacagc

SEQ ID NO: 5564410 - DNA, 25 bp, Homo sapien
cacagcatcctagaaatggatcccc

SEQ ID NO: 5564411 - DNA, 25 bp, Homo sapien
agcagatgcctaaaaacatcgaatg

SEQ ID NO: 5564412 - DNA, 25 bp, Homo sapien
ctacactaagcagcagcaatggaag

SEQ ID NO: 5564413 - DNA, 25 bp, Homo sapien
accttatacctcaaggctgagaaac

SEQ ID NO: 5564414 - DNA, 25 bp, Homo sapien
gactccctacactaagcagcagcaa

SEQ ID NO: 5564415 - DNA, 25 bp, Homo sapien
attacattaaggaaagtatgaaaca

SEQ ID NO: 5564416 - DNA, 25 bp, Homo sapien
gatcactggtgaattgtttaacttc

SEQ ID NO: 5564417 - DNA, 25 bp, Homo sapien
catgtaagtgtgatcactggtgaat

SEQ ID NO: 5564418 - DNA, 25 bp, Homo sapien
gtatgaaacattcagcacagctccc

SEQ ID NO: 5564419 - DNA, 25 bp, Homo sapien
gagacagtaatgattgtggtgatgc

SEQ ID NO: 5564420 - DNA, 25 bp, Homo sapien
tgtaatggccaggctcaagttatca

SEQ ID NO: 5564421 - DNA, 25 bp, Homo sapien
gctcccagagtgtccgtattgctat

SEQ ID NO: 5564422 - DNA, 25 bp, Homo sapien
atcagacagatagaatacctggctt

SEQ ID NO: 5564423 - DNA, 25 bp, Homo sapien
ggccaggctcaagttatcagacaga

SEQ ID NO: 5564424 - DNA, 25 bp, Homo sapien
actttggcgtatacttacagttgat

SEQ ID NO: 5564425 - DNA, 25 bp, Homo sapien
cacactgccttcaggacggcagagc

SEQ ID NO: 5564426 - DNA, 25 bp, Homo sapien
ctgttaaagctgagtgatggaagtt

SEQ ID NO: 5564427 - DNA, 25 bp, Homo sapien
catctctcatggctgggcagcagct

SEQ ID NO: 5564428 - DNA, 25 bp, Homo sapien
ttatttaggaaggttgcacagttca

SEQ ID NO: 5564429 - DNA, 25 bp, Homo sapien
gatcacagatcacttaacagtggtt

SEQ ID NO: 5564430 - DNA, 25 bp, Homo sapien
agaggtagcaaatccacagaggtat

SEQ ID NO: 5564431 - DNA, 25 bp, Homo sapien
agtgatggaagttcattatatagtc

SEQ ID NO: 5564432 - DNA, 25 bp, Homo sapien
taacaatcaaataggagaggtagca

SEQ ID NO: 5564433 - DNA, 25 bp, Homo sapien
aaacaagaatggaagaatgctgata

SEQ ID NO: 5564434 - DNA, 25 bp, Homo sapien
ttcaagttcagcaggtaaacctatc

SEQ ID NO: 5564435 - DNA, 25 bp, Homo sapien
gaatggaagaatgctgataactgtt

SEQ ID NO: 5564436 - DNA, 25 bp, Homo sapien
aaagtctgttatttaggaaggttgc

SEQ ID NO: 5564437 - DNA, 25 bp, Homo sapien
ctggatctccaaacagggccagaag

SEQ ID NO: 5564438 - DNA, 25 bp, Homo sapien
ctggagcagaagttagcgcttctct

SEQ ID NO: 5564439 - DNA, 25 bp, Homo sapien
gctgacctacgagctacagcagggc

SEQ ID NO: 5564440 - DNA, 25 bp, Homo sapien
gcatcctgggcgagttcctgcagga

SEQ ID NO: 5564441 - DNA, 25 bp, Homo sapien
acggagtggaccactggatctccaa

SEQ ID NO: 5564442 - DNA, 25 bp, Homo sapien
gcggacttcaggttgatgctggaga

SEQ ID NO: 5564443 - DNA, 25 bp, Homo sapien
gagaaaagacaacgatagcagttac

SEQ ID NO: 5564444 - DNA, 25 bp, Homo sapien
atctagaggctattatggattggag

SEQ ID NO: 5564445 - DNA, 25 bp, Homo sapien
ctcaccgccccctttctgcagccct

SEQ ID NO: 5564446 - DNA, 25 bp, Homo sapien
gaaggagtgcctcctcgctggagga

SEQ ID NO: 5564447 - DNA, 25 bp, Homo sapien
tgtgtctgctgcagatggaagagaa

SEQ ID NO: 5564448 - DNA, 25 bp, Homo sapien
tttcagatggttttgctgggaggag

SEQ ID NO: 5564449 - DNA, 25 bp, Homo sapien
gacccatcctgacagtgaggcagtc

SEQ ID NO: 5564450 - DNA, 25 bp, Homo sapien
tgtgaagaagctaacagatgtgcaa

SEQ ID NO: 5564451 - DNA, 25 bp, Homo sapien
agcatgtgagaaagacttggactta

SEQ ID NO: 5564452 - DNA, 25 bp, Homo sapien
gagggacaggcttgtcttgactcca

SEQ ID NO: 5564453 - DNA, 25 bp, Homo sapien
aggcagtcctggtagcatgtcatgt

SEQ ID NO: 5564454 - DNA, 25 bp, Homo sapien
taatgggatgggtttcaactgctta

SEQ ID NO: 5564455 - DNA, 25 bp, Homo sapien
ataagttagacaagagcagttctgc

SEQ ID NO: 5564456 - DNA, 25 bp, Homo sapien
atcctgtgacactagcactgtgcac

SEQ ID NO: 5564457 - DNA, 25 bp, Homo sapien
atgtgcctttgagggtaatgggatg

SEQ ID NO: 5564458 - DNA, 25 bp, Homo sapien
caaaaaggaacttgtagagtcactg

SEQ ID NO: 5564459 - DNA, 25 bp, Homo sapien
ctcttgattcctcggggtcgactgt

SEQ ID NO: 5564460 - DNA, 25 bp, Homo sapien
acagtcgaccccgaggaatcaagag

SEQ ID NO: 5564461 - DNA, 25 bp, Homo sapien
taggcaaattttctagaagcaacat

SEQ ID NO: 5564462 - DNA, 25 bp, Homo sapien
agaatgacaaaggtacagaaattca

SEQ ID NO: 5564463 - DNA, 25 bp, Homo sapien
aaagttggtcattggcccaacacac

SEQ ID NO: 5564464 - DNA, 25 bp, Homo sapien
cttcaccttccccacattcgcctcc

SEQ ID NO: 5564465 - DNA, 25 bp, Homo sapien
attagcgcaaataacagaatgacaa

SEQ ID NO: 5564466 - DNA, 25 bp, Homo sapien
tcacgcagtgtatgaattatcaacg

SEQ ID NO: 5564467 - DNA, 25 bp, Homo sapien
atgacaaaggtaacagaatgacaaa

SEQ ID NO: 5564468 - DNA, 25 bp, Homo sapien
ctgtcaaacctgtggaagtgaaaca

SEQ ID NO: 5564469 - DNA, 25 bp, Homo sapien
gaatttagggaattatggtgagtgc

SEQ ID NO: 5564470 - DNA, 25 bp, Homo sapien
aacttagcacagacataacaaaatt

SEQ ID NO: 5564471 - DNA, 25 bp, Homo sapien
tcaaaaccagacagtgtacattctt

SEQ ID NO: 5564472 - DNA, 25 bp, Homo sapien
agccagtcatgtcttgccctcccac

SEQ ID NO: 5564473 - DNA, 25 bp, Homo sapien
gccctcccactcagggcaggcagga

SEQ ID NO: 5564474 - DNA, 25 bp, Homo sapien
gcttctttgaggcaacttgggtgac

SEQ ID NO: 5564475 - DNA, 25 bp, Homo sapien
aattaatctctggtgacaggggcca

SEQ ID NO: 5564476 - DNA, 25 bp, Homo sapien
gtgacaggccatcctgagccagtca

SEQ ID NO: 5564477 - DNA, 25 bp, Homo sapien
gctgtctcaatggcccccaaagcct

SEQ ID NO: 5564478 - DNA, 25 bp, Homo sapien
gtgggttggtctctcctgtgaggtt

SEQ ID NO: 5564479 - DNA, 25 bp, Homo sapien
gggcaggtacacacacgtgtgcact

SEQ ID NO: 5564480 - DNA, 25 bp, Homo sapien
tgtgcatccgactgcactgatgtcc

SEQ ID NO: 5564481 - DNA, 25 bp, Homo sapien
aacccacagtgggtagagttacagg

SEQ ID NO: 5564482 - DNA, 25 bp, Homo sapien
agtttcagaaagggcaaaattaatc

SEQ ID NO: 5564483 - DNA, 25 bp, Homo sapien
aagagaactaaaggagcaaaattct

SEQ ID NO: 5564484 - DNA, 25 bp, Homo sapien
gaatggactgattgaggacaactat

SEQ ID NO: 5564485 - DNA, 25 bp, Homo sapien
gattgaggacaactataaaattaca

SEQ ID NO: 5564486 - DNA, 25 bp, Homo sapien
cagctctttgctctggggacccttt

SEQ ID NO: 5564487 - DNA, 25 bp, Homo sapien
ctattgggtaaggtatagtagtcgg

SEQ ID NO: 5564488 - DNA, 25 bp, Homo sapien
aagcacatgcacagaatgcagctct

SEQ ID NO: 5564489 - DNA, 25 bp, Homo sapien
acatgcacagaatgcagctctttgc

SEQ ID NO: 5564490 - DNA, 25 bp, Homo sapien
tattgctatagaagcaaagagaact

SEQ ID NO: 5564491 - DNA, 25 bp, Homo sapien
aactaaaggagcaaaattctagaga

SEQ ID NO: 5564492 - DNA, 25 bp, Homo sapien
ctatagaagcaaagagaactaaagg

SEQ ID NO: 5564493 - DNA, 25 bp, Homo sapien
tagattttgctattgggtaaggtat

SEQ ID NO: 5564494 - DNA, 25 bp, Homo sapien
caaaagggaatggtctcactgctta

SEQ ID NO: 5564495 - DNA, 25 bp, Homo sapien
ggatgcaaggactctccaaaaggga

SEQ ID NO: 5564496 - DNA, 25 bp, Homo sapien
ctaaatagttcgaccactgaccacc

SEQ ID NO: 5564497 - DNA, 25 bp, Homo sapien
acaagaaccagaatgagttattctc

SEQ ID NO: 5564498 - DNA, 25 bp, Homo sapien
cccagagaacactgtacttagattc

SEQ ID NO: 5564499 - DNA, 25 bp, Homo sapien
actgcttagtgggcccttcccagtc

SEQ ID NO: 5564500 - DNA, 25 bp, Homo sapien
aggaaagagcatcagatagtcctaa

SEQ ID NO: 5564501 - DNA, 25 bp, Homo sapien
tatggaacacaagacaaatatactt

SEQ ID NO: 5564502 - DNA, 25 bp, Homo sapien
tcagtatggactggtgtatggaaca

SEQ ID NO: 5564503 - DNA, 25 bp, Homo sapien
ttctagaagcctgccctgatctctc

SEQ ID NO: 5564504 - DNA, 25 bp, Homo sapien
cagcctggtgtggtttatgtaaacc

SEQ ID NO: 5564505 - DNA, 25 bp, Homo sapien
tctgtagacaatatagattaggcat

SEQ ID NO: 5564506 - DNA, 25 bp, Homo sapien
agattaggcataggataaaatcctc

SEQ ID NO: 5564507 - DNA, 25 bp, Homo sapien
ctgaggaaagtgtaaatacaaagtc

SEQ ID NO: 5564508 - DNA, 25 bp, Homo sapien
caagttaagccgcaaacaattcacc

SEQ ID NO: 5564509 - DNA, 25 bp, Homo sapien
catgaataagttttgcaaagcacag

SEQ ID NO: 5564510 - DNA, 25 bp, Homo sapien
ggggagtcaggatgaacttccttgg

SEQ ID NO: 5564511 - DNA, 25 bp, Homo sapien
aaggtgacgaaacactccttttgat

SEQ ID NO: 5564512 - DNA, 25 bp, Homo sapien
ttccttggctagggatagaaggaag

SEQ ID NO: 5564513 - DNA, 25 bp, Homo sapien
cccaatcattggtcaaagtcatctg

SEQ ID NO: 5564514 - DNA, 25 bp, Homo sapien
gcatacttccttggccagggatagg

SEQ ID NO: 5564515 - DNA, 25 bp, Homo sapien
gacaacagactatctgaggaaagtg

SEQ ID NO: 5564516 - DNA, 25 bp, Homo sapien
tacaaccaggtggtaattgataccc

SEQ ID NO: 5564517 - DNA, 25 bp, Homo sapien
agtgtaatatagtactgtgggatcc

SEQ ID NO: 5564518 - DNA, 25 bp, Homo sapien
ctgatgaaacagctaaacctgtctg

SEQ ID NO: 5564519 - DNA, 25 bp, Homo sapien
gctagaagcaggactcatgaaaata

SEQ ID NO: 5564520 - DNA, 25 bp, Homo sapien
tcaggtagtagaatttgtacaaacc

SEQ ID NO: 5564521 - DNA, 25 bp, Homo sapien
gtatatattaggctgctgatgaaac

SEQ ID NO: 5564522 - DNA, 25 bp, Homo sapien
caggtggcttcgaaaatggaattaa

SEQ ID NO: 5564523 - DNA, 25 bp, Homo sapien
attccacaatggagctagaagcagg

SEQ ID NO: 5564524 - DNA, 25 bp, Homo sapien
tcttggaataaatgtcaggtagtag

SEQ ID NO: 5564525 - DNA, 25 bp, Homo sapien
tacatggcattgataagttactatt

SEQ ID NO: 5564526 - DNA, 25 bp, Homo sapien
catgacccagtataatgcaactagc

SEQ ID NO: 5564527 - DNA, 25 bp, Homo sapien
gtagacacgtagtgcagtacaaggt

SEQ ID NO: 5564528 - DNA, 25 bp, Homo sapien
accttgtactgcactacgtgtctac

SEQ ID NO: 5564529 - DNA, 25 bp, Homo sapien
ctggcaggcattcaggaaattgcta

SEQ ID NO: 5564530 - DNA, 25 bp, Homo sapien
ttgacaaaacgtacagaagagatga

SEQ ID NO: 5564531 - DNA, 25 bp, Homo sapien
ctggcttaatggttagctggcaggc

SEQ ID NO: 5564532 - DNA, 25 bp, Homo sapien
tgtgagacagtgagattttgccttt

SEQ ID NO: 5564533 - DNA, 25 bp, Homo sapien
gctatcagaagatggaagaaataac

SEQ ID NO: 5564534 - DNA, 25 bp, Homo sapien
cagaagagatgaactcagaaaagac

SEQ ID NO: 5564535 - DNA, 25 bp, Homo sapien
ggcaagctagcccatgctgacacag

SEQ ID NO: 5564536 - DNA, 25 bp, Homo sapien
aacctgaaaggcagatcatctaccc

SEQ ID NO: 5564537 - DNA, 25 bp, Homo sapien
ttatattatggaaaggtgaaactgc

SEQ ID NO: 5564538 - DNA, 25 bp, Homo sapien
aaaccaaagtccctaggcaagttgc

SEQ ID NO: 5564539 - DNA, 25 bp, Homo sapien
gcaatagaaaagttgtgtgagacag

SEQ ID NO: 5564540 - DNA, 25 bp, Homo sapien
agggatccctggcacttccctgggc

SEQ ID NO: 5564541 - DNA, 25 bp, Homo sapien
cccagggatccctggcacttccctg

SEQ ID NO: 5564542 - DNA, 25 bp, Homo sapien
catctcccgccttcccagggatccc

SEQ ID NO: 5564543 - DNA, 25 bp, Homo sapien
gggatccctggcacttccctgggcc

SEQ ID NO: 5564544 - DNA, 25 bp, Homo sapien
ccctgccccttccccatctcccgcc

SEQ ID NO: 5564545 - DNA, 25 bp, Homo sapien
ccttcccagggatccctggcacttc

SEQ ID NO: 5564546 - DNA, 25 bp, Homo sapien
ctcccgccttcccagggatccctgg

SEQ ID NO: 5564547 - DNA, 25 bp, Homo sapien
cttccccatctcccgccttcccagg

SEQ ID NO: 5564548 - DNA, 25 bp, Homo sapien
ttcccagggatccctggcacttccc

SEQ ID NO: 5564549 - DNA, 25 bp, Homo sapien
cgccttcccagggatccctggcact

SEQ ID NO: 5564550 - DNA, 25 bp, Homo sapien
ccctggcacttccctgggccacagg

SEQ ID NO: 5564551 - DNA, 25 bp, Homo sapien
gagcttggacatagcactgccctcc

SEQ ID NO: 5564552 - DNA, 25 bp, Homo sapien
ctctgtatgattaggtggaggtgga

SEQ ID NO: 5564553 - DNA, 25 bp, Homo sapien
cactctcctgtctggtcagaggaac

SEQ ID NO: 5564554 - DNA, 25 bp, Homo sapien
cttggggagtttcctctctagggga

SEQ ID NO: 5564555 - DNA, 25 bp, Homo sapien
cctactgcttgctgagagcttggac

SEQ ID NO: 5564556 - DNA, 25 bp, Homo sapien
gctcatgaatgtcccaggtggaggt

SEQ ID NO: 5564557 - DNA, 25 bp, Homo sapien
agtgccttctaagggccccagtgtc

SEQ ID NO: 5564558 - DNA, 25 bp, Homo sapien
ggcctgggctctgcctactgcttgc

SEQ ID NO: 5564559 - DNA, 25 bp, Homo sapien
acaatcccaccacgctgctgcagtc

SEQ ID NO: 5564560 - DNA, 25 bp, Homo sapien
gtcaaagtctgggattccagctttc

SEQ ID NO: 5564561 - DNA, 25 bp, Homo sapien
gtggagatgccttcttgagtgtcaa

SEQ ID NO: 5564562 - DNA, 25 bp, Homo sapien
cagcagttatgtcaaaattagattt

SEQ ID NO: 5564563 - DNA, 25 bp, Homo sapien
tatcacccagtgggataagggagta

SEQ ID NO: 5564564 - DNA, 25 bp, Homo sapien
ataattactcttgggaatgactgca

SEQ ID NO: 5564565 - DNA, 25 bp, Homo sapien
gactgcaaattagagatgttaggta

SEQ ID NO: 5564566 - DNA, 25 bp, Homo sapien
ggtggcagaatgacaatcagtaatc

SEQ ID NO: 5564567 - DNA, 25 bp, Homo sapien
atcagcaacgtgaagcaacatcaat

SEQ ID NO: 5564568 - DNA, 25 bp, Homo sapien
tatatactccagggtggcagaatga

SEQ ID NO: 5564569 - DNA, 25 bp, Homo sapien
catactatgtatcaggcaaatggat

SEQ ID NO: 5564570 - DNA, 25 bp, Homo sapien
tcaggcaaatggatatcacctcccc

SEQ ID NO: 5564571 - DNA, 25 bp, Homo sapien
cctactatggaagaataacagtaat

SEQ ID NO: 5564572 - DNA, 25 bp, Homo sapien
gccgtttctggatggttacagcagt

SEQ ID NO: 5564573 - DNA, 25 bp, Homo sapien
ccactgattgtagctgaaggatttt

SEQ ID NO: 5564574 - DNA, 25 bp, Homo sapien
gtcttacacaatctggacccagtct

SEQ ID NO: 5564575 - DNA, 25 bp, Homo sapien
catgagcatgcttgggactaaagaa

SEQ ID NO: 5564576 - DNA, 25 bp, Homo sapien
aaggacagtccatcaaaagccagag

SEQ ID NO: 5564577 - DNA, 25 bp, Homo sapien
ctgaatcaatcatgccaaaagctaa

SEQ ID NO: 5564578 - DNA, 25 bp, Homo sapien
ctgctctaaaagttatgaacctgac

SEQ ID NO: 5564579 - DNA, 25 bp, Homo sapien
taaagaaacagaactgaggatttcc

SEQ ID NO: 5564580 - DNA, 25 bp, Homo sapien
aaaagctaagaaaacatgagcatgc

SEQ ID NO: 5564581 - DNA, 25 bp, Homo sapien
attaccagggtaatattcctaacac

SEQ ID NO: 5564582 - DNA, 25 bp, Homo sapien
ttagaggtattttaaaggatatgta

SEQ ID NO: 5564583 - DNA, 25 bp, Homo sapien
atctttattaaggcacaggtactcc

SEQ ID NO: 5564584 - DNA, 25 bp, Homo sapien
tggacccacccctagtgaaatgact

SEQ ID NO: 5564585 - DNA, 25 bp, Homo sapien
cactgaaaattagtgagtggggaaa

SEQ ID NO: 5564586 - DNA, 25 bp, Homo sapien
tttgaggccctttgtgattcgtgct

SEQ ID NO: 5564587 - DNA, 25 bp, Homo sapien
tggggaaactgagcttcaaaacttg

SEQ ID NO: 5564588 - DNA, 25 bp, Homo sapien
acagtcaagtatcggctagacaatc

SEQ ID NO: 5564589 - DNA, 25 bp, Homo sapien
ggtattccgacaccaaaggctatgg

SEQ ID NO: 5564590 - DNA, 25 bp, Homo sapien
tacctcaaaggaggcccacattgga

SEQ ID NO: 5564591 - DNA, 25 bp, Homo sapien
gaagtaggtaggcattattgtccat

SEQ ID NO: 5564592 - DNA, 25 bp, Homo sapien
agagggcctctgagtctgtgcctca

SEQ ID NO: 5564593 - DNA, 25 bp, Homo sapien
tcagagatccagtataggctctcac

SEQ ID NO: 5564594 - DNA, 25 bp, Homo sapien
gtgcctcaggattccggagtagatg

SEQ ID NO: 5564595 - DNA, 25 bp, Homo sapien
aacacgcacgtgacagcgactttcc

SEQ ID NO: 5564596 - DNA, 25 bp, Homo sapien
ggaaagtcgctgtcacgtgcgtgtt

SEQ ID NO: 5564597 - DNA, 25 bp, Homo sapien
gtcacattattgttgagcataaaag

SEQ ID NO: 5564598 - DNA, 25 bp, Homo sapien
cttttatgctcaacaataatgtgac

SEQ ID NO: 5564599 - DNA, 25 bp, Homo sapien
ggcttcctcatgggccgtgtgaccg

SEQ ID NO: 5564600 - DNA, 25 bp, Homo sapien
ttctagctcatccggctgtgtggcc

SEQ ID NO: 5564601 - DNA, 25 bp, Homo sapien
agccgttcatggagatgccactcct

SEQ ID NO: 5564602 - DNA, 25 bp, Homo sapien
gtcccaggaccagcctctacttgct

SEQ ID NO: 5564603 - DNA, 25 bp, Homo sapien
tagctcatccggctgtgtggccttg

SEQ ID NO: 5564604 - DNA, 25 bp, Homo sapien
ccagcagcccctctggcttcctcat

SEQ ID NO: 5564605 - DNA, 25 bp, Homo sapien
gtgctgtcttctcgagtgggaactc

SEQ ID NO: 5564606 - DNA, 25 bp, Homo sapien
gcgagaacacaagccgttcatggag

SEQ ID NO: 5564607 - DNA, 25 bp, Homo sapien
cagctctgggctttggtgccagctg

SEQ ID NO: 5564608 - DNA, 25 bp, Homo sapien
ctctacttgctactgtgctgtcttc

SEQ ID NO: 5564609 - DNA, 25 bp, Homo sapien
tagcacctttctagctcatccggct

SEQ ID NO: 5564610 - DNA, 25 bp, Homo sapien
agacatagtcattctggtacaatat

SEQ ID NO: 5564611 - DNA, 25 bp, Homo sapien
tttctgaccagttattagttgccct

SEQ ID NO: 5564612 - DNA, 25 bp, Homo sapien
tgaagaccgtctaaatttttctgac

SEQ ID NO: 5564613 - DNA, 25 bp, Homo sapien
tagttgccctgcctctcggaaatgt

SEQ ID NO: 5564614 - DNA, 25 bp, Homo sapien
tggtacaatatggatttaaaataag

SEQ ID NO: 5564615 - DNA, 25 bp, Homo sapien
ctgcctctcggaaatgtgtttaaac

SEQ ID NO: 5564616 - DNA, 25 bp, Homo sapien
cctaagaaacacagacatagtcatt

SEQ ID NO: 5564617 - DNA, 25 bp, Homo sapien
tcacaaaaagcttcaacattcctaa

SEQ ID NO: 5564618 - DNA, 25 bp, Homo sapien
ctgatgccaattttaaaatgaagac

SEQ ID NO: 5564619 - DNA, 25 bp, Homo sapien
tgcagtggcacaattcctgatcact

SEQ ID NO: 5564620 - DNA, 25 bp, Homo sapien
aaaataagttcatggtaatccttcc

SEQ ID NO: 5564621 - DNA, 25 bp, Homo sapien
tcttatgctaaagtgtgaatgattc

SEQ ID NO: 5564622 - DNA, 25 bp, Homo sapien
aaagtgtgaatgattctggactatc

SEQ ID NO: 5564623 - DNA, 25 bp, Homo sapien
ttctccaacattctctgaactgcca

SEQ ID NO: 5564624 - DNA, 25 bp, Homo sapien
tttagcagtacattaagagaaatat

SEQ ID NO: 5564625 - DNA, 25 bp, Homo sapien
taaaagtcataaggtcaaaactgca

SEQ ID NO: 5564626 - DNA, 25 bp, Homo sapien
tatgctaaagtgtgaatgattctgg

SEQ ID NO: 5564627 - DNA, 25 bp, Homo sapien
atttgaacagttctccaacattctc

SEQ ID NO: 5564628 - DNA, 25 bp, Homo sapien
ttcagttcaggagtttcaaggctgc

SEQ ID NO: 5564629 - DNA, 25 bp, Homo sapien
ctggactatcttactgggaaaacat

SEQ ID NO: 5564630 - DNA, 25 bp, Homo sapien
ttgatataatgatctgtcaggtttt

SEQ ID NO: 5564631 - DNA, 25 bp, Homo sapien
atgtatttactggaaaagaaaacca

SEQ ID NO: 5564632 - DNA, 25 bp, Homo sapien
gaagttcacaaagacttactaagac

SEQ ID NO: 5564633 - DNA, 25 bp, Homo sapien
gtcttagtaagtctttgtgaacttc

SEQ ID NO: 5564634 - DNA, 25 bp, Homo sapien
tccaacacagatgaagtagtgacct

SEQ ID NO: 5564635 - DNA, 25 bp, Homo sapien
ggaataagcagcctccaaggtcacc

SEQ ID NO: 5564636 - DNA, 25 bp, Homo sapien
gaggatgtttgtaaaggctagacct

SEQ ID NO: 5564637 - DNA, 25 bp, Homo sapien
tcttaactgcaagggttactgggaa

SEQ ID NO: 5564638 - DNA, 25 bp, Homo sapien
caacccagtctggaataagcagcct

SEQ ID NO: 5564639 - DNA, 25 bp, Homo sapien
caaggaaatggaaccagtgtgataa

SEQ ID NO: 5564640 - DNA, 25 bp, Homo sapien
aggctagacctgaaagtggcttata

SEQ ID NO: 5564641 - DNA, 25 bp, Homo sapien
agagaagcctgaggatgtttgtaaa

SEQ ID NO: 5564642 - DNA, 25 bp, Homo sapien
gtagagaatctcatggaaaacctgg

SEQ ID NO: 5564643 - DNA, 25 bp, Homo sapien
ctttcatagtaagagcatgggtttc

SEQ ID NO: 5564644 - DNA, 25 bp, Homo sapien
agaactcaatcacatgggcacactc

SEQ ID NO: 5564645 - DNA, 25 bp, Homo sapien
actttgcgagagcccctttgatttc

SEQ ID NO: 5564646 - DNA, 25 bp, Homo sapien
ggctgacgtcatctctgagggctct

SEQ ID NO: 5564647 - DNA, 25 bp, Homo sapien
ccaggactcaagaattgggatagtc

SEQ ID NO: 5564648 - DNA, 25 bp, Homo sapien
gtgaagagaggttttatgggcctct

SEQ ID NO: 5564649 - DNA, 25 bp, Homo sapien
atgggcctctaagcaccggccagta

SEQ ID NO: 5564650 - DNA, 25 bp, Homo sapien
aacacaccaagacaggcttcccttg

SEQ ID NO: 5564651 - DNA, 25 bp, Homo sapien
tgggatagtcaagcaacaaacacac

SEQ ID NO: 5564652 - DNA, 25 bp, Homo sapien
ggaatgccacatgcaatgggtgagt

SEQ ID NO: 5564653 - DNA, 25 bp, Homo sapien
cccaaatgtgctaaggtcccaattc

SEQ ID NO: 5564654 - DNA, 25 bp, Homo sapien
tcttagccagaactttgcgagagcc

SEQ ID NO: 5564655 - DNA, 25 bp, Homo sapien
aattcccagacccctcccaggactc

SEQ ID NO: 5564656 - DNA, 25 bp, Homo sapien
atcaaagatctaagatggcaaggca

SEQ ID NO: 5564657 - DNA, 25 bp, Homo sapien
tgtagacaaactagagtgagatggt

SEQ ID NO: 5564658 - DNA, 25 bp, Homo sapien
cccattaggtatgaagctatcagat

SEQ ID NO: 5564659 - DNA, 25 bp, Homo sapien
tagagtgagatggtgattttgaaac

SEQ ID NO: 5564660 - DNA, 25 bp, Homo sapien
aggaaaaacatgtggcccccattag

SEQ ID NO: 5564661 - DNA, 25 bp, Homo sapien
tctcacctttgcctgagcacaggaa

SEQ ID NO: 5564662 - DNA, 25 bp, Homo sapien
ttttaaacatggctggaaatgcttt

SEQ ID NO: 5564663 - DNA, 25 bp, Homo sapien
gggatgtagaaagctgcaaagaata

SEQ ID NO: 5564664 - DNA, 25 bp, Homo sapien
ttgatagatggctttgtagacaaac

SEQ ID NO: 5564665 - DNA, 25 bp, Homo sapien
agacacgagacacatggcgtttctc

SEQ ID NO: 5564666 - DNA, 25 bp, Homo sapien
aaaaacctggctagtgtaccaacat

SEQ ID NO: 5564667 - DNA, 25 bp, Homo sapien
gaccatggttcagttatatagagga

SEQ ID NO: 5564668 - DNA, 25 bp, Homo sapien
agatattctaagcaagcaagggatt

SEQ ID NO: 5564669 - DNA, 25 bp, Homo sapien
ttatatagaggaggacttagaaaac

SEQ ID NO: 5564670 - DNA, 25 bp, Homo sapien
acatagtgtattacaggtccagcct

SEQ ID NO: 5564671 - DNA, 25 bp, Homo sapien
attgtagcacaactaagataaagga

SEQ ID NO: 5564672 - DNA, 25 bp, Homo sapien
ttcactaagactagcctaaagcctt

SEQ ID NO: 5564673 - DNA, 25 bp, Homo sapien
ctcagtcaggaaaaccaggttctgt

SEQ ID NO: 5564674 - DNA, 25 bp, Homo sapien
ctaaagccttaggagcagtgctctg

SEQ ID NO: 5564675 - DNA, 25 bp, Homo sapien
taaaggaaccaataatgagagtcac

SEQ ID NO: 5564676 - DNA, 25 bp, Homo sapien
caggtccagccttatattgtagcac

SEQ ID NO: 5564677 - DNA, 25 bp, Homo sapien
tttcaatgggaagtcagatattcta

SEQ ID NO: 5564678 - DNA, 25 bp, Homo sapien
ataagcatcttggaggtaaggtcat

SEQ ID NO: 5564679 - DNA, 25 bp, Homo sapien
accatgtgaggacatacattcctcc

SEQ ID NO: 5564680 - DNA, 25 bp, Homo sapien
ggatgtggcctttaagaggtgactg

SEQ ID NO: 5564681 - DNA, 25 bp, Homo sapien
cctccactgtggaggatgcagcaat

SEQ ID NO: 5564682 - DNA, 25 bp, Homo sapien
ctaagagtataagcatcttggaggt

SEQ ID NO: 5564683 - DNA, 25 bp, Homo sapien
atgcagcaatgaggtgccatcttgg

SEQ ID NO: 5564684 - DNA, 25 bp, Homo sapien
aggtgcaatgaatcctacctgctgc

SEQ ID NO: 5564685 - DNA, 25 bp, Homo sapien
aagcagagatcagccttcaccagac

SEQ ID NO: 5564686 - DNA, 25 bp, Homo sapien
taagaggtgactgagtaatgaatga

SEQ ID NO: 5564687 - DNA, 25 bp, Homo sapien
gaggtaaggtcatttcaaatacttc

SEQ ID NO: 5564688 - DNA, 25 bp, Homo sapien
agccatctgtacctgtcaacttttc

SEQ ID NO: 5564689 - DNA, 25 bp, Homo sapien
gaaagggtccaataccagcaggaca

SEQ ID NO: 5564690 - DNA, 25 bp, Homo sapien
gcggaacctggcagtgtaaacagga

SEQ ID NO: 5564691 - DNA, 25 bp, Homo sapien
aagacaatcatacagtttccgtttc

SEQ ID NO: 5564692 - DNA, 25 bp, Homo sapien
cattggaaacaataatattcagcag

SEQ ID NO: 5564693 - DNA, 25 bp, Homo sapien
ttaaaagtcatgccgcaaacgccac

SEQ ID NO: 5564694 - DNA, 25 bp, Homo sapien
attcagcagagggattattcttctt

SEQ ID NO: 5564695 - DNA, 25 bp, Homo sapien
atttgaaaatgctgatggaggcaga

SEQ ID NO: 5564696 - DNA, 25 bp, Homo sapien
tcagacattgtagacattataggtc

SEQ ID NO: 5564697 - DNA, 25 bp, Homo sapien
ggtgaaaggccagagcctgaaattt

SEQ ID NO: 5564698 - DNA, 25 bp, Homo sapien
gccgcaaacgccactctcagacatt

SEQ ID NO: 5564699 - DNA, 25 bp, Homo sapien
cctggcagtgtaaacaggactggtg

SEQ ID NO: 5564700 - DNA, 25 bp, Homo sapien
tgcaatgcatatggcatgttgggtt

SEQ ID NO: 5564701 - DNA, 25 bp, Homo sapien
gcatgttgggttttggcttggagta

SEQ ID NO: 5564702 - DNA, 25 bp, Homo sapien
attttagtgtcatgtcggccagcag

SEQ ID NO: 5564703 - DNA, 25 bp, Homo sapien
tggaaggacatgtgcaatgcatatg

SEQ ID NO: 5564704 - DNA, 25 bp, Homo sapien
acggctgaagaacctgctgtacatg

SEQ ID NO: 5564705 - DNA, 25 bp, Homo sapien
tagaacccagctcagagatagacca

SEQ ID NO: 5564706 - DNA, 25 bp, Homo sapien
tggcttggagtatgcagattgagat

SEQ ID NO: 5564707 - DNA, 25 bp, Homo sapien
ttaatgacataggccagtatatttt

SEQ ID NO: 5564708 - DNA, 25 bp, Homo sapien
ctgctgtacatgccaagagagcgtg

SEQ ID NO: 5564709 - DNA, 25 bp, Homo sapien
ccagcaggagtcaataatgaagtcc

SEQ ID NO: 5564710 - DNA, 25 bp, Homo sapien
aagtggcatattataagaagcccct

SEQ ID NO: 5564711 - DNA, 25 bp, Homo sapien
tataagaatcccacgtttccatcac

SEQ ID NO: 5564712 - DNA, 25 bp, Homo sapien
attgtgaatgatttcgaataataac

SEQ ID NO: 5564713 - DNA, 25 bp, Homo sapien
gtgttacatgaaaatcaaagaagat

SEQ ID NO: 5564714 - DNA, 25 bp, Homo sapien
ctagtgaaatgaggcatattttatc

SEQ ID NO: 5564715 - DNA, 25 bp, Homo sapien
ttaatggtacaggtttaagagatgc

SEQ ID NO: 5564716 - DNA, 25 bp, Homo sapien
tggtacaggtttaagagatgcattc

SEQ ID NO: 5564717 - DNA, 25 bp, Homo sapien
aaatgcatgacttaactagacaatt

SEQ ID NO: 5564718 - DNA, 25 bp, Homo sapien
aaatcaaagaagatattgtggatat

SEQ ID NO: 5564719 - DNA, 25 bp, Homo sapien
aaattcaccttgttctgcagtctgt

SEQ ID NO: 5564720 - DNA, 25 bp, Homo sapien
ctgcagtctgtaaatgcaaagacat

SEQ ID NO: 5564721 - DNA, 25 bp, Homo sapien
tgacagtttggacacttttaaggta

SEQ ID NO: 5564722 - DNA, 25 bp, Homo sapien
gatggttgccagcaactccagcctt

SEQ ID NO: 5564723 - DNA, 25 bp, Homo sapien
ctggtttccagctgtacaaagtcaa

SEQ ID NO: 5564724 - DNA, 25 bp, Homo sapien
tctgtgagcttgccatgggtcactt

SEQ ID NO: 5564725 - DNA, 25 bp, Homo sapien
ttgcaaagatggttgccagcaactc

SEQ ID NO: 5564726 - DNA, 25 bp, Homo sapien
tgccatgggtcacttggttacaagt

SEQ ID NO: 5564727 - DNA, 25 bp, Homo sapien
catggttgcaaagatggttgccagc

SEQ ID NO: 5564728 - DNA, 25 bp, Homo sapien
cctgcatggttgcaaagatggttgc

SEQ ID NO: 5564729 - DNA, 25 bp, Homo sapien
acaaacccattaaactgccttcagt

SEQ ID NO: 5564730 - DNA, 25 bp, Homo sapien
aaggaggaattctgccaatacaaat

SEQ ID NO: 5564731 - DNA, 25 bp, Homo sapien
tccagcattgctggtttccagctgt

SEQ ID NO: 5564732 - DNA, 25 bp, Homo sapien
aagtagttctccctgcatggttgca

SEQ ID NO: 5564733 - DNA, 25 bp, Homo sapien
ttcactagcctgaaaagggcattat

SEQ ID NO: 5564734 - DNA, 25 bp, Homo sapien
tatgggctgaaaggaattttacgca

SEQ ID NO: 5564735 - DNA, 25 bp, Homo sapien
aacagcagccccagtgatctctcat

SEQ ID NO: 5564736 - DNA, 25 bp, Homo sapien
attttacgcaggtgggaaatcttaa

SEQ ID NO: 5564737 - DNA, 25 bp, Homo sapien
ttaaacaaaagctcaatccagtctc

SEQ ID NO: 5564738 - DNA, 25 bp, Homo sapien
ccacccagtccaggtttgtcccacc

SEQ ID NO: 5564739 - DNA, 25 bp, Homo sapien
gcttcatcagaaacgccttgcgtcc

SEQ ID NO: 5564740 - DNA, 25 bp, Homo sapien
acacaaacttcggacaaacagcagc

SEQ ID NO: 5564741 - DNA, 25 bp, Homo sapien
cttagaagagggttcatcatgatac

SEQ ID NO: 5564742 - DNA, 25 bp, Homo sapien
ggaggcacaaattccagcttatggc

SEQ ID NO: 5564743 - DNA, 25 bp, Homo sapien
cttatggcgcctgctatggcagagc

SEQ ID NO: 5564744 - DNA, 25 bp, Homo sapien
aattctcagtgcagtcaaagaaagt

SEQ ID NO: 5564745 - DNA, 25 bp, Homo sapien
ggcaactcttaggagtcagaatgtc

SEQ ID NO: 5564746 - DNA, 25 bp, Homo sapien
ttgcagccctccacatctacaaggc

SEQ ID NO: 5564747 - DNA, 25 bp, Homo sapien
taaagaaagttggctatgggctgta

SEQ ID NO: 5564748 - DNA, 25 bp, Homo sapien
ttccaagcaaactcagccgcctggc

SEQ ID NO: 5564749 - DNA, 25 bp, Homo sapien
agaagattctatggctaaaaaacaa

SEQ ID NO: 5564750 - DNA, 25 bp, Homo sapien
cagtgtctccccataggcaaatgct

SEQ ID NO: 5564751 - DNA, 25 bp, Homo sapien
aaatacagtatacaaaagtaagcaa

SEQ ID NO: 5564752 - DNA, 25 bp, Homo sapien
gggctgtaaagtgctgacaccattg

SEQ ID NO: 5564753 - DNA, 25 bp, Homo sapien
gaaagttaagtgcttggagaaatca

SEQ ID NO: 5564754 - DNA, 25 bp, Homo sapien
aaccaaggttctgtaatgctggaaa

SEQ ID NO: 5564755 - DNA, 25 bp, Homo sapien
gtgctcattcacgtccctgccctgt

SEQ ID NO: 5564756 - DNA, 25 bp, Homo sapien
ggagaccgttacgacacatgcctat

SEQ ID NO: 5564757 - DNA, 25 bp, Homo sapien
actgactacgatatccccattgccc

SEQ ID NO: 5564758 - DNA, 25 bp, Homo sapien
atggggacattacgtgctcattcac

SEQ ID NO: 5564759 - DNA, 25 bp, Homo sapien
attgcccggtacaatgcctgacaca

SEQ ID NO: 5564760 - DNA, 25 bp, Homo sapien
agagttaacatgcaggtgcactaac

SEQ ID NO: 5564761 - DNA, 25 bp, Homo sapien
gcaggtgcactaacataatactccc

SEQ ID NO: 5564762 - DNA, 25 bp, Homo sapien
atgcatgcttgaggctttgtggtgg

SEQ ID NO: 5564763 - DNA, 25 bp, Homo sapien
gaaagacaaacccatggggacatta

SEQ ID NO: 5564764 - DNA, 25 bp, Homo sapien
gggaccagatatgcatgcttgaggc

SEQ ID NO: 5564765 - DNA, 25 bp, Homo sapien
cgtggccccttcatgagcagagtta

SEQ ID NO: 5564766 - DNA, 25 bp, Homo sapien
tcagataccaccagctgtggcttcc

SEQ ID NO: 5564767 - DNA, 25 bp, Homo sapien
caccaactcagcacaattccacgca

SEQ ID NO: 5564768 - DNA, 25 bp, Homo sapien
tagaaggtcatacctgtgggtctcc

SEQ ID NO: 5564769 - DNA, 25 bp, Homo sapien
agctagttagcaaatgaccttgtgt

SEQ ID NO: 5564770 - DNA, 25 bp, Homo sapien
gcaaaccattgaaaggaactggtgt

SEQ ID NO: 5564771 - DNA, 25 bp, Homo sapien
ctggtgtattagtgtcctgagctcc

SEQ ID NO: 5564772 - DNA, 25 bp, Homo sapien
tgtttgtaagaattgggcccatcga

SEQ ID NO: 5564773 - DNA, 25 bp, Homo sapien
aactggtgtaaaagccccaaagcac

SEQ ID NO: 5564774 - DNA, 25 bp, Homo sapien
gggcccatcgaactggagcttccta

SEQ ID NO: 5564775 - DNA, 25 bp, Homo sapien
gggtctcctggagtaagccattgtc

SEQ ID NO: 5564776 - DNA, 25 bp, Homo sapien
attgagttaaaaacacaagcagtgt

SEQ ID NO: 5564777 - DNA, 25 bp, Homo sapien
tgatgcccgagctcgccccttttgt

SEQ ID NO: 5564778 - DNA, 25 bp, Homo sapien
tcgaaatcaccgagtgtgggtgttt

SEQ ID NO: 5564779 - DNA, 25 bp, Homo sapien
ttgaacagattggatacagaactat

SEQ ID NO: 5564780 - DNA, 25 bp, Homo sapien
tcggaaacaatgagctggatccttg

SEQ ID NO: 5564781 - DNA, 25 bp, Homo sapien
aaggcgccctttgtaccacccgcag

SEQ ID NO: 5564782 - DNA, 25 bp, Homo sapien
ggctggtcaattcattccgctcctc

SEQ ID NO: 5564783 - DNA, 25 bp, Homo sapien
ccgcgaggaccatctcagactgaga

SEQ ID NO: 5564784 - DNA, 25 bp, Homo sapien
gccgaggctactgcacgtattttcg

SEQ ID NO: 5564785 - DNA, 25 bp, Homo sapien
ctaacagaattccgggcttgggtag

SEQ ID NO: 5564786 - DNA, 25 bp, Homo sapien
tgtaagccggcgtttcatccagctc

SEQ ID NO: 5564787 - DNA, 25 bp, Homo sapien
cccttttgtgtcctcgcggtgagcc

SEQ ID NO: 5564788 - DNA, 25 bp, Homo sapien
taaggaaagctacaaaatctaatct

SEQ ID NO: 5564789 - DNA, 25 bp, Homo sapien
atgccaacagaaaatttagaggttc

SEQ ID NO: 5564790 - DNA, 25 bp, Homo sapien
agacaatggatactagaggaccact

SEQ ID NO: 5564791 - DNA, 25 bp, Homo sapien
aagtactctgaggctaccacggtag

SEQ ID NO: 5564792 - DNA, 25 bp, Homo sapien
accaccatgtgtgccacgtcccatc

SEQ ID NO: 5564793 - DNA, 25 bp, Homo sapien
caagatgctctcaaggcttactctc

SEQ ID NO: 5564794 - DNA, 25 bp, Homo sapien
ttacataaagaaaggagacaatgga

SEQ ID NO: 5564795 - DNA, 25 bp, Homo sapien
agcctggcaactgcacacatcaatc

SEQ ID NO: 5564796 - DNA, 25 bp, Homo sapien
tagttgaacagtagaagagtgaaca

SEQ ID NO: 5564797 - DNA, 25 bp, Homo sapien
catcccaactagtgagatggaggga

SEQ ID NO: 5564798 - DNA, 25 bp, Homo sapien
gaccaagcctagctgtaaggaaagc

SEQ ID NO: 5564799 - DNA, 25 bp, Homo sapien
tgtgtataaacagataggaattacc

SEQ ID NO: 5564800 - DNA, 25 bp, Homo sapien
gcaaaggttgaaaaaaactcacatc

SEQ ID NO: 5564801 - DNA, 25 bp, Homo sapien
gttccccaggaacatggcttccaac

SEQ ID NO: 5564802 - DNA, 25 bp, Homo sapien
acagccaagaaaacacagcctcatt

SEQ ID NO: 5564803 - DNA, 25 bp, Homo sapien
tttgtacagcaagcgctaaagcatc

SEQ ID NO: 5564804 - DNA, 25 bp, Homo sapien
tccaacatcaagaagcacagccaag

SEQ ID NO: 5564805 - DNA, 25 bp, Homo sapien
acagataggtagggaacattatttg

SEQ ID NO: 5564806 - DNA, 25 bp, Homo sapien
cttaggagaaaagaatacagatttg

SEQ ID NO: 5564807 - DNA, 25 bp, Homo sapien
gtggaacagacactaccagcctgca

SEQ ID NO: 5564808 - DNA, 25 bp, Homo sapien
gaggaggctactactcccatgggcc

SEQ ID NO: 5564809 - DNA, 25 bp, Homo sapien
cctaagatggaaggtattgacagat

SEQ ID NO: 5564810 - DNA, 25 bp, Homo sapien
aaatgaggtgataaagtagccttgc

SEQ ID NO: 5564811 - DNA, 25 bp, Homo sapien
atctgctataagcgatcaagagggg

SEQ ID NO: 5564812 - DNA, 25 bp, Homo sapien
ttccagtaacagaacagaccacctt

SEQ ID NO: 5564813 - DNA, 25 bp, Homo sapien
agtagccttgctcagcaccctcgtt

SEQ ID NO: 5564814 - DNA, 25 bp, Homo sapien
agaaaggattccactgtggtggtct

SEQ ID NO: 5564815 - DNA, 25 bp, Homo sapien
aggggcctcatctagaagaaaatgc

SEQ ID NO: 5564816 - DNA, 25 bp, Homo sapien
gaagaaaatgccctgaagctggcct

SEQ ID NO: 5564817 - DNA, 25 bp, Homo sapien
atatcagaatgtaacagaaaggatt

SEQ ID NO: 5564818 - DNA, 25 bp, Homo sapien
ctcctcagcttccagtcttcagtcc

SEQ ID NO: 5564819 - DNA, 25 bp, Homo sapien
acacacacaagcatctagaggaaaa

SEQ ID NO: 5564820 - DNA, 25 bp, Homo sapien
caaaatggtgaatgtaatagcaatc

SEQ ID NO: 5564821 - DNA, 25 bp, Homo sapien
tgagtgaaaagatgtgtctgaattc

SEQ ID NO: 5564822 - DNA, 25 bp, Homo sapien
aaacagtgaaagaaggtcagctgta

SEQ ID NO: 5564823 - DNA, 25 bp, Homo sapien
ttaccctgagaaggtctgagatgag

SEQ ID NO: 5564824 - DNA, 25 bp, Homo sapien
ttcaccgagttaccctgagaaggtc

SEQ ID NO: 5564825 - DNA, 25 bp, Homo sapien
gaattcttacatgtgggcctggaag

SEQ ID NO: 5564826 - DNA, 25 bp, Homo sapien
gccagggtcactcaggttgagcttt

SEQ ID NO: 5564827 - DNA, 25 bp, Homo sapien
gccacatccagacacccactctatt

SEQ ID NO: 5564828 - DNA, 25 bp, Homo sapien
gccaatcatttcaggggccagggtc

SEQ ID NO: 5564829 - DNA, 25 bp, Homo sapien
tcatctgcaagttgcagggaggctc

SEQ ID NO: 5564830 - DNA, 25 bp, Homo sapien
gaagtgtcttccacatacctgggct

SEQ ID NO: 5564831 - DNA, 25 bp, Homo sapien
tcagctgtagaactaagacatgagc

SEQ ID NO: 5564832 - DNA, 25 bp, Homo sapien
aaagagacagaaccaacactaatta

SEQ ID NO: 5564833 - DNA, 25 bp, Homo sapien
gctgtaatcggctgaccctgtccat

SEQ ID NO: 5564834 - DNA, 25 bp, Homo sapien
cctcggcacaggcccctactccaag

SEQ ID NO: 5564835 - DNA, 25 bp, Homo sapien
ctaattactgcaaaacgaaaaaaga

SEQ ID NO: 5564836 - DNA, 25 bp, Homo sapien
gaccctgtccatattctgaacacac

SEQ ID NO: 5564837 - DNA, 25 bp, Homo sapien
ctgcagcccatcgccttggatctga

SEQ ID NO: 5564838 - DNA, 25 bp, Homo sapien
ctctatgtaaagcacaggctggtga

SEQ ID NO: 5564839 - DNA, 25 bp, Homo sapien
ggcccctactccaagtcctgtgcag

SEQ ID NO: 5564840 - DNA, 25 bp, Homo sapien
aacacactcctgtctcgcaggcttc

SEQ ID NO: 5564841 - DNA, 25 bp, Homo sapien
cctgcccttcagaaatgcttacatc

SEQ ID NO: 5564842 - DNA, 25 bp, Homo sapien
ccttggatctgaagaccagccctgt

SEQ ID NO: 5564843 - DNA, 25 bp, Homo sapien
gatcaatagggaaacaccacgtctc

SEQ ID NO: 5564844 - DNA, 25 bp, Homo sapien
cacttccgcagtggcatggaaagga

SEQ ID NO: 5564845 - DNA, 25 bp, Homo sapien
ctcaaaagaagcacagttaaaaacc

SEQ ID NO: 5564846 - DNA, 25 bp, Homo sapien
gcaggcactgtgaataaaaggtgct

SEQ ID NO: 5564847 - DNA, 25 bp, Homo sapien
aggtgcttccaggaattcccggtag

SEQ ID NO: 5564848 - DNA, 25 bp, Homo sapien
gtgtggaatggactacataagatac

SEQ ID NO: 5564849 - DNA, 25 bp, Homo sapien
aaaggctcactgagcctggggtatc

SEQ ID NO: 5564850 - DNA, 25 bp, Homo sapien
tcgtgtgcacaggcttctaaacttc

SEQ ID NO: 5564851 - DNA, 25 bp, Homo sapien
acatgagaccctgagtaaaaggctc

SEQ ID NO: 5564852 - DNA, 25 bp, Homo sapien
acaggtcagcatgcagtttggatca

SEQ ID NO: 5564853 - DNA, 25 bp, Homo sapien
gtgaacgccgcacacatggttgtta

SEQ ID NO: 5564854 - DNA, 25 bp, Homo sapien
cattacatcatggtttgttgagggt

SEQ ID NO: 5564855 - DNA, 25 bp, Homo sapien
tcagttttctagtctcggcatgaac

SEQ ID NO: 5564856 - DNA, 25 bp, Homo sapien
gccagggacctatttgaattaggaa

SEQ ID NO: 5564857 - DNA, 25 bp, Homo sapien
ggtgtgattcgtgcttcattacatc

SEQ ID NO: 5564858 - DNA, 25 bp, Homo sapien
ggaaagagacaaaatggtgtgattc

SEQ ID NO: 5564859 - DNA, 25 bp, Homo sapien
aacagtactagggttcagttttcta

SEQ ID NO: 5564860 - DNA, 25 bp, Homo sapien
ttctagtctcggcatgaactaatgc

SEQ ID NO: 5564861 - DNA, 25 bp, Homo sapien
tcggcatgaactaatgccagggacc

SEQ ID NO: 5564862 - DNA, 25 bp, Homo sapien
aagagacaaaatggtgtgattcgtg

SEQ ID NO: 5564863 - DNA, 25 bp, Homo sapien
atgaactaatgccagggacctattt

SEQ ID NO: 5564864 - DNA, 25 bp, Homo sapien
aggtgaatatcttccatttcaagac

SEQ ID NO: 5564865 - DNA, 25 bp, Homo sapien
cattttagtaagacttgggcaggtg

SEQ ID NO: 5564866 - DNA, 25 bp, Homo sapien
cacaaccagtgagactgagaaaaaa

SEQ ID NO: 5564867 - DNA, 25 bp, Homo sapien
tcttctccatggagacagttggggt

SEQ ID NO: 5564868 - DNA, 25 bp, Homo sapien
tcgaggtaatggagacttcatgtac

SEQ ID NO: 5564869 - DNA, 25 bp, Homo sapien
caggctgaggcttccatgttcacag

SEQ ID NO: 5564870 - DNA, 25 bp, Homo sapien
agaaaaaaattcgaggtaatggaga

SEQ ID NO: 5564871 - DNA, 25 bp, Homo sapien
ttgggtgatgtatttctggagtttt

SEQ ID NO: 5564872 - DNA, 25 bp, Homo sapien
gagaactgccaccttgggtgatgta

SEQ ID NO: 5564873 - DNA, 25 bp, Homo sapien
aagtgtatctttgcgtctggtgggc

SEQ ID NO: 5564874 - DNA, 25 bp, Homo sapien
cagctttgcccacgcacagaccctt

SEQ ID NO: 5564875 - DNA, 25 bp, Homo sapien
tttacatccagaggatacagggaca

SEQ ID NO: 5564876 - DNA, 25 bp, Homo sapien
atttgcacaacagagtaaaggatgt

SEQ ID NO: 5564877 - DNA, 25 bp, Homo sapien
atcttgatgtcctgagcactctggt

SEQ ID NO: 5564878 - DNA, 25 bp, Homo sapien
agagtaaaggatgtgtgcctgattc

SEQ ID NO: 5564879 - DNA, 25 bp, Homo sapien
taaaataaagattgtggaggaatag

SEQ ID NO: 5564880 - DNA, 25 bp, Homo sapien
tggccaggctctctgggtaaccatc

SEQ ID NO: 5564881 - DNA, 25 bp, Homo sapien
ctccaccgcaaatattctggccagg

SEQ ID NO: 5564882 - DNA, 25 bp, Homo sapien
ggaggaatagaatacaaacacacag

SEQ ID NO: 5564883 - DNA, 25 bp, Homo sapien
ctgctctcaagagctgatgagggac

SEQ ID NO: 5564884 - DNA, 25 bp, Homo sapien
gctgttgggctcatttagttggcac

SEQ ID NO: 5564885 - DNA, 25 bp, Homo sapien
atttggataatgatactgagggaag

SEQ ID NO: 5564886 - DNA, 25 bp, Homo sapien
cacagtaaggtgagatttgcacaac

SEQ ID NO: 5564887 - DNA, 25 bp, Homo sapien
agtggtggtaaaaatccctaatgtc

SEQ ID NO: 5564888 - DNA, 25 bp, Homo sapien
caaatgagttagctttctggcagaa

SEQ ID NO: 5564889 - DNA, 25 bp, Homo sapien
aaaggatcacacagtttgaggaaga

SEQ ID NO: 5564890 - DNA, 25 bp, Homo sapien
ttgagtttatataccccaggcccag

SEQ ID NO: 5564891 - DNA, 25 bp, Homo sapien
tagctcttggcaatctgggagttgg

SEQ ID NO: 5564892 - DNA, 25 bp, Homo sapien
gaagctggaaagaattgcagtaagc

SEQ ID NO: 5564893 - DNA, 25 bp, Homo sapien
gtctagagcacaatgttcatgatac

SEQ ID NO: 5564894 - DNA, 25 bp, Homo sapien
ctgaactggtcagaaagcaaaagga

SEQ ID NO: 5564895 - DNA, 25 bp, Homo sapien
ctctaaaggaagattagctcttggc

SEQ ID NO: 5564896 - DNA, 25 bp, Homo sapien
gctgcaatggaagcaagccacttaa

SEQ ID NO: 5564897 - DNA, 25 bp, Homo sapien
cctgtaaagagccccaggctactcc

SEQ ID NO: 5564898 - DNA, 25 bp, Homo sapien
gaaggatgacattgagctgtgatga

SEQ ID NO: 5564899 - DNA, 25 bp, Homo sapien
acagaaggtctgaagattatatgac

SEQ ID NO: 5564900 - DNA, 25 bp, Homo sapien
gattatatgacccttcagaagtgcc

SEQ ID NO: 5564901 - DNA, 25 bp, Homo sapien
tgagaggaagcttcagccaacctta

SEQ ID NO: 5564902 - DNA, 25 bp, Homo sapien
tcttgacatcaacatgagggaaggc

SEQ ID NO: 5564903 - DNA, 25 bp, Homo sapien
ttatcttgaaatacagttactaaaa

SEQ ID NO: 5564904 - DNA, 25 bp, Homo sapien
ggagtttgctagggaacgctcttga

SEQ ID NO: 5564905 - DNA, 25 bp, Homo sapien
gccaaccttacagaaggtctgaaga

SEQ ID NO: 5564906 - DNA, 25 bp, Homo sapien
cattgagctgtgatgaagtctgaga

SEQ ID NO: 5564907 - DNA, 25 bp, Homo sapien
atgacccttcagaagtgccctgaat

SEQ ID NO: 5564908 - DNA, 25 bp, Homo sapien
gctagggaacgctcttgacatcaac

SEQ ID NO: 5564909 - DNA, 25 bp, Homo sapien
agaatcaacattaatgagacgaaat

SEQ ID NO: 5564910 - DNA, 25 bp, Homo sapien
tcaccatgacattatagaagcagat

SEQ ID NO: 5564911 - DNA, 25 bp, Homo sapien
gatggtgttaggataatgaatacag

SEQ ID NO: 5564912 - DNA, 25 bp, Homo sapien
acaggctttggagtaaataagaagt

SEQ ID NO: 5564913 - DNA, 25 bp, Homo sapien
ttatgaaagctggttgttttgtctc

SEQ ID NO: 5564914 - DNA, 25 bp, Homo sapien
tgagacgaaataatatgttgcagtt

SEQ ID NO: 5564915 - DNA, 25 bp, Homo sapien
tccaagggaggtctcataagtatac

SEQ ID NO: 5564916 - DNA, 25 bp, Homo sapien
agaagtaggtttgagttggtgactt

SEQ ID NO: 5564917 - DNA, 25 bp, Homo sapien
ttgcagttaagaacaacaggctttg

SEQ ID NO: 5564918 - DNA, 25 bp, Homo sapien
cagaacatcaatgagaatctaaatt

SEQ ID NO: 5564919 - DNA, 25 bp, Homo sapien
gttggtgacttttgctgtgtggcct

SEQ ID NO: 5564920 - DNA, 25 bp, Homo sapien
agccatgccatccaccccgtaaacc

SEQ ID NO: 5564921 - DNA, 25 bp, Homo sapien
gagggtcgcgaaaatcccatgagtt

SEQ ID NO: 5564922 - DNA, 25 bp, Homo sapien
tctccccatagcgttgacaggcaaa

SEQ ID NO: 5564923 - DNA, 25 bp, Homo sapien
tcttccggggctttctcatcacatc

SEQ ID NO: 5564924 - DNA, 25 bp, Homo sapien
agatacttaggaaaatcggtgggat

SEQ ID NO: 5564925 - DNA, 25 bp, Homo sapien
gaatggtccagggcagcctgtattt

SEQ ID NO: 5564926 - DNA, 25 bp, Homo sapien
aaactttggatctagaaggagagtc

SEQ ID NO: 5564927 - DNA, 25 bp, Homo sapien
gttgcaggcaacagatacttaggaa

SEQ ID NO: 5564928 - DNA, 25 bp, Homo sapien
tggatcattcagtgatgggaagagc

SEQ ID NO: 5564929 - DNA, 25 bp, Homo sapien
gcctatgttggcagagtccatctct

SEQ ID NO: 5564930 - DNA, 25 bp, Homo sapien
agcagtccgattccgccgccctaaa

SEQ ID NO: 5564931 - DNA, 25 bp, Homo sapien
agagcacattctttccagccctggc

SEQ ID NO: 5564932 - DNA, 25 bp, Homo sapien
tatgacaggtttataactcagactt

SEQ ID NO: 5564933 - DNA, 25 bp, Homo sapien
gtggctgcaatccaggcctgctcag

SEQ ID NO: 5564934 - DNA, 25 bp, Homo sapien
cctgctcaggcatctcatgaccttc

SEQ ID NO: 5564935 - DNA, 25 bp, Homo sapien
gatggctgttacctaggcttgctct

SEQ ID NO: 5564936 - DNA, 25 bp, Homo sapien
acaagcctacagtggcacaaagtgt

SEQ ID NO: 5564937 - DNA, 25 bp, Homo sapien
aaacaggaatcataagagaaaggaa

SEQ ID NO: 5564938 - DNA, 25 bp, Homo sapien
acaaagtgtagtgatgtgaaagcaa

SEQ ID NO: 5564939 - DNA, 25 bp, Homo sapien
gcttgctctagtgccttgcatgggc

SEQ ID NO: 5564940 - DNA, 25 bp, Homo sapien
ctgcttaaatgaaaaacaggaatca

SEQ ID NO: 5564941 - DNA, 25 bp, Homo sapien
cttcactatggtgcctaggtggctg

SEQ ID NO: 5564942 - DNA, 25 bp, Homo sapien
gccagaggaataaaccatgcataag

SEQ ID NO: 5564943 - DNA, 25 bp, Homo sapien
aaaagcactgcatatcaggtgggag

SEQ ID NO: 5564944 - DNA, 25 bp, Homo sapien
ctccaacctgggacaaagtaaagta

SEQ ID NO: 5564945 - DNA, 25 bp, Homo sapien
aggaaaattgactatgggtattgtt

SEQ ID NO: 5564946 - DNA, 25 bp, Homo sapien
gggcatctgcgcctcccagaggcac

SEQ ID NO: 5564947 - DNA, 25 bp, Homo sapien
gcctcccaaggcctgttgttgcatc

SEQ ID NO: 5564948 - DNA, 25 bp, Homo sapien
gaggccagactgattatatccgttc

SEQ ID NO: 5564949 - DNA, 25 bp, Homo sapien
agtaaagtaaagcaagttataggat

SEQ ID NO: 5564950 - DNA, 25 bp, Homo sapien
tcgaacacaagtcagtgctggctgt

SEQ ID NO: 5564951 - DNA, 25 bp, Homo sapien
gaggcactcgcacacctgaggcctc

SEQ ID NO: 5564952 - DNA, 25 bp, Homo sapien
tgcataagatagtcaaaagcactgc

SEQ ID NO: 5564953 - DNA, 25 bp, Homo sapien
cctcccagccctccgactttggctc

SEQ ID NO: 5564954 - DNA, 25 bp, Homo sapien
gcccagatgtctccggtcacggctc

SEQ ID NO: 5564955 - DNA, 25 bp, Homo sapien
ccagatgtctccggtcacggctcgg

SEQ ID NO: 5564956 - DNA, 25 bp, Homo sapien
tccgactttggctcacgcgctggga

SEQ ID NO: 5564957 - DNA, 25 bp, Homo sapien
atgtctccggtcacggctcggagga

SEQ ID NO: 5564958 - DNA, 25 bp, Homo sapien
ctcgctcattcccgaccccgagcct

SEQ ID NO: 5564959 - DNA, 25 bp, Homo sapien
ccctccgactttggctcacgcgctg

SEQ ID NO: 5564960 - DNA, 25 bp, Homo sapien
ggagaggcttgagaaagatttttcc

SEQ ID NO: 5564961 - DNA, 25 bp, Homo sapien
tctgccggaccctcgctcattcccg

SEQ ID NO: 5564962 - DNA, 25 bp, Homo sapien
gccggaccctcgctcattcccgacc

SEQ ID NO: 5564963 - DNA, 25 bp, Homo sapien
cttgagaaagatttttcctgccccc

SEQ ID NO: 5564964 - DNA, 25 bp, Homo sapien
tctacattgaacacagctgagcatt

SEQ ID NO: 5564965 - DNA, 25 bp, Homo sapien
ccttagtggttgagtttacaggtgt

SEQ ID NO: 5564966 - DNA, 25 bp, Homo sapien
ttgaaaatcgtccatttgcagctaa

SEQ ID NO: 5564967 - DNA, 25 bp, Homo sapien
tatgggtaatagctaagtattattt

SEQ ID NO: 5564968 - DNA, 25 bp, Homo sapien
ccgcctcagtctccttagtggttga

SEQ ID NO: 5564969 - DNA, 25 bp, Homo sapien
agggtgtgtgaaaccactttctgcc

SEQ ID NO: 5564970 - DNA, 25 bp, Homo sapien
tgagcattactcacatctgacatct

SEQ ID NO: 5564971 - DNA, 25 bp, Homo sapien
agctgattaaataaaagggtgtgtg

SEQ ID NO: 5564972 - DNA, 25 bp, Homo sapien
aacatttctcccctcctggcagcag

SEQ ID NO: 5564973 - DNA, 25 bp, Homo sapien
ggcagcaggctaaaagcaatatggg

SEQ ID NO: 5564974 - DNA, 25 bp, Homo sapien
caggtgtgtgtcaccgcacccactt

SEQ ID NO: 5564975 - DNA, 25 bp, Homo sapien
taacttggatttgagctagcaaggc

SEQ ID NO: 5564976 - DNA, 25 bp, Homo sapien
tctggagactttctggcaccccttg

SEQ ID NO: 5564977 - DNA, 25 bp, Homo sapien
atgtgtgtatcagcaggatagtaaa

SEQ ID NO: 5564978 - DNA, 25 bp, Homo sapien
tatgtggagacatctaggcattact

SEQ ID NO: 5564979 - DNA, 25 bp, Homo sapien
ttttaaaaggaaacatgacatggag

SEQ ID NO: 5564980 - DNA, 25 bp, Homo sapien
tgacatggagaacaaggtgtctaga

SEQ ID NO: 5564981 - DNA, 25 bp, Homo sapien
tatatttatggagcttcacacactt

SEQ ID NO: 5564982 - DNA, 25 bp, Homo sapien
ggatagtaaagagggcatttcaaaa

SEQ ID NO: 5564983 - DNA, 25 bp, Homo sapien
attactaatgaagggttagggattg

SEQ ID NO: 5564984 - DNA, 25 bp, Homo sapien
tcccaggggactaagaaaatatata

SEQ ID NO: 5564985 - DNA, 25 bp, Homo sapien
ggcaccccttgaaatatgtggagac

SEQ ID NO: 5564986 - DNA, 25 bp, Homo sapien
gatttcctcaagagcggagaacagg

SEQ ID NO: 5564987 - DNA, 25 bp, Homo sapien
ggcacctagtagatcctcaataaac

SEQ ID NO: 5564988 - DNA, 25 bp, Homo sapien
aaaggaattactgagtgaataaacc

SEQ ID NO: 5564989 - DNA, 25 bp, Homo sapien
gccctgatatttctcctcgtggtac

SEQ ID NO: 5564990 - DNA, 25 bp, Homo sapien
tggccgtgagtaataaagccttatt

SEQ ID NO: 5564991 - DNA, 25 bp, Homo sapien
gatcacacacatggcttctctctca

SEQ ID NO: 5564992 - DNA, 25 bp, Homo sapien
agtatcatgatacctggcacctagt

SEQ ID NO: 5564993 - DNA, 25 bp, Homo sapien
gtggcaggtcacacccttcttcaaa

SEQ ID NO: 5564994 - DNA, 25 bp, Homo sapien
atgatcacacacatggccgtgagta

SEQ ID NO: 5564995 - DNA, 25 bp, Homo sapien
agctcaggagtgaaataactagatt

SEQ ID NO: 5564996 - DNA, 25 bp, Homo sapien
acacacagctcaggagtgaaataac

SEQ ID NO: 5564997 - DNA, 25 bp, Homo sapien
ttcaaagggtgctgctatttaggga

SEQ ID NO: 5564998 - DNA, 25 bp, Homo sapien
gtggtcatggttcaaggatccttca

SEQ ID NO: 5564999 - DNA, 25 bp, Homo sapien
agacactcctgacagacaggcagcc

SEQ ID NO: 5565000 - DNA, 25 bp, Homo sapien
tgtctcaccctaagaggcttggggg

SEQ ID NO: 5565001 - DNA, 25 bp, Homo sapien
gaaggactctttgttgcggtgtggt

SEQ ID NO: 5565002 - DNA, 25 bp, Homo sapien
gaagcgagtttgatgaaggactctt

SEQ ID NO: 5565003 - DNA, 25 bp, Homo sapien
ggtagaagcttagtcaaaatccggc

SEQ ID NO: 5565004 - DNA, 25 bp, Homo sapien
tcagcagtcagggttcttgcaggaa

SEQ ID NO: 5565005 - DNA, 25 bp, Homo sapien
cagtcacggtttacaaggtagaagc

SEQ ID NO: 5565006 - DNA, 25 bp, Homo sapien
tttcaaaaataatcagaggccctgc

SEQ ID NO: 5565007 - DNA, 25 bp, Homo sapien
ggggccagtcagtagtgactcctct

SEQ ID NO: 5565008 - DNA, 25 bp, Homo sapien
aataccacactaactgataacagac

SEQ ID NO: 5565009 - DNA, 25 bp, Homo sapien
tcacataactaggaaatggcagagc

SEQ ID NO: 5565010 - DNA, 25 bp, Homo sapien
ggcagagcttgggttccacccttgc

SEQ ID NO: 5565011 - DNA, 25 bp, Homo sapien
gggaatagatgcacagagtggttaa

SEQ ID NO: 5565012 - DNA, 25 bp, Homo sapien
ctagttccaaaccccagagctcata

SEQ ID NO: 5565013 - DNA, 25 bp, Homo sapien
tcaggtaagtaacaatattatgccc

SEQ ID NO: 5565014 - DNA, 25 bp, Homo sapien
attggacctgatatatcaagacaat

SEQ ID NO: 5565015 - DNA, 25 bp, Homo sapien
cattttgatgatgagggaatagatg

SEQ ID NO: 5565016 - DNA, 25 bp, Homo sapien
taagaattaaccagcagtcaaacaa

SEQ ID NO: 5565017 - DNA, 25 bp, Homo sapien
tgcccaaggtcacataactaggaaa

SEQ ID NO: 5565018 - DNA, 25 bp, Homo sapien
actctcgcagaggcaactatcatct

SEQ ID NO: 5565019 - DNA, 25 bp, Homo sapien
gtgtttaagccgatcagggacacct

SEQ ID NO: 5565020 - DNA, 25 bp, Homo sapien
gtcagccaagtataccaatcaccac

SEQ ID NO: 5565021 - DNA, 25 bp, Homo sapien
cacctggaactcagcaaagagaggt

SEQ ID NO: 5565022 - DNA, 25 bp, Homo sapien
aagtgggagatgaaaaaactatctc

SEQ ID NO: 5565023 - DNA, 25 bp, Homo sapien
acaactgcgaatgaaacatgcttcc

SEQ ID NO: 5565024 - DNA, 25 bp, Homo sapien
ggatgctgctgccaacaactgcgaa

SEQ ID NO: 5565025 - DNA, 25 bp, Homo sapien
aaaaatcaacacacaaccaagccca

SEQ ID NO: 5565026 - DNA, 25 bp, Homo sapien
ttcgtatcacggataagaacgatcc

SEQ ID NO: 5565027 - DNA, 25 bp, Homo sapien
ctttgacacggcgtctggttcatgg

SEQ ID NO: 5565028 - DNA, 25 bp, Homo sapien
caaccaagcccaaagctgggtatgc

SEQ ID NO: 5565029 - DNA, 25 bp, Homo sapien
atatgacccagtgtttaagccgatc

SEQ ID NO: 5565030 - DNA, 25 bp, Homo sapien
tttccaagtggcataaaaaatgtac

SEQ ID NO: 5565031 - DNA, 25 bp, Homo sapien
agtacaagattatggtaaaggcccc

SEQ ID NO: 5565032 - DNA, 25 bp, Homo sapien
taaaagaagcattgtcagttacagt

SEQ ID NO: 5565033 - DNA, 25 bp, Homo sapien
ggaggttatccttgcagaacacagg

SEQ ID NO: 5565034 - DNA, 25 bp, Homo sapien
acatacacaaggtaggaccaagaga

SEQ ID NO: 5565035 - DNA, 25 bp, Homo sapien
ggggatgcatagggtcttacttaaa

SEQ ID NO: 5565036 - DNA, 25 bp, Homo sapien
ataatgccccagtgggctgaaacac

SEQ ID NO: 5565037 - DNA, 25 bp, Homo sapien
gaacacaggcacagcttccagtctg

SEQ ID NO: 5565038 - DNA, 25 bp, Homo sapien
caagaccatcagggtcacagaattc

SEQ ID NO: 5565039 - DNA, 25 bp, Homo sapien
aagcaacaagcaagcctttacagca

SEQ ID NO: 5565040 - DNA, 25 bp, Homo sapien
atggtaaaggccccaacaacctgat

SEQ ID NO: 5565041 - DNA, 25 bp, Homo sapien
tccaaataagccatcttgtacagtt

SEQ ID NO: 5565042 - DNA, 25 bp, Homo sapien
accagtggattgcctctggggaaga

SEQ ID NO: 5565043 - DNA, 25 bp, Homo sapien
aaaaagcaaagtaaagaacagtgta

SEQ ID NO: 5565044 - DNA, 25 bp, Homo sapien
ggttgttgacccatgccaggagaaa

SEQ ID NO: 5565045 - DNA, 25 bp, Homo sapien
caaggaattgttaccagtggattgc

SEQ ID NO: 5565046 - DNA, 25 bp, Homo sapien
tagagaaagaatatatgtacgagta

SEQ ID NO: 5565047 - DNA, 25 bp, Homo sapien
aaataaaggggccattatataatga

SEQ ID NO: 5565048 - DNA, 25 bp, Homo sapien
agtaaatatgtaaataaaggggcca

SEQ ID NO: 5565049 - DNA, 25 bp, Homo sapien
tgttgacccatgccaggagaaagaa

SEQ ID NO: 5565050 - DNA, 25 bp, Homo sapien
tgtatatatcaccttccctccccac

SEQ ID NO: 5565051 - DNA, 25 bp, Homo sapien
taaagaacagtgtatagtgtgcttc

SEQ ID NO: 5565052 - DNA, 25 bp, Homo sapien
gaactcatgagaagtatgggattgc

SEQ ID NO: 5565053 - DNA, 25 bp, Homo sapien
tggtactgcagaatcacatgacagc

SEQ ID NO: 5565054 - DNA, 25 bp, Homo sapien
tttctcttcactgaggagcgggagg

SEQ ID NO: 5565055 - DNA, 25 bp, Homo sapien
aggtggttattcctgtggtactgca

SEQ ID NO: 5565056 - DNA, 25 bp, Homo sapien
gtggaggatcgaaaattgtacaatt

SEQ ID NO: 5565057 - DNA, 25 bp, Homo sapien
agagctgcctccgaagtggtaaaat

SEQ ID NO: 5565058 - DNA, 25 bp, Homo sapien
aagtgaacttgattctgaggctgaa

SEQ ID NO: 5565059 - DNA, 25 bp, Homo sapien
tgctccagggcatttgtggaggatc

SEQ ID NO: 5565060 - DNA, 25 bp, Homo sapien
gggaggattgtaagatactgtgcct

SEQ ID NO: 5565061 - DNA, 25 bp, Homo sapien
aggctattacatcagagacagtggc

SEQ ID NO: 5565062 - DNA, 25 bp, Homo sapien
aatcacatgacagcaaaggcatagg

SEQ ID NO: 5565063 - DNA, 25 bp, Homo sapien
aaggtgcactgaaaatgttggctgt

SEQ ID NO: 5565064 - DNA, 25 bp, Homo sapien
taaatgtgactgagctaagcaaacg

SEQ ID NO: 5565065 - DNA, 25 bp, Homo sapien
aggcgtggactaaaatgacctccta

SEQ ID NO: 5565066 - DNA, 25 bp, Homo sapien
gaggcggaacaagaacaattacttg

SEQ ID NO: 5565067 - DNA, 25 bp, Homo sapien
acagctgagtcttagtgttggggga

SEQ ID NO: 5565068 - DNA, 25 bp, Homo sapien
gaaactaacaatgcaacccagaccc

SEQ ID NO: 5565069 - DNA, 25 bp, Homo sapien
gcagctttttcagaggcgtggacta

SEQ ID NO: 5565070 - DNA, 25 bp, Homo sapien
gattctagaaaatgaaggcaggtac

SEQ ID NO: 5565071 - DNA, 25 bp, Homo sapien
ggcaggtactcaaaaggtacagttc

SEQ ID NO: 5565072 - DNA, 25 bp, Homo sapien
ggggaagtagctttcatgaaggcaa

SEQ ID NO: 5565073 - DNA, 25 bp, Homo sapien
aagggagccccattctcggccgtat

SEQ ID NO: 5565074 - DNA, 25 bp, Homo sapien
cagtttgtattaaagaggactcccc

SEQ ID NO: 5565075 - DNA, 25 bp, Homo sapien
aaagagattatcaaagagtaagcaa

SEQ ID NO: 5565076 - DNA, 25 bp, Homo sapien
gccacacagactgccaagtaggtac

SEQ ID NO: 5565077 - DNA, 25 bp, Homo sapien
tgggtttattaatggaagtgaggct

SEQ ID NO: 5565078 - DNA, 25 bp, Homo sapien
taatgtcataggaatggatgctttt

SEQ ID NO: 5565079 - DNA, 25 bp, Homo sapien
aagtaggtacagtcttggaactgtc

SEQ ID NO: 5565080 - DNA, 25 bp, Homo sapien
atgattctcaagtattggggacacc

SEQ ID NO: 5565081 - DNA, 25 bp, Homo sapien
aatggaagtgaggcttaatgtcata

SEQ ID NO: 5565082 - DNA, 25 bp, Homo sapien
aaaagtgtctcaatagggttaagga

SEQ ID NO: 5565083 - DNA, 25 bp, Homo sapien
gttaaggagaacactacagatgatt

SEQ ID NO: 5565084 - DNA, 25 bp, Homo sapien
tatcagataaaaataggccacacag

SEQ ID NO: 5565085 - DNA, 25 bp, Homo sapien
gtacccactacacagtaactcccca

SEQ ID NO: 5565086 - DNA, 25 bp, Homo sapien
ctcactctaaaagagtgaggtcagc

SEQ ID NO: 5565087 - DNA, 25 bp, Homo sapien
gaggggcgtatatgttgatttttta

SEQ ID NO: 5565088 - DNA, 25 bp, Homo sapien
acaattcagtggcatgaactacatt

SEQ ID NO: 5565089 - DNA, 25 bp, Homo sapien
tcaccaccatccatcaccagtacgt

SEQ ID NO: 5565090 - DNA, 25 bp, Homo sapien
atcaccagtacgttttcatctttcc

SEQ ID NO: 5565091 - DNA, 25 bp, Homo sapien
tatttggttccaggtactacatata

SEQ ID NO: 5565092 - DNA, 25 bp, Homo sapien
ctccagcctttggcaacaaccattc

SEQ ID NO: 5565093 - DNA, 25 bp, Homo sapien
tcagtggcatgaactacattcacac

SEQ ID NO: 5565094 - DNA, 25 bp, Homo sapien
taggtacctcaattaagtggagtca

SEQ ID NO: 5565095 - DNA, 25 bp, Homo sapien
aattaagtggagtcatgtattcatc

SEQ ID NO: 5565096 - DNA, 25 bp, Homo sapien
taaaaggtgaagtcatgacggttag

SEQ ID NO: 5565097 - DNA, 25 bp, Homo sapien
gatttgaactggatctgactcagac

SEQ ID NO: 5565098 - DNA, 25 bp, Homo sapien
aacgagtggtgaatatggtcattgt

SEQ ID NO: 5565099 - DNA, 25 bp, Homo sapien
gcttgtgcagtgggaattaaaaatg

SEQ ID NO: 5565100 - DNA, 25 bp, Homo sapien
ttaagaaaaggaatggctatccatc

SEQ ID NO: 5565101 - DNA, 25 bp, Homo sapien
tcaccttaagagatggcactcgaat

SEQ ID NO: 5565102 - DNA, 25 bp, Homo sapien
ggagggaactgtcttcgtccaggaa

SEQ ID NO: 5565103 - DNA, 25 bp, Homo sapien
gcactcgaattccgcttggggaggg

SEQ ID NO: 5565104 - DNA, 25 bp, Homo sapien
ggtgttggcaggaatcaaattaaga

SEQ ID NO: 5565105 - DNA, 25 bp, Homo sapien
atggtcattgtgatgcctggcttgt

SEQ ID NO: 5565106 - DNA, 25 bp, Homo sapien
aggtgtacccctgacaacgagtggt

SEQ ID NO: 5565107 - DNA, 25 bp, Homo sapien
aggtgacttactggctgcagaaacc

SEQ ID NO: 5565108 - DNA, 25 bp, Homo sapien
agtacattctacacgcagatggatt

SEQ ID NO: 5565109 - DNA, 25 bp, Homo sapien
caaccaaacaaggtaggtaagcttg

SEQ ID NO: 5565110 - DNA, 25 bp, Homo sapien
aggattctcattgaaaaggggtgac

SEQ ID NO: 5565111 - DNA, 25 bp, Homo sapien
gaaagaaatatgaggacgttactga

SEQ ID NO: 5565112 - DNA, 25 bp, Homo sapien
gtctcaagagcaccacagttgcagg

SEQ ID NO: 5565113 - DNA, 25 bp, Homo sapien
tatgaggacgttactgaaagcaaag

SEQ ID NO: 5565114 - DNA, 25 bp, Homo sapien
tacacgcagatggatttggaagcgg

SEQ ID NO: 5565115 - DNA, 25 bp, Homo sapien
acagcttaatcacccaaccaaacaa

SEQ ID NO: 5565116 - DNA, 25 bp, Homo sapien
cacacactcaaaattacagagatgg

SEQ ID NO: 5565117 - DNA, 25 bp, Homo sapien
tattcaacagaacatgacacaggta

SEQ ID NO: 5565118 - DNA, 25 bp, Homo sapien
acatataaaaggtcagtctagtcac

SEQ ID NO: 5565119 - DNA, 25 bp, Homo sapien
taaaggtacttaagatttgagcaac

SEQ ID NO: 5565120 - DNA, 25 bp, Homo sapien
tcctgttgccaacagcaagagctat

SEQ ID NO: 5565121 - DNA, 25 bp, Homo sapien
ccatctgccaaagcgagaacactta

SEQ ID NO: 5565122 - DNA, 25 bp, Homo sapien
gcagtgactgtgggtgcaattaact

SEQ ID NO: 5565123 - DNA, 25 bp, Homo sapien
aaagaacaaggttaatccatctgcc

SEQ ID NO: 5565124 - DNA, 25 bp, Homo sapien
tagtcactgtctaggaaatctgcta

SEQ ID NO: 5565125 - DNA, 25 bp, Homo sapien
aagatttgagcaaccacacagatgc

SEQ ID NO: 5565126 - DNA, 25 bp, Homo sapien
aactcagaaccataggcaactcagc

SEQ ID NO: 5565127 - DNA, 25 bp, Homo sapien
ggcaactcagcagtacaacctctcc

SEQ ID NO: 5565128 - DNA, 25 bp, Homo sapien
tctgagctagcacttcgattccatc

SEQ ID NO: 5565129 - DNA, 25 bp, Homo sapien
tttccatgtgtgacctggtacagtc

SEQ ID NO: 5565130 - DNA, 25 bp, Homo sapien
agaaaaaggaatgagtggcatttca

SEQ ID NO: 5565131 - DNA, 25 bp, Homo sapien
cccctatgtacaaagtgctcggtca

SEQ ID NO: 5565132 - DNA, 25 bp, Homo sapien
taaaagtgcttaaaacgagtatctc

SEQ ID NO: 5565133 - DNA, 25 bp, Homo sapien
gacctggtacagtcaaggccacttc

SEQ ID NO: 5565134 - DNA, 25 bp, Homo sapien
taggtgaataagcatgtcaggtcca

SEQ ID NO: 5565135 - DNA, 25 bp, Homo sapien
aacctgtggttacctaagaggtatc

SEQ ID NO: 5565136 - DNA, 25 bp, Homo sapien
agtgctcggtcaacttggcctattt

SEQ ID NO: 5565137 - DNA, 25 bp, Homo sapien
atctgggagagaatttcctaatttg

SEQ ID NO: 5565138 - DNA, 25 bp, Homo sapien
ttgggaataaattggtctctgaatc

SEQ ID NO: 5565139 - DNA, 25 bp, Homo sapien
agaggtatcagtgtgcatttagcaa

SEQ ID NO: 5565140 - DNA, 25 bp, Homo sapien
tgaaggtctagaggcaatacaattt

SEQ ID NO: 5565141 - DNA, 25 bp, Homo sapien
tggtgtgagagaccctcccattcct

SEQ ID NO: 5565142 - DNA, 25 bp, Homo sapien
agccaaatgatatctgtagactcca

SEQ ID NO: 5565143 - DNA, 25 bp, Homo sapien
ggtggcctggcctttataaaagcat

SEQ ID NO: 5565144 - DNA, 25 bp, Homo sapien
aagtcatctgcgttagtccagcttc

SEQ ID NO: 5565145 - DNA, 25 bp, Homo sapien
gctttaggtactagctgaaggtcta

SEQ ID NO: 5565146 - DNA, 25 bp, Homo sapien
gctttgctcaaaggagtggatttat

SEQ ID NO: 5565147 - DNA, 25 bp, Homo sapien
ttgattggacctatattggcatgtt

SEQ ID NO: 5565148 - DNA, 25 bp, Homo sapien
ttctcaggatagagtgctttgctca

SEQ ID NO: 5565149 - DNA, 25 bp, Homo sapien
atgttaatgtttgatggtggcctgg

SEQ ID NO: 5565150 - DNA, 25 bp, Homo sapien
tccagttgtgtgcaagccctgtgtg

SEQ ID NO: 5565151 - DNA, 25 bp, Homo sapien
gaagcactacttactctgggctggc

SEQ ID NO: 5565152 - DNA, 25 bp, Homo sapien
ggctggagggtttacaaactcatcc

SEQ ID NO: 5565153 - DNA, 25 bp, Homo sapien
agcattgtacgtacatggcagaaaa

SEQ ID NO: 5565154 - DNA, 25 bp, Homo sapien
gaaaaatgactagcctgccagaggg

SEQ ID NO: 5565155 - DNA, 25 bp, Homo sapien
agcccactcaacaagcagacacggt

SEQ ID NO: 5565156 - DNA, 25 bp, Homo sapien
gctcattaggagcttgcttactggc

SEQ ID NO: 5565157 - DNA, 25 bp, Homo sapien
gataacaccacaaagaaacttgctc

SEQ ID NO: 5565158 - DNA, 25 bp, Homo sapien
gcttgcttactggctagaaaggaaa

SEQ ID NO: 5565159 - DNA, 25 bp, Homo sapien
ttactctgggctggcctgatgaaag

SEQ ID NO: 5565160 - DNA, 25 bp, Homo sapien
atgaaaggatacagagataacacca

SEQ ID NO: 5565161 - DNA, 25 bp, Homo sapien
gaactgggctgggttaccataattc

SEQ ID NO: 5565162 - DNA, 25 bp, Homo sapien
ttaaatctggacaaaaaacacataa

SEQ ID NO: 5565163 - DNA, 25 bp, Homo sapien
tactaataagtaaagaacatctcag

SEQ ID NO: 5565164 - DNA, 25 bp, Homo sapien
cattaaaatggactctagaagggct

SEQ ID NO: 5565165 - DNA, 25 bp, Homo sapien
agtcagcataaagttaaatctggac

SEQ ID NO: 5565166 - DNA, 25 bp, Homo sapien
aaaagcaagatgtagaatgatgaat

SEQ ID NO: 5565167 - DNA, 25 bp, Homo sapien
ggcccagacagccccagctagttct

SEQ ID NO: 5565168 - DNA, 25 bp, Homo sapien
gggctcgaggacctaacttgcctga

SEQ ID NO: 5565169 - DNA, 25 bp, Homo sapien
aggaaaagaccttctgataatccct

SEQ ID NO: 5565170 - DNA, 25 bp, Homo sapien
tggacactgagaaggctttgacaaa

SEQ ID NO: 5565171 - DNA, 25 bp, Homo sapien
agatgattgtagaatatagaggttt

SEQ ID NO: 5565172 - DNA, 25 bp, Homo sapien
atactactagagcaaaggaaaagac

SEQ ID NO: 5565173 - DNA, 25 bp, Homo sapien
tcctatttcaagagcacacaaagta

SEQ ID NO: 5565174 - DNA, 25 bp, Homo sapien
ctggcaatagggatctgtacatttc

SEQ ID NO: 5565175 - DNA, 25 bp, Homo sapien
gtgccatcatggctacaaatggtta

SEQ ID NO: 5565176 - DNA, 25 bp, Homo sapien
ttgccacataggaagttcttcatgc

SEQ ID NO: 5565177 - DNA, 25 bp, Homo sapien
tgtctggcaatagggatctgtacat

SEQ ID NO: 5565178 - DNA, 25 bp, Homo sapien
aaatagtaatcaaatcattgcaaat

SEQ ID NO: 5565179 - DNA, 25 bp, Homo sapien
tgtctagagctagaatataaaatag

SEQ ID NO: 5565180 - DNA, 25 bp, Homo sapien
gctggcagcaatagttacataaatt

SEQ ID NO: 5565181 - DNA, 25 bp, Homo sapien
gtgtcttcataaccataatgggatt

SEQ ID NO: 5565182 - DNA, 25 bp, Homo sapien
aagaatatagattctaggccgggca

SEQ ID NO: 5565183 - DNA, 25 bp, Homo sapien
gtcaactatgacaaaccttctatgt

SEQ ID NO: 5565184 - DNA, 25 bp, Homo sapien
cccaaaccatcccaagaggtcaata

SEQ ID NO: 5565185 - DNA, 25 bp, Homo sapien
tttgaatcttgacgagcactaatat

SEQ ID NO: 5565186 - DNA, 25 bp, Homo sapien
tctgctacccaagacctgttgaatt

SEQ ID NO: 5565187 - DNA, 25 bp, Homo sapien
gggtaggatgaatcactccagaacc

SEQ ID NO: 5565188 - DNA, 25 bp, Homo sapien
caatatatgtggtgaggaattattc

SEQ ID NO: 5565189 - DNA, 25 bp, Homo sapien
ccactgagataccatgaccatgcac

SEQ ID NO: 5565190 - DNA, 25 bp, Homo sapien
caacaggcacctattatcagaaacc

SEQ ID NO: 5565191 - DNA, 25 bp, Homo sapien
attcaatgcctgttgaggagacttc

SEQ ID NO: 5565192 - DNA, 25 bp, Homo sapien
ttgttgcataaaggtcattccatcc

SEQ ID NO: 5565193 - DNA, 25 bp, Homo sapien
gccctggagcatgcctatgacattc

SEQ ID NO: 5565194 - DNA, 25 bp, Homo sapien
atttatgtatgagggtaggatgaat

SEQ ID NO: 5565195 - DNA, 25 bp, Homo sapien
gctactctggttggaagacagcttt

SEQ ID NO: 5565196 - DNA, 25 bp, Homo sapien
gtgctggtagagaagactctctccg

SEQ ID NO: 5565197 - DNA, 25 bp, Homo sapien
aatgaagcactatgaaagcatttca

SEQ ID NO: 5565198 - DNA, 25 bp, Homo sapien
aggcagggatccaaacctcccgcta

SEQ ID NO: 5565199 - DNA, 25 bp, Homo sapien
atgagctccatatgacagttgagtt

SEQ ID NO: 5565200 - DNA, 25 bp, Homo sapien
aacagttccatttgcgctacagtct

SEQ ID NO: 5565201 - DNA, 25 bp, Homo sapien
tccgtagtctccaatgccacagcac

SEQ ID NO: 5565202 - DNA, 25 bp, Homo sapien
gctgcaagctcccagagatgtatcc

SEQ ID NO: 5565203 - DNA, 25 bp, Homo sapien
ggctgagatcatgcagtgctggtag

SEQ ID NO: 5565204 - DNA, 25 bp, Homo sapien
tccacagcatatgaaaataaggcag

SEQ ID NO: 5565205 - DNA, 25 bp, Homo sapien
ttgaatgttcaacaggctaggggaa

SEQ ID NO: 5565206 - DNA, 25 bp, Homo sapien
gagcccagagttcaaggttacagtg

SEQ ID NO: 5565207 - DNA, 25 bp, Homo sapien
gggagaagtatacagtgacagtgta

SEQ ID NO: 5565208 - DNA, 25 bp, Homo sapien
ggcaggtcacttgagcccagagttc

SEQ ID NO: 5565209 - DNA, 25 bp, Homo sapien
gcatagtggcacacacctgtagtcc

SEQ ID NO: 5565210 - DNA, 25 bp, Homo sapien
gctggaacattgtctgataatctgt

SEQ ID NO: 5565211 - DNA, 25 bp, Homo sapien
ttaaaattagctgggcatagtggca

SEQ ID NO: 5565212 - DNA, 25 bp, Homo sapien
aattagtacatttgctggaacattg

SEQ ID NO: 5565213 - DNA, 25 bp, Homo sapien
caacatagcaagacctctactctac

SEQ ID NO: 5565214 - DNA, 25 bp, Homo sapien
atacagtgacagtgtaaattagtac

SEQ ID NO: 5565215 - DNA, 25 bp, Homo sapien
ggttacagtgagctatgatcaggcc

SEQ ID NO: 5565216 - DNA, 25 bp, Homo sapien
tagcttacttaggcagctgaggcag

SEQ ID NO: 5565217 - DNA, 25 bp, Homo sapien
tttgctgtgcctgccctgggttatt

SEQ ID NO: 5565218 - DNA, 25 bp, Homo sapien
tggatctgacaactctgaagctggc

SEQ ID NO: 5565219 - DNA, 25 bp, Homo sapien
ttttggacatggtgatgctgactca

SEQ ID NO: 5565220 - DNA, 25 bp, Homo sapien
ttcataagatgtctggaggagagac

SEQ ID NO: 5565221 - DNA, 25 bp, Homo sapien
gagaaactctcccgtggtggtcgaa

SEQ ID NO: 5565222 - DNA, 25 bp, Homo sapien
ctgttgggttttggccactcgtgga

SEQ ID NO: 5565223 - DNA, 25 bp, Homo sapien
tggtcgaagtcttccgcagagctgc

SEQ ID NO: 5565224 - DNA, 25 bp, Homo sapien
cactagtgtcttctggctgggtctg

SEQ ID NO: 5565225 - DNA, 25 bp, Homo sapien
tctgaagctggcaaaaccctgacag

SEQ ID NO: 5565226 - DNA, 25 bp, Homo sapien
gatgaggtttttgctggccactagt

SEQ ID NO: 5565227 - DNA, 25 bp, Homo sapien
ttgtggctaagccggtttgctgtgc

SEQ ID NO: 5565228 - DNA, 25 bp, Homo sapien
gttacaggattgatactgctagatc

SEQ ID NO: 5565229 - DNA, 25 bp, Homo sapien
gaaagatggacaaattagagcacat

SEQ ID NO: 5565230 - DNA, 25 bp, Homo sapien
attttgcaaatgggagatagtagaa

SEQ ID NO: 5565231 - DNA, 25 bp, Homo sapien
taagtgaaatagtacagatatgatc

SEQ ID NO: 5565232 - DNA, 25 bp, Homo sapien
gggagatagtagaaatagctagtcc

SEQ ID NO: 5565233 - DNA, 25 bp, Homo sapien
aacaaagaagagaagtattagtttc

SEQ ID NO: 5565234 - DNA, 25 bp, Homo sapien
cagatatgatcaaagggaaagatgg

SEQ ID NO: 5565235 - DNA, 25 bp, Homo sapien
agctgaggggatccttagcaattct

SEQ ID NO: 5565236 - DNA, 25 bp, Homo sapien
tcttgtaagtggattctgaatgggg

SEQ ID NO: 5565237 - DNA, 25 bp, Homo sapien
tatagaactgtaaattagggctttc

SEQ ID NO: 5565238 - DNA, 25 bp, Homo sapien
caattctagctactcccctgggacc

SEQ ID NO: 5565239 - DNA, 25 bp, Homo sapien
cagctgagaatcactctgtgccatg

SEQ ID NO: 5565240 - DNA, 25 bp, Homo sapien
gagccctgaaagctgcaggtttgtg

SEQ ID NO: 5565241 - DNA, 25 bp, Homo sapien
tgcaggtttgtgtccaagctggata

SEQ ID NO: 5565242 - DNA, 25 bp, Homo sapien
gaccccgcaaggctctggccatttc

SEQ ID NO: 5565243 - DNA, 25 bp, Homo sapien
gctgccacatgctgatccagggagc

SEQ ID NO: 5565244 - DNA, 25 bp, Homo sapien
tctcccacctggttggtcagcagct

SEQ ID NO: 5565245 - DNA, 25 bp, Homo sapien
acagtggccacgaccgctgccacat

SEQ ID NO: 5565246 - DNA, 25 bp, Homo sapien
tctctcagcgatctgtcaggacgga

SEQ ID NO: 5565247 - DNA, 25 bp, Homo sapien
agctggatatctgcacagtggccac

SEQ ID NO: 5565248 - DNA, 25 bp, Homo sapien
tgggcagggtcatcccctcagtcac

SEQ ID NO: 5565249 - DNA, 25 bp, Homo sapien
tctggccatttcactggctgcctcc

SEQ ID NO: 5565250 - DNA, 25 bp, Homo sapien
ctttcttgggtcttcagggctttgg

SEQ ID NO: 5565251 - DNA, 25 bp, Homo sapien
attctgacctaacatctgctgggct

SEQ ID NO: 5565252 - DNA, 25 bp, Homo sapien
cctggtatcagggtcactccacttg

SEQ ID NO: 5565253 - DNA, 25 bp, Homo sapien
gtcttgcaggatctgggcttgattt

SEQ ID NO: 5565254 - DNA, 25 bp, Homo sapien
tcaaatgtattgggtatcctgtatt

SEQ ID NO: 5565255 - DNA, 25 bp, Homo sapien
ccctgctggctgtaaacctttagtc

SEQ ID NO: 5565256 - DNA, 25 bp, Homo sapien
tcccagtgtctgcctcacaagaaga

SEQ ID NO: 5565257 - DNA, 25 bp, Homo sapien
tcctgtatttcctctgggaaccctc

SEQ ID NO: 5565258 - DNA, 25 bp, Homo sapien
gaggggacgcattctgacctaacat

SEQ ID NO: 5565259 - DNA, 25 bp, Homo sapien
tggggagccataatgtcttgcagga

SEQ ID NO: 5565260 - DNA, 25 bp, Homo sapien
tcctccccagctacaggggactggg

SEQ ID NO: 5565261 - DNA, 25 bp, Homo sapien
tgtaccaccttattcagggtcgaca

SEQ ID NO: 5565262 - DNA, 25 bp, Homo sapien
aaaggcttccttgtgtgacgataat

SEQ ID NO: 5565263 - DNA, 25 bp, Homo sapien
aggtagtcggtcctataaaggcttc

SEQ ID NO: 5565264 - DNA, 25 bp, Homo sapien
ctgcttagacacatacgttctgttc

SEQ ID NO: 5565265 - DNA, 25 bp, Homo sapien
tcagggtcgacaattaattagaaga

SEQ ID NO: 5565266 - DNA, 25 bp, Homo sapien
ttgactgcaattaggtagtcggtcc

SEQ ID NO: 5565267 - DNA, 25 bp, Homo sapien
aagacaaaaagtataaattcgcgtg

SEQ ID NO: 5565268 - DNA, 25 bp, Homo sapien
taaagaaattccaatccctcatgtt

SEQ ID NO: 5565269 - DNA, 25 bp, Homo sapien
ttcgcgtgtttattaagtagcaaaa

SEQ ID NO: 5565270 - DNA, 25 bp, Homo sapien
tacatgaaggatataacttaaaaca

SEQ ID NO: 5565271 - DNA, 25 bp, Homo sapien
taatatgccttagttgtaccacctt

SEQ ID NO: 5565272 - DNA, 25 bp, Homo sapien
taagagagagacattacactatgta

SEQ ID NO: 5565273 - DNA, 25 bp, Homo sapien
ccccaagcaatgtagaaattggaac

SEQ ID NO: 5565274 - DNA, 25 bp, Homo sapien
gtagaaattggaacaaagatacacc

SEQ ID NO: 5565275 - DNA, 25 bp, Homo sapien
agatacaccaaagccctgttaggac

SEQ ID NO: 5565276 - DNA, 25 bp, Homo sapien
ctggacagtgacattgcaaaactaa

SEQ ID NO: 5565277 - DNA, 25 bp, Homo sapien
cgaataattctatctggacagtgac

SEQ ID NO: 5565278 - DNA, 25 bp, Homo sapien
tagcaactaatggttgaggtgtcta

SEQ ID NO: 5565279 - DNA, 25 bp, Homo sapien
tgaggcacattttggggcaaaggta

SEQ ID NO: 5565280 - DNA, 25 bp, Homo sapien
gtacaatgctgtaagagagagacat

SEQ ID NO: 5565281 - DNA, 25 bp, Homo sapien
aggtagagaaaatgtagtatttgga

SEQ ID NO: 5565282 - DNA, 25 bp, Homo sapien
atgtaagtgtgactagataaaagta

SEQ ID NO: 5565283 - DNA, 25 bp, Homo sapien
tgcatttcatttggtggttatcttc

SEQ ID NO: 5565284 - DNA, 25 bp, Homo sapien
cccagtatgggttatatgcctcttt

SEQ ID NO: 5565285 - DNA, 25 bp, Homo sapien
ttttcaacaacatgggtttatacac

SEQ ID NO: 5565286 - DNA, 25 bp, Homo sapien
gactcagttctggaatgatattccc

SEQ ID NO: 5565287 - DNA, 25 bp, Homo sapien
tgaagactttttactctccaggccc

SEQ ID NO: 5565288 - DNA, 25 bp, Homo sapien
caggccctactgtctggctcatagt

SEQ ID NO: 5565289 - DNA, 25 bp, Homo sapien
ccactgtcatggtatcattacacta

SEQ ID NO: 5565290 - DNA, 25 bp, Homo sapien
gaatgatattccctgggaagccctc

SEQ ID NO: 5565291 - DNA, 25 bp, Homo sapien
tacacccaaaatacataacactgac

SEQ ID NO: 5565292 - DNA, 25 bp, Homo sapien
gtctctcacaataaacagtaatctc

SEQ ID NO: 5565293 - DNA, 25 bp, Homo sapien
gaagccctctgtgactccccctacc

SEQ ID NO: 5565294 - DNA, 25 bp, Homo sapien
gtcaggttaccattgctaaggcaac

SEQ ID NO: 5565295 - DNA, 25 bp, Homo sapien
ctcaccagtgccacgtcaggttacc

SEQ ID NO: 5565296 - DNA, 25 bp, Homo sapien
cagtactgcttccgagctgctactc

SEQ ID NO: 5565297 - DNA, 25 bp, Homo sapien
gaagaggtgaaagagtctctccata

SEQ ID NO: 5565298 - DNA, 25 bp, Homo sapien
aagatgatagcacattttgagattc

SEQ ID NO: 5565299 - DNA, 25 bp, Homo sapien
tttttattactgaggtaggaggcag

SEQ ID NO: 5565300 - DNA, 25 bp, Homo sapien
tttccatagcaacaatcccacgacc

SEQ ID NO: 5565301 - DNA, 25 bp, Homo sapien
aagtgggtattaatgtgattgcagt

SEQ ID NO: 5565302 - DNA, 25 bp, Homo sapien
ttgagattcagattggtaatgtatc

SEQ ID NO: 5565303 - DNA, 25 bp, Homo sapien
tctgggcacactgcctattgggagc

SEQ ID NO: 5565304 - DNA, 25 bp, Homo sapien
attgctaaggcaacagctggaagtt

SEQ ID NO: 5565305 - DNA, 25 bp, Homo sapien
ccacactctcagtttgtggtccccg

SEQ ID NO: 5565306 - DNA, 25 bp, Homo sapien
cggggaccacaaactgagagtgtgg

SEQ ID NO: 5565307 - DNA, 25 bp, Homo sapien
atttgtcattatgctaagactcctc

SEQ ID NO: 5565308 - DNA, 25 bp, Homo sapien
acaatgagattattagcaaagatgt

SEQ ID NO: 5565309 - DNA, 25 bp, Homo sapien
atatttaggtagagaaaaggataat

SEQ ID NO: 5565310 - DNA, 25 bp, Homo sapien
tgttagtgtggatccagcaagtacc

SEQ ID NO: 5565311 - DNA, 25 bp, Homo sapien
ataattctggtgggaagtattgttt

SEQ ID NO: 5565312 - DNA, 25 bp, Homo sapien
ttagcaaagatgttagtgtggatcc

SEQ ID NO: 5565313 - DNA, 25 bp, Homo sapien
aggatatataattctggtgggaagt

SEQ ID NO: 5565314 - DNA, 25 bp, Homo sapien
aatcagttggaagaaacaatgagat

SEQ ID NO: 5565315 - DNA, 25 bp, Homo sapien
gatgtgggatatagtgttaggaatc

SEQ ID NO: 5565316 - DNA, 25 bp, Homo sapien
gtgttaggaatcagttggaagaaac

SEQ ID NO: 5565317 - DNA, 25 bp, Homo sapien
agttagatactgccacggcattttg

SEQ ID NO: 5565318 - DNA, 25 bp, Homo sapien
tcctccaagagatctgtgggagggc

SEQ ID NO: 5565319 - DNA, 25 bp, Homo sapien
ggggcaatgccctgagtccttgctt

SEQ ID NO: 5565320 - DNA, 25 bp, Homo sapien
acacagaacaagtattggcagttgc

SEQ ID NO: 5565321 - DNA, 25 bp, Homo sapien
agttaagaggaaagcacatgtattt

SEQ ID NO: 5565322 - DNA, 25 bp, Homo sapien
gaagctaaggtgctatgaaggtttc

SEQ ID NO: 5565323 - DNA, 25 bp, Homo sapien
gatccatggcaatggtagcacctac

SEQ ID NO: 5565324 - DNA, 25 bp, Homo sapien
gagcttggatctgtgcgtccccact

SEQ ID NO: 5565325 - DNA, 25 bp, Homo sapien
atcaaatccagtgctgggcgctgag

SEQ ID NO: 5565326 - DNA, 25 bp, Homo sapien
tgagctgttcagcaaaaacagggcc

SEQ ID NO: 5565327 - DNA, 25 bp, Homo sapien
gtgggagggcccaactcccttgaga

SEQ ID NO: 5565328 - DNA, 25 bp, Homo sapien
agcacctaccgcataggatggctgc

SEQ ID NO: 5565329 - DNA, 25 bp, Homo sapien
ctttgaccttctggtgaagacagcc

SEQ ID NO: 5565330 - DNA, 25 bp, Homo sapien
tatagcaaatgtcaagtaaacactc

SEQ ID NO: 5565331 - DNA, 25 bp, Homo sapien
ttagagtactcaaacacggctttta

SEQ ID NO: 5565332 - DNA, 25 bp, Homo sapien
ggctgcaaggctttgaccttctggt

SEQ ID NO: 5565333 - DNA, 25 bp, Homo sapien
attacttgatcaaacaaatgggcat

SEQ ID NO: 5565334 - DNA, 25 bp, Homo sapien
tggtcaaagaatctgtttcagtatt

SEQ ID NO: 5565335 - DNA, 25 bp, Homo sapien
tctgctaccacactagaagattact

SEQ ID NO: 5565336 - DNA, 25 bp, Homo sapien
tggtgccaattcctatagtaatagc

SEQ ID NO: 5565337 - DNA, 25 bp, Homo sapien
cccaggaagttgtctgtactttgct

SEQ ID NO: 5565338 - DNA, 25 bp, Homo sapien
tcctacactggcattctctgtggtc

SEQ ID NO: 5565339 - DNA, 25 bp, Homo sapien
taaagcaccctaagcaattatttgc

SEQ ID NO: 5565340 - DNA, 25 bp, Homo sapien
agcgagagaatgagataatctgttt

SEQ ID NO: 5565341 - DNA, 25 bp, Homo sapien
gaaaagaaactattggtacacagtg

SEQ ID NO: 5565342 - DNA, 25 bp, Homo sapien
ggcctgtatgtgtgcaagagacagc

SEQ ID NO: 5565343 - DNA, 25 bp, Homo sapien
tggcctgctctggcacctgtgcgag

SEQ ID NO: 5565344 - DNA, 25 bp, Homo sapien
ggaaacgacccaagtgcccatcaat

SEQ ID NO: 5565345 - DNA, 25 bp, Homo sapien
ggtacacagtgacatggatgagtcc

SEQ ID NO: 5565346 - DNA, 25 bp, Homo sapien
ggaatctacccagcaataagaaaag

SEQ ID NO: 5565347 - DNA, 25 bp, Homo sapien
aatggtagaacggttaaactgtagc

SEQ ID NO: 5565348 - DNA, 25 bp, Homo sapien
tattatgttgcatgaaagaagccag

SEQ ID NO: 5565349 - DNA, 25 bp, Homo sapien
aagagggtatcgctgctcccaccct

SEQ ID NO: 5565350 - DNA, 25 bp, Homo sapien
atggttccaacctggaaacgaccca

SEQ ID NO: 5565351 - DNA, 25 bp, Homo sapien
tgctgctcagccaccggcgcattca

SEQ ID NO: 5565352 - DNA, 25 bp, Homo sapien
tgctcagccaccggcgcattcacac

SEQ ID NO: 5565353 - DNA, 25 bp, Homo sapien
ttcttggccttctgtgaatcccttc

SEQ ID NO: 5565354 - DNA, 25 bp, Homo sapien
gggagaccctttggctgtggttcca

SEQ ID NO: 5565355 - DNA, 25 bp, Homo sapien
cttccacagctaaagggtccgagtg

SEQ ID NO: 5565356 - DNA, 25 bp, Homo sapien
agcgccctgccctcttgcaccacca

SEQ ID NO: 5565357 - DNA, 25 bp, Homo sapien
gaatcccttccacagctaaagggtc

SEQ ID NO: 5565358 - DNA, 25 bp, Homo sapien
tcttcagatccacgatggggaaaag

SEQ ID NO: 5565359 - DNA, 25 bp, Homo sapien
gggtccgagtgctcttcagatccac

SEQ ID NO: 5565360 - DNA, 25 bp, Homo sapien
acaggtcgcagcccaaccctttctt

SEQ ID NO: 5565361 - DNA, 25 bp, Homo sapien
gagaagcccttcgtgtgcacgcagt

SEQ ID NO: 5565362 - DNA, 25 bp, Homo sapien
gtggctcaatttgtctcccggttac

SEQ ID NO: 5565363 - DNA, 25 bp, Homo sapien
ttaaaatatggtaacaagtgtctga

SEQ ID NO: 5565364 - DNA, 25 bp, Homo sapien
gaaaaagaagtggtgataaatagcc

SEQ ID NO: 5565365 - DNA, 25 bp, Homo sapien
ctttaaaatgtagaggaaggagaag

SEQ ID NO: 5565366 - DNA, 25 bp, Homo sapien
agaagcttagaacagtacatggtgc

SEQ ID NO: 5565367 - DNA, 25 bp, Homo sapien
aatagccagtccgtgtgcctggaat

SEQ ID NO: 5565368 - DNA, 25 bp, Homo sapien
tgtctgaaaatatgtggctcaattt

SEQ ID NO: 5565369 - DNA, 25 bp, Homo sapien
acatggtgcatagcaaagactctgt

SEQ ID NO: 5565370 - DNA, 25 bp, Homo sapien
ggcacaggaatcttagtggggaaaa

SEQ ID NO: 5565371 - DNA, 25 bp, Homo sapien
gactaacgccatagggatctccctc

SEQ ID NO: 5565372 - DNA, 25 bp, Homo sapien
actgcaaatgcattgttgtcctagc

SEQ ID NO: 5565373 - DNA, 25 bp, Homo sapien
gctctgagttataaacagaatgaac

SEQ ID NO: 5565374 - DNA, 25 bp, Homo sapien
acaagtattttagcctcagcagaaa

SEQ ID NO: 5565375 - DNA, 25 bp, Homo sapien
agcagaaaaaacaaatgctctgagt

SEQ ID NO: 5565376 - DNA, 25 bp, Homo sapien
ccagccttattttagagactgggtc

SEQ ID NO: 5565377 - DNA, 25 bp, Homo sapien
cctatccatgaaggagacagctcag

SEQ ID NO: 5565378 - DNA, 25 bp, Homo sapien
cagacgactaaagcctacagcattt

SEQ ID NO: 5565379 - DNA, 25 bp, Homo sapien
ttaaggaaaaatatggcctcgtctc

SEQ ID NO: 5565380 - DNA, 25 bp, Homo sapien
ttgaaaaacgcttgtgaaatttaga

SEQ ID NO: 5565381 - DNA, 25 bp, Homo sapien
acagcattttgacggctgcaggcgc

SEQ ID NO: 5565382 - DNA, 25 bp, Homo sapien
tggtaagagaagacagctcgttttc

SEQ ID NO: 5565383 - DNA, 25 bp, Homo sapien
aactggcagacgactaaagcctaca

SEQ ID NO: 5565384 - DNA, 25 bp, Homo sapien
ttctcattgccaagcccagggcgga

SEQ ID NO: 5565385 - DNA, 25 bp, Homo sapien
ccctccggtccagcccaggctggga

SEQ ID NO: 5565386 - DNA, 25 bp, Homo sapien
tagtccattatatagacagagaaac

SEQ ID NO: 5565387 - DNA, 25 bp, Homo sapien
ttatatagacagagaaactgaggct

SEQ ID NO: 5565388 - DNA, 25 bp, Homo sapien
gccctggcagacagcctagtccatt

SEQ ID NO: 5565389 - DNA, 25 bp, Homo sapien
atagacagagaaactgaggctcttg

SEQ ID NO: 5565390 - DNA, 25 bp, Homo sapien
cgagttcacctccgaagggaaacca

SEQ ID NO: 5565391 - DNA, 25 bp, Homo sapien
aggcctgccctggccacctgagact

SEQ ID NO: 5565392 - DNA, 25 bp, Homo sapien
ggcggggctgcttctcattgccaag

SEQ ID NO: 5565393 - DNA, 25 bp, Homo sapien
gcttctcattgccaagcccagggcg

SEQ ID NO: 5565394 - DNA, 25 bp, Homo sapien
tccattatatagacagagaaactga

SEQ ID NO: 5565395 - DNA, 25 bp, Homo sapien
gtgtacattgaactttataggaaac

SEQ ID NO: 5565396 - DNA, 25 bp, Homo sapien
cccccaaatctccttagtgccacac

SEQ ID NO: 5565397 - DNA, 25 bp, Homo sapien
tataccacagtttaccagttcaccc

SEQ ID NO: 5565398 - DNA, 25 bp, Homo sapien
cacagaatggctccacccccaaatc

SEQ ID NO: 5565399 - DNA, 25 bp, Homo sapien
gattatgaataaggcatcagtaaac

SEQ ID NO: 5565400 - DNA, 25 bp, Homo sapien
taacacatgtacagtcacgcgacca

SEQ ID NO: 5565401 - DNA, 25 bp, Homo sapien
atggtgcccaatgtgtcagtctctc

SEQ ID NO: 5565402 - DNA, 25 bp, Homo sapien
accagttcacccaatgaaaggcatt

SEQ ID NO: 5565403 - DNA, 25 bp, Homo sapien
ccccattgtcactgcagaggagtat

SEQ ID NO: 5565404 - DNA, 25 bp, Homo sapien
tccttagtgccacacctgaccacgg

SEQ ID NO: 5565405 - DNA, 25 bp, Homo sapien
tgtcactgcagaggagtatttcact

SEQ ID NO: 5565406 - DNA, 25 bp, Homo sapien
ccagggttctgagcaccccactccg

SEQ ID NO: 5565407 - DNA, 25 bp, Homo sapien
cccaccacagcctggtgatgggaga

SEQ ID NO: 5565408 - DNA, 25 bp, Homo sapien
gttgtgtaccacagcctccccacac

SEQ ID NO: 5565409 - DNA, 25 bp, Homo sapien
aggaatcttttggtctactcggagc

SEQ ID NO: 5565410 - DNA, 25 bp, Homo sapien
tctgtgatatgcctgcagccaacgg

SEQ ID NO: 5565411 - DNA, 25 bp, Homo sapien
cctgggcagcatcccctatctgtga

SEQ ID NO: 5565412 - DNA, 25 bp, Homo sapien
gaatcgccgttgcctgcctgctctt

SEQ ID NO: 5565413 - DNA, 25 bp, Homo sapien
agtcccacagtggaccaaggacaag

SEQ ID NO: 5565414 - DNA, 25 bp, Homo sapien
gtgatatgcctgcagccaacggctg

SEQ ID NO: 5565415 - DNA, 25 bp, Homo sapien
gttctgagcaccccactccggggcc

SEQ ID NO: 5565416 - DNA, 25 bp, Homo sapien
gtgggcaggaatcttttggtctact

SEQ ID NO: 5565417 - DNA, 25 bp, Homo sapien
aaaaggaaaataatcttagcctaca

SEQ ID NO: 5565418 - DNA, 25 bp, Homo sapien
tacaacaaaagacttagtagcacag

SEQ ID NO: 5565419 - DNA, 25 bp, Homo sapien
accactcagctattcccctagggac

SEQ ID NO: 5565420 - DNA, 25 bp, Homo sapien
ctaaaagatcacaacccctcctacc

SEQ ID NO: 5565421 - DNA, 25 bp, Homo sapien
cttagtagcacagaagttccaggga

SEQ ID NO: 5565422 - DNA, 25 bp, Homo sapien
tagggactaggcagcctgccacata

SEQ ID NO: 5565423 - DNA, 25 bp, Homo sapien
aaatttgggaatgtctcagaagaga

SEQ ID NO: 5565424 - DNA, 25 bp, Homo sapien
tggtttcagtacagctggtacccac

SEQ ID NO: 5565425 - DNA, 25 bp, Homo sapien
aatacatggctaaaattatggtttc

SEQ ID NO: 5565426 - DNA, 25 bp, Homo sapien
aacagtcaataattaaggcagaaat

SEQ ID NO: 5565427 - DNA, 25 bp, Homo sapien
tcagaagagagatttcacaacagtc

SEQ ID NO: 5565428 - DNA, 25 bp, Homo sapien
ctatagttgagtgtaaaactcccct

SEQ ID NO: 5565429 - DNA, 25 bp, Homo sapien
ggccaaagatctgcagagaaatgtg

SEQ ID NO: 5565430 - DNA, 25 bp, Homo sapien
tgattaggttttaaagcaactgatc

SEQ ID NO: 5565431 - DNA, 25 bp, Homo sapien
cagggttgtttctcgagaacactca

SEQ ID NO: 5565432 - DNA, 25 bp, Homo sapien
cttcccacccaagcacctctgaact

SEQ ID NO: 5565433 - DNA, 25 bp, Homo sapien
ataaacagttaaaattctcagaaaa

SEQ ID NO: 5565434 - DNA, 25 bp, Homo sapien
atcagtcttctagggccacacggag

SEQ ID NO: 5565435 - DNA, 25 bp, Homo sapien
cagaaaaatcatctatagttgagtg

SEQ ID NO: 5565436 - DNA, 25 bp, Homo sapien
caattcactactgcacgaagagggc

SEQ ID NO: 5565437 - DNA, 25 bp, Homo sapien
ggagcagaagcagcttcccacccaa

SEQ ID NO: 5565438 - DNA, 25 bp, Homo sapien
gagaaatgtgaagcaagtgttttgc

SEQ ID NO: 5565439 - DNA, 25 bp, Homo sapien
ataaaggtgatgaacttgatacagt

SEQ ID NO: 5565440 - DNA, 25 bp, Homo sapien
atgaatctaaagaagttcacggcac

SEQ ID NO: 5565441 - DNA, 25 bp, Homo sapien
tttgcccaacctgatctcaatctcc

SEQ ID NO: 5565442 - DNA, 25 bp, Homo sapien
atctaaagaagttcacggcacaggt

SEQ ID NO: 5565443 - DNA, 25 bp, Homo sapien
tgatgtgaccacaacacaaagaaac

SEQ ID NO: 5565444 - DNA, 25 bp, Homo sapien
ggtcaaattgataaaggtgatgaac

SEQ ID NO: 5565445 - DNA, 25 bp, Homo sapien
gtgtaaaagccacatgatgtgacca

SEQ ID NO: 5565446 - DNA, 25 bp, Homo sapien
caccaatgcccaggctaatattgat

SEQ ID NO: 5565447 - DNA, 25 bp, Homo sapien
caagccttgcttaaattagtattct

SEQ ID NO: 5565448 - DNA, 25 bp, Homo sapien
atcttgcacgactacaaaaaaaagt

SEQ ID NO: 5565449 - DNA, 25 bp, Homo sapien
agttcacggcacaggtcaaattgat

SEQ ID NO: 5565450 - DNA, 25 bp, Homo sapien
gaaagggacctttaagttcatcatg

SEQ ID NO: 5565451 - DNA, 25 bp, Homo sapien
agtagaagtcatatagcaatgtttt

SEQ ID NO: 5565452 - DNA, 25 bp, Homo sapien
acgtgagcaaatgagctccaggaga

SEQ ID NO: 5565453 - DNA, 25 bp, Homo sapien
atatctggatggcccagaacacttt

SEQ ID NO: 5565454 - DNA, 25 bp, Homo sapien
aaccaaagtgaatctgaatgtgtct

SEQ ID NO: 5565455 - DNA, 25 bp, Homo sapien
gccattcccagcatggtgaattctc

SEQ ID NO: 5565456 - DNA, 25 bp, Homo sapien
gccccctcatggtcgattcagagcc

SEQ ID NO: 5565457 - DNA, 25 bp, Homo sapien
agagaagattaaggaatattgcttt

SEQ ID NO: 5565458 - DNA, 25 bp, Homo sapien
ggtgaattctcctccagtagaagtc

SEQ ID NO: 5565459 - DNA, 25 bp, Homo sapien
taacttttacgtgagcaaatgagct

SEQ ID NO: 5565460 - DNA, 25 bp, Homo sapien
tccactgcaacctgctgccattccc

SEQ ID NO: 5565461 - DNA, 25 bp, Homo sapien
catatgcaggaatacatgactatac

SEQ ID NO: 5565462 - DNA, 25 bp, Homo sapien
gaatgcaaaaaaggtagcaaacagg

SEQ ID NO: 5565463 - DNA, 25 bp, Homo sapien
ttagcccagtgtctgtaaaattcac

SEQ ID NO: 5565464 - DNA, 25 bp, Homo sapien
aaaacaggcccagtatacaagttcc

SEQ ID NO: 5565465 - DNA, 25 bp, Homo sapien
ggaattaggaccatatgatgacatt

SEQ ID NO: 5565466 - DNA, 25 bp, Homo sapien
aaagttgtaaacagggtcttgtctg

SEQ ID NO: 5565467 - DNA, 25 bp, Homo sapien
gttgttggtgacatggaattaggac

SEQ ID NO: 5565468 - DNA, 25 bp, Homo sapien
cagaaatacatctatggccatacac

SEQ ID NO: 5565469 - DNA, 25 bp, Homo sapien
tgtgtgtccatgtgtctgaataccc

SEQ ID NO: 5565470 - DNA, 25 bp, Homo sapien
tggccatacacatagctatagatat

SEQ ID NO: 5565471 - DNA, 25 bp, Homo sapien
cacatgggatagaatgcaaaaaagg

SEQ ID NO: 5565472 - DNA, 25 bp, Homo sapien
tccacatggtcttcacgaatgattt

SEQ ID NO: 5565473 - DNA, 25 bp, Homo sapien
agaggctcctaatccaagctggtct

SEQ ID NO: 5565474 - DNA, 25 bp, Homo sapien
tgctccaagtgtcattccataagat

SEQ ID NO: 5565475 - DNA, 25 bp, Homo sapien
tatggaatgcctcaattacacagaa

SEQ ID NO: 5565476 - DNA, 25 bp, Homo sapien
tttggacataaaaagtgatagttgt

SEQ ID NO: 5565477 - DNA, 25 bp, Homo sapien
aagaggggttttactcagaggtata

SEQ ID NO: 5565478 - DNA, 25 bp, Homo sapien
tctctggaaatagccaaatatgtcc

SEQ ID NO: 5565479 - DNA, 25 bp, Homo sapien
gtgatagttgtacccagaggctcct

SEQ ID NO: 5565480 - DNA, 25 bp, Homo sapien
tacccaagtgctttcctgaaggagc

SEQ ID NO: 5565481 - DNA, 25 bp, Homo sapien
tagttcttaaagcctccacatggtc

SEQ ID NO: 5565482 - DNA, 25 bp, Homo sapien
gaaggagcacgtgaaactcacatgg

SEQ ID NO: 5565483 - DNA, 25 bp, Homo sapien
aatgcctcataccctcagacgtccc

SEQ ID NO: 5565484 - DNA, 25 bp, Homo sapien
agtggtgagcaggtaaatttttaac

SEQ ID NO: 5565485 - DNA, 25 bp, Homo sapien
tagctaaaaagaaggttgagctgga

SEQ ID NO: 5565486 - DNA, 25 bp, Homo sapien
ggttcctgcatgtctataagctggc

SEQ ID NO: 5565487 - DNA, 25 bp, Homo sapien
agagaatcatgtgtaactggggtca

SEQ ID NO: 5565488 - DNA, 25 bp, Homo sapien
agacacacacccaagccaagagtgc

SEQ ID NO: 5565489 - DNA, 25 bp, Homo sapien
ggacagctgatgaaatgaaaagaca

SEQ ID NO: 5565490 - DNA, 25 bp, Homo sapien
gagtgcaaaaggatgtagtagcatg

SEQ ID NO: 5565491 - DNA, 25 bp, Homo sapien
ggttgagctggaacttaggatactt

SEQ ID NO: 5565492 - DNA, 25 bp, Homo sapien
agacgtcccaaatccagtggtgagc

SEQ ID NO: 5565493 - DNA, 25 bp, Homo sapien
aggtattaggctgatagagaatcat

SEQ ID NO: 5565494 - DNA, 25 bp, Homo sapien
caagttgaatagctgtgaccaagcc

SEQ ID NO: 5565495 - DNA, 25 bp, Homo sapien
aggctcaaatcaagaattggagtcc

SEQ ID NO: 5565496 - DNA, 25 bp, Homo sapien
aagaaagaattctccaaagatactg

SEQ ID NO: 5565497 - DNA, 25 bp, Homo sapien
actgagtttctttgggagtgaacaa

SEQ ID NO: 5565498 - DNA, 25 bp, Homo sapien
gatgtacagctatggcaagccacgg

SEQ ID NO: 5565499 - DNA, 25 bp, Homo sapien
gtgaccaagccagcatgacccacaa

SEQ ID NO: 5565500 - DNA, 25 bp, Homo sapien
gctgggccaaacgtcctttcgacag

SEQ ID NO: 5565501 - DNA, 25 bp, Homo sapien
caaagttgattggttcccaaggctc

SEQ ID NO: 5565502 - DNA, 25 bp, Homo sapien
gaagctaaaagacaacaaagaaaga

SEQ ID NO: 5565503 - DNA, 25 bp, Homo sapien
agccagcatgacccacaaaacctaa

SEQ ID NO: 5565504 - DNA, 25 bp, Homo sapien
attggagtccgttcattggtggagg

SEQ ID NO: 5565505 - DNA, 25 bp, Homo sapien
aaggactctattgggcatcgacccc

SEQ ID NO: 5565506 - DNA, 25 bp, Homo sapien
ccctacactgtgaataggcagctcc

SEQ ID NO: 5565507 - DNA, 25 bp, Homo sapien
gacacaggacacattgaatgccacc

SEQ ID NO: 5565508 - DNA, 25 bp, Homo sapien
ttgaggactgaataggtccagaggg

SEQ ID NO: 5565509 - DNA, 25 bp, Homo sapien
atgccagctttggcacagggtggtg

SEQ ID NO: 5565510 - DNA, 25 bp, Homo sapien
cagcccagcctttagcagggcaccc

SEQ ID NO: 5565511 - DNA, 25 bp, Homo sapien
cttaatcaaccccagggaggacaca

SEQ ID NO: 5565512 - DNA, 25 bp, Homo sapien
ctctcagatatacaacatgccagct

SEQ ID NO: 5565513 - DNA, 25 bp, Homo sapien
aacgccaagatgaaggactctattg

SEQ ID NO: 5565514 - DNA, 25 bp, Homo sapien
tctcagtgcccggtgtctgagtcag

SEQ ID NO: 5565515 - DNA, 25 bp, Homo sapien
tctgagtcagcatgccacttgccat

SEQ ID NO: 5565516 - DNA, 25 bp, Homo sapien
acagcacagactacccggaacaaag

SEQ ID NO: 5565517 - DNA, 25 bp, Homo sapien
accacagctgcagtaaccattgata

SEQ ID NO: 5565518 - DNA, 25 bp, Homo sapien
ggggcagcctataccatctagaaac

SEQ ID NO: 5565519 - DNA, 25 bp, Homo sapien
gcttgtaaggatttagaacagcaca

SEQ ID NO: 5565520 - DNA, 25 bp, Homo sapien
tgatggtgcgctttatgccctgttc

SEQ ID NO: 5565521 - DNA, 25 bp, Homo sapien
agccccacagtgatggtgcgcttta

SEQ ID NO: 5565522 - DNA, 25 bp, Homo sapien
tcctcacaccaaccagctagtcctt

SEQ ID NO: 5565523 - DNA, 25 bp, Homo sapien
taatgggccaggtcccagacattct

SEQ ID NO: 5565524 - DNA, 25 bp, Homo sapien
cccaatgtacgaaatctgaagtgct

SEQ ID NO: 5565525 - DNA, 25 bp, Homo sapien
tcaatcatgtaaagagccatgtggt

SEQ ID NO: 5565526 - DNA, 25 bp, Homo sapien
gcagatgggtctctcagattaaatg

SEQ ID NO: 5565527 - DNA, 25 bp, Homo sapien
gactcctcacccctggctgttcccc

SEQ ID NO: 5565528 - DNA, 25 bp, Homo sapien
agcacccatggcaaagatggatgct

SEQ ID NO: 5565529 - DNA, 25 bp, Homo sapien
agcgcatctcggaccacaggatgcc

SEQ ID NO: 5565530 - DNA, 25 bp, Homo sapien
cgggggactcctcacccctggctgt

SEQ ID NO: 5565531 - DNA, 25 bp, Homo sapien
gcacaagcacccatggcaaagatgg

SEQ ID NO: 5565532 - DNA, 25 bp, Homo sapien
actccctccaagccagaacacgggc

SEQ ID NO: 5565533 - DNA, 25 bp, Homo sapien
tggatgctcccggcataactgaggg

SEQ ID NO: 5565534 - DNA, 25 bp, Homo sapien
tgggaaaggtcacgctacctttggc

SEQ ID NO: 5565535 - DNA, 25 bp, Homo sapien
ggcacccagcccctggtatccggca

SEQ ID NO: 5565536 - DNA, 25 bp, Homo sapien
aggtcccgatccttcgaggtcaccg

SEQ ID NO: 5565537 - DNA, 25 bp, Homo sapien
cctggtatccggcatctgggaaagg

SEQ ID NO: 5565538 - DNA, 25 bp, Homo sapien
tagcagcattggcaaatggcctaac

SEQ ID NO: 5565539 - DNA, 25 bp, Homo sapien
atccaggagaaacatttgcacaagt

SEQ ID NO: 5565540 - DNA, 25 bp, Homo sapien
ttagctgcagttggtatgaagcctg

SEQ ID NO: 5565541 - DNA, 25 bp, Homo sapien
gaacagacagaaacagcccactctg

SEQ ID NO: 5565542 - DNA, 25 bp, Homo sapien
tgaagcctgcaacctgtgaggccat

SEQ ID NO: 5565543 - DNA, 25 bp, Homo sapien
tgagattgcatctgagaagggtgca

SEQ ID NO: 5565544 - DNA, 25 bp, Homo sapien
gaacgccgtgtgtcctcagtgtttc

SEQ ID NO: 5565545 - DNA, 25 bp, Homo sapien
cccactctgtgtgcagaacgccgtg

SEQ ID NO: 5565546 - DNA, 25 bp, Homo sapien
cagtgtttctcggggcccatagctc

SEQ ID NO: 5565547 - DNA, 25 bp, Homo sapien
aggacacatgctctaaaggaaacca

SEQ ID NO: 5565548 - DNA, 25 bp, Homo sapien
ggcctaacggaatttagatggctcc

SEQ ID NO: 5565549 - DNA, 25 bp, Homo sapien
cattctgccagacccattcccattc

SEQ ID NO: 5565550 - DNA, 25 bp, Homo sapien
gttggctcctattcgtacttggctt

SEQ ID NO: 5565551 - DNA, 25 bp, Homo sapien
ggaagactggaatgtagccatagtt

SEQ ID NO: 5565552 - DNA, 25 bp, Homo sapien
gccatagttgaactctaacatcgtc

SEQ ID NO: 5565553 - DNA, 25 bp, Homo sapien
tctaggcatactaagctgctcttgc

SEQ ID NO: 5565554 - DNA, 25 bp, Homo sapien
acttggcttaaggatcaccacctcc

SEQ ID NO: 5565555 - DNA, 25 bp, Homo sapien
cttcctcaatcaaaacatgcgcttc

SEQ ID NO: 5565556 - DNA, 25 bp, Homo sapien
ccatttcccgtctccagttaggttc

SEQ ID NO: 5565557 - DNA, 25 bp, Homo sapien
aacatcgtctatagaaccatttccc

SEQ ID NO: 5565558 - DNA, 25 bp, Homo sapien
gccagaatgtgacaaagtcacttac

SEQ ID NO: 5565559 - DNA, 25 bp, Homo sapien
gtctccagttaggttctaggcatac

SEQ ID NO: 5565560 - DNA, 25 bp, Homo sapien
attccagaacaaagtgaaggaaaaa

SEQ ID NO: 5565561 - DNA, 25 bp, Homo sapien
tctgcttagcagctcacttcaagga

SEQ ID NO: 5565562 - DNA, 25 bp, Homo sapien
cacagaattgtggtaaaggttaaaa

SEQ ID NO: 5565563 - DNA, 25 bp, Homo sapien
tctactgctctatgtctgtctcctg

SEQ ID NO: 5565564 - DNA, 25 bp, Homo sapien
tagcagctcacttcaaggaaagtta

SEQ ID NO: 5565565 - DNA, 25 bp, Homo sapien
aagctaaggctaaagtaatgggctc

SEQ ID NO: 5565566 - DNA, 25 bp, Homo sapien
gtaatgggctctagacactttttaa

SEQ ID NO: 5565567 - DNA, 25 bp, Homo sapien
aaggctaaagtaatgggctctagac

SEQ ID NO: 5565568 - DNA, 25 bp, Homo sapien
aacgctgtccaaaaagctaaggcta

SEQ ID NO: 5565569 - DNA, 25 bp, Homo sapien
aggaaagttataagataacgctgtc

SEQ ID NO: 5565570 - DNA, 25 bp, Homo sapien
cctgatccctttggcccacagaatt

SEQ ID NO: 5565571 - DNA, 25 bp, Homo sapien
atgtggtaaggtgtacccaagtgtt

SEQ ID NO: 5565572 - DNA, 25 bp, Homo sapien
gtgcagtgtcaactctcagaactgc

SEQ ID NO: 5565573 - DNA, 25 bp, Homo sapien
acagagctcaggccttgtctcaagg

SEQ ID NO: 5565574 - DNA, 25 bp, Homo sapien
ctcagaggcctaaagtccttgaagg

SEQ ID NO: 5565575 - DNA, 25 bp, Homo sapien
tccttatccttgaggggaaggtgca

SEQ ID NO: 5565576 - DNA, 25 bp, Homo sapien
ctcaggccttgtctcaagggggcag

SEQ ID NO: 5565577 - DNA, 25 bp, Homo sapien
cagaactgccattttgaagattaaa

SEQ ID NO: 5565578 - DNA, 25 bp, Homo sapien
acttaatcatgtggtaaggtgtacc

SEQ ID NO: 5565579 - DNA, 25 bp, Homo sapien
ggggcagtcgtagttgtacttaatc

SEQ ID NO: 5565580 - DNA, 25 bp, Homo sapien
acccaagtgttggtagagcttctga

SEQ ID NO: 5565581 - DNA, 25 bp, Homo sapien
tctaggagtcacatactcagaggcc

SEQ ID NO: 5565582 - DNA, 25 bp, Homo sapien
acgcttctttagtgaagggcctacc

SEQ ID NO: 5565583 - DNA, 25 bp, Homo sapien
gataataaaagctttcgtggcactg

SEQ ID NO: 5565584 - DNA, 25 bp, Homo sapien
aacttcaaagctaacccaacaactc

SEQ ID NO: 5565585 - DNA, 25 bp, Homo sapien
ttaatacaaatctgtggaaggggaa

SEQ ID NO: 5565586 - DNA, 25 bp, Homo sapien
ttcctaacaggagatacgcttcttt

SEQ ID NO: 5565587 - DNA, 25 bp, Homo sapien
agtgaagggcctaccccttattcac

SEQ ID NO: 5565588 - DNA, 25 bp, Homo sapien
ggaggtcagatgaaccttaagggca

SEQ ID NO: 5565589 - DNA, 25 bp, Homo sapien
attaaaaggccaattacctgtaata

SEQ ID NO: 5565590 - DNA, 25 bp, Homo sapien
gttacaacacgtcaaaggtgatttc

SEQ ID NO: 5565591 - DNA, 25 bp, Homo sapien
ccccaatgcttatacagaaaaaatc

SEQ ID NO: 5565592 - DNA, 25 bp, Homo sapien
ctctatgcttagatagtcagtttcc

SEQ ID NO: 5565593 - DNA, 25 bp, Homo sapien
acgggttatgtggtccaagattgta

SEQ ID NO: 5565594 - DNA, 25 bp, Homo sapien
tacaatcttggaccacataacccgt

SEQ ID NO: 5565595 - DNA, 25 bp, Homo sapien
ggctcaggctggaaaccatccaaag

SEQ ID NO: 5565596 - DNA, 25 bp, Homo sapien
gctatgatcaaggcatgtgtgtggg

SEQ ID NO: 5565597 - DNA, 25 bp, Homo sapien
ggtagagtcaacctgccaggcactg

SEQ ID NO: 5565598 - DNA, 25 bp, Homo sapien
tggaaaccatccaaagcgcaatccc

SEQ ID NO: 5565599 - DNA, 25 bp, Homo sapien
ggagacatagggttatcctgggtca

SEQ ID NO: 5565600 - DNA, 25 bp, Homo sapien
acatagggttatcctgggtcatggg

SEQ ID NO: 5565601 - DNA, 25 bp, Homo sapien
atccaaagcgcaatccctgacctca

SEQ ID NO: 5565602 - DNA, 25 bp, Homo sapien
ggaaccccaaagtcagcctcaggtg

SEQ ID NO: 5565603 - DNA, 25 bp, Homo sapien
attaatgactctgaagaagcgcagg

SEQ ID NO: 5565604 - DNA, 25 bp, Homo sapien
gcaggcaagtgctatgatcaaggca

SEQ ID NO: 5565605 - DNA, 25 bp, Homo sapien
agcaaattaatgactctgaagaagc

SEQ ID NO: 5565606 - DNA, 25 bp, Homo sapien
agaacattaaaaacttggtggcgcc

SEQ ID NO: 5565607 - DNA, 25 bp, Homo sapien
cgaaggcactatattttgcagagaa

SEQ ID NO: 5565608 - DNA, 25 bp, Homo sapien
ttttacaagcaggttggaacagaga

SEQ ID NO: 5565609 - DNA, 25 bp, Homo sapien
tgagaatattttacaagcaggttgg

SEQ ID NO: 5565610 - DNA, 25 bp, Homo sapien
ccattgaatcactggtccccaactt

SEQ ID NO: 5565611 - DNA, 25 bp, Homo sapien
ttaatcagaagccatgtaataactg

SEQ ID NO: 5565612 - DNA, 25 bp, Homo sapien
ccctcacctctcattcgaaggcact

SEQ ID NO: 5565613 - DNA, 25 bp, Homo sapien
ttgcagagaaaaactcacacaaccc

SEQ ID NO: 5565614 - DNA, 25 bp, Homo sapien
aattatcaggccatttgagaatatt

SEQ ID NO: 5565615 - DNA, 25 bp, Homo sapien
catggcatatagtaattatcaggcc

SEQ ID NO: 5565616 - DNA, 25 bp, Homo sapien
atgtaataactgaaacacatgttca

SEQ ID NO: 5565617 - DNA, 25 bp, Homo sapien
aaatccagactgtaaaaaacacatc

SEQ ID NO: 5565618 - DNA, 25 bp, Homo sapien
aagcgttacaagactttcctcctgg

SEQ ID NO: 5565619 - DNA, 25 bp, Homo sapien
cataaaagattaaatcctggcgggt

SEQ ID NO: 5565620 - DNA, 25 bp, Homo sapien
aaaacacatctactgacactcactt

SEQ ID NO: 5565621 - DNA, 25 bp, Homo sapien
ccggtggcatcgctcagagccacaa

SEQ ID NO: 5565622 - DNA, 25 bp, Homo sapien
agagaaaaagtaaagcgttacaaga

SEQ ID NO: 5565623 - DNA, 25 bp, Homo sapien
aaagattaaatcctggcgggttgtg

SEQ ID NO: 5565624 - DNA, 25 bp, Homo sapien
cgctcagagccacaaactgtatttc

SEQ ID NO: 5565625 - DNA, 25 bp, Homo sapien
tccagactgtaaaaaacacatctac

SEQ ID NO: 5565626 - DNA, 25 bp, Homo sapien
ggcatcgctcagagccacaaactgt

SEQ ID NO: 5565627 - DNA, 25 bp, Homo sapien
agattaaatcctggcgggttgtggg

SEQ ID NO: 5565628 - DNA, 25 bp, Homo sapien
atacagctcctgtaagcagtctgcc

SEQ ID NO: 5565629 - DNA, 25 bp, Homo sapien
acagggctctgtaattgtgttcctt

SEQ ID NO: 5565630 - DNA, 25 bp, Homo sapien
acacaagtccaaagcaggttgagtt

SEQ ID NO: 5565631 - DNA, 25 bp, Homo sapien
tacctctgaggaactagaggcattt

SEQ ID NO: 5565632 - DNA, 25 bp, Homo sapien
gagcttggtagacagactgtgcaag

SEQ ID NO: 5565633 - DNA, 25 bp, Homo sapien
cagactgtgcaagctcaaaacagcc

SEQ ID NO: 5565634 - DNA, 25 bp, Homo sapien
gcagtctgccttcctacagggctct

SEQ ID NO: 5565635 - DNA, 25 bp, Homo sapien
gcatgcctcagaggttggaaagatg

SEQ ID NO: 5565636 - DNA, 25 bp, Homo sapien
ataaggagattctggaaaccaaccc

SEQ ID NO: 5565637 - DNA, 25 bp, Homo sapien
atctgtgactattaagagagggcac

SEQ ID NO: 5565638 - DNA, 25 bp, Homo sapien
atactgtttcaggaataaggagatt

SEQ ID NO: 5565639 - DNA, 25 bp, Homo sapien
aatatctcatagaacttatcaatgg

SEQ ID NO: 5565640 - DNA, 25 bp, Homo sapien
ccattgataagttctatgagatatt

SEQ ID NO: 5565641 - DNA, 25 bp, Homo sapien
gaatgggaaacccatgggctctgaa

SEQ ID NO: 5565642 - DNA, 25 bp, Homo sapien
tccccaggatttcatggccagggct

SEQ ID NO: 5565643 - DNA, 25 bp, Homo sapien
cctcgacgccagtccttggaggtgg

SEQ ID NO: 5565644 - DNA, 25 bp, Homo sapien
ctagccctcgcccctctcactctct

SEQ ID NO: 5565645 - DNA, 25 bp, Homo sapien
atctggggcttttttcgaccctgtc

SEQ ID NO: 5565646 - DNA, 25 bp, Homo sapien
tggttttgcagtctttggtcttaaa

SEQ ID NO: 5565647 - DNA, 25 bp, Homo sapien
ggcaggtacagcactgtggttttgc

SEQ ID NO: 5565648 - DNA, 25 bp, Homo sapien
ttcgaccctgtcattgcaaaaccaa

SEQ ID NO: 5565649 - DNA, 25 bp, Homo sapien
ttggtcttaaaggtctgaggcaagg

SEQ ID NO: 5565650 - DNA, 25 bp, Homo sapien
tgatgaggcctaaactgcttccccc

SEQ ID NO: 5565651 - DNA, 25 bp, Homo sapien
gtgctccccagctctgatgaggcct

SEQ ID NO: 5565652 - DNA, 25 bp, Homo sapien
ttctgaaccgccacgacactatgca

SEQ ID NO: 5565653 - DNA, 25 bp, Homo sapien
tgcatagtgtcgtggcggttcagaa

SEQ ID NO: 5565654 - DNA, 25 bp, Homo sapien
gggctacaaaatgatacagacactc

SEQ ID NO: 5565655 - DNA, 25 bp, Homo sapien
aaggacctctgctgaccagaatacc

SEQ ID NO: 5565656 - DNA, 25 bp, Homo sapien
gagttggttggaaagcagattatta

SEQ ID NO: 5565657 - DNA, 25 bp, Homo sapien
aggactggctttgaacaggaaacct

SEQ ID NO: 5565658 - DNA, 25 bp, Homo sapien
tcccctccaccaacaggactggctt

SEQ ID NO: 5565659 - DNA, 25 bp, Homo sapien
ctaccagaaaacgtcagagaaaagg

SEQ ID NO: 5565660 - DNA, 25 bp, Homo sapien
acagacactctcggtgatcccctcc

SEQ ID NO: 5565661 - DNA, 25 bp, Homo sapien
tgaacaggaaacctgaaaggactgg

SEQ ID NO: 5565662 - DNA, 25 bp, Homo sapien
caggttgtcacttgtgggagttggt

SEQ ID NO: 5565663 - DNA, 25 bp, Homo sapien
tatgactctgcttacaagggaggga

SEQ ID NO: 5565664 - DNA, 25 bp, Homo sapien
agtaacactgtgactcaaggacctc

SEQ ID NO: 5565665 - DNA, 25 bp, Homo sapien
aggtcaagtagagcagactcctgat

SEQ ID NO: 5565666 - DNA, 25 bp, Homo sapien
ccccgactaaggtgattttacatga

SEQ ID NO: 5565667 - DNA, 25 bp, Homo sapien
taaaaatgaagtttagacagaactc

SEQ ID NO: 5565668 - DNA, 25 bp, Homo sapien
ttcatctcacagagcctaagaagtc

SEQ ID NO: 5565669 - DNA, 25 bp, Homo sapien
gctggtaatgataacacaccccgac

SEQ ID NO: 5565670 - DNA, 25 bp, Homo sapien
gggcaggaatcatgcaggaatctgc

SEQ ID NO: 5565671 - DNA, 25 bp, Homo sapien
attgggcctcactttgtcagaagca

SEQ ID NO: 5565672 - DNA, 25 bp, Homo sapien
cctgcaggacatgctggtaatgata

SEQ ID NO: 5565673 - DNA, 25 bp, Homo sapien
cttcaagaactcctgaaaacaggga

SEQ ID NO: 5565674 - DNA, 25 bp, Homo sapien
agacagaactcagtgggttgagaca

SEQ ID NO: 5565675 - DNA, 25 bp, Homo sapien
cagaactgagcaaccagtctgagcc

SEQ ID NO: 5565676 - DNA, 25 bp, Homo sapien
gcagtttgcacaggaggcctgtctg

SEQ ID NO: 5565677 - DNA, 25 bp, Homo sapien
cagacctgttgtgagcagctcctgt

SEQ ID NO: 5565678 - DNA, 25 bp, Homo sapien
gtgagcagctcctgtcactgaggct

SEQ ID NO: 5565679 - DNA, 25 bp, Homo sapien
ggacagttgcacaaattggacgagc

SEQ ID NO: 5565680 - DNA, 25 bp, Homo sapien
ggccaagccgtgccaacctctctgg

SEQ ID NO: 5565681 - DNA, 25 bp, Homo sapien
ggccaaagtagccccttggcttcgc

SEQ ID NO: 5565682 - DNA, 25 bp, Homo sapien
cccaaggccatacttaccccccaga

SEQ ID NO: 5565683 - DNA, 25 bp, Homo sapien
agccccttggcttcgctgctttggg

SEQ ID NO: 5565684 - DNA, 25 bp, Homo sapien
cggccccagctctctggctgccatc

SEQ ID NO: 5565685 - DNA, 25 bp, Homo sapien
gccatcttgtgctggccgagtagac

SEQ ID NO: 5565686 - DNA, 25 bp, Homo sapien
ccacccgccagacctgttgtgagca

SEQ ID NO: 5565687 - DNA, 25 bp, Homo sapien
ccttccgctggaaattctcaagtgg

SEQ ID NO: 5565688 - DNA, 25 bp, Homo sapien
ctcctgcagacaaccgctcccttcc

SEQ ID NO: 5565689 - DNA, 25 bp, Homo sapien
tataaaagcttagtctcagagttca

SEQ ID NO: 5565690 - DNA, 25 bp, Homo sapien
gctctcccgctgcgtggtcccctaa

SEQ ID NO: 5565691 - DNA, 25 bp, Homo sapien
ggtgccccataggagttcctggtca

SEQ ID NO: 5565692 - DNA, 25 bp, Homo sapien
ctcccccacctgccttccgctggaa

SEQ ID NO: 5565693 - DNA, 25 bp, Homo sapien
tcagagttcatgttaagagtgtaga

SEQ ID NO: 5565694 - DNA, 25 bp, Homo sapien
taagagtgtagaatacacacagtcc

SEQ ID NO: 5565695 - DNA, 25 bp, Homo sapien
acacacaagcttctaaccctaaatc

SEQ ID NO: 5565696 - DNA, 25 bp, Homo sapien
tacacacagtccatgattcagtttt

SEQ ID NO: 5565697 - DNA, 25 bp, Homo sapien
attctcaagtgggaaatacaacggg

SEQ ID NO: 5565698 - DNA, 25 bp, Homo sapien
acagatggtgactaccatgtgcctc

SEQ ID NO: 5565699 - DNA, 25 bp, Homo sapien
aggtggctgatagataacttgagtt

SEQ ID NO: 5565700 - DNA, 25 bp, Homo sapien
gtcttaaactgtagaggaaatgtac

SEQ ID NO: 5565701 - DNA, 25 bp, Homo sapien
agtgatgaccggtagataccagaat

SEQ ID NO: 5565702 - DNA, 25 bp, Homo sapien
atcttttgaccctggggcagtgatg

SEQ ID NO: 5565703 - DNA, 25 bp, Homo sapien
ttcccaacaaactgcacccgaggag

SEQ ID NO: 5565704 - DNA, 25 bp, Homo sapien
acccgaggagcctcatctgcagcta

SEQ ID NO: 5565705 - DNA, 25 bp, Homo sapien
gcagagcaaaactggatcttaatca

SEQ ID NO: 5565706 - DNA, 25 bp, Homo sapien
agccaatgtagtaattagatgagcc

SEQ ID NO: 5565707 - DNA, 25 bp, Homo sapien
ctgcagctaggcctgattcagaaga

SEQ ID NO: 5565708 - DNA, 25 bp, Homo sapien
attttacaatgtgagggagatgaga

SEQ ID NO: 5565709 - DNA, 25 bp, Homo sapien
ttcaccatagaggtaggcactagag

SEQ ID NO: 5565710 - DNA, 25 bp, Homo sapien
ctgaagcctgtgtataagcattaac

SEQ ID NO: 5565711 - DNA, 25 bp, Homo sapien
gacaactcaccatagtataagtaac

SEQ ID NO: 5565712 - DNA, 25 bp, Homo sapien
aaaatgtaacagatagacaactcac

SEQ ID NO: 5565713 - DNA, 25 bp, Homo sapien
tgtaacagtgccaaaataatctaaa

SEQ ID NO: 5565714 - DNA, 25 bp, Homo sapien
ggtaggcactagaggactaaattta

SEQ ID NO: 5565715 - DNA, 25 bp, Homo sapien
caaataagtacagctaaatattgta

SEQ ID NO: 5565716 - DNA, 25 bp, Homo sapien
ttctctaccttgacagatgacaatt

SEQ ID NO: 5565717 - DNA, 25 bp, Homo sapien
tataggtgttacactgaagcctgtg

SEQ ID NO: 5565718 - DNA, 25 bp, Homo sapien
tgggacaaagtaccatttaaagata

SEQ ID NO: 5565719 - DNA, 25 bp, Homo sapien
aatattgtaatagtgtataggtgtt

SEQ ID NO: 5565720 - DNA, 25 bp, Homo sapien
acactgtcaacaccgaccgggagga

SEQ ID NO: 5565721 - DNA, 25 bp, Homo sapien
tgttaataattgtcaggggtctgtt

SEQ ID NO: 5565722 - DNA, 25 bp, Homo sapien
gccggagacttcgcatagtgcccgg

SEQ ID NO: 5565723 - DNA, 25 bp, Homo sapien
agggagccctccgcgcgttctccca

SEQ ID NO: 5565724 - DNA, 25 bp, Homo sapien
tcgcatagtgcccggctcatcggag

SEQ ID NO: 5565725 - DNA, 25 bp, Homo sapien
catcggagggctgtgatcttttttt

SEQ ID NO: 5565726 - DNA, 25 bp, Homo sapien
ttgaaagttgtatgcactaggtaaa

SEQ ID NO: 5565727 - DNA, 25 bp, Homo sapien
gggacggttctcccgcagacactca

SEQ ID NO: 5565728 - DNA, 25 bp, Homo sapien
atgtttggaagtatgtgaaagacag

SEQ ID NO: 5565729 - DNA, 25 bp, Homo sapien
tagataacagaaatgccacactgtc

SEQ ID NO: 5565730 - DNA, 25 bp, Homo sapien
cgcagacactcaaactccgggatgt

SEQ ID NO: 5565731 - DNA, 25 bp, Homo sapien
ttgcaaatcacatcactggtttgtc

SEQ ID NO: 5565732 - DNA, 25 bp, Homo sapien
catcactggtttgtccaagcagagg

SEQ ID NO: 5565733 - DNA, 25 bp, Homo sapien
agaaacagtcatgtactttaggcat

SEQ ID NO: 5565734 - DNA, 25 bp, Homo sapien
aaacaaattggtcaggtaaatatac

SEQ ID NO: 5565735 - DNA, 25 bp, Homo sapien
acatgtaacttaaaaagaaacagtc

SEQ ID NO: 5565736 - DNA, 25 bp, Homo sapien
aagttaggtcaaattctctgaaagt

SEQ ID NO: 5565737 - DNA, 25 bp, Homo sapien
aaatacagagtaaaacaaattggtc

SEQ ID NO: 5565738 - DNA, 25 bp, Homo sapien
ctgtcctgctaaaagtctcctaaaa

SEQ ID NO: 5565739 - DNA, 25 bp, Homo sapien
tttaggcataaggacaatgcttttc

SEQ ID NO: 5565740 - DNA, 25 bp, Homo sapien
gaagttacagcctatttgcaaatca

SEQ ID NO: 5565741 - DNA, 25 bp, Homo sapien
atgagaggtaagctcctgtcctgct

SEQ ID NO: 5565742 - DNA, 25 bp, Homo sapien
aaggggtggtctctttgttagcaat

SEQ ID NO: 5565743 - DNA, 25 bp, Homo sapien
atctgaaagtccacccgcggaccat

SEQ ID NO: 5565744 - DNA, 25 bp, Homo sapien
aaatgtggttccagtcaaatgattt

SEQ ID NO: 5565745 - DNA, 25 bp, Homo sapien
gtcaaatgatttacccacaccccaa

SEQ ID NO: 5565746 - DNA, 25 bp, Homo sapien
aactccaccgtgtcccgaattctcc

SEQ ID NO: 5565747 - DNA, 25 bp, Homo sapien
gatactggttaaactccaccgtgtc

SEQ ID NO: 5565748 - DNA, 25 bp, Homo sapien
atctccaccctgtccctggggattt

SEQ ID NO: 5565749 - DNA, 25 bp, Homo sapien
tggaggagtgttcagaatctgaaag

SEQ ID NO: 5565750 - DNA, 25 bp, Homo sapien
ccctggggatttaagatactggtta

SEQ ID NO: 5565751 - DNA, 25 bp, Homo sapien
aaaacctctaggtctgtgccctcat

SEQ ID NO: 5565752 - DNA, 25 bp, Homo sapien
gagccaccacgcagtgcactcttct

SEQ ID NO: 5565753 - DNA, 25 bp, Homo sapien
ggaacaaacaagaagcagtcttcag

SEQ ID NO: 5565754 - DNA, 25 bp, Homo sapien
ttgggcataaggagactattgattg

SEQ ID NO: 5565755 - DNA, 25 bp, Homo sapien
ctgcacatccagctgtggaggaatc

SEQ ID NO: 5565756 - DNA, 25 bp, Homo sapien
gtggaggaatccttaaggctcacag

SEQ ID NO: 5565757 - DNA, 25 bp, Homo sapien
ttgattgcttgaagacacagacagc

SEQ ID NO: 5565758 - DNA, 25 bp, Homo sapien
ggcggaatccccaatgtcaggagca

SEQ ID NO: 5565759 - DNA, 25 bp, Homo sapien
agaaccaaacaagaggctacgtctt

SEQ ID NO: 5565760 - DNA, 25 bp, Homo sapien
cagctcaaggaaaattggacataga

SEQ ID NO: 5565761 - DNA, 25 bp, Homo sapien
ccgtgggcaaatacagaaaatcaga

SEQ ID NO: 5565762 - DNA, 25 bp, Homo sapien
ggacatagagctgaaaagtgatgtt

SEQ ID NO: 5565763 - DNA, 25 bp, Homo sapien
cagaatagattgtggttgggcataa

SEQ ID NO: 5565764 - DNA, 25 bp, Homo sapien
aatacaggccgcacacctgcctact

SEQ ID NO: 5565765 - DNA, 25 bp, Homo sapien
agcattcctgaggcctcccgatgcc

SEQ ID NO: 5565766 - DNA, 25 bp, Homo sapien
taaccagatcaagacagaacgttcc

SEQ ID NO: 5565767 - DNA, 25 bp, Homo sapien
gggcctctgaggcccaccatgaccc

SEQ ID NO: 5565768 - DNA, 25 bp, Homo sapien
cagggaggactctgctaccaataca

SEQ ID NO: 5565769 - DNA, 25 bp, Homo sapien
agtctgattctttagtggggcctct

SEQ ID NO: 5565770 - DNA, 25 bp, Homo sapien
aaatgtttactgagggcataacttc

SEQ ID NO: 5565771 - DNA, 25 bp, Homo sapien
cgtgcctcctccctgggcccactac

SEQ ID NO: 5565772 - DNA, 25 bp, Homo sapien
ctacctccctaatgatccagccctc

SEQ ID NO: 5565773 - DNA, 25 bp, Homo sapien
taagaagcacaaatctagaatagtc

SEQ ID NO: 5565774 - DNA, 25 bp, Homo sapien
atgcaaatatgcccccaggtgacca

SEQ ID NO: 5565775 - DNA, 25 bp, Homo sapien
gcctgtaaccgcagtaccctggcag

SEQ ID NO: 5565776 - DNA, 25 bp, Homo sapien
ctatgttcagaaaccggcaaagtgg

SEQ ID NO: 5565777 - DNA, 25 bp, Homo sapien
ttgctgaggctgaacatactatgtt

SEQ ID NO: 5565778 - DNA, 25 bp, Homo sapien
acacattcttgctgaggctgaacat

SEQ ID NO: 5565779 - DNA, 25 bp, Homo sapien
gggaagaggtcagatgaatattttt

SEQ ID NO: 5565780 - DNA, 25 bp, Homo sapien
aagtaaggtagtaaagtctggagta

SEQ ID NO: 5565781 - DNA, 25 bp, Homo sapien
tgaaaagatccaagtaaggtagtaa

SEQ ID NO: 5565782 - DNA, 25 bp, Homo sapien
ggagtagatccaagtaagttagtaa

SEQ ID NO: 5565783 - DNA, 25 bp, Homo sapien
agatacttaacagcttgaagattcc

SEQ ID NO: 5565784 - DNA, 25 bp, Homo sapien
aattgatactgggtgactatttcac

SEQ ID NO: 5565785 - DNA, 25 bp, Homo sapien
ggtagtaaagtctggagtagatcca

SEQ ID NO: 5565786 - DNA, 25 bp, Homo sapien
cctatgagaacaaaagaggtagaaa

SEQ ID NO: 5565787 - DNA, 25 bp, Homo sapien
tcaagtcagcatgtcactggggctg

SEQ ID NO: 5565788 - DNA, 25 bp, Homo sapien
gcagtatgctgcaatcacataggtc

SEQ ID NO: 5565789 - DNA, 25 bp, Homo sapien
gatgctgacaacaaactctggtatg

SEQ ID NO: 5565790 - DNA, 25 bp, Homo sapien
atgtcactggggctgactcctctct

SEQ ID NO: 5565791 - DNA, 25 bp, Homo sapien
ttttgaagttaggcagaattaaatg

SEQ ID NO: 5565792 - DNA, 25 bp, Homo sapien
gtaagaattaaacgaggcagtatgc

SEQ ID NO: 5565793 - DNA, 25 bp, Homo sapien
aatgagaaaaacatacagtcaccta

SEQ ID NO: 5565794 - DNA, 25 bp, Homo sapien
aattaaatgagaattgaggtaagtg

SEQ ID NO: 5565795 - DNA, 25 bp, Homo sapien
tcagcacagagagatataattgcca

SEQ ID NO: 5565796 - DNA, 25 bp, Homo sapien
tgaggtaagtgttacgtaagaatta

SEQ ID NO: 5565797 - DNA, 25 bp, Homo sapien
tcaagccaccttggagcagacgtgg

SEQ ID NO: 5565798 - DNA, 25 bp, Homo sapien
atgcacttattacgagagggacaaa

SEQ ID NO: 5565799 - DNA, 25 bp, Homo sapien
cccggctctgtgcccgacaagatgg

SEQ ID NO: 5565800 - DNA, 25 bp, Homo sapien
aaccttcgtgacaggtggaagttgg

SEQ ID NO: 5565801 - DNA, 25 bp, Homo sapien
catgacaccaaggagctgctgtctg

SEQ ID NO: 5565802 - DNA, 25 bp, Homo sapien
gtacccatcggccactgaagatctc

SEQ ID NO: 5565803 - DNA, 25 bp, Homo sapien
cacaaagtcgaaagtagacagttcc

SEQ ID NO: 5565804 - DNA, 25 bp, Homo sapien
gctgtggagactgatctgaaaaagc

SEQ ID NO: 5565805 - DNA, 25 bp, Homo sapien
atctgagtcttgggctcccggtcca

SEQ ID NO: 5565806 - DNA, 25 bp, Homo sapien
gtggctacgctcccagcagccctgt

SEQ ID NO: 5565807 - DNA, 25 bp, Homo sapien
tcagccagtcaaaaggacttgggca

SEQ ID NO: 5565808 - DNA, 25 bp, Homo sapien
gggaactgatacctaagatgcacat

SEQ ID NO: 5565809 - DNA, 25 bp, Homo sapien
tggaagtgcctttacagagacatta

SEQ ID NO: 5565810 - DNA, 25 bp, Homo sapien
gctgtgtaggtttggccactcacta

SEQ ID NO: 5565811 - DNA, 25 bp, Homo sapien
ctgagatccggtccacctgcctgag

SEQ ID NO: 5565812 - DNA, 25 bp, Homo sapien
aattttgagacaacagcatgccctg

SEQ ID NO: 5565813 - DNA, 25 bp, Homo sapien
tacggtggaacatacacaacagatc

SEQ ID NO: 5565814 - DNA, 25 bp, Homo sapien
ccctctaagagcacgggtctgttgc

SEQ ID NO: 5565815 - DNA, 25 bp, Homo sapien
tggtgtttaccagggaacaagaatc

SEQ ID NO: 5565816 - DNA, 25 bp, Homo sapien
ttatttgccatgggaagacacacac

SEQ ID NO: 5565817 - DNA, 25 bp, Homo sapien
aaaaggtatatagaagcacaatgtc

SEQ ID NO: 5565818 - DNA, 25 bp, Homo sapien
tgatacacgctatggtggatgtgac

SEQ ID NO: 5565819 - DNA, 25 bp, Homo sapien
atagtagttttgaagcacatgaatt

SEQ ID NO: 5565820 - DNA, 25 bp, Homo sapien
attagaaatgatacgaaaaaaatag

SEQ ID NO: 5565821 - DNA, 25 bp, Homo sapien
gcaggacgcataagaaagtctagca

SEQ ID NO: 5565822 - DNA, 25 bp, Homo sapien
atagatgactacatgttctaggcat

SEQ ID NO: 5565823 - DNA, 25 bp, Homo sapien
cacatgaattagtttgtgggaaaga

SEQ ID NO: 5565824 - DNA, 25 bp, Homo sapien
tgggaatgggcattacatagatgac

SEQ ID NO: 5565825 - DNA, 25 bp, Homo sapien
caaaagcttggaagtttgttgggaa

SEQ ID NO: 5565826 - DNA, 25 bp, Homo sapien
tttgaggtaagaatacaatactaca

SEQ ID NO: 5565827 - DNA, 25 bp, Homo sapien
tgttctaggcatcaagcaccatatt

SEQ ID NO: 5565828 - DNA, 25 bp, Homo sapien
agaatatgccagtctagtgacttct

SEQ ID NO: 5565829 - DNA, 25 bp, Homo sapien
tttgttgggaatgggcattacatag

SEQ ID NO: 5565830 - DNA, 25 bp, Homo sapien
cctcccaatagaatacgtacaagta

SEQ ID NO: 5565831 - DNA, 25 bp, Homo sapien
gtaacacacacataacttggtaacc

SEQ ID NO: 5565832 - DNA, 25 bp, Homo sapien
aacaaataagggattagagaaataa

SEQ ID NO: 5565833 - DNA, 25 bp, Homo sapien
ccactgctgcaacaaataagggatt

SEQ ID NO: 5565834 - DNA, 25 bp, Homo sapien
tgaggggaataagattatactggtc

SEQ ID NO: 5565835 - DNA, 25 bp, Homo sapien
atctgaaagaatatatgccaggcta

SEQ ID NO: 5565836 - DNA, 25 bp, Homo sapien
tccaaatgaaaacaagtagagttat

SEQ ID NO: 5565837 - DNA, 25 bp, Homo sapien
atagggaaagaattaggaccttcca

SEQ ID NO: 5565838 - DNA, 25 bp, Homo sapien
atgccaggctattaatagtagctat

SEQ ID NO: 5565839 - DNA, 25 bp, Homo sapien
tagagaaataaatgatcatacatcc

SEQ ID NO: 5565840 - DNA, 25 bp, Homo sapien
agctatatatcaggcaagagagcaa

SEQ ID NO: 5565841 - DNA, 25 bp, Homo sapien
aagcattatagtacccgtcaaaatc

SEQ ID NO: 5565842 - DNA, 25 bp, Homo sapien
gtttatatggcttacagtgttctgg

SEQ ID NO: 5565843 - DNA, 25 bp, Homo sapien
aaacttgagtcatctaggtgaggtc

SEQ ID NO: 5565844 - DNA, 25 bp, Homo sapien
atggtttcactgttgctgactcttt

SEQ ID NO: 5565845 - DNA, 25 bp, Homo sapien
tggacatattaagcattatagtacc

SEQ ID NO: 5565846 - DNA, 25 bp, Homo sapien
ctagcccaagatacttatgtgatac

SEQ ID NO: 5565847 - DNA, 25 bp, Homo sapien
tcttgatgttccccaaacttgagtc

SEQ ID NO: 5565848 - DNA, 25 bp, Homo sapien
acactgtagctcctatggcagaaat

SEQ ID NO: 5565849 - DNA, 25 bp, Homo sapien
gtcatctaggtgaggtcattgctgt

SEQ ID NO: 5565850 - DNA, 25 bp, Homo sapien
tccaacggtatatataaactgcatt

SEQ ID NO: 5565851 - DNA, 25 bp, Homo sapien
tctagtgaacttaagtgaggttttc

SEQ ID NO: 5565852 - DNA, 25 bp, Homo sapien
cttgagaagcaaaaataatactact

SEQ ID NO: 5565853 - DNA, 25 bp, Homo sapien
actatgcgcttgttctgtaccttac

SEQ ID NO: 5565854 - DNA, 25 bp, Homo sapien
tcatgcatcttgaataaaagccaat

SEQ ID NO: 5565855 - DNA, 25 bp, Homo sapien
tatccacagtccttggtcagccaac

SEQ ID NO: 5565856 - DNA, 25 bp, Homo sapien
ctgcccagtgagacctctcattcta

SEQ ID NO: 5565857 - DNA, 25 bp, Homo sapien
tgtaatacggaaatgctcactgttt

SEQ ID NO: 5565858 - DNA, 25 bp, Homo sapien
tggtcagccaacttcaggctcaaat

SEQ ID NO: 5565859 - DNA, 25 bp, Homo sapien
ttgacattaatgaaacccacgtaat

SEQ ID NO: 5565860 - DNA, 25 bp, Homo sapien
tctcaccttacaaaacccactgctt

SEQ ID NO: 5565861 - DNA, 25 bp, Homo sapien
aaaacccactgctttgccactgccc

SEQ ID NO: 5565862 - DNA, 25 bp, Homo sapien
tggaggctgatccgattcatgcatc

SEQ ID NO: 5565863 - DNA, 25 bp, Homo sapien
atctgacaatgccaaaccgacaggc

SEQ ID NO: 5565864 - DNA, 25 bp, Homo sapien
ggtgactcacctggctggaattaac

SEQ ID NO: 5565865 - DNA, 25 bp, Homo sapien
aatgccaaacaaaggagaatcactc

SEQ ID NO: 5565866 - DNA, 25 bp, Homo sapien
ttagaggcttgctggtcaaaatgaa

SEQ ID NO: 5565867 - DNA, 25 bp, Homo sapien
ggagctcaacactaagtcagactgc

SEQ ID NO: 5565868 - DNA, 25 bp, Homo sapien
aatcaaggcacccatttagaggctt

SEQ ID NO: 5565869 - DNA, 25 bp, Homo sapien
tgaccgacccctgcccattacccat

SEQ ID NO: 5565870 - DNA, 25 bp, Homo sapien
tcctgagggtgaaatggttaaagga

SEQ ID NO: 5565871 - DNA, 25 bp, Homo sapien
ggatgagagctacctggtgactcac

SEQ ID NO: 5565872 - DNA, 25 bp, Homo sapien
ttacccatgtgactaggtgcctgcc

SEQ ID NO: 5565873 - DNA, 25 bp, Homo sapien
acatgtcataaaaaggcaactgccc

SEQ ID NO: 5565874 - DNA, 25 bp, Homo sapien
gaacttgtctcctgggatgagggga

SEQ ID NO: 5565875 - DNA, 25 bp, Homo sapien
gggagagcctttgaagccaacccca

SEQ ID NO: 5565876 - DNA, 25 bp, Homo sapien
ataaggtgatggagaacttgtctcc

SEQ ID NO: 5565877 - DNA, 25 bp, Homo sapien
aaggtgaatgttgccctgggcatca

SEQ ID NO: 5565878 - DNA, 25 bp, Homo sapien
acctgatgaaatgcattccagaatc

SEQ ID NO: 5565879 - DNA, 25 bp, Homo sapien
cagagtgaggatataactaactagc

SEQ ID NO: 5565880 - DNA, 25 bp, Homo sapien
tgggcatcaagggttatcttctatt

SEQ ID NO: 5565881 - DNA, 25 bp, Homo sapien
accccaaaggccaatgtgaaggtga

SEQ ID NO: 5565882 - DNA, 25 bp, Homo sapien
gctggcttctgctagctcattgctc

SEQ ID NO: 5565883 - DNA, 25 bp, Homo sapien
caggacggccttaccggctctcaga

SEQ ID NO: 5565884 - DNA, 25 bp, Homo sapien
aaactatctgtggctaatgacaggt

SEQ ID NO: 5565885 - DNA, 25 bp, Homo sapien
tgagaccaagttgcagacatgttcc

SEQ ID NO: 5565886 - DNA, 25 bp, Homo sapien
gcgtgcatgtgtgtaccaccattat

SEQ ID NO: 5565887 - DNA, 25 bp, Homo sapien
gttccatcagtcctaaacactccag

SEQ ID NO: 5565888 - DNA, 25 bp, Homo sapien
agtacaaagaactcccatgttcact

SEQ ID NO: 5565889 - DNA, 25 bp, Homo sapien
ataagacttccccctggccttaagc

SEQ ID NO: 5565890 - DNA, 25 bp, Homo sapien
caaaacacaatttacagaagagttc

SEQ ID NO: 5565891 - DNA, 25 bp, Homo sapien
attgtcaaaaaaaggccaagcccaa

SEQ ID NO: 5565892 - DNA, 25 bp, Homo sapien
ctggccttaagctcagtagatttta

SEQ ID NO: 5565893 - DNA, 25 bp, Homo sapien
atttctgcagcatgcatgcgtgcat

SEQ ID NO: 5565894 - DNA, 25 bp, Homo sapien
tttacagaagagttcaaagtgaaaa

SEQ ID NO: 5565895 - DNA, 25 bp, Homo sapien
accaaaaagttggaggaatagtaca

SEQ ID NO: 5565896 - DNA, 25 bp, Homo sapien
aagatttgccactgacttccatgtc

SEQ ID NO: 5565897 - DNA, 25 bp, Homo sapien
tcacagcagaaaaatgacttgggag

SEQ ID NO: 5565898 - DNA, 25 bp, Homo sapien
tgagtctagacaactccctgttgcc

SEQ ID NO: 5565899 - DNA, 25 bp, Homo sapien
cactacaatgggacctctgaaaatt

SEQ ID NO: 5565900 - DNA, 25 bp, Homo sapien
gaaacatcagtagtatatatttgcc

SEQ ID NO: 5565901 - DNA, 25 bp, Homo sapien
tcaagtgattgacatgattagcaat

SEQ ID NO: 5565902 - DNA, 25 bp, Homo sapien
aaaatgacttgggagacaaaatgag

SEQ ID NO: 5565903 - DNA, 25 bp, Homo sapien
gatgagtcttcctacaagcctggtc

SEQ ID NO: 5565904 - DNA, 25 bp, Homo sapien
taatatacaataggagactaatctc

SEQ ID NO: 5565905 - DNA, 25 bp, Homo sapien
attcatggaagtaattaatgttttc

SEQ ID NO: 5565906 - DNA, 25 bp, Homo sapien
tattaactcactacaatgggacctc

SEQ ID NO: 5565907 - DNA, 25 bp, Homo sapien
gacgaccaaaacagcctagcgactg

SEQ ID NO: 5565908 - DNA, 25 bp, Homo sapien
aaataatcattcgaaccatgggctc

SEQ ID NO: 5565909 - DNA, 25 bp, Homo sapien
ttgtttactgataaagcccgacgac

SEQ ID NO: 5565910 - DNA, 25 bp, Homo sapien
gtccaagactctagggtcagcaagc

SEQ ID NO: 5565911 - DNA, 25 bp, Homo sapien
gaaccatgggctcgaattgtttact

SEQ ID NO: 5565912 - DNA, 25 bp, Homo sapien
tggggactcccaacgccactgtcca

SEQ ID NO: 5565913 - DNA, 25 bp, Homo sapien
cccgtggctgttctctccaagggac

SEQ ID NO: 5565914 - DNA, 25 bp, Homo sapien
acagcctagcgactgctgtttggag

SEQ ID NO: 5565915 - DNA, 25 bp, Homo sapien
gccactgtccaagactctagggtca

SEQ ID NO: 5565916 - DNA, 25 bp, Homo sapien
catctggttcccaggccgctgggga

SEQ ID NO: 5565917 - DNA, 25 bp, Homo sapien
ctccaagggaccatctcgcccctca

SEQ ID NO: 5565918 - DNA, 25 bp, Homo sapien
ggcgctggtcgtcctgctcacgcta

SEQ ID NO: 5565919 - DNA, 25 bp, Homo sapien
tgcagatgggccagattctccctca

SEQ ID NO: 5565920 - DNA, 25 bp, Homo sapien
tctccctcacctcacagtgcccttg

SEQ ID NO: 5565921 - DNA, 25 bp, Homo sapien
gctcggcctcctcaccggcttcgtg

SEQ ID NO: 5565922 - DNA, 25 bp, Homo sapien
agtgcccttgccctcagctgtaaaa

SEQ ID NO: 5565923 - DNA, 25 bp, Homo sapien
cctgctcacgctatggatcactggc

SEQ ID NO: 5565924 - DNA, 25 bp, Homo sapien
acctcacagtgcccttgccctcagc

SEQ ID NO: 5565925 - DNA, 25 bp, Homo sapien
gctccttcctaaagagcggcgcgcg

SEQ ID NO: 5565926 - DNA, 25 bp, Homo sapien
ctcacgctatggatcactggcggcg

SEQ ID NO: 5565927 - DNA, 25 bp, Homo sapien
cggcctcctcaccggcttcgtgggg

SEQ ID NO: 5565928 - DNA, 25 bp, Homo sapien
ctgctccttcctaaagagcggcgcg

SEQ ID NO: 5565929 - DNA, 25 bp, Homo sapien
cctagatcatggggtctttgtgctc

SEQ ID NO: 5565930 - DNA, 25 bp, Homo sapien
gcaagccagaacccccacctgactt

SEQ ID NO: 5565931 - DNA, 25 bp, Homo sapien
tggggtctttgtgctctgagaatgg

SEQ ID NO: 5565932 - DNA, 25 bp, Homo sapien
gccaacagttggacaagtttgccct

SEQ ID NO: 5565933 - DNA, 25 bp, Homo sapien
ctccaaacgctggtgtcagcaagcc

SEQ ID NO: 5565934 - DNA, 25 bp, Homo sapien
ggatggactcagctttctgttggtt

SEQ ID NO: 5565935 - DNA, 25 bp, Homo sapien
ccatgggccaacagttggacaagtt

SEQ ID NO: 5565936 - DNA, 25 bp, Homo sapien
agaggcaactcggcttggttatttc

SEQ ID NO: 5565937 - DNA, 25 bp, Homo sapien
agtttgccctagatcatggggtctt

SEQ ID NO: 5565938 - DNA, 25 bp, Homo sapien
attcaaagctgttccatgggccaac

SEQ ID NO: 5565939 - DNA, 25 bp, Homo sapien
ctcactgctgtgcagaggcaactcg

SEQ ID NO: 5565940 - DNA, 25 bp, Homo sapien
tggagcctgtacagtgcaagattct

SEQ ID NO: 5565941 - DNA, 25 bp, Homo sapien
tcacagctgtgggccatcttgcatc

SEQ ID NO: 5565942 - DNA, 25 bp, Homo sapien
tcttattctgcagaaggacatgggg

SEQ ID NO: 5565943 - DNA, 25 bp, Homo sapien
caacaactctggcttggaactgctc

SEQ ID NO: 5565944 - DNA, 25 bp, Homo sapien
tgcatcaaacatggctagagaaggc

SEQ ID NO: 5565945 - DNA, 25 bp, Homo sapien
gcccatcagatagacaagttgaagc

SEQ ID NO: 5565946 - DNA, 25 bp, Homo sapien
atggctagagaaggcctgtttactc

SEQ ID NO: 5565947 - DNA, 25 bp, Homo sapien
gccaaggacactcatatagacactc

SEQ ID NO: 5565948 - DNA, 25 bp, Homo sapien
gagcctgggttctggtctcagattc

SEQ ID NO: 5565949 - DNA, 25 bp, Homo sapien
atttgcgcatctcacgtggaagcct

SEQ ID NO: 5565950 - DNA, 25 bp, Homo sapien
aagctaaaaagtcacagctgtgggc

SEQ ID NO: 5565951 - DNA, 25 bp, Homo sapien
ggaaactccgctggacttgcctggg

SEQ ID NO: 5565952 - DNA, 25 bp, Homo sapien
gcgcctggaaactccgctggacttg

SEQ ID NO: 5565953 - DNA, 25 bp, Homo sapien
ctgaattcctttcggcctctggggc

SEQ ID NO: 5565954 - DNA, 25 bp, Homo sapien
cctttcggcctctggggccatttgg

SEQ ID NO: 5565955 - DNA, 25 bp, Homo sapien
gctgcttctcctatgcggggacagc

SEQ ID NO: 5565956 - DNA, 25 bp, Homo sapien
gacagcggcaatcccccctgaattc

SEQ ID NO: 5565957 - DNA, 25 bp, Homo sapien
cgagttccctccccgggtgctcctg

SEQ ID NO: 5565958 - DNA, 25 bp, Homo sapien
cagcctctccccacctagctcagga

SEQ ID NO: 5565959 - DNA, 25 bp, Homo sapien
gcttgaccctccggctcggacagag

SEQ ID NO: 5565960 - DNA, 25 bp, Homo sapien
ccagctgcttctcctatgcggggac

SEQ ID NO: 5565961 - DNA, 25 bp, Homo sapien
cccacctagctcaggaatggtgcgc

SEQ ID NO: 5565962 - DNA, 25 bp, Homo sapien
ctataggccagtaagatgtgtttct

SEQ ID NO: 5565963 - DNA, 25 bp, Homo sapien
gcatcccgaggacagatgatcctga

SEQ ID NO: 5565964 - DNA, 25 bp, Homo sapien
ctgtaggccagaacacgacatttta

SEQ ID NO: 5565965 - DNA, 25 bp, Homo sapien
atcccagttaggcccctgggggcaa

SEQ ID NO: 5565966 - DNA, 25 bp, Homo sapien
tctgaaaccaggctctatggcatcc

SEQ ID NO: 5565967 - DNA, 25 bp, Homo sapien
agccctggcattccaagcaggccca

SEQ ID NO: 5565968 - DNA, 25 bp, Homo sapien
cagggccagttcaagttcgtcttct

SEQ ID NO: 5565969 - DNA, 25 bp, Homo sapien
agtggctcagtgtgcacttgggcca

SEQ ID NO: 5565970 - DNA, 25 bp, Homo sapien
acctaaatgtgtgagggttggtaaa

SEQ ID NO: 5565971 - DNA, 25 bp, Homo sapien
cgaacaataaagtggagtccctaac

SEQ ID NO: 5565972 - DNA, 25 bp, Homo sapien
gtgaggtttgctggttagcagctca

SEQ ID NO: 5565973 - DNA, 25 bp, Homo sapien
tccttgaggtggtataaataaaaca

SEQ ID NO: 5565974 - DNA, 25 bp, Homo sapien
accagcagccactagcatcaatatc

SEQ ID NO: 5565975 - DNA, 25 bp, Homo sapien
atatagccctaaatcgaacacaagc

SEQ ID NO: 5565976 - DNA, 25 bp, Homo sapien
ctgtacacagtcaatgcaatttatc

SEQ ID NO: 5565977 - DNA, 25 bp, Homo sapien
taaacacaaaacacctcattaggct

SEQ ID NO: 5565978 - DNA, 25 bp, Homo sapien
gtgaagtggaactaaaaccagcagc

SEQ ID NO: 5565979 - DNA, 25 bp, Homo sapien
aagccattataaggtgaagtggaac

SEQ ID NO: 5565980 - DNA, 25 bp, Homo sapien
agctacatggttttcgagtaccctc

SEQ ID NO: 5565981 - DNA, 25 bp, Homo sapien
acagcatgagtccaatcttcccatt

SEQ ID NO: 5565982 - DNA, 25 bp, Homo sapien
ttctaaccctagtgccctgcctgct

SEQ ID NO: 5565983 - DNA, 25 bp, Homo sapien
ttcaaagaaaggtcacagaatttta

SEQ ID NO: 5565984 - DNA, 25 bp, Homo sapien
tctaacacacgcttttgggaggtca

SEQ ID NO: 5565985 - DNA, 25 bp, Homo sapien
cagcagagtcccaagccagtctgat

SEQ ID NO: 5565986 - DNA, 25 bp, Homo sapien
ctaggcaggtcagtctctaacacac

SEQ ID NO: 5565987 - DNA, 25 bp, Homo sapien
cacaaggcactgagccattcacgag

SEQ ID NO: 5565988 - DNA, 25 bp, Homo sapien
tcccgagatgacagcttgttacagc

SEQ ID NO: 5565989 - DNA, 25 bp, Homo sapien
ccctccactgacgcactaggcaggt

SEQ ID NO: 5565990 - DNA, 25 bp, Homo sapien
gggaggaacatggtgtcctcacaca

SEQ ID NO: 5565991 - DNA, 25 bp, Homo sapien
gaccaaactccctccatcaagccct

SEQ ID NO: 5565992 - DNA, 25 bp, Homo sapien
gggcctggtgtctcctcccgagatg

SEQ ID NO: 5565993 - DNA, 25 bp, Homo sapien
cggggcctcacgatccaagcccctc

SEQ ID NO: 5565994 - DNA, 25 bp, Homo sapien
aaggtgctggcatgttcagcgtctg

SEQ ID NO: 5565995 - DNA, 25 bp, Homo sapien
tctagtccaactgctttcccaactc

SEQ ID NO: 5565996 - DNA, 25 bp, Homo sapien
tacgcgaaataacacaagccttaac

SEQ ID NO: 5565997 - DNA, 25 bp, Homo sapien
ttgatgaaggcaatgagttcttctc

SEQ ID NO: 5565998 - DNA, 25 bp, Homo sapien
ataataaaatggatacttaggaact

SEQ ID NO: 5565999 - DNA, 25 bp, Homo sapien
aaaaatgagttagaagtaacaatta

SEQ ID NO: 5566000 - DNA, 25 bp, Homo sapien
ccaataaccctcaaaacagaacaac

SEQ ID NO: 5566001 - DNA, 25 bp, Homo sapien
gaggaattaaaaaacagacacattg

SEQ ID NO: 5566002 - DNA, 25 bp, Homo sapien
ccactgaagctcaatataggattat

SEQ ID NO: 5566003 - DNA, 25 bp, Homo sapien
aacagaacaacaatgcttacgcgaa

SEQ ID NO: 5566004 - DNA, 25 bp, Homo sapien
aaaacagacacattgatgaaggcaa

SEQ ID NO: 5566005 - DNA, 25 bp, Homo sapien
atgaaagagaaatttgcatagtttg

SEQ ID NO: 5566006 - DNA, 25 bp, Homo sapien
ttggcatctgcaatttcatgcagtc

SEQ ID NO: 5566007 - DNA, 25 bp, Homo sapien
atttcaattgagacataaaacacac

SEQ ID NO: 5566008 - DNA, 25 bp, Homo sapien
aatatatcgtgtagaataaaaaatt

SEQ ID NO: 5566009 - DNA, 25 bp, Homo sapien
catgttcccatctacaccccacccc

SEQ ID NO: 5566010 - DNA, 25 bp, Homo sapien
tcatgcagtctaagtgaaacccata

SEQ ID NO: 5566011 - DNA, 25 bp, Homo sapien
cccaaaccatgttcccatctacacc

SEQ ID NO: 5566012 - DNA, 25 bp, Homo sapien
tgtgtatgaaataggaaagcaacaa

SEQ ID NO: 5566013 - DNA, 25 bp, Homo sapien
agtgaaacccataaagaaatgtgta

SEQ ID NO: 5566014 - DNA, 25 bp, Homo sapien
aggaaagcaacaaaagctcataaca

SEQ ID NO: 5566015 - DNA, 25 bp, Homo sapien
attttgttaaaaggtaattggcatc

SEQ ID NO: 5566016 - DNA, 25 bp, Homo sapien
tagaaatcagattcaaaacccatca

SEQ ID NO: 5566017 - DNA, 25 bp, Homo sapien
gtaaacctttagcaaagataatagt

SEQ ID NO: 5566018 - DNA, 25 bp, Homo sapien
actattatctttgctaaaggtttac

SEQ ID NO: 5566019 - DNA, 25 bp, Homo sapien
aaaatttattcagtgggagaagctt

SEQ ID NO: 5566020 - DNA, 25 bp, Homo sapien
tcccagtcgcctacaataagaagaa

SEQ ID NO: 5566021 - DNA, 25 bp, Homo sapien
agcattttgaggtgaatgtatgcat

SEQ ID NO: 5566022 - DNA, 25 bp, Homo sapien
attcagtgggagaagctttttcttc

SEQ ID NO: 5566023 - DNA, 25 bp, Homo sapien
aatcagtgaattagacaagcatgca

SEQ ID NO: 5566024 - DNA, 25 bp, Homo sapien
tttggtaattatgactcccagtcgc

SEQ ID NO: 5566025 - DNA, 25 bp, Homo sapien
agttgcctacttgcgctagcacatc

SEQ ID NO: 5566026 - DNA, 25 bp, Homo sapien
tatgccaacatactcaggtaagagc

SEQ ID NO: 5566027 - DNA, 25 bp, Homo sapien
acatactcaggtaagagcaacattt

SEQ ID NO: 5566028 - DNA, 25 bp, Homo sapien
tgtatgcataatcagtgaattagac

SEQ ID NO: 5566029 - DNA, 25 bp, Homo sapien
ctgagtcttgtgttgagttgcctac

SEQ ID NO: 5566030 - DNA, 25 bp, Homo sapien
aaaacactggccaaatcaccacctc

SEQ ID NO: 5566031 - DNA, 25 bp, Homo sapien
aaattagtcagcagcacatgaagtt

SEQ ID NO: 5566032 - DNA, 25 bp, Homo sapien
ctataaaaacctagaagtcccagga

SEQ ID NO: 5566033 - DNA, 25 bp, Homo sapien
agagatgagaggttcgcactcttat

SEQ ID NO: 5566034 - DNA, 25 bp, Homo sapien
ccccagctgtggccatgtttaaaat

SEQ ID NO: 5566035 - DNA, 25 bp, Homo sapien
cctagaagtcccaggaattagattt

SEQ ID NO: 5566036 - DNA, 25 bp, Homo sapien
catgtttaaaattagtcagcagcac

SEQ ID NO: 5566037 - DNA, 25 bp, Homo sapien
tcacacctgagtacttgtcacaagt

SEQ ID NO: 5566038 - DNA, 25 bp, Homo sapien
acttgtcacaagttaaaacactggc

SEQ ID NO: 5566039 - DNA, 25 bp, Homo sapien
tattgaagaaattagtatgttaact

SEQ ID NO: 5566040 - DNA, 25 bp, Homo sapien
ttggggattattttgccccagctgt

SEQ ID NO: 5566041 - DNA, 25 bp, Homo sapien
ccttggcaatcaatagacatgcccc

SEQ ID NO: 5566042 - DNA, 25 bp, Homo sapien
catgagagatatattccttggcaat

SEQ ID NO: 5566043 - DNA, 25 bp, Homo sapien
ccgcaagttaccaaagaacaacagc

SEQ ID NO: 5566044 - DNA, 25 bp, Homo sapien
aggttacagagcccaaccgcaagtt

SEQ ID NO: 5566045 - DNA, 25 bp, Homo sapien
tcaatagacatgccccccaagagag

SEQ ID NO: 5566046 - DNA, 25 bp, Homo sapien
ctggacacacgggtttaagactttg

SEQ ID NO: 5566047 - DNA, 25 bp, Homo sapien
agaacaacagcattccatgagagat

SEQ ID NO: 5566048 - DNA, 25 bp, Homo sapien
gaggcttatttcagacaaacagaat

SEQ ID NO: 5566049 - DNA, 25 bp, Homo sapien
agattaccaagggtacaagtggctc

SEQ ID NO: 5566050 - DNA, 25 bp, Homo sapien
ttcaatacaaggttacagagcccaa

SEQ ID NO: 5566051 - DNA, 25 bp, Homo sapien
taacctggaatgcctcatgaggagg

SEQ ID NO: 5566052 - DNA, 25 bp, Homo sapien
atgcatgaaagtcacaataaatcac

SEQ ID NO: 5566053 - DNA, 25 bp, Homo sapien
atataatcccccctcccaagactat

SEQ ID NO: 5566054 - DNA, 25 bp, Homo sapien
atccaccatgcccagcctgcccttt

SEQ ID NO: 5566055 - DNA, 25 bp, Homo sapien
ttctcgtaaggctatggtttcattt

SEQ ID NO: 5566056 - DNA, 25 bp, Homo sapien
gctatgtcactcaggctgaagtgca

SEQ ID NO: 5566057 - DNA, 25 bp, Homo sapien
cacagtgcactaaaacctcaaactc

SEQ ID NO: 5566058 - DNA, 25 bp, Homo sapien
ggctggtctcgaacttccccgcctc

SEQ ID NO: 5566059 - DNA, 25 bp, Homo sapien
tttttggtgacttctaaagcacagt

SEQ ID NO: 5566060 - DNA, 25 bp, Homo sapien
ccgcctcaagtgattctcccatttc

SEQ ID NO: 5566061 - DNA, 25 bp, Homo sapien
tccaaacaattggccaatgaccctt

SEQ ID NO: 5566062 - DNA, 25 bp, Homo sapien
gtggctattcacaggtgcaatcaca

SEQ ID NO: 5566063 - DNA, 25 bp, Homo sapien
tcagtgtcaaaatatgagcgccctt

SEQ ID NO: 5566064 - DNA, 25 bp, Homo sapien
acgctccctacaaaatctgtgtttc

SEQ ID NO: 5566065 - DNA, 25 bp, Homo sapien
gtgcacatagttaacattcagtgtc

SEQ ID NO: 5566066 - DNA, 25 bp, Homo sapien
cttgatacaagataagcatgcaata

SEQ ID NO: 5566067 - DNA, 25 bp, Homo sapien
tgtcagtgcctgcttccatttgaaa

SEQ ID NO: 5566068 - DNA, 25 bp, Homo sapien
ctcagtctcccctacgctccctaca

SEQ ID NO: 5566069 - DNA, 25 bp, Homo sapien
agagaatgaataagtgcccaatgtt

SEQ ID NO: 5566070 - DNA, 25 bp, Homo sapien
gaatagctagcatgatgtgcacata

SEQ ID NO: 5566071 - DNA, 25 bp, Homo sapien
ctgctagtgaaggaatatgattctt

SEQ ID NO: 5566072 - DNA, 25 bp, Homo sapien
atgagcgcccttactaacctgaacc

SEQ ID NO: 5566073 - DNA, 25 bp, Homo sapien
ttactcagagaatgaataagtgccc

SEQ ID NO: 5566074 - DNA, 25 bp, Homo sapien
tgacactgaccctgggctaggatgg

SEQ ID NO: 5566075 - DNA, 25 bp, Homo sapien
agaagaaaagtaagcctctttgggc

SEQ ID NO: 5566076 - DNA, 25 bp, Homo sapien
cttctcccagtccctcagggggaag

SEQ ID NO: 5566077 - DNA, 25 bp, Homo sapien
gtgcttccagggcacatggcttacc

SEQ ID NO: 5566078 - DNA, 25 bp, Homo sapien
tccaaagattgagattgaggcagag

SEQ ID NO: 5566079 - DNA, 25 bp, Homo sapien
accggacatgggtgtctccttaccc

SEQ ID NO: 5566080 - DNA, 25 bp, Homo sapien
agctcaggcacctcaaatgcccctc

SEQ ID NO: 5566081 - DNA, 25 bp, Homo sapien
gggtgcaaatctgaggctccctgca

SEQ ID NO: 5566082 - DNA, 25 bp, Homo sapien
aggtagaagggtttgtcttgcaacc

SEQ ID NO: 5566083 - DNA, 25 bp, Homo sapien
accactttggagctaaaaaggtcca

SEQ ID NO: 5566084 - DNA, 25 bp, Homo sapien
tgaaccatcaggtgcccttgctttc

SEQ ID NO: 5566085 - DNA, 25 bp, Homo sapien
attcaaacaccacatctgctcccaa

SEQ ID NO: 5566086 - DNA, 25 bp, Homo sapien
tagaacacaagtgagttgtggacag

SEQ ID NO: 5566087 - DNA, 25 bp, Homo sapien
cattgcggggtgtatacaaaaaaat

SEQ ID NO: 5566088 - DNA, 25 bp, Homo sapien
gctcccaaccacttcctaccacttc

SEQ ID NO: 5566089 - DNA, 25 bp, Homo sapien
agtgagttgtggacagtaatacata

SEQ ID NO: 5566090 - DNA, 25 bp, Homo sapien
ctttagggtacacttctgagcattt

SEQ ID NO: 5566091 - DNA, 25 bp, Homo sapien
cttctaggaatatggcattgcgggg

SEQ ID NO: 5566092 - DNA, 25 bp, Homo sapien
tctttaggtggattcatacatttgt

SEQ ID NO: 5566093 - DNA, 25 bp, Homo sapien
tacaaccaaaaccagcctagaacaa

SEQ ID NO: 5566094 - DNA, 25 bp, Homo sapien
agcatgagtaagaggctttagggta

SEQ ID NO: 5566095 - DNA, 25 bp, Homo sapien
accagcctagaacaaaagcatgagt

SEQ ID NO: 5566096 - DNA, 25 bp, Homo sapien
tactgaacaacagtggaaaagacaa

SEQ ID NO: 5566097 - DNA, 25 bp, Homo sapien
taacagacgtatacatagaaccttt

SEQ ID NO: 5566098 - DNA, 25 bp, Homo sapien
acacagcctcattgaggggagatgg

SEQ ID NO: 5566099 - DNA, 25 bp, Homo sapien
tagaaccttaagtaggaggccctca

SEQ ID NO: 5566100 - DNA, 25 bp, Homo sapien
gtggaaaagacaactacacagcctc

SEQ ID NO: 5566101 - DNA, 25 bp, Homo sapien
tcaaggtagaatcgttggaacttac

SEQ ID NO: 5566102 - DNA, 25 bp, Homo sapien
acttactggtaactggacacgggta

SEQ ID NO: 5566103 - DNA, 25 bp, Homo sapien
tagtccttagggagtcaatgtgtgt

SEQ ID NO: 5566104 - DNA, 25 bp, Homo sapien
ttaaatacagttcagttggagcccc

SEQ ID NO: 5566105 - DNA, 25 bp, Homo sapien
gggagatgggtactgtatacttact

SEQ ID NO: 5566106 - DNA, 25 bp, Homo sapien
aggaggccctcaaatggacttacgt

SEQ ID NO: 5566107 - DNA, 25 bp, Homo sapien
gagttgacctaatatcacatcagtg

SEQ ID NO: 5566108 - DNA, 25 bp, Homo sapien
tgaactttatgctaatgggaaaata

SEQ ID NO: 5566109 - DNA, 25 bp, Homo sapien
aaaaaatattgcattgagttgacct

SEQ ID NO: 5566110 - DNA, 25 bp, Homo sapien
tgaacaactgaactgaactttatgc

SEQ ID NO: 5566111 - DNA, 25 bp, Homo sapien
cttctaattacatgaggcttctgct

SEQ ID NO: 5566112 - DNA, 25 bp, Homo sapien
aatttatcatgaagtcagctgcttg

SEQ ID NO: 5566113 - DNA, 25 bp, Homo sapien
gaggcttctgctcatgataaagata

SEQ ID NO: 5566114 - DNA, 25 bp, Homo sapien
acaggtgtttgaacaactgaactga

SEQ ID NO: 5566115 - DNA, 25 bp, Homo sapien
tcagctgcttgttaaccttgacact

SEQ ID NO: 5566116 - DNA, 25 bp, Homo sapien
agcctgagcactatattatacaaca

SEQ ID NO: 5566117 - DNA, 25 bp, Homo sapien
aatcacatgtacagtccacattgtc

SEQ ID NO: 5566118 - DNA, 25 bp, Homo sapien
gtgggaaaacttgttagcagccttg

SEQ ID NO: 5566119 - DNA, 25 bp, Homo sapien
taacatcagacttggcatcagggac

SEQ ID NO: 5566120 - DNA, 25 bp, Homo sapien
aattcctgaggtgtcaggtgtggac

SEQ ID NO: 5566121 - DNA, 25 bp, Homo sapien
aggtgtggactgtttaactctgctt

SEQ ID NO: 5566122 - DNA, 25 bp, Homo sapien
tgcttgtaacaacagatacttgaac

SEQ ID NO: 5566123 - DNA, 25 bp, Homo sapien
gacaccattggaacaaatctacttt

SEQ ID NO: 5566124 - DNA, 25 bp, Homo sapien
gttagaatatatgggctaggttggg

SEQ ID NO: 5566125 - DNA, 25 bp, Homo sapien
tgcatgagatgtttatgtcagttac

SEQ ID NO: 5566126 - DNA, 25 bp, Homo sapien
gaacagattgatattagatggcacc

SEQ ID NO: 5566127 - DNA, 25 bp, Homo sapien
gcatggggccttgtctagtctaatc

SEQ ID NO: 5566128 - DNA, 25 bp, Homo sapien
agagataagatttgggcagttactt

SEQ ID NO: 5566129 - DNA, 25 bp, Homo sapien
cttggaaattatagtgaagtggggt

SEQ ID NO: 5566130 - DNA, 25 bp, Homo sapien
agctagtgatgaggtctccgttctc

SEQ ID NO: 5566131 - DNA, 25 bp, Homo sapien
gctactgcatcttacctggacaaat

SEQ ID NO: 5566132 - DNA, 25 bp, Homo sapien
acacaaatgtaaatgcccccaaatc

SEQ ID NO: 5566133 - DNA, 25 bp, Homo sapien
caaaacatgcagctagtgatgaggt

SEQ ID NO: 5566134 - DNA, 25 bp, Homo sapien
cacaaaagcaataattagcagaaat

SEQ ID NO: 5566135 - DNA, 25 bp, Homo sapien
gctgctcagggagcagctactgcat

SEQ ID NO: 5566136 - DNA, 25 bp, Homo sapien
cacctaagcgtgtccctttaaacaa

SEQ ID NO: 5566137 - DNA, 25 bp, Homo sapien
ccccaaatccaaaacatgcagctag

SEQ ID NO: 5566138 - DNA, 25 bp, Homo sapien
tgtacaaaacaaacctggcagcatc

SEQ ID NO: 5566139 - DNA, 25 bp, Homo sapien
aacaaacctggcagcatctgtggga

SEQ ID NO: 5566140 - DNA, 25 bp, Homo sapien
ggctccgaagcagtcgtctcatctt

SEQ ID NO: 5566141 - DNA, 25 bp, Homo sapien
cataggattaaaatggaaggcaatt

SEQ ID NO: 5566142 - DNA, 25 bp, Homo sapien
ggtggcgaactgatagctatgtcca

SEQ ID NO: 5566143 - DNA, 25 bp, Homo sapien
tagtcaacctagctggggtgaaaga

SEQ ID NO: 5566144 - DNA, 25 bp, Homo sapien
attctcttagaggaccagcagagcg

SEQ ID NO: 5566145 - DNA, 25 bp, Homo sapien
ggtaaatgtgattggcaggcatatc

SEQ ID NO: 5566146 - DNA, 25 bp, Homo sapien
gtaaatgtgggactagtcaacctag

SEQ ID NO: 5566147 - DNA, 25 bp, Homo sapien
catacatctgcaatggtggcgaact

SEQ ID NO: 5566148 - DNA, 25 bp, Homo sapien
ggcttgactgtactgcacgacactc

SEQ ID NO: 5566149 - DNA, 25 bp, Homo sapien
gctaggccccaaccagcttcggctt

SEQ ID NO: 5566150 - DNA, 25 bp, Homo sapien
aatatagtggtgattaaaatgggtc

SEQ ID NO: 5566151 - DNA, 25 bp, Homo sapien
gaggactttaagggctatcactttc

SEQ ID NO: 5566152 - DNA, 25 bp, Homo sapien
ggggctgatcgatgataacactgtg

SEQ ID NO: 5566153 - DNA, 25 bp, Homo sapien
caggcttgccagcacctctaggagt

SEQ ID NO: 5566154 - DNA, 25 bp, Homo sapien
agacaaatgactcaacaagacagcc

SEQ ID NO: 5566155 - DNA, 25 bp, Homo sapien
atgaggaggacatgcttgttcttta

SEQ ID NO: 5566156 - DNA, 25 bp, Homo sapien
agagaaagtgatgttactaaccctc

SEQ ID NO: 5566157 - DNA, 25 bp, Homo sapien
agtgtgagataatggagttcctgaa

SEQ ID NO: 5566158 - DNA, 25 bp, Homo sapien
aggagtaaatcacaagactgagacc

SEQ ID NO: 5566159 - DNA, 25 bp, Homo sapien
aacccctacgatgaatatgtccacc

SEQ ID NO: 5566160 - DNA, 25 bp, Homo sapien
ttctaagcagcagaattcgtgggat

SEQ ID NO: 5566161 - DNA, 25 bp, Homo sapien
tccatacttaagggtcaggatctcc

SEQ ID NO: 5566162 - DNA, 25 bp, Homo sapien
tcgatcagtcttctcagtatggcat

SEQ ID NO: 5566163 - DNA, 25 bp, Homo sapien
aagaagagatcctttaggagtttgc

SEQ ID NO: 5566164 - DNA, 25 bp, Homo sapien
ggggaccctatattatgtgtcaggc

SEQ ID NO: 5566165 - DNA, 25 bp, Homo sapien
tccgtgccacactgagattccacac

SEQ ID NO: 5566166 - DNA, 25 bp, Homo sapien
gaattgtttccaagaagagatcctt

SEQ ID NO: 5566167 - DNA, 25 bp, Homo sapien
gttctgtagcttggcagtaaaactc

SEQ ID NO: 5566168 - DNA, 25 bp, Homo sapien
cttcccaagatcacccaggcgatga

SEQ ID NO: 5566169 - DNA, 25 bp, Homo sapien
ggcatttgataaagttctgtagctt

SEQ ID NO: 5566170 - DNA, 25 bp, Homo sapien
ctggggccgttacccatgtacttta

SEQ ID NO: 5566171 - DNA, 25 bp, Homo sapien
acaggtgaggaaattaaagctaccg

SEQ ID NO: 5566172 - DNA, 25 bp, Homo sapien
agagaactaacatttcaggggaccc

SEQ ID NO: 5566173 - DNA, 25 bp, Homo sapien
gaacgctgggagtatcaactcatct

SEQ ID NO: 5566174 - DNA, 25 bp, Homo sapien
aactacagtatgattccatggatga

SEQ ID NO: 5566175 - DNA, 25 bp, Homo sapien
gaatgcctcggctcaggcaatccac

SEQ ID NO: 5566176 - DNA, 25 bp, Homo sapien
agttctcaaatctaagtggctgttt

SEQ ID NO: 5566177 - DNA, 25 bp, Homo sapien
caaagcacttagcatagttctcaaa

SEQ ID NO: 5566178 - DNA, 25 bp, Homo sapien
tgccaggccccttagttttttgagc

SEQ ID NO: 5566179 - DNA, 25 bp, Homo sapien
ccatggatgaattagaaacagtctt

SEQ ID NO: 5566180 - DNA, 25 bp, Homo sapien
ctaacaatatttgggaacgctggga

SEQ ID NO: 5566181 - DNA, 25 bp, Homo sapien
atttaacactggcccctaacaatat

SEQ ID NO: 5566182 - DNA, 25 bp, Homo sapien
gacgagatactgcctgcaaagcact

SEQ ID NO: 5566183 - DNA, 25 bp, Homo sapien
attctgaaacaagacgagatactgc

SEQ ID NO: 5566184 - DNA, 25 bp, Homo sapien
atagaactgaatacacaaaaacact

SEQ ID NO: 5566185 - DNA, 25 bp, Homo sapien
gccactgaaataatgtcaccaagtc

SEQ ID NO: 5566186 - DNA, 25 bp, Homo sapien
cttgccgcgagttcacaaatatgac

SEQ ID NO: 5566187 - DNA, 25 bp, Homo sapien
gggggagacaatggtttattgatca

SEQ ID NO: 5566188 - DNA, 25 bp, Homo sapien
gaatcagaaacacttcatcccacat

SEQ ID NO: 5566189 - DNA, 25 bp, Homo sapien
gaagagagttgagccactgaaataa

SEQ ID NO: 5566190 - DNA, 25 bp, Homo sapien
tgacaactgcagatgaggataaaga

SEQ ID NO: 5566191 - DNA, 25 bp, Homo sapien
aatatctcacttgccgcgagttcac

SEQ ID NO: 5566192 - DNA, 25 bp, Homo sapien
cacaataacactgaatcagaaacac

SEQ ID NO: 5566193 - DNA, 25 bp, Homo sapien
tcaccaagtcaatgtagcaaagtac

SEQ ID NO: 5566194 - DNA, 25 bp, Homo sapien
caaatatgacaactgcagatgagga

SEQ ID NO: 5566195 - DNA, 25 bp, Homo sapien
ggaaaactagattatgccaagccct

SEQ ID NO: 5566196 - DNA, 25 bp, Homo sapien
acaatatcaaaaggctggtacttac

SEQ ID NO: 5566197 - DNA, 25 bp, Homo sapien
aggtatttcactaggctggaaggat

SEQ ID NO: 5566198 - DNA, 25 bp, Homo sapien
gcataaagataagaacctggctgag

SEQ ID NO: 5566199 - DNA, 25 bp, Homo sapien
ggctgagcccaaggtaagtattcaa

SEQ ID NO: 5566200 - DNA, 25 bp, Homo sapien
gccaagccctgcactagatacttta

SEQ ID NO: 5566201 - DNA, 25 bp, Homo sapien
gagttcaagtaatgcccccacccac

SEQ ID NO: 5566202 - DNA, 25 bp, Homo sapien
acgggacagtatgaaaaagtgtatt

SEQ ID NO: 5566203 - DNA, 25 bp, Homo sapien
ccatcacaggatgaagagattcaga

SEQ ID NO: 5566204 - DNA, 25 bp, Homo sapien
taggctggaaggattacaatatcaa

SEQ ID NO: 5566205 - DNA, 25 bp, Homo sapien
ttactggcaaagactcattgaattc

SEQ ID NO: 5566206 - DNA, 25 bp, Homo sapien
caaataggtctgtatagggtatgtc

SEQ ID NO: 5566207 - DNA, 25 bp, Homo sapien
agtgattgctatatggcaagggata

SEQ ID NO: 5566208 - DNA, 25 bp, Homo sapien
ggatgaaattaagctgtgataaccc

SEQ ID NO: 5566209 - DNA, 25 bp, Homo sapien
tcaaaggtatagataaagcactccc

SEQ ID NO: 5566210 - DNA, 25 bp, Homo sapien
tgggggaagcattaacaattagaaa

SEQ ID NO: 5566211 - DNA, 25 bp, Homo sapien
ggtaaagacaccaagcctggatgaa

SEQ ID NO: 5566212 - DNA, 25 bp, Homo sapien
acgggctgctgctacctgccaactc

SEQ ID NO: 5566213 - DNA, 25 bp, Homo sapien
gcaagggataaacatggacagtttg

SEQ ID NO: 5566214 - DNA, 25 bp, Homo sapien
gcagggaatgtcatcttagggaaga

SEQ ID NO: 5566215 - DNA, 25 bp, Homo sapien
atgtcacacaatatttgggggaagc

SEQ ID NO: 5566216 - DNA, 25 bp, Homo sapien
gaggctgtacctaactggcctggtc

SEQ ID NO: 5566217 - DNA, 25 bp, Homo sapien
cggaagtataaacgtcctatatctg

SEQ ID NO: 5566218 - DNA, 25 bp, Homo sapien
cagatataggacgtttatacttccg

SEQ ID NO: 5566219 - DNA, 25 bp, Homo sapien
gaaaagttgggtacatgtcacatta

SEQ ID NO: 5566220 - DNA, 25 bp, Homo sapien
atacaaggaataacgaacatataat

SEQ ID NO: 5566221 - DNA, 25 bp, Homo sapien
aaaagaccagcttaagcatagtttc

SEQ ID NO: 5566222 - DNA, 25 bp, Homo sapien
aagaacaacgcatttttatcaagca

SEQ ID NO: 5566223 - DNA, 25 bp, Homo sapien
tcaagcaaaagataagtggcaataa

SEQ ID NO: 5566224 - DNA, 25 bp, Homo sapien
acagaacgtaagcgtcatcttgcat

SEQ ID NO: 5566225 - DNA, 25 bp, Homo sapien
acaaattaatgaaaagttgggtaca

SEQ ID NO: 5566226 - DNA, 25 bp, Homo sapien
tactaatggtttacagaacgtaagc

SEQ ID NO: 5566227 - DNA, 25 bp, Homo sapien
cacattagcaatgcaaaagaccagc

SEQ ID NO: 5566228 - DNA, 25 bp, Homo sapien
agtcacttctagggaaagattaatc

SEQ ID NO: 5566229 - DNA, 25 bp, Homo sapien
agataagtggcaataatacaaggaa

SEQ ID NO: 5566230 - DNA, 25 bp, Homo sapien
ctaaagaaaaaggtagccaaataga

SEQ ID NO: 5566231 - DNA, 25 bp, Homo sapien
gacacaaaggaaattattaatagat

SEQ ID NO: 5566232 - DNA, 25 bp, Homo sapien
gagaagtccttcttaagcaacaaaa

SEQ ID NO: 5566233 - DNA, 25 bp, Homo sapien
aaggtagccaaatagagactagcat

SEQ ID NO: 5566234 - DNA, 25 bp, Homo sapien
ataaggttaaatctttgagaagtcc

SEQ ID NO: 5566235 - DNA, 25 bp, Homo sapien
aagatgatgagctataatggagaga

SEQ ID NO: 5566236 - DNA, 25 bp, Homo sapien
ttaagcaacaaaacctcagagacac

SEQ ID NO: 5566237 - DNA, 25 bp, Homo sapien
atagagactagcattaagctgctct

SEQ ID NO: 5566238 - DNA, 25 bp, Homo sapien
taagctgctctaggaatttcacatt

SEQ ID NO: 5566239 - DNA, 25 bp, Homo sapien
caaaacctcagagacacaaaggaaa

SEQ ID NO: 5566240 - DNA, 25 bp, Homo sapien
ataaacaaagctaaaagatgatgag

SEQ ID NO: 5566241 - DNA, 25 bp, Homo sapien
ataacccaagatatgagtgctattt

SEQ ID NO: 5566242 - DNA, 25 bp, Homo sapien
agatgagacaatacaggcaacatat

SEQ ID NO: 5566243 - DNA, 25 bp, Homo sapien
ctcaagggatatagtggctgttaag

SEQ ID NO: 5566244 - DNA, 25 bp, Homo sapien
tatctatcactaactgtcccaggcc

SEQ ID NO: 5566245 - DNA, 25 bp, Homo sapien
acttctggggcccttcacttgcctc

SEQ ID NO: 5566246 - DNA, 25 bp, Homo sapien
ccagcaatcaataaacaggttaatc

SEQ ID NO: 5566247 - DNA, 25 bp, Homo sapien
acttagcaataagatccctcacttc

SEQ ID NO: 5566248 - DNA, 25 bp, Homo sapien
ataaggatgcgatcagactttgctt

SEQ ID NO: 5566249 - DNA, 25 bp, Homo sapien
tgaacatggaatacaaaatagcaac

SEQ ID NO: 5566250 - DNA, 25 bp, Homo sapien
atagcaacagtagctaacatgtatc

SEQ ID NO: 5566251 - DNA, 25 bp, Homo sapien
tgccaggtcccatgcaatatttgcc

SEQ ID NO: 5566252 - DNA, 25 bp, Homo sapien
gtactgatcaccacactggccacag

SEQ ID NO: 5566253 - DNA, 25 bp, Homo sapien
ataacagtcaccacagctcacagct

SEQ ID NO: 5566254 - DNA, 25 bp, Homo sapien
atcactaggaaaaataacagtcacc

SEQ ID NO: 5566255 - DNA, 25 bp, Homo sapien
ctttgtgaaaagtctgcatatgcca

SEQ ID NO: 5566256 - DNA, 25 bp, Homo sapien
ccagagctcaagaaaacaatcactt

SEQ ID NO: 5566257 - DNA, 25 bp, Homo sapien
ctggccacagtgaacagaatgaata

SEQ ID NO: 5566258 - DNA, 25 bp, Homo sapien
tgttaccaagtagtccagagctcaa

SEQ ID NO: 5566259 - DNA, 25 bp, Homo sapien
ggagctacaaagtgaaggaacttat

SEQ ID NO: 5566260 - DNA, 25 bp, Homo sapien
cagctcacagctatagaacagccac

SEQ ID NO: 5566261 - DNA, 25 bp, Homo sapien
ttggccactggtgtggccagtactg

SEQ ID NO: 5566262 - DNA, 25 bp, Homo sapien
aacagccacatgatgaatgcagttc

SEQ ID NO: 5566263 - DNA, 25 bp, Homo sapien
gaacgagaactacagtcctgtgacc

SEQ ID NO: 5566264 - DNA, 25 bp, Homo sapien
ggtcacaggactgtagttctcgttc

SEQ ID NO: 5566265 - DNA, 25 bp, Homo sapien
tgctggcaattaaaggtaagtagcc

SEQ ID NO: 5566266 - DNA, 25 bp, Homo sapien
aaaagaccattacacaagattgcac

SEQ ID NO: 5566267 - DNA, 25 bp, Homo sapien
tacgttgagagcagtttaaaatttc

SEQ ID NO: 5566268 - DNA, 25 bp, Homo sapien
aagattcctacgttgagagcagttt

SEQ ID NO: 5566269 - DNA, 25 bp, Homo sapien
ctggattcaaagtccccttggccaa

SEQ ID NO: 5566270 - DNA, 25 bp, Homo sapien
agagctgtcgagattcaaagtttcc

SEQ ID NO: 5566271 - DNA, 25 bp, Homo sapien
caaaacagtcaaaataaaagaccat

SEQ ID NO: 5566272 - DNA, 25 bp, Homo sapien
ccccttggccaagctcattgcattc

SEQ ID NO: 5566273 - DNA, 25 bp, Homo sapien
gtgattctcagagctgtcgagattc

SEQ ID NO: 5566274 - DNA, 25 bp, Homo sapien
catagtccggggtataacattatcc

SEQ ID NO: 5566275 - DNA, 25 bp, Homo sapien
tcagacctcaggtaggaacttttcc

SEQ ID NO: 5566276 - DNA, 25 bp, Homo sapien
tggagtaagatatgctgtaagtcac

SEQ ID NO: 5566277 - DNA, 25 bp, Homo sapien
tgtaagtcactgtaatgattaaacc

SEQ ID NO: 5566278 - DNA, 25 bp, Homo sapien
taacatcacacgtttggagtaagat

SEQ ID NO: 5566279 - DNA, 25 bp, Homo sapien
acagtgaactggtaagtttaaatgt

SEQ ID NO: 5566280 - DNA, 25 bp, Homo sapien
ttctagaaatagatggaccatagtt

SEQ ID NO: 5566281 - DNA, 25 bp, Homo sapien
cacacgtttggagtaagatatgctg

SEQ ID NO: 5566282 - DNA, 25 bp, Homo sapien
gtagtagcagaaatagtgacaacaa

SEQ ID NO: 5566283 - DNA, 25 bp, Homo sapien
aaaagtagttgctgggctaacattt

SEQ ID NO: 5566284 - DNA, 25 bp, Homo sapien
atggaccatagttaacatcacacgt

SEQ ID NO: 5566285 - DNA, 25 bp, Homo sapien
gtgacaacaaaagtagttgctgggc

SEQ ID NO: 5566286 - DNA, 25 bp, Homo sapien
aaaacaagtttaagatggcattatt

SEQ ID NO: 5566287 - DNA, 25 bp, Homo sapien
aagaaggctgccaataagtagaact

SEQ ID NO: 5566288 - DNA, 25 bp, Homo sapien
ccaataagtagaactcagcaatttc

SEQ ID NO: 5566289 - DNA, 25 bp, Homo sapien
cacaatacataatatcacagaacac

SEQ ID NO: 5566290 - DNA, 25 bp, Homo sapien
cttcaaattcagtgtaaacaataat

SEQ ID NO: 5566291 - DNA, 25 bp, Homo sapien
cacttgaggtaaggaaaaaaataca

SEQ ID NO: 5566292 - DNA, 25 bp, Homo sapien
atcacatttaaaagaaggctgccaa

SEQ ID NO: 5566293 - DNA, 25 bp, Homo sapien
tgacttaattgacaagcctaggaat

SEQ ID NO: 5566294 - DNA, 25 bp, Homo sapien
ttctttttgacaatcagtggaattc

SEQ ID NO: 5566295 - DNA, 25 bp, Homo sapien
agtttgtaacaaaaggaacagaaca

SEQ ID NO: 5566296 - DNA, 25 bp, Homo sapien
caatcagtggaattcattacatact

SEQ ID NO: 5566297 - DNA, 25 bp, Homo sapien
aatcacagtttgtaacaaaaggaac

SEQ ID NO: 5566298 - DNA, 25 bp, Homo sapien
ttccatctcaggagcatttgctgcc

SEQ ID NO: 5566299 - DNA, 25 bp, Homo sapien
gcagctggcaggtaaccttgaactg

SEQ ID NO: 5566300 - DNA, 25 bp, Homo sapien
atctcaagctacatggcagggttta

SEQ ID NO: 5566301 - DNA, 25 bp, Homo sapien
aggcattatgtagcgatagaaaagc

SEQ ID NO: 5566302 - DNA, 25 bp, Homo sapien
ttgaactgctcaccatggtaccatc

SEQ ID NO: 5566303 - DNA, 25 bp, Homo sapien
attagtgtatcgagatgcctgctac

SEQ ID NO: 5566304 - DNA, 25 bp, Homo sapien
cctatgtctgaggctgtgatggttc

SEQ ID NO: 5566305 - DNA, 25 bp, Homo sapien
ttactgaacgattaagaaacgcact

SEQ ID NO: 5566306 - DNA, 25 bp, Homo sapien
ttaaggacaatgctccaacacaacc

SEQ ID NO: 5566307 - DNA, 25 bp, Homo sapien
atagcttgtgaacttgcagggactc

SEQ ID NO: 5566308 - DNA, 25 bp, Homo sapien
agtgccttggctgcagtaggcactc

SEQ ID NO: 5566309 - DNA, 25 bp, Homo sapien
ggtgtgctagggtaaaatatgatat

SEQ ID NO: 5566310 - DNA, 25 bp, Homo sapien
ccaacgtagtaaatcgaatgaaaac

SEQ ID NO: 5566311 - DNA, 25 bp, Homo sapien
tcatatagacaaaagtgcacctgca

SEQ ID NO: 5566312 - DNA, 25 bp, Homo sapien
cataatatgtctgaagggtggtagg

SEQ ID NO: 5566313 - DNA, 25 bp, Homo sapien
gaatggaaggactgatcttggtcat

SEQ ID NO: 5566314 - DNA, 25 bp, Homo sapien
tagtgtaatctatgaagagctgtat

SEQ ID NO: 5566315 - DNA, 25 bp, Homo sapien
catcaagataaaaaaaccaacgtag

SEQ ID NO: 5566316 - DNA, 25 bp, Homo sapien
atatctgtagagggcctactctggg

SEQ ID NO: 5566317 - DNA, 25 bp, Homo sapien
tcaaagaggggctactctgaatgga

SEQ ID NO: 5566318 - DNA, 25 bp, Homo sapien
taagcacttgctatgagctagatgc

SEQ ID NO: 5566319 - DNA, 25 bp, Homo sapien
ataagaccaagaagtctaccaaatc

SEQ ID NO: 5566320 - DNA, 25 bp, Homo sapien
gacccaggttcctctgcagcccctg

SEQ ID NO: 5566321 - DNA, 25 bp, Homo sapien
tataaaaagagccccaccaaacaga

SEQ ID NO: 5566322 - DNA, 25 bp, Homo sapien
gaggagataccccatttaaagagcc

SEQ ID NO: 5566323 - DNA, 25 bp, Homo sapien
accatctgagttagtccaggccctc

SEQ ID NO: 5566324 - DNA, 25 bp, Homo sapien
catttaaagagcccctgagcctcct

SEQ ID NO: 5566325 - DNA, 25 bp, Homo sapien
ccccaccaaacagaagagttaggaa

SEQ ID NO: 5566326 - DNA, 25 bp, Homo sapien
tgtccctgctttggcccctccccca

SEQ ID NO: 5566327 - DNA, 25 bp, Homo sapien
cctcccccagtccccttgtccagcc

SEQ ID NO: 5566328 - DNA, 25 bp, Homo sapien
cttgtccagccgagcaccatctgag

SEQ ID NO: 5566329 - DNA, 25 bp, Homo sapien
tgagcctcctggatctaggtcaagg

SEQ ID NO: 5566330 - DNA, 25 bp, Homo sapien
actcctgcaaagtggaggctctgtg

SEQ ID NO: 5566331 - DNA, 25 bp, Homo sapien
ctctcaagaagctaatcccagtgtt

SEQ ID NO: 5566332 - DNA, 25 bp, Homo sapien
acagagcccctttgaagatagcctt

SEQ ID NO: 5566333 - DNA, 25 bp, Homo sapien
gggactccccaagcgctctgcggga

SEQ ID NO: 5566334 - DNA, 25 bp, Homo sapien
gaagctaatcccagtgttacggctc

SEQ ID NO: 5566335 - DNA, 25 bp, Homo sapien
ctgtaccacgttctgcagaaaagag

SEQ ID NO: 5566336 - DNA, 25 bp, Homo sapien
aaaagaaaagcagttaatcctttca

SEQ ID NO: 5566337 - DNA, 25 bp, Homo sapien
ctccctggatagtcacagggcagac

SEQ ID NO: 5566338 - DNA, 25 bp, Homo sapien
cacaaagaatgaatgtggttcctgc

SEQ ID NO: 5566339 - DNA, 25 bp, Homo sapien
ttcatcagccacagagcccctttga

SEQ ID NO: 5566340 - DNA, 25 bp, Homo sapien
agcagatgtctgctaaagtgaaggt

SEQ ID NO: 5566341 - DNA, 25 bp, Homo sapien
cacactttttgagcagggactcccc

SEQ ID NO: 5566342 - DNA, 25 bp, Homo sapien
ttatagaataagcaagagtaggaaa

SEQ ID NO: 5566343 - DNA, 25 bp, Homo sapien
cacaccatcagcacggacatcacat

SEQ ID NO: 5566344 - DNA, 25 bp, Homo sapien
ttcaaagtgtggatcacacaccatc

SEQ ID NO: 5566345 - DNA, 25 bp, Homo sapien
gtacaaaatatataggagcttggac

SEQ ID NO: 5566346 - DNA, 25 bp, Homo sapien
gagtagttctgaaaacccatcaaat

SEQ ID NO: 5566347 - DNA, 25 bp, Homo sapien
aacaaggtcccacatgatcatatat

SEQ ID NO: 5566348 - DNA, 25 bp, Homo sapien
agactggatctaaagcccattacac

SEQ ID NO: 5566349 - DNA, 25 bp, Homo sapien
gagtaggaaacagatacaccacact

SEQ ID NO: 5566350 - DNA, 25 bp, Homo sapien
tataggagcttggacactaccacta

SEQ ID NO: 5566351 - DNA, 25 bp, Homo sapien
tatatatgttaaggtttgaggttct

SEQ ID NO: 5566352 - DNA, 25 bp, Homo sapien
gacatcacatggagctcgctggaac

SEQ ID NO: 5566353 - DNA, 25 bp, Homo sapien
actcgattgtagaaaaagaagaaag

SEQ ID NO: 5566354 - DNA, 25 bp, Homo sapien
aggacatagtacagaactatagttt

SEQ ID NO: 5566355 - DNA, 25 bp, Homo sapien
ctgccttcacaactagaggaagtaa

SEQ ID NO: 5566356 - DNA, 25 bp, Homo sapien
ctagttggttagatactgcactttc

SEQ ID NO: 5566357 - DNA, 25 bp, Homo sapien
caaaaaaggtaacttatgcaatgtt

SEQ ID NO: 5566358 - DNA, 25 bp, Homo sapien
acagaataaggtacaaaagaacact

SEQ ID NO: 5566359 - DNA, 25 bp, Homo sapien
gaagccaggtctgcaccactgaatt

SEQ ID NO: 5566360 - DNA, 25 bp, Homo sapien
aagaaaaccaatagtacacgctaac

SEQ ID NO: 5566361 - DNA, 25 bp, Homo sapien
aagaaaaaataaagcgtgtgtgtca

SEQ ID NO: 5566362 - DNA, 25 bp, Homo sapien
caaaagaacacttctggaaacagca

SEQ ID NO: 5566363 - DNA, 25 bp, Homo sapien
atatataacaaaggtgcacttgttc

SEQ ID NO: 5566364 - DNA, 25 bp, Homo sapien
tcacaggcagcagacatgacttaga

SEQ ID NO: 5566365 - DNA, 25 bp, Homo sapien
tggaaggatcacagtccctccagtt

SEQ ID NO: 5566366 - DNA, 25 bp, Homo sapien
tttgaaagcactccttcccaggctc

SEQ ID NO: 5566367 - DNA, 25 bp, Homo sapien
cagctaaagtaggattaaaacccag

SEQ ID NO: 5566368 - DNA, 25 bp, Homo sapien
tcttcaagatttaatgagctgactc

SEQ ID NO: 5566369 - DNA, 25 bp, Homo sapien
gcagcagacatgacttagaaggaaa

SEQ ID NO: 5566370 - DNA, 25 bp, Homo sapien
ggctggctgtcaggtaagcctcttc

SEQ ID NO: 5566371 - DNA, 25 bp, Homo sapien
ttaaaacccagagctctggccgagc

SEQ ID NO: 5566372 - DNA, 25 bp, Homo sapien
aaaaatacaggttttgaaagcactc

SEQ ID NO: 5566373 - DNA, 25 bp, Homo sapien
ctccttcccaggctcacaggcagca

SEQ ID NO: 5566374 - DNA, 25 bp, Homo sapien
ttgcccaaggttctacagctaaagt

SEQ ID NO: 5566375 - DNA, 25 bp, Homo sapien
aatttggaaaagcacatgttaaaaa

SEQ ID NO: 5566376 - DNA, 25 bp, Homo sapien
tgaaatcaaaactttgtgaggccaa

SEQ ID NO: 5566377 - DNA, 25 bp, Homo sapien
gtgaggccaaagcaatgaataatct

SEQ ID NO: 5566378 - DNA, 25 bp, Homo sapien
aacattaaaggaagatattttcact

SEQ ID NO: 5566379 - DNA, 25 bp, Homo sapien
tattcagcacacactttcctcctcc

SEQ ID NO: 5566380 - DNA, 25 bp, Homo sapien
ttgtatgatcagtgggaaatgttta

SEQ ID NO: 5566381 - DNA, 25 bp, Homo sapien
tctgattagaaagcccaagtttttg

SEQ ID NO: 5566382 - DNA, 25 bp, Homo sapien
cccgttctgtatgaaagagcacaac

SEQ ID NO: 5566383 - DNA, 25 bp, Homo sapien
aaagagcacaacattcaaaactaca

SEQ ID NO: 5566384 - DNA, 25 bp, Homo sapien
gaaagtttatgcatttggtatactc

SEQ ID NO: 5566385 - DNA, 25 bp, Homo sapien
acctgaggattatgtttcccgttct

SEQ ID NO: 5566386 - DNA, 25 bp, Homo sapien
tatccagaaaattatgagtccatag

SEQ ID NO: 5566387 - DNA, 25 bp, Homo sapien
tttaatgtgaagaatattaggaaga

SEQ ID NO: 5566388 - DNA, 25 bp, Homo sapien
gacagaaataaagaagcaaactcat

SEQ ID NO: 5566389 - DNA, 25 bp, Homo sapien
ggaactttcttgggagccataatag

SEQ ID NO: 5566390 - DNA, 25 bp, Homo sapien
agggaacaaaacactaaagcaggaa

SEQ ID NO: 5566391 - DNA, 25 bp, Homo sapien
gggagaagggtttgtcttactgata

SEQ ID NO: 5566392 - DNA, 25 bp, Homo sapien
tatatgccagaaataccaaatgaac

SEQ ID NO: 5566393 - DNA, 25 bp, Homo sapien
cctgccttcatgggacttaccttct

SEQ ID NO: 5566394 - DNA, 25 bp, Homo sapien
ttaccttctagggcatgtgatgggc

SEQ ID NO: 5566395 - DNA, 25 bp, Homo sapien
tcatagattgtcaggtacaggggat

SEQ ID NO: 5566396 - DNA, 25 bp, Homo sapien
caaaactgacaaagcccctgccttc

SEQ ID NO: 5566397 - DNA, 25 bp, Homo sapien
cttgcaggaatacaagaaagcaggt

SEQ ID NO: 5566398 - DNA, 25 bp, Homo sapien
atggattatgcatgaagtcagtctc

SEQ ID NO: 5566399 - DNA, 25 bp, Homo sapien
ttcagtcctgctatgaggtgatact

SEQ ID NO: 5566400 - DNA, 25 bp, Homo sapien
aatgactataagcctggaactgccc

SEQ ID NO: 5566401 - DNA, 25 bp, Homo sapien
gaatacagtacagttctgagtcccc

SEQ ID NO: 5566402 - DNA, 25 bp, Homo sapien
ggaactgcccaccctgccgtgtact

SEQ ID NO: 5566403 - DNA, 25 bp, Homo sapien
actacaagggtagtagagtcttggg

SEQ ID NO: 5566404 - DNA, 25 bp, Homo sapien
aaggtcaaggtggttggatttttga

SEQ ID NO: 5566405 - DNA, 25 bp, Homo sapien
tgggcagcctaagtcttgaccgttt

SEQ ID NO: 5566406 - DNA, 25 bp, Homo sapien
aggactccatgctaaagggtcagat

SEQ ID NO: 5566407 - DNA, 25 bp, Homo sapien
ggtcagataatgaggtaaaggtcaa

SEQ ID NO: 5566408 - DNA, 25 bp, Homo sapien
ctggctgcgcgaggcccgcttcctc

SEQ ID NO: 5566409 - DNA, 25 bp, Homo sapien
gaggaagcgggcctcgcgcagccag

SEQ ID NO: 5566410 - DNA, 25 bp, Homo sapien
ccccgacctggctgcgcgaggcccg

SEQ ID NO: 5566411 - DNA, 25 bp, Homo sapien
cgggcctcgcgcagccaggtcgggg

SEQ ID NO: 5566412 - DNA, 25 bp, Homo sapien
ttaaactatgagtactgcttgtaac

SEQ ID NO: 5566413 - DNA, 25 bp, Homo sapien
aagccatccgatgttagatttaaaa

SEQ ID NO: 5566414 - DNA, 25 bp, Homo sapien
tcttggagtttgacacccacttaac

SEQ ID NO: 5566415 - DNA, 25 bp, Homo sapien
actgcttgtaactgagatgtgcatt

SEQ ID NO: 5566416 - DNA, 25 bp, Homo sapien
aaaagtacagtaaaggacaattgta

SEQ ID NO: 5566417 - DNA, 25 bp, Homo sapien
tagcaatatattgatgcaccgttac

SEQ ID NO: 5566418 - DNA, 25 bp, Homo sapien
catagtacacatgaaaaattggaaa

SEQ ID NO: 5566419 - DNA, 25 bp, Homo sapien
cagcagaaaataaggtactatactg

SEQ ID NO: 5566420 - DNA, 25 bp, Homo sapien
aaaaaaacctttagacagctgtcat

SEQ ID NO: 5566421 - DNA, 25 bp, Homo sapien
attgatgcaccgttacatggatatt

SEQ ID NO: 5566422 - DNA, 25 bp, Homo sapien
ttcaatagaagttatagaaagtgta

SEQ ID NO: 5566423 - DNA, 25 bp, Homo sapien
tacaagagacagataataatacttc

SEQ ID NO: 5566424 - DNA, 25 bp, Homo sapien
gggaagtcaggtggattctttgtaa

SEQ ID NO: 5566425 - DNA, 25 bp, Homo sapien
atggcagatccatattcatatagaa

SEQ ID NO: 5566426 - DNA, 25 bp, Homo sapien
aaacttatcaggatttcaggtgaat

SEQ ID NO: 5566427 - DNA, 25 bp, Homo sapien
aaaattagagttgaactagattttc

SEQ ID NO: 5566428 - DNA, 25 bp, Homo sapien
ctgattggttagataaaaattgcac

SEQ ID NO: 5566429 - DNA, 25 bp, Homo sapien
atctgaaagatcctgtataaacata

SEQ ID NO: 5566430 - DNA, 25 bp, Homo sapien
tggacttccaaatgaaaaatactga

SEQ ID NO: 5566431 - DNA, 25 bp, Homo sapien
aatactgaagaacaaatgatgttta

SEQ ID NO: 5566432 - DNA, 25 bp, Homo sapien
aaaaattgcacatgatctgaaagat

SEQ ID NO: 5566433 - DNA, 25 bp, Homo sapien
cattgtactacaagagacagataat

SEQ ID NO: 5566434 - DNA, 25 bp, Homo sapien
gagccaaacattcagtctggaggcc

SEQ ID NO: 5566435 - DNA, 25 bp, Homo sapien
tgcagtaacacgatttgagagaacc

SEQ ID NO: 5566436 - DNA, 25 bp, Homo sapien
gttgacccctgttccaagtgctgat

SEQ ID NO: 5566437 - DNA, 25 bp, Homo sapien
tgattctgccatggacataggtctt

SEQ ID NO: 5566438 - DNA, 25 bp, Homo sapien
aagtgctgattcctggaagagaagg

SEQ ID NO: 5566439 - DNA, 25 bp, Homo sapien
aggagctagtgcaagaacagctaca

SEQ ID NO: 5566440 - DNA, 25 bp, Homo sapien
aatgctgagcacacaatgggttctc

SEQ ID NO: 5566441 - DNA, 25 bp, Homo sapien
tacagatagattgcttcagggccca

SEQ ID NO: 5566442 - DNA, 25 bp, Homo sapien
gcttatatttaggggatgatgggaa

SEQ ID NO: 5566443 - DNA, 25 bp, Homo sapien
gcccaaaggtaggcttggaaataca

SEQ ID NO: 5566444 - DNA, 25 bp, Homo sapien
ttggaaatacagtagttgcagtaac

SEQ ID NO: 5566445 - DNA, 25 bp, Homo sapien
gaaagaggctgcaactccaagatca

SEQ ID NO: 5566446 - DNA, 25 bp, Homo sapien
ggtgtgctcctctcacttggccaac

SEQ ID NO: 5566447 - DNA, 25 bp, Homo sapien
agcactgaaaaatgggagcccatta

SEQ ID NO: 5566448 - DNA, 25 bp, Homo sapien
tccaagatcaagggacctttgccca

SEQ ID NO: 5566449 - DNA, 25 bp, Homo sapien
tcactggattgactggctcaggctg

SEQ ID NO: 5566450 - DNA, 25 bp, Homo sapien
gtgtccaatcagggcctgtgacggc

SEQ ID NO: 5566451 - DNA, 25 bp, Homo sapien
cctggtcacaggctactcctgaacc

SEQ ID NO: 5566452 - DNA, 25 bp, Homo sapien
gggctgccccagtcgttcactacca

SEQ ID NO: 5566453 - DNA, 25 bp, Homo sapien
ctcaggctggtcaccgccctccttg

SEQ ID NO: 5566454 - DNA, 25 bp, Homo sapien
gttagcagctgcccagtgtccaatc

SEQ ID NO: 5566455 - DNA, 25 bp, Homo sapien
agacactgggttagcagctgcccag

SEQ ID NO: 5566456 - DNA, 25 bp, Homo sapien
tgtttgcccaacaggtagaactctc

SEQ ID NO: 5566457 - DNA, 25 bp, Homo sapien
gcacccagcatttacgattcataat

SEQ ID NO: 5566458 - DNA, 25 bp, Homo sapien
ggtagaactctcagtaaaacctgct

SEQ ID NO: 5566459 - DNA, 25 bp, Homo sapien
aagtgacctgttatgcaaaggcaac

SEQ ID NO: 5566460 - DNA, 25 bp, Homo sapien
cagaaatcaggaagcaattcaagtc

SEQ ID NO: 5566461 - DNA, 25 bp, Homo sapien
tttgggctgtctatctctgtcacct

SEQ ID NO: 5566462 - DNA, 25 bp, Homo sapien
gtaaactgcaacattcatgagtgcc

SEQ ID NO: 5566463 - DNA, 25 bp, Homo sapien
ttcatgagtgccttgtagccaccgg

SEQ ID NO: 5566464 - DNA, 25 bp, Homo sapien
tttctattgccctgaaccctgacca

SEQ ID NO: 5566465 - DNA, 25 bp, Homo sapien
cttcttcttggctctatggcatttc

SEQ ID NO: 5566466 - DNA, 25 bp, Homo sapien
gtagccaccgggtcacttgataatt

SEQ ID NO: 5566467 - DNA, 25 bp, Homo sapien
gacgcacctggtccctgctaaagcc

SEQ ID NO: 5566468 - DNA, 25 bp, Homo sapien
tgctggactgatatgtgaacactgc

SEQ ID NO: 5566469 - DNA, 25 bp, Homo sapien
gtcactgcactaggtgctggggaat

SEQ ID NO: 5566470 - DNA, 25 bp, Homo sapien
gccacgagaacaaaagatctctcac

SEQ ID NO: 5566471 - DNA, 25 bp, Homo sapien
cactggattaaactgatgactgttc

SEQ ID NO: 5566472 - DNA, 25 bp, Homo sapien
ttctaggagtatgatgagtattttc

SEQ ID NO: 5566473 - DNA, 25 bp, Homo sapien
cagaaataggaaaatgctcatgaaa

SEQ ID NO: 5566474 - DNA, 25 bp, Homo sapien
ctggaagaatctactgaacctattt

SEQ ID NO: 5566475 - DNA, 25 bp, Homo sapien
ccacttgcaaagtggacgcacctgg

SEQ ID NO: 5566476 - DNA, 25 bp, Homo sapien
gggaatggaatgttcaagacgttct

SEQ ID NO: 5566477 - DNA, 25 bp, Homo sapien
ttcagtgtcctgacgcccctacttc

SEQ ID NO: 5566478 - DNA, 25 bp, Homo sapien
aagctactcttgacccaaggcactc

SEQ ID NO: 5566479 - DNA, 25 bp, Homo sapien
ctgtgttagcagtgactgaatcgcc

SEQ ID NO: 5566480 - DNA, 25 bp, Homo sapien
gaatcgccattaccaggcagtggac

SEQ ID NO: 5566481 - DNA, 25 bp, Homo sapien
acatataccagtggaattacaggaa

SEQ ID NO: 5566482 - DNA, 25 bp, Homo sapien
agaaactgctacatcagaaagttgt

SEQ ID NO: 5566483 - DNA, 25 bp, Homo sapien
attctcaggtgaccagaaaatacat

SEQ ID NO: 5566484 - DNA, 25 bp, Homo sapien
atagagaaagttagcctgtgaagtt

SEQ ID NO: 5566485 - DNA, 25 bp, Homo sapien
ggcagtggacaaagtgttaaccaca

SEQ ID NO: 5566486 - DNA, 25 bp, Homo sapien
aggctgaagttcaaggtctcaccat

SEQ ID NO: 5566487 - DNA, 25 bp, Homo sapien
gtcctcacaagttgacagtggatac

SEQ ID NO: 5566488 - DNA, 25 bp, Homo sapien
caaggcactcatggctttcaatgct

SEQ ID NO: 5566489 - DNA, 25 bp, Homo sapien
cactccacgtctggccagtgacagc

SEQ ID NO: 5566490 - DNA, 25 bp, Homo sapien
gccggtcttggctctggcatgtgag

SEQ ID NO: 5566491 - DNA, 25 bp, Homo sapien
cagtgacagcttttccccagatgcc

SEQ ID NO: 5566492 - DNA, 25 bp, Homo sapien
atttatctcggagtcaaggcataga

SEQ ID NO: 5566493 - DNA, 25 bp, Homo sapien
ggtctggggctcgattccatttcac

SEQ ID NO: 5566494 - DNA, 25 bp, Homo sapien
tcaaggcatagacaccagcagcttg

SEQ ID NO: 5566495 - DNA, 25 bp, Homo sapien
gaaggcctgaccctgtctgagtgtt

SEQ ID NO: 5566496 - DNA, 25 bp, Homo sapien
gccctggctactgcgcgacttggca

SEQ ID NO: 5566497 - DNA, 25 bp, Homo sapien
ttcaccgtcagaaaggtgagaggca

SEQ ID NO: 5566498 - DNA, 25 bp, Homo sapien
gagaggcaaaagttggccactgtta

SEQ ID NO: 5566499 - DNA, 25 bp, Homo sapien
ggacagcctgccagcttagggcagg

SEQ ID NO: 5566500 - DNA, 25 bp, Homo sapien
gccgctcgctgacggcagtgtttgg

SEQ ID NO: 5566501 - DNA, 25 bp, Homo sapien
gggaagagccgcttctgtcacacgg

SEQ ID NO: 5566502 - DNA, 25 bp, Homo sapien
cttatttggacagtggctctgcgac

SEQ ID NO: 5566503 - DNA, 25 bp, Homo sapien
ctgtcacacgggtcgtggtaatgga

SEQ ID NO: 5566504 - DNA, 25 bp, Homo sapien
gctttatgtcatcctcgtggctctc

SEQ ID NO: 5566505 - DNA, 25 bp, Homo sapien
catcctcgtggctctcgaaatgcct

SEQ ID NO: 5566506 - DNA, 25 bp, Homo sapien
cgttccgatggcggattcctgacgg

SEQ ID NO: 5566507 - DNA, 25 bp, Homo sapien
agaaacgcggagtctgctttatgtc

SEQ ID NO: 5566508 - DNA, 25 bp, Homo sapien
tgtgagggaaatcgtgtcacttaac

SEQ ID NO: 5566509 - DNA, 25 bp, Homo sapien
cacttaacgaaaaatgaagaaacgc

SEQ ID NO: 5566510 - DNA, 25 bp, Homo sapien
ccagttagggcctccgttccgatgg

SEQ ID NO: 5566511 - DNA, 25 bp, Homo sapien
gtcacaatattggatgtagcagctc

SEQ ID NO: 5566512 - DNA, 25 bp, Homo sapien
acatctagtgatgccaataaaatgg

SEQ ID NO: 5566513 - DNA, 25 bp, Homo sapien
ttaggactcagctatgttcaaggcc

SEQ ID NO: 5566514 - DNA, 25 bp, Homo sapien
catcacagaaacccaacatgtacct

SEQ ID NO: 5566515 - DNA, 25 bp, Homo sapien
tgtgactgcactaaaaacagacgct

SEQ ID NO: 5566516 - DNA, 25 bp, Homo sapien
tgttcaaggcctcatcgagcccaac

SEQ ID NO: 5566517 - DNA, 25 bp, Homo sapien
tcatcgagcccaacatacaattatc

SEQ ID NO: 5566518 - DNA, 25 bp, Homo sapien
ttagtggccattgcaagaaggaaga

SEQ ID NO: 5566519 - DNA, 25 bp, Homo sapien
attgtgtgctattagtggccattgc

SEQ ID NO: 5566520 - DNA, 25 bp, Homo sapien
gctgcagaagggtatcccacactta

SEQ ID NO: 5566521 - DNA, 25 bp, Homo sapien
gtagcagctccaaatagaggttacc

SEQ ID NO: 5566522 - DNA, 25 bp, Homo sapien
ggcatcaccctgaaggagctcactg

SEQ ID NO: 5566523 - DNA, 25 bp, Homo sapien
cagactgaagtgcagtggctcaatt

SEQ ID NO: 5566524 - DNA, 25 bp, Homo sapien
tgtgcgagaatacctgcactgagcc

SEQ ID NO: 5566525 - DNA, 25 bp, Homo sapien
ctgggcacaagcaatcctcccctcg

SEQ ID NO: 5566526 - DNA, 25 bp, Homo sapien
aggacttcgtgactctgcaggagag

SEQ ID NO: 5566527 - DNA, 25 bp, Homo sapien
ggcaaggacttcgtgactctgcagg

SEQ ID NO: 5566528 - DNA, 25 bp, Homo sapien
accatggctcacagtgggctgtttg

SEQ ID NO: 5566529 - DNA, 25 bp, Homo sapien
aggagctcactgtgcgagaatacct

SEQ ID NO: 5566530 - DNA, 25 bp, Homo sapien
tgccgaattcttggcctcgagggcc

SEQ ID NO: 5566531 - DNA, 25 bp, Homo sapien
ctatgcgcctctgctggacgccatg

SEQ ID NO: 5566532 - DNA, 25 bp, Homo sapien
ggcctcgagggccaaattccctata

SEQ ID NO: 5566533 - DNA, 25 bp, Homo sapien
acctgcccagataatcaaatttttt

SEQ ID NO: 5566534 - DNA, 25 bp, Homo sapien
atcatccaaaattttcagggtgatg

SEQ ID NO: 5566535 - DNA, 25 bp, Homo sapien
taatacaatgaggccaacaagagag

SEQ ID NO: 5566536 - DNA, 25 bp, Homo sapien
caaatattcaacagtgtaccaaact

SEQ ID NO: 5566537 - DNA, 25 bp, Homo sapien
attcttgggctaacgcaatcctcct

SEQ ID NO: 5566538 - DNA, 25 bp, Homo sapien
tagtattcaataccgactgcttgtt

SEQ ID NO: 5566539 - DNA, 25 bp, Homo sapien
taccgactgcttgtttagactccac

SEQ ID NO: 5566540 - DNA, 25 bp, Homo sapien
agtgtaccaaactgataatattgta

SEQ ID NO: 5566541 - DNA, 25 bp, Homo sapien
attaataatacaatgaggccaacaa

SEQ ID NO: 5566542 - DNA, 25 bp, Homo sapien
ttgaaaaagtcaaggctcattaata

SEQ ID NO: 5566543 - DNA, 25 bp, Homo sapien
agggtgatgaaaacctaggtcttct

SEQ ID NO: 5566544 - DNA, 25 bp, Homo sapien
aggggagagacagtctgtcccctct

SEQ ID NO: 5566545 - DNA, 25 bp, Homo sapien
gcgcatgctgctctgtgagaactcc

SEQ ID NO: 5566546 - DNA, 25 bp, Homo sapien
agagacagtctgtcccctctggtcc

SEQ ID NO: 5566547 - DNA, 25 bp, Homo sapien
ctccgaggaataactcactggaggg

SEQ ID NO: 5566548 - DNA, 25 bp, Homo sapien
gaggaataactcactggagggctat

SEQ ID NO: 5566549 - DNA, 25 bp, Homo sapien
gctgctctgtgagaactccgaggaa

SEQ ID NO: 5566550 - DNA, 25 bp, Homo sapien
acagtctgtcccctctggtccagcc

SEQ ID NO: 5566551 - DNA, 25 bp, Homo sapien
atgctgctctgtgagaactccgagg

SEQ ID NO: 5566552 - DNA, 25 bp, Homo sapien
agaactccgaggaataactcactgg

SEQ ID NO: 5566553 - DNA, 25 bp, Homo sapien
ccgcaggcgcatgctgctctgtgag

SEQ ID NO: 5566554 - DNA, 25 bp, Homo sapien
taactcactggagggctataaatgc

SEQ ID NO: 5566555 - DNA, 25 bp, Homo sapien
gccgccatcgccgcttcagacttca

SEQ ID NO: 5566556 - DNA, 25 bp, Homo sapien
gtcgtcctcaaccacctggccgaga

SEQ ID NO: 5566557 - DNA, 25 bp, Homo sapien
taggtgatgccttacaactctttct

SEQ ID NO: 5566558 - DNA, 25 bp, Homo sapien
tctgcgatgctggttttttaggtga

SEQ ID NO: 5566559 - DNA, 25 bp, Homo sapien
tttttaggtgatgccttacaactct

SEQ ID NO: 5566560 - DNA, 25 bp, Homo sapien
ctcaaccacctggccgagaagtggt

SEQ ID NO: 5566561 - DNA, 25 bp, Homo sapien
agacttcagaaccagcgtcgtcctc

SEQ ID NO: 5566562 - DNA, 25 bp, Homo sapien
ttcagacttcagaaccagcgtcgtc

SEQ ID NO: 5566563 - DNA, 25 bp, Homo sapien
gtcctcaaccacctggccgagaagt

SEQ ID NO: 5566564 - DNA, 25 bp, Homo sapien
gtactctgcgatgctggttttttag

SEQ ID NO: 5566565 - DNA, 25 bp, Homo sapien
ttcagaaccagcgtcgtcctcaacc

SEQ ID NO: 5566566 - DNA, 25 bp, Homo sapien
cgtaaaggacttgggttagcttaca

SEQ ID NO: 5566567 - DNA, 25 bp, Homo sapien
taaggtgaatgattttaagagaaaa

SEQ ID NO: 5566568 - DNA, 25 bp, Homo sapien
ctaatgcctgggtgaataaacacac

SEQ ID NO: 5566569 - DNA, 25 bp, Homo sapien
gacattttgggctagatatatcttc

SEQ ID NO: 5566570 - DNA, 25 bp, Homo sapien
tttggtagatatgagtttgattcac

SEQ ID NO: 5566571 - DNA, 25 bp, Homo sapien
atatcttcgttgtgggagttgtcct

SEQ ID NO: 5566572 - DNA, 25 bp, Homo sapien
tgggttagcttacaagagcacatac

SEQ ID NO: 5566573 - DNA, 25 bp, Homo sapien
ctctaagaatcacagtttactggct

SEQ ID NO: 5566574 - DNA, 25 bp, Homo sapien
aaatagtaacattggcagtcaagcc

SEQ ID NO: 5566575 - DNA, 25 bp, Homo sapien
tttatggcagcttataaggtgaatg

SEQ ID NO: 5566576 - DNA, 25 bp, Homo sapien
ataactgcatctaacacgaagtata

SEQ ID NO: 5566577 - DNA, 25 bp, Homo sapien
tatgaatatccaccagaaatctatc

SEQ ID NO: 5566578 - DNA, 25 bp, Homo sapien
aaaatagatgacttagggccataat

SEQ ID NO: 5566579 - DNA, 25 bp, Homo sapien
ctggtagaatgaggaacatcaatca

SEQ ID NO: 5566580 - DNA, 25 bp, Homo sapien
cctagcctagaaaggacttaggttc

SEQ ID NO: 5566581 - DNA, 25 bp, Homo sapien
aacaggtttgaggcaagaccattgt

SEQ ID NO: 5566582 - DNA, 25 bp, Homo sapien
tagggccataatacatgatgaaatt

SEQ ID NO: 5566583 - DNA, 25 bp, Homo sapien
tgtgtagcctagaattgcctagcct

SEQ ID NO: 5566584 - DNA, 25 bp, Homo sapien
tactctatgcaagctggtaggtatg

SEQ ID NO: 5566585 - DNA, 25 bp, Homo sapien
tagagagagctcgaagatactcctt

SEQ ID NO: 5566586 - DNA, 25 bp, Homo sapien
atcaaatggtatttacagagactac

SEQ ID NO: 5566587 - DNA, 25 bp, Homo sapien
tacagagactacgaattgtgtagcc

SEQ ID NO: 5566588 - DNA, 25 bp, Homo sapien
gcagaagtctagatgagagacagtg

SEQ ID NO: 5566589 - DNA, 25 bp, Homo sapien
aggaagagctattggcagaatctct

SEQ ID NO: 5566590 - DNA, 25 bp, Homo sapien
tttggcagtgatgaatattagaagg

SEQ ID NO: 5566591 - DNA, 25 bp, Homo sapien
tggttggtacatattaggcattgac

SEQ ID NO: 5566592 - DNA, 25 bp, Homo sapien
atagtgtgggacaaactccccgcat

SEQ ID NO: 5566593 - DNA, 25 bp, Homo sapien
ggggataacaaggtatctgttgcct

SEQ ID NO: 5566594 - DNA, 25 bp, Homo sapien
attgaatgatagcagaacaaggctt

SEQ ID NO: 5566595 - DNA, 25 bp, Homo sapien
gcagaatctctgggagcaatctgac

SEQ ID NO: 5566596 - DNA, 25 bp, Homo sapien
acatagcagtgaatagaacatgact

SEQ ID NO: 5566597 - DNA, 25 bp, Homo sapien
agtgagagattgatgcctgccttga

SEQ ID NO: 5566598 - DNA, 25 bp, Homo sapien
ctagtagtaagcagatatgtatcca

SEQ ID NO: 5566599 - DNA, 25 bp, Homo sapien
ggaagccaagcagactacacctgta

SEQ ID NO: 5566600 - DNA, 25 bp, Homo sapien
cacagatacaccttcaaccatgctc

SEQ ID NO: 5566601 - DNA, 25 bp, Homo sapien
tgactggcagcaaaatactagcttc

SEQ ID NO: 5566602 - DNA, 25 bp, Homo sapien
attaagtgtaggctaatgccatttc

SEQ ID NO: 5566603 - DNA, 25 bp, Homo sapien
tggagtaacggaaacagatttgtac

SEQ ID NO: 5566604 - DNA, 25 bp, Homo sapien
tggtgcaaaccctaaaaaagacatg

SEQ ID NO: 5566605 - DNA, 25 bp, Homo sapien
gctccaaccacataggcaacctaac

SEQ ID NO: 5566606 - DNA, 25 bp, Homo sapien
ctcaaccccaggagtgacctcttta

SEQ ID NO: 5566607 - DNA, 25 bp, Homo sapien
ggcaacctaactacagaaatgactg

SEQ ID NO: 5566608 - DNA, 25 bp, Homo sapien
ggctttctggataatggagtaacgg

SEQ ID NO: 5566609 - DNA, 25 bp, Homo sapien
gatttgtactgagccagacactctc

SEQ ID NO: 5566610 - DNA, 25 bp, Homo sapien
tgaagtcttgaggctgatctgacgg

SEQ ID NO: 5566611 - DNA, 25 bp, Homo sapien
ggtttccttctggtgtgtctttaca

SEQ ID NO: 5566612 - DNA, 25 bp, Homo sapien
gaaagcaattaagcaagctgaatgc

SEQ ID NO: 5566613 - DNA, 25 bp, Homo sapien
ggctgatctgacggctttcccacat

SEQ ID NO: 5566614 - DNA, 25 bp, Homo sapien
acggattctctctcgtatgagtcct

SEQ ID NO: 5566615 - DNA, 25 bp, Homo sapien
aatcctagccgatctgaaggctttc

SEQ ID NO: 5566616 - DNA, 25 bp, Homo sapien
tgccaagtgtgagtgcttccatgca

SEQ ID NO: 5566617 - DNA, 25 bp, Homo sapien
catgcatttgaagtcttgaggctga

SEQ ID NO: 5566618 - DNA, 25 bp, Homo sapien
aaagaatcctagccgatctgaaggc

SEQ ID NO: 5566619 - DNA, 25 bp, Homo sapien
gcatttgaagtcttgaggctgatct

SEQ ID NO: 5566620 - DNA, 25 bp, Homo sapien
tgtctatgaaagcaattaagcaagc

SEQ ID NO: 5566621 - DNA, 25 bp, Homo sapien
aagaaagaacaccacattgaaagcc

SEQ ID NO: 5566622 - DNA, 25 bp, Homo sapien
gcctgtagtagtctgaggagtgtct

SEQ ID NO: 5566623 - DNA, 25 bp, Homo sapien
aatggaagcagacctcattagtccc

SEQ ID NO: 5566624 - DNA, 25 bp, Homo sapien
tcatgaatttgagagccaccagctg

SEQ ID NO: 5566625 - DNA, 25 bp, Homo sapien
ccagaggaacaacttctggaccctc

SEQ ID NO: 5566626 - DNA, 25 bp, Homo sapien
tgtccacatgcctgcggctcgaagg

SEQ ID NO: 5566627 - DNA, 25 bp, Homo sapien
caagaaaacttaagtgtagaactcc

SEQ ID NO: 5566628 - DNA, 25 bp, Homo sapien
atttgctgacccacatccagggcac

SEQ ID NO: 5566629 - DNA, 25 bp, Homo sapien
ataggtacatgtaaggtgataggga

SEQ ID NO: 5566630 - DNA, 25 bp, Homo sapien
tgagcagtctgcttaccaagggtca

SEQ ID NO: 5566631 - DNA, 25 bp, Homo sapien
tgattaaagtgcaaaccaagaaaac

SEQ ID NO: 5566632 - DNA, 25 bp, Homo sapien
ccgtgaggcacggtcgggcaggaca

SEQ ID NO: 5566633 - DNA, 25 bp, Homo sapien
tgtcctgcccgaccgtgcctcacgg

SEQ ID NO: 5566634 - DNA, 25 bp, Homo sapien
tgtgaagttccattcgggggatcat

SEQ ID NO: 5566635 - DNA, 25 bp, Homo sapien
ttccctaagaaagaagctcagagaa

SEQ ID NO: 5566636 - DNA, 25 bp, Homo sapien
aagtatgggtcgtttagggacaatg

SEQ ID NO: 5566637 - DNA, 25 bp, Homo sapien
tggaaaaggattagatatggcactt

SEQ ID NO: 5566638 - DNA, 25 bp, Homo sapien
acatagattatagatgggaagtggg

SEQ ID NO: 5566639 - DNA, 25 bp, Homo sapien
aggatgtggtaatctctgaccctgc

SEQ ID NO: 5566640 - DNA, 25 bp, Homo sapien
actgtgacccagtgaattcgaactt

SEQ ID NO: 5566641 - DNA, 25 bp, Homo sapien
ttgaccatgattagagaaactgtgc

SEQ ID NO: 5566642 - DNA, 25 bp, Homo sapien
gggaagggcttcacacccagacata

SEQ ID NO: 5566643 - DNA, 25 bp, Homo sapien
gtgttgatgagaggtcctgaaatgc

SEQ ID NO: 5566644 - DNA, 25 bp, Homo sapien
tatatgtggttgtggtaaagaaaga

SEQ ID NO: 5566645 - DNA, 25 bp, Homo sapien
gggttaagagatgtaactggagaca

SEQ ID NO: 5566646 - DNA, 25 bp, Homo sapien
gggcacagcaggcttcactgacaaa

SEQ ID NO: 5566647 - DNA, 25 bp, Homo sapien
taacatagaagcatatgtgaggggt

SEQ ID NO: 5566648 - DNA, 25 bp, Homo sapien
gagacatgacgtggtagagtcttgt

SEQ ID NO: 5566649 - DNA, 25 bp, Homo sapien
tcttctcaagaagaggggttaagag

SEQ ID NO: 5566650 - DNA, 25 bp, Homo sapien
gcatatgtgaggggtccactcttct

SEQ ID NO: 5566651 - DNA, 25 bp, Homo sapien
ccaggaaagaccctgctagcagaaa

SEQ ID NO: 5566652 - DNA, 25 bp, Homo sapien
atatatgagaaactaaggaaggtgg

SEQ ID NO: 5566653 - DNA, 25 bp, Homo sapien
acaccaccatacctgcgaaccttca

SEQ ID NO: 5566654 - DNA, 25 bp, Homo sapien
aaagagtatgtaataaaataggtca

SEQ ID NO: 5566655 - DNA, 25 bp, Homo sapien
agaaagaactgccaatgtaaatctc

SEQ ID NO: 5566656 - DNA, 25 bp, Homo sapien
gcccttggtatcacccgagtgaccc

SEQ ID NO: 5566657 - DNA, 25 bp, Homo sapien
aggctcccctactcggggcacaggg

SEQ ID NO: 5566658 - DNA, 25 bp, Homo sapien
tgatacccccaaagccacctggggc

SEQ ID NO: 5566659 - DNA, 25 bp, Homo sapien
gagtgacccacagcgttcttaggac

SEQ ID NO: 5566660 - DNA, 25 bp, Homo sapien
aaatctgggccccagtgagcatggg

SEQ ID NO: 5566661 - DNA, 25 bp, Homo sapien
tggcaaaatggtgattgtgatgatt

SEQ ID NO: 5566662 - DNA, 25 bp, Homo sapien
agtcaatggcaggcgctctcgcctg

SEQ ID NO: 5566663 - DNA, 25 bp, Homo sapien
caagtccaggctcccctactcgggg

SEQ ID NO: 5566664 - DNA, 25 bp, Homo sapien
gtgagcatgggcttaaccactgccc

SEQ ID NO: 5566665 - DNA, 25 bp, Homo sapien
ttatatccatttgagagatgaggaa

SEQ ID NO: 5566666 - DNA, 25 bp, Homo sapien
tgctctgggcccgtttcctctctgg

SEQ ID NO: 5566667 - DNA, 25 bp, Homo sapien
gcataagcacagctcaagaactgag

SEQ ID NO: 5566668 - DNA, 25 bp, Homo sapien
ctatgaaggggtttgtagttgtaag

SEQ ID NO: 5566669 - DNA, 25 bp, Homo sapien
agaactgagctttgtatgtgtcctt

SEQ ID NO: 5566670 - DNA, 25 bp, Homo sapien
ctggttatgtggggaacttccttag

SEQ ID NO: 5566671 - DNA, 25 bp, Homo sapien
atgtgtccttttgggggataacagg

SEQ ID NO: 5566672 - DNA, 25 bp, Homo sapien
ttctgaatggatggagactatgaag

SEQ ID NO: 5566673 - DNA, 25 bp, Homo sapien
aaacggctgctgtggcttcctcttg

SEQ ID NO: 5566674 - DNA, 25 bp, Homo sapien
tatacagagtatccaccaaagtcct

SEQ ID NO: 5566675 - DNA, 25 bp, Homo sapien
acagggctggaccatgcttccctgc

SEQ ID NO: 5566676 - DNA, 25 bp, Homo sapien
aagtcctaatctaaagtcctgctcc

SEQ ID NO: 5566677 - DNA, 25 bp, Homo sapien
tcctcttcggctggttatgtgggga

SEQ ID NO: 5566678 - DNA, 25 bp, Homo sapien
gtagtagctgtcatcgatctgcacg

SEQ ID NO: 5566679 - DNA, 25 bp, Homo sapien
ctgtgctgcatcatgtggcgcttca

SEQ ID NO: 5566680 - DNA, 25 bp, Homo sapien
gtcatcgatctgcacgttcacgtcc

SEQ ID NO: 5566681 - DNA, 25 bp, Homo sapien
ccacgtccacgtagtagctgtcatc

SEQ ID NO: 5566682 - DNA, 25 bp, Homo sapien
gtagctgtcatcgatctgcacgttc

SEQ ID NO: 5566683 - DNA, 25 bp, Homo sapien
acctcgctgtgctgcatcatgtggc

SEQ ID NO: 5566684 - DNA, 25 bp, Homo sapien
gcacgttcacgtccaccctctccac

SEQ ID NO: 5566685 - DNA, 25 bp, Homo sapien
tgcggcttgatcccactgtggccca

SEQ ID NO: 5566686 - DNA, 25 bp, Homo sapien
gttcacgtccaccctctccaccttc

SEQ ID NO: 5566687 - DNA, 25 bp, Homo sapien
gtccacgtagtagctgtcatcgatc

SEQ ID NO: 5566688 - DNA, 25 bp, Homo sapien
agccgcccacgtccacgtagtagct

SEQ ID NO: 5566689 - DNA, 25 bp, Homo sapien
tcaaaatcacctaggaggctttttc

SEQ ID NO: 5566690 - DNA, 25 bp, Homo sapien
tgagactgggattcatcaaaatcac

SEQ ID NO: 5566691 - DNA, 25 bp, Homo sapien
atatcctggtgtgctaggtaggaga

SEQ ID NO: 5566692 - DNA, 25 bp, Homo sapien
gcctcacctgcctagtcccagctct

SEQ ID NO: 5566693 - DNA, 25 bp, Homo sapien
tggaaagtctcgggagcacattttt

SEQ ID NO: 5566694 - DNA, 25 bp, Homo sapien
cattctcagggctacacttgcacgt

SEQ ID NO: 5566695 - DNA, 25 bp, Homo sapien
acttgcacgtagctgcctcacctgc

SEQ ID NO: 5566696 - DNA, 25 bp, Homo sapien
tgggcctaagtgatattcccacctc

SEQ ID NO: 5566697 - DNA, 25 bp, Homo sapien
aacccctcataagaagcactgccac

SEQ ID NO: 5566698 - DNA, 25 bp, Homo sapien
ctgctgctctggaaagtctcgggag

SEQ ID NO: 5566699 - DNA, 25 bp, Homo sapien
ttctccagtaatacgtgtggcctac

SEQ ID NO: 5566700 - DNA, 25 bp, Homo sapien
gcaggcccagctttgtggcaatgag

SEQ ID NO: 5566701 - DNA, 25 bp, Homo sapien
ctattcagtgggctgaggccacaaa

SEQ ID NO: 5566702 - DNA, 25 bp, Homo sapien
tcctttgaaggaaatgaaatggcag

SEQ ID NO: 5566703 - DNA, 25 bp, Homo sapien
ctgtgatttgatcctgcaggcccag

SEQ ID NO: 5566704 - DNA, 25 bp, Homo sapien
cactgcatgttgaagtgaggccaag

SEQ ID NO: 5566705 - DNA, 25 bp, Homo sapien
ggccacaaataataatgggaggacc

SEQ ID NO: 5566706 - DNA, 25 bp, Homo sapien
ggagtctaggaagagctattcagtg

SEQ ID NO: 5566707 - DNA, 25 bp, Homo sapien
ctgctgtgccagctgttcacgtttc

SEQ ID NO: 5566708 - DNA, 25 bp, Homo sapien
cccctgtcgttctgcagcacccacc

SEQ ID NO: 5566709 - DNA, 25 bp, Homo sapien
gccagagctggccaactgtgatttg

SEQ ID NO: 5566710 - DNA, 25 bp, Homo sapien
aatggcaggtgagaattttcagcat

SEQ ID NO: 5566711 - DNA, 25 bp, Homo sapien
tttatgcttcagggatgcatgggac

SEQ ID NO: 5566712 - DNA, 25 bp, Homo sapien
ggcggccatcctgggtttatgcttc

SEQ ID NO: 5566713 - DNA, 25 bp, Homo sapien
acttgcatcacagctgtgggaggtt

SEQ ID NO: 5566714 - DNA, 25 bp, Homo sapien
gattctgtaaggattggtaggtgat

SEQ ID NO: 5566715 - DNA, 25 bp, Homo sapien
gataagaggggacattcttgccctc

SEQ ID NO: 5566716 - DNA, 25 bp, Homo sapien
tacctgggattcatgcattctgctc

SEQ ID NO: 5566717 - DNA, 25 bp, Homo sapien
aggaaaaccacccagtgcagatgca

SEQ ID NO: 5566718 - DNA, 25 bp, Homo sapien
atctcacggacacacagtaagttac

SEQ ID NO: 5566719 - DNA, 25 bp, Homo sapien
atacagatcggcagatacctgggat

SEQ ID NO: 5566720 - DNA, 25 bp, Homo sapien
tgtgtctgagttgagtgagagataa

SEQ ID NO: 5566721 - DNA, 25 bp, Homo sapien
ccaacctctaggggaaactatgctt

SEQ ID NO: 5566722 - DNA, 25 bp, Homo sapien
atgcaacattagagtcatgctgaga

SEQ ID NO: 5566723 - DNA, 25 bp, Homo sapien
ataggagaaatgatcttactgacac

SEQ ID NO: 5566724 - DNA, 25 bp, Homo sapien
cttggaaccataagcatttcagatt

SEQ ID NO: 5566725 - DNA, 25 bp, Homo sapien
gggagatatcatttagctacacgcc

SEQ ID NO: 5566726 - DNA, 25 bp, Homo sapien
tattatatagatgtggggagatatc

SEQ ID NO: 5566727 - DNA, 25 bp, Homo sapien
cccagctacactcctggcctgagtc

SEQ ID NO: 5566728 - DNA, 25 bp, Homo sapien
ttaggaaactagaagatatgaaacc

SEQ ID NO: 5566729 - DNA, 25 bp, Homo sapien
tttaaagcaggtaacagcttattat

SEQ ID NO: 5566730 - DNA, 25 bp, Homo sapien
acccagaatgggctccttttaatta

SEQ ID NO: 5566731 - DNA, 25 bp, Homo sapien
ttagagtcatgctgagagcttttcc

SEQ ID NO: 5566732 - DNA, 25 bp, Homo sapien
tctgttcaaccctgagaagagcttt

SEQ ID NO: 5566733 - DNA, 25 bp, Homo sapien
caatgtcataggaaagagctttttc

SEQ ID NO: 5566734 - DNA, 25 bp, Homo sapien
ccagaaaggcctacagtatttttgc

SEQ ID NO: 5566735 - DNA, 25 bp, Homo sapien
aacacctccaacgccactaaactta

SEQ ID NO: 5566736 - DNA, 25 bp, Homo sapien
acatgcagggtctcaaacaaggagt

SEQ ID NO: 5566737 - DNA, 25 bp, Homo sapien
aatgagctacagagtgacatgagtt

SEQ ID NO: 5566738 - DNA, 25 bp, Homo sapien
ctcaaacaaggagtatttgggcttc

SEQ ID NO: 5566739 - DNA, 25 bp, Homo sapien
cagagtgacatgagttgaaattaga

SEQ ID NO: 5566740 - DNA, 25 bp, Homo sapien
cacaaaagacatgcagggtctcaaa

SEQ ID NO: 5566741 - DNA, 25 bp, Homo sapien
attaagagcacaactaaaaaaaatc

SEQ ID NO: 5566742 - DNA, 25 bp, Homo sapien
aatataatgggcagttcattcaatc

SEQ ID NO: 5566743 - DNA, 25 bp, Homo sapien
tgtgaaataatgcaattaagagcac

SEQ ID NO: 5566744 - DNA, 25 bp, Homo sapien
agatgtgaaactgggcattcactct

SEQ ID NO: 5566745 - DNA, 25 bp, Homo sapien
ttactgtgggataatcattcttgtc

SEQ ID NO: 5566746 - DNA, 25 bp, Homo sapien
ctggtagattccatcacaagaatac

SEQ ID NO: 5566747 - DNA, 25 bp, Homo sapien
ttgtcatatcagtggcccttacagc

SEQ ID NO: 5566748 - DNA, 25 bp, Homo sapien
ttccagtagggaacatttacagtcc

SEQ ID NO: 5566749 - DNA, 25 bp, Homo sapien
aaagttggagagagacatatttcta

SEQ ID NO: 5566750 - DNA, 25 bp, Homo sapien
gcccttacagcaaactacacactcc

SEQ ID NO: 5566751 - DNA, 25 bp, Homo sapien
ttccaaactccaaaaggcagatgtg

SEQ ID NO: 5566752 - DNA, 25 bp, Homo sapien
aatgatctctaaatgtgtacctgtt

SEQ ID NO: 5566753 - DNA, 25 bp, Homo sapien
attttatttggtggaaagttggaga

SEQ ID NO: 5566754 - DNA, 25 bp, Homo sapien
gaatacagcagcatgcatgatctca

SEQ ID NO: 5566755 - DNA, 25 bp, Homo sapien
atttcatcaaagcacccgcagtggc

SEQ ID NO: 5566756 - DNA, 25 bp, Homo sapien
aggatgcattgccaaatgctgcccc

SEQ ID NO: 5566757 - DNA, 25 bp, Homo sapien
aggcacgccatacaaccgactacac

SEQ ID NO: 5566758 - DNA, 25 bp, Homo sapien
tcttcctccagacaggcacgccata

SEQ ID NO: 5566759 - DNA, 25 bp, Homo sapien
actgcaaaaggagtcaagaagttta

SEQ ID NO: 5566760 - DNA, 25 bp, Homo sapien
acaaccgactacacttgggctcact

SEQ ID NO: 5566761 - DNA, 25 bp, Homo sapien
tccagactgtagacatagaatcacc

SEQ ID NO: 5566762 - DNA, 25 bp, Homo sapien
tgctgtgcctcccagagatttcatc

SEQ ID NO: 5566763 - DNA, 25 bp, Homo sapien
atgaatatgaaatcagagcaagagg

SEQ ID NO: 5566764 - DNA, 25 bp, Homo sapien
ctctggcctgatgactacactccat

SEQ ID NO: 5566765 - DNA, 25 bp, Homo sapien
accagatggctaggatcctggtgca

SEQ ID NO: 5566766 - DNA, 25 bp, Homo sapien
ataagcttggagatacagatgtcct

SEQ ID NO: 5566767 - DNA, 25 bp, Homo sapien
tctcttccctacaaggtgccttagt

SEQ ID NO: 5566768 - DNA, 25 bp, Homo sapien
gccccagccacttcgagctccactc

SEQ ID NO: 5566769 - DNA, 25 bp, Homo sapien
gtcccagttgtgtcccagagtgaag

SEQ ID NO: 5566770 - DNA, 25 bp, Homo sapien
tgccctatttaggatgagtccagga

SEQ ID NO: 5566771 - DNA, 25 bp, Homo sapien
gcttggataagcttggagatacaga

SEQ ID NO: 5566772 - DNA, 25 bp, Homo sapien
ggttcctggtccagaacgagacgtg

SEQ ID NO: 5566773 - DNA, 25 bp, Homo sapien
cgggcttattttcggcagtgcagtg

SEQ ID NO: 5566774 - DNA, 25 bp, Homo sapien
gaagcgggagtctttgcccgcccca

SEQ ID NO: 5566775 - DNA, 25 bp, Homo sapien
acaaggtgccttagtctccgggctt

SEQ ID NO: 5566776 - DNA, 25 bp, Homo sapien
ctggtttagcccgggtctgccctat

SEQ ID NO: 5566777 - DNA, 25 bp, Homo sapien
aagggagttgagtttccatcctcct

SEQ ID NO: 5566778 - DNA, 25 bp, Homo sapien
tgttatgaagtttcagtgtggctga

SEQ ID NO: 5566779 - DNA, 25 bp, Homo sapien
tcctcctcagcagaaactataatca

SEQ ID NO: 5566780 - DNA, 25 bp, Homo sapien
tacataaataggtgaacagattctt

SEQ ID NO: 5566781 - DNA, 25 bp, Homo sapien
atgaccacagaaattaggaaaaaag

SEQ ID NO: 5566782 - DNA, 25 bp, Homo sapien
ttaaacaaagtaacatgctcaaatt

SEQ ID NO: 5566783 - DNA, 25 bp, Homo sapien
ggaagggttattaacagcaggacta

SEQ ID NO: 5566784 - DNA, 25 bp, Homo sapien
aagaatggaagggttattaacagca

SEQ ID NO: 5566785 - DNA, 25 bp, Homo sapien
aatcacaatatatggtctgagggaa

SEQ ID NO: 5566786 - DNA, 25 bp, Homo sapien
ggctgcagcagtagttccatgcact

SEQ ID NO: 5566787 - DNA, 25 bp, Homo sapien
ctcttgcaatccggttctgaacatc

SEQ ID NO: 5566788 - DNA, 25 bp, Homo sapien
tagattaagaatcatgggggaaaaa

SEQ ID NO: 5566789 - DNA, 25 bp, Homo sapien
gagcactggcatttgctagggctac

SEQ ID NO: 5566790 - DNA, 25 bp, Homo sapien
ggaaaaatgagtgttgagccatagt

SEQ ID NO: 5566791 - DNA, 25 bp, Homo sapien
ggtaccagggcatagaaatatgaac

SEQ ID NO: 5566792 - DNA, 25 bp, Homo sapien
agaagaggccaacattgccactgtt

SEQ ID NO: 5566793 - DNA, 25 bp, Homo sapien
tctggggtactgaatccataggtga

SEQ ID NO: 5566794 - DNA, 25 bp, Homo sapien
cagaaacattatcagcacaggaccc

SEQ ID NO: 5566795 - DNA, 25 bp, Homo sapien
aataagcaagaaccgaatctagttg

SEQ ID NO: 5566796 - DNA, 25 bp, Homo sapien
tctagttgcctaagaagaggccaac

SEQ ID NO: 5566797 - DNA, 25 bp, Homo sapien
ccataggtgaatctctggaaggagc

SEQ ID NO: 5566798 - DNA, 25 bp, Homo sapien
cgggctggaactgaatattgattgt

SEQ ID NO: 5566799 - DNA, 25 bp, Homo sapien
acaagctctgttcaggacagggttc

SEQ ID NO: 5566800 - DNA, 25 bp, Homo sapien
aagaggcccccaaacactgcttttc

SEQ ID NO: 5566801 - DNA, 25 bp, Homo sapien
attatggtgtgattagggaaatctc

SEQ ID NO: 5566802 - DNA, 25 bp, Homo sapien
gaggagtgagattatgcacagatca

SEQ ID NO: 5566803 - DNA, 25 bp, Homo sapien
caacaaaatgaacgtgagccaacgt

SEQ ID NO: 5566804 - DNA, 25 bp, Homo sapien
ctaagcaagatggcctgtcaaaatc

SEQ ID NO: 5566805 - DNA, 25 bp, Homo sapien
aagtgacctgggtttaaacacagcc

SEQ ID NO: 5566806 - DNA, 25 bp, Homo sapien
gcttagtcataggaggaagcaaaaa

SEQ ID NO: 5566807 - DNA, 25 bp, Homo sapien
acttttcagtggattcgcaggtatc

SEQ ID NO: 5566808 - DNA, 25 bp, Homo sapien
tagttagactagacagtccagcccc

SEQ ID NO: 5566809 - DNA, 25 bp, Homo sapien
caggacagggttcactgcctagtta

SEQ ID NO: 5566810 - DNA, 25 bp, Homo sapien
ctgagtctgttaacaataggcaagt

SEQ ID NO: 5566811 - DNA, 25 bp, Homo sapien
atagttatagcttctggcaagtatt

SEQ ID NO: 5566812 - DNA, 25 bp, Homo sapien
ttcagcactgtcacttggtttccct

SEQ ID NO: 5566813 - DNA, 25 bp, Homo sapien
ctgtactagccactgtcctgagttc

SEQ ID NO: 5566814 - DNA, 25 bp, Homo sapien
taacaggatcacatggctaattagt

SEQ ID NO: 5566815 - DNA, 25 bp, Homo sapien
aagatgaacatgaaattaataagaa

SEQ ID NO: 5566816 - DNA, 25 bp, Homo sapien
tgcaaggtagactgaaaaaaaacga

SEQ ID NO: 5566817 - DNA, 25 bp, Homo sapien
gatgtttggtaccactcagcccagt

SEQ ID NO: 5566818 - DNA, 25 bp, Homo sapien
caataggcaagtaaaacagccactt

SEQ ID NO: 5566819 - DNA, 25 bp, Homo sapien
tttcaggggatttctgccacttcct

SEQ ID NO: 5566820 - DNA, 25 bp, Homo sapien
gatttaacacatttcaggggatttc

SEQ ID NO: 5566821 - DNA, 25 bp, Homo sapien
atatgtcaagttggctaaggctggg

SEQ ID NO: 5566822 - DNA, 25 bp, Homo sapien
tcttaccgcaggcctgctgacgaag

SEQ ID NO: 5566823 - DNA, 25 bp, Homo sapien
tgggtagagttgaccatgaagaaag

SEQ ID NO: 5566824 - DNA, 25 bp, Homo sapien
aatagaggcaacaatttcagcagca

SEQ ID NO: 5566825 - DNA, 25 bp, Homo sapien
caccactgtgtgtccatcccatctt

SEQ ID NO: 5566826 - DNA, 25 bp, Homo sapien
atgaagaaaggtgttatactcagtc

SEQ ID NO: 5566827 - DNA, 25 bp, Homo sapien
catcagtcgcagtgatggacagatg

SEQ ID NO: 5566828 - DNA, 25 bp, Homo sapien
atttccaagttggtagaggttgagt

SEQ ID NO: 5566829 - DNA, 25 bp, Homo sapien
ggtagcagataaatagaggcaacaa

SEQ ID NO: 5566830 - DNA, 25 bp, Homo sapien
gaggttgagttctgttggattatga

SEQ ID NO: 5566831 - DNA, 25 bp, Homo sapien
cctacgtggttcctgggtagagttg

SEQ ID NO: 5566832 - DNA, 25 bp, Homo sapien
gggaccaccggatgactcctcgttg

SEQ ID NO: 5566833 - DNA, 25 bp, Homo sapien
caacgaggagtcatccggtggtccc

SEQ ID NO: 5566834 - DNA, 25 bp, Homo sapien
cctgtttttcggaggactggaatcc

SEQ ID NO: 5566835 - DNA, 25 bp, Homo sapien
tttcaccaagttatcctgagaagct

SEQ ID NO: 5566836 - DNA, 25 bp, Homo sapien
aaggaagagtcgctgattttcatgt

SEQ ID NO: 5566837 - DNA, 25 bp, Homo sapien
tcaggggtcagtgtcactctgactg

SEQ ID NO: 5566838 - DNA, 25 bp, Homo sapien
taaggttcaaggtgatttgagtcta

SEQ ID NO: 5566839 - DNA, 25 bp, Homo sapien
tacaggaaaagccacacactccatt

SEQ ID NO: 5566840 - DNA, 25 bp, Homo sapien
gtatattacaggtgggctcactgag

SEQ ID NO: 5566841 - DNA, 25 bp, Homo sapien
attgtgcccatcatttcaggggtca

SEQ ID NO: 5566842 - DNA, 25 bp, Homo sapien
agaagctccgagttttgtaagaagg

SEQ ID NO: 5566843 - DNA, 25 bp, Homo sapien
tgattttcatgtgatggccaggaag

SEQ ID NO: 5566844 - DNA, 25 bp, Homo sapien
taggaagtcacttatagacacatga

SEQ ID NO: 5566845 - DNA, 25 bp, Homo sapien
ttaggttcacagcaacactgagcag

SEQ ID NO: 5566846 - DNA, 25 bp, Homo sapien
aacactgagcagatttcccatattc

SEQ ID NO: 5566847 - DNA, 25 bp, Homo sapien
tcacagcaacactgagcagatttcc

SEQ ID NO: 5566848 - DNA, 25 bp, Homo sapien
agagggtacctctgttataactgat

SEQ ID NO: 5566849 - DNA, 25 bp, Homo sapien
acatttcagaacattaaaaactcat

SEQ ID NO: 5566850 - DNA, 25 bp, Homo sapien
acaactgagctgtgagcatattttt

SEQ ID NO: 5566851 - DNA, 25 bp, Homo sapien
ttaacaagttaaatgttcaacacat

SEQ ID NO: 5566852 - DNA, 25 bp, Homo sapien
attactagtatcacaactgagctgt

SEQ ID NO: 5566853 - DNA, 25 bp, Homo sapien
ctgccaccaccagagggtacctctg

SEQ ID NO: 5566854 - DNA, 25 bp, Homo sapien
acaagtgttaagcatacattgccat

SEQ ID NO: 5566855 - DNA, 25 bp, Homo sapien
ttcccatattcccccaccctgccac

SEQ ID NO: 5566856 - DNA, 25 bp, Homo sapien
gcaaaaaacaggaagcacttgaagc

SEQ ID NO: 5566857 - DNA, 25 bp, Homo sapien
acacacccaggtatacaaatatctt

SEQ ID NO: 5566858 - DNA, 25 bp, Homo sapien
ctgtctctaagatggccatgctgtc

SEQ ID NO: 5566859 - DNA, 25 bp, Homo sapien
caaagtaaccaatatctggcctgcc

SEQ ID NO: 5566860 - DNA, 25 bp, Homo sapien
aaatatgacactgtggagatggcca

SEQ ID NO: 5566861 - DNA, 25 bp, Homo sapien
gcttgaaatgactgctacctttgcc

SEQ ID NO: 5566862 - DNA, 25 bp, Homo sapien
ccttgtgaaagtaaatagagggaac

SEQ ID NO: 5566863 - DNA, 25 bp, Homo sapien
tacaaaaaccaagtgctcgattacc

SEQ ID NO: 5566864 - DNA, 25 bp, Homo sapien
cagtcagtgacccttagaccaatgc

SEQ ID NO: 5566865 - DNA, 25 bp, Homo sapien
agatggccatgctgtcaccgcattc

SEQ ID NO: 5566866 - DNA, 25 bp, Homo sapien
cttgaagttcacactgctgtattgc

SEQ ID NO: 5566867 - DNA, 25 bp, Homo sapien
gtctgagggctccaagaatccttga

SEQ ID NO: 5566868 - DNA, 25 bp, Homo sapien
atcattgtggacaccagatcaggaa

SEQ ID NO: 5566869 - DNA, 25 bp, Homo sapien
ccagataattaggagggatgctgaa

SEQ ID NO: 5566870 - DNA, 25 bp, Homo sapien
gatgaccacagcacggtgatggttt

SEQ ID NO: 5566871 - DNA, 25 bp, Homo sapien
cattcaccagcacgcactggcagcc

SEQ ID NO: 5566872 - DNA, 25 bp, Homo sapien
caccaaccgcccatgggctgcattc

SEQ ID NO: 5566873 - DNA, 25 bp, Homo sapien
cacggtgatggtttaaaggccttga

SEQ ID NO: 5566874 - DNA, 25 bp, Homo sapien
cagccgcagccacccgttctctttc

SEQ ID NO: 5566875 - DNA, 25 bp, Homo sapien
gaatccaagtgactcatctgtgtgc

SEQ ID NO: 5566876 - DNA, 25 bp, Homo sapien
tatcattcagttaggctcagctctc

SEQ ID NO: 5566877 - DNA, 25 bp, Homo sapien
ttgttgtgaaggataatcaaactga

SEQ ID NO: 5566878 - DNA, 25 bp, Homo sapien
gatgccaagcaggaggctttctcct

SEQ ID NO: 5566879 - DNA, 25 bp, Homo sapien
ctggtagatcaagcccttactgggc

SEQ ID NO: 5566880 - DNA, 25 bp, Homo sapien
ggctagcagagtgcagactatttct

SEQ ID NO: 5566881 - DNA, 25 bp, Homo sapien
attgttcttgctgtaggtggcaggt

SEQ ID NO: 5566882 - DNA, 25 bp, Homo sapien
gacctcactggggccataatgggca

SEQ ID NO: 5566883 - DNA, 25 bp, Homo sapien
gcagtgactcaaagcaaagacccat

SEQ ID NO: 5566884 - DNA, 25 bp, Homo sapien
cagggggatgttgctcaacttcctc

SEQ ID NO: 5566885 - DNA, 25 bp, Homo sapien
atgggcaggaaataaagtaacatgt

SEQ ID NO: 5566886 - DNA, 25 bp, Homo sapien
ctctgcacttgactcctcggctagc

SEQ ID NO: 5566887 - DNA, 25 bp, Homo sapien
cttctgcccaaaaagggactctgga

SEQ ID NO: 5566888 - DNA, 25 bp, Homo sapien
ttactgggctatgctgcactccctc

SEQ ID NO: 5566889 - DNA, 25 bp, Homo sapien
gataaaaaaaaggatccagagatat

SEQ ID NO: 5566890 - DNA, 25 bp, Homo sapien
atatctctggatccttttttttatc

SEQ ID NO: 5566891 - DNA, 25 bp, Homo sapien
atctacagggaaactcatcttgacc

SEQ ID NO: 5566892 - DNA, 25 bp, Homo sapien
gacacacacacctgactaggcccca

SEQ ID NO: 5566893 - DNA, 25 bp, Homo sapien
caaggtacaatctacagggaaactc

SEQ ID NO: 5566894 - DNA, 25 bp, Homo sapien
aacaactgtccagcccaggcgctag

SEQ ID NO: 5566895 - DNA, 25 bp, Homo sapien
ttttagaaacaactgtccagcccag

SEQ ID NO: 5566896 - DNA, 25 bp, Homo sapien
aaccccaaggtacaatctacaggga

SEQ ID NO: 5566897 - DNA, 25 bp, Homo sapien
gtccagcccaggcgctagaaaaata

SEQ ID NO: 5566898 - DNA, 25 bp, Homo sapien
agcagagctcccagtcacatccatg

SEQ ID NO: 5566899 - DNA, 25 bp, Homo sapien
cacacacactcatgacaggctgggg

SEQ ID NO: 5566900 - DNA, 25 bp, Homo sapien
cccagtcacatccatgcccgcacac

SEQ ID NO: 5566901 - DNA, 25 bp, Homo sapien
acacctgactaggccccagatgtgg

SEQ ID NO: 5566902 - DNA, 25 bp, Homo sapien
tccactgggaagacatcactaagtt

SEQ ID NO: 5566903 - DNA, 25 bp, Homo sapien
tcatgagttggctgagatcataggg

SEQ ID NO: 5566904 - DNA, 25 bp, Homo sapien
tctttctttttgtgacggtgggcgc

SEQ ID NO: 5566905 - DNA, 25 bp, Homo sapien
aggcagttcaatgagcagctggatt

SEQ ID NO: 5566906 - DNA, 25 bp, Homo sapien
cagcatgaacgtgactctaaagtac

SEQ ID NO: 5566907 - DNA, 25 bp, Homo sapien
ctaaagtacctgccgagggtctttc

SEQ ID NO: 5566908 - DNA, 25 bp, Homo sapien
tgtgagattccagacaggcagttca

SEQ ID NO: 5566909 - DNA, 25 bp, Homo sapien
agcgctcagtgtgcattcggttgct

SEQ ID NO: 5566910 - DNA, 25 bp, Homo sapien
tcaaggtgcaaatttgtgagattcc

SEQ ID NO: 5566911 - DNA, 25 bp, Homo sapien
gggtgtcctctgagcacttgcaggc

SEQ ID NO: 5566912 - DNA, 25 bp, Homo sapien
acggtgggcgctgttccccactgtc

SEQ ID NO: 5566913 - DNA, 25 bp, Homo sapien
acaccggttgtaactatgtacctac

SEQ ID NO: 5566914 - DNA, 25 bp, Homo sapien
gaacgctggactcccagtagaccat

SEQ ID NO: 5566915 - DNA, 25 bp, Homo sapien
gggaatgatccgtacctgcctcgct

SEQ ID NO: 5566916 - DNA, 25 bp, Homo sapien
ctttcaactcaggccgtccacgagc

SEQ ID NO: 5566917 - DNA, 25 bp, Homo sapien
ggagtcgggtttgagtcccactgtc

SEQ ID NO: 5566918 - DNA, 25 bp, Homo sapien
gtcccaagcacagaacgctggactc

SEQ ID NO: 5566919 - DNA, 25 bp, Homo sapien
tgttgcaaataaagaccttcgtccc

SEQ ID NO: 5566920 - DNA, 25 bp, Homo sapien
cgtctcatcgttatcacaccggttg

SEQ ID NO: 5566921 - DNA, 25 bp, Homo sapien
ttggaaacacctagtcgtctcatcg

SEQ ID NO: 5566922 - DNA, 25 bp, Homo sapien
caggagttccaacaaaatgatgtac

SEQ ID NO: 5566923 - DNA, 25 bp, Homo sapien
tgatgtacagcaaccttttccaggc

SEQ ID NO: 5566924 - DNA, 25 bp, Homo sapien
ctagccagaactatcgcaggactat

SEQ ID NO: 5566925 - DNA, 25 bp, Homo sapien
tcgcacattaaaaggaatcaacatc

SEQ ID NO: 5566926 - DNA, 25 bp, Homo sapien
gggaaagcctgctatgaaaatgcca

SEQ ID NO: 5566927 - DNA, 25 bp, Homo sapien
cgcaggactataatagggcaacaga

SEQ ID NO: 5566928 - DNA, 25 bp, Homo sapien
aatagggagatcttccaccacggaa

SEQ ID NO: 5566929 - DNA, 25 bp, Homo sapien
ctgtcacatcagagaaatagggaga

SEQ ID NO: 5566930 - DNA, 25 bp, Homo sapien
catttactaatcacctcccaccccc

SEQ ID NO: 5566931 - DNA, 25 bp, Homo sapien
tcttggggcttagaccgtcaaccta

SEQ ID NO: 5566932 - DNA, 25 bp, Homo sapien
aatagggcaacagagtactttgtgt

SEQ ID NO: 5566933 - DNA, 25 bp, Homo sapien
gttacagccaagactggatacaatc

SEQ ID NO: 5566934 - DNA, 25 bp, Homo sapien
aaaacctccttcaccctcgcacatt

SEQ ID NO: 5566935 - DNA, 25 bp, Homo sapien
ggataagcctacatgtgcaggtgaa

SEQ ID NO: 5566936 - DNA, 25 bp, Homo sapien
tcaacccttcaacaggctgaggatc

SEQ ID NO: 5566937 - DNA, 25 bp, Homo sapien
ggacaagagcggctaaaatttactc

SEQ ID NO: 5566938 - DNA, 25 bp, Homo sapien
tgtgccaggcccatatcaacccttc

SEQ ID NO: 5566939 - DNA, 25 bp, Homo sapien
tttgcagttgagaaagccaccttta

SEQ ID NO: 5566940 - DNA, 25 bp, Homo sapien
ttactcattgagcaggaatcccaac

SEQ ID NO: 5566941 - DNA, 25 bp, Homo sapien
aggatctacagcacctcacggggta

SEQ ID NO: 5566942 - DNA, 25 bp, Homo sapien
agaaatgaagtaacctccaaaggat

SEQ ID NO: 5566943 - DNA, 25 bp, Homo sapien
atgacgttatgggatacatatagat

SEQ ID NO: 5566944 - DNA, 25 bp, Homo sapien
tgagcaggaatcccaacatggtgca

SEQ ID NO: 5566945 - DNA, 25 bp, Homo sapien
gatacagagcatccacagggctcac

SEQ ID NO: 5566946 - DNA, 25 bp, Homo sapien
ggggacagtcaaggatgttttgagt

SEQ ID NO: 5566947 - DNA, 25 bp, Homo sapien
actgataggaaaatgaacacttaaa

SEQ ID NO: 5566948 - DNA, 25 bp, Homo sapien
tgtttggagaacatacatgtgtgat

SEQ ID NO: 5566949 - DNA, 25 bp, Homo sapien
aaaacattgcaaagggaagtaatac

SEQ ID NO: 5566950 - DNA, 25 bp, Homo sapien
acatgtgtgattaaaaaatggcaag

SEQ ID NO: 5566951 - DNA, 25 bp, Homo sapien
tcagacactatatgtagaaagcttc

SEQ ID NO: 5566952 - DNA, 25 bp, Homo sapien
caaagggaagtaatactcaagagaa

SEQ ID NO: 5566953 - DNA, 25 bp, Homo sapien
ctatagagcaagtaaaccatccatg

SEQ ID NO: 5566954 - DNA, 25 bp, Homo sapien
aaaacttgacaagccaacaactcca

SEQ ID NO: 5566955 - DNA, 25 bp, Homo sapien
gcatataagcgcaagaatgaatttt

SEQ ID NO: 5566956 - DNA, 25 bp, Homo sapien
aaaaaagcaagttgagtaagacttc

SEQ ID NO: 5566957 - DNA, 25 bp, Homo sapien
aagatgtccacatccggcagagaag

SEQ ID NO: 5566958 - DNA, 25 bp, Homo sapien
agaggccaagatgtccacatccggc

SEQ ID NO: 5566959 - DNA, 25 bp, Homo sapien
cctgccacagttgctcttcctggac

SEQ ID NO: 5566960 - DNA, 25 bp, Homo sapien
gtgtcgcccagtcccggcgaactgg

SEQ ID NO: 5566961 - DNA, 25 bp, Homo sapien
agagatgtctggacccgcttcccaa

SEQ ID NO: 5566962 - DNA, 25 bp, Homo sapien
ggctccggagaataagcggtttcag

SEQ ID NO: 5566963 - DNA, 25 bp, Homo sapien
gaataagcggtttcagcttggtcgc

SEQ ID NO: 5566964 - DNA, 25 bp, Homo sapien
cttcctggactggtcaaatggtgat

SEQ ID NO: 5566965 - DNA, 25 bp, Homo sapien
cgggccagagcaaatttcccgtttg

SEQ ID NO: 5566966 - DNA, 25 bp, Homo sapien
tggacccgcttcccaagagtaggca

SEQ ID NO: 5566967 - DNA, 25 bp, Homo sapien
gacccacgtacctgggtagcaggtc

SEQ ID NO: 5566968 - DNA, 25 bp, Homo sapien
acacacccagagctaagacaaagga

SEQ ID NO: 5566969 - DNA, 25 bp, Homo sapien
taccctctagggaaataaatgaaga

SEQ ID NO: 5566970 - DNA, 25 bp, Homo sapien
tcacctgatcggacagtgagaagtg

SEQ ID NO: 5566971 - DNA, 25 bp, Homo sapien
tctgtttggatatgatgaggagtta

SEQ ID NO: 5566972 - DNA, 25 bp, Homo sapien
taataacacagacctgagcaaagtc

SEQ ID NO: 5566973 - DNA, 25 bp, Homo sapien
agcaaaaggggactgcttccctctg

SEQ ID NO: 5566974 - DNA, 25 bp, Homo sapien
gctgtcaaaatcaggatgagaaccc

SEQ ID NO: 5566975 - DNA, 25 bp, Homo sapien
tgaggagttattaagtttcgcagat

SEQ ID NO: 5566976 - DNA, 25 bp, Homo sapien
gagcaaagtcagcattagatattgt

SEQ ID NO: 5566977 - DNA, 25 bp, Homo sapien
aaccctgaaccagtagccctcatct

SEQ ID NO: 5566978 - DNA, 25 bp, Homo sapien
gtgagaagtgctgtcaaaatcagga

SEQ ID NO: 5566979 - DNA, 25 bp, Homo sapien
ggggcttataggtgaagttgctcta

SEQ ID NO: 5566980 - DNA, 25 bp, Homo sapien
tgttattgaccagtggtaaacacac

SEQ ID NO: 5566981 - DNA, 25 bp, Homo sapien
ctttggcagatataatagctgtata

SEQ ID NO: 5566982 - DNA, 25 bp, Homo sapien
ttcagatgtcagagtatgttaacac

SEQ ID NO: 5566983 - DNA, 25 bp, Homo sapien
aagaagaatagttaacatgcttgct

SEQ ID NO: 5566984 - DNA, 25 bp, Homo sapien
aaatatacagcagttctatgccaca

SEQ ID NO: 5566985 - DNA, 25 bp, Homo sapien
tggaaatcctggatcttcagatgtc

SEQ ID NO: 5566986 - DNA, 25 bp, Homo sapien
aatagctgtatagagcagaggcttt

SEQ ID NO: 5566987 - DNA, 25 bp, Homo sapien
ctgtggattcttagagatgtagcac

SEQ ID NO: 5566988 - DNA, 25 bp, Homo sapien
aggtgaagttgctctaaatgttgga

SEQ ID NO: 5566989 - DNA, 25 bp, Homo sapien
gagcagaggctttcaaatgcatttc

SEQ ID NO: 5566990 - DNA, 25 bp, Homo sapien
cggctgatggcgtgcccatcctatg

SEQ ID NO: 5566991 - DNA, 25 bp, Homo sapien
gtgcccatcctatgctgagccgctc

SEQ ID NO: 5566992 - DNA, 25 bp, Homo sapien
tcctatgctgagccgctcccacttc

SEQ ID NO: 5566993 - DNA, 25 bp, Homo sapien
taccagtcctgccacgaggatgaga

SEQ ID NO: 5566994 - DNA, 25 bp, Homo sapien
gcaagaatgcgctgtaccagtcctg

SEQ ID NO: 5566995 - DNA, 25 bp, Homo sapien
tggcgtgcccatcctatgctgagcc

SEQ ID NO: 5566996 - DNA, 25 bp, Homo sapien
cagaccatctcccacaagtgccagg

SEQ ID NO: 5566997 - DNA, 25 bp, Homo sapien
aggcccggaagctgttctacaaggc

SEQ ID NO: 5566998 - DNA, 25 bp, Homo sapien
gaatgcgctgtaccagtcctgccac

SEQ ID NO: 5566999 - DNA, 25 bp, Homo sapien
acgacgtgcagaccatctcccacaa

SEQ ID NO: 5567000 - DNA, 25 bp, Homo sapien
gcccggaagctgttctacaaggcca

SEQ ID NO: 5567001 - DNA, 25 bp, Homo sapien
tagggggagatcataaactccttcc

SEQ ID NO: 5567002 - DNA, 25 bp, Homo sapien
ggaccaaacgaggtgcttagaacaa

SEQ ID NO: 5567003 - DNA, 25 bp, Homo sapien
cacaaaggcagtttggtgcagtatt

SEQ ID NO: 5567004 - DNA, 25 bp, Homo sapien
tttaaaaagatggactctggagcaa

SEQ ID NO: 5567005 - DNA, 25 bp, Homo sapien
ccacaattctttagggggagatcat

SEQ ID NO: 5567006 - DNA, 25 bp, Homo sapien
aacagctgggtcacttggacaagtt

SEQ ID NO: 5567007 - DNA, 25 bp, Homo sapien
ttataggattgtaggaccaaacgag

SEQ ID NO: 5567008 - DNA, 25 bp, Homo sapien
aagttactgaacatctctgagcatc

SEQ ID NO: 5567009 - DNA, 25 bp, Homo sapien
ccttccaggccccagttaccatcac

SEQ ID NO: 5567010 - DNA, 25 bp, Homo sapien
cttagaacaatgtgctaaggaaggg

SEQ ID NO: 5567011 - DNA, 25 bp, Homo sapien
ctctgccaattaacagctgggtcac

SEQ ID NO: 5567012 - DNA, 25 bp, Homo sapien
tctccctcagctaccaaaaactgtc

SEQ ID NO: 5567013 - DNA, 25 bp, Homo sapien
ttaaaaccgctgggttcattcactc

SEQ ID NO: 5567014 - DNA, 25 bp, Homo sapien
taggcagtcatgtgctgcgctaatc

SEQ ID NO: 5567015 - DNA, 25 bp, Homo sapien
ggtagaaaagtattacaagctatca

SEQ ID NO: 5567016 - DNA, 25 bp, Homo sapien
tgtgagcatctcttaggcagtcatg

SEQ ID NO: 5567017 - DNA, 25 bp, Homo sapien
gagaggatcagtagagatttagttc

SEQ ID NO: 5567018 - DNA, 25 bp, Homo sapien
gtgctgcgctaatcctatctgactc

SEQ ID NO: 5567019 - DNA, 25 bp, Homo sapien
aaattgctcctaagagaggatcagt

SEQ ID NO: 5567020 - DNA, 25 bp, Homo sapien
acaagctatcagtgacgtctacaat

SEQ ID NO: 5567021 - DNA, 25 bp, Homo sapien
attaacagtgaacatagctatttct

SEQ ID NO: 5567022 - DNA, 25 bp, Homo sapien
tctacaatataggtgggaaaggtga

SEQ ID NO: 5567023 - DNA, 25 bp, Homo sapien
cctcaggctccaacagcaaaacttc

SEQ ID NO: 5567024 - DNA, 25 bp, Homo sapien
gtagtgactacaaatagtgagtatg

SEQ ID NO: 5567025 - DNA, 25 bp, Homo sapien
ctcagaacgtaagcttccggagaca

SEQ ID NO: 5567026 - DNA, 25 bp, Homo sapien
ctaaggttacaaaaagagaatatac

SEQ ID NO: 5567027 - DNA, 25 bp, Homo sapien
acaaaacacacatacgcagacatat

SEQ ID NO: 5567028 - DNA, 25 bp, Homo sapien
tgtataggtgtgtgtatacggatac

SEQ ID NO: 5567029 - DNA, 25 bp, Homo sapien
ttcaggaataaatgactaaggttac

SEQ ID NO: 5567030 - DNA, 25 bp, Homo sapien
gtatacggatacacaaaacacacat

SEQ ID NO: 5567031 - DNA, 25 bp, Homo sapien
ccggagacacctgccagcctgttta

SEQ ID NO: 5567032 - DNA, 25 bp, Homo sapien
caggcttctggtgggttctccccaa

SEQ ID NO: 5567033 - DNA, 25 bp, Homo sapien
tgccagcctgtttactgccccatcc

SEQ ID NO: 5567034 - DNA, 25 bp, Homo sapien
tcacacaagatgagttacagttgcc

SEQ ID NO: 5567035 - DNA, 25 bp, Homo sapien
caatactataaaccgccactcacac

SEQ ID NO: 5567036 - DNA, 25 bp, Homo sapien
cagaaggccacgagcaaaaatcgtg

SEQ ID NO: 5567037 - DNA, 25 bp, Homo sapien
atacagacatacacagccaacattc

SEQ ID NO: 5567038 - DNA, 25 bp, Homo sapien
ccttagcatgtaatacaggtgcctg

SEQ ID NO: 5567039 - DNA, 25 bp, Homo sapien
tgtcttcggcgtacggataaaccca

SEQ ID NO: 5567040 - DNA, 25 bp, Homo sapien
gttgccatgggttaaatctgctgcc

SEQ ID NO: 5567041 - DNA, 25 bp, Homo sapien
tatgatgccacaggatacaatacta

SEQ ID NO: 5567042 - DNA, 25 bp, Homo sapien
caatagaaatgcaagatacagacat

SEQ ID NO: 5567043 - DNA, 25 bp, Homo sapien
ctttctgcactgccaaggtgaggga

SEQ ID NO: 5567044 - DNA, 25 bp, Homo sapien
aaaacaattaggttcacaaagccaa

SEQ ID NO: 5567045 - DNA, 25 bp, Homo sapien
tctgctgcctcacggtcagtatcgt

SEQ ID NO: 5567046 - DNA, 25 bp, Homo sapien
atgttagcatattcaaggctctgcc

SEQ ID NO: 5567047 - DNA, 25 bp, Homo sapien
aacaaaacagacaagttccctgttc

SEQ ID NO: 5567048 - DNA, 25 bp, Homo sapien
gtagtccataggaatctgctgcctc

SEQ ID NO: 5567049 - DNA, 25 bp, Homo sapien
catagtatgtgccagcataggggat

SEQ ID NO: 5567050 - DNA, 25 bp, Homo sapien
gcaaagggctttaaacatcagagtt

SEQ ID NO: 5567051 - DNA, 25 bp, Homo sapien
agaatgtgttgtaatgtacagcagc

SEQ ID NO: 5567052 - DNA, 25 bp, Homo sapien
gtacagcagcttcatgtgataattc

SEQ ID NO: 5567053 - DNA, 25 bp, Homo sapien
cggtcagtatcgtgccccttacccc

SEQ ID NO: 5567054 - DNA, 25 bp, Homo sapien
agaatggttattcactcatgcactc

SEQ ID NO: 5567055 - DNA, 25 bp, Homo sapien
tcaaggctctgccaggacctgtaat

SEQ ID NO: 5567056 - DNA, 25 bp, Homo sapien
cccttgaccacagctacttggatca

SEQ ID NO: 5567057 - DNA, 25 bp, Homo sapien
tgtgcgtatgaaaacagaacatttt

SEQ ID NO: 5567058 - DNA, 25 bp, Homo sapien
tgcaaataaagtcagaaagagagtc

SEQ ID NO: 5567059 - DNA, 25 bp, Homo sapien
tgaggcagacatgtgcgtatgaaaa

SEQ ID NO: 5567060 - DNA, 25 bp, Homo sapien
agagtctctactgtgtgcttgaatt

SEQ ID NO: 5567061 - DNA, 25 bp, Homo sapien
acagctacttggatcaggaatgaac

SEQ ID NO: 5567062 - DNA, 25 bp, Homo sapien
tgatactgtccaatctacacccctc

SEQ ID NO: 5567063 - DNA, 25 bp, Homo sapien
ggaatgaacacttggcactagggaa

SEQ ID NO: 5567064 - DNA, 25 bp, Homo sapien
cccccacttggacccagcagtgtgg

SEQ ID NO: 5567065 - DNA, 25 bp, Homo sapien
aaataaaactatgagtgaggcagac

SEQ ID NO: 5567066 - DNA, 25 bp, Homo sapien
ataaagtcagaaagagagtctctac

SEQ ID NO: 5567067 - DNA, 25 bp, Homo sapien
tttaccaataacatgacagggttta

SEQ ID NO: 5567068 - DNA, 25 bp, Homo sapien
ccagtgaaataatactaaggcagta

SEQ ID NO: 5567069 - DNA, 25 bp, Homo sapien
gcagtaaaatgcctaacagattccc

SEQ ID NO: 5567070 - DNA, 25 bp, Homo sapien
ttaagcttactcggtcctgaatttc

SEQ ID NO: 5567071 - DNA, 25 bp, Homo sapien
attttgggagaattatgtttgtgct

SEQ ID NO: 5567072 - DNA, 25 bp, Homo sapien
gatagtagtgttcagcagcactgat

SEQ ID NO: 5567073 - DNA, 25 bp, Homo sapien
tcaaaacattccctccagtgaaata

SEQ ID NO: 5567074 - DNA, 25 bp, Homo sapien
ctgggcatctggatagtagtgttca

SEQ ID NO: 5567075 - DNA, 25 bp, Homo sapien
ccacacacacaaccatataccattt

SEQ ID NO: 5567076 - DNA, 25 bp, Homo sapien
aaatgatttcccatagaccaccttt

SEQ ID NO: 5567077 - DNA, 25 bp, Homo sapien
aacatgacagggtttaacaaataaa

SEQ ID NO: 5567078 - DNA, 25 bp, Homo sapien
cttgctgttggggcatcctcaatgc

SEQ ID NO: 5567079 - DNA, 25 bp, Homo sapien
gcagccactttagagggtctgacgc

SEQ ID NO: 5567080 - DNA, 25 bp, Homo sapien
cagtgcagacaaaacgcagatcttc

SEQ ID NO: 5567081 - DNA, 25 bp, Homo sapien
cttcctctagagagaacagaaggct

SEQ ID NO: 5567082 - DNA, 25 bp, Homo sapien
gtctgacgctccccactagagagtc

SEQ ID NO: 5567083 - DNA, 25 bp, Homo sapien
ttgcatcaaacagcccctttggaga

SEQ ID NO: 5567084 - DNA, 25 bp, Homo sapien
gttctgttccctgacaagcgcgtgg

SEQ ID NO: 5567085 - DNA, 25 bp, Homo sapien
ccggggcctcaccatgcccaatggc

SEQ ID NO: 5567086 - DNA, 25 bp, Homo sapien
gctttcccgagaggcagccacttta

SEQ ID NO: 5567087 - DNA, 25 bp, Homo sapien
tccctgctcccctgccaggcgtcgg

SEQ ID NO: 5567088 - DNA, 25 bp, Homo sapien
ccaatggcagcaagccctgctccta

SEQ ID NO: 5567089 - DNA, 25 bp, Homo sapien
ctaggagaatgtctattagggaatt

SEQ ID NO: 5567090 - DNA, 25 bp, Homo sapien
gggggactcatcccgctaggagaat

SEQ ID NO: 5567091 - DNA, 25 bp, Homo sapien
tagtcagtcgacaactccaagagcc

SEQ ID NO: 5567092 - DNA, 25 bp, Homo sapien
aggtccaccaacgatggtctggcat

SEQ ID NO: 5567093 - DNA, 25 bp, Homo sapien
ctgcacgagaacaaacacacagatg

SEQ ID NO: 5567094 - DNA, 25 bp, Homo sapien
gcagactttgccagcgtgaatccac

SEQ ID NO: 5567095 - DNA, 25 bp, Homo sapien
gaaatgagtgagatgctatgagtca

SEQ ID NO: 5567096 - DNA, 25 bp, Homo sapien
ggagcaggcatttcccgagtgctgt

SEQ ID NO: 5567097 - DNA, 25 bp, Homo sapien
gccttagttgaaagacaggagaggt

SEQ ID NO: 5567098 - DNA, 25 bp, Homo sapien
gtgatgcaaaagtgcagactgctgc

SEQ ID NO: 5567099 - DNA, 25 bp, Homo sapien
cttttactgaagatgagggtcattc

SEQ ID NO: 5567100 - DNA, 25 bp, Homo sapien
tcaccttgttctggggaggatttga

SEQ ID NO: 5567101 - DNA, 25 bp, Homo sapien
cccttgagcaaagaaacgatctgta

SEQ ID NO: 5567102 - DNA, 25 bp, Homo sapien
aagagactagcgtggataatgtcct

SEQ ID NO: 5567103 - DNA, 25 bp, Homo sapien
cccacctcggcccagatgaaagaga

SEQ ID NO: 5567104 - DNA, 25 bp, Homo sapien
acagaaactatgccatgggtggtat

SEQ ID NO: 5567105 - DNA, 25 bp, Homo sapien
ggggaggatttgagactgctcatat

SEQ ID NO: 5567106 - DNA, 25 bp, Homo sapien
aaaaataaagcatcagaccacagaa

SEQ ID NO: 5567107 - DNA, 25 bp, Homo sapien
acaagagggcaatgtaccagctctt

SEQ ID NO: 5567108 - DNA, 25 bp, Homo sapien
tgttgtggtcacatacatggctctc

SEQ ID NO: 5567109 - DNA, 25 bp, Homo sapien
tcttagtggtcaactgaaagggtgt

SEQ ID NO: 5567110 - DNA, 25 bp, Homo sapien
ctgtaaagttgatccggaattggcc

SEQ ID NO: 5567111 - DNA, 25 bp, Homo sapien
ggtcagagtcagtacaaatgggaca

SEQ ID NO: 5567112 - DNA, 25 bp, Homo sapien
caccattgtccttgggtgggagagg

SEQ ID NO: 5567113 - DNA, 25 bp, Homo sapien
aaatgcagtggatgctaccagacat

SEQ ID NO: 5567114 - DNA, 25 bp, Homo sapien
gaggtgaataatgttggaaaagata

SEQ ID NO: 5567115 - DNA, 25 bp, Homo sapien
agtagcttatggtagattctcggtc

SEQ ID NO: 5567116 - DNA, 25 bp, Homo sapien
tcagtacaaatgggacaaacctggg

SEQ ID NO: 5567117 - DNA, 25 bp, Homo sapien
agtcatgacaacctgggtcagagtc

SEQ ID NO: 5567118 - DNA, 25 bp, Homo sapien
ggaaaagatagaagatattgctggc

SEQ ID NO: 5567119 - DNA, 25 bp, Homo sapien
tctcggtcattgaatgctctgtcca

SEQ ID NO: 5567120 - DNA, 25 bp, Homo sapien
gaagatgtggccctagtagcttatg

SEQ ID NO: 5567121 - DNA, 25 bp, Homo sapien
gctctgtccagcccaccattgtcct

SEQ ID NO: 5567122 - DNA, 25 bp, Homo sapien
ctggctgatttaaagcagaataaaa

SEQ ID NO: 5567123 - DNA, 25 bp, Homo sapien
ctaccgtacttaagtttgaggagga

SEQ ID NO: 5567124 - DNA, 25 bp, Homo sapien
ataccgccgtgttaacactaccgta

SEQ ID NO: 5567125 - DNA, 25 bp, Homo sapien
ataaatagataaacttctggctgat

SEQ ID NO: 5567126 - DNA, 25 bp, Homo sapien
aataaataaagcaagcaactatgta

SEQ ID NO: 5567127 - DNA, 25 bp, Homo sapien
gacatgaggtggacttttgacttgg

SEQ ID NO: 5567128 - DNA, 25 bp, Homo sapien
attattgagtgaaagacacaaatac

SEQ ID NO: 5567129 - DNA, 25 bp, Homo sapien
aaagtaatagatctaatacctggtt

SEQ ID NO: 5567130 - DNA, 25 bp, Homo sapien
atgtattagcagatagaaaaatgat

SEQ ID NO: 5567131 - DNA, 25 bp, Homo sapien
tatgggaaaacatgtgttgtgcact

SEQ ID NO: 5567132 - DNA, 25 bp, Homo sapien
ggacttttgacttgggtagctgttc

SEQ ID NO: 5567133 - DNA, 25 bp, Homo sapien
tagaagagtcagaacttgtgaagaa

SEQ ID NO: 5567134 - DNA, 25 bp, Homo sapien
gctcatacaaaggtttggaagaccc

SEQ ID NO: 5567135 - DNA, 25 bp, Homo sapien
tgtgaagaaagaagccttaaaatcc

SEQ ID NO: 5567136 - DNA, 25 bp, Homo sapien
ttggaagacccattctgactaccta

SEQ ID NO: 5567137 - DNA, 25 bp, Homo sapien
tccaaggtagtaatcatcctgggaa

SEQ ID NO: 5567138 - DNA, 25 bp, Homo sapien
gtcatcacgtcggaaagggttatct

SEQ ID NO: 5567139 - DNA, 25 bp, Homo sapien
tgtgcttatagaagagtcagaactt

SEQ ID NO: 5567140 - DNA, 25 bp, Homo sapien
actacctaaaggagagtcagcattc

SEQ ID NO: 5567141 - DNA, 25 bp, Homo sapien
tgaggcagctaatgggctcatacaa

SEQ ID NO: 5567142 - DNA, 25 bp, Homo sapien
aacgtaaagaatatgtaacctgtgt

SEQ ID NO: 5567143 - DNA, 25 bp, Homo sapien
ctccccaaaggaaaataggcatatt

SEQ ID NO: 5567144 - DNA, 25 bp, Homo sapien
aggaaacaaaaggattgtgataaga

SEQ ID NO: 5567145 - DNA, 25 bp, Homo sapien
aaagaatttcttgcaggaaagattc

SEQ ID NO: 5567146 - DNA, 25 bp, Homo sapien
tttggtaaagaatttcttgcaggaa

SEQ ID NO: 5567147 - DNA, 25 bp, Homo sapien
tgcatccctttaagaaacacctgcc

SEQ ID NO: 5567148 - DNA, 25 bp, Homo sapien
gttccctccaacgatcccagcagaa

SEQ ID NO: 5567149 - DNA, 25 bp, Homo sapien
cctaagagaatgagctaaaacacag

SEQ ID NO: 5567150 - DNA, 25 bp, Homo sapien
aaaggattgtgataagaagcaaaaa

SEQ ID NO: 5567151 - DNA, 25 bp, Homo sapien
tcccagcagaaatgtttctaacttc

SEQ ID NO: 5567152 - DNA, 25 bp, Homo sapien
atgtcctaagagaatgagctaaaac

SEQ ID NO: 5567153 - DNA, 25 bp, Homo sapien
ttcttgcaggaaagattccaaagtt

SEQ ID NO: 5567154 - DNA, 25 bp, Homo sapien
tgttttggaacatacaaagtgcaaa

SEQ ID NO: 5567155 - DNA, 25 bp, Homo sapien
ggtcgaccaacaggagcaccaacta

SEQ ID NO: 5567156 - DNA, 25 bp, Homo sapien
tagttggtgctcctgttggtcgacc

SEQ ID NO: 5567157 - DNA, 25 bp, Homo sapien
agaggaagcattctgcccgtgctct

SEQ ID NO: 5567158 - DNA, 25 bp, Homo sapien
atgtgatctggagctgtggttttca

SEQ ID NO: 5567159 - DNA, 25 bp, Homo sapien
ttgatggaagagcacctcgcctaaa

SEQ ID NO: 5567160 - DNA, 25 bp, Homo sapien
tgatagggctgtaactccacctgct

SEQ ID NO: 5567161 - DNA, 25 bp, Homo sapien
cacctggttgcttgctaggaaggcg

SEQ ID NO: 5567162 - DNA, 25 bp, Homo sapien
ttggaaaccactggctaagaggaag

SEQ ID NO: 5567163 - DNA, 25 bp, Homo sapien
gcccagggcttatctgagaagcaga

SEQ ID NO: 5567164 - DNA, 25 bp, Homo sapien
tggagtaggtgagtttacctgaccc

SEQ ID NO: 5567165 - DNA, 25 bp, Homo sapien
atctcaagtgtctctagcccagggc

SEQ ID NO: 5567166 - DNA, 25 bp, Homo sapien
gtcagaaatgcatcagcaatgtggc

SEQ ID NO: 5567167 - DNA, 25 bp, Homo sapien
caacatgagtccctgaccagcagtt

SEQ ID NO: 5567168 - DNA, 25 bp, Homo sapien
agacaccatgtgctgtccacacagc

SEQ ID NO: 5567169 - DNA, 25 bp, Homo sapien
ggtcaaccccaataggtggggagca

SEQ ID NO: 5567170 - DNA, 25 bp, Homo sapien
ggggagcaggacagccatgctccca

SEQ ID NO: 5567171 - DNA, 25 bp, Homo sapien
cacagccctccagaagaaagctggg

SEQ ID NO: 5567172 - DNA, 25 bp, Homo sapien
ggcaggccaagtctctctaaccaca

SEQ ID NO: 5567173 - DNA, 25 bp, Homo sapien
ctaaccacagccctccagaagaaag

SEQ ID NO: 5567174 - DNA, 25 bp, Homo sapien
ccacctgttctgctccatggggagc

SEQ ID NO: 5567175 - DNA, 25 bp, Homo sapien
agcaggatggtcaaccccaataggt

SEQ ID NO: 5567176 - DNA, 25 bp, Homo sapien
gatcgtgagttagcgccacacagaa

SEQ ID NO: 5567177 - DNA, 25 bp, Homo sapien
atagaagagaagttctgtaggtcca

SEQ ID NO: 5567178 - DNA, 25 bp, Homo sapien
ctgcatccctgtgagagatcgtgag

SEQ ID NO: 5567179 - DNA, 25 bp, Homo sapien
ttggacatccctgatatacacatta

SEQ ID NO: 5567180 - DNA, 25 bp, Homo sapien
aggggaaaacctagaatatacatat

SEQ ID NO: 5567181 - DNA, 25 bp, Homo sapien
tcatcaggtattgctagtgttagtg

SEQ ID NO: 5567182 - DNA, 25 bp, Homo sapien
actcgtaacaaaaaactgtgattga

SEQ ID NO: 5567183 - DNA, 25 bp, Homo sapien
gatatacacattaacaggtgccatc

SEQ ID NO: 5567184 - DNA, 25 bp, Homo sapien
ctataggggaaaacctagaatatac

SEQ ID NO: 5567185 - DNA, 25 bp, Homo sapien
cattaacaggtgccatccttggatg

SEQ ID NO: 5567186 - DNA, 25 bp, Homo sapien
aactgtgattgaaaatcgtcccggg

SEQ ID NO: 5567187 - DNA, 25 bp, Homo sapien
atacatatagcagtcttgtccaacc

SEQ ID NO: 5567188 - DNA, 25 bp, Homo sapien
caaacagtacgaggtttttttgtga

SEQ ID NO: 5567189 - DNA, 25 bp, Homo sapien
cacataagtatacctataggggaaa

SEQ ID NO: 5567190 - DNA, 25 bp, Homo sapien
taaactgcaaggttccctgatttta

SEQ ID NO: 5567191 - DNA, 25 bp, Homo sapien
tggctggatgcattgaaggattaaa

SEQ ID NO: 5567192 - DNA, 25 bp, Homo sapien
gaagctgggtatgcaaagcatgtct

SEQ ID NO: 5567193 - DNA, 25 bp, Homo sapien
aaaaaccttgcattgatggatggta

SEQ ID NO: 5567194 - DNA, 25 bp, Homo sapien
tgttttggctggatgcattgaagga

SEQ ID NO: 5567195 - DNA, 25 bp, Homo sapien
aaggtgtgccttaaactgcaaggtt

SEQ ID NO: 5567196 - DNA, 25 bp, Homo sapien
tttgctgctttaggtagctgacaac

SEQ ID NO: 5567197 - DNA, 25 bp, Homo sapien
caaagcatgtctatagcaaggaaag

SEQ ID NO: 5567198 - DNA, 25 bp, Homo sapien
tttcttagggaagatgtggctagaa

SEQ ID NO: 5567199 - DNA, 25 bp, Homo sapien
taggtagctgacaacatgcagatcc

SEQ ID NO: 5567200 - DNA, 25 bp, Homo sapien
atgagtgagggtcaaaaatctagtt

SEQ ID NO: 5567201 - DNA, 25 bp, Homo sapien
gacaatggggttttgattctgaccc

SEQ ID NO: 5567202 - DNA, 25 bp, Homo sapien
ccagttcagtgggatagcaccactc

SEQ ID NO: 5567203 - DNA, 25 bp, Homo sapien
ttctgacccattatgaaacagcaac

SEQ ID NO: 5567204 - DNA, 25 bp, Homo sapien
ctctcaaagacacctgaccaggcac

SEQ ID NO: 5567205 - DNA, 25 bp, Homo sapien
tgaaacagcaactccccttcctccc

SEQ ID NO: 5567206 - DNA, 25 bp, Homo sapien
tttctcaccagttcagtgggatagc

SEQ ID NO: 5567207 - DNA, 25 bp, Homo sapien
attttgacttagaaaaatgcaggga

SEQ ID NO: 5567208 - DNA, 25 bp, Homo sapien
gaagggctagtgattcgcaatcata

SEQ ID NO: 5567209 - DNA, 25 bp, Homo sapien
tggaggttacaatgtgccatgctta

SEQ ID NO: 5567210 - DNA, 25 bp, Homo sapien
agggagtcagcctgtctgaaagctt

SEQ ID NO: 5567211 - DNA, 25 bp, Homo sapien
gggatagcaccactctcaaagacac

SEQ ID NO: 5567212 - DNA, 25 bp, Homo sapien
tgagaacttctcactgagagagtct

SEQ ID NO: 5567213 - DNA, 25 bp, Homo sapien
tgctattattgtccctgagaacttc

SEQ ID NO: 5567214 - DNA, 25 bp, Homo sapien
tgaatcaatgaaagatggaccagag

SEQ ID NO: 5567215 - DNA, 25 bp, Homo sapien
tcactgagagagtctgacataaaac

SEQ ID NO: 5567216 - DNA, 25 bp, Homo sapien
agcttgggctccctgccccagggtt

SEQ ID NO: 5567217 - DNA, 25 bp, Homo sapien
agtcacagtcctagcttgggctccc

SEQ ID NO: 5567218 - DNA, 25 bp, Homo sapien
tttctcccacaaatgccgatgcgca

SEQ ID NO: 5567219 - DNA, 25 bp, Homo sapien
tagcaccatcgccagggaaatcaaa

SEQ ID NO: 5567220 - DNA, 25 bp, Homo sapien
ggcccatagccagacagaccctttt

SEQ ID NO: 5567221 - DNA, 25 bp, Homo sapien
aactaagctagcaccatcgccaggg

SEQ ID NO: 5567222 - DNA, 25 bp, Homo sapien
gccgatgcgcacaaactaagctagc

SEQ ID NO: 5567223 - DNA, 25 bp, Homo sapien
aaaacgacattgaagcaccatttgc

SEQ ID NO: 5567224 - DNA, 25 bp, Homo sapien
gtcctctctaccctgctgccctcgc

SEQ ID NO: 5567225 - DNA, 25 bp, Homo sapien
ctctgttctctgactgaccgggtgc

SEQ ID NO: 5567226 - DNA, 25 bp, Homo sapien
acagcttaaagatacaaaacgacat

SEQ ID NO: 5567227 - DNA, 25 bp, Homo sapien
ggagaacgccatccaagaactggaa

SEQ ID NO: 5567228 - DNA, 25 bp, Homo sapien
gcctctgtctggtttggtgtgtgtg

SEQ ID NO: 5567229 - DNA, 25 bp, Homo sapien
gtctagctgggaggcattgtatata

SEQ ID NO: 5567230 - DNA, 25 bp, Homo sapien
aggttgaattcaagtgttggctccc

SEQ ID NO: 5567231 - DNA, 25 bp, Homo sapien
ctacctgtctccatgctgccctgcc

SEQ ID NO: 5567232 - DNA, 25 bp, Homo sapien
aggagcctaggatttgtctcagtgg

SEQ ID NO: 5567233 - DNA, 25 bp, Homo sapien
agggacctggaggtctgtctacctg

SEQ ID NO: 5567234 - DNA, 25 bp, Homo sapien
ggcggcattatcttggggatgcaac

SEQ ID NO: 5567235 - DNA, 25 bp, Homo sapien
gtcgcctcgctaagttgctgtgccc

SEQ ID NO: 5567236 - DNA, 25 bp, Homo sapien
tgccttctacttggtgagggcggca

SEQ ID NO: 5567237 - DNA, 25 bp, Homo sapien
tcggatgaattaactgagaacgcag

SEQ ID NO: 5567238 - DNA, 25 bp, Homo sapien
caaaagttagcagtctgcagggtgc

SEQ ID NO: 5567239 - DNA, 25 bp, Homo sapien
cagtgacagaactgtacgcagcgtg

SEQ ID NO: 5567240 - DNA, 25 bp, Homo sapien
aggccaggacacttgcatagaatgc

SEQ ID NO: 5567241 - DNA, 25 bp, Homo sapien
gagaacgcagtgcactcactggcat

SEQ ID NO: 5567242 - DNA, 25 bp, Homo sapien
agaatgctcccggcactctcccgtc

SEQ ID NO: 5567243 - DNA, 25 bp, Homo sapien
ggctgtgtgtaagagtcagtgacag

SEQ ID NO: 5567244 - DNA, 25 bp, Homo sapien
cgtgcaagagacaactgccatcact

SEQ ID NO: 5567245 - DNA, 25 bp, Homo sapien
gctctgcttggtgaatggagcctgg

SEQ ID NO: 5567246 - DNA, 25 bp, Homo sapien
ctggtgccagctcatacaagatgca

SEQ ID NO: 5567247 - DNA, 25 bp, Homo sapien
gccacccttgggctgttccactcct

SEQ ID NO: 5567248 - DNA, 25 bp, Homo sapien
gacacacaacaacataagctctgct

SEQ ID NO: 5567249 - DNA, 25 bp, Homo sapien
gtgctcttgcacagggcatgaccta

SEQ ID NO: 5567250 - DNA, 25 bp, Homo sapien
tccactccttgctggaaagggccga

SEQ ID NO: 5567251 - DNA, 25 bp, Homo sapien
ccctggataggaccagggtatgagg

SEQ ID NO: 5567252 - DNA, 25 bp, Homo sapien
gaaagggccgatttgatttgtctgg

SEQ ID NO: 5567253 - DNA, 25 bp, Homo sapien
gggaatataaccctggataggacca

SEQ ID NO: 5567254 - DNA, 25 bp, Homo sapien
ccacatcctctgggtagacacagac

SEQ ID NO: 5567255 - DNA, 25 bp, Homo sapien
cagaagatgtgatctagccaccctt

SEQ ID NO: 5567256 - DNA, 25 bp, Homo sapien
agataaaacgccttctctccccacc

SEQ ID NO: 5567257 - DNA, 25 bp, Homo sapien
agctcgtcactgaactaacggcttt

SEQ ID NO: 5567258 - DNA, 25 bp, Homo sapien
ggcttgtgccgcttccgcaagaagg

SEQ ID NO: 5567259 - DNA, 25 bp, Homo sapien
tggaggttttttcacgctgagggtg

SEQ ID NO: 5567260 - DNA, 25 bp, Homo sapien
gtaaaaaggccgcgctgtactgcgg

SEQ ID NO: 5567261 - DNA, 25 bp, Homo sapien
tgtcccacggcttctcgagattatc

SEQ ID NO: 5567262 - DNA, 25 bp, Homo sapien
cctcaattagcataaaagctgctcc

SEQ ID NO: 5567263 - DNA, 25 bp, Homo sapien
gagggtgaagattcttagtttcctc

SEQ ID NO: 5567264 - DNA, 25 bp, Homo sapien
cacgcaacctacgccctactgtcct

SEQ ID NO: 5567265 - DNA, 25 bp, Homo sapien
ttaattcctgagacacgcaacctac

SEQ ID NO: 5567266 - DNA, 25 bp, Homo sapien
ccgcgctgtactgcggcttgtgccg

SEQ ID NO: 5567267 - DNA, 25 bp, Homo sapien
tcctgttctgtagacagctggcttc

SEQ ID NO: 5567268 - DNA, 25 bp, Homo sapien
tacacatgttgaactgctgacagga

SEQ ID NO: 5567269 - DNA, 25 bp, Homo sapien
tagataaatctaggctttccactcc

SEQ ID NO: 5567270 - DNA, 25 bp, Homo sapien
gtcgccagcatggttaggttctcgt

SEQ ID NO: 5567271 - DNA, 25 bp, Homo sapien
gagagcaagcaggctttctgatgtc

SEQ ID NO: 5567272 - DNA, 25 bp, Homo sapien
cagcagagactgaaagctactacac

SEQ ID NO: 5567273 - DNA, 25 bp, Homo sapien
tgacaggaaaagaacccagtagata

SEQ ID NO: 5567274 - DNA, 25 bp, Homo sapien
ctgtagacagctggcttcttcctgc

SEQ ID NO: 5567275 - DNA, 25 bp, Homo sapien
tccatatattagctggggctgccat

SEQ ID NO: 5567276 - DNA, 25 bp, Homo sapien
ccagcatggttaggttctcgtaggg

SEQ ID NO: 5567277 - DNA, 25 bp, Homo sapien
gagactgaaagctactacacatgtt

SEQ ID NO: 5567278 - DNA, 25 bp, Homo sapien
taacaattataaatagagatcataa

SEQ ID NO: 5567279 - DNA, 25 bp, Homo sapien
aatgattttgtgaaataagctgtaa

SEQ ID NO: 5567280 - DNA, 25 bp, Homo sapien
ataccatccaaaaaactagacgttc

SEQ ID NO: 5567281 - DNA, 25 bp, Homo sapien
acagtggaaaagagcaatgattttg

SEQ ID NO: 5567282 - DNA, 25 bp, Homo sapien
aaaaatgattatgttattgccactc

SEQ ID NO: 5567283 - DNA, 25 bp, Homo sapien
ataagctgtaagttcttaacaatta

SEQ ID NO: 5567284 - DNA, 25 bp, Homo sapien
gcacactatggtacatacgtatggt

SEQ ID NO: 5567285 - DNA, 25 bp, Homo sapien
actagacgttcaaataatcacgttt

SEQ ID NO: 5567286 - DNA, 25 bp, Homo sapien
cgtatggtacaaataacagtggaaa

SEQ ID NO: 5567287 - DNA, 25 bp, Homo sapien
catacgtatggtacaaataacagtg

SEQ ID NO: 5567288 - DNA, 25 bp, Homo sapien
ctataatttggcagtttgtaaaaaa

SEQ ID NO: 5567289 - DNA, 25 bp, Homo sapien
ccaccctgagcctcacagtcctcac

SEQ ID NO: 5567290 - DNA, 25 bp, Homo sapien
taatacaatgttcctgaggggacgc

SEQ ID NO: 5567291 - DNA, 25 bp, Homo sapien
cttaaaaatcacaatcccgggatag

SEQ ID NO: 5567292 - DNA, 25 bp, Homo sapien
tctaaaagacataatcccaaacact

SEQ ID NO: 5567293 - DNA, 25 bp, Homo sapien
tatttggagactgaaaatggtttaa

SEQ ID NO: 5567294 - DNA, 25 bp, Homo sapien
gcatcatgttaggtggagctactgc

SEQ ID NO: 5567295 - DNA, 25 bp, Homo sapien
ggacgcccttcaggccctcagcatg

SEQ ID NO: 5567296 - DNA, 25 bp, Homo sapien
aatcccgggatagttgcatcatgtt

SEQ ID NO: 5567297 - DNA, 25 bp, Homo sapien
tgaaatactgaaagacgcaaatctc

SEQ ID NO: 5567298 - DNA, 25 bp, Homo sapien
tgttgtagccacctgtcctggggca

SEQ ID NO: 5567299 - DNA, 25 bp, Homo sapien
ggagctactgccttgcttggggctt

SEQ ID NO: 5567300 - DNA, 25 bp, Homo sapien
gaaatcaggagtgacattcaatagc

SEQ ID NO: 5567301 - DNA, 25 bp, Homo sapien
agtaggtgcaggaaaatgtttttgt

SEQ ID NO: 5567302 - DNA, 25 bp, Homo sapien
cttatgccgcactcaggctgtgtag

SEQ ID NO: 5567303 - DNA, 25 bp, Homo sapien
ttcatcagtgaaatacaacccccat

SEQ ID NO: 5567304 - DNA, 25 bp, Homo sapien
agcaagcaaggtcaacttatgccgc

SEQ ID NO: 5567305 - DNA, 25 bp, Homo sapien
aaagggctacttgttttctgtctcc

SEQ ID NO: 5567306 - DNA, 25 bp, Homo sapien
gccccatttcttagcaagcaaggtc

SEQ ID NO: 5567307 - DNA, 25 bp, Homo sapien
tatcttgatggaaagggctacttgt

SEQ ID NO: 5567308 - DNA, 25 bp, Homo sapien
ccgcactcaggctgtgtagtaggtg

SEQ ID NO: 5567309 - DNA, 25 bp, Homo sapien
tcaatagccagcaaccccagaaaac

SEQ ID NO: 5567310 - DNA, 25 bp, Homo sapien
caggagtgacattcaatagccagca

SEQ ID NO: 5567311 - DNA, 25 bp, Homo sapien
tcctaacaaggaaactatcagattt

SEQ ID NO: 5567312 - DNA, 25 bp, Homo sapien
aagtgcacctcccgggaaatcctca

SEQ ID NO: 5567313 - DNA, 25 bp, Homo sapien
attcatggtacgaatggccaatttc

SEQ ID NO: 5567314 - DNA, 25 bp, Homo sapien
tacaaagcacaaactgaagattaaa

SEQ ID NO: 5567315 - DNA, 25 bp, Homo sapien
agagcttcagaaagaatacaaggtc

SEQ ID NO: 5567316 - DNA, 25 bp, Homo sapien
atacaggtactttaggaagttcttc

SEQ ID NO: 5567317 - DNA, 25 bp, Homo sapien
gcaaactgcacaggcaaagtgctac

SEQ ID NO: 5567318 - DNA, 25 bp, Homo sapien
agaatacaaggtcaaatgccaaaaa

SEQ ID NO: 5567319 - DNA, 25 bp, Homo sapien
tgtcagtgcacataattccaatagc

SEQ ID NO: 5567320 - DNA, 25 bp, Homo sapien
gtacatctacactccagcaaactgc

SEQ ID NO: 5567321 - DNA, 25 bp, Homo sapien
agagcttgaaaacaccacacaaggt

SEQ ID NO: 5567322 - DNA, 25 bp, Homo sapien
aagtgatcatgttttgtgagcagaa

SEQ ID NO: 5567323 - DNA, 25 bp, Homo sapien
taggctccacaccaatgacaaagtc

SEQ ID NO: 5567324 - DNA, 25 bp, Homo sapien
aactgcccccttatggtgaagcgat

SEQ ID NO: 5567325 - DNA, 25 bp, Homo sapien
ttgcacataattataggctccacac

SEQ ID NO: 5567326 - DNA, 25 bp, Homo sapien
ggtgaagcgatgtctccatttaatg

SEQ ID NO: 5567327 - DNA, 25 bp, Homo sapien
caagtgagtaggactaccaaaccct

SEQ ID NO: 5567328 - DNA, 25 bp, Homo sapien
tgcaaaaccagtcagaatattaaaa

SEQ ID NO: 5567329 - DNA, 25 bp, Homo sapien
aaaagtcttaagtagggaattgcac

SEQ ID NO: 5567330 - DNA, 25 bp, Homo sapien
tgtgagcagaaggaatcattcttga

SEQ ID NO: 5567331 - DNA, 25 bp, Homo sapien
tttgacaatagcaagtgagtaggac

SEQ ID NO: 5567332 - DNA, 25 bp, Homo sapien
taatgaagacttataaggatctcaa

SEQ ID NO: 5567333 - DNA, 25 bp, Homo sapien
ttttgtccttgcaagtggtcctgtc

SEQ ID NO: 5567334 - DNA, 25 bp, Homo sapien
gtcctgtctggtgtgaaccgtcagc

SEQ ID NO: 5567335 - DNA, 25 bp, Homo sapien
gctcggcgggctcccttccattcta

SEQ ID NO: 5567336 - DNA, 25 bp, Homo sapien
tgcaagtggtcctgtctggtgtgaa

SEQ ID NO: 5567337 - DNA, 25 bp, Homo sapien
ccagcccgcgttcttccgcctgcct

SEQ ID NO: 5567338 - DNA, 25 bp, Homo sapien
tggtgtgaaccgtcagcacagatgg

SEQ ID NO: 5567339 - DNA, 25 bp, Homo sapien
gagcttccccgagtcgttcgctggg

SEQ ID NO: 5567340 - DNA, 25 bp, Homo sapien
gaggaatccccgcctgctccatcgg

SEQ ID NO: 5567341 - DNA, 25 bp, Homo sapien
tgcttcccagcccgcgttcttccgc

SEQ ID NO: 5567342 - DNA, 25 bp, Homo sapien
gaatcttcccgcttgcttcccagcc

SEQ ID NO: 5567343 - DNA, 25 bp, Homo sapien
tccattctagaatcttcccgcttgc

SEQ ID NO: 5567344 - DNA, 25 bp, Homo sapien
tagcatataatactatagtggcatt

SEQ ID NO: 5567345 - DNA, 25 bp, Homo sapien
aaaataacctgctgaaactattcag

SEQ ID NO: 5567346 - DNA, 25 bp, Homo sapien
tccctgtcttctgctgagtataaaa

SEQ ID NO: 5567347 - DNA, 25 bp, Homo sapien
gctgagtataaaataaatgggtcta

SEQ ID NO: 5567348 - DNA, 25 bp, Homo sapien
tcagaaatatacctcaattagggca

SEQ ID NO: 5567349 - DNA, 25 bp, Homo sapien
ttgttgattcagagtggtagaagct

SEQ ID NO: 5567350 - DNA, 25 bp, Homo sapien
aagtgaaactgatggcagcactgct

SEQ ID NO: 5567351 - DNA, 25 bp, Homo sapien
tagtggcattaataattcagcagat

SEQ ID NO: 5567352 - DNA, 25 bp, Homo sapien
tgtgtgaacatgtttaaaattaacc

SEQ ID NO: 5567353 - DNA, 25 bp, Homo sapien
taagcttggtagaaatagaaattat

SEQ ID NO: 5567354 - DNA, 25 bp, Homo sapien
aataattcagcagatacagaaattt

SEQ ID NO: 5567355 - DNA, 25 bp, Homo sapien
agagagaaactagtcatactatgtg

SEQ ID NO: 5567356 - DNA, 25 bp, Homo sapien
agtctctatgaaagccacccgtctc

SEQ ID NO: 5567357 - DNA, 25 bp, Homo sapien
gcaatggttctcagtgcagattcct

SEQ ID NO: 5567358 - DNA, 25 bp, Homo sapien
agtcaaccttatctgaactgaaaac

SEQ ID NO: 5567359 - DNA, 25 bp, Homo sapien
tgaaagccacccgtctccagcttcc

SEQ ID NO: 5567360 - DNA, 25 bp, Homo sapien
tgtatgagtatgcaggaacacctat

SEQ ID NO: 5567361 - DNA, 25 bp, Homo sapien
attaacagtttagataggagatttt

SEQ ID NO: 5567362 - DNA, 25 bp, Homo sapien
tccatagaagtatttctggcatctt

SEQ ID NO: 5567363 - DNA, 25 bp, Homo sapien
tttgagtctatggacaaaatcatac

SEQ ID NO: 5567364 - DNA, 25 bp, Homo sapien
cagatgtgagctgcacagtcaacct

SEQ ID NO: 5567365 - DNA, 25 bp, Homo sapien
aaagagagcactcacattcccagtc

SEQ ID NO: 5567366 - DNA, 25 bp, Homo sapien
tgatcttcacaaaaaccttctgagg

SEQ ID NO: 5567367 - DNA, 25 bp, Homo sapien
aagccatttcaggtgtgacaacagt

SEQ ID NO: 5567368 - DNA, 25 bp, Homo sapien
aacatacatatgcataacactttac

SEQ ID NO: 5567369 - DNA, 25 bp, Homo sapien
acatagttggcaaaaagataaatgg

SEQ ID NO: 5567370 - DNA, 25 bp, Homo sapien
gtgacaacagtaacatagttggcaa

SEQ ID NO: 5567371 - DNA, 25 bp, Homo sapien
ctcagataagtcatagcaggcaagg

SEQ ID NO: 5567372 - DNA, 25 bp, Homo sapien
aaccttctgaggtgttattatttcc

SEQ ID NO: 5567373 - DNA, 25 bp, Homo sapien
atcatgccacatatatttagcttct

SEQ ID NO: 5567374 - DNA, 25 bp, Homo sapien
acactttacaaatcatgccacatat

SEQ ID NO: 5567375 - DNA, 25 bp, Homo sapien
aacaaagccatttcaggtgtgacaa

SEQ ID NO: 5567376 - DNA, 25 bp, Homo sapien
atgggaacatggctctcagataagt

SEQ ID NO: 5567377 - DNA, 25 bp, Homo sapien
aggcatggcacctccaaaggtcatc

SEQ ID NO: 5567378 - DNA, 25 bp, Homo sapien
atctctcccagaacagccaggtctt

SEQ ID NO: 5567379 - DNA, 25 bp, Homo sapien
caggtcttctgtgggtccatcagat

SEQ ID NO: 5567380 - DNA, 25 bp, Homo sapien
taagttcatgcatggtacaaaccac

SEQ ID NO: 5567381 - DNA, 25 bp, Homo sapien
ctttcactgccctggaagagtcctg

SEQ ID NO: 5567382 - DNA, 25 bp, Homo sapien
taaatgcattccgggcatggcagga

SEQ ID NO: 5567383 - DNA, 25 bp, Homo sapien
tgcccgaatcccaaatctgactccc

SEQ ID NO: 5567384 - DNA, 25 bp, Homo sapien
agacttcctagagctgcctgtggtc

SEQ ID NO: 5567385 - DNA, 25 bp, Homo sapien
cggcctggctgtgtcctacccttga

SEQ ID NO: 5567386 - DNA, 25 bp, Homo sapien
agtcctgcagagacctcaaggcagt

SEQ ID NO: 5567387 - DNA, 25 bp, Homo sapien
cctgtggtcaagattagaagaggag

SEQ ID NO: 5567388 - DNA, 25 bp, Homo sapien
caggaaaagcactaaagatggatag

SEQ ID NO: 5567389 - DNA, 25 bp, Homo sapien
tgtggcctttaaggcaggactgggt

SEQ ID NO: 5567390 - DNA, 25 bp, Homo sapien
tagaaaacagtgtaaccctatctcc

SEQ ID NO: 5567391 - DNA, 25 bp, Homo sapien
tctacaggttagggtcaagttattc

SEQ ID NO: 5567392 - DNA, 25 bp, Homo sapien
gagctgatgatcatagatgtggcct

SEQ ID NO: 5567393 - DNA, 25 bp, Homo sapien
ctaaagatggatagtcctgccttcc

SEQ ID NO: 5567394 - DNA, 25 bp, Homo sapien
agtaaaacaggctatcaggaggtta

SEQ ID NO: 5567395 - DNA, 25 bp, Homo sapien
ttgttgtttaacggcaggaaaagca

SEQ ID NO: 5567396 - DNA, 25 bp, Homo sapien
agaacagaaatgacttgaccaagtt

SEQ ID NO: 5567397 - DNA, 25 bp, Homo sapien
ttaagcccaaacagtgaggaaacaa

SEQ ID NO: 5567398 - DNA, 25 bp, Homo sapien
gcaggactgggtatttggttcttaa

SEQ ID NO: 5567399 - DNA, 25 bp, Homo sapien
tctctgactgtaaagatgaccactt

SEQ ID NO: 5567400 - DNA, 25 bp, Homo sapien
tggtgatgctactggtatgtgtggt

SEQ ID NO: 5567401 - DNA, 25 bp, Homo sapien
ggtatgtgtggtatagcctaaagat

SEQ ID NO: 5567402 - DNA, 25 bp, Homo sapien
acctaatcagaaaaacctgagcttt

SEQ ID NO: 5567403 - DNA, 25 bp, Homo sapien
ttatgaacacagtaggatttaattt

SEQ ID NO: 5567404 - DNA, 25 bp, Homo sapien
agtggtttccaacaaggaatgactt

SEQ ID NO: 5567405 - DNA, 25 bp, Homo sapien
tataatgattaggtggtgatgctac

SEQ ID NO: 5567406 - DNA, 25 bp, Homo sapien
atagaacacttgtcagtgtctggag

SEQ ID NO: 5567407 - DNA, 25 bp, Homo sapien
aaacaacttccctgatgagttcttt

SEQ ID NO: 5567408 - DNA, 25 bp, Homo sapien
tataaccaaacatacagttctttcc

SEQ ID NO: 5567409 - DNA, 25 bp, Homo sapien
tccccaacacacatatgcttctctg

SEQ ID NO: 5567410 - DNA, 25 bp, Homo sapien
aagagtgggtttgctcccatgctgc

SEQ ID NO: 5567411 - DNA, 25 bp, Homo sapien
ctagaatcaaacatctgaggatttt

SEQ ID NO: 5567412 - DNA, 25 bp, Homo sapien
tgacaagttttctataggtgcataa

SEQ ID NO: 5567413 - DNA, 25 bp, Homo sapien
tccatagatttctgtaaactgagag

SEQ ID NO: 5567414 - DNA, 25 bp, Homo sapien
gcatttgcaggacagaattcccagc

SEQ ID NO: 5567415 - DNA, 25 bp, Homo sapien
atgccattccaaccctgaaggcttg

SEQ ID NO: 5567416 - DNA, 25 bp, Homo sapien
ggaaaatatggcagcagcaccatct

SEQ ID NO: 5567417 - DNA, 25 bp, Homo sapien
ttgagtctatatttggaaatgccat

SEQ ID NO: 5567418 - DNA, 25 bp, Homo sapien
ttcaaaatgtagacccacatctttc

SEQ ID NO: 5567419 - DNA, 25 bp, Homo sapien
gtgccaggaaaatatggcagcagca

SEQ ID NO: 5567420 - DNA, 25 bp, Homo sapien
cagtttccagaaaatagagagtttg

SEQ ID NO: 5567421 - DNA, 25 bp, Homo sapien
aatcacacacccgcacagaacttgg

SEQ ID NO: 5567422 - DNA, 25 bp, Homo sapien
gaatgacagaatcagggcctgatct

SEQ ID NO: 5567423 - DNA, 25 bp, Homo sapien
cggggtctagttgtgactctgtcac

SEQ ID NO: 5567424 - DNA, 25 bp, Homo sapien
ataaaattggtgacaggtttgtttc

SEQ ID NO: 5567425 - DNA, 25 bp, Homo sapien
ttgctgatagcgaaacggatataga

SEQ ID NO: 5567426 - DNA, 25 bp, Homo sapien
gtgacagggaagaacctctcagtta

SEQ ID NO: 5567427 - DNA, 25 bp, Homo sapien
gaatccagcagacctcggggtctag

SEQ ID NO: 5567428 - DNA, 25 bp, Homo sapien
tcttaagatcatggtggatgccgtg

SEQ ID NO: 5567429 - DNA, 25 bp, Homo sapien
tgaaaacggtacactgaagaactgt

SEQ ID NO: 5567430 - DNA, 25 bp, Homo sapien
ggagacaggactaggatgtgtctta

SEQ ID NO: 5567431 - DNA, 25 bp, Homo sapien
aggagggaaattcaagagaatgttt

SEQ ID NO: 5567432 - DNA, 25 bp, Homo sapien
gtttccatagtacttggagagactt

SEQ ID NO: 5567433 - DNA, 25 bp, Homo sapien
cacactcaagccttggaaatcaatt

SEQ ID NO: 5567434 - DNA, 25 bp, Homo sapien
gtcgacctgatggacctcacctctc

SEQ ID NO: 5567435 - DNA, 25 bp, Homo sapien
gcctcccgtgtcccttggactactc

SEQ ID NO: 5567436 - DNA, 25 bp, Homo sapien
agtacaattcaggttgagcagaggg

SEQ ID NO: 5567437 - DNA, 25 bp, Homo sapien
gtcgaccagatctctctcgccagca

SEQ ID NO: 5567438 - DNA, 25 bp, Homo sapien
ttgatcttcctggtctcgcccgggc

SEQ ID NO: 5567439 - DNA, 25 bp, Homo sapien
cgttggactaaggtcgacctgatgg

SEQ ID NO: 5567440 - DNA, 25 bp, Homo sapien
cgtgtcccttggactactcagacct

SEQ ID NO: 5567441 - DNA, 25 bp, Homo sapien
gatctctctcgccagcagcagtaca

SEQ ID NO: 5567442 - DNA, 25 bp, Homo sapien
gatggacctcacctctcgccttgcc

SEQ ID NO: 5567443 - DNA, 25 bp, Homo sapien
ccatgaaaaagtagctgtaaaataa

SEQ ID NO: 5567444 - DNA, 25 bp, Homo sapien
attggacatcaacttatggagaatc

SEQ ID NO: 5567445 - DNA, 25 bp, Homo sapien
gtggagccatttgtggtagatggac

SEQ ID NO: 5567446 - DNA, 25 bp, Homo sapien
atggacgtgtatatcttgcagaagt

SEQ ID NO: 5567447 - DNA, 25 bp, Homo sapien
tgtggtagatggacgtgtatatctt

SEQ ID NO: 5567448 - DNA, 25 bp, Homo sapien
aaaagcattattattggacatcaac

SEQ ID NO: 5567449 - DNA, 25 bp, Homo sapien
cttgcagaagtctccaatggcctta

SEQ ID NO: 5567450 - DNA, 25 bp, Homo sapien
tttgctcttgttccagtaggtcaac

SEQ ID NO: 5567451 - DNA, 25 bp, Homo sapien
accactcatctaatgcaggttttgc

SEQ ID NO: 5567452 - DNA, 25 bp, Homo sapien
agacaatacagatgtggagccattt

SEQ ID NO: 5567453 - DNA, 25 bp, Homo sapien
atggagaatcttatgaccactcatc

SEQ ID NO: 5567454 - DNA, 25 bp, Homo sapien
aaagcacttgcagacccgactctct

SEQ ID NO: 5567455 - DNA, 25 bp, Homo sapien
gaaatctaagatgtgcaggtttact

SEQ ID NO: 5567456 - DNA, 25 bp, Homo sapien
tgtaaggatctctttggacacatct

SEQ ID NO: 5567457 - DNA, 25 bp, Homo sapien
atgaaaacaggacagtcactgaaaa

SEQ ID NO: 5567458 - DNA, 25 bp, Homo sapien
aataaggactaatcaatggccaaat

SEQ ID NO: 5567459 - DNA, 25 bp, Homo sapien
tgagtcagaacaataaggaaattat

SEQ ID NO: 5567460 - DNA, 25 bp, Homo sapien
ctaatctaatgaaaacaggacagtc

SEQ ID NO: 5567461 - DNA, 25 bp, Homo sapien
tcatctgggctttaagagctataaa

SEQ ID NO: 5567462 - DNA, 25 bp, Homo sapien
gcccacacagggtctctctaatcta

SEQ ID NO: 5567463 - DNA, 25 bp, Homo sapien
ggaggtcagccaactctaaacaaac

SEQ ID NO: 5567464 - DNA, 25 bp, Homo sapien
gaagctaaggcagtaggattccttg

SEQ ID NO: 5567465 - DNA, 25 bp, Homo sapien
ctcgggggtcggcgccgggcgagtg

SEQ ID NO: 5567466 - DNA, 25 bp, Homo sapien
cactcgcccggcgccgacccccgag

SEQ ID NO: 5567467 - DNA, 25 bp, Homo sapien
caaattacatcccagctgagaccgc

SEQ ID NO: 5567468 - DNA, 25 bp, Homo sapien
gtgcctgggtcacaccgtcctatcc

SEQ ID NO: 5567469 - DNA, 25 bp, Homo sapien
gactcacttaggagtgtgctgtgtt

SEQ ID NO: 5567470 - DNA, 25 bp, Homo sapien
cagtaggacatgctgagctgttctg

SEQ ID NO: 5567471 - DNA, 25 bp, Homo sapien
gtgggaatccaaaagtcaccatggt

SEQ ID NO: 5567472 - DNA, 25 bp, Homo sapien
ctcctcttcccatgtggccagtggc

SEQ ID NO: 5567473 - DNA, 25 bp, Homo sapien
cggagcggcgtcttgtagctcattt

SEQ ID NO: 5567474 - DNA, 25 bp, Homo sapien
tgagaccgctgcctgggattttctc

SEQ ID NO: 5567475 - DNA, 25 bp, Homo sapien
gagccatttcacctgtgttgggagc

SEQ ID NO: 5567476 - DNA, 25 bp, Homo sapien
cactggccggtgttcctccagcgtg

SEQ ID NO: 5567477 - DNA, 25 bp, Homo sapien
cagcacttctgagctaagatctctc

SEQ ID NO: 5567478 - DNA, 25 bp, Homo sapien
attcctagaatgttactaagcctga

SEQ ID NO: 5567479 - DNA, 25 bp, Homo sapien
agaatgttactaagcctgatacctc

SEQ ID NO: 5567480 - DNA, 25 bp, Homo sapien
aacatgatactgagaagacactggc

SEQ ID NO: 5567481 - DNA, 25 bp, Homo sapien
taatgaggtctgaaataatactaac

SEQ ID NO: 5567482 - DNA, 25 bp, Homo sapien
ctgagaagacactggcctttatttt

SEQ ID NO: 5567483 - DNA, 25 bp, Homo sapien
gaggtctgaaataatactaacatga

SEQ ID NO: 5567484 - DNA, 25 bp, Homo sapien
tactaacatgatactgagaagacac

SEQ ID NO: 5567485 - DNA, 25 bp, Homo sapien
tactaagcctgatacctctggtaag

SEQ ID NO: 5567486 - DNA, 25 bp, Homo sapien
cacccctctagtttagtgcctgtgt

SEQ ID NO: 5567487 - DNA, 25 bp, Homo sapien
tctagtttagtgcctgtgtatatct

SEQ ID NO: 5567488 - DNA, 25 bp, Homo sapien
ctctgttagtatttgggacagtttt

SEQ ID NO: 5567489 - DNA, 25 bp, Homo sapien
aaatcaattgtgatagaaaggctat

SEQ ID NO: 5567490 - DNA, 25 bp, Homo sapien
atagcctttctatcacaattgattt

SEQ ID NO: 5567491 - DNA, 25 bp, Homo sapien
agccatggggcatttcgacaatatt

SEQ ID NO: 5567492 - DNA, 25 bp, Homo sapien
tcttcagaacaatcagtactacact

SEQ ID NO: 5567493 - DNA, 25 bp, Homo sapien
tcttgtgagaaaatactggagccag

SEQ ID NO: 5567494 - DNA, 25 bp, Homo sapien
agaaggtataggtatgccacaattt

SEQ ID NO: 5567495 - DNA, 25 bp, Homo sapien
ttcagcactaaccaaccagaaggta

SEQ ID NO: 5567496 - DNA, 25 bp, Homo sapien
aacccaagttacaattataggcaaa

SEQ ID NO: 5567497 - DNA, 25 bp, Homo sapien
accaaccagaaggtataggtatgcc

SEQ ID NO: 5567498 - DNA, 25 bp, Homo sapien
cagacaatgcacagcatatacatga

SEQ ID NO: 5567499 - DNA, 25 bp, Homo sapien
aggcaaactttgaatgataaccaca

SEQ ID NO: 5567500 - DNA, 25 bp, Homo sapien
aattctgcagccatggggcatttcg

SEQ ID NO: 5567501 - DNA, 25 bp, Homo sapien
ttcaagttgggtctaggtacagatg

SEQ ID NO: 5567502 - DNA, 25 bp, Homo sapien
taccgggaggaagcagggtacgggc

SEQ ID NO: 5567503 - DNA, 25 bp, Homo sapien
gcccgtaccctgcttcctcccggta

SEQ ID NO: 5567504 - DNA, 25 bp, Homo sapien
gatttcgatgtcaagctccagccgg

SEQ ID NO: 5567505 - DNA, 25 bp, Homo sapien
ctgagtgctgcctgcagtaacgtcc

SEQ ID NO: 5567506 - DNA, 25 bp, Homo sapien
ccaggcgccgtctttgctccaacat

SEQ ID NO: 5567507 - DNA, 25 bp, Homo sapien
ttggcctgcattgacctccaccagc

SEQ ID NO: 5567508 - DNA, 25 bp, Homo sapien
gctctgacctcatagtggccccgga

SEQ ID NO: 5567509 - DNA, 25 bp, Homo sapien
ggtatagagtcttagtgccaggcgc

SEQ ID NO: 5567510 - DNA, 25 bp, Homo sapien
cttggctctgtcagcgccctaggtc

SEQ ID NO: 5567511 - DNA, 25 bp, Homo sapien
gggcctgccacattcgaacctgtgc

SEQ ID NO: 5567512 - DNA, 25 bp, Homo sapien
acgtccggcgcaccatgtttccacg

SEQ ID NO: 5567513 - DNA, 25 bp, Homo sapien
agcgccctaggtcatgaggatttcg

SEQ ID NO: 5567514 - DNA, 25 bp, Homo sapien
ctccaccagcactggatgacccagg

SEQ ID NO: 5567515 - DNA, 25 bp, Homo sapien
aaagttcaaatgggcaaacattatg

SEQ ID NO: 5567516 - DNA, 25 bp, Homo sapien
ccatggtgatggtcgtcgtacacct

SEQ ID NO: 5567517 - DNA, 25 bp, Homo sapien
tagcaggcactttcttcctaagacc

SEQ ID NO: 5567518 - DNA, 25 bp, Homo sapien
aagtggtccctgggccatagttttc

SEQ ID NO: 5567519 - DNA, 25 bp, Homo sapien
aagaacacaaattgtatgatcccat

SEQ ID NO: 5567520 - DNA, 25 bp, Homo sapien
actgagtcataaagttcaaatgggc

SEQ ID NO: 5567521 - DNA, 25 bp, Homo sapien
tcgtacaccttgtgaccactgagtc

SEQ ID NO: 5567522 - DNA, 25 bp, Homo sapien
cttcctaagaccgttcatgcaatgt

SEQ ID NO: 5567523 - DNA, 25 bp, Homo sapien
ggtaacgttctgggattagaccatg

SEQ ID NO: 5567524 - DNA, 25 bp, Homo sapien
tactaatctcaagggagaaagagat

SEQ ID NO: 5567525 - DNA, 25 bp, Homo sapien
agaacacctaagatttagcaggcac

SEQ ID NO: 5567526 - DNA, 25 bp, Homo sapien
tgacgattggaaacatagagaatac

SEQ ID NO: 5567527 - DNA, 25 bp, Homo sapien
agacactcacagccatggcgtggga

SEQ ID NO: 5567528 - DNA, 25 bp, Homo sapien
aactgtcaaataactacggagcaag

SEQ ID NO: 5567529 - DNA, 25 bp, Homo sapien
gtgccgatgtattggagaccaagtc

SEQ ID NO: 5567530 - DNA, 25 bp, Homo sapien
gcatggcactgtgatgtaagatggg

SEQ ID NO: 5567531 - DNA, 25 bp, Homo sapien
gaggggctaataaccaaaggaatca

SEQ ID NO: 5567532 - DNA, 25 bp, Homo sapien
ctccaaatgccaatgggtgccgatg

SEQ ID NO: 5567533 - DNA, 25 bp, Homo sapien
tggcaagactggctcaacactgaca

SEQ ID NO: 5567534 - DNA, 25 bp, Homo sapien
gttgggggagagattcccatactga

SEQ ID NO: 5567535 - DNA, 25 bp, Homo sapien
gagaccaagtcaagcatggcactgt

SEQ ID NO: 5567536 - DNA, 25 bp, Homo sapien
acaaaacctgcaaaaacagcgtccc

SEQ ID NO: 5567537 - DNA, 25 bp, Homo sapien
gcagagaggtaatcagcaccaaaat

SEQ ID NO: 5567538 - DNA, 25 bp, Homo sapien
gtagcaccaaacgaaaccaagtcaa

SEQ ID NO: 5567539 - DNA, 25 bp, Homo sapien
aaaagagcaggaaactaccaattta

SEQ ID NO: 5567540 - DNA, 25 bp, Homo sapien
tgagttccccccatgcagcagctaa

SEQ ID NO: 5567541 - DNA, 25 bp, Homo sapien
ggcagcccccagaggcttcacatta

SEQ ID NO: 5567542 - DNA, 25 bp, Homo sapien
ccctgcgacctcgggtgaatttcct

SEQ ID NO: 5567543 - DNA, 25 bp, Homo sapien
cggttgaggggtctaccccatggaa

SEQ ID NO: 5567544 - DNA, 25 bp, Homo sapien
agcaccaaaatgagtactcaaggcc

SEQ ID NO: 5567545 - DNA, 25 bp, Homo sapien
aagattacacaaaaagagcaggaaa

SEQ ID NO: 5567546 - DNA, 25 bp, Homo sapien
acacaaccatcagtgcacgagggca

SEQ ID NO: 5567547 - DNA, 25 bp, Homo sapien
gcagctaaaagggaatcgcactgcc

SEQ ID NO: 5567548 - DNA, 25 bp, Homo sapien
aagaaaacattaccatgtggggccg

SEQ ID NO: 5567549 - DNA, 25 bp, Homo sapien
cgtcccgttattgcttggatgagga

SEQ ID NO: 5567550 - DNA, 25 bp, Homo sapien
gaagatctggctctgggaattgcag

SEQ ID NO: 5567551 - DNA, 25 bp, Homo sapien
gtgtccctgagtgtccttggccctg

SEQ ID NO: 5567552 - DNA, 25 bp, Homo sapien
cgttattgcttggatgaggaagatc

SEQ ID NO: 5567553 - DNA, 25 bp, Homo sapien
ctctctaaagaaaacattaccatgt

SEQ ID NO: 5567554 - DNA, 25 bp, Homo sapien
gttattgcttggatgaggaagatct

SEQ ID NO: 5567555 - DNA, 25 bp, Homo sapien
ccctggctccctcgtcccgttattg

SEQ ID NO: 5567556 - DNA, 25 bp, Homo sapien
tgtccctgagtgtccttggccctgg

SEQ ID NO: 5567557 - DNA, 25 bp, Homo sapien
taaagaaaacattaccatgtggggc

SEQ ID NO: 5567558 - DNA, 25 bp, Homo sapien
cccgttattgcttggatgaggaaga

SEQ ID NO: 5567559 - DNA, 25 bp, Homo sapien
ggccctctcccagcgatgccacggg

SEQ ID NO: 5567560 - DNA, 25 bp, Homo sapien
ggtaagtagcaggtcagcataaatc

SEQ ID NO: 5567561 - DNA, 25 bp, Homo sapien
agtagcaggtcagcataaatccaac

SEQ ID NO: 5567562 - DNA, 25 bp, Homo sapien
gacactgagggttcacaccacccca

SEQ ID NO: 5567563 - DNA, 25 bp, Homo sapien
ctgagggttcacaccaccccagcct

SEQ ID NO: 5567564 - DNA, 25 bp, Homo sapien
agcataaatccaaccccgcgaggca

SEQ ID NO: 5567565 - DNA, 25 bp, Homo sapien
tatgtcataaataggtgggcggaca

SEQ ID NO: 5567566 - DNA, 25 bp, Homo sapien
ggcggggctcacattcctctagacc

SEQ ID NO: 5567567 - DNA, 25 bp, Homo sapien
ttcctctagaccactggggtccact

SEQ ID NO: 5567568 - DNA, 25 bp, Homo sapien
aatatgtcataaataggtgggcgga

SEQ ID NO: 5567569 - DNA, 25 bp, Homo sapien
gcctggtaagtagcaggtcagcata

SEQ ID NO: 5567570 - DNA, 25 bp, Homo sapien
taaacaggattgctattctaacttt

SEQ ID NO: 5567571 - DNA, 25 bp, Homo sapien
tttacagatacgaaactgggaccag

SEQ ID NO: 5567572 - DNA, 25 bp, Homo sapien
ctaactttacagatacgaaactggg

SEQ ID NO: 5567573 - DNA, 25 bp, Homo sapien
ttctgatccctggtgagagaagcaa

SEQ ID NO: 5567574 - DNA, 25 bp, Homo sapien
gttaataaggcactcagattcacac

SEQ ID NO: 5567575 - DNA, 25 bp, Homo sapien
tggaagatttggaacgttattggtg

SEQ ID NO: 5567576 - DNA, 25 bp, Homo sapien
ccaaaccctttgctctttcctagtc

SEQ ID NO: 5567577 - DNA, 25 bp, Homo sapien
ttcacacactattaagaaggtgggg

SEQ ID NO: 5567578 - DNA, 25 bp, Homo sapien
tcatctcatttggccttctgatccc

SEQ ID NO: 5567579 - DNA, 25 bp, Homo sapien
caagtgccatctgtggaggacttta

SEQ ID NO: 5567580 - DNA, 25 bp, Homo sapien
ggaaggttaataaggcactcagatt

SEQ ID NO: 5567581 - DNA, 25 bp, Homo sapien
aacagtgagcaggttctctgcagta

SEQ ID NO: 5567582 - DNA, 25 bp, Homo sapien
tccatgtgtatgttcccgactttcc

SEQ ID NO: 5567583 - DNA, 25 bp, Homo sapien
aagacaatatgattttctgggctac

SEQ ID NO: 5567584 - DNA, 25 bp, Homo sapien
caggctgtgaagcgtctagtccttg

SEQ ID NO: 5567585 - DNA, 25 bp, Homo sapien
agtgaccagtaaggagagatttcta

SEQ ID NO: 5567586 - DNA, 25 bp, Homo sapien
atttgctgtgaggagaacagtatgg

SEQ ID NO: 5567587 - DNA, 25 bp, Homo sapien
ttccaactccaccagacagaggatg

SEQ ID NO: 5567588 - DNA, 25 bp, Homo sapien
tgctcccctcagaagctgggacatg

SEQ ID NO: 5567589 - DNA, 25 bp, Homo sapien
accagacatttgctgtgaggagaac

SEQ ID NO: 5567590 - DNA, 25 bp, Homo sapien
tctttggaaggacataccagacatt

SEQ ID NO: 5567591 - DNA, 25 bp, Homo sapien
tattgatatgcctacaacagaaaac

SEQ ID NO: 5567592 - DNA, 25 bp, Homo sapien
ctggactgcagcccaaagtctactg

SEQ ID NO: 5567593 - DNA, 25 bp, Homo sapien
aacggtgacaaaagaaactactgga

SEQ ID NO: 5567594 - DNA, 25 bp, Homo sapien
agcccaaagtctactgctttcagct

SEQ ID NO: 5567595 - DNA, 25 bp, Homo sapien
aagacccatctatttgcaattaggc

SEQ ID NO: 5567596 - DNA, 25 bp, Homo sapien
cttttagggctccagagacactaac

SEQ ID NO: 5567597 - DNA, 25 bp, Homo sapien
aaaggtggtatcttttagggctcca

SEQ ID NO: 5567598 - DNA, 25 bp, Homo sapien
aaccagtgtaatttttgcaggcaac

SEQ ID NO: 5567599 - DNA, 25 bp, Homo sapien
ggtgacaaaagaaactactggactg

SEQ ID NO: 5567600 - DNA, 25 bp, Homo sapien
gggctccagagacactaaccagtgt

SEQ ID NO: 5567601 - DNA, 25 bp, Homo sapien
tttttgcaggcaacattaaaacaaa

SEQ ID NO: 5567602 - DNA, 25 bp, Homo sapien
aaacaatcctaagacccatctattt

SEQ ID NO: 5567603 - DNA, 25 bp, Homo sapien
aggcttaacagacatgtaaactact

SEQ ID NO: 5567604 - DNA, 25 bp, Homo sapien
ccaacattgaggactgcgttgcagc

SEQ ID NO: 5567605 - DNA, 25 bp, Homo sapien
agaagtgcatgcccagcatcgactt

SEQ ID NO: 5567606 - DNA, 25 bp, Homo sapien
gccagactgtacagaagtgcatgcc

SEQ ID NO: 5567607 - DNA, 25 bp, Homo sapien
aggttgtaccatagataaactaggc

SEQ ID NO: 5567608 - DNA, 25 bp, Homo sapien
ggggaacgtgaacattcaggttgta

SEQ ID NO: 5567609 - DNA, 25 bp, Homo sapien
ttgattaccaagagggtgatgccaa

SEQ ID NO: 5567610 - DNA, 25 bp, Homo sapien
gagggtgatgccaagctattcatga

SEQ ID NO: 5567611 - DNA, 25 bp, Homo sapien
atttgcccccatgactagaacacct

SEQ ID NO: 5567612 - DNA, 25 bp, Homo sapien
gcgttgcagcatgatgtttggggaa

SEQ ID NO: 5567613 - DNA, 25 bp, Homo sapien
ggagaccaagatgtgaggatctctt

SEQ ID NO: 5567614 - DNA, 25 bp, Homo sapien
tttcctaagccccgcgtgcctgtgg

SEQ ID NO: 5567615 - DNA, 25 bp, Homo sapien
ccctgggctgtttgttcggtgtttg

SEQ ID NO: 5567616 - DNA, 25 bp, Homo sapien
gtgcctgtgggtatttgaaagctga

SEQ ID NO: 5567617 - DNA, 25 bp, Homo sapien
tcctagtcagacaacagggagaaat

SEQ ID NO: 5567618 - DNA, 25 bp, Homo sapien
cccagaacccctcagggcctctaaa

SEQ ID NO: 5567619 - DNA, 25 bp, Homo sapien
gcttgtcaaccttgcatgatgcagc

SEQ ID NO: 5567620 - DNA, 25 bp, Homo sapien
aagctgaaggtaaccccaagctacc

SEQ ID NO: 5567621 - DNA, 25 bp, Homo sapien
tgttcggtgtttgcagaattggttc

SEQ ID NO: 5567622 - DNA, 25 bp, Homo sapien
ggttcattatgagcaaggcagccag

SEQ ID NO: 5567623 - DNA, 25 bp, Homo sapien
gtgtccacgcattcctggtgcaacc

SEQ ID NO: 5567624 - DNA, 25 bp, Homo sapien
agagggtgcttctcccccctgggct

SEQ ID NO: 5567625 - DNA, 25 bp, Homo sapien
gatctgatctttgagtggggaaatc

SEQ ID NO: 5567626 - DNA, 25 bp, Homo sapien
ttagaaacagcctcctcgagggagc

SEQ ID NO: 5567627 - DNA, 25 bp, Homo sapien
aggtaaactgtgggccagaatctat

SEQ ID NO: 5567628 - DNA, 25 bp, Homo sapien
atgtcatggtgtacgcaaaatcaac

SEQ ID NO: 5567629 - DNA, 25 bp, Homo sapien
tggcactgcccctgggttcccaatc

SEQ ID NO: 5567630 - DNA, 25 bp, Homo sapien
ctggagggaattcaagaaccacttg

SEQ ID NO: 5567631 - DNA, 25 bp, Homo sapien
gatctctaagtgaaagaggagaaac

SEQ ID NO: 5567632 - DNA, 25 bp, Homo sapien
gcctaacgctgatgtcatggtgtac

SEQ ID NO: 5567633 - DNA, 25 bp, Homo sapien
cctttcacaatgagactggagggaa

SEQ ID NO: 5567634 - DNA, 25 bp, Homo sapien
gaaataaaggcgaaatgattagatt

SEQ ID NO: 5567635 - DNA, 25 bp, Homo sapien
acaacatcaacagcctttcgaggta

SEQ ID NO: 5567636 - DNA, 25 bp, Homo sapien
tgtcaggaatcatgctaagtaggtc

SEQ ID NO: 5567637 - DNA, 25 bp, Homo sapien
gagaaggggattctgattaagcccc

SEQ ID NO: 5567638 - DNA, 25 bp, Homo sapien
gcctcgactagtaaaggaagaagct

SEQ ID NO: 5567639 - DNA, 25 bp, Homo sapien
tttgggagacgattaggtcataagg

SEQ ID NO: 5567640 - DNA, 25 bp, Homo sapien
tttctcaggcagtgtgagcctacac

SEQ ID NO: 5567641 - DNA, 25 bp, Homo sapien
tgggcacctgaaaaagcctcgacta

SEQ ID NO: 5567642 - DNA, 25 bp, Homo sapien
agatgtcatgataggtgtgtgagtg

SEQ ID NO: 5567643 - DNA, 25 bp, Homo sapien
gagcctacacacggaaagaagtctc

SEQ ID NO: 5567644 - DNA, 25 bp, Homo sapien
gtgactctacaaaggggtctcctgc

SEQ ID NO: 5567645 - DNA, 25 bp, Homo sapien
ggtcataagggcagatccctcgtga

SEQ ID NO: 5567646 - DNA, 25 bp, Homo sapien
cctcaccacagtctacggggttggg

SEQ ID NO: 5567647 - DNA, 25 bp, Homo sapien
cacagtcagcacagagcaaatggta

SEQ ID NO: 5567648 - DNA, 25 bp, Homo sapien
aggagctgtggcctcacagtcgctg

SEQ ID NO: 5567649 - DNA, 25 bp, Homo sapien
ttataggaccacagtcagcacagag

SEQ ID NO: 5567650 - DNA, 25 bp, Homo sapien
gtcagcacagagcaaatggtacaag

SEQ ID NO: 5567651 - DNA, 25 bp, Homo sapien
cttctctccagctgcctgagtactg

SEQ ID NO: 5567652 - DNA, 25 bp, Homo sapien
tccagctgcctgagtactggcacac

SEQ ID NO: 5567653 - DNA, 25 bp, Homo sapien
ctgggatgaagtcacccctccttcc

SEQ ID NO: 5567654 - DNA, 25 bp, Homo sapien
atttataggaccacagtcagcacag

SEQ ID NO: 5567655 - DNA, 25 bp, Homo sapien
ctctgggatgaagtcacccctcctt

SEQ ID NO: 5567656 - DNA, 25 bp, Homo sapien
gcacagagcaaatggtacaagtgca

SEQ ID NO: 5567657 - DNA, 25 bp, Homo sapien
ctgcctgagtactggcacacagcgg

SEQ ID NO: 5567658 - DNA, 25 bp, Homo sapien
tgctcagagcaagggactttctgca

SEQ ID NO: 5567659 - DNA, 25 bp, Homo sapien
agcttctgtagatatggtgtgggca

SEQ ID NO: 5567660 - DNA, 25 bp, Homo sapien
caattgccacgatgctaatcacaga

SEQ ID NO: 5567661 - DNA, 25 bp, Homo sapien
atgtatacaaagaaagagcatgtgt

SEQ ID NO: 5567662 - DNA, 25 bp, Homo sapien
atgtggagaaaacgccttttgccct

SEQ ID NO: 5567663 - DNA, 25 bp, Homo sapien
tcaggcctgaatgaccaattgccac

SEQ ID NO: 5567664 - DNA, 25 bp, Homo sapien
gccagctttggcccccttcatgctt

SEQ ID NO: 5567665 - DNA, 25 bp, Homo sapien
cacagaatgtaattgacaggccctt

SEQ ID NO: 5567666 - DNA, 25 bp, Homo sapien
ctttctgcagccaggatttgcatcc

SEQ ID NO: 5567667 - DNA, 25 bp, Homo sapien
tcctgcccgtgtagtcagcatgtat

SEQ ID NO: 5567668 - DNA, 25 bp, Homo sapien
actttctgcatgtggagaaaacgcc

SEQ ID NO: 5567669 - DNA, 25 bp, Homo sapien
aagcacaataattaaatgaggggca

SEQ ID NO: 5567670 - DNA, 25 bp, Homo sapien
ctttggaaacctgcctggtgctcca

SEQ ID NO: 5567671 - DNA, 25 bp, Homo sapien
gagcctcctgactgaccccagctgc

SEQ ID NO: 5567672 - DNA, 25 bp, Homo sapien
ctctaccagggaggaaaatattttc

SEQ ID NO: 5567673 - DNA, 25 bp, Homo sapien
gcctggataccccgctgtggctcta

SEQ ID NO: 5567674 - DNA, 25 bp, Homo sapien
tccaacaaagtttgtcctgcaggtc

SEQ ID NO: 5567675 - DNA, 25 bp, Homo sapien
tgcggtgccatggtccttctcgcca

SEQ ID NO: 5567676 - DNA, 25 bp, Homo sapien
agagtggtttagaagaagattgttt

SEQ ID NO: 5567677 - DNA, 25 bp, Homo sapien
ggtgacaggcagcacctgctgtcat

SEQ ID NO: 5567678 - DNA, 25 bp, Homo sapien
aaccagcaatcagaggctggcacag

SEQ ID NO: 5567679 - DNA, 25 bp, Homo sapien
ttttcctgccactgccctgagcctc

SEQ ID NO: 5567680 - DNA, 25 bp, Homo sapien
atgaaagaaacctgagatattttga

SEQ ID NO: 5567681 - DNA, 25 bp, Homo sapien
gctcctggagaaacttgtagcatta

SEQ ID NO: 5567682 - DNA, 25 bp, Homo sapien
gaactctgaggctatccactgttgc

SEQ ID NO: 5567683 - DNA, 25 bp, Homo sapien
aggggcacattatctcagaatccaa

SEQ ID NO: 5567684 - DNA, 25 bp, Homo sapien
gagatcataagcacagaagaaagat

SEQ ID NO: 5567685 - DNA, 25 bp, Homo sapien
ggacggtaggataagcattcaattt

SEQ ID NO: 5567686 - DNA, 25 bp, Homo sapien
aaaaagtggtagtgataaaattata

SEQ ID NO: 5567687 - DNA, 25 bp, Homo sapien
aattgctatttttggggacaccgaa

SEQ ID NO: 5567688 - DNA, 25 bp, Homo sapien
acagaagaaagattatgtgaatgaa

SEQ ID NO: 5567689 - DNA, 25 bp, Homo sapien
cacattctagatagcaaaggggcac

SEQ ID NO: 5567690 - DNA, 25 bp, Homo sapien
gaatccaagaaaccccactgagatc

SEQ ID NO: 5567691 - DNA, 25 bp, Homo sapien
gaaatgaaggcatccacgatccatg

SEQ ID NO: 5567692 - DNA, 25 bp, Homo sapien
tgctttacagctccatgcgaggccc

SEQ ID NO: 5567693 - DNA, 25 bp, Homo sapien
tgtatgtaagttcccacccacggcc

SEQ ID NO: 5567694 - DNA, 25 bp, Homo sapien
gtctgaagcactgcccatgtatccc

SEQ ID NO: 5567695 - DNA, 25 bp, Homo sapien
aggattgaggagatgaccacaatcc

SEQ ID NO: 5567696 - DNA, 25 bp, Homo sapien
gcgaggcccccttgtttagacagtc

SEQ ID NO: 5567697 - DNA, 25 bp, Homo sapien
cgatccatgaggacacatgagtttc

SEQ ID NO: 5567698 - DNA, 25 bp, Homo sapien
tgccatccgcgggtcactctactga

SEQ ID NO: 5567699 - DNA, 25 bp, Homo sapien
cagacccatagatccaaggccaaga

SEQ ID NO: 5567700 - DNA, 25 bp, Homo sapien
agaaaaggaggtgcatttatgccat

SEQ ID NO: 5567701 - DNA, 25 bp, Homo sapien
ccacccacggccacattgattcagc

SEQ ID NO: 5567702 - DNA, 25 bp, Homo sapien
tcaagatccagcccctggatgggcg

SEQ ID NO: 5567703 - DNA, 25 bp, Homo sapien
acttcagccaatcttgcagttaatt

SEQ ID NO: 5567704 - DNA, 25 bp, Homo sapien
cggtccatgtcaagatccagcccct

SEQ ID NO: 5567705 - DNA, 25 bp, Homo sapien
taaatttcagccttgaccggggaga

SEQ ID NO: 5567706 - DNA, 25 bp, Homo sapien
gaggcatacggtccatgtcaagatc

SEQ ID NO: 5567707 - DNA, 25 bp, Homo sapien
ccaggagtaaatttcagccttgacc

SEQ ID NO: 5567708 - DNA, 25 bp, Homo sapien
ttctggaggcatacggtccatgtca

SEQ ID NO: 5567709 - DNA, 25 bp, Homo sapien
gtgcaatccactccaacagcttatc

SEQ ID NO: 5567710 - DNA, 25 bp, Homo sapien
acccttcaatttgtggggggaatgc

SEQ ID NO: 5567711 - DNA, 25 bp, Homo sapien
cctgaccaggttacaaatgaacttc

SEQ ID NO: 5567712 - DNA, 25 bp, Homo sapien
catcctgggcctgaccaggttacaa

SEQ ID NO: 5567713 - DNA, 25 bp, Homo sapien
tttccttgccggacgcctctcgcgg

SEQ ID NO: 5567714 - DNA, 25 bp, Homo sapien
gcctggtcccacgcccgtagcaggc

SEQ ID NO: 5567715 - DNA, 25 bp, Homo sapien
cctcaatctccaaggccccggttcc

SEQ ID NO: 5567716 - DNA, 25 bp, Homo sapien
gaggggaattccatggtcaatctga

SEQ ID NO: 5567717 - DNA, 25 bp, Homo sapien
agggcgccagttgtgttctgggcgc

SEQ ID NO: 5567718 - DNA, 25 bp, Homo sapien
acccatcgcgttctttgcgggcgcc

SEQ ID NO: 5567719 - DNA, 25 bp, Homo sapien
tggaattatcaaagggtatgtgtgc

SEQ ID NO: 5567720 - DNA, 25 bp, Homo sapien
cggtgtcgggtccctagtctgattt

SEQ ID NO: 5567721 - DNA, 25 bp, Homo sapien
cctctaaaacgcggccgctcacaac

SEQ ID NO: 5567722 - DNA, 25 bp, Homo sapien
tcctcggcacgctttggttgtggtg

SEQ ID NO: 5567723 - DNA, 25 bp, Homo sapien
gtggagccggcccctatttccttgc

SEQ ID NO: 5567724 - DNA, 25 bp, Homo sapien
ccacaaagaaccagagaatttagtt

SEQ ID NO: 5567725 - DNA, 25 bp, Homo sapien
cctgtgaacacccaagttgagtctc

SEQ ID NO: 5567726 - DNA, 25 bp, Homo sapien
aaggccccacgagtaatcactggtc

SEQ ID NO: 5567727 - DNA, 25 bp, Homo sapien
agctcagtgagaaacaccccagatt

SEQ ID NO: 5567728 - DNA, 25 bp, Homo sapien
gttgagtctcttaagtaggcccaag

SEQ ID NO: 5567729 - DNA, 25 bp, Homo sapien
aaagtcaacagtcctgtgaacaccc

SEQ ID NO: 5567730 - DNA, 25 bp, Homo sapien
atcactggtcctctggctcttgcac

SEQ ID NO: 5567731 - DNA, 25 bp, Homo sapien
tcattggcatagcactggctgagct

SEQ ID NO: 5567732 - DNA, 25 bp, Homo sapien
tgttaaatgtgaaaccatgtcattc

SEQ ID NO: 5567733 - DNA, 25 bp, Homo sapien
ttagaattaaagtcaacagtcctgt

SEQ ID NO: 5567734 - DNA, 25 bp, Homo sapien
cagccctttcccagagcaggtgctt

SEQ ID NO: 5567735 - DNA, 25 bp, Homo sapien
gatctggggccatttctacaagtta

SEQ ID NO: 5567736 - DNA, 25 bp, Homo sapien
gcaaggcaccaactacaagggtttc

SEQ ID NO: 5567737 - DNA, 25 bp, Homo sapien
ttctacaagttaagctggggtaggc

SEQ ID NO: 5567738 - DNA, 25 bp, Homo sapien
cctcatcctgaaatccctgcgccgg

SEQ ID NO: 5567739 - DNA, 25 bp, Homo sapien
ggcagacgcgcactgaatcgctttc

SEQ ID NO: 5567740 - DNA, 25 bp, Homo sapien
tcacgttcccagcagtgatcccagg

SEQ ID NO: 5567741 - DNA, 25 bp, Homo sapien
caccctgcaggaagacaacagcagg

SEQ ID NO: 5567742 - DNA, 25 bp, Homo sapien
ggcccagaacatttgagtctggttt

SEQ ID NO: 5567743 - DNA, 25 bp, Homo sapien
ctgccccctagtggccaagggcaga

SEQ ID NO: 5567744 - DNA, 25 bp, Homo sapien
ccacctttccactcggcctctttgc

SEQ ID NO: 5567745 - DNA, 25 bp, Homo sapien
agccatcagtgatctggggccattt

SEQ ID NO: 5567746 - DNA, 25 bp, Homo sapien
cttcccttggcacagctctttcgtc

SEQ ID NO: 5567747 - DNA, 25 bp, Homo sapien
cagctgccgaatccccttttgccac

SEQ ID NO: 5567748 - DNA, 25 bp, Homo sapien
cacaaggttcttaatcacagctgcc

SEQ ID NO: 5567749 - DNA, 25 bp, Homo sapien
aacttagtggcctcaaacaacacac

SEQ ID NO: 5567750 - DNA, 25 bp, Homo sapien
aggccacctgcatcccactgccgcc

SEQ ID NO: 5567751 - DNA, 25 bp, Homo sapien
ctcacctgggtaatccaggaatccc

SEQ ID NO: 5567752 - DNA, 25 bp, Homo sapien
tcagacacagtgtagtagtttccta

SEQ ID NO: 5567753 - DNA, 25 bp, Homo sapien
aacagaccaggttttagcactcaac

SEQ ID NO: 5567754 - DNA, 25 bp, Homo sapien
aggaaagaacccatggacttgcctt

SEQ ID NO: 5567755 - DNA, 25 bp, Homo sapien
gccgttctaagatgggtcagcaagg

SEQ ID NO: 5567756 - DNA, 25 bp, Homo sapien
ggaatccctccccatcacaaggttc

SEQ ID NO: 5567757 - DNA, 25 bp, Homo sapien
gtcgcgggtgcacctttcactccca

SEQ ID NO: 5567758 - DNA, 25 bp, Homo sapien
ccattttgagggctttaggtgtttc

SEQ ID NO: 5567759 - DNA, 25 bp, Homo sapien
cggacgcctctgcccaggttctctg

SEQ ID NO: 5567760 - DNA, 25 bp, Homo sapien
tctgcccaggttctctgccgggaag

SEQ ID NO: 5567761 - DNA, 25 bp, Homo sapien
ataccgcctgttaggcggagggtgg

SEQ ID NO: 5567762 - DNA, 25 bp, Homo sapien
tgcttcaggagctatcgcagacaac

SEQ ID NO: 5567763 - DNA, 25 bp, Homo sapien
ggactgcaccacgcaacgtttgccc

SEQ ID NO: 5567764 - DNA, 25 bp, Homo sapien
ctgccgggaagcttcgtccttccgg

SEQ ID NO: 5567765 - DNA, 25 bp, Homo sapien
cggcttatcgcagagtcccagagcc

SEQ ID NO: 5567766 - DNA, 25 bp, Homo sapien
gtgggaaagacactctcctgcttca

SEQ ID NO: 5567767 - DNA, 25 bp, Homo sapien
agggtcagataccgcctgttaggcg

SEQ ID NO: 5567768 - DNA, 25 bp, Homo sapien
tctaatgctcacgaggctcagttac

SEQ ID NO: 5567769 - DNA, 25 bp, Homo sapien
gataataagcctgagtcactgatat

SEQ ID NO: 5567770 - DNA, 25 bp, Homo sapien
tacctttgacgtgcccaagtggaca

SEQ ID NO: 5567771 - DNA, 25 bp, Homo sapien
acccaccaagatcctgtctgaaacc

SEQ ID NO: 5567772 - DNA, 25 bp, Homo sapien
tatgcccagtatacaggctaacttc

SEQ ID NO: 5567773 - DNA, 25 bp, Homo sapien
aacatccctatgaggcaggaatgct

SEQ ID NO: 5567774 - DNA, 25 bp, Homo sapien
tgaggcaggaatgctataatcccca

SEQ ID NO: 5567775 - DNA, 25 bp, Homo sapien
tccagaagaatgtgtatgcccagta

SEQ ID NO: 5567776 - DNA, 25 bp, Homo sapien
aaaggagcaaatccagaagaatgtg

SEQ ID NO: 5567777 - DNA, 25 bp, Homo sapien
tcaacccaggtagacaactgtatat

SEQ ID NO: 5567778 - DNA, 25 bp, Homo sapien
gacaaatgggacagataaaatctac

SEQ ID NO: 5567779 - DNA, 25 bp, Homo sapien
taagttggtattgttagatgaagac

SEQ ID NO: 5567780 - DNA, 25 bp, Homo sapien
gctaacaccaaaagaacaactgtac

SEQ ID NO: 5567781 - DNA, 25 bp, Homo sapien
gagggcgaagcaaagtctcttgtat

SEQ ID NO: 5567782 - DNA, 25 bp, Homo sapien
agagcataaagcttcaagagggcga

SEQ ID NO: 5567783 - DNA, 25 bp, Homo sapien
tggggccaatttgggcaccatgcta

SEQ ID NO: 5567784 - DNA, 25 bp, Homo sapien
tctgggcaagattagtatgcaattc

SEQ ID NO: 5567785 - DNA, 25 bp, Homo sapien
gctaaatctggaaagagcataaagc

SEQ ID NO: 5567786 - DNA, 25 bp, Homo sapien
ttttcagaaggcgttgcttgctggg

SEQ ID NO: 5567787 - DNA, 25 bp, Homo sapien
gatgaagacaggtaagctaacacca

SEQ ID NO: 5567788 - DNA, 25 bp, Homo sapien
aaacaagtacagtatgaaatcttcc

SEQ ID NO: 5567789 - DNA, 25 bp, Homo sapien
ttagcaagtcaaaaacctacagacc

SEQ ID NO: 5567790 - DNA, 25 bp, Homo sapien
tttctgctgtcagggatgaaatcta

SEQ ID NO: 5567791 - DNA, 25 bp, Homo sapien
accacgctattgcatgttctccgtc

SEQ ID NO: 5567792 - DNA, 25 bp, Homo sapien
cacttgtaaggaatggcaggttttt

SEQ ID NO: 5567793 - DNA, 25 bp, Homo sapien
tggcaggtttttaaggaccacgcta

SEQ ID NO: 5567794 - DNA, 25 bp, Homo sapien
tgggctacaagttttgctgcgggag

SEQ ID NO: 5567795 - DNA, 25 bp, Homo sapien
ttctaaggcacttgtaaggaatggc

SEQ ID NO: 5567796 - DNA, 25 bp, Homo sapien
acccagttggttcgccctgaatcct

SEQ ID NO: 5567797 - DNA, 25 bp, Homo sapien
taaacacacagatatgcctgggctc

SEQ ID NO: 5567798 - DNA, 25 bp, Homo sapien
tgtaatgcggaaaaattaactcaac

SEQ ID NO: 5567799 - DNA, 25 bp, Homo sapien
atgcctgggctctgtgtcctttgat

SEQ ID NO: 5567800 - DNA, 25 bp, Homo sapien
ataaaagagaaaaccatgcgtgtgt

SEQ ID NO: 5567801 - DNA, 25 bp, Homo sapien
taaaaagtaccagaagaaggctgaa

SEQ ID NO: 5567802 - DNA, 25 bp, Homo sapien
ataagtactaaagaaaggagattgt

SEQ ID NO: 5567803 - DNA, 25 bp, Homo sapien
gaagaaggctgaaatcaatccaatc

SEQ ID NO: 5567804 - DNA, 25 bp, Homo sapien
ttcataagatgaagtcacacacacc

SEQ ID NO: 5567805 - DNA, 25 bp, Homo sapien
agtcacacacaccaatcataagtac

SEQ ID NO: 5567806 - DNA, 25 bp, Homo sapien
tatgttaagacattcagagtaaaat

SEQ ID NO: 5567807 - DNA, 25 bp, Homo sapien
aatcataagtactaaagaaaggaga

SEQ ID NO: 5567808 - DNA, 25 bp, Homo sapien
cagagtaaaatgatatagctctaat

SEQ ID NO: 5567809 - DNA, 25 bp, Homo sapien
cttatcaagcacacatagattttat

SEQ ID NO: 5567810 - DNA, 25 bp, Homo sapien
taccagaagaaggctgaaatcaatc

SEQ ID NO: 5567811 - DNA, 25 bp, Homo sapien
aataaatactcacaagatcagcata

SEQ ID NO: 5567812 - DNA, 25 bp, Homo sapien
ggcactacagcaaagagcatcatgc

SEQ ID NO: 5567813 - DNA, 25 bp, Homo sapien
ctatgctcccttccaccagggcctt

SEQ ID NO: 5567814 - DNA, 25 bp, Homo sapien
aacctgccaaagctatgccattaaa

SEQ ID NO: 5567815 - DNA, 25 bp, Homo sapien
ttctgaacatctccaaacctgccaa

SEQ ID NO: 5567816 - DNA, 25 bp, Homo sapien
atgcaacttgcatcacactgggggc

SEQ ID NO: 5567817 - DNA, 25 bp, Homo sapien
gtgggtcatgcaaatggcattacac

SEQ ID NO: 5567818 - DNA, 25 bp, Homo sapien
attaaaaggcactacagcaaagagc

SEQ ID NO: 5567819 - DNA, 25 bp, Homo sapien
caccagggccttagacaaccacaaa

SEQ ID NO: 5567820 - DNA, 25 bp, Homo sapien
atcccctccaattcacctatgctcc

SEQ ID NO: 5567821 - DNA, 25 bp, Homo sapien
accatgtgggtcatgcaaatggcat

SEQ ID NO: 5567822 - DNA, 25 bp, Homo sapien
agacaaccacaaatccaccacagga

SEQ ID NO: 5567823 - DNA, 25 bp, Homo sapien
ctgaactgccatggaaagtaactgc

SEQ ID NO: 5567824 - DNA, 25 bp, Homo sapien
atgaagtaactgaactgccatggaa

SEQ ID NO: 5567825 - DNA, 25 bp, Homo sapien
gaggacatgagttactggaacagta

SEQ ID NO: 5567826 - DNA, 25 bp, Homo sapien
aaatgacaaccagtagtcagggaaa

SEQ ID NO: 5567827 - DNA, 25 bp, Homo sapien
aaatcacctctggaggacatgagtt

SEQ ID NO: 5567828 - DNA, 25 bp, Homo sapien
gacaaccagtagtcagggaaattaa

SEQ ID NO: 5567829 - DNA, 25 bp, Homo sapien
acagtaagtaacatctttggaatcc

SEQ ID NO: 5567830 - DNA, 25 bp, Homo sapien
caaaaatacgcactcttcaaaaatc

SEQ ID NO: 5567831 - DNA, 25 bp, Homo sapien
accaatgattcaataataagagcct

SEQ ID NO: 5567832 - DNA, 25 bp, Homo sapien
aagtaactgccaaaaatacgcactc

SEQ ID NO: 5567833 - DNA, 25 bp, Homo sapien
ctctggaggacatgagttactggaa

SEQ ID NO: 5567834 - DNA, 25 bp, Homo sapien
aaaagtataaagaactgtgatgcac

SEQ ID NO: 5567835 - DNA, 25 bp, Homo sapien
atgggcaaaggtatacatcgcattt

SEQ ID NO: 5567836 - DNA, 25 bp, Homo sapien
cttaacatgaaggtaataaacttta

SEQ ID NO: 5567837 - DNA, 25 bp, Homo sapien
tgctagaagctttatcaacactgac

SEQ ID NO: 5567838 - DNA, 25 bp, Homo sapien
tacatcgcattttctgggggagtag

SEQ ID NO: 5567839 - DNA, 25 bp, Homo sapien
gactaaagttgaatgggcaaaggta

SEQ ID NO: 5567840 - DNA, 25 bp, Homo sapien
tctgtgaagctggatattccttaac

SEQ ID NO: 5567841 - DNA, 25 bp, Homo sapien
aaatatggactaaagttgaatgggc

SEQ ID NO: 5567842 - DNA, 25 bp, Homo sapien
aagaaattaaccagaaagctatagc

SEQ ID NO: 5567843 - DNA, 25 bp, Homo sapien
ctgtgatgcacttctagtcaaccta

SEQ ID NO: 5567844 - DNA, 25 bp, Homo sapien
aaagtataactgataaggtacaatt

SEQ ID NO: 5567845 - DNA, 25 bp, Homo sapien
gaaaaatcaaggtaggcacttgctc

SEQ ID NO: 5567846 - DNA, 25 bp, Homo sapien
actcccgagaactccaatgtgctcc

SEQ ID NO: 5567847 - DNA, 25 bp, Homo sapien
ccccgatctctgtgaccaaggttgc

SEQ ID NO: 5567848 - DNA, 25 bp, Homo sapien
gtgacatggatttgcagcctgcagt

SEQ ID NO: 5567849 - DNA, 25 bp, Homo sapien
aaggttgccacctgtgacatggatt

SEQ ID NO: 5567850 - DNA, 25 bp, Homo sapien
agagaggagacacaaattagctttg

SEQ ID NO: 5567851 - DNA, 25 bp, Homo sapien
tggcaggtacaagaagatgccctat

SEQ ID NO: 5567852 - DNA, 25 bp, Homo sapien
cttggtggcacaacctggatcctaa

SEQ ID NO: 5567853 - DNA, 25 bp, Homo sapien
tcccctgcttggggccatctgtgct

SEQ ID NO: 5567854 - DNA, 25 bp, Homo sapien
aaactacgtgagtagtcagagagga

SEQ ID NO: 5567855 - DNA, 25 bp, Homo sapien
atctgtgctaggacatgatgatttt

SEQ ID NO: 5567856 - DNA, 25 bp, Homo sapien
tgccataactctcaacaaaagtgta

SEQ ID NO: 5567857 - DNA, 25 bp, Homo sapien
gaaaccatctccagacttgagtatg

SEQ ID NO: 5567858 - DNA, 25 bp, Homo sapien
tgccagaagaccaatgccataactc

SEQ ID NO: 5567859 - DNA, 25 bp, Homo sapien
ttgcacagatactgaagaataaatc

SEQ ID NO: 5567860 - DNA, 25 bp, Homo sapien
aggctactggatgttgcctgaaacc

SEQ ID NO: 5567861 - DNA, 25 bp, Homo sapien
cagaaaaagatcaccagctacctta

SEQ ID NO: 5567862 - DNA, 25 bp, Homo sapien
tctcttgacaaccgattaatctaaa

SEQ ID NO: 5567863 - DNA, 25 bp, Homo sapien
aaatacaaaccaaatggcaaagaca

SEQ ID NO: 5567864 - DNA, 25 bp, Homo sapien
atggtcttaggctactggatgttgc

SEQ ID NO: 5567865 - DNA, 25 bp, Homo sapien
gaatagtctataagtttaccagtta

SEQ ID NO: 5567866 - DNA, 25 bp, Homo sapien
agctaccttaaaatggtcttaggct

SEQ ID NO: 5567867 - DNA, 25 bp, Homo sapien
ctcctggcatcgcagctgtgcccag

SEQ ID NO: 5567868 - DNA, 25 bp, Homo sapien
ctgctgtgtgacacccctgcagtgc

SEQ ID NO: 5567869 - DNA, 25 bp, Homo sapien
tgccagccattcagtggccagtggc

SEQ ID NO: 5567870 - DNA, 25 bp, Homo sapien
gtcccaaagtcactctgtgcagccc

SEQ ID NO: 5567871 - DNA, 25 bp, Homo sapien
cctgtgcattcccttgggcctgccc

SEQ ID NO: 5567872 - DNA, 25 bp, Homo sapien
atctcccacgcaggctgactgagtt

SEQ ID NO: 5567873 - DNA, 25 bp, Homo sapien
tgtgcccagcagggctcatgtgatg

SEQ ID NO: 5567874 - DNA, 25 bp, Homo sapien
gctcatgtgatgatggcaagagtcc

SEQ ID NO: 5567875 - DNA, 25 bp, Homo sapien
aagccactctctgccccccaaaggg

SEQ ID NO: 5567876 - DNA, 25 bp, Homo sapien
ggcttgtgggtgccagccattcagt

SEQ ID NO: 5567877 - DNA, 25 bp, Homo sapien
ctgcccctctgggcacctgactggc

SEQ ID NO: 5567878 - DNA, 25 bp, Homo sapien
gtcataccaccgtgtgcagaaagcc

SEQ ID NO: 5567879 - DNA, 25 bp, Homo sapien
cttggggccaaaccttcccatcaac

SEQ ID NO: 5567880 - DNA, 25 bp, Homo sapien
atatccttggggccaaaccttccca

SEQ ID NO: 5567881 - DNA, 25 bp, Homo sapien
ggccacacatggttctcccttgctg

SEQ ID NO: 5567882 - DNA, 25 bp, Homo sapien
ggagttctgcccacgtgtctgtgtc

SEQ ID NO: 5567883 - DNA, 25 bp, Homo sapien
ctatctcagtcataccaccgtgtgc

SEQ ID NO: 5567884 - DNA, 25 bp, Homo sapien
tcccatcaactgtgaagccgggaac

SEQ ID NO: 5567885 - DNA, 25 bp, Homo sapien
cctgcctgttcacctcccaccattc

SEQ ID NO: 5567886 - DNA, 25 bp, Homo sapien
cccaccattcacctcccacagctcc

SEQ ID NO: 5567887 - DNA, 25 bp, Homo sapien
ctccctggagttctgcccacgtgtc

SEQ ID NO: 5567888 - DNA, 25 bp, Homo sapien
cccacagaacctgcctgttcacctc

SEQ ID NO: 5567889 - DNA, 25 bp, Homo sapien
atatggatgcaatacaaaaagtggt

SEQ ID NO: 5567890 - DNA, 25 bp, Homo sapien
gtggtcctacggagagctgtaacta

SEQ ID NO: 5567891 - DNA, 25 bp, Homo sapien
ctttggacccagagaatcatttgcc

SEQ ID NO: 5567892 - DNA, 25 bp, Homo sapien
tgggtcttatggaatcctagagctc

SEQ ID NO: 5567893 - DNA, 25 bp, Homo sapien
gaataatatacagagaggcaccatt

SEQ ID NO: 5567894 - DNA, 25 bp, Homo sapien
tggaatcatctggctagtaagacac

SEQ ID NO: 5567895 - DNA, 25 bp, Homo sapien
aaaagcccagttacagctgccctgc

SEQ ID NO: 5567896 - DNA, 25 bp, Homo sapien
ctgtaactagcagtggagttgttgc

SEQ ID NO: 5567897 - DNA, 25 bp, Homo sapien
ataataaggtagctctgcagatgta

SEQ ID NO: 5567898 - DNA, 25 bp, Homo sapien
taaagcaaagcaatcatgtggtcct

SEQ ID NO: 5567899 - DNA, 25 bp, Homo sapien
gctgccctgcctacccatggaccat

SEQ ID NO: 5567900 - DNA, 25 bp, Homo sapien
ctaaagacacactggatactacatt

SEQ ID NO: 5567901 - DNA, 25 bp, Homo sapien
tttgaaatcagtggtgtaatgggga

SEQ ID NO: 5567902 - DNA, 25 bp, Homo sapien
atcacagagtagtgtacaactaaca

SEQ ID NO: 5567903 - DNA, 25 bp, Homo sapien
attaaggacagggttatctaaagac

SEQ ID NO: 5567904 - DNA, 25 bp, Homo sapien
gagtagtgtacaactaacagaacaa

SEQ ID NO: 5567905 - DNA, 25 bp, Homo sapien
tgaaaatatcattaaggacagggtt

SEQ ID NO: 5567906 - DNA, 25 bp, Homo sapien
aacaattgaagagggaaaaataata

SEQ ID NO: 5567907 - DNA, 25 bp, Homo sapien
tctttgaaatcagtggtgtaatggg

SEQ ID NO: 5567908 - DNA, 25 bp, Homo sapien
taattgatttgtactatgcactaat

SEQ ID NO: 5567909 - DNA, 25 bp, Homo sapien
agggttatctaaagacacactggat

SEQ ID NO: 5567910 - DNA, 25 bp, Homo sapien
actatgcactaataaagcctgcctt

SEQ ID NO: 5567911 - DNA, 25 bp, Homo sapien
atgtcagtagagttatcatttcctg

SEQ ID NO: 5567912 - DNA, 25 bp, Homo sapien
ctgaaaatactaggtagaaataatc

SEQ ID NO: 5567913 - DNA, 25 bp, Homo sapien
tagtcacttaaaacattccagcatg

SEQ ID NO: 5567914 - DNA, 25 bp, Homo sapien
tatacttggttaaacatacactgta

SEQ ID NO: 5567915 - DNA, 25 bp, Homo sapien
ttgatatggtccaaagtataccacc

SEQ ID NO: 5567916 - DNA, 25 bp, Homo sapien
agtataccaccactccagtttcaca

SEQ ID NO: 5567917 - DNA, 25 bp, Homo sapien
gccgcacatcccaagtaaatcattc

SEQ ID NO: 5567918 - DNA, 25 bp, Homo sapien
atctaaaaaagaatcgccgcacatc

SEQ ID NO: 5567919 - DNA, 25 bp, Homo sapien
tttgaataattgtgatgatggcatc

SEQ ID NO: 5567920 - DNA, 25 bp, Homo sapien
attccagcatgtggttcaatgtatt

SEQ ID NO: 5567921 - DNA, 25 bp, Homo sapien
actatacatcaagcagtgatatgtc

SEQ ID NO: 5567922 - DNA, 25 bp, Homo sapien
cggtctcataggggagtttctggag

SEQ ID NO: 5567923 - DNA, 25 bp, Homo sapien
gagggagtgatacagtgcatatact

SEQ ID NO: 5567924 - DNA, 25 bp, Homo sapien
taacagaaccccaagcaataaatcc

SEQ ID NO: 5567925 - DNA, 25 bp, Homo sapien
gggacagacacgggtaatatcatcc

SEQ ID NO: 5567926 - DNA, 25 bp, Homo sapien
ttgaaaatatgagacctacaggtgt

SEQ ID NO: 5567927 - DNA, 25 bp, Homo sapien
attaaagttgaataggtaagaggta

SEQ ID NO: 5567928 - DNA, 25 bp, Homo sapien
ttttcctgataaaaagggacagaca

SEQ ID NO: 5567929 - DNA, 25 bp, Homo sapien
gaggtaagtctctgtgcatagaagc

SEQ ID NO: 5567930 - DNA, 25 bp, Homo sapien
atacctggatgtgaggtctagtgga

SEQ ID NO: 5567931 - DNA, 25 bp, Homo sapien
cctgaagtagccagcatgagaaaag

SEQ ID NO: 5567932 - DNA, 25 bp, Homo sapien
ccaggagaacagtagagaccctgga

SEQ ID NO: 5567933 - DNA, 25 bp, Homo sapien
agctactgagctcagcctccctctc

SEQ ID NO: 5567934 - DNA, 25 bp, Homo sapien
ccacctcagcatcacagagtgcagg

SEQ ID NO: 5567935 - DNA, 25 bp, Homo sapien
ccaagttctgatcaacggtactaac

SEQ ID NO: 5567936 - DNA, 25 bp, Homo sapien
tgtgttctgaacatgcataagcata

SEQ ID NO: 5567937 - DNA, 25 bp, Homo sapien
gggaggatggctgtatcactcctta

SEQ ID NO: 5567938 - DNA, 25 bp, Homo sapien
cattccccacggataggggaggatg

SEQ ID NO: 5567939 - DNA, 25 bp, Homo sapien
ccaccgacacatgatgtctactgtg

SEQ ID NO: 5567940 - DNA, 25 bp, Homo sapien
ctgcattgttagccttcaggaaagg

SEQ ID NO: 5567941 - DNA, 25 bp, Homo sapien
acggtactaaccgcagtttcaggca

SEQ ID NO: 5567942 - DNA, 25 bp, Homo sapien
ctcggggtcttggcacacattcccc

SEQ ID NO: 5567943 - DNA, 25 bp, Homo sapien
ccagctcaacacccaccgacacatg

SEQ ID NO: 5567944 - DNA, 25 bp, Homo sapien
gggtgtctgttgctggatccagttc

SEQ ID NO: 5567945 - DNA, 25 bp, Homo sapien
ctatcatctcacagggactccccac

SEQ ID NO: 5567946 - DNA, 25 bp, Homo sapien
cttggttgggagcctccattgctac

SEQ ID NO: 5567947 - DNA, 25 bp, Homo sapien
ccacaccactgctagtccatgggga

SEQ ID NO: 5567948 - DNA, 25 bp, Homo sapien
caggtgagactccctcaacccgctt

SEQ ID NO: 5567949 - DNA, 25 bp, Homo sapien
tgcatttaaaggaccgagagtctcc

SEQ ID NO: 5567950 - DNA, 25 bp, Homo sapien
caacccgctttcccccctcactgcc

SEQ ID NO: 5567951 - DNA, 25 bp, Homo sapien
ctggatccagttccaaaaggtgccc

SEQ ID NO: 5567952 - DNA, 25 bp, Homo sapien
accactgttatgtgatggatggggg

SEQ ID NO: 5567953 - DNA, 25 bp, Homo sapien
ttgtgaattttcaggtgagactccc

SEQ ID NO: 5567954 - DNA, 25 bp, Homo sapien
tgcttggaagcagcccatatcctgt

SEQ ID NO: 5567955 - DNA, 25 bp, Homo sapien
tctgatcaccgcagaaagcagaaac

SEQ ID NO: 5567956 - DNA, 25 bp, Homo sapien
tcaggatttcagtgcgacttgcaca

SEQ ID NO: 5567957 - DNA, 25 bp, Homo sapien
ggctccaggcttggcctttcaggat

SEQ ID NO: 5567958 - DNA, 25 bp, Homo sapien
tattatgatcgggtacaagtgtcca

SEQ ID NO: 5567959 - DNA, 25 bp, Homo sapien
tcctcgcctttagaaactcgccatc

SEQ ID NO: 5567960 - DNA, 25 bp, Homo sapien
caaacccaaacgcgccctctgatca

SEQ ID NO: 5567961 - DNA, 25 bp, Homo sapien
tccttaatgaaaagcctggacgggc

SEQ ID NO: 5567962 - DNA, 25 bp, Homo sapien
acaagtgtccattcgcgtgggtttt

SEQ ID NO: 5567963 - DNA, 25 bp, Homo sapien
ttagtccgcgtcaaacaaaaatata

SEQ ID NO: 5567964 - DNA, 25 bp, Homo sapien
gagcggcgattcaagcggctctttt

SEQ ID NO: 5567965 - DNA, 25 bp, Homo sapien
tgaacaacccgagcttgattagacc

SEQ ID NO: 5567966 - DNA, 25 bp, Homo sapien
aaatacatagcatctgtgtgacagg

SEQ ID NO: 5567967 - DNA, 25 bp, Homo sapien
gagcagaatcgaatgacatgatgat

SEQ ID NO: 5567968 - DNA, 25 bp, Homo sapien
atgatgagcataaaagctattggat

SEQ ID NO: 5567969 - DNA, 25 bp, Homo sapien
aggataggagatgcacctaaatgtt

SEQ ID NO: 5567970 - DNA, 25 bp, Homo sapien
atagtaagagttacacaatagcctc

SEQ ID NO: 5567971 - DNA, 25 bp, Homo sapien
cgaatgtttgcaggatgagcgttaa

SEQ ID NO: 5567972 - DNA, 25 bp, Homo sapien
ttatttccaggataggagatgcacc

SEQ ID NO: 5567973 - DNA, 25 bp, Homo sapien
gaggaaggattgaagtgttgtctca

SEQ ID NO: 5567974 - DNA, 25 bp, Homo sapien
gatgagcgttaatgagcagaatcga

SEQ ID NO: 5567975 - DNA, 25 bp, Homo sapien
gtggctggtcttgctcgaatgtttg

SEQ ID NO: 5567976 - DNA, 25 bp, Homo sapien
agctattggatagtaagagttacac

SEQ ID NO: 5567977 - DNA, 25 bp, Homo sapien
tccaggggccaagtttccaagcttg

SEQ ID NO: 5567978 - DNA, 25 bp, Homo sapien
taaatgccacccagtgaaggccaac

SEQ ID NO: 5567979 - DNA, 25 bp, Homo sapien
tggggccatcacaacgtttagacag

SEQ ID NO: 5567980 - DNA, 25 bp, Homo sapien
gaaccatatgagtggtagaaggaga

SEQ ID NO: 5567981 - DNA, 25 bp, Homo sapien
cagcagcacattcctcccctgggcc

SEQ ID NO: 5567982 - DNA, 25 bp, Homo sapien
gggcagcagctatagtgaccattgg

SEQ ID NO: 5567983 - DNA, 25 bp, Homo sapien
ttagacaggtttgtgcagcagcaca

SEQ ID NO: 5567984 - DNA, 25 bp, Homo sapien
gggctgaacttaggttgtggtctca

SEQ ID NO: 5567985 - DNA, 25 bp, Homo sapien
tggtctcagacctaggatccagggg

SEQ ID NO: 5567986 - DNA, 25 bp, Homo sapien
gtggagcggttaagaactcatatgc

SEQ ID NO: 5567987 - DNA, 25 bp, Homo sapien
tccaagcttgcccatcaggaaggtg

SEQ ID NO: 5567988 - DNA, 25 bp, Homo sapien
tggccaagacataatttggatgagc

SEQ ID NO: 5567989 - DNA, 25 bp, Homo sapien
tgagtaatagttgtgctggagaagt

SEQ ID NO: 5567990 - DNA, 25 bp, Homo sapien
ccgaaagaacaaatgtccaaaagtc

SEQ ID NO: 5567991 - DNA, 25 bp, Homo sapien
cttcactgcagacccttctcagcat

SEQ ID NO: 5567992 - DNA, 25 bp, Homo sapien
tagctgggatatgatgtctacttcc

SEQ ID NO: 5567993 - DNA, 25 bp, Homo sapien
cattatacatgcatagacaaactat

SEQ ID NO: 5567994 - DNA, 25 bp, Homo sapien
cctgtttagctgggatatgatgtct

SEQ ID NO: 5567995 - DNA, 25 bp, Homo sapien
ttctaatgtaaaacttgctggccaa

SEQ ID NO: 5567996 - DNA, 25 bp, Homo sapien
ttgccttgacaattatgctccagtt

SEQ ID NO: 5567997 - DNA, 25 bp, Homo sapien
aacttggtttctgatatggctttac

SEQ ID NO: 5567998 - DNA, 25 bp, Homo sapien
ttccaaagccgaaagaacaaatgtc

SEQ ID NO: 5567999 - DNA, 25 bp, Homo sapien
ctctaatatggaaaataaaacactt

SEQ ID NO: 5568000 - DNA, 25 bp, Homo sapien
ccatattggtaaggctggtctcgaa

SEQ ID NO: 5568001 - DNA, 25 bp, Homo sapien
gatggagtcttgctattgcccaagc

SEQ ID NO: 5568002 - DNA, 25 bp, Homo sapien
ttgctattgcccaagctggagtgca

SEQ ID NO: 5568003 - DNA, 25 bp, Homo sapien
acacataaggttcccttcccatctc

SEQ ID NO: 5568004 - DNA, 25 bp, Homo sapien
gacctcaggtgatctacctccctca

SEQ ID NO: 5568005 - DNA, 25 bp, Homo sapien
aataaaacacttaatatgaatactc

SEQ ID NO: 5568006 - DNA, 25 bp, Homo sapien
cacctgccaccatgcagggctaatt

SEQ ID NO: 5568007 - DNA, 25 bp, Homo sapien
caaaataaaatacacataaggttcc

SEQ ID NO: 5568008 - DNA, 25 bp, Homo sapien
caggtgatctacctccctcagcctc

SEQ ID NO: 5568009 - DNA, 25 bp, Homo sapien
tggggcttcaccatattggtaaggc

SEQ ID NO: 5568010 - DNA, 25 bp, Homo sapien
aagacaggagaggtaatctatttta

SEQ ID NO: 5568011 - DNA, 25 bp, Homo sapien
tctttacataagtgacagaaaagca

SEQ ID NO: 5568012 - DNA, 25 bp, Homo sapien
gcagttcagaggaggctattatgat

SEQ ID NO: 5568013 - DNA, 25 bp, Homo sapien
ggcaatgggaataagaatttggaaa

SEQ ID NO: 5568014 - DNA, 25 bp, Homo sapien
atattagaaaatgtcctcccttacc

SEQ ID NO: 5568015 - DNA, 25 bp, Homo sapien
gggacagagaaggtttatgtaaata

SEQ ID NO: 5568016 - DNA, 25 bp, Homo sapien
aggacttttaaaggcaatgggaata

SEQ ID NO: 5568017 - DNA, 25 bp, Homo sapien
gcctatgaggtttggaaataagaaa

SEQ ID NO: 5568018 - DNA, 25 bp, Homo sapien
ttatacaacctgcctctaaaggact

SEQ ID NO: 5568019 - DNA, 25 bp, Homo sapien
aacaactcaaggcagttcagaggag

SEQ ID NO: 5568020 - DNA, 25 bp, Homo sapien
gaattcaattgagtccaaagaagtc

SEQ ID NO: 5568021 - DNA, 25 bp, Homo sapien
tggcagggtagatttggtctctgta

SEQ ID NO: 5568022 - DNA, 25 bp, Homo sapien
ttactatagcagatttttgacccca

SEQ ID NO: 5568023 - DNA, 25 bp, Homo sapien
agtataaacttttggtgaataggga

SEQ ID NO: 5568024 - DNA, 25 bp, Homo sapien
ttccagcaatcgtgatgcttctctg

SEQ ID NO: 5568025 - DNA, 25 bp, Homo sapien
ctgtagttcactgacccctgatcta

SEQ ID NO: 5568026 - DNA, 25 bp, Homo sapien
aaacagcaatgccaaaccttgaatc

SEQ ID NO: 5568027 - DNA, 25 bp, Homo sapien
tatctgaataaaaggcttagtaact

SEQ ID NO: 5568028 - DNA, 25 bp, Homo sapien
tttgaccccaatttagtgtgctatc

SEQ ID NO: 5568029 - DNA, 25 bp, Homo sapien
atgccaaaccttgaatccaggtccg

SEQ ID NO: 5568030 - DNA, 25 bp, Homo sapien
tccaggtccgatattttccagcaat

SEQ ID NO: 5568031 - DNA, 25 bp, Homo sapien
tgaatgaaacagttataaatgtact

SEQ ID NO: 5568032 - DNA, 25 bp, Homo sapien
cagcccaagaaacagcacattcagc

SEQ ID NO: 5568033 - DNA, 25 bp, Homo sapien
tcacgttggaaacaatgagtagtgt

SEQ ID NO: 5568034 - DNA, 25 bp, Homo sapien
ggtcaaggatgggcacatcttcagt

SEQ ID NO: 5568035 - DNA, 25 bp, Homo sapien
acatatacttctgtggccaggtggt

SEQ ID NO: 5568036 - DNA, 25 bp, Homo sapien
atgagtagtgttgtgttgtttgttt

SEQ ID NO: 5568037 - DNA, 25 bp, Homo sapien
tagagtgtataacagcatgcacatc

SEQ ID NO: 5568038 - DNA, 25 bp, Homo sapien
catgtggattcagcactcctggccc

SEQ ID NO: 5568039 - DNA, 25 bp, Homo sapien
tagaactccactgttgggcactccc

SEQ ID NO: 5568040 - DNA, 25 bp, Homo sapien
cctggccctccgcactgctccatac

SEQ ID NO: 5568041 - DNA, 25 bp, Homo sapien
aacaaatgccgcagtcaacacgtgt

SEQ ID NO: 5568042 - DNA, 25 bp, Homo sapien
aaacctccagccctggtcctcggcc

SEQ ID NO: 5568043 - DNA, 25 bp, Homo sapien
gccgggttgcctatcgcgtacttgg

SEQ ID NO: 5568044 - DNA, 25 bp, Homo sapien
gtccccgccaccgctactgtctctt

SEQ ID NO: 5568045 - DNA, 25 bp, Homo sapien
tgaaaggcgtggcatgtaattcttt

SEQ ID NO: 5568046 - DNA, 25 bp, Homo sapien
ataagggcagtgacagtgtctcttt

SEQ ID NO: 5568047 - DNA, 25 bp, Homo sapien
atcgcgtacttggcacacagttaag

SEQ ID NO: 5568048 - DNA, 25 bp, Homo sapien
tcagagaacttgccttgccactctc

SEQ ID NO: 5568049 - DNA, 25 bp, Homo sapien
cacagttaagtgctcgagaaattgc

SEQ ID NO: 5568050 - DNA, 25 bp, Homo sapien
tttgctagtttgcggacgagtttcc

SEQ ID NO: 5568051 - DNA, 25 bp, Homo sapien
ggacgagtttcccccaagctgcagg

SEQ ID NO: 5568052 - DNA, 25 bp, Homo sapien
atgctccaccgttgctgaaagaatt

SEQ ID NO: 5568053 - DNA, 25 bp, Homo sapien
ctttctcagatgaatgccgggttgc

SEQ ID NO: 5568054 - DNA, 25 bp, Homo sapien
agtcagtcaaattgttgggggtata

SEQ ID NO: 5568055 - DNA, 25 bp, Homo sapien
agagaaatgtaaagtaacctggacc

SEQ ID NO: 5568056 - DNA, 25 bp, Homo sapien
atcatgtttgtagaaaggagcactt

SEQ ID NO: 5568057 - DNA, 25 bp, Homo sapien
agtaggtaccaaatgggcttccagc

SEQ ID NO: 5568058 - DNA, 25 bp, Homo sapien
acatgcattgcaaacagtaggtacc

SEQ ID NO: 5568059 - DNA, 25 bp, Homo sapien
tttaggaagatggtagtctacagta

SEQ ID NO: 5568060 - DNA, 25 bp, Homo sapien
gacagaggagacatgtaaacttaat

SEQ ID NO: 5568061 - DNA, 25 bp, Homo sapien
ctaccctcagacaataacagcagtg

SEQ ID NO: 5568062 - DNA, 25 bp, Homo sapien
cagcagtgactggaatatataagaa

SEQ ID NO: 5568063 - DNA, 25 bp, Homo sapien
aacctggaccatgatatagtcagtc

SEQ ID NO: 5568064 - DNA, 25 bp, Homo sapien
aagattaaaacttggtgttgcctac

SEQ ID NO: 5568065 - DNA, 25 bp, Homo sapien
ctcttatgaggaaacccagagagat

SEQ ID NO: 5568066 - DNA, 25 bp, Homo sapien
gccaagtggaatggactcctggcat

SEQ ID NO: 5568067 - DNA, 25 bp, Homo sapien
ggctgggatgtctggcccttcctga

SEQ ID NO: 5568068 - DNA, 25 bp, Homo sapien
cacccagaataaagacctggggacc

SEQ ID NO: 5568069 - DNA, 25 bp, Homo sapien
gcctttgctcgggtcatggctggga

SEQ ID NO: 5568070 - DNA, 25 bp, Homo sapien
aagtcagagaggctttccctgcatt

SEQ ID NO: 5568071 - DNA, 25 bp, Homo sapien
tgactgcctggcaaacagcagatgc

SEQ ID NO: 5568072 - DNA, 25 bp, Homo sapien
tggcatttgagggcttcccgactgc

SEQ ID NO: 5568073 - DNA, 25 bp, Homo sapien
gacaggaaccttgtgggtctacctc

SEQ ID NO: 5568074 - DNA, 25 bp, Homo sapien
gggtgtccatagtcagctctgcctt

SEQ ID NO: 5568075 - DNA, 25 bp, Homo sapien
tgaggcgggacaaacttgtcttcct

SEQ ID NO: 5568076 - DNA, 25 bp, Homo sapien
attctggactgatacaaccaaaact

SEQ ID NO: 5568077 - DNA, 25 bp, Homo sapien
aaccaaaactcacacaagctctccc

SEQ ID NO: 5568078 - DNA, 25 bp, Homo sapien
aaagacattctggagcgtatagtgg

SEQ ID NO: 5568079 - DNA, 25 bp, Homo sapien
tcaccgaaagacattctggagcgta

SEQ ID NO: 5568080 - DNA, 25 bp, Homo sapien
ttaagcaaactctgatagctacgtc

SEQ ID NO: 5568081 - DNA, 25 bp, Homo sapien
agaagagcccaagccctctcatttc

SEQ ID NO: 5568082 - DNA, 25 bp, Homo sapien
gctacgtctagaatcagaagagccc

SEQ ID NO: 5568083 - DNA, 25 bp, Homo sapien
tgaagtctttttcagggaaatggaa

SEQ ID NO: 5568084 - DNA, 25 bp, Homo sapien
ggacagaaaggtctcctatgcactg

SEQ ID NO: 5568085 - DNA, 25 bp, Homo sapien
attagaacattgtaaggaagtactt

SEQ ID NO: 5568086 - DNA, 25 bp, Homo sapien
tatccaaaaggatgtcaagctattt

SEQ ID NO: 5568087 - DNA, 25 bp, Homo sapien
gttccacagcagacgcttccccctt

SEQ ID NO: 5568088 - DNA, 25 bp, Homo sapien
cccccttaagggagatgttgtgaaa

SEQ ID NO: 5568089 - DNA, 25 bp, Homo sapien
gacacgacagcctcctcagattggg

SEQ ID NO: 5568090 - DNA, 25 bp, Homo sapien
gcgtcctcagctagtggcgcacatc

SEQ ID NO: 5568091 - DNA, 25 bp, Homo sapien
tatgtcacacaggctcatgaactac

SEQ ID NO: 5568092 - DNA, 25 bp, Homo sapien
gccctctacccgaagtgtgtgctct

SEQ ID NO: 5568093 - DNA, 25 bp, Homo sapien
atggccaagcctttgtggtgtcgcc

SEQ ID NO: 5568094 - DNA, 25 bp, Homo sapien
ttgagggcacattccgcatggccaa

SEQ ID NO: 5568095 - DNA, 25 bp, Homo sapien
gaagagctcaatgcaagtgccctct

SEQ ID NO: 5568096 - DNA, 25 bp, Homo sapien
tcctcagattgggaagcgacctgag

SEQ ID NO: 5568097 - DNA, 25 bp, Homo sapien
aatagttgaaaagattgaaaatgcc

SEQ ID NO: 5568098 - DNA, 25 bp, Homo sapien
aatttgtgctaattaactgtacaaa

SEQ ID NO: 5568099 - DNA, 25 bp, Homo sapien
tttgtacagttaattagcacaaatt

SEQ ID NO: 5568100 - DNA, 25 bp, Homo sapien
cttcccagtggaacccttctcttag

SEQ ID NO: 5568101 - DNA, 25 bp, Homo sapien
tcttagttgcactggcattggggga

SEQ ID NO: 5568102 - DNA, 25 bp, Homo sapien
ttaggtgtgaactagcataggtgat

SEQ ID NO: 5568103 - DNA, 25 bp, Homo sapien
tgattcatgggaaacgaaatggcaa

SEQ ID NO: 5568104 - DNA, 25 bp, Homo sapien
agaataacattaggtgtgaactagc

SEQ ID NO: 5568105 - DNA, 25 bp, Homo sapien
gagaggggttctcagccttcccagt

SEQ ID NO: 5568106 - DNA, 25 bp, Homo sapien
tctcattgctgggcctaggtccagg

SEQ ID NO: 5568107 - DNA, 25 bp, Homo sapien
gaaatggcaaattcgaaaggaattc

SEQ ID NO: 5568108 - DNA, 25 bp, Homo sapien
ttgcctgtagagaacccatgaggag

SEQ ID NO: 5568109 - DNA, 25 bp, Homo sapien
attcgaaaggaattctgggaaccat

SEQ ID NO: 5568110 - DNA, 25 bp, Homo sapien
tctgggaaccatcgtactaggttac

SEQ ID NO: 5568111 - DNA, 25 bp, Homo sapien
gcaaaggttcagcaaatcagctagc

SEQ ID NO: 5568112 - DNA, 25 bp, Homo sapien
agtcacttacaaggacttaacgact

SEQ ID NO: 5568113 - DNA, 25 bp, Homo sapien
ccaaatgggtgagtcagcctcatca

SEQ ID NO: 5568114 - DNA, 25 bp, Homo sapien
aataaacattggaatagtcacttac

SEQ ID NO: 5568115 - DNA, 25 bp, Homo sapien
aaaacatggtaactccaagcattct

SEQ ID NO: 5568116 - DNA, 25 bp, Homo sapien
ttacactaaagtactagatggtctc

SEQ ID NO: 5568117 - DNA, 25 bp, Homo sapien
gaattaaagttgttatcagtaagcc

SEQ ID NO: 5568118 - DNA, 25 bp, Homo sapien
tgagtcagcctcatcacagagattt

SEQ ID NO: 5568119 - DNA, 25 bp, Homo sapien
cagctagcactaatcttgaccaaat

SEQ ID NO: 5568120 - DNA, 25 bp, Homo sapien
ttctacattaggagaagggagaata

SEQ ID NO: 5568121 - DNA, 25 bp, Homo sapien
cagtaagcctaattaaacagtgcag

SEQ ID NO: 5568122 - DNA, 25 bp, Homo sapien
tgaaacaatagagccaacagtgcaa

SEQ ID NO: 5568123 - DNA, 25 bp, Homo sapien
aaaattctataggaaggaggtatcc

SEQ ID NO: 5568124 - DNA, 25 bp, Homo sapien
aaatatgcgtaaagcaaaagtaaac

SEQ ID NO: 5568125 - DNA, 25 bp, Homo sapien
catgagaacctgacctttacattgc

SEQ ID NO: 5568126 - DNA, 25 bp, Homo sapien
gaaggtggcatctcaacttatagcc

SEQ ID NO: 5568127 - DNA, 25 bp, Homo sapien
ggtagtggaataatatgcttgtttt

SEQ ID NO: 5568128 - DNA, 25 bp, Homo sapien
aggaggtatcctaactagaaatgtg

SEQ ID NO: 5568129 - DNA, 25 bp, Homo sapien
gactgctggtctaaatatgtggggg

SEQ ID NO: 5568130 - DNA, 25 bp, Homo sapien
tttaagttaatggttgaaggtggca

SEQ ID NO: 5568131 - DNA, 25 bp, Homo sapien
aatgtgaggcagaatatctagaagt

SEQ ID NO: 5568132 - DNA, 25 bp, Homo sapien
agcctgccagagatctcatgagaac

SEQ ID NO: 5568133 - DNA, 25 bp, Homo sapien
accaccgcacactccctaccaccgc

SEQ ID NO: 5568134 - DNA, 25 bp, Homo sapien
cacatacctgatcatggggctgagg

SEQ ID NO: 5568135 - DNA, 25 bp, Homo sapien
gaaccacatgaaccagggctaagtc

SEQ ID NO: 5568136 - DNA, 25 bp, Homo sapien
ttccctccaaggacctggatctgag

SEQ ID NO: 5568137 - DNA, 25 bp, Homo sapien
gaaataaggtcacttgctgcttctg

SEQ ID NO: 5568138 - DNA, 25 bp, Homo sapien
taccaccgcctgctggagaaataag

SEQ ID NO: 5568139 - DNA, 25 bp, Homo sapien
acctggatctgagccaggaccggtg

SEQ ID NO: 5568140 - DNA, 25 bp, Homo sapien
gcggtgcaacccgtctcctgccctc

SEQ ID NO: 5568141 - DNA, 25 bp, Homo sapien
cagggctaagtcacagccaagctac

SEQ ID NO: 5568142 - DNA, 25 bp, Homo sapien
gaagcccctgttttcaccaccgcac

SEQ ID NO: 5568143 - DNA, 25 bp, Homo sapien
gctggcctggatgccacatacctga

SEQ ID NO: 5568144 - DNA, 25 bp, Homo sapien
gagccctgtgtgtagggagtaattc

SEQ ID NO: 5568145 - DNA, 25 bp, Homo sapien
gataacagagtaagaaaagtggtaa

SEQ ID NO: 5568146 - DNA, 25 bp, Homo sapien
tctggttgatctagagaacacgagc

SEQ ID NO: 5568147 - DNA, 25 bp, Homo sapien
gcttcagttactgtggctggctggg

SEQ ID NO: 5568148 - DNA, 25 bp, Homo sapien
taggggcagttaatgtacagctctg

SEQ ID NO: 5568149 - DNA, 25 bp, Homo sapien
ttatgtgtagacttgggatctgtgc

SEQ ID NO: 5568150 - DNA, 25 bp, Homo sapien
aagtcgaaagccaaagccttaatta

SEQ ID NO: 5568151 - DNA, 25 bp, Homo sapien
tcaggatgatgcgtagcgttccttt

SEQ ID NO: 5568152 - DNA, 25 bp, Homo sapien
ggctaactggcctgaggaaatgaaa

SEQ ID NO: 5568153 - DNA, 25 bp, Homo sapien
ggctactagccaagggctaactggc

SEQ ID NO: 5568154 - DNA, 25 bp, Homo sapien
aaaaaaactaggctgactgattctc

SEQ ID NO: 5568155 - DNA, 25 bp, Homo sapien
tggccaaaagaatatagcagaagta

SEQ ID NO: 5568156 - DNA, 25 bp, Homo sapien
agcagaagtaatggtacacagattc

SEQ ID NO: 5568157 - DNA, 25 bp, Homo sapien
cacagggttggattagtaacttgga

SEQ ID NO: 5568158 - DNA, 25 bp, Homo sapien
agagatcacactgaccacaggccat

SEQ ID NO: 5568159 - DNA, 25 bp, Homo sapien
ttgaatctggcctagactgtggctt

SEQ ID NO: 5568160 - DNA, 25 bp, Homo sapien
gttaccctgttggagatgagagatc

SEQ ID NO: 5568161 - DNA, 25 bp, Homo sapien
ctagatacttgttgaggcacttccc

SEQ ID NO: 5568162 - DNA, 25 bp, Homo sapien
aggccataaacctgtgagagaaccc

SEQ ID NO: 5568163 - DNA, 25 bp, Homo sapien
caagagggcttgaacacttctgctt

SEQ ID NO: 5568164 - DNA, 25 bp, Homo sapien
gactgtggcttagcttgcactggcc

SEQ ID NO: 5568165 - DNA, 25 bp, Homo sapien
tggatttggagcatgtctggtgata

SEQ ID NO: 5568166 - DNA, 25 bp, Homo sapien
gtcgtcacctcacctctaccccaac

SEQ ID NO: 5568167 - DNA, 25 bp, Homo sapien
gtaacagtactgaaatctagatccc

SEQ ID NO: 5568168 - DNA, 25 bp, Homo sapien
caaaaaacctggcttcataaatgtt

SEQ ID NO: 5568169 - DNA, 25 bp, Homo sapien
accactatctctgtgtcgtcacctc

SEQ ID NO: 5568170 - DNA, 25 bp, Homo sapien
tctgcaaaacaggtaatcgtatcta

SEQ ID NO: 5568171 - DNA, 25 bp, Homo sapien
taacaggcttgccaaaaaacctggc

SEQ ID NO: 5568172 - DNA, 25 bp, Homo sapien
taagataacatatataacaggcttg

SEQ ID NO: 5568173 - DNA, 25 bp, Homo sapien
aaatgttaattactgtgtcactgtc

SEQ ID NO: 5568174 - DNA, 25 bp, Homo sapien
tcaactgtagttcccaataaccact

SEQ ID NO: 5568175 - DNA, 25 bp, Homo sapien
acagactaaagttaatcagtatttc

SEQ ID NO: 5568176 - DNA, 25 bp, Homo sapien
atgatgacctaataagataacatat

SEQ ID NO: 5568177 - DNA, 25 bp, Homo sapien
actgttctgagaaatcacttccctt

SEQ ID NO: 5568178 - DNA, 25 bp, Homo sapien
ttgaggccagagttacattggttca

SEQ ID NO: 5568179 - DNA, 25 bp, Homo sapien
acaaccagaaatccggatgatggga

SEQ ID NO: 5568180 - DNA, 25 bp, Homo sapien
ggaatatgattgaggccagagttac

SEQ ID NO: 5568181 - DNA, 25 bp, Homo sapien
tacttctcaagggtggatatgtggt

SEQ ID NO: 5568182 - DNA, 25 bp, Homo sapien
tgtggtggaatgcagactccatcaa

SEQ ID NO: 5568183 - DNA, 25 bp, Homo sapien
gaatatgagttctagatggcagatc

SEQ ID NO: 5568184 - DNA, 25 bp, Homo sapien
atggcagatctacttacaactgctc

SEQ ID NO: 5568185 - DNA, 25 bp, Homo sapien
tgggagagaaacacttctttaggat

SEQ ID NO: 5568186 - DNA, 25 bp, Homo sapien
ctgaggtctttcactagctgattta

SEQ ID NO: 5568187 - DNA, 25 bp, Homo sapien
tttagaaatcccagaggaatatgat

SEQ ID NO: 5568188 - DNA, 25 bp, Homo sapien
gttggagatttaagatactcaggat

SEQ ID NO: 5568189 - DNA, 25 bp, Homo sapien
ggttcatgataaccaccaggattgg

SEQ ID NO: 5568190 - DNA, 25 bp, Homo sapien
cgtaattcaagaagtccaaaaatac

SEQ ID NO: 5568191 - DNA, 25 bp, Homo sapien
agtaatactgccccagcccggaaca

SEQ ID NO: 5568192 - DNA, 25 bp, Homo sapien
caatagttaatgagtgtactggttc

SEQ ID NO: 5568193 - DNA, 25 bp, Homo sapien
attaaggtagttcttcgcaacccat

SEQ ID NO: 5568194 - DNA, 25 bp, Homo sapien
gaggccccatgtctaataaataatt

SEQ ID NO: 5568195 - DNA, 25 bp, Homo sapien
cttaagaaagtaatactgccccagc

SEQ ID NO: 5568196 - DNA, 25 bp, Homo sapien
cctggcacgttggatattttgttcc

SEQ ID NO: 5568197 - DNA, 25 bp, Homo sapien
ctgtgctgacaaattgcctttgcaa

SEQ ID NO: 5568198 - DNA, 25 bp, Homo sapien
agatatttgacatgatacgtaattc

SEQ ID NO: 5568199 - DNA, 25 bp, Homo sapien
tgggaaaggtactagctgacgtcgt

SEQ ID NO: 5568200 - DNA, 25 bp, Homo sapien
acgacgtcagctagtacctttccca

SEQ ID NO: 5568201 - DNA, 25 bp, Homo sapien
cccccaggcctgtctttcagggatt

SEQ ID NO: 5568202 - DNA, 25 bp, Homo sapien
gccctgaggttgcttcccccaggcc

SEQ ID NO: 5568203 - DNA, 25 bp, Homo sapien
gcagcagggtctccagtctgacctg

SEQ ID NO: 5568204 - DNA, 25 bp, Homo sapien
ctgggatctggccctagatttgaca

SEQ ID NO: 5568205 - DNA, 25 bp, Homo sapien
ccacctgtgccctgaggttgcttcc

SEQ ID NO: 5568206 - DNA, 25 bp, Homo sapien
gccctagatttgacagtggcgcggg

SEQ ID NO: 5568207 - DNA, 25 bp, Homo sapien
ttccagcagacttgtggcctccttc

SEQ ID NO: 5568208 - DNA, 25 bp, Homo sapien
tttctctaggcctctgtcccccacc

SEQ ID NO: 5568209 - DNA, 25 bp, Homo sapien
ttcagggattggggtcttcttatct

SEQ ID NO: 5568210 - DNA, 25 bp, Homo sapien
tcctcaccccacaggttctgcttgc

SEQ ID NO: 5568211 - DNA, 25 bp, Homo sapien
tctctgtggtctccctcgtggggga

SEQ ID NO: 5568212 - DNA, 25 bp, Homo sapien
ataagtttctgtatatagtttgtgt

SEQ ID NO: 5568213 - DNA, 25 bp, Homo sapien
acacaaactatatacagaaacttat

SEQ ID NO: 5568214 - DNA, 25 bp, Homo sapien
cttctgtcacagccaatgggatgcc

SEQ ID NO: 5568215 - DNA, 25 bp, Homo sapien
tccagggtggcaagttcctgccacc

SEQ ID NO: 5568216 - DNA, 25 bp, Homo sapien
cacagcaaccacctcgtctccccca

SEQ ID NO: 5568217 - DNA, 25 bp, Homo sapien
cgctgctccctgtggagcacggtgc

SEQ ID NO: 5568218 - DNA, 25 bp, Homo sapien
gagggagaaaccagcgttcttatca

SEQ ID NO: 5568219 - DNA, 25 bp, Homo sapien
caagttcctgccaccaaggcccttc

SEQ ID NO: 5568220 - DNA, 25 bp, Homo sapien
gtggcctccccgaagcccactctcc

SEQ ID NO: 5568221 - DNA, 25 bp, Homo sapien
ggccacacctgagcagaccctcagc

SEQ ID NO: 5568222 - DNA, 25 bp, Homo sapien
cctcacccatgccccacagaggcga

SEQ ID NO: 5568223 - DNA, 25 bp, Homo sapien
gatgccctcctccaggaccctgcag

SEQ ID NO: 5568224 - DNA, 25 bp, Homo sapien
gaggcgagactctctccacagcaac

SEQ ID NO: 5568225 - DNA, 25 bp, Homo sapien
aaggataattgctgatgagaaaaaa

SEQ ID NO: 5568226 - DNA, 25 bp, Homo sapien
tgtctcacggtgtataaaagttata

SEQ ID NO: 5568227 - DNA, 25 bp, Homo sapien
gatgataggcatgacccatggtgcc

SEQ ID NO: 5568228 - DNA, 25 bp, Homo sapien
ccatggtgcctgaccttaaaaagtc

SEQ ID NO: 5568229 - DNA, 25 bp, Homo sapien
ccaagacaaggataattgctgatga

SEQ ID NO: 5568230 - DNA, 25 bp, Homo sapien
ttaaaataagttgtctcacggtgta

SEQ ID NO: 5568231 - DNA, 25 bp, Homo sapien
agctctgatgttccaagacaaggat

SEQ ID NO: 5568232 - DNA, 25 bp, Homo sapien
tgatcttgaaatcttggcctcaaat

SEQ ID NO: 5568233 - DNA, 25 bp, Homo sapien
aaaaaatcagaatctcacagactgc

SEQ ID NO: 5568234 - DNA, 25 bp, Homo sapien
cccacttcagtcctcaaagcgttga

SEQ ID NO: 5568235 - DNA, 25 bp, Homo sapien
taaatgaaggctgccagattgatta

SEQ ID NO: 5568236 - DNA, 25 bp, Homo sapien
tggctcctatgattggttgagtctc

SEQ ID NO: 5568237 - DNA, 25 bp, Homo sapien
ttgagaagtaggcaccatcccagaa

SEQ ID NO: 5568238 - DNA, 25 bp, Homo sapien
aacaaagatcgttcagagtgactcc

SEQ ID NO: 5568239 - DNA, 25 bp, Homo sapien
gagtgactccacatccagagtggtg

SEQ ID NO: 5568240 - DNA, 25 bp, Homo sapien
tggcagcattcagcctaggattgac

SEQ ID NO: 5568241 - DNA, 25 bp, Homo sapien
gtatggatgccgctttgggccaaac

SEQ ID NO: 5568242 - DNA, 25 bp, Homo sapien
agagtttccctgattggtgcagttc

SEQ ID NO: 5568243 - DNA, 25 bp, Homo sapien
cagtcactatgtatggatgccgctt

SEQ ID NO: 5568244 - DNA, 25 bp, Homo sapien
taggattgactaagggtttggctcc

SEQ ID NO: 5568245 - DNA, 25 bp, Homo sapien
ggttgagtctcagttgcttggttac

SEQ ID NO: 5568246 - DNA, 25 bp, Homo sapien
cagagtggtgagatgtatttataac

SEQ ID NO: 5568247 - DNA, 25 bp, Homo sapien
aaggagcctctatcaggcctgtccc

SEQ ID NO: 5568248 - DNA, 25 bp, Homo sapien
gcctgtcccagtcctaccatgtccc

SEQ ID NO: 5568249 - DNA, 25 bp, Homo sapien
ctcaccagtctgcaccttcctatct

SEQ ID NO: 5568250 - DNA, 25 bp, Homo sapien
atgtcccataatgccccatgttcca

SEQ ID NO: 5568251 - DNA, 25 bp, Homo sapien
tgcttacattacataaaggagcctc

SEQ ID NO: 5568252 - DNA, 25 bp, Homo sapien
ttgaaggcaagaaagctctctccaa

SEQ ID NO: 5568253 - DNA, 25 bp, Homo sapien
attattcctaagggcaaagcaaagg

SEQ ID NO: 5568254 - DNA, 25 bp, Homo sapien
aacaaattataatgagtgcttacac

SEQ ID NO: 5568255 - DNA, 25 bp, Homo sapien
tctcagtgggacaaaactcagctag

SEQ ID NO: 5568256 - DNA, 25 bp, Homo sapien
actcagctagatgttgaaggcaaga

SEQ ID NO: 5568257 - DNA, 25 bp, Homo sapien
aaaaatctaaggacagtaccaacat

SEQ ID NO: 5568258 - DNA, 25 bp, Homo sapien
gatggtgctggtagctaacagatct

SEQ ID NO: 5568259 - DNA, 25 bp, Homo sapien
ctctagcctcttcccgcggtgccag

SEQ ID NO: 5568260 - DNA, 25 bp, Homo sapien
agaggacaaggtgatttagtgactc

SEQ ID NO: 5568261 - DNA, 25 bp, Homo sapien
ggcgaaagtggcctacacccactcc

SEQ ID NO: 5568262 - DNA, 25 bp, Homo sapien
ctaacagatcttgagcgtaccaggc

SEQ ID NO: 5568263 - DNA, 25 bp, Homo sapien
ccctctccggaacacacatgcgaac

SEQ ID NO: 5568264 - DNA, 25 bp, Homo sapien
gctgagtcctctaacgggcagaatg

SEQ ID NO: 5568265 - DNA, 25 bp, Homo sapien
gcgtccgaagtcagaagatatagta

SEQ ID NO: 5568266 - DNA, 25 bp, Homo sapien
actccagcagccaccagctagactt

SEQ ID NO: 5568267 - DNA, 25 bp, Homo sapien
gggcagaatgtcgctgcatacggac

SEQ ID NO: 5568268 - DNA, 25 bp, Homo sapien
gagcaccctgcttgacgagcaaggt

SEQ ID NO: 5568269 - DNA, 25 bp, Homo sapien
caccctccagagagctctgggcgcg

SEQ ID NO: 5568270 - DNA, 25 bp, Homo sapien
gcgggggtgcccaatttctctcact

SEQ ID NO: 5568271 - DNA, 25 bp, Homo sapien
tccacccctctcccgcataccccac

SEQ ID NO: 5568272 - DNA, 25 bp, Homo sapien
tctcacttggtgccccctcccctgg

SEQ ID NO: 5568273 - DNA, 25 bp, Homo sapien
agctcttgccccctggaaattattc

SEQ ID NO: 5568274 - DNA, 25 bp, Homo sapien
ctccacgcccgcagtacggcgtgcg

SEQ ID NO: 5568275 - DNA, 25 bp, Homo sapien
ccctcccctggctccgaagtagggc

SEQ ID NO: 5568276 - DNA, 25 bp, Homo sapien
cgggcttgcgcctccacgcccgcag

SEQ ID NO: 5568277 - DNA, 25 bp, Homo sapien
ctggaaattattccggtccaggggc

SEQ ID NO: 5568278 - DNA, 25 bp, Homo sapien
gagggcccttgcgtttggcctccac

SEQ ID NO: 5568279 - DNA, 25 bp, Homo sapien
taccccaccctccagagagctctgg

SEQ ID NO: 5568280 - DNA, 25 bp, Homo sapien
tctgtgcccccttgggaaacactgc

SEQ ID NO: 5568281 - DNA, 25 bp, Homo sapien
acaattccaatacccagctgtaccc

SEQ ID NO: 5568282 - DNA, 25 bp, Homo sapien
cctgccctgaagatagaagacaaaa

SEQ ID NO: 5568283 - DNA, 25 bp, Homo sapien
gccctccctctgtgcccccttggga

SEQ ID NO: 5568284 - DNA, 25 bp, Homo sapien
acgcgaggcataaccaaccattctt

SEQ ID NO: 5568285 - DNA, 25 bp, Homo sapien
caatacccagctgtaccctgccctg

SEQ ID NO: 5568286 - DNA, 25 bp, Homo sapien
tgggaaacactgcttggtacaattc

SEQ ID NO: 5568287 - DNA, 25 bp, Homo sapien
tctgtcactcacgcgaggcataacc

SEQ ID NO: 5568288 - DNA, 25 bp, Homo sapien
gaagacaaaaccctggctctgtcac

SEQ ID NO: 5568289 - DNA, 25 bp, Homo sapien
gtaccctgccctgaagatagaagac

SEQ ID NO: 5568290 - DNA, 25 bp, Homo sapien
cctggctctgtcactcacgcgaggc

SEQ ID NO: 5568291 - DNA, 25 bp, Homo sapien
gcaggacaccctgagcagtcctcca

SEQ ID NO: 5568292 - DNA, 25 bp, Homo sapien
tcaggggcttctccgcctctcgccc

SEQ ID NO: 5568293 - DNA, 25 bp, Homo sapien
tccttgcacgatgagccactaggca

SEQ ID NO: 5568294 - DNA, 25 bp, Homo sapien
cacgccctcgccccatctcatctcc

SEQ ID NO: 5568295 - DNA, 25 bp, Homo sapien
ctaaggaacctgatcctgcgcttcc

SEQ ID NO: 5568296 - DNA, 25 bp, Homo sapien
tcatctccaggactcgcctccctcc

SEQ ID NO: 5568297 - DNA, 25 bp, Homo sapien
gtctccctggtaacatcaacatcct

SEQ ID NO: 5568298 - DNA, 25 bp, Homo sapien
ttgcacacttctgccgcgagctacc

SEQ ID NO: 5568299 - DNA, 25 bp, Homo sapien
ccgcgagctaccctctaaggaacct

SEQ ID NO: 5568300 - DNA, 25 bp, Homo sapien
atcctgcgcttccacctcaccgttc

SEQ ID NO: 5568301 - DNA, 25 bp, Homo sapien
ctccacaattcatcctcaggggctt

SEQ ID NO: 5568302 - DNA, 25 bp, Homo sapien
gtgggttcagtttaataccgtgctc

SEQ ID NO: 5568303 - DNA, 25 bp, Homo sapien
aatctgtaaactacaggaacaggca

SEQ ID NO: 5568304 - DNA, 25 bp, Homo sapien
gacaaaggtgctaagcaaatagatg

SEQ ID NO: 5568305 - DNA, 25 bp, Homo sapien
aatgagttgactgtgctgcaacctc

SEQ ID NO: 5568306 - DNA, 25 bp, Homo sapien
tgcctagcaaccatggtggctcacc

SEQ ID NO: 5568307 - DNA, 25 bp, Homo sapien
aaaagcagcctaaatatatatcgtc

SEQ ID NO: 5568308 - DNA, 25 bp, Homo sapien
ataccgtgctctatcaacccgctct

SEQ ID NO: 5568309 - DNA, 25 bp, Homo sapien
taaatgtgccacacagaaaagcagc

SEQ ID NO: 5568310 - DNA, 25 bp, Homo sapien
atggtggctcaccccgagttcattt

SEQ ID NO: 5568311 - DNA, 25 bp, Homo sapien
ctgaacgactgcctcggaaatagtt

SEQ ID NO: 5568312 - DNA, 25 bp, Homo sapien
aagtaaaacaccaatgtgggttcag

SEQ ID NO: 5568313 - DNA, 25 bp, Homo sapien
atagccattcacgccaagtggggaa

SEQ ID NO: 5568314 - DNA, 25 bp, Homo sapien
aatcatcttcgatagcaggtgggtc

SEQ ID NO: 5568315 - DNA, 25 bp, Homo sapien
ctagaagccagcataagaaaacaaa

SEQ ID NO: 5568316 - DNA, 25 bp, Homo sapien
tgcaaagcacgactaagaatcatct

SEQ ID NO: 5568317 - DNA, 25 bp, Homo sapien
acagaagtcctcgaatatagttgcc

SEQ ID NO: 5568318 - DNA, 25 bp, Homo sapien
agttgccatcggaatacccaggagt

SEQ ID NO: 5568319 - DNA, 25 bp, Homo sapien
gtggggaaccagctgatcccaaaag

SEQ ID NO: 5568320 - DNA, 25 bp, Homo sapien
ctgatcccaaaagcccctagggaag

SEQ ID NO: 5568321 - DNA, 25 bp, Homo sapien
gtgtctgcggatgttgctacgtcca

SEQ ID NO: 5568322 - DNA, 25 bp, Homo sapien
cctagggttcatgtaggtgtctgcg

SEQ ID NO: 5568323 - DNA, 25 bp, Homo sapien
gatagcaggtgggtctttaatctac

SEQ ID NO: 5568324 - DNA, 25 bp, Homo sapien
tcggcgtctcgctcctgaccatagc

SEQ ID NO: 5568325 - DNA, 25 bp, Homo sapien
aacgacacaggcaaacccactcttc

SEQ ID NO: 5568326 - DNA, 25 bp, Homo sapien
acatgcctgtcttccgcgggctcga

SEQ ID NO: 5568327 - DNA, 25 bp, Homo sapien
agtagcatcgactgccgtccgtctc

SEQ ID NO: 5568328 - DNA, 25 bp, Homo sapien
gcgggctcgagttactgcccgggac

SEQ ID NO: 5568329 - DNA, 25 bp, Homo sapien
gtccgtctcggagccctctcgggaa

SEQ ID NO: 5568330 - DNA, 25 bp, Homo sapien
ggtggtggccgtcctctactgtttc

SEQ ID NO: 5568331 - DNA, 25 bp, Homo sapien
ccgccttggaaccaagcacaggtac

SEQ ID NO: 5568332 - DNA, 25 bp, Homo sapien
gccgagctctgccctgcgttcattc

SEQ ID NO: 5568333 - DNA, 25 bp, Homo sapien
cagcttccaaaccccgccgtccttc

SEQ ID NO: 5568334 - DNA, 25 bp, Homo sapien
gaggtaagttcatggccgccttgga

SEQ ID NO: 5568335 - DNA, 25 bp, Homo sapien
taagtgagaacatacaaggtctggt

SEQ ID NO: 5568336 - DNA, 25 bp, Homo sapien
agtgagaacatacaaggtctggttt

SEQ ID NO: 5568337 - DNA, 25 bp, Homo sapien
catccagcgttgccttgtgaatgcc

SEQ ID NO: 5568338 - DNA, 25 bp, Homo sapien
gcagtgtacacggcacccaatgtgt

SEQ ID NO: 5568339 - DNA, 25 bp, Homo sapien
aacctccatccagcgttgccttgtg

SEQ ID NO: 5568340 - DNA, 25 bp, Homo sapien
tgtacacggcacccaatgtgtagtc

SEQ ID NO: 5568341 - DNA, 25 bp, Homo sapien
cttttatccctcaaccccctctcac

SEQ ID NO: 5568342 - DNA, 25 bp, Homo sapien
gttacacaggtaagttcttcagtgg

SEQ ID NO: 5568343 - DNA, 25 bp, Homo sapien
tatgcctttgcttagctcccgctta

SEQ ID NO: 5568344 - DNA, 25 bp, Homo sapien
atccctcaaccccctctcacccctc

SEQ ID NO: 5568345 - DNA, 25 bp, Homo sapien
tttggttacacaggtaagttcttca

SEQ ID NO: 5568346 - DNA, 25 bp, Homo sapien
gtgttaggatctgggaagtcattcc

SEQ ID NO: 5568347 - DNA, 25 bp, Homo sapien
gggggaacaacttgaactgatgcaa

SEQ ID NO: 5568348 - DNA, 25 bp, Homo sapien
tagtatcaatatcagtgtggtccac

SEQ ID NO: 5568349 - DNA, 25 bp, Homo sapien
agtacaagatgaaagaagctgaata

SEQ ID NO: 5568350 - DNA, 25 bp, Homo sapien
aaccacaaatcaggagtcaggaagg

SEQ ID NO: 5568351 - DNA, 25 bp, Homo sapien
atcctaaatcccagtgggggaacaa

SEQ ID NO: 5568352 - DNA, 25 bp, Homo sapien
agtctgtgaactgttagtgacccac

SEQ ID NO: 5568353 - DNA, 25 bp, Homo sapien
gagtcaggaaggctatatttggttc

SEQ ID NO: 5568354 - DNA, 25 bp, Homo sapien
tgatgcaaggtataataaaccacaa

SEQ ID NO: 5568355 - DNA, 25 bp, Homo sapien
ttaaaagtgctgcgatataacctta

SEQ ID NO: 5568356 - DNA, 25 bp, Homo sapien
ctctgcagccagccattagtgcagc

SEQ ID NO: 5568357 - DNA, 25 bp, Homo sapien
tgaggtagacatggtttggtttttc

SEQ ID NO: 5568358 - DNA, 25 bp, Homo sapien
tccagctgctgtccagatggaagtt

SEQ ID NO: 5568359 - DNA, 25 bp, Homo sapien
cccacatcggcactctaagaattcc

SEQ ID NO: 5568360 - DNA, 25 bp, Homo sapien
tggaagctaacgaagatcccccttc

SEQ ID NO: 5568361 - DNA, 25 bp, Homo sapien
tccaggagatgtgtttggaagctaa

SEQ ID NO: 5568362 - DNA, 25 bp, Homo sapien
ggcactgagaaccctgtttgcatgt

SEQ ID NO: 5568363 - DNA, 25 bp, Homo sapien
acaaagaacagaatcaatacaggtc

SEQ ID NO: 5568364 - DNA, 25 bp, Homo sapien
tcgtggggaaaaactcttctgcctg

SEQ ID NO: 5568365 - DNA, 25 bp, Homo sapien
gggctcaggcccaactgcctgcacc

SEQ ID NO: 5568366 - DNA, 25 bp, Homo sapien
agcaaggtgagaaaattcaggcttt

SEQ ID NO: 5568367 - DNA, 25 bp, Homo sapien
atacaggtcaagaatgagtgacagg

SEQ ID NO: 5568368 - DNA, 25 bp, Homo sapien
ggatgtagtagggagctaatactta

SEQ ID NO: 5568369 - DNA, 25 bp, Homo sapien
acaaatggtacatcgtcaatgaccc

SEQ ID NO: 5568370 - DNA, 25 bp, Homo sapien
gtcaatgacccatcttcagagcact

SEQ ID NO: 5568371 - DNA, 25 bp, Homo sapien
ttggacgcaatacaacagaacagaa

SEQ ID NO: 5568372 - DNA, 25 bp, Homo sapien
accactgttagtgatgtaggactcc

SEQ ID NO: 5568373 - DNA, 25 bp, Homo sapien
gtagataaagtagacaggtacctcc

SEQ ID NO: 5568374 - DNA, 25 bp, Homo sapien
atgagaaagggagtcaccttttttg

SEQ ID NO: 5568375 - DNA, 25 bp, Homo sapien
cacatgtggataggaagtactttct

SEQ ID NO: 5568376 - DNA, 25 bp, Homo sapien
gtgatgtaggactcccgatggaatt

SEQ ID NO: 5568377 - DNA, 25 bp, Homo sapien
tcagagcactgtggtatgctaaatt

SEQ ID NO: 5568378 - DNA, 25 bp, Homo sapien
tagtttgcatggattagagaaagcc

SEQ ID NO: 5568379 - DNA, 25 bp, Homo sapien
cccctgctgtgtctcgatggcctga

SEQ ID NO: 5568380 - DNA, 25 bp, Homo sapien
actcaattggaaagaaaatctcctc

SEQ ID NO: 5568381 - DNA, 25 bp, Homo sapien
taaacaaatgaggcagtgaatgaat

SEQ ID NO: 5568382 - DNA, 25 bp, Homo sapien
tgaccggcgagtgccggtccagtca

SEQ ID NO: 5568383 - DNA, 25 bp, Homo sapien
ggcaaggcatgcattccctgcacac

SEQ ID NO: 5568384 - DNA, 25 bp, Homo sapien
gtgccggtccagtcagttctgagtc

SEQ ID NO: 5568385 - DNA, 25 bp, Homo sapien
taaaataccttcagaggcgagccag

SEQ ID NO: 5568386 - DNA, 25 bp, Homo sapien
agttaaaccaagagtcaggatttcc

SEQ ID NO: 5568387 - DNA, 25 bp, Homo sapien
aaaagtacaaataaggcacgcatta

SEQ ID NO: 5568388 - DNA, 25 bp, Homo sapien
gcacacaggagaagactcaattgga

SEQ ID NO: 5568389 - DNA, 25 bp, Homo sapien
tcagtggcatagagcaacagcataa

SEQ ID NO: 5568390 - DNA, 25 bp, Homo sapien
caaatgagacataaggtatagttcc

SEQ ID NO: 5568391 - DNA, 25 bp, Homo sapien
aataggttttactaggctgaatttc

SEQ ID NO: 5568392 - DNA, 25 bp, Homo sapien
gaataggcaaatgtgagacacagtg

SEQ ID NO: 5568393 - DNA, 25 bp, Homo sapien
agcctgccaggcacacaaataggtt

SEQ ID NO: 5568394 - DNA, 25 bp, Homo sapien
tgaagaaccccacataaagatggtc

SEQ ID NO: 5568395 - DNA, 25 bp, Homo sapien
atggatgaatttatggatgaaaggc

SEQ ID NO: 5568396 - DNA, 25 bp, Homo sapien
gtcagaatagtgattaactgggagg

SEQ ID NO: 5568397 - DNA, 25 bp, Homo sapien
tggatgaaaggcagtttgccagtcc

SEQ ID NO: 5568398 - DNA, 25 bp, Homo sapien
tgccagtcctctaccaagttgctat

SEQ ID NO: 5568399 - DNA, 25 bp, Homo sapien
cactgaatctcagcagcctgccagg

SEQ ID NO: 5568400 - DNA, 25 bp, Homo sapien
gttcaagaataggcaaatgtgagac

SEQ ID NO: 5568401 - DNA, 25 bp, Homo sapien
gaaggctacagggctttgtgtcctt

SEQ ID NO: 5568402 - DNA, 25 bp, Homo sapien
agcacttagggaatctgaaaaaata

SEQ ID NO: 5568403 - DNA, 25 bp, Homo sapien
ttccaagtgcccttaaaatgtactc

SEQ ID NO: 5568404 - DNA, 25 bp, Homo sapien
aatgcctccaagcagacaggatcta

SEQ ID NO: 5568405 - DNA, 25 bp, Homo sapien
atgtcagtcttaaatgaggagactg

SEQ ID NO: 5568406 - DNA, 25 bp, Homo sapien
taccttcttagccgagcctcccagt

SEQ ID NO: 5568407 - DNA, 25 bp, Homo sapien
tgaggagactgatgccatcacaaac

SEQ ID NO: 5568408 - DNA, 25 bp, Homo sapien
ggtacttaggagaatagatcccacc

SEQ ID NO: 5568409 - DNA, 25 bp, Homo sapien
tacagccttggtacttaggagaata

SEQ ID NO: 5568410 - DNA, 25 bp, Homo sapien
atgctttttccacttggggctgggg

SEQ ID NO: 5568411 - DNA, 25 bp, Homo sapien
taacttatggttctacagccttggt

SEQ ID NO: 5568412 - DNA, 25 bp, Homo sapien
tacaagaatggtaggcagtattgaa

SEQ ID NO: 5568413 - DNA, 25 bp, Homo sapien
atagggacatgatcatgctatgttg

SEQ ID NO: 5568414 - DNA, 25 bp, Homo sapien
gtattgaatggctagttgaagtttt

SEQ ID NO: 5568415 - DNA, 25 bp, Homo sapien
ttggactcctaggttcaggcaatcc

SEQ ID NO: 5568416 - DNA, 25 bp, Homo sapien
gcagattacaatagggctaaagaac

SEQ ID NO: 5568417 - DNA, 25 bp, Homo sapien
taccaatgttaagctactgaagttc

SEQ ID NO: 5568418 - DNA, 25 bp, Homo sapien
aaacaaggaaaacagtagtttgcag

SEQ ID NO: 5568419 - DNA, 25 bp, Homo sapien
agcaatggaagactcaggtaaatga

SEQ ID NO: 5568420 - DNA, 25 bp, Homo sapien
tgttttctcagttaagcagggaagg

SEQ ID NO: 5568421 - DNA, 25 bp, Homo sapien
actgtgcccagcggataccttctgt

SEQ ID NO: 5568422 - DNA, 25 bp, Homo sapien
agggctaaagaactgcagcaatgga

SEQ ID NO: 5568423 - DNA, 25 bp, Homo sapien
attggggctcaaaagatgtgttccc

SEQ ID NO: 5568424 - DNA, 25 bp, Homo sapien
aggcttcacatggaagtaagatggc

SEQ ID NO: 5568425 - DNA, 25 bp, Homo sapien
gaggtcaggaatcagaatatcagct

SEQ ID NO: 5568426 - DNA, 25 bp, Homo sapien
gtaagatggctatagctgctgcagc

SEQ ID NO: 5568427 - DNA, 25 bp, Homo sapien
gggcaactcatggccaaattggggc

SEQ ID NO: 5568428 - DNA, 25 bp, Homo sapien
tgccgtaagcatagtttgacctgtt

SEQ ID NO: 5568429 - DNA, 25 bp, Homo sapien
aaggaaagaggtttattaggctcac

SEQ ID NO: 5568430 - DNA, 25 bp, Homo sapien
gtcattatgcagtgtgtaagtgtac

SEQ ID NO: 5568431 - DNA, 25 bp, Homo sapien
gcattggtcaaaaggcaacaaattc

SEQ ID NO: 5568432 - DNA, 25 bp, Homo sapien
tcaagttcaagtacattaaggttca

SEQ ID NO: 5568433 - DNA, 25 bp, Homo sapien
cagctctctcatggaagcattggtc

SEQ ID NO: 5568434 - DNA, 25 bp, Homo sapien
acaaagacagaattaacaactggcc

SEQ ID NO: 5568435 - DNA, 25 bp, Homo sapien
agaaggtccaacataaggaaaaaga

SEQ ID NO: 5568436 - DNA, 25 bp, Homo sapien
agaaaaagacaactcacaaagacag

SEQ ID NO: 5568437 - DNA, 25 bp, Homo sapien
gtaccttgagattagaaggtccaac

SEQ ID NO: 5568438 - DNA, 25 bp, Homo sapien
aatcaaagacaaataggccaagtac

SEQ ID NO: 5568439 - DNA, 25 bp, Homo sapien
agattgaaaaattatgaactcgaaa

SEQ ID NO: 5568440 - DNA, 25 bp, Homo sapien
acaagcaaaataatcagagagacac

SEQ ID NO: 5568441 - DNA, 25 bp, Homo sapien
cagagagacacagacaaaacattga

SEQ ID NO: 5568442 - DNA, 25 bp, Homo sapien
caagattaacaatacaacagcactc

SEQ ID NO: 5568443 - DNA, 25 bp, Homo sapien
acaactggccaatcaacaagcaaaa

SEQ ID NO: 5568444 - DNA, 25 bp, Homo sapien
acaacagcactcagtggcgctgagg

SEQ ID NO: 5568445 - DNA, 25 bp, Homo sapien
ccaggatctcacagcaaagccatag

SEQ ID NO: 5568446 - DNA, 25 bp, Homo sapien
gtgagcgatgaagtcttcccaggtc

SEQ ID NO: 5568447 - DNA, 25 bp, Homo sapien
cccactgggcattaggcaaagtgag

SEQ ID NO: 5568448 - DNA, 25 bp, Homo sapien
tgaggctcagaagttacatggcttg

SEQ ID NO: 5568449 - DNA, 25 bp, Homo sapien
ccctgcctggcatgagctccttcag

SEQ ID NO: 5568450 - DNA, 25 bp, Homo sapien
ttcctttccgtggtgccgggtctga

SEQ ID NO: 5568451 - DNA, 25 bp, Homo sapien
tgccaggcacatcaaggacctgctc

SEQ ID NO: 5568452 - DNA, 25 bp, Homo sapien
tttggggattaattagccagactcc

SEQ ID NO: 5568453 - DNA, 25 bp, Homo sapien
tcacgctaaccctgtgaggtggcat

SEQ ID NO: 5568454 - DNA, 25 bp, Homo sapien
ttgtttactggacatggctggaagg

SEQ ID NO: 5568455 - DNA, 25 bp, Homo sapien
gtgccgggtctgatcagtcccactg

SEQ ID NO: 5568456 - DNA, 25 bp, Homo sapien
ggatccttactgagaagcagcaggc

SEQ ID NO: 5568457 - DNA, 25 bp, Homo sapien
attaaaaagctgaagtggcacatac

SEQ ID NO: 5568458 - DNA, 25 bp, Homo sapien
tttctgtcatagagaggcagatgac

SEQ ID NO: 5568459 - DNA, 25 bp, Homo sapien
agcttttattgtttgggatccttac

SEQ ID NO: 5568460 - DNA, 25 bp, Homo sapien
gtatcataagtacctacactgtttc

SEQ ID NO: 5568461 - DNA, 25 bp, Homo sapien
tttgggatccttactgagaagcagc

SEQ ID NO: 5568462 - DNA, 25 bp, Homo sapien
agcggcctacccacggtttgggata

SEQ ID NO: 5568463 - DNA, 25 bp, Homo sapien
cacggtttgggataatggactagtg

SEQ ID NO: 5568464 - DNA, 25 bp, Homo sapien
atggctcactgaataatagatgtta

SEQ ID NO: 5568465 - DNA, 25 bp, Homo sapien
gcagcaggcttcctctactgtcata

SEQ ID NO: 5568466 - DNA, 25 bp, Homo sapien
tggcaacaggcaagtccagctttta

SEQ ID NO: 5568467 - DNA, 25 bp, Homo sapien
ttgaccttgagtttcctgacagcga

SEQ ID NO: 5568468 - DNA, 25 bp, Homo sapien
atgttgtggttaatacagttatata

SEQ ID NO: 5568469 - DNA, 25 bp, Homo sapien
cacccccaaaacttagagtaagctg

SEQ ID NO: 5568470 - DNA, 25 bp, Homo sapien
aatagaaatatatgctcagtgttat

SEQ ID NO: 5568471 - DNA, 25 bp, Homo sapien
ttgcagttgctgtatttaaggaata

SEQ ID NO: 5568472 - DNA, 25 bp, Homo sapien
cgctcatgagcatagcagagataac

SEQ ID NO: 5568473 - DNA, 25 bp, Homo sapien
agttatataacgaatcacccccaaa

SEQ ID NO: 5568474 - DNA, 25 bp, Homo sapien
acaaccacttcttacgctcatgagc

SEQ ID NO: 5568475 - DNA, 25 bp, Homo sapien
taacacttaaggctattgcagttgc

SEQ ID NO: 5568476 - DNA, 25 bp, Homo sapien
tcctgacagcgaaggtaaaaatgga

SEQ ID NO: 5568477 - DNA, 25 bp, Homo sapien
aaacttagagtaagctgaaaacaac

SEQ ID NO: 5568478 - DNA, 25 bp, Homo sapien
gtcccggttgagacgaacagaaggt

SEQ ID NO: 5568479 - DNA, 25 bp, Homo sapien
accttctgttcgtctcaaccgggac

SEQ ID NO: 5568480 - DNA, 25 bp, Homo sapien
aacatataagcctctccccactacc

SEQ ID NO: 5568481 - DNA, 25 bp, Homo sapien
tacagcggtactttccctcccctca

SEQ ID NO: 5568482 - DNA, 25 bp, Homo sapien
attttgactcagaaaggttagccct

SEQ ID NO: 5568483 - DNA, 25 bp, Homo sapien
caacatacatgcattaggacttact

SEQ ID NO: 5568484 - DNA, 25 bp, Homo sapien
ggagcgtttgcctgatagggatttg

SEQ ID NO: 5568485 - DNA, 25 bp, Homo sapien
ctgggcgtatgtcaataagatcctg

SEQ ID NO: 5568486 - DNA, 25 bp, Homo sapien
ttcatacagagcttacagcggtact

SEQ ID NO: 5568487 - DNA, 25 bp, Homo sapien
taatgactccagaggaactgagact

SEQ ID NO: 5568488 - DNA, 25 bp, Homo sapien
gaatctacagcaaatataatgactc

SEQ ID NO: 5568489 - DNA, 25 bp, Homo sapien
tgctgagagcaatggaataacttca

SEQ ID NO: 5568490 - DNA, 25 bp, Homo sapien
ctgagactcctatcggaaacacacc

SEQ ID NO: 5568491 - DNA, 25 bp, Homo sapien
caccagggaaaggacctggttctca

SEQ ID NO: 5568492 - DNA, 25 bp, Homo sapien
cctggttctcagggcacattttgac

SEQ ID NO: 5568493 - DNA, 25 bp, Homo sapien
aggccctggttgcaccagggaaagg

SEQ ID NO: 5568494 - DNA, 25 bp, Homo sapien
ctctgggtcagcagttcttcctcag

SEQ ID NO: 5568495 - DNA, 25 bp, Homo sapien
tggttctcagggcacattttgactc

SEQ ID NO: 5568496 - DNA, 25 bp, Homo sapien
actttggagttgctctgggtcagca

SEQ ID NO: 5568497 - DNA, 25 bp, Homo sapien
gggaaggccctggttgcaccaggga

SEQ ID NO: 5568498 - DNA, 25 bp, Homo sapien
gtcagcagttcttcctcagacccca

SEQ ID NO: 5568499 - DNA, 25 bp, Homo sapien
ccagagatgcttgagataccacttt

SEQ ID NO: 5568500 - DNA, 25 bp, Homo sapien
ctgggtcagcagttcttcctcagac

SEQ ID NO: 5568501 - DNA, 25 bp, Homo sapien
ttctcagggcacattttgactcaga

SEQ ID NO: 5568502 - DNA, 25 bp, Homo sapien
tcagaaaagatagcgcttgtacacc

SEQ ID NO: 5568503 - DNA, 25 bp, Homo sapien
tcacatagtaagtggtagaaccagg

SEQ ID NO: 5568504 - DNA, 25 bp, Homo sapien
cacaactctaaagttggtggcgggg

SEQ ID NO: 5568505 - DNA, 25 bp, Homo sapien
gcctcttcctagaggagccggaagc

SEQ ID NO: 5568506 - DNA, 25 bp, Homo sapien
cggggagacctagcacccttctaga

SEQ ID NO: 5568507 - DNA, 25 bp, Homo sapien
tacaggtagtgtgctagtatgtcct

SEQ ID NO: 5568508 - DNA, 25 bp, Homo sapien
ttccagggccctagttcttaatgct

SEQ ID NO: 5568509 - DNA, 25 bp, Homo sapien
gagcctactgcgccctcaaaccccg

SEQ ID NO: 5568510 - DNA, 25 bp, Homo sapien
aaaaatgtcctgacgggatctaagt

SEQ ID NO: 5568511 - DNA, 25 bp, Homo sapien
ttaaggtaatgttgagcccacagtt

SEQ ID NO: 5568512 - DNA, 25 bp, Homo sapien
gagaaaattgagctgtagtgaagtt

SEQ ID NO: 5568513 - DNA, 25 bp, Homo sapien
taaagtaatgacaaagtaaagtatc

SEQ ID NO: 5568514 - DNA, 25 bp, Homo sapien
attctgtggagacctaggacttagt

SEQ ID NO: 5568515 - DNA, 25 bp, Homo sapien
tatagatttaatgggtcagaacaca

SEQ ID NO: 5568516 - DNA, 25 bp, Homo sapien
tagcagagatgtaaaattggtgaat

SEQ ID NO: 5568517 - DNA, 25 bp, Homo sapien
ttctaaatggcaggagttgtagcag

SEQ ID NO: 5568518 - DNA, 25 bp, Homo sapien
gatcatagaatcatggagctttaga

SEQ ID NO: 5568519 - DNA, 25 bp, Homo sapien
ggaagagcctgatacatcatctagt

SEQ ID NO: 5568520 - DNA, 25 bp, Homo sapien
taggacttagtattggtatgggatc

SEQ ID NO: 5568521 - DNA, 25 bp, Homo sapien
gggtcagaacacattaaagtggaaa

SEQ ID NO: 5568522 - DNA, 25 bp, Homo sapien
ttgaaagactatagggacattctgt

SEQ ID NO: 5568523 - DNA, 25 bp, Homo sapien
tttaaggcaaaacaagctataatat

SEQ ID NO: 5568524 - DNA, 25 bp, Homo sapien
ccaagccatggctctagcaacgttg

SEQ ID NO: 5568525 - DNA, 25 bp, Homo sapien
tgcaaatcagcaggttcaagaatcc

SEQ ID NO: 5568526 - DNA, 25 bp, Homo sapien
attacgtgctcaatagccaggcccg

SEQ ID NO: 5568527 - DNA, 25 bp, Homo sapien
agcccatgaccctgaactctgcctg

SEQ ID NO: 5568528 - DNA, 25 bp, Homo sapien
tgactgccctagcccatgaccctga

SEQ ID NO: 5568529 - DNA, 25 bp, Homo sapien
tagaactacaggtgaaatgcaaatc

SEQ ID NO: 5568530 - DNA, 25 bp, Homo sapien
caagaatcctacactcagagaccac

SEQ ID NO: 5568531 - DNA, 25 bp, Homo sapien
agcagaaggcaagttctagtgcatt

SEQ ID NO: 5568532 - DNA, 25 bp, Homo sapien
gcccgctagtgactagtggctgctg

SEQ ID NO: 5568533 - DNA, 25 bp, Homo sapien
agagaccactaggcatgactgccct

SEQ ID NO: 5568534 - DNA, 25 bp, Homo sapien
tgggacagcacagatctaaaccttg

SEQ ID NO: 5568535 - DNA, 25 bp, Homo sapien
gggataacagcccaggcaccaaatc

SEQ ID NO: 5568536 - DNA, 25 bp, Homo sapien
taccctaaggctaagatcaattaac

SEQ ID NO: 5568537 - DNA, 25 bp, Homo sapien
taacagaacccctgggataacagcc

SEQ ID NO: 5568538 - DNA, 25 bp, Homo sapien
gcccaggcaccaaatctggcacctc

SEQ ID NO: 5568539 - DNA, 25 bp, Homo sapien
gtcccgtgatcgcactaaacgtatt

SEQ ID NO: 5568540 - DNA, 25 bp, Homo sapien
tctgtcaagatgtgcctctccagcc

SEQ ID NO: 5568541 - DNA, 25 bp, Homo sapien
ctggcacctcagagtcgtccttgac

SEQ ID NO: 5568542 - DNA, 25 bp, Homo sapien
ccctcgagtcacaacgtcttcaacg

SEQ ID NO: 5568543 - DNA, 25 bp, Homo sapien
cctactcctttaagagggtcacctc

SEQ ID NO: 5568544 - DNA, 25 bp, Homo sapien
gggtcgcagaatccctcgagtcaca

SEQ ID NO: 5568545 - DNA, 25 bp, Homo sapien
cgtcttgtcagtcccgtgatcgcac

SEQ ID NO: 5568546 - DNA, 25 bp, Homo sapien
catcctccctagggcagggaattcc

SEQ ID NO: 5568547 - DNA, 25 bp, Homo sapien
ggctccagatgccgaaccccaccaa

SEQ ID NO: 5568548 - DNA, 25 bp, Homo sapien
gagggcctcatggtcggcctgtact

SEQ ID NO: 5568549 - DNA, 25 bp, Homo sapien
gcagtgcatccatcctccctagggc

SEQ ID NO: 5568550 - DNA, 25 bp, Homo sapien
gggcgaggtctaaccttgcgtctcc

SEQ ID NO: 5568551 - DNA, 25 bp, Homo sapien
tgcgtctcctcctaggcagtgcatc

SEQ ID NO: 5568552 - DNA, 25 bp, Homo sapien
tttgtgtgctcaggggtcccttgtt

SEQ ID NO: 5568553 - DNA, 25 bp, Homo sapien
agaaaataaaactgagctactatta

SEQ ID NO: 5568554 - DNA, 25 bp, Homo sapien
tcctaggcagtgcatccatcctccc

SEQ ID NO: 5568555 - DNA, 25 bp, Homo sapien
tgcagcactttgggcccccagtttc

SEQ ID NO: 5568556 - DNA, 25 bp, Homo sapien
gtgtgctcaggggtcccttgttttc

SEQ ID NO: 5568557 - DNA, 25 bp, Homo sapien
cccagctgaaaatcaggggcttgat

SEQ ID NO: 5568558 - DNA, 25 bp, Homo sapien
ggttaggcaatcagcagtcactgcc

SEQ ID NO: 5568559 - DNA, 25 bp, Homo sapien
catgactggagcatgtcgaatgttc

SEQ ID NO: 5568560 - DNA, 25 bp, Homo sapien
ctggccactgctcatccctgctaac

SEQ ID NO: 5568561 - DNA, 25 bp, Homo sapien
tcagtagtgtgcaacttggcctttc

SEQ ID NO: 5568562 - DNA, 25 bp, Homo sapien
agaaatccagaggataatgggtctg

SEQ ID NO: 5568563 - DNA, 25 bp, Homo sapien
tttctcgacccagaagctcaaggcg

SEQ ID NO: 5568564 - DNA, 25 bp, Homo sapien
ggtgcatggcagtctctcagtagtg

SEQ ID NO: 5568565 - DNA, 25 bp, Homo sapien
ggcgataacacacgtggagttgttc

SEQ ID NO: 5568566 - DNA, 25 bp, Homo sapien
gcatgtcgaatgttctgaggcctcc

SEQ ID NO: 5568567 - DNA, 25 bp, Homo sapien
agtcactgccgtggccatgactgga

SEQ ID NO: 5568568 - DNA, 25 bp, Homo sapien
ccttaaggcattgatttgtcatgag

SEQ ID NO: 5568569 - DNA, 25 bp, Homo sapien
ccctggaatgtggactgtctcagtg

SEQ ID NO: 5568570 - DNA, 25 bp, Homo sapien
ctttccctgactcccctgtgcccac

SEQ ID NO: 5568571 - DNA, 25 bp, Homo sapien
ttccagagtgcaatcaataacagtg

SEQ ID NO: 5568572 - DNA, 25 bp, Homo sapien
gaatgtggactgtctcagtggattc

SEQ ID NO: 5568573 - DNA, 25 bp, Homo sapien
ggtggaagaagctcattccagagtg

SEQ ID NO: 5568574 - DNA, 25 bp, Homo sapien
tgagaatgcactcactggctgttgc

SEQ ID NO: 5568575 - DNA, 25 bp, Homo sapien
gctgttgcagccaagactccagttc

SEQ ID NO: 5568576 - DNA, 25 bp, Homo sapien
catggataagtaaaactgaggcttg

SEQ ID NO: 5568577 - DNA, 25 bp, Homo sapien
gccaagactccagttctcgcctctc

SEQ ID NO: 5568578 - DNA, 25 bp, Homo sapien
tcatgagtctctttgttatagccac

SEQ ID NO: 5568579 - DNA, 25 bp, Homo sapien
tgatgtgtctgtctatgacgaggag

SEQ ID NO: 5568580 - DNA, 25 bp, Homo sapien
gtgcactatggactgttacaagaga

SEQ ID NO: 5568581 - DNA, 25 bp, Homo sapien
gaggacaatgtcctaaggaatggag

SEQ ID NO: 5568582 - DNA, 25 bp, Homo sapien
tatgacgaggaggacaatgtcctaa

SEQ ID NO: 5568583 - DNA, 25 bp, Homo sapien
tgtgtctgtctatgacgaggaggac

SEQ ID NO: 5568584 - DNA, 25 bp, Homo sapien
aagggaaccaggtccctggattcca

SEQ ID NO: 5568585 - DNA, 25 bp, Homo sapien
gcccaggatgtgcactatggactgt

SEQ ID NO: 5568586 - DNA, 25 bp, Homo sapien
caggtccctggattccatgtggaac

SEQ ID NO: 5568587 - DNA, 25 bp, Homo sapien
ctatggactgttacaagagagagac

SEQ ID NO: 5568588 - DNA, 25 bp, Homo sapien
tctgtctatgacgaggaggacaatg

SEQ ID NO: 5568589 - DNA, 25 bp, Homo sapien
gactgttacaagagagagacatgat

SEQ ID NO: 5568590 - DNA, 25 bp, Homo sapien
cttttccagctaagacaagtgcccc

SEQ ID NO: 5568591 - DNA, 25 bp, Homo sapien
aaatgtgtaggaattgttatggttt

SEQ ID NO: 5568592 - DNA, 25 bp, Homo sapien
tagacagaatgtaaagaccaagaga

SEQ ID NO: 5568593 - DNA, 25 bp, Homo sapien
atgtgttaactgaatgtaaactgac

SEQ ID NO: 5568594 - DNA, 25 bp, Homo sapien
gagaacagttaaatagtaaatgtgt

SEQ ID NO: 5568595 - DNA, 25 bp, Homo sapien
ctgtccatttggatgtgtgggaggt

SEQ ID NO: 5568596 - DNA, 25 bp, Homo sapien
acagagccacggtcagtttgtacat

SEQ ID NO: 5568597 - DNA, 25 bp, Homo sapien
gctaaaagccaggttaattctaatc

SEQ ID NO: 5568598 - DNA, 25 bp, Homo sapien
ttagcatcaacaagaaaaataatac

SEQ ID NO: 5568599 - DNA, 25 bp, Homo sapien
gtttgtacattaagcgtgcattcgc

SEQ ID NO: 5568600 - DNA, 25 bp, Homo sapien
agtgaaactcgtactgaaaggcatc

SEQ ID NO: 5568601 - DNA, 25 bp, Homo sapien
atgagagcttcaatttagtaagttc

SEQ ID NO: 5568602 - DNA, 25 bp, Homo sapien
aaagtagaagacatcggatcaaact

SEQ ID NO: 5568603 - DNA, 25 bp, Homo sapien
gttcaagcagatgctagcagagcag

SEQ ID NO: 5568604 - DNA, 25 bp, Homo sapien
tttactaaatatgtatgagagcttc

SEQ ID NO: 5568605 - DNA, 25 bp, Homo sapien
tacgagtattcaagaaaagattaga

SEQ ID NO: 5568606 - DNA, 25 bp, Homo sapien
gacttagtgaattgaacacatggtt

SEQ ID NO: 5568607 - DNA, 25 bp, Homo sapien
gcagatgctagcagagcagtaatca

SEQ ID NO: 5568608 - DNA, 25 bp, Homo sapien
cactgtcttcgtagatggcaggctt

SEQ ID NO: 5568609 - DNA, 25 bp, Homo sapien
aatttagtaagttcaagcagatgct

SEQ ID NO: 5568610 - DNA, 25 bp, Homo sapien
agaaatctgccctgtgaacttggta

SEQ ID NO: 5568611 - DNA, 25 bp, Homo sapien
gccctgtgaacttggtaaatgtaag

SEQ ID NO: 5568612 - DNA, 25 bp, Homo sapien
cctgggtccaggtttcggacatacc

SEQ ID NO: 5568613 - DNA, 25 bp, Homo sapien
ggtatgtccgaaacctggacccagg

SEQ ID NO: 5568614 - DNA, 25 bp, Homo sapien
cttattttaaaagcgcagctcccac

SEQ ID NO: 5568615 - DNA, 25 bp, Homo sapien
cctgggggactcttgctcagtagaa

SEQ ID NO: 5568616 - DNA, 25 bp, Homo sapien
cagtccctacagaagagacctgctc

SEQ ID NO: 5568617 - DNA, 25 bp, Homo sapien
tgacccaatgacttaatcctgctac

SEQ ID NO: 5568618 - DNA, 25 bp, Homo sapien
gctgccctctcttggcggcaccgtc

SEQ ID NO: 5568619 - DNA, 25 bp, Homo sapien
tgagattttctgatgacccaatgac

SEQ ID NO: 5568620 - DNA, 25 bp, Homo sapien
cgtcccaccccgcctgctgcactga

SEQ ID NO: 5568621 - DNA, 25 bp, Homo sapien
aaagctcttagcccaggatggctgc

SEQ ID NO: 5568622 - DNA, 25 bp, Homo sapien
ctcttgctcagtagaacccgaggcc

SEQ ID NO: 5568623 - DNA, 25 bp, Homo sapien
tccctgtgctgaggatccagggtgg

SEQ ID NO: 5568624 - DNA, 25 bp, Homo sapien
gaggccagcaaaagctcttagccca

SEQ ID NO: 5568625 - DNA, 25 bp, Homo sapien
aacacactgtcaagagaatgagaag

SEQ ID NO: 5568626 - DNA, 25 bp, Homo sapien
gaagacatacagatagcaaacaagc

SEQ ID NO: 5568627 - DNA, 25 bp, Homo sapien
aatatcctctgcagaacacactgtc

SEQ ID NO: 5568628 - DNA, 25 bp, Homo sapien
gggccaatggtataaacaggcacct

SEQ ID NO: 5568629 - DNA, 25 bp, Homo sapien
cttatagaggtgccctgattttgtt

SEQ ID NO: 5568630 - DNA, 25 bp, Homo sapien
tggtgcaaatgccaagcagtatacc

SEQ ID NO: 5568631 - DNA, 25 bp, Homo sapien
atgtcatcaggtaattggaaatcaa

SEQ ID NO: 5568632 - DNA, 25 bp, Homo sapien
acaggcaccttatcagagaagacat

SEQ ID NO: 5568633 - DNA, 25 bp, Homo sapien
ctgtagtatcatttgaagtggctat

SEQ ID NO: 5568634 - DNA, 25 bp, Homo sapien
tgtggagtaataggagctctcattc

SEQ ID NO: 5568635 - DNA, 25 bp, Homo sapien
tgcaagagacatacctaacaaaaga

SEQ ID NO: 5568636 - DNA, 25 bp, Homo sapien
agtcagtgtacagacaacgtgatcc

SEQ ID NO: 5568637 - DNA, 25 bp, Homo sapien
cttccgcaaagaaatgtacccaaaa

SEQ ID NO: 5568638 - DNA, 25 bp, Homo sapien
ttcaaagactctaagttggtatgtc

SEQ ID NO: 5568639 - DNA, 25 bp, Homo sapien
tttctaaaacagagcgggctgtgag

SEQ ID NO: 5568640 - DNA, 25 bp, Homo sapien
ttgccaaacttaagtcagtagcact

SEQ ID NO: 5568641 - DNA, 25 bp, Homo sapien
gggcaccaccctgccgtgaaccaca

SEQ ID NO: 5568642 - DNA, 25 bp, Homo sapien
ctaagttggtatgtcagtcagtgta

SEQ ID NO: 5568643 - DNA, 25 bp, Homo sapien
tctgcttttagtctgcggtggcacc

SEQ ID NO: 5568644 - DNA, 25 bp, Homo sapien
gccgtgaaccacatctcagccaatc

SEQ ID NO: 5568645 - DNA, 25 bp, Homo sapien
gctgtgaggagtgattttgccaaac

SEQ ID NO: 5568646 - DNA, 25 bp, Homo sapien
attcaggaaggtgatccacaccttc

SEQ ID NO: 5568647 - DNA, 25 bp, Homo sapien
ctcaagggtcctagaagcccctagg

SEQ ID NO: 5568648 - DNA, 25 bp, Homo sapien
attcagcatttggtggagtatgtta

SEQ ID NO: 5568649 - DNA, 25 bp, Homo sapien
gttcactcaagggtcctagaagccc

SEQ ID NO: 5568650 - DNA, 25 bp, Homo sapien
ggaaccctccaaatcatggcccaaa

SEQ ID NO: 5568651 - DNA, 25 bp, Homo sapien
tttcattttaaggtgggggatgtca

SEQ ID NO: 5568652 - DNA, 25 bp, Homo sapien
gggctcaagaagtcccaagagctct

SEQ ID NO: 5568653 - DNA, 25 bp, Homo sapien
agcatttggtggagtatgttaattc

SEQ ID NO: 5568654 - DNA, 25 bp, Homo sapien
caagaagtcccaagagctctcactg

SEQ ID NO: 5568655 - DNA, 25 bp, Homo sapien
gctctcactgttcactcaagggtcc

SEQ ID NO: 5568656 - DNA, 25 bp, Homo sapien
atagtaggtacttaagttattaatc

SEQ ID NO: 5568657 - DNA, 25 bp, Homo sapien
cccctactcccatgtaatcaagaag

SEQ ID NO: 5568658 - DNA, 25 bp, Homo sapien
ttattaagtgatagagaacactcaa

SEQ ID NO: 5568659 - DNA, 25 bp, Homo sapien
aactctaggacatgattgctgctgg

SEQ ID NO: 5568660 - DNA, 25 bp, Homo sapien
ctggtatttagcaaaaggctcgggt

SEQ ID NO: 5568661 - DNA, 25 bp, Homo sapien
tcagtctaacacaataaagggagat

SEQ ID NO: 5568662 - DNA, 25 bp, Homo sapien
ctaacacaataaagggagataccat

SEQ ID NO: 5568663 - DNA, 25 bp, Homo sapien
tagagaacactcaatatagcgattt

SEQ ID NO: 5568664 - DNA, 25 bp, Homo sapien
ttctgggatttaactctaggacatg

SEQ ID NO: 5568665 - DNA, 25 bp, Homo sapien
atggtttaacgtaattagctgattt

SEQ ID NO: 5568666 - DNA, 25 bp, Homo sapien
tgctgctggtatttagcaaaaggct

SEQ ID NO: 5568667 - DNA, 25 bp, Homo sapien
aggctcgggttcacacctagcgcta

SEQ ID NO: 5568668 - DNA, 25 bp, Homo sapien
acacctagcgctaataaaatgcttt

SEQ ID NO: 5568669 - DNA, 25 bp, Homo sapien
attaactcagaaagggacatgcaaa

SEQ ID NO: 5568670 - DNA, 25 bp, Homo sapien
taatgaggatatggctaactagaca

SEQ ID NO: 5568671 - DNA, 25 bp, Homo sapien
tctgcaagaaatatcaagagcatta

SEQ ID NO: 5568672 - DNA, 25 bp, Homo sapien
taaaagtgctaggagtattaaagct

SEQ ID NO: 5568673 - DNA, 25 bp, Homo sapien
attaaagctaataggaaaagtttca

SEQ ID NO: 5568674 - DNA, 25 bp, Homo sapien
cagataacactttaaacagggaagg

SEQ ID NO: 5568675 - DNA, 25 bp, Homo sapien
aacactactgaaaggaatgtaaatt

SEQ ID NO: 5568676 - DNA, 25 bp, Homo sapien
aaagggacatgcaaagattctaatc

SEQ ID NO: 5568677 - DNA, 25 bp, Homo sapien
caaacggtcccgattacactctcct

SEQ ID NO: 5568678 - DNA, 25 bp, Homo sapien
agaggaagaattagaggtaaatctt

SEQ ID NO: 5568679 - DNA, 25 bp, Homo sapien
tacattataggagccatacaaatat

SEQ ID NO: 5568680 - DNA, 25 bp, Homo sapien
gtcttgtgtgtcgatgactgaggat

SEQ ID NO: 5568681 - DNA, 25 bp, Homo sapien
ctgtgtccctgcctagtcacctgtc

SEQ ID NO: 5568682 - DNA, 25 bp, Homo sapien
gggcgggttttactcagcctgcgta

SEQ ID NO: 5568683 - DNA, 25 bp, Homo sapien
ccgccccagtctcccgagcggtcgt

SEQ ID NO: 5568684 - DNA, 25 bp, Homo sapien
gagcggtcgtgattccaagcccacg

SEQ ID NO: 5568685 - DNA, 25 bp, Homo sapien
agtcacctgtcttgtgtgtcgatga

SEQ ID NO: 5568686 - DNA, 25 bp, Homo sapien
tgtgtgtcgatgactgaggattcca

SEQ ID NO: 5568687 - DNA, 25 bp, Homo sapien
gtcgtgattccaagcccacgccacc

SEQ ID NO: 5568688 - DNA, 25 bp, Homo sapien
cgtgcccggcccagatcatcttttt

SEQ ID NO: 5568689 - DNA, 25 bp, Homo sapien
atagtgtttgatctgtgtccctgcc

SEQ ID NO: 5568690 - DNA, 25 bp, Homo sapien
aggacccggaaatagtgtttgatct

SEQ ID NO: 5568691 - DNA, 25 bp, Homo sapien
atgtcctttgcaaggcccagggtct

SEQ ID NO: 5568692 - DNA, 25 bp, Homo sapien
agactcctgggtccggtcacttctg

SEQ ID NO: 5568693 - DNA, 25 bp, Homo sapien
agtggcccaacttagaaatactaga

SEQ ID NO: 5568694 - DNA, 25 bp, Homo sapien
cattggtgatgtctactccctgtcc

SEQ ID NO: 5568695 - DNA, 25 bp, Homo sapien
gtccaaatggaactcagcagtcagc

SEQ ID NO: 5568696 - DNA, 25 bp, Homo sapien
aggtcagcagggaccaaatcctatc

SEQ ID NO: 5568697 - DNA, 25 bp, Homo sapien
actaagcctgttcctggtaccccaa

SEQ ID NO: 5568698 - DNA, 25 bp, Homo sapien
gctttgggataaaagagaatgtcct

SEQ ID NO: 5568699 - DNA, 25 bp, Homo sapien
ggtaccccaatatcactaagtggcc

SEQ ID NO: 5568700 - DNA, 25 bp, Homo sapien
tctgtgggtccactaagcctgttcc

SEQ ID NO: 5568701 - DNA, 25 bp, Homo sapien
tgtatcacggtggtttgttgtaccc

SEQ ID NO: 5568702 - DNA, 25 bp, Homo sapien
gcaaatgtagcgactggtgcacaag

SEQ ID NO: 5568703 - DNA, 25 bp, Homo sapien
gcacacatgggcttcctgttgggag

SEQ ID NO: 5568704 - DNA, 25 bp, Homo sapien
cttccacttgcaaatgtagcgactg

SEQ ID NO: 5568705 - DNA, 25 bp, Homo sapien
aagtgttcctatgcatatggggggt

SEQ ID NO: 5568706 - DNA, 25 bp, Homo sapien
gtgtcctctggccccgcacacatgg

SEQ ID NO: 5568707 - DNA, 25 bp, Homo sapien
gggattggaatcccatccagactcc

SEQ ID NO: 5568708 - DNA, 25 bp, Homo sapien
tgtcacctgtccttccaggcacagc

SEQ ID NO: 5568709 - DNA, 25 bp, Homo sapien
agcgactggtgcacaagtgttccta

SEQ ID NO: 5568710 - DNA, 25 bp, Homo sapien
gcagcccctgcctaaaaccccatga

SEQ ID NO: 5568711 - DNA, 25 bp, Homo sapien
ggtggtgctgttcccagaaaggaag

SEQ ID NO: 5568712 - DNA, 25 bp, Homo sapien
ctcttcacagaagcttagcgcctca

SEQ ID NO: 5568713 - DNA, 25 bp, Homo sapien
gcaggcccctgtaattagcacccac

SEQ ID NO: 5568714 - DNA, 25 bp, Homo sapien
tacttttctatgaaggcaggcccct

SEQ ID NO: 5568715 - DNA, 25 bp, Homo sapien
gctgagtgccagctctctgccatca

SEQ ID NO: 5568716 - DNA, 25 bp, Homo sapien
ccgtgcctccgatgctcacagaacc

SEQ ID NO: 5568717 - DNA, 25 bp, Homo sapien
atgctcctttgtcaggggtgagccc

SEQ ID NO: 5568718 - DNA, 25 bp, Homo sapien
gggatggctagaccctcacaagagc

SEQ ID NO: 5568719 - DNA, 25 bp, Homo sapien
ctttgcgcaagcagcactgagaaaa

SEQ ID NO: 5568720 - DNA, 25 bp, Homo sapien
gtgcagatgtgcgtttaacaaggac

SEQ ID NO: 5568721 - DNA, 25 bp, Homo sapien
gctgctgaaactcggccgcagtaac

SEQ ID NO: 5568722 - DNA, 25 bp, Homo sapien
cctaaccctccacaagggggcacag

SEQ ID NO: 5568723 - DNA, 25 bp, Homo sapien
agtgaagcccatctggctgagtgcc

SEQ ID NO: 5568724 - DNA, 25 bp, Homo sapien
ggagagatgttgaaagataaatcca

SEQ ID NO: 5568725 - DNA, 25 bp, Homo sapien
ccgtacattcgggattactcgccgc

SEQ ID NO: 5568726 - DNA, 25 bp, Homo sapien
agtctgctcactccaccgtacattc

SEQ ID NO: 5568727 - DNA, 25 bp, Homo sapien
attgtcttcaggacggccttcaggc

SEQ ID NO: 5568728 - DNA, 25 bp, Homo sapien
cagggcatctgtgatggagttcttt

SEQ ID NO: 5568729 - DNA, 25 bp, Homo sapien
aaaataaaccccgaccctgagctca

SEQ ID NO: 5568730 - DNA, 25 bp, Homo sapien
ttgaggcgttacaaagccaactagc

SEQ ID NO: 5568731 - DNA, 25 bp, Homo sapien
aaagataaatccacaggttaaaata

SEQ ID NO: 5568732 - DNA, 25 bp, Homo sapien
tagctgtgcttgtattagggtggag

SEQ ID NO: 5568733 - DNA, 25 bp, Homo sapien
attactcgccgcagcacggtttggg

SEQ ID NO: 5568734 - DNA, 25 bp, Homo sapien
gttattcgatccgaggggtcgatct

SEQ ID NO: 5568735 - DNA, 25 bp, Homo sapien
acctccctcaggagacactcaggct

SEQ ID NO: 5568736 - DNA, 25 bp, Homo sapien
tggagccctgaggcagtctccatcg

SEQ ID NO: 5568737 - DNA, 25 bp, Homo sapien
ttctgggcctgcacaagataaaagg

SEQ ID NO: 5568738 - DNA, 25 bp, Homo sapien
atcagcacacaattgtggggcacct

SEQ ID NO: 5568739 - DNA, 25 bp, Homo sapien
ggctgcgcactcacctggatgccag

SEQ ID NO: 5568740 - DNA, 25 bp, Homo sapien
tccatcgctgtggaccagtaaggaa

SEQ ID NO: 5568741 - DNA, 25 bp, Homo sapien
tctacccagcctgtgaggtcatcct

SEQ ID NO: 5568742 - DNA, 25 bp, Homo sapien
ggaccagtaaggaacctcatccctc

SEQ ID NO: 5568743 - DNA, 25 bp, Homo sapien
ggatctctgtcccaaaggcaggcca

SEQ ID NO: 5568744 - DNA, 25 bp, Homo sapien
cagtggaccaacagtcagtgctgaa

SEQ ID NO: 5568745 - DNA, 25 bp, Homo sapien
gcttggcttcatgcacgtgtggctg

SEQ ID NO: 5568746 - DNA, 25 bp, Homo sapien
gttctccagctgcgacctcccacgg

SEQ ID NO: 5568747 - DNA, 25 bp, Homo sapien
ctcataacaccagggaaacgggtgg

SEQ ID NO: 5568748 - DNA, 25 bp, Homo sapien
tttccaggtgttacatggagagggg

SEQ ID NO: 5568749 - DNA, 25 bp, Homo sapien
ctccccaacagcagcctgaggggtt

SEQ ID NO: 5568750 - DNA, 25 bp, Homo sapien
gaaaagactcaacaaggaccattat

SEQ ID NO: 5568751 - DNA, 25 bp, Homo sapien
gtctccacactatgggaagcacctc

SEQ ID NO: 5568752 - DNA, 25 bp, Homo sapien
gcccaagagtcaagtgtgtcctggc

SEQ ID NO: 5568753 - DNA, 25 bp, Homo sapien
tctgggacagttaaacttggaagcc

SEQ ID NO: 5568754 - DNA, 25 bp, Homo sapien
acatcagtgatgaatgcggaaaaga

SEQ ID NO: 5568755 - DNA, 25 bp, Homo sapien
agcagcagtcagtgtcagacaaaca

SEQ ID NO: 5568756 - DNA, 25 bp, Homo sapien
gacacatcgtgtgggccaacttgca

SEQ ID NO: 5568757 - DNA, 25 bp, Homo sapien
tgccgacgcattcaatctcttttcc

SEQ ID NO: 5568758 - DNA, 25 bp, Homo sapien
gctaaacaacaggaatacaaagact

SEQ ID NO: 5568759 - DNA, 25 bp, Homo sapien
cagtactatgctaaacaacaggaat

SEQ ID NO: 5568760 - DNA, 25 bp, Homo sapien
acaaagactgtcaagacatgtcccc

SEQ ID NO: 5568761 - DNA, 25 bp, Homo sapien
acatgtcccctgatctgaagaagct

SEQ ID NO: 5568762 - DNA, 25 bp, Homo sapien
ttgttcaggcctataaagttatctc

SEQ ID NO: 5568763 - DNA, 25 bp, Homo sapien
tgaataaaatgagcacaattctgct

SEQ ID NO: 5568764 - DNA, 25 bp, Homo sapien
acagacatccacatttgttaggcgc

SEQ ID NO: 5568765 - DNA, 25 bp, Homo sapien
tctttgagagcaggaactgcatctt

SEQ ID NO: 5568766 - DNA, 25 bp, Homo sapien
ctagtgtatggtatatggtaagtat

SEQ ID NO: 5568767 - DNA, 25 bp, Homo sapien
tagtatcagtataatacagacatcc

SEQ ID NO: 5568768 - DNA, 25 bp, Homo sapien
caaccaaggacaaatataaatgagt

SEQ ID NO: 5568769 - DNA, 25 bp, Homo sapien
agtatagagttgagcatatgtcttc

SEQ ID NO: 5568770 - DNA, 25 bp, Homo sapien
atggcagacctttggcaggatagta

SEQ ID NO: 5568771 - DNA, 25 bp, Homo sapien
tggtggggcacatacctgccttcca

SEQ ID NO: 5568772 - DNA, 25 bp, Homo sapien
accattacataagccagaaccacac

SEQ ID NO: 5568773 - DNA, 25 bp, Homo sapien
gactaagaagcatgcgagctacatc

SEQ ID NO: 5568774 - DNA, 25 bp, Homo sapien
gtttgtgagtgttagaaaagcaagc

SEQ ID NO: 5568775 - DNA, 25 bp, Homo sapien
atcaacatccctgggaagatgagaa

SEQ ID NO: 5568776 - DNA, 25 bp, Homo sapien
ggctgccttgcaatacctggtgggg

SEQ ID NO: 5568777 - DNA, 25 bp, Homo sapien
aaatgagtgctgaagatgaccttcc

SEQ ID NO: 5568778 - DNA, 25 bp, Homo sapien
ctggtggcaccataacattaacatc

SEQ ID NO: 5568779 - DNA, 25 bp, Homo sapien
tccgaatcaaccagacggtgagagc

SEQ ID NO: 5568780 - DNA, 25 bp, Homo sapien
actgaaatgctgtattagaggcctc

SEQ ID NO: 5568781 - DNA, 25 bp, Homo sapien
gtacatttacagcacctggccagcc

SEQ ID NO: 5568782 - DNA, 25 bp, Homo sapien
ctgtgaccctcagtggcccttgctg

SEQ ID NO: 5568783 - DNA, 25 bp, Homo sapien
aggttatgtgtcctgatgtggggct

SEQ ID NO: 5568784 - DNA, 25 bp, Homo sapien
tccaggacagtgcaaccacgtccga

SEQ ID NO: 5568785 - DNA, 25 bp, Homo sapien
agaggcctctggatcctgtatgttc

SEQ ID NO: 5568786 - DNA, 25 bp, Homo sapien
agaaatgcctcgactgggcagaatg

SEQ ID NO: 5568787 - DNA, 25 bp, Homo sapien
gttctatgcaaggttctcacgggtc

SEQ ID NO: 5568788 - DNA, 25 bp, Homo sapien
cttccaccgtgacccttgaacactc

SEQ ID NO: 5568789 - DNA, 25 bp, Homo sapien
tggggcttcacaaacatggtctctg

SEQ ID NO: 5568790 - DNA, 25 bp, Homo sapien
tcctgggacccggttaacacaggca

SEQ ID NO: 5568791 - DNA, 25 bp, Homo sapien
ctacagaattaagagatagggcctt

SEQ ID NO: 5568792 - DNA, 25 bp, Homo sapien
tgcactcatgtttgcaggggaaggg

SEQ ID NO: 5568793 - DNA, 25 bp, Homo sapien
gttaacacaggcagcccctgcactc

SEQ ID NO: 5568794 - DNA, 25 bp, Homo sapien
gtgagatcatgaggactccaccttc

SEQ ID NO: 5568795 - DNA, 25 bp, Homo sapien
cttaaagaaaaggctcaaggaagcc

SEQ ID NO: 5568796 - DNA, 25 bp, Homo sapien
aaaactacacagtgtgcagagcaga

SEQ ID NO: 5568797 - DNA, 25 bp, Homo sapien
atggaggacttctgctatggtgtga

SEQ ID NO: 5568798 - DNA, 25 bp, Homo sapien
ggtgtgaatgttgctgtctccccca

SEQ ID NO: 5568799 - DNA, 25 bp, Homo sapien
ctgggtctggatgcctcctttgcct

SEQ ID NO: 5568800 - DNA, 25 bp, Homo sapien
ggcaccttgatattgggcttcccag

SEQ ID NO: 5568801 - DNA, 25 bp, Homo sapien
gggtaaggatacatgcatagctcta

SEQ ID NO: 5568802 - DNA, 25 bp, Homo sapien
ccctgtctagggcaaggattccaaa

SEQ ID NO: 5568803 - DNA, 25 bp, Homo sapien
taagtttgacaattctagggccttg

SEQ ID NO: 5568804 - DNA, 25 bp, Homo sapien
acttgcatagagattccaggaacac

SEQ ID NO: 5568805 - DNA, 25 bp, Homo sapien
tctagggccttggtcttcaaaatga

SEQ ID NO: 5568806 - DNA, 25 bp, Homo sapien
cattttcccatgggggtaaggatac

SEQ ID NO: 5568807 - DNA, 25 bp, Homo sapien
tttaacaagcaaccctcatgatttt

SEQ ID NO: 5568808 - DNA, 25 bp, Homo sapien
aagatcagtctctgcacgtttggac

SEQ ID NO: 5568809 - DNA, 25 bp, Homo sapien
acatgcatacccttgagaacacacc

SEQ ID NO: 5568810 - DNA, 25 bp, Homo sapien
gtgttgtcctaaaatatgtgctctg

SEQ ID NO: 5568811 - DNA, 25 bp, Homo sapien
tctgatgaggcctcttcagatctac

SEQ ID NO: 5568812 - DNA, 25 bp, Homo sapien
ttctgctgttagcacaggacaattc

SEQ ID NO: 5568813 - DNA, 25 bp, Homo sapien
ggagtgctttcttgggaccctcgac

SEQ ID NO: 5568814 - DNA, 25 bp, Homo sapien
agcacaggacaattcttcaggtatc

SEQ ID NO: 5568815 - DNA, 25 bp, Homo sapien
gcaacatcttaagatagggagaaac

SEQ ID NO: 5568816 - DNA, 25 bp, Homo sapien
ctttggactgacacagttacccctc

SEQ ID NO: 5568817 - DNA, 25 bp, Homo sapien
agtgaatcatgttatgctggggtat

SEQ ID NO: 5568818 - DNA, 25 bp, Homo sapien
ctcgactgcagtgcaaatgtggcac

SEQ ID NO: 5568819 - DNA, 25 bp, Homo sapien
taccatggggtcaaatacaaaatag

SEQ ID NO: 5568820 - DNA, 25 bp, Homo sapien
gaatatgctgagaatgcaacatctt

SEQ ID NO: 5568821 - DNA, 25 bp, Homo sapien
ggagaaactagcctgaacagcctag

SEQ ID NO: 5568822 - DNA, 25 bp, Homo sapien
atgctggggtataaaacctagggtg

SEQ ID NO: 5568823 - DNA, 25 bp, Homo sapien
tcctagctcaaaatccatcctccac

SEQ ID NO: 5568824 - DNA, 25 bp, Homo sapien
tagaggcaatggattcaacaaattc

SEQ ID NO: 5568825 - DNA, 25 bp, Homo sapien
gaagtggggactgatttaacatcct

SEQ ID NO: 5568826 - DNA, 25 bp, Homo sapien
taacagaaatagtctgaaaggaaaa

SEQ ID NO: 5568827 - DNA, 25 bp, Homo sapien
tatcaggaaattagaggcaatggat

SEQ ID NO: 5568828 - DNA, 25 bp, Homo sapien
cctgctcagaatactacaatggcct

SEQ ID NO: 5568829 - DNA, 25 bp, Homo sapien
cactctactgatccaggccttcatc

SEQ ID NO: 5568830 - DNA, 25 bp, Homo sapien
ttcactcagagaagagtccaaattc

SEQ ID NO: 5568831 - DNA, 25 bp, Homo sapien
gagaagagtccaaattcctaggcat

SEQ ID NO: 5568832 - DNA, 25 bp, Homo sapien
caccaataaggattacactaaaaat

SEQ ID NO: 5568833 - DNA, 25 bp, Homo sapien
gtcacttccctgaagaagtggggac

SEQ ID NO: 5568834 - DNA, 25 bp, Homo sapien
tgagccacatcattcggttccaatc

SEQ ID NO: 5568835 - DNA, 25 bp, Homo sapien
accaggggcagctaacattttctcg

SEQ ID NO: 5568836 - DNA, 25 bp, Homo sapien
tgaagcaattcaccatgagctgtac

SEQ ID NO: 5568837 - DNA, 25 bp, Homo sapien
agctaacattttctcgaagggccag

SEQ ID NO: 5568838 - DNA, 25 bp, Homo sapien
ttcggttccaatcacagaatttgaa

SEQ ID NO: 5568839 - DNA, 25 bp, Homo sapien
acagaatttgaacaagcagcttcca

SEQ ID NO: 5568840 - DNA, 25 bp, Homo sapien
ttacctactctagaccaggggcagc

SEQ ID NO: 5568841 - DNA, 25 bp, Homo sapien
caaaaccatggtactgaagcaattc

SEQ ID NO: 5568842 - DNA, 25 bp, Homo sapien
catgagctgtacaatgagccacatc

SEQ ID NO: 5568843 - DNA, 25 bp, Homo sapien
cttaaaatgtatacaaggaaataaa

SEQ ID NO: 5568844 - DNA, 25 bp, Homo sapien
gaagggccagacgctaaatatttta

SEQ ID NO: 5568845 - DNA, 25 bp, Homo sapien
ctcgcgcccgcttctcccgctttac

SEQ ID NO: 5568846 - DNA, 25 bp, Homo sapien
attatgactcagcccagcccgttcc

SEQ ID NO: 5568847 - DNA, 25 bp, Homo sapien
ttacggctgctgaaaatccggcctg

SEQ ID NO: 5568848 - DNA, 25 bp, Homo sapien
gaacactgctgcccgcggctcttct

SEQ ID NO: 5568849 - DNA, 25 bp, Homo sapien
atggtgtaggaaatgctcatccagt

SEQ ID NO: 5568850 - DNA, 25 bp, Homo sapien
gaggcttgtgccattgaacactgct

SEQ ID NO: 5568851 - DNA, 25 bp, Homo sapien
tgccaagctccaaggtccatgaaat

SEQ ID NO: 5568852 - DNA, 25 bp, Homo sapien
tcagtaagatcagttatgggctatg

SEQ ID NO: 5568853 - DNA, 25 bp, Homo sapien
tatcttttgatgggcaccatggggg

SEQ ID NO: 5568854 - DNA, 25 bp, Homo sapien
tctgaaagaaaagatcagtaagatc

SEQ ID NO: 5568855 - DNA, 25 bp, Homo sapien
ccacttggctcgacaaacgcgtctt

SEQ ID NO: 5568856 - DNA, 25 bp, Homo sapien
gtctgttaaacgtggtccgtgcagt

SEQ ID NO: 5568857 - DNA, 25 bp, Homo sapien
ctggaccccttagcatgcgtgcggg

SEQ ID NO: 5568858 - DNA, 25 bp, Homo sapien
ctgttaaacgtggtccgtgcagtct

SEQ ID NO: 5568859 - DNA, 25 bp, Homo sapien
gcagcctttccgggcggctttgctg

SEQ ID NO: 5568860 - DNA, 25 bp, Homo sapien
ggctggagatgtttcgcattctttc

SEQ ID NO: 5568861 - DNA, 25 bp, Homo sapien
ctagagtgggtctggaccccttagc

SEQ ID NO: 5568862 - DNA, 25 bp, Homo sapien
gtccgtgcagtctgtggtgtcagaa

SEQ ID NO: 5568863 - DNA, 25 bp, Homo sapien
aaagtctgttaaacgtggtccgtgc

SEQ ID NO: 5568864 - DNA, 25 bp, Homo sapien
ccctagagtgggtctggacccctta

SEQ ID NO: 5568865 - DNA, 25 bp, Homo sapien
ccgtgcagtctgtggtgtcagaaga

SEQ ID NO: 5568866 - DNA, 25 bp, Homo sapien
tgggtctggaccccttagcatgcgt

SEQ ID NO: 5568867 - DNA, 25 bp, Homo sapien
caaggtcaccttaaagacaccccac

SEQ ID NO: 5568868 - DNA, 25 bp, Homo sapien
gacctccaaggatacatagaagctc

SEQ ID NO: 5568869 - DNA, 25 bp, Homo sapien
gggaagagatttgtcatgcctggcg

SEQ ID NO: 5568870 - DNA, 25 bp, Homo sapien
tgcgtgacctcaggaaaagcactca

SEQ ID NO: 5568871 - DNA, 25 bp, Homo sapien
gggacattaggactggacctccaag

SEQ ID NO: 5568872 - DNA, 25 bp, Homo sapien
aaaagccctggcattgtcctcccct

SEQ ID NO: 5568873 - DNA, 25 bp, Homo sapien
acaccccacgatgtggcaaagagac

SEQ ID NO: 5568874 - DNA, 25 bp, Homo sapien
tgcaaataggacataaaacagcttc

SEQ ID NO: 5568875 - DNA, 25 bp, Homo sapien
ctgttgggcccactgtgggaagaga

SEQ ID NO: 5568876 - DNA, 25 bp, Homo sapien
atctgcctccctgttgggcccactg

SEQ ID NO: 5568877 - DNA, 25 bp, Homo sapien
aaaagcactcagctctccaggtgtg

SEQ ID NO: 5568878 - DNA, 25 bp, Homo sapien
gtgcaatcttacaaggagagcagaa

SEQ ID NO: 5568879 - DNA, 25 bp, Homo sapien
ttggtgacatctagtggaagatctt

SEQ ID NO: 5568880 - DNA, 25 bp, Homo sapien
agagcagaaatcgcagcccttttct

SEQ ID NO: 5568881 - DNA, 25 bp, Homo sapien
ctctttggctgctggtaagcacgtg

SEQ ID NO: 5568882 - DNA, 25 bp, Homo sapien
atgcatctaataataggacctgccc

SEQ ID NO: 5568883 - DNA, 25 bp, Homo sapien
tctgagttagaaattccaaggccaa

SEQ ID NO: 5568884 - DNA, 25 bp, Homo sapien
acgaaatgatacccatgaaggactc

SEQ ID NO: 5568885 - DNA, 25 bp, Homo sapien
ttgcaaggaccaaacgaaatgatac

SEQ ID NO: 5568886 - DNA, 25 bp, Homo sapien
gtctgaccagctaacagtggccaca

SEQ ID NO: 5568887 - DNA, 25 bp, Homo sapien
ttcagcagtgtgatcacctccagct

SEQ ID NO: 5568888 - DNA, 25 bp, Homo sapien
cacgtgccatccgggaccctatatc

SEQ ID NO: 5568889 - DNA, 25 bp, Homo sapien
tcaaaacactaggttaatttgaaga

SEQ ID NO: 5568890 - DNA, 25 bp, Homo sapien
tcttcaaattaacctagtgttttga

SEQ ID NO: 5568891 - DNA, 25 bp, Homo sapien
tccttacatcctaaattgtatttaa

SEQ ID NO: 5568892 - DNA, 25 bp, Homo sapien
ttaaatacaatttaggatgtaagga

SEQ ID NO: 5568893 - DNA, 25 bp, Homo sapien
agccaagtacctgagggttggctcc

SEQ ID NO: 5568894 - DNA, 25 bp, Homo sapien
agtccctgacttttatagaggaaaa

SEQ ID NO: 5568895 - DNA, 25 bp, Homo sapien
gtaaatggcagcttcagtcctactc

SEQ ID NO: 5568896 - DNA, 25 bp, Homo sapien
aatagtgtagaagatgtgaattcat

SEQ ID NO: 5568897 - DNA, 25 bp, Homo sapien
tcacccatataaatcatagtccctg

SEQ ID NO: 5568898 - DNA, 25 bp, Homo sapien
tttttcaatagtgtagaagatgtga

SEQ ID NO: 5568899 - DNA, 25 bp, Homo sapien
tcatgctgcacttaacacaatacaa

SEQ ID NO: 5568900 - DNA, 25 bp, Homo sapien
gggagccctcttgcctgggccgtca

SEQ ID NO: 5568901 - DNA, 25 bp, Homo sapien
ctgggccgtcacattactcagagcc

SEQ ID NO: 5568902 - DNA, 25 bp, Homo sapien
agtcctactccaaaccttctcaccc

SEQ ID NO: 5568903 - DNA, 25 bp, Homo sapien
ttgttcctcattggcagtgggagcc

SEQ ID NO: 5568904 - DNA, 25 bp, Homo sapien
accctgtggttagaatatactttta

SEQ ID NO: 5568905 - DNA, 25 bp, Homo sapien
acgatgtgttaccctgtggttagaa

SEQ ID NO: 5568906 - DNA, 25 bp, Homo sapien
tccaaaagtcaagaagaataagatg

SEQ ID NO: 5568907 - DNA, 25 bp, Homo sapien
accgtccctttacatgacaggtgat

SEQ ID NO: 5568908 - DNA, 25 bp, Homo sapien
tccaccatccataccgtccctttac

SEQ ID NO: 5568909 - DNA, 25 bp, Homo sapien
tctggcagattccatcatcaatccc

SEQ ID NO: 5568910 - DNA, 25 bp, Homo sapien
agccacagcctttctaggccagaat

SEQ ID NO: 5568911 - DNA, 25 bp, Homo sapien
ccaaattcagtgcatttcatgatgt

SEQ ID NO: 5568912 - DNA, 25 bp, Homo sapien
catgacaggtgatatgcattacatc

SEQ ID NO: 5568913 - DNA, 25 bp, Homo sapien
cttttatgctgaaaaatgaagtcac

SEQ ID NO: 5568914 - DNA, 25 bp, Homo sapien
atcaatcccaacataagccacagcc

SEQ ID NO: 5568915 - DNA, 25 bp, Homo sapien
tggggtgtagacttcctctgaagct

SEQ ID NO: 5568916 - DNA, 25 bp, Homo sapien
gtgcccaacagactaccaataatta

SEQ ID NO: 5568917 - DNA, 25 bp, Homo sapien
ttaaatacagtgagccagctgcttt

SEQ ID NO: 5568918 - DNA, 25 bp, Homo sapien
agaaaatactaagcagcaataaaac

SEQ ID NO: 5568919 - DNA, 25 bp, Homo sapien
ttggctacaagtctgctacactgag

SEQ ID NO: 5568920 - DNA, 25 bp, Homo sapien
tgggtacattgtaagcagaagggaa

SEQ ID NO: 5568921 - DNA, 25 bp, Homo sapien
ggtgtcactgggatatgccagcacc

SEQ ID NO: 5568922 - DNA, 25 bp, Homo sapien
tgtgctaaacacatatcatgggtac

SEQ ID NO: 5568923 - DNA, 25 bp, Homo sapien
tcctctgaagctagatccacctatc

SEQ ID NO: 5568924 - DNA, 25 bp, Homo sapien
ctttcccaaatggtgcccaacagac

SEQ ID NO: 5568925 - DNA, 25 bp, Homo sapien
aataaaactgaaggtgtcactggga

SEQ ID NO: 5568926 - DNA, 25 bp, Homo sapien
tgtagaagacattatttacggtaag

SEQ ID NO: 5568927 - DNA, 25 bp, Homo sapien
aataaaagcagaattggcattgtgt

SEQ ID NO: 5568928 - DNA, 25 bp, Homo sapien
ttggcattgtgttagaatctgtgat

SEQ ID NO: 5568929 - DNA, 25 bp, Homo sapien
ttcactgagtagagaaaaagatttc

SEQ ID NO: 5568930 - DNA, 25 bp, Homo sapien
ataagtttaaagtgaaggggcttca

SEQ ID NO: 5568931 - DNA, 25 bp, Homo sapien
cctggaaaaatttcaacagagagtc

SEQ ID NO: 5568932 - DNA, 25 bp, Homo sapien
aatggagttgttattagaatgccaa

SEQ ID NO: 5568933 - DNA, 25 bp, Homo sapien
gattataaaaatggtcagctaatgc

SEQ ID NO: 5568934 - DNA, 25 bp, Homo sapien
gtataatgaataaagtgtagaagac

SEQ ID NO: 5568935 - DNA, 25 bp, Homo sapien
tgaaggggcttcatagcaagctttc

SEQ ID NO: 5568936 - DNA, 25 bp, Homo sapien
agtggtgggtcatgtccatcatttg

SEQ ID NO: 5568937 - DNA, 25 bp, Homo sapien
cagagactgcaaaaagatgtatgtg

SEQ ID NO: 5568938 - DNA, 25 bp, Homo sapien
ttttgactcagaaggcaaagggatt

SEQ ID NO: 5568939 - DNA, 25 bp, Homo sapien
agccaaatggcaggatgtacaatca

SEQ ID NO: 5568940 - DNA, 25 bp, Homo sapien
tatcaaaggcttttaggagaccagg

SEQ ID NO: 5568941 - DNA, 25 bp, Homo sapien
aaagggattaagagaacattgtatt

SEQ ID NO: 5568942 - DNA, 25 bp, Homo sapien
cacaaagctgcttcagagactgcaa

SEQ ID NO: 5568943 - DNA, 25 bp, Homo sapien
acaggcattcctaacagccagcctc

SEQ ID NO: 5568944 - DNA, 25 bp, Homo sapien
ttcatggcatggtcaatttccgttt

SEQ ID NO: 5568945 - DNA, 25 bp, Homo sapien
atgtgctggaatctgttacaggcat

SEQ ID NO: 5568946 - DNA, 25 bp, Homo sapien
agggaaagtctcctgaggcatccat

SEQ ID NO: 5568947 - DNA, 25 bp, Homo sapien
tacaatcacatgcagaagaaaatat

SEQ ID NO: 5568948 - DNA, 25 bp, Homo sapien
gagcttttcctttgagcagcatgtc

SEQ ID NO: 5568949 - DNA, 25 bp, Homo sapien
tttcagagctgggatgctcaaacct

SEQ ID NO: 5568950 - DNA, 25 bp, Homo sapien
taagatggaaggatgctccatcaac

SEQ ID NO: 5568951 - DNA, 25 bp, Homo sapien
agaggtaaatctgaatagaacaggc

SEQ ID NO: 5568952 - DNA, 25 bp, Homo sapien
tcccatgtacagggtgttacagttc

SEQ ID NO: 5568953 - DNA, 25 bp, Homo sapien
aaatccaaaatgctcaattgagctt

SEQ ID NO: 5568954 - DNA, 25 bp, Homo sapien
aatctgaatagaacaggcattcaca

SEQ ID NO: 5568955 - DNA, 25 bp, Homo sapien
cttatctaagaggtaaatctgaata

SEQ ID NO: 5568956 - DNA, 25 bp, Homo sapien
atgttgtttcctcccatgtacaggg

SEQ ID NO: 5568957 - DNA, 25 bp, Homo sapien
gtgttacagttcaaacatctcatcc

SEQ ID NO: 5568958 - DNA, 25 bp, Homo sapien
ggggtagctggaacaacttatctaa

SEQ ID NO: 5568959 - DNA, 25 bp, Homo sapien
ctgtacagaccaccctgcctgcagc

SEQ ID NO: 5568960 - DNA, 25 bp, Homo sapien
gggaaggttggagtctttacatagc

SEQ ID NO: 5568961 - DNA, 25 bp, Homo sapien
gttgtaggcaagtcagcaaatacct

SEQ ID NO: 5568962 - DNA, 25 bp, Homo sapien
gagcagagactgcccctcttggaac

SEQ ID NO: 5568963 - DNA, 25 bp, Homo sapien
tgtgaatattattggtggcggtagc

SEQ ID NO: 5568964 - DNA, 25 bp, Homo sapien
aatggctatagtaacaggatgcatc

SEQ ID NO: 5568965 - DNA, 25 bp, Homo sapien
cctcctagacttccagaccccgtgc

SEQ ID NO: 5568966 - DNA, 25 bp, Homo sapien
gctcgctgcttgggtctatgtctcc

SEQ ID NO: 5568967 - DNA, 25 bp, Homo sapien
aagtgtacgaacagcagcctatatc

SEQ ID NO: 5568968 - DNA, 25 bp, Homo sapien
agggacacatacagggtgaaatcta

SEQ ID NO: 5568969 - DNA, 25 bp, Homo sapien
agttgcagttgacttcagacactcc

SEQ ID NO: 5568970 - DNA, 25 bp, Homo sapien
ctaaaacagctgaaacactaacatt

SEQ ID NO: 5568971 - DNA, 25 bp, Homo sapien
aataaataactggatgaagtacatg

SEQ ID NO: 5568972 - DNA, 25 bp, Homo sapien
acaaggtgatagcttacttggtcac

SEQ ID NO: 5568973 - DNA, 25 bp, Homo sapien
atcacaaggtgatagcttacttggt

SEQ ID NO: 5568974 - DNA, 25 bp, Homo sapien
attgtatgagatagaaaaataaata

SEQ ID NO: 5568975 - DNA, 25 bp, Homo sapien
acttggtcacttactaaaacagctg

SEQ ID NO: 5568976 - DNA, 25 bp, Homo sapien
cagctgaaacactaacattcctggt

SEQ ID NO: 5568977 - DNA, 25 bp, Homo sapien
gaatgcagtatctccagttaacatt

SEQ ID NO: 5568978 - DNA, 25 bp, Homo sapien
aaaaactttgaaggacacgaagcga

SEQ ID NO: 5568979 - DNA, 25 bp, Homo sapien
attcctggtaagtgttaagtggtcc

SEQ ID NO: 5568980 - DNA, 25 bp, Homo sapien
aagtaaaactgatcattgtatgaga

SEQ ID NO: 5568981 - DNA, 25 bp, Homo sapien
gtggaaaacatacctgggcaagaaa

SEQ ID NO: 5568982 - DNA, 25 bp, Homo sapien
gtgtctgtgtccacaaaaatcctgc

SEQ ID NO: 5568983 - DNA, 25 bp, Homo sapien
aacatttcttacggatggctaccat

SEQ ID NO: 5568984 - DNA, 25 bp, Homo sapien
aaagaactgatattatgtggaaaac

SEQ ID NO: 5568985 - DNA, 25 bp, Homo sapien
aaacatacctgggcaagaaaagagt

SEQ ID NO: 5568986 - DNA, 25 bp, Homo sapien
ccaacatggatgccagaaacttcca

SEQ ID NO: 5568987 - DNA, 25 bp, Homo sapien
aatgacagtgttttatagagaacta

SEQ ID NO: 5568988 - DNA, 25 bp, Homo sapien
tggatgccagaaacttccatcgacc

SEQ ID NO: 5568989 - DNA, 25 bp, Homo sapien
gagacatgtgagtgttttggtttac

SEQ ID NO: 5568990 - DNA, 25 bp, Homo sapien
taagattagtagaatgaaaaaggca

SEQ ID NO: 5568991 - DNA, 25 bp, Homo sapien
aaggcacctgcggtctcctctattt

SEQ ID NO: 5568992 - DNA, 25 bp, Homo sapien
gagtctcaaggtctaggaaagcctc

SEQ ID NO: 5568993 - DNA, 25 bp, Homo sapien
tgtaaagtacagcacttcatagagt

SEQ ID NO: 5568994 - DNA, 25 bp, Homo sapien
aagcctccctcacaacctgagctgc

SEQ ID NO: 5568995 - DNA, 25 bp, Homo sapien
cccaaactgagctagaacataattc

SEQ ID NO: 5568996 - DNA, 25 bp, Homo sapien
ttctcacagggagataatcataaaa

SEQ ID NO: 5568997 - DNA, 25 bp, Homo sapien
taaagagctgacaataaatacgagt

SEQ ID NO: 5568998 - DNA, 25 bp, Homo sapien
attctggctctgctagtacatcttc

SEQ ID NO: 5568999 - DNA, 25 bp, Homo sapien
aatcataaaaacgactgtaaagtac

SEQ ID NO: 5569000 - DNA, 25 bp, Homo sapien
gtatctgtgatagagttcctggtac

SEQ ID NO: 5569001 - DNA, 25 bp, Homo sapien
tatgaatattaggcagattgcaacc

SEQ ID NO: 5569002 - DNA, 25 bp, Homo sapien
attgcaaccttgacaggccactgcc

SEQ ID NO: 5569003 - DNA, 25 bp, Homo sapien
tgcttgagttgggtgcttgctctat

SEQ ID NO: 5569004 - DNA, 25 bp, Homo sapien
tcaagatctgaacccaagcagtctc

SEQ ID NO: 5569005 - DNA, 25 bp, Homo sapien
gaataaagggcagaatcaagatctg

SEQ ID NO: 5569006 - DNA, 25 bp, Homo sapien
tgtattaaacagcatagcaggcagt

SEQ ID NO: 5569007 - DNA, 25 bp, Homo sapien
tccacaacatagaataaagggcaga

SEQ ID NO: 5569008 - DNA, 25 bp, Homo sapien
acaggaagaagccagttggtttctt

SEQ ID NO: 5569009 - DNA, 25 bp, Homo sapien
aggcacagcacaatgtaatatattc

SEQ ID NO: 5569010 - DNA, 25 bp, Homo sapien
gccttggcaataaagcttcccggga

SEQ ID NO: 5569011 - DNA, 25 bp, Homo sapien
tgggatgctgtgctaaaactcagaa

SEQ ID NO: 5569012 - DNA, 25 bp, Homo sapien
catagcaggcagttcttgcaacaac

SEQ ID NO: 5569013 - DNA, 25 bp, Homo sapien
tcctctggtggaaatatcaataaac

SEQ ID NO: 5569014 - DNA, 25 bp, Homo sapien
gtagtatcttcgagcctccgagaac

SEQ ID NO: 5569015 - DNA, 25 bp, Homo sapien
gttctcggaggctcgaagatactac

SEQ ID NO: 5569016 - DNA, 25 bp, Homo sapien
gtgatgaggaaaacagttctgttac

SEQ ID NO: 5569017 - DNA, 25 bp, Homo sapien
aaattcaaaacactagcatgcacat

SEQ ID NO: 5569018 - DNA, 25 bp, Homo sapien
gtgaaaaagtttataagacgattgc

SEQ ID NO: 5569019 - DNA, 25 bp, Homo sapien
ttgttgtaagaattggtaacgataa

SEQ ID NO: 5569020 - DNA, 25 bp, Homo sapien
tctgttacgtaaaaactgtgttgaa

SEQ ID NO: 5569021 - DNA, 25 bp, Homo sapien
agtatctgaaaaatgagttacataa

SEQ ID NO: 5569022 - DNA, 25 bp, Homo sapien
agcatgcacattaacaactgatttc

SEQ ID NO: 5569023 - DNA, 25 bp, Homo sapien
aagacgattgccttataatagtacc

SEQ ID NO: 5569024 - DNA, 25 bp, Homo sapien
ctgtgttgaaaacaaagaaaacaaa

SEQ ID NO: 5569025 - DNA, 25 bp, Homo sapien
tctaatagtgatgaggaaaacagtt

SEQ ID NO: 5569026 - DNA, 25 bp, Homo sapien
caacattactggtaggtaacatctc

SEQ ID NO: 5569027 - DNA, 25 bp, Homo sapien
gtcaagttacaccgacagaggtcac

SEQ ID NO: 5569028 - DNA, 25 bp, Homo sapien
tcctggggaaacagcatattgtgga

SEQ ID NO: 5569029 - DNA, 25 bp, Homo sapien
catcactgctacaccaacatgggcc

SEQ ID NO: 5569030 - DNA, 25 bp, Homo sapien
aaacacttggctagaaaaactgaaa

SEQ ID NO: 5569031 - DNA, 25 bp, Homo sapien
ttagaaattgtcaagttacaccgac

SEQ ID NO: 5569032 - DNA, 25 bp, Homo sapien
aagttacaccgacagaggtcacaga

SEQ ID NO: 5569033 - DNA, 25 bp, Homo sapien
acttggctagaaaaactgaaaagga

SEQ ID NO: 5569034 - DNA, 25 bp, Homo sapien
caccaacatgggccctacagggtgg

SEQ ID NO: 5569035 - DNA, 25 bp, Homo sapien
tacaccaacatgggccctacagggt

SEQ ID NO: 5569036 - DNA, 25 bp, Homo sapien
actgctacaccaacatgggccctac

SEQ ID NO: 5569037 - DNA, 25 bp, Homo sapien
aagccatcactgctacaccaacatg

SEQ ID NO: 5569038 - DNA, 25 bp, Homo sapien
agtgctccacctaaactttgggtta

SEQ ID NO: 5569039 - DNA, 25 bp, Homo sapien
tcatatctatgttgggagggcacaa

SEQ ID NO: 5569040 - DNA, 25 bp, Homo sapien
tgggttaaattaggcttcagcagta

SEQ ID NO: 5569041 - DNA, 25 bp, Homo sapien
tcagcagtattccataggtcttctc

SEQ ID NO: 5569042 - DNA, 25 bp, Homo sapien
aggcttcagcagtattccataggtc

SEQ ID NO: 5569043 - DNA, 25 bp, Homo sapien
aaatttaaagtgtttgcagccatat

SEQ ID NO: 5569044 - DNA, 25 bp, Homo sapien
actttgggttaaattaggcttcagc

SEQ ID NO: 5569045 - DNA, 25 bp, Homo sapien
aagcacaaagtgctccacctaaact

SEQ ID NO: 5569046 - DNA, 25 bp, Homo sapien
gagctcaggcaatctacctccctca

SEQ ID NO: 5569047 - DNA, 25 bp, Homo sapien
gagaaaaacataacacttcctagac

SEQ ID NO: 5569048 - DNA, 25 bp, Homo sapien
taaagtgtttgcagccatatgaaag

SEQ ID NO: 5569049 - DNA, 25 bp, Homo sapien
gtcctcgtcaagtctttaaggtcct

SEQ ID NO: 5569050 - DNA, 25 bp, Homo sapien
aggaccttaaagacttgacgaggac

SEQ ID NO: 5569051 - DNA, 25 bp, Homo sapien
tcgtggaccttatacgtacgtaaca

SEQ ID NO: 5569052 - DNA, 25 bp, Homo sapien
tgttacgtacgtataaggtccacga

SEQ ID NO: 5569053 - DNA, 25 bp, Homo sapien
tcaagcccagacttggatctgttgt

SEQ ID NO: 5569054 - DNA, 25 bp, Homo sapien
gacctaagcatcaaaattaatcatc

SEQ ID NO: 5569055 - DNA, 25 bp, Homo sapien
tatggccccttcttcctatatctgg

SEQ ID NO: 5569056 - DNA, 25 bp, Homo sapien
ttcagcagacggtattttcttatgc

SEQ ID NO: 5569057 - DNA, 25 bp, Homo sapien
tagaatggactctgacctaagcatc

SEQ ID NO: 5569058 - DNA, 25 bp, Homo sapien
gatctgttgtctgaattccaagctt

SEQ ID NO: 5569059 - DNA, 25 bp, Homo sapien
tgtccctctttcagcagacggtatt

SEQ ID NO: 5569060 - DNA, 25 bp, Homo sapien
ttgagatcaagcccagacttggatc

SEQ ID NO: 5569061 - DNA, 25 bp, Homo sapien
ttcaacatcaaaacactagcttgag

SEQ ID NO: 5569062 - DNA, 25 bp, Homo sapien
agatatcctagaatggactctgacc

SEQ ID NO: 5569063 - DNA, 25 bp, Homo sapien
ctatatctggtagcttttaaatgat

SEQ ID NO: 5569064 - DNA, 25 bp, Homo sapien
aaattgagatggttgccaagagcaa

SEQ ID NO: 5569065 - DNA, 25 bp, Homo sapien
acttgactgtgcttcagaggaaggc

SEQ ID NO: 5569066 - DNA, 25 bp, Homo sapien
aggcaaggctgccctgaacactgaa

SEQ ID NO: 5569067 - DNA, 25 bp, Homo sapien
gcagagtatactcagcctgaccccc

SEQ ID NO: 5569068 - DNA, 25 bp, Homo sapien
tacacagaccagccacaggtttgtc

SEQ ID NO: 5569069 - DNA, 25 bp, Homo sapien
actgaaagtacagtgccttctggga

SEQ ID NO: 5569070 - DNA, 25 bp, Homo sapien
gcagagctctgcagagtatactcag

SEQ ID NO: 5569071 - DNA, 25 bp, Homo sapien
agtttactgcaggatgtagggatag

SEQ ID NO: 5569072 - DNA, 25 bp, Homo sapien
gccaagagcaacttgactgtgcttc

SEQ ID NO: 5569073 - DNA, 25 bp, Homo sapien
aggcagctttcaatagggttatgat

SEQ ID NO: 5569074 - DNA, 25 bp, Homo sapien
tgactaagtattttgggataagaac

SEQ ID NO: 5569075 - DNA, 25 bp, Homo sapien
aggagaatttcaaggaaaggaagaa

SEQ ID NO: 5569076 - DNA, 25 bp, Homo sapien
ttgcacattaagcctggactaactc

SEQ ID NO: 5569077 - DNA, 25 bp, Homo sapien
taagaatgatccccagagaaataat

SEQ ID NO: 5569078 - DNA, 25 bp, Homo sapien
acacctactggaacttaaataagca

SEQ ID NO: 5569079 - DNA, 25 bp, Homo sapien
agagctaaatctgcatgagcattcc

SEQ ID NO: 5569080 - DNA, 25 bp, Homo sapien
ggaaaggaagaaatatctacaagta

SEQ ID NO: 5569081 - DNA, 25 bp, Homo sapien
ccctgcagaagcaaagatgacctat

SEQ ID NO: 5569082 - DNA, 25 bp, Homo sapien
gaggctcatctagaatggcagacca

SEQ ID NO: 5569083 - DNA, 25 bp, Homo sapien
ggcagaccagctttgaaacatcatc

SEQ ID NO: 5569084 - DNA, 25 bp, Homo sapien
tctaaagactgttgtcaagacatac

SEQ ID NO: 5569085 - DNA, 25 bp, Homo sapien
ttcagtatgggttagcatgcttgat

SEQ ID NO: 5569086 - DNA, 25 bp, Homo sapien
tccatagtggccaagttcgccatcc

SEQ ID NO: 5569087 - DNA, 25 bp, Homo sapien
ggacaagcatgccctcaccagtgtg

SEQ ID NO: 5569088 - DNA, 25 bp, Homo sapien
gcccttgactcctgggatggcagag

SEQ ID NO: 5569089 - DNA, 25 bp, Homo sapien
tttgtaaagcttagcgtggcacagg

SEQ ID NO: 5569090 - DNA, 25 bp, Homo sapien
aaacgagtaaaagtccaactcctgc

SEQ ID NO: 5569091 - DNA, 25 bp, Homo sapien
acctgctcccggcaagaataggtga

SEQ ID NO: 5569092 - DNA, 25 bp, Homo sapien
tagagtacctgctcccggcaagaat

SEQ ID NO: 5569093 - DNA, 25 bp, Homo sapien
ccgaatggacccttagagtacctgc

SEQ ID NO: 5569094 - DNA, 25 bp, Homo sapien
cagcgcccttgactcctgggatggc

SEQ ID NO: 5569095 - DNA, 25 bp, Homo sapien
ccaagttcgccatccgtcggcgggc

SEQ ID NO: 5569096 - DNA, 25 bp, Homo sapien
taaaagtccaactcctgccaggatg

SEQ ID NO: 5569097 - DNA, 25 bp, Homo sapien
cggatgccctaccctcttccccacc

SEQ ID NO: 5569098 - DNA, 25 bp, Homo sapien
gactacaagtgtgtgtcacaacacc

SEQ ID NO: 5569099 - DNA, 25 bp, Homo sapien
ggaccagcccacatccttgccgcca

SEQ ID NO: 5569100 - DNA, 25 bp, Homo sapien
tgaacttcacggatgccctaccctc

SEQ ID NO: 5569101 - DNA, 25 bp, Homo sapien
gtgggtgccgccccattgaacttca

SEQ ID NO: 5569102 - DNA, 25 bp, Homo sapien
ctcaagccatcatcttgcctcggcc

SEQ ID NO: 5569103 - DNA, 25 bp, Homo sapien
gtgtgtcacaacaccagggttgggc

SEQ ID NO: 5569104 - DNA, 25 bp, Homo sapien
cttccacccaaagtgggaagggaga

SEQ ID NO: 5569105 - DNA, 25 bp, Homo sapien
ccacatccttgccgccagtcatgat

SEQ ID NO: 5569106 - DNA, 25 bp, Homo sapien
gcctcaacttccacccaaagtggga

SEQ ID NO: 5569107 - DNA, 25 bp, Homo sapien
gagcacattccccagcccttcagga

SEQ ID NO: 5569108 - DNA, 25 bp, Homo sapien
gtctctgatccaatgactggcatcc

SEQ ID NO: 5569109 - DNA, 25 bp, Homo sapien
tcctcaaaccatgcgatcaatcctg

SEQ ID NO: 5569110 - DNA, 25 bp, Homo sapien
ccagaacctcagaatgtgggtttat

SEQ ID NO: 5569111 - DNA, 25 bp, Homo sapien
gagtcctcaggtatccagcatgtgt

SEQ ID NO: 5569112 - DNA, 25 bp, Homo sapien
gggtcaatgctcccaccatggccac

SEQ ID NO: 5569113 - DNA, 25 bp, Homo sapien
ccatggccacttgaaggctaccagt

SEQ ID NO: 5569114 - DNA, 25 bp, Homo sapien
atcctgaaaatgagtgtcctgtgtt

SEQ ID NO: 5569115 - DNA, 25 bp, Homo sapien
tcctggattaaggtggtctctgatc

SEQ ID NO: 5569116 - DNA, 25 bp, Homo sapien
cagatttaagaagagatgtcaccat

SEQ ID NO: 5569117 - DNA, 25 bp, Homo sapien
aatttggacacagagcatctcagaa

SEQ ID NO: 5569118 - DNA, 25 bp, Homo sapien
gccaaatagcatgcccacccagaac

SEQ ID NO: 5569119 - DNA, 25 bp, Homo sapien
caagttgctggcaatgcgcaattat

SEQ ID NO: 5569120 - DNA, 25 bp, Homo sapien
aaacgtctaaacaggcgccaagttg

SEQ ID NO: 5569121 - DNA, 25 bp, Homo sapien
gcgccaagttgctggcaatgcgcaa

SEQ ID NO: 5569122 - DNA, 25 bp, Homo sapien
ctctgggactgacggctgtcagtca

SEQ ID NO: 5569123 - DNA, 25 bp, Homo sapien
gacggctgtcagtcagtcgtgactt

SEQ ID NO: 5569124 - DNA, 25 bp, Homo sapien
ctgacggctgtcagtcagtcgtgac

SEQ ID NO: 5569125 - DNA, 25 bp, Homo sapien
gctggcaatgcgcaattatttcctt

SEQ ID NO: 5569126 - DNA, 25 bp, Homo sapien
tctaaacaggcgccaagttgctggc

SEQ ID NO: 5569127 - DNA, 25 bp, Homo sapien
aataaaaacgtctaaacaggcgcca

SEQ ID NO: 5569128 - DNA, 25 bp, Homo sapien
tgggactgacggctgtcagtcagtc

SEQ ID NO: 5569129 - DNA, 25 bp, Homo sapien
tgacaccattacaacttcaaataca

SEQ ID NO: 5569130 - DNA, 25 bp, Homo sapien
catagtttaatcagcagaggccttc

SEQ ID NO: 5569131 - DNA, 25 bp, Homo sapien
aagcagctagatggtagaatatgtc

SEQ ID NO: 5569132 - DNA, 25 bp, Homo sapien
tagggaatacctagagaaaaagaga

SEQ ID NO: 5569133 - DNA, 25 bp, Homo sapien
tttacgatgaaagcactagggaata

SEQ ID NO: 5569134 - DNA, 25 bp, Homo sapien
acactaacaacaagggtcagaagct

SEQ ID NO: 5569135 - DNA, 25 bp, Homo sapien
acaatggacagagttctagaatcta

SEQ ID NO: 5569136 - DNA, 25 bp, Homo sapien
tgctaaaagtacctttgggaggtga

SEQ ID NO: 5569137 - DNA, 25 bp, Homo sapien
agctgctggccaacccaaatctccc

SEQ ID NO: 5569138 - DNA, 25 bp, Homo sapien
tagaaaacaatcacatggtactcac

SEQ ID NO: 5569139 - DNA, 25 bp, Homo sapien
gaaggttctagactaaggtacacac

SEQ ID NO: 5569140 - DNA, 25 bp, Homo sapien
gcagaggccttcgacttgtagccct

SEQ ID NO: 5569141 - DNA, 25 bp, Homo sapien
ctccagtctggaagacaaagctagg

SEQ ID NO: 5569142 - DNA, 25 bp, Homo sapien
agccatgatcacaccaccacactcc

SEQ ID NO: 5569143 - DNA, 25 bp, Homo sapien
tgatatgtagagatggtggacatca

SEQ ID NO: 5569144 - DNA, 25 bp, Homo sapien
ccagctattcaggagactgaggagg

SEQ ID NO: 5569145 - DNA, 25 bp, Homo sapien
ggaagacaaagctaggccctgtctc

SEQ ID NO: 5569146 - DNA, 25 bp, Homo sapien
taaattactaaaactcagcacatct

SEQ ID NO: 5569147 - DNA, 25 bp, Homo sapien
ctcaaaagaaaaaaagtacaatcaa

SEQ ID NO: 5569148 - DNA, 25 bp, Homo sapien
ttgtcttagaaacaacgaaaattca

SEQ ID NO: 5569149 - DNA, 25 bp, Homo sapien
aaaagtaatttctgagatcctgtat

SEQ ID NO: 5569150 - DNA, 25 bp, Homo sapien
agcacatctggaaattctgaatact

SEQ ID NO: 5569151 - DNA, 25 bp, Homo sapien
ggacatcaccacacgtatagaaagg

SEQ ID NO: 5569152 - DNA, 25 bp, Homo sapien
tcaggtgaccagtctttcccggctg

SEQ ID NO: 5569153 - DNA, 25 bp, Homo sapien
gagtgcagtgaggacttccaatctc

SEQ ID NO: 5569154 - DNA, 25 bp, Homo sapien
gatcatgctttggaagtgaaggaga

SEQ ID NO: 5569155 - DNA, 25 bp, Homo sapien
atccctcaggcagataagggaatcc

SEQ ID NO: 5569156 - DNA, 25 bp, Homo sapien
tctgagtcctgacactgagcaactc

SEQ ID NO: 5569157 - DNA, 25 bp, Homo sapien
aagggaatcccagagagatcccctg

SEQ ID NO: 5569158 - DNA, 25 bp, Homo sapien
aggaggtcatgccagtcacatttct

SEQ ID NO: 5569159 - DNA, 25 bp, Homo sapien
gagatcccctggccaaagatcatgc

SEQ ID NO: 5569160 - DNA, 25 bp, Homo sapien
agacatgtgagttctgaggccctct

SEQ ID NO: 5569161 - DNA, 25 bp, Homo sapien
ttcccggctgtttgaagagattcct

SEQ ID NO: 5569162 - DNA, 25 bp, Homo sapien
gtctctagaagaatggacaacagcc

SEQ ID NO: 5569163 - DNA, 25 bp, Homo sapien
gagcacgcagctttgggctgcagaa

SEQ ID NO: 5569164 - DNA, 25 bp, Homo sapien
aagaaacaacatagccactgcagag

SEQ ID NO: 5569165 - DNA, 25 bp, Homo sapien
ttgggctgcagaagtccatctggaa

SEQ ID NO: 5569166 - DNA, 25 bp, Homo sapien
cagagattcacagcaggctgaacac

SEQ ID NO: 5569167 - DNA, 25 bp, Homo sapien
cccctactcaaggggcacatggcac

SEQ ID NO: 5569168 - DNA, 25 bp, Homo sapien
acaacacaaaacagatgtcccctac

SEQ ID NO: 5569169 - DNA, 25 bp, Homo sapien
tggcacacagggaatagatgcctca

SEQ ID NO: 5569170 - DNA, 25 bp, Homo sapien
atctagatggacaacaacttcagcc

SEQ ID NO: 5569171 - DNA, 25 bp, Homo sapien
attgtgtgccaggttccattctaat

SEQ ID NO: 5569172 - DNA, 25 bp, Homo sapien
aatgatagtaaagttgtagaccacc

SEQ ID NO: 5569173 - DNA, 25 bp, Homo sapien
attctaatgctggagacacagacaa

SEQ ID NO: 5569174 - DNA, 25 bp, Homo sapien
tcccacaccggaaaatcccaccgtg

SEQ ID NO: 5569175 - DNA, 25 bp, Homo sapien
cacggtgggattttccggtgtggga

SEQ ID NO: 5569176 - DNA, 25 bp, Homo sapien
tactggatgaaagatttagaagctc

SEQ ID NO: 5569177 - DNA, 25 bp, Homo sapien
gagaagagagacaaagatatttaaa

SEQ ID NO: 5569178 - DNA, 25 bp, Homo sapien
agaaggaatagaagttgaaactaac

SEQ ID NO: 5569179 - DNA, 25 bp, Homo sapien
aatgaaacacacagtaacaaatgac

SEQ ID NO: 5569180 - DNA, 25 bp, Homo sapien
atggaatccctgaagggcgtgtagt

SEQ ID NO: 5569181 - DNA, 25 bp, Homo sapien
attgcagaagagaagattattgaac

SEQ ID NO: 5569182 - DNA, 25 bp, Homo sapien
ccagtatagggctaaatggaatccc

SEQ ID NO: 5569183 - DNA, 25 bp, Homo sapien
taagaacaagaaacatgaagaaaac

SEQ ID NO: 5569184 - DNA, 25 bp, Homo sapien
aaggcagtggattaaacattgcaga

SEQ ID NO: 5569185 - DNA, 25 bp, Homo sapien
aaaacataaaaagaccattggcatc

SEQ ID NO: 5569186 - DNA, 25 bp, Homo sapien
aacttcaccaaggaacgccttaatc

SEQ ID NO: 5569187 - DNA, 25 bp, Homo sapien
ccgcagaggcctttaaacgcgtggg

SEQ ID NO: 5569188 - DNA, 25 bp, Homo sapien
agtgttttttcgagagccgggatgt

SEQ ID NO: 5569189 - DNA, 25 bp, Homo sapien
ttgtgcgagccccttgccccctaaa

SEQ ID NO: 5569190 - DNA, 25 bp, Homo sapien
aaaggccacctcttgcgcggtcttg

SEQ ID NO: 5569191 - DNA, 25 bp, Homo sapien
cccagtaggttacccggctgcctgg

SEQ ID NO: 5569192 - DNA, 25 bp, Homo sapien
tgggcgcagactgctctcgcttcca

SEQ ID NO: 5569193 - DNA, 25 bp, Homo sapien
ctaaaggatgcttgcagtgactcac

SEQ ID NO: 5569194 - DNA, 25 bp, Homo sapien
cgtccctaaacgttgccgcagaggc

SEQ ID NO: 5569195 - DNA, 25 bp, Homo sapien
aggagagcgcatcttcgcccttgtg

SEQ ID NO: 5569196 - DNA, 25 bp, Homo sapien
atcgcccgcctgaggtttgtgctga

SEQ ID NO: 5569197 - DNA, 25 bp, Homo sapien
tgcccctctgtaacgcggggaagta

SEQ ID NO: 5569198 - DNA, 25 bp, Homo sapien
tatatcctactcaaaatccgagaag

SEQ ID NO: 5569199 - DNA, 25 bp, Homo sapien
cttctcggattttgagtaggatata

SEQ ID NO: 5569200 - DNA, 25 bp, Homo sapien
attacaggtgtaagttgctgagtcc

SEQ ID NO: 5569201 - DNA, 25 bp, Homo sapien
actttgatagatataggggaggttt

SEQ ID NO: 5569202 - DNA, 25 bp, Homo sapien
aagccacaagatatatgagaaggtt

SEQ ID NO: 5569203 - DNA, 25 bp, Homo sapien
ttgagaacagtctagttgattcccc

SEQ ID NO: 5569204 - DNA, 25 bp, Homo sapien
acatacaaataagctgcagttcaac

SEQ ID NO: 5569205 - DNA, 25 bp, Homo sapien
agtggtaaagctggtcacaatttaa

SEQ ID NO: 5569206 - DNA, 25 bp, Homo sapien
atataggggaggtttgttctaagaa

SEQ ID NO: 5569207 - DNA, 25 bp, Homo sapien
gcaatttgaacagtagcttagtgtc

SEQ ID NO: 5569208 - DNA, 25 bp, Homo sapien
gactgcaggtatgcatgaccacacc

SEQ ID NO: 5569209 - DNA, 25 bp, Homo sapien
agcttagtgtcttttgagaacagtc

SEQ ID NO: 5569210 - DNA, 25 bp, Homo sapien
tgctgagtccagcctacagttacat

SEQ ID NO: 5569211 - DNA, 25 bp, Homo sapien
tagtaggcagaaggtcaactacttc

SEQ ID NO: 5569212 - DNA, 25 bp, Homo sapien
ggagtgtcacctgatagaaaaggca

SEQ ID NO: 5569213 - DNA, 25 bp, Homo sapien
cctcaaaacaatccgctgatgtgga

SEQ ID NO: 5569214 - DNA, 25 bp, Homo sapien
ataatatggctagtaggcagaaggt

SEQ ID NO: 5569215 - DNA, 25 bp, Homo sapien
gacagattagtaaaacaactctgac

SEQ ID NO: 5569216 - DNA, 25 bp, Homo sapien
tagcataaggcatataaataacgta

SEQ ID NO: 5569217 - DNA, 25 bp, Homo sapien
gggtgacagcagcaatatgcataaa

SEQ ID NO: 5569218 - DNA, 25 bp, Homo sapien
ggaataagtggagtgtcacctgata

SEQ ID NO: 5569219 - DNA, 25 bp, Homo sapien
tgtgttggactcaatgcaaagccct

SEQ ID NO: 5569220 - DNA, 25 bp, Homo sapien
aataacgtattaagggtgacagcag

SEQ ID NO: 5569221 - DNA, 25 bp, Homo sapien
caacctgtgcagattaagagagaag

SEQ ID NO: 5569222 - DNA, 25 bp, Homo sapien
tgagagttaaataaggaccccaata

SEQ ID NO: 5569223 - DNA, 25 bp, Homo sapien
accttagcaccagagaaattgtttc

SEQ ID NO: 5569224 - DNA, 25 bp, Homo sapien
gaaaatgcacaaaagcctacagttc

SEQ ID NO: 5569225 - DNA, 25 bp, Homo sapien
aaaatggaacacaaagatctggatg

SEQ ID NO: 5569226 - DNA, 25 bp, Homo sapien
tgcatttatcctgagcagaactgct

SEQ ID NO: 5569227 - DNA, 25 bp, Homo sapien
ctgatatggagtatagtaagaaaag

SEQ ID NO: 5569228 - DNA, 25 bp, Homo sapien
tagcactagaccatgttcctgaaaa

SEQ ID NO: 5569229 - DNA, 25 bp, Homo sapien
catgggttaccctgatatggagtat

SEQ ID NO: 5569230 - DNA, 25 bp, Homo sapien
attagtaaaagtggcttcaatggat

SEQ ID NO: 5569231 - DNA, 25 bp, Homo sapien
tcaatggatagttgaatctgctatt

SEQ ID NO: 5569232 - DNA, 25 bp, Homo sapien
aaaataattgcacgccatgggttac

SEQ ID NO: 5569233 - DNA, 25 bp, Homo sapien
aaaacaagtgaaagaagcagccttg

SEQ ID NO: 5569234 - DNA, 25 bp, Homo sapien
tcagcaaccccaagtggtatgcttc

SEQ ID NO: 5569235 - DNA, 25 bp, Homo sapien
tcttgcaaactgatgggaagacctt

SEQ ID NO: 5569236 - DNA, 25 bp, Homo sapien
tcacgaggtctgaagacatccattt

SEQ ID NO: 5569237 - DNA, 25 bp, Homo sapien
tcactactctgaacaaggattcccc

SEQ ID NO: 5569238 - DNA, 25 bp, Homo sapien
gaggacaaaacaactcagcaacccc

SEQ ID NO: 5569239 - DNA, 25 bp, Homo sapien
tattaaaatgcttgcgaggctggtc

SEQ ID NO: 5569240 - DNA, 25 bp, Homo sapien
tttgggaggtgtctatgctttaagc

SEQ ID NO: 5569241 - DNA, 25 bp, Homo sapien
gcaggttagtaaaatgaagcagtat

SEQ ID NO: 5569242 - DNA, 25 bp, Homo sapien
tggtctgggagttccagctccatca

SEQ ID NO: 5569243 - DNA, 25 bp, Homo sapien
gatatgcccacagttcacgaggtct

SEQ ID NO: 5569244 - DNA, 25 bp, Homo sapien
gaaaggaggaacaaaactgtatcta

SEQ ID NO: 5569245 - DNA, 25 bp, Homo sapien
agagtgtctcaggccaggtaattac

SEQ ID NO: 5569246 - DNA, 25 bp, Homo sapien
ttaaacctcagactcaggcctttcc

SEQ ID NO: 5569247 - DNA, 25 bp, Homo sapien
acaccacaggtctagagcttgggag

SEQ ID NO: 5569248 - DNA, 25 bp, Homo sapien
agagaatgtgaatctagatacagcc

SEQ ID NO: 5569249 - DNA, 25 bp, Homo sapien
ccgaagcctacaatgctccaggtcc

SEQ ID NO: 5569250 - DNA, 25 bp, Homo sapien
tgacacctgccctacaacctactct

SEQ ID NO: 5569251 - DNA, 25 bp, Homo sapien
catatctcagttcagaccagccaca

SEQ ID NO: 5569252 - DNA, 25 bp, Homo sapien
tactcttctggagtaggaggtagag

SEQ ID NO: 5569253 - DNA, 25 bp, Homo sapien
ggtggagccaaaaaggtgctccgaa

SEQ ID NO: 5569254 - DNA, 25 bp, Homo sapien
ctgccatattggacaccacaggtct

SEQ ID NO: 5569255 - DNA, 25 bp, Homo sapien
ctctgtcctctgagaaagtcaggaa

SEQ ID NO: 5569256 - DNA, 25 bp, Homo sapien
aataagacatatgagatggaaaagc

SEQ ID NO: 5569257 - DNA, 25 bp, Homo sapien
gcccagaaggagttacacaatgaaa

SEQ ID NO: 5569258 - DNA, 25 bp, Homo sapien
gctcatccagcgaagctatgctggc

SEQ ID NO: 5569259 - DNA, 25 bp, Homo sapien
gaagcaaagtatctttaggagggag

SEQ ID NO: 5569260 - DNA, 25 bp, Homo sapien
aagcagaaacttaacagggaggctt

SEQ ID NO: 5569261 - DNA, 25 bp, Homo sapien
agaggaacttcaaaagtgaaaggat

SEQ ID NO: 5569262 - DNA, 25 bp, Homo sapien
gtatctacactggcccagaggaact

SEQ ID NO: 5569263 - DNA, 25 bp, Homo sapien
aaaattattcatgagctgccccgcc

SEQ ID NO: 5569264 - DNA, 25 bp, Homo sapien
tgaaacaaagtatctacactggccc

SEQ ID NO: 5569265 - DNA, 25 bp, Homo sapien
tctggaaagcagtcactgcacacaa

SEQ ID NO: 5569266 - DNA, 25 bp, Homo sapien
cggacctgctgccaagtcttaagtc

SEQ ID NO: 5569267 - DNA, 25 bp, Homo sapien
taggattgaaagaaccgattagccc

SEQ ID NO: 5569268 - DNA, 25 bp, Homo sapien
tcacacacctgagcagttcctatcc

SEQ ID NO: 5569269 - DNA, 25 bp, Homo sapien
gaagggacacaccttgtgctcgagt

SEQ ID NO: 5569270 - DNA, 25 bp, Homo sapien
ggcacagtcggacctgctgccaagt

SEQ ID NO: 5569271 - DNA, 25 bp, Homo sapien
tgaactaccccaatgtgaacacttt

SEQ ID NO: 5569272 - DNA, 25 bp, Homo sapien
gtatgttaggtgcttggttgatgtg

SEQ ID NO: 5569273 - DNA, 25 bp, Homo sapien
agcagttcctatcctgaaagggcac

SEQ ID NO: 5569274 - DNA, 25 bp, Homo sapien
tctgcatggtatttcctcccagtga

SEQ ID NO: 5569275 - DNA, 25 bp, Homo sapien
tttgctatataatgagagtactttc

SEQ ID NO: 5569276 - DNA, 25 bp, Homo sapien
cacaccttgtgctcgagtctctttc

SEQ ID NO: 5569277 - DNA, 25 bp, Homo sapien
agctgctagaactatcataaggacc

SEQ ID NO: 5569278 - DNA, 25 bp, Homo sapien
tgacaccagaaaagacctgggttca

SEQ ID NO: 5569279 - DNA, 25 bp, Homo sapien
caagagcaaaggttttgacaccaga

SEQ ID NO: 5569280 - DNA, 25 bp, Homo sapien
tacagtcggcactctggcccacctt

SEQ ID NO: 5569281 - DNA, 25 bp, Homo sapien
ccagtccaatggagttccttcgctc

SEQ ID NO: 5569282 - DNA, 25 bp, Homo sapien
tccaagttggagacatgttccccct

SEQ ID NO: 5569283 - DNA, 25 bp, Homo sapien
ctgtgcacagtgaacaagagcaaag

SEQ ID NO: 5569284 - DNA, 25 bp, Homo sapien
cgctccacaaaggcagatgctgcta

SEQ ID NO: 5569285 - DNA, 25 bp, Homo sapien
ctatcataaggaccagaaaaggcaa

SEQ ID NO: 5569286 - DNA, 25 bp, Homo sapien
gcacagtgcttaccacatagggagc

SEQ ID NO: 5569287 - DNA, 25 bp, Homo sapien
taccacatagggagcgctccacaaa

SEQ ID NO: 5569288 - DNA, 25 bp, Homo sapien
agcagcaaaccttagagaaggaaac

SEQ ID NO: 5569289 - DNA, 25 bp, Homo sapien
ctgctctccccggagaaggaaacac

SEQ ID NO: 5569290 - DNA, 25 bp, Homo sapien
gacccacgatcccctgctctccctg

SEQ ID NO: 5569291 - DNA, 25 bp, Homo sapien
gaggggcttgtttctgaaccacaca

SEQ ID NO: 5569292 - DNA, 25 bp, Homo sapien
aagtgactcgtttgtggttggcacg

SEQ ID NO: 5569293 - DNA, 25 bp, Homo sapien
atcaacaggtgaacagatgctagtt

SEQ ID NO: 5569294 - DNA, 25 bp, Homo sapien
tggtgctgcttgtagcaagtgactc

SEQ ID NO: 5569295 - DNA, 25 bp, Homo sapien
ggacccacgatcccctgctctcccc

SEQ ID NO: 5569296 - DNA, 25 bp, Homo sapien
gggggtctcgtaatccacggtatca

SEQ ID NO: 5569297 - DNA, 25 bp, Homo sapien
agatgctagttctgccatgcgatcc

SEQ ID NO: 5569298 - DNA, 25 bp, Homo sapien
tggaaacagcagcaaaccttagaga

SEQ ID NO: 5569299 - DNA, 25 bp, Homo sapien
agtgtatgtctatccgtcgggccca

SEQ ID NO: 5569300 - DNA, 25 bp, Homo sapien
ctctggtgattctccggtgaaattc

SEQ ID NO: 5569301 - DNA, 25 bp, Homo sapien
caacctacgccacttcactcctctc

SEQ ID NO: 5569302 - DNA, 25 bp, Homo sapien
catagaatacagccataggccaccc

SEQ ID NO: 5569303 - DNA, 25 bp, Homo sapien
tctcgtatcttgctggtcctgaccc

SEQ ID NO: 5569304 - DNA, 25 bp, Homo sapien
tcgggcccaccagctgctctgccca

SEQ ID NO: 5569305 - DNA, 25 bp, Homo sapien
gcagcctcctcgtttggacccagcc

SEQ ID NO: 5569306 - DNA, 25 bp, Homo sapien
cgggctggcagtgtatgtctatccg

SEQ ID NO: 5569307 - DNA, 25 bp, Homo sapien
cgcccttccgcctttcaacctacgc

SEQ ID NO: 5569308 - DNA, 25 bp, Homo sapien
gtggaccgacaagtaacatagaata

SEQ ID NO: 5569309 - DNA, 25 bp, Homo sapien
tcctgggcagcctttcccttgggcc

SEQ ID NO: 5569310 - DNA, 25 bp, Homo sapien
attttctgatggacagagaagtttt

SEQ ID NO: 5569311 - DNA, 25 bp, Homo sapien
tatggatgcagaacagctctccttc

SEQ ID NO: 5569312 - DNA, 25 bp, Homo sapien
ggaggttggagattgtttttgcagt

SEQ ID NO: 5569313 - DNA, 25 bp, Homo sapien
acagatgagaattacagaagtggga

SEQ ID NO: 5569314 - DNA, 25 bp, Homo sapien
tctagtaagacaacagatgagaatt

SEQ ID NO: 5569315 - DNA, 25 bp, Homo sapien
aaagatgcgttttcacagagagtgc

SEQ ID NO: 5569316 - DNA, 25 bp, Homo sapien
ctaaaggcccaggagtctcctttgt

SEQ ID NO: 5569317 - DNA, 25 bp, Homo sapien
tacatcttgagaagacagggatatc

SEQ ID NO: 5569318 - DNA, 25 bp, Homo sapien
agatgcagtattcttgggaaagttc

SEQ ID NO: 5569319 - DNA, 25 bp, Homo sapien
acagagagtgcacccatttggttac

SEQ ID NO: 5569320 - DNA, 25 bp, Homo sapien
acgtctgtatattgcacaagagaac

SEQ ID NO: 5569321 - DNA, 25 bp, Homo sapien
actgaccacgagaagaaccgtggag

SEQ ID NO: 5569322 - DNA, 25 bp, Homo sapien
aacaccatcatcaaaaaagaacttc

SEQ ID NO: 5569323 - DNA, 25 bp, Homo sapien
attctatcaaggcacaaacaccatc

SEQ ID NO: 5569324 - DNA, 25 bp, Homo sapien
catgatctctcagcctaaaaattct

SEQ ID NO: 5569325 - DNA, 25 bp, Homo sapien
aaggccagcaccactaaacagcctc

SEQ ID NO: 5569326 - DNA, 25 bp, Homo sapien
aggaaggcataaactccatgatctc

SEQ ID NO: 5569327 - DNA, 25 bp, Homo sapien
ggctgccgcccactgatactgacca

SEQ ID NO: 5569328 - DNA, 25 bp, Homo sapien
aagacttgttgctcatttgctgtgt

SEQ ID NO: 5569329 - DNA, 25 bp, Homo sapien
cagccacagtagctgtgtggaagga

SEQ ID NO: 5569330 - DNA, 25 bp, Homo sapien
cataatcccagtgggttgccaccac

SEQ ID NO: 5569331 - DNA, 25 bp, Homo sapien
acagcctcactgataaggaaggcat

SEQ ID NO: 5569332 - DNA, 25 bp, Homo sapien
aaaacaacccatagatgacaaatgc

SEQ ID NO: 5569333 - DNA, 25 bp, Homo sapien
agatagactaatacaataaactccc

SEQ ID NO: 5569334 - DNA, 25 bp, Homo sapien
accaataagcagtctaagttaattc

SEQ ID NO: 5569335 - DNA, 25 bp, Homo sapien
cacatagtccaaggctttcaacacc

SEQ ID NO: 5569336 - DNA, 25 bp, Homo sapien
gcatctgacactgtaacatcccatc

SEQ ID NO: 5569337 - DNA, 25 bp, Homo sapien
agatgacaaatgcagatagactaat

SEQ ID NO: 5569338 - DNA, 25 bp, Homo sapien
cccatgtacctaacagcacagcttc

SEQ ID NO: 5569339 - DNA, 25 bp, Homo sapien
gctgttaccgatttccaggataacc

SEQ ID NO: 5569340 - DNA, 25 bp, Homo sapien
ctgcactctgtggttaagacatgcc

SEQ ID NO: 5569341 - DNA, 25 bp, Homo sapien
cttctgactactcctcctgtggttc

SEQ ID NO: 5569342 - DNA, 25 bp, Homo sapien
acaccttttagatgaagggggcctg

SEQ ID NO: 5569343 - DNA, 25 bp, Homo sapien
atgaattcaattacaagcgaagaac

SEQ ID NO: 5569344 - DNA, 25 bp, Homo sapien
ctcttcccaatgtcactgtgcacct

SEQ ID NO: 5569345 - DNA, 25 bp, Homo sapien
acgagatgaggttagtaatgaattc

SEQ ID NO: 5569346 - DNA, 25 bp, Homo sapien
attacaagcgaagaactgtgatttt

SEQ ID NO: 5569347 - DNA, 25 bp, Homo sapien
gccttggtgcctaactcaaagaaac

SEQ ID NO: 5569348 - DNA, 25 bp, Homo sapien
ccctattgtaagttcagtggctatt

SEQ ID NO: 5569349 - DNA, 25 bp, Homo sapien
attttgtaatactgctgtgccctat

SEQ ID NO: 5569350 - DNA, 25 bp, Homo sapien
aaagagcatataaattacgtaaaca

SEQ ID NO: 5569351 - DNA, 25 bp, Homo sapien
cccaaaaacaaacgagatgaggtta

SEQ ID NO: 5569352 - DNA, 25 bp, Homo sapien
aaccacaacacgaatgctctagagc

SEQ ID NO: 5569353 - DNA, 25 bp, Homo sapien
cctaactcaaagaaacaagtagctt

SEQ ID NO: 5569354 - DNA, 25 bp, Homo sapien
agaaggggctaagttttgtcttctg

SEQ ID NO: 5569355 - DNA, 25 bp, Homo sapien
gctgtgtgatctgccatgtgccatg

SEQ ID NO: 5569356 - DNA, 25 bp, Homo sapien
ccatgtgccatgtgatcctccctgc

SEQ ID NO: 5569357 - DNA, 25 bp, Homo sapien
aaccacaaatctccagtaaaatctg

SEQ ID NO: 5569358 - DNA, 25 bp, Homo sapien
tttcaatgtggtacatacgggtggg

SEQ ID NO: 5569359 - DNA, 25 bp, Homo sapien
gaatatagttgaaggctgtgtgatc

SEQ ID NO: 5569360 - DNA, 25 bp, Homo sapien
gaaaaaaaaatggtcagatgtctgc

SEQ ID NO: 5569361 - DNA, 25 bp, Homo sapien
gtcagatgtctgcctcaagtagatt

SEQ ID NO: 5569362 - DNA, 25 bp, Homo sapien
gtgtctctgggtataacagggacga

SEQ ID NO: 5569363 - DNA, 25 bp, Homo sapien
cagggacgacccctgagggtttata

SEQ ID NO: 5569364 - DNA, 25 bp, Homo sapien
tcctccctgcaaaaccacaaatctc

SEQ ID NO: 5569365 - DNA, 25 bp, Homo sapien
ttcgcactgtaactgtgaagggtac

SEQ ID NO: 5569366 - DNA, 25 bp, Homo sapien
gtacccttcacagttacagtgcgaa

SEQ ID NO: 5569367 - DNA, 25 bp, Homo sapien
agtccatatttgccactgaaatgac

SEQ ID NO: 5569368 - DNA, 25 bp, Homo sapien
tttaagagtaagagataagtatcaa

SEQ ID NO: 5569369 - DNA, 25 bp, Homo sapien
atgaactcagtgttgtagcagatat

SEQ ID NO: 5569370 - DNA, 25 bp, Homo sapien
ttccatggcacctgctctgttgagc

SEQ ID NO: 5569371 - DNA, 25 bp, Homo sapien
aatgcttggcttcagaagaaaagct

SEQ ID NO: 5569372 - DNA, 25 bp, Homo sapien
gttgagcaattatgtgtgaaaagcc

SEQ ID NO: 5569373 - DNA, 25 bp, Homo sapien
agtggtgctacaacaatcatggaat

SEQ ID NO: 5569374 - DNA, 25 bp, Homo sapien
agaatcaattcagtggtgctacaac

SEQ ID NO: 5569375 - DNA, 25 bp, Homo sapien
gataagtatcaatgcagaataatct

SEQ ID NO: 5569376 - DNA, 25 bp, Homo sapien
atagcgaattttaagagtaagagat

SEQ ID NO: 5569377 - DNA, 25 bp, Homo sapien
aatatatggtaaagaacatcttatt

SEQ ID NO: 5569378 - DNA, 25 bp, Homo sapien
tttggataggatctaggaactgaaa

SEQ ID NO: 5569379 - DNA, 25 bp, Homo sapien
tcacatgcagtaccaccaaggaagt

SEQ ID NO: 5569380 - DNA, 25 bp, Homo sapien
tggagaaagacctcagggtaatact

SEQ ID NO: 5569381 - DNA, 25 bp, Homo sapien
cagtagtccctcggtatctgtgggg

SEQ ID NO: 5569382 - DNA, 25 bp, Homo sapien
tcagaaaaagaactaagtggcctct

SEQ ID NO: 5569383 - DNA, 25 bp, Homo sapien
agatgaaggaaatgagcctacaaga

SEQ ID NO: 5569384 - DNA, 25 bp, Homo sapien
gaagtacttggcacctggcaaactc

SEQ ID NO: 5569385 - DNA, 25 bp, Homo sapien
aaacctggggatgcccaagtctctt

SEQ ID NO: 5569386 - DNA, 25 bp, Homo sapien
aaggaagtgtctagggtgcttttta

SEQ ID NO: 5569387 - DNA, 25 bp, Homo sapien
gtggattcaacgaagtacttggcac

SEQ ID NO: 5569388 - DNA, 25 bp, Homo sapien
tcagataacaaaacctggggatgcc

SEQ ID NO: 5569389 - DNA, 25 bp, Homo sapien
ttcagtgctcacgtgtatcagtttc

SEQ ID NO: 5569390 - DNA, 25 bp, Homo sapien
cctggaactaagatgtttcagtgct

SEQ ID NO: 5569391 - DNA, 25 bp, Homo sapien
agctgaactactgcccacaggtgac

SEQ ID NO: 5569392 - DNA, 25 bp, Homo sapien
acaagcagagaagcagtcttttagg

SEQ ID NO: 5569393 - DNA, 25 bp, Homo sapien
tttgccagttaggcaggaaaagcta

SEQ ID NO: 5569394 - DNA, 25 bp, Homo sapien
gggggtcttgatatagagtgtttgc

SEQ ID NO: 5569395 - DNA, 25 bp, Homo sapien
gagaaatacaacacaaatgctacct

SEQ ID NO: 5569396 - DNA, 25 bp, Homo sapien
agcagcagtggtgtgctgacaaatg

SEQ ID NO: 5569397 - DNA, 25 bp, Homo sapien
cacagaaattagacagaacaagcag

SEQ ID NO: 5569398 - DNA, 25 bp, Homo sapien
cttggaaatgagctattctggtgcc

SEQ ID NO: 5569399 - DNA, 25 bp, Homo sapien
ctggtgcctagttaagatgtattct

SEQ ID NO: 5569400 - DNA, 25 bp, Homo sapien
tggtccatggtttacttaaagaggt

SEQ ID NO: 5569401 - DNA, 25 bp, Homo sapien
acctctttaagtaaaccatggacca

SEQ ID NO: 5569402 - DNA, 25 bp, Homo sapien
agggttcctataggcctgctaggcc

SEQ ID NO: 5569403 - DNA, 25 bp, Homo sapien
aaatccaatctactggaagggtccc

SEQ ID NO: 5569404 - DNA, 25 bp, Homo sapien
tctttgtttggctctgccggctccc

SEQ ID NO: 5569405 - DNA, 25 bp, Homo sapien
tccaccattcacccccgggatgctc

SEQ ID NO: 5569406 - DNA, 25 bp, Homo sapien
cctcagtccttagtcctacagcttc

SEQ ID NO: 5569407 - DNA, 25 bp, Homo sapien
attcacccccgggatgctcccccaa

SEQ ID NO: 5569408 - DNA, 25 bp, Homo sapien
gggacaccccaggatcctcagtcct

SEQ ID NO: 5569409 - DNA, 25 bp, Homo sapien
tctctgagggttcctataggcctgc

SEQ ID NO: 5569410 - DNA, 25 bp, Homo sapien
gctaggccttaattctggattcccc

SEQ ID NO: 5569411 - DNA, 25 bp, Homo sapien
tgtttggctctgccggctcccctga

SEQ ID NO: 5569412 - DNA, 25 bp, Homo sapien
cccccagctcctctctccaccattc

SEQ ID NO: 5569413 - DNA, 25 bp, Homo sapien
agagaaaacttaagcagatttcaga

SEQ ID NO: 5569414 - DNA, 25 bp, Homo sapien
tatctcagaagattgatgaaaatac

SEQ ID NO: 5569415 - DNA, 25 bp, Homo sapien
caaaataaagtccagctcttccagg

SEQ ID NO: 5569416 - DNA, 25 bp, Homo sapien
gagccatcaaagagggcaaatgtca

SEQ ID NO: 5569417 - DNA, 25 bp, Homo sapien
atgccatgactaagggaaattggtc

SEQ ID NO: 5569418 - DNA, 25 bp, Homo sapien
atggacagaagtgcaagcaaaataa

SEQ ID NO: 5569419 - DNA, 25 bp, Homo sapien
cctcacagctgactcatgccatgac

SEQ ID NO: 5569420 - DNA, 25 bp, Homo sapien
ccagaagctataaaactggggggca

SEQ ID NO: 5569421 - DNA, 25 bp, Homo sapien
gaaattggtcgtggagccatcaaag

SEQ ID NO: 5569422 - DNA, 25 bp, Homo sapien
gagctgtgatctaatctctgagccc

SEQ ID NO: 5569423 - DNA, 25 bp, Homo sapien
ggtggtgtgccatcagccctcacag

SEQ ID NO: 5569424 - DNA, 25 bp, Homo sapien
tagtggattttggtgctaagatgca

SEQ ID NO: 5569425 - DNA, 25 bp, Homo sapien
gaaccagtgtaattctgtgctttgc

SEQ ID NO: 5569426 - DNA, 25 bp, Homo sapien
ctaagatgcaagtctgaaccagtgt

SEQ ID NO: 5569427 - DNA, 25 bp, Homo sapien
ccaatgacatttataagggagaata

SEQ ID NO: 5569428 - DNA, 25 bp, Homo sapien
ttcattgtagaggcaaaactctttt

SEQ ID NO: 5569429 - DNA, 25 bp, Homo sapien
agtcaaattggtgaacttgcacttt

SEQ ID NO: 5569430 - DNA, 25 bp, Homo sapien
gctgtctgcatttgtatagtggatt

SEQ ID NO: 5569431 - DNA, 25 bp, Homo sapien
tgttctaacaaaagaccaatgacat

SEQ ID NO: 5569432 - DNA, 25 bp, Homo sapien
ttataagggagaataaaataagcaa

SEQ ID NO: 5569433 - DNA, 25 bp, Homo sapien
aagctaaagattactggctgggtgt

SEQ ID NO: 5569434 - DNA, 25 bp, Homo sapien
tttgaaaaagcaagtgagctcctct

SEQ ID NO: 5569435 - DNA, 25 bp, Homo sapien
tcctgtgccagtcaataagagtgcg

SEQ ID NO: 5569436 - DNA, 25 bp, Homo sapien
gtgagcttgcacaaatattcttccc

SEQ ID NO: 5569437 - DNA, 25 bp, Homo sapien
tctcagggcttcattggataactcc

SEQ ID NO: 5569438 - DNA, 25 bp, Homo sapien
atcaccagattcaagtcagagagta

SEQ ID NO: 5569439 - DNA, 25 bp, Homo sapien
aagactgcagcttgaaatttgttct

SEQ ID NO: 5569440 - DNA, 25 bp, Homo sapien
gacacacctgaagaagtgagcttgc

SEQ ID NO: 5569441 - DNA, 25 bp, Homo sapien
caagtcagagagtatcctgtgccag

SEQ ID NO: 5569442 - DNA, 25 bp, Homo sapien
cacaagccttgcaaaacttagagcc

SEQ ID NO: 5569443 - DNA, 25 bp, Homo sapien
cgggtcactggaagatcccttcgta

SEQ ID NO: 5569444 - DNA, 25 bp, Homo sapien
tcaatatgaaggttgacacacctga

SEQ ID NO: 5569445 - DNA, 25 bp, Homo sapien
ttagagccagttgagcttggttaac

SEQ ID NO: 5569446 - DNA, 25 bp, Homo sapien
cttttggtgggaaatttgattttca

SEQ ID NO: 5569447 - DNA, 25 bp, Homo sapien
tatgaagtaatgaagtttttatctc

SEQ ID NO: 5569448 - DNA, 25 bp, Homo sapien
aaatgcagcaggcttatgggttagg

SEQ ID NO: 5569449 - DNA, 25 bp, Homo sapien
caggcttatgggttaggtttgataa

SEQ ID NO: 5569450 - DNA, 25 bp, Homo sapien
ccaatcctgtacatttgctgccccc

SEQ ID NO: 5569451 - DNA, 25 bp, Homo sapien
cattcagctaggttaactgcatctc

SEQ ID NO: 5569452 - DNA, 25 bp, Homo sapien
ctgataaaaggctgttctgggacac

SEQ ID NO: 5569453 - DNA, 25 bp, Homo sapien
gataaagaaaggctgccatacattc

SEQ ID NO: 5569454 - DNA, 25 bp, Homo sapien
ctccagtaaaatatgtctaagacca

SEQ ID NO: 5569455 - DNA, 25 bp, Homo sapien
tttttgggagtatcattatgaagta

SEQ ID NO: 5569456 - DNA, 25 bp, Homo sapien
gctgcccccaagcttagctggccct

SEQ ID NO: 5569457 - DNA, 25 bp, Homo sapien
ggagaatggagttaccaagaccaca

SEQ ID NO: 5569458 - DNA, 25 bp, Homo sapien
cctgctgcctcccacgtgtcagggc

SEQ ID NO: 5569459 - DNA, 25 bp, Homo sapien
ccccagagtgctgaattgggaatga

SEQ ID NO: 5569460 - DNA, 25 bp, Homo sapien
gaaaattagaatgaccccagagtgc

SEQ ID NO: 5569461 - DNA, 25 bp, Homo sapien
gcagactttcctacagggagaggca

SEQ ID NO: 5569462 - DNA, 25 bp, Homo sapien
gtttcttataggcggagaatggagt

SEQ ID NO: 5569463 - DNA, 25 bp, Homo sapien
gctgtcggtcatggccagtctcaat

SEQ ID NO: 5569464 - DNA, 25 bp, Homo sapien
aaaccatctcaaaatcagctgtcct

SEQ ID NO: 5569465 - DNA, 25 bp, Homo sapien
aacagagacccgctaaagaatgggg

SEQ ID NO: 5569466 - DNA, 25 bp, Homo sapien
tgcatggaggcccggtttcttatag

SEQ ID NO: 5569467 - DNA, 25 bp, Homo sapien
accaagaccacaagagaaaattaga

SEQ ID NO: 5569468 - DNA, 25 bp, Homo sapien
gggacacttgaatcagcaggctcac

SEQ ID NO: 5569469 - DNA, 25 bp, Homo sapien
gccggctctcatcggctgtgggagc

SEQ ID NO: 5569470 - DNA, 25 bp, Homo sapien
ggacccacagggacacttgaatcag

SEQ ID NO: 5569471 - DNA, 25 bp, Homo sapien
aaagcgccagcttacgatacagcca

SEQ ID NO: 5569472 - DNA, 25 bp, Homo sapien
cccaatctagatgcggctgtggggg

SEQ ID NO: 5569473 - DNA, 25 bp, Homo sapien
ggtaaatcccggagcctcgtctctg

SEQ ID NO: 5569474 - DNA, 25 bp, Homo sapien
tggtggctgtctcagaagcacgtta

SEQ ID NO: 5569475 - DNA, 25 bp, Homo sapien
agaagcacgttaaaatgtcctaccc

SEQ ID NO: 5569476 - DNA, 25 bp, Homo sapien
cccagcctgacagtgcatcaagagc

SEQ ID NO: 5569477 - DNA, 25 bp, Homo sapien
tcgtccctctccagctaaagcgcca

SEQ ID NO: 5569478 - DNA, 25 bp, Homo sapien
tgcatcaagagctttgcggagccta

SEQ ID NO: 5569479 - DNA, 25 bp, Homo sapien
aaccttgccatcttttcccgtgctt

SEQ ID NO: 5569480 - DNA, 25 bp, Homo sapien
atgacaaatgatacaaacttgtgaa

SEQ ID NO: 5569481 - DNA, 25 bp, Homo sapien
tagacaagctagcacaatatacttt

SEQ ID NO: 5569482 - DNA, 25 bp, Homo sapien
caccttccttggccccctaaactgc

SEQ ID NO: 5569483 - DNA, 25 bp, Homo sapien
ctgtcccctcctgttttcctactac

SEQ ID NO: 5569484 - DNA, 25 bp, Homo sapien
cttccttggccccctaaactgctgg

SEQ ID NO: 5569485 - DNA, 25 bp, Homo sapien
aggtgcagccctcccccaacagtat

SEQ ID NO: 5569486 - DNA, 25 bp, Homo sapien
acattgacaggttatcttgacaggt

SEQ ID NO: 5569487 - DNA, 25 bp, Homo sapien
agtttattcttagacaagctagcac

SEQ ID NO: 5569488 - DNA, 25 bp, Homo sapien
tactacattgacaggttatcttgac

SEQ ID NO: 5569489 - DNA, 25 bp, Homo sapien
ttgtagacactttcgccacattgcc

SEQ ID NO: 5569490 - DNA, 25 bp, Homo sapien
ttctaagagagatgttaagtcaact

SEQ ID NO: 5569491 - DNA, 25 bp, Homo sapien
acagactgttgactcttgtggtcgt

SEQ ID NO: 5569492 - DNA, 25 bp, Homo sapien
agggtaacgatggcctcataaagtg

SEQ ID NO: 5569493 - DNA, 25 bp, Homo sapien
ctggttttggcctcagggtaacgat

SEQ ID NO: 5569494 - DNA, 25 bp, Homo sapien
ctgcgagtgccctctggcctaccta

SEQ ID NO: 5569495 - DNA, 25 bp, Homo sapien
ctggcccaacacagccagacaggga

SEQ ID NO: 5569496 - DNA, 25 bp, Homo sapien
taaatcaatcagaaggctgcgagtg

SEQ ID NO: 5569497 - DNA, 25 bp, Homo sapien
gtcgtgattgttgggaaagcatttg

SEQ ID NO: 5569498 - DNA, 25 bp, Homo sapien
tacagacggtggtaataaaacacac

SEQ ID NO: 5569499 - DNA, 25 bp, Homo sapien
ctgggtaacagagtcttaggctttc

SEQ ID NO: 5569500 - DNA, 25 bp, Homo sapien
gggagcagactaccctggcatcctc

SEQ ID NO: 5569501 - DNA, 25 bp, Homo sapien
tctaggaataggaatgttcgaagaa

SEQ ID NO: 5569502 - DNA, 25 bp, Homo sapien
taaactacatctaggaataggaatg

SEQ ID NO: 5569503 - DNA, 25 bp, Homo sapien
tgagtaagattattcacaaatgcaa

SEQ ID NO: 5569504 - DNA, 25 bp, Homo sapien
ttggccttcacagtctaaacagata

SEQ ID NO: 5569505 - DNA, 25 bp, Homo sapien
tggacctaatgtctggagtcacttc

SEQ ID NO: 5569506 - DNA, 25 bp, Homo sapien
gttatcttttctagagagaagagat

SEQ ID NO: 5569507 - DNA, 25 bp, Homo sapien
tgttcgaagaaaagatgaactcatc

SEQ ID NO: 5569508 - DNA, 25 bp, Homo sapien
tcacactcatatcaggttatcagac

SEQ ID NO: 5569509 - DNA, 25 bp, Homo sapien
ttcccaatttgaggtaaactacatc

SEQ ID NO: 5569510 - DNA, 25 bp, Homo sapien
atgtctggacctaatgtctggagtc

SEQ ID NO: 5569511 - DNA, 25 bp, Homo sapien
caaatgcaaacacactactcttcaa

SEQ ID NO: 5569512 - DNA, 25 bp, Homo sapien
taccagtactgaaatgggcaaaaga

SEQ ID NO: 5569513 - DNA, 25 bp, Homo sapien
ctatctaatgtggaggcacggtaag

SEQ ID NO: 5569514 - DNA, 25 bp, Homo sapien
tcttatgaggtgttaagaaaagctt

SEQ ID NO: 5569515 - DNA, 25 bp, Homo sapien
gactgatacgagcatgactggatta

SEQ ID NO: 5569516 - DNA, 25 bp, Homo sapien
agaagattcctctggaggcaatcac

SEQ ID NO: 5569517 - DNA, 25 bp, Homo sapien
caagtgctcctacagagactgatac

SEQ ID NO: 5569518 - DNA, 25 bp, Homo sapien
ggcgtttcccagagttagatagcat

SEQ ID NO: 5569519 - DNA, 25 bp, Homo sapien
gactggattacacatgccaggtgaa

SEQ ID NO: 5569520 - DNA, 25 bp, Homo sapien
caaaagatggctgataacaaattac

SEQ ID NO: 5569521 - DNA, 25 bp, Homo sapien
gcttggattcatacacagttgaccc

SEQ ID NO: 5569522 - DNA, 25 bp, Homo sapien
agggatctatctaatgtggaggcac

SEQ ID NO: 5569523 - DNA, 25 bp, Homo sapien
ccaggcgtcagcttcctcatccgca

SEQ ID NO: 5569524 - DNA, 25 bp, Homo sapien
tgctctaaatcccgggggctaaggc

SEQ ID NO: 5569525 - DNA, 25 bp, Homo sapien
tgctccgagcgcaagtttgtgcgga

SEQ ID NO: 5569526 - DNA, 25 bp, Homo sapien
ggatgctctaaatcccgggggctaa

SEQ ID NO: 5569527 - DNA, 25 bp, Homo sapien
atataaccagcgctgctagcgggga

SEQ ID NO: 5569528 - DNA, 25 bp, Homo sapien
ctccgagcgcaagtttgtgcggaag

SEQ ID NO: 5569529 - DNA, 25 bp, Homo sapien
aaggttggcccacaatataaccagc

SEQ ID NO: 5569530 - DNA, 25 bp, Homo sapien
aggggacttgctccgagcgcaagtt

SEQ ID NO: 5569531 - DNA, 25 bp, Homo sapien
ggcccacaatataaccagcgctgct

SEQ ID NO: 5569532 - DNA, 25 bp, Homo sapien
agcttcctcatccgcagagtggccc

SEQ ID NO: 5569533 - DNA, 25 bp, Homo sapien
gtcgcgaggatgctctaaatcccgg

SEQ ID NO: 5569534 - DNA, 25 bp, Homo sapien
aagacaaatgcaaagcaccagtgac

SEQ ID NO: 5569535 - DNA, 25 bp, Homo sapien
gcggggcgtatgtcctttccaagac

SEQ ID NO: 5569536 - DNA, 25 bp, Homo sapien
attcacagtctccctagttagtaaa

SEQ ID NO: 5569537 - DNA, 25 bp, Homo sapien
tttccaagacaaatgcaaagcacca

SEQ ID NO: 5569538 - DNA, 25 bp, Homo sapien
gctatgtgtccgacattgagctttc

SEQ ID NO: 5569539 - DNA, 25 bp, Homo sapien
atgcaaagcaccagtgacggatttc

SEQ ID NO: 5569540 - DNA, 25 bp, Homo sapien
ccagaactgtgaaccacgctagacc

SEQ ID NO: 5569541 - DNA, 25 bp, Homo sapien
cacgctagacctaaattccccattc

SEQ ID NO: 5569542 - DNA, 25 bp, Homo sapien
ccattctcaggagactgacggaaac

SEQ ID NO: 5569543 - DNA, 25 bp, Homo sapien
ccagtgacggatttcatgctatgtg

SEQ ID NO: 5569544 - DNA, 25 bp, Homo sapien
aactcctaaaaaaccagaactgtga

SEQ ID NO: 5569545 - DNA, 25 bp, Homo sapien
cggtcatacctttgattgcagtcag

SEQ ID NO: 5569546 - DNA, 25 bp, Homo sapien
ctgactgcaatcaaaggtatgaccg

SEQ ID NO: 5569547 - DNA, 25 bp, Homo sapien
ggtcttactcagttgcccaggctgg

SEQ ID NO: 5569548 - DNA, 25 bp, Homo sapien
cagtaggaggctacctttcctcatc

SEQ ID NO: 5569549 - DNA, 25 bp, Homo sapien
caccttagccccccaagtaataata

SEQ ID NO: 5569550 - DNA, 25 bp, Homo sapien
tagccccccaagtaataatatatgg

SEQ ID NO: 5569551 - DNA, 25 bp, Homo sapien
acagtaggaggctacctttcctcat

SEQ ID NO: 5569552 - DNA, 25 bp, Homo sapien
gaggcaaggtcttactcagttgccc

SEQ ID NO: 5569553 - DNA, 25 bp, Homo sapien
cactgcagcctccgcttcctgtact

SEQ ID NO: 5569554 - DNA, 25 bp, Homo sapien
ggatgagatattctggtgggacttg

SEQ ID NO: 5569555 - DNA, 25 bp, Homo sapien
tgagccaccatgcccagcctatagc

SEQ ID NO: 5569556 - DNA, 25 bp, Homo sapien
ctttcctcatctccagcttctgcct

SEQ ID NO: 5569557 - DNA, 25 bp, Homo sapien
atgcccagcctatagctgtaccttc

SEQ ID NO: 5569558 - DNA, 25 bp, Homo sapien
cgcatggcctcgtcaaagttggaag

SEQ ID NO: 5569559 - DNA, 25 bp, Homo sapien
tagtacgcaggtgcacaccagttat

SEQ ID NO: 5569560 - DNA, 25 bp, Homo sapien
gcccaggacagtattgcaccttccc

SEQ ID NO: 5569561 - DNA, 25 bp, Homo sapien
ctgataaaccaaagtgcatatgccc

SEQ ID NO: 5569562 - DNA, 25 bp, Homo sapien
tgcaccttccccagtcgcgcgtgtc

SEQ ID NO: 5569563 - DNA, 25 bp, Homo sapien
gtcactttggcacacgctaacgtct

SEQ ID NO: 5569564 - DNA, 25 bp, Homo sapien
acaatggaacctatagaatacgtca

SEQ ID NO: 5569565 - DNA, 25 bp, Homo sapien
aaagcaaagacaatggaacctatag

SEQ ID NO: 5569566 - DNA, 25 bp, Homo sapien
gtgcatatgcccaggacagtattgc

SEQ ID NO: 5569567 - DNA, 25 bp, Homo sapien
cagtcgtgagattagtacgcaggtg

SEQ ID NO: 5569568 - DNA, 25 bp, Homo sapien
agttggaagttaacagtcgtgagat

SEQ ID NO: 5569569 - DNA, 25 bp, Homo sapien
ttttatgaccaaaagaggctgacaa

SEQ ID NO: 5569570 - DNA, 25 bp, Homo sapien
atgttgtagaacaccatctgcttga

SEQ ID NO: 5569571 - DNA, 25 bp, Homo sapien
taggggaagatctctcacagaataa

SEQ ID NO: 5569572 - DNA, 25 bp, Homo sapien
agatccaggtgccattttcagctca

SEQ ID NO: 5569573 - DNA, 25 bp, Homo sapien
ctctcacagaataaagctcaaaaaa

SEQ ID NO: 5569574 - DNA, 25 bp, Homo sapien
gaaaaaatcactgtaggggaagatc

SEQ ID NO: 5569575 - DNA, 25 bp, Homo sapien
acttggcatgctcaaattagacaat

SEQ ID NO: 5569576 - DNA, 25 bp, Homo sapien
cttctgaatttaatgtaggatgttt

SEQ ID NO: 5569577 - DNA, 25 bp, Homo sapien
atggcttatgacaaatttatgacac

SEQ ID NO: 5569578 - DNA, 25 bp, Homo sapien
cctccaccccttactgagaccccag

SEQ ID NO: 5569579 - DNA, 25 bp, Homo sapien
gcttgatatttgagtgcattcccac

SEQ ID NO: 5569580 - DNA, 25 bp, Homo sapien
gacccccgccctccccctcgtgcag

SEQ ID NO: 5569581 - DNA, 25 bp, Homo sapien
ctgcacgagggggagggcgggggtc

SEQ ID NO: 5569582 - DNA, 25 bp, Homo sapien
cagggggacctattccgcctatctg

SEQ ID NO: 5569583 - DNA, 25 bp, Homo sapien
acatggcccatttagtccagcttgc

SEQ ID NO: 5569584 - DNA, 25 bp, Homo sapien
ggttcactggttaaccgcccagctc

SEQ ID NO: 5569585 - DNA, 25 bp, Homo sapien
ctttgtcatggtgggtcctgcagaa

SEQ ID NO: 5569586 - DNA, 25 bp, Homo sapien
ggcaagactcatggcccactgaatt

SEQ ID NO: 5569587 - DNA, 25 bp, Homo sapien
gctacttgggcttagcaatgtgctg

SEQ ID NO: 5569588 - DNA, 25 bp, Homo sapien
agcaatgtgctggttgtctttgtcc

SEQ ID NO: 5569589 - DNA, 25 bp, Homo sapien
tgtggaattgagatagtttagagaa

SEQ ID NO: 5569590 - DNA, 25 bp, Homo sapien
gagcccagagccactcaattggttc

SEQ ID NO: 5569591 - DNA, 25 bp, Homo sapien
atggggtcaggaaatttgctacttg

SEQ ID NO: 5569592 - DNA, 25 bp, Homo sapien
ctctaagggtgtatcacaggctgtg

SEQ ID NO: 5569593 - DNA, 25 bp, Homo sapien
gtcaacaatatccccagtggccaaa

SEQ ID NO: 5569594 - DNA, 25 bp, Homo sapien
tcggacacttccaaacaccagcaag

SEQ ID NO: 5569595 - DNA, 25 bp, Homo sapien
gttccccaggtcaacaatatcccca

SEQ ID NO: 5569596 - DNA, 25 bp, Homo sapien
tagatcggacacttccaaacaccag

SEQ ID NO: 5569597 - DNA, 25 bp, Homo sapien
caggtcaacaatatccccagtggcc

SEQ ID NO: 5569598 - DNA, 25 bp, Homo sapien
ccccaggtcaacaatatccccagtg

SEQ ID NO: 5569599 - DNA, 25 bp, Homo sapien
caatatccccagtggccaaagctgc

SEQ ID NO: 5569600 - DNA, 25 bp, Homo sapien
tgatttgtaaaaagagaagggattg

SEQ ID NO: 5569601 - DNA, 25 bp, Homo sapien
cacttccaaacaccagcaagattcc

SEQ ID NO: 5569602 - DNA, 25 bp, Homo sapien
acacattaaaaagtatttggttgat

SEQ ID NO: 5569603 - DNA, 25 bp, Homo sapien
tatttggttgatttgtaaaaagaga

SEQ ID NO: 5569604 - DNA, 25 bp, Homo sapien
aatctaagcactctgggaggctgaa

SEQ ID NO: 5569605 - DNA, 25 bp, Homo sapien
ccaggtgtggtagctcatgcctata

SEQ ID NO: 5569606 - DNA, 25 bp, Homo sapien
gggcaggtgggcttccaccatcacc

SEQ ID NO: 5569607 - DNA, 25 bp, Homo sapien
acagctgccctccagggcaggtggg

SEQ ID NO: 5569608 - DNA, 25 bp, Homo sapien
gggtgaaagaagagtatatgattca

SEQ ID NO: 5569609 - DNA, 25 bp, Homo sapien
tttctttgggagtcgttgttacaca

SEQ ID NO: 5569610 - DNA, 25 bp, Homo sapien
aacagaaagaaagaagtggtttctc

SEQ ID NO: 5569611 - DNA, 25 bp, Homo sapien
ggctaggaagtaaatctgtacattt

SEQ ID NO: 5569612 - DNA, 25 bp, Homo sapien
ccatcacctccgtcaggggcaaaaa

SEQ ID NO: 5569613 - DNA, 25 bp, Homo sapien
tcatagaaataaaaaggaaggatgg

SEQ ID NO: 5569614 - DNA, 25 bp, Homo sapien
aggtacaaaggtaactgaaatattc

SEQ ID NO: 5569615 - DNA, 25 bp, Homo sapien
agggtactggtctactggtacagac

SEQ ID NO: 5569616 - DNA, 25 bp, Homo sapien
agaacaagaaatccacttaagtaat

SEQ ID NO: 5569617 - DNA, 25 bp, Homo sapien
aaaaacgttaagctgagaaagagta

SEQ ID NO: 5569618 - DNA, 25 bp, Homo sapien
agaaactagacaaatggaaaactgc

SEQ ID NO: 5569619 - DNA, 25 bp, Homo sapien
tggtacagactgataatatatactg

SEQ ID NO: 5569620 - DNA, 25 bp, Homo sapien
ctgacatgcattgatacatcctgcc

SEQ ID NO: 5569621 - DNA, 25 bp, Homo sapien
accacggcaacctgaagttcaactc

SEQ ID NO: 5569622 - DNA, 25 bp, Homo sapien
ttcagtagttagggtactggtctac

SEQ ID NO: 5569623 - DNA, 25 bp, Homo sapien
cttcgaatcccaagaaatgtaaaaa

SEQ ID NO: 5569624 - DNA, 25 bp, Homo sapien
tcttaggttgtgataacctgcccca

SEQ ID NO: 5569625 - DNA, 25 bp, Homo sapien
ctgtacactgtaaccacggcaacct

SEQ ID NO: 5569626 - DNA, 25 bp, Homo sapien
ctgcctttgcacatttggccaggag

SEQ ID NO: 5569627 - DNA, 25 bp, Homo sapien
aaacactgtgctggactgtagtctt

SEQ ID NO: 5569628 - DNA, 25 bp, Homo sapien
aaatctgatggtgtcttcctcgctt

SEQ ID NO: 5569629 - DNA, 25 bp, Homo sapien
acagcctcaggaatagtgtagtgat

SEQ ID NO: 5569630 - DNA, 25 bp, Homo sapien
tttaaaggatgaactcagatgccac

SEQ ID NO: 5569631 - DNA, 25 bp, Homo sapien
caggttattctgatgaaggtgcttt

SEQ ID NO: 5569632 - DNA, 25 bp, Homo sapien
gcttcagtggctcctcacagcctca

SEQ ID NO: 5569633 - DNA, 25 bp, Homo sapien
ctacaggtgactcacctgggcctgc

SEQ ID NO: 5569634 - DNA, 25 bp, Homo sapien
cagatgccacctcttttagggggtc

SEQ ID NO: 5569635 - DNA, 25 bp, Homo sapien
gaaggtgctttggaaaacactgtgc

SEQ ID NO: 5569636 - DNA, 25 bp, Homo sapien
aagctggattgggttcctgtactct

SEQ ID NO: 5569637 - DNA, 25 bp, Homo sapien
tttcagccgtaaaacaaaatcatta

SEQ ID NO: 5569638 - DNA, 25 bp, Homo sapien
tatcaggtaaagaacaataattcca

SEQ ID NO: 5569639 - DNA, 25 bp, Homo sapien
aatctgaattcaacaccccaaaacc

SEQ ID NO: 5569640 - DNA, 25 bp, Homo sapien
cagactcatcaaacagacatggcta

SEQ ID NO: 5569641 - DNA, 25 bp, Homo sapien
caaaatcattagtgtaagaaaaaac

SEQ ID NO: 5569642 - DNA, 25 bp, Homo sapien
ccacagccctcttataatgaccctt

SEQ ID NO: 5569643 - DNA, 25 bp, Homo sapien
atagtagaatagaaagttaggtaag

SEQ ID NO: 5569644 - DNA, 25 bp, Homo sapien
ctaaggcatattatacctaggcttc

SEQ ID NO: 5569645 - DNA, 25 bp, Homo sapien
acctaggcttctcaagttggccatt

SEQ ID NO: 5569646 - DNA, 25 bp, Homo sapien
agatttaaaggccaagtaaccaata

SEQ ID NO: 5569647 - DNA, 25 bp, Homo sapien
tacctgtaaaaacatgaatagcttt

SEQ ID NO: 5569648 - DNA, 25 bp, Homo sapien
tcttgaaaaggtcctgattactttc

SEQ ID NO: 5569649 - DNA, 25 bp, Homo sapien
tagtacgtccaaagccacaggatga

SEQ ID NO: 5569650 - DNA, 25 bp, Homo sapien
tacagcctctttggatagtacgtcc

SEQ ID NO: 5569651 - DNA, 25 bp, Homo sapien
ttatgcagaagtctatcttgaaaag

SEQ ID NO: 5569652 - DNA, 25 bp, Homo sapien
gctacaagaaatggcattacacgcc

SEQ ID NO: 5569653 - DNA, 25 bp, Homo sapien
aagatgcttaaagggaatgactgtc

SEQ ID NO: 5569654 - DNA, 25 bp, Homo sapien
taagagtcaactgaagcacagaaca

SEQ ID NO: 5569655 - DNA, 25 bp, Homo sapien
attagaaagatgacaatatcccaaa

SEQ ID NO: 5569656 - DNA, 25 bp, Homo sapien
acagaacaggttaatcacttatcac

SEQ ID NO: 5569657 - DNA, 25 bp, Homo sapien
cattacacgccaagaattcctattc

SEQ ID NO: 5569658 - DNA, 25 bp, Homo sapien
gtgacttgctggatgtacagcctct

SEQ ID NO: 5569659 - DNA, 25 bp, Homo sapien
ggccacaagccaggacctgcacaaa

SEQ ID NO: 5569660 - DNA, 25 bp, Homo sapien
tcttcctcaacttggaggcaaagac

SEQ ID NO: 5569661 - DNA, 25 bp, Homo sapien
cctctaggggtctgtgcctacttct

SEQ ID NO: 5569662 - DNA, 25 bp, Homo sapien
cctcaacttggaggcaaagacaaac

SEQ ID NO: 5569663 - DNA, 25 bp, Homo sapien
ctgtcacaaggcagttaattccaaa

SEQ ID NO: 5569664 - DNA, 25 bp, Homo sapien
aggcaggccacccttggcttcctcc

SEQ ID NO: 5569665 - DNA, 25 bp, Homo sapien
ctgctcttcctcaacttggaggcaa

SEQ ID NO: 5569666 - DNA, 25 bp, Homo sapien
ccacaagccaggacctgcacaaact

SEQ ID NO: 5569667 - DNA, 25 bp, Homo sapien
gtcacaaggcagttaattccaaatt

SEQ ID NO: 5569668 - DNA, 25 bp, Homo sapien
ccaaattttgccaccatagagaagc

SEQ ID NO: 5569669 - DNA, 25 bp, Homo sapien
aattttgccaccatagagaagcagc

SEQ ID NO: 5569670 - DNA, 25 bp, Homo sapien
aaaagaccagcacattttgggtggg

SEQ ID NO: 5569671 - DNA, 25 bp, Homo sapien
tgacagcatccatatccaccttgac

SEQ ID NO: 5569672 - DNA, 25 bp, Homo sapien
atgttcagtgcaagcttgttgggac

SEQ ID NO: 5569673 - DNA, 25 bp, Homo sapien
gacaggttgatgtcgcttctgtgcc

SEQ ID NO: 5569674 - DNA, 25 bp, Homo sapien
aacctcaggaagacagctcaactaa

SEQ ID NO: 5569675 - DNA, 25 bp, Homo sapien
aggacttgtcaggcttcttgatgtt

SEQ ID NO: 5569676 - DNA, 25 bp, Homo sapien
ggcaggcctcagcacataagccaca

SEQ ID NO: 5569677 - DNA, 25 bp, Homo sapien
tttgggtgggcttcttgcatttgaa

SEQ ID NO: 5569678 - DNA, 25 bp, Homo sapien
aaggccatgttcaccctggagttgc

SEQ ID NO: 5569679 - DNA, 25 bp, Homo sapien
aagcttgttgggactggctttaggg

SEQ ID NO: 5569680 - DNA, 25 bp, Homo sapien
gcagcggctccaaacaacctcagga

SEQ ID NO: 5569681 - DNA, 25 bp, Homo sapien
aggcatgtaacaagctgacacaaaa

SEQ ID NO: 5569682 - DNA, 25 bp, Homo sapien
aaaggaagttgcagagatgttattt

SEQ ID NO: 5569683 - DNA, 25 bp, Homo sapien
gcaatccagaggttcaggcatgtaa

SEQ ID NO: 5569684 - DNA, 25 bp, Homo sapien
tgagcaactgctggtacaatgacaa

SEQ ID NO: 5569685 - DNA, 25 bp, Homo sapien
atggatcaccagttggctcccctgt

SEQ ID NO: 5569686 - DNA, 25 bp, Homo sapien
ctcacaggactgatcaggagaaaaa

SEQ ID NO: 5569687 - DNA, 25 bp, Homo sapien
accactgcaggactatagtaatccc

SEQ ID NO: 5569688 - DNA, 25 bp, Homo sapien
tctatgaaagccaatatggatcacc

SEQ ID NO: 5569689 - DNA, 25 bp, Homo sapien
gccctcacaggttgtcacagcctac

SEQ ID NO: 5569690 - DNA, 25 bp, Homo sapien
ctgattagagtctgagcaactgctg

SEQ ID NO: 5569691 - DNA, 25 bp, Homo sapien
aagttatcaagggtcactcacagga

SEQ ID NO: 5569692 - DNA, 25 bp, Homo sapien
caggtgcgaatcccacagaatctca

SEQ ID NO: 5569693 - DNA, 25 bp, Homo sapien
aaaattagccgtgctagtacccacc

SEQ ID NO: 5569694 - DNA, 25 bp, Homo sapien
cttcaaagcactctgcaaaaactga

SEQ ID NO: 5569695 - DNA, 25 bp, Homo sapien
aacacataacagaccccgtccctac

SEQ ID NO: 5569696 - DNA, 25 bp, Homo sapien
cagtgtattctggcattccttatct

SEQ ID NO: 5569697 - DNA, 25 bp, Homo sapien
tagccgtgctagtacccacctattt

SEQ ID NO: 5569698 - DNA, 25 bp, Homo sapien
gggccagcctgaacacataacagac

SEQ ID NO: 5569699 - DNA, 25 bp, Homo sapien
tccaaaccacagaatgtcaaatttt

SEQ ID NO: 5569700 - DNA, 25 bp, Homo sapien
atattttggtataggttctaagaat

SEQ ID NO: 5569701 - DNA, 25 bp, Homo sapien
tccaaaattattagtgttcaacacc

SEQ ID NO: 5569702 - DNA, 25 bp, Homo sapien
ctaaagttaaactctccaaaccaca

SEQ ID NO: 5569703 - DNA, 25 bp, Homo sapien
aagctctctggtgattctgacatac

SEQ ID NO: 5569704 - DNA, 25 bp, Homo sapien
aatactctgaggtgaaccagggata

SEQ ID NO: 5569705 - DNA, 25 bp, Homo sapien
cgggaaaagatccaggtatcaggat

SEQ ID NO: 5569706 - DNA, 25 bp, Homo sapien
aaagctacatggagagctgatgaaa

SEQ ID NO: 5569707 - DNA, 25 bp, Homo sapien
atcccaagccaaatgaaccagagtt

SEQ ID NO: 5569708 - DNA, 25 bp, Homo sapien
ttaatgcccacactgaatcccaagc

SEQ ID NO: 5569709 - DNA, 25 bp, Homo sapien
acagtcaagtagagaatcaaagttc

SEQ ID NO: 5569710 - DNA, 25 bp, Homo sapien
gcagcctcaaactttggactgaagc

SEQ ID NO: 5569711 - DNA, 25 bp, Homo sapien
accctgacgcctatggaataagtat

SEQ ID NO: 5569712 - DNA, 25 bp, Homo sapien
aacagtgcactgtctaggccatatc

SEQ ID NO: 5569713 - DNA, 25 bp, Homo sapien
tagaagaattggagatacccagaag

SEQ ID NO: 5569714 - DNA, 25 bp, Homo sapien
agcactgtgtgggttgaacaacatt

SEQ ID NO: 5569715 - DNA, 25 bp, Homo sapien
tggtaggacattacagctggagata

SEQ ID NO: 5569716 - DNA, 25 bp, Homo sapien
atgtgcactggtaaagataagagga

SEQ ID NO: 5569717 - DNA, 25 bp, Homo sapien
gtaaagataagaggaccatccatat

SEQ ID NO: 5569718 - DNA, 25 bp, Homo sapien
cgtgctacagagactgtgacaactc

SEQ ID NO: 5569719 - DNA, 25 bp, Homo sapien
ggccactgtgtttagatgtaccctg

SEQ ID NO: 5569720 - DNA, 25 bp, Homo sapien
tgtaccctgaagaaggtaccccagc

SEQ ID NO: 5569721 - DNA, 25 bp, Homo sapien
gacttgtgggaattcaactcatgtt

SEQ ID NO: 5569722 - DNA, 25 bp, Homo sapien
tagagaattctcacaaacgtgctac

SEQ ID NO: 5569723 - DNA, 25 bp, Homo sapien
acctctggattatatggtaggacat

SEQ ID NO: 5569724 - DNA, 25 bp, Homo sapien
agggaaacaagaagtctgaatttta

SEQ ID NO: 5569725 - DNA, 25 bp, Homo sapien
taaagatagacaagtggaaaataca

SEQ ID NO: 5569726 - DNA, 25 bp, Homo sapien
ggaaaatacaccaataagagaatta

SEQ ID NO: 5569727 - DNA, 25 bp, Homo sapien
actcctgagctgaagcaatccacct

SEQ ID NO: 5569728 - DNA, 25 bp, Homo sapien
agtacagtggtacaatcttggctcc

SEQ ID NO: 5569729 - DNA, 25 bp, Homo sapien
ctcatcattattgggttgtagtttt

SEQ ID NO: 5569730 - DNA, 25 bp, Homo sapien
gacaaggaagctgtcctattactcc

SEQ ID NO: 5569731 - DNA, 25 bp, Homo sapien
agcaatccacctgacctggactccc

SEQ ID NO: 5569732 - DNA, 25 bp, Homo sapien
aaaaacaggacaaggaagctgtcct

SEQ ID NO: 5569733 - DNA, 25 bp, Homo sapien
ttagtagaaacaggatttcaccata

SEQ ID NO: 5569734 - DNA, 25 bp, Homo sapien
acctggactcccaaaaggctggaat

SEQ ID NO: 5569735 - DNA, 25 bp, Homo sapien
agccactgcacacagcccctaactt

SEQ ID NO: 5569736 - DNA, 25 bp, Homo sapien
gccacacagtataacaagcatatta

SEQ ID NO: 5569737 - DNA, 25 bp, Homo sapien
tgggttggtaacatttcctgtcctc

SEQ ID NO: 5569738 - DNA, 25 bp, Homo sapien
ttcatcatttctatgggttggtaac

SEQ ID NO: 5569739 - DNA, 25 bp, Homo sapien
gtgtagccacacagtataacaagca

SEQ ID NO: 5569740 - DNA, 25 bp, Homo sapien
ctaatggcaaatttgggttatatgc

SEQ ID NO: 5569741 - DNA, 25 bp, Homo sapien
ataatgtcagagtatttggggtatc

SEQ ID NO: 5569742 - DNA, 25 bp, Homo sapien
atttccttaaccagtgtagccacac

SEQ ID NO: 5569743 - DNA, 25 bp, Homo sapien
atgggtacatgtatttgttacacgt

SEQ ID NO: 5569744 - DNA, 25 bp, Homo sapien
aaaatgtataataatgtcagagtat

SEQ ID NO: 5569745 - DNA, 25 bp, Homo sapien
caggaatttccttaaccagtgtagc

SEQ ID NO: 5569746 - DNA, 25 bp, Homo sapien
actcttatgtgcactgactgctctc

SEQ ID NO: 5569747 - DNA, 25 bp, Homo sapien
tctcgcgcctctgaaaccccattga

SEQ ID NO: 5569748 - DNA, 25 bp, Homo sapien
gctccctctctcgcagacgttctgt

SEQ ID NO: 5569749 - DNA, 25 bp, Homo sapien
gtctcggacgtgtgtatgcaccttt

SEQ ID NO: 5569750 - DNA, 25 bp, Homo sapien
gcccgcacaacagaggctgtatgcg

SEQ ID NO: 5569751 - DNA, 25 bp, Homo sapien
gaacgccgctctcgcgcctctgaaa

SEQ ID NO: 5569752 - DNA, 25 bp, Homo sapien
aggcgggaacttgagctccctctct

SEQ ID NO: 5569753 - DNA, 25 bp, Homo sapien
gtatgcacctttgtgggccgggtta

SEQ ID NO: 5569754 - DNA, 25 bp, Homo sapien
aaagcgcatttcattgcaggcctgg

SEQ ID NO: 5569755 - DNA, 25 bp, Homo sapien
accccattgagaagaaccctttgat

SEQ ID NO: 5569756 - DNA, 25 bp, Homo sapien
catcagaaaagcgtacccataaaca

SEQ ID NO: 5569757 - DNA, 25 bp, Homo sapien
ctgtaacatcagaaaagcgtaccca

SEQ ID NO: 5569758 - DNA, 25 bp, Homo sapien
gcctgtgtgggagcagttttcccag

SEQ ID NO: 5569759 - DNA, 25 bp, Homo sapien
gagaaccactaggagaatcaagatc

SEQ ID NO: 5569760 - DNA, 25 bp, Homo sapien
acgagaaagaaggctagcactttca

SEQ ID NO: 5569761 - DNA, 25 bp, Homo sapien
tggaggcaagttgattctgagtttc

SEQ ID NO: 5569762 - DNA, 25 bp, Homo sapien
cttattccagccacgagaaagaagg

SEQ ID NO: 5569763 - DNA, 25 bp, Homo sapien
gactggccaagaaagtgaatgtcaa

SEQ ID NO: 5569764 - DNA, 25 bp, Homo sapien
tcttttttgcaggtgagaccaggag

SEQ ID NO: 5569765 - DNA, 25 bp, Homo sapien
caaaatagtgagttgtgggattacc

SEQ ID NO: 5569766 - DNA, 25 bp, Homo sapien
gctttctcttaggtggctgcaattc

SEQ ID NO: 5569767 - DNA, 25 bp, Homo sapien
tgggattaccagtccgggtatcagc

SEQ ID NO: 5569768 - DNA, 25 bp, Homo sapien
gcacagctctggggaatgtttccca

SEQ ID NO: 5569769 - DNA, 25 bp, Homo sapien
atgttggaggttggtctaattgaac

SEQ ID NO: 5569770 - DNA, 25 bp, Homo sapien
aaaatggaaggatctgggttatttg

SEQ ID NO: 5569771 - DNA, 25 bp, Homo sapien
gttcagcaatgcaatgagctgcttt

SEQ ID NO: 5569772 - DNA, 25 bp, Homo sapien
cctgagttcaagtcaaggctctatg

SEQ ID NO: 5569773 - DNA, 25 bp, Homo sapien
acttatggagaaacagattttagct

SEQ ID NO: 5569774 - DNA, 25 bp, Homo sapien
ttggtcattgtccttcggagctccc

SEQ ID NO: 5569775 - DNA, 25 bp, Homo sapien
tgaagagttatcacatgcatgagac

SEQ ID NO: 5569776 - DNA, 25 bp, Homo sapien
tttccagcaaagacgttcagcaatg

SEQ ID NO: 5569777 - DNA, 25 bp, Homo sapien
agaggaagtctgtgttctatgttgg

SEQ ID NO: 5569778 - DNA, 25 bp, Homo sapien
ttggagaccatgtcaagtgagcaaa

SEQ ID NO: 5569779 - DNA, 25 bp, Homo sapien
tcattggacttgtttaggtggcagc

SEQ ID NO: 5569780 - DNA, 25 bp, Homo sapien
agactaggtggaatatccaggaatg

SEQ ID NO: 5569781 - DNA, 25 bp, Homo sapien
acatggctcacagagttgttgggaa

SEQ ID NO: 5569782 - DNA, 25 bp, Homo sapien
gagataaatgggtggtctgatactc

SEQ ID NO: 5569783 - DNA, 25 bp, Homo sapien
gagtgagccaaatccagtatatgcc

SEQ ID NO: 5569784 - DNA, 25 bp, Homo sapien
ccacacaatgagtgggccaccaagg

SEQ ID NO: 5569785 - DNA, 25 bp, Homo sapien
gaaagctaaagaaacagactaggtg

SEQ ID NO: 5569786 - DNA, 25 bp, Homo sapien
gtctggaacctagctcaagggaatc

SEQ ID NO: 5569787 - DNA, 25 bp, Homo sapien
gctggctccagaaccgtgtcttgca

SEQ ID NO: 5569788 - DNA, 25 bp, Homo sapien
tagtccaggaagatacagtagatga

SEQ ID NO: 5569789 - DNA, 25 bp, Homo sapien
ggaataccacgtgtgagtgagccaa

SEQ ID NO: 5569790 - DNA, 25 bp, Homo sapien
gctgcctattgagtcaggatgctac

SEQ ID NO: 5569791 - DNA, 25 bp, Homo sapien
tgtttgttagatgacatgaaaagtc

SEQ ID NO: 5569792 - DNA, 25 bp, Homo sapien
tgtggcaagcaatgtgtaagtgctc

SEQ ID NO: 5569793 - DNA, 25 bp, Homo sapien
tgctgacctctgagtcaatatccac

SEQ ID NO: 5569794 - DNA, 25 bp, Homo sapien
taaatggtgcctattattaccggta

SEQ ID NO: 5569795 - DNA, 25 bp, Homo sapien
taccacaatgtggcaagcaatgtgt

SEQ ID NO: 5569796 - DNA, 25 bp, Homo sapien
gaagcagggcactatctctggagta

SEQ ID NO: 5569797 - DNA, 25 bp, Homo sapien
ctggagtaaaacttccgctgagctc

SEQ ID NO: 5569798 - DNA, 25 bp, Homo sapien
ttggtacacatgactatgaaggttt

SEQ ID NO: 5569799 - DNA, 25 bp, Homo sapien
tggagaaaaagtgtgtagttcttcc

SEQ ID NO: 5569800 - DNA, 25 bp, Homo sapien
gcatgaatacctaccacaatgtggc

SEQ ID NO: 5569801 - DNA, 25 bp, Homo sapien
aagacccttggagaaaaagtgtgta

SEQ ID NO: 5569802 - DNA, 25 bp, Homo sapien
agcagcaatttggagtggtgctagc

SEQ ID NO: 5569803 - DNA, 25 bp, Homo sapien
tcgcacgatggtctgaatatgattt

SEQ ID NO: 5569804 - DNA, 25 bp, Homo sapien
aggccagagatataaccatcgcacg

SEQ ID NO: 5569805 - DNA, 25 bp, Homo sapien
gtgtgtcaggcagtctaaagtccct

SEQ ID NO: 5569806 - DNA, 25 bp, Homo sapien
tcccatcctgcagccgtccaaacct

SEQ ID NO: 5569807 - DNA, 25 bp, Homo sapien
gcaatgagttatgctccactggtca

SEQ ID NO: 5569808 - DNA, 25 bp, Homo sapien
ctagtgagaaagcaagctccctttt

SEQ ID NO: 5569809 - DNA, 25 bp, Homo sapien
ttttgaagcagcaatttggagtggt

SEQ ID NO: 5569810 - DNA, 25 bp, Homo sapien
cactgttttcccatccagctgcccc

SEQ ID NO: 5569811 - DNA, 25 bp, Homo sapien
taaataggatgtattggtccatgta

SEQ ID NO: 5569812 - DNA, 25 bp, Homo sapien
ggggctgactgacctcttttgaagc

SEQ ID NO: 5569813 - DNA, 25 bp, Homo sapien
agagaggattgttggcttcagattt

SEQ ID NO: 5569814 - DNA, 25 bp, Homo sapien
gtgctctccgacaacgagcagccct

SEQ ID NO: 5569815 - DNA, 25 bp, Homo sapien
gagcaggtccaacccaaggattgct

SEQ ID NO: 5569816 - DNA, 25 bp, Homo sapien
gacccccctcacctgacgtgattgt

SEQ ID NO: 5569817 - DNA, 25 bp, Homo sapien
cctcacacagtgacatgaagtccga

SEQ ID NO: 5569818 - DNA, 25 bp, Homo sapien
cacacagtgacatgaagtccgagag

SEQ ID NO: 5569819 - DNA, 25 bp, Homo sapien
cctgacgtgattgtgctctccgaca

SEQ ID NO: 5569820 - DNA, 25 bp, Homo sapien
tccaacccaaggattgctgagggca

SEQ ID NO: 5569821 - DNA, 25 bp, Homo sapien
ttcagatttaaacactgacggagac

SEQ ID NO: 5569822 - DNA, 25 bp, Homo sapien
atttaaacactgacggagacatgag

SEQ ID NO: 5569823 - DNA, 25 bp, Homo sapien
gtggacatgcgcacctcacacagtg

SEQ ID NO: 5569824 - DNA, 25 bp, Homo sapien
atttggtatcaaaagacataacatt

SEQ ID NO: 5569825 - DNA, 25 bp, Homo sapien
ctgaaaaaacatcaaagtgccgctt

SEQ ID NO: 5569826 - DNA, 25 bp, Homo sapien
aaggcagtataggttcaaaaggcaa

SEQ ID NO: 5569827 - DNA, 25 bp, Homo sapien
aggcacagaggctgttgcttcacaa

SEQ ID NO: 5569828 - DNA, 25 bp, Homo sapien
agactagaccgtcaacagagcatgc

SEQ ID NO: 5569829 - DNA, 25 bp, Homo sapien
taggagacaacctgatcagccacca

SEQ ID NO: 5569830 - DNA, 25 bp, Homo sapien
gagatcatgaaaacacagcacgcag

SEQ ID NO: 5569831 - DNA, 25 bp, Homo sapien
aggcctaagagttgctaggaaggct

SEQ ID NO: 5569832 - DNA, 25 bp, Homo sapien
agcagcaggttctctctcaagacta

SEQ ID NO: 5569833 - DNA, 25 bp, Homo sapien
gggataaatatccacagtgatactt

SEQ ID NO: 5569834 - DNA, 25 bp, Homo sapien
catcaaagtgccgctttgggggaga

SEQ ID NO: 5569835 - DNA, 25 bp, Homo sapien
caagctgcagtacttctagtggaga

SEQ ID NO: 5569836 - DNA, 25 bp, Homo sapien
ccgataaaaatgggctaagtgaaga

SEQ ID NO: 5569837 - DNA, 25 bp, Homo sapien
ggctaagtgaagactggataacatt

SEQ ID NO: 5569838 - DNA, 25 bp, Homo sapien
cttctagtggagatagaagacagga

SEQ ID NO: 5569839 - DNA, 25 bp, Homo sapien
ctagacctgatcagaccctgccagc

SEQ ID NO: 5569840 - DNA, 25 bp, Homo sapien
tttcctaatgccgataaaaatgggc

SEQ ID NO: 5569841 - DNA, 25 bp, Homo sapien
aagaccagactgctaaatcaataac

SEQ ID NO: 5569842 - DNA, 25 bp, Homo sapien
taatataggaatactagatagataa

SEQ ID NO: 5569843 - DNA, 25 bp, Homo sapien
gaaagcagatcatataagaccagac

SEQ ID NO: 5569844 - DNA, 25 bp, Homo sapien
agatagataattagaaagcagatca

SEQ ID NO: 5569845 - DNA, 25 bp, Homo sapien
ccctgccagcagatgataacccaga

SEQ ID NO: 5569846 - DNA, 25 bp, Homo sapien
caagctagattcaaacctgggtaag

SEQ ID NO: 5569847 - DNA, 25 bp, Homo sapien
tgaaatgcaataaaacgagcagtgc

SEQ ID NO: 5569848 - DNA, 25 bp, Homo sapien
acgagcagtgcttgtacaaatgagc

SEQ ID NO: 5569849 - DNA, 25 bp, Homo sapien
gagagctgaatggtgcatccaatat

SEQ ID NO: 5569850 - DNA, 25 bp, Homo sapien
gtacaaatgagcaagatgaagcaaa

SEQ ID NO: 5569851 - DNA, 25 bp, Homo sapien
ttaaacatacccaaggccacatagc

SEQ ID NO: 5569852 - DNA, 25 bp, Homo sapien
cagtgctatagcacacggcttagcc

SEQ ID NO: 5569853 - DNA, 25 bp, Homo sapien
acctgggtaagatagctccagtgct

SEQ ID NO: 5569854 - DNA, 25 bp, Homo sapien
agatgaagcaaagtaaggttaaaca

SEQ ID NO: 5569855 - DNA, 25 bp, Homo sapien
atcccacacaaggttgccaaaaact

SEQ ID NO: 5569856 - DNA, 25 bp, Homo sapien
tagaaaatggccaagctagattcaa

SEQ ID NO: 5569857 - DNA, 25 bp, Homo sapien
gtgtcaagaaggatatagagtcatg

SEQ ID NO: 5569858 - DNA, 25 bp, Homo sapien
ttcacataactgactgatgcaggta

SEQ ID NO: 5569859 - DNA, 25 bp, Homo sapien
tgatgcaggtaaattcttgtaagtt

SEQ ID NO: 5569860 - DNA, 25 bp, Homo sapien
cctcctaaaaagcacaagggccttg

SEQ ID NO: 5569861 - DNA, 25 bp, Homo sapien
aggatatagagtcatgagagattta

SEQ ID NO: 5569862 - DNA, 25 bp, Homo sapien
tgtgtgtgaggtaataagtgaaata

SEQ ID NO: 5569863 - DNA, 25 bp, Homo sapien
ctgagtagatgatggccttctttat

SEQ ID NO: 5569864 - DNA, 25 bp, Homo sapien
ccacttaggtaaaggctgagtagat

SEQ ID NO: 5569865 - DNA, 25 bp, Homo sapien
caagggccttgtgtacgctgaaata

SEQ ID NO: 5569866 - DNA, 25 bp, Homo sapien
aagttaaatgcgcaaaagacaggat

SEQ ID NO: 5569867 - DNA, 25 bp, Homo sapien
ttggttaggtgtcaagaaggatata

SEQ ID NO: 5569868 - DNA, 25 bp, Homo sapien
aggggactgtttgacaccaccactt

SEQ ID NO: 5569869 - DNA, 25 bp, Homo sapien
tagaggtaagactaggcacatctca

SEQ ID NO: 5569870 - DNA, 25 bp, Homo sapien
attaaagcaaccgtactaaagcaat

SEQ ID NO: 5569871 - DNA, 25 bp, Homo sapien
agcagttaggacacctccccagagt

SEQ ID NO: 5569872 - DNA, 25 bp, Homo sapien
gaattgtaaatgaatgtgagagtgc

SEQ ID NO: 5569873 - DNA, 25 bp, Homo sapien
ctaaagcaattgtgaggaatgcctt

SEQ ID NO: 5569874 - DNA, 25 bp, Homo sapien
gcctttgttaggaaacagctgaggg

SEQ ID NO: 5569875 - DNA, 25 bp, Homo sapien
taggaaagctgacctagcagttagg

SEQ ID NO: 5569876 - DNA, 25 bp, Homo sapien
accaccacttgtagaggtaagacta

SEQ ID NO: 5569877 - DNA, 25 bp, Homo sapien
gagaggccctatatttaaaagattc

SEQ ID NO: 5569878 - DNA, 25 bp, Homo sapien
acagctgagggttattccaagttgg

SEQ ID NO: 5569879 - DNA, 25 bp, Homo sapien
attgatagtgagtccttgggctgca

SEQ ID NO: 5569880 - DNA, 25 bp, Homo sapien
tggtggcaagtccctctacagcaag

SEQ ID NO: 5569881 - DNA, 25 bp, Homo sapien
cagcaaggaatttgatgatgagaac

SEQ ID NO: 5569882 - DNA, 25 bp, Homo sapien
ctggcgtcttgtccacggcaaatgc

SEQ ID NO: 5569883 - DNA, 25 bp, Homo sapien
gatggatgacagcatgtggtctttg

SEQ ID NO: 5569884 - DNA, 25 bp, Homo sapien
gtgctctgaacactggagagaaagt

SEQ ID NO: 5569885 - DNA, 25 bp, Homo sapien
tggtctttggcaaggtgaaagatgg

SEQ ID NO: 5569886 - DNA, 25 bp, Homo sapien
tctgtactgccaagacagaggatgg

SEQ ID NO: 5569887 - DNA, 25 bp, Homo sapien
ccagccatggccaaccccactgtgt

SEQ ID NO: 5569888 - DNA, 25 bp, Homo sapien
cggcaaatgctggacccaccacaaa

SEQ ID NO: 5569889 - DNA, 25 bp, Homo sapien
tcctaagcatacagctcctggcgtc

SEQ ID NO: 5569890 - DNA, 25 bp, Homo sapien
ggttcttctgcggctgtgaacttgg

SEQ ID NO: 5569891 - DNA, 25 bp, Homo sapien
ttggcgtcaatgaaggaactactta

SEQ ID NO: 5569892 - DNA, 25 bp, Homo sapien
atgagacaggacacgcctgcaaaaa

SEQ ID NO: 5569893 - DNA, 25 bp, Homo sapien
cttaggcatgaaaagatttgagatg

SEQ ID NO: 5569894 - DNA, 25 bp, Homo sapien
taaataaaagacatttggcgtcaat

SEQ ID NO: 5569895 - DNA, 25 bp, Homo sapien
actcccaatgtggagaagaacgtgg

SEQ ID NO: 5569896 - DNA, 25 bp, Homo sapien
aaaagatttgagatgagagttcagg

SEQ ID NO: 5569897 - DNA, 25 bp, Homo sapien
gacacgcctgcaaaaaactcccaat

SEQ ID NO: 5569898 - DNA, 25 bp, Homo sapien
aggtgggaatgcaagcatacactca

SEQ ID NO: 5569899 - DNA, 25 bp, Homo sapien
tgtagccgaataagctttacctccc

SEQ ID NO: 5569900 - DNA, 25 bp, Homo sapien
tgaacttggacggattgtgtcctct

SEQ ID NO: 5569901 - DNA, 25 bp, Homo sapien
cacacttgaatcatggatgtctgtc

SEQ ID NO: 5569902 - DNA, 25 bp, Homo sapien
aagggctccacactatctggcaagt

SEQ ID NO: 5569903 - DNA, 25 bp, Homo sapien
tgcaagagtacattatagtcacctc

SEQ ID NO: 5569904 - DNA, 25 bp, Homo sapien
gtctgtctaattcatggtaaggtct

SEQ ID NO: 5569905 - DNA, 25 bp, Homo sapien
gtaaggtctatgagtgcaagagtac

SEQ ID NO: 5569906 - DNA, 25 bp, Homo sapien
ctccataatatggccccagcctgtc

SEQ ID NO: 5569907 - DNA, 25 bp, Homo sapien
catgtctgactttggcatatccttc

SEQ ID NO: 5569908 - DNA, 25 bp, Homo sapien
tctggtgaatcgtcacagcatgact

SEQ ID NO: 5569909 - DNA, 25 bp, Homo sapien
tcccagcccggcacctttctggtga

SEQ ID NO: 5569910 - DNA, 25 bp, Homo sapien
cccagctcagaaagccctaagggct

SEQ ID NO: 5569911 - DNA, 25 bp, Homo sapien
tgcatgtcatccccaatcccttcga

SEQ ID NO: 5569912 - DNA, 25 bp, Homo sapien
aatgtcactgtaaagataagacaaa

SEQ ID NO: 5569913 - DNA, 25 bp, Homo sapien
atagtggttcagtattacaagaata

SEQ ID NO: 5569914 - DNA, 25 bp, Homo sapien
gttcacatcagaagttaatagcact

SEQ ID NO: 5569915 - DNA, 25 bp, Homo sapien
gtgttacacagtacgacagtaatac

SEQ ID NO: 5569916 - DNA, 25 bp, Homo sapien
gtcaaaagctatagttcacatcaga

SEQ ID NO: 5569917 - DNA, 25 bp, Homo sapien
tacaagaataggatgtgttacacag

SEQ ID NO: 5569918 - DNA, 25 bp, Homo sapien
taatgtatccataatgaaagattcc

SEQ ID NO: 5569919 - DNA, 25 bp, Homo sapien
actgctgtgttccctcagatggcat

SEQ ID NO: 5569920 - DNA, 25 bp, Homo sapien
tcacttggctaatttggctactaat

SEQ ID NO: 5569921 - DNA, 25 bp, Homo sapien
aaaaattctcagcagttgggtatat

SEQ ID NO: 5569922 - DNA, 25 bp, Homo sapien
ctcagatggcataaatcacttggct

SEQ ID NO: 5569923 - DNA, 25 bp, Homo sapien
acaagagcgctataaaggcccatgc

SEQ ID NO: 5569924 - DNA, 25 bp, Homo sapien
gcatgggcctttatagcgctcttgt

SEQ ID NO: 5569925 - DNA, 25 bp, Homo sapien
ttggcctcgccccttgtgattctgt

SEQ ID NO: 5569926 - DNA, 25 bp, Homo sapien
gagagcagatttcttggcctcgccc

SEQ ID NO: 5569927 - DNA, 25 bp, Homo sapien
ttaagttatcacttggagagcagat

SEQ ID NO: 5569928 - DNA, 25 bp, Homo sapien
cttgtgattctgtttgaggggtgtg

SEQ ID NO: 5569929 - DNA, 25 bp, Homo sapien
agtttaagtgtcacctgaagagcat

SEQ ID NO: 5569930 - DNA, 25 bp, Homo sapien
aaagagatgacaatctagttggaga

SEQ ID NO: 5569931 - DNA, 25 bp, Homo sapien
actgaagatacacaagaacgtaatc

SEQ ID NO: 5569932 - DNA, 25 bp, Homo sapien
ttagaaacacttctgtgtcaggcac

SEQ ID NO: 5569933 - DNA, 25 bp, Homo sapien
cctgaagagcatgttaaaaagttta

SEQ ID NO: 5569934 - DNA, 25 bp, Homo sapien
aggggtgtgcagatgttacttttag

SEQ ID NO: 5569935 - DNA, 25 bp, Homo sapien
aaggccaacacagaaaaagatacaa

SEQ ID NO: 5569936 - DNA, 25 bp, Homo sapien
catagagctcatgacacataatagg

SEQ ID NO: 5569937 - DNA, 25 bp, Homo sapien
tccccattgaggagtctcgattacc

SEQ ID NO: 5569938 - DNA, 25 bp, Homo sapien
gggccagatgagcactgactttccc

SEQ ID NO: 5569939 - DNA, 25 bp, Homo sapien
atgcatagctgggttcaagagttct

SEQ ID NO: 5569940 - DNA, 25 bp, Homo sapien
ttcagctcaacaggcacactagggg

SEQ ID NO: 5569941 - DNA, 25 bp, Homo sapien
cataataggtattcactgagcattt

SEQ ID NO: 5569942 - DNA, 25 bp, Homo sapien
agcgctgagtgaaacctcaaaatac

SEQ ID NO: 5569943 - DNA, 25 bp, Homo sapien
ctgagcatttggtgatttgttaagc

SEQ ID NO: 5569944 - DNA, 25 bp, Homo sapien
ttgtgatcactgtatagcgctgagt

SEQ ID NO: 5569945 - DNA, 25 bp, Homo sapien
ttctggaatttgtaagggatgcttt

SEQ ID NO: 5569946 - DNA, 25 bp, Homo sapien
tacgactgtatgaaaaaaagctacc

SEQ ID NO: 5569947 - DNA, 25 bp, Homo sapien
aattgtctgttttagtagtacactt

SEQ ID NO: 5569948 - DNA, 25 bp, Homo sapien
aataaaagtgagacaaaaaggataa

SEQ ID NO: 5569949 - DNA, 25 bp, Homo sapien
ttacacgtaccataacagtagattc

SEQ ID NO: 5569950 - DNA, 25 bp, Homo sapien
ttccaaaaagcacaagactattatt

SEQ ID NO: 5569951 - DNA, 25 bp, Homo sapien
tattcttgcgatagaaataattttc

SEQ ID NO: 5569952 - DNA, 25 bp, Homo sapien
ctcaagaacaactgtgaaatatcac

SEQ ID NO: 5569953 - DNA, 25 bp, Homo sapien
taacagtagattcttagaggattcc

SEQ ID NO: 5569954 - DNA, 25 bp, Homo sapien
tattattcaaacaaaggaaaatctc

SEQ ID NO: 5569955 - DNA, 25 bp, Homo sapien
gtttagtatttaagtgacatcataa

SEQ ID NO: 5569956 - DNA, 25 bp, Homo sapien
aaaaaggataaaaagtcatacactc

SEQ ID NO: 5569957 - DNA, 25 bp, Homo sapien
caccaataagtcttccaaaaagcac

SEQ ID NO: 5569958 - DNA, 25 bp, Homo sapien
gagggagaaagtaactaacagataa

SEQ ID NO: 5569959 - DNA, 25 bp, Homo sapien
tgaagaatgcattatcagtgctcac

SEQ ID NO: 5569960 - DNA, 25 bp, Homo sapien
ctcactagatgcaactgactgtccc

SEQ ID NO: 5569961 - DNA, 25 bp, Homo sapien
ccatgaagtgacaaataaaagtgat

SEQ ID NO: 5569962 - DNA, 25 bp, Homo sapien
tccagactccccatcagacacagtt

SEQ ID NO: 5569963 - DNA, 25 bp, Homo sapien
actgggaaaagtctgcccatgtgcc

SEQ ID NO: 5569964 - DNA, 25 bp, Homo sapien
ccctgggaaaggtcacttgactcca

SEQ ID NO: 5569965 - DNA, 25 bp, Homo sapien
gtgtactctgaagcccaggaacagc

SEQ ID NO: 5569966 - DNA, 25 bp, Homo sapien
cgttggaactcagaaggtgtcaaga

SEQ ID NO: 5569967 - DNA, 25 bp, Homo sapien
tgccagcctctgaaagacaccaatt

SEQ ID NO: 5569968 - DNA, 25 bp, Homo sapien
ttctcaggaaagaccatgaacttac

SEQ ID NO: 5569969 - DNA, 25 bp, Homo sapien
gagaaagaagctgttaagccaaaat

SEQ ID NO: 5569970 - DNA, 25 bp, Homo sapien
cagaaagggaactataacgttttca

SEQ ID NO: 5569971 - DNA, 25 bp, Homo sapien
tttcaggcaggcctaagatgagaaa

SEQ ID NO: 5569972 - DNA, 25 bp, Homo sapien
cagaaaaaacaggagtgacatttac

SEQ ID NO: 5569973 - DNA, 25 bp, Homo sapien
tcattgaaaccaccgcctgccagaa

SEQ ID NO: 5569974 - DNA, 25 bp, Homo sapien
ctgagaggggtgtatctccatttta

SEQ ID NO: 5569975 - DNA, 25 bp, Homo sapien
acgacctcgctgaatcaccacaacc

SEQ ID NO: 5569976 - DNA, 25 bp, Homo sapien
gcaggtattgtctaaaggggctttc

SEQ ID NO: 5569977 - DNA, 25 bp, Homo sapien
aaggggctttcacagccacgacctc

SEQ ID NO: 5569978 - DNA, 25 bp, Homo sapien
acaccgactctgtgcaggtattgtc

SEQ ID NO: 5569979 - DNA, 25 bp, Homo sapien
caattagactttaggcagcctgtcc

SEQ ID NO: 5569980 - DNA, 25 bp, Homo sapien
cctaattgttcaagagaaacccagg

SEQ ID NO: 5569981 - DNA, 25 bp, Homo sapien
gtatacagcctggtgagttggaaac

SEQ ID NO: 5569982 - DNA, 25 bp, Homo sapien
cttctgctcctggctaccctaattc

SEQ ID NO: 5569983 - DNA, 25 bp, Homo sapien
ggcaataatgcagccctaccttctc

SEQ ID NO: 5569984 - DNA, 25 bp, Homo sapien
cttgtgatttcttgggcctcagtga

SEQ ID NO: 5569985 - DNA, 25 bp, Homo sapien
gaaacccaggaatctacctggcctc

SEQ ID NO: 5569986 - DNA, 25 bp, Homo sapien
cctatttagatagcactggcagata

SEQ ID NO: 5569987 - DNA, 25 bp, Homo sapien
ctaattcagcaaacggtactaactt

SEQ ID NO: 5569988 - DNA, 25 bp, Homo sapien
accatcttaacgtctgcagccctga

SEQ ID NO: 5569989 - DNA, 25 bp, Homo sapien
tctctcacaaacctgcttctgctcc

SEQ ID NO: 5569990 - DNA, 25 bp, Homo sapien
ttttaatgtgagaattcatgccttg

SEQ ID NO: 5569991 - DNA, 25 bp, Homo sapien
catgaatcgttaaagaaattacaat

SEQ ID NO: 5569992 - DNA, 25 bp, Homo sapien
caatacaaacaaggacatgtgcaaa

SEQ ID NO: 5569993 - DNA, 25 bp, Homo sapien
tccagtaagataatttaatagatat

SEQ ID NO: 5569994 - DNA, 25 bp, Homo sapien
aagtttgttaaaaacatgtgatttc

SEQ ID NO: 5569995 - DNA, 25 bp, Homo sapien
tacaattagattcagcaactctgat

SEQ ID NO: 5569996 - DNA, 25 bp, Homo sapien
actatacataccacttcctacatcc

SEQ ID NO: 5569997 - DNA, 25 bp, Homo sapien
acaaggacatgtgcaaagatgtgat

SEQ ID NO: 5569998 - DNA, 25 bp, Homo sapien
acttcctacatccgtgatccagacg

SEQ ID NO: 5569999 - DNA, 25 bp, Homo sapien
gcaaagatgtgatttccagtaagat

SEQ ID NO: 5570000 - DNA, 25 bp, Homo sapien
aatatccatcctctgtgaacactaa

SEQ ID NO: 5570001 - DNA, 25 bp, Homo sapien
attccacagaagtacaaaataaagt

SEQ ID NO: 5570002 - DNA, 25 bp, Homo sapien
taagatgttgttgaggacaagtctt

SEQ ID NO: 5570003 - DNA, 25 bp, Homo sapien
tttaggatattagggtataattctc

SEQ ID NO: 5570004 - DNA, 25 bp, Homo sapien
tcaactcgggttcagccaaagaatt

SEQ ID NO: 5570005 - DNA, 25 bp, Homo sapien
atttgccatctgaagtaaaactttg

SEQ ID NO: 5570006 - DNA, 25 bp, Homo sapien
atgatgtaggtaatacagtaagatt

SEQ ID NO: 5570007 - DNA, 25 bp, Homo sapien
cacaccagctgacctttaagatgtt

SEQ ID NO: 5570008 - DNA, 25 bp, Homo sapien
tacaaaatgccttcggatagatgac

SEQ ID NO: 5570009 - DNA, 25 bp, Homo sapien
tcggatagatgactagaaataaaaa

SEQ ID NO: 5570010 - DNA, 25 bp, Homo sapien
ttgagaaaggctgcatgatgattct

SEQ ID NO: 5570011 - DNA, 25 bp, Homo sapien
ctcccaggaatgagtaagttaattc

SEQ ID NO: 5570012 - DNA, 25 bp, Homo sapien
ttctgctgctattcatcctggagtc

SEQ ID NO: 5570013 - DNA, 25 bp, Homo sapien
agaacaagcaattcagctgcagctc

SEQ ID NO: 5570014 - DNA, 25 bp, Homo sapien
aggagctcacaagcagagtgttgag

SEQ ID NO: 5570015 - DNA, 25 bp, Homo sapien
gaggaaggatatccattggccacac

SEQ ID NO: 5570016 - DNA, 25 bp, Homo sapien
tagaagccaggacaactttaccctc

SEQ ID NO: 5570017 - DNA, 25 bp, Homo sapien
catggcactgccccactgcacgaga

SEQ ID NO: 5570018 - DNA, 25 bp, Homo sapien
ccattggccacacactcaggatctg

SEQ ID NO: 5570019 - DNA, 25 bp, Homo sapien
tcatctacagggttagaagccagga

SEQ ID NO: 5570020 - DNA, 25 bp, Homo sapien
acccaaacacacaacagggaaggag

SEQ ID NO: 5570021 - DNA, 25 bp, Homo sapien
ataaaaggagatgctgtatgctata

SEQ ID NO: 5570022 - DNA, 25 bp, Homo sapien
tgagcaacagaggtcagacataaaa

SEQ ID NO: 5570023 - DNA, 25 bp, Homo sapien
acctgcccaaaggcctgtcaactgc

SEQ ID NO: 5570024 - DNA, 25 bp, Homo sapien
ggttacagatgatagtgtagcggga

SEQ ID NO: 5570025 - DNA, 25 bp, Homo sapien
caggcattgcagtgtttgttggttc

SEQ ID NO: 5570026 - DNA, 25 bp, Homo sapien
aaaatgttgagtgcgttatggttac

SEQ ID NO: 5570027 - DNA, 25 bp, Homo sapien
ccagggctttgtcaagattggggag

SEQ ID NO: 5570028 - DNA, 25 bp, Homo sapien
caagcactgtgcaggctaatggcta

SEQ ID NO: 5570029 - DNA, 25 bp, Homo sapien
atctttgagtgaagcaacaatcctt

SEQ ID NO: 5570030 - DNA, 25 bp, Homo sapien
attggggagacttctgaagtgccaa

SEQ ID NO: 5570031 - DNA, 25 bp, Homo sapien
tctaagaaaatgtacggaccctgtc

SEQ ID NO: 5570032 - DNA, 25 bp, Homo sapien
taatcttatcaacaggaggccctcc

SEQ ID NO: 5570033 - DNA, 25 bp, Homo sapien
gatattcttatcaacgggaggcccg

SEQ ID NO: 5570034 - DNA, 25 bp, Homo sapien
tggctaagtgagggattctaagaaa

SEQ ID NO: 5570035 - DNA, 25 bp, Homo sapien
gagaaacacaggaatgtacctgagg

SEQ ID NO: 5570036 - DNA, 25 bp, Homo sapien
ctgataaaaactagcaatgagaagc

SEQ ID NO: 5570037 - DNA, 25 bp, Homo sapien
agcagtcataaaagaacaagtaatc

SEQ ID NO: 5570038 - DNA, 25 bp, Homo sapien
aagatgactatttgtgattggtgta

SEQ ID NO: 5570039 - DNA, 25 bp, Homo sapien
caagtaatcctggggataaggagtg

SEQ ID NO: 5570040 - DNA, 25 bp, Homo sapien
cagccctcctagagaagggtgtcca

SEQ ID NO: 5570041 - DNA, 25 bp, Homo sapien
cgaagaacaacacccaccatagcaa

SEQ ID NO: 5570042 - DNA, 25 bp, Homo sapien
ggaacacagcaatcatagtatgccc

SEQ ID NO: 5570043 - DNA, 25 bp, Homo sapien
aggaatgtacctgaggaacacagca

SEQ ID NO: 5570044 - DNA, 25 bp, Homo sapien
accaagtcagttaggttaggggatc

SEQ ID NO: 5570045 - DNA, 25 bp, Homo sapien
gaagctttgaaggagaaaagcagtc

SEQ ID NO: 5570046 - DNA, 25 bp, Homo sapien
cctacaaatatgaggaggaaaaacc

SEQ ID NO: 5570047 - DNA, 25 bp, Homo sapien
gctaagggagcttcacatgaaagcc

SEQ ID NO: 5570048 - DNA, 25 bp, Homo sapien
accacagaaataaatcagagccttt

SEQ ID NO: 5570049 - DNA, 25 bp, Homo sapien
ttccatgccaaatgagctgagcttc

SEQ ID NO: 5570050 - DNA, 25 bp, Homo sapien
aaaagttaccttacagataccagct

SEQ ID NO: 5570051 - DNA, 25 bp, Homo sapien
attttaagaggaaaagtcaagtcca

SEQ ID NO: 5570052 - DNA, 25 bp, Homo sapien
attaggttttaaaaggagtgacaga

SEQ ID NO: 5570053 - DNA, 25 bp, Homo sapien
aggaaaaacctagccacggcacatt

SEQ ID NO: 5570054 - DNA, 25 bp, Homo sapien
aaggagtgacagaatgtcttgaatc

SEQ ID NO: 5570055 - DNA, 25 bp, Homo sapien
tttgaccaatgctgagctaagggag

SEQ ID NO: 5570056 - DNA, 25 bp, Homo sapien
agtccactgaaggaatttaacagat

SEQ ID NO: 5570057 - DNA, 25 bp, Homo sapien
atttctctgctggaaggagtgtgtg

SEQ ID NO: 5570058 - DNA, 25 bp, Homo sapien
taccccgttagcaccccatcaccac

SEQ ID NO: 5570059 - DNA, 25 bp, Homo sapien
ccctctgcacccaaaggaaagtttg

SEQ ID NO: 5570060 - DNA, 25 bp, Homo sapien
aatggaggtccttcaacacaaaaac

SEQ ID NO: 5570061 - DNA, 25 bp, Homo sapien
ccaattggagaaaatgacattagat

SEQ ID NO: 5570062 - DNA, 25 bp, Homo sapien
taatactctgtgactgccaactctc

SEQ ID NO: 5570063 - DNA, 25 bp, Homo sapien
caaatacacatccaaagcctccctc

SEQ ID NO: 5570064 - DNA, 25 bp, Homo sapien
aagtttggagctgtctctagggagg

SEQ ID NO: 5570065 - DNA, 25 bp, Homo sapien
aacacaaaaacatgagaccagggaa

SEQ ID NO: 5570066 - DNA, 25 bp, Homo sapien
tgagactacaggccaagagttgtat

SEQ ID NO: 5570067 - DNA, 25 bp, Homo sapien
tagatctgtgaaccaaagagcctat

SEQ ID NO: 5570068 - DNA, 25 bp, Homo sapien
tcttgagcttgcggatagcagcatt

SEQ ID NO: 5570069 - DNA, 25 bp, Homo sapien
tggtggttagaatctctgggatctc

SEQ ID NO: 5570070 - DNA, 25 bp, Homo sapien
gcagcactcaggtcccttgggctca

SEQ ID NO: 5570071 - DNA, 25 bp, Homo sapien
tggtggttcccaaatcccatggcct

SEQ ID NO: 5570072 - DNA, 25 bp, Homo sapien
gtccccttcagtagcaatgagtgcc

SEQ ID NO: 5570073 - DNA, 25 bp, Homo sapien
agcagcattggtgtccccttcagta

SEQ ID NO: 5570074 - DNA, 25 bp, Homo sapien
gcctgtagattggcatggtggttcc

SEQ ID NO: 5570075 - DNA, 25 bp, Homo sapien
acaaatctcaggagcttgcagaggg

SEQ ID NO: 5570076 - DNA, 25 bp, Homo sapien
tagcaatgagtgcctgtagattggc

SEQ ID NO: 5570077 - DNA, 25 bp, Homo sapien
gcaggactgttccaggcttgtggca

SEQ ID NO: 5570078 - DNA, 25 bp, Homo sapien
agtacaagacacattggttgataac

SEQ ID NO: 5570079 - DNA, 25 bp, Homo sapien
agagtggaaaacctcaggatgtttc

SEQ ID NO: 5570080 - DNA, 25 bp, Homo sapien
tactcctcgccctagaccaaaccta

SEQ ID NO: 5570081 - DNA, 25 bp, Homo sapien
gacctagactaaaatgagaggattc

SEQ ID NO: 5570082 - DNA, 25 bp, Homo sapien
ctatcccacctcagcggcaccctca

SEQ ID NO: 5570083 - DNA, 25 bp, Homo sapien
tgctcagacactccacttagaagac

SEQ ID NO: 5570084 - DNA, 25 bp, Homo sapien
tttagctgtagattaggaatggtaa

SEQ ID NO: 5570085 - DNA, 25 bp, Homo sapien
aatgagaggattcagaagtctgacc

SEQ ID NO: 5570086 - DNA, 25 bp, Homo sapien
gctgatgttgctctagaaaaaccac

SEQ ID NO: 5570087 - DNA, 25 bp, Homo sapien
taagaacagggaaccacattttagc

SEQ ID NO: 5570088 - DNA, 25 bp, Homo sapien
agcggcaccctcactgctggtgacc

SEQ ID NO: 5570089 - DNA, 25 bp, Homo sapien
attaacaatgatcagggaaaatatc

SEQ ID NO: 5570090 - DNA, 25 bp, Homo sapien
acacattttccgtggaggctggagg

SEQ ID NO: 5570091 - DNA, 25 bp, Homo sapien
tcccatagcagataaggttcgacct

SEQ ID NO: 5570092 - DNA, 25 bp, Homo sapien
gcgcgatggacgccaccttctgtga

SEQ ID NO: 5570093 - DNA, 25 bp, Homo sapien
cttatgcatgtgtttggtggctacc

SEQ ID NO: 5570094 - DNA, 25 bp, Homo sapien
tgctgcagcattctgggaaaagtcc

SEQ ID NO: 5570095 - DNA, 25 bp, Homo sapien
gtggagcctttgcaaagagtgttga

SEQ ID NO: 5570096 - DNA, 25 bp, Homo sapien
tgcaagactcacgtagcactgtggc

SEQ ID NO: 5570097 - DNA, 25 bp, Homo sapien
gggccctgcgtgaatctgaaaatgc

SEQ ID NO: 5570098 - DNA, 25 bp, Homo sapien
aggctagtgtctatctggagggtag

SEQ ID NO: 5570099 - DNA, 25 bp, Homo sapien
gttgcagagctgccggtatctgtca

SEQ ID NO: 5570100 - DNA, 25 bp, Homo sapien
cagtagtcaccatccaggcgcgatg

SEQ ID NO: 5570101 - DNA, 25 bp, Homo sapien
tggctgcactaaaaggtgggcagaa

SEQ ID NO: 5570102 - DNA, 25 bp, Homo sapien
gtgtaaagatagttgccatagcgat

SEQ ID NO: 5570103 - DNA, 25 bp, Homo sapien
agaaatgaagagatacgtggtatcg

SEQ ID NO: 5570104 - DNA, 25 bp, Homo sapien
gcaaggctgaggtatagctaaaatt

SEQ ID NO: 5570105 - DNA, 25 bp, Homo sapien
cagagccatgaggtcttgtgtgtag

SEQ ID NO: 5570106 - DNA, 25 bp, Homo sapien
ttgtcagggtgcttgctcgctattc

SEQ ID NO: 5570107 - DNA, 25 bp, Homo sapien
agcacttctcgcagagtcctgactg

SEQ ID NO: 5570108 - DNA, 25 bp, Homo sapien
ttccttgaatcgagctgagtgacag

SEQ ID NO: 5570109 - DNA, 25 bp, Homo sapien
ggtgggtgctgtcatgttacatctg

SEQ ID NO: 5570110 - DNA, 25 bp, Homo sapien
ggagattactttgggaagcgatcct

SEQ ID NO: 5570111 - DNA, 25 bp, Homo sapien
ctgccaaagcaagcatgtgacgtct

SEQ ID NO: 5570112 - DNA, 25 bp, Homo sapien
ctaagccacaattcaatgttgagta

SEQ ID NO: 5570113 - DNA, 25 bp, Homo sapien
ctgacatggtcacaacctagagatc

SEQ ID NO: 5570114 - DNA, 25 bp, Homo sapien
gtagtcacaagatgtttagggttac

SEQ ID NO: 5570115 - DNA, 25 bp, Homo sapien
ctagagatcaagcagccagtttgtc

SEQ ID NO: 5570116 - DNA, 25 bp, Homo sapien
tgttggctgcattcttagtagtcac

SEQ ID NO: 5570117 - DNA, 25 bp, Homo sapien
ggtcacaacctagagatcaagcagc

SEQ ID NO: 5570118 - DNA, 25 bp, Homo sapien
agtctacctctacctaagctgcctc

SEQ ID NO: 5570119 - DNA, 25 bp, Homo sapien
agctgcctctatccctgacatggtc

SEQ ID NO: 5570120 - DNA, 25 bp, Homo sapien
tgttgagtacaagaaagtctacctc

SEQ ID NO: 5570121 - DNA, 25 bp, Homo sapien
ccagtttgtcagaggcattggaacc

SEQ ID NO: 5570122 - DNA, 25 bp, Homo sapien
ttagggttacaggaacagattaata

SEQ ID NO: 5570123 - DNA, 25 bp, Homo sapien
ccctgtgagtgctaccccatcctcc

SEQ ID NO: 5570124 - DNA, 25 bp, Homo sapien
atgtctgggatagacactgaaatac

SEQ ID NO: 5570125 - DNA, 25 bp, Homo sapien
aatgtagaaaagtgtcctgtgtgat

SEQ ID NO: 5570126 - DNA, 25 bp, Homo sapien
ccaggcattattatacaaaagttcc

SEQ ID NO: 5570127 - DNA, 25 bp, Homo sapien
cacaaactcagttaccaccccgtat

SEQ ID NO: 5570128 - DNA, 25 bp, Homo sapien
tgggcagctgtatcaacctggcttc

SEQ ID NO: 5570129 - DNA, 25 bp, Homo sapien
tgacaatcgcaggtcacccaatgac

SEQ ID NO: 5570130 - DNA, 25 bp, Homo sapien
tacagcacatcgtccctgtgagtgc

SEQ ID NO: 5570131 - DNA, 25 bp, Homo sapien
tcctgtgtgattgtttcaagcacgt

SEQ ID NO: 5570132 - DNA, 25 bp, Homo sapien
accaccccgtatgtctgggatagac

SEQ ID NO: 5570133 - DNA, 25 bp, Homo sapien
caaaaagcaccaaattggcatacat

SEQ ID NO: 5570134 - DNA, 25 bp, Homo sapien
ttcttacgagatgctggtcacctac

SEQ ID NO: 5570135 - DNA, 25 bp, Homo sapien
acgagatgctggtcacctacgaagg

SEQ ID NO: 5570136 - DNA, 25 bp, Homo sapien
attcaaagttaaagtaatggtgacc

SEQ ID NO: 5570137 - DNA, 25 bp, Homo sapien
tgggtcgcgcacattaacgcatcca

SEQ ID NO: 5570138 - DNA, 25 bp, Homo sapien
ctgctcttaacccgcgcgcgggggc

SEQ ID NO: 5570139 - DNA, 25 bp, Homo sapien
ttgccctgcttcccgcaagaggtgg

SEQ ID NO: 5570140 - DNA, 25 bp, Homo sapien
ggagcgcctgaccaaagtggttttg

SEQ ID NO: 5570141 - DNA, 25 bp, Homo sapien
aacgcatccagcggaaaaatgaagg

SEQ ID NO: 5570142 - DNA, 25 bp, Homo sapien
ccaaagtggttttgccctgcttccc

SEQ ID NO: 5570143 - DNA, 25 bp, Homo sapien
aagttaaagtaatggtgacccgaga

SEQ ID NO: 5570144 - DNA, 25 bp, Homo sapien
gggtcccggttactgatggttatca

SEQ ID NO: 5570145 - DNA, 25 bp, Homo sapien
agttacccctgactccctcaacacc

SEQ ID NO: 5570146 - DNA, 25 bp, Homo sapien
aaaatgtaagaagccaaagggcaaa

SEQ ID NO: 5570147 - DNA, 25 bp, Homo sapien
cttagcactaagatgaaatgttttt

SEQ ID NO: 5570148 - DNA, 25 bp, Homo sapien
actccctcaacaccccaaaactcta

SEQ ID NO: 5570149 - DNA, 25 bp, Homo sapien
gtagaaaatagtagacttagcacta

SEQ ID NO: 5570150 - DNA, 25 bp, Homo sapien
tctaaatgccacggtcatctgtttc

SEQ ID NO: 5570151 - DNA, 25 bp, Homo sapien
ccccaaaactctaaatgccacggtc

SEQ ID NO: 5570152 - DNA, 25 bp, Homo sapien
tcaggacaattcacagatatcaatc

SEQ ID NO: 5570153 - DNA, 25 bp, Homo sapien
tacccttcaggacaattcacagata

SEQ ID NO: 5570154 - DNA, 25 bp, Homo sapien
ctttctggagttacccctgactccc

SEQ ID NO: 5570155 - DNA, 25 bp, Homo sapien
aatgtaagaagccaaagggcaaaaa

SEQ ID NO: 5570156 - DNA, 25 bp, Homo sapien
aatatgtttgagaatgtcacaaatt

SEQ ID NO: 5570157 - DNA, 25 bp, Homo sapien
aatgaaaaggaactgacaattgtat

SEQ ID NO: 5570158 - DNA, 25 bp, Homo sapien
gtgctttctcaggggtatatactac

SEQ ID NO: 5570159 - DNA, 25 bp, Homo sapien
gagaatgtcacaaattagaccagtt

SEQ ID NO: 5570160 - DNA, 25 bp, Homo sapien
taaattagtgctttctcaggggtat

SEQ ID NO: 5570161 - DNA, 25 bp, Homo sapien
agagaaagaagacaatctacattct

SEQ ID NO: 5570162 - DNA, 25 bp, Homo sapien
atcatgttaaagggtagtaacagcc

SEQ ID NO: 5570163 - DNA, 25 bp, Homo sapien
agctaacagattaattagtagtgcc

SEQ ID NO: 5570164 - DNA, 25 bp, Homo sapien
attaattagtagtgccaatgaatac

SEQ ID NO: 5570165 - DNA, 25 bp, Homo sapien
taaaagtattagattgttgcaaaag

SEQ ID NO: 5570166 - DNA, 25 bp, Homo sapien
gaactattcaaaatagagaaagaag

SEQ ID NO: 5570167 - DNA, 25 bp, Homo sapien
gaagatcaggtattaggtagccgat

SEQ ID NO: 5570168 - DNA, 25 bp, Homo sapien
tgctcactcacatgacagagaatca

SEQ ID NO: 5570169 - DNA, 25 bp, Homo sapien
gccgattgggaggtcacttaccttg

SEQ ID NO: 5570170 - DNA, 25 bp, Homo sapien
ggaggtcacttaccttgaaccagtc

SEQ ID NO: 5570171 - DNA, 25 bp, Homo sapien
ctgacggcaaggttgctcactcaca

SEQ ID NO: 5570172 - DNA, 25 bp, Homo sapien
tctgggaagatcaggtattaggtag

SEQ ID NO: 5570173 - DNA, 25 bp, Homo sapien
cagcaggaggctccgtcaactaagt

SEQ ID NO: 5570174 - DNA, 25 bp, Homo sapien
cgtcaactaagtgagacggaaacca

SEQ ID NO: 5570175 - DNA, 25 bp, Homo sapien
ggaggctccgtcaactaagtgagac

SEQ ID NO: 5570176 - DNA, 25 bp, Homo sapien
tcaggtattaggtagccgattggga

SEQ ID NO: 5570177 - DNA, 25 bp, Homo sapien
ccaggctcctcggaacatgcagagg

SEQ ID NO: 5570178 - DNA, 25 bp, Homo sapien
atatacaaagacaactcccaacccc

SEQ ID NO: 5570179 - DNA, 25 bp, Homo sapien
tggggccaagatccaagaatatctg

SEQ ID NO: 5570180 - DNA, 25 bp, Homo sapien
caggtagaccacagaatgatgaacc

SEQ ID NO: 5570181 - DNA, 25 bp, Homo sapien
gtggatagaaaggactgcatatttt

SEQ ID NO: 5570182 - DNA, 25 bp, Homo sapien
gatgcatcagacactgctaagtact

SEQ ID NO: 5570183 - DNA, 25 bp, Homo sapien
ctaagtactgttaggagacagtgac

SEQ ID NO: 5570184 - DNA, 25 bp, Homo sapien
cccaacccctggtggatagaaagga

SEQ ID NO: 5570185 - DNA, 25 bp, Homo sapien
agaaacacggctgcatcaggtctac

SEQ ID NO: 5570186 - DNA, 25 bp, Homo sapien
accaatgctcatatagggaagaatg

SEQ ID NO: 5570187 - DNA, 25 bp, Homo sapien
aacagcccttccacggttgatatac

SEQ ID NO: 5570188 - DNA, 25 bp, Homo sapien
ttaggagacagtgacaaattggata

SEQ ID NO: 5570189 - DNA, 25 bp, Homo sapien
cttaaaagatttagagtacagaaaa

SEQ ID NO: 5570190 - DNA, 25 bp, Homo sapien
acagcaaatatagaagacttactta

SEQ ID NO: 5570191 - DNA, 25 bp, Homo sapien
aggcattcagaactatgttttagag

SEQ ID NO: 5570192 - DNA, 25 bp, Homo sapien
attctattgatgaatatcatggcta

SEQ ID NO: 5570193 - DNA, 25 bp, Homo sapien
atacatacaaatctggtataccact

SEQ ID NO: 5570194 - DNA, 25 bp, Homo sapien
aactgagccaaggtcactgtcaaag

SEQ ID NO: 5570195 - DNA, 25 bp, Homo sapien
aaggtcactgtcaaaggaaagcttt

SEQ ID NO: 5570196 - DNA, 25 bp, Homo sapien
tctggtataccactaacacaacata

SEQ ID NO: 5570197 - DNA, 25 bp, Homo sapien
tgagccaaggtcactgtcaaaggaa

SEQ ID NO: 5570198 - DNA, 25 bp, Homo sapien
actatgttttagagatcaaataatg

SEQ ID NO: 5570199 - DNA, 25 bp, Homo sapien
actaacacaacataggagttaattc

SEQ ID NO: 5570200 - DNA, 25 bp, Homo sapien
gtcaccccgctgaccaggagacggt

SEQ ID NO: 5570201 - DNA, 25 bp, Homo sapien
accgtctcctggtcagcggggtgac

SEQ ID NO: 5570202 - DNA, 25 bp, Homo sapien
aatttgatgcaccctggcaagcttt

SEQ ID NO: 5570203 - DNA, 25 bp, Homo sapien
ctttactcaggctggaagcgaattc

SEQ ID NO: 5570204 - DNA, 25 bp, Homo sapien
atttgacagtcagctaggagacagg

SEQ ID NO: 5570205 - DNA, 25 bp, Homo sapien
caatctgggtgtgcttaaactagtc

SEQ ID NO: 5570206 - DNA, 25 bp, Homo sapien
accacggagcaacctctaaaggatc

SEQ ID NO: 5570207 - DNA, 25 bp, Homo sapien
agacaaacggtacaaacatatggac

SEQ ID NO: 5570208 - DNA, 25 bp, Homo sapien
tggtcaacagacaacttacaagagt

SEQ ID NO: 5570209 - DNA, 25 bp, Homo sapien
gagggacttggcagatgtaattaaa

SEQ ID NO: 5570210 - DNA, 25 bp, Homo sapien
gggtgatgttacattgcagggcaga

SEQ ID NO: 5570211 - DNA, 25 bp, Homo sapien
atggcccccatgaactctgcccctc

SEQ ID NO: 5570212 - DNA, 25 bp, Homo sapien
ctggtagaagtagagtcaaagtata

SEQ ID NO: 5570213 - DNA, 25 bp, Homo sapien
ctcaagaagaaagtttagacatgtc

SEQ ID NO: 5570214 - DNA, 25 bp, Homo sapien
ttaagtgacaaaagactgtaaggga

SEQ ID NO: 5570215 - DNA, 25 bp, Homo sapien
ttctaaatataacgagaggtggcac

SEQ ID NO: 5570216 - DNA, 25 bp, Homo sapien
ggagaaagacttgttttggatggac

SEQ ID NO: 5570217 - DNA, 25 bp, Homo sapien
gcacaggaaaccagctggagtttcc

SEQ ID NO: 5570218 - DNA, 25 bp, Homo sapien
aaattgaactcagctccagagcctg

SEQ ID NO: 5570219 - DNA, 25 bp, Homo sapien
caatggtacccggctttggtcactg

SEQ ID NO: 5570220 - DNA, 25 bp, Homo sapien
tagagccagcgttttccaattgagc

SEQ ID NO: 5570221 - DNA, 25 bp, Homo sapien
tggatggacgattgcctatgagttc

SEQ ID NO: 5570222 - DNA, 25 bp, Homo sapien
ccagagcctggccagttttaaggat

SEQ ID NO: 5570223 - DNA, 25 bp, Homo sapien
ggtggcaccataagcactgcacagg

SEQ ID NO: 5570224 - DNA, 25 bp, Homo sapien
tggcagagcaaggtcataatctttg

SEQ ID NO: 5570225 - DNA, 25 bp, Homo sapien
gacgctgcccgaaagcatctgaagt

SEQ ID NO: 5570226 - DNA, 25 bp, Homo sapien
ttaaaagtatcaaggtgtcatcatc

SEQ ID NO: 5570227 - DNA, 25 bp, Homo sapien
ggttggctttggaaaatgttgagaa

SEQ ID NO: 5570228 - DNA, 25 bp, Homo sapien
tttgaggtgcatttgaacatctttc

SEQ ID NO: 5570229 - DNA, 25 bp, Homo sapien
agtgcttactaatggctggagttgc

SEQ ID NO: 5570230 - DNA, 25 bp, Homo sapien
ccttccatcctgaggtactgcagag

SEQ ID NO: 5570231 - DNA, 25 bp, Homo sapien
catcatcagtttaggacgctgcccg

SEQ ID NO: 5570232 - DNA, 25 bp, Homo sapien
gacagttgaccaagcacttttgtgc

SEQ ID NO: 5570233 - DNA, 25 bp, Homo sapien
tataaaagcagtgatgacccaacat

SEQ ID NO: 5570234 - DNA, 25 bp, Homo sapien
tgttgagaaatttgaggtgcatttg

SEQ ID NO: 5570235 - DNA, 25 bp, Homo sapien
gaggagaatcccaatttgtaccaaa

SEQ ID NO: 5570236 - DNA, 25 bp, Homo sapien
ggagcaatctgggttttaacaagtc

SEQ ID NO: 5570237 - DNA, 25 bp, Homo sapien
tccaacagacatgcctacaggcggc

SEQ ID NO: 5570238 - DNA, 25 bp, Homo sapien
ataatgaaacggaaaagcaccttca

SEQ ID NO: 5570239 - DNA, 25 bp, Homo sapien
gcatcaatgcccacctgggggacac

SEQ ID NO: 5570240 - DNA, 25 bp, Homo sapien
caggcggcctttatcagtggttctc

SEQ ID NO: 5570241 - DNA, 25 bp, Homo sapien
gattctgatgccacatgctgaagcc

SEQ ID NO: 5570242 - DNA, 25 bp, Homo sapien
cacaaatcctgcttagtgcatggtc

SEQ ID NO: 5570243 - DNA, 25 bp, Homo sapien
agtggttctcaatcgtggttctccc

SEQ ID NO: 5570244 - DNA, 25 bp, Homo sapien
ctcccgatagatcacctgggaactt

SEQ ID NO: 5570245 - DNA, 25 bp, Homo sapien
gccacttggccacaaccatagcatc

SEQ ID NO: 5570246 - DNA, 25 bp, Homo sapien
aagtgacataagacatacagggatt

SEQ ID NO: 5570247 - DNA, 25 bp, Homo sapien
acatggggatagaacccacctcagt

SEQ ID NO: 5570248 - DNA, 25 bp, Homo sapien
acattggggaccacaatacaaactc

SEQ ID NO: 5570249 - DNA, 25 bp, Homo sapien
ctgagttactgaaatgatgatgaaa

SEQ ID NO: 5570250 - DNA, 25 bp, Homo sapien
tggcacactaagagcaggcaaataa

SEQ ID NO: 5570251 - DNA, 25 bp, Homo sapien
attatatgtgcaggatcagaaatcc

SEQ ID NO: 5570252 - DNA, 25 bp, Homo sapien
atatgatctaaacattggggaccac

SEQ ID NO: 5570253 - DNA, 25 bp, Homo sapien
agggagtagatgtgtaaattaaatt

SEQ ID NO: 5570254 - DNA, 25 bp, Homo sapien
gcaaataacacagggagtagatgtg

SEQ ID NO: 5570255 - DNA, 25 bp, Homo sapien
tcatcgcagagataggtatacagat

SEQ ID NO: 5570256 - DNA, 25 bp, Homo sapien
ttcctcactgcaacatggggataga

SEQ ID NO: 5570257 - DNA, 25 bp, Homo sapien
aaacagatcagcggttacctagggg

SEQ ID NO: 5570258 - DNA, 25 bp, Homo sapien
tcatcctcactagcagaatcctcat

SEQ ID NO: 5570259 - DNA, 25 bp, Homo sapien
tacttcaagaaaactgattacacat

SEQ ID NO: 5570260 - DNA, 25 bp, Homo sapien
aatctcttggagtgatgggaatgtt

SEQ ID NO: 5570261 - DNA, 25 bp, Homo sapien
agtcacccatgaagcatggagaaac

SEQ ID NO: 5570262 - DNA, 25 bp, Homo sapien
atgcagactaatctattgtgatgga

SEQ ID NO: 5570263 - DNA, 25 bp, Homo sapien
attttgcttagcagcagcatggtct

SEQ ID NO: 5570264 - DNA, 25 bp, Homo sapien
taggttcagtttattgtacatgtat

SEQ ID NO: 5570265 - DNA, 25 bp, Homo sapien
tggaaaacagatcagcggttaccta

SEQ ID NO: 5570266 - DNA, 25 bp, Homo sapien
acaaagggacacaaagaatctcttg

SEQ ID NO: 5570267 - DNA, 25 bp, Homo sapien
cttgactgtggtatatacatctgtc

SEQ ID NO: 5570268 - DNA, 25 bp, Homo sapien
aaggctggagactagaatcatctga

SEQ ID NO: 5570269 - DNA, 25 bp, Homo sapien
tggggctataagctggaacatcttc

SEQ ID NO: 5570270 - DNA, 25 bp, Homo sapien
ttacctcttgatgcagggaagtggc

SEQ ID NO: 5570271 - DNA, 25 bp, Homo sapien
gaagatcatcaagggctggaaatat

SEQ ID NO: 5570272 - DNA, 25 bp, Homo sapien
tattagttgaaaccttagctggggc

SEQ ID NO: 5570273 - DNA, 25 bp, Homo sapien
agtggcaaagttctagaagatcatc

SEQ ID NO: 5570274 - DNA, 25 bp, Homo sapien
tgctgtggtcattccagagaaatgc

SEQ ID NO: 5570275 - DNA, 25 bp, Homo sapien
ccaacaagtcatgaagtcacagagt

SEQ ID NO: 5570276 - DNA, 25 bp, Homo sapien
catatacctggtggttgagtctggc

SEQ ID NO: 5570277 - DNA, 25 bp, Homo sapien
ctccactcagcatcgactggggaag

SEQ ID NO: 5570278 - DNA, 25 bp, Homo sapien
ttgcaatttggacagggctcagtga

SEQ ID NO: 5570279 - DNA, 25 bp, Homo sapien
agctccccattgcttggccccaaac

SEQ ID NO: 5570280 - DNA, 25 bp, Homo sapien
ggatgtcattacacgaatatacacc

SEQ ID NO: 5570281 - DNA, 25 bp, Homo sapien
agcctcattattcaaatagagcagg

SEQ ID NO: 5570282 - DNA, 25 bp, Homo sapien
cattacacgaatatacacccttttt

SEQ ID NO: 5570283 - DNA, 25 bp, Homo sapien
ttcagcagctgcccaaattctactc

SEQ ID NO: 5570284 - DNA, 25 bp, Homo sapien
ccacagaccaccacaagcctcatta

SEQ ID NO: 5570285 - DNA, 25 bp, Homo sapien
tttttcccccatcactaggagccaa

SEQ ID NO: 5570286 - DNA, 25 bp, Homo sapien
ccattgcttggccccaaacattggt

SEQ ID NO: 5570287 - DNA, 25 bp, Homo sapien
tccttagggtaacgtggactcattc

SEQ ID NO: 5570288 - DNA, 25 bp, Homo sapien
gctgcccaaattctactctgtccac

SEQ ID NO: 5570289 - DNA, 25 bp, Homo sapien
gtgagatctggatgtcattacacga

SEQ ID NO: 5570290 - DNA, 25 bp, Homo sapien
gcgtacaccatggagctctctgagc

SEQ ID NO: 5570291 - DNA, 25 bp, Homo sapien
gacctgggctcctccgcttctgaac

SEQ ID NO: 5570292 - DNA, 25 bp, Homo sapien
atatatggagagcgtacaccatgga

SEQ ID NO: 5570293 - DNA, 25 bp, Homo sapien
cagtaaactgttgtaaggcttggca

SEQ ID NO: 5570294 - DNA, 25 bp, Homo sapien
acggccaagtgcccatccctgctct

SEQ ID NO: 5570295 - DNA, 25 bp, Homo sapien
agacaaacatagcccgctcacgcct

SEQ ID NO: 5570296 - DNA, 25 bp, Homo sapien
cctgattgtaaacacggccaagtgc

SEQ ID NO: 5570297 - DNA, 25 bp, Homo sapien
ggtgtgagcaactgcgtttcaggtt

SEQ ID NO: 5570298 - DNA, 25 bp, Homo sapien
cctcaagtacgtcacaagaatcggc

SEQ ID NO: 5570299 - DNA, 25 bp, Homo sapien
cgacaagtcaggagagcattttttc

SEQ ID NO: 5570300 - DNA, 25 bp, Homo sapien
acgccttccccgtctgccggcaggc

SEQ ID NO: 5570301 - DNA, 25 bp, Homo sapien
atactgccacagagaaattagtttt

SEQ ID NO: 5570302 - DNA, 25 bp, Homo sapien
gctaacaatgcatcacctggcttca

SEQ ID NO: 5570303 - DNA, 25 bp, Homo sapien
agtaagcacctgaatattaattgtc

SEQ ID NO: 5570304 - DNA, 25 bp, Homo sapien
tatgctcttaaacaggatcagggat

SEQ ID NO: 5570305 - DNA, 25 bp, Homo sapien
acatattggctcaaaagtaagcacc

SEQ ID NO: 5570306 - DNA, 25 bp, Homo sapien
ttacctgagcaaaatgcaaagataa

SEQ ID NO: 5570307 - DNA, 25 bp, Homo sapien
aaacaggatcagggatatctttatt

SEQ ID NO: 5570308 - DNA, 25 bp, Homo sapien
atttctagactctgggaagataatt

SEQ ID NO: 5570309 - DNA, 25 bp, Homo sapien
tttaagtcagttgtcaaagctaaca

SEQ ID NO: 5570310 - DNA, 25 bp, Homo sapien
tctgggaagataatttacctgagca

SEQ ID NO: 5570311 - DNA, 25 bp, Homo sapien
aatttaacaaacaaagagtctacat

SEQ ID NO: 5570312 - DNA, 25 bp, Homo sapien
aattataggaatgttacttcagcta

SEQ ID NO: 5570313 - DNA, 25 bp, Homo sapien
tttagccttgtatgccataagcaac

SEQ ID NO: 5570314 - DNA, 25 bp, Homo sapien
atgccataagcaactgctatgctgt

SEQ ID NO: 5570315 - DNA, 25 bp, Homo sapien
aaaaatgaaaaatagcaataattac

SEQ ID NO: 5570316 - DNA, 25 bp, Homo sapien
ttagaaaataagacacattactttg

SEQ ID NO: 5570317 - DNA, 25 bp, Homo sapien
cagctatttgtatatgtaaaacact

SEQ ID NO: 5570318 - DNA, 25 bp, Homo sapien
attaaagtacaccaaagttctccat

SEQ ID NO: 5570319 - DNA, 25 bp, Homo sapien
ctaaccaatgtcagattaaaattat

SEQ ID NO: 5570320 - DNA, 25 bp, Homo sapien
actgctatgctgttagataagattc

SEQ ID NO: 5570321 - DNA, 25 bp, Homo sapien
aaatagctgaattaattttagcctt

SEQ ID NO: 5570322 - DNA, 25 bp, Homo sapien
tatttaaagaacaatatgtaacttc

SEQ ID NO: 5570323 - DNA, 25 bp, Homo sapien
tcctgctcagccacgggttcacaat

SEQ ID NO: 5570324 - DNA, 25 bp, Homo sapien
cagtttggagacgtgacttgccatg

SEQ ID NO: 5570325 - DNA, 25 bp, Homo sapien
gtccttgggatgccactttggggct

SEQ ID NO: 5570326 - DNA, 25 bp, Homo sapien
accactggccaagagctcatgctgt

SEQ ID NO: 5570327 - DNA, 25 bp, Homo sapien
acctagggcaagaaatcctttctct

SEQ ID NO: 5570328 - DNA, 25 bp, Homo sapien
accaagtcatgcaattctgagcact

SEQ ID NO: 5570329 - DNA, 25 bp, Homo sapien
ttggggctcccatatctgaaatcat

SEQ ID NO: 5570330 - DNA, 25 bp, Homo sapien
cagccgatgcctttggaagttatgt

SEQ ID NO: 5570331 - DNA, 25 bp, Homo sapien
tccaagacagaatagctcaacagaa

SEQ ID NO: 5570332 - DNA, 25 bp, Homo sapien
ttgccatgtagtactgagagggaaa

SEQ ID NO: 5570333 - DNA, 25 bp, Homo sapien
ctgcttagctgccctctgaacagtc

SEQ ID NO: 5570334 - DNA, 25 bp, Homo sapien
gtggacacccacctgcttcgtgccc

SEQ ID NO: 5570335 - DNA, 25 bp, Homo sapien
ttgcagcccatggtctgcagaggga

SEQ ID NO: 5570336 - DNA, 25 bp, Homo sapien
cagagggacctacccgtgcttgtgt

SEQ ID NO: 5570337 - DNA, 25 bp, Homo sapien
tttttgtctctgaggagatgagggc

SEQ ID NO: 5570338 - DNA, 25 bp, Homo sapien
ctgtgctggccacctgtaccccagg

SEQ ID NO: 5570339 - DNA, 25 bp, Homo sapien
tcacacaactagaaagtggccaagc

SEQ ID NO: 5570340 - DNA, 25 bp, Homo sapien
ggcagatgcaccaagtcacacaact

SEQ ID NO: 5570341 - DNA, 25 bp, Homo sapien
gctggcccccacacctgtgctggcc

SEQ ID NO: 5570342 - DNA, 25 bp, Homo sapien
ttttggatactagattggtggacac

SEQ ID NO: 5570343 - DNA, 25 bp, Homo sapien
gtgggctattagccaggctggaagt

SEQ ID NO: 5570344 - DNA, 25 bp, Homo sapien
ggccgggcctcttgcagcccatggt

SEQ ID NO: 5570345 - DNA, 25 bp, Homo sapien
ctttcttttcacaatgggaggcagg

SEQ ID NO: 5570346 - DNA, 25 bp, Homo sapien
cctgtataggcaggtaccagggaaa

SEQ ID NO: 5570347 - DNA, 25 bp, Homo sapien
cttcccctaagacgtgggttcagtc

SEQ ID NO: 5570348 - DNA, 25 bp, Homo sapien
cccttaaatcaggtggaaagatctc

SEQ ID NO: 5570349 - DNA, 25 bp, Homo sapien
gggaaaagcagtagagttacagtat

SEQ ID NO: 5570350 - DNA, 25 bp, Homo sapien
agtatgttcttgtgggtagaggaca

SEQ ID NO: 5570351 - DNA, 25 bp, Homo sapien
ggtggaaagatctcatggaaaaagt

SEQ ID NO: 5570352 - DNA, 25 bp, Homo sapien
ggaaactgcaaggtcagtgatccac

SEQ ID NO: 5570353 - DNA, 25 bp, Homo sapien
ctaagttaggatcccctccagaccc

SEQ ID NO: 5570354 - DNA, 25 bp, Homo sapien
cctgccatcagttaatgaggaaact

SEQ ID NO: 5570355 - DNA, 25 bp, Homo sapien
gaggacagaagagtgaccttccttc

SEQ ID NO: 5570356 - DNA, 25 bp, Homo sapien
tcaaggtcatttagcagtcaaaaaa

SEQ ID NO: 5570357 - DNA, 25 bp, Homo sapien
ctaggctgatcttgactttctggac

SEQ ID NO: 5570358 - DNA, 25 bp, Homo sapien
tacctggcccaatatcttaagttag

SEQ ID NO: 5570359 - DNA, 25 bp, Homo sapien
cacactcagagtacgaagctttctc

SEQ ID NO: 5570360 - DNA, 25 bp, Homo sapien
catgtagtagtataggttaagttcc

SEQ ID NO: 5570361 - DNA, 25 bp, Homo sapien
atagtattataggtctgcatgtagt

SEQ ID NO: 5570362 - DNA, 25 bp, Homo sapien
aagcattgttatgctacagcgacat

SEQ ID NO: 5570363 - DNA, 25 bp, Homo sapien
aggtctgcatgtagtagtataggtt

SEQ ID NO: 5570364 - DNA, 25 bp, Homo sapien
tcctgggaaaggtcattttcttaca

SEQ ID NO: 5570365 - DNA, 25 bp, Homo sapien
ttgagtttgacagtattaaaatttc

SEQ ID NO: 5570366 - DNA, 25 bp, Homo sapien
agaacatgactgcttaactaatatt

SEQ ID NO: 5570367 - DNA, 25 bp, Homo sapien
aaaatggagtgttgtaaaggtcaag

SEQ ID NO: 5570368 - DNA, 25 bp, Homo sapien
gcccagcttccttccgtgattggct

SEQ ID NO: 5570369 - DNA, 25 bp, Homo sapien
taaaactgatcatgtgaattcccct

SEQ ID NO: 5570370 - DNA, 25 bp, Homo sapien
ttcccctatgtacggcccaggcaag

SEQ ID NO: 5570371 - DNA, 25 bp, Homo sapien
tccttccgtgattggctcatggagc

SEQ ID NO: 5570372 - DNA, 25 bp, Homo sapien
atgtgaattcccctatgtacggccc

SEQ ID NO: 5570373 - DNA, 25 bp, Homo sapien
gcacttttcaacatctacacactca

SEQ ID NO: 5570374 - DNA, 25 bp, Homo sapien
aggcaagtcctctggctatttatgt

SEQ ID NO: 5570375 - DNA, 25 bp, Homo sapien
aaaattgacagtatatactaaaact

SEQ ID NO: 5570376 - DNA, 25 bp, Homo sapien
cgtgattggctcatggagcaaacat

SEQ ID NO: 5570377 - DNA, 25 bp, Homo sapien
aacaactgaaactctactaatgctt

SEQ ID NO: 5570378 - DNA, 25 bp, Homo sapien
caattcttctacatgctggactttc

SEQ ID NO: 5570379 - DNA, 25 bp, Homo sapien
ttaccttacatgggacagtgtatat

SEQ ID NO: 5570380 - DNA, 25 bp, Homo sapien
tagctaactgtttcatactggattt

SEQ ID NO: 5570381 - DNA, 25 bp, Homo sapien
ttggaccaagaacctagctaactgt

SEQ ID NO: 5570382 - DNA, 25 bp, Homo sapien
aaatacctggaatataatagtgatt

SEQ ID NO: 5570383 - DNA, 25 bp, Homo sapien
ttggttagaattcaaggccaattcc

SEQ ID NO: 5570384 - DNA, 25 bp, Homo sapien
ggcaaggacaaatcaaagcctgacc

SEQ ID NO: 5570385 - DNA, 25 bp, Homo sapien
tctaaggaatttatgaggctatatc

SEQ ID NO: 5570386 - DNA, 25 bp, Homo sapien
cagtgtatattaaaggtcctagtaa

SEQ ID NO: 5570387 - DNA, 25 bp, Homo sapien
aggacaaagaatttggaaatgttat

SEQ ID NO: 5570388 - DNA, 25 bp, Homo sapien
gtctttttgctggcaaggacaaatc

SEQ ID NO: 5570389 - DNA, 25 bp, Homo sapien
aagggctgaatgaggtctcatgatg

SEQ ID NO: 5570390 - DNA, 25 bp, Homo sapien
atctgtacttgagagcaccagagcc

SEQ ID NO: 5570391 - DNA, 25 bp, Homo sapien
tactgacattcaaaagttgggtttc

SEQ ID NO: 5570392 - DNA, 25 bp, Homo sapien
tgagccaatcacttatccatgccaa

SEQ ID NO: 5570393 - DNA, 25 bp, Homo sapien
gcactgactagcggcaacaccttga

SEQ ID NO: 5570394 - DNA, 25 bp, Homo sapien
ctagcggcaacaccttgagccaatc

SEQ ID NO: 5570395 - DNA, 25 bp, Homo sapien
gccacttggcagcaacccagtgaca

SEQ ID NO: 5570396 - DNA, 25 bp, Homo sapien
caacatgagtttggcaatctgctgt

SEQ ID NO: 5570397 - DNA, 25 bp, Homo sapien
ctgctgtacaagtgaaagatgtggg

SEQ ID NO: 5570398 - DNA, 25 bp, Homo sapien
cttcagaggattcttggaagggctg

SEQ ID NO: 5570399 - DNA, 25 bp, Homo sapien
ccacaaggcctggccacatcaacat

SEQ ID NO: 5570400 - DNA, 25 bp, Homo sapien
cacagtaactggtcccgtgttgcga

SEQ ID NO: 5570401 - DNA, 25 bp, Homo sapien
gggaggagtaccaacatccgatccc

SEQ ID NO: 5570402 - DNA, 25 bp, Homo sapien
ccagtgcccaacaccaaatagtgga

SEQ ID NO: 5570403 - DNA, 25 bp, Homo sapien
gttgcgacacgattaggatttttgc

SEQ ID NO: 5570404 - DNA, 25 bp, Homo sapien
caaatgacccgatagacacagtaac

SEQ ID NO: 5570405 - DNA, 25 bp, Homo sapien
acggggggaaccatcactcctatat

SEQ ID NO: 5570406 - DNA, 25 bp, Homo sapien
gaaagaaatgtcaatggctgcaagg

SEQ ID NO: 5570407 - DNA, 25 bp, Homo sapien
atgacaaatggtaagtgcagcagtc

SEQ ID NO: 5570408 - DNA, 25 bp, Homo sapien
agcctcccagctccagtatcctgcc

SEQ ID NO: 5570409 - DNA, 25 bp, Homo sapien
tgcagctctggaccccattagcctc

SEQ ID NO: 5570410 - DNA, 25 bp, Homo sapien
tcaagttaaacagatgtgagtcatc

SEQ ID NO: 5570411 - DNA, 25 bp, Homo sapien
gattagccaatgcaaagaaggaatt

SEQ ID NO: 5570412 - DNA, 25 bp, Homo sapien
acaaatgaaatgcaataggaaattc

SEQ ID NO: 5570413 - DNA, 25 bp, Homo sapien
cagggctctgcgcacatacaaacct

SEQ ID NO: 5570414 - DNA, 25 bp, Homo sapien
ggagcacaatttagagtggccacat

SEQ ID NO: 5570415 - DNA, 25 bp, Homo sapien
gcaataggaaattctacacagctgt

SEQ ID NO: 5570416 - DNA, 25 bp, Homo sapien
taagcaaccgagttctaaacccaca

SEQ ID NO: 5570417 - DNA, 25 bp, Homo sapien
atctgaaaattgggttctgaactac

SEQ ID NO: 5570418 - DNA, 25 bp, Homo sapien
ggccacatgccaacaagaagcttgc

SEQ ID NO: 5570419 - DNA, 25 bp, Homo sapien
agagaagttggaaaaatgtaccttg

SEQ ID NO: 5570420 - DNA, 25 bp, Homo sapien
aatatgaaataagcaaccgagttct

SEQ ID NO: 5570421 - DNA, 25 bp, Homo sapien
gcaagcatggacccatagcagatcc

SEQ ID NO: 5570422 - DNA, 25 bp, Homo sapien
aaacaagtggatacaattttactct

SEQ ID NO: 5570423 - DNA, 25 bp, Homo sapien
aaattagagaatcccatcagtaagg

SEQ ID NO: 5570424 - DNA, 25 bp, Homo sapien
ccaagtaagcatgctgataaaaagc

SEQ ID NO: 5570425 - DNA, 25 bp, Homo sapien
aaggctctttctgaaaagctaaatt

SEQ ID NO: 5570426 - DNA, 25 bp, Homo sapien
aaaagggactgattaaggctctttc

SEQ ID NO: 5570427 - DNA, 25 bp, Homo sapien
ttagaagatgtatataaggcttaaa

SEQ ID NO: 5570428 - DNA, 25 bp, Homo sapien
gctaaattagagaatcccatcagta

SEQ ID NO: 5570429 - DNA, 25 bp, Homo sapien
aaattgaaacaagtcagaatttaaa

SEQ ID NO: 5570430 - DNA, 25 bp, Homo sapien
ctttatcaccaagtaagcatgctga

SEQ ID NO: 5570431 - DNA, 25 bp, Homo sapien
taatgcacaaaataactcttcaaac

SEQ ID NO: 5570432 - DNA, 25 bp, Homo sapien
taaggcttaaagatttctaatgcac

SEQ ID NO: 5570433 - DNA, 25 bp, Homo sapien
ataatgaaacaaaatgggtttgctt

SEQ ID NO: 5570434 - DNA, 25 bp, Homo sapien
ctttacgaagcacaagacacttgca

SEQ ID NO: 5570435 - DNA, 25 bp, Homo sapien
tctgctacccccaaatcagggattc

SEQ ID NO: 5570436 - DNA, 25 bp, Homo sapien
taagccttagcacaaaacctctcag

SEQ ID NO: 5570437 - DNA, 25 bp, Homo sapien
gaaacaaatgggcactttacgaagc

SEQ ID NO: 5570438 - DNA, 25 bp, Homo sapien
gcaaggctgatggaacagaactttg

SEQ ID NO: 5570439 - DNA, 25 bp, Homo sapien
acagtgtgaaatctaatgttagctc

SEQ ID NO: 5570440 - DNA, 25 bp, Homo sapien
ggagactgtaaactgtaagtgggcc

SEQ ID NO: 5570441 - DNA, 25 bp, Homo sapien
gggcctagcttgggattagcaaggc

SEQ ID NO: 5570442 - DNA, 25 bp, Homo sapien
gcaaaggaacacaatgaccaaattc

SEQ ID NO: 5570443 - DNA, 25 bp, Homo sapien
attggacaaccgatcaagagccaca

SEQ ID NO: 5570444 - DNA, 25 bp, Homo sapien
tcttaaaatgcggccccacaaggag

SEQ ID NO: 5570445 - DNA, 25 bp, Homo sapien
gatgttaacgataactgatagttac

SEQ ID NO: 5570446 - DNA, 25 bp, Homo sapien
ccacaaggagtatacaggtccctat

SEQ ID NO: 5570447 - DNA, 25 bp, Homo sapien
cttaagtaactgacaatgcaaaaca

SEQ ID NO: 5570448 - DNA, 25 bp, Homo sapien
ctaagaggatgtctgttctacactc

SEQ ID NO: 5570449 - DNA, 25 bp, Homo sapien
tgagctgtcaggagtcttaaaatgc

SEQ ID NO: 5570450 - DNA, 25 bp, Homo sapien
tctaaaggtaaactggaccaagaga

SEQ ID NO: 5570451 - DNA, 25 bp, Homo sapien
agaaaagagaattttgcgacttaga

SEQ ID NO: 5570452 - DNA, 25 bp, Homo sapien
acaaaaaactctaagaggatgtctg

SEQ ID NO: 5570453 - DNA, 25 bp, Homo sapien
ctaagtaaataactgaggaaggaga

SEQ ID NO: 5570454 - DNA, 25 bp, Homo sapien
ttactgggtactggtgtccacatca

SEQ ID NO: 5570455 - DNA, 25 bp, Homo sapien
aatatgtaaagtagaatgcagctgc

SEQ ID NO: 5570456 - DNA, 25 bp, Homo sapien
gctcttgcagtggcaaaaggactgt

SEQ ID NO: 5570457 - DNA, 25 bp, Homo sapien
gcagagccagggcatgtaatctatg

SEQ ID NO: 5570458 - DNA, 25 bp, Homo sapien
ggggattagtggcagataaataaaa

SEQ ID NO: 5570459 - DNA, 25 bp, Homo sapien
aatgcagctgctagggtctcagtca

SEQ ID NO: 5570460 - DNA, 25 bp, Homo sapien
tggataaaccatgcacgccggatac

SEQ ID NO: 5570461 - DNA, 25 bp, Homo sapien
tgggaagaggaaaatcctagatttg

SEQ ID NO: 5570462 - DNA, 25 bp, Homo sapien
ccggctttctctggcaggcagagcc

SEQ ID NO: 5570463 - DNA, 25 bp, Homo sapien
ctagatttgggtatgagacacatgg

SEQ ID NO: 5570464 - DNA, 25 bp, Homo sapien
gggaaagctggaactcaggcttccc

SEQ ID NO: 5570465 - DNA, 25 bp, Homo sapien
ggaaggcaggcactgatttccacaa

SEQ ID NO: 5570466 - DNA, 25 bp, Homo sapien
agaaaggaaagaagcatttctaaag

SEQ ID NO: 5570467 - DNA, 25 bp, Homo sapien
ttgtctgctgtgcactgagcacaaa

SEQ ID NO: 5570468 - DNA, 25 bp, Homo sapien
gtctggtgcatgtggtttcttgtct

SEQ ID NO: 5570469 - DNA, 25 bp, Homo sapien
ttcttgtcccgagagacaagagggc

SEQ ID NO: 5570470 - DNA, 25 bp, Homo sapien
cccaaggtgacacgctaacctgtgc

SEQ ID NO: 5570471 - DNA, 25 bp, Homo sapien
agaagcatttcttgtcccgagagac

SEQ ID NO: 5570472 - DNA, 25 bp, Homo sapien
ttgattcagtccgtctgggttgggg

SEQ ID NO: 5570473 - DNA, 25 bp, Homo sapien
tggcaaactgatgatgtagatattc

SEQ ID NO: 5570474 - DNA, 25 bp, Homo sapien
caatgctgagagctttgcccaaggt

SEQ ID NO: 5570475 - DNA, 25 bp, Homo sapien
gtgtcaccgagggtcttaccacaat

SEQ ID NO: 5570476 - DNA, 25 bp, Homo sapien
cacaaactacatgccaggctctgcc

SEQ ID NO: 5570477 - DNA, 25 bp, Homo sapien
ggccgactccaccctagctgctcgc

SEQ ID NO: 5570478 - DNA, 25 bp, Homo sapien
ccaagtggtcactgccaggctctag

SEQ ID NO: 5570479 - DNA, 25 bp, Homo sapien
cacacttgccgacatgagagcggaa

SEQ ID NO: 5570480 - DNA, 25 bp, Homo sapien
tcttgctggacgactcctgaaaagc

SEQ ID NO: 5570481 - DNA, 25 bp, Homo sapien
gctaactaaacagcgaagagaacac

SEQ ID NO: 5570482 - DNA, 25 bp, Homo sapien
tcctgggcttccgtaggtcggaata

SEQ ID NO: 5570483 - DNA, 25 bp, Homo sapien
aacctttgaggccgactccacccta

SEQ ID NO: 5570484 - DNA, 25 bp, Homo sapien
tccaccgggaaagctcagtgtttta

SEQ ID NO: 5570485 - DNA, 25 bp, Homo sapien
gacagagggtatgtctcctgctctg

SEQ ID NO: 5570486 - DNA, 25 bp, Homo sapien
actcctgaaaagcaaaagtgggaaa

SEQ ID NO: 5570487 - DNA, 25 bp, Homo sapien
cctgtccagcaggcctttctcctcc

SEQ ID NO: 5570488 - DNA, 25 bp, Homo sapien
ggagctgcgctcacccctccggttc

SEQ ID NO: 5570489 - DNA, 25 bp, Homo sapien
tcatcctcaacgccccagcgccctg

SEQ ID NO: 5570490 - DNA, 25 bp, Homo sapien
cttcctcgacaggaaacccagactc

SEQ ID NO: 5570491 - DNA, 25 bp, Homo sapien
gaggcacaaacggagcctgtttccc

SEQ ID NO: 5570492 - DNA, 25 bp, Homo sapien
ttccccatctgcaactctccccgtg

SEQ ID NO: 5570493 - DNA, 25 bp, Homo sapien
aactctccccgtggcagaaagggga

SEQ ID NO: 5570494 - DNA, 25 bp, Homo sapien
ttgcccttctgtgacgctctgggtg

SEQ ID NO: 5570495 - DNA, 25 bp, Homo sapien
tttatcatcctcaacgccccagcgc

SEQ ID NO: 5570496 - DNA, 25 bp, Homo sapien
agacggcgactgttctaactctccc

SEQ ID NO: 5570497 - DNA, 25 bp, Homo sapien
agctgagactgtttgtcattgtcac

SEQ ID NO: 5570498 - DNA, 25 bp, Homo sapien
aggagcgaacacccacctgggtgca

SEQ ID NO: 5570499 - DNA, 25 bp, Homo sapien
tgtggaaaatcctctggggaatagc

SEQ ID NO: 5570500 - DNA, 25 bp, Homo sapien
ggtttcttgccaggtaagtcgagcg

SEQ ID NO: 5570501 - DNA, 25 bp, Homo sapien
ggctgtgtttggctctgaccgtacc

SEQ ID NO: 5570502 - DNA, 25 bp, Homo sapien
gcttttagggagtccgctacgcaga

SEQ ID NO: 5570503 - DNA, 25 bp, Homo sapien
gagaaaactgactgtgtcctgccgg

SEQ ID NO: 5570504 - DNA, 25 bp, Homo sapien
tctccccgtaatgcgcgtccagatt

SEQ ID NO: 5570505 - DNA, 25 bp, Homo sapien
gtcaaaataggaactccgcggtgaa

SEQ ID NO: 5570506 - DNA, 25 bp, Homo sapien
gggaatagctgagaggacttttttg

SEQ ID NO: 5570507 - DNA, 25 bp, Homo sapien
gggcggccacccctctgccaacttg

SEQ ID NO: 5570508 - DNA, 25 bp, Homo sapien
gacgtaagagatgcccaggtttctc

SEQ ID NO: 5570509 - DNA, 25 bp, Homo sapien
aaatggtgttcgggcgactcttttc

SEQ ID NO: 5570510 - DNA, 25 bp, Homo sapien
ttacagtctacataggggaagagaa

SEQ ID NO: 5570511 - DNA, 25 bp, Homo sapien
acagtagatgagtagtcagcacatg

SEQ ID NO: 5570512 - DNA, 25 bp, Homo sapien
gctaaggtgttgcataatcaaggtt

SEQ ID NO: 5570513 - DNA, 25 bp, Homo sapien
cgaggcagaattatttacccgggca

SEQ ID NO: 5570514 - DNA, 25 bp, Homo sapien
gggaaacaagagaaagatctacagt

SEQ ID NO: 5570515 - DNA, 25 bp, Homo sapien
aacaaacgagttcaagtacatgcct

SEQ ID NO: 5570516 - DNA, 25 bp, Homo sapien
atgctcactaacaccgaggcagaat

SEQ ID NO: 5570517 - DNA, 25 bp, Homo sapien
tacccgggcaattaaagcaacagca

SEQ ID NO: 5570518 - DNA, 25 bp, Homo sapien
atttacatagggaaacaagagaaag

SEQ ID NO: 5570519 - DNA, 25 bp, Homo sapien
aaaagtacctgaaattgcctagaat

SEQ ID NO: 5570520 - DNA, 25 bp, Homo sapien
tgcctagaatagcagcatgcatagc

SEQ ID NO: 5570521 - DNA, 25 bp, Homo sapien
taatgagaggaacaacgactcaagt

SEQ ID NO: 5570522 - DNA, 25 bp, Homo sapien
gaagctgagaggctaccaaaactaa

SEQ ID NO: 5570523 - DNA, 25 bp, Homo sapien
gcccttaggaagcaacagatgtgat

SEQ ID NO: 5570524 - DNA, 25 bp, Homo sapien
tctgagacaggaaccacacatgaaa

SEQ ID NO: 5570525 - DNA, 25 bp, Homo sapien
gaaaccacaatttggcaaggacagc

SEQ ID NO: 5570526 - DNA, 25 bp, Homo sapien
actaaaagtgaaagtgtctgccatc

SEQ ID NO: 5570527 - DNA, 25 bp, Homo sapien
ctgggaactgtgacttaagagaaaa

SEQ ID NO: 5570528 - DNA, 25 bp, Homo sapien
cgactcaagtgatctgatgggaagg

SEQ ID NO: 5570529 - DNA, 25 bp, Homo sapien
ctgaaaagcttaactacgctgggct

SEQ ID NO: 5570530 - DNA, 25 bp, Homo sapien
taagagaaaatggagacttcttgaa

SEQ ID NO: 5570531 - DNA, 25 bp, Homo sapien
actggaacccccacatgcacctctg

SEQ ID NO: 5570532 - DNA, 25 bp, Homo sapien
ttggcggattagaaacccgtagatc

SEQ ID NO: 5570533 - DNA, 25 bp, Homo sapien
gtaccgggaatgatctggaatgtta

SEQ ID NO: 5570534 - DNA, 25 bp, Homo sapien
agatataaagtgctgatgcctgggc

SEQ ID NO: 5570535 - DNA, 25 bp, Homo sapien
ccgcaatcgcgtctgctgaaccttc

SEQ ID NO: 5570536 - DNA, 25 bp, Homo sapien
gtttgcttccagtcagagaacttcc

SEQ ID NO: 5570537 - DNA, 25 bp, Homo sapien
ctgccctgggtgtttctgggccaga

SEQ ID NO: 5570538 - DNA, 25 bp, Homo sapien
actttgggataggtttgagtcgttg

SEQ ID NO: 5570539 - DNA, 25 bp, Homo sapien
tttcggattactgcttggcggatta

SEQ ID NO: 5570540 - DNA, 25 bp, Homo sapien
tccaggctaataatgaaggtaccgg

SEQ ID NO: 5570541 - DNA, 25 bp, Homo sapien
cgtgggaagcgtgtactttttcgga

SEQ ID NO: 5570542 - DNA, 25 bp, Homo sapien
tctgcccccacgattctgtctgccc

SEQ ID NO: 5570543 - DNA, 25 bp, Homo sapien
actcgaggagaatgccctatccccg

SEQ ID NO: 5570544 - DNA, 25 bp, Homo sapien
cggggatagggcattctcctcgagt

SEQ ID NO: 5570545 - DNA, 25 bp, Homo sapien
acagccttaagacaagtagttcccc

SEQ ID NO: 5570546 - DNA, 25 bp, Homo sapien
ccgaggttccctcgtggcaagctga

SEQ ID NO: 5570547 - DNA, 25 bp, Homo sapien
tttgaaaggctgaccgcctactttg

SEQ ID NO: 5570548 - DNA, 25 bp, Homo sapien
gtgagaatcaaagcccaaccaaggc

SEQ ID NO: 5570549 - DNA, 25 bp, Homo sapien
agactttggatgatcatggaagttc

SEQ ID NO: 5570550 - DNA, 25 bp, Homo sapien
tccaacacgtattttgaaaggctga

SEQ ID NO: 5570551 - DNA, 25 bp, Homo sapien
tgagccgactccccactcgtgggct

SEQ ID NO: 5570552 - DNA, 25 bp, Homo sapien
ctccccactcgtgggctgatgcccg

SEQ ID NO: 5570553 - DNA, 25 bp, Homo sapien
caaagcccaaccaaggcactgaaca

SEQ ID NO: 5570554 - DNA, 25 bp, Homo sapien
atggaagttctcaaaagctagcaac

SEQ ID NO: 5570555 - DNA, 25 bp, Homo sapien
gtagttccccatgtgaccccaggtg

SEQ ID NO: 5570556 - DNA, 25 bp, Homo sapien
agggttttgacaggtgcttggaaaa

SEQ ID NO: 5570557 - DNA, 25 bp, Homo sapien
gtacagcaaaatggctgctccacag

SEQ ID NO: 5570558 - DNA, 25 bp, Homo sapien
tagcactccaggattgctggctagc

SEQ ID NO: 5570559 - DNA, 25 bp, Homo sapien
ggctaccccacaggtagaatagcac

SEQ ID NO: 5570560 - DNA, 25 bp, Homo sapien
tattccgagctggttttggccattc

SEQ ID NO: 5570561 - DNA, 25 bp, Homo sapien
tgctaaataagaggcaggttattca

SEQ ID NO: 5570562 - DNA, 25 bp, Homo sapien
gccctggtgggagtatcttatgcaa

SEQ ID NO: 5570563 - DNA, 25 bp, Homo sapien
ctgggttattgccgtgggatcattt

SEQ ID NO: 5570564 - DNA, 25 bp, Homo sapien
acatgcctactgccaaaggagagac

SEQ ID NO: 5570565 - DNA, 25 bp, Homo sapien
ggtgcttggaaaaatcctgctgatc

SEQ ID NO: 5570566 - DNA, 25 bp, Homo sapien
aaggagagacggaattatctttcta

SEQ ID NO: 5570567 - DNA, 25 bp, Homo sapien
tgtgacttatgctgaagaaacatac

SEQ ID NO: 5570568 - DNA, 25 bp, Homo sapien
cacgcaagtttcatcagttgactcc

SEQ ID NO: 5570569 - DNA, 25 bp, Homo sapien
actctatccatggggtatactctcc

SEQ ID NO: 5570570 - DNA, 25 bp, Homo sapien
ttttgtaagcacagatagccaccaa

SEQ ID NO: 5570571 - DNA, 25 bp, Homo sapien
tgactccatgactgctacccactgc

SEQ ID NO: 5570572 - DNA, 25 bp, Homo sapien
tcaaactgtggatagtacaacatac

SEQ ID NO: 5570573 - DNA, 25 bp, Homo sapien
ctctccaagaaccccactgcatatc

SEQ ID NO: 5570574 - DNA, 25 bp, Homo sapien
tacttgaagagatattaacctaaaa

SEQ ID NO: 5570575 - DNA, 25 bp, Homo sapien
aaaattaggtgaggttattacacta

SEQ ID NO: 5570576 - DNA, 25 bp, Homo sapien
aatttgtaaatcaggcacagtaaga

SEQ ID NO: 5570577 - DNA, 25 bp, Homo sapien
gtaagagattaggaacaacactggt

SEQ ID NO: 5570578 - DNA, 25 bp, Homo sapien
tgccatgactgatgccagctaactc

SEQ ID NO: 5570579 - DNA, 25 bp, Homo sapien
tgtcctgccagcaacctctgccacc

SEQ ID NO: 5570580 - DNA, 25 bp, Homo sapien
agagatactgtggagatcaagccaa

SEQ ID NO: 5570581 - DNA, 25 bp, Homo sapien
agacacaggaagaatgccgtttgaa

SEQ ID NO: 5570582 - DNA, 25 bp, Homo sapien
gtttcacttaggacccagacttgtc

SEQ ID NO: 5570583 - DNA, 25 bp, Homo sapien
agtggaacagtgtttgaccagctcc

SEQ ID NO: 5570584 - DNA, 25 bp, Homo sapien
ccctggaagtactatttgatggcac

SEQ ID NO: 5570585 - DNA, 25 bp, Homo sapien
accccagaaacatcacggtgaacca

SEQ ID NO: 5570586 - DNA, 25 bp, Homo sapien
gtatgcccaacaccatgcagacccc

SEQ ID NO: 5570587 - DNA, 25 bp, Homo sapien
tgcagaccccacaaccttcatgatg

SEQ ID NO: 5570588 - DNA, 25 bp, Homo sapien
caggtatcaaacagtggtcactcca

SEQ ID NO: 5570589 - DNA, 25 bp, Homo sapien
ggcccgacacggtgtcagtccggtc

SEQ ID NO: 5570590 - DNA, 25 bp, Homo sapien
gaccggactgacaccgtgtcgggcc

SEQ ID NO: 5570591 - DNA, 25 bp, Homo sapien
agaaccggagcagagaggtgaagtc

SEQ ID NO: 5570592 - DNA, 25 bp, Homo sapien
gacttcacctctctgctccggttct

SEQ ID NO: 5570593 - DNA, 25 bp, Homo sapien
ctgggatattggaaggttgaacttt

SEQ ID NO: 5570594 - DNA, 25 bp, Homo sapien
gaggagtacaaatacaagggtgtaa

SEQ ID NO: 5570595 - DNA, 25 bp, Homo sapien
cactgattaaagtcacaggccagcc

SEQ ID NO: 5570596 - DNA, 25 bp, Homo sapien
tgtaaatcctcagaggcgtgggttc

SEQ ID NO: 5570597 - DNA, 25 bp, Homo sapien
agcccagactcaagaggagtacaaa

SEQ ID NO: 5570598 - DNA, 25 bp, Homo sapien
gcgtgggttcactggagtcacgaat

SEQ ID NO: 5570599 - DNA, 25 bp, Homo sapien
tatcacatcagttggtggagaaggc

SEQ ID NO: 5570600 - DNA, 25 bp, Homo sapien
atgtgaataaaaggccctacccttc

SEQ ID NO: 5570601 - DNA, 25 bp, Homo sapien
gtagtcttagaactggcactgaacc

SEQ ID NO: 5570602 - DNA, 25 bp, Homo sapien
ctggagtcacgaatataaaaggata

SEQ ID NO: 5570603 - DNA, 25 bp, Homo sapien
agggtataacacattttgagagcat

SEQ ID NO: 5570604 - DNA, 25 bp, Homo sapien
aatgcataccacatccttccagttt

SEQ ID NO: 5570605 - DNA, 25 bp, Homo sapien
agataaaaccttgtggcaggaagtc

SEQ ID NO: 5570606 - DNA, 25 bp, Homo sapien
agcaggagcaaacaaagtatctttc

SEQ ID NO: 5570607 - DNA, 25 bp, Homo sapien
tggttccgaaaatagaggccctata

SEQ ID NO: 5570608 - DNA, 25 bp, Homo sapien
atcaaaacgcaaaccaataaagtgt

SEQ ID NO: 5570609 - DNA, 25 bp, Homo sapien
atagaggccctatacaaataattct

SEQ ID NO: 5570610 - DNA, 25 bp, Homo sapien
aaataattctggcaacttgtcaaca

SEQ ID NO: 5570611 - DNA, 25 bp, Homo sapien
atcttaaaacatagtcttgtgtgtc

SEQ ID NO: 5570612 - DNA, 25 bp, Homo sapien
ttgtcaacagaaatgaaagcaggag

SEQ ID NO: 5570613 - DNA, 25 bp, Homo sapien
ctgatttctaagtgagattttcctc

SEQ ID NO: 5570614 - DNA, 25 bp, Homo sapien
ttgtgacaaagtaaaataaatcctc

SEQ ID NO: 5570615 - DNA, 25 bp, Homo sapien
ttgggggaagcgacttcccactctc

SEQ ID NO: 5570616 - DNA, 25 bp, Homo sapien
catacaacgtttacaggcaaaagct

SEQ ID NO: 5570617 - DNA, 25 bp, Homo sapien
ctgctgttaacagaggagcaaagaa

SEQ ID NO: 5570618 - DNA, 25 bp, Homo sapien
tgcatgattaagaaaccatcagtgc

SEQ ID NO: 5570619 - DNA, 25 bp, Homo sapien
ggcaaaagctaccaaactgttgtgg

SEQ ID NO: 5570620 - DNA, 25 bp, Homo sapien
cactctcgattacagaaggagaatc

SEQ ID NO: 5570621 - DNA, 25 bp, Homo sapien
cttactatgtcgaaccagatgattt

SEQ ID NO: 5570622 - DNA, 25 bp, Homo sapien
atgatgaactaactgcactggcttt

SEQ ID NO: 5570623 - DNA, 25 bp, Homo sapien
tcatggtgcatgatccacaatgcat

SEQ ID NO: 5570624 - DNA, 25 bp, Homo sapien
tgtggccattgagatgttggaacaa

SEQ ID NO: 5570625 - DNA, 25 bp, Homo sapien
tcaaagtcctctaatgtctgcagtc

SEQ ID NO: 5570626 - DNA, 25 bp, Homo sapien
cctggcatgagagcactcgacttta

SEQ ID NO: 5570627 - DNA, 25 bp, Homo sapien
aaaaaagacagtggaattgagtatc

SEQ ID NO: 5570628 - DNA, 25 bp, Homo sapien
agacaggagtaatacgaaagaatga

SEQ ID NO: 5570629 - DNA, 25 bp, Homo sapien
tcagaatttgccagagccatattac

SEQ ID NO: 5570630 - DNA, 25 bp, Homo sapien
atatagtcggatactgtgagtcagt

SEQ ID NO: 5570631 - DNA, 25 bp, Homo sapien
agcgtcaagaccaaattcatgagat

SEQ ID NO: 5570632 - DNA, 25 bp, Homo sapien
attgcctgcatgttttcagagccct

SEQ ID NO: 5570633 - DNA, 25 bp, Homo sapien
gtaatacgaaagaatgactgaggtt

SEQ ID NO: 5570634 - DNA, 25 bp, Homo sapien
tgactgaggtttcatgaactgtatc

SEQ ID NO: 5570635 - DNA, 25 bp, Homo sapien
tcctgggatgttaagtcagcgtcaa

SEQ ID NO: 5570636 - DNA, 25 bp, Homo sapien
atcagcttcctggcatgagagcact

SEQ ID NO: 5570637 - DNA, 25 bp, Homo sapien
ctgaagttctcttgagccctgtggc

SEQ ID NO: 5570638 - DNA, 25 bp, Homo sapien
gctctgtctcccagaggatggcgtc

SEQ ID NO: 5570639 - DNA, 25 bp, Homo sapien
actcaacaagagctatggtgatggg

SEQ ID NO: 5570640 - DNA, 25 bp, Homo sapien
tgtggcctcgaggtaactcgctgga

SEQ ID NO: 5570641 - DNA, 25 bp, Homo sapien
gtgtgtgatttttctgccctaccca

SEQ ID NO: 5570642 - DNA, 25 bp, Homo sapien
gcctctccctggcccccacactgtc

SEQ ID NO: 5570643 - DNA, 25 bp, Homo sapien
gctgagggggtatactcacctccat

SEQ ID NO: 5570644 - DNA, 25 bp, Homo sapien
atggcgtccccatcctcgctgaagt

SEQ ID NO: 5570645 - DNA, 25 bp, Homo sapien
cattgtgattaatactgttagactc

SEQ ID NO: 5570646 - DNA, 25 bp, Homo sapien
tcttgagccctgtggcctcgaggta

SEQ ID NO: 5570647 - DNA, 25 bp, Homo sapien
tactgttagactcaacaagagctat

SEQ ID NO: 5570648 - DNA, 25 bp, Homo sapien
tgtaccaatctgaagaagatctttc

SEQ ID NO: 5570649 - DNA, 25 bp, Homo sapien
cagatgttaacagtcactgaaaatc

SEQ ID NO: 5570650 - DNA, 25 bp, Homo sapien
agttaggggtttattgaggcttgaa

SEQ ID NO: 5570651 - DNA, 25 bp, Homo sapien
cacaagtgccagttaaacatgtacc

SEQ ID NO: 5570652 - DNA, 25 bp, Homo sapien
catgaggatcattaagatggcagac

SEQ ID NO: 5570653 - DNA, 25 bp, Homo sapien
catggaaaacaattaacttactggt

SEQ ID NO: 5570654 - DNA, 25 bp, Homo sapien
agcataattggagaaccatagattc

SEQ ID NO: 5570655 - DNA, 25 bp, Homo sapien
gaggcttgaattctagaaagagggg

SEQ ID NO: 5570656 - DNA, 25 bp, Homo sapien
agaaagaggggaattactatattat

SEQ ID NO: 5570657 - DNA, 25 bp, Homo sapien
agatggcagaccttgtagatcaaac

SEQ ID NO: 5570658 - DNA, 25 bp, Homo sapien
gagtgagggcaaaacatacatctgc

SEQ ID NO: 5570659 - DNA, 25 bp, Homo sapien
gactgttagtggcaggaatgtagtc

SEQ ID NO: 5570660 - DNA, 25 bp, Homo sapien
acccgctttgcatatgaggaaactg

SEQ ID NO: 5570661 - DNA, 25 bp, Homo sapien
aacacatgtgtaagtggctcaggac

SEQ ID NO: 5570662 - DNA, 25 bp, Homo sapien
gcccagtggccaccgactgttagtg

SEQ ID NO: 5570663 - DNA, 25 bp, Homo sapien
cagacttaagatttgcccagtggcc

SEQ ID NO: 5570664 - DNA, 25 bp, Homo sapien
ggggaccatgaaaactcacaccagt

SEQ ID NO: 5570665 - DNA, 25 bp, Homo sapien
gaaactgaggcaccacagacttaag

SEQ ID NO: 5570666 - DNA, 25 bp, Homo sapien
ggatgtggtcccggggaccatgaaa

SEQ ID NO: 5570667 - DNA, 25 bp, Homo sapien
caggccgttcacaagatgctggcta

SEQ ID NO: 5570668 - DNA, 25 bp, Homo sapien
aagatgctggctaagcggcttcatt

SEQ ID NO: 5570669 - DNA, 25 bp, Homo sapien
gtctgcagggaatgcccctgtccca

SEQ ID NO: 5570670 - DNA, 25 bp, Homo sapien
gcgcaactttcgctctcatcgccgc

SEQ ID NO: 5570671 - DNA, 25 bp, Homo sapien
ctccaccatggccggcatcggtggg

SEQ ID NO: 5570672 - DNA, 25 bp, Homo sapien
gcaactttcgctctcatcgccgccc

SEQ ID NO: 5570673 - DNA, 25 bp, Homo sapien
gccgcttcaagcccccagcgacgag

SEQ ID NO: 5570674 - DNA, 25 bp, Homo sapien
gacgagccgagcgcaactttcgctc

SEQ ID NO: 5570675 - DNA, 25 bp, Homo sapien
aactttcgctctcatcgccgccctc

SEQ ID NO: 5570676 - DNA, 25 bp, Homo sapien
cgagccgagcgcaactttcgctctc

SEQ ID NO: 5570677 - DNA, 25 bp, Homo sapien
ctttcgctctcatcgccgccctcac

SEQ ID NO: 5570678 - DNA, 25 bp, Homo sapien
cgcaactttcgctctcatcgccgcc

SEQ ID NO: 5570679 - DNA, 25 bp, Homo sapien
ttctccaccatggccggcatcggtg

SEQ ID NO: 5570680 - DNA, 25 bp, Homo sapien
tctccaccatggccggcatcggtgg

SEQ ID NO: 5570681 - DNA, 25 bp, Homo sapien
ccctagatctcctctgacggtgtac

SEQ ID NO: 5570682 - DNA, 25 bp, Homo sapien
cctgctctggacccatgtttaaggg

SEQ ID NO: 5570683 - DNA, 25 bp, Homo sapien
atatcccactaggctgtgctgggac

SEQ ID NO: 5570684 - DNA, 25 bp, Homo sapien
gggaagaggtgacatataccaatcc

SEQ ID NO: 5570685 - DNA, 25 bp, Homo sapien
ctcctttatagacaggaagcacatc

SEQ ID NO: 5570686 - DNA, 25 bp, Homo sapien
cgaggcagagccgctcttgtcccta

SEQ ID NO: 5570687 - DNA, 25 bp, Homo sapien
ctcaagaaatgaactggtgagagga

SEQ ID NO: 5570688 - DNA, 25 bp, Homo sapien
taaggggccaactgctactgttgct

SEQ ID NO: 5570689 - DNA, 25 bp, Homo sapien
tctgacggtgtacagctcctccctg

SEQ ID NO: 5570690 - DNA, 25 bp, Homo sapien
caggaagcacatctgacctcaggct

SEQ ID NO: 5570691 - DNA, 25 bp, Homo sapien
acctcaggctgagcacaaagctcca

SEQ ID NO: 5570692 - DNA, 25 bp, Homo sapien
gtaaggctgggagatatttttcaat

SEQ ID NO: 5570693 - DNA, 25 bp, Homo sapien
ggctctggtattgaagtgaatggac

SEQ ID NO: 5570694 - DNA, 25 bp, Homo sapien
tgttaacctaacaggagagccagga

SEQ ID NO: 5570695 - DNA, 25 bp, Homo sapien
gcaataggaagttaaagggcaaatg

SEQ ID NO: 5570696 - DNA, 25 bp, Homo sapien
caaggagatctcatgctggtatggc

SEQ ID NO: 5570697 - DNA, 25 bp, Homo sapien
atcgtaacctctggtaaggctggga

SEQ ID NO: 5570698 - DNA, 25 bp, Homo sapien
agtgaatggactcacacagacagtg

SEQ ID NO: 5570699 - DNA, 25 bp, Homo sapien
gggatttaacactatcaaggagatc

SEQ ID NO: 5570700 - DNA, 25 bp, Homo sapien
caaagaggtggctctggtattgaag

SEQ ID NO: 5570701 - DNA, 25 bp, Homo sapien
tatggcttcttagtaaataggaaac

SEQ ID NO: 5570702 - DNA, 25 bp, Homo sapien
tgggagacatttcaaaggggaatta

SEQ ID NO: 5570703 - DNA, 25 bp, Homo sapien
gagatggcccccctccaccgatatt

SEQ ID NO: 5570704 - DNA, 25 bp, Homo sapien
acccgtcttaggtcccaagcctcga

SEQ ID NO: 5570705 - DNA, 25 bp, Homo sapien
gcagggagcgattcataaatatgtc

SEQ ID NO: 5570706 - DNA, 25 bp, Homo sapien
gctctccccggcgctttaagtaatg

SEQ ID NO: 5570707 - DNA, 25 bp, Homo sapien
gcacgctcggtttccggatacggct

SEQ ID NO: 5570708 - DNA, 25 bp, Homo sapien
ttcataaatatgtcagggctggtga

SEQ ID NO: 5570709 - DNA, 25 bp, Homo sapien
ggctggtgaaatataggcaacattt

SEQ ID NO: 5570710 - DNA, 25 bp, Homo sapien
gtaatgatatttgcatgcagggagc

SEQ ID NO: 5570711 - DNA, 25 bp, Homo sapien
cggatacggctattcaccgcacctc

SEQ ID NO: 5570712 - DNA, 25 bp, Homo sapien
aaatatgtcagggctggtgaaatat

SEQ ID NO: 5570713 - DNA, 25 bp, Homo sapien
gatatttgcatgcagggagcgattc

SEQ ID NO: 5570714 - DNA, 25 bp, Homo sapien
agtccttcagaaataacctctcccc

SEQ ID NO: 5570715 - DNA, 25 bp, Homo sapien
tttcccagacacaggaagtacagac

SEQ ID NO: 5570716 - DNA, 25 bp, Homo sapien
cactgccacaacagacaggccagta

SEQ ID NO: 5570717 - DNA, 25 bp, Homo sapien
agacaggccagtattgacagaattt

SEQ ID NO: 5570718 - DNA, 25 bp, Homo sapien
ggccaaggccttcactgccacaaca

SEQ ID NO: 5570719 - DNA, 25 bp, Homo sapien
gcacaccgtgctccggccctcttct

SEQ ID NO: 5570720 - DNA, 25 bp, Homo sapien
gacacaggaagtacagacctaagct

SEQ ID NO: 5570721 - DNA, 25 bp, Homo sapien
attaattcactatggccaaggcctt

SEQ ID NO: 5570722 - DNA, 25 bp, Homo sapien
atgaagtttctgccacactgggctt

SEQ ID NO: 5570723 - DNA, 25 bp, Homo sapien
agacctaagctctgccggaatattc

SEQ ID NO: 5570724 - DNA, 25 bp, Homo sapien
aacatatgccagaaggccctgcaca

SEQ ID NO: 5570725 - DNA, 25 bp, Homo sapien
tgccgtgattcagtgacagagttcc

SEQ ID NO: 5570726 - DNA, 25 bp, Homo sapien
gagaaaccgaggcctttgcttagta

SEQ ID NO: 5570727 - DNA, 25 bp, Homo sapien
taaactgcacaaaacctcggtcaaa

SEQ ID NO: 5570728 - DNA, 25 bp, Homo sapien
gagatggctcctcatggaggaggct

SEQ ID NO: 5570729 - DNA, 25 bp, Homo sapien
ttctacccaggttgaagtccagcaa

SEQ ID NO: 5570730 - DNA, 25 bp, Homo sapien
acatgaaatagtctacaagtggcct

SEQ ID NO: 5570731 - DNA, 25 bp, Homo sapien
ccagtcaatagtgagatggctcctc

SEQ ID NO: 5570732 - DNA, 25 bp, Homo sapien
tacctggatgataataaactgcaca

SEQ ID NO: 5570733 - DNA, 25 bp, Homo sapien
gaagtccagcaaaattgcgactgtc

SEQ ID NO: 5570734 - DNA, 25 bp, Homo sapien
ctgggttgcacctgattacctggat

SEQ ID NO: 5570735 - DNA, 25 bp, Homo sapien
gctggtggccatacctggcactagc

SEQ ID NO: 5570736 - DNA, 25 bp, Homo sapien
cgttaactttaactctgatactatt

SEQ ID NO: 5570737 - DNA, 25 bp, Homo sapien
aatagtatcagagttaaagttaacg

SEQ ID NO: 5570738 - DNA, 25 bp, Homo sapien
ttggactctacatgtggtaagcaac

SEQ ID NO: 5570739 - DNA, 25 bp, Homo sapien
ttggcttccccattgtgcaccattc

SEQ ID NO: 5570740 - DNA, 25 bp, Homo sapien
atgtggtaagcaactaacttgattt

SEQ ID NO: 5570741 - DNA, 25 bp, Homo sapien
gcttgacctattcctacccagaccc

SEQ ID NO: 5570742 - DNA, 25 bp, Homo sapien
ctcactaggtactttgaatggatat

SEQ ID NO: 5570743 - DNA, 25 bp, Homo sapien
agcaagaaattttgtgtcccttccc

SEQ ID NO: 5570744 - DNA, 25 bp, Homo sapien
gaacacaaatctctggcgactagac

SEQ ID NO: 5570745 - DNA, 25 bp, Homo sapien
ggcgactagactgaagcttgaccta

SEQ ID NO: 5570746 - DNA, 25 bp, Homo sapien
aaaaaatgacctgaagagtcctgtt

SEQ ID NO: 5570747 - DNA, 25 bp, Homo sapien
tgtgtcccttccccaagctagcttt

SEQ ID NO: 5570748 - DNA, 25 bp, Homo sapien
cccagttgaatggatgttgggaaga

SEQ ID NO: 5570749 - DNA, 25 bp, Homo sapien
cccatgaagcatgtgtaccacgtgc

SEQ ID NO: 5570750 - DNA, 25 bp, Homo sapien
caagatgcaatgaactaccatgtcc

SEQ ID NO: 5570751 - DNA, 25 bp, Homo sapien
caagaacaaggttcaaggatgtgag

SEQ ID NO: 5570752 - DNA, 25 bp, Homo sapien
gaggaactcacacaggtggtgtcca

SEQ ID NO: 5570753 - DNA, 25 bp, Homo sapien
actggtcagcaatggctcttcttac

SEQ ID NO: 5570754 - DNA, 25 bp, Homo sapien
caagaaacttcacaacaccccatac

SEQ ID NO: 5570755 - DNA, 25 bp, Homo sapien
aaaacatcacaggtgcccatgaagc

SEQ ID NO: 5570756 - DNA, 25 bp, Homo sapien
tccgacagctggaagtttgaacaac

SEQ ID NO: 5570757 - DNA, 25 bp, Homo sapien
aaggacaaaattagagaacaagaga

SEQ ID NO: 5570758 - DNA, 25 bp, Homo sapien
tacaactatgggaatgaagatcagg

SEQ ID NO: 5570759 - DNA, 25 bp, Homo sapien
aatgaagatcaggccaagttcctct

SEQ ID NO: 5570760 - DNA, 25 bp, Homo sapien
acaatcttcctgaggattagcagca

SEQ ID NO: 5570761 - DNA, 25 bp, Homo sapien
ctgtccataagggaacctggcagta

SEQ ID NO: 5570762 - DNA, 25 bp, Homo sapien
ttatccgtttgaaattctaagattc

SEQ ID NO: 5570763 - DNA, 25 bp, Homo sapien
tgattcattctgtccataagggaac

SEQ ID NO: 5570764 - DNA, 25 bp, Homo sapien
agcgtcctaaggtttacaatcttcc

SEQ ID NO: 5570765 - DNA, 25 bp, Homo sapien
ctgcacccagccgatgattcattct

SEQ ID NO: 5570766 - DNA, 25 bp, Homo sapien
ccacccacctcagcgtcctaaggtt

SEQ ID NO: 5570767 - DNA, 25 bp, Homo sapien
gccaatatggaaaaactcaacagtt

SEQ ID NO: 5570768 - DNA, 25 bp, Homo sapien
ataagggaacctggcagtatattgc

SEQ ID NO: 5570769 - DNA, 25 bp, Homo sapien
cttcctgaggattagcagcatgagc

SEQ ID NO: 5570770 - DNA, 25 bp, Homo sapien
atggaaaaactcaacagttacactt

SEQ ID NO: 5570771 - DNA, 25 bp, Homo sapien
accctcaacttaaagccaatgaaaa

SEQ ID NO: 5570772 - DNA, 25 bp, Homo sapien
aagccagaagtaccattatctatcc

SEQ ID NO: 5570773 - DNA, 25 bp, Homo sapien
ccatctccaatacaaaaacaaaaac

SEQ ID NO: 5570774 - DNA, 25 bp, Homo sapien
gcctgggcaacatagtaagaaccca

SEQ ID NO: 5570775 - DNA, 25 bp, Homo sapien
cacagttgggcattttatacaaaat

SEQ ID NO: 5570776 - DNA, 25 bp, Homo sapien
agtagggtgcaatatatatacgtat

SEQ ID NO: 5570777 - DNA, 25 bp, Homo sapien
ttaaataaagccagaagtaccatta

SEQ ID NO: 5570778 - DNA, 25 bp, Homo sapien
aattttaaagtagggtgcaatatat

SEQ ID NO: 5570779 - DNA, 25 bp, Homo sapien
tgtataaatacaatggtttccctaa

SEQ ID NO: 5570780 - DNA, 25 bp, Homo sapien
atcagtcaattttaaagtagggtgc

SEQ ID NO: 5570781 - DNA, 25 bp, Homo sapien
ggcaacatagtaagaacccatctcc

SEQ ID NO: 5570782 - DNA, 25 bp, Homo sapien
atgggaatgaccaggttcccacatc

SEQ ID NO: 5570783 - DNA, 25 bp, Homo sapien
gggcctgtagcttgagtccagacag

SEQ ID NO: 5570784 - DNA, 25 bp, Homo sapien
cagtacaataatgggaccttaaaac

SEQ ID NO: 5570785 - DNA, 25 bp, Homo sapien
tgtctctaaaattctggatgtgccc

SEQ ID NO: 5570786 - DNA, 25 bp, Homo sapien
tcccacatcatgcacagcaggggcc

SEQ ID NO: 5570787 - DNA, 25 bp, Homo sapien
aaaactgctgtgatgcaggagtgga

SEQ ID NO: 5570788 - DNA, 25 bp, Homo sapien
tacccaccactgaccccctagcatt

SEQ ID NO: 5570789 - DNA, 25 bp, Homo sapien
cagagatgggaaaacatcattggtc

SEQ ID NO: 5570790 - DNA, 25 bp, Homo sapien
ttctggatgtgccctagtggctgag

SEQ ID NO: 5570791 - DNA, 25 bp, Homo sapien
aatgggaccttaaaactgctgtgat

SEQ ID NO: 5570792 - DNA, 25 bp, Homo sapien
tgaccccctagcattcagagatggg

SEQ ID NO: 5570793 - DNA, 25 bp, Homo sapien
taaatggacagatagcataatagta

SEQ ID NO: 5570794 - DNA, 25 bp, Homo sapien
gagtgctcatgtattctgagatgtc

SEQ ID NO: 5570795 - DNA, 25 bp, Homo sapien
aaagcaagccaacatgagtgctcat

SEQ ID NO: 5570796 - DNA, 25 bp, Homo sapien
taatacagggtaagttcatagctac

SEQ ID NO: 5570797 - DNA, 25 bp, Homo sapien
agtaatgctctaaaatggaccaatt

SEQ ID NO: 5570798 - DNA, 25 bp, Homo sapien
tctggggagtttgctacctaccata

SEQ ID NO: 5570799 - DNA, 25 bp, Homo sapien
agaggttttataatgaaatgggaat

SEQ ID NO: 5570800 - DNA, 25 bp, Homo sapien
catagctacaaagcaagccaacatg

SEQ ID NO: 5570801 - DNA, 25 bp, Homo sapien
gagttcatacttctggggagtttgc

SEQ ID NO: 5570802 - DNA, 25 bp, Homo sapien
gagatgtctaatccagagttcatac

SEQ ID NO: 5570803 - DNA, 25 bp, Homo sapien
aataagtatctgtaagtaaaccatc

SEQ ID NO: 5570804 - DNA, 25 bp, Homo sapien
aaaacaatgtgatggtggcacagaa

SEQ ID NO: 5570805 - DNA, 25 bp, Homo sapien
tcatggcaaagtactcaatcaagaa

SEQ ID NO: 5570806 - DNA, 25 bp, Homo sapien
ggagaagtgagactgtcattttata

SEQ ID NO: 5570807 - DNA, 25 bp, Homo sapien
tttgggaaattactctgttacagac

SEQ ID NO: 5570808 - DNA, 25 bp, Homo sapien
tgatatgtcaagtcagtggagaaag

SEQ ID NO: 5570809 - DNA, 25 bp, Homo sapien
caaaatatcataaagctacagtaac

SEQ ID NO: 5570810 - DNA, 25 bp, Homo sapien
ataagcatgttcacaagctatcatt

SEQ ID NO: 5570811 - DNA, 25 bp, Homo sapien
gaaaacaaatagtccagaaagtcac

SEQ ID NO: 5570812 - DNA, 25 bp, Homo sapien
aaaatcaagacaaataagcatgttc

SEQ ID NO: 5570813 - DNA, 25 bp, Homo sapien
gtaactaaaacaatgtgatggtggc

SEQ ID NO: 5570814 - DNA, 25 bp, Homo sapien
aagaaataacacgtaataacaatta

SEQ ID NO: 5570815 - DNA, 25 bp, Homo sapien
accgtccagtgtccttgtcccgtct

SEQ ID NO: 5570816 - DNA, 25 bp, Homo sapien
ggaacttagcatctaatgagggaga

SEQ ID NO: 5570817 - DNA, 25 bp, Homo sapien
cagaaaatatataagcatggcacaa

SEQ ID NO: 5570818 - DNA, 25 bp, Homo sapien
aatacaaataacatagccgaggggt

SEQ ID NO: 5570819 - DNA, 25 bp, Homo sapien
agcatggcacaatagaccgtccagt

SEQ ID NO: 5570820 - DNA, 25 bp, Homo sapien
atgagggagacacatgtaaataaat

SEQ ID NO: 5570821 - DNA, 25 bp, Homo sapien
gtctcagaggactccgaatatcccc

SEQ ID NO: 5570822 - DNA, 25 bp, Homo sapien
aagacaaaacaattccatgggatga

SEQ ID NO: 5570823 - DNA, 25 bp, Homo sapien
gggttgagagcatattcgagcctct

SEQ ID NO: 5570824 - DNA, 25 bp, Homo sapien
ttcgagcctctgcgtgtcctcacat

SEQ ID NO: 5570825 - DNA, 25 bp, Homo sapien
gcaactgatagggttgagagcatat

SEQ ID NO: 5570826 - DNA, 25 bp, Homo sapien
atacctaacaacaaagcctggccca

SEQ ID NO: 5570827 - DNA, 25 bp, Homo sapien
tccttccggcaatgctaaggggtga

SEQ ID NO: 5570828 - DNA, 25 bp, Homo sapien
aagattcataggttctccggactcc

SEQ ID NO: 5570829 - DNA, 25 bp, Homo sapien
tctgtagtcggctaacagaggatga

SEQ ID NO: 5570830 - DNA, 25 bp, Homo sapien
atgaagtttccctggggactgtgtg

SEQ ID NO: 5570831 - DNA, 25 bp, Homo sapien
taaggggtgaatctcttttgcggga

SEQ ID NO: 5570832 - DNA, 25 bp, Homo sapien
cctcactgagaaaccggcttttgtc

SEQ ID NO: 5570833 - DNA, 25 bp, Homo sapien
tttgtgtagatgcatgaggtgtatt

SEQ ID NO: 5570834 - DNA, 25 bp, Homo sapien
tcattttaaggtctcgcgggcttcg

SEQ ID NO: 5570835 - DNA, 25 bp, Homo sapien
gactgtgtgactccctaggggtcgg

SEQ ID NO: 5570836 - DNA, 25 bp, Homo sapien
gattatcttggggccagcgatttcc

SEQ ID NO: 5570837 - DNA, 25 bp, Homo sapien
atgatgttggtacaaagaatgtgat

SEQ ID NO: 5570838 - DNA, 25 bp, Homo sapien
ctactgaggtaggataaaatgatgt

SEQ ID NO: 5570839 - DNA, 25 bp, Homo sapien
tgtagcaaaatgtaattccagcaat

SEQ ID NO: 5570840 - DNA, 25 bp, Homo sapien
ctgctatgaagtatcctactgaggt

SEQ ID NO: 5570841 - DNA, 25 bp, Homo sapien
gtagagaaagtggcaaccatttccc

SEQ ID NO: 5570842 - DNA, 25 bp, Homo sapien
tcccatcacataatcagtcactaat

SEQ ID NO: 5570843 - DNA, 25 bp, Homo sapien
ttcttaataaaactgtagcaaaatg

SEQ ID NO: 5570844 - DNA, 25 bp, Homo sapien
ttccagcaattagtgtgaattctac

SEQ ID NO: 5570845 - DNA, 25 bp, Homo sapien
tataaaacagctattgccattcagt

SEQ ID NO: 5570846 - DNA, 25 bp, Homo sapien
ttctgaccaagctctccactctaat

SEQ ID NO: 5570847 - DNA, 25 bp, Homo sapien
ttcccctgcactattcccatcacat

SEQ ID NO: 5570848 - DNA, 25 bp, Homo sapien
tgaaatacagagttgaaagaatagt

SEQ ID NO: 5570849 - DNA, 25 bp, Homo sapien
ttaccgctaagtacttaggagatac

SEQ ID NO: 5570850 - DNA, 25 bp, Homo sapien
taggagatacatgccaaagaaagtg

SEQ ID NO: 5570851 - DNA, 25 bp, Homo sapien
ctccacatttgtctcagcgtccttc

SEQ ID NO: 5570852 - DNA, 25 bp, Homo sapien
atcctgaatgatactttaccgctaa

SEQ ID NO: 5570853 - DNA, 25 bp, Homo sapien
caaagaaagtgggatattcgcctat

SEQ ID NO: 5570854 - DNA, 25 bp, Homo sapien
acagtgatcacattagagaaattcc

SEQ ID NO: 5570855 - DNA, 25 bp, Homo sapien
tcgcctatagaaccacagtgatcac

SEQ ID NO: 5570856 - DNA, 25 bp, Homo sapien
cattttcaactcagggcagaatcct

SEQ ID NO: 5570857 - DNA, 25 bp, Homo sapien
tagagaaattccactgccacaataa

SEQ ID NO: 5570858 - DNA, 25 bp, Homo sapien
gttgaaaagaagttgcagatatcct

SEQ ID NO: 5570859 - DNA, 25 bp, Homo sapien
aaatacaccatcaagagcagaagcc

SEQ ID NO: 5570860 - DNA, 25 bp, Homo sapien
agaatgagaccccaggagtatttat

SEQ ID NO: 5570861 - DNA, 25 bp, Homo sapien
gggaaagaacagtcttcaggcctac

SEQ ID NO: 5570862 - DNA, 25 bp, Homo sapien
aataggcactgttaaaagatgggga

SEQ ID NO: 5570863 - DNA, 25 bp, Homo sapien
tgatgggccatcatttaataggcac

SEQ ID NO: 5570864 - DNA, 25 bp, Homo sapien
atttattcaaagttgagaggggaaa

SEQ ID NO: 5570865 - DNA, 25 bp, Homo sapien
ggcaatatgtagagttgggagaatg

SEQ ID NO: 5570866 - DNA, 25 bp, Homo sapien
aagagcagaagcccttatacactac

SEQ ID NO: 5570867 - DNA, 25 bp, Homo sapien
ttcttagacaggttctcccatcccc

SEQ ID NO: 5570868 - DNA, 25 bp, Homo sapien
aacagagaatgcaacatcaaatgca

SEQ ID NO: 5570869 - DNA, 25 bp, Homo sapien
tcaggcctacaacaaagagctaaag

SEQ ID NO: 5570870 - DNA, 25 bp, Homo sapien
tacaacatcactcctgcattccctt

SEQ ID NO: 5570871 - DNA, 25 bp, Homo sapien
ttgaacaaaagcaaagacagagtag

SEQ ID NO: 5570872 - DNA, 25 bp, Homo sapien
taaaatagcatacaacatcactcct

SEQ ID NO: 5570873 - DNA, 25 bp, Homo sapien
aagttaagaacacaacaaaaatgct

SEQ ID NO: 5570874 - DNA, 25 bp, Homo sapien
aaatgagatatatttccagctgatc

SEQ ID NO: 5570875 - DNA, 25 bp, Homo sapien
ctactttacatagggtggccttccc

SEQ ID NO: 5570876 - DNA, 25 bp, Homo sapien
acatttgatgggtaataagcatttt

SEQ ID NO: 5570877 - DNA, 25 bp, Homo sapien
aacagatacatttgatgggtaataa

SEQ ID NO: 5570878 - DNA, 25 bp, Homo sapien
tatctaggattccttcaaggtttcc

SEQ ID NO: 5570879 - DNA, 25 bp, Homo sapien
acaaaagcaaagacagagtagtgta

SEQ ID NO: 5570880 - DNA, 25 bp, Homo sapien
gatgctactttacatagggtggcct

SEQ ID NO: 5570881 - DNA, 25 bp, Homo sapien
aacagtgaaaggaccacattcgggt

SEQ ID NO: 5570882 - DNA, 25 bp, Homo sapien
acccgaatgtggtcctttcactgtt

SEQ ID NO: 5570883 - DNA, 25 bp, Homo sapien
taaggaactataagagatgtgttac

SEQ ID NO: 5570884 - DNA, 25 bp, Homo sapien
accagtaactgttgatagaaaatgt

SEQ ID NO: 5570885 - DNA, 25 bp, Homo sapien
aaaactgtgttggaagatatcaaac

SEQ ID NO: 5570886 - DNA, 25 bp, Homo sapien
ttaatgaatagaacgtcccagttac

SEQ ID NO: 5570887 - DNA, 25 bp, Homo sapien
ccagttacataaagatgccaatcat

SEQ ID NO: 5570888 - DNA, 25 bp, Homo sapien
tagaattctaacatgtgggagggca

SEQ ID NO: 5570889 - DNA, 25 bp, Homo sapien
acagaaactttagcaaacgaatgaa

SEQ ID NO: 5570890 - DNA, 25 bp, Homo sapien
agtaaaatggtgaggcttgtcctac

SEQ ID NO: 5570891 - DNA, 25 bp, Homo sapien
atcccatttagggtagagaggaatg

SEQ ID NO: 5570892 - DNA, 25 bp, Homo sapien
gaataagacactttgaaggagaaga

SEQ ID NO: 5570893 - DNA, 25 bp, Homo sapien
gtgtgaaccagccattgaaacccag

SEQ ID NO: 5570894 - DNA, 25 bp, Homo sapien
ttgcctctccaatgtgggaggggag

SEQ ID NO: 5570895 - DNA, 25 bp, Homo sapien
gagcggttgcctctccaatgtggga

SEQ ID NO: 5570896 - DNA, 25 bp, Homo sapien
actgtctgatgaagcgacaatcagc

SEQ ID NO: 5570897 - DNA, 25 bp, Homo sapien
gttaagaataaacatttagctgggc

SEQ ID NO: 5570898 - DNA, 25 bp, Homo sapien
tgttaagagcggttgcctctccaat

SEQ ID NO: 5570899 - DNA, 25 bp, Homo sapien
gatgaagcgacaatcagccataacc

SEQ ID NO: 5570900 - DNA, 25 bp, Homo sapien
tatgacagtaaattaagttattaac

SEQ ID NO: 5570901 - DNA, 25 bp, Homo sapien
aatcctggttaagaataaacattta

SEQ ID NO: 5570902 - DNA, 25 bp, Homo sapien
acaccaaaaattccagtctggggcc

SEQ ID NO: 5570903 - DNA, 25 bp, Homo sapien
acatttagctgggcactcatgctgt

SEQ ID NO: 5570904 - DNA, 25 bp, Homo sapien
gaagcgacaatcagccataaccttg

SEQ ID NO: 5570905 - DNA, 25 bp, Homo sapien
aaaagtttaagggctattgcatgtg

SEQ ID NO: 5570906 - DNA, 25 bp, Homo sapien
agaagtagagaaatttactccaggt

SEQ ID NO: 5570907 - DNA, 25 bp, Homo sapien
gaaatggcagctacatgtggtttcc

SEQ ID NO: 5570908 - DNA, 25 bp, Homo sapien
gttatactgcagaaagaggcaaaac

SEQ ID NO: 5570909 - DNA, 25 bp, Homo sapien
tctatgaggctaccatcatcatctc

SEQ ID NO: 5570910 - DNA, 25 bp, Homo sapien
gaatatcgagtctcaaagaagtaga

SEQ ID NO: 5570911 - DNA, 25 bp, Homo sapien
tgtgtttgtctggggttaagtatac

SEQ ID NO: 5570912 - DNA, 25 bp, Homo sapien
ctggggttaagtatactgacatcta

SEQ ID NO: 5570913 - DNA, 25 bp, Homo sapien
gtatttaatggtgtgaaatggcagc

SEQ ID NO: 5570914 - DNA, 25 bp, Homo sapien
aggaaactgacaagtgcccaatcta

SEQ ID NO: 5570915 - DNA, 25 bp, Homo sapien
caaaaaatcatgaggcaattgcagg

SEQ ID NO: 5570916 - DNA, 25 bp, Homo sapien
cattaaattgctgtgcagccaactt

SEQ ID NO: 5570917 - DNA, 25 bp, Homo sapien
cttaaacaaggaaattccacacagc

SEQ ID NO: 5570918 - DNA, 25 bp, Homo sapien
taatagatatttgtagaatggctga

SEQ ID NO: 5570919 - DNA, 25 bp, Homo sapien
tgagggtgcaagacaccataatgcc

SEQ ID NO: 5570920 - DNA, 25 bp, Homo sapien
ggccatcagccactttcaataatct

SEQ ID NO: 5570921 - DNA, 25 bp, Homo sapien
cagatggaaggtacctaatagatat

SEQ ID NO: 5570922 - DNA, 25 bp, Homo sapien
tggggacacagtaggaattatctag

SEQ ID NO: 5570923 - DNA, 25 bp, Homo sapien
attatctagattatggccatcagcc

SEQ ID NO: 5570924 - DNA, 25 bp, Homo sapien
cctgacagatggaaggtacctaata

SEQ ID NO: 5570925 - DNA, 25 bp, Homo sapien
gctgtgcagccaacttgaattacac

SEQ ID NO: 5570926 - DNA, 25 bp, Homo sapien
tccacacagcaccatttcttaggca

SEQ ID NO: 5570927 - DNA, 25 bp, Homo sapien
cggttatgtggagcatttcattgcc

SEQ ID NO: 5570928 - DNA, 25 bp, Homo sapien
gaagatggcgatctctaccaccaac

SEQ ID NO: 5570929 - DNA, 25 bp, Homo sapien
tttcattgccacagtggtgcctgga

SEQ ID NO: 5570930 - DNA, 25 bp, Homo sapien
ttgatatttgcacaggagcacacac

SEQ ID NO: 5570931 - DNA, 25 bp, Homo sapien
acaggagcacacacacgtccatgct

SEQ ID NO: 5570932 - DNA, 25 bp, Homo sapien
tggtgcctggaatgtgaattgttaa

SEQ ID NO: 5570933 - DNA, 25 bp, Homo sapien
cccaaacagctatgggaagatggcg

SEQ ID NO: 5570934 - DNA, 25 bp, Homo sapien
ttggaaaatacggttatgtggagca

SEQ ID NO: 5570935 - DNA, 25 bp, Homo sapien
caagggcctaaagaacacaacaaat

SEQ ID NO: 5570936 - DNA, 25 bp, Homo sapien
gctgaagcttcataacagaaaaagt

SEQ ID NO: 5570937 - DNA, 25 bp, Homo sapien
tctctcatacacacagtggtcaaat

SEQ ID NO: 5570938 - DNA, 25 bp, Homo sapien
ttactttatatgctgcggcggaggt

SEQ ID NO: 5570939 - DNA, 25 bp, Homo sapien
ggcatctcagcgcggacatttgcaa

SEQ ID NO: 5570940 - DNA, 25 bp, Homo sapien
cggcggaggtcgtacctccttggcc

SEQ ID NO: 5570941 - DNA, 25 bp, Homo sapien
tatcggcgggtttcttcccatctcc

SEQ ID NO: 5570942 - DNA, 25 bp, Homo sapien
tcccgacgcttgttcccgacggtgc

SEQ ID NO: 5570943 - DNA, 25 bp, Homo sapien
cgttggcgccggcgcttcctcttaa

SEQ ID NO: 5570944 - DNA, 25 bp, Homo sapien
tgctgtatcggcgggtttcttccca

SEQ ID NO: 5570945 - DNA, 25 bp, Homo sapien
aatcccggcttgttcccgacgcttg

SEQ ID NO: 5570946 - DNA, 25 bp, Homo sapien
gacgcttgttcccgacggtgctcgc

SEQ ID NO: 5570947 - DNA, 25 bp, Homo sapien
ggcgccggcgcttcctcttaatccc

SEQ ID NO: 5570948 - DNA, 25 bp, Homo sapien
gatcgcgcaccccgtagtacccgcg

SEQ ID NO: 5570949 - DNA, 25 bp, Homo sapien
ggagacacagccttggatatgcgag

SEQ ID NO: 5570950 - DNA, 25 bp, Homo sapien
gtcatgggttcttagcttctctttc

SEQ ID NO: 5570951 - DNA, 25 bp, Homo sapien
agtgattgaaccataggctgaattg

SEQ ID NO: 5570952 - DNA, 25 bp, Homo sapien
ctggaagggtcttctcctggaaggt

SEQ ID NO: 5570953 - DNA, 25 bp, Homo sapien
agtctgctaaaagccgagtggtgat

SEQ ID NO: 5570954 - DNA, 25 bp, Homo sapien
tggggagccaactcacccaagtaac

SEQ ID NO: 5570955 - DNA, 25 bp, Homo sapien
ctgctcatcactagagacaaaacta

SEQ ID NO: 5570956 - DNA, 25 bp, Homo sapien
taataggtttaaagaagcaagagct

SEQ ID NO: 5570957 - DNA, 25 bp, Homo sapien
gtaaaagctgatgtttgggagtcta

SEQ ID NO: 5570958 - DNA, 25 bp, Homo sapien
tttctggttggaccagtaaagcctc

SEQ ID NO: 5570959 - DNA, 25 bp, Homo sapien
tgggagtctagctaaagaaaactaa

SEQ ID NO: 5570960 - DNA, 25 bp, Homo sapien
acaccgggatctcggccacaggtgc

SEQ ID NO: 5570961 - DNA, 25 bp, Homo sapien
gcacctgtggccgagatcccggtgt

SEQ ID NO: 5570962 - DNA, 25 bp, Homo sapien
gcagacctgaaatgacagcacagca

SEQ ID NO: 5570963 - DNA, 25 bp, Homo sapien
gatcatggactattctctgtggacc

SEQ ID NO: 5570964 - DNA, 25 bp, Homo sapien
ggaaggaacttcagacagctttttc

SEQ ID NO: 5570965 - DNA, 25 bp, Homo sapien
ctctctggcagtcagacctgtggga

SEQ ID NO: 5570966 - DNA, 25 bp, Homo sapien
ctgctgttgctcctgaggtggtgaa

SEQ ID NO: 5570967 - DNA, 25 bp, Homo sapien
gagaaagcagctctctggatgtttg

SEQ ID NO: 5570968 - DNA, 25 bp, Homo sapien
ccctaggtgtcactattggggggac

SEQ ID NO: 5570969 - DNA, 25 bp, Homo sapien
gctgataagcttggaaggaacttca

SEQ ID NO: 5570970 - DNA, 25 bp, Homo sapien
ggattggcacactaggactctacca

SEQ ID NO: 5570971 - DNA, 25 bp, Homo sapien
tgttaaagctcaggttaggaggctg

SEQ ID NO: 5570972 - DNA, 25 bp, Homo sapien
tccaaagatattaagtgactcacac

SEQ ID NO: 5570973 - DNA, 25 bp, Homo sapien
acctaaacctctggcaccgtgcgtg

SEQ ID NO: 5570974 - DNA, 25 bp, Homo sapien
agggaagattgagccgtttatcgca

SEQ ID NO: 5570975 - DNA, 25 bp, Homo sapien
agagatggtcccactgactccgtcc

SEQ ID NO: 5570976 - DNA, 25 bp, Homo sapien
agggatccgtccacagctctgccca

SEQ ID NO: 5570977 - DNA, 25 bp, Homo sapien
gcagccataaagctgagagagtgca

SEQ ID NO: 5570978 - DNA, 25 bp, Homo sapien
caacagccctaccaagcccaggcag

SEQ ID NO: 5570979 - DNA, 25 bp, Homo sapien
agtctgcaaagctccagcatgggca

SEQ ID NO: 5570980 - DNA, 25 bp, Homo sapien
caggaagtaatctgccaacagccct

SEQ ID NO: 5570981 - DNA, 25 bp, Homo sapien
cgtgtctgcatgtgaggtcagagat

SEQ ID NO: 5570982 - DNA, 25 bp, Homo sapien
cgtttatcgcaggaaagcctccatc

SEQ ID NO: 5570983 - DNA, 25 bp, Homo sapien
gtgcgtgacccgcagctccagattc

SEQ ID NO: 5570984 - DNA, 25 bp, Homo sapien
tcccatgcaggctcctgtgagagag

SEQ ID NO: 5570985 - DNA, 25 bp, Homo sapien
cctcctcagataaggggagtgattc

SEQ ID NO: 5570986 - DNA, 25 bp, Homo sapien
gcaggtgacagtctggtatcttgac

SEQ ID NO: 5570987 - DNA, 25 bp, Homo sapien
gcatagggcagcctgttattacagt

SEQ ID NO: 5570988 - DNA, 25 bp, Homo sapien
ttccacagatgctaagtggcagggc

SEQ ID NO: 5570989 - DNA, 25 bp, Homo sapien
gacagccacacaggattcagtagtt

SEQ ID NO: 5570990 - DNA, 25 bp, Homo sapien
ttattacagtcaaggatggagatac

SEQ ID NO: 5570991 - DNA, 25 bp, Homo sapien
ttcagtctctcagtgacagccacac

SEQ ID NO: 5570992 - DNA, 25 bp, Homo sapien
attccagacttggagatcacggtcc

SEQ ID NO: 5570993 - DNA, 25 bp, Homo sapien
cagaactctgcttggtgcatagggc

SEQ ID NO: 5570994 - DNA, 25 bp, Homo sapien
cctgatgcagaagcgcttctctgtc

SEQ ID NO: 5570995 - DNA, 25 bp, Homo sapien
ttttgttaggggactatggatgtct

SEQ ID NO: 5570996 - DNA, 25 bp, Homo sapien
cctcccctgtctgcaggtggcttcc

SEQ ID NO: 5570997 - DNA, 25 bp, Homo sapien
ccgagccgccctatcatcaaccact

SEQ ID NO: 5570998 - DNA, 25 bp, Homo sapien
aaaaagtatgagtctggtgaaacag

SEQ ID NO: 5570999 - DNA, 25 bp, Homo sapien
catggcaggcttcaatctggctggg

SEQ ID NO: 5571000 - DNA, 25 bp, Homo sapien
atggatgtctggctaatggctaata

SEQ ID NO: 5571001 - DNA, 25 bp, Homo sapien
tcctgcctgccctaggccacatggc

SEQ ID NO: 5571002 - DNA, 25 bp, Homo sapien
gcttgaaggaagccccctattgacc

SEQ ID NO: 5571003 - DNA, 25 bp, Homo sapien
atgagctgcatggtgaaactttaac

SEQ ID NO: 5571004 - DNA, 25 bp, Homo sapien
cagaacaccggcaactttaagaaag

SEQ ID NO: 5571005 - DNA, 25 bp, Homo sapien
gccttatccaaaaggaggcgctgtg

SEQ ID NO: 5571006 - DNA, 25 bp, Homo sapien
cacttaatggaccaacccagttgtg

SEQ ID NO: 5571007 - DNA, 25 bp, Homo sapien
atagccactgtcacactgaaaaatc

SEQ ID NO: 5571008 - DNA, 25 bp, Homo sapien
agactcatcacttagatccaccaac

SEQ ID NO: 5571009 - DNA, 25 bp, Homo sapien
agttgtgttatctgtctggaccaat

SEQ ID NO: 5571010 - DNA, 25 bp, Homo sapien
tgtcagttgtagccatcaggtctct

SEQ ID NO: 5571011 - DNA, 25 bp, Homo sapien
tttttgccttcaatgcagtgctgca

SEQ ID NO: 5571012 - DNA, 25 bp, Homo sapien
ctacaaagttccccagttgtccctc

SEQ ID NO: 5571013 - DNA, 25 bp, Homo sapien
taacatcctaagaactagggcattc

SEQ ID NO: 5571014 - DNA, 25 bp, Homo sapien
gtctaatgattcagcactaacatcc

SEQ ID NO: 5571015 - DNA, 25 bp, Homo sapien
gtctggaccaattccctagcttgac

SEQ ID NO: 5571016 - DNA, 25 bp, Homo sapien
cagtgctgcatcaggggtcacttaa

SEQ ID NO: 5571017 - DNA, 25 bp, Homo sapien
tacaagcattatggttatatatgtt

SEQ ID NO: 5571018 - DNA, 25 bp, Homo sapien
gctagtaagacacagcagtacttac

SEQ ID NO: 5571019 - DNA, 25 bp, Homo sapien
tatttttaggagatacgtgtcaatg

SEQ ID NO: 5571020 - DNA, 25 bp, Homo sapien
taggagatacgtgtcaatgctgcca

SEQ ID NO: 5571021 - DNA, 25 bp, Homo sapien
cgtgtcaatgctgccacagaaaatt

SEQ ID NO: 5571022 - DNA, 25 bp, Homo sapien
ttttaggagatacgtgtcaatgctg

SEQ ID NO: 5571023 - DNA, 25 bp, Homo sapien
aaataataagatgttacctctcatc

SEQ ID NO: 5571024 - DNA, 25 bp, Homo sapien
cacacatatatggtgcttaaaaaat

SEQ ID NO: 5571025 - DNA, 25 bp, Homo sapien
agacacagcagtacttactagtcac

SEQ ID NO: 5571026 - DNA, 25 bp, Homo sapien
cttcctgaacctatcatgctgcttg

SEQ ID NO: 5571027 - DNA, 25 bp, Homo sapien
tcatgctgcttgtaaacgtggggaa

SEQ ID NO: 5571028 - DNA, 25 bp, Homo sapien
ttgccatcaaagtgctgggttcatt

SEQ ID NO: 5571029 - DNA, 25 bp, Homo sapien
taagagaacctaggcaagtcattta

SEQ ID NO: 5571030 - DNA, 25 bp, Homo sapien
tccaaaagtgtctgcacaggactgc

SEQ ID NO: 5571031 - DNA, 25 bp, Homo sapien
ttttatcttgatgatggaaaggaag

SEQ ID NO: 5571032 - DNA, 25 bp, Homo sapien
cacggctccctaaggagtgttcctt

SEQ ID NO: 5571033 - DNA, 25 bp, Homo sapien
ggcatccaagtacaaattaacagtt

SEQ ID NO: 5571034 - DNA, 25 bp, Homo sapien
gaaatcctatagtcagccactggtc

SEQ ID NO: 5571035 - DNA, 25 bp, Homo sapien
cagccactggtcccctcagagagtt

SEQ ID NO: 5571036 - DNA, 25 bp, Homo sapien
tgcacaggactgctaagagaaccta

SEQ ID NO: 5571037 - DNA, 25 bp, Homo sapien
ttacctctgatctttggggtgattc

SEQ ID NO: 5571038 - DNA, 25 bp, Homo sapien
tggattgctctgtttggctccctcc

SEQ ID NO: 5571039 - DNA, 25 bp, Homo sapien
tccagaccgtattgtggtgtggctt

SEQ ID NO: 5571040 - DNA, 25 bp, Homo sapien
gaaaaggattgacaaccggtctcat

SEQ ID NO: 5571041 - DNA, 25 bp, Homo sapien
cccccaccaacaccgtccagagagg

SEQ ID NO: 5571042 - DNA, 25 bp, Homo sapien
gggctcgtgtcctcgtctgcagtgt

SEQ ID NO: 5571043 - DNA, 25 bp, Homo sapien
ccggtctcatgacccaggcagagag

SEQ ID NO: 5571044 - DNA, 25 bp, Homo sapien
aggctcaccaaagacaggccaccat

SEQ ID NO: 5571045 - DNA, 25 bp, Homo sapien
ttccactgccagggtcataagggat

SEQ ID NO: 5571046 - DNA, 25 bp, Homo sapien
gccttcacacacccaaagcggaacc

SEQ ID NO: 5571047 - DNA, 25 bp, Homo sapien
gcattccagtgacagggactgttgc

SEQ ID NO: 5571048 - DNA, 25 bp, Homo sapien
gagccgtgaaaagatacaagcatct

SEQ ID NO: 5571049 - DNA, 25 bp, Homo sapien
caggcgggatatatcaccgttccac

SEQ ID NO: 5571050 - DNA, 25 bp, Homo sapien
taaacatacaaaacctaggcatatt

SEQ ID NO: 5571051 - DNA, 25 bp, Homo sapien
taatcagcaagtatgactcaatttg

SEQ ID NO: 5571052 - DNA, 25 bp, Homo sapien
tatggtatgcaaataaactcagagg

SEQ ID NO: 5571053 - DNA, 25 bp, Homo sapien
aaatctctggaagacctctgagctc

SEQ ID NO: 5571054 - DNA, 25 bp, Homo sapien
taggaacacccagtaaactatggta

SEQ ID NO: 5571055 - DNA, 25 bp, Homo sapien
aaatcatcaacaagcgaaaatcctt

SEQ ID NO: 5571056 - DNA, 25 bp, Homo sapien
aactcagaggtaaacttgtgaatac

SEQ ID NO: 5571057 - DNA, 25 bp, Homo sapien
atgtgggaatgcattaggtacagta

SEQ ID NO: 5571058 - DNA, 25 bp, Homo sapien
gagattccgtgagtagtcttgaata

SEQ ID NO: 5571059 - DNA, 25 bp, Homo sapien
aatccttatcaatagcgatgtggga

SEQ ID NO: 5571060 - DNA, 25 bp, Homo sapien
aatagatttaaataggaacacccag

SEQ ID NO: 5571061 - DNA, 25 bp, Homo sapien
ctcaaggtcttctatacctaagtat

SEQ ID NO: 5571062 - DNA, 25 bp, Homo sapien
atacttaggtatagaagaccttgag

SEQ ID NO: 5571063 - DNA, 25 bp, Homo sapien
atgtatagctagctgcagagaaccc

SEQ ID NO: 5571064 - DNA, 25 bp, Homo sapien
tagatcctgctcacaagagagcccc

SEQ ID NO: 5571065 - DNA, 25 bp, Homo sapien
ccaacaaatgagctccagtacccct

SEQ ID NO: 5571066 - DNA, 25 bp, Homo sapien
ccaggcatctgggtgaattgtgtag

SEQ ID NO: 5571067 - DNA, 25 bp, Homo sapien
tgcagaagacaggtaaataaaaacc

SEQ ID NO: 5571068 - DNA, 25 bp, Homo sapien
aggtgggatttggcttcaaatgtca

SEQ ID NO: 5571069 - DNA, 25 bp, Homo sapien
aatggctgtgagcttctgcagaaga

SEQ ID NO: 5571070 - DNA, 25 bp, Homo sapien
caagagagccccaaaccctccttcc

SEQ ID NO: 5571071 - DNA, 25 bp, Homo sapien
aaggaccactccaatctacccattc

SEQ ID NO: 5571072 - DNA, 25 bp, Homo sapien
tacccctgggattggtccaggcatc

SEQ ID NO: 5571073 - DNA, 25 bp, Homo sapien
tggggtgaatgcgtttaaagctctt

SEQ ID NO: 5571074 - DNA, 25 bp, Homo sapien
atcacaacccaaggtaaatggagct

SEQ ID NO: 5571075 - DNA, 25 bp, Homo sapien
agctaagacatgaggaccagcttgc

SEQ ID NO: 5571076 - DNA, 25 bp, Homo sapien
aacgggaatcctaggcattcgtgtt

SEQ ID NO: 5571077 - DNA, 25 bp, Homo sapien
ataaataataacgggaatcctaggc

SEQ ID NO: 5571078 - DNA, 25 bp, Homo sapien
taaataccatgcaggaaattgggaa

SEQ ID NO: 5571079 - DNA, 25 bp, Homo sapien
cgccgtgctaagtggaattttcagg

SEQ ID NO: 5571080 - DNA, 25 bp, Homo sapien
cgccaaacaccagcccctggggttc

SEQ ID NO: 5571081 - DNA, 25 bp, Homo sapien
aaatggagctaacagcatagatggg

SEQ ID NO: 5571082 - DNA, 25 bp, Homo sapien
gcaggaaattgggaaataatatcac

SEQ ID NO: 5571083 - DNA, 25 bp, Homo sapien
ctaagtggaattttcaggtggagga

SEQ ID NO: 5571084 - DNA, 25 bp, Homo sapien
ggaccagcttgcgactccagacctg

SEQ ID NO: 5571085 - DNA, 25 bp, Homo sapien
tgcccagagcagacttacacttctc

SEQ ID NO: 5571086 - DNA, 25 bp, Homo sapien
cgccgttagtgattagccaagtctc

SEQ ID NO: 5571087 - DNA, 25 bp, Homo sapien
gtccttggtccagcatcagcagtag

SEQ ID NO: 5571088 - DNA, 25 bp, Homo sapien
cacaggagcgtttgaccccttggag

SEQ ID NO: 5571089 - DNA, 25 bp, Homo sapien
ggtggcttctaagactgcccagagc

SEQ ID NO: 5571090 - DNA, 25 bp, Homo sapien
aaagaggttgaatgacatcagaatg

SEQ ID NO: 5571091 - DNA, 25 bp, Homo sapien
atcacaggggtcttaggagctgtgt

SEQ ID NO: 5571092 - DNA, 25 bp, Homo sapien
gagtggggactgaaaattccatatt

SEQ ID NO: 5571093 - DNA, 25 bp, Homo sapien
caaattctaagacccagccacggac

SEQ ID NO: 5571094 - DNA, 25 bp, Homo sapien
ctcaaatagaaatcaatggtggctt

SEQ ID NO: 5571095 - DNA, 25 bp, Homo sapien
acaagtgacaaagagttacataggt

SEQ ID NO: 5571096 - DNA, 25 bp, Homo sapien
aataaactccctctagaggcgtggg

SEQ ID NO: 5571097 - DNA, 25 bp, Homo sapien
caggagacgtctgctctgccactgt

SEQ ID NO: 5571098 - DNA, 25 bp, Homo sapien
acaccccagattcctctccagccac

SEQ ID NO: 5571099 - DNA, 25 bp, Homo sapien
cacagtttacttttccggcggatct

SEQ ID NO: 5571100 - DNA, 25 bp, Homo sapien
ctagtttggaacttctgcagggaag

SEQ ID NO: 5571101 - DNA, 25 bp, Homo sapien
ctccccacacaccccagattcctct

SEQ ID NO: 5571102 - DNA, 25 bp, Homo sapien
tcaggcccactgattacatccatcc

SEQ ID NO: 5571103 - DNA, 25 bp, Homo sapien
gagttacgaggtgctccccgcctcg

SEQ ID NO: 5571104 - DNA, 25 bp, Homo sapien
ctccagccacagtttacttttccgg

SEQ ID NO: 5571105 - DNA, 25 bp, Homo sapien
attacatccatccttcccgctccct

SEQ ID NO: 5571106 - DNA, 25 bp, Homo sapien
aggaatgaagttcaggcccactgat

SEQ ID NO: 5571107 - DNA, 25 bp, Homo sapien
tggactcataggtagtatatacttc

SEQ ID NO: 5571108 - DNA, 25 bp, Homo sapien
ttgtcgcttattcctcggccctgcc

SEQ ID NO: 5571109 - DNA, 25 bp, Homo sapien
cggcgcgactttctggacctagtga

SEQ ID NO: 5571110 - DNA, 25 bp, Homo sapien
ggagaaaaaccagaattgtcgctta

SEQ ID NO: 5571111 - DNA, 25 bp, Homo sapien
ctttctggacctagtgacacgaaga

SEQ ID NO: 5571112 - DNA, 25 bp, Homo sapien
cgcctctgcccggcgcgactttctg

SEQ ID NO: 5571113 - DNA, 25 bp, Homo sapien
taattggactcataggtagtatata

SEQ ID NO: 5571114 - DNA, 25 bp, Homo sapien
gcttattcctcggccctgccggccc

SEQ ID NO: 5571115 - DNA, 25 bp, Homo sapien
cgcgactttctggacctagtgacac

SEQ ID NO: 5571116 - DNA, 25 bp, Homo sapien
ttctggacctagtgacacgaagaca

SEQ ID NO: 5571117 - DNA, 25 bp, Homo sapien
ctggacctagtgacacgaagacaga

SEQ ID NO: 5571118 - DNA, 25 bp, Homo sapien
ctctaagacaggatatcaggaaaca

SEQ ID NO: 5571119 - DNA, 25 bp, Homo sapien
aatggtgctctccacataccgactc

SEQ ID NO: 5571120 - DNA, 25 bp, Homo sapien
gaatgtatccttagagcataaagtt

SEQ ID NO: 5571121 - DNA, 25 bp, Homo sapien
ctatatatagcaagaaaaagaatgt

SEQ ID NO: 5571122 - DNA, 25 bp, Homo sapien
tctagtctgcagaggcaactaactt

SEQ ID NO: 5571123 - DNA, 25 bp, Homo sapien
ttatttgcatctgaagggtaaatgc

SEQ ID NO: 5571124 - DNA, 25 bp, Homo sapien
tgaagggtaaatgcagatacatcag

SEQ ID NO: 5571125 - DNA, 25 bp, Homo sapien
atgaaggattttagtgggttttctc

SEQ ID NO: 5571126 - DNA, 25 bp, Homo sapien
atcaggaaacagaatggtacttttc

SEQ ID NO: 5571127 - DNA, 25 bp, Homo sapien
cataccgactctaagacaggatatc

SEQ ID NO: 5571128 - DNA, 25 bp, Homo sapien
aaaatgtggaaaataacttagcaca

SEQ ID NO: 5571129 - DNA, 25 bp, Homo sapien
aagatggcttctgccaggctgacct

SEQ ID NO: 5571130 - DNA, 25 bp, Homo sapien
acaggcctggattcctctggccttt

SEQ ID NO: 5571131 - DNA, 25 bp, Homo sapien
aatatctagtaggaataggaaggac

SEQ ID NO: 5571132 - DNA, 25 bp, Homo sapien
tcaaatgttgtcaccacaggcctgg

SEQ ID NO: 5571133 - DNA, 25 bp, Homo sapien
gtataaagggaatgcattggcccac

SEQ ID NO: 5571134 - DNA, 25 bp, Homo sapien
aaaaaaatatctagtaggaatagga

SEQ ID NO: 5571135 - DNA, 25 bp, Homo sapien
gatccagcagctcaaatgttgtcac

SEQ ID NO: 5571136 - DNA, 25 bp, Homo sapien
attggcccacacagtggaaaaaaat

SEQ ID NO: 5571137 - DNA, 25 bp, Homo sapien
gcctggcttacacagtataaaggga

SEQ ID NO: 5571138 - DNA, 25 bp, Homo sapien
ctctggacacccctctcagtgccat

SEQ ID NO: 5571139 - DNA, 25 bp, Homo sapien
tcatgctccacaagatggcttctgc

SEQ ID NO: 5571140 - DNA, 25 bp, Homo sapien
ctgtgagccagaagctaaccgggcg

SEQ ID NO: 5571141 - DNA, 25 bp, Homo sapien
cgcccggttagcttctggctcacag

SEQ ID NO: 5571142 - DNA, 25 bp, Homo sapien
cactaacaatattacggagggctgc

SEQ ID NO: 5571143 - DNA, 25 bp, Homo sapien
attgaaaaaataggagcaaataggc

SEQ ID NO: 5571144 - DNA, 25 bp, Homo sapien
ccactctgatggaaagaatagctat

SEQ ID NO: 5571145 - DNA, 25 bp, Homo sapien
tgacattttacatacaggactcttc

SEQ ID NO: 5571146 - DNA, 25 bp, Homo sapien
tatgcctacgaatgtttaaaagcaa

SEQ ID NO: 5571147 - DNA, 25 bp, Homo sapien
agcaaaaatggaagggcatacattt

SEQ ID NO: 5571148 - DNA, 25 bp, Homo sapien
tgacaggatttaatgtgatagtgcc

SEQ ID NO: 5571149 - DNA, 25 bp, Homo sapien
atattacggagggctgcattctcat

SEQ ID NO: 5571150 - DNA, 25 bp, Homo sapien
tctgcattcactaaatgacaggatt

SEQ ID NO: 5571151 - DNA, 25 bp, Homo sapien
gccaatattgcttagtggaggtggg

SEQ ID NO: 5571152 - DNA, 25 bp, Homo sapien
tgatggaaagaatagctatgcctac

SEQ ID NO: 5571153 - DNA, 25 bp, Homo sapien
aaactaatttggagacaggacacag

SEQ ID NO: 5571154 - DNA, 25 bp, Homo sapien
tatgactaagtattgcacaggatta

SEQ ID NO: 5571155 - DNA, 25 bp, Homo sapien
tggtggtgcagttttagtgtcagaa

SEQ ID NO: 5571156 - DNA, 25 bp, Homo sapien
atgggatataagcagcaaaactaat

SEQ ID NO: 5571157 - DNA, 25 bp, Homo sapien
tttagtatgcaaagagttgactgta

SEQ ID NO: 5571158 - DNA, 25 bp, Homo sapien
aggacacagcatagacatttaaaaa

SEQ ID NO: 5571159 - DNA, 25 bp, Homo sapien
agttgactgtataggaagcaatgtc

SEQ ID NO: 5571160 - DNA, 25 bp, Homo sapien
gggtctggaagtccaagtaatcata

SEQ ID NO: 5571161 - DNA, 25 bp, Homo sapien
tttagaccacattggtggtgcagtt

SEQ ID NO: 5571162 - DNA, 25 bp, Homo sapien
agtgtcagaacgaatctcagaaata

SEQ ID NO: 5571163 - DNA, 25 bp, Homo sapien
attagaattaagagagggtctggaa

SEQ ID NO: 5571164 - DNA, 25 bp, Homo sapien
acgggtcgtcctagattcgcgttcc

SEQ ID NO: 5571165 - DNA, 25 bp, Homo sapien
ggaacgcgaatctaggacgacccgt

SEQ ID NO: 5571166 - DNA, 25 bp, Homo sapien
tgggattacaactgaggatgttggt

SEQ ID NO: 5571167 - DNA, 25 bp, Homo sapien
gtgaggttaatcacccgtgaaagac

SEQ ID NO: 5571168 - DNA, 25 bp, Homo sapien
tacagaggataatctagtagaagtt

SEQ ID NO: 5571169 - DNA, 25 bp, Homo sapien
ataaatcaagtaggctttccacctt

SEQ ID NO: 5571170 - DNA, 25 bp, Homo sapien
tagacgcaacttacagaggataatc

SEQ ID NO: 5571171 - DNA, 25 bp, Homo sapien
acccaaatggatgggcgacttctca

SEQ ID NO: 5571172 - DNA, 25 bp, Homo sapien
atttccaagactcacgtaaagatgg

SEQ ID NO: 5571173 - DNA, 25 bp, Homo sapien
gatgtgtaaactaatagacgcaact

SEQ ID NO: 5571174 - DNA, 25 bp, Homo sapien
gatgtcgctttcgtctcgccctggc

SEQ ID NO: 5571175 - DNA, 25 bp, Homo sapien
cccgtgaaagactgatgtgtaaact

SEQ ID NO: 5571176 - DNA, 25 bp, Homo sapien
cacgattatctgacaccattgccta

SEQ ID NO: 5571177 - DNA, 25 bp, Homo sapien
aggtatcacctcctccgggaagctc

SEQ ID NO: 5571178 - DNA, 25 bp, Homo sapien
atagggaaatgactggagtctctct

SEQ ID NO: 5571179 - DNA, 25 bp, Homo sapien
ctaccccatcgtgccatagggaaat

SEQ ID NO: 5571180 - DNA, 25 bp, Homo sapien
gtcccaagtacatcctcagggttcc

SEQ ID NO: 5571181 - DNA, 25 bp, Homo sapien
gatatcaccggtggataacagagag

SEQ ID NO: 5571182 - DNA, 25 bp, Homo sapien
tcccccagaatataagctatgtccc

SEQ ID NO: 5571183 - DNA, 25 bp, Homo sapien
gctgccaactccctacccagagaac

SEQ ID NO: 5571184 - DNA, 25 bp, Homo sapien
gcacccatcacaaggcccagatatc

SEQ ID NO: 5571185 - DNA, 25 bp, Homo sapien
gcattgtgctgggttgccatagttc

SEQ ID NO: 5571186 - DNA, 25 bp, Homo sapien
cgggaagctctcctggcattgtgct

SEQ ID NO: 5571187 - DNA, 25 bp, Homo sapien
gagtcctattttggccgcgatgccc

SEQ ID NO: 5571188 - DNA, 25 bp, Homo sapien
acatgttttagtcagctcacgagag

SEQ ID NO: 5571189 - DNA, 25 bp, Homo sapien
ctctcgtgagctgactaaaacatgt

SEQ ID NO: 5571190 - DNA, 25 bp, Homo sapien
aaggtttgtggcaactctacattca

SEQ ID NO: 5571191 - DNA, 25 bp, Homo sapien
aacctcaatctcctaggctccagtc

SEQ ID NO: 5571192 - DNA, 25 bp, Homo sapien
ctgttatggtcatctgtgatcaatg

SEQ ID NO: 5571193 - DNA, 25 bp, Homo sapien
tgctcacattgtgtccttgtaccac

SEQ ID NO: 5571194 - DNA, 25 bp, Homo sapien
gtggcaactctacattcagcaagtc

SEQ ID NO: 5571195 - DNA, 25 bp, Homo sapien
tttaaggaacagtgttttgctctgt

SEQ ID NO: 5571196 - DNA, 25 bp, Homo sapien
tgcacccagctagatattgcatttt

SEQ ID NO: 5571197 - DNA, 25 bp, Homo sapien
ctgttgtctaggctgtaatacaggt

SEQ ID NO: 5571198 - DNA, 25 bp, Homo sapien
ttcccaaaagcatgtgctcacattg

SEQ ID NO: 5571199 - DNA, 25 bp, Homo sapien
ctcctaggctccagtcatcctcctg

SEQ ID NO: 5571200 - DNA, 25 bp, Homo sapien
tgtctaggctgtaatacaggtggta

SEQ ID NO: 5571201 - DNA, 25 bp, Homo sapien
gcaggaggagctacagtatttccgt

SEQ ID NO: 5571202 - DNA, 25 bp, Homo sapien
tcttccagacatagtgttcattctt

SEQ ID NO: 5571203 - DNA, 25 bp, Homo sapien
aaaatatcttccagacatagtgttc

SEQ ID NO: 5571204 - DNA, 25 bp, Homo sapien
caagttagattttgaaagaggggga

SEQ ID NO: 5571205 - DNA, 25 bp, Homo sapien
tgacccccaagtccttgactgtctc

SEQ ID NO: 5571206 - DNA, 25 bp, Homo sapien
tttttcaaagtgatggcaaagtcaa

SEQ ID NO: 5571207 - DNA, 25 bp, Homo sapien
ttcaaagtgatggcaaagtcaaaca

SEQ ID NO: 5571208 - DNA, 25 bp, Homo sapien
tcttgccacatatagtttgtactaa

SEQ ID NO: 5571209 - DNA, 25 bp, Homo sapien
atttccgttggtactgtctgtcttc

SEQ ID NO: 5571210 - DNA, 25 bp, Homo sapien
aaatgcgagtctcaagttagatttt

SEQ ID NO: 5571211 - DNA, 25 bp, Homo sapien
gaaaggcccaaaatgtccagaagaa

SEQ ID NO: 5571212 - DNA, 25 bp, Homo sapien
gacttaacttaaacttctatacata

SEQ ID NO: 5571213 - DNA, 25 bp, Homo sapien
tatgtatagaagtttaagttaagtc

SEQ ID NO: 5571214 - DNA, 25 bp, Homo sapien
aaacttctatacatagtttttggta

SEQ ID NO: 5571215 - DNA, 25 bp, Homo sapien
taccaaaaactatgtatagaagttt

SEQ ID NO: 5571216 - DNA, 25 bp, Homo sapien
taatctgagtctatggattggagtt

SEQ ID NO: 5571217 - DNA, 25 bp, Homo sapien
tcactggctcccatctcagattccc

SEQ ID NO: 5571218 - DNA, 25 bp, Homo sapien
ggtgacaggaagacgtgcttccatg

SEQ ID NO: 5571219 - DNA, 25 bp, Homo sapien
ttcttttatgtgatgcagctctcct

SEQ ID NO: 5571220 - DNA, 25 bp, Homo sapien
caggacctcttctcccctctgggtc

SEQ ID NO: 5571221 - DNA, 25 bp, Homo sapien
gtttcactccggaacctcagctccc

SEQ ID NO: 5571222 - DNA, 25 bp, Homo sapien
cctttaaaatgaagccgatgggtga

SEQ ID NO: 5571223 - DNA, 25 bp, Homo sapien
ggtcctgcccccatctcactggctc

SEQ ID NO: 5571224 - DNA, 25 bp, Homo sapien
atgtgatgcagctctccttgaatgt

SEQ ID NO: 5571225 - DNA, 25 bp, Homo sapien
caatgattggaatgattggagtcat

SEQ ID NO: 5571226 - DNA, 25 bp, Homo sapien
aggcagtgtttcactccggaacctc

SEQ ID NO: 5571227 - DNA, 25 bp, Homo sapien
tacacgatattaagtacagagacat

SEQ ID NO: 5571228 - DNA, 25 bp, Homo sapien
atgtctctgtacttaatatcgtgta

SEQ ID NO: 5571229 - DNA, 25 bp, Homo sapien
cactaaatcctcacaccaccacatg

SEQ ID NO: 5571230 - DNA, 25 bp, Homo sapien
atacagaagttttggggactctaag

SEQ ID NO: 5571231 - DNA, 25 bp, Homo sapien
gggcacatcatctcactaaatcctc

SEQ ID NO: 5571232 - DNA, 25 bp, Homo sapien
ttaggtgttttgggcacatcatctc

SEQ ID NO: 5571233 - DNA, 25 bp, Homo sapien
aaatggaccttcttggacaagttcc

SEQ ID NO: 5571234 - DNA, 25 bp, Homo sapien
tgctcttagctttacaccaactatc

SEQ ID NO: 5571235 - DNA, 25 bp, Homo sapien
caccaccacatgtcagtgatggttt

SEQ ID NO: 5571236 - DNA, 25 bp, Homo sapien
taacatctcaagcaaatggaccttc

SEQ ID NO: 5571237 - DNA, 25 bp, Homo sapien
ctgtttaggtgttttgggcacatca

SEQ ID NO: 5571238 - DNA, 25 bp, Homo sapien
ttacatacagaagttttggggactc

SEQ ID NO: 5571239 - DNA, 25 bp, Homo sapien
atcaaatataacatctcaagcaaat

SEQ ID NO: 5571240 - DNA, 25 bp, Homo sapien
gcctcagccacagtcttcgtctcac

SEQ ID NO: 5571241 - DNA, 25 bp, Homo sapien
tctaagctccaagtgctgcactggc

SEQ ID NO: 5571242 - DNA, 25 bp, Homo sapien
gtggccctgacctcatggcgtgact

SEQ ID NO: 5571243 - DNA, 25 bp, Homo sapien
tcggcctgaaaacaaagcctcagcc

SEQ ID NO: 5571244 - DNA, 25 bp, Homo sapien
ttaacaaagagttgtgtgcatcttc

SEQ ID NO: 5571245 - DNA, 25 bp, Homo sapien
tttgaattatcgatgttgaagtttc

SEQ ID NO: 5571246 - DNA, 25 bp, Homo sapien
agtgctgcactggcttccagcagac

SEQ ID NO: 5571247 - DNA, 25 bp, Homo sapien
gctgagtgtcctgctttcggcctga

SEQ ID NO: 5571248 - DNA, 25 bp, Homo sapien
cagacaatggcatccgtggccctga

SEQ ID NO: 5571249 - DNA, 25 bp, Homo sapien
tttcattgagaatgagctgagtgtc

SEQ ID NO: 5571250 - DNA, 25 bp, Homo sapien
tggcttccagcagacaatggcatcc

SEQ ID NO: 5571251 - DNA, 25 bp, Homo sapien
gaagaaagatacacaggcatcagtt

SEQ ID NO: 5571252 - DNA, 25 bp, Homo sapien
tcttaaagagtaatgatttctcatc

SEQ ID NO: 5571253 - DNA, 25 bp, Homo sapien
gaatttgaccaagattctcggaggt

SEQ ID NO: 5571254 - DNA, 25 bp, Homo sapien
ttctcggaggttgccaaatcattcc

SEQ ID NO: 5571255 - DNA, 25 bp, Homo sapien
gtatcaaaggaaatgtcaccgattt

SEQ ID NO: 5571256 - DNA, 25 bp, Homo sapien
tgcccaggctcaaatcactcttaaa

SEQ ID NO: 5571257 - DNA, 25 bp, Homo sapien
catccttatgacacacagaagaatt

SEQ ID NO: 5571258 - DNA, 25 bp, Homo sapien
cagttataaatggagggaactaagg

SEQ ID NO: 5571259 - DNA, 25 bp, Homo sapien
tttgaccaagattctcggaggttgc

SEQ ID NO: 5571260 - DNA, 25 bp, Homo sapien
tacacaggcatcagttataaatgga

SEQ ID NO: 5571261 - DNA, 25 bp, Homo sapien
tcggaggttgccaaatcattcctgg

SEQ ID NO: 5571262 - DNA, 25 bp, Homo sapien
taccagtcagcacatgccagagaac

SEQ ID NO: 5571263 - DNA, 25 bp, Homo sapien
tctagaaagactatgatactgattc

SEQ ID NO: 5571264 - DNA, 25 bp, Homo sapien
aacatgtcttttctatcctgggctt

SEQ ID NO: 5571265 - DNA, 25 bp, Homo sapien
tgattctagtagagggttctcaagc

SEQ ID NO: 5571266 - DNA, 25 bp, Homo sapien
acatacagacacacgttgaaattcc

SEQ ID NO: 5571267 - DNA, 25 bp, Homo sapien
gcgccccagcaaacatgcatgcaca

SEQ ID NO: 5571268 - DNA, 25 bp, Homo sapien
tgatactgattctagtagagggttc

SEQ ID NO: 5571269 - DNA, 25 bp, Homo sapien
agcaaggtggtcattacaaaggtga

SEQ ID NO: 5571270 - DNA, 25 bp, Homo sapien
gctgtgatcaggtgatatgtgtggg

SEQ ID NO: 5571271 - DNA, 25 bp, Homo sapien
gagggttctcaagctaccagtcagc

SEQ ID NO: 5571272 - DNA, 25 bp, Homo sapien
acaaaggtgacctctagttgccccc

SEQ ID NO: 5571273 - DNA, 25 bp, Homo sapien
tacagtgctatgatcgaaggactaa

SEQ ID NO: 5571274 - DNA, 25 bp, Homo sapien
tttaagatgatacagtgctatgatc

SEQ ID NO: 5571275 - DNA, 25 bp, Homo sapien
cagcttgatgaattctcacatagtg

SEQ ID NO: 5571276 - DNA, 25 bp, Homo sapien
tcgaaggactaaaatgatcaacatc

SEQ ID NO: 5571277 - DNA, 25 bp, Homo sapien
tacatacaatgaagagcacaataat

SEQ ID NO: 5571278 - DNA, 25 bp, Homo sapien
ggtgggaggcacacttacaaaaatg

SEQ ID NO: 5571279 - DNA, 25 bp, Homo sapien
aggcagagtcataaacaagaacaat

SEQ ID NO: 5571280 - DNA, 25 bp, Homo sapien
tctcagtctgataggtctctgactt

SEQ ID NO: 5571281 - DNA, 25 bp, Homo sapien
cataaaaggcagagtcataaacaag

SEQ ID NO: 5571282 - DNA, 25 bp, Homo sapien
atgatcaacatcaccataaaaggca

SEQ ID NO: 5571283 - DNA, 25 bp, Homo sapien
tagtgagcctgtgttacaagtaatc

SEQ ID NO: 5571284 - DNA, 25 bp, Homo sapien
gaacccggctgtgcacctaccagtt

SEQ ID NO: 5571285 - DNA, 25 bp, Homo sapien
agtcattgggattcaaagagtgttc

SEQ ID NO: 5571286 - DNA, 25 bp, Homo sapien
atgattctggtaatgggccatggac

SEQ ID NO: 5571287 - DNA, 25 bp, Homo sapien
aatggactatccaatcctcggaatc

SEQ ID NO: 5571288 - DNA, 25 bp, Homo sapien
ttaaagagttgctgggatgattaag

SEQ ID NO: 5571289 - DNA, 25 bp, Homo sapien
ggtactcctgtgattggggtggagc

SEQ ID NO: 5571290 - DNA, 25 bp, Homo sapien
atgactgtacaaaaattgggagctc

SEQ ID NO: 5571291 - DNA, 25 bp, Homo sapien
gcctgtggttttgcagtgcgagaac

SEQ ID NO: 5571292 - DNA, 25 bp, Homo sapien
tatagtttggtgattgctgtggtac

SEQ ID NO: 5571293 - DNA, 25 bp, Homo sapien
accatcaaattgactgcaacgttta

SEQ ID NO: 5571294 - DNA, 25 bp, Homo sapien
attgggagctcagttatagtttggt

SEQ ID NO: 5571295 - DNA, 25 bp, Homo sapien
atagtcagagatagtggctaaaaac

SEQ ID NO: 5571296 - DNA, 25 bp, Homo sapien
tgattacaggtaagattaggcaatc

SEQ ID NO: 5571297 - DNA, 25 bp, Homo sapien
tatggaaccaaaccaagagagaaac

SEQ ID NO: 5571298 - DNA, 25 bp, Homo sapien
ggctaaaaacgtgctctctggaacc

SEQ ID NO: 5571299 - DNA, 25 bp, Homo sapien
aggaccttgtccttagaccacacca

SEQ ID NO: 5571300 - DNA, 25 bp, Homo sapien
agagagatagagattcattctggga

SEQ ID NO: 5571301 - DNA, 25 bp, Homo sapien
tgggatgtttctaaaagagagatag

SEQ ID NO: 5571302 - DNA, 25 bp, Homo sapien
acagccacatcatcatagcaggcat

SEQ ID NO: 5571303 - DNA, 25 bp, Homo sapien
ctttaatatgcgccagtctcatctc

SEQ ID NO: 5571304 - DNA, 25 bp, Homo sapien
atgataatgtagccatgacagccac

SEQ ID NO: 5571305 - DNA, 25 bp, Homo sapien
ttggtcttacaaaatgggatgtttc

SEQ ID NO: 5571306 - DNA, 25 bp, Homo sapien
cttccaagacccaagtcagatcctc

SEQ ID NO: 5571307 - DNA, 25 bp, Homo sapien
gacttggaagttgtgttaggactca

SEQ ID NO: 5571308 - DNA, 25 bp, Homo sapien
aatgccccaagagaatcatggactt

SEQ ID NO: 5571309 - DNA, 25 bp, Homo sapien
aagtgaaggtgactccagatcatag

SEQ ID NO: 5571310 - DNA, 25 bp, Homo sapien
gttaggactcagctagcaagtgaag

SEQ ID NO: 5571311 - DNA, 25 bp, Homo sapien
gatcatagaagcaaagctacattcc

SEQ ID NO: 5571312 - DNA, 25 bp, Homo sapien
tttgaaccaggaaatgatgaagtca

SEQ ID NO: 5571313 - DNA, 25 bp, Homo sapien
gcaaaaaaatgggcagcttcctgac

SEQ ID NO: 5571314 - DNA, 25 bp, Homo sapien
cactgagcccatccaatgccccaag

SEQ ID NO: 5571315 - DNA, 25 bp, Homo sapien
attctcacaaagggctcacagctac

SEQ ID NO: 5571316 - DNA, 25 bp, Homo sapien
agaacagcctaagagacccacactg

SEQ ID NO: 5571317 - DNA, 25 bp, Homo sapien
tgcagttgccaacataggatacttt

SEQ ID NO: 5571318 - DNA, 25 bp, Homo sapien
acaagtggagtagaagctagtttta

SEQ ID NO: 5571319 - DNA, 25 bp, Homo sapien
aaagcacatttcctacaagtggagt

SEQ ID NO: 5571320 - DNA, 25 bp, Homo sapien
agtcaaaggaacaagacctttagga

SEQ ID NO: 5571321 - DNA, 25 bp, Homo sapien
aacaagacctttaggagttactggc

SEQ ID NO: 5571322 - DNA, 25 bp, Homo sapien
ttttgttcctagaaggctgggctac

SEQ ID NO: 5571323 - DNA, 25 bp, Homo sapien
acctaaaaaacgtttgccattgcaa

SEQ ID NO: 5571324 - DNA, 25 bp, Homo sapien
cctttgggccctcatatctccagcc

SEQ ID NO: 5571325 - DNA, 25 bp, Homo sapien
ctacaccaaagattaaaagcacatt

SEQ ID NO: 5571326 - DNA, 25 bp, Homo sapien
gataatagttgtggcccctttgggc

SEQ ID NO: 5571327 - DNA, 25 bp, Homo sapien
gaaggctgggctacaccaaagatta

SEQ ID NO: 5571328 - DNA, 25 bp, Homo sapien
taggaaagcaaagaatctatatcca

SEQ ID NO: 5571329 - DNA, 25 bp, Homo sapien
ttctgagcttgtctggcaggtatgg

SEQ ID NO: 5571330 - DNA, 25 bp, Homo sapien
cttgctggtaagaatgaattgttta

SEQ ID NO: 5571331 - DNA, 25 bp, Homo sapien
acagaagcaggaagtctgaatgctt

SEQ ID NO: 5571332 - DNA, 25 bp, Homo sapien
tgcaaaggattgaactgaatgtgaa

SEQ ID NO: 5571333 - DNA, 25 bp, Homo sapien
gaatgaatggctctaatcttgctgg

SEQ ID NO: 5571334 - DNA, 25 bp, Homo sapien
cagcaggcctgatgatgtactttag

SEQ ID NO: 5571335 - DNA, 25 bp, Homo sapien
tagcacatgtttacagcaggcctga

SEQ ID NO: 5571336 - DNA, 25 bp, Homo sapien
aggaggatccaggatttacaatgcc

SEQ ID NO: 5571337 - DNA, 25 bp, Homo sapien
ccacttgatggaggtatttgtctac

SEQ ID NO: 5571338 - DNA, 25 bp, Homo sapien
ctgtagccaaaaggtgtacagaagc

SEQ ID NO: 5571339 - DNA, 25 bp, Homo sapien
tatctgaaatgcttggggaccagaa

SEQ ID NO: 5571340 - DNA, 25 bp, Homo sapien
aaaacaagaaatgttaacataatgc

SEQ ID NO: 5571341 - DNA, 25 bp, Homo sapien
cagaagtgttttgggattttgggaa

SEQ ID NO: 5571342 - DNA, 25 bp, Homo sapien
tatttgccatgtacatggacgtatc

SEQ ID NO: 5571343 - DNA, 25 bp, Homo sapien
taatagacatatcaaaaaagctaac

SEQ ID NO: 5571344 - DNA, 25 bp, Homo sapien
gccatgtacatggacgtatccgggg

SEQ ID NO: 5571345 - DNA, 25 bp, Homo sapien
atatcaaaaaagctaacaaatgtta

SEQ ID NO: 5571346 - DNA, 25 bp, Homo sapien
cccaaggtctaaacaatattactta

SEQ ID NO: 5571347 - DNA, 25 bp, Homo sapien
tttgggattttgggaatatttgcca

SEQ ID NO: 5571348 - DNA, 25 bp, Homo sapien
taccagcttatgaaaataaatctct

SEQ ID NO: 5571349 - DNA, 25 bp, Homo sapien
cagtacagattgaatatcccttatc

SEQ ID NO: 5571350 - DNA, 25 bp, Homo sapien
agtgtactttagaaaataggtcatc

SEQ ID NO: 5571351 - DNA, 25 bp, Homo sapien
ttttggatgtgatcagaagaatgtc

SEQ ID NO: 5571352 - DNA, 25 bp, Homo sapien
ctggtcaataacttggtatggctac

SEQ ID NO: 5571353 - DNA, 25 bp, Homo sapien
ttggtatggctactggattcattcc

SEQ ID NO: 5571354 - DNA, 25 bp, Homo sapien
tagggctgtattacctagacaggcc

SEQ ID NO: 5571355 - DNA, 25 bp, Homo sapien
gtctgcttaagataactggtcaata

SEQ ID NO: 5571356 - DNA, 25 bp, Homo sapien
gatggtaaaactctggaatcagtcc

SEQ ID NO: 5571357 - DNA, 25 bp, Homo sapien
atggtagtataaggcatgagccacc

SEQ ID NO: 5571358 - DNA, 25 bp, Homo sapien
attcttgtaagtgatggtaaaactc

SEQ ID NO: 5571359 - DNA, 25 bp, Homo sapien
gcagaccatggcagtcattaaatac

SEQ ID NO: 5571360 - DNA, 25 bp, Homo sapien
tgtaggaaagttagctgatgtagac

SEQ ID NO: 5571361 - DNA, 25 bp, Homo sapien
agatatgacccagtaaaaccagcac

SEQ ID NO: 5571362 - DNA, 25 bp, Homo sapien
tgggcggatattggatctgtaaaac

SEQ ID NO: 5571363 - DNA, 25 bp, Homo sapien
gcacaacttatgactccacccaccc

SEQ ID NO: 5571364 - DNA, 25 bp, Homo sapien
ctcaactgccaacacagaactggtg

SEQ ID NO: 5571365 - DNA, 25 bp, Homo sapien
aaagaacaataatgaagaatttcac

SEQ ID NO: 5571366 - DNA, 25 bp, Homo sapien
tttcatgtgtgtgacttgatgggcg

SEQ ID NO: 5571367 - DNA, 25 bp, Homo sapien
gtgtcactggactgttctgaagggc

SEQ ID NO: 5571368 - DNA, 25 bp, Homo sapien
tatttcatgtatgagggtggagaga

SEQ ID NO: 5571369 - DNA, 25 bp, Homo sapien
tggagagattaaggactgataaaag

SEQ ID NO: 5571370 - DNA, 25 bp, Homo sapien
gcttcacatgtggagaaagatcatt

SEQ ID NO: 5571371 - DNA, 25 bp, Homo sapien
gcacttgcagcaggattaggattga

SEQ ID NO: 5571372 - DNA, 25 bp, Homo sapien
aggtatgctgcaagtgtcaaacaca

SEQ ID NO: 5571373 - DNA, 25 bp, Homo sapien
ttgagcagtaggagataaattccac

SEQ ID NO: 5571374 - DNA, 25 bp, Homo sapien
cagtcagaccctggcgatgaccttg

SEQ ID NO: 5571375 - DNA, 25 bp, Homo sapien
ctaaggacttccaaagtggctagtc

SEQ ID NO: 5571376 - DNA, 25 bp, Homo sapien
cttagctgtgacattggaaaggcaa

SEQ ID NO: 5571377 - DNA, 25 bp, Homo sapien
gctagtccaatgtcaggtatgctgc

SEQ ID NO: 5571378 - DNA, 25 bp, Homo sapien
taatgatggcctccccggcaaagaa

SEQ ID NO: 5571379 - DNA, 25 bp, Homo sapien
acgcagtagagaaccataatgatgg

SEQ ID NO: 5571380 - DNA, 25 bp, Homo sapien
gtatagtaatgacgcagtagagaac

SEQ ID NO: 5571381 - DNA, 25 bp, Homo sapien
agccatgcgtgactgctaaggactt

SEQ ID NO: 5571382 - DNA, 25 bp, Homo sapien
acccgtttacgcctgaggttgcaat

SEQ ID NO: 5571383 - DNA, 25 bp, Homo sapien
ggctcctctgtggaatcaggtcatt

SEQ ID NO: 5571384 - DNA, 25 bp, Homo sapien
aaggaaaatgcactaccaggacact

SEQ ID NO: 5571385 - DNA, 25 bp, Homo sapien
gctactctgctgttaaaaatgatgt

SEQ ID NO: 5571386 - DNA, 25 bp, Homo sapien
gtcatcttcagcaaaataatccaaa

SEQ ID NO: 5571387 - DNA, 25 bp, Homo sapien
tagtttcatactgtttcctggctcc

SEQ ID NO: 5571388 - DNA, 25 bp, Homo sapien
tactcctcacatctcagagctggtc

SEQ ID NO: 5571389 - DNA, 25 bp, Homo sapien
ccaggacactgagaagaatatgatg

SEQ ID NO: 5571390 - DNA, 25 bp, Homo sapien
aggtcatttaaggctactctgctgt

SEQ ID NO: 5571391 - DNA, 25 bp, Homo sapien
tagtattaaggtttccatatttcta

SEQ ID NO: 5571392 - DNA, 25 bp, Homo sapien
ttcctggctcctctgtggaatcagg

SEQ ID NO: 5571393 - DNA, 25 bp, Homo sapien
cactgagaagaatatgatgcatttc

SEQ ID NO: 5571394 - DNA, 25 bp, Homo sapien
aggaattattcctgtcacagtggag

SEQ ID NO: 5571395 - DNA, 25 bp, Homo sapien
ctccactgtgacaggaataattcct

SEQ ID NO: 5571396 - DNA, 25 bp, Homo sapien
gtgcaggctctactgggctacatca

SEQ ID NO: 5571397 - DNA, 25 bp, Homo sapien
taatcaattcatggaggagtagcac

SEQ ID NO: 5571398 - DNA, 25 bp, Homo sapien
ggccacagccgtattggtgcaggct

SEQ ID NO: 5571399 - DNA, 25 bp, Homo sapien
catatagtgactggtcaggccacag

SEQ ID NO: 5571400 - DNA, 25 bp, Homo sapien
tagcacaagtgaaaatcagagttgc

SEQ ID NO: 5571401 - DNA, 25 bp, Homo sapien
gtagagggatggacaactatcctca

SEQ ID NO: 5571402 - DNA, 25 bp, Homo sapien
acttactgtgaatgaggtcataggt

SEQ ID NO: 5571403 - DNA, 25 bp, Homo sapien
ctgaatatggtgagatatgtgctct

SEQ ID NO: 5571404 - DNA, 25 bp, Homo sapien
aagaattacgaaagaatccagactg

SEQ ID NO: 5571405 - DNA, 25 bp, Homo sapien
tataggtagtgattggttagtagag

SEQ ID NO: 5571406 - DNA, 25 bp, Homo sapien
gaacaggagtaggtgccttttactc

SEQ ID NO: 5571407 - DNA, 25 bp, Homo sapien
agacacgtggaaaaatgtgccatct

SEQ ID NO: 5571408 - DNA, 25 bp, Homo sapien
aggcgccttagaaaacaagggcaaa

SEQ ID NO: 5571409 - DNA, 25 bp, Homo sapien
cacacccgaggaaattagagtagta

SEQ ID NO: 5571410 - DNA, 25 bp, Homo sapien
gctgttaaataatggggaagcaggc

SEQ ID NO: 5571411 - DNA, 25 bp, Homo sapien
gcaaaaatgtaaacaaagcggcacc

SEQ ID NO: 5571412 - DNA, 25 bp, Homo sapien
agcggcacctagtaaggtagaagac

SEQ ID NO: 5571413 - DNA, 25 bp, Homo sapien
tagagtagtaaatagacacgtggaa

SEQ ID NO: 5571414 - DNA, 25 bp, Homo sapien
ggatatgtgaacctgccgccaccaa

SEQ ID NO: 5571415 - DNA, 25 bp, Homo sapien
gccagagaagatagacacagtactg

SEQ ID NO: 5571416 - DNA, 25 bp, Homo sapien
aacctctaaggcaagagttcggtgg

SEQ ID NO: 5571417 - DNA, 25 bp, Homo sapien
taggggcaggttaataatatacacc

SEQ ID NO: 5571418 - DNA, 25 bp, Homo sapien
cttaaaataagtcctctccgtgtga

SEQ ID NO: 5571419 - DNA, 25 bp, Homo sapien
aacgaagcaaggcctctcaaactct

SEQ ID NO: 5571420 - DNA, 25 bp, Homo sapien
agcccaggtggcttaaaagattcct

SEQ ID NO: 5571421 - DNA, 25 bp, Homo sapien
tgcaattaagcaaggttaccaattt

SEQ ID NO: 5571422 - DNA, 25 bp, Homo sapien
gctttgattttaaggattgtgcttt

SEQ ID NO: 5571423 - DNA, 25 bp, Homo sapien
aaaaagagatgtcaattgcaaggtt

SEQ ID NO: 5571424 - DNA, 25 bp, Homo sapien
caactaccatggaaagtcacttaaa

SEQ ID NO: 5571425 - DNA, 25 bp, Homo sapien
tcgaagaaaatcatagtcataggag

SEQ ID NO: 5571426 - DNA, 25 bp, Homo sapien
tctccgtgtgagtaaaccaccaact

SEQ ID NO: 5571427 - DNA, 25 bp, Homo sapien
cagggcaacatgcaattaagcaagg

SEQ ID NO: 5571428 - DNA, 25 bp, Homo sapien
aatttaaaacgaagcaaggcctctc

SEQ ID NO: 5571429 - DNA, 25 bp, Homo sapien
cagtgagtcagaaccgtaattaaac

SEQ ID NO: 5571430 - DNA, 25 bp, Homo sapien
acacagtgagtcagaaccgtaatta

SEQ ID NO: 5571431 - DNA, 25 bp, Homo sapien
aatttgggagttcacccaacaggcc

SEQ ID NO: 5571432 - DNA, 25 bp, Homo sapien
cttcccagccacgtaccttggggcg

SEQ ID NO: 5571433 - DNA, 25 bp, Homo sapien
tcacccaacaggccaaaagataggc

SEQ ID NO: 5571434 - DNA, 25 bp, Homo sapien
cccaacaggccaaaagataggctct

SEQ ID NO: 5571435 - DNA, 25 bp, Homo sapien
tatgctctcctaatattgcctttcc

SEQ ID NO: 5571436 - DNA, 25 bp, Homo sapien
tctaatagagaacacagtgagtcag

SEQ ID NO: 5571437 - DNA, 25 bp, Homo sapien
aacaggccaaaagataggctctaat

SEQ ID NO: 5571438 - DNA, 25 bp, Homo sapien
aggctctaatagagaacacagtgag

SEQ ID NO: 5571439 - DNA, 25 bp, Homo sapien
gtcagaaccgtaattaaacaccatc

SEQ ID NO: 5571440 - DNA, 25 bp, Homo sapien
gcagaggaacaaaacgagtctttga

SEQ ID NO: 5571441 - DNA, 25 bp, Homo sapien
acctagagatgcattgtgagatttc

SEQ ID NO: 5571442 - DNA, 25 bp, Homo sapien
acatcaaccaacagaaatgacatat

SEQ ID NO: 5571443 - DNA, 25 bp, Homo sapien
aacgagtctttgagggcttagagat

SEQ ID NO: 5571444 - DNA, 25 bp, Homo sapien
taccctagaaatgcacttagcacct

SEQ ID NO: 5571445 - DNA, 25 bp, Homo sapien
gcctttcaggactttgccaaatgat

SEQ ID NO: 5571446 - DNA, 25 bp, Homo sapien
ttcagaggttcacaatacccagggc

SEQ ID NO: 5571447 - DNA, 25 bp, Homo sapien
gggcttagagatgaaaaactatagc

SEQ ID NO: 5571448 - DNA, 25 bp, Homo sapien
tatagctgttagtgaataagtaaag

SEQ ID NO: 5571449 - DNA, 25 bp, Homo sapien
tcccaaagacggattacgcagtgga

SEQ ID NO: 5571450 - DNA, 25 bp, Homo sapien
tacccagggcatttacaagctattc

SEQ ID NO: 5571451 - DNA, 25 bp, Homo sapien
tttcgatgccagtcgcaagtccagg

SEQ ID NO: 5571452 - DNA, 25 bp, Homo sapien
tgctactaaacaccagaagagaatt

SEQ ID NO: 5571453 - DNA, 25 bp, Homo sapien
aatactggcagtcaactgattctcc

SEQ ID NO: 5571454 - DNA, 25 bp, Homo sapien
acacatttgggtgccttggtatggg

SEQ ID NO: 5571455 - DNA, 25 bp, Homo sapien
gcctgcctgccaaagctcaggtacc

SEQ ID NO: 5571456 - DNA, 25 bp, Homo sapien
tcatgtgcacctggtgacatgactg

SEQ ID NO: 5571457 - DNA, 25 bp, Homo sapien
tggacttattgcagacaacacaggt

SEQ ID NO: 5571458 - DNA, 25 bp, Homo sapien
ctcaggtacccaactgtgatcacac

SEQ ID NO: 5571459 - DNA, 25 bp, Homo sapien
acaggttaaagtctcaatcccataa

SEQ ID NO: 5571460 - DNA, 25 bp, Homo sapien
gtcaggtgcagtcttcattgctact

SEQ ID NO: 5571461 - DNA, 25 bp, Homo sapien
tccagataccaactgtgtgttcaac

SEQ ID NO: 5571462 - DNA, 25 bp, Homo sapien
taatgaacctctccccatccacctc

SEQ ID NO: 5571463 - DNA, 25 bp, Homo sapien
taggatacaaagtgatgattttggt

SEQ ID NO: 5571464 - DNA, 25 bp, Homo sapien
aggagcaacactaagacagtaactc

SEQ ID NO: 5571465 - DNA, 25 bp, Homo sapien
accacagctgggtacaatgtagtaa

SEQ ID NO: 5571466 - DNA, 25 bp, Homo sapien
ggcttgccccaaccaggatatacac

SEQ ID NO: 5571467 - DNA, 25 bp, Homo sapien
ttttaaaggagcaacactaagacag

SEQ ID NO: 5571468 - DNA, 25 bp, Homo sapien
aaatgtgatttaagaagccctggct

SEQ ID NO: 5571469 - DNA, 25 bp, Homo sapien
agaaaaatgattaaagccgtgagaa

SEQ ID NO: 5571470 - DNA, 25 bp, Homo sapien
tttggtataggtgtacaatgtgtac

SEQ ID NO: 5571471 - DNA, 25 bp, Homo sapien
atcaaatcatggtaatcagcatatc

SEQ ID NO: 5571472 - DNA, 25 bp, Homo sapien
aaccatattcacctgagagtgctgc

SEQ ID NO: 5571473 - DNA, 25 bp, Homo sapien
acagtaggggagtttcaactattgc

SEQ ID NO: 5571474 - DNA, 25 bp, Homo sapien
aggaaaaagagactcaagctgcaat

SEQ ID NO: 5571475 - DNA, 25 bp, Homo sapien
atttagaatgatatggggcaaacag

SEQ ID NO: 5571476 - DNA, 25 bp, Homo sapien
atggtggtgtgcaacctataatcga

SEQ ID NO: 5571477 - DNA, 25 bp, Homo sapien
ccaaccaccctgctaagctgggaaa

SEQ ID NO: 5571478 - DNA, 25 bp, Homo sapien
ccaggatgacaagcgacaccttgtc

SEQ ID NO: 5571479 - DNA, 25 bp, Homo sapien
gactcaagctgcaatagggtctgtg

SEQ ID NO: 5571480 - DNA, 25 bp, Homo sapien
cctataatcgagaagcatgaggatc

SEQ ID NO: 5571481 - DNA, 25 bp, Homo sapien
tataaataaaacatcaggctgggcg

SEQ ID NO: 5571482 - DNA, 25 bp, Homo sapien
aatgaagagtgcaccctataaataa

SEQ ID NO: 5571483 - DNA, 25 bp, Homo sapien
gaggagcaaggtccttgaaaaccca

SEQ ID NO: 5571484 - DNA, 25 bp, Homo sapien
aaataagatcaaagtgtaagcggga

SEQ ID NO: 5571485 - DNA, 25 bp, Homo sapien
gcacgcactcgcctaacacgctcca

SEQ ID NO: 5571486 - DNA, 25 bp, Homo sapien
gtgggcgcacgcactcgcctaacac

SEQ ID NO: 5571487 - DNA, 25 bp, Homo sapien
aattcatcacttctgagcgccgggc

SEQ ID NO: 5571488 - DNA, 25 bp, Homo sapien
aacacgctccaagcgcgcacactca

SEQ ID NO: 5571489 - DNA, 25 bp, Homo sapien
gcccggcctcgtctatctgatcaat

SEQ ID NO: 5571490 - DNA, 25 bp, Homo sapien
agagcttttcatttcgggtcggccc

SEQ ID NO: 5571491 - DNA, 25 bp, Homo sapien
cgcctaacacgctccaagcgcgcac

SEQ ID NO: 5571492 - DNA, 25 bp, Homo sapien
gggacaagcccggcctcgtctatct

SEQ ID NO: 5571493 - DNA, 25 bp, Homo sapien
ggaggagagcttttcatttcgggtc

SEQ ID NO: 5571494 - DNA, 25 bp, Homo sapien
gctggggtcacgatccgatcaaata

SEQ ID NO: 5571495 - DNA, 25 bp, Homo sapien
tgctcattatgaacatgcgactctc

SEQ ID NO: 5571496 - DNA, 25 bp, Homo sapien
tatattcctgttgacaatgtaagtt

SEQ ID NO: 5571497 - DNA, 25 bp, Homo sapien
gtttcaagaaatggtcaactttata

SEQ ID NO: 5571498 - DNA, 25 bp, Homo sapien
atgaacatgcgactctctggaatat

SEQ ID NO: 5571499 - DNA, 25 bp, Homo sapien
atccagtcattgtacatgtaagcaa

SEQ ID NO: 5571500 - DNA, 25 bp, Homo sapien
acaagcaacaaatgcccagcaaatc

SEQ ID NO: 5571501 - DNA, 25 bp, Homo sapien
atacctattaattggaagaaaacag

SEQ ID NO: 5571502 - DNA, 25 bp, Homo sapien
atgtaagcaattgttgtcaagggag

SEQ ID NO: 5571503 - DNA, 25 bp, Homo sapien
gcaattgttgtcaagggagaaaaat

SEQ ID NO: 5571504 - DNA, 25 bp, Homo sapien
gaaaacagatataagctatcacctc

SEQ ID NO: 5571505 - DNA, 25 bp, Homo sapien
tgcccagcaaatccagtcattgtac

SEQ ID NO: 5571506 - DNA, 25 bp, Homo sapien
cacatctagggaccagaccttctgc

SEQ ID NO: 5571507 - DNA, 25 bp, Homo sapien
gcagaaggtctggtccctagatgtg

SEQ ID NO: 5571508 - DNA, 25 bp, Homo sapien
ttcctatgattctcacaaaaccttc

SEQ ID NO: 5571509 - DNA, 25 bp, Homo sapien
tccttttggcttgtcctgcatcctt

SEQ ID NO: 5571510 - DNA, 25 bp, Homo sapien
caatgtaggaaatgctttcatagac

SEQ ID NO: 5571511 - DNA, 25 bp, Homo sapien
cactgaaaaaaaagacttcaaggtc

SEQ ID NO: 5571512 - DNA, 25 bp, Homo sapien
tttaacgccactgtttccttgcttc

SEQ ID NO: 5571513 - DNA, 25 bp, Homo sapien
ttttgagcactttacaatgtaggaa

SEQ ID NO: 5571514 - DNA, 25 bp, Homo sapien
aaaaagacttcaaggtcacttgccc

SEQ ID NO: 5571515 - DNA, 25 bp, Homo sapien
acagctgccctgtgtacacctgcct

SEQ ID NO: 5571516 - DNA, 25 bp, Homo sapien
ctgcatccttttctgacagctgccc

SEQ ID NO: 5571517 - DNA, 25 bp, Homo sapien
ttcagataagtttactccttttggc

SEQ ID NO: 5571518 - DNA, 25 bp, Homo sapien
tcaaggtcacttgccctatgtttat

SEQ ID NO: 5571519 - DNA, 25 bp, Homo sapien
taagagtggtttctacctgtggatt

SEQ ID NO: 5571520 - DNA, 25 bp, Homo sapien
cttgaaccaggaccacctacctctc

SEQ ID NO: 5571521 - DNA, 25 bp, Homo sapien
cctcctctaagagttagtgctgctc

SEQ ID NO: 5571522 - DNA, 25 bp, Homo sapien
ctgcttatggaggcccctaagagtg

SEQ ID NO: 5571523 - DNA, 25 bp, Homo sapien
gccctagacaggaaaagtagtcttc

SEQ ID NO: 5571524 - DNA, 25 bp, Homo sapien
gtaacagccttaatgaaaaggagaa

SEQ ID NO: 5571525 - DNA, 25 bp, Homo sapien
tttgagacaatagtgaagccattcc

SEQ ID NO: 5571526 - DNA, 25 bp, Homo sapien
tgatggttctgtcaaggaaacttgc

SEQ ID NO: 5571527 - DNA, 25 bp, Homo sapien
agggaaccagtgaaatactgtatat

SEQ ID NO: 5571528 - DNA, 25 bp, Homo sapien
cagaacggaagggataactttatct

SEQ ID NO: 5571529 - DNA, 25 bp, Homo sapien
aaagtagtcttcgagcaaacccagg

SEQ ID NO: 5571530 - DNA, 25 bp, Homo sapien
ttctcgttagtgctggtccaatccc

SEQ ID NO: 5571531 - DNA, 25 bp, Homo sapien
cagcttccctgccagccccctcgga

SEQ ID NO: 5571532 - DNA, 25 bp, Homo sapien
ccagcctcccttgcaaacgtggggg

SEQ ID NO: 5571533 - DNA, 25 bp, Homo sapien
agcctcccttgcaaacgtgggggtc

SEQ ID NO: 5571534 - DNA, 25 bp, Homo sapien
gaaagaacaaagctagaacccagct

SEQ ID NO: 5571535 - DNA, 25 bp, Homo sapien
ttccctgccagccccctcggaatgg

SEQ ID NO: 5571536 - DNA, 25 bp, Homo sapien
agtgctggtccaatcccctctgagg

SEQ ID NO: 5571537 - DNA, 25 bp, Homo sapien
atcccctctgaggaaagggctaaag

SEQ ID NO: 5571538 - DNA, 25 bp, Homo sapien
ccccaaagtaacttctcgttagtgc

SEQ ID NO: 5571539 - DNA, 25 bp, Homo sapien
tttcctttcgtctggccgtgctggc

SEQ ID NO: 5571540 - DNA, 25 bp, Homo sapien
gaacaaagctagaacccagcttccc

SEQ ID NO: 5571541 - DNA, 25 bp, Homo sapien
taaatgtttcacagggttgcaagcc

SEQ ID NO: 5571542 - DNA, 25 bp, Homo sapien
tctgagaagcataaaatttaggatc

SEQ ID NO: 5571543 - DNA, 25 bp, Homo sapien
catggcttggattttggagatcttt

SEQ ID NO: 5571544 - DNA, 25 bp, Homo sapien
gtaatcataaactgtatccacttgg

SEQ ID NO: 5571545 - DNA, 25 bp, Homo sapien
agggtggattctgagaagcataaaa

SEQ ID NO: 5571546 - DNA, 25 bp, Homo sapien
gtataagatgaggtattggattttc

SEQ ID NO: 5571547 - DNA, 25 bp, Homo sapien
tattcaatgtataagatgaggtatt

SEQ ID NO: 5571548 - DNA, 25 bp, Homo sapien
atgaaagtaaacatccagggtggat

SEQ ID NO: 5571549 - DNA, 25 bp, Homo sapien
ttcacagggttgcaagcccttatcc

SEQ ID NO: 5571550 - DNA, 25 bp, Homo sapien
gcagttggcactgtatcaagactcc

SEQ ID NO: 5571551 - DNA, 25 bp, Homo sapien
ggatcataattattggtttggtacc

SEQ ID NO: 5571552 - DNA, 25 bp, Homo sapien
tgtcccaacacgccaaagaggctac

SEQ ID NO: 5571553 - DNA, 25 bp, Homo sapien
ggtgggaagaacagctacattccta

SEQ ID NO: 5571554 - DNA, 25 bp, Homo sapien
cccacaggtagtttaaataagagac

SEQ ID NO: 5571555 - DNA, 25 bp, Homo sapien
aataagagacatgaaaactctgttt

SEQ ID NO: 5571556 - DNA, 25 bp, Homo sapien
ggccggccaagctaccgctcttcgg

SEQ ID NO: 5571557 - DNA, 25 bp, Homo sapien
agaggctacaaataaccttccagga

SEQ ID NO: 5571558 - DNA, 25 bp, Homo sapien
cgctcttcggagagaaagagctcag

SEQ ID NO: 5571559 - DNA, 25 bp, Homo sapien
gctgagaggaaagttccatcccctt

SEQ ID NO: 5571560 - DNA, 25 bp, Homo sapien
ttcctaccccagtagggccgctgtc

SEQ ID NO: 5571561 - DNA, 25 bp, Homo sapien
caaataaccttccaggagagagccg

SEQ ID NO: 5571562 - DNA, 25 bp, Homo sapien
catcccctttccttgcaacccgaag

SEQ ID NO: 5571563 - DNA, 25 bp, Homo sapien
acactctgaagctgtacaagaagtc

SEQ ID NO: 5571564 - DNA, 25 bp, Homo sapien
aagaagtcaggaaagactccgtatc

SEQ ID NO: 5571565 - DNA, 25 bp, Homo sapien
ctttgcagttagtgtgatctgtgtc

SEQ ID NO: 5571566 - DNA, 25 bp, Homo sapien
gttgatactgaagatgttctgagtt

SEQ ID NO: 5571567 - DNA, 25 bp, Homo sapien
aggctcacctagagaaaaagcactt

SEQ ID NO: 5571568 - DNA, 25 bp, Homo sapien
aatgctgtagattagtgctatccat

SEQ ID NO: 5571569 - DNA, 25 bp, Homo sapien
taatcaaacaccctgtctgagtcct

SEQ ID NO: 5571570 - DNA, 25 bp, Homo sapien
gctacgctggtgtagtgtgaaagca

SEQ ID NO: 5571571 - DNA, 25 bp, Homo sapien
tctctaagagagtgaatattttcgc

SEQ ID NO: 5571572 - DNA, 25 bp, Homo sapien
tgacaccgaaatctcagtttgggtc

SEQ ID NO: 5571573 - DNA, 25 bp, Homo sapien
ctcagtttgggtcagcctcacactc

SEQ ID NO: 5571574 - DNA, 25 bp, Homo sapien
gtgttgattgatagtgcaaagggtg

SEQ ID NO: 5571575 - DNA, 25 bp, Homo sapien
gctgccagcatacttgagccagtaa

SEQ ID NO: 5571576 - DNA, 25 bp, Homo sapien
ttccagttaagtagcccatttcatt

SEQ ID NO: 5571577 - DNA, 25 bp, Homo sapien
tcctgagtaatgggcatctagcttc

SEQ ID NO: 5571578 - DNA, 25 bp, Homo sapien
gtgaattgattcctgccatggaacc

SEQ ID NO: 5571579 - DNA, 25 bp, Homo sapien
gcaaagggtggcttaaggccacttg

SEQ ID NO: 5571580 - DNA, 25 bp, Homo sapien
ccatggaaccatagacctagaagag

SEQ ID NO: 5571581 - DNA, 25 bp, Homo sapien
aaggccacttggaattagactgagc

SEQ ID NO: 5571582 - DNA, 25 bp, Homo sapien
gtgactgaagatgcactatgtgaat

SEQ ID NO: 5571583 - DNA, 25 bp, Homo sapien
gaacatctctgtagacttggaagtc

SEQ ID NO: 5571584 - DNA, 25 bp, Homo sapien
tgagccagtaagagttaccagtgtt

SEQ ID NO: 5571585 - DNA, 25 bp, Homo sapien
caaccttgaaaggaaaccattgtcc

SEQ ID NO: 5571586 - DNA, 25 bp, Homo sapien
agtttagtggtttctctcagtgagc

SEQ ID NO: 5571587 - DNA, 25 bp, Homo sapien
ttgactcactgataaggaaacagag

SEQ ID NO: 5571588 - DNA, 25 bp, Homo sapien
gaaggattattgtcacttttggaac

SEQ ID NO: 5571589 - DNA, 25 bp, Homo sapien
aaggaaacagaggcttaaaatgtgt

SEQ ID NO: 5571590 - DNA, 25 bp, Homo sapien
acccagcatcatgccttggagattt

SEQ ID NO: 5571591 - DNA, 25 bp, Homo sapien
tatatattaggtataccgatccttt

SEQ ID NO: 5571592 - DNA, 25 bp, Homo sapien
atcaatgttgcctttgccctatccc

SEQ ID NO: 5571593 - DNA, 25 bp, Homo sapien
aaaatgtccaggttttgaaggatta

SEQ ID NO: 5571594 - DNA, 25 bp, Homo sapien
acaaatgtacgcacctgtgtcacac

SEQ ID NO: 5571595 - DNA, 25 bp, Homo sapien
taaaatgtagaatattgtatcactc

SEQ ID NO: 5571596 - DNA, 25 bp, Homo sapien
tgagagaagggtttgttctagcgaa

SEQ ID NO: 5571597 - DNA, 25 bp, Homo sapien
ccatttcctgtggtagggagtagag

SEQ ID NO: 5571598 - DNA, 25 bp, Homo sapien
gtttttggctatagaggctaagccc

SEQ ID NO: 5571599 - DNA, 25 bp, Homo sapien
ttacagttgaggatatggaagttga

SEQ ID NO: 5571600 - DNA, 25 bp, Homo sapien
tgttctagcgaactgagaattaaga

SEQ ID NO: 5571601 - DNA, 25 bp, Homo sapien
caatatataaaaggtaggggtcctc

SEQ ID NO: 5571602 - DNA, 25 bp, Homo sapien
agtaaagtttaaatgagataggtcc

SEQ ID NO: 5571603 - DNA, 25 bp, Homo sapien
ttaagaagaaaagtcctgcattgtt

SEQ ID NO: 5571604 - DNA, 25 bp, Homo sapien
cagtctcctagtgcaatgttgattc

SEQ ID NO: 5571605 - DNA, 25 bp, Homo sapien
ggctaagccccatattacagttgag

SEQ ID NO: 5571606 - DNA, 25 bp, Homo sapien
tttagaaagatgtcagctttgttgc

SEQ ID NO: 5571607 - DNA, 25 bp, Homo sapien
ccccaggcccattgtgcctgccgct

SEQ ID NO: 5571608 - DNA, 25 bp, Homo sapien
caaagggcttgatctaatgtgaata

SEQ ID NO: 5571609 - DNA, 25 bp, Homo sapien
ccctaaaggtttgctgagaagtcac

SEQ ID NO: 5571610 - DNA, 25 bp, Homo sapien
atgagacagatggattaataggaga

SEQ ID NO: 5571611 - DNA, 25 bp, Homo sapien
ggtccgagtgtccacaactgcaccc

SEQ ID NO: 5571612 - DNA, 25 bp, Homo sapien
ataggagaaacggtatgcaaattta

SEQ ID NO: 5571613 - DNA, 25 bp, Homo sapien
gggccctctctggaatgacagtctc

SEQ ID NO: 5571614 - DNA, 25 bp, Homo sapien
gagaagtcactgacatgagacagat

SEQ ID NO: 5571615 - DNA, 25 bp, Homo sapien
gcattttcttctctggacgtggggc

SEQ ID NO: 5571616 - DNA, 25 bp, Homo sapien
ctaatgtgaatagactgagtgggaa

SEQ ID NO: 5571617 - DNA, 25 bp, Homo sapien
ctttagaacgaagacccaacgatgg

SEQ ID NO: 5571618 - DNA, 25 bp, Homo sapien
tgggtgctggaatgcccgttttcca

SEQ ID NO: 5571619 - DNA, 25 bp, Homo sapien
agttccaccatcttgtctcgggcct

SEQ ID NO: 5571620 - DNA, 25 bp, Homo sapien
agctggcatcctgagttccaccatc

SEQ ID NO: 5571621 - DNA, 25 bp, Homo sapien
gcagtcttccaatggtgcccagagc

SEQ ID NO: 5571622 - DNA, 25 bp, Homo sapien
caagaagcattggccttttgaggat

SEQ ID NO: 5571623 - DNA, 25 bp, Homo sapien
tctcgggcctaggatggccactaat

SEQ ID NO: 5571624 - DNA, 25 bp, Homo sapien
tggccgaacttcaaaaccctggatc

SEQ ID NO: 5571625 - DNA, 25 bp, Homo sapien
gaggttagttactcaggatgatata

SEQ ID NO: 5571626 - DNA, 25 bp, Homo sapien
tatctgactctaaagctaaagctct

SEQ ID NO: 5571627 - DNA, 25 bp, Homo sapien
ggaaggcacatacaccgagttggcc

SEQ ID NO: 5571628 - DNA, 25 bp, Homo sapien
cactaatatccagtgcgcaggcagg

SEQ ID NO: 5571629 - DNA, 25 bp, Homo sapien
agaacatatttggtagccgaaggac

SEQ ID NO: 5571630 - DNA, 25 bp, Homo sapien
actctgagtctgagtacaactgtcc

SEQ ID NO: 5571631 - DNA, 25 bp, Homo sapien
aagaagtatgttttaggatattatt

SEQ ID NO: 5571632 - DNA, 25 bp, Homo sapien
tcagcctcagtttaaagaagcagac

SEQ ID NO: 5571633 - DNA, 25 bp, Homo sapien
tagccgaaggacattaaagtgattt

SEQ ID NO: 5571634 - DNA, 25 bp, Homo sapien
catgaaattacccaaaagatacagt

SEQ ID NO: 5571635 - DNA, 25 bp, Homo sapien
gaggataccatcatttaaggggaat

SEQ ID NO: 5571636 - DNA, 25 bp, Homo sapien
taaggggaatgactgactgttcatt

SEQ ID NO: 5571637 - DNA, 25 bp, Homo sapien
ttcattaggactacagactctgagt

SEQ ID NO: 5571638 - DNA, 25 bp, Homo sapien
agagaggaaatgtgccttttatcag

SEQ ID NO: 5571639 - DNA, 25 bp, Homo sapien
gatttgggagcccacaaagaagtat

SEQ ID NO: 5571640 - DNA, 25 bp, Homo sapien
tctcttggtagttttatagtaatta

SEQ ID NO: 5571641 - DNA, 25 bp, Homo sapien
tccctcaaatttaccccactgtgcc

SEQ ID NO: 5571642 - DNA, 25 bp, Homo sapien
taccccactgtgccatatagatatg

SEQ ID NO: 5571643 - DNA, 25 bp, Homo sapien
tatataatataaagaaaacacaatg

SEQ ID NO: 5571644 - DNA, 25 bp, Homo sapien
acaatgactattttagcctaggccc

SEQ ID NO: 5571645 - DNA, 25 bp, Homo sapien
atgtaagatgtccctaaaatccctc

SEQ ID NO: 5571646 - DNA, 25 bp, Homo sapien
aagatgtccctaaaatccctcaaat

SEQ ID NO: 5571647 - DNA, 25 bp, Homo sapien
attttagcctaggcccatgtaagat

SEQ ID NO: 5571648 - DNA, 25 bp, Homo sapien
taatataaagaaaacacaatgacta

SEQ ID NO: 5571649 - DNA, 25 bp, Homo sapien
aatgactattttagcctaggcccat

SEQ ID NO: 5571650 - DNA, 25 bp, Homo sapien
tttagcctaggcccatgtaagatgt

SEQ ID NO: 5571651 - DNA, 25 bp, Homo sapien
aaatgggaagaacattactaacttc

SEQ ID NO: 5571652 - DNA, 25 bp, Homo sapien
aatggcacatacatagaggtactat

SEQ ID NO: 5571653 - DNA, 25 bp, Homo sapien
aatgctctagcccttgtgattctta

SEQ ID NO: 5571654 - DNA, 25 bp, Homo sapien
aaaagaaatggcacatacatagagg

SEQ ID NO: 5571655 - DNA, 25 bp, Homo sapien
aattgttgctgtaaggacctcctgc

SEQ ID NO: 5571656 - DNA, 25 bp, Homo sapien
aagcaaaggcttagttcatggtaat

SEQ ID NO: 5571657 - DNA, 25 bp, Homo sapien
tctatgctagcaatcaggcaactga

SEQ ID NO: 5571658 - DNA, 25 bp, Homo sapien
aatcaggcaactgaattccaccttc

SEQ ID NO: 5571659 - DNA, 25 bp, Homo sapien
aggacctcctgcaatgctctagccc

SEQ ID NO: 5571660 - DNA, 25 bp, Homo sapien
aacacagtgcctgcactaagcaaag

SEQ ID NO: 5571661 - DNA, 25 bp, Homo sapien
gcttccagcacagtgttcagctttt

SEQ ID NO: 5571662 - DNA, 25 bp, Homo sapien
aggtgctgagaatttgtgatgttga

SEQ ID NO: 5571663 - DNA, 25 bp, Homo sapien
acagtgcgatgtctcaaccacaagc

SEQ ID NO: 5571664 - DNA, 25 bp, Homo sapien
gaaaaatgtagggacaaactctcta

SEQ ID NO: 5571665 - DNA, 25 bp, Homo sapien
cactgtgtgtaagtggatctgcacc

SEQ ID NO: 5571666 - DNA, 25 bp, Homo sapien
tatgttgatagtataccaggcattc

SEQ ID NO: 5571667 - DNA, 25 bp, Homo sapien
gtgagttcactcagggatgatcaag

SEQ ID NO: 5571668 - DNA, 25 bp, Homo sapien
gggttcacaataaggtacatgtagc

SEQ ID NO: 5571669 - DNA, 25 bp, Homo sapien
attgaggtttatgaacccacagggg

SEQ ID NO: 5571670 - DNA, 25 bp, Homo sapien
gacagaggccaaatcctcctgggtt

SEQ ID NO: 5571671 - DNA, 25 bp, Homo sapien
cagggatgatcaagttctaagaaac

SEQ ID NO: 5571672 - DNA, 25 bp, Homo sapien
taaggaactgatatataaagcacaa

SEQ ID NO: 5571673 - DNA, 25 bp, Homo sapien
ggtcgtcagccaaaggaatgcttca

SEQ ID NO: 5571674 - DNA, 25 bp, Homo sapien
aagggcactatttcaatggacacac

SEQ ID NO: 5571675 - DNA, 25 bp, Homo sapien
cacgagaggatattttttgggaggg

SEQ ID NO: 5571676 - DNA, 25 bp, Homo sapien
gggagatgaaagggcactatttcaa

SEQ ID NO: 5571677 - DNA, 25 bp, Homo sapien
ataagctgtgacacgagaggatatt

SEQ ID NO: 5571678 - DNA, 25 bp, Homo sapien
tctgttttggttaatgtcgacagcc

SEQ ID NO: 5571679 - DNA, 25 bp, Homo sapien
cagagacgaatgagtctcatgccct

SEQ ID NO: 5571680 - DNA, 25 bp, Homo sapien
tgacaataaatgagtctccggtagg

SEQ ID NO: 5571681 - DNA, 25 bp, Homo sapien
tttcatacccagagacgaatgagtc

SEQ ID NO: 5571682 - DNA, 25 bp, Homo sapien
tcatgccctcataagctgtgacacg

SEQ ID NO: 5571683 - DNA, 25 bp, Homo sapien
taccaccatgaccgcacctgatctc

SEQ ID NO: 5571684 - DNA, 25 bp, Homo sapien
aaataaaatgatagtggttcctccc

SEQ ID NO: 5571685 - DNA, 25 bp, Homo sapien
ggttcggaccctgaggtctgaacac

SEQ ID NO: 5571686 - DNA, 25 bp, Homo sapien
tcaacttcggaactagcgccagaga

SEQ ID NO: 5571687 - DNA, 25 bp, Homo sapien
agcctcctatgagtgctggcagtcc

SEQ ID NO: 5571688 - DNA, 25 bp, Homo sapien
taattctcgcagtcctgggcacaca

SEQ ID NO: 5571689 - DNA, 25 bp, Homo sapien
attcaaactgaactgggtgtcctgt

SEQ ID NO: 5571690 - DNA, 25 bp, Homo sapien
ccggggttgccaagatgattaaata

SEQ ID NO: 5571691 - DNA, 25 bp, Homo sapien
gcgccagagaccactaagtcaatcc

SEQ ID NO: 5571692 - DNA, 25 bp, Homo sapien
caataaatggtagccactgccggtg

SEQ ID NO: 5571693 - DNA, 25 bp, Homo sapien
atcacaccacgtgaaggtgccatga

SEQ ID NO: 5571694 - DNA, 25 bp, Homo sapien
caactaagatgtatccggccccttc

SEQ ID NO: 5571695 - DNA, 25 bp, Homo sapien
aggaaaggaaagtcaattttacagc

SEQ ID NO: 5571696 - DNA, 25 bp, Homo sapien
cattgatattgaacagggacctggt

SEQ ID NO: 5571697 - DNA, 25 bp, Homo sapien
cacgtaacgtgtccttcagtctgtc

SEQ ID NO: 5571698 - DNA, 25 bp, Homo sapien
aatctcttaagatggaaggaaagga

SEQ ID NO: 5571699 - DNA, 25 bp, Homo sapien
tctcaggacatagacctggggtaga

SEQ ID NO: 5571700 - DNA, 25 bp, Homo sapien
gaatgtgggatcagttttgggcaca

SEQ ID NO: 5571701 - DNA, 25 bp, Homo sapien
ctcaaatagaccaaggaaaatggaa

SEQ ID NO: 5571702 - DNA, 25 bp, Homo sapien
cctggggtagaatcacatccgtgat

SEQ ID NO: 5571703 - DNA, 25 bp, Homo sapien
caagacaggacaatggctggtattt

SEQ ID NO: 5571704 - DNA, 25 bp, Homo sapien
aattttacagccagaggtaggaaag

SEQ ID NO: 5571705 - DNA, 25 bp, Homo sapien
gacctggttatggaccacaggaggc

SEQ ID NO: 5571706 - DNA, 25 bp, Homo sapien
tcccactctaaatgtaaggcaaccc

SEQ ID NO: 5571707 - DNA, 25 bp, Homo sapien
tcttgagggattttataaggtcatc

SEQ ID NO: 5571708 - DNA, 25 bp, Homo sapien
gtctgtgccaaatctgtcaatcagt

SEQ ID NO: 5571709 - DNA, 25 bp, Homo sapien
gtcaatcagtacaatagaaaagtta

SEQ ID NO: 5571710 - DNA, 25 bp, Homo sapien
atgtaaatataccccagagtccaaa

SEQ ID NO: 5571711 - DNA, 25 bp, Homo sapien
accagtgtggttatcaatgctttca

SEQ ID NO: 5571712 - DNA, 25 bp, Homo sapien
cacgaaacacaaatttttagaagca

SEQ ID NO: 5571713 - DNA, 25 bp, Homo sapien
atattcacaatgagaggatgtctgt

SEQ ID NO: 5571714 - DNA, 25 bp, Homo sapien
tatataactacaacacgaaacacaa

SEQ ID NO: 5571715 - DNA, 25 bp, Homo sapien
aactgcagagcttcgtacacttgat

SEQ ID NO: 5571716 - DNA, 25 bp, Homo sapien
ccgctgctcctctgctaactcattt

SEQ ID NO: 5571717 - DNA, 25 bp, Homo sapien
taaagtgataatgatgatagctaac

SEQ ID NO: 5571718 - DNA, 25 bp, Homo sapien
ccgggtaccattctaagggcctcaa

SEQ ID NO: 5571719 - DNA, 25 bp, Homo sapien
aatactgagcaagatgctgaatctc

SEQ ID NO: 5571720 - DNA, 25 bp, Homo sapien
ctggggatcttagcccatgtgtggt

SEQ ID NO: 5571721 - DNA, 25 bp, Homo sapien
gtggagccaagaattgaactcaggc

SEQ ID NO: 5571722 - DNA, 25 bp, Homo sapien
aggagttgcattagaaaatgagtat

SEQ ID NO: 5571723 - DNA, 25 bp, Homo sapien
ctagcacttaatatacaccgggtac

SEQ ID NO: 5571724 - DNA, 25 bp, Homo sapien
aatgagaagtatgagtgtccctact

SEQ ID NO: 5571725 - DNA, 25 bp, Homo sapien
atcatagagtttctaggagttgcat

SEQ ID NO: 5571726 - DNA, 25 bp, Homo sapien
agccacaatcaagtcattgggtttc

SEQ ID NO: 5571727 - DNA, 25 bp, Homo sapien
aggcagtctgcctctggggatctta

SEQ ID NO: 5571728 - DNA, 25 bp, Homo sapien
gatcaagccctggtctcagtatgcc

SEQ ID NO: 5571729 - DNA, 25 bp, Homo sapien
attcatttgcactgcggctgggagg

SEQ ID NO: 5571730 - DNA, 25 bp, Homo sapien
tggcctcttgctgccaaacaattat

SEQ ID NO: 5571731 - DNA, 25 bp, Homo sapien
tggagtcagggtaacccatctgtag

SEQ ID NO: 5571732 - DNA, 25 bp, Homo sapien
tcagtatgccagagtctaaggtgac

SEQ ID NO: 5571733 - DNA, 25 bp, Homo sapien
taccgtcaccatatctctagtttcc

SEQ ID NO: 5571734 - DNA, 25 bp, Homo sapien
ggtgggggccaacattcatttgcac

SEQ ID NO: 5571735 - DNA, 25 bp, Homo sapien
gggtaacccatctgtagtaggcctg

SEQ ID NO: 5571736 - DNA, 25 bp, Homo sapien
gtctaaggtgactatgtttggtttc

SEQ ID NO: 5571737 - DNA, 25 bp, Homo sapien
ggaccactaccgtcaccatatctct

SEQ ID NO: 5571738 - DNA, 25 bp, Homo sapien
gtggtgctcaggttaaagctcctcc

SEQ ID NO: 5571739 - DNA, 25 bp, Homo sapien
ggatcagaaagccactctaggcctg

SEQ ID NO: 5571740 - DNA, 25 bp, Homo sapien
tggcatgaccatggattatttcact

SEQ ID NO: 5571741 - DNA, 25 bp, Homo sapien
ttcccactggcgaggcttcttattc

SEQ ID NO: 5571742 - DNA, 25 bp, Homo sapien
aataggtgtataacagggatcagaa

SEQ ID NO: 5571743 - DNA, 25 bp, Homo sapien
cagctattgacatcagtgtggagtc

SEQ ID NO: 5571744 - DNA, 25 bp, Homo sapien
tcctcgtagcccttgctctccagct

SEQ ID NO: 5571745 - DNA, 25 bp, Homo sapien
accaagggccctatttcccactggc

SEQ ID NO: 5571746 - DNA, 25 bp, Homo sapien
ccactctaggcctgacatgcttgac

SEQ ID NO: 5571747 - DNA, 25 bp, Homo sapien
caggaaaattactctgagctcagaa

SEQ ID NO: 5571748 - DNA, 25 bp, Homo sapien
gtgactattaggagcaaaaggtacc

SEQ ID NO: 5571749 - DNA, 25 bp, Homo sapien
catcagtgtggagtcagtaattctt

SEQ ID NO: 5571750 - DNA, 25 bp, Homo sapien
taagtgtgagaaattagtaggaact

SEQ ID NO: 5571751 - DNA, 25 bp, Homo sapien
caactgtgcagaaaccagataggca

SEQ ID NO: 5571752 - DNA, 25 bp, Homo sapien
ttgcagactttagacccctagctct

SEQ ID NO: 5571753 - DNA, 25 bp, Homo sapien
agacaacgcaacctcccagggcttt

SEQ ID NO: 5571754 - DNA, 25 bp, Homo sapien
gcaaagagaacagagaaccattttt

SEQ ID NO: 5571755 - DNA, 25 bp, Homo sapien
agtaggaactaggaaccaatacaag

SEQ ID NO: 5571756 - DNA, 25 bp, Homo sapien
tactggctcttgagacaacgcaacc

SEQ ID NO: 5571757 - DNA, 25 bp, Homo sapien
aacctcccagggcttttgcagactt

SEQ ID NO: 5571758 - DNA, 25 bp, Homo sapien
tactatgatgtggagtggtccattg

SEQ ID NO: 5571759 - DNA, 25 bp, Homo sapien
ccaatacaagaactgcaaagagaac

SEQ ID NO: 5571760 - DNA, 25 bp, Homo sapien
ggagtggtccattgaatactggctc

SEQ ID NO: 5571761 - DNA, 25 bp, Homo sapien
tagtaggcactaagtgagcatctct

SEQ ID NO: 5571762 - DNA, 25 bp, Homo sapien
tggagcctcactgcaagcacaatgc

SEQ ID NO: 5571763 - DNA, 25 bp, Homo sapien
ggaattcctggagaactagaatatc

SEQ ID NO: 5571764 - DNA, 25 bp, Homo sapien
ggaatggctgttaggcaccttcacc

SEQ ID NO: 5571765 - DNA, 25 bp, Homo sapien
ccccacctatcgagtgagccacgtg

SEQ ID NO: 5571766 - DNA, 25 bp, Homo sapien
acaatgcttggtgcatagtaggcac

SEQ ID NO: 5571767 - DNA, 25 bp, Homo sapien
gccacgtgctgtctgtccttgcctc

SEQ ID NO: 5571768 - DNA, 25 bp, Homo sapien
atcactcacaacagaggggaattcc

SEQ ID NO: 5571769 - DNA, 25 bp, Homo sapien
tctctgaatgaatgccccacctatc

SEQ ID NO: 5571770 - DNA, 25 bp, Homo sapien
catcacaagcagtgttcctggcctt

SEQ ID NO: 5571771 - DNA, 25 bp, Homo sapien
aagcagtagccacatcacaagcagt

SEQ ID NO: 5571772 - DNA, 25 bp, Homo sapien
aaggcagtgtctaagctcttgtcca

SEQ ID NO: 5571773 - DNA, 25 bp, Homo sapien
ctagtccacgttcagcaagagcttc

SEQ ID NO: 5571774 - DNA, 25 bp, Homo sapien
agctggagcatccctccctcagggg

SEQ ID NO: 5571775 - DNA, 25 bp, Homo sapien
tttatagacacatgggagttctggg

SEQ ID NO: 5571776 - DNA, 25 bp, Homo sapien
tctgactactgctgccctcaaggca

SEQ ID NO: 5571777 - DNA, 25 bp, Homo sapien
acaaaacaacgtaagcatagcatgc

SEQ ID NO: 5571778 - DNA, 25 bp, Homo sapien
agctcttgtccagctggagcatccc

SEQ ID NO: 5571779 - DNA, 25 bp, Homo sapien
gcacagtaagcactagtccacgttc

SEQ ID NO: 5571780 - DNA, 25 bp, Homo sapien
tgccctcaaggcagtgtctaagctc

SEQ ID NO: 5571781 - DNA, 25 bp, Homo sapien
ttcaaaacaaaacaacgtaagcata

SEQ ID NO: 5571782 - DNA, 25 bp, Homo sapien
aagcatagcatgcacagtaagcact

SEQ ID NO: 5571783 - DNA, 25 bp, Homo sapien
tcacataaaaggaatgtggggctag

SEQ ID NO: 5571784 - DNA, 25 bp, Homo sapien
taacagctaagtgacctatagatac

SEQ ID NO: 5571785 - DNA, 25 bp, Homo sapien
ggagcagcagctattttacggagag

SEQ ID NO: 5571786 - DNA, 25 bp, Homo sapien
aatagtgaaccccagcatcgcttgt

SEQ ID NO: 5571787 - DNA, 25 bp, Homo sapien
agagaagcacccctgggctatgtaa

SEQ ID NO: 5571788 - DNA, 25 bp, Homo sapien
agtgttacaaggagcaaaagaattg

SEQ ID NO: 5571789 - DNA, 25 bp, Homo sapien
ttcagtacattatgtggctggcctc

SEQ ID NO: 5571790 - DNA, 25 bp, Homo sapien
ctcaccccacaggtaaaaggcattt

SEQ ID NO: 5571791 - DNA, 25 bp, Homo sapien
gaatgtggggctagtatgacatttc

SEQ ID NO: 5571792 - DNA, 25 bp, Homo sapien
cctgggctatgtaactggccacttc

SEQ ID NO: 5571793 - DNA, 25 bp, Homo sapien
agcctaatgtaatgggctggagcag

SEQ ID NO: 5571794 - DNA, 25 bp, Homo sapien
gagcagaagccccatgactctgtag

SEQ ID NO: 5571795 - DNA, 25 bp, Homo sapien
catgactctgtaggagccctctggc

SEQ ID NO: 5571796 - DNA, 25 bp, Homo sapien
tctaaatgatcagagagcatcctga

SEQ ID NO: 5571797 - DNA, 25 bp, Homo sapien
ccttgtctacccatgaggcagcagg

SEQ ID NO: 5571798 - DNA, 25 bp, Homo sapien
aagacggctaaaattacctgaaata

SEQ ID NO: 5571799 - DNA, 25 bp, Homo sapien
tggccctggtatcagttccttgctc

SEQ ID NO: 5571800 - DNA, 25 bp, Homo sapien
ctcggctgtgtaaggttccacggaa

SEQ ID NO: 5571801 - DNA, 25 bp, Homo sapien
agcagattagctggaatgtgttctc

SEQ ID NO: 5571802 - DNA, 25 bp, Homo sapien
aggttttgctgtcgtgctggccctg

SEQ ID NO: 5571803 - DNA, 25 bp, Homo sapien
caaataggctaagtctcccacatgg

SEQ ID NO: 5571804 - DNA, 25 bp, Homo sapien
aggttccacggaaagtctcctatcc

SEQ ID NO: 5571805 - DNA, 25 bp, Homo sapien
agcaacacacaatccaaaacaacac

SEQ ID NO: 5571806 - DNA, 25 bp, Homo sapien
ttttcgatcaactccgccaggtctg

SEQ ID NO: 5571807 - DNA, 25 bp, Homo sapien
acttagacgccaacggagatggcga

SEQ ID NO: 5571808 - DNA, 25 bp, Homo sapien
gttaagctcaagaatgaggtctgac

SEQ ID NO: 5571809 - DNA, 25 bp, Homo sapien
aactcaaaaaattaacacaagcctg

SEQ ID NO: 5571810 - DNA, 25 bp, Homo sapien
atgaggtctgactttaaacgaccct

SEQ ID NO: 5571811 - DNA, 25 bp, Homo sapien
cacaagcctgatactaatatcgccc

SEQ ID NO: 5571812 - DNA, 25 bp, Homo sapien
ctaatatcgccctggacatcctgac

SEQ ID NO: 5571813 - DNA, 25 bp, Homo sapien
cctggacatcctgacagtgctcttc

SEQ ID NO: 5571814 - DNA, 25 bp, Homo sapien
actgtccacataagacgttaagctc

SEQ ID NO: 5571815 - DNA, 25 bp, Homo sapien
acaacaggagcaacacacaatccaa

SEQ ID NO: 5571816 - DNA, 25 bp, Homo sapien
aagggcctagtttggtgtctggcat

SEQ ID NO: 5571817 - DNA, 25 bp, Homo sapien
cttttgaaaattacacagcatcttt

SEQ ID NO: 5571818 - DNA, 25 bp, Homo sapien
agaaatacattgtgtgaaattgtcc

SEQ ID NO: 5571819 - DNA, 25 bp, Homo sapien
agtgtgtgaacattttggaagcttc

SEQ ID NO: 5571820 - DNA, 25 bp, Homo sapien
aatacagaatatcatgagattcaac

SEQ ID NO: 5571821 - DNA, 25 bp, Homo sapien
ttagtatacactgctagcatctgtg

SEQ ID NO: 5571822 - DNA, 25 bp, Homo sapien
gtttggtgtctggcatttagtatac

SEQ ID NO: 5571823 - DNA, 25 bp, Homo sapien
agcaaccctttgtggttgaagggcc

SEQ ID NO: 5571824 - DNA, 25 bp, Homo sapien
ctgtattagctgtatgtgagattgc

SEQ ID NO: 5571825 - DNA, 25 bp, Homo sapien
atagatacttggtctgtaatacaga

SEQ ID NO: 5571826 - DNA, 25 bp, Homo sapien
ttggaagcttcaagaaatacattgt

SEQ ID NO: 5571827 - DNA, 25 bp, Homo sapien
cagacagaaagcatggtataatcca

SEQ ID NO: 5571828 - DNA, 25 bp, Homo sapien
aagattagaaataagcatgactgtc

SEQ ID NO: 5571829 - DNA, 25 bp, Homo sapien
tctaagaaccccagctgaaggcttg

SEQ ID NO: 5571830 - DNA, 25 bp, Homo sapien
gctatcaggagattttccagacaga

SEQ ID NO: 5571831 - DNA, 25 bp, Homo sapien
ggttgagccacttaaagtagctgcc

SEQ ID NO: 5571832 - DNA, 25 bp, Homo sapien
agaagaactgaaaaaatttggccta

SEQ ID NO: 5571833 - DNA, 25 bp, Homo sapien
aacactggggttagttataagtcaa

SEQ ID NO: 5571834 - DNA, 25 bp, Homo sapien
gataagttaccaggttgagccactt

SEQ ID NO: 5571835 - DNA, 25 bp, Homo sapien
cgaatactttcaagggggaatatta

SEQ ID NO: 5571836 - DNA, 25 bp, Homo sapien
ggcgggataactaatggtcacattt

SEQ ID NO: 5571837 - DNA, 25 bp, Homo sapien
acagtgcgttatctaaaaacaggtc

SEQ ID NO: 5571838 - DNA, 25 bp, Homo sapien
acacaacagcacaccagaataaaac

SEQ ID NO: 5571839 - DNA, 25 bp, Homo sapien
atcaagaccaaaaagacaaccatat

SEQ ID NO: 5571840 - DNA, 25 bp, Homo sapien
ccattacatagatccgttccacctg

SEQ ID NO: 5571841 - DNA, 25 bp, Homo sapien
ctgcttggccccagaatgaacacat

SEQ ID NO: 5571842 - DNA, 25 bp, Homo sapien
gacaaccatatgagaacacaacagc

SEQ ID NO: 5571843 - DNA, 25 bp, Homo sapien
acgccgttcagaagagatccctgtt

SEQ ID NO: 5571844 - DNA, 25 bp, Homo sapien
aatgtcacgccgttcagaagagatc

SEQ ID NO: 5571845 - DNA, 25 bp, Homo sapien
agttgaggccgtaaacagcttttct

SEQ ID NO: 5571846 - DNA, 25 bp, Homo sapien
gcaaacatgatagggtagagaattt

SEQ ID NO: 5571847 - DNA, 25 bp, Homo sapien
tctgtactgcctccatactggcctc

SEQ ID NO: 5571848 - DNA, 25 bp, Homo sapien
ataagtgccactctccagttactgc

SEQ ID NO: 5571849 - DNA, 25 bp, Homo sapien
tggccatgctgcttccccacaggca

SEQ ID NO: 5571850 - DNA, 25 bp, Homo sapien
taggagctgatctagaatggtttct

SEQ ID NO: 5571851 - DNA, 25 bp, Homo sapien
acaccagttgacccctcttaggagt

SEQ ID NO: 5571852 - DNA, 25 bp, Homo sapien
cctagctccagttacgcagatgttt

SEQ ID NO: 5571853 - DNA, 25 bp, Homo sapien
caagcatgtgtttgtagcctggtat

SEQ ID NO: 5571854 - DNA, 25 bp, Homo sapien
tcttaggagtatctaggagctgatc

SEQ ID NO: 5571855 - DNA, 25 bp, Homo sapien
taaaatagaggataccagagcttat

SEQ ID NO: 5571856 - DNA, 25 bp, Homo sapien
gaaccaagggcaatttggagctttc

SEQ ID NO: 5571857 - DNA, 25 bp, Homo sapien
tactgcctgtggaagttgaggatat

SEQ ID NO: 5571858 - DNA, 25 bp, Homo sapien
agagcttatacagagaagacccttt

SEQ ID NO: 5571859 - DNA, 25 bp, Homo sapien
agcctggtatacccaacgtggttgt

SEQ ID NO: 5571860 - DNA, 25 bp, Homo sapien
aaggggatttcctcaggatgtgaag

SEQ ID NO: 5571861 - DNA, 25 bp, Homo sapien
gatttcctcaggatgtgaaggggga

SEQ ID NO: 5571862 - DNA, 25 bp, Homo sapien
gggcggtgttgcactaatcccagca

SEQ ID NO: 5571863 - DNA, 25 bp, Homo sapien
gtttcagagtcataaatgaaggcag

SEQ ID NO: 5571864 - DNA, 25 bp, Homo sapien
tgcatcagttggtcaccaggaaggg

SEQ ID NO: 5571865 - DNA, 25 bp, Homo sapien
tgaagggggagtcttcttgctttta

SEQ ID NO: 5571866 - DNA, 25 bp, Homo sapien
tgggggatgtttcagagtcataaat

SEQ ID NO: 5571867 - DNA, 25 bp, Homo sapien
ttctagacttggctgagagatgtga

SEQ ID NO: 5571868 - DNA, 25 bp, Homo sapien
tctagccagagcttctagacttggc

SEQ ID NO: 5571869 - DNA, 25 bp, Homo sapien
actaatcccagcatgcccgggctcg

SEQ ID NO: 5571870 - DNA, 25 bp, Homo sapien
ccctccctcgcttagttgaccccca

SEQ ID NO: 5571871 - DNA, 25 bp, Homo sapien
gaactgtacagcaaagcctgtgggg

SEQ ID NO: 5571872 - DNA, 25 bp, Homo sapien
ggacctggtcatttacagcaaagcc

SEQ ID NO: 5571873 - DNA, 25 bp, Homo sapien
ggtggtgacctgcaaatccagcctt

SEQ ID NO: 5571874 - DNA, 25 bp, Homo sapien
gttgtacattctaaaggacctggtc

SEQ ID NO: 5571875 - DNA, 25 bp, Homo sapien
aaatccagccttggagaatgaccgt

SEQ ID NO: 5571876 - DNA, 25 bp, Homo sapien
aatgaccgtccgaatctgcagcctg

SEQ ID NO: 5571877 - DNA, 25 bp, Homo sapien
agcggtgtctgctaaccagcctgct

SEQ ID NO: 5571878 - DNA, 25 bp, Homo sapien
tggatcccactgctggcgtcttaga

SEQ ID NO: 5571879 - DNA, 25 bp, Homo sapien
cctctgtctataggtaccggggtgg

SEQ ID NO: 5571880 - DNA, 25 bp, Homo sapien
agcaaagcctatggagggataattc

SEQ ID NO: 5571881 - DNA, 25 bp, Homo sapien
aaagaaatccagctcccagcttgca

SEQ ID NO: 5571882 - DNA, 25 bp, Homo sapien
gtgctgattagatgtttactgggtg

SEQ ID NO: 5571883 - DNA, 25 bp, Homo sapien
gaaagttcgtggtgctctgcccaga

SEQ ID NO: 5571884 - DNA, 25 bp, Homo sapien
atgaggatcctgcaggtgctgatta

SEQ ID NO: 5571885 - DNA, 25 bp, Homo sapien
aacccaaggcttgctcaggaattcc

SEQ ID NO: 5571886 - DNA, 25 bp, Homo sapien
gactgccagctcacgcctggtggga

SEQ ID NO: 5571887 - DNA, 25 bp, Homo sapien
ggcgagaaagcaaactccgtcatct

SEQ ID NO: 5571888 - DNA, 25 bp, Homo sapien
tgttggtagaaaataactcagggaa

SEQ ID NO: 5571889 - DNA, 25 bp, Homo sapien
caagtctgtatttagcgctggcctc

SEQ ID NO: 5571890 - DNA, 25 bp, Homo sapien
cccttccagagggacttcctagggc

SEQ ID NO: 5571891 - DNA, 25 bp, Homo sapien
actgggtgaagtagttctgccaagt

SEQ ID NO: 5571892 - DNA, 25 bp, Homo sapien
tgtctccctggggtttgaggcaggg

SEQ ID NO: 5571893 - DNA, 25 bp, Homo sapien
aaaggaaggacattctacacatcag

SEQ ID NO: 5571894 - DNA, 25 bp, Homo sapien
cagctggcctgtaattaaaagtgtc

SEQ ID NO: 5571895 - DNA, 25 bp, Homo sapien
atgctccaaaaaagggtacttgatt

SEQ ID NO: 5571896 - DNA, 25 bp, Homo sapien
aaggaaggacagaaaacatctccta

SEQ ID NO: 5571897 - DNA, 25 bp, Homo sapien
ggacattctacacatcagctggcct

SEQ ID NO: 5571898 - DNA, 25 bp, Homo sapien
tagctctcctcgtggcaggtaacac

SEQ ID NO: 5571899 - DNA, 25 bp, Homo sapien
taaaagtgtcagtgtcatgaaagat

SEQ ID NO: 5571900 - DNA, 25 bp, Homo sapien
agtgtcatgaaagatgaaggaagaa

SEQ ID NO: 5571901 - DNA, 25 bp, Homo sapien
gcagagcgcctagctctcctcgtgg

SEQ ID NO: 5571902 - DNA, 25 bp, Homo sapien
attaatgaagcgttgtaagagagag

SEQ ID NO: 5571903 - DNA, 25 bp, Homo sapien
gcaggtaacactagtggggttttca

SEQ ID NO: 5571904 - DNA, 25 bp, Homo sapien
aaaaaaaagtaacatccatggcttc

SEQ ID NO: 5571905 - DNA, 25 bp, Homo sapien
ggcagaaccaagtttgtttggaatc

SEQ ID NO: 5571906 - DNA, 25 bp, Homo sapien
gactgggaaatcatctgtgtgtaac

SEQ ID NO: 5571907 - DNA, 25 bp, Homo sapien
gtgactgagaaagatgataccctcg

SEQ ID NO: 5571908 - DNA, 25 bp, Homo sapien
tcgaatactaggggccaagaatgaa

SEQ ID NO: 5571909 - DNA, 25 bp, Homo sapien
tggatgattatgaccctaaaggtat

SEQ ID NO: 5571910 - DNA, 25 bp, Homo sapien
ttcaagtatctggcaaacaaattca

SEQ ID NO: 5571911 - DNA, 25 bp, Homo sapien
aggaaatctgatgtctctaagaacc

SEQ ID NO: 5571912 - DNA, 25 bp, Homo sapien
aaatgacaagatcactcatggaaac

SEQ ID NO: 5571913 - DNA, 25 bp, Homo sapien
gaagggaagcctggccactaattct

SEQ ID NO: 5571914 - DNA, 25 bp, Homo sapien
accagtataccaaagaaaagtgaat

SEQ ID NO: 5571915 - DNA, 25 bp, Homo sapien
ctcgtgcttctacatgcccaggcct

SEQ ID NO: 5571916 - DNA, 25 bp, Homo sapien
ctccagctgcatccaaccacgtgtg

SEQ ID NO: 5571917 - DNA, 25 bp, Homo sapien
catccaaccacgtgtgtgggctctc

SEQ ID NO: 5571918 - DNA, 25 bp, Homo sapien
atggtaaatgagtcatcagcctcgt

SEQ ID NO: 5571919 - DNA, 25 bp, Homo sapien
tcatcatgtctgaaagcactaatct

SEQ ID NO: 5571920 - DNA, 25 bp, Homo sapien
agcttgccttttcgagaccatgccc

SEQ ID NO: 5571921 - DNA, 25 bp, Homo sapien
acgtgtgtgggctctctcttggacg

SEQ ID NO: 5571922 - DNA, 25 bp, Homo sapien
tgctatgagttagggctccacaaat

SEQ ID NO: 5571923 - DNA, 25 bp, Homo sapien
ccacaggaaagcttgctatgagtta

SEQ ID NO: 5571924 - DNA, 25 bp, Homo sapien
ttgaagtcttccaatggtaaatgag

SEQ ID NO: 5571925 - DNA, 25 bp, Homo sapien
aagtgggttattagggctgccattt

SEQ ID NO: 5571926 - DNA, 25 bp, Homo sapien
aggtagatacaaaagggtaaagaca

SEQ ID NO: 5571927 - DNA, 25 bp, Homo sapien
ctggcacataagtctgaggtagagg

SEQ ID NO: 5571928 - DNA, 25 bp, Homo sapien
ctccaaaggctcatttaggtttccc

SEQ ID NO: 5571929 - DNA, 25 bp, Homo sapien
ggggccgctctggtatctgttgcag

SEQ ID NO: 5571930 - DNA, 25 bp, Homo sapien
gcactcaagccactcaagcggagaa

SEQ ID NO: 5571931 - DNA, 25 bp, Homo sapien
agcagaagtgcactcaagccactca

SEQ ID NO: 5571932 - DNA, 25 bp, Homo sapien
ctctgcccctgggcctatggaaagg

SEQ ID NO: 5571933 - DNA, 25 bp, Homo sapien
tatctgttgcagtctggctggggaa

SEQ ID NO: 5571934 - DNA, 25 bp, Homo sapien
tccctagccttaaccacctgcagat

SEQ ID NO: 5571935 - DNA, 25 bp, Homo sapien
agctggacacgctgtcccccacctc

SEQ ID NO: 5571936 - DNA, 25 bp, Homo sapien
agcttcagtctgcaagagtatccct

SEQ ID NO: 5571937 - DNA, 25 bp, Homo sapien
taaacctgcgtcagaaatgttgctg

SEQ ID NO: 5571938 - DNA, 25 bp, Homo sapien
gacagactctagctgcagcaactgc

SEQ ID NO: 5571939 - DNA, 25 bp, Homo sapien
attctttatcctggcagggagccct

SEQ ID NO: 5571940 - DNA, 25 bp, Homo sapien
tagggctaatcagcattaaacctgc

SEQ ID NO: 5571941 - DNA, 25 bp, Homo sapien
gcagctggcctatatgcaaaccaat

SEQ ID NO: 5571942 - DNA, 25 bp, Homo sapien
aacaagaaaatggtcctagtttgac

SEQ ID NO: 5571943 - DNA, 25 bp, Homo sapien
aacaaagctcttcaggaaagggatg

SEQ ID NO: 5571944 - DNA, 25 bp, Homo sapien
cagaaatgttgctgaaagcagccct

SEQ ID NO: 5571945 - DNA, 25 bp, Homo sapien
aagaccacagcaacaaagctcttca

SEQ ID NO: 5571946 - DNA, 25 bp, Homo sapien
aaagcatagctaattttctgggttt

SEQ ID NO: 5571947 - DNA, 25 bp, Homo sapien
gggatgacaaatgcagcagctatgt

SEQ ID NO: 5571948 - DNA, 25 bp, Homo sapien
tggctggggtaattgatcctgccca

SEQ ID NO: 5571949 - DNA, 25 bp, Homo sapien
tttgggctcctcacacctctgaatc

SEQ ID NO: 5571950 - DNA, 25 bp, Homo sapien
aaaataacaacaatccatacaggac

SEQ ID NO: 5571951 - DNA, 25 bp, Homo sapien
ctggaagttaagacagccacccagc

SEQ ID NO: 5571952 - DNA, 25 bp, Homo sapien
actgctacacaatggaggtaaggag

SEQ ID NO: 5571953 - DNA, 25 bp, Homo sapien
actgcatcagagaatcttgctccct

SEQ ID NO: 5571954 - DNA, 25 bp, Homo sapien
gagtatgtctggcttaaggagatcc

SEQ ID NO: 5571955 - DNA, 25 bp, Homo sapien
agccacccagccactttgggctcct

SEQ ID NO: 5571956 - DNA, 25 bp, Homo sapien
cttaggacatctctgtaccctgccc

SEQ ID NO: 5571957 - DNA, 25 bp, Homo sapien
gaactggaactgctacacaatggag

SEQ ID NO: 5571958 - DNA, 25 bp, Homo sapien
cctctgaatcaataggcaaggaagg

SEQ ID NO: 5571959 - DNA, 25 bp, Homo sapien
aggctcagacgaggttagactcgtt

SEQ ID NO: 5571960 - DNA, 25 bp, Homo sapien
aggtgacaggaccctatgcatgact

SEQ ID NO: 5571961 - DNA, 25 bp, Homo sapien
gcatctgcagatgaatgaacgttct

SEQ ID NO: 5571962 - DNA, 25 bp, Homo sapien
atcgaatttcccgtgaggctgacct

SEQ ID NO: 5571963 - DNA, 25 bp, Homo sapien
tcttttaggtgaacaaactgaggct

SEQ ID NO: 5571964 - DNA, 25 bp, Homo sapien
tcatcctgtaggaatgtgtgagcat

SEQ ID NO: 5571965 - DNA, 25 bp, Homo sapien
gctgcatgtggagatatcgaatttc

SEQ ID NO: 5571966 - DNA, 25 bp, Homo sapien
ggggtcagtctaccaggtgacagga

SEQ ID NO: 5571967 - DNA, 25 bp, Homo sapien
gagctgagctgtattccatgaggat

SEQ ID NO: 5571968 - DNA, 25 bp, Homo sapien
ggatggccaccataacccctgagaa

SEQ ID NO: 5571969 - DNA, 25 bp, Homo sapien
ccatgtggcatgacagctgcatgtg

SEQ ID NO: 5571970 - DNA, 25 bp, Homo sapien
tgccaaaagctacccatgtgaactc

SEQ ID NO: 5571971 - DNA, 25 bp, Homo sapien
cgtattgaaatagagagtgagatga

SEQ ID NO: 5571972 - DNA, 25 bp, Homo sapien
acaatctgcagcctgtgtggtgtgg

SEQ ID NO: 5571973 - DNA, 25 bp, Homo sapien
atgggagggaacaatgatttatccc

SEQ ID NO: 5571974 - DNA, 25 bp, Homo sapien
gagaaaatccaacatatcagagcca

SEQ ID NO: 5571975 - DNA, 25 bp, Homo sapien
tcgatatgggacttgcttgagaaaa

SEQ ID NO: 5571976 - DNA, 25 bp, Homo sapien
ataaggagaataattgctgctgcca

SEQ ID NO: 5571977 - DNA, 25 bp, Homo sapien
aagccctgctgttgaagtagaacgt

SEQ ID NO: 5571978 - DNA, 25 bp, Homo sapien
tctgagaactggcaactggttaaat

SEQ ID NO: 5571979 - DNA, 25 bp, Homo sapien
agaaaatgtacctatgggagggaac

SEQ ID NO: 5571980 - DNA, 25 bp, Homo sapien
catctgtagagtaataaggagaata

SEQ ID NO: 5571981 - DNA, 25 bp, Homo sapien
ggtcagggtaccaggtgccctgatc

SEQ ID NO: 5571982 - DNA, 25 bp, Homo sapien
ccccacacgcatgcaactgaccttc

SEQ ID NO: 5571983 - DNA, 25 bp, Homo sapien
gccctgatcactgtccctgcacccc

SEQ ID NO: 5571984 - DNA, 25 bp, Homo sapien
ggggaagctgtgatttcggccccca

SEQ ID NO: 5571985 - DNA, 25 bp, Homo sapien
aagtgcgcagacttgggcatcttaa

SEQ ID NO: 5571986 - DNA, 25 bp, Homo sapien
gccatcatcaagttggtcagggtac

SEQ ID NO: 5571987 - DNA, 25 bp, Homo sapien
agcccttgattggagcaggtgggct

SEQ ID NO: 5571988 - DNA, 25 bp, Homo sapien
ctccttgccgagaaactactgccat

SEQ ID NO: 5571989 - DNA, 25 bp, Homo sapien
ctccatgaggactcatcagggaagc

SEQ ID NO: 5571990 - DNA, 25 bp, Homo sapien
agtggcctcaggtttgttccagccc

SEQ ID NO: 5571991 - DNA, 25 bp, Homo sapien
atcagggaagcccccccaatcactt

SEQ ID NO: 5571992 - DNA, 25 bp, Homo sapien
ctgtaaacactgaccctgaaccccg

SEQ ID NO: 5571993 - DNA, 25 bp, Homo sapien
actagccaagtgacctttgagctca

SEQ ID NO: 5571994 - DNA, 25 bp, Homo sapien
ggggacgagaacagtatttgcctca

SEQ ID NO: 5571995 - DNA, 25 bp, Homo sapien
ctaccttgtgccagaaggcagagag

SEQ ID NO: 5571996 - DNA, 25 bp, Homo sapien
gcttccactagagctgacgcacatc

SEQ ID NO: 5571997 - DNA, 25 bp, Homo sapien
gggtgccagagtcttaatgcttcca

SEQ ID NO: 5571998 - DNA, 25 bp, Homo sapien
tgacgcacatcagttccgccacgtt

SEQ ID NO: 5571999 - DNA, 25 bp, Homo sapien
acagctagcatcaaagagtgagaac

SEQ ID NO: 5572000 - DNA, 25 bp, Homo sapien
tatttgtgtacaatgaggacccagc

SEQ ID NO: 5572001 - DNA, 25 bp, Homo sapien
aacacccttggcacagtgtggcaca

SEQ ID NO: 5572002 - DNA, 25 bp, Homo sapien
attggttaaagttggtcacatgtcc

SEQ ID NO: 5572003 - DNA, 25 bp, Homo sapien
tgctgacaccctatgaggtaacacc

SEQ ID NO: 5572004 - DNA, 25 bp, Homo sapien
tttggacgtggttctcaaaggtgag

SEQ ID NO: 5572005 - DNA, 25 bp, Homo sapien
gtgggcagcacttcgttatgttcgt

SEQ ID NO: 5572006 - DNA, 25 bp, Homo sapien
cctatgaggtaacaccaagctctgg

SEQ ID NO: 5572007 - DNA, 25 bp, Homo sapien
cagtgtgcccttcacaggccgtcgt

SEQ ID NO: 5572008 - DNA, 25 bp, Homo sapien
cctgttaatgaatgggtgtgctggg

SEQ ID NO: 5572009 - DNA, 25 bp, Homo sapien
ataaagcctgttaatgaatgggtgt

SEQ ID NO: 5572010 - DNA, 25 bp, Homo sapien
cccaagccgctgctgacaccctatg

SEQ ID NO: 5572011 - DNA, 25 bp, Homo sapien
actgtcatgttcttcagcatgctgc

SEQ ID NO: 5572012 - DNA, 25 bp, Homo sapien
ttcctagggtctgacctggcttccc

SEQ ID NO: 5572013 - DNA, 25 bp, Homo sapien
tgcaggtggcatgtccacgtctctc

SEQ ID NO: 5572014 - DNA, 25 bp, Homo sapien
ctgatggaccaagtcaccagtttct

SEQ ID NO: 5572015 - DNA, 25 bp, Homo sapien
ttgcagcaaactgtgcgtgtggaga

SEQ ID NO: 5572016 - DNA, 25 bp, Homo sapien
actaaacgagaatagaaagaacttc

SEQ ID NO: 5572017 - DNA, 25 bp, Homo sapien
tcaaaaacccagatctgaaattctc

SEQ ID NO: 5572018 - DNA, 25 bp, Homo sapien
ccccagagcaacacaaaccaataat

SEQ ID NO: 5572019 - DNA, 25 bp, Homo sapien
gagaggtaatgaggaatgcacatta

SEQ ID NO: 5572020 - DNA, 25 bp, Homo sapien
tgatttccaatttccccagagcaac

SEQ ID NO: 5572021 - DNA, 25 bp, Homo sapien
tctacagcatgcaacaatataaaat

SEQ ID NO: 5572022 - DNA, 25 bp, Homo sapien
acagagagccttacagagactgttc

SEQ ID NO: 5572023 - DNA, 25 bp, Homo sapien
gaaagaacttcgtgactgatggacc

SEQ ID NO: 5572024 - DNA, 25 bp, Homo sapien
tcttgaaaactaaacgagaatagaa

SEQ ID NO: 5572025 - DNA, 25 bp, Homo sapien
tctagccctggacaggaaaaggata

SEQ ID NO: 5572026 - DNA, 25 bp, Homo sapien
tatgactggaaaagacaaaatatat

SEQ ID NO: 5572027 - DNA, 25 bp, Homo sapien
tggtggttggtgacatttaggttat

SEQ ID NO: 5572028 - DNA, 25 bp, Homo sapien
tcccctgctcactggaggcaaagta

SEQ ID NO: 5572029 - DNA, 25 bp, Homo sapien
aaaggataccagatgcatagagtca

SEQ ID NO: 5572030 - DNA, 25 bp, Homo sapien
gtgaaatagaccaggacaaacttcc

SEQ ID NO: 5572031 - DNA, 25 bp, Homo sapien
caaacttcctgactggtggttggtg

SEQ ID NO: 5572032 - DNA, 25 bp, Homo sapien
agataaagatggtgaagtgaccttc

SEQ ID NO: 5572033 - DNA, 25 bp, Homo sapien
tgtggatcagagcccaaagccttta

SEQ ID NO: 5572034 - DNA, 25 bp, Homo sapien
gcatagagtcacagagcattaggac

SEQ ID NO: 5572035 - DNA, 25 bp, Homo sapien
ctggaggcaaagtaagtctcatacc

SEQ ID NO: 5572036 - DNA, 25 bp, Homo sapien
acccgggaggtcgacactactggtg

SEQ ID NO: 5572037 - DNA, 25 bp, Homo sapien
caccagtagtgtcgacctcccgggt

SEQ ID NO: 5572038 - DNA, 25 bp, Homo sapien
tctcctgaactgatatgcgtgattt

SEQ ID NO: 5572039 - DNA, 25 bp, Homo sapien
tggaaaagattcaacgtgtcaaaca

SEQ ID NO: 5572040 - DNA, 25 bp, Homo sapien
ctgctttagtggagccaactctctc

SEQ ID NO: 5572041 - DNA, 25 bp, Homo sapien
ggatgggactgagaatttctgcttt

SEQ ID NO: 5572042 - DNA, 25 bp, Homo sapien
tagaagaagtcagtgattgtggatg

SEQ ID NO: 5572043 - DNA, 25 bp, Homo sapien
cttggtagggggtatttttcatcta

SEQ ID NO: 5572044 - DNA, 25 bp, Homo sapien
tttcagaagacttgttagaagaagt

SEQ ID NO: 5572045 - DNA, 25 bp, Homo sapien
aaaattatatgcataggtaggttat

SEQ ID NO: 5572046 - DNA, 25 bp, Homo sapien
attagtaaagagattttcagaagac

SEQ ID NO: 5572047 - DNA, 25 bp, Homo sapien
ttcttacatgggctaccttggtagg

SEQ ID NO: 5572048 - DNA, 25 bp, Homo sapien
gatatgcgtgattttggtggttcct

SEQ ID NO: 5572049 - DNA, 25 bp, Homo sapien
cttgcttaggacaaatgtatcataa

SEQ ID NO: 5572050 - DNA, 25 bp, Homo sapien
aggcatgtgtatttatccagaagtt

SEQ ID NO: 5572051 - DNA, 25 bp, Homo sapien
taatggcctttcttgcttaggacaa

SEQ ID NO: 5572052 - DNA, 25 bp, Homo sapien
tgatagtatggtgggaaaataattc

SEQ ID NO: 5572053 - DNA, 25 bp, Homo sapien
atcataatcatcaagtgtgcgagct

SEQ ID NO: 5572054 - DNA, 25 bp, Homo sapien
catgatcatctgtccaccctgttgt

SEQ ID NO: 5572055 - DNA, 25 bp, Homo sapien
aaggtcaggatacataggcatgtgt

SEQ ID NO: 5572056 - DNA, 25 bp, Homo sapien
ctttgaaaggtcaggatacataggc

SEQ ID NO: 5572057 - DNA, 25 bp, Homo sapien
accagtgaactctttgaaaggtcag

SEQ ID NO: 5572058 - DNA, 25 bp, Homo sapien
atcttaaataatggatggttctgca

SEQ ID NO: 5572059 - DNA, 25 bp, Homo sapien
agtgtgcgagcttttctgtttacca

SEQ ID NO: 5572060 - DNA, 25 bp, Homo sapien
tcacagtaatgataatgaactaaaa

SEQ ID NO: 5572061 - DNA, 25 bp, Homo sapien
ttttagttcattatcattactgtga

SEQ ID NO: 5572062 - DNA, 25 bp, Homo sapien
aagaaataaagattagttgaaattg

SEQ ID NO: 5572063 - DNA, 25 bp, Homo sapien
atttgcacactgatataggaatgtt

SEQ ID NO: 5572064 - DNA, 25 bp, Homo sapien
aataattgagctcttacaaaggtca

SEQ ID NO: 5572065 - DNA, 25 bp, Homo sapien
ccaattcattgtcgtaaaaagccta

SEQ ID NO: 5572066 - DNA, 25 bp, Homo sapien
ggcactgacttcaagtagaagaaat

SEQ ID NO: 5572067 - DNA, 25 bp, Homo sapien
ttgtcgtaaaaagcctattgtctcc

SEQ ID NO: 5572068 - DNA, 25 bp, Homo sapien
gaatgtttgtggtagataggcactg

SEQ ID NO: 5572069 - DNA, 25 bp, Homo sapien
aaattgtattactcagaatggtgat

SEQ ID NO: 5572070 - DNA, 25 bp, Homo sapien
cagaatggtgatattccttgcttcc

SEQ ID NO: 5572071 - DNA, 25 bp, Homo sapien
tttgtggtagataggcactgacttc

SEQ ID NO: 5572072 - DNA, 25 bp, Homo sapien
acaaaggtcaatataaatacgactt

SEQ ID NO: 5572073 - DNA, 25 bp, Homo sapien
acaggagctgtagcattcagtgttc

SEQ ID NO: 5572074 - DNA, 25 bp, Homo sapien
agtgttcaatgttagcagtgactgc

SEQ ID NO: 5572075 - DNA, 25 bp, Homo sapien
tccaggcttcctagagcaatggctc

SEQ ID NO: 5572076 - DNA, 25 bp, Homo sapien
catcactgggcaacttgtaagaaag

SEQ ID NO: 5572077 - DNA, 25 bp, Homo sapien
gcagtgactgcaggttcgataaaat

SEQ ID NO: 5572078 - DNA, 25 bp, Homo sapien
ggcagggcttaggttgtgatcctga

SEQ ID NO: 5572079 - DNA, 25 bp, Homo sapien
gtgggacccagtaatcatgtgtgca

SEQ ID NO: 5572080 - DNA, 25 bp, Homo sapien
aggttcgataaaataggccagtggc

SEQ ID NO: 5572081 - DNA, 25 bp, Homo sapien
cagactgccttaagtggcagctgtc

SEQ ID NO: 5572082 - DNA, 25 bp, Homo sapien
ctcacactagcaatatcagcatcac

SEQ ID NO: 5572083 - DNA, 25 bp, Homo sapien
gcaatggctcttaaaatgtgatctc

SEQ ID NO: 5572084 - DNA, 25 bp, Homo sapien
gcacaggccacattagtgggcagag

SEQ ID NO: 5572085 - DNA, 25 bp, Homo sapien
tcttctctgtaaggcagggtctgca

SEQ ID NO: 5572086 - DNA, 25 bp, Homo sapien
agcaaacagtagaaacagcctcctg

SEQ ID NO: 5572087 - DNA, 25 bp, Homo sapien
ttcctgctccaaggttagtggggtg

SEQ ID NO: 5572088 - DNA, 25 bp, Homo sapien
taagaaaactgattaagaagggaga

SEQ ID NO: 5572089 - DNA, 25 bp, Homo sapien
tggtgttaccaattccccgagtgtc

SEQ ID NO: 5572090 - DNA, 25 bp, Homo sapien
gaaaaagtagtccaattgaagctgc

SEQ ID NO: 5572091 - DNA, 25 bp, Homo sapien
aactaagaggcttcacctgaggatt

SEQ ID NO: 5572092 - DNA, 25 bp, Homo sapien
acctggactgctcagctgcagtgtg

SEQ ID NO: 5572093 - DNA, 25 bp, Homo sapien
cctgaggattggtggttatacttgc

SEQ ID NO: 5572094 - DNA, 25 bp, Homo sapien
ggagagaagagacatccgctgtctc

SEQ ID NO: 5572095 - DNA, 25 bp, Homo sapien
gccctggctccctggtggttttctc

SEQ ID NO: 5572096 - DNA, 25 bp, Homo sapien
gagccagatgcttgggccaagagta

SEQ ID NO: 5572097 - DNA, 25 bp, Homo sapien
ggtcaagcaagtaggtccagttcag

SEQ ID NO: 5572098 - DNA, 25 bp, Homo sapien
cctgaatcctaggatggtccccagc

SEQ ID NO: 5572099 - DNA, 25 bp, Homo sapien
tgtcaagcttagctggtcagccagc

SEQ ID NO: 5572100 - DNA, 25 bp, Homo sapien
gcagatttgggttttcagaggccag

SEQ ID NO: 5572101 - DNA, 25 bp, Homo sapien
aaacccagcttccctgtccaggccc

SEQ ID NO: 5572102 - DNA, 25 bp, Homo sapien
ggcctgttggatattagaagatctc

SEQ ID NO: 5572103 - DNA, 25 bp, Homo sapien
gtcctttccctggagcgaggtgtag

SEQ ID NO: 5572104 - DNA, 25 bp, Homo sapien
agggagaggctccaaatgactccaa

SEQ ID NO: 5572105 - DNA, 25 bp, Homo sapien
tagaagatctctagagccagatgct

SEQ ID NO: 5572106 - DNA, 25 bp, Homo sapien
ttggtgatctagcaatgaacaaaac

SEQ ID NO: 5572107 - DNA, 25 bp, Homo sapien
ttcatggaattaggcattatagagg

SEQ ID NO: 5572108 - DNA, 25 bp, Homo sapien
gacattgagaagcgcacacagcttc

SEQ ID NO: 5572109 - DNA, 25 bp, Homo sapien
ctcactattgggaaaacgagggtag

SEQ ID NO: 5572110 - DNA, 25 bp, Homo sapien
atgtgttagcccttggtgatctagc

SEQ ID NO: 5572111 - DNA, 25 bp, Homo sapien
tttcaaaattagagagtggtgcata

SEQ ID NO: 5572112 - DNA, 25 bp, Homo sapien
tggtgacagctgttatgtgttagcc

SEQ ID NO: 5572113 - DNA, 25 bp, Homo sapien
ggagtggaacagggaataccctgta

SEQ ID NO: 5572114 - DNA, 25 bp, Homo sapien
ctgtatgcagagtacacagtggaag

SEQ ID NO: 5572115 - DNA, 25 bp, Homo sapien
agggacctcaccacagtgctgctca

SEQ ID NO: 5572116 - DNA, 25 bp, Homo sapien
tgcatactgtgtaggagtggaacag

SEQ ID NO: 5572117 - DNA, 25 bp, Homo sapien
gtgaaacctttcgatcttaaatgat

SEQ ID NO: 5572118 - DNA, 25 bp, Homo sapien
atcatttaagatcgaaaggtttcac

SEQ ID NO: 5572119 - DNA, 25 bp, Homo sapien
gcttgggaatcatgccgattggttc

SEQ ID NO: 5572120 - DNA, 25 bp, Homo sapien
tggcagtccttcagtttcgggagct

SEQ ID NO: 5572121 - DNA, 25 bp, Homo sapien
agccagcagaacttgctctgggacc

SEQ ID NO: 5572122 - DNA, 25 bp, Homo sapien
gaggcacctgcctcccatccagacc

SEQ ID NO: 5572123 - DNA, 25 bp, Homo sapien
tctttctggttgaaggtcctgggag

SEQ ID NO: 5572124 - DNA, 25 bp, Homo sapien
ttgcagggatatgcgcatatgctct

SEQ ID NO: 5572125 - DNA, 25 bp, Homo sapien
tggagggtcttgactccctagcttg

SEQ ID NO: 5572126 - DNA, 25 bp, Homo sapien
attcctttgccggtaaaattggctc

SEQ ID NO: 5572127 - DNA, 25 bp, Homo sapien
ggtggccaaaagcttgagcttggga

SEQ ID NO: 5572128 - DNA, 25 bp, Homo sapien
gctcctcgatgcttgtgggatcgcc

SEQ ID NO: 5572129 - DNA, 25 bp, Homo sapien
tgtgggatcgcctagcctttcagat

SEQ ID NO: 5572130 - DNA, 25 bp, Homo sapien
ctatctaacggtcttcgtcgtgccc

SEQ ID NO: 5572131 - DNA, 25 bp, Homo sapien
gggcacgacgaagaccgttagatag

SEQ ID NO: 5572132 - DNA, 25 bp, Homo sapien
ggcggtgtttcaggtacacgcatgt

SEQ ID NO: 5572133 - DNA, 25 bp, Homo sapien
caatgaaccaatagaaacagagagg

SEQ ID NO: 5572134 - DNA, 25 bp, Homo sapien
cccagatccatttggcgagggcatg

SEQ ID NO: 5572135 - DNA, 25 bp, Homo sapien
gtcctgacttcagagctgtggctaa

SEQ ID NO: 5572136 - DNA, 25 bp, Homo sapien
agggagaggctttagatacagtttt

SEQ ID NO: 5572137 - DNA, 25 bp, Homo sapien
tgtggctaactctgtgatggaggga

SEQ ID NO: 5572138 - DNA, 25 bp, Homo sapien
acagccaagaaagatgctaagtgtc

SEQ ID NO: 5572139 - DNA, 25 bp, Homo sapien
atggagcagcattctaacttgcccc

SEQ ID NO: 5572140 - DNA, 25 bp, Homo sapien
ttagtggtggtatatcatcctctcc

SEQ ID NO: 5572141 - DNA, 25 bp, Homo sapien
ggaatgggtatgtggtacttgcatt

SEQ ID NO: 5572142 - DNA, 25 bp, Homo sapien
gtaaatataggcaaacttagcagac

SEQ ID NO: 5572143 - DNA, 25 bp, Homo sapien
ctgacacaggttcctggtggaatac

SEQ ID NO: 5572144 - DNA, 25 bp, Homo sapien
gggcggaccatggtttgattccaga

SEQ ID NO: 5572145 - DNA, 25 bp, Homo sapien
gagcagtttttggttccagggaggc

SEQ ID NO: 5572146 - DNA, 25 bp, Homo sapien
ggtggaatacctcaaatgtcgactt

SEQ ID NO: 5572147 - DNA, 25 bp, Homo sapien
ggctgcaccgtccgtccctccagca

SEQ ID NO: 5572148 - DNA, 25 bp, Homo sapien
ttccagatgtgaagttagaaaaaac

SEQ ID NO: 5572149 - DNA, 25 bp, Homo sapien
tggtactcttgacagctaagctctc

SEQ ID NO: 5572150 - DNA, 25 bp, Homo sapien
atgtcgacttcctgaggtggttgct

SEQ ID NO: 5572151 - DNA, 25 bp, Homo sapien
ccactggccgtgcatgcagaagtgg

SEQ ID NO: 5572152 - DNA, 25 bp, Homo sapien
aaccaccttgatctcatgaggagca

SEQ ID NO: 5572153 - DNA, 25 bp, Homo sapien
catgaggagcaaatagtaatagtag

SEQ ID NO: 5572154 - DNA, 25 bp, Homo sapien
aaaagtggtctagtccataagcctc

SEQ ID NO: 5572155 - DNA, 25 bp, Homo sapien
gctacagtgagcaatctgacacaat

SEQ ID NO: 5572156 - DNA, 25 bp, Homo sapien
caaggcttgccttcagccctgattc

SEQ ID NO: 5572157 - DNA, 25 bp, Homo sapien
gtcatggctgataaggtaaagccct

SEQ ID NO: 5572158 - DNA, 25 bp, Homo sapien
ctggagtgagagacctacattgaga

SEQ ID NO: 5572159 - DNA, 25 bp, Homo sapien
taacagccatgaaaaatgtgggcaa

SEQ ID NO: 5572160 - DNA, 25 bp, Homo sapien
gagagacctacattgagaccagatt

SEQ ID NO: 5572161 - DNA, 25 bp, Homo sapien
caagtaagtggcactcaaggcttgc

SEQ ID NO: 5572162 - DNA, 25 bp, Homo sapien
cccaaacctagtcaatccaacccac

SEQ ID NO: 5572163 - DNA, 25 bp, Homo sapien
cagaagccacaaagaactctgtctt

SEQ ID NO: 5572164 - DNA, 25 bp, Homo sapien
cttggatggcaagttacagaagcca

SEQ ID NO: 5572165 - DNA, 25 bp, Homo sapien
tggtgtgtctaaatggcacttcctt

SEQ ID NO: 5572166 - DNA, 25 bp, Homo sapien
catgtagctgagtgactagcctcgg

SEQ ID NO: 5572167 - DNA, 25 bp, Homo sapien
ctgcaccaggcctttatggtgtgtc

SEQ ID NO: 5572168 - DNA, 25 bp, Homo sapien
cgatcacctgaagtacatgcccaac

SEQ ID NO: 5572169 - DNA, 25 bp, Homo sapien
agaaactggttaaatgaatagtgtg

SEQ ID NO: 5572170 - DNA, 25 bp, Homo sapien
cttagagacctttccgatcacctga

SEQ ID NO: 5572171 - DNA, 25 bp, Homo sapien
aacgaaattcgacttccaagagggc

SEQ ID NO: 5572172 - DNA, 25 bp, Homo sapien
actagcctcggctacgtgtcagtgg

SEQ ID NO: 5572173 - DNA, 25 bp, Homo sapien
tccaagagggcaagaaccttatttg

SEQ ID NO: 5572174 - DNA, 25 bp, Homo sapien
tattcctgacatgtagctgagtgac

SEQ ID NO: 5572175 - DNA, 25 bp, Homo sapien
aagtacatgcccaacagaccatccc

SEQ ID NO: 5572176 - DNA, 25 bp, Homo sapien
caagtgaaaaccagatataagtgct

SEQ ID NO: 5572177 - DNA, 25 bp, Homo sapien
tgagaagattagtgaactagaacac

SEQ ID NO: 5572178 - DNA, 25 bp, Homo sapien
attagtctgaaatgatgagaagatt

SEQ ID NO: 5572179 - DNA, 25 bp, Homo sapien
aatatacaacatatgtgtgaaacat

SEQ ID NO: 5572180 - DNA, 25 bp, Homo sapien
aaatgtgcagtgttccaaaaagaga

SEQ ID NO: 5572181 - DNA, 25 bp, Homo sapien
ctaaaatatacatgtatgacaggga

SEQ ID NO: 5572182 - DNA, 25 bp, Homo sapien
atgagatggagtaaaacaagtctga

SEQ ID NO: 5572183 - DNA, 25 bp, Homo sapien
ttacttaaaacgggctgcataacac

SEQ ID NO: 5572184 - DNA, 25 bp, Homo sapien
attcagagttggtgactcataagtt

SEQ ID NO: 5572185 - DNA, 25 bp, Homo sapien
ctagaacactaagcagtaattaatt

SEQ ID NO: 5572186 - DNA, 25 bp, Homo sapien
aaaatcaaagtcagtattcagagtt

SEQ ID NO: 5572187 - DNA, 25 bp, Homo sapien
ggagcagctgtgcaccgtgtctcca

SEQ ID NO: 5572188 - DNA, 25 bp, Homo sapien
agatgtgtctctctggagcagctgt

SEQ ID NO: 5572189 - DNA, 25 bp, Homo sapien
tgctgtgctggactgtaactgccca

SEQ ID NO: 5572190 - DNA, 25 bp, Homo sapien
aggcccccaagactcagaggccaaa

SEQ ID NO: 5572191 - DNA, 25 bp, Homo sapien
tggactgtaactgcccagatgtgtc

SEQ ID NO: 5572192 - DNA, 25 bp, Homo sapien
cttgactatgcattgggagcaccga

SEQ ID NO: 5572193 - DNA, 25 bp, Homo sapien
tggtgatgccctggtttaagagcac

SEQ ID NO: 5572194 - DNA, 25 bp, Homo sapien
accacatctaacacgcaggtggcac

SEQ ID NO: 5572195 - DNA, 25 bp, Homo sapien
aggccaaagctgccctgtccaacct

SEQ ID NO: 5572196 - DNA, 25 bp, Homo sapien
tccaagaagcctgaccttgactccc

SEQ ID NO: 5572197 - DNA, 25 bp, Homo sapien
tgtgccctgcctgacttgtgtattt

SEQ ID NO: 5572198 - DNA, 25 bp, Homo sapien
caggagcttggcccacagttcaact

SEQ ID NO: 5572199 - DNA, 25 bp, Homo sapien
atgtagggtttctgtactgaagggg

SEQ ID NO: 5572200 - DNA, 25 bp, Homo sapien
cacatgctactgagaaagccggttg

SEQ ID NO: 5572201 - DNA, 25 bp, Homo sapien
tcagttgtcgtggctctaaccagtc

SEQ ID NO: 5572202 - DNA, 25 bp, Homo sapien
aaatgggcggtgaacttcccgctgt

SEQ ID NO: 5572203 - DNA, 25 bp, Homo sapien
tttcgctgtgagaacctggcagcat

SEQ ID NO: 5572204 - DNA, 25 bp, Homo sapien
tcccgggagtccttagctctcagac

SEQ ID NO: 5572205 - DNA, 25 bp, Homo sapien
atacatgaaaccgaagccgacttta

SEQ ID NO: 5572206 - DNA, 25 bp, Homo sapien
cacaagagcatggagacctcctgtg

SEQ ID NO: 5572207 - DNA, 25 bp, Homo sapien
caacttctcaacaggtgagcgggca

SEQ ID NO: 5572208 - DNA, 25 bp, Homo sapien
ctgtttggtgtcacgaagccgatac

SEQ ID NO: 5572209 - DNA, 25 bp, Homo sapien
taagctacctatgaggtggacgttc

SEQ ID NO: 5572210 - DNA, 25 bp, Homo sapien
caggagcctacaatctcaagcaaag

SEQ ID NO: 5572211 - DNA, 25 bp, Homo sapien
ggcacgggaaaacccagtgatcaat

SEQ ID NO: 5572212 - DNA, 25 bp, Homo sapien
tggagtccttcccacaggagcctac

SEQ ID NO: 5572213 - DNA, 25 bp, Homo sapien
tgagtactttatctaggctggatcc

SEQ ID NO: 5572214 - DNA, 25 bp, Homo sapien
ccagtgatcaatgcgatggagtcct

SEQ ID NO: 5572215 - DNA, 25 bp, Homo sapien
tgtgagccctcctgacttcgattcc

SEQ ID NO: 5572216 - DNA, 25 bp, Homo sapien
gaagaggaatctgtagctcaataaa

SEQ ID NO: 5572217 - DNA, 25 bp, Homo sapien
cacaaagttctatggatggcacggg

SEQ ID NO: 5572218 - DNA, 25 bp, Homo sapien
aaaacgtatcaagcacagtgcagag

SEQ ID NO: 5572219 - DNA, 25 bp, Homo sapien
catgtctacatcacaccccaggccc

SEQ ID NO: 5572220 - DNA, 25 bp, Homo sapien
attgggaagtgactgatgctttact

SEQ ID NO: 5572221 - DNA, 25 bp, Homo sapien
gcatgtgtgacaaaacttgacatcc

SEQ ID NO: 5572222 - DNA, 25 bp, Homo sapien
gagacaactttgtagctgctgttct

SEQ ID NO: 5572223 - DNA, 25 bp, Homo sapien
ccatatgcaggacattgggaagtga

SEQ ID NO: 5572224 - DNA, 25 bp, Homo sapien
aagaatctgataaacacaactagtc

SEQ ID NO: 5572225 - DNA, 25 bp, Homo sapien
ttgacatccaatgatcagaccctcc

SEQ ID NO: 5572226 - DNA, 25 bp, Homo sapien
cagaggactgactgtagttagttat

SEQ ID NO: 5572227 - DNA, 25 bp, Homo sapien
tgcagtactttgagaacgaaatggt

SEQ ID NO: 5572228 - DNA, 25 bp, Homo sapien
tgctttcccattgagcaggctgctc

SEQ ID NO: 5572229 - DNA, 25 bp, Homo sapien
accctccttggattacagacacctc

SEQ ID NO: 5572230 - DNA, 25 bp, Homo sapien
ggggctccaccatatgcaggacatt

SEQ ID NO: 5572231 - DNA, 25 bp, Homo sapien
tacaaatgaaaccaaatccatattc

SEQ ID NO: 5572232 - DNA, 25 bp, Homo sapien
ttaacataaatgcagtcagggtcaa

SEQ ID NO: 5572233 - DNA, 25 bp, Homo sapien
aatatgaatatacagagtaagaaat

SEQ ID NO: 5572234 - DNA, 25 bp, Homo sapien
taagacaatatagagcctgggctca

SEQ ID NO: 5572235 - DNA, 25 bp, Homo sapien
cttgtaagacaatatagagcctggg

SEQ ID NO: 5572236 - DNA, 25 bp, Homo sapien
gaatgactgttctgacttgggggca

SEQ ID NO: 5572237 - DNA, 25 bp, Homo sapien
ttggtactgggaccaatcattcatc

SEQ ID NO: 5572238 - DNA, 25 bp, Homo sapien
cagtcagggtcaaagactttccacc

SEQ ID NO: 5572239 - DNA, 25 bp, Homo sapien
tctgaaagacttagcgaatgactgt

SEQ ID NO: 5572240 - DNA, 25 bp, Homo sapien
cttgggggcaatccaagttaagtga

SEQ ID NO: 5572241 - DNA, 25 bp, Homo sapien
aagttaagtgaatttagagttaatc

SEQ ID NO: 5572242 - DNA, 25 bp, Homo sapien
agacaggataaaggttaggaattct

SEQ ID NO: 5572243 - DNA, 25 bp, Homo sapien
atgaaaaaggaactatgtataactg

SEQ ID NO: 5572244 - DNA, 25 bp, Homo sapien
atccttagcgtattttgtgtcaccc

SEQ ID NO: 5572245 - DNA, 25 bp, Homo sapien
atttaccaacatgaaaaaggaacta

SEQ ID NO: 5572246 - DNA, 25 bp, Homo sapien
tctcctagctcaagcttgtccaacc

SEQ ID NO: 5572247 - DNA, 25 bp, Homo sapien
acaaaagatagtttatcctggcgat

SEQ ID NO: 5572248 - DNA, 25 bp, Homo sapien
taaagctactagagacaggataaag

SEQ ID NO: 5572249 - DNA, 25 bp, Homo sapien
agactttcagaaaacaagctgtacc

SEQ ID NO: 5572250 - DNA, 25 bp, Homo sapien
tatcctggcgatatcatttcacact

SEQ ID NO: 5572251 - DNA, 25 bp, Homo sapien
caacccagagcccacaacagctttg

SEQ ID NO: 5572252 - DNA, 25 bp, Homo sapien
acaagctgtaccagttaaagctact

SEQ ID NO: 5572253 - DNA, 25 bp, Homo sapien
aacatccactactgggaggactagc

SEQ ID NO: 5572254 - DNA, 25 bp, Homo sapien
tgattgtagagttattggaccacca

SEQ ID NO: 5572255 - DNA, 25 bp, Homo sapien
aaagtgggctttgtaaagatggagt

SEQ ID NO: 5572256 - DNA, 25 bp, Homo sapien
agccttaaaggacattaaagtgggc

SEQ ID NO: 5572257 - DNA, 25 bp, Homo sapien
aagctggaaaacaagaagaacttat

SEQ ID NO: 5572258 - DNA, 25 bp, Homo sapien
tgcctcagattgaaacaagagtgat

SEQ ID NO: 5572259 - DNA, 25 bp, Homo sapien
gagtgatattggttcaagaagctgg

SEQ ID NO: 5572260 - DNA, 25 bp, Homo sapien
gaggactagcttggcagactcttcc

SEQ ID NO: 5572261 - DNA, 25 bp, Homo sapien
aatttgaaggtttggattctccgga

SEQ ID NO: 5572262 - DNA, 25 bp, Homo sapien
ttcatatgtagaagaagagatgcct

SEQ ID NO: 5572263 - DNA, 25 bp, Homo sapien
tagtcacggactttcaggattctgt

SEQ ID NO: 5572264 - DNA, 25 bp, Homo sapien
gtaacctggtgtaattacatggtat

SEQ ID NO: 5572265 - DNA, 25 bp, Homo sapien
tagatcatcatcaaggaatagaata

SEQ ID NO: 5572266 - DNA, 25 bp, Homo sapien
caaggaatagaataaagctgaaata

SEQ ID NO: 5572267 - DNA, 25 bp, Homo sapien
acatagtgctgggcatagaagtaaa

SEQ ID NO: 5572268 - DNA, 25 bp, Homo sapien
atgcaaattaggtatggcagagggt

SEQ ID NO: 5572269 - DNA, 25 bp, Homo sapien
catgaagggctttgaccacagttat

SEQ ID NO: 5572270 - DNA, 25 bp, Homo sapien
tcttggactgttagagcccagattt

SEQ ID NO: 5572271 - DNA, 25 bp, Homo sapien
gtcaaggtacatgaagggctttgac

SEQ ID NO: 5572272 - DNA, 25 bp, Homo sapien
tgagccttaggacaattatgcaaat

SEQ ID NO: 5572273 - DNA, 25 bp, Homo sapien
ttaattttgcagaatgtagatcatc

SEQ ID NO: 5572274 - DNA, 25 bp, Homo sapien
tatgataatgataaaaaatacagct

SEQ ID NO: 5572275 - DNA, 25 bp, Homo sapien
tgagcttgggctcagtttttggtct

SEQ ID NO: 5572276 - DNA, 25 bp, Homo sapien
tgggctcagtttttggtctggagct

SEQ ID NO: 5572277 - DNA, 25 bp, Homo sapien
acatttagagttgtgtcttcattca

SEQ ID NO: 5572278 - DNA, 25 bp, Homo sapien
cagttctgcggctgtgtttctggct

SEQ ID NO: 5572279 - DNA, 25 bp, Homo sapien
cacatagcgtccatggttccacatt

SEQ ID NO: 5572280 - DNA, 25 bp, Homo sapien
tggctcacatagcgtccatggttcc

SEQ ID NO: 5572281 - DNA, 25 bp, Homo sapien
tgcagaatgtacaagtgggccttgt

SEQ ID NO: 5572282 - DNA, 25 bp, Homo sapien
gggctcagttctgcggctgtgtttc

SEQ ID NO: 5572283 - DNA, 25 bp, Homo sapien
cttgtttttctggacggctagggag

SEQ ID NO: 5572284 - DNA, 25 bp, Homo sapien
gctagggagcacactggctcacata

SEQ ID NO: 5572285 - DNA, 25 bp, Homo sapien
gtggtcactttgcctgggccagtcc

SEQ ID NO: 5572286 - DNA, 25 bp, Homo sapien
tacttgttcctaactccatgagcta

SEQ ID NO: 5572287 - DNA, 25 bp, Homo sapien
tatatctgagagtgaagtgttaaat

SEQ ID NO: 5572288 - DNA, 25 bp, Homo sapien
ctaaacagtgggtttatgggtatga

SEQ ID NO: 5572289 - DNA, 25 bp, Homo sapien
aaaaagaatctaaaaagtcagctaa

SEQ ID NO: 5572290 - DNA, 25 bp, Homo sapien
actgcaaccccaacctcccgcactc

SEQ ID NO: 5572291 - DNA, 25 bp, Homo sapien
actcactgtcaggcacactctgata

SEQ ID NO: 5572292 - DNA, 25 bp, Homo sapien
caacctcccgcactcaggtcatcct

SEQ ID NO: 5572293 - DNA, 25 bp, Homo sapien
ttaagaactagaaatcccgtatata

SEQ ID NO: 5572294 - DNA, 25 bp, Homo sapien
gggtttatgggtatgatcctgagtt

SEQ ID NO: 5572295 - DNA, 25 bp, Homo sapien
cccgtatatatctgagaactacatc

SEQ ID NO: 5572296 - DNA, 25 bp, Homo sapien
tcatccaaagagagtagatattttc

SEQ ID NO: 5572297 - DNA, 25 bp, Homo sapien
ttcaagtcgctacaacactattatc

SEQ ID NO: 5572298 - DNA, 25 bp, Homo sapien
tatgaaacaaggtcttaaatgattt

SEQ ID NO: 5572299 - DNA, 25 bp, Homo sapien
acaaatagtgactggcacaatcaca

SEQ ID NO: 5572300 - DNA, 25 bp, Homo sapien
ttgacagtctgtgcctaaaggattc

SEQ ID NO: 5572301 - DNA, 25 bp, Homo sapien
tatggaacactttcttgagtggcaa

SEQ ID NO: 5572302 - DNA, 25 bp, Homo sapien
agtggcaaacaaggatattatgatc

SEQ ID NO: 5572303 - DNA, 25 bp, Homo sapien
tattatctgatgctgacaaagtttc

SEQ ID NO: 5572304 - DNA, 25 bp, Homo sapien
actgaaatacagcttagaaatctaa

SEQ ID NO: 5572305 - DNA, 25 bp, Homo sapien
taatttagggcaataagctcaatat

SEQ ID NO: 5572306 - DNA, 25 bp, Homo sapien
caaagtttcatatgttcccagtgtt

SEQ ID NO: 5572307 - DNA, 25 bp, Homo sapien
gtcatatcaaggttcaatccaagtc

SEQ ID NO: 5572308 - DNA, 25 bp, Homo sapien
tcgtcgtctttgtcgggtctcgtcg

SEQ ID NO: 5572309 - DNA, 25 bp, Homo sapien
cgacgagacccgacaaagacgacga

SEQ ID NO: 5572310 - DNA, 25 bp, Homo sapien
aaatggcaaaagcaatttcccccca

SEQ ID NO: 5572311 - DNA, 25 bp, Homo sapien
actagagtaaaagaaaaattgagat

SEQ ID NO: 5572312 - DNA, 25 bp, Homo sapien
aggaagtcagtaggagatccttttt

SEQ ID NO: 5572313 - DNA, 25 bp, Homo sapien
aacaataataattaggaaggaagtc

SEQ ID NO: 5572314 - DNA, 25 bp, Homo sapien
tggattagttgcttgtgaaatggcc

SEQ ID NO: 5572315 - DNA, 25 bp, Homo sapien
tgagactgaacaaaacttagcctcc

SEQ ID NO: 5572316 - DNA, 25 bp, Homo sapien
aattgagattcgaatacacacgcat

SEQ ID NO: 5572317 - DNA, 25 bp, Homo sapien
tgaacacagatataaacggtggcac

SEQ ID NO: 5572318 - DNA, 25 bp, Homo sapien
tctgggaaatctacacaaagtgaat

SEQ ID NO: 5572319 - DNA, 25 bp, Homo sapien
caatgaaacatcagtctgggaaatc

SEQ ID NO: 5572320 - DNA, 25 bp, Homo sapien
tcaggtctcttaaagcgggcttcca

SEQ ID NO: 5572321 - DNA, 25 bp, Homo sapien
ggtggagagcaccccttattagagg

SEQ ID NO: 5572322 - DNA, 25 bp, Homo sapien
tctggggagccaatcgtgctttatg

SEQ ID NO: 5572323 - DNA, 25 bp, Homo sapien
taccagccacgtgcatgcagggctg

SEQ ID NO: 5572324 - DNA, 25 bp, Homo sapien
acttcctaggagatcccaattgctc

SEQ ID NO: 5572325 - DNA, 25 bp, Homo sapien
gaaccagagactcacagcactgtgt

SEQ ID NO: 5572326 - DNA, 25 bp, Homo sapien
tgctcctcagatagggtggagagca

SEQ ID NO: 5572327 - DNA, 25 bp, Homo sapien
attcaagggttgtgctacaaaaatc

SEQ ID NO: 5572328 - DNA, 25 bp, Homo sapien
actgccctaccgtgcatccactgcc

SEQ ID NO: 5572329 - DNA, 25 bp, Homo sapien
cagagtgacatgaaccagagactca

SEQ ID NO: 5572330 - DNA, 25 bp, Homo sapien
tgagacatagcagtcacaacatgcc

SEQ ID NO: 5572331 - DNA, 25 bp, Homo sapien
aaaacctctttgtgctggagcagcc

SEQ ID NO: 5572332 - DNA, 25 bp, Homo sapien
gtagtgcaggcacccaagattaaca

SEQ ID NO: 5572333 - DNA, 25 bp, Homo sapien
gtgatgttccttagtttgaagcaca

SEQ ID NO: 5572334 - DNA, 25 bp, Homo sapien
tttaaaatcaagtgtagtgcaggca

SEQ ID NO: 5572335 - DNA, 25 bp, Homo sapien
aagtatactgtcacccagaaaattt

SEQ ID NO: 5572336 - DNA, 25 bp, Homo sapien
caagattaacaagcaataaggactt

SEQ ID NO: 5572337 - DNA, 25 bp, Homo sapien
aataaggacttaactgtggatggta

SEQ ID NO: 5572338 - DNA, 25 bp, Homo sapien
tttaaacagcaagcatgacatattc

SEQ ID NO: 5572339 - DNA, 25 bp, Homo sapien
aaggtcatatgatcaactagtggcc

SEQ ID NO: 5572340 - DNA, 25 bp, Homo sapien
ttgcatgtgattagttaggaatttt

SEQ ID NO: 5572341 - DNA, 25 bp, Homo sapien
ttgaagcacatcaaaacctgaattt

SEQ ID NO: 5572342 - DNA, 25 bp, Homo sapien
ttcccaattacaacaaggtcacaat

SEQ ID NO: 5572343 - DNA, 25 bp, Homo sapien
gccaccaccagacaacacaagtgct

SEQ ID NO: 5572344 - DNA, 25 bp, Homo sapien
tagcatttgcatggtttgtgagccc

SEQ ID NO: 5572345 - DNA, 25 bp, Homo sapien
gtgcacacagagatagcatgaaatc

SEQ ID NO: 5572346 - DNA, 25 bp, Homo sapien
agcatgaaatcattctacagtgaaa

SEQ ID NO: 5572347 - DNA, 25 bp, Homo sapien
tacagtgaaaataatagcctctgga

SEQ ID NO: 5572348 - DNA, 25 bp, Homo sapien
gctttgaaaatcagagatggtgcca

SEQ ID NO: 5572349 - DNA, 25 bp, Homo sapien
aatagcctctggaaaaagctttgaa

SEQ ID NO: 5572350 - DNA, 25 bp, Homo sapien
aaatcagagatggtgccaccaccag

SEQ ID NO: 5572351 - DNA, 25 bp, Homo sapien
gtttgtgagccccatttaatgacat

SEQ ID NO: 5572352 - DNA, 25 bp, Homo sapien
acagagacacaagtcctcatatatg

SEQ ID NO: 5572353 - DNA, 25 bp, Homo sapien
gcagccctccatgcatctcatagca

SEQ ID NO: 5572354 - DNA, 25 bp, Homo sapien
taatcgatttaggtggagcctgagg

SEQ ID NO: 5572355 - DNA, 25 bp, Homo sapien
gcttaatcgatttaggtggagcctg

SEQ ID NO: 5572356 - DNA, 25 bp, Homo sapien
ctgactgcatgaatggcaggagtcg

SEQ ID NO: 5572357 - DNA, 25 bp, Homo sapien
gggctgactgcatgaatggcaggag

SEQ ID NO: 5572358 - DNA, 25 bp, Homo sapien
gctgtccttgagttaggggcaggac

SEQ ID NO: 5572359 - DNA, 25 bp, Homo sapien
gagcttaatcgatttaggtggagcc

SEQ ID NO: 5572360 - DNA, 25 bp, Homo sapien
gaggctgagcttaatcgatttaggt

SEQ ID NO: 5572361 - DNA, 25 bp, Homo sapien
gggtctgaggctgagcttaatcgat

SEQ ID NO: 5572362 - DNA, 25 bp, Homo sapien
gctgactgcatgaatggcaggagtc

SEQ ID NO: 5572363 - DNA, 25 bp, Homo sapien
ctgaggctgagcttaatcgatttag

SEQ ID NO: 5572364 - DNA, 25 bp, Homo sapien
gtccttgagttaggggcaggactta

SEQ ID NO: 5572365 - DNA, 25 bp, Homo sapien
aatgaatagacaatgtgcccttacc

SEQ ID NO: 5572366 - DNA, 25 bp, Homo sapien
gtctggcattaatatagctacactg

SEQ ID NO: 5572367 - DNA, 25 bp, Homo sapien
gagggcagaaactaagttgaccaag

SEQ ID NO: 5572368 - DNA, 25 bp, Homo sapien
atgaagtgcatacagatttagaaat

SEQ ID NO: 5572369 - DNA, 25 bp, Homo sapien
cccacctccctcatcacagccaccc

SEQ ID NO: 5572370 - DNA, 25 bp, Homo sapien
taagttgaccaagcacgtctcttcc

SEQ ID NO: 5572371 - DNA, 25 bp, Homo sapien
ccacccagtgtgatgcattcagcat

SEQ ID NO: 5572372 - DNA, 25 bp, Homo sapien
ttgtgagcttatgtcatgaagtgca

SEQ ID NO: 5572373 - DNA, 25 bp, Homo sapien
ttgtggggaggtatctctcacttga

SEQ ID NO: 5572374 - DNA, 25 bp, Homo sapien
tctcttcctattgggctgcggcacc

SEQ ID NO: 5572375 - DNA, 25 bp, Homo sapien
gagaggtactcaacagatgtgtggt

SEQ ID NO: 5572376 - DNA, 25 bp, Homo sapien
ctgtacaaggaaaactgttaccctg

SEQ ID NO: 5572377 - DNA, 25 bp, Homo sapien
tagcctcagcaatgactcaaagtct

SEQ ID NO: 5572378 - DNA, 25 bp, Homo sapien
tttaagacaagcctctcatgaaagc

SEQ ID NO: 5572379 - DNA, 25 bp, Homo sapien
aggtatcccaggactgtgaagtgat

SEQ ID NO: 5572380 - DNA, 25 bp, Homo sapien
gtatgaacaaacacactagaagtca

SEQ ID NO: 5572381 - DNA, 25 bp, Homo sapien
atctggactgctagactaaatctct

SEQ ID NO: 5572382 - DNA, 25 bp, Homo sapien
gattgcccaacaaccaagtatgaac

SEQ ID NO: 5572383 - DNA, 25 bp, Homo sapien
tctaaagtgacgatatagcctcagc

SEQ ID NO: 5572384 - DNA, 25 bp, Homo sapien
agaggaacagatgacctcagagata

SEQ ID NO: 5572385 - DNA, 25 bp, Homo sapien
ctctcatgaaagctgaggtgaagag

SEQ ID NO: 5572386 - DNA, 25 bp, Homo sapien
gtagccactgactccagatacatct

SEQ ID NO: 5572387 - DNA, 25 bp, Homo sapien
cggatttcttgtgaactggtgtggt

SEQ ID NO: 5572388 - DNA, 25 bp, Homo sapien
atgttttcaccttgagagatgctct

SEQ ID NO: 5572389 - DNA, 25 bp, Homo sapien
ccctgacctgtcatgcctctccaca

SEQ ID NO: 5572390 - DNA, 25 bp, Homo sapien
atccagcctaaccaatgcctgagct

SEQ ID NO: 5572391 - DNA, 25 bp, Homo sapien
tcttgcacgtaacccctgacctgtc

SEQ ID NO: 5572392 - DNA, 25 bp, Homo sapien
atcatctccgtaaaccccaaggaaa

SEQ ID NO: 5572393 - DNA, 25 bp, Homo sapien
taactgccaggcactactgccagct

SEQ ID NO: 5572394 - DNA, 25 bp, Homo sapien
aattcaggtagtcgagttccagagt

SEQ ID NO: 5572395 - DNA, 25 bp, Homo sapien
tgcccaagggcatccagcctaacca

SEQ ID NO: 5572396 - DNA, 25 bp, Homo sapien
aaactgagtcatgtggatactaaat

SEQ ID NO: 5572397 - DNA, 25 bp, Homo sapien
gttccagagttcttgcacgtaaccc

SEQ ID NO: 5572398 - DNA, 25 bp, Homo sapien
gaggagccgttcgaactgtctcacc

SEQ ID NO: 5572399 - DNA, 25 bp, Homo sapien
gcagctcccgtaagtcagatgttgt

SEQ ID NO: 5572400 - DNA, 25 bp, Homo sapien
ttcagatctgcggagtgtatcactt

SEQ ID NO: 5572401 - DNA, 25 bp, Homo sapien
attattataaacataagggtggact

SEQ ID NO: 5572402 - DNA, 25 bp, Homo sapien
atccagtcaagcacaattatgccca

SEQ ID NO: 5572403 - DNA, 25 bp, Homo sapien
tacgatggtaaatgcagtttgctgt

SEQ ID NO: 5572404 - DNA, 25 bp, Homo sapien
atgaagattctgaagggtctttgtt

SEQ ID NO: 5572405 - DNA, 25 bp, Homo sapien
tgtgtcacttgcaggtgctatggtc

SEQ ID NO: 5572406 - DNA, 25 bp, Homo sapien
ttgctgtgtcttcaaagtgactctt

SEQ ID NO: 5572407 - DNA, 25 bp, Homo sapien
ataataaatctgcttgttgtgtcac

SEQ ID NO: 5572408 - DNA, 25 bp, Homo sapien
gtctcaccacttccctgcagctccc

SEQ ID NO: 5572409 - DNA, 25 bp, Homo sapien
caaaactagactggtgggtcttgtc

SEQ ID NO: 5572410 - DNA, 25 bp, Homo sapien
tataataataaaggccggtgcgtct

SEQ ID NO: 5572411 - DNA, 25 bp, Homo sapien
gcactgtgtgcacctcggtcatggg

SEQ ID NO: 5572412 - DNA, 25 bp, Homo sapien
gggagtagatgatgccttgctctga

SEQ ID NO: 5572413 - DNA, 25 bp, Homo sapien
aaaaagtcaagaataatgacgccat

SEQ ID NO: 5572414 - DNA, 25 bp, Homo sapien
caagttatgctgccgcctcactggc

SEQ ID NO: 5572415 - DNA, 25 bp, Homo sapien
tcctattcaagagggcactgtgtgc

SEQ ID NO: 5572416 - DNA, 25 bp, Homo sapien
ggaagagatggtaagatataagtcc

SEQ ID NO: 5572417 - DNA, 25 bp, Homo sapien
ctggaatctggggccagactctcag

SEQ ID NO: 5572418 - DNA, 25 bp, Homo sapien
tgggctgtccgcacatctggaatct

SEQ ID NO: 5572419 - DNA, 25 bp, Homo sapien
tctaatgccaagaaataaagacaca

SEQ ID NO: 5572420 - DNA, 25 bp, Homo sapien
gccataggaagggctcttcccgtac

SEQ ID NO: 5572421 - DNA, 25 bp, Homo sapien
atcagaattgccaggaaaggtttat

SEQ ID NO: 5572422 - DNA, 25 bp, Homo sapien
aagatggtatgaagggttcttgatc

SEQ ID NO: 5572423 - DNA, 25 bp, Homo sapien
taattgcaactaaggggatctttcc

SEQ ID NO: 5572424 - DNA, 25 bp, Homo sapien
gccagaaagagagaggttttcatca

SEQ ID NO: 5572425 - DNA, 25 bp, Homo sapien
ccaggctactgatcatgtaagcagc

SEQ ID NO: 5572426 - DNA, 25 bp, Homo sapien
taaaatcatgctgcaagagaggaca

SEQ ID NO: 5572427 - DNA, 25 bp, Homo sapien
gtaagcagcaagcatttcagccccg

SEQ ID NO: 5572428 - DNA, 25 bp, Homo sapien
gagcagttgagactttgggtaatca

SEQ ID NO: 5572429 - DNA, 25 bp, Homo sapien
agaaaactgaagggatttgagtcca

SEQ ID NO: 5572430 - DNA, 25 bp, Homo sapien
atttgagtccagaaggagaaatttg

SEQ ID NO: 5572431 - DNA, 25 bp, Homo sapien
aacaaatcaggaagtcccagtgaac

SEQ ID NO: 5572432 - DNA, 25 bp, Homo sapien
gtcaagatatattgtgggggatttt

SEQ ID NO: 5572433 - DNA, 25 bp, Homo sapien
tgctaagattcatacgcccgggttc

SEQ ID NO: 5572434 - DNA, 25 bp, Homo sapien
aattgataaaaggttttgagcatct

SEQ ID NO: 5572435 - DNA, 25 bp, Homo sapien
agacaagccccagggttgctcagaa

SEQ ID NO: 5572436 - DNA, 25 bp, Homo sapien
cagtgaactaggaacttcgtgtgtg

SEQ ID NO: 5572437 - DNA, 25 bp, Homo sapien
ttcgtgtgtgtttgtaacggcagaa

SEQ ID NO: 5572438 - DNA, 25 bp, Homo sapien
aacagagcttctaggtgagaaggag

SEQ ID NO: 5572439 - DNA, 25 bp, Homo sapien
aatcctgtcctatgagacaagcccc

SEQ ID NO: 5572440 - DNA, 25 bp, Homo sapien
cgcccgggttctaaatctaatattc

SEQ ID NO: 5572441 - DNA, 25 bp, Homo sapien
ttgtaacggcagaaatggaatcaat

SEQ ID NO: 5572442 - DNA, 25 bp, Homo sapien
cagactccagcacctatgccacttt

SEQ ID NO: 5572443 - DNA, 25 bp, Homo sapien
ctccacactcaccctgcagactcca

SEQ ID NO: 5572444 - DNA, 25 bp, Homo sapien
caggaatgtcccagcggaattgtca

SEQ ID NO: 5572445 - DNA, 25 bp, Homo sapien
aaggggaagcagttgtccttctcta

SEQ ID NO: 5572446 - DNA, 25 bp, Homo sapien
gttgtccttctctaggctgagggag

SEQ ID NO: 5572447 - DNA, 25 bp, Homo sapien
ccatcacatgagccacgtggtgagt

SEQ ID NO: 5572448 - DNA, 25 bp, Homo sapien
gtcctctggaggcttgaagattatc

SEQ ID NO: 5572449 - DNA, 25 bp, Homo sapien
ctggaggcttgaagattatccccct

SEQ ID NO: 5572450 - DNA, 25 bp, Homo sapien
cttcaagcagatttactcccagttc

SEQ ID NO: 5572451 - DNA, 25 bp, Homo sapien
aatgaggagaacttcaagcagattt

SEQ ID NO: 5572452 - DNA, 25 bp, Homo sapien
cggaaggggattttgtctctgccct

SEQ ID NO: 5572453 - DNA, 25 bp, Homo sapien
cttgcctcttgtgtgatagaacttc

SEQ ID NO: 5572454 - DNA, 25 bp, Homo sapien
aggtgtgcaaacgtgactgaagttt

SEQ ID NO: 5572455 - DNA, 25 bp, Homo sapien
tcacaaataggctgatttcccaccc

SEQ ID NO: 5572456 - DNA, 25 bp, Homo sapien
gcctgtgaagatcataaaactggac

SEQ ID NO: 5572457 - DNA, 25 bp, Homo sapien
gatagaacttccagtcagaaggttt

SEQ ID NO: 5572458 - DNA, 25 bp, Homo sapien
caaaagaagaccaaattgagaaccc

SEQ ID NO: 5572459 - DNA, 25 bp, Homo sapien
tcccctgcccgcaaatcggtgttcc

SEQ ID NO: 5572460 - DNA, 25 bp, Homo sapien
aaatgcaatagcctgtgaagatcat

SEQ ID NO: 5572461 - DNA, 25 bp, Homo sapien
tcacactcagacagaaaaaaagcag

SEQ ID NO: 5572462 - DNA, 25 bp, Homo sapien
cccaaaaaatcagatgcccaggcgg

SEQ ID NO: 5572463 - DNA, 25 bp, Homo sapien
gtgactgaagttttcccctgcccgc

SEQ ID NO: 5572464 - DNA, 25 bp, Homo sapien
gaagatcctggatgttgttcagtta

SEQ ID NO: 5572465 - DNA, 25 bp, Homo sapien
cccttaagaatggtgaaattaaatc

SEQ ID NO: 5572466 - DNA, 25 bp, Homo sapien
tatagcagctaaactcaatgaagat

SEQ ID NO: 5572467 - DNA, 25 bp, Homo sapien
ttttgaataatggcacttgactttt

SEQ ID NO: 5572468 - DNA, 25 bp, Homo sapien
cagggcagctggttaaagctgatac

SEQ ID NO: 5572469 - DNA, 25 bp, Homo sapien
tcccgtcccctcacatagtattccc

SEQ ID NO: 5572470 - DNA, 25 bp, Homo sapien
gacagccactataaagtactccccc

SEQ ID NO: 5572471 - DNA, 25 bp, Homo sapien
acccagaaacatggaacacagggca

SEQ ID NO: 5572472 - DNA, 25 bp, Homo sapien
caagtgtcagtaacaaagatgattt

SEQ ID NO: 5572473 - DNA, 25 bp, Homo sapien
atctagaatgcaaacctacatgcta

SEQ ID NO: 5572474 - DNA, 25 bp, Homo sapien
atttgtatgtggcttgcagtcttcc

SEQ ID NO: 5572475 - DNA, 25 bp, Homo sapien
gagagaacagaagatgccttttgga

SEQ ID NO: 5572476 - DNA, 25 bp, Homo sapien
caggtggatgctgaagcaatgtaat

SEQ ID NO: 5572477 - DNA, 25 bp, Homo sapien
ggttgagttcagttgagagacccga

SEQ ID NO: 5572478 - DNA, 25 bp, Homo sapien
agaagcaaccaaaacagtcagtgac

SEQ ID NO: 5572479 - DNA, 25 bp, Homo sapien
tccggctctcatcggtgaggcacaa

SEQ ID NO: 5572480 - DNA, 25 bp, Homo sapien
ctgtaacccctggatggagcaatag

SEQ ID NO: 5572481 - DNA, 25 bp, Homo sapien
tctatgaaaagagcactggataggg

SEQ ID NO: 5572482 - DNA, 25 bp, Homo sapien
ttgaagccaggctgtgtgaccttca

SEQ ID NO: 5572483 - DNA, 25 bp, Homo sapien
gcagggattatgagagataacatgc

SEQ ID NO: 5572484 - DNA, 25 bp, Homo sapien
atgccttttggagcccgagaggctt

SEQ ID NO: 5572485 - DNA, 25 bp, Homo sapien
aatcaatcaaggaagggttgagttc

SEQ ID NO: 5572486 - DNA, 25 bp, Homo sapien
ggacttccgacgaatctcttcgagc

SEQ ID NO: 5572487 - DNA, 25 bp, Homo sapien
gctcgaagagattcgtcggaagtcc

SEQ ID NO: 5572488 - DNA, 25 bp, Homo sapien
gtcacctaaaggtatctgagatgat

SEQ ID NO: 5572489 - DNA, 25 bp, Homo sapien
gcaagttaagagcacgtgaagaata

SEQ ID NO: 5572490 - DNA, 25 bp, Homo sapien
atctcaggagatgatttgtaagcag

SEQ ID NO: 5572491 - DNA, 25 bp, Homo sapien
agtaactgaatcaatggtgggagga

SEQ ID NO: 5572492 - DNA, 25 bp, Homo sapien
tggctctgaatatgcaaagggatcc

SEQ ID NO: 5572493 - DNA, 25 bp, Homo sapien
tttgtaagcagcaagttaagagcac

SEQ ID NO: 5572494 - DNA, 25 bp, Homo sapien
cactaagcaatgggcagaaaaatgg

SEQ ID NO: 5572495 - DNA, 25 bp, Homo sapien
ctggtgaatacaatgtctcagtaac

SEQ ID NO: 5572496 - DNA, 25 bp, Homo sapien
catgaaccactaagcaatgggcaga

SEQ ID NO: 5572497 - DNA, 25 bp, Homo sapien
gttcaaagttagcatctcaggagat

SEQ ID NO: 5572498 - DNA, 25 bp, Homo sapien
tgggcaggtctatagtggctctgaa

SEQ ID NO: 5572499 - DNA, 25 bp, Homo sapien
aagcgtctaatcacggtacccccac

SEQ ID NO: 5572500 - DNA, 25 bp, Homo sapien
tcgctgctgcttgtacccgtcctcg

SEQ ID NO: 5572501 - DNA, 25 bp, Homo sapien
gcgcggtagtttcagctgtagccaa

SEQ ID NO: 5572502 - DNA, 25 bp, Homo sapien
gcgctgggagcattaattctggtag

SEQ ID NO: 5572503 - DNA, 25 bp, Homo sapien
cacacagcaaatcataggcaggagt

SEQ ID NO: 5572504 - DNA, 25 bp, Homo sapien
cgagctttgaatcaagcgcggtagt

SEQ ID NO: 5572505 - DNA, 25 bp, Homo sapien
tccgttacgactcagaggacggaga

SEQ ID NO: 5572506 - DNA, 25 bp, Homo sapien
ggtacccccacgagtagtagtcaca

SEQ ID NO: 5572507 - DNA, 25 bp, Homo sapien
cgctgcaagccccgagctttgaatc

SEQ ID NO: 5572508 - DNA, 25 bp, Homo sapien
cagttgttgctgaggcctagatctc

SEQ ID NO: 5572509 - DNA, 25 bp, Homo sapien
ttcctcagtatccaggccggaagga

SEQ ID NO: 5572510 - DNA, 25 bp, Homo sapien
acacctactatagaccaggtaccgc

SEQ ID NO: 5572511 - DNA, 25 bp, Homo sapien
tatcctccaaggtgaaacgtgcaac

SEQ ID NO: 5572512 - DNA, 25 bp, Homo sapien
ctatagaccaggtaccgctgagatg

SEQ ID NO: 5572513 - DNA, 25 bp, Homo sapien
caggtaccgctgagatgtcagatat

SEQ ID NO: 5572514 - DNA, 25 bp, Homo sapien
gtcagatataaacagtgaagaagat

SEQ ID NO: 5572515 - DNA, 25 bp, Homo sapien
actttcattcaaggaggggagatag

SEQ ID NO: 5572516 - DNA, 25 bp, Homo sapien
ctctgagttaacgtgtgacattgac

SEQ ID NO: 5572517 - DNA, 25 bp, Homo sapien
atatatcctccaaggtgaaacgtgc

SEQ ID NO: 5572518 - DNA, 25 bp, Homo sapien
gaaggcctctctgagttaacgtgtg

SEQ ID NO: 5572519 - DNA, 25 bp, Homo sapien
gaagataaggtacctgcccgagtaa

SEQ ID NO: 5572520 - DNA, 25 bp, Homo sapien
acctgcccgagtaaaactttcattc

SEQ ID NO: 5572521 - DNA, 25 bp, Homo sapien
gccgtgtccgagagtctccgacaat

SEQ ID NO: 5572522 - DNA, 25 bp, Homo sapien
attgtcggagactctcggacacggc

SEQ ID NO: 5572523 - DNA, 25 bp, Homo sapien
aacatgtttatactgctactccatc

SEQ ID NO: 5572524 - DNA, 25 bp, Homo sapien
caggttcacaaatatcccagttctc

SEQ ID NO: 5572525 - DNA, 25 bp, Homo sapien
agctaaagcaaaatctgccagtatt

SEQ ID NO: 5572526 - DNA, 25 bp, Homo sapien
tagtcctactccatggaagcaaaat

SEQ ID NO: 5572527 - DNA, 25 bp, Homo sapien
caacgcttctcaccactagtcctac

SEQ ID NO: 5572528 - DNA, 25 bp, Homo sapien
tttatgatatagctaaagcaaaatc

SEQ ID NO: 5572529 - DNA, 25 bp, Homo sapien
ctctttgctgctaagccaagtgtgg

SEQ ID NO: 5572530 - DNA, 25 bp, Homo sapien
actgcagtttcctattcaacgcttc

SEQ ID NO: 5572531 - DNA, 25 bp, Homo sapien
ctattgtgacagatgttaatttccc

SEQ ID NO: 5572532 - DNA, 25 bp, Homo sapien
caacaagactctttgctgctaagcc

SEQ ID NO: 5572533 - DNA, 25 bp, Homo sapien
ccactatctattccccccctcccca

SEQ ID NO: 5572534 - DNA, 25 bp, Homo sapien
tgaacttgttgggaccatttcgacg

SEQ ID NO: 5572535 - DNA, 25 bp, Homo sapien
cgtcgaaatggtcccaacaagttca

SEQ ID NO: 5572536 - DNA, 25 bp, Homo sapien
cctccagcttagccttggggagcag

SEQ ID NO: 5572537 - DNA, 25 bp, Homo sapien
gagtgtttcagatgcgttaaaaatc

SEQ ID NO: 5572538 - DNA, 25 bp, Homo sapien
gtgcccaatgcaaagcggctctgta

SEQ ID NO: 5572539 - DNA, 25 bp, Homo sapien
agcagcagactgaagagtgtttcag

SEQ ID NO: 5572540 - DNA, 25 bp, Homo sapien
agaggattaactgtgatggccccag

SEQ ID NO: 5572541 - DNA, 25 bp, Homo sapien
gcattatgaacccttgtgtacccac

SEQ ID NO: 5572542 - DNA, 25 bp, Homo sapien
tagggcactccgaccttagaggatt

SEQ ID NO: 5572543 - DNA, 25 bp, Homo sapien
aaaaatccaggtagagacgttaaga

SEQ ID NO: 5572544 - DNA, 25 bp, Homo sapien
tgaagtaaaccccagacatctgatc

SEQ ID NO: 5572545 - DNA, 25 bp, Homo sapien
ccagggtcttctaatagggcactcc

SEQ ID NO: 5572546 - DNA, 25 bp, Homo sapien
gcacacagggtatgtacagactgga

SEQ ID NO: 5572547 - DNA, 25 bp, Homo sapien
cgcaagtcaaattccaggagggtct

SEQ ID NO: 5572548 - DNA, 25 bp, Homo sapien
aggcacttgttggtctgcaaggcat

SEQ ID NO: 5572549 - DNA, 25 bp, Homo sapien
gtctgacatgccttccaggagctgc

SEQ ID NO: 5572550 - DNA, 25 bp, Homo sapien
cctcgatgcagttgagacgtaggtt

SEQ ID NO: 5572551 - DNA, 25 bp, Homo sapien
cccaccgtccagcccgatgtggttg

SEQ ID NO: 5572552 - DNA, 25 bp, Homo sapien
ctggccaatgaggtactcgctttcc

SEQ ID NO: 5572553 - DNA, 25 bp, Homo sapien
agctcattgccaccgaggtgcagcg

SEQ ID NO: 5572554 - DNA, 25 bp, Homo sapien
ggtgggctcagacagctcattgcca

SEQ ID NO: 5572555 - DNA, 25 bp, Homo sapien
aggagggtcttgttgtctgacatgc

SEQ ID NO: 5572556 - DNA, 25 bp, Homo sapien
ggtgcacgcacctggttgttagcca

SEQ ID NO: 5572557 - DNA, 25 bp, Homo sapien
ggccacatctgacaggcgcaagtca

SEQ ID NO: 5572558 - DNA, 25 bp, Homo sapien
gagcctcggcgtcaaaatgacaacc

SEQ ID NO: 5572559 - DNA, 25 bp, Homo sapien
gctgtatgttctcgggcctcagttt

SEQ ID NO: 5572560 - DNA, 25 bp, Homo sapien
gcaaacgtgcccctcaaatccttcc

SEQ ID NO: 5572561 - DNA, 25 bp, Homo sapien
cccacaccccacttggcggttcatc

SEQ ID NO: 5572562 - DNA, 25 bp, Homo sapien
gagagccgagtgtctcatagaggct

SEQ ID NO: 5572563 - DNA, 25 bp, Homo sapien
tggcacatgctggctgtatgttctc

SEQ ID NO: 5572564 - DNA, 25 bp, Homo sapien
agtgtctcatagaggctcctggtgt

SEQ ID NO: 5572565 - DNA, 25 bp, Homo sapien
tttattgaaggttcctgtgtgcggg

SEQ ID NO: 5572566 - DNA, 25 bp, Homo sapien
ggacattaaattaggagatgaacct

SEQ ID NO: 5572567 - DNA, 25 bp, Homo sapien
cggttcatctggggccctggaatca

SEQ ID NO: 5572568 - DNA, 25 bp, Homo sapien
atgccatgttaggcaaacgtgcccc

SEQ ID NO: 5572569 - DNA, 25 bp, Homo sapien
tacctaagagtactgtcccctgcac

SEQ ID NO: 5572570 - DNA, 25 bp, Homo sapien
ttccccacacagtggccagagtgat

SEQ ID NO: 5572571 - DNA, 25 bp, Homo sapien
tgtggtgataaaaggtatttgcagc

SEQ ID NO: 5572572 - DNA, 25 bp, Homo sapien
tctgctcctggaccgttccccacac

SEQ ID NO: 5572573 - DNA, 25 bp, Homo sapien
tcacagatcatagtgtcggagaccc

SEQ ID NO: 5572574 - DNA, 25 bp, Homo sapien
ctgtcccctgcacaagaaggcactg

SEQ ID NO: 5572575 - DNA, 25 bp, Homo sapien
tcacaaaatgaactggattgaattc

SEQ ID NO: 5572576 - DNA, 25 bp, Homo sapien
gagtgatccgatctgacaatgccac

SEQ ID NO: 5572577 - DNA, 25 bp, Homo sapien
gatctgacccttgatagaagcagtt

SEQ ID NO: 5572578 - DNA, 25 bp, Homo sapien
tacaaagccctacctgatctgaccc

SEQ ID NO: 5572579 - DNA, 25 bp, Homo sapien
tggggaagtcaaacactctgctcct

SEQ ID NO: 5572580 - DNA, 25 bp, Homo sapien
ctaagaggaccaccaacttcccagt

SEQ ID NO: 5572581 - DNA, 25 bp, Homo sapien
cacatgaatgtgattgccttgattt

SEQ ID NO: 5572582 - DNA, 25 bp, Homo sapien
aaaaccagtgcaatcatcctcaagg

SEQ ID NO: 5572583 - DNA, 25 bp, Homo sapien
ttgatttatcagggactaagaggac

SEQ ID NO: 5572584 - DNA, 25 bp, Homo sapien
aagcaactgacttcaaaaccagtgc

SEQ ID NO: 5572585 - DNA, 25 bp, Homo sapien
gacatatctatgcggttacacaatt

SEQ ID NO: 5572586 - DNA, 25 bp, Homo sapien
agagaatacaaactgctaaacatca

SEQ ID NO: 5572587 - DNA, 25 bp, Homo sapien
cctcaaggtatgaaggataaggtct

SEQ ID NO: 5572588 - DNA, 25 bp, Homo sapien
aagacagatttagcaacaggataca

SEQ ID NO: 5572589 - DNA, 25 bp, Homo sapien
gtttcaccaagggtctaagacagat

SEQ ID NO: 5572590 - DNA, 25 bp, Homo sapien
tcccagtaagtagaaagcctgaact

SEQ ID NO: 5572591 - DNA, 25 bp, Homo sapien
taagaataagattttgtggtgattt

SEQ ID NO: 5572592 - DNA, 25 bp, Homo sapien
agaagggcctttcacacacagattc

SEQ ID NO: 5572593 - DNA, 25 bp, Homo sapien
gaagactgattgctcaacaagggct

SEQ ID NO: 5572594 - DNA, 25 bp, Homo sapien
aaatattaaacagaagggcctttca

SEQ ID NO: 5572595 - DNA, 25 bp, Homo sapien
tgcacaggcatttctcagtactctt

SEQ ID NO: 5572596 - DNA, 25 bp, Homo sapien
tgaatcaagacacctttgcctgcac

SEQ ID NO: 5572597 - DNA, 25 bp, Homo sapien
gtcaaggatttattaactgcactgc

SEQ ID NO: 5572598 - DNA, 25 bp, Homo sapien
acaagggctgtgattagtgcactgt

SEQ ID NO: 5572599 - DNA, 25 bp, Homo sapien
tctgactgagaatgtgctttaagct

SEQ ID NO: 5572600 - DNA, 25 bp, Homo sapien
cacagattcagcgttaaaaagcctc

SEQ ID NO: 5572601 - DNA, 25 bp, Homo sapien
taaagccagaaagaatcaattgttt

SEQ ID NO: 5572602 - DNA, 25 bp, Homo sapien
agtctcagaatcaaagaaagaacat

SEQ ID NO: 5572603 - DNA, 25 bp, Homo sapien
gtaatgaaccacgtgcactgctcac

SEQ ID NO: 5572604 - DNA, 25 bp, Homo sapien
ggtagcagtggactcaaccattccc

SEQ ID NO: 5572605 - DNA, 25 bp, Homo sapien
cctgctggggtccccagacccggaa

SEQ ID NO: 5572606 - DNA, 25 bp, Homo sapien
tgcgcagccatggatttggagtaga

SEQ ID NO: 5572607 - DNA, 25 bp, Homo sapien
gactggtccgactctgcaacctggc

SEQ ID NO: 5572608 - DNA, 25 bp, Homo sapien
atttggagtagaactgctattgctc

SEQ ID NO: 5572609 - DNA, 25 bp, Homo sapien
aagaacatgaatgctgctctgtgag

SEQ ID NO: 5572610 - DNA, 25 bp, Homo sapien
tggaaagccgtgactcgctctcaga

SEQ ID NO: 5572611 - DNA, 25 bp, Homo sapien
agcccagacacgttcctggtgcgca

SEQ ID NO: 5572612 - DNA, 25 bp, Homo sapien
ccagacccggaacatacacattaga

SEQ ID NO: 5572613 - DNA, 25 bp, Homo sapien
ggcaaatattcgtccaggaggcagt

SEQ ID NO: 5572614 - DNA, 25 bp, Homo sapien
catcccccaccttgacacccccaca

SEQ ID NO: 5572615 - DNA, 25 bp, Homo sapien
gtgcctgcagtgattgcagcgcctg

SEQ ID NO: 5572616 - DNA, 25 bp, Homo sapien
gcaaatgctctgggctttactgata

SEQ ID NO: 5572617 - DNA, 25 bp, Homo sapien
ggtaaagcagaaattgcaaatgttt

SEQ ID NO: 5572618 - DNA, 25 bp, Homo sapien
ccagttccccaaatggcttgtggtt

SEQ ID NO: 5572619 - DNA, 25 bp, Homo sapien
aggcatgcagacaagtgcctgcagt

SEQ ID NO: 5572620 - DNA, 25 bp, Homo sapien
ggagttctaagaggccatgccaagc

SEQ ID NO: 5572621 - DNA, 25 bp, Homo sapien
gactgtacaaaggtgccccttgagc

SEQ ID NO: 5572622 - DNA, 25 bp, Homo sapien
ttactgataagcctccccagactcc

SEQ ID NO: 5572623 - DNA, 25 bp, Homo sapien
cccttgagcaataaatagcaaatgc

SEQ ID NO: 5572624 - DNA, 25 bp, Homo sapien
tctgataatgcctcactagagaata

SEQ ID NO: 5572625 - DNA, 25 bp, Homo sapien
cctgtgtcaagggacaatgtcctgc

SEQ ID NO: 5572626 - DNA, 25 bp, Homo sapien
tttacaaagtcaaggctgtgcccat

SEQ ID NO: 5572627 - DNA, 25 bp, Homo sapien
ctgtgcccatagaaagccttgtaat

SEQ ID NO: 5572628 - DNA, 25 bp, Homo sapien
ccccggtttcccctatgagtgatgc

SEQ ID NO: 5572629 - DNA, 25 bp, Homo sapien
acaacaacttttgaagctgacctgg

SEQ ID NO: 5572630 - DNA, 25 bp, Homo sapien
tagatccatttagctcatcagcgtt

SEQ ID NO: 5572631 - DNA, 25 bp, Homo sapien
cccctatgagtgatgcacagggctc

SEQ ID NO: 5572632 - DNA, 25 bp, Homo sapien
ttgccatgtttatttcgggtctgtg

SEQ ID NO: 5572633 - DNA, 25 bp, Homo sapien
tcctgccctggcttgtcctgtgtca

SEQ ID NO: 5572634 - DNA, 25 bp, Homo sapien
gcacagggctctgatgattgtcatc

SEQ ID NO: 5572635 - DNA, 25 bp, Homo sapien
aattaataaagcaggtggaaagttc

SEQ ID NO: 5572636 - DNA, 25 bp, Homo sapien
aaagttcgcgctgtggtgcaattgt

SEQ ID NO: 5572637 - DNA, 25 bp, Homo sapien
ttaaaccttgggcaaccagatgcaa

SEQ ID NO: 5572638 - DNA, 25 bp, Homo sapien
accagatgcaacccggtgtcggaat

SEQ ID NO: 5572639 - DNA, 25 bp, Homo sapien
gtggtgcaattgtaaagaatgctta

SEQ ID NO: 5572640 - DNA, 25 bp, Homo sapien
ttgactcactcatacgacagatccc

SEQ ID NO: 5572641 - DNA, 25 bp, Homo sapien
tacgtttctcaaaaggacagctgaa

SEQ ID NO: 5572642 - DNA, 25 bp, Homo sapien
ttctatgttgtgacaagagaccggg

SEQ ID NO: 5572643 - DNA, 25 bp, Homo sapien
tcatacgacagatcccacgcaccca

SEQ ID NO: 5572644 - DNA, 25 bp, Homo sapien
aatgtgttgctattcaagatgccat

SEQ ID NO: 5572645 - DNA, 25 bp, Homo sapien
gtttcccgagcttctatgttgtgac

SEQ ID NO: 5572646 - DNA, 25 bp, Homo sapien
accgcagccccccagaactgggtct

SEQ ID NO: 5572647 - DNA, 25 bp, Homo sapien
aatagtggaattgcgcgtgtcttta

SEQ ID NO: 5572648 - DNA, 25 bp, Homo sapien
gaacccgggacttgattggtcttgc

SEQ ID NO: 5572649 - DNA, 25 bp, Homo sapien
cacagcctggtggtctagttgcttt

SEQ ID NO: 5572650 - DNA, 25 bp, Homo sapien
ccgtccttgcctggataggaggaac

SEQ ID NO: 5572651 - DNA, 25 bp, Homo sapien
gccgagttagtaggtgaatagtgga

SEQ ID NO: 5572652 - DNA, 25 bp, Homo sapien
gacgaagtgttaggagcattcctgt

SEQ ID NO: 5572653 - DNA, 25 bp, Homo sapien
gttgctcatgggcccgtccttgcct

SEQ ID NO: 5572654 - DNA, 25 bp, Homo sapien
gtctagttgctttgtggggtgtgca

SEQ ID NO: 5572655 - DNA, 25 bp, Homo sapien
acctgatcaaggaattggatatatt

SEQ ID NO: 5572656 - DNA, 25 bp, Homo sapien
tatgagcacagagcgctcattggcc

SEQ ID NO: 5572657 - DNA, 25 bp, Homo sapien
ctcgtctctcaaccgcgggtggtga

SEQ ID NO: 5572658 - DNA, 25 bp, Homo sapien
tcaccacccgcggttgagagacgag

SEQ ID NO: 5572659 - DNA, 25 bp, Homo sapien
tgtacgtccaatcattaggcgctca

SEQ ID NO: 5572660 - DNA, 25 bp, Homo sapien
ctgggtccaaatccgacgtgatctc

SEQ ID NO: 5572661 - DNA, 25 bp, Homo sapien
tagacctccctgtgattctggcacc

SEQ ID NO: 5572662 - DNA, 25 bp, Homo sapien
gcctctctgcagtgtgctaagcaca

SEQ ID NO: 5572663 - DNA, 25 bp, Homo sapien
ggcgctcagtgcgtgcaccttccct

SEQ ID NO: 5572664 - DNA, 25 bp, Homo sapien
tgatctcccgtgtggatcgagggga

SEQ ID NO: 5572665 - DNA, 25 bp, Homo sapien
acaaataagtcttggcgttggccat

SEQ ID NO: 5572666 - DNA, 25 bp, Homo sapien
cttcgaaacacagaagacgatgttt

SEQ ID NO: 5572667 - DNA, 25 bp, Homo sapien
ctctgcagtgtcctaagcactcaac

SEQ ID NO: 5572668 - DNA, 25 bp, Homo sapien
gcgtgcaccttccctgtagacctcc

SEQ ID NO: 5572669 - DNA, 25 bp, Homo sapien
cacagtgcagttaactcgaacagca

SEQ ID NO: 5572670 - DNA, 25 bp, Homo sapien
gggtacagctgcatggttccatgga

SEQ ID NO: 5572671 - DNA, 25 bp, Homo sapien
ggttccatggagtttcaggcgtctg

SEQ ID NO: 5572672 - DNA, 25 bp, Homo sapien
ggaaggccatcgctcgagttaatcc

SEQ ID NO: 5572673 - DNA, 25 bp, Homo sapien
gacaccttgggccacgttgacatct

SEQ ID NO: 5572674 - DNA, 25 bp, Homo sapien
ggagtttcaggcgtctgccagctct

SEQ ID NO: 5572675 - DNA, 25 bp, Homo sapien
aagacaggcaacgcaacacaatata

SEQ ID NO: 5572676 - DNA, 25 bp, Homo sapien
atgcagttatccagcaagacaggca

SEQ ID NO: 5572677 - DNA, 25 bp, Homo sapien
gcagttattgacaagacaggtgcac

SEQ ID NO: 5572678 - DNA, 25 bp, Homo sapien
actgtatatagactgaaagcaaaac

SEQ ID NO: 5572679 - DNA, 25 bp, Homo sapien
tctcttttcctgggaggagccctag

SEQ ID NO: 5572680 - DNA, 25 bp, Homo sapien
aatcccagtgcttcaggacaccttg

SEQ ID NO: 5572681 - DNA, 25 bp, Homo sapien
ctgaaaagcttcaggagtcacggtc

SEQ ID NO: 5572682 - DNA, 25 bp, Homo sapien
aactgagcggtcaatgatctgcaca

SEQ ID NO: 5572683 - DNA, 25 bp, Homo sapien
ggctccaaacctcactgcggcgacg

SEQ ID NO: 5572684 - DNA, 25 bp, Homo sapien
aggcctgtgaatcagcagcacccta

SEQ ID NO: 5572685 - DNA, 25 bp, Homo sapien
aacgcagtccacaaaaagcacgatc

SEQ ID NO: 5572686 - DNA, 25 bp, Homo sapien
cagcaccctaggaactgcaaacgca

SEQ ID NO: 5572687 - DNA, 25 bp, Homo sapien
actgcctcggtggttctcaagagaa

SEQ ID NO: 5572688 - DNA, 25 bp, Homo sapien
agcacgatctccagaccccggaatc

SEQ ID NO: 5572689 - DNA, 25 bp, Homo sapien
tgaagaaagtgactcagcaatccaa

SEQ ID NO: 5572690 - DNA, 25 bp, Homo sapien
aagccggctacacctgcgctgaaaa

SEQ ID NO: 5572691 - DNA, 25 bp, Homo sapien
tcagcaatccaaagcggctccaaac

SEQ ID NO: 5572692 - DNA, 25 bp, Homo sapien
accaagtattggcacgaatttgagc

SEQ ID NO: 5572693 - DNA, 25 bp, Homo sapien
gctgctgctgtagaatacagtaatc

SEQ ID NO: 5572694 - DNA, 25 bp, Homo sapien
gtaatctgctacaatctgctgctgt

SEQ ID NO: 5572695 - DNA, 25 bp, Homo sapien
gatgaaaaattactacacactctcc

SEQ ID NO: 5572696 - DNA, 25 bp, Homo sapien
acagatgacccaatgtaaaatggac

SEQ ID NO: 5572697 - DNA, 25 bp, Homo sapien
aactggcaatctcacatgctgctgc

SEQ ID NO: 5572698 - DNA, 25 bp, Homo sapien
ggcacgaatttgagcaactggcaat

SEQ ID NO: 5572699 - DNA, 25 bp, Homo sapien
gacaaaaactgaccaagcactcata

SEQ ID NO: 5572700 - DNA, 25 bp, Homo sapien
tagaatacagcaaactgctacaatc

SEQ ID NO: 5572701 - DNA, 25 bp, Homo sapien
aatggacaataagcacttcaaaata

SEQ ID NO: 5572702 - DNA, 25 bp, Homo sapien
aaagtgaaaaaagaggatatttgtg

SEQ ID NO: 5572703 - DNA, 25 bp, Homo sapien
ttataaataacattggtccagaact

SEQ ID NO: 5572704 - DNA, 25 bp, Homo sapien
gaaacataagaaactgtcaagcttt

SEQ ID NO: 5572705 - DNA, 25 bp, Homo sapien
aatttcctggatgtaaggaagagaa

SEQ ID NO: 5572706 - DNA, 25 bp, Homo sapien
aaaagtgatatgaacatgcatacat

SEQ ID NO: 5572707 - DNA, 25 bp, Homo sapien
ataaacagcaaatttcctggatgta

SEQ ID NO: 5572708 - DNA, 25 bp, Homo sapien
acatgagtcattcaaaagtgatatg

SEQ ID NO: 5572709 - DNA, 25 bp, Homo sapien
cacagattgctgcatttgtagccac

SEQ ID NO: 5572710 - DNA, 25 bp, Homo sapien
ttggaaattagaaacaaacatattc

SEQ ID NO: 5572711 - DNA, 25 bp, Homo sapien
tgtttatctagttcatggtccatga

SEQ ID NO: 5572712 - DNA, 25 bp, Homo sapien
gcatttgtagccacatgagtcattc

SEQ ID NO: 5572713 - DNA, 25 bp, Homo sapien
atggtccatgataaccacagattgc

SEQ ID NO: 5572714 - DNA, 25 bp, Homo sapien
cccagaccctcgaatggtggtcatc

SEQ ID NO: 5572715 - DNA, 25 bp, Homo sapien
ttgtggggtcaagctataattagtt

SEQ ID NO: 5572716 - DNA, 25 bp, Homo sapien
gatggaaggagttgtttcatagcct

SEQ ID NO: 5572717 - DNA, 25 bp, Homo sapien
tggctggggctttgatcccagaccc

SEQ ID NO: 5572718 - DNA, 25 bp, Homo sapien
ttggcattagactcaaatgggcttt

SEQ ID NO: 5572719 - DNA, 25 bp, Homo sapien
tggcaaaatgtgcaactgatgctcc

SEQ ID NO: 5572720 - DNA, 25 bp, Homo sapien
ctctccagctcaaaggattgccctt

SEQ ID NO: 5572721 - DNA, 25 bp, Homo sapien
ttcagggccatgatgttgccccatt

SEQ ID NO: 5572722 - DNA, 25 bp, Homo sapien
tcactgaagcctgattgtggggtca

SEQ ID NO: 5572723 - DNA, 25 bp, Homo sapien
cataaaagctgcaaggcatcatttt

SEQ ID NO: 5572724 - DNA, 25 bp, Homo sapien
gcttggctgcaatagaatgttcacc

SEQ ID NO: 5572725 - DNA, 25 bp, Homo sapien
cactcttccactgtgagcatgctta

SEQ ID NO: 5572726 - DNA, 25 bp, Homo sapien
tcgccccagcagtttaatcccagtc

SEQ ID NO: 5572727 - DNA, 25 bp, Homo sapien
gcaacttagtaaatcctcagcaaat

SEQ ID NO: 5572728 - DNA, 25 bp, Homo sapien
gttgaacaatcaaattcgtgctaac

SEQ ID NO: 5572729 - DNA, 25 bp, Homo sapien
agctgtggtaaaacataattccccc

SEQ ID NO: 5572730 - DNA, 25 bp, Homo sapien
catgaaagggataagtgttttttct

SEQ ID NO: 5572731 - DNA, 25 bp, Homo sapien
tctcaagataaagctgtggtaaaac

SEQ ID NO: 5572732 - DNA, 25 bp, Homo sapien
agtcatttatgcagacaaagtgtgc

SEQ ID NO: 5572733 - DNA, 25 bp, Homo sapien
tgcagacaaagtgtgctgctcactc

SEQ ID NO: 5572734 - DNA, 25 bp, Homo sapien
tttaagaccctaacatgtccacaca

SEQ ID NO: 5572735 - DNA, 25 bp, Homo sapien
taactctgtacctagcaacttagta

SEQ ID NO: 5572736 - DNA, 25 bp, Homo sapien
tgagctcttacatgtgcaggcactg

SEQ ID NO: 5572737 - DNA, 25 bp, Homo sapien
ccacccgtgtctgccagcactccgt

SEQ ID NO: 5572738 - DNA, 25 bp, Homo sapien
cgccctgccccagtactgcagcctc

SEQ ID NO: 5572739 - DNA, 25 bp, Homo sapien
tggctgggaaacactccctgaatcc

SEQ ID NO: 5572740 - DNA, 25 bp, Homo sapien
agtcagttaccagccagtggtcctc

SEQ ID NO: 5572741 - DNA, 25 bp, Homo sapien
ccatatacagatgcagatactgagg

SEQ ID NO: 5572742 - DNA, 25 bp, Homo sapien
aaggtgcctgtttagtcagttacca

SEQ ID NO: 5572743 - DNA, 25 bp, Homo sapien
gcactccgtattggctgggaaacac

SEQ ID NO: 5572744 - DNA, 25 bp, Homo sapien
ctggagaactgagttatccccatat

SEQ ID NO: 5572745 - DNA, 25 bp, Homo sapien
tcagatcccacagctagtgtggcac

SEQ ID NO: 5572746 - DNA, 25 bp, Homo sapien
gcactgtgctaggcctgttacaaac

SEQ ID NO: 5572747 - DNA, 25 bp, Homo sapien
gcccccctggaacatttggcaatgt

SEQ ID NO: 5572748 - DNA, 25 bp, Homo sapien
gagtgctctgacagggaaaagcaca

SEQ ID NO: 5572749 - DNA, 25 bp, Homo sapien
atggatacaatgattatatagtccc

SEQ ID NO: 5572750 - DNA, 25 bp, Homo sapien
aagctaaggaactcttcccccatga

SEQ ID NO: 5572751 - DNA, 25 bp, Homo sapien
ccccatgaagtggttacttactttc

SEQ ID NO: 5572752 - DNA, 25 bp, Homo sapien
ataatatgtatgtggagtgctctga

SEQ ID NO: 5572753 - DNA, 25 bp, Homo sapien
tcatggaacatttgaatggtgaaat

SEQ ID NO: 5572754 - DNA, 25 bp, Homo sapien
cataaaggttctcaaccctaggagg

SEQ ID NO: 5572755 - DNA, 25 bp, Homo sapien
atcctccaggagaacaatagacaga

SEQ ID NO: 5572756 - DNA, 25 bp, Homo sapien
caggagaacaatagacagacacctt

SEQ ID NO: 5572757 - DNA, 25 bp, Homo sapien
tatagtcccaatcctccaggagaac

SEQ ID NO: 5572758 - DNA, 25 bp, Homo sapien
cactgatctcttgcctgggatagta

SEQ ID NO: 5572759 - DNA, 25 bp, Homo sapien
catatctctcagtggccgccccttt

SEQ ID NO: 5572760 - DNA, 25 bp, Homo sapien
gcttaatgacaccagtattcaggct

SEQ ID NO: 5572761 - DNA, 25 bp, Homo sapien
tcctaggccttattcaaagccccac

SEQ ID NO: 5572762 - DNA, 25 bp, Homo sapien
ttccagcagccttacagacatcttc

SEQ ID NO: 5572763 - DNA, 25 bp, Homo sapien
ctcagagccccttagaatcccccta

SEQ ID NO: 5572764 - DNA, 25 bp, Homo sapien
tgggtacctcaaagttgacatgtcc

SEQ ID NO: 5572765 - DNA, 25 bp, Homo sapien
agccattccagaaacctcagagccc

SEQ ID NO: 5572766 - DNA, 25 bp, Homo sapien
ttcacacagatatccccctgggtac

SEQ ID NO: 5572767 - DNA, 25 bp, Homo sapien
acttatctataggactgagcttctc

SEQ ID NO: 5572768 - DNA, 25 bp, Homo sapien
gtcacaaacccttgaggatagtaat

SEQ ID NO: 5572769 - DNA, 25 bp, Homo sapien
tgctcatgcatggggatataacatc

SEQ ID NO: 5572770 - DNA, 25 bp, Homo sapien
tccccaccaaagatgctgttgtcac

SEQ ID NO: 5572771 - DNA, 25 bp, Homo sapien
atgagtcttgggtaaaaggcactat

SEQ ID NO: 5572772 - DNA, 25 bp, Homo sapien
gttgtcacaatgaaacacaccctcc

SEQ ID NO: 5572773 - DNA, 25 bp, Homo sapien
tatacaaaacccagacactgtccat

SEQ ID NO: 5572774 - DNA, 25 bp, Homo sapien
atgaaggagcatgtcaggcccttat

SEQ ID NO: 5572775 - DNA, 25 bp, Homo sapien
caccaacagcaaattccccaccaaa

SEQ ID NO: 5572776 - DNA, 25 bp, Homo sapien
aggcactattcactgggaaaccaat

SEQ ID NO: 5572777 - DNA, 25 bp, Homo sapien
cctgagacagtgtttagagtggaaa

SEQ ID NO: 5572778 - DNA, 25 bp, Homo sapien
cacccatgctcagagaaagcactgg

SEQ ID NO: 5572779 - DNA, 25 bp, Homo sapien
catcccatcaatgtccccctgagac

SEQ ID NO: 5572780 - DNA, 25 bp, Homo sapien
tgacacttgtcaccagcaggagatg

SEQ ID NO: 5572781 - DNA, 25 bp, Homo sapien
tgcggttcaaagtgagtgttctctc

SEQ ID NO: 5572782 - DNA, 25 bp, Homo sapien
caggagatgtggtctagccattcct

SEQ ID NO: 5572783 - DNA, 25 bp, Homo sapien
gtagttcgccgactgccgctctatt

SEQ ID NO: 5572784 - DNA, 25 bp, Homo sapien
tctctgttgtgaatcgccaggtttc

SEQ ID NO: 5572785 - DNA, 25 bp, Homo sapien
gcattcagacttttgcgggggtctc

SEQ ID NO: 5572786 - DNA, 25 bp, Homo sapien
cgtaaaaaaaaacacacgtgctgga

SEQ ID NO: 5572787 - DNA, 25 bp, Homo sapien
ccaggggctgttgcattcagacttt

SEQ ID NO: 5572788 - DNA, 25 bp, Homo sapien
aagacagactcatttgtgggccgta

SEQ ID NO: 5572789 - DNA, 25 bp, Homo sapien
catgggctacatgtagttcgccgac

SEQ ID NO: 5572790 - DNA, 25 bp, Homo sapien
gctggaccggattttgttcatgggc

SEQ ID NO: 5572791 - DNA, 25 bp, Homo sapien
gtgagcgaacacaccctcccttcca

SEQ ID NO: 5572792 - DNA, 25 bp, Homo sapien
tgtcctttgagggtatctgtgcttt

SEQ ID NO: 5572793 - DNA, 25 bp, Homo sapien
taccaggcccctaatgatgtccttt

SEQ ID NO: 5572794 - DNA, 25 bp, Homo sapien
gagaggctgtaccataaaatcactt

SEQ ID NO: 5572795 - DNA, 25 bp, Homo sapien
tacggcaatgcttcagaggatatcc

SEQ ID NO: 5572796 - DNA, 25 bp, Homo sapien
gccagtcctgatctccacctgtccc

SEQ ID NO: 5572797 - DNA, 25 bp, Homo sapien
ctgtggctctggtgtgtccttgcag

SEQ ID NO: 5572798 - DNA, 25 bp, Homo sapien
ggtcaacaaatacaatcaggctttc

SEQ ID NO: 5572799 - DNA, 25 bp, Homo sapien
ttgcattctgtgagcgaacacaccc

SEQ ID NO: 5572800 - DNA, 25 bp, Homo sapien
aagtttatctgtaggagaaactcct

SEQ ID NO: 5572801 - DNA, 25 bp, Homo sapien
acacggtgttccactgtgtggaatt

SEQ ID NO: 5572802 - DNA, 25 bp, Homo sapien
gcagatctcagaggtctctagtacc

SEQ ID NO: 5572803 - DNA, 25 bp, Homo sapien
agattctgaggaatcaaaggggatt

SEQ ID NO: 5572804 - DNA, 25 bp, Homo sapien
tgaccagtgctataaaggaaggcca

SEQ ID NO: 5572805 - DNA, 25 bp, Homo sapien
gaaaacaggcaaataaccagatatg

SEQ ID NO: 5572806 - DNA, 25 bp, Homo sapien
gtcatggaaatgtgatgtgagctga

SEQ ID NO: 5572807 - DNA, 25 bp, Homo sapien
agaaaagggcagttttctgggtgga

SEQ ID NO: 5572808 - DNA, 25 bp, Homo sapien
ggaaccatgtgtgcagatctcagag

SEQ ID NO: 5572809 - DNA, 25 bp, Homo sapien
ctatgggaatgccagttacagtggg

SEQ ID NO: 5572810 - DNA, 25 bp, Homo sapien
gcagattctaaggaatgcagatgaa

SEQ ID NO: 5572811 - DNA, 25 bp, Homo sapien
atttgccaggcagctatgtaggatg

SEQ ID NO: 5572812 - DNA, 25 bp, Homo sapien
ttcaagaaatcaagctaaaaagatc

SEQ ID NO: 5572813 - DNA, 25 bp, Homo sapien
gaagcaccaattagtcaaggatccc

SEQ ID NO: 5572814 - DNA, 25 bp, Homo sapien
tcgcccttgagaattgcagtctggt

SEQ ID NO: 5572815 - DNA, 25 bp, Homo sapien
ggagacaagcattggtcgcccttga

SEQ ID NO: 5572816 - DNA, 25 bp, Homo sapien
tacacggagtaacagtctgctgagc

SEQ ID NO: 5572817 - DNA, 25 bp, Homo sapien
tgctggaagtttgtaggttgtttta

SEQ ID NO: 5572818 - DNA, 25 bp, Homo sapien
gccagcatgctaggaaatggtgctg

SEQ ID NO: 5572819 - DNA, 25 bp, Homo sapien
acccaaagcaagtaatgagaacata

SEQ ID NO: 5572820 - DNA, 25 bp, Homo sapien
gcagtctggtgatttacacggagta

SEQ ID NO: 5572821 - DNA, 25 bp, Homo sapien
gtcactgagatggtaacagacccta

SEQ ID NO: 5572822 - DNA, 25 bp, Homo sapien
aaaagagttgctgtaatggaaagga

SEQ ID NO: 5572823 - DNA, 25 bp, Homo sapien
tcccaacaggatcaggactagggtg

SEQ ID NO: 5572824 - DNA, 25 bp, Homo sapien
catagaggagaatttttactggcag

SEQ ID NO: 5572825 - DNA, 25 bp, Homo sapien
aagaggttcatccagggtcacacct

SEQ ID NO: 5572826 - DNA, 25 bp, Homo sapien
gtaacagttatgaaggggctttgtg

SEQ ID NO: 5572827 - DNA, 25 bp, Homo sapien
tcactacctaaagaaaggccacaac

SEQ ID NO: 5572828 - DNA, 25 bp, Homo sapien
ctagcttgtgaccctgagaaagtgc

SEQ ID NO: 5572829 - DNA, 25 bp, Homo sapien
aagagctcaacagatagaagacact

SEQ ID NO: 5572830 - DNA, 25 bp, Homo sapien
agggtcacacctcaagccccagctc

SEQ ID NO: 5572831 - DNA, 25 bp, Homo sapien
gacatttagaacaaagcaagaattc

SEQ ID NO: 5572832 - DNA, 25 bp, Homo sapien
gggctttgtgaacgatcaagagctc

SEQ ID NO: 5572833 - DNA, 25 bp, Homo sapien
ggggaaaaggcttttgagactcagc

SEQ ID NO: 5572834 - DNA, 25 bp, Homo sapien
aagccattcaaccagccagaaaggt

SEQ ID NO: 5572835 - DNA, 25 bp, Homo sapien
gccagacctgttaaggaccagctgc

SEQ ID NO: 5572836 - DNA, 25 bp, Homo sapien
caaaacgaatccccaggagacagaa

SEQ ID NO: 5572837 - DNA, 25 bp, Homo sapien
catcaggaacagactccacagcaag

SEQ ID NO: 5572838 - DNA, 25 bp, Homo sapien
catatccgagtgaaacatcaggaac

SEQ ID NO: 5572839 - DNA, 25 bp, Homo sapien
aaataacaaatagcagcctgaggaa

SEQ ID NO: 5572840 - DNA, 25 bp, Homo sapien
aaagcctaaccctgagagcatgatc

SEQ ID NO: 5572841 - DNA, 25 bp, Homo sapien
tccacagcaagatgccacagacaag

SEQ ID NO: 5572842 - DNA, 25 bp, Homo sapien
aattctccatgaagccagcattcta

SEQ ID NO: 5572843 - DNA, 25 bp, Homo sapien
aaacttagatgagtaaatggctttc

SEQ ID NO: 5572844 - DNA, 25 bp, Homo sapien
gcctccagggctaagttaactgttc

SEQ ID NO: 5572845 - DNA, 25 bp, Homo sapien
tccctgcaaaaaaagaacaagtgac

SEQ ID NO: 5572846 - DNA, 25 bp, Homo sapien
ggagacacatgtaacgtacaactag

SEQ ID NO: 5572847 - DNA, 25 bp, Homo sapien
ctagttgtacgttacatgtgtctcc

SEQ ID NO: 5572848 - DNA, 25 bp, Homo sapien
agggaacaaggtctgactcttccca

SEQ ID NO: 5572849 - DNA, 25 bp, Homo sapien
caagatttcttgctgatgtggggaa

SEQ ID NO: 5572850 - DNA, 25 bp, Homo sapien
aggaagaagtaaacactccaacctg

SEQ ID NO: 5572851 - DNA, 25 bp, Homo sapien
agcagaaagcttgttcagggaacaa

SEQ ID NO: 5572852 - DNA, 25 bp, Homo sapien
aaagacctgccaagaacccttaggc

SEQ ID NO: 5572853 - DNA, 25 bp, Homo sapien
ctccaacctgtgcctttcggggaca

SEQ ID NO: 5572854 - DNA, 25 bp, Homo sapien
atttttgagtggctaaaggctaaag

SEQ ID NO: 5572855 - DNA, 25 bp, Homo sapien
gaacctctccagctaagcctccctc

SEQ ID NO: 5572856 - DNA, 25 bp, Homo sapien
tactttctgtcctctccccgcggcc

SEQ ID NO: 5572857 - DNA, 25 bp, Homo sapien
taagcctccctccctagagactggg

SEQ ID NO: 5572858 - DNA, 25 bp, Homo sapien
ttcggggacaggcattaatctccta

SEQ ID NO: 5572859 - DNA, 25 bp, Homo sapien
tgcacaaagatcccagcccataggc

SEQ ID NO: 5572860 - DNA, 25 bp, Homo sapien
gccccttgaaaggcccatgagctgc

SEQ ID NO: 5572861 - DNA, 25 bp, Homo sapien
actgcaacctgtaaggtatcagaac

SEQ ID NO: 5572862 - DNA, 25 bp, Homo sapien
ggcagagctggtgagtcttatttgc

SEQ ID NO: 5572863 - DNA, 25 bp, Homo sapien
cttactcaaactcactcaacaggaa

SEQ ID NO: 5572864 - DNA, 25 bp, Homo sapien
tcgcattctaccactgaggaaactg

SEQ ID NO: 5572865 - DNA, 25 bp, Homo sapien
aacgtgggtctgcacaaagatccca

SEQ ID NO: 5572866 - DNA, 25 bp, Homo sapien
catatcccagccccttgaaaggccc

SEQ ID NO: 5572867 - DNA, 25 bp, Homo sapien
gcacctcgtcacacgccacagcgtc

SEQ ID NO: 5572868 - DNA, 25 bp, Homo sapien
ctgtaaggtatcagaactcgcattc

SEQ ID NO: 5572869 - DNA, 25 bp, Homo sapien
catgagctgcacagttagtaggatc

SEQ ID NO: 5572870 - DNA, 25 bp, Homo sapien
tccatctcagagatggatggggaac

SEQ ID NO: 5572871 - DNA, 25 bp, Homo sapien
ccacgggtttaacaagtcttgggca

SEQ ID NO: 5572872 - DNA, 25 bp, Homo sapien
tgggttcccctcagaaagcatagcc

SEQ ID NO: 5572873 - DNA, 25 bp, Homo sapien
aaatgatacgacaactcacaagatt

SEQ ID NO: 5572874 - DNA, 25 bp, Homo sapien
ttgtggaagactcagattctcatcc

SEQ ID NO: 5572875 - DNA, 25 bp, Homo sapien
gcaagggtcatctggtccagcattt

SEQ ID NO: 5572876 - DNA, 25 bp, Homo sapien
aagcatagcctgcaacaagggcttt

SEQ ID NO: 5572877 - DNA, 25 bp, Homo sapien
attttagtgtcttggcctgggttcc

SEQ ID NO: 5572878 - DNA, 25 bp, Homo sapien
tcttgggcatcttgtggaagactca

SEQ ID NO: 5572879 - DNA, 25 bp, Homo sapien
attcacagagatatgcaatccaacc

SEQ ID NO: 5572880 - DNA, 25 bp, Homo sapien
gcaccatgattgcaagggtcatctg

SEQ ID NO: 5572881 - DNA, 25 bp, Homo sapien
tatcccacccctggaaggaaagata

SEQ ID NO: 5572882 - DNA, 25 bp, Homo sapien
aggaaagataagcttctgggaaaac

SEQ ID NO: 5572883 - DNA, 25 bp, Homo sapien
tgaatccctcaggtggtaaagatgg

SEQ ID NO: 5572884 - DNA, 25 bp, Homo sapien
acttaacccaaagtttcagacatgt

SEQ ID NO: 5572885 - DNA, 25 bp, Homo sapien
gacatgttaaaccactagcccagat

SEQ ID NO: 5572886 - DNA, 25 bp, Homo sapien
aagaagcatgggtgattaactcctt

SEQ ID NO: 5572887 - DNA, 25 bp, Homo sapien
tagcccagatttctgcccttgcacc

SEQ ID NO: 5572888 - DNA, 25 bp, Homo sapien
cttgcaccaaggctatgcttggaaa

SEQ ID NO: 5572889 - DNA, 25 bp, Homo sapien
caagttcccccacaattacaaattc

SEQ ID NO: 5572890 - DNA, 25 bp, Homo sapien
attctggcctatcctttgaggctct

SEQ ID NO: 5572891 - DNA, 25 bp, Homo sapien
caattaacatgctatcccctccctt

SEQ ID NO: 5572892 - DNA, 25 bp, Homo sapien
tcattaagcttgtggaagtgggttt

SEQ ID NO: 5572893 - DNA, 25 bp, Homo sapien
tgaagacgtgcctttggctccacta

SEQ ID NO: 5572894 - DNA, 25 bp, Homo sapien
gaggacaccatgaataggttggatt

SEQ ID NO: 5572895 - DNA, 25 bp, Homo sapien
gactactcacaaagaactgggaata

SEQ ID NO: 5572896 - DNA, 25 bp, Homo sapien
cagaaaaagtaagaagactactcac

SEQ ID NO: 5572897 - DNA, 25 bp, Homo sapien
ttgaccacaataagtgaggacacca

SEQ ID NO: 5572898 - DNA, 25 bp, Homo sapien
tgccagctgtcctgctaggaagcag

SEQ ID NO: 5572899 - DNA, 25 bp, Homo sapien
gtggaagtgggtttcgtgaaattga

SEQ ID NO: 5572900 - DNA, 25 bp, Homo sapien
agctggctagtcaaacaatgcatgc

SEQ ID NO: 5572901 - DNA, 25 bp, Homo sapien
gctaggaagcaggaataccatacaa

SEQ ID NO: 5572902 - DNA, 25 bp, Homo sapien
gaatagatatggcctgggacaatct

SEQ ID NO: 5572903 - DNA, 25 bp, Homo sapien
ggataacatggctgaaactgctgca

SEQ ID NO: 5572904 - DNA, 25 bp, Homo sapien
aaacatgagtagtagtctagaggag

SEQ ID NO: 5572905 - DNA, 25 bp, Homo sapien
tggattaggataacatggctgaaac

SEQ ID NO: 5572906 - DNA, 25 bp, Homo sapien
ctagaggaggaccttctggtaaaag

SEQ ID NO: 5572907 - DNA, 25 bp, Homo sapien
gtccaatgaaacatgagtagtagtc

SEQ ID NO: 5572908 - DNA, 25 bp, Homo sapien
ccagatgttggtggattaggataac

SEQ ID NO: 5572909 - DNA, 25 bp, Homo sapien
agacagatacctccagatgttggtg

SEQ ID NO: 5572910 - DNA, 25 bp, Homo sapien
ttaggtagtctaatccagtcatgat

SEQ ID NO: 5572911 - DNA, 25 bp, Homo sapien
tcttcagccatatgcagttgtttgc

SEQ ID NO: 5572912 - DNA, 25 bp, Homo sapien
gaaattccatgggaccaaatttgtc

SEQ ID NO: 5572913 - DNA, 25 bp, Homo sapien
ttgtaatagatggagattgaaaaga

SEQ ID NO: 5572914 - DNA, 25 bp, Homo sapien
catcaacctggtgtttaaggccatc

SEQ ID NO: 5572915 - DNA, 25 bp, Homo sapien
gtgtccacctcaaatttagcatgtc

SEQ ID NO: 5572916 - DNA, 25 bp, Homo sapien
ctgacccatgctaaccaaatccacc

SEQ ID NO: 5572917 - DNA, 25 bp, Homo sapien
atgcctcaaaagttcgattctaaaa

SEQ ID NO: 5572918 - DNA, 25 bp, Homo sapien
taccctttaagtcaatgcctcaaaa

SEQ ID NO: 5572919 - DNA, 25 bp, Homo sapien
aaagcaacacacctcagtctgtatg

SEQ ID NO: 5572920 - DNA, 25 bp, Homo sapien
ttccatcacactactgacccatgct

SEQ ID NO: 5572921 - DNA, 25 bp, Homo sapien
tctatgattaaaagcaacacacctc

SEQ ID NO: 5572922 - DNA, 25 bp, Homo sapien
agtctgtatgttttgtggtgtgtcc

SEQ ID NO: 5572923 - DNA, 25 bp, Homo sapien
ccgtggtttctgcaactacactgtc

SEQ ID NO: 5572924 - DNA, 25 bp, Homo sapien
attacctaaagctttgagttaaatg

SEQ ID NO: 5572925 - DNA, 25 bp, Homo sapien
catttaaccagcacaagagccccag

SEQ ID NO: 5572926 - DNA, 25 bp, Homo sapien
ggcttcaaatccacctctcaccagt

SEQ ID NO: 5572927 - DNA, 25 bp, Homo sapien
tgacctgtgagggcatacaccacag

SEQ ID NO: 5572928 - DNA, 25 bp, Homo sapien
atacaccacagagctgggtgcaaac

SEQ ID NO: 5572929 - DNA, 25 bp, Homo sapien
gccttctttgctgtgtcaatgtggg

SEQ ID NO: 5572930 - DNA, 25 bp, Homo sapien
tggctcagaatccagcatgaaaaca

SEQ ID NO: 5572931 - DNA, 25 bp, Homo sapien
tctttccagcggaaagtctgcccgg

SEQ ID NO: 5572932 - DNA, 25 bp, Homo sapien
acctctcaccagtatttgagttctc

SEQ ID NO: 5572933 - DNA, 25 bp, Homo sapien
gggcatacaccacagagctgggtgc

SEQ ID NO: 5572934 - DNA, 25 bp, Homo sapien
ggtgcaaacctgcagagccaaaacc

SEQ ID NO: 5572935 - DNA, 25 bp, Homo sapien
acctgtgagggcatacaccacagag

SEQ ID NO: 5572936 - DNA, 25 bp, Homo sapien
aaaaaatgaatcactggtcagatcc

SEQ ID NO: 5572937 - DNA, 25 bp, Homo sapien
ttgggtttgaggccaatacaatttc

SEQ ID NO: 5572938 - DNA, 25 bp, Homo sapien
aaaaacctggaatcatgcttaatgt

SEQ ID NO: 5572939 - DNA, 25 bp, Homo sapien
agaaagagtaacaacagtggtatta

SEQ ID NO: 5572940 - DNA, 25 bp, Homo sapien
ttgctggaacataattaaaaacctg

SEQ ID NO: 5572941 - DNA, 25 bp, Homo sapien
gtttcagacttaacggggatgagaa

SEQ ID NO: 5572942 - DNA, 25 bp, Homo sapien
tgatgtggggtgtcaataatgtttc

SEQ ID NO: 5572943 - DNA, 25 bp, Homo sapien
aatcactggtcagatccaaaggtaa

SEQ ID NO: 5572944 - DNA, 25 bp, Homo sapien
ggatgagaaagcaaacacaaagtat

SEQ ID NO: 5572945 - DNA, 25 bp, Homo sapien
ctttaaacagagtaagtgatgtggg

SEQ ID NO: 5572946 - DNA, 25 bp, Homo sapien
taaagaaacactagtgttgctggaa

SEQ ID NO: 5572947 - DNA, 25 bp, Homo sapien
tcaactttacaggggctgtttagaa

SEQ ID NO: 5572948 - DNA, 25 bp, Homo sapien
tgaatccacatgactgataatatgc

SEQ ID NO: 5572949 - DNA, 25 bp, Homo sapien
gacaaacaggaggcatccaaatatt

SEQ ID NO: 5572950 - DNA, 25 bp, Homo sapien
cttgcaattgaggttaatgatctac

SEQ ID NO: 5572951 - DNA, 25 bp, Homo sapien
aatctggaaaagacaacgactaatc

SEQ ID NO: 5572952 - DNA, 25 bp, Homo sapien
tgtgtacaatctggaaaagacaacg

SEQ ID NO: 5572953 - DNA, 25 bp, Homo sapien
gactaatccaaagaaatgaaactac

SEQ ID NO: 5572954 - DNA, 25 bp, Homo sapien
tatacctgtaagaagttaacctagc

SEQ ID NO: 5572955 - DNA, 25 bp, Homo sapien
ttctatttgacaaacaggaggcatc

SEQ ID NO: 5572956 - DNA, 25 bp, Homo sapien
acaaagcctgcagtaactaaacctc

SEQ ID NO: 5572957 - DNA, 25 bp, Homo sapien
tgtgttgatcagattgtgtacaatc

SEQ ID NO: 5572958 - DNA, 25 bp, Homo sapien
tgctgccctgcaagttgacaattct

SEQ ID NO: 5572959 - DNA, 25 bp, Homo sapien
ccgccacacactacaaccataccac

SEQ ID NO: 5572960 - DNA, 25 bp, Homo sapien
tgaagcacagcactattaccaggat

SEQ ID NO: 5572961 - DNA, 25 bp, Homo sapien
tgaattccctagaagatagtacctt

SEQ ID NO: 5572962 - DNA, 25 bp, Homo sapien
ttcctctcaaatttccgccacacac

SEQ ID NO: 5572963 - DNA, 25 bp, Homo sapien
aaatagcagcttaggtccgtttgaa

SEQ ID NO: 5572964 - DNA, 25 bp, Homo sapien
tcgacggacaaaattctggttctac

SEQ ID NO: 5572965 - DNA, 25 bp, Homo sapien
ggatgcctctcttggtctcaactgc

SEQ ID NO: 5572966 - DNA, 25 bp, Homo sapien
cgtcaccccaagttcgacggacaaa

SEQ ID NO: 5572967 - DNA, 25 bp, Homo sapien
acctttatctgaggcatagtgcttc

SEQ ID NO: 5572968 - DNA, 25 bp, Homo sapien
tgaggcatagtgcttcgtcacccca

SEQ ID NO: 5572969 - DNA, 25 bp, Homo sapien
gaaatcgaggttacttttgtcttta

SEQ ID NO: 5572970 - DNA, 25 bp, Homo sapien
taaagacaaaagtaacctcgatttc

SEQ ID NO: 5572971 - DNA, 25 bp, Homo sapien
tatatgcacaacacacagcagcttc

SEQ ID NO: 5572972 - DNA, 25 bp, Homo sapien
cctgagtctcagatcttcaacctgc

SEQ ID NO: 5572973 - DNA, 25 bp, Homo sapien
cagtgcaagccacaacacacagcat

SEQ ID NO: 5572974 - DNA, 25 bp, Homo sapien
gcatagcattggctcaagcaagctt

SEQ ID NO: 5572975 - DNA, 25 bp, Homo sapien
caaagcccagcaagcatagcattgg

SEQ ID NO: 5572976 - DNA, 25 bp, Homo sapien
aagcaagcttcatgccagccattcc

SEQ ID NO: 5572977 - DNA, 25 bp, Homo sapien
gcagggatactggcaaaatcactgg

SEQ ID NO: 5572978 - DNA, 25 bp, Homo sapien
cacacagttgtaagtgacaaagggg

SEQ ID NO: 5572979 - DNA, 25 bp, Homo sapien
tatgcaaatacagttggtggcccaa

SEQ ID NO: 5572980 - DNA, 25 bp, Homo sapien
gaccagccggcccttacataagctt

SEQ ID NO: 5572981 - DNA, 25 bp, Homo sapien
gtaccgcaggtccctgcagggatac

SEQ ID NO: 5572982 - DNA, 25 bp, Homo sapien
atgatatgtgtgatgcactctgacc

SEQ ID NO: 5572983 - DNA, 25 bp, Homo sapien
aagaattccctggaagctagcgcag

SEQ ID NO: 5572984 - DNA, 25 bp, Homo sapien
tattagtacagctccaagaattccc

SEQ ID NO: 5572985 - DNA, 25 bp, Homo sapien
ctgccctagccctggaatcagctat

SEQ ID NO: 5572986 - DNA, 25 bp, Homo sapien
tggcttcttttaatgggagtggtat

SEQ ID NO: 5572987 - DNA, 25 bp, Homo sapien
ttgtcactggcatcttctgaaagcc

SEQ ID NO: 5572988 - DNA, 25 bp, Homo sapien
atactgctttagggcaatgtactcc

SEQ ID NO: 5572989 - DNA, 25 bp, Homo sapien
gctgctccccagtggctagtgctgg

SEQ ID NO: 5572990 - DNA, 25 bp, Homo sapien
gtgctgggtttagcacgaggcaaca

SEQ ID NO: 5572991 - DNA, 25 bp, Homo sapien
tcagctatttctgcaaggagccctg

SEQ ID NO: 5572992 - DNA, 25 bp, Homo sapien
tctgaaagccaaggctaaactagtt

SEQ ID NO: 5572993 - DNA, 25 bp, Homo sapien
ggtaggaggatttgccagcattatc

SEQ ID NO: 5572994 - DNA, 25 bp, Homo sapien
tgaatccataggatggcgtctcctc

SEQ ID NO: 5572995 - DNA, 25 bp, Homo sapien
gtgtgtgaagaaggaaattcatgac

SEQ ID NO: 5572996 - DNA, 25 bp, Homo sapien
atggtctggcacaaagcccagagat

SEQ ID NO: 5572997 - DNA, 25 bp, Homo sapien
agcctggatagggaattcagagata

SEQ ID NO: 5572998 - DNA, 25 bp, Homo sapien
aatatatgctgaaggtgaaatgagg

SEQ ID NO: 5572999 - DNA, 25 bp, Homo sapien
ttgggagtatgatcccagcgcagag

SEQ ID NO: 5573000 - DNA, 25 bp, Homo sapien
gttgccctctggtgagtatgaatcc

SEQ ID NO: 5573001 - DNA, 25 bp, Homo sapien
aggaaggaagtactgctagttcgta

SEQ ID NO: 5573002 - DNA, 25 bp, Homo sapien
cactgaccatgtccgagtctgagtc

SEQ ID NO: 5573003 - DNA, 25 bp, Homo sapien
ttagtaatgtgatttgggagtatga

SEQ ID NO: 5573004 - DNA, 25 bp, Homo sapien
cgggcagcaaacactatgaaactta

SEQ ID NO: 5573005 - DNA, 25 bp, Homo sapien
tgtggttcccttagtaatgccttta

SEQ ID NO: 5573006 - DNA, 25 bp, Homo sapien
ggtccctggttatcacagctgtgcc

SEQ ID NO: 5573007 - DNA, 25 bp, Homo sapien
taagctcttggagatcagtagggga

SEQ ID NO: 5573008 - DNA, 25 bp, Homo sapien
ttttggacttcaggcctattgtttc

SEQ ID NO: 5573009 - DNA, 25 bp, Homo sapien
tcgaactcattgtgaatcctgagct

SEQ ID NO: 5573010 - DNA, 25 bp, Homo sapien
ctgttagattagcaaaaggcccttt

SEQ ID NO: 5573011 - DNA, 25 bp, Homo sapien
caacacacttgcgggtgttggtccc

SEQ ID NO: 5573012 - DNA, 25 bp, Homo sapien
tatgaaacttaatggaagaagtgac

SEQ ID NO: 5573013 - DNA, 25 bp, Homo sapien
agctgtgccctagaaccacaagaat

SEQ ID NO: 5573014 - DNA, 25 bp, Homo sapien
ttaatggaagaagtgacattcactc

SEQ ID NO: 5573015 - DNA, 25 bp, Homo sapien
ctcgctgctctggatcctggttgtc

SEQ ID NO: 5573016 - DNA, 25 bp, Homo sapien
taggtgtccgttaaagacagtggga

SEQ ID NO: 5573017 - DNA, 25 bp, Homo sapien
gttaaagacagtgggactgctcatt

SEQ ID NO: 5573018 - DNA, 25 bp, Homo sapien
gtatctcctgggcacacatggcaga

SEQ ID NO: 5573019 - DNA, 25 bp, Homo sapien
gagcactgtgggtccctcgctgctc

SEQ ID NO: 5573020 - DNA, 25 bp, Homo sapien
gggacagacaggcgactcatgtccc

SEQ ID NO: 5573021 - DNA, 25 bp, Homo sapien
tgtgccacatgcacagctctgagga

SEQ ID NO: 5573022 - DNA, 25 bp, Homo sapien
ggactgctcattactgggagaaaat

SEQ ID NO: 5573023 - DNA, 25 bp, Homo sapien
ttgtcccggtatttgaaggcgtcca

SEQ ID NO: 5573024 - DNA, 25 bp, Homo sapien
catgccctcctggccacacgtgggg

SEQ ID NO: 5573025 - DNA, 25 bp, Homo sapien
ggcaggaaaagcaccgtatctcctg

SEQ ID NO: 5573026 - DNA, 25 bp, Homo sapien
gtgctaccttggctggaatgtggcc

SEQ ID NO: 5573027 - DNA, 25 bp, Homo sapien
ccgtcttctcagtggtgaagggagc

SEQ ID NO: 5573028 - DNA, 25 bp, Homo sapien
atcccctgactgtcctgtgcccgtc

SEQ ID NO: 5573029 - DNA, 25 bp, Homo sapien
caggttgtgggccatagttccattt

SEQ ID NO: 5573030 - DNA, 25 bp, Homo sapien
accatgcacatcactgaggacagcc

SEQ ID NO: 5573031 - DNA, 25 bp, Homo sapien
ttgtatatccagcctctcagaccac

SEQ ID NO: 5573032 - DNA, 25 bp, Homo sapien
tccatagagggctataaaaccttac

SEQ ID NO: 5573033 - DNA, 25 bp, Homo sapien
gcacagcaaggtgtactgaagtagt

SEQ ID NO: 5573034 - DNA, 25 bp, Homo sapien
ataagaccaatgatgtgagtacaac

SEQ ID NO: 5573035 - DNA, 25 bp, Homo sapien
gaagtagttcagaaaagcccagctc

SEQ ID NO: 5573036 - DNA, 25 bp, Homo sapien
ttgtacagatggtcatgccattgtc

SEQ ID NO: 5573037 - DNA, 25 bp, Homo sapien
gacacctcaggaaaacgaatgatgt

SEQ ID NO: 5573038 - DNA, 25 bp, Homo sapien
agattgtagataaacaggcagacag

SEQ ID NO: 5573039 - DNA, 25 bp, Homo sapien
ggaggagatgctcaaagctttggct

SEQ ID NO: 5573040 - DNA, 25 bp, Homo sapien
gcaggtatgctgatgtggctcctca

SEQ ID NO: 5573041 - DNA, 25 bp, Homo sapien
tttatgatatttgaggtggtggttg

SEQ ID NO: 5573042 - DNA, 25 bp, Homo sapien
tctgatacgtggttcaagtccggag

SEQ ID NO: 5573043 - DNA, 25 bp, Homo sapien
agccaggatttgttggagacacctc

SEQ ID NO: 5573044 - DNA, 25 bp, Homo sapien
gttcacatggcgaaagacatggacg

SEQ ID NO: 5573045 - DNA, 25 bp, Homo sapien
tgccatttgaagacccagtgcactc

SEQ ID NO: 5573046 - DNA, 25 bp, Homo sapien
tccggagacaacttgcatggcttgt

SEQ ID NO: 5573047 - DNA, 25 bp, Homo sapien
acactctctacatgggaggagatgc

SEQ ID NO: 5573048 - DNA, 25 bp, Homo sapien
tttattgaaactacaccctgcatcc

SEQ ID NO: 5573049 - DNA, 25 bp, Homo sapien
aaggcctatgcagaacagctaaata

SEQ ID NO: 5573050 - DNA, 25 bp, Homo sapien
ctctggggtatacatgcactcctca

SEQ ID NO: 5573051 - DNA, 25 bp, Homo sapien
atctcaaaggcctatgcagaacagc

SEQ ID NO: 5573052 - DNA, 25 bp, Homo sapien
tcagtacagacagagttactacttc

SEQ ID NO: 5573053 - DNA, 25 bp, Homo sapien
ctagagtgcactagtctctggggta

SEQ ID NO: 5573054 - DNA, 25 bp, Homo sapien
tcaggcagtgacctcttttctgtac

SEQ ID NO: 5573055 - DNA, 25 bp, Homo sapien
tctggggagaatttatcttacttat

SEQ ID NO: 5573056 - DNA, 25 bp, Homo sapien
ctgcatccaaccaaaagtaagggct

SEQ ID NO: 5573057 - DNA, 25 bp, Homo sapien
ccaaccaaaagtaagggctgaatga

SEQ ID NO: 5573058 - DNA, 25 bp, Homo sapien
aattgttttgcggtttctggggaga

SEQ ID NO: 5573059 - DNA, 25 bp, Homo sapien
gagtgttgggtcctttagcagattt

SEQ ID NO: 5573060 - DNA, 25 bp, Homo sapien
ctatgtctagcaaatgaggtctggt

SEQ ID NO: 5573061 - DNA, 25 bp, Homo sapien
ccagggactcaatgagtgttgggtc

SEQ ID NO: 5573062 - DNA, 25 bp, Homo sapien
cataccacatgcaaagcactacacc

SEQ ID NO: 5573063 - DNA, 25 bp, Homo sapien
taagcactaactctgccagggactc

SEQ ID NO: 5573064 - DNA, 25 bp, Homo sapien
cctggcatgcttgaacccaccactc

SEQ ID NO: 5573065 - DNA, 25 bp, Homo sapien
caggctatagatttaaaggtgtgtc

SEQ ID NO: 5573066 - DNA, 25 bp, Homo sapien
ctggttaatacaccgtgagggcaac

SEQ ID NO: 5573067 - DNA, 25 bp, Homo sapien
gtgagggcaaccacattctcctggc

SEQ ID NO: 5573068 - DNA, 25 bp, Homo sapien
gtgtcaaacacaacagattgggtcc

SEQ ID NO: 5573069 - DNA, 25 bp, Homo sapien
cattgttggataatagggaacctgg

SEQ ID NO: 5573070 - DNA, 25 bp, Homo sapien
caggaggaccagtcggacaggggac

SEQ ID NO: 5573071 - DNA, 25 bp, Homo sapien
gtcccctgtccgactggtcctcctg

SEQ ID NO: 5573072 - DNA, 25 bp, Homo sapien
ttaaagcaatcgtctgtgtcaccct

SEQ ID NO: 5573073 - DNA, 25 bp, Homo sapien
gttaaaggagagtcaaacaatgatc

SEQ ID NO: 5573074 - DNA, 25 bp, Homo sapien
tgaccaaaggaattccatggacata

SEQ ID NO: 5573075 - DNA, 25 bp, Homo sapien
ggaaggcacagattggctgctttag

SEQ ID NO: 5573076 - DNA, 25 bp, Homo sapien
gtcaaacaatgatcaagtggggatt

SEQ ID NO: 5573077 - DNA, 25 bp, Homo sapien
taccagaagatgccaagtttgggct

SEQ ID NO: 5573078 - DNA, 25 bp, Homo sapien
agtggggattgtgattgaagccact

SEQ ID NO: 5573079 - DNA, 25 bp, Homo sapien
tgccctgaatactgggtgttctgcc

SEQ ID NO: 5573080 - DNA, 25 bp, Homo sapien
gccaccacaccataagccaagtctt

SEQ ID NO: 5573081 - DNA, 25 bp, Homo sapien
caagaacagttggtcaaatgccacc

SEQ ID NO: 5573082 - DNA, 25 bp, Homo sapien
ccatggacatagtgggttaaaggag

SEQ ID NO: 5573083 - DNA, 25 bp, Homo sapien
caaaggacgtagtgtcaatcgtggt

SEQ ID NO: 5573084 - DNA, 25 bp, Homo sapien
accacgattgacactacgtcctttg

SEQ ID NO: 5573085 - DNA, 25 bp, Homo sapien
gagcccccgctcccggaggcccagt

SEQ ID NO: 5573086 - DNA, 25 bp, Homo sapien
actgggcctccgggagcgggggctc

SEQ ID NO: 5573087 - DNA, 25 bp, Homo sapien
tgaaaaacgacttttcaaaatctct

SEQ ID NO: 5573088 - DNA, 25 bp, Homo sapien
agagattttgaaaagtcgtttttca

SEQ ID NO: 5573089 - DNA, 25 bp, Homo sapien
agggctgcacagcatgccccgatct

SEQ ID NO: 5573090 - DNA, 25 bp, Homo sapien
agtcatgcaggtgctcctaggacaa

SEQ ID NO: 5573091 - DNA, 25 bp, Homo sapien
gggactgaggtctagacacagttgt

SEQ ID NO: 5573092 - DNA, 25 bp, Homo sapien
ttttgtgcaggctcgaagcactgtg

SEQ ID NO: 5573093 - DNA, 25 bp, Homo sapien
tattcagtggattgatgagagcatg

SEQ ID NO: 5573094 - DNA, 25 bp, Homo sapien
cagggctgcctaccacagtcatgca

SEQ ID NO: 5573095 - DNA, 25 bp, Homo sapien
tcacaaatggtctcaccccaggcaa

SEQ ID NO: 5573096 - DNA, 25 bp, Homo sapien
tgatgagagcatggactttagaatc

SEQ ID NO: 5573097 - DNA, 25 bp, Homo sapien
cagttgtctcatctaaagggggcag

SEQ ID NO: 5573098 - DNA, 25 bp, Homo sapien
ccagagaagctagagatttcagatt

SEQ ID NO: 5573099 - DNA, 25 bp, Homo sapien
actgtgcccaccagtgcatctggcc

SEQ ID NO: 5573100 - DNA, 25 bp, Homo sapien
cagcagtcatcacctacaccttgtt

SEQ ID NO: 5573101 - DNA, 25 bp, Homo sapien
atcagttccagcagtcatcacctac

SEQ ID NO: 5573102 - DNA, 25 bp, Homo sapien
ctattcccattgccagatactggac

SEQ ID NO: 5573103 - DNA, 25 bp, Homo sapien
ccatgtgctacaagagtggatgcag

SEQ ID NO: 5573104 - DNA, 25 bp, Homo sapien
agagtggatgcagtgcttttgagct

SEQ ID NO: 5573105 - DNA, 25 bp, Homo sapien
ctcaactttttaacagactgcttcc

SEQ ID NO: 5573106 - DNA, 25 bp, Homo sapien
atactaaatgcctgtgtctgtactc

SEQ ID NO: 5573107 - DNA, 25 bp, Homo sapien
gccagatactggaccttactattct

SEQ ID NO: 5573108 - DNA, 25 bp, Homo sapien
gagtgtctggatataatgtcttggc

SEQ ID NO: 5573109 - DNA, 25 bp, Homo sapien
aatgtcttggcaacattgtcacctc

SEQ ID NO: 5573110 - DNA, 25 bp, Homo sapien
attcagtccatgtgctacaagagtg

SEQ ID NO: 5573111 - DNA, 25 bp, Homo sapien
ggcacagtggtgagtctgtataagg

SEQ ID NO: 5573112 - DNA, 25 bp, Homo sapien
gaatccacaaagaagaggaaacaga

SEQ ID NO: 5573113 - DNA, 25 bp, Homo sapien
agtggtgagtctgtataaggccttt

SEQ ID NO: 5573114 - DNA, 25 bp, Homo sapien
tgaacactgaagttgtcaattctga

SEQ ID NO: 5573115 - DNA, 25 bp, Homo sapien
cagatagtagtaagagtgatgaaga

SEQ ID NO: 5573116 - DNA, 25 bp, Homo sapien
aaaggtgaatccacaaagaagagga

SEQ ID NO: 5573117 - DNA, 25 bp, Homo sapien
gggttggagacacttctggttctag

SEQ ID NO: 5573118 - DNA, 25 bp, Homo sapien
ctagggtcttgggtgttaatgccca

SEQ ID NO: 5573119 - DNA, 25 bp, Homo sapien
ttgatttcagatagtagtaagagtg

SEQ ID NO: 5573120 - DNA, 25 bp, Homo sapien
ctggttctagtaacgtgatagactg

SEQ ID NO: 5573121 - DNA, 25 bp, Homo sapien
acacccaaaaaaaggtgaatccaca

SEQ ID NO: 5573122 - DNA, 25 bp, Homo sapien
gctctgaggctggcaaataataaac

SEQ ID NO: 5573123 - DNA, 25 bp, Homo sapien
tctatctcttaaggagctgtgatga

SEQ ID NO: 5573124 - DNA, 25 bp, Homo sapien
ggaaaatgttctttggtgcagggtg

SEQ ID NO: 5573125 - DNA, 25 bp, Homo sapien
ccattaatctcagaggatgggaggg

SEQ ID NO: 5573126 - DNA, 25 bp, Homo sapien
gagtgcactcccaggcccacctttc

SEQ ID NO: 5573127 - DNA, 25 bp, Homo sapien
gtagtcctcagcaataacttagccc

SEQ ID NO: 5573128 - DNA, 25 bp, Homo sapien
taaatggaatgaccttaattctcgc

SEQ ID NO: 5573129 - DNA, 25 bp, Homo sapien
cctctctgaaggatttaaatggaat

SEQ ID NO: 5573130 - DNA, 25 bp, Homo sapien
gccagggaattgtctgggcttccca

SEQ ID NO: 5573131 - DNA, 25 bp, Homo sapien
tcatcccccaagtgagtgcactccc

SEQ ID NO: 5573132 - DNA, 25 bp, Homo sapien
tccagccctcctctctgtagtcctc

SEQ ID NO: 5573133 - DNA, 25 bp, Homo sapien
caatagccaataacagtaacagcag

SEQ ID NO: 5573134 - DNA, 25 bp, Homo sapien
ggggatcggttacagaattatggga

SEQ ID NO: 5573135 - DNA, 25 bp, Homo sapien
ggaaggctatcggtcatttgaggat

SEQ ID NO: 5573136 - DNA, 25 bp, Homo sapien
gggtttggaccatgccaggttttgc

SEQ ID NO: 5573137 - DNA, 25 bp, Homo sapien
gtggcttggttgctagcgcactcta

SEQ ID NO: 5573138 - DNA, 25 bp, Homo sapien
attatgggaaggttgtttgactttc

SEQ ID NO: 5573139 - DNA, 25 bp, Homo sapien
gttcagtggctgagacaaaattaca

SEQ ID NO: 5573140 - DNA, 25 bp, Homo sapien
ctgcaattagatccaaagggttggg

SEQ ID NO: 5573141 - DNA, 25 bp, Homo sapien
acgaggactctactggactgagttc

SEQ ID NO: 5573142 - DNA, 25 bp, Homo sapien
cttttctaccgggaatcacgaggac

SEQ ID NO: 5573143 - DNA, 25 bp, Homo sapien
agcagcagccacaggttatcaagct

SEQ ID NO: 5573144 - DNA, 25 bp, Homo sapien
ggggcaaattgtcagtgagaaactt

SEQ ID NO: 5573145 - DNA, 25 bp, Homo sapien
tccgctcgaactgccctggacaaaa

SEQ ID NO: 5573146 - DNA, 25 bp, Homo sapien
cctgcgactcgctcttgccgcatgg

SEQ ID NO: 5573147 - DNA, 25 bp, Homo sapien
atctatctatttggggcaaattgtc

SEQ ID NO: 5573148 - DNA, 25 bp, Homo sapien
gccctggacaaaaccggctgtttga

SEQ ID NO: 5573149 - DNA, 25 bp, Homo sapien
gtgagaaacttccgctcgaactgcc

SEQ ID NO: 5573150 - DNA, 25 bp, Homo sapien
gtcagtgagaaacttccgctcgaac

SEQ ID NO: 5573151 - DNA, 25 bp, Homo sapien
cccacttgttcctgcgactcgctct

SEQ ID NO: 5573152 - DNA, 25 bp, Homo sapien
caaactccaaacaaaagtcaatttc

SEQ ID NO: 5573153 - DNA, 25 bp, Homo sapien
atttggggcaaattgtcagtgagaa

SEQ ID NO: 5573154 - DNA, 25 bp, Homo sapien
gccgcggccaagattccccacttgt

SEQ ID NO: 5573155 - DNA, 25 bp, Homo sapien
ctcagggctttgtggaatgctccag

SEQ ID NO: 5573156 - DNA, 25 bp, Homo sapien
ctctgactgcacccacctcacccct

SEQ ID NO: 5573157 - DNA, 25 bp, Homo sapien
gcatggctggcttcttgtcaatcaa

SEQ ID NO: 5573158 - DNA, 25 bp, Homo sapien
ggacaaaagacaaaatggcacaaat

SEQ ID NO: 5573159 - DNA, 25 bp, Homo sapien
ccttatagacaagcacaaaggtctt

SEQ ID NO: 5573160 - DNA, 25 bp, Homo sapien
atgggtctggcactatgtcctctct

SEQ ID NO: 5573161 - DNA, 25 bp, Homo sapien
aagacagcaggaatttgaagttcac

SEQ ID NO: 5573162 - DNA, 25 bp, Homo sapien
gaatgctccagtggcctaaagaacc

SEQ ID NO: 5573163 - DNA, 25 bp, Homo sapien
gttgtgcaaaaggaatcattaagac

SEQ ID NO: 5573164 - DNA, 25 bp, Homo sapien
ataagcttgtacaggttctagaata

SEQ ID NO: 5573165 - DNA, 25 bp, Homo sapien
cactctccacactccagccactagc

SEQ ID NO: 5573166 - DNA, 25 bp, Homo sapien
aggtgatagaaagtcttgaattggc

SEQ ID NO: 5573167 - DNA, 25 bp, Homo sapien
gatataggaggtaaactaaagtgta

SEQ ID NO: 5573168 - DNA, 25 bp, Homo sapien
aatcatctgtgagcttttaaaagtc

SEQ ID NO: 5573169 - DNA, 25 bp, Homo sapien
taaaccagtctgttctgctagtacc

SEQ ID NO: 5573170 - DNA, 25 bp, Homo sapien
ggcatcagacctgtattagaggctc

SEQ ID NO: 5573171 - DNA, 25 bp, Homo sapien
gtctgttctgctagtaccaaagttc

SEQ ID NO: 5573172 - DNA, 25 bp, Homo sapien
gcaaaacccaggcatcagacctgta

SEQ ID NO: 5573173 - DNA, 25 bp, Homo sapien
ctgctagtaccaaagttcttgaact

SEQ ID NO: 5573174 - DNA, 25 bp, Homo sapien
caggaagccagtgcaaaccaattaa

SEQ ID NO: 5573175 - DNA, 25 bp, Homo sapien
acctgtattagaggctccagtgggc

SEQ ID NO: 5573176 - DNA, 25 bp, Homo sapien
ttaaaagtcctgatgccaggaagcc

SEQ ID NO: 5573177 - DNA, 25 bp, Homo sapien
gcctggagtctacaacccaggtcgg

SEQ ID NO: 5573178 - DNA, 25 bp, Homo sapien
gctgttgccctacacagcagggtgg

SEQ ID NO: 5573179 - DNA, 25 bp, Homo sapien
ggctgcagtgccaagaatatttcct

SEQ ID NO: 5573180 - DNA, 25 bp, Homo sapien
gtgctctagattccccatgactgac

SEQ ID NO: 5573181 - DNA, 25 bp, Homo sapien
ctctgtcactctccggggacgtgca

SEQ ID NO: 5573182 - DNA, 25 bp, Homo sapien
ttcacgggagagctagttgtttaaa

SEQ ID NO: 5573183 - DNA, 25 bp, Homo sapien
tgacccttcatcggagaagcgtgcc

SEQ ID NO: 5573184 - DNA, 25 bp, Homo sapien
agaagcgtgcccacctgtgctctag

SEQ ID NO: 5573185 - DNA, 25 bp, Homo sapien
aagagcctcagtgtgcatctgcagt

SEQ ID NO: 5573186 - DNA, 25 bp, Homo sapien
gtgcctgcagttgactgtgcctgga

SEQ ID NO: 5573187 - DNA, 25 bp, Homo sapien
tggtgctgactgtgcctgcagttga

SEQ ID NO: 5573188 - DNA, 25 bp, Homo sapien
aatggataccaattattagggctgt

SEQ ID NO: 5573189 - DNA, 25 bp, Homo sapien
agttaatagatgcaaaagtaaaggg

SEQ ID NO: 5573190 - DNA, 25 bp, Homo sapien
gataactccttgagaaacaaaagta

SEQ ID NO: 5573191 - DNA, 25 bp, Homo sapien
accccaaaacatcacaaaattattc

SEQ ID NO: 5573192 - DNA, 25 bp, Homo sapien
actgaatattgaatggcatgtgtat

SEQ ID NO: 5573193 - DNA, 25 bp, Homo sapien
actattatacactccaaaagcaaaa

SEQ ID NO: 5573194 - DNA, 25 bp, Homo sapien
caactgcaatccttgccccagcatg

SEQ ID NO: 5573195 - DNA, 25 bp, Homo sapien
aaggaatagagttaatagatgcaaa

SEQ ID NO: 5573196 - DNA, 25 bp, Homo sapien
aaagcgtaatttagtgtgaaaacca

SEQ ID NO: 5573197 - DNA, 25 bp, Homo sapien
aaagcaaaatacttcaactgcaatc

SEQ ID NO: 5573198 - DNA, 25 bp, Homo sapien
tgccccagcatgattcctcaaaatt

SEQ ID NO: 5573199 - DNA, 25 bp, Homo sapien
tatgtagctgcttggattcctcaca

SEQ ID NO: 5573200 - DNA, 25 bp, Homo sapien
aggcacatctcatctcatgggcagt

SEQ ID NO: 5573201 - DNA, 25 bp, Homo sapien
ggaaacgtgccagctttattcgtaa

SEQ ID NO: 5573202 - DNA, 25 bp, Homo sapien
cagctggaatatctagttgtggcct

SEQ ID NO: 5573203 - DNA, 25 bp, Homo sapien
catggggggcatctccccgattttg

SEQ ID NO: 5573204 - DNA, 25 bp, Homo sapien
gggggacagctagtctctgctctac

SEQ ID NO: 5573205 - DNA, 25 bp, Homo sapien
tgcatattagagcattgggggacag

SEQ ID NO: 5573206 - DNA, 25 bp, Homo sapien
tctgaaggcttgctcgttttcacgc

SEQ ID NO: 5573207 - DNA, 25 bp, Homo sapien
agttgtggcctttctatgtagctgc

SEQ ID NO: 5573208 - DNA, 25 bp, Homo sapien
ctgggttcccgattactgcctcgac

SEQ ID NO: 5573209 - DNA, 25 bp, Homo sapien
gttttcacgcgtggtggttgatgtt

SEQ ID NO: 5573210 - DNA, 25 bp, Homo sapien
atgaaccacaaaaggatctagaaaa

SEQ ID NO: 5573211 - DNA, 25 bp, Homo sapien
gtgccaatgacaaggctcaagggag

SEQ ID NO: 5573212 - DNA, 25 bp, Homo sapien
tgtggacgcgaaaactcaatcatca

SEQ ID NO: 5573213 - DNA, 25 bp, Homo sapien
atgaagagaacaacatacactgggg

SEQ ID NO: 5573214 - DNA, 25 bp, Homo sapien
gtccatgcttgtgtgcaaataggtc

SEQ ID NO: 5573215 - DNA, 25 bp, Homo sapien
gaggagaaaaagcaactattgggta

SEQ ID NO: 5573216 - DNA, 25 bp, Homo sapien
aacatacactggggcctatttgagg

SEQ ID NO: 5573217 - DNA, 25 bp, Homo sapien
acatctcacatgtggacgcgaaaac

SEQ ID NO: 5573218 - DNA, 25 bp, Homo sapien
catgaacataatgaagagaacaaca

SEQ ID NO: 5573219 - DNA, 25 bp, Homo sapien
tgcaaataggtcacactgttgtata

SEQ ID NO: 5573220 - DNA, 25 bp, Homo sapien
tcatctaacagtggaaatgctttcc

SEQ ID NO: 5573221 - DNA, 25 bp, Homo sapien
tgagtcctctggaggctcaaggaga

SEQ ID NO: 5573222 - DNA, 25 bp, Homo sapien
ctacagggaagaaataatcagactt

SEQ ID NO: 5573223 - DNA, 25 bp, Homo sapien
caacatgccccggagtgttgtgagt

SEQ ID NO: 5573224 - DNA, 25 bp, Homo sapien
ggacaagctcagacctgctgctccg

SEQ ID NO: 5573225 - DNA, 25 bp, Homo sapien
aactcccaccctcgccggacaagct

SEQ ID NO: 5573226 - DNA, 25 bp, Homo sapien
gaaagtcaaaagcatcaacaggtgg

SEQ ID NO: 5573227 - DNA, 25 bp, Homo sapien
cttcccactggatctccgccgggac

SEQ ID NO: 5573228 - DNA, 25 bp, Homo sapien
aatcagacttcaagggtgccccatt

SEQ ID NO: 5573229 - DNA, 25 bp, Homo sapien
attggaaatgctccagatgggacga

SEQ ID NO: 5573230 - DNA, 25 bp, Homo sapien
gtgccccattccccagagtccattc

SEQ ID NO: 5573231 - DNA, 25 bp, Homo sapien
ggtatttgaaagagcaacatgcccc

SEQ ID NO: 5573232 - DNA, 25 bp, Homo sapien
taacaatttacaatagactagttat

SEQ ID NO: 5573233 - DNA, 25 bp, Homo sapien
ataactagtctattgtaaattgtta

SEQ ID NO: 5573234 - DNA, 25 bp, Homo sapien
taaggataacaatgcctatgaggtt

SEQ ID NO: 5573235 - DNA, 25 bp, Homo sapien
taaggcctagctagatagtaggctc

SEQ ID NO: 5573236 - DNA, 25 bp, Homo sapien
agtaggctctttaagaacagtcacc

SEQ ID NO: 5573237 - DNA, 25 bp, Homo sapien
ctcttgactagaatgcatcccctcc

SEQ ID NO: 5573238 - DNA, 25 bp, Homo sapien
atgagttaaggtttgtgaaaagtac

SEQ ID NO: 5573239 - DNA, 25 bp, Homo sapien
attcttagtgcctggagtgaggatg

SEQ ID NO: 5573240 - DNA, 25 bp, Homo sapien
gctgctgaagcgagcaccttttagc

SEQ ID NO: 5573241 - DNA, 25 bp, Homo sapien
gtgaaaagtacatgaaagtctatac

SEQ ID NO: 5573242 - DNA, 25 bp, Homo sapien
cctggagtgaggatgaattcatcat

SEQ ID NO: 5573243 - DNA, 25 bp, Homo sapien
tcagtatacgtgctgctgaagcgag

SEQ ID NO: 5573244 - DNA, 25 bp, Homo sapien
agttaatcctgcaaagtgcttgact

SEQ ID NO: 5573245 - DNA, 25 bp, Homo sapien
ggctttggaccttgcgctctggccc

SEQ ID NO: 5573246 - DNA, 25 bp, Homo sapien
cagcacgcatcccgccctggtattt

SEQ ID NO: 5573247 - DNA, 25 bp, Homo sapien
atcccgccctggtatttgcccctgg

SEQ ID NO: 5573248 - DNA, 25 bp, Homo sapien
ctggtatttgcccctggcggtggag

SEQ ID NO: 5573249 - DNA, 25 bp, Homo sapien
acatgccccaggacatttgggatgc

SEQ ID NO: 5573250 - DNA, 25 bp, Homo sapien
ggacacatgccccaggacatttggg

SEQ ID NO: 5573251 - DNA, 25 bp, Homo sapien
cttgtcccagcccatgcttcccaga

SEQ ID NO: 5573252 - DNA, 25 bp, Homo sapien
gagccaagccgccggctttggacct

SEQ ID NO: 5573253 - DNA, 25 bp, Homo sapien
tcccagcccatgcttcccagaagag

SEQ ID NO: 5573254 - DNA, 25 bp, Homo sapien
cgccggctttggaccttgcgctctg

SEQ ID NO: 5573255 - DNA, 25 bp, Homo sapien
cccaggacatttgggatgcagaaaa

SEQ ID NO: 5573256 - DNA, 25 bp, Homo sapien
ttgtcaaatgacacagtaacacact

SEQ ID NO: 5573257 - DNA, 25 bp, Homo sapien
tgatgtccacttaaaccagagatga

SEQ ID NO: 5573258 - DNA, 25 bp, Homo sapien
ggccctgctcagcatggagtcgctg

SEQ ID NO: 5573259 - DNA, 25 bp, Homo sapien
accgggcatccattgcagctgcctc

SEQ ID NO: 5573260 - DNA, 25 bp, Homo sapien
tgctcccttgcactggctggcatgc

SEQ ID NO: 5573261 - DNA, 25 bp, Homo sapien
agcatggagtcgctggacattttgg

SEQ ID NO: 5573262 - DNA, 25 bp, Homo sapien
cagaacacatctacgcctgtgcatc

SEQ ID NO: 5573263 - DNA, 25 bp, Homo sapien
tggacattttggaccgggcatccat

SEQ ID NO: 5573264 - DNA, 25 bp, Homo sapien
agcactttgcagaacagacaccttc

SEQ ID NO: 5573265 - DNA, 25 bp, Homo sapien
ctgcctctcgcacgaatggaccctg

SEQ ID NO: 5573266 - DNA, 25 bp, Homo sapien
ggctggcatgccgctccagaacaca

SEQ ID NO: 5573267 - DNA, 25 bp, Homo sapien
gttaaaaggacagaactggtcagtg

SEQ ID NO: 5573268 - DNA, 25 bp, Homo sapien
ccttaagtagagagagtcccgttaa

SEQ ID NO: 5573269 - DNA, 25 bp, Homo sapien
ttctgtgcagagttaggaaaaatgg

SEQ ID NO: 5573270 - DNA, 25 bp, Homo sapien
gtcaattacataaagggaggaagga

SEQ ID NO: 5573271 - DNA, 25 bp, Homo sapien
aaataaggtttaggtgtgccgtgaa

SEQ ID NO: 5573272 - DNA, 25 bp, Homo sapien
ggaggaccccaaaacaggtatgtga

SEQ ID NO: 5573273 - DNA, 25 bp, Homo sapien
ggaggaaggatgccaaattaaaaga

SEQ ID NO: 5573274 - DNA, 25 bp, Homo sapien
atgctcaaagaaagacgccaaaggt

SEQ ID NO: 5573275 - DNA, 25 bp, Homo sapien
gtgtgccgtgaattccagcaggatc

SEQ ID NO: 5573276 - DNA, 25 bp, Homo sapien
aaaagaagtgatgtgtgttatgtta

SEQ ID NO: 5573277 - DNA, 25 bp, Homo sapien
aaggtgatttgaaattagcagctcc

SEQ ID NO: 5573278 - DNA, 25 bp, Homo sapien
aaacatagttgatggagaatgtgcc

SEQ ID NO: 5573279 - DNA, 25 bp, Homo sapien
tggaaggaatcaagaactgatgtcc

SEQ ID NO: 5573280 - DNA, 25 bp, Homo sapien
ggcagcccctcgagaaaacaagctg

SEQ ID NO: 5573281 - DNA, 25 bp, Homo sapien
tctcagaacatagccaccagccaca

SEQ ID NO: 5573282 - DNA, 25 bp, Homo sapien
agggacagaaagagtggttatctct

SEQ ID NO: 5573283 - DNA, 25 bp, Homo sapien
tgtgccacccatgggcaccatcccc

SEQ ID NO: 5573284 - DNA, 25 bp, Homo sapien
cttcaagcaccaactccaaaggagt

SEQ ID NO: 5573285 - DNA, 25 bp, Homo sapien
tccagaaaaaagcagcgactgccaa

SEQ ID NO: 5573286 - DNA, 25 bp, Homo sapien
agaacgggcctcaggcattcacaca

SEQ ID NO: 5573287 - DNA, 25 bp, Homo sapien
aggcccttgctgagatagaagctga

SEQ ID NO: 5573288 - DNA, 25 bp, Homo sapien
acaggatgaaatgcttaaacatagt

SEQ ID NO: 5573289 - DNA, 25 bp, Homo sapien
catgaagtatgtgccctatgatttc

SEQ ID NO: 5573290 - DNA, 25 bp, Homo sapien
ttccacttctgaaaggtccacatta

SEQ ID NO: 5573291 - DNA, 25 bp, Homo sapien
aatttttaggtgatacttgagtttc

SEQ ID NO: 5573292 - DNA, 25 bp, Homo sapien
ttgttgggtgattgatgagtatctt

SEQ ID NO: 5573293 - DNA, 25 bp, Homo sapien
ttgggtcagtgtgtcagatacatga

SEQ ID NO: 5573294 - DNA, 25 bp, Homo sapien
gacatttgattagaggaaacatttc

SEQ ID NO: 5573295 - DNA, 25 bp, Homo sapien
ctgttagaataggaaattgacattt

SEQ ID NO: 5573296 - DNA, 25 bp, Homo sapien
gctgtggagatgtaagcagacttta

SEQ ID NO: 5573297 - DNA, 25 bp, Homo sapien
agaagtatgatcagtcagaaacaac

SEQ ID NO: 5573298 - DNA, 25 bp, Homo sapien
acaagtaattgtgggataattgatt

SEQ ID NO: 5573299 - DNA, 25 bp, Homo sapien
ttaatacatagctggaaggattttt

SEQ ID NO: 5573300 - DNA, 25 bp, Homo sapien
ctagcaggacagattgtatgcaatc

SEQ ID NO: 5573301 - DNA, 25 bp, Homo sapien
tggaagatcttagaagcacagctga

SEQ ID NO: 5573302 - DNA, 25 bp, Homo sapien
cttgtattcttgaaccgacggtggt

SEQ ID NO: 5573303 - DNA, 25 bp, Homo sapien
gcttgggaccaaaagtcttcatgtt

SEQ ID NO: 5573304 - DNA, 25 bp, Homo sapien
ccctaatcctgctggaagagctgac

SEQ ID NO: 5573305 - DNA, 25 bp, Homo sapien
tgttgcacttagatgcagtccttgc

SEQ ID NO: 5573306 - DNA, 25 bp, Homo sapien
tttaccagcttgaggctgatgttct

SEQ ID NO: 5573307 - DNA, 25 bp, Homo sapien
aagggatgtttagggagaaaatcca

SEQ ID NO: 5573308 - DNA, 25 bp, Homo sapien
ttgggggagtctttccaagaattgc

SEQ ID NO: 5573309 - DNA, 25 bp, Homo sapien
gagctgaccacatattgggagaaga

SEQ ID NO: 5573310 - DNA, 25 bp, Homo sapien
tccagcatttccaagttaaggccaa

SEQ ID NO: 5573311 - DNA, 25 bp, Homo sapien
agctagaatagaaagtactggcaat

SEQ ID NO: 5573312 - DNA, 25 bp, Homo sapien
agtgagagaaccttttatcgggatt

SEQ ID NO: 5573313 - DNA, 25 bp, Homo sapien
ggtaagtgaagaatatggaagatta

SEQ ID NO: 5573314 - DNA, 25 bp, Homo sapien
agtagcctaacagtagtgagagaac

SEQ ID NO: 5573315 - DNA, 25 bp, Homo sapien
aaaccagtatgtagccatttgcttt

SEQ ID NO: 5573316 - DNA, 25 bp, Homo sapien
ggaagattatactggaaaagtagcc

SEQ ID NO: 5573317 - DNA, 25 bp, Homo sapien
tatcgggatttgcagctagaataga

SEQ ID NO: 5573318 - DNA, 25 bp, Homo sapien
caacagaacttcaataagcacaaag

SEQ ID NO: 5573319 - DNA, 25 bp, Homo sapien
agtactggcaattctgacaagtcct

SEQ ID NO: 5573320 - DNA, 25 bp, Homo sapien
aagcacaaagttcaactggtaagtg

SEQ ID NO: 5573321 - DNA, 25 bp, Homo sapien
tcgaatacacaggtttgaaaaatac

SEQ ID NO: 5573322 - DNA, 25 bp, Homo sapien
tgagcagaccacaggctgttcatcc

SEQ ID NO: 5573323 - DNA, 25 bp, Homo sapien
tactgccttctcgaaggctccaatc

SEQ ID NO: 5573324 - DNA, 25 bp, Homo sapien
tgcagtaaggtcttaggttttgttg

SEQ ID NO: 5573325 - DNA, 25 bp, Homo sapien
gtcaataaaaacagccatttactgc

SEQ ID NO: 5573326 - DNA, 25 bp, Homo sapien
cggccctgccttcctggatttcctg

SEQ ID NO: 5573327 - DNA, 25 bp, Homo sapien
tgctcccagtcaatgcccttttaat

SEQ ID NO: 5573328 - DNA, 25 bp, Homo sapien
ggctgccccaccagctaagccagct

SEQ ID NO: 5573329 - DNA, 25 bp, Homo sapien
cacaggctgttcatcccattgggtt

SEQ ID NO: 5573330 - DNA, 25 bp, Homo sapien
tttaattgaaataaggctgccccac

SEQ ID NO: 5573331 - DNA, 25 bp, Homo sapien
acttagttgcagtaaggtcttaggt

SEQ ID NO: 5573332 - DNA, 25 bp, Homo sapien
caccagctaagccagcttccaacac

SEQ ID NO: 5573333 - DNA, 25 bp, Homo sapien
tctgtccagttaggaaaggcacatc

SEQ ID NO: 5573334 - DNA, 25 bp, Homo sapien
aattctggccaacaaagatagcttg

SEQ ID NO: 5573335 - DNA, 25 bp, Homo sapien
aaggcacatcactaaacacagggct

SEQ ID NO: 5573336 - DNA, 25 bp, Homo sapien
cttggggacaggtgatatctatccc

SEQ ID NO: 5573337 - DNA, 25 bp, Homo sapien
tggtacgtgtcactttgcaggaggg

SEQ ID NO: 5573338 - DNA, 25 bp, Homo sapien
cacttctgggttgtgctgagctttc

SEQ ID NO: 5573339 - DNA, 25 bp, Homo sapien
aggagtgaattattttgtgggggga

SEQ ID NO: 5573340 - DNA, 25 bp, Homo sapien
cagggcttttagcactggttgggac

SEQ ID NO: 5573341 - DNA, 25 bp, Homo sapien
ggggatggctttgacacagtatctt

SEQ ID NO: 5573342 - DNA, 25 bp, Homo sapien
ttggatgtggcacaggcttcctgtg

SEQ ID NO: 5573343 - DNA, 25 bp, Homo sapien
gttggctgcaagatttggtacgtgt

SEQ ID NO: 5573344 - DNA, 25 bp, Homo sapien
acaggcttttgctctgcgacggctg

SEQ ID NO: 5573345 - DNA, 25 bp, Homo sapien
ggtggtgaccgacgattctgtccta

SEQ ID NO: 5573346 - DNA, 25 bp, Homo sapien
ccaccctgagatggtagaaaacata

SEQ ID NO: 5573347 - DNA, 25 bp, Homo sapien
gggtggattctggattaactgcgtt

SEQ ID NO: 5573348 - DNA, 25 bp, Homo sapien
gtcctagatcccagtggagaacacc

SEQ ID NO: 5573349 - DNA, 25 bp, Homo sapien
agcacctgctgcctcgccctactgc

SEQ ID NO: 5573350 - DNA, 25 bp, Homo sapien
ggcctgtggagcccaaatatgaatc

SEQ ID NO: 5573351 - DNA, 25 bp, Homo sapien
actgcgtttcacgctgggaagtgac

SEQ ID NO: 5573352 - DNA, 25 bp, Homo sapien
gaggacccgaccttctgtgaggtgt

SEQ ID NO: 5573353 - DNA, 25 bp, Homo sapien
tatgaatctaaggcaatgggtggat

SEQ ID NO: 5573354 - DNA, 25 bp, Homo sapien
atccctgtgtacacgtggagggaga

SEQ ID NO: 5573355 - DNA, 25 bp, Homo sapien
gtaatgaggaaagtttgcaaggttc

SEQ ID NO: 5573356 - DNA, 25 bp, Homo sapien
gcagagactgtgaagtagctgatca

SEQ ID NO: 5573357 - DNA, 25 bp, Homo sapien
tcgttaggctagttggctgagccat

SEQ ID NO: 5573358 - DNA, 25 bp, Homo sapien
aggaaatggcagataagctccttcc

SEQ ID NO: 5573359 - DNA, 25 bp, Homo sapien
caggcatctctggactcaaccagtt

SEQ ID NO: 5573360 - DNA, 25 bp, Homo sapien
ttgttcatctagagctgagcttcac

SEQ ID NO: 5573361 - DNA, 25 bp, Homo sapien
gtgaagtagctgatcatgcttctcc

SEQ ID NO: 5573362 - DNA, 25 bp, Homo sapien
ggtgaaaacagctttcgttaggcta

SEQ ID NO: 5573363 - DNA, 25 bp, Homo sapien
atgtcacatgtgtaggaaatggcag

SEQ ID NO: 5573364 - DNA, 25 bp, Homo sapien
gcagtacctcccaaacaatggtgaa

SEQ ID NO: 5573365 - DNA, 25 bp, Homo sapien
gggcagtttcccaaagcagtacctc

SEQ ID NO: 5573366 - DNA, 25 bp, Homo sapien
acctctgccacagaggggtaatgcc

SEQ ID NO: 5573367 - DNA, 25 bp, Homo sapien
agttgatgaacacgaccacctctgc

SEQ ID NO: 5573368 - DNA, 25 bp, Homo sapien
gcagctcacagatccaggcagcttc

SEQ ID NO: 5573369 - DNA, 25 bp, Homo sapien
gcaagccaggaaactccttagtagc

SEQ ID NO: 5573370 - DNA, 25 bp, Homo sapien
tccagtcacagtgatgataaagaga

SEQ ID NO: 5573371 - DNA, 25 bp, Homo sapien
gataaagagagtaaagagaactcac

SEQ ID NO: 5573372 - DNA, 25 bp, Homo sapien
aactcacaaactgttcccaactgcc

SEQ ID NO: 5573373 - DNA, 25 bp, Homo sapien
gccttagaccaaagcgacacctgtc

SEQ ID NO: 5573374 - DNA, 25 bp, Homo sapien
ggggtaatgccttctcctagggtgc

SEQ ID NO: 5573375 - DNA, 25 bp, Homo sapien
agcccatcaaccagtccccgggccc

SEQ ID NO: 5573376 - DNA, 25 bp, Homo sapien
cccaactgccttagaccaaagcgac

SEQ ID NO: 5573377 - DNA, 25 bp, Homo sapien
atctaccagaaataacacaggaacc

SEQ ID NO: 5573378 - DNA, 25 bp, Homo sapien
acacaggaaccaacatcagtaacta

SEQ ID NO: 5573379 - DNA, 25 bp, Homo sapien
tctagaaaatgatgaatgacttcag

SEQ ID NO: 5573380 - DNA, 25 bp, Homo sapien
tagcctacagtagtcaactctaact

SEQ ID NO: 5573381 - DNA, 25 bp, Homo sapien
cagaacatgcaggttgtatacacat

SEQ ID NO: 5573382 - DNA, 25 bp, Homo sapien
gtatacacatgctgtggtggcttgc

SEQ ID NO: 5573383 - DNA, 25 bp, Homo sapien
tgttaaacacacgtgcagaacatgc

SEQ ID NO: 5573384 - DNA, 25 bp, Homo sapien
tgcaggtttgttaaacacacgtgca

SEQ ID NO: 5573385 - DNA, 25 bp, Homo sapien
tccaagggattccaatcaaaatgcc

SEQ ID NO: 5573386 - DNA, 25 bp, Homo sapien
gctgtggtggcttgctgtacctatc

SEQ ID NO: 5573387 - DNA, 25 bp, Homo sapien
ttgaaaaatcacctccacgaaaatc

SEQ ID NO: 5573388 - DNA, 25 bp, Homo sapien
tttacaatactgatactgcacctgt

SEQ ID NO: 5573389 - DNA, 25 bp, Homo sapien
tactgcacctgtatcatttaccata

SEQ ID NO: 5573390 - DNA, 25 bp, Homo sapien
aatggagtcatttatggaaacacat

SEQ ID NO: 5573391 - DNA, 25 bp, Homo sapien
tcacacaagaatctgaaatatagtt

SEQ ID NO: 5573392 - DNA, 25 bp, Homo sapien
atccacagaatgacttttgtagttt

SEQ ID NO: 5573393 - DNA, 25 bp, Homo sapien
atggaaacacataaaaatagttacc

SEQ ID NO: 5573394 - DNA, 25 bp, Homo sapien
gtttgtttccattggcaggtgagga

SEQ ID NO: 5573395 - DNA, 25 bp, Homo sapien
attacaatgcatatgaaatggagtc

SEQ ID NO: 5573396 - DNA, 25 bp, Homo sapien
aggtgtagggatattgccataccat

SEQ ID NO: 5573397 - DNA, 25 bp, Homo sapien
agggatattgccataccatagggta

SEQ ID NO: 5573398 - DNA, 25 bp, Homo sapien
ttaaaatatatccacagaatgactt

SEQ ID NO: 5573399 - DNA, 25 bp, Homo sapien
ccattcacgagggtttcatctttat

SEQ ID NO: 5573400 - DNA, 25 bp, Homo sapien
tgttaaaactgcaagaagaatcccc

SEQ ID NO: 5573401 - DNA, 25 bp, Homo sapien
gatcatcactttgggggttaaatgc

SEQ ID NO: 5573402 - DNA, 25 bp, Homo sapien
attcagaccatagtacaagtgttaa

SEQ ID NO: 5573403 - DNA, 25 bp, Homo sapien
catagttcttgcagaggttcttttc

SEQ ID NO: 5573404 - DNA, 25 bp, Homo sapien
caattgttgggaattctcatagttc

SEQ ID NO: 5573405 - DNA, 25 bp, Homo sapien
agaatccccacactcaaggtaaccc

SEQ ID NO: 5573406 - DNA, 25 bp, Homo sapien
actcaaggtaacccaagtaatagac

SEQ ID NO: 5573407 - DNA, 25 bp, Homo sapien
gggggttaaatgccaacatgtgaat

SEQ ID NO: 5573408 - DNA, 25 bp, Homo sapien
actgcaagaagaatccccacactca

SEQ ID NO: 5573409 - DNA, 25 bp, Homo sapien
agtaatagactaatatgaatcaatc

SEQ ID NO: 5573410 - DNA, 25 bp, Homo sapien
ccaattaggctgagagcaaactggt

SEQ ID NO: 5573411 - DNA, 25 bp, Homo sapien
actcttcaccaaggatagtactgtg

SEQ ID NO: 5573412 - DNA, 25 bp, Homo sapien
tagtaaaagcactgagattaaagga

SEQ ID NO: 5573413 - DNA, 25 bp, Homo sapien
agagcaaactggtgaacaagattca

SEQ ID NO: 5573414 - DNA, 25 bp, Homo sapien
ctataccctgggctgacatttagtc

SEQ ID NO: 5573415 - DNA, 25 bp, Homo sapien
tgaccaagaaggggtatgttttcca

SEQ ID NO: 5573416 - DNA, 25 bp, Homo sapien
gtactgtgtcatggttactataccc

SEQ ID NO: 5573417 - DNA, 25 bp, Homo sapien
ttttgtgctaaaagtgtcctatggc

SEQ ID NO: 5573418 - DNA, 25 bp, Homo sapien
gtgctgttacccaatgaccaagaag

SEQ ID NO: 5573419 - DNA, 25 bp, Homo sapien
actgttaccgaaatggtgctgttac

SEQ ID NO: 5573420 - DNA, 25 bp, Homo sapien
tcatgatcctgggatccacaggaaa

SEQ ID NO: 5573421 - DNA, 25 bp, Homo sapien
aaagcacatttgaacataaagagta

SEQ ID NO: 5573422 - DNA, 25 bp, Homo sapien
actagatatggctgaaatccccttt

SEQ ID NO: 5573423 - DNA, 25 bp, Homo sapien
ttactgatgactctctgttacccac

SEQ ID NO: 5573424 - DNA, 25 bp, Homo sapien
tgaacataaagagtatagggaaaac

SEQ ID NO: 5573425 - DNA, 25 bp, Homo sapien
aatcccctttattcaagaggtagcc

SEQ ID NO: 5573426 - DNA, 25 bp, Homo sapien
cacctagctttgacaaaaggaaacc

SEQ ID NO: 5573427 - DNA, 25 bp, Homo sapien
tggtatactgtatataacctgcttc

SEQ ID NO: 5573428 - DNA, 25 bp, Homo sapien
ctctgttacccactaaagcacattt

SEQ ID NO: 5573429 - DNA, 25 bp, Homo sapien
tagggaaaacacctagctttgacaa

SEQ ID NO: 5573430 - DNA, 25 bp, Homo sapien
tcaagaggtagccattatctaaaac

SEQ ID NO: 5573431 - DNA, 25 bp, Homo sapien
aaaataaatactagatatggctgaa

SEQ ID NO: 5573432 - DNA, 25 bp, Homo sapien
aacatcggtctggacagagaaagtg

SEQ ID NO: 5573433 - DNA, 25 bp, Homo sapien
ttaatggctgggaaaaatacttgaa

SEQ ID NO: 5573434 - DNA, 25 bp, Homo sapien
taggtgaagaggttctcaggatata

SEQ ID NO: 5573435 - DNA, 25 bp, Homo sapien
aataagcacatgagaaggtgctcaa

SEQ ID NO: 5573436 - DNA, 25 bp, Homo sapien
agagaaagtgctacatgtaagagaa

SEQ ID NO: 5573437 - DNA, 25 bp, Homo sapien
acgctgagtctgatatgtggtaggt

SEQ ID NO: 5573438 - DNA, 25 bp, Homo sapien
agataagttatggacacgctgagtc

SEQ ID NO: 5573439 - DNA, 25 bp, Homo sapien
gcccgggaacatagattcaggtttc

SEQ ID NO: 5573440 - DNA, 25 bp, Homo sapien
tacagtacagagtcaaggtaagagt

SEQ ID NO: 5573441 - DNA, 25 bp, Homo sapien
aggtaagagtcacgtaaggctctgt

SEQ ID NO: 5573442 - DNA, 25 bp, Homo sapien
ggaatgatgaaaaactacagtacag

SEQ ID NO: 5573443 - DNA, 25 bp, Homo sapien
gatggacctgtaaaaatggcgtgta

SEQ ID NO: 5573444 - DNA, 25 bp, Homo sapien
agaaacacttaaacagcacattcca

SEQ ID NO: 5573445 - DNA, 25 bp, Homo sapien
tatcagtgggcatgatccatgaagt

SEQ ID NO: 5573446 - DNA, 25 bp, Homo sapien
caaggatactgagtccatttaagag

SEQ ID NO: 5573447 - DNA, 25 bp, Homo sapien
cttataatttgaacagtcagtttgt

SEQ ID NO: 5573448 - DNA, 25 bp, Homo sapien
attgatacaaaatgttgccagtcga

SEQ ID NO: 5573449 - DNA, 25 bp, Homo sapien
aaagaaacataaaatcaacgtgatt

SEQ ID NO: 5573450 - DNA, 25 bp, Homo sapien
aaaatggcgtgtagaaaattcagaa

SEQ ID NO: 5573451 - DNA, 25 bp, Homo sapien
ttaaacagcacattccaaggatact

SEQ ID NO: 5573452 - DNA, 25 bp, Homo sapien
ctttgaagccattgtagtcagcctg

SEQ ID NO: 5573453 - DNA, 25 bp, Homo sapien
tcacatcataaacagatggacctgt

SEQ ID NO: 5573454 - DNA, 25 bp, Homo sapien
aaattaactattctatacggtgtat

SEQ ID NO: 5573455 - DNA, 25 bp, Homo sapien
atacaccgtatagaatagttaattt

SEQ ID NO: 5573456 - DNA, 25 bp, Homo sapien
ataaattaactattctatacggtgt

SEQ ID NO: 5573457 - DNA, 25 bp, Homo sapien
acaccgtatagaatagttaatttat

SEQ ID NO: 5573458 - DNA, 25 bp, Homo sapien
gctgtttgggcaatttagttgttcc

SEQ ID NO: 5573459 - DNA, 25 bp, Homo sapien
atttagttgttccagccttcaggct

SEQ ID NO: 5573460 - DNA, 25 bp, Homo sapien
agaaagtgataaaagtatcagcttg

SEQ ID NO: 5573461 - DNA, 25 bp, Homo sapien
tgactagcccatgaacaaatcagtt

SEQ ID NO: 5573462 - DNA, 25 bp, Homo sapien
ttcaaaactgattgagacttgtctc

SEQ ID NO: 5573463 - DNA, 25 bp, Homo sapien
attcagaaaattgtaaagatcatat

SEQ ID NO: 5573464 - DNA, 25 bp, Homo sapien
atccaaatagtgacttagttgtaaa

SEQ ID NO: 5573465 - DNA, 25 bp, Homo sapien
tttgcttaagttgggttcttgctac

SEQ ID NO: 5573466 - DNA, 25 bp, Homo sapien
gatcatatgaatagctgactagccc

SEQ ID NO: 5573467 - DNA, 25 bp, Homo sapien
tgagatattgaaggcataagaattt

SEQ ID NO: 5573468 - DNA, 25 bp, Homo sapien
ttacagtagtaatgaaactagcatt

SEQ ID NO: 5573469 - DNA, 25 bp, Homo sapien
agccaatatattaaaggaaggtgac

SEQ ID NO: 5573470 - DNA, 25 bp, Homo sapien
ctcaagggagatccagattttctgg

SEQ ID NO: 5573471 - DNA, 25 bp, Homo sapien
cattctgcctgatctagagggtggg

SEQ ID NO: 5573472 - DNA, 25 bp, Homo sapien
caaggtgctgagcttctgaccctga

SEQ ID NO: 5573473 - DNA, 25 bp, Homo sapien
aaggtgacttcctgtgtgcagacgc

SEQ ID NO: 5573474 - DNA, 25 bp, Homo sapien
cttctgaccctgaaccaggagggct

SEQ ID NO: 5573475 - DNA, 25 bp, Homo sapien
ctctttcagaagatacacggggtga

SEQ ID NO: 5573476 - DNA, 25 bp, Homo sapien
ctcccccactcaccaattgtgcttt

SEQ ID NO: 5573477 - DNA, 25 bp, Homo sapien
aggaggaaagacctacttctctttc

SEQ ID NO: 5573478 - DNA, 25 bp, Homo sapien
tcctgtgtgcagacgcagcacaggc

SEQ ID NO: 5573479 - DNA, 25 bp, Homo sapien
aattgtgctttgggatcatggagaa

SEQ ID NO: 5573480 - DNA, 25 bp, Homo sapien
agagccacaaatagaagcagtggtt

SEQ ID NO: 5573481 - DNA, 25 bp, Homo sapien
agagcatgtgccaacttccgtgtgt

SEQ ID NO: 5573482 - DNA, 25 bp, Homo sapien
taatcctatttatggggcctctgcc

SEQ ID NO: 5573483 - DNA, 25 bp, Homo sapien
tgctgcatcctcatatggcagtagg

SEQ ID NO: 5573484 - DNA, 25 bp, Homo sapien
ttctgcaaaaccctggagagcatgt

SEQ ID NO: 5573485 - DNA, 25 bp, Homo sapien
tgtgtcttagtcatctcaggctgct

SEQ ID NO: 5573486 - DNA, 25 bp, Homo sapien
tgtcagcaggatcaggttttggtga

SEQ ID NO: 5573487 - DNA, 25 bp, Homo sapien
gtttctgtggaaacagagccacaaa

SEQ ID NO: 5573488 - DNA, 25 bp, Homo sapien
tagacacccaccatatttgtgctgc

SEQ ID NO: 5573489 - DNA, 25 bp, Homo sapien
tttggggctaccacctggtttctgc

SEQ ID NO: 5573490 - DNA, 25 bp, Homo sapien
caggttttggtgagagcccatttct

SEQ ID NO: 5573491 - DNA, 25 bp, Homo sapien
gacaaaagaggcactgctctggata

SEQ ID NO: 5573492 - DNA, 25 bp, Homo sapien
tgggccctgacaatctctctctcct

SEQ ID NO: 5573493 - DNA, 25 bp, Homo sapien
ctctccttgggatttctacagcatt

SEQ ID NO: 5573494 - DNA, 25 bp, Homo sapien
tccccacacctctgaaggcctagac

SEQ ID NO: 5573495 - DNA, 25 bp, Homo sapien
tcatcaagacatgacaaaagaggca

SEQ ID NO: 5573496 - DNA, 25 bp, Homo sapien
ctaacatcaggatatgtgcctctgc

SEQ ID NO: 5573497 - DNA, 25 bp, Homo sapien
ggatatgtgcctctgctggtaattt

SEQ ID NO: 5573498 - DNA, 25 bp, Homo sapien
gaaggcctagacagagccccatatt

SEQ ID NO: 5573499 - DNA, 25 bp, Homo sapien
cttcctgacactcttgggccctgac

SEQ ID NO: 5573500 - DNA, 25 bp, Homo sapien
aggtatctgaaaggtatccccacac

SEQ ID NO: 5573501 - DNA, 25 bp, Homo sapien
cttacttacgaatttgaagcatctc

SEQ ID NO: 5573502 - DNA, 25 bp, Homo sapien
cacctcagaggaacctgttaacacc

SEQ ID NO: 5573503 - DNA, 25 bp, Homo sapien
gcgtaattctccaggcagaggatgg

SEQ ID NO: 5573504 - DNA, 25 bp, Homo sapien
agctcccgggagactgttcatgtct

SEQ ID NO: 5573505 - DNA, 25 bp, Homo sapien
gcaagcgttaactggacacatactc

SEQ ID NO: 5573506 - DNA, 25 bp, Homo sapien
gcagaggatggagtattcattcatt

SEQ ID NO: 5573507 - DNA, 25 bp, Homo sapien
catactccatgcccagtgaggggtg

SEQ ID NO: 5573508 - DNA, 25 bp, Homo sapien
caaaccacattataggggataggga

SEQ ID NO: 5573509 - DNA, 25 bp, Homo sapien
ttggatatgctaaagtgcgtaattc

SEQ ID NO: 5573510 - DNA, 25 bp, Homo sapien
gggagacagatggccataaaatgtc

SEQ ID NO: 5573511 - DNA, 25 bp, Homo sapien
gccgagacagtcctgggctttgctt

SEQ ID NO: 5573512 - DNA, 25 bp, Homo sapien
atgcaggacttgtcagagccttgga

SEQ ID NO: 5573513 - DNA, 25 bp, Homo sapien
ggtggtggactctcatgtgactttc

SEQ ID NO: 5573514 - DNA, 25 bp, Homo sapien
atctctcttggaaagcaggtaaggt

SEQ ID NO: 5573515 - DNA, 25 bp, Homo sapien
gttatattttaggtggtggactctc

SEQ ID NO: 5573516 - DNA, 25 bp, Homo sapien
cattctacaagaccctaccctaaaa

SEQ ID NO: 5573517 - DNA, 25 bp, Homo sapien
aaaacataaaatctctcttggaaag

SEQ ID NO: 5573518 - DNA, 25 bp, Homo sapien
tattttaggtggtggactctcatgt

SEQ ID NO: 5573519 - DNA, 25 bp, Homo sapien
ttctgttataactgtcatgctattt

SEQ ID NO: 5573520 - DNA, 25 bp, Homo sapien
aggaagttatattttaggtggtgga

SEQ ID NO: 5573521 - DNA, 25 bp, Homo sapien
tgcaccattgcattctacaagaccc

SEQ ID NO: 5573522 - DNA, 25 bp, Homo sapien
tctcttggaaagcaggtaaggttaa

SEQ ID NO: 5573523 - DNA, 25 bp, Homo sapien
ccattcagtatgtgaagcaattaga

SEQ ID NO: 5573524 - DNA, 25 bp, Homo sapien
gaagatgcatttaggttggtgtgta

SEQ ID NO: 5573525 - DNA, 25 bp, Homo sapien
tccagtgctgtaactccatgctgcc

SEQ ID NO: 5573526 - DNA, 25 bp, Homo sapien
gactgcaggagtgttgccctctgct

SEQ ID NO: 5573527 - DNA, 25 bp, Homo sapien
tttccagaggaaagtaatcacaaac

SEQ ID NO: 5573528 - DNA, 25 bp, Homo sapien
agcttctgttgtgagggatgaaact

SEQ ID NO: 5573529 - DNA, 25 bp, Homo sapien
gctgccatgtggccaagcaacagca

SEQ ID NO: 5573530 - DNA, 25 bp, Homo sapien
agccaaaaatgatgagagatgagtg

SEQ ID NO: 5573531 - DNA, 25 bp, Homo sapien
tggcagtttttgaaagggatttgga

SEQ ID NO: 5573532 - DNA, 25 bp, Homo sapien
ttatagcaaaggacactgagaagct

SEQ ID NO: 5573533 - DNA, 25 bp, Homo sapien
gttggtgtgtaagcctgtctcaggc

SEQ ID NO: 5573534 - DNA, 25 bp, Homo sapien
aggcctgagtttgaaaaaagagcct

SEQ ID NO: 5573535 - DNA, 25 bp, Homo sapien
gatacttggctgaatacaaatagtt

SEQ ID NO: 5573536 - DNA, 25 bp, Homo sapien
agtaaaaactagtgggctatgctta

SEQ ID NO: 5573537 - DNA, 25 bp, Homo sapien
aaaactggacatagatacttggctg

SEQ ID NO: 5573538 - DNA, 25 bp, Homo sapien
attatgcaaagtggtcagtggttgt

SEQ ID NO: 5573539 - DNA, 25 bp, Homo sapien
atagcatacagacttactcagaatc

SEQ ID NO: 5573540 - DNA, 25 bp, Homo sapien
gcttcaacaggatttgcgtgcattt

SEQ ID NO: 5573541 - DNA, 25 bp, Homo sapien
cagtggttgttgaagcatgcattgc

SEQ ID NO: 5573542 - DNA, 25 bp, Homo sapien
aactagtgggctatgcttaggtttt

SEQ ID NO: 5573543 - DNA, 25 bp, Homo sapien
taaagttagtgaagcatactaccat

SEQ ID NO: 5573544 - DNA, 25 bp, Homo sapien
tgcagattgcaatataataaaggaa

SEQ ID NO: 5573545 - DNA, 25 bp, Homo sapien
attacagattcattgatggagtcaa

SEQ ID NO: 5573546 - DNA, 25 bp, Homo sapien
ggcttgcgctacgtcctgcccctcc

SEQ ID NO: 5573547 - DNA, 25 bp, Homo sapien
tgggttggaagctgtaaccccgaca

SEQ ID NO: 5573548 - DNA, 25 bp, Homo sapien
gggtcaggacagcagaccgttttat

SEQ ID NO: 5573549 - DNA, 25 bp, Homo sapien
tcagaaaccactcgtggtggtgggg

SEQ ID NO: 5573550 - DNA, 25 bp, Homo sapien
gatccctacttagccacggagctgc

SEQ ID NO: 5573551 - DNA, 25 bp, Homo sapien
agggcgcctcaaccctaccgctgct

SEQ ID NO: 5573552 - DNA, 25 bp, Homo sapien
gctgtaaccccgacatgggcttgcg

SEQ ID NO: 5573553 - DNA, 25 bp, Homo sapien
ggccagtcactggggatccctactt

SEQ ID NO: 5573554 - DNA, 25 bp, Homo sapien
gaggtcagaaaccactcgtggtggt

SEQ ID NO: 5573555 - DNA, 25 bp, Homo sapien
attgcttaactcagtgggttggaag

SEQ ID NO: 5573556 - DNA, 25 bp, Homo sapien
caaccctaccgctgcttcctgcctg

SEQ ID NO: 5573557 - DNA, 25 bp, Homo sapien
tcactcaaccctaaaatcaaaccat

SEQ ID NO: 5573558 - DNA, 25 bp, Homo sapien
caagaaattcgctcgcctcaggcct

SEQ ID NO: 5573559 - DNA, 25 bp, Homo sapien
tcaggcggctgaatccctaaaagat

SEQ ID NO: 5573560 - DNA, 25 bp, Homo sapien
ctggaactgatctttcaggcggctg

SEQ ID NO: 5573561 - DNA, 25 bp, Homo sapien
gagtcatgactgtatgtctcactac

SEQ ID NO: 5573562 - DNA, 25 bp, Homo sapien
caacaccgtaacaaagataaagtag

SEQ ID NO: 5573563 - DNA, 25 bp, Homo sapien
tcatgcacagtattccacaaggttc

SEQ ID NO: 5573564 - DNA, 25 bp, Homo sapien
tatccaaacataatgagtcatgact

SEQ ID NO: 5573565 - DNA, 25 bp, Homo sapien
tctctttacctcgttgcagccccag

SEQ ID NO: 5573566 - DNA, 25 bp, Homo sapien
gctccatccaaacagaagccccctc

SEQ ID NO: 5573567 - DNA, 25 bp, Homo sapien
attccacaaggttcatgctccatcc

SEQ ID NO: 5573568 - DNA, 25 bp, Homo sapien
tctgtctgtgggtcccagctctggt

SEQ ID NO: 5573569 - DNA, 25 bp, Homo sapien
gaaggcacttgagcacacctggaaa

SEQ ID NO: 5573570 - DNA, 25 bp, Homo sapien
gagagaacaggcttttgacagcaat

SEQ ID NO: 5573571 - DNA, 25 bp, Homo sapien
tccctgggggtattctagctttctg

SEQ ID NO: 5573572 - DNA, 25 bp, Homo sapien
ccaggctcccacacttggcagcagg

SEQ ID NO: 5573573 - DNA, 25 bp, Homo sapien
ggccggctaaaatccaaggtgacca

SEQ ID NO: 5573574 - DNA, 25 bp, Homo sapien
tcggagtcagccagcacatctggcc

SEQ ID NO: 5573575 - DNA, 25 bp, Homo sapien
atgttgatccagacagggtaagtga

SEQ ID NO: 5573576 - DNA, 25 bp, Homo sapien
gggaggcagctccgactctgcctgt

SEQ ID NO: 5573577 - DNA, 25 bp, Homo sapien
ccagcctcacggcctggttgtggag

SEQ ID NO: 5573578 - DNA, 25 bp, Homo sapien
gcctgttatagccagaaagaggccg

SEQ ID NO: 5573579 - DNA, 25 bp, Homo sapien
tatttccattttgtagcgataaaac

SEQ ID NO: 5573580 - DNA, 25 bp, Homo sapien
gttttatcgctacaaaatggaaata

SEQ ID NO: 5573581 - DNA, 25 bp, Homo sapien
ggccacaggccctccatgggtggcc

SEQ ID NO: 5573582 - DNA, 25 bp, Homo sapien
agctccgtgtgagtgcccacgctaa

SEQ ID NO: 5573583 - DNA, 25 bp, Homo sapien
gagcttcgtagaaactacaagtggc

SEQ ID NO: 5573584 - DNA, 25 bp, Homo sapien
gtggccatgtgacagtgcctactgc

SEQ ID NO: 5573585 - DNA, 25 bp, Homo sapien
gcctactgctcattacagccagggc

SEQ ID NO: 5573586 - DNA, 25 bp, Homo sapien
acaggccctccatgggtggccatgt

SEQ ID NO: 5573587 - DNA, 25 bp, Homo sapien
agggcattcatctgaggactctggc

SEQ ID NO: 5573588 - DNA, 25 bp, Homo sapien
attcttcttggtgcttgtatacagt

SEQ ID NO: 5573589 - DNA, 25 bp, Homo sapien
cagccagggcattcatctgaggact

SEQ ID NO: 5573590 - DNA, 25 bp, Homo sapien
actgctcattacagccagggcattc

SEQ ID NO: 5573591 - DNA, 25 bp, Homo sapien
ttgttaccattgtgactgatattgc

SEQ ID NO: 5573592 - DNA, 25 bp, Homo sapien
ccacctatgcatttcccggagggga

SEQ ID NO: 5573593 - DNA, 25 bp, Homo sapien
caagcgttttctaaagatttcaacc

SEQ ID NO: 5573594 - DNA, 25 bp, Homo sapien
ctttttttgtagacgcccaaccgca

SEQ ID NO: 5573595 - DNA, 25 bp, Homo sapien
gtactccttccgcaaggtggatggg

SEQ ID NO: 5573596 - DNA, 25 bp, Homo sapien
acgcccaaccgcaggactgtttttc

SEQ ID NO: 5573597 - DNA, 25 bp, Homo sapien
ggccgctcgcgtgtccacctatgca

SEQ ID NO: 5573598 - DNA, 25 bp, Homo sapien
ctatgcatttcccggaggggaaggg

SEQ ID NO: 5573599 - DNA, 25 bp, Homo sapien
tttttgcagtttctcaagcgttttc

SEQ ID NO: 5573600 - DNA, 25 bp, Homo sapien
cagcatgcgtcttttttgcagtttc

SEQ ID NO: 5573601 - DNA, 25 bp, Homo sapien
ggtggagtactccttccgcaaggtg

SEQ ID NO: 5573602 - DNA, 25 bp, Homo sapien
gtttttcatcagcatgcgtcttttt

SEQ ID NO: 5573603 - DNA, 25 bp, Homo sapien
cagagccttgacctgaaagctggga

SEQ ID NO: 5573604 - DNA, 25 bp, Homo sapien
ggacctgaggctggtcatgatgtct

SEQ ID NO: 5573605 - DNA, 25 bp, Homo sapien
caccccgcaagcctcagcctaattc

SEQ ID NO: 5573606 - DNA, 25 bp, Homo sapien
tgggcctcagtgtcgccatctgcag

SEQ ID NO: 5573607 - DNA, 25 bp, Homo sapien
gaagcatgagggttaaacaattcgg

SEQ ID NO: 5573608 - DNA, 25 bp, Homo sapien
cttcttaaagggatctctgttcacc

SEQ ID NO: 5573609 - DNA, 25 bp, Homo sapien
cccaggtgtcacaaccagagccttg

SEQ ID NO: 5573610 - DNA, 25 bp, Homo sapien
ataggacaatggacggtctgtgttt

SEQ ID NO: 5573611 - DNA, 25 bp, Homo sapien
cgccatctgcagtaagaacgcgcct

SEQ ID NO: 5573612 - DNA, 25 bp, Homo sapien
aaacttttcacccgcagtccaggcc

SEQ ID NO: 5573613 - DNA, 25 bp, Homo sapien
tctggaacatggagaagttcttctt

SEQ ID NO: 5573614 - DNA, 25 bp, Homo sapien
aatgagatcatgcaagcaaatgcta

SEQ ID NO: 5573615 - DNA, 25 bp, Homo sapien
tgggatgtttatacatgtgtgtcct

SEQ ID NO: 5573616 - DNA, 25 bp, Homo sapien
taggtgctaagctttcccaggattc

SEQ ID NO: 5573617 - DNA, 25 bp, Homo sapien
gccccagagtacagagctggggagg

SEQ ID NO: 5573618 - DNA, 25 bp, Homo sapien
gggttgtagcaagtagtttcagaaa

SEQ ID NO: 5573619 - DNA, 25 bp, Homo sapien
ccaggatagctgacacatctcccct

SEQ ID NO: 5573620 - DNA, 25 bp, Homo sapien
ttcctgacagaggtgataacgttga

SEQ ID NO: 5573621 - DNA, 25 bp, Homo sapien
tgtcctgggtcatggcgtaccatat

SEQ ID NO: 5573622 - DNA, 25 bp, Homo sapien
atcagcaccttgtcacacgggtcct

SEQ ID NO: 5573623 - DNA, 25 bp, Homo sapien
tctgctaatgaagtaagtaggaagt

SEQ ID NO: 5573624 - DNA, 25 bp, Homo sapien
atctcccctgacaatctgctaatga

SEQ ID NO: 5573625 - DNA, 25 bp, Homo sapien
ttgagatgtatgcaatgtaggaatc

SEQ ID NO: 5573626 - DNA, 25 bp, Homo sapien
ttgaatcctgacttgaattggaaaa

SEQ ID NO: 5573627 - DNA, 25 bp, Homo sapien
aaaatgaatttgaagccaaagagtg

SEQ ID NO: 5573628 - DNA, 25 bp, Homo sapien
tccactgggtaggacatttgagatg

SEQ ID NO: 5573629 - DNA, 25 bp, Homo sapien
aagtgctaaagcaatcattgttttt

SEQ ID NO: 5573630 - DNA, 25 bp, Homo sapien
aacagttaagtctaacaacagattt

SEQ ID NO: 5573631 - DNA, 25 bp, Homo sapien
tgaatttgaagccaaagagtggaga

SEQ ID NO: 5573632 - DNA, 25 bp, Homo sapien
gcaatgtaggaatcttatttgaatc

SEQ ID NO: 5573633 - DNA, 25 bp, Homo sapien
gggatccactgggtaggacatttga

SEQ ID NO: 5573634 - DNA, 25 bp, Homo sapien
ctgctgggtagttattaacactaac

SEQ ID NO: 5573635 - DNA, 25 bp, Homo sapien
tgggtaggacatttgagatgtatgc

SEQ ID NO: 5573636 - DNA, 25 bp, Homo sapien
tgcataacatagatttagcccagtc

SEQ ID NO: 5573637 - DNA, 25 bp, Homo sapien
tagcccagtcttagccttctgcgtc

SEQ ID NO: 5573638 - DNA, 25 bp, Homo sapien
atgggttaaatgattacctcgtgcc

SEQ ID NO: 5573639 - DNA, 25 bp, Homo sapien
gggctctgaggaactctgcaatctt

SEQ ID NO: 5573640 - DNA, 25 bp, Homo sapien
tcactacagcctcaacctcgtgggc

SEQ ID NO: 5573641 - DNA, 25 bp, Homo sapien
tataagcatgggttaaatgattacc

SEQ ID NO: 5573642 - DNA, 25 bp, Homo sapien
ttgagacaggatcttgctctgtcac

SEQ ID NO: 5573643 - DNA, 25 bp, Homo sapien
attttaagtctataagcatgggtta

SEQ ID NO: 5573644 - DNA, 25 bp, Homo sapien
cagcctcaacctcgtgggctcaatt

SEQ ID NO: 5573645 - DNA, 25 bp, Homo sapien
agccttctgcgtctaacactttcct

SEQ ID NO: 5573646 - DNA, 25 bp, Homo sapien
aaagagaaggacccacacaccttaa

SEQ ID NO: 5573647 - DNA, 25 bp, Homo sapien
tgtaggacaagtgttaggaaacatg

SEQ ID NO: 5573648 - DNA, 25 bp, Homo sapien
gcctggcgtggaatttcactccatc

SEQ ID NO: 5573649 - DNA, 25 bp, Homo sapien
attacaagcaggagaatgaatgtag

SEQ ID NO: 5573650 - DNA, 25 bp, Homo sapien
caaaaaagttcctaatgaaatggac

SEQ ID NO: 5573651 - DNA, 25 bp, Homo sapien
aagcaacaactaatcacaataatac

SEQ ID NO: 5573652 - DNA, 25 bp, Homo sapien
aaaaaaattctgtgcctggcgtgga

SEQ ID NO: 5573653 - DNA, 25 bp, Homo sapien
atgaatgtaggacaagtgttaggaa

SEQ ID NO: 5573654 - DNA, 25 bp, Homo sapien
ggaaatcatatgtatctcacggggt

SEQ ID NO: 5573655 - DNA, 25 bp, Homo sapien
atctcacggggtttaatcattaggg

SEQ ID NO: 5573656 - DNA, 25 bp, Homo sapien
aatacaaaggtaatttcgttctgtg

SEQ ID NO: 5573657 - DNA, 25 bp, Homo sapien
gtgttactgaggatacctatgtgac

SEQ ID NO: 5573658 - DNA, 25 bp, Homo sapien
tgagtggtatcagaaataggcttta

SEQ ID NO: 5573659 - DNA, 25 bp, Homo sapien
acgacagttttttgacctgagtggt

SEQ ID NO: 5573660 - DNA, 25 bp, Homo sapien
aatttcaaacggcaaccatggacat

SEQ ID NO: 5573661 - DNA, 25 bp, Homo sapien
cagcaatcccacaggaaaggagttc

SEQ ID NO: 5573662 - DNA, 25 bp, Homo sapien
agacagagagacagctactcatctg

SEQ ID NO: 5573663 - DNA, 25 bp, Homo sapien
ggaaggcactgtcactcttggcagc

SEQ ID NO: 5573664 - DNA, 25 bp, Homo sapien
gcgccccgcctgacctacagaaatt

SEQ ID NO: 5573665 - DNA, 25 bp, Homo sapien
acagaaatttcaaacggcaaccatg

SEQ ID NO: 5573666 - DNA, 25 bp, Homo sapien
caggtaaatacctgaacaaaggaac

SEQ ID NO: 5573667 - DNA, 25 bp, Homo sapien
atacctgaacaaaggaaccctcatc

SEQ ID NO: 5573668 - DNA, 25 bp, Homo sapien
tcatcaggaaggcactgtcactctt

SEQ ID NO: 5573669 - DNA, 25 bp, Homo sapien
aatgactgcgtgtactgaatctgac

SEQ ID NO: 5573670 - DNA, 25 bp, Homo sapien
tgcaaataactgtgatggatacttc

SEQ ID NO: 5573671 - DNA, 25 bp, Homo sapien
aataatctcagaatggcagcaccac

SEQ ID NO: 5573672 - DNA, 25 bp, Homo sapien
tgggtgcagttccctgtggtctcta

SEQ ID NO: 5573673 - DNA, 25 bp, Homo sapien
gaatctgactgtgtgaaataatctc

SEQ ID NO: 5573674 - DNA, 25 bp, Homo sapien
acttcgaagtgaataagaagggaag

SEQ ID NO: 5573675 - DNA, 25 bp, Homo sapien
aagaagggaagcctgattattgctg

SEQ ID NO: 5573676 - DNA, 25 bp, Homo sapien
accaacatggtcagagtgcaaataa

SEQ ID NO: 5573677 - DNA, 25 bp, Homo sapien
ttgctgagatcaccttggtattgcc

SEQ ID NO: 5573678 - DNA, 25 bp, Homo sapien
cactctagtgagcaccaacatggtc

SEQ ID NO: 5573679 - DNA, 25 bp, Homo sapien
caagctgcacaaaggaatgttcttc

SEQ ID NO: 5573680 - DNA, 25 bp, Homo sapien
aatatcattgacaagggctgtggca

SEQ ID NO: 5573681 - DNA, 25 bp, Homo sapien
gtgtccctgactcttgagcaggtgc

SEQ ID NO: 5573682 - DNA, 25 bp, Homo sapien
tgggggcactgtttgtcacctcccc

SEQ ID NO: 5573683 - DNA, 25 bp, Homo sapien
gatcctgggagtacagcctcaaaca

SEQ ID NO: 5573684 - DNA, 25 bp, Homo sapien
catttagtgatgcgtgtgtccctga

SEQ ID NO: 5573685 - DNA, 25 bp, Homo sapien
atggtgcccaccttgctgctgtgag

SEQ ID NO: 5573686 - DNA, 25 bp, Homo sapien
gggatggcatcgagtccactctctg

SEQ ID NO: 5573687 - DNA, 25 bp, Homo sapien
actctctgagccgtgcttgccggag

SEQ ID NO: 5573688 - DNA, 25 bp, Homo sapien
ccagggtctctgtgaaatatcattg

SEQ ID NO: 5573689 - DNA, 25 bp, Homo sapien
tgagtgccaatggtgcccaccttgc

SEQ ID NO: 5573690 - DNA, 25 bp, Homo sapien
cagggagagaacatccaattccaca

SEQ ID NO: 5573691 - DNA, 25 bp, Homo sapien
cttttgtgaactggcttacactgtt

SEQ ID NO: 5573692 - DNA, 25 bp, Homo sapien
acataaggatctgtaaaaatgcctg

SEQ ID NO: 5573693 - DNA, 25 bp, Homo sapien
agaatgtgggccacatcaggatggg

SEQ ID NO: 5573694 - DNA, 25 bp, Homo sapien
actttgcagagtacttcctggccat

SEQ ID NO: 5573695 - DNA, 25 bp, Homo sapien
agcatgaaattgaaacataaggatc

SEQ ID NO: 5573696 - DNA, 25 bp, Homo sapien
ctgaggatcctaccaccagcttcat

SEQ ID NO: 5573697 - DNA, 25 bp, Homo sapien
tgttcattatggctcctgaggatcc

SEQ ID NO: 5573698 - DNA, 25 bp, Homo sapien
agaatcaaataagaatgtgggccac

SEQ ID NO: 5573699 - DNA, 25 bp, Homo sapien
tacatggccagtcttaggattttcc

SEQ ID NO: 5573700 - DNA, 25 bp, Homo sapien
taacagtagcaaaggatctttttcc

SEQ ID NO: 5573701 - DNA, 25 bp, Homo sapien
tcacgtgaatagagcatgaaattga

SEQ ID NO: 5573702 - DNA, 25 bp, Homo sapien
tgtgacaggttaaagtatttcgtgt

SEQ ID NO: 5573703 - DNA, 25 bp, Homo sapien
acacgaaatactttaacctgtcaca

SEQ ID NO: 5573704 - DNA, 25 bp, Homo sapien
gagagctctgcattgcatggggtgg

SEQ ID NO: 5573705 - DNA, 25 bp, Homo sapien
gcacgctaccaagggaaaatggttc

SEQ ID NO: 5573706 - DNA, 25 bp, Homo sapien
ggagagtctgatgataaagcttgca

SEQ ID NO: 5573707 - DNA, 25 bp, Homo sapien
acccaccagtgatccaggttgcaag

SEQ ID NO: 5573708 - DNA, 25 bp, Homo sapien
ggcttaggtgaaaggtaatgccttg

SEQ ID NO: 5573709 - DNA, 25 bp, Homo sapien
aaacacaagaaagcattccgggaat

SEQ ID NO: 5573710 - DNA, 25 bp, Homo sapien
atgcctggtcaggatctctggaatt

SEQ ID NO: 5573711 - DNA, 25 bp, Homo sapien
tttcctctgtagccaggagagctct

SEQ ID NO: 5573712 - DNA, 25 bp, Homo sapien
aggagttgctctggtaacagcacgc

SEQ ID NO: 5573713 - DNA, 25 bp, Homo sapien
attccgggaatttgtacaagtgcct

SEQ ID NO: 5573714 - DNA, 25 bp, Homo sapien
tagcagcttgattcgatgcctggtc

SEQ ID NO: 5573715 - DNA, 25 bp, Homo sapien
aaggaacagttagagaaaaagtaca

SEQ ID NO: 5573716 - DNA, 25 bp, Homo sapien
tggtataaataagtaacaggaagta

SEQ ID NO: 5573717 - DNA, 25 bp, Homo sapien
acaagccagagtgtgaatccaggct

SEQ ID NO: 5573718 - DNA, 25 bp, Homo sapien
ggaagtatttgcagtagaagaacct

SEQ ID NO: 5573719 - DNA, 25 bp, Homo sapien
tggcctgagcactagggcaaaacaa

SEQ ID NO: 5573720 - DNA, 25 bp, Homo sapien
tatgacccaggatatgtttcttctc

SEQ ID NO: 5573721 - DNA, 25 bp, Homo sapien
tgtaggaagcagagttaaatgccta

SEQ ID NO: 5573722 - DNA, 25 bp, Homo sapien
tatctgtaagtctgaggtgaatttc

SEQ ID NO: 5573723 - DNA, 25 bp, Homo sapien
gggaatgaaagagcatggtataaat

SEQ ID NO: 5573724 - DNA, 25 bp, Homo sapien
gaagaacctcagtgaagtggcctga

SEQ ID NO: 5573725 - DNA, 25 bp, Homo sapien
tgatcaaacaagaagggtactccta

SEQ ID NO: 5573726 - DNA, 25 bp, Homo sapien
ctcctctcccggggaacaggaataa

SEQ ID NO: 5573727 - DNA, 25 bp, Homo sapien
ttagggaccaacattctctcagact

SEQ ID NO: 5573728 - DNA, 25 bp, Homo sapien
agaactgtttgcccctgtggactca

SEQ ID NO: 5573729 - DNA, 25 bp, Homo sapien
gcactgaggctgagtaaatattgac

SEQ ID NO: 5573730 - DNA, 25 bp, Homo sapien
caagatgcttgtcttagggaccaac

SEQ ID NO: 5573731 - DNA, 25 bp, Homo sapien
atttccatggtgaatgagtcttctt

SEQ ID NO: 5573732 - DNA, 25 bp, Homo sapien
ggaagtgatggaagtggttcatcac

SEQ ID NO: 5573733 - DNA, 25 bp, Homo sapien
aggaagtagtaaacatctgtgatga

SEQ ID NO: 5573734 - DNA, 25 bp, Homo sapien
ttaaatcgcccagtgttgacagaaa

SEQ ID NO: 5573735 - DNA, 25 bp, Homo sapien
tagaccacagaaacaggaagtagta

SEQ ID NO: 5573736 - DNA, 25 bp, Homo sapien
gaaagcagctcataagataaaattc

SEQ ID NO: 5573737 - DNA, 25 bp, Homo sapien
tgtgggcatttaaggctccctttgc

SEQ ID NO: 5573738 - DNA, 25 bp, Homo sapien
agcagagcagagactctggatgtct

SEQ ID NO: 5573739 - DNA, 25 bp, Homo sapien
tatctaaaacaggagtacgaatacc

SEQ ID NO: 5573740 - DNA, 25 bp, Homo sapien
aggagtacgaatacctgcctctttc

SEQ ID NO: 5573741 - DNA, 25 bp, Homo sapien
taaacaagtttcataccacagccat

SEQ ID NO: 5573742 - DNA, 25 bp, Homo sapien
ccctttgcattaggaggtaaagaaa

SEQ ID NO: 5573743 - DNA, 25 bp, Homo sapien
ccacagccatggtaattaatccttt

SEQ ID NO: 5573744 - DNA, 25 bp, Homo sapien
aactctggcacatagcaagtgctta

SEQ ID NO: 5573745 - DNA, 25 bp, Homo sapien
gtgagtaaaactcaatgagctttgc

SEQ ID NO: 5573746 - DNA, 25 bp, Homo sapien
cttaatcaatcatagcagcgctgct

SEQ ID NO: 5573747 - DNA, 25 bp, Homo sapien
ggagcttacagtttagtgagtaaaa

SEQ ID NO: 5573748 - DNA, 25 bp, Homo sapien
gaccgcaaacctggagtaaccaaag

SEQ ID NO: 5573749 - DNA, 25 bp, Homo sapien
ctttggttactccaggtttgcggtc

SEQ ID NO: 5573750 - DNA, 25 bp, Homo sapien
attagagtaaatagggtgtccatca

SEQ ID NO: 5573751 - DNA, 25 bp, Homo sapien
atcacctcaagcctgtatcccttcc

SEQ ID NO: 5573752 - DNA, 25 bp, Homo sapien
tattggatacttgatagttactctc

SEQ ID NO: 5573753 - DNA, 25 bp, Homo sapien
ttaactaagagtgtattttgttcac

SEQ ID NO: 5573754 - DNA, 25 bp, Homo sapien
ctgtggaaggttgtattatttgtag

SEQ ID NO: 5573755 - DNA, 25 bp, Homo sapien
ctttgtttagttatgaatgaatttt

SEQ ID NO: 5573756 - DNA, 25 bp, Homo sapien
ttgtgggtacgtagtatatatactt

SEQ ID NO: 5573757 - DNA, 25 bp, Homo sapien
aatttttgtgggtacgtagtatata

SEQ ID NO: 5573758 - DNA, 25 bp, Homo sapien
tccttatgttacagacaatccaatt

SEQ ID NO: 5573759 - DNA, 25 bp, Homo sapien
gtgtccatcacctcaagcctgtatc

SEQ ID NO: 5573760 - DNA, 25 bp, Homo sapien
atcatattagagtaaatagggtgtc

SEQ ID NO: 5573761 - DNA, 25 bp, Homo sapien
acaaacgtttgcagaagagaagctg

SEQ ID NO: 5573762 - DNA, 25 bp, Homo sapien
gtcacggagccctacgtgttcaggc

SEQ ID NO: 5573763 - DNA, 25 bp, Homo sapien
aagttagggtcttgaaacaataaca

SEQ ID NO: 5573764 - DNA, 25 bp, Homo sapien
gccccttggagctccgactcttgct

SEQ ID NO: 5573765 - DNA, 25 bp, Homo sapien
accagtcacggcaaatacaaatccc

SEQ ID NO: 5573766 - DNA, 25 bp, Homo sapien
cattcctgtcccagtcacggagccc

SEQ ID NO: 5573767 - DNA, 25 bp, Homo sapien
ttgaaacaataacaacggagcattt

SEQ ID NO: 5573768 - DNA, 25 bp, Homo sapien
cctacgtgttcaggccaaccagtca

SEQ ID NO: 5573769 - DNA, 25 bp, Homo sapien
catcacctagagcctctcccccagc

SEQ ID NO: 5573770 - DNA, 25 bp, Homo sapien
cccgtttctgaggattccggggagc

SEQ ID NO: 5573771 - DNA, 25 bp, Homo sapien
gagcatttcagaggcacaaacgttt

SEQ ID NO: 5573772 - DNA, 25 bp, Homo sapien
ggcctgggaatagagccttccagct

SEQ ID NO: 5573773 - DNA, 25 bp, Homo sapien
cagagacattaaagaagcattcaga

SEQ ID NO: 5573774 - DNA, 25 bp, Homo sapien
ggcagtgaagatttgcagcgctcaa

SEQ ID NO: 5573775 - DNA, 25 bp, Homo sapien
cattcctggtcaaggagacagcatg

SEQ ID NO: 5573776 - DNA, 25 bp, Homo sapien
ggcatgagagatggtgacatgtttg

SEQ ID NO: 5573777 - DNA, 25 bp, Homo sapien
taaaggaggaaggaactccttctca

SEQ ID NO: 5573778 - DNA, 25 bp, Homo sapien
tttgcagcgctcaaggatcttggca

SEQ ID NO: 5573779 - DNA, 25 bp, Homo sapien
cccagatcttacagtgaagggggct

SEQ ID NO: 5573780 - DNA, 25 bp, Homo sapien
atgtgtgtattgcagatgctagggg

SEQ ID NO: 5573781 - DNA, 25 bp, Homo sapien
aatgaggaagggtcccttgtcttca

SEQ ID NO: 5573782 - DNA, 25 bp, Homo sapien
gcgtgtgcttgggctcagtattcaa

SEQ ID NO: 5573783 - DNA, 25 bp, Homo sapien
cccagatccgagatgtaaaaaagct

SEQ ID NO: 5573784 - DNA, 25 bp, Homo sapien
ggcgactgttccgatgacaccatcc

SEQ ID NO: 5573785 - DNA, 25 bp, Homo sapien
tttctcttcacagggtcccagcggc

SEQ ID NO: 5573786 - DNA, 25 bp, Homo sapien
cccggcgactgttccgatgacacca

SEQ ID NO: 5573787 - DNA, 25 bp, Homo sapien
aatacacttagttcaaacacacaac

SEQ ID NO: 5573788 - DNA, 25 bp, Homo sapien
acaacttttctcttcacagggtccc

SEQ ID NO: 5573789 - DNA, 25 bp, Homo sapien
gatccgagatgtaaaaaagcttgct

SEQ ID NO: 5573790 - DNA, 25 bp, Homo sapien
tgcagggcactgcccagatccgaga

SEQ ID NO: 5573791 - DNA, 25 bp, Homo sapien
ttccgatgacaccatccatgggcgc

SEQ ID NO: 5573792 - DNA, 25 bp, Homo sapien
cccacccacccaacaatacacttag

SEQ ID NO: 5573793 - DNA, 25 bp, Homo sapien
cactgcccagatccgagatgtaaaa

SEQ ID NO: 5573794 - DNA, 25 bp, Homo sapien
ggaagattatgccacagaagacccc

SEQ ID NO: 5573795 - DNA, 25 bp, Homo sapien
aggacaggacaaagtctgttcacag

SEQ ID NO: 5573796 - DNA, 25 bp, Homo sapien
gtggtttcccatcgacttgtctgtc

SEQ ID NO: 5573797 - DNA, 25 bp, Homo sapien
tccagaattgctttcatcgagacat

SEQ ID NO: 5573798 - DNA, 25 bp, Homo sapien
gctgcatccctggtgcctagctctg

SEQ ID NO: 5573799 - DNA, 25 bp, Homo sapien
gtgaatcccgttaaattagagcagc

SEQ ID NO: 5573800 - DNA, 25 bp, Homo sapien
ctcaaagtatcaaacagagggtctt

SEQ ID NO: 5573801 - DNA, 25 bp, Homo sapien
tgggctcgtgcattcgctatcaggc

SEQ ID NO: 5573802 - DNA, 25 bp, Homo sapien
gccacagaagacccctcaaagtatc

SEQ ID NO: 5573803 - DNA, 25 bp, Homo sapien
cagaaaaagagtgaatcccgttaaa

SEQ ID NO: 5573804 - DNA, 25 bp, Homo sapien
cttcctgggaagattatgccacaga

SEQ ID NO: 5573805 - DNA, 25 bp, Homo sapien
tcatgaactgggtaactggcagcaa

SEQ ID NO: 5573806 - DNA, 25 bp, Homo sapien
ttgaggcacttctgtgcccagaagc

SEQ ID NO: 5573807 - DNA, 25 bp, Homo sapien
taaggctggacagccatggctttgc

SEQ ID NO: 5573808 - DNA, 25 bp, Homo sapien
tctgtctttgtgtgtgccagcaggg

SEQ ID NO: 5573809 - DNA, 25 bp, Homo sapien
acgttcacatgtgcgctcctgggtc

SEQ ID NO: 5573810 - DNA, 25 bp, Homo sapien
cagcaagcatgcgcacgttcacatg

SEQ ID NO: 5573811 - DNA, 25 bp, Homo sapien
tgaccccaacaggagctgcttcctt

SEQ ID NO: 5573812 - DNA, 25 bp, Homo sapien
gcagcagggttccttgtggctgtgg

SEQ ID NO: 5573813 - DNA, 25 bp, Homo sapien
ggcctgctgtaggccccccagactc

SEQ ID NO: 5573814 - DNA, 25 bp, Homo sapien
caaggcttcacgtgttcatgaactg

SEQ ID NO: 5573815 - DNA, 25 bp, Homo sapien
tggccctgagttctcgaggcccagc

SEQ ID NO: 5573816 - DNA, 25 bp, Homo sapien
aattcatgacaaataaggcaatcac

SEQ ID NO: 5573817 - DNA, 25 bp, Homo sapien
ggcaacacaggaattaggtaggtta

SEQ ID NO: 5573818 - DNA, 25 bp, Homo sapien
agaaggacactgtggatacaaacac

SEQ ID NO: 5573819 - DNA, 25 bp, Homo sapien
cactctacaggaatgctgaagcggg

SEQ ID NO: 5573820 - DNA, 25 bp, Homo sapien
atccccacccgagtgctccacaatt

SEQ ID NO: 5573821 - DNA, 25 bp, Homo sapien
taaggcaatcacatctatccccacc

SEQ ID NO: 5573822 - DNA, 25 bp, Homo sapien
aattaggtaggttacaaaggcaaga

SEQ ID NO: 5573823 - DNA, 25 bp, Homo sapien
tctgtggcctctgaaggaaaacctt

SEQ ID NO: 5573824 - DNA, 25 bp, Homo sapien
tacaacagaagcactctacaggaat

SEQ ID NO: 5573825 - DNA, 25 bp, Homo sapien
gtggtgcaccagcttcctagttcct

SEQ ID NO: 5573826 - DNA, 25 bp, Homo sapien
ctagttcctctacccgcgctgcctc

SEQ ID NO: 5573827 - DNA, 25 bp, Homo sapien
atttgtgttgcaaactgaagctaaa

SEQ ID NO: 5573828 - DNA, 25 bp, Homo sapien
ttcacattaggaaatcgctccacat

SEQ ID NO: 5573829 - DNA, 25 bp, Homo sapien
aatgaaaccatgaacctgtaaggtc

SEQ ID NO: 5573830 - DNA, 25 bp, Homo sapien
taggaaatcgctccacatgtgggta

SEQ ID NO: 5573831 - DNA, 25 bp, Homo sapien
aacctgtaaggtcagcattttagtt

SEQ ID NO: 5573832 - DNA, 25 bp, Homo sapien
agcttttcatgaagaccaaaaatga

SEQ ID NO: 5573833 - DNA, 25 bp, Homo sapien
agaaaattctgtgacaatcagtctc

SEQ ID NO: 5573834 - DNA, 25 bp, Homo sapien
ctgtgtatgtccaatggtactgatc

SEQ ID NO: 5573835 - DNA, 25 bp, Homo sapien
tttataatattgcaagaagtgactt

SEQ ID NO: 5573836 - DNA, 25 bp, Homo sapien
ctcataccatcaagaaaagtatttc

SEQ ID NO: 5573837 - DNA, 25 bp, Homo sapien
ccacatgtgggtaattagaaaattc

SEQ ID NO: 5573838 - DNA, 25 bp, Homo sapien
cactgtgaaattgttaggataagcc

SEQ ID NO: 5573839 - DNA, 25 bp, Homo sapien
tttgatacagtttagcaagagctta

SEQ ID NO: 5573840 - DNA, 25 bp, Homo sapien
ggtcggtgataagcaagcatcttga

SEQ ID NO: 5573841 - DNA, 25 bp, Homo sapien
agagcttaatcatcacttggtcggt

SEQ ID NO: 5573842 - DNA, 25 bp, Homo sapien
acaagtctagctttaactgaatgcc

SEQ ID NO: 5573843 - DNA, 25 bp, Homo sapien
gagtagctacagaaagcatgcgttt

SEQ ID NO: 5573844 - DNA, 25 bp, Homo sapien
aactgaatgccagagattactgttc

SEQ ID NO: 5573845 - DNA, 25 bp, Homo sapien
accagaatttatgagtagctacaga

SEQ ID NO: 5573846 - DNA, 25 bp, Homo sapien
aatctggaaacaacttaaacgtcac

SEQ ID NO: 5573847 - DNA, 25 bp, Homo sapien
aaaagaatgagtcacctctctatgt

SEQ ID NO: 5573848 - DNA, 25 bp, Homo sapien
aaaatcaaagtaattagaacaagtc

SEQ ID NO: 5573849 - DNA, 25 bp, Homo sapien
acggtcgtatttagcctcggttctg

SEQ ID NO: 5573850 - DNA, 25 bp, Homo sapien
caccagtgatcccagatattgctgc

SEQ ID NO: 5573851 - DNA, 25 bp, Homo sapien
ctgaaggcaagttccctcgtgctgg

SEQ ID NO: 5573852 - DNA, 25 bp, Homo sapien
gacgttggagctgactctgagcttt

SEQ ID NO: 5573853 - DNA, 25 bp, Homo sapien
tttaattcacaagtgagggagccgt

SEQ ID NO: 5573854 - DNA, 25 bp, Homo sapien
ggcagaataatgatgcgaggcctga

SEQ ID NO: 5573855 - DNA, 25 bp, Homo sapien
agtgggatccaatagacgttggagc

SEQ ID NO: 5573856 - DNA, 25 bp, Homo sapien
ttccacaagctggcaaaggatccaa

SEQ ID NO: 5573857 - DNA, 25 bp, Homo sapien
aaggatccaagatgtagcctggcat

SEQ ID NO: 5573858 - DNA, 25 bp, Homo sapien
gaaccagaagaacttacggcagtgt

SEQ ID NO: 5573859 - DNA, 25 bp, Homo sapien
tgcgaggcctgacatttaatacacc

SEQ ID NO: 5573860 - DNA, 25 bp, Homo sapien
aatgaagctcctctgtgccacccac

SEQ ID NO: 5573861 - DNA, 25 bp, Homo sapien
tcacaccacttggtactggggctgg

SEQ ID NO: 5573862 - DNA, 25 bp, Homo sapien
aatcccataaagctggagaaagaac

SEQ ID NO: 5573863 - DNA, 25 bp, Homo sapien
gctgggatggatattgctagtgcaa

SEQ ID NO: 5573864 - DNA, 25 bp, Homo sapien
taacccatgaaagggctggtaactc

SEQ ID NO: 5573865 - DNA, 25 bp, Homo sapien
gtgccacccactggatgagggatat

SEQ ID NO: 5573866 - DNA, 25 bp, Homo sapien
tggtaggaacaagtaacaccctcca

SEQ ID NO: 5573867 - DNA, 25 bp, Homo sapien
aaaagtgacttagtgcagtggaaag

SEQ ID NO: 5573868 - DNA, 25 bp, Homo sapien
aagaggaaacagtcccaaagaaaca

SEQ ID NO: 5573869 - DNA, 25 bp, Homo sapien
cagtggaaaggagtataattacatt

SEQ ID NO: 5573870 - DNA, 25 bp, Homo sapien
gctagtgcaaacaaatgaaggttct

SEQ ID NO: 5573871 - DNA, 25 bp, Homo sapien
catctctctttgctagaatcttgcc

SEQ ID NO: 5573872 - DNA, 25 bp, Homo sapien
taatgcttatcccaggaaaaggcat

SEQ ID NO: 5573873 - DNA, 25 bp, Homo sapien
ctgaactctcagccatttatctccc

SEQ ID NO: 5573874 - DNA, 25 bp, Homo sapien
atattcacctgaactctcagccatt

SEQ ID NO: 5573875 - DNA, 25 bp, Homo sapien
agaatcttgccttaccatcactatc

SEQ ID NO: 5573876 - DNA, 25 bp, Homo sapien
atcccaggaaaaggcattaaaaata

SEQ ID NO: 5573877 - DNA, 25 bp, Homo sapien
cttatcccaggaaaaggcattaaaa

SEQ ID NO: 5573878 - DNA, 25 bp, Homo sapien
tttgctagaatcttgccttaccatc

SEQ ID NO: 5573879 - DNA, 25 bp, Homo sapien
ctcagccatttatctcccatctctc

SEQ ID NO: 5573880 - DNA, 25 bp, Homo sapien
tttaatgcttatcccaggaaaaggc

SEQ ID NO: 5573881 - DNA, 25 bp, Homo sapien
tgcttatcccaggaaaaggcattaa

SEQ ID NO: 5573882 - DNA, 25 bp, Homo sapien
ttcacctgctaggctgggttgatga

SEQ ID NO: 5573883 - DNA, 25 bp, Homo sapien
gactgggaggcacaaattatcccct

SEQ ID NO: 5573884 - DNA, 25 bp, Homo sapien
accccagtggtatggtctgaattgt

SEQ ID NO: 5573885 - DNA, 25 bp, Homo sapien
tacctaccagatacctaccccagtg

SEQ ID NO: 5573886 - DNA, 25 bp, Homo sapien
tagcacatggtgaatgagcagtaaa

SEQ ID NO: 5573887 - DNA, 25 bp, Homo sapien
attgagctaatgcatataaggtatt

SEQ ID NO: 5573888 - DNA, 25 bp, Homo sapien
ggttgatgagcagcattgccagtga

SEQ ID NO: 5573889 - DNA, 25 bp, Homo sapien
ttaggcctctggtccatttggagat

SEQ ID NO: 5573890 - DNA, 25 bp, Homo sapien
ttggcaaccctgtctagcctgttcc

SEQ ID NO: 5573891 - DNA, 25 bp, Homo sapien
ataaggtatttaacacagtgactag

SEQ ID NO: 5573892 - DNA, 25 bp, Homo sapien
catgtttgtgtttggtgtgtggtag

SEQ ID NO: 5573893 - DNA, 25 bp, Homo sapien
gacattgttagagaaggcagatatc

SEQ ID NO: 5573894 - DNA, 25 bp, Homo sapien
gaagggcaaacaggacattactgaa

SEQ ID NO: 5573895 - DNA, 25 bp, Homo sapien
ttagcagtcctgaagctgtgtatcc

SEQ ID NO: 5573896 - DNA, 25 bp, Homo sapien
tgtcagaatgtagctagatagatgc

SEQ ID NO: 5573897 - DNA, 25 bp, Homo sapien
gactgtgggtctgtagcacctgtca

SEQ ID NO: 5573898 - DNA, 25 bp, Homo sapien
caaaacaggcatgctagatataagc

SEQ ID NO: 5573899 - DNA, 25 bp, Homo sapien
gatagatgctgataagaagggcaaa

SEQ ID NO: 5573900 - DNA, 25 bp, Homo sapien
ggagacacctaagtagaaagaaaca

SEQ ID NO: 5573901 - DNA, 25 bp, Homo sapien
accgtaattacacaagagggcaaac

SEQ ID NO: 5573902 - DNA, 25 bp, Homo sapien
cagatatctagccaagagcaggaag

SEQ ID NO: 5573903 - DNA, 25 bp, Homo sapien
aaatgcctgttcccaaagtgtaatc

SEQ ID NO: 5573904 - DNA, 25 bp, Homo sapien
ctcactgatcagagcggcttctgtt

SEQ ID NO: 5573905 - DNA, 25 bp, Homo sapien
tagtctccagctgaagcgaatgaat

SEQ ID NO: 5573906 - DNA, 25 bp, Homo sapien
aagcgaatgaatggaatctgctggc

SEQ ID NO: 5573907 - DNA, 25 bp, Homo sapien
gttgaatcaaggcagcttgtgcttt

SEQ ID NO: 5573908 - DNA, 25 bp, Homo sapien
ctgatatatggcaggaaatacttgc

SEQ ID NO: 5573909 - DNA, 25 bp, Homo sapien
acattcggagtgtctgaaatcagag

SEQ ID NO: 5573910 - DNA, 25 bp, Homo sapien
taaaagtaatgcatgagtctgattc

SEQ ID NO: 5573911 - DNA, 25 bp, Homo sapien
agggcaaagtatgacagatagattt

SEQ ID NO: 5573912 - DNA, 25 bp, Homo sapien
cccacagaatacttgagggcaaagt

SEQ ID NO: 5573913 - DNA, 25 bp, Homo sapien
aaaatgatgtcaacagcccacagaa

SEQ ID NO: 5573914 - DNA, 25 bp, Homo sapien
tttaatgcatgagcgtgtctgttat

SEQ ID NO: 5573915 - DNA, 25 bp, Homo sapien
cgggccctcctacctgaagctcagc

SEQ ID NO: 5573916 - DNA, 25 bp, Homo sapien
ggagatgaggctggatctcctggta

SEQ ID NO: 5573917 - DNA, 25 bp, Homo sapien
tgccttaggtgccaagagggcatta

SEQ ID NO: 5573918 - DNA, 25 bp, Homo sapien
ggtgcctctggtgcttgagaatgca

SEQ ID NO: 5573919 - DNA, 25 bp, Homo sapien
tgtagaaacagaaactggtcccaac

SEQ ID NO: 5573920 - DNA, 25 bp, Homo sapien
cagacctccagggaaaccctaagga

SEQ ID NO: 5573921 - DNA, 25 bp, Homo sapien
ataccactgagcactgccgagtatc

SEQ ID NO: 5573922 - DNA, 25 bp, Homo sapien
tgagaatgcagatctgcacacgggc

SEQ ID NO: 5573923 - DNA, 25 bp, Homo sapien
ctctacatcaggcatgcagtgggag

SEQ ID NO: 5573924 - DNA, 25 bp, Homo sapien
tttaactgaaggaatgagaatatgc

SEQ ID NO: 5573925 - DNA, 25 bp, Homo sapien
tgaaacttaccaaggaatggcacac

SEQ ID NO: 5573926 - DNA, 25 bp, Homo sapien
ctacaaatggagacattgaaggatt

SEQ ID NO: 5573927 - DNA, 25 bp, Homo sapien
tcgagttggtaaatgagtaagatat

SEQ ID NO: 5573928 - DNA, 25 bp, Homo sapien
ggagatgatcgaatacagatgaccc

SEQ ID NO: 5573929 - DNA, 25 bp, Homo sapien
gagatggactgagctatgaagttca

SEQ ID NO: 5573930 - DNA, 25 bp, Homo sapien
ttcactgtggcgtggttttgctgtt

SEQ ID NO: 5573931 - DNA, 25 bp, Homo sapien
taccatgtttgcaggagatgatcga

SEQ ID NO: 5573932 - DNA, 25 bp, Homo sapien
ggaaaccttaatgaaaagctgctgt

SEQ ID NO: 5573933 - DNA, 25 bp, Homo sapien
gtgtgtatagtgagctgactgtagt

SEQ ID NO: 5573934 - DNA, 25 bp, Homo sapien
gatgcctgtataatcggtctggatg

SEQ ID NO: 5573935 - DNA, 25 bp, Homo sapien
attgaaggattatgtgtatggaaat

SEQ ID NO: 5573936 - DNA, 25 bp, Homo sapien
cagatgaccctgctgtcgtgtcttc

SEQ ID NO: 5573937 - DNA, 25 bp, Homo sapien
aaggagcttacagcctgtccaccac

SEQ ID NO: 5573938 - DNA, 25 bp, Homo sapien
cacgtgtataggagctgagcttaaa

SEQ ID NO: 5573939 - DNA, 25 bp, Homo sapien
tacaatgtaaaagcaacagacacag

SEQ ID NO: 5573940 - DNA, 25 bp, Homo sapien
ggatcctttagtagccaggcaggac

SEQ ID NO: 5573941 - DNA, 25 bp, Homo sapien
ccaacaagcagagacagttgagatc

SEQ ID NO: 5573942 - DNA, 25 bp, Homo sapien
ccacacacagaatagacagagtgag

SEQ ID NO: 5573943 - DNA, 25 bp, Homo sapien
gacaggcccttctggcagctccaca

SEQ ID NO: 5573944 - DNA, 25 bp, Homo sapien
aggtgggatcccttccccaaggcca

SEQ ID NO: 5573945 - DNA, 25 bp, Homo sapien
atgttaaaaaagggttatgctggag

SEQ ID NO: 5573946 - DNA, 25 bp, Homo sapien
acccctgccaagattgcccagttac

SEQ ID NO: 5573947 - DNA, 25 bp, Homo sapien
ggccatgccgcctctaagagtacga

SEQ ID NO: 5573948 - DNA, 25 bp, Homo sapien
gacaagagcttctgaggatcaaaac

SEQ ID NO: 5573949 - DNA, 25 bp, Homo sapien
ccagattgtcctgacagacagtctc

SEQ ID NO: 5573950 - DNA, 25 bp, Homo sapien
ggcattgctaaattccagattgtcc

SEQ ID NO: 5573951 - DNA, 25 bp, Homo sapien
gtgggtcaggcagtcatttgagcct

SEQ ID NO: 5573952 - DNA, 25 bp, Homo sapien
ctttaaaatcagagacaagagcttc

SEQ ID NO: 5573953 - DNA, 25 bp, Homo sapien
aggcctttggttgtgtgtatgtttc

SEQ ID NO: 5573954 - DNA, 25 bp, Homo sapien
tcaaggaggtaatctagagaatcaa

SEQ ID NO: 5573955 - DNA, 25 bp, Homo sapien
catttgagcctggctggcattgcta

SEQ ID NO: 5573956 - DNA, 25 bp, Homo sapien
ataaaagatggggaactaagtaata

SEQ ID NO: 5573957 - DNA, 25 bp, Homo sapien
gacagacagtctcagtcaggccttt

SEQ ID NO: 5573958 - DNA, 25 bp, Homo sapien
ggcacatcacttgatccagggtccc

SEQ ID NO: 5573959 - DNA, 25 bp, Homo sapien
aaggggtaatcacagagaagtatta

SEQ ID NO: 5573960 - DNA, 25 bp, Homo sapien
gagggataggaaattgccagatcct

SEQ ID NO: 5573961 - DNA, 25 bp, Homo sapien
gttttgagtctgaccgcgtggaatc

SEQ ID NO: 5573962 - DNA, 25 bp, Homo sapien
cctgtcactctgggaggcttctgag

SEQ ID NO: 5573963 - DNA, 25 bp, Homo sapien
ctgtaaaatgggcttcctgggacca

SEQ ID NO: 5573964 - DNA, 25 bp, Homo sapien
tcccaagctcctaagcaggctgcac

SEQ ID NO: 5573965 - DNA, 25 bp, Homo sapien
aggtcgcttcgtgcctttgggcctc

SEQ ID NO: 5573966 - DNA, 25 bp, Homo sapien
cttccagtgctcttggtgaggctga

SEQ ID NO: 5573967 - DNA, 25 bp, Homo sapien
attagatgcacagagccaacagaga

SEQ ID NO: 5573968 - DNA, 25 bp, Homo sapien
cgcgtggaatcctataaggtggttc

SEQ ID NO: 5573969 - DNA, 25 bp, Homo sapien
gactcaaggagtaattagatgcaca

SEQ ID NO: 5573970 - DNA, 25 bp, Homo sapien
ttggcatcaagatcatactagcctt

SEQ ID NO: 5573971 - DNA, 25 bp, Homo sapien
aacatgtataataactgaaggtttt

SEQ ID NO: 5573972 - DNA, 25 bp, Homo sapien
aatcccaacttggttataatgtgtt

SEQ ID NO: 5573973 - DNA, 25 bp, Homo sapien
actggggaggtctatttcatgagtt

SEQ ID NO: 5573974 - DNA, 25 bp, Homo sapien
atattttgactgagactggtgcatc

SEQ ID NO: 5573975 - DNA, 25 bp, Homo sapien
atatatatgtacatggccaattatg

SEQ ID NO: 5573976 - DNA, 25 bp, Homo sapien
tgactgagactggtgcatctaaatt

SEQ ID NO: 5573977 - DNA, 25 bp, Homo sapien
aaatgtactggggaggtctatttca

SEQ ID NO: 5573978 - DNA, 25 bp, Homo sapien
tctggagggaaacatgtataataac

SEQ ID NO: 5573979 - DNA, 25 bp, Homo sapien
tgtatgtatataattgcccttagat

SEQ ID NO: 5573980 - DNA, 25 bp, Homo sapien
tttggttttggcatcaagatcatac

SEQ ID NO: 5573981 - DNA, 25 bp, Homo sapien
aaggccaaagttagtcgagtttcac

SEQ ID NO: 5573982 - DNA, 25 bp, Homo sapien
aatacatgggttttggcagacccac

SEQ ID NO: 5573983 - DNA, 25 bp, Homo sapien
taccttcaggaaatacacaaaggcc

SEQ ID NO: 5573984 - DNA, 25 bp, Homo sapien
aactatgcctgaactgccagcaaat

SEQ ID NO: 5573985 - DNA, 25 bp, Homo sapien
tgcaaatctaaaatgctccagagaa

SEQ ID NO: 5573986 - DNA, 25 bp, Homo sapien
ctgccagcaaatgcaaataagtaca

SEQ ID NO: 5573987 - DNA, 25 bp, Homo sapien
ggagaactctcactttaactatgcc

SEQ ID NO: 5573988 - DNA, 25 bp, Homo sapien
caatgagcaattagtttgcagaatc

SEQ ID NO: 5573989 - DNA, 25 bp, Homo sapien
tacacaaaggccaaagttagtcgag

SEQ ID NO: 5573990 - DNA, 25 bp, Homo sapien
tattatgaaatataggagaactctc

SEQ ID NO: 5573991 - DNA, 25 bp, Homo sapien
acatttaaatgtagtgtcagaagta

SEQ ID NO: 5573992 - DNA, 25 bp, Homo sapien
caaagttcaggtgagttcacgacgc

SEQ ID NO: 5573993 - DNA, 25 bp, Homo sapien
ggctagttgcacgcttgcggttcct

SEQ ID NO: 5573994 - DNA, 25 bp, Homo sapien
gttcacgacgctcggatcctagtgg

SEQ ID NO: 5573995 - DNA, 25 bp, Homo sapien
ctgggtccttagacccaggcgggac

SEQ ID NO: 5573996 - DNA, 25 bp, Homo sapien
aggtttcccgactggaccctctgtc

SEQ ID NO: 5573997 - DNA, 25 bp, Homo sapien
gcgttcagtcatttcccagggggat

SEQ ID NO: 5573998 - DNA, 25 bp, Homo sapien
cggcctcccactgcccgtgctcaca

SEQ ID NO: 5573999 - DNA, 25 bp, Homo sapien
gcccctgcgcctttccaccggcctc

SEQ ID NO: 5574000 - DNA, 25 bp, Homo sapien
tgcggttcctgccccttccgtgtgc

SEQ ID NO: 5574001 - DNA, 25 bp, Homo sapien
ccccagtgccaaccttccaaagttc

SEQ ID NO: 5574002 - DNA, 25 bp, Homo sapien
ccctctgtccagaggaagaaagatt

SEQ ID NO: 5574003 - DNA, 25 bp, Homo sapien
gacagagcgagaccccatctccaaa

SEQ ID NO: 5574004 - DNA, 25 bp, Homo sapien
tattaaaagaatacaggagagtatc

SEQ ID NO: 5574005 - DNA, 25 bp, Homo sapien
aaaaacaagaaataggctgggataa

SEQ ID NO: 5574006 - DNA, 25 bp, Homo sapien
agtatcaagtaaaaaagtagaagtc

SEQ ID NO: 5574007 - DNA, 25 bp, Homo sapien
aggtcgagactgcaataagccaaga

SEQ ID NO: 5574008 - DNA, 25 bp, Homo sapien
aggctgggataaggacagcttaaaa

SEQ ID NO: 5574009 - DNA, 25 bp, Homo sapien
aataagccaagattgcgtcattgca

SEQ ID NO: 5574010 - DNA, 25 bp, Homo sapien
tcccgggctcaagcaattctcccgc

SEQ ID NO: 5574011 - DNA, 25 bp, Homo sapien
cactctccagaggtaatcattgttt

SEQ ID NO: 5574012 - DNA, 25 bp, Homo sapien
ggataaggacagcttaaaagacctc

SEQ ID NO: 5574013 - DNA, 25 bp, Homo sapien
acaggagagtatcaagtaaaaaagt

SEQ ID NO: 5574014 - DNA, 25 bp, Homo sapien
tcccacagaatgcgctcgaatgaca

SEQ ID NO: 5574015 - DNA, 25 bp, Homo sapien
gcccatcgtgtgtgactctcacgcc

SEQ ID NO: 5574016 - DNA, 25 bp, Homo sapien
tggccatccccagcatcagtccttc

SEQ ID NO: 5574017 - DNA, 25 bp, Homo sapien
caaactcccgggcttcccacagaat

SEQ ID NO: 5574018 - DNA, 25 bp, Homo sapien
tggagccaagaggttaagctttcag

SEQ ID NO: 5574019 - DNA, 25 bp, Homo sapien
gaaggattgaagctgtccctctgcc

SEQ ID NO: 5574020 - DNA, 25 bp, Homo sapien
gctcgaatgacactggaaagatttc

SEQ ID NO: 5574021 - DNA, 25 bp, Homo sapien
ccatatttaaaggagtggaggagat

SEQ ID NO: 5574022 - DNA, 25 bp, Homo sapien
aattgaaggtcgtgatcctcaaacc

SEQ ID NO: 5574023 - DNA, 25 bp, Homo sapien
tcgtggtgcggccaaattcctctat

SEQ ID NO: 5574024 - DNA, 25 bp, Homo sapien
ctcacgccactgacggggtttcgtg

SEQ ID NO: 5574025 - DNA, 25 bp, Homo sapien
tcacattgcaggttaaggggtgaat

SEQ ID NO: 5574026 - DNA, 25 bp, Homo sapien
gaaaacaggatgagactgcaatatc

SEQ ID NO: 5574027 - DNA, 25 bp, Homo sapien
tgaattctggcaagttggagttggg

SEQ ID NO: 5574028 - DNA, 25 bp, Homo sapien
gcataggaagagacgtctctccttc

SEQ ID NO: 5574029 - DNA, 25 bp, Homo sapien
ggcgcaggggttatataactccaga

SEQ ID NO: 5574030 - DNA, 25 bp, Homo sapien
ccttgtgtcctcatgtggactttcc

SEQ ID NO: 5574031 - DNA, 25 bp, Homo sapien
agcagaaaacaggatgagactgcaa

SEQ ID NO: 5574032 - DNA, 25 bp, Homo sapien
tctcttggcttctccttgtgtcctc

SEQ ID NO: 5574033 - DNA, 25 bp, Homo sapien
acaatcacattgcaggttaaggggt

SEQ ID NO: 5574034 - DNA, 25 bp, Homo sapien
ctccagaaatctcagtcacagactc

SEQ ID NO: 5574035 - DNA, 25 bp, Homo sapien
cctttgtgtgtgagcataggaagag

SEQ ID NO: 5574036 - DNA, 25 bp, Homo sapien
agaccccaaaccagtgtctggtttc

SEQ ID NO: 5574037 - DNA, 25 bp, Homo sapien
ttggttttcccactggctcacaaaa

SEQ ID NO: 5574038 - DNA, 25 bp, Homo sapien
tcctctatgactcttcctgccttcc

SEQ ID NO: 5574039 - DNA, 25 bp, Homo sapien
tatatgtatttcgacagaggactgc

SEQ ID NO: 5574040 - DNA, 25 bp, Homo sapien
tcacatctccaggctctatggttta

SEQ ID NO: 5574041 - DNA, 25 bp, Homo sapien
tatttcgacagaggactgctgaaga

SEQ ID NO: 5574042 - DNA, 25 bp, Homo sapien
gctcacctctgtccctgtccgaaac

SEQ ID NO: 5574043 - DNA, 25 bp, Homo sapien
ctatggtttagcctccttggttttc

SEQ ID NO: 5574044 - DNA, 25 bp, Homo sapien
cacacccagcccctgaatatatgta

SEQ ID NO: 5574045 - DNA, 25 bp, Homo sapien
tgtccgaaactgccttgtgcttgat

SEQ ID NO: 5574046 - DNA, 25 bp, Homo sapien
ggtttcaaggtgcttgtgatctggc

SEQ ID NO: 5574047 - DNA, 25 bp, Homo sapien
gccccacgtgactgaggctccttgg

SEQ ID NO: 5574048 - DNA, 25 bp, Homo sapien
tgtttgcttcctgaccctggcctcc

SEQ ID NO: 5574049 - DNA, 25 bp, Homo sapien
ccccttaactggtgccccacgtgac

SEQ ID NO: 5574050 - DNA, 25 bp, Homo sapien
ctgagatcggttggagtctatttgc

SEQ ID NO: 5574051 - DNA, 25 bp, Homo sapien
ctatttgcaggcatgcaggcatttc

SEQ ID NO: 5574052 - DNA, 25 bp, Homo sapien
ctctcaccaacagggtgatgaggtg

SEQ ID NO: 5574053 - DNA, 25 bp, Homo sapien
agactcgggcattcagaaggccctt

SEQ ID NO: 5574054 - DNA, 25 bp, Homo sapien
ggtcacatcatgatctgtggtaccc

SEQ ID NO: 5574055 - DNA, 25 bp, Homo sapien
cctgctggctggaaattctcctgag

SEQ ID NO: 5574056 - DNA, 25 bp, Homo sapien
gcacagaggtttctgccagagcctc

SEQ ID NO: 5574057 - DNA, 25 bp, Homo sapien
ccctttcagcaaagggcgccacagg

SEQ ID NO: 5574058 - DNA, 25 bp, Homo sapien
cctccacaaggtttcccacactgac

SEQ ID NO: 5574059 - DNA, 25 bp, Homo sapien
aatttccaaaaagcccagagataac

SEQ ID NO: 5574060 - DNA, 25 bp, Homo sapien
agtctgcctgccaatttagaacttt

SEQ ID NO: 5574061 - DNA, 25 bp, Homo sapien
ctaaacccataggcaacacggtaga

SEQ ID NO: 5574062 - DNA, 25 bp, Homo sapien
aaagaacgaacaagtagtctgcctg

SEQ ID NO: 5574063 - DNA, 25 bp, Homo sapien
aaaaagatcaacccaaagaaattca

SEQ ID NO: 5574064 - DNA, 25 bp, Homo sapien
aatgaacaatcaaaagaacgaacaa

SEQ ID NO: 5574065 - DNA, 25 bp, Homo sapien
ttaaaaatctgccctaggattcatc

SEQ ID NO: 5574066 - DNA, 25 bp, Homo sapien
ccataggcaacacggtagaaaatgg

SEQ ID NO: 5574067 - DNA, 25 bp, Homo sapien
ccagagataacaaatacccaagcat

SEQ ID NO: 5574068 - DNA, 25 bp, Homo sapien
aataaatgctctccctcctaaaccc

SEQ ID NO: 5574069 - DNA, 25 bp, Homo sapien
cctgagaggactcgcatccacaaga

SEQ ID NO: 5574070 - DNA, 25 bp, Homo sapien
tccaacatggcgtcctccccctttc

SEQ ID NO: 5574071 - DNA, 25 bp, Homo sapien
tgtgcatcagtaaactcatgggagc

SEQ ID NO: 5574072 - DNA, 25 bp, Homo sapien
gcagcagatggttccgtccaacatg

SEQ ID NO: 5574073 - DNA, 25 bp, Homo sapien
ggctacagcccagccatgtgcgtgc

SEQ ID NO: 5574074 - DNA, 25 bp, Homo sapien
gaccaccccatgtgtggcagcagat

SEQ ID NO: 5574075 - DNA, 25 bp, Homo sapien
actcatgggagcattgaccacccca

SEQ ID NO: 5574076 - DNA, 25 bp, Homo sapien
cctttcctttcccgtcggacgctgc

SEQ ID NO: 5574077 - DNA, 25 bp, Homo sapien
aagaccgcgcccgaaaatcatcaaa

SEQ ID NO: 5574078 - DNA, 25 bp, Homo sapien
gaggactcgcatccacaagaccgcg

SEQ ID NO: 5574079 - DNA, 25 bp, Homo sapien
ccgcgcccgaaaatcatcaaactga

SEQ ID NO: 5574080 - DNA, 25 bp, Homo sapien
ttcctggagggtatttgtagctaaa

SEQ ID NO: 5574081 - DNA, 25 bp, Homo sapien
tgccttatagtaccacatacaactt

SEQ ID NO: 5574082 - DNA, 25 bp, Homo sapien
cttagattgccagtaaaacacatta

SEQ ID NO: 5574083 - DNA, 25 bp, Homo sapien
cttccaaaaaagtgtaggtgttatc

SEQ ID NO: 5574084 - DNA, 25 bp, Homo sapien
atcaacaaattaggtgactgaattc

SEQ ID NO: 5574085 - DNA, 25 bp, Homo sapien
cattcaggacttggtggctattctt

SEQ ID NO: 5574086 - DNA, 25 bp, Homo sapien
tgtagctaaaagtaaactagatttc

SEQ ID NO: 5574087 - DNA, 25 bp, Homo sapien
tcaaagtagaggcatgttgtgcctt

SEQ ID NO: 5574088 - DNA, 25 bp, Homo sapien
aaagtgtaggtgttatcagtatatc

SEQ ID NO: 5574089 - DNA, 25 bp, Homo sapien
tattggtccaaaggaagtatatgaa

SEQ ID NO: 5574090 - DNA, 25 bp, Homo sapien
atatcataccatgtgagagaaggtg

SEQ ID NO: 5574091 - DNA, 25 bp, Homo sapien
gtgagattatgggtataagtataac

SEQ ID NO: 5574092 - DNA, 25 bp, Homo sapien
ataaccaaacgcatcatacccataa

SEQ ID NO: 5574093 - DNA, 25 bp, Homo sapien
gtagagcatgcatgagtgagattat

SEQ ID NO: 5574094 - DNA, 25 bp, Homo sapien
agagtaataggactgtgatcatgcc

SEQ ID NO: 5574095 - DNA, 25 bp, Homo sapien
gcctgtgactaatcaagagacaagt

SEQ ID NO: 5574096 - DNA, 25 bp, Homo sapien
tagatatgcaagagtaataggactg

SEQ ID NO: 5574097 - DNA, 25 bp, Homo sapien
cattattttcaacaagggggctatt

SEQ ID NO: 5574098 - DNA, 25 bp, Homo sapien
tggatctagagtatgcatgagagcc

SEQ ID NO: 5574099 - DNA, 25 bp, Homo sapien
gagacaagtgatcaaaaattggtcc

SEQ ID NO: 5574100 - DNA, 25 bp, Homo sapien
caaaggcagtttattcagggaaatt

SEQ ID NO: 5574101 - DNA, 25 bp, Homo sapien
atgagagccatgtgcctagatatgc

SEQ ID NO: 5574102 - DNA, 25 bp, Homo sapien
cacgtgggcttcagataaggcctca

SEQ ID NO: 5574103 - DNA, 25 bp, Homo sapien
ttcccagaagcccctggcaaagtca

SEQ ID NO: 5574104 - DNA, 25 bp, Homo sapien
gctgccagacacaacctgagttatg

SEQ ID NO: 5574105 - DNA, 25 bp, Homo sapien
cacaacctgagttatggatgtcctc

SEQ ID NO: 5574106 - DNA, 25 bp, Homo sapien
gatcacaagatggctgccagacaca

SEQ ID NO: 5574107 - DNA, 25 bp, Homo sapien
atggtgacggctttattcttgggct

SEQ ID NO: 5574108 - DNA, 25 bp, Homo sapien
caatctctggagctaggatgatagg

SEQ ID NO: 5574109 - DNA, 25 bp, Homo sapien
gacgagacaatgaagacccagtgtc

SEQ ID NO: 5574110 - DNA, 25 bp, Homo sapien
tctcatgtaagtgagtagtccggag

SEQ ID NO: 5574111 - DNA, 25 bp, Homo sapien
ttgggctgtcttgccagatgatcac

SEQ ID NO: 5574112 - DNA, 25 bp, Homo sapien
tctctgagctcagtcataaaaagga

SEQ ID NO: 5574113 - DNA, 25 bp, Homo sapien
ctccagatgtgtgagcaattgtagc

SEQ ID NO: 5574114 - DNA, 25 bp, Homo sapien
tctgaaggcatacatcatggtatcc

SEQ ID NO: 5574115 - DNA, 25 bp, Homo sapien
tgcccataagctgccattttgtgag

SEQ ID NO: 5574116 - DNA, 25 bp, Homo sapien
gcagtagatcagttcagaagaaaac

SEQ ID NO: 5574117 - DNA, 25 bp, Homo sapien
cataagaagatttcctggctgccca

SEQ ID NO: 5574118 - DNA, 25 bp, Homo sapien
tgtgtgagcaattgtagctggccat

SEQ ID NO: 5574119 - DNA, 25 bp, Homo sapien
tcccagcaagaatgccaacagaaac

SEQ ID NO: 5574120 - DNA, 25 bp, Homo sapien
ttgtagctggccataagaagatttc

SEQ ID NO: 5574121 - DNA, 25 bp, Homo sapien
tcagaaagggatacatacttcctgc

SEQ ID NO: 5574122 - DNA, 25 bp, Homo sapien
atttgcatcagaaagggatacatac

SEQ ID NO: 5574123 - DNA, 25 bp, Homo sapien
tccactgcagcagtagatcagttca

SEQ ID NO: 5574124 - DNA, 25 bp, Homo sapien
ggggaccgcccctcggcgcaggagc

SEQ ID NO: 5574125 - DNA, 25 bp, Homo sapien
gctcctgcgccgaggggcggtcccc

SEQ ID NO: 5574126 - DNA, 25 bp, Homo sapien
ttgatcaaaaagacaggaaattaca

SEQ ID NO: 5574127 - DNA, 25 bp, Homo sapien
aatcctaaattaggcacagctgccc

SEQ ID NO: 5574128 - DNA, 25 bp, Homo sapien
ctaagccccaaaacggtctgacatc

SEQ ID NO: 5574129 - DNA, 25 bp, Homo sapien
atttagtaagagaggttagaataaa

SEQ ID NO: 5574130 - DNA, 25 bp, Homo sapien
caattgtgctccaaagtaggagagt

SEQ ID NO: 5574131 - DNA, 25 bp, Homo sapien
aaacagactaagatgtgtactaccc

SEQ ID NO: 5574132 - DNA, 25 bp, Homo sapien
tatctggccagtttccggacaatta

SEQ ID NO: 5574133 - DNA, 25 bp, Homo sapien
ttaaggagttctaagcattgggtta

SEQ ID NO: 5574134 - DNA, 25 bp, Homo sapien
aagtaggagagttccatgaatcaat

SEQ ID NO: 5574135 - DNA, 25 bp, Homo sapien
acagctgccctccccccattgatca

SEQ ID NO: 5574136 - DNA, 25 bp, Homo sapien
atcaggaaacaaaagggcttctcaa

SEQ ID NO: 5574137 - DNA, 25 bp, Homo sapien
tgttcacattgaggaccaagatatc

SEQ ID NO: 5574138 - DNA, 25 bp, Homo sapien
tttacagaggcacttgttcggtcta

SEQ ID NO: 5574139 - DNA, 25 bp, Homo sapien
tgttcggtctaacacagacacctcc

SEQ ID NO: 5574140 - DNA, 25 bp, Homo sapien
tccacttgttcacattgaggaccaa

SEQ ID NO: 5574141 - DNA, 25 bp, Homo sapien
tacagaggcacttgttcggtctaac

SEQ ID NO: 5574142 - DNA, 25 bp, Homo sapien
tttttacagaggcacttgttcggtc

SEQ ID NO: 5574143 - DNA, 25 bp, Homo sapien
ccatgacgacatgctggctcacatt

SEQ ID NO: 5574144 - DNA, 25 bp, Homo sapien
tctgcggatgtttctgtccacttgt

SEQ ID NO: 5574145 - DNA, 25 bp, Homo sapien
cacattgaggaccaagatatccttt

SEQ ID NO: 5574146 - DNA, 25 bp, Homo sapien
ctggtcactctgcggatgtttctgt

SEQ ID NO: 5574147 - DNA, 25 bp, Homo sapien
gatatccttttttacagaggcactt

SEQ ID NO: 5574148 - DNA, 25 bp, Homo sapien
gttcaggctggacaagatccaagga

SEQ ID NO: 5574149 - DNA, 25 bp, Homo sapien
tctctgacactgtgcgctgcaggtt

SEQ ID NO: 5574150 - DNA, 25 bp, Homo sapien
atccaaggactccaacagtgatccc

SEQ ID NO: 5574151 - DNA, 25 bp, Homo sapien
taaacaaataatggataagagggag

SEQ ID NO: 5574152 - DNA, 25 bp, Homo sapien
agtgaaagatggtgcctcttccaca

SEQ ID NO: 5574153 - DNA, 25 bp, Homo sapien
acagaccacatggaaagtagatcac

SEQ ID NO: 5574154 - DNA, 25 bp, Homo sapien
gtagcttaaagttggccatggtaaa

SEQ ID NO: 5574155 - DNA, 25 bp, Homo sapien
aaatcaaaggaattggacctaagga

SEQ ID NO: 5574156 - DNA, 25 bp, Homo sapien
ccagagggataaatggtctgattca

SEQ ID NO: 5574157 - DNA, 25 bp, Homo sapien
tcatgtaacagcaatgtccagaggt

SEQ ID NO: 5574158 - DNA, 25 bp, Homo sapien
tttcaacgaacgcagtgaaagatgg

SEQ ID NO: 5574159 - DNA, 25 bp, Homo sapien
gctcagtcaaggaaacatcatctct

SEQ ID NO: 5574160 - DNA, 25 bp, Homo sapien
aagggggcagtcaaatcatatatga

SEQ ID NO: 5574161 - DNA, 25 bp, Homo sapien
aggggataaggttttacacaagtca

SEQ ID NO: 5574162 - DNA, 25 bp, Homo sapien
ttcctgtagacatgattagtgtatc

SEQ ID NO: 5574163 - DNA, 25 bp, Homo sapien
tatatcccggtatacaggcaagtct

SEQ ID NO: 5574164 - DNA, 25 bp, Homo sapien
tacaggcaagtctccctaaaccatt

SEQ ID NO: 5574165 - DNA, 25 bp, Homo sapien
cagagagtagaagccattcgtaatc

SEQ ID NO: 5574166 - DNA, 25 bp, Homo sapien
tatatgaggctatgatcaaatcatt

SEQ ID NO: 5574167 - DNA, 25 bp, Homo sapien
atgcaaggtcttctagctctctatt

SEQ ID NO: 5574168 - DNA, 25 bp, Homo sapien
tggtcaatcagtttatgcaaggtct

SEQ ID NO: 5574169 - DNA, 25 bp, Homo sapien
tctcaagatgctcagtcaaggaaac

SEQ ID NO: 5574170 - DNA, 25 bp, Homo sapien
tttaagggtatgtacaagtgtaata

SEQ ID NO: 5574171 - DNA, 25 bp, Homo sapien
gggcaaacacaggtatggtctatgg

SEQ ID NO: 5574172 - DNA, 25 bp, Homo sapien
attttaagggtatgtacaagtgtaa

SEQ ID NO: 5574173 - DNA, 25 bp, Homo sapien
aattagaagggcatattagcaggta

SEQ ID NO: 5574174 - DNA, 25 bp, Homo sapien
acaagtgtaataattatgactttcc

SEQ ID NO: 5574175 - DNA, 25 bp, Homo sapien
tttgcaacatttcaagcaggctctt

SEQ ID NO: 5574176 - DNA, 25 bp, Homo sapien
acacaggtatggtctatggtttata

SEQ ID NO: 5574177 - DNA, 25 bp, Homo sapien
tcatccttaattagaagggcatatt

SEQ ID NO: 5574178 - DNA, 25 bp, Homo sapien
atcttagggacccatttaaacagcc

SEQ ID NO: 5574179 - DNA, 25 bp, Homo sapien
agaagggcatattagcaggtatttc

SEQ ID NO: 5574180 - DNA, 25 bp, Homo sapien
agagattaattggcatcatccttaa

SEQ ID NO: 5574181 - DNA, 25 bp, Homo sapien
acatttgccggatatttgctgcctg

SEQ ID NO: 5574182 - DNA, 25 bp, Homo sapien
actaaacactggcttggtgtggaag

SEQ ID NO: 5574183 - DNA, 25 bp, Homo sapien
ccacagtattgcaaaagagtctggt

SEQ ID NO: 5574184 - DNA, 25 bp, Homo sapien
agagtctggtaaaccaaaaaatcta

SEQ ID NO: 5574185 - DNA, 25 bp, Homo sapien
tgagggaagtcactttgccactcca

SEQ ID NO: 5574186 - DNA, 25 bp, Homo sapien
tcaggaggatcaatgcagtctacat

SEQ ID NO: 5574187 - DNA, 25 bp, Homo sapien
tccccatctgtaacatggaagtaat

SEQ ID NO: 5574188 - DNA, 25 bp, Homo sapien
tggaagtaataatgtcactaaggtc

SEQ ID NO: 5574189 - DNA, 25 bp, Homo sapien
ttgctgcctggcaccacagtattgc

SEQ ID NO: 5574190 - DNA, 25 bp, Homo sapien
gctgtaccatggcaggaaccctgcc

SEQ ID NO: 5574191 - DNA, 25 bp, Homo sapien
attcaagtataaactaaacactggc

SEQ ID NO: 5574192 - DNA, 25 bp, Homo sapien
cttgcatcccagttcacgcggggga

SEQ ID NO: 5574193 - DNA, 25 bp, Homo sapien
tcttaattgctggggaattgggaaa

SEQ ID NO: 5574194 - DNA, 25 bp, Homo sapien
gcgttcacatcggttagcaacttgc

SEQ ID NO: 5574195 - DNA, 25 bp, Homo sapien
aaaaaactgcaatgtaccaataaac

SEQ ID NO: 5574196 - DNA, 25 bp, Homo sapien
tcaaacaacctcaagatctcgtcag

SEQ ID NO: 5574197 - DNA, 25 bp, Homo sapien
gctcggctgcagtacgttttggttc

SEQ ID NO: 5574198 - DNA, 25 bp, Homo sapien
aacccgtgacctgccctggtctttg

SEQ ID NO: 5574199 - DNA, 25 bp, Homo sapien
cttcatccatggcctggtccagggt

SEQ ID NO: 5574200 - DNA, 25 bp, Homo sapien
ctgtgtgtgtgagaatccagcacaa

SEQ ID NO: 5574201 - DNA, 25 bp, Homo sapien
tttggttcagcgattgtgtttcctt

SEQ ID NO: 5574202 - DNA, 25 bp, Homo sapien
tcgtcaggaataatgaacaaggcat

SEQ ID NO: 5574203 - DNA, 25 bp, Homo sapien
ctaagggcacaaacctggccatgag

SEQ ID NO: 5574204 - DNA, 25 bp, Homo sapien
cctgggactcgaggcccctcattag

SEQ ID NO: 5574205 - DNA, 25 bp, Homo sapien
ggtcccagagctcttagggctgctc

SEQ ID NO: 5574206 - DNA, 25 bp, Homo sapien
cattagacccccaagtgcagaagtg

SEQ ID NO: 5574207 - DNA, 25 bp, Homo sapien
tcccattatccccaggaggaagtct

SEQ ID NO: 5574208 - DNA, 25 bp, Homo sapien
cctggccatgaggttctccttccca

SEQ ID NO: 5574209 - DNA, 25 bp, Homo sapien
ggctataagaagacagtggtccttc

SEQ ID NO: 5574210 - DNA, 25 bp, Homo sapien
ctcattagtgccctgcccacctgcc

SEQ ID NO: 5574211 - DNA, 25 bp, Homo sapien
cccttggggacctcactaagggcac

SEQ ID NO: 5574212 - DNA, 25 bp, Homo sapien
cgcaagtctggagttcagaagagag

SEQ ID NO: 5574213 - DNA, 25 bp, Homo sapien
gcacatgcagggccttgaagtgctg

SEQ ID NO: 5574214 - DNA, 25 bp, Homo sapien
ttgagatagggtctgactctgtcac

SEQ ID NO: 5574215 - DNA, 25 bp, Homo sapien
gctggtctccgactcctgagcccaa

SEQ ID NO: 5574216 - DNA, 25 bp, Homo sapien
agtgcagtggcaccatctgagctca

SEQ ID NO: 5574217 - DNA, 25 bp, Homo sapien
gggactacaggcatctgacaccaca

SEQ ID NO: 5574218 - DNA, 25 bp, Homo sapien
ccgttgacacaggtacagaagtttc

SEQ ID NO: 5574219 - DNA, 25 bp, Homo sapien
gagacaggatctcgccatgttgccc

SEQ ID NO: 5574220 - DNA, 25 bp, Homo sapien
attagataagatgcaccgttgacac

SEQ ID NO: 5574221 - DNA, 25 bp, Homo sapien
gtatattttgcagagacaggatctc

SEQ ID NO: 5574222 - DNA, 25 bp, Homo sapien
ctcggccacccaaagtggtgggatt

SEQ ID NO: 5574223 - DNA, 25 bp, Homo sapien
ttgcaggctcaaacgatcctcccac

SEQ ID NO: 5574224 - DNA, 25 bp, Homo sapien
tgagcccaagtaatctgcccccctc

SEQ ID NO: 5574225 - DNA, 25 bp, Homo sapien
aactgtatgacattctctcggcctc

SEQ ID NO: 5574226 - DNA, 25 bp, Homo sapien
acaatacctaacctggccattttta

SEQ ID NO: 5574227 - DNA, 25 bp, Homo sapien
aactgttacaataggtagctggtca

SEQ ID NO: 5574228 - DNA, 25 bp, Homo sapien
aaggaatatctgagataatgcactg

SEQ ID NO: 5574229 - DNA, 25 bp, Homo sapien
acttggtatagggtaggtactctat

SEQ ID NO: 5574230 - DNA, 25 bp, Homo sapien
ttgaattataccagcaaacagctta

SEQ ID NO: 5574231 - DNA, 25 bp, Homo sapien
tgaatgaatgtcagttcagccacat

SEQ ID NO: 5574232 - DNA, 25 bp, Homo sapien
gataactgaaaccatagaaggcaaa

SEQ ID NO: 5574233 - DNA, 25 bp, Homo sapien
aaaaatacagcatggattgagcaca

SEQ ID NO: 5574234 - DNA, 25 bp, Homo sapien
tggaccatggctaatactggataac

SEQ ID NO: 5574235 - DNA, 25 bp, Homo sapien
tctgagataatgcactgtaccacac

SEQ ID NO: 5574236 - DNA, 25 bp, Homo sapien
cattttcccgaacgggcaccctgag

SEQ ID NO: 5574237 - DNA, 25 bp, Homo sapien
ggcgtctctgtgcccgtttagtgga

SEQ ID NO: 5574238 - DNA, 25 bp, Homo sapien
ggagaagcccttgtgacaccttgct

SEQ ID NO: 5574239 - DNA, 25 bp, Homo sapien
ctgtgcccgtttagtggagttggag

SEQ ID NO: 5574240 - DNA, 25 bp, Homo sapien
gctgcagattgggaagctgcagatg

SEQ ID NO: 5574241 - DNA, 25 bp, Homo sapien
ggggcatggtgttagaaatcatagc

SEQ ID NO: 5574242 - DNA, 25 bp, Homo sapien
gctgcagattgggaagctgcagatt

SEQ ID NO: 5574243 - DNA, 25 bp, Homo sapien
gtgacaccttgctgcagattgggaa

SEQ ID NO: 5574244 - DNA, 25 bp, Homo sapien
ttagaaatcatagctgcggagaagc

SEQ ID NO: 5574245 - DNA, 25 bp, Homo sapien
ggggtgatcctgattcggctcccat

SEQ ID NO: 5574246 - DNA, 25 bp, Homo sapien
ttaggtggtcgagcgcattttctct

SEQ ID NO: 5574247 - DNA, 25 bp, Homo sapien
tggagcacaacaaagcctcggatat

SEQ ID NO: 5574248 - DNA, 25 bp, Homo sapien
cagtgggacatcttactttaaccgc

SEQ ID NO: 5574249 - DNA, 25 bp, Homo sapien
taagataagttacaaagaaaacatc

SEQ ID NO: 5574250 - DNA, 25 bp, Homo sapien
taaaatggatgtgtctatgtctttc

SEQ ID NO: 5574251 - DNA, 25 bp, Homo sapien
agaaagaaataagataagttacaaa

SEQ ID NO: 5574252 - DNA, 25 bp, Homo sapien
ctaatatctatgacattcagtggga

SEQ ID NO: 5574253 - DNA, 25 bp, Homo sapien
gaaatataaaatggatgtgtctatg

SEQ ID NO: 5574254 - DNA, 25 bp, Homo sapien
attagacagtcaagaaagaaataag

SEQ ID NO: 5574255 - DNA, 25 bp, Homo sapien
aaagcctcggatattagacagtcaa

SEQ ID NO: 5574256 - DNA, 25 bp, Homo sapien
aagtaattggctctgatcaaaatac

SEQ ID NO: 5574257 - DNA, 25 bp, Homo sapien
aaagagaaagataagccattcctaa

SEQ ID NO: 5574258 - DNA, 25 bp, Homo sapien
catcatttcaaatcagaggtgccat

SEQ ID NO: 5574259 - DNA, 25 bp, Homo sapien
aaaaacgcaaagccaaacaaagctg

SEQ ID NO: 5574260 - DNA, 25 bp, Homo sapien
agctgtcttcaacactcaggcctgg

SEQ ID NO: 5574261 - DNA, 25 bp, Homo sapien
ggaagcagatacacggctgatgaaa

SEQ ID NO: 5574262 - DNA, 25 bp, Homo sapien
aaaaaggacagcaatgcccatctgc

SEQ ID NO: 5574263 - DNA, 25 bp, Homo sapien
acacatgcacaattgagacatcctc

SEQ ID NO: 5574264 - DNA, 25 bp, Homo sapien
ggcctgccagatgacacactgaaac

SEQ ID NO: 5574265 - DNA, 25 bp, Homo sapien
tcagaggtgccatattcctgcagac

SEQ ID NO: 5574266 - DNA, 25 bp, Homo sapien
tcttacattggaacaagctgtcttc

SEQ ID NO: 5574267 - DNA, 25 bp, Homo sapien
tgctgcaaacaacttaggaggagag

SEQ ID NO: 5574268 - DNA, 25 bp, Homo sapien
gagacatcctctgtttgggcctgcc

SEQ ID NO: 5574269 - DNA, 25 bp, Homo sapien
gaggtcggtgggtgacgggactgtg

SEQ ID NO: 5574270 - DNA, 25 bp, Homo sapien
cacagtcccgtcacccaccgacctc

SEQ ID NO: 5574271 - DNA, 25 bp, Homo sapien
aaaacccagccatgtaggaatacac

SEQ ID NO: 5574272 - DNA, 25 bp, Homo sapien
atttgagcacaacacaacttggcat

SEQ ID NO: 5574273 - DNA, 25 bp, Homo sapien
cacaaaatgtatatctgcacacacc

SEQ ID NO: 5574274 - DNA, 25 bp, Homo sapien
ctataacgcttgctggaactgtttc

SEQ ID NO: 5574275 - DNA, 25 bp, Homo sapien
gttaaaggaacaatttgagcacaac

SEQ ID NO: 5574276 - DNA, 25 bp, Homo sapien
ctgtgagagactctagatggatgca

SEQ ID NO: 5574277 - DNA, 25 bp, Homo sapien
gtaccagctacttcagttcactgcc

SEQ ID NO: 5574278 - DNA, 25 bp, Homo sapien
acatgatttgtacgttaaaggaaca

SEQ ID NO: 5574279 - DNA, 25 bp, Homo sapien
gcacacacctcaaacatgtaccagc

SEQ ID NO: 5574280 - DNA, 25 bp, Homo sapien
atcctcatctggtgatacaactttt

SEQ ID NO: 5574281 - DNA, 25 bp, Homo sapien
actgcacccaacaaaacccagccat

SEQ ID NO: 5574282 - DNA, 25 bp, Homo sapien
aaggtgattagattcaggctgcaaa

SEQ ID NO: 5574283 - DNA, 25 bp, Homo sapien
gaagcgatgaaagaacgaatcttaa

SEQ ID NO: 5574284 - DNA, 25 bp, Homo sapien
gtgactacgggggccatttaatatg

SEQ ID NO: 5574285 - DNA, 25 bp, Homo sapien
aatatgaactgaaaggtccggtctt

SEQ ID NO: 5574286 - DNA, 25 bp, Homo sapien
attttaatgggaagcgatgaaagaa

SEQ ID NO: 5574287 - DNA, 25 bp, Homo sapien
tcggtcttagaaaaaggtgattaga

SEQ ID NO: 5574288 - DNA, 25 bp, Homo sapien
ttgccgtgaccacaccctgtgccca

SEQ ID NO: 5574289 - DNA, 25 bp, Homo sapien
tgagtcacttcgacgatgaatctga

SEQ ID NO: 5574290 - DNA, 25 bp, Homo sapien
tccagtccagacacatcctatttgc

SEQ ID NO: 5574291 - DNA, 25 bp, Homo sapien
cttaagttcaaggaagatctttcgg

SEQ ID NO: 5574292 - DNA, 25 bp, Homo sapien
ctacatgaaagtaaggtgactacgg

SEQ ID NO: 5574293 - DNA, 25 bp, Homo sapien
ttcagttaggttcccaggagcacag

SEQ ID NO: 5574294 - DNA, 25 bp, Homo sapien
aggagcacaggcattagaactacct

SEQ ID NO: 5574295 - DNA, 25 bp, Homo sapien
gagggtgctggacaatttaacttct

SEQ ID NO: 5574296 - DNA, 25 bp, Homo sapien
taccagaagtcacctcagagaatag

SEQ ID NO: 5574297 - DNA, 25 bp, Homo sapien
gagtagcagaactaagagtgcctga

SEQ ID NO: 5574298 - DNA, 25 bp, Homo sapien
ggggtcacatgaccacataggagga

SEQ ID NO: 5574299 - DNA, 25 bp, Homo sapien
aatattagggaatgaagaaagttga

SEQ ID NO: 5574300 - DNA, 25 bp, Homo sapien
aattggtagagaaaccctgttcacc

SEQ ID NO: 5574301 - DNA, 25 bp, Homo sapien
taagagtgcctgagttggaatctct

SEQ ID NO: 5574302 - DNA, 25 bp, Homo sapien
aaggaatatgtaacaagcccctggg

SEQ ID NO: 5574303 - DNA, 25 bp, Homo sapien
aggctggagtaatagatgattttag

SEQ ID NO: 5574304 - DNA, 25 bp, Homo sapien
aggtcacacagtatagtggacattt

SEQ ID NO: 5574305 - DNA, 25 bp, Homo sapien
aggtcccccttgcagtcagaacaca

SEQ ID NO: 5574306 - DNA, 25 bp, Homo sapien
ggatccatcccttggactgggagcc

SEQ ID NO: 5574307 - DNA, 25 bp, Homo sapien
ttggctcacccaatccaaggatcca

SEQ ID NO: 5574308 - DNA, 25 bp, Homo sapien
ttgctcttaaggaggtcacacagta

SEQ ID NO: 5574309 - DNA, 25 bp, Homo sapien
ggcttaggaatcttggtgggaagca

SEQ ID NO: 5574310 - DNA, 25 bp, Homo sapien
atgaccttggccctagctagctgct

SEQ ID NO: 5574311 - DNA, 25 bp, Homo sapien
gggaagcaggtcccccttgcagtca

SEQ ID NO: 5574312 - DNA, 25 bp, Homo sapien
gaacacaggcacatgaccttggctc

SEQ ID NO: 5574313 - DNA, 25 bp, Homo sapien
aaaatctctgattgagacagctacg

SEQ ID NO: 5574314 - DNA, 25 bp, Homo sapien
tgctgtccagcatatgaaccccttt

SEQ ID NO: 5574315 - DNA, 25 bp, Homo sapien
cagctgtagtgtagctccctgggag

SEQ ID NO: 5574316 - DNA, 25 bp, Homo sapien
catggttgtgatggcattgttaata

SEQ ID NO: 5574317 - DNA, 25 bp, Homo sapien
aagagcctgtctacaaaaagctggg

SEQ ID NO: 5574318 - DNA, 25 bp, Homo sapien
ggtagatgtatcttggtaaaatgtt

SEQ ID NO: 5574319 - DNA, 25 bp, Homo sapien
tgtgcaaggtagttaatgtttaggt

SEQ ID NO: 5574320 - DNA, 25 bp, Homo sapien
gcattgttaatagggaagcaagcac

SEQ ID NO: 5574321 - DNA, 25 bp, Homo sapien
agtttgaggtcagtgtgagttatga

SEQ ID NO: 5574322 - DNA, 25 bp, Homo sapien
aaagtgagctttaggccagttgcag

SEQ ID NO: 5574323 - DNA, 25 bp, Homo sapien
aggcggtagagttaattgagttcag

SEQ ID NO: 5574324 - DNA, 25 bp, Homo sapien
cttaaggccaggaaagtctggcaac

SEQ ID NO: 5574325 - DNA, 25 bp, Homo sapien
cagtgtgagttatgattgcgccact

SEQ ID NO: 5574326 - DNA, 25 bp, Homo sapien
gttacagttatagttctaagaacac

SEQ ID NO: 5574327 - DNA, 25 bp, Homo sapien
ctaagaacacagattaagagaaaac

SEQ ID NO: 5574328 - DNA, 25 bp, Homo sapien
ccatttacaaccaattgcgtgcaat

SEQ ID NO: 5574329 - DNA, 25 bp, Homo sapien
catgcttggaacttttagaggaatt

SEQ ID NO: 5574330 - DNA, 25 bp, Homo sapien
tcagctcactgcaaatcattcatta

SEQ ID NO: 5574331 - DNA, 25 bp, Homo sapien
aaccagctacattccccaaatccct

SEQ ID NO: 5574332 - DNA, 25 bp, Homo sapien
atctacccaggtcttaccagttgtc

SEQ ID NO: 5574333 - DNA, 25 bp, Homo sapien
gaacacagattaagagaaaacacag

SEQ ID NO: 5574334 - DNA, 25 bp, Homo sapien
tagaggaattaagtgttctcataac

SEQ ID NO: 5574335 - DNA, 25 bp, Homo sapien
accagttgtcattagcatcatgctt

SEQ ID NO: 5574336 - DNA, 25 bp, Homo sapien
acatacatacataaagaggaaaaaa

SEQ ID NO: 5574337 - DNA, 25 bp, Homo sapien
atttgaccttagcttggaacgtgca

SEQ ID NO: 5574338 - DNA, 25 bp, Homo sapien
cttagcttggaacgtgcataaggag

SEQ ID NO: 5574339 - DNA, 25 bp, Homo sapien
cagagttaagattcagacctcgtcc

SEQ ID NO: 5574340 - DNA, 25 bp, Homo sapien
gtcatctttgtatgagagctgaaac

SEQ ID NO: 5574341 - DNA, 25 bp, Homo sapien
ctaacaggtgccagagttaagattc

SEQ ID NO: 5574342 - DNA, 25 bp, Homo sapien
caattagtcctagagccagagcttc

SEQ ID NO: 5574343 - DNA, 25 bp, Homo sapien
tgaggctgcttcactaacaggtgcc

SEQ ID NO: 5574344 - DNA, 25 bp, Homo sapien
gcctctgtccttgggtcatctttgt

SEQ ID NO: 5574345 - DNA, 25 bp, Homo sapien
ccatgaatcaccttgaaagctccac

SEQ ID NO: 5574346 - DNA, 25 bp, Homo sapien
agcattaagtgatttgcttgaggct

SEQ ID NO: 5574347 - DNA, 25 bp, Homo sapien
tagcaagtaagcaaatttgcaaata

SEQ ID NO: 5574348 - DNA, 25 bp, Homo sapien
tatccttaaaatcatagtgcctggc

SEQ ID NO: 5574349 - DNA, 25 bp, Homo sapien
catagtgcctggcagagttaagtgc

SEQ ID NO: 5574350 - DNA, 25 bp, Homo sapien
gtgcctggcagagttaagtgcttga

SEQ ID NO: 5574351 - DNA, 25 bp, Homo sapien
caaaacaagcaaggatcatgtttgc

SEQ ID NO: 5574352 - DNA, 25 bp, Homo sapien
tagtgtgtcaatagagtccatgtcc

SEQ ID NO: 5574353 - DNA, 25 bp, Homo sapien
agaacagataaagattattagatta

SEQ ID NO: 5574354 - DNA, 25 bp, Homo sapien
tagactgctgagtcaatgaatgaat

SEQ ID NO: 5574355 - DNA, 25 bp, Homo sapien
tgatatagactgctgagtcaatgaa

SEQ ID NO: 5574356 - DNA, 25 bp, Homo sapien
aacaagcaaggatcatgtttgcctt

SEQ ID NO: 5574357 - DNA, 25 bp, Homo sapien
cagagttaagtgcttgatatagact

SEQ ID NO: 5574358 - DNA, 25 bp, Homo sapien
aatgaatgaatgtaggtcctacgta

SEQ ID NO: 5574359 - DNA, 25 bp, Homo sapien
aaagtcaagagtgcaacagaatcac

SEQ ID NO: 5574360 - DNA, 25 bp, Homo sapien
caggctggtcttgagaataatttta

SEQ ID NO: 5574361 - DNA, 25 bp, Homo sapien
tttttccaaagtgtgtaatctcctg

SEQ ID NO: 5574362 - DNA, 25 bp, Homo sapien
taaacagactcatagggtctgctat

SEQ ID NO: 5574363 - DNA, 25 bp, Homo sapien
agggtctgctatttaagaaagtcct

SEQ ID NO: 5574364 - DNA, 25 bp, Homo sapien
aatctcctgagtggttctgaaagtc

SEQ ID NO: 5574365 - DNA, 25 bp, Homo sapien
gaatcacctcgcgatgactgacaag

SEQ ID NO: 5574366 - DNA, 25 bp, Homo sapien
tgagtggttctgaaagtcaagagtg

SEQ ID NO: 5574367 - DNA, 25 bp, Homo sapien
agaaagtcctatcagaaaaacaatt

SEQ ID NO: 5574368 - DNA, 25 bp, Homo sapien
caagagtgcaacagaatcacctcgc

SEQ ID NO: 5574369 - DNA, 25 bp, Homo sapien
tataaattcaaatgtaaacagactc

SEQ ID NO: 5574370 - DNA, 25 bp, Homo sapien
ttaagtcaggcttcaggactactga

SEQ ID NO: 5574371 - DNA, 25 bp, Homo sapien
tacttactcgccacccaccccacta

SEQ ID NO: 5574372 - DNA, 25 bp, Homo sapien
aactagaagcaccgactatattgtt

SEQ ID NO: 5574373 - DNA, 25 bp, Homo sapien
cttgcctaagcacaaaagcaaaacc

SEQ ID NO: 5574374 - DNA, 25 bp, Homo sapien
caaaaaaggtagtaagcaaaatata

SEQ ID NO: 5574375 - DNA, 25 bp, Homo sapien
ggaagcaaggaaaccaattctctag

SEQ ID NO: 5574376 - DNA, 25 bp, Homo sapien
ttcatcgccctctccacaaaaggac

SEQ ID NO: 5574377 - DNA, 25 bp, Homo sapien
tgcgtctatgctcaaatcaatgttt

SEQ ID NO: 5574378 - DNA, 25 bp, Homo sapien
tgaagaagatgacaattatgatttc

SEQ ID NO: 5574379 - DNA, 25 bp, Homo sapien
tatacaaacaaaacttgatcctatc

SEQ ID NO: 5574380 - DNA, 25 bp, Homo sapien
ttttctgagcatacagggaagcaag

SEQ ID NO: 5574381 - DNA, 25 bp, Homo sapien
aatttccatagttctgccggccttg

SEQ ID NO: 5574382 - DNA, 25 bp, Homo sapien
tgtgagtatcacttcaagcaattaa

SEQ ID NO: 5574383 - DNA, 25 bp, Homo sapien
tgcttagagacaactagtggaactg

SEQ ID NO: 5574384 - DNA, 25 bp, Homo sapien
ctgaataagaaggactgtttgggtt

SEQ ID NO: 5574385 - DNA, 25 bp, Homo sapien
ttcaagcaattaagaaaaagagaga

SEQ ID NO: 5574386 - DNA, 25 bp, Homo sapien
tggtcggttttacaaagaagtctga

SEQ ID NO: 5574387 - DNA, 25 bp, Homo sapien
actagtggaactgaatgtgagtatc

SEQ ID NO: 5574388 - DNA, 25 bp, Homo sapien
agagacaactagtggaactgaatgt

SEQ ID NO: 5574389 - DNA, 25 bp, Homo sapien
agaaaaagagagagttattttggtc

SEQ ID NO: 5574390 - DNA, 25 bp, Homo sapien
agtctgaataagaaggactgtttgg

SEQ ID NO: 5574391 - DNA, 25 bp, Homo sapien
caggtgggactccaattattctggt

SEQ ID NO: 5574392 - DNA, 25 bp, Homo sapien
ctaccctggtcaccaaacaaggcgg

SEQ ID NO: 5574393 - DNA, 25 bp, Homo sapien
gtaacttgcttgaaacaaactcttc

SEQ ID NO: 5574394 - DNA, 25 bp, Homo sapien
atggcataataaataacgagttaag

SEQ ID NO: 5574395 - DNA, 25 bp, Homo sapien
caagcttctcttgcacctgggcagg

SEQ ID NO: 5574396 - DNA, 25 bp, Homo sapien
gctgaggtagacgtttctgaactgt

SEQ ID NO: 5574397 - DNA, 25 bp, Homo sapien
cacctgggcaggttctgtttgctta

SEQ ID NO: 5574398 - DNA, 25 bp, Homo sapien
tagttccacaaaatgggcttttgaa

SEQ ID NO: 5574399 - DNA, 25 bp, Homo sapien
ccaaacaaggcggctcagtatcata

SEQ ID NO: 5574400 - DNA, 25 bp, Homo sapien
gaagggctggtttatgcctatgtgc

SEQ ID NO: 5574401 - DNA, 25 bp, Homo sapien
aggcggctcagtatcataaaaccac

SEQ ID NO: 5574402 - DNA, 25 bp, Homo sapien
gtttgcttattcacagaagggctgg

SEQ ID NO: 5574403 - DNA, 25 bp, Homo sapien
ttcttcctactgtggaatatgggga

SEQ ID NO: 5574404 - DNA, 25 bp, Homo sapien
aggacagtggaactatggcatttga

SEQ ID NO: 5574405 - DNA, 25 bp, Homo sapien
taaaaggaatgcatctaaattggta

SEQ ID NO: 5574406 - DNA, 25 bp, Homo sapien
agaaagtcctggtcagatgccttgc

SEQ ID NO: 5574407 - DNA, 25 bp, Homo sapien
agtgtgtgacggtaaatctaacaac

SEQ ID NO: 5574408 - DNA, 25 bp, Homo sapien
ttggtattaaatatagctagaaact

SEQ ID NO: 5574409 - DNA, 25 bp, Homo sapien
tttcattagtgtgtgacggtaaatc

SEQ ID NO: 5574410 - DNA, 25 bp, Homo sapien
agagaaacacaatgtaggcatggct

SEQ ID NO: 5574411 - DNA, 25 bp, Homo sapien
gtgttggaagtataaggatcagaaa

SEQ ID NO: 5574412 - DNA, 25 bp, Homo sapien
ttgaacgagtaaataaaggattatc

SEQ ID NO: 5574413 - DNA, 25 bp, Homo sapien
atgccttgctactccatcagggctt

SEQ ID NO: 5574414 - DNA, 25 bp, Homo sapien
agacaatcaccgagagccctggtgg

SEQ ID NO: 5574415 - DNA, 25 bp, Homo sapien
gactgaagttggtaattacaagatg

SEQ ID NO: 5574416 - DNA, 25 bp, Homo sapien
agagggcagtttaatggcatgatga

SEQ ID NO: 5574417 - DNA, 25 bp, Homo sapien
agcagcggtagttaaggatatagct

SEQ ID NO: 5574418 - DNA, 25 bp, Homo sapien
aagaggattttgaagggagcttctg

SEQ ID NO: 5574419 - DNA, 25 bp, Homo sapien
gccctcagctttgcccccagccagc

SEQ ID NO: 5574420 - DNA, 25 bp, Homo sapien
gtagttcagagtaatcaagaggaca

SEQ ID NO: 5574421 - DNA, 25 bp, Homo sapien
tttgctgattgttaagggccaaggg

SEQ ID NO: 5574422 - DNA, 25 bp, Homo sapien
gaagggagcttctgaaggataaact

SEQ ID NO: 5574423 - DNA, 25 bp, Homo sapien
gccctggtggcttttgagagggcag

SEQ ID NO: 5574424 - DNA, 25 bp, Homo sapien
caagaggacaagtatctaagccctt

SEQ ID NO: 5574425 - DNA, 25 bp, Homo sapien
gcacatagaacatgggctctgagca

SEQ ID NO: 5574426 - DNA, 25 bp, Homo sapien
ataaagctgttagtacggcgtctgg

SEQ ID NO: 5574427 - DNA, 25 bp, Homo sapien
tgcatactggggttactaacagacc

SEQ ID NO: 5574428 - DNA, 25 bp, Homo sapien
ctacctcatggagtttgggaggatt

SEQ ID NO: 5574429 - DNA, 25 bp, Homo sapien
gaagaagtgacgttctgggacttct

SEQ ID NO: 5574430 - DNA, 25 bp, Homo sapien
tctgagcacaaaaacgagctgtgta

SEQ ID NO: 5574431 - DNA, 25 bp, Homo sapien
gaaatatgaagagacagagtctgtt

SEQ ID NO: 5574432 - DNA, 25 bp, Homo sapien
gcagtagattgtttccaaaggtggc

SEQ ID NO: 5574433 - DNA, 25 bp, Homo sapien
ctcttagaggaacagcaatagagca

SEQ ID NO: 5574434 - DNA, 25 bp, Homo sapien
tggctggccctatgacttgtggaag

SEQ ID NO: 5574435 - DNA, 25 bp, Homo sapien
caaaggtggctgcaacaatttgtcc

SEQ ID NO: 5574436 - DNA, 25 bp, Homo sapien
tgctcaccacgtgaggaactggagt

SEQ ID NO: 5574437 - DNA, 25 bp, Homo sapien
ggcgcgcacttcttatcccggatcc

SEQ ID NO: 5574438 - DNA, 25 bp, Homo sapien
cgctgccctgagtgctcaccacgtg

SEQ ID NO: 5574439 - DNA, 25 bp, Homo sapien
ggactggaggcgtcctccaggtgtc

SEQ ID NO: 5574440 - DNA, 25 bp, Homo sapien
ttcttatcccggatccctggcgcgc

SEQ ID NO: 5574441 - DNA, 25 bp, Homo sapien
cgtagtcccacaccacgaaggtgcc

SEQ ID NO: 5574442 - DNA, 25 bp, Homo sapien
ctcaaacccaggtatgggacctcgg

SEQ ID NO: 5574443 - DNA, 25 bp, Homo sapien
tcggaaaatcgacccgctgccctga

SEQ ID NO: 5574444 - DNA, 25 bp, Homo sapien
gcgaacaccacgtagtcccacacca

SEQ ID NO: 5574445 - DNA, 25 bp, Homo sapien
gtcccacaccacgaaggtgccgatg

SEQ ID NO: 5574446 - DNA, 25 bp, Homo sapien
ccgcgcccctcaaacccaggtatgg

SEQ ID NO: 5574447 - DNA, 25 bp, Homo sapien
ctttggcacctgcggctgcttcatg

SEQ ID NO: 5574448 - DNA, 25 bp, Homo sapien
tggcaaaaagcagtgtgtagtttct

SEQ ID NO: 5574449 - DNA, 25 bp, Homo sapien
tagggtagagcattagtttccaggg

SEQ ID NO: 5574450 - DNA, 25 bp, Homo sapien
gggtgtgagaagttggtcattcttg

SEQ ID NO: 5574451 - DNA, 25 bp, Homo sapien
agggtggtgacttttctttgctggt

SEQ ID NO: 5574452 - DNA, 25 bp, Homo sapien
atttccttgttggcagtgggtcctt

SEQ ID NO: 5574453 - DNA, 25 bp, Homo sapien
ctgcttcatgggcagtcagggtttg

SEQ ID NO: 5574454 - DNA, 25 bp, Homo sapien
tgacttccagaggtgctctcttggc

SEQ ID NO: 5574455 - DNA, 25 bp, Homo sapien
tgctggtctgaagtcatgctgtctc

SEQ ID NO: 5574456 - DNA, 25 bp, Homo sapien
cagggtgtgtgatccactgccctca

SEQ ID NO: 5574457 - DNA, 25 bp, Homo sapien
ttggcttagactttgaatgtggttc

SEQ ID NO: 5574458 - DNA, 25 bp, Homo sapien
gtggggcccaccgaatcgtcctcgt

SEQ ID NO: 5574459 - DNA, 25 bp, Homo sapien
acgaggacgattcggtgggccccac

SEQ ID NO: 5574460 - DNA, 25 bp, Homo sapien
atgcagtggctatacaagatacaac

SEQ ID NO: 5574461 - DNA, 25 bp, Homo sapien
gggagcacatggccaaatagttact

SEQ ID NO: 5574462 - DNA, 25 bp, Homo sapien
acagatgaagagcacaaatcccttg

SEQ ID NO: 5574463 - DNA, 25 bp, Homo sapien
tgaaaacttgtgtacccagggagca

SEQ ID NO: 5574464 - DNA, 25 bp, Homo sapien
caacattaacaaagactgaggcaga

SEQ ID NO: 5574465 - DNA, 25 bp, Homo sapien
aacaaggacaagtacccacagatga

SEQ ID NO: 5574466 - DNA, 25 bp, Homo sapien
cagagaaaaggccaagtcttcttcc

SEQ ID NO: 5574467 - DNA, 25 bp, Homo sapien
agaaagatgggctccagctctcaaa

SEQ ID NO: 5574468 - DNA, 25 bp, Homo sapien
agttactgagacagggtatgaaaga

SEQ ID NO: 5574469 - DNA, 25 bp, Homo sapien
tggtagaattagcctcaaggggtac

SEQ ID NO: 5574470 - DNA, 25 bp, Homo sapien
atttcctagaagagtccggagcagt

SEQ ID NO: 5574471 - DNA, 25 bp, Homo sapien
acttggtccaagtacaagaggaaat

SEQ ID NO: 5574472 - DNA, 25 bp, Homo sapien
gatggaggagtatgtcttaagatga

SEQ ID NO: 5574473 - DNA, 25 bp, Homo sapien
tgaaaagagaattgggttgccttgt

SEQ ID NO: 5574474 - DNA, 25 bp, Homo sapien
taaaagagcacgtctggttgctgtt

SEQ ID NO: 5574475 - DNA, 25 bp, Homo sapien
gctggacattagctcctggtaagga

SEQ ID NO: 5574476 - DNA, 25 bp, Homo sapien
ggttgccttgttaggaggtgatgtc

SEQ ID NO: 5574477 - DNA, 25 bp, Homo sapien
gtcttaagatgagtttggaggaagg

SEQ ID NO: 5574478 - DNA, 25 bp, Homo sapien
agtacaagaggaaatctttgaagct

SEQ ID NO: 5574479 - DNA, 25 bp, Homo sapien
ctggtaaggattttgaacttggtcc

SEQ ID NO: 5574480 - DNA, 25 bp, Homo sapien
tctgatcttgctggacattagctcc

SEQ ID NO: 5574481 - DNA, 25 bp, Homo sapien
taaagcaaggtcaaatgattggatt

SEQ ID NO: 5574482 - DNA, 25 bp, Homo sapien
tggacacaaaagaatcctaacaaat

SEQ ID NO: 5574483 - DNA, 25 bp, Homo sapien
tacatagctgtgatacataccttgt

SEQ ID NO: 5574484 - DNA, 25 bp, Homo sapien
taggggatagcacaccccagctctt

SEQ ID NO: 5574485 - DNA, 25 bp, Homo sapien
gcacgcgagtacacacaagtgccca

SEQ ID NO: 5574486 - DNA, 25 bp, Homo sapien
tagttgagtgaaccactggataatt

SEQ ID NO: 5574487 - DNA, 25 bp, Homo sapien
actactaccaagtcagaaaagctct

SEQ ID NO: 5574488 - DNA, 25 bp, Homo sapien
atacaactcacaagtaggggatagc

SEQ ID NO: 5574489 - DNA, 25 bp, Homo sapien
acacaagaacatatgcacgcgagta

SEQ ID NO: 5574490 - DNA, 25 bp, Homo sapien
ttgttatagcagtcagagccagcca

SEQ ID NO: 5574491 - DNA, 25 bp, Homo sapien
caatatacaccaacaacacaagaac

SEQ ID NO: 5574492 - DNA, 25 bp, Homo sapien
aaaacaaagcagaacaatatacacc

SEQ ID NO: 5574493 - DNA, 25 bp, Homo sapien
cgtggaacatgtgtcccgggtttta

SEQ ID NO: 5574494 - DNA, 25 bp, Homo sapien
gaatttgactcaccagctaacactg

SEQ ID NO: 5574495 - DNA, 25 bp, Homo sapien
ttagcttaatgtatgccggtccttc

SEQ ID NO: 5574496 - DNA, 25 bp, Homo sapien
tttttctgagggaagccttagctta

SEQ ID NO: 5574497 - DNA, 25 bp, Homo sapien
aagacatgatagcaatttgagagtc

SEQ ID NO: 5574498 - DNA, 25 bp, Homo sapien
tgtacagcctagaaggaaagatcaa

SEQ ID NO: 5574499 - DNA, 25 bp, Homo sapien
tttcgtctgaagtggctgtaaataa

SEQ ID NO: 5574500 - DNA, 25 bp, Homo sapien
ctaatgttgcgcatgcccactgtgc

SEQ ID NO: 5574501 - DNA, 25 bp, Homo sapien
gtttttatggaagccttgccacgtg

SEQ ID NO: 5574502 - DNA, 25 bp, Homo sapien
aaagtggttagtcctgtcgcctcct

SEQ ID NO: 5574503 - DNA, 25 bp, Homo sapien
tttgagagtctgaactgtaagtttt

SEQ ID NO: 5574504 - DNA, 25 bp, Homo sapien
acaagagctagcagagtacatgtgt

SEQ ID NO: 5574505 - DNA, 25 bp, Homo sapien
cacaggtaaatgagccctaccagat

SEQ ID NO: 5574506 - DNA, 25 bp, Homo sapien
aaggtttataagtgtagataccagt

SEQ ID NO: 5574507 - DNA, 25 bp, Homo sapien
agaagttaagttacttgcgtaagtc

SEQ ID NO: 5574508 - DNA, 25 bp, Homo sapien
gcatcttgggccactgtgctagcac

SEQ ID NO: 5574509 - DNA, 25 bp, Homo sapien
tagcccagtggcttgtgcatggtta

SEQ ID NO: 5574510 - DNA, 25 bp, Homo sapien
tgtgcatggttaatactcagtgtaa

SEQ ID NO: 5574511 - DNA, 25 bp, Homo sapien
acccatgtagccccttggccagctc

SEQ ID NO: 5574512 - DNA, 25 bp, Homo sapien
tatgcttgttgaggacagagacttt

SEQ ID NO: 5574513 - DNA, 25 bp, Homo sapien
gccagctctgctcccatctgcctct

SEQ ID NO: 5574514 - DNA, 25 bp, Homo sapien
tgtgtagtattatgtggcaccatgc

SEQ ID NO: 5574515 - DNA, 25 bp, Homo sapien
tcagagagtctctgtccacagactg

SEQ ID NO: 5574516 - DNA, 25 bp, Homo sapien
acagactgatgctgagaagcactca

SEQ ID NO: 5574517 - DNA, 25 bp, Homo sapien
gctcagacagcggcataaaaatgga

SEQ ID NO: 5574518 - DNA, 25 bp, Homo sapien
ggagaggaattccctgtggtctggt

SEQ ID NO: 5574519 - DNA, 25 bp, Homo sapien
ggaggcggaatccttctgatgtgtc

SEQ ID NO: 5574520 - DNA, 25 bp, Homo sapien
atgatgtcaagaaatcagacggagg

SEQ ID NO: 5574521 - DNA, 25 bp, Homo sapien
gtcatctcccagacaggctcatggc

SEQ ID NO: 5574522 - DNA, 25 bp, Homo sapien
ttctgatgtgtctgacgagtccgac

SEQ ID NO: 5574523 - DNA, 25 bp, Homo sapien
gcggcataaaaatggagccaggttc

SEQ ID NO: 5574524 - DNA, 25 bp, Homo sapien
caagataaccagagtacaaaagtcc

SEQ ID NO: 5574525 - DNA, 25 bp, Homo sapien
cgagtccgacaaaagcacgtcgggc

SEQ ID NO: 5574526 - DNA, 25 bp, Homo sapien
aaaataaagaatgccaagttgctat

SEQ ID NO: 5574527 - DNA, 25 bp, Homo sapien
ataagtcctagtaacactgattcat

SEQ ID NO: 5574528 - DNA, 25 bp, Homo sapien
attttaatggaaataacttagacat

SEQ ID NO: 5574529 - DNA, 25 bp, Homo sapien
acaaagctttgcaccacattgtggt

SEQ ID NO: 5574530 - DNA, 25 bp, Homo sapien
atccctccaaataaaacaaccagga

SEQ ID NO: 5574531 - DNA, 25 bp, Homo sapien
acatgcagattattgcttagaactt

SEQ ID NO: 5574532 - DNA, 25 bp, Homo sapien
ttacagggtgttcattttatcattc

SEQ ID NO: 5574533 - DNA, 25 bp, Homo sapien
ttcaggacaaaatatgtcaaccttg

SEQ ID NO: 5574534 - DNA, 25 bp, Homo sapien
ttaaaatggcacacataaagtatac

SEQ ID NO: 5574535 - DNA, 25 bp, Homo sapien
tctagcacaagaaaatcccaaggtt

SEQ ID NO: 5574536 - DNA, 25 bp, Homo sapien
gtcaaccttgtataacatgcagatt

SEQ ID NO: 5574537 - DNA, 25 bp, Homo sapien
ctgaatttctggagcacgcagcaag

SEQ ID NO: 5574538 - DNA, 25 bp, Homo sapien
gagatatggaacagcaaaatgaaag

SEQ ID NO: 5574539 - DNA, 25 bp, Homo sapien
gactgcaaggaagacagcttcagag

SEQ ID NO: 5574540 - DNA, 25 bp, Homo sapien
ctcagagtttagagatatggagaaa

SEQ ID NO: 5574541 - DNA, 25 bp, Homo sapien
aggaacaaggagagtttacttacac

SEQ ID NO: 5574542 - DNA, 25 bp, Homo sapien
tccgctttggtatcatggtcccttc

SEQ ID NO: 5574543 - DNA, 25 bp, Homo sapien
aaggtgtgatggatcagctttactc

SEQ ID NO: 5574544 - DNA, 25 bp, Homo sapien
tacagcacaggattcttagactgca

SEQ ID NO: 5574545 - DNA, 25 bp, Homo sapien
tctgcctccagcaaaggtgtgatgg

SEQ ID NO: 5574546 - DNA, 25 bp, Homo sapien
gagcacgcagcaagatcatgatttt

SEQ ID NO: 5574547 - DNA, 25 bp, Homo sapien
tgaagatgtgaagtcaatgcacttt

SEQ ID NO: 5574548 - DNA, 25 bp, Homo sapien
ggcatatcaaaaggggtccacattc

SEQ ID NO: 5574549 - DNA, 25 bp, Homo sapien
ttctagaaacggatgacaaaactca

SEQ ID NO: 5574550 - DNA, 25 bp, Homo sapien
cagacagatcatgaacaagaacttt

SEQ ID NO: 5574551 - DNA, 25 bp, Homo sapien
gaattccgtggagacacacaagcaa

SEQ ID NO: 5574552 - DNA, 25 bp, Homo sapien
tgtggcccttaaagaaacagatgcc

SEQ ID NO: 5574553 - DNA, 25 bp, Homo sapien
gtggaaagaagttgctggtaatgca

SEQ ID NO: 5574554 - DNA, 25 bp, Homo sapien
aaaaggaaacaatagtcagaggata

SEQ ID NO: 5574555 - DNA, 25 bp, Homo sapien
gtcagaggataaatgtaagaagaaa

SEQ ID NO: 5574556 - DNA, 25 bp, Homo sapien
gttatggcacaaacagtaaggagat

SEQ ID NO: 5574557 - DNA, 25 bp, Homo sapien
gttgccttttcacggagggagacaa

SEQ ID NO: 5574558 - DNA, 25 bp, Homo sapien
ggggttagtgctacaagagaattct

SEQ ID NO: 5574559 - DNA, 25 bp, Homo sapien
gatcttcgaatggcagtttgggact

SEQ ID NO: 5574560 - DNA, 25 bp, Homo sapien
tttgctggtttgcatgaaacgggag

SEQ ID NO: 5574561 - DNA, 25 bp, Homo sapien
cccatgaagtgggtttggcttggtg

SEQ ID NO: 5574562 - DNA, 25 bp, Homo sapien
gcccgattgccaggccccacatgca

SEQ ID NO: 5574563 - DNA, 25 bp, Homo sapien
gcttctgcagctacccgctcctgtc

SEQ ID NO: 5574564 - DNA, 25 bp, Homo sapien
gcacagcagcggcagtttgcctttg

SEQ ID NO: 5574565 - DNA, 25 bp, Homo sapien
tgttctcgaagccatagcccaggtg

SEQ ID NO: 5574566 - DNA, 25 bp, Homo sapien
gtccatcggggcatccacacttcta

SEQ ID NO: 5574567 - DNA, 25 bp, Homo sapien
cagaccccttcagcccacagcagct

SEQ ID NO: 5574568 - DNA, 25 bp, Homo sapien
ccccacatgcaacaagcccacagct

SEQ ID NO: 5574569 - DNA, 25 bp, Homo sapien
cctaggaagatcacacagaccctgt

SEQ ID NO: 5574570 - DNA, 25 bp, Homo sapien
taggacagtcgctcacgctgatgtc

SEQ ID NO: 5574571 - DNA, 25 bp, Homo sapien
acaacatctagtcacaggtccaaat

SEQ ID NO: 5574572 - DNA, 25 bp, Homo sapien
cactcaagatctagtctggactgct

SEQ ID NO: 5574573 - DNA, 25 bp, Homo sapien
ctttctgccattggtgtgaacaccc

SEQ ID NO: 5574574 - DNA, 25 bp, Homo sapien
gcacgtctgatgtgataggacagtc

SEQ ID NO: 5574575 - DNA, 25 bp, Homo sapien
ggcagataaccctctatggatccca

SEQ ID NO: 5574576 - DNA, 25 bp, Homo sapien
gtgaacacccggcatccccacatct

SEQ ID NO: 5574577 - DNA, 25 bp, Homo sapien
ctggactgctgaccctcttctaggc

SEQ ID NO: 5574578 - DNA, 25 bp, Homo sapien
gcttttctcagggatgtgcagcctc

SEQ ID NO: 5574579 - DNA, 25 bp, Homo sapien
gtgcagcctctgtagtcctctctct

SEQ ID NO: 5574580 - DNA, 25 bp, Homo sapien
ccacatctcctgatatccgggcttc

SEQ ID NO: 5574581 - DNA, 25 bp, Homo sapien
ttacagacagtcccatatgtatgat

SEQ ID NO: 5574582 - DNA, 25 bp, Homo sapien
ggtttgatgcataatttttcgactt

SEQ ID NO: 5574583 - DNA, 25 bp, Homo sapien
catttctactgaacatgcatcactt

SEQ ID NO: 5574584 - DNA, 25 bp, Homo sapien
gctttggatgatacattacagacag

SEQ ID NO: 5574585 - DNA, 25 bp, Homo sapien
aagtgttctgctttggatgatacat

SEQ ID NO: 5574586 - DNA, 25 bp, Homo sapien
ttgtgatacacatactttaagtacc

SEQ ID NO: 5574587 - DNA, 25 bp, Homo sapien
ttcaccttcagctcagtatttttaa

SEQ ID NO: 5574588 - DNA, 25 bp, Homo sapien
ttcgactttatgatttctatgactt

SEQ ID NO: 5574589 - DNA, 25 bp, Homo sapien
catagaccttttgtgatcaataaat

SEQ ID NO: 5574590 - DNA, 25 bp, Homo sapien
tatgtatgatggtttgatgcataat

SEQ ID NO: 5574591 - DNA, 25 bp, Homo sapien
taaaattacatgagatattcaacac

SEQ ID NO: 5574592 - DNA, 25 bp, Homo sapien
attcacatggttgcaacagatctct

SEQ ID NO: 5574593 - DNA, 25 bp, Homo sapien
taagtatattcacatggttgcaaca

SEQ ID NO: 5574594 - DNA, 25 bp, Homo sapien
tttcagtgtacagtacggtagtgtt

SEQ ID NO: 5574595 - DNA, 25 bp, Homo sapien
gtacagtacggtagtgttaagtata

SEQ ID NO: 5574596 - DNA, 25 bp, Homo sapien
aaagaacatacatgagggtttttaa

SEQ ID NO: 5574597 - DNA, 25 bp, Homo sapien
tactactgtggtaacaaaacaacat

SEQ ID NO: 5574598 - DNA, 25 bp, Homo sapien
gtggtaacaaaacaacattatcctc

SEQ ID NO: 5574599 - DNA, 25 bp, Homo sapien
aaacactaaaactctataccactaa

SEQ ID NO: 5574600 - DNA, 25 bp, Homo sapien
gtctgtgtctatggattttggactg

SEQ ID NO: 5574601 - DNA, 25 bp, Homo sapien
ctttctactgtctgtgtctatggat

SEQ ID NO: 5574602 - DNA, 25 bp, Homo sapien
accactaaatactaactccctctcc

SEQ ID NO: 5574603 - DNA, 25 bp, Homo sapien
agcttgcagatggctaatcaaagag

SEQ ID NO: 5574604 - DNA, 25 bp, Homo sapien
attctcacgagagccatgtagtggg

SEQ ID NO: 5574605 - DNA, 25 bp, Homo sapien
atctccgcggattctcacgagagcc

SEQ ID NO: 5574606 - DNA, 25 bp, Homo sapien
aagactgtaagtcgctgcctgagtg

SEQ ID NO: 5574607 - DNA, 25 bp, Homo sapien
tattggccaagaaacttgagcagcc

SEQ ID NO: 5574608 - DNA, 25 bp, Homo sapien
ccgcacagaacccggcgcctattat

SEQ ID NO: 5574609 - DNA, 25 bp, Homo sapien
tcgctcagaaatgccagcttgcaga

SEQ ID NO: 5574610 - DNA, 25 bp, Homo sapien
tggggaagataaccacatccccatt

SEQ ID NO: 5574611 - DNA, 25 bp, Homo sapien
gtttacaaatgtgatctccgcggat

SEQ ID NO: 5574612 - DNA, 25 bp, Homo sapien
tggtactcgttcccaccgcacagaa

SEQ ID NO: 5574613 - DNA, 25 bp, Homo sapien
tttgaaaagtccctcgctcagaaat

SEQ ID NO: 5574614 - DNA, 25 bp, Homo sapien
tcccactgtctcgcctcaatcctac

SEQ ID NO: 5574615 - DNA, 25 bp, Homo sapien
accctggatccctcggccttccctg

SEQ ID NO: 5574616 - DNA, 25 bp, Homo sapien
atcctacaggtggtctcagagacta

SEQ ID NO: 5574617 - DNA, 25 bp, Homo sapien
tcgcctcaatcctacaggtggtctc

SEQ ID NO: 5574618 - DNA, 25 bp, Homo sapien
gttcttcccactgtctcgcctcaat

SEQ ID NO: 5574619 - DNA, 25 bp, Homo sapien
gccttccctggacagcatgacctta

SEQ ID NO: 5574620 - DNA, 25 bp, Homo sapien
ttcttgatccaagagtacgggtggt

SEQ ID NO: 5574621 - DNA, 25 bp, Homo sapien
ttctgggttcttgatccaagagtac

SEQ ID NO: 5574622 - DNA, 25 bp, Homo sapien
tgtctcgcctcaatcctacaggtgg

SEQ ID NO: 5574623 - DNA, 25 bp, Homo sapien
caatcctacaggtggtctcagagac

SEQ ID NO: 5574624 - DNA, 25 bp, Homo sapien
tgggttcttgatccaagagtacggg

SEQ ID NO: 5574625 - DNA, 25 bp, Homo sapien
atcagagaagtgacctttggaacac

SEQ ID NO: 5574626 - DNA, 25 bp, Homo sapien
gcctaggcaacttggcgaaatgccc

SEQ ID NO: 5574627 - DNA, 25 bp, Homo sapien
tggcgaaatgccctcactattagac

SEQ ID NO: 5574628 - DNA, 25 bp, Homo sapien
ggaggatggcctgagttcaggattc

SEQ ID NO: 5574629 - DNA, 25 bp, Homo sapien
aaattcatgctagccggggctcaca

SEQ ID NO: 5574630 - DNA, 25 bp, Homo sapien
gctaaaaatccaacaatgcacagaa

SEQ ID NO: 5574631 - DNA, 25 bp, Homo sapien
ttggtctgacttagaaaattcatgc

SEQ ID NO: 5574632 - DNA, 25 bp, Homo sapien
ttttggtgatcataatcgggaggga

SEQ ID NO: 5574633 - DNA, 25 bp, Homo sapien
caggattcatgatcagcctaggcaa

SEQ ID NO: 5574634 - DNA, 25 bp, Homo sapien
gtcagggacgctgctaaaaatccaa

SEQ ID NO: 5574635 - DNA, 25 bp, Homo sapien
tttggaacacttggcgatgtctgga

SEQ ID NO: 5574636 - DNA, 25 bp, Homo sapien
gagcccggcttactcgtggcctgga

SEQ ID NO: 5574637 - DNA, 25 bp, Homo sapien
aaagccagagcttcaatagcccctt

SEQ ID NO: 5574638 - DNA, 25 bp, Homo sapien
caaacccaatttagatgaaacgtct

SEQ ID NO: 5574639 - DNA, 25 bp, Homo sapien
ctgagcagacaaatatgaatattta

SEQ ID NO: 5574640 - DNA, 25 bp, Homo sapien
acatctgatagagtggccacctcac

SEQ ID NO: 5574641 - DNA, 25 bp, Homo sapien
ccacctcaccccacgtgagcccggc

SEQ ID NO: 5574642 - DNA, 25 bp, Homo sapien
ctctgaggatgctgaaccaagagag

SEQ ID NO: 5574643 - DNA, 25 bp, Homo sapien
tggaggactttgagtgagactaatt

SEQ ID NO: 5574644 - DNA, 25 bp, Homo sapien
tggtggctgttgtctaagaggccca

SEQ ID NO: 5574645 - DNA, 25 bp, Homo sapien
atgaaaatttgggcaacataatgtt

SEQ ID NO: 5574646 - DNA, 25 bp, Homo sapien
aggcccatgccagaagcaacatctg

SEQ ID NO: 5574647 - DNA, 25 bp, Homo sapien
ggtaatgggagtctcctggatggac

SEQ ID NO: 5574648 - DNA, 25 bp, Homo sapien
caagaaagtcttttcagaggctgac

SEQ ID NO: 5574649 - DNA, 25 bp, Homo sapien
ctgccctccacaaaacaccactgtc

SEQ ID NO: 5574650 - DNA, 25 bp, Homo sapien
tggaacccaaatggtaatgggagtc

SEQ ID NO: 5574651 - DNA, 25 bp, Homo sapien
ctcatgtcacataattggaacccaa

SEQ ID NO: 5574652 - DNA, 25 bp, Homo sapien
gtaacagcaaatggagggtttctat

SEQ ID NO: 5574653 - DNA, 25 bp, Homo sapien
aaaaatcataattgagaggcatttc

SEQ ID NO: 5574654 - DNA, 25 bp, Homo sapien
ctggatggaccttttagattgaaac

SEQ ID NO: 5574655 - DNA, 25 bp, Homo sapien
tcctgggtattcttgggtaacagca

SEQ ID NO: 5574656 - DNA, 25 bp, Homo sapien
ccagatacactggaagactccatac

SEQ ID NO: 5574657 - DNA, 25 bp, Homo sapien
agattgaaactcgcttcccagatac

SEQ ID NO: 5574658 - DNA, 25 bp, Homo sapien
ttttcattatgccagggggaaacca

SEQ ID NO: 5574659 - DNA, 25 bp, Homo sapien
ttcagtcttgactgcagatatatgc

SEQ ID NO: 5574660 - DNA, 25 bp, Homo sapien
tatgcagaatttcccttgaggtaag

SEQ ID NO: 5574661 - DNA, 25 bp, Homo sapien
ttattagtatgatagcatgcagctc

SEQ ID NO: 5574662 - DNA, 25 bp, Homo sapien
agctctttcccttctgcgggatccc

SEQ ID NO: 5574663 - DNA, 25 bp, Homo sapien
tgcgggatccctctctattcagtct

SEQ ID NO: 5574664 - DNA, 25 bp, Homo sapien
tcccttgaggtaagaaaaaggcaga

SEQ ID NO: 5574665 - DNA, 25 bp, Homo sapien
ctggtaaccatgttatctaactctc

SEQ ID NO: 5574666 - DNA, 25 bp, Homo sapien
agaaaaaggcagacatgtctaagtt

SEQ ID NO: 5574667 - DNA, 25 bp, Homo sapien
gcagatatatgcagaatttcccttg

SEQ ID NO: 5574668 - DNA, 25 bp, Homo sapien
agtatgatagcatgcagctctttcc

SEQ ID NO: 5574669 - DNA, 25 bp, Homo sapien
gcagctacagattaaggctagagac

SEQ ID NO: 5574670 - DNA, 25 bp, Homo sapien
aaggctagagactctcctagggagc

SEQ ID NO: 5574671 - DNA, 25 bp, Homo sapien
ggtatagctgtagctgtgacagtgc

SEQ ID NO: 5574672 - DNA, 25 bp, Homo sapien
ttaacacgccatccttcaagaagca

SEQ ID NO: 5574673 - DNA, 25 bp, Homo sapien
taagatagggaccttgtttggttca

SEQ ID NO: 5574674 - DNA, 25 bp, Homo sapien
ctagggagcgtgttattcctggctt

SEQ ID NO: 5574675 - DNA, 25 bp, Homo sapien
ctcgcaaccagaacatacttagaag

SEQ ID NO: 5574676 - DNA, 25 bp, Homo sapien
ctggctttgcacaggtatagctgta

SEQ ID NO: 5574677 - DNA, 25 bp, Homo sapien
tacttagaagattaacacgccatcc

SEQ ID NO: 5574678 - DNA, 25 bp, Homo sapien
tgaacattggtacagaccccagcac

SEQ ID NO: 5574679 - DNA, 25 bp, Homo sapien
gtgacagtgctctatcctcgcaacc

SEQ ID NO: 5574680 - DNA, 25 bp, Homo sapien
attgtgctgataactatccagtctc

SEQ ID NO: 5574681 - DNA, 25 bp, Homo sapien
tgactgatgagtataaagggattta

SEQ ID NO: 5574682 - DNA, 25 bp, Homo sapien
aaatatgaaggagatttaaacatct

SEQ ID NO: 5574683 - DNA, 25 bp, Homo sapien
aattagccataaatgataaagattt

SEQ ID NO: 5574684 - DNA, 25 bp, Homo sapien
agaagagtgagaccaaatgcttttt

SEQ ID NO: 5574685 - DNA, 25 bp, Homo sapien
gaaaatagatatgatttggcaaagg

SEQ ID NO: 5574686 - DNA, 25 bp, Homo sapien
ataatgactgatgagtataaaggga

SEQ ID NO: 5574687 - DNA, 25 bp, Homo sapien
tgtcattagcactaagatgagctgc

SEQ ID NO: 5574688 - DNA, 25 bp, Homo sapien
gctctcttgaagaaaatagatatga

SEQ ID NO: 5574689 - DNA, 25 bp, Homo sapien
aaatcaggaaatgtattttgctctc

SEQ ID NO: 5574690 - DNA, 25 bp, Homo sapien
tattcaggagttaaagagatcagca

SEQ ID NO: 5574691 - DNA, 25 bp, Homo sapien
gcattcaatcacacaacaaacactc

SEQ ID NO: 5574692 - DNA, 25 bp, Homo sapien
aaggtcctattacacagtaggcagt

SEQ ID NO: 5574693 - DNA, 25 bp, Homo sapien
taagtaacataagaagaagctgcat

SEQ ID NO: 5574694 - DNA, 25 bp, Homo sapien
gccggagcctttagaccctaccaca

SEQ ID NO: 5574695 - DNA, 25 bp, Homo sapien
agaccctaccacatggcaagtactc

SEQ ID NO: 5574696 - DNA, 25 bp, Homo sapien
gacagcatgactgagacatggtgtc

SEQ ID NO: 5574697 - DNA, 25 bp, Homo sapien
aacaactacctagtgtgtgccggag

SEQ ID NO: 5574698 - DNA, 25 bp, Homo sapien
cactagaccaccaaggctaggcagg

SEQ ID NO: 5574699 - DNA, 25 bp, Homo sapien
ttgttaggcacttgaaacagccatg

SEQ ID NO: 5574700 - DNA, 25 bp, Homo sapien
tggcaagtactctgcttggagcaaa

SEQ ID NO: 5574701 - DNA, 25 bp, Homo sapien
agtaggcagttgctgagttcatact

SEQ ID NO: 5574702 - DNA, 25 bp, Homo sapien
acccgaagtgctcctaacccacagc

SEQ ID NO: 5574703 - DNA, 25 bp, Homo sapien
ttgcccaatagtcacatggcgcttg

SEQ ID NO: 5574704 - DNA, 25 bp, Homo sapien
tcccggcctgcctgctaatctcact

SEQ ID NO: 5574705 - DNA, 25 bp, Homo sapien
tcactgacagctacggagtctatgg

SEQ ID NO: 5574706 - DNA, 25 bp, Homo sapien
tcttaagtcacccagagggctcctg

SEQ ID NO: 5574707 - DNA, 25 bp, Homo sapien
atctcaccgggtgagttcagtagcc

SEQ ID NO: 5574708 - DNA, 25 bp, Homo sapien
taatccagagccccgggccttgagg

SEQ ID NO: 5574709 - DNA, 25 bp, Homo sapien
tacatgaacgtgatatttgcccaat

SEQ ID NO: 5574710 - DNA, 25 bp, Homo sapien
cttatttaatccagagccccgggcc

SEQ ID NO: 5574711 - DNA, 25 bp, Homo sapien
gccaggacacccgaagtgctcctaa

SEQ ID NO: 5574712 - DNA, 25 bp, Homo sapien
catggcgcttgagttgtctcccttc

SEQ ID NO: 5574713 - DNA, 25 bp, Homo sapien
caaatgcctactgggctgatggctc

SEQ ID NO: 5574714 - DNA, 25 bp, Homo sapien
gcttgttaacctgcgttgatctctc

SEQ ID NO: 5574715 - DNA, 25 bp, Homo sapien
aatcagcttggttctcatgtgcccc

SEQ ID NO: 5574716 - DNA, 25 bp, Homo sapien
tgccttctgggcttaccttctagtc

SEQ ID NO: 5574717 - DNA, 25 bp, Homo sapien
ggctgatggctctaactcacccgct

SEQ ID NO: 5574718 - DNA, 25 bp, Homo sapien
tcttctagaatgctcaaatgcctac

SEQ ID NO: 5574719 - DNA, 25 bp, Homo sapien
tccatgcccatcctgggggcacagt

SEQ ID NO: 5574720 - DNA, 25 bp, Homo sapien
ctgggggcacagtactctttgacta

SEQ ID NO: 5574721 - DNA, 25 bp, Homo sapien
tgatagtctctggtcagtcctgtcc

SEQ ID NO: 5574722 - DNA, 25 bp, Homo sapien
ctgtcctaccagtcaaaccctaatc

SEQ ID NO: 5574723 - DNA, 25 bp, Homo sapien
agccccatctaacttctgcccaacc

SEQ ID NO: 5574724 - DNA, 25 bp, Homo sapien
ggggaaatcacccacccagcagtgt

SEQ ID NO: 5574725 - DNA, 25 bp, Homo sapien
gtgtgtcccccaacgtctgagaccc

SEQ ID NO: 5574726 - DNA, 25 bp, Homo sapien
tctgccgtcactcttgcgcgatgcc

SEQ ID NO: 5574727 - DNA, 25 bp, Homo sapien
aatcacccacccagcagtgtgtccc

SEQ ID NO: 5574728 - DNA, 25 bp, Homo sapien
cccgcccgtttggacctttcaggca

SEQ ID NO: 5574729 - DNA, 25 bp, Homo sapien
cgtcactcttgcgcgatgcctgagg

SEQ ID NO: 5574730 - DNA, 25 bp, Homo sapien
gggtctgccgtcactcttgcgcgat

SEQ ID NO: 5574731 - DNA, 25 bp, Homo sapien
ccagcagtgtgtcccccaacgtctg

SEQ ID NO: 5574732 - DNA, 25 bp, Homo sapien
tgtcccccaacgtctgagacccctc

SEQ ID NO: 5574733 - DNA, 25 bp, Homo sapien
gacccctcctctcacttctgggtga

SEQ ID NO: 5574734 - DNA, 25 bp, Homo sapien
tgccgtcactcttgcgcgatgcctg

SEQ ID NO: 5574735 - DNA, 25 bp, Homo sapien
tagactggcatagactgactgagaa

SEQ ID NO: 5574736 - DNA, 25 bp, Homo sapien
acagggaaagtcctctccagcgtct

SEQ ID NO: 5574737 - DNA, 25 bp, Homo sapien
ggcatagactgactgagaagccctt

SEQ ID NO: 5574738 - DNA, 25 bp, Homo sapien
ttggccagtaaagtttcagattatt

SEQ ID NO: 5574739 - DNA, 25 bp, Homo sapien
ctgaaagcatggcctactcattgca

SEQ ID NO: 5574740 - DNA, 25 bp, Homo sapien
ctcctaaacttggggtcaagaggaa

SEQ ID NO: 5574741 - DNA, 25 bp, Homo sapien
tgcagtgacctgacaaacttgctcc

SEQ ID NO: 5574742 - DNA, 25 bp, Homo sapien
gtccagagacttagccaattacaac

SEQ ID NO: 5574743 - DNA, 25 bp, Homo sapien
ggctcgtaaatccagctggagtgcc

SEQ ID NO: 5574744 - DNA, 25 bp, Homo sapien
aaggagtcccactttggccagtaaa

SEQ ID NO: 5574745 - DNA, 25 bp, Homo sapien
cagctgaccagataggaagaactga

SEQ ID NO: 5574746 - DNA, 25 bp, Homo sapien
gtgtgggtaacctagcatagcaaac

SEQ ID NO: 5574747 - DNA, 25 bp, Homo sapien
ttgcagaagacctatgacaacccat

SEQ ID NO: 5574748 - DNA, 25 bp, Homo sapien
cccatctgcagaagcaccggtttgg

SEQ ID NO: 5574749 - DNA, 25 bp, Homo sapien
gactggaagtcaatggataagcatc

SEQ ID NO: 5574750 - DNA, 25 bp, Homo sapien
tcagcggtgaagcccacttaactct

SEQ ID NO: 5574751 - DNA, 25 bp, Homo sapien
gagaccacgttgcactcagcggtga

SEQ ID NO: 5574752 - DNA, 25 bp, Homo sapien
ccgaggtcacaagtgactggaagtc

SEQ ID NO: 5574753 - DNA, 25 bp, Homo sapien
gccacccatggagcagatctgataa

SEQ ID NO: 5574754 - DNA, 25 bp, Homo sapien
aaaggctgttgctccagtgtgggta

SEQ ID NO: 5574755 - DNA, 25 bp, Homo sapien
ctagggcacaatggtgcaaccacag

SEQ ID NO: 5574756 - DNA, 25 bp, Homo sapien
cgcccagtcctggccattgagaccc

SEQ ID NO: 5574757 - DNA, 25 bp, Homo sapien
gttgcctgaatgatggaaagctctt

SEQ ID NO: 5574758 - DNA, 25 bp, Homo sapien
cactgagtgacctgttgcctgaatg

SEQ ID NO: 5574759 - DNA, 25 bp, Homo sapien
aaggatttagaagatattcccagtc

SEQ ID NO: 5574760 - DNA, 25 bp, Homo sapien
tttcagcacagtttgcttaaggatt

SEQ ID NO: 5574761 - DNA, 25 bp, Homo sapien
ataggtgcctttgttaagtagggga

SEQ ID NO: 5574762 - DNA, 25 bp, Homo sapien
tccagaggcatcgttttaaagtcaa

SEQ ID NO: 5574763 - DNA, 25 bp, Homo sapien
attcccagtctcctggcacagtttc

SEQ ID NO: 5574764 - DNA, 25 bp, Homo sapien
tcgaaaagatgggtttctgcacttt

SEQ ID NO: 5574765 - DNA, 25 bp, Homo sapien
tcagcagtttgttttcagcacagtt

SEQ ID NO: 5574766 - DNA, 25 bp, Homo sapien
aagctctttcgaaaagatgggtttc

SEQ ID NO: 5574767 - DNA, 25 bp, Homo sapien
ggatcatgaacatctggcagctgct

SEQ ID NO: 5574768 - DNA, 25 bp, Homo sapien
ccagatcctgctagaggcaaaatcc

SEQ ID NO: 5574769 - DNA, 25 bp, Homo sapien
ttatgtcaagtagcccaatcctggg

SEQ ID NO: 5574770 - DNA, 25 bp, Homo sapien
agaaagtgtatatacaggggcctct

SEQ ID NO: 5574771 - DNA, 25 bp, Homo sapien
acagccctctgtgcatgcaggaatc

SEQ ID NO: 5574772 - DNA, 25 bp, Homo sapien
tcattcccagggtctgaggcaaaca

SEQ ID NO: 5574773 - DNA, 25 bp, Homo sapien
gtgttcaaacaggtaaagagcttag

SEQ ID NO: 5574774 - DNA, 25 bp, Homo sapien
gctgcccttttgccagaggctgcac

SEQ ID NO: 5574775 - DNA, 25 bp, Homo sapien
tgcagaatgaggacaatactatccc

SEQ ID NO: 5574776 - DNA, 25 bp, Homo sapien
ccaagtaaatccaagtgaagaaagt

SEQ ID NO: 5574777 - DNA, 25 bp, Homo sapien
ggtgaggatcaagtgtgttcaaaca

SEQ ID NO: 5574778 - DNA, 25 bp, Homo sapien
gcacacaggatgggattcgtgtgtc

SEQ ID NO: 5574779 - DNA, 25 bp, Homo sapien
gcattcaagattcgaagtggtcccc

SEQ ID NO: 5574780 - DNA, 25 bp, Homo sapien
tcatactggaaagcgtgtacatagc

SEQ ID NO: 5574781 - DNA, 25 bp, Homo sapien
ttcaagtgttcgccagccccatgta

SEQ ID NO: 5574782 - DNA, 25 bp, Homo sapien
ggtgtcttgagctgtttgcccctgc

SEQ ID NO: 5574783 - DNA, 25 bp, Homo sapien
ttcatcagccatggtgtcttgagct

SEQ ID NO: 5574784 - DNA, 25 bp, Homo sapien
tctaaagaaccaacgctgaccagta

SEQ ID NO: 5574785 - DNA, 25 bp, Homo sapien
gaaaatggctgtagtaagtgctgag

SEQ ID NO: 5574786 - DNA, 25 bp, Homo sapien
actgtggaatataagtgagtcccga

SEQ ID NO: 5574787 - DNA, 25 bp, Homo sapien
ggaaagcgtgtacatagcgtcttca

SEQ ID NO: 5574788 - DNA, 25 bp, Homo sapien
ttccagcctggaccttgacctatta

SEQ ID NO: 5574789 - DNA, 25 bp, Homo sapien
tacacgtccagcacatctcaactct

SEQ ID NO: 5574790 - DNA, 25 bp, Homo sapien
gacctcgggtgcgtcttcccctccg

SEQ ID NO: 5574791 - DNA, 25 bp, Homo sapien
cggaggggaagacgcacccgaggtc

SEQ ID NO: 5574792 - DNA, 25 bp, Homo sapien
gagggacgtccagacctgagtctgg

SEQ ID NO: 5574793 - DNA, 25 bp, Homo sapien
aaatgtgaaccaagtattaaaaaca

SEQ ID NO: 5574794 - DNA, 25 bp, Homo sapien
tatcggtacctccgggccacttgag

SEQ ID NO: 5574795 - DNA, 25 bp, Homo sapien
atacgcatttaaaacccgacctcta

SEQ ID NO: 5574796 - DNA, 25 bp, Homo sapien
aggatcccaaacatcgctgccgcct

SEQ ID NO: 5574797 - DNA, 25 bp, Homo sapien
atttctctcagaacaaaggttttat

SEQ ID NO: 5574798 - DNA, 25 bp, Homo sapien
atccttgaggaaatacgcatttaaa

SEQ ID NO: 5574799 - DNA, 25 bp, Homo sapien
tctgcttccacaacatccttgagga

SEQ ID NO: 5574800 - DNA, 25 bp, Homo sapien
gacggcggtgacactaatatcggta

SEQ ID NO: 5574801 - DNA, 25 bp, Homo sapien
tgtggagatccttggaggtcctcca

SEQ ID NO: 5574802 - DNA, 25 bp, Homo sapien
cctgagtctggtctgatgctttctt

SEQ ID NO: 5574803 - DNA, 25 bp, Homo sapien
catagaatgaacgaaagtgtgatga

SEQ ID NO: 5574804 - DNA, 25 bp, Homo sapien
gctggtggacattgagttaagtatc

SEQ ID NO: 5574805 - DNA, 25 bp, Homo sapien
tagggtaggtttgaagtagcctcta

SEQ ID NO: 5574806 - DNA, 25 bp, Homo sapien
tatggaagttccctggctcgctctt

SEQ ID NO: 5574807 - DNA, 25 bp, Homo sapien
gactgtggaatataagattggctgc

SEQ ID NO: 5574808 - DNA, 25 bp, Homo sapien
aagagttgttgtaaaggactgtgga

SEQ ID NO: 5574809 - DNA, 25 bp, Homo sapien
aggcatgggatgacccttctggttc

SEQ ID NO: 5574810 - DNA, 25 bp, Homo sapien
ctctactactaaggcatgggatgac

SEQ ID NO: 5574811 - DNA, 25 bp, Homo sapien
gattggctgcagttacatagaatga

SEQ ID NO: 5574812 - DNA, 25 bp, Homo sapien
aagtagctatcagagggtcactcat

SEQ ID NO: 5574813 - DNA, 25 bp, Homo sapien
gatgagatgaatgctgagaaatgtt

SEQ ID NO: 5574814 - DNA, 25 bp, Homo sapien
acttcactgacagcagagttggctc

SEQ ID NO: 5574815 - DNA, 25 bp, Homo sapien
cttggagaataggtttgagattttc

SEQ ID NO: 5574816 - DNA, 25 bp, Homo sapien
atttcaaatgagagatgattgtcag

SEQ ID NO: 5574817 - DNA, 25 bp, Homo sapien
ttcactgtgcactgaaactgttgag

SEQ ID NO: 5574818 - DNA, 25 bp, Homo sapien
tgtgatgtggctgcctgaatgttcc

SEQ ID NO: 5574819 - DNA, 25 bp, Homo sapien
ggtgcagaatctgtatgggagttcc

SEQ ID NO: 5574820 - DNA, 25 bp, Homo sapien
agttagccgactttaagatgttctc

SEQ ID NO: 5574821 - DNA, 25 bp, Homo sapien
accctgagacacccctagctctagt

SEQ ID NO: 5574822 - DNA, 25 bp, Homo sapien
gcttcatgccaattagctgcagttt

SEQ ID NO: 5574823 - DNA, 25 bp, Homo sapien
gcccgagactgtgttgtgatgtggc

SEQ ID NO: 5574824 - DNA, 25 bp, Homo sapien
ttgagattttcaccctgagacaccc

SEQ ID NO: 5574825 - DNA, 25 bp, Homo sapien
gagcacagacaaagaagcaaattta

SEQ ID NO: 5574826 - DNA, 25 bp, Homo sapien
agaaaaggggatcccaatctagacc

SEQ ID NO: 5574827 - DNA, 25 bp, Homo sapien
ccagagaatggtattgggttcaaat

SEQ ID NO: 5574828 - DNA, 25 bp, Homo sapien
tatgattaaacttggaatgtgcaga

SEQ ID NO: 5574829 - DNA, 25 bp, Homo sapien
ggttcttagatctcacacaggaaag

SEQ ID NO: 5574830 - DNA, 25 bp, Homo sapien
aatctagaccccaagagtgggttct

SEQ ID NO: 5574831 - DNA, 25 bp, Homo sapien
actcaagatgttgccagaaaagggg

SEQ ID NO: 5574832 - DNA, 25 bp, Homo sapien
gggctgttggtgctctagtgaccat

SEQ ID NO: 5574833 - DNA, 25 bp, Homo sapien
gcctctgggagaaccagagaatggt

SEQ ID NO: 5574834 - DNA, 25 bp, Homo sapien
atggtcacatactcaagatgttgcc

SEQ ID NO: 5574835 - DNA, 25 bp, Homo sapien
ataagaagctataaggagctatgat

SEQ ID NO: 5574836 - DNA, 25 bp, Homo sapien
agcttggtgccagatttcctctcgc

SEQ ID NO: 5574837 - DNA, 25 bp, Homo sapien
tctgccagaggatatgagtatttca

SEQ ID NO: 5574838 - DNA, 25 bp, Homo sapien
ggagccagacattctcgctctcccc

SEQ ID NO: 5574839 - DNA, 25 bp, Homo sapien
tgcagttgagccttcgatgagatga

SEQ ID NO: 5574840 - DNA, 25 bp, Homo sapien
aaggctcccccgctcctgcacttca

SEQ ID NO: 5574841 - DNA, 25 bp, Homo sapien
ttgagaagatgcacaatagaaattc

SEQ ID NO: 5574842 - DNA, 25 bp, Homo sapien
gaacatgggtcttggattaggatat

SEQ ID NO: 5574843 - DNA, 25 bp, Homo sapien
gtgtgggtttctttcaggctgtgag

SEQ ID NO: 5574844 - DNA, 25 bp, Homo sapien
aggcatcacacagtagcaccaggcc

SEQ ID NO: 5574845 - DNA, 25 bp, Homo sapien
gttggccaggtataagctatgtaat

SEQ ID NO: 5574846 - DNA, 25 bp, Homo sapien
tgagtaagtggacatggatttctgt

SEQ ID NO: 5574847 - DNA, 25 bp, Homo sapien
agacactcagtcctggttgcaaacc

SEQ ID NO: 5574848 - DNA, 25 bp, Homo sapien
atgaaatcacaccaaaccagttagc

SEQ ID NO: 5574849 - DNA, 25 bp, Homo sapien
tgtttttgataagagatgagaattt

SEQ ID NO: 5574850 - DNA, 25 bp, Homo sapien
gaaaatcaaagaatcagacactcag

SEQ ID NO: 5574851 - DNA, 25 bp, Homo sapien
tagggatgaaattaggaatgtctct

SEQ ID NO: 5574852 - DNA, 25 bp, Homo sapien
tgactgagaatacagctaaacactc

SEQ ID NO: 5574853 - DNA, 25 bp, Homo sapien
gagaatttatctggggagagttagg

SEQ ID NO: 5574854 - DNA, 25 bp, Homo sapien
gtatgacttgaattaagggaaggag

SEQ ID NO: 5574855 - DNA, 25 bp, Homo sapien
ctgaaaggagtgataagtatgactt

SEQ ID NO: 5574856 - DNA, 25 bp, Homo sapien
tggggacaagaaagcatcaattcaa

SEQ ID NO: 5574857 - DNA, 25 bp, Homo sapien
accagttagctgccaaccttgcctc

SEQ ID NO: 5574858 - DNA, 25 bp, Homo sapien
atgcagtgagactttgtcccagaaa

SEQ ID NO: 5574859 - DNA, 25 bp, Homo sapien
gtaaaactgaacactggaaggatat

SEQ ID NO: 5574860 - DNA, 25 bp, Homo sapien
gctcaggtgatgctccttggcttcc

SEQ ID NO: 5574861 - DNA, 25 bp, Homo sapien
tggaatgcagtgagactttgtccca

SEQ ID NO: 5574862 - DNA, 25 bp, Homo sapien
ttgagacagggcccttctctgtccc

SEQ ID NO: 5574863 - DNA, 25 bp, Homo sapien
ccctagagaacttttgtggatcctt

SEQ ID NO: 5574864 - DNA, 25 bp, Homo sapien
agccatgagatgtgttcagtaaaac

SEQ ID NO: 5574865 - DNA, 25 bp, Homo sapien
ctggaaggatatttatttcggacca

SEQ ID NO: 5574866 - DNA, 25 bp, Homo sapien
ccgtgcccagtgaggaattattcag

SEQ ID NO: 5574867 - DNA, 25 bp, Homo sapien
tttgactatgtccctagagaacttt

SEQ ID NO: 5574868 - DNA, 25 bp, Homo sapien
cagttaaacccaaagccatgagatg

SEQ ID NO: 5574869 - DNA, 25 bp, Homo sapien
tagggcttggtaattctaagacgtc

SEQ ID NO: 5574870 - DNA, 25 bp, Homo sapien
tgtcattgtaccaagacctgccccc

SEQ ID NO: 5574871 - DNA, 25 bp, Homo sapien
gacctgcccccttgcccctcaacac

SEQ ID NO: 5574872 - DNA, 25 bp, Homo sapien
tggcagtaggtggtaccactacctt

SEQ ID NO: 5574873 - DNA, 25 bp, Homo sapien
aaagagttctctgtcaaaggctacc

SEQ ID NO: 5574874 - DNA, 25 bp, Homo sapien
aaagggcttttgggactcctggata

SEQ ID NO: 5574875 - DNA, 25 bp, Homo sapien
agttcaaggtctcgtgctagttgtc

SEQ ID NO: 5574876 - DNA, 25 bp, Homo sapien
ctgcctgtgtcatgaccaaagcctg

SEQ ID NO: 5574877 - DNA, 25 bp, Homo sapien
aaagaccacaaaatatcatgagcat

SEQ ID NO: 5574878 - DNA, 25 bp, Homo sapien
gataaagccaattcaaaagagactc

SEQ ID NO: 5574879 - DNA, 25 bp, Homo sapien
accaaagcctgagcactgtcttcat

SEQ ID NO: 5574880 - DNA, 25 bp, Homo sapien
ttagaagtctagtcacttttgtaac

SEQ ID NO: 5574881 - DNA, 25 bp, Homo sapien
gttacaaaagtgactagacttctaa

SEQ ID NO: 5574882 - DNA, 25 bp, Homo sapien
gggcctgcctttgaagcgattgtgg

SEQ ID NO: 5574883 - DNA, 25 bp, Homo sapien
aacaggaaataagaaagcgtttgga

SEQ ID NO: 5574884 - DNA, 25 bp, Homo sapien
tgagctgaaagtaaaccagaaaagc

SEQ ID NO: 5574885 - DNA, 25 bp, Homo sapien
ggtgtcgtggttattgagctgaaag

SEQ ID NO: 5574886 - DNA, 25 bp, Homo sapien
tgtcagtctgcagtgtcccagccag

SEQ ID NO: 5574887 - DNA, 25 bp, Homo sapien
tcctgtagtcctgatttagtgtgca

SEQ ID NO: 5574888 - DNA, 25 bp, Homo sapien
gtgtgcagtgtacacagagtgaagc

SEQ ID NO: 5574889 - DNA, 25 bp, Homo sapien
ttggcttaggatagttcctgtagtc

SEQ ID NO: 5574890 - DNA, 25 bp, Homo sapien
ggcctcaggctgttggttgagcttt

SEQ ID NO: 5574891 - DNA, 25 bp, Homo sapien
caggaggagaagctttagcctattt

SEQ ID NO: 5574892 - DNA, 25 bp, Homo sapien
agccagggcttttcagatctcagtg

SEQ ID NO: 5574893 - DNA, 25 bp, Homo sapien
tccccctgctgcttagttagtgcta

SEQ ID NO: 5574894 - DNA, 25 bp, Homo sapien
atacagagaaacacgtgatgaacat

SEQ ID NO: 5574895 - DNA, 25 bp, Homo sapien
agccataaacccgttaagccctctg

SEQ ID NO: 5574896 - DNA, 25 bp, Homo sapien
gttactatgttgctgaggcaggcca

SEQ ID NO: 5574897 - DNA, 25 bp, Homo sapien
attgcttgagccagtagatgcgtta

SEQ ID NO: 5574898 - DNA, 25 bp, Homo sapien
caaaactcgaaaccttagccgggca

SEQ ID NO: 5574899 - DNA, 25 bp, Homo sapien
gatgaacatcggaatggtattagtg

SEQ ID NO: 5574900 - DNA, 25 bp, Homo sapien
aagcgtgacatacaaagcagcgatt

SEQ ID NO: 5574901 - DNA, 25 bp, Homo sapien
tgggatattggaggcatgtattttt

SEQ ID NO: 5574902 - DNA, 25 bp, Homo sapien
attagatacaagaatgacaaaatat

SEQ ID NO: 5574903 - DNA, 25 bp, Homo sapien
gttagtgctatacagagaaacacgt

SEQ ID NO: 5574904 - DNA, 25 bp, Homo sapien
acacgcttacttgatgaaggagctg

SEQ ID NO: 5574905 - DNA, 25 bp, Homo sapien
tctggaagactggcttacatgacaa

SEQ ID NO: 5574906 - DNA, 25 bp, Homo sapien
gatgacacaatccaaaagacaccac

SEQ ID NO: 5574907 - DNA, 25 bp, Homo sapien
gaatatctagtggcaaagctttgga

SEQ ID NO: 5574908 - DNA, 25 bp, Homo sapien
gatgtattataggcaaaaaagagag

SEQ ID NO: 5574909 - DNA, 25 bp, Homo sapien
ccaaaagacaccacagtcccccaca

SEQ ID NO: 5574910 - DNA, 25 bp, Homo sapien
atgaaggagctgatgacacaatcca

SEQ ID NO: 5574911 - DNA, 25 bp, Homo sapien
attcaagacagaggtcattaccttt

SEQ ID NO: 5574912 - DNA, 25 bp, Homo sapien
atgtaagagattgagtactgttcac

SEQ ID NO: 5574913 - DNA, 25 bp, Homo sapien
aataggcaataacagctacacgctt

SEQ ID NO: 5574914 - DNA, 25 bp, Homo sapien
gttgtcaccaacccactcacctcta

SEQ ID NO: 5574915 - DNA, 25 bp, Homo sapien
cagcctgtcattcaaagtaagccat

SEQ ID NO: 5574916 - DNA, 25 bp, Homo sapien
tgggcattagagcaggtacttcatg

SEQ ID NO: 5574917 - DNA, 25 bp, Homo sapien
tcaaagtaagccataatgtgcctct

SEQ ID NO: 5574918 - DNA, 25 bp, Homo sapien
taagcttgctcctatggtgctcatc

SEQ ID NO: 5574919 - DNA, 25 bp, Homo sapien
agtgtgagtgagcattaaatgagat

SEQ ID NO: 5574920 - DNA, 25 bp, Homo sapien
ggggccagaccaaggcctgctttca

SEQ ID NO: 5574921 - DNA, 25 bp, Homo sapien
ctgctctggtgcactgatggtgatg

SEQ ID NO: 5574922 - DNA, 25 bp, Homo sapien
aacaggacagaactctgaggtatac

SEQ ID NO: 5574923 - DNA, 25 bp, Homo sapien
aaagttcagatgtgtaaccttagac

SEQ ID NO: 5574924 - DNA, 25 bp, Homo sapien
gctctacagagtcaagtcacatcac

SEQ ID NO: 5574925 - DNA, 25 bp, Homo sapien
ttaaatacagtatcaaacaggacag

SEQ ID NO: 5574926 - DNA, 25 bp, Homo sapien
gaaacccacaaagcgatctgacaaa

SEQ ID NO: 5574927 - DNA, 25 bp, Homo sapien
ggactgatagagttgatgcatggga

SEQ ID NO: 5574928 - DNA, 25 bp, Homo sapien
tctgctctacagatgggagacactt

SEQ ID NO: 5574929 - DNA, 25 bp, Homo sapien
ttctccaaagtgtcagcgcagcaca

SEQ ID NO: 5574930 - DNA, 25 bp, Homo sapien
gaatgtctgggaagatcccgaactc

SEQ ID NO: 5574931 - DNA, 25 bp, Homo sapien
tccactgtggggatccacgtcctga

SEQ ID NO: 5574932 - DNA, 25 bp, Homo sapien
agctcctcaaggccacctccgacct

SEQ ID NO: 5574933 - DNA, 25 bp, Homo sapien
ggatgccaccaccgtccccctccat

SEQ ID NO: 5574934 - DNA, 25 bp, Homo sapien
aaagataatattcggggactgatag

SEQ ID NO: 5574935 - DNA, 25 bp, Homo sapien
ggatggagacgccttctgcctcaag

SEQ ID NO: 5574936 - DNA, 25 bp, Homo sapien
gaaaccctcactggcagatcggtgc

SEQ ID NO: 5574937 - DNA, 25 bp, Homo sapien
caagtttttatgtctgaagggttcg

SEQ ID NO: 5574938 - DNA, 25 bp, Homo sapien
tcccactgacttttgagacagcctc

SEQ ID NO: 5574939 - DNA, 25 bp, Homo sapien
gggctttctcaagtgtactaatctt

SEQ ID NO: 5574940 - DNA, 25 bp, Homo sapien
ttatgtctgaagggttcgtagattc

SEQ ID NO: 5574941 - DNA, 25 bp, Homo sapien
gaagggttcgtagattctgacattg

SEQ ID NO: 5574942 - DNA, 25 bp, Homo sapien
actctacgttttgtgcctcatttcc

SEQ ID NO: 5574943 - DNA, 25 bp, Homo sapien
cattgtaatttgtccctgctctctt

SEQ ID NO: 5574944 - DNA, 25 bp, Homo sapien
ttggttttgttggttgtatctactc

SEQ ID NO: 5574945 - DNA, 25 bp, Homo sapien
aggagctagtaacatgttctatttc

SEQ ID NO: 5574946 - DNA, 25 bp, Homo sapien
ctctgactagtgtaccagggctttc

SEQ ID NO: 5574947 - DNA, 25 bp, Homo sapien
gtcaattgcatttaacgtttcccac

SEQ ID NO: 5574948 - DNA, 25 bp, Homo sapien
ataatggcggtcctccactgctgtc

SEQ ID NO: 5574949 - DNA, 25 bp, Homo sapien
atgtagatacggctgatgacagttc

SEQ ID NO: 5574950 - DNA, 25 bp, Homo sapien
cagccagcacagatgatacggattt

SEQ ID NO: 5574951 - DNA, 25 bp, Homo sapien
ggaacaaaatgacgatggacaaatt

SEQ ID NO: 5574952 - DNA, 25 bp, Homo sapien
gatttcacaggtcagatgcacatta

SEQ ID NO: 5574953 - DNA, 25 bp, Homo sapien
tgcaggttgcacgcctttggccgta

SEQ ID NO: 5574954 - DNA, 25 bp, Homo sapien
aactgcatggaattacagccagcac

SEQ ID NO: 5574955 - DNA, 25 bp, Homo sapien
agcagactgagtttgggaataatgt

SEQ ID NO: 5574956 - DNA, 25 bp, Homo sapien
tggacaaattgtgaataatggcggt

SEQ ID NO: 5574957 - DNA, 25 bp, Homo sapien
acaatagtttagtctgcaggtagct

SEQ ID NO: 5574958 - DNA, 25 bp, Homo sapien
atcagaaaatgcaatgaagccgtgc

SEQ ID NO: 5574959 - DNA, 25 bp, Homo sapien
ctggttccaggcttcacatgcatac

SEQ ID NO: 5574960 - DNA, 25 bp, Homo sapien
tggacagtatcttggcagtaacctc

SEQ ID NO: 5574961 - DNA, 25 bp, Homo sapien
gcaggggaaattgaatgtaccaatg

SEQ ID NO: 5574962 - DNA, 25 bp, Homo sapien
gaatgttagctacggagccaacaga

SEQ ID NO: 5574963 - DNA, 25 bp, Homo sapien
cgactgaagcttgaagtgggatcag

SEQ ID NO: 5574964 - DNA, 25 bp, Homo sapien
ggaaggcaagtaatgaatgttagct

SEQ ID NO: 5574965 - DNA, 25 bp, Homo sapien
ctggttgggtcgtgttctccccttc

SEQ ID NO: 5574966 - DNA, 25 bp, Homo sapien
agctggcatttcaaacaagggtcct

SEQ ID NO: 5574967 - DNA, 25 bp, Homo sapien
caaccgaaaaatgatgtaagcaggg

SEQ ID NO: 5574968 - DNA, 25 bp, Homo sapien
gcatacaacatggtgttggaggaac

SEQ ID NO: 5574969 - DNA, 25 bp, Homo sapien
ggagccaacagacagtgtccactcc

SEQ ID NO: 5574970 - DNA, 25 bp, Homo sapien
gttgcagctatgtgggtccaaactc

SEQ ID NO: 5574971 - DNA, 25 bp, Homo sapien
tccctccctacatgatcaggtcctc

SEQ ID NO: 5574972 - DNA, 25 bp, Homo sapien
ttgaacatcgctggggatgatagtt

SEQ ID NO: 5574973 - DNA, 25 bp, Homo sapien
tgctgggccccactgctgattatgg

SEQ ID NO: 5574974 - DNA, 25 bp, Homo sapien
gccagcttgggttgcagctatgtgg

SEQ ID NO: 5574975 - DNA, 25 bp, Homo sapien
catgctgcacatagataagatttta

SEQ ID NO: 5574976 - DNA, 25 bp, Homo sapien
ggtcctctcagctgtctagagccct

SEQ ID NO: 5574977 - DNA, 25 bp, Homo sapien
tcctcttacagccatgcagctcctg

SEQ ID NO: 5574978 - DNA, 25 bp, Homo sapien
gaagaggcccttctttccacagtgt

SEQ ID NO: 5574979 - DNA, 25 bp, Homo sapien
tccacagtgttttgggatgggtcag

SEQ ID NO: 5574980 - DNA, 25 bp, Homo sapien
tagagccctttctgtcacctggaga

SEQ ID NO: 5574981 - DNA, 25 bp, Homo sapien
agcagcatgagcccatgggctccac

SEQ ID NO: 5574982 - DNA, 25 bp, Homo sapien
tgtgatgccatcactccccattcac

SEQ ID NO: 5574983 - DNA, 25 bp, Homo sapien
cacaagctttgtgaacccaaaccac

SEQ ID NO: 5574984 - DNA, 25 bp, Homo sapien
taatcaatggaaaaagtccggccag

SEQ ID NO: 5574985 - DNA, 25 bp, Homo sapien
acagaatattacagtgtatggctac

SEQ ID NO: 5574986 - DNA, 25 bp, Homo sapien
gaaaaggcaagtacagtagaatcta

SEQ ID NO: 5574987 - DNA, 25 bp, Homo sapien
ttctctctaagggaagtcatggact

SEQ ID NO: 5574988 - DNA, 25 bp, Homo sapien
ataaccatggccctattgaacattt

SEQ ID NO: 5574989 - DNA, 25 bp, Homo sapien
tgagcccatgggctccacagcatgg

SEQ ID NO: 5574990 - DNA, 25 bp, Homo sapien
aagtcatggacttaccacaagcttt

SEQ ID NO: 5574991 - DNA, 25 bp, Homo sapien
tcactccccattcacctgcagctcc

SEQ ID NO: 5574992 - DNA, 25 bp, Homo sapien
agcctcttgagtagccaggagtaca

SEQ ID NO: 5574993 - DNA, 25 bp, Homo sapien
tgagctcaggcgatttgcccgcctc

SEQ ID NO: 5574994 - DNA, 25 bp, Homo sapien
gctttgcaaactgaccaccatggac

SEQ ID NO: 5574995 - DNA, 25 bp, Homo sapien
ctggtcatgaactgatgggctcagg

SEQ ID NO: 5574996 - DNA, 25 bp, Homo sapien
ggcagtctgcccacctcaccctccc

SEQ ID NO: 5574997 - DNA, 25 bp, Homo sapien
caccctcccagggtgctgcaattac

SEQ ID NO: 5574998 - DNA, 25 bp, Homo sapien
aggcaggaatcactgcatccggcct

SEQ ID NO: 5574999 - DNA, 25 bp, Homo sapien
gacagggtctcaccacgttgcccca

SEQ ID NO: 5575000 - DNA, 25 bp, Homo sapien
aacactaagaggcactgtggctttc

SEQ ID NO: 5575001 - DNA, 25 bp, Homo sapien
tttcagagaaaatacgagaagcagt

SEQ ID NO: 5575002 - DNA, 25 bp, Homo sapien
aactcttggggtcaagtgatcctcc

SEQ ID NO: 5575003 - DNA, 25 bp, Homo sapien
cacccttcacctggatagatgccac

SEQ ID NO: 5575004 - DNA, 25 bp, Homo sapien
ccataaatacctgcagaaagaaaga

SEQ ID NO: 5575005 - DNA, 25 bp, Homo sapien
agtgcctagaacatagtgggtactc

SEQ ID NO: 5575006 - DNA, 25 bp, Homo sapien
gccagaaggcagagactttttggtc

SEQ ID NO: 5575007 - DNA, 25 bp, Homo sapien
tccatcataaggacccagcttatat

SEQ ID NO: 5575008 - DNA, 25 bp, Homo sapien
tagaaaagtgcctagaacatagtgg

SEQ ID NO: 5575009 - DNA, 25 bp, Homo sapien
tctcgttcactgctgtagtcccaac

SEQ ID NO: 5575010 - DNA, 25 bp, Homo sapien
cacctggatagatgccactcaattc

SEQ ID NO: 5575011 - DNA, 25 bp, Homo sapien
ctctcctagcctcctggccagaagg

SEQ ID NO: 5575012 - DNA, 25 bp, Homo sapien
aatgaatatgtgactctgctttcac

SEQ ID NO: 5575013 - DNA, 25 bp, Homo sapien
ttttggaccccccgactccatcata

SEQ ID NO: 5575014 - DNA, 25 bp, Homo sapien
agggtaggaatcaagggattctgat

SEQ ID NO: 5575015 - DNA, 25 bp, Homo sapien
gggattctgatctgtgggctccagt

SEQ ID NO: 5575016 - DNA, 25 bp, Homo sapien
agtgtgcgcagtcgcccatttcctg

SEQ ID NO: 5575017 - DNA, 25 bp, Homo sapien
atgataaccatgagataggtactgt

SEQ ID NO: 5575018 - DNA, 25 bp, Homo sapien
tgtgtgcatgctaaatttctggcgc

SEQ ID NO: 5575019 - DNA, 25 bp, Homo sapien
tgccaaagagtttaattagtccagt

SEQ ID NO: 5575020 - DNA, 25 bp, Homo sapien
ctcccccgcccaccccgatatagaa

SEQ ID NO: 5575021 - DNA, 25 bp, Homo sapien
cgaacataaagcagtctaagaaggt

SEQ ID NO: 5575022 - DNA, 25 bp, Homo sapien
tcctgctcctggttagcactgctgg

SEQ ID NO: 5575023 - DNA, 25 bp, Homo sapien
ggcgcttgcctaaccactcagttcc

SEQ ID NO: 5575024 - DNA, 25 bp, Homo sapien
gcactgctgggagatcctgctattt

SEQ ID NO: 5575025 - DNA, 25 bp, Homo sapien
aatatgtatgagtctgcgtgtgtgc

SEQ ID NO: 5575026 - DNA, 25 bp, Homo sapien
gaaagattttaaggctaagactagc

SEQ ID NO: 5575027 - DNA, 25 bp, Homo sapien
gagtatcaggagatttatcacgtcg

SEQ ID NO: 5575028 - DNA, 25 bp, Homo sapien
tgtgtgtgacctgacaagttgttcc

SEQ ID NO: 5575029 - DNA, 25 bp, Homo sapien
gcatgtgtgtgtgacctgacaagtt

SEQ ID NO: 5575030 - DNA, 25 bp, Homo sapien
aaagatgcaatttatgatagtaaca

SEQ ID NO: 5575031 - DNA, 25 bp, Homo sapien
tatcacgtcgaaagacataaaaatg

SEQ ID NO: 5575032 - DNA, 25 bp, Homo sapien
gttccaaatgattgtatgaaagatt

SEQ ID NO: 5575033 - DNA, 25 bp, Homo sapien
gtgtgccgcttgtgcttgcatgtgt

SEQ ID NO: 5575034 - DNA, 25 bp, Homo sapien
acagaacatttgagtatcaggagat

SEQ ID NO: 5575035 - DNA, 25 bp, Homo sapien
atataagagacaattgcttggcaga

SEQ ID NO: 5575036 - DNA, 25 bp, Homo sapien
tttacgacgacaaaagatttaagaa

SEQ ID NO: 5575037 - DNA, 25 bp, Homo sapien
ttcttaaatcttttgtcgtcgtaaa

SEQ ID NO: 5575038 - DNA, 25 bp, Homo sapien
aaacttacctctcccgcaggatccc

SEQ ID NO: 5575039 - DNA, 25 bp, Homo sapien
acagaaagacgtggctactccctgt

SEQ ID NO: 5575040 - DNA, 25 bp, Homo sapien
aagaatgggctggatcttccactcc

SEQ ID NO: 5575041 - DNA, 25 bp, Homo sapien
ggaaagagtttcagtctgtgtgcct

SEQ ID NO: 5575042 - DNA, 25 bp, Homo sapien
gggagacacacaggtgtgaactaca

SEQ ID NO: 5575043 - DNA, 25 bp, Homo sapien
ctagcacctgcactgagctttacac

SEQ ID NO: 5575044 - DNA, 25 bp, Homo sapien
aaactgtgttccctgcaaacctgcc

SEQ ID NO: 5575045 - DNA, 25 bp, Homo sapien
ccatgacctagcacctgcactgagc

SEQ ID NO: 5575046 - DNA, 25 bp, Homo sapien
cacacaggtgtgaactacagaaaga

SEQ ID NO: 5575047 - DNA, 25 bp, Homo sapien
tttctgcaggcttgcaggctctgcg

SEQ ID NO: 5575048 - DNA, 25 bp, Homo sapien
attctgtggatgagtccaagaaagg

SEQ ID NO: 5575049 - DNA, 25 bp, Homo sapien
tacatgaaccacttggggtaaaata

SEQ ID NO: 5575050 - DNA, 25 bp, Homo sapien
gggtaaaatatgaaatcagtccagc

SEQ ID NO: 5575051 - DNA, 25 bp, Homo sapien
aagacattggtctagagagagtaag

SEQ ID NO: 5575052 - DNA, 25 bp, Homo sapien
ctaaatttacgaaggaaatgaaaga

SEQ ID NO: 5575053 - DNA, 25 bp, Homo sapien
gaaaccaaacgtgagcgaaatggaa

SEQ ID NO: 5575054 - DNA, 25 bp, Homo sapien
aaagtggatttaatagtgtgaagca

SEQ ID NO: 5575055 - DNA, 25 bp, Homo sapien
acccaggaatactcatatagttgcc

SEQ ID NO: 5575056 - DNA, 25 bp, Homo sapien
gtaagaggcacacatgactaatggt

SEQ ID NO: 5575057 - DNA, 25 bp, Homo sapien
tagtgtgaagcaaaactccccctag

SEQ ID NO: 5575058 - DNA, 25 bp, Homo sapien
agtccagcacagaggctaacatttt

SEQ ID NO: 5575059 - DNA, 25 bp, Homo sapien
gaaatgaaagacggacacactttta

SEQ ID NO: 5575060 - DNA, 25 bp, Homo sapien
aacaccggccgccgcccactttaca

SEQ ID NO: 5575061 - DNA, 25 bp, Homo sapien
cgtcttctcgcagccgtgtcgcgcg

SEQ ID NO: 5575062 - DNA, 25 bp, Homo sapien
gcactgccgctcttgtgaccgctgc

SEQ ID NO: 5575063 - DNA, 25 bp, Homo sapien
ctcttgtgaccgctgcacgcttagg

SEQ ID NO: 5575064 - DNA, 25 bp, Homo sapien
ggctgtgactcagctgtgggaacac

SEQ ID NO: 5575065 - DNA, 25 bp, Homo sapien
gggacagcactgccgctcttgtgac

SEQ ID NO: 5575066 - DNA, 25 bp, Homo sapien
cggccgccgcccactttacaagccg

SEQ ID NO: 5575067 - DNA, 25 bp, Homo sapien
tctgtcgtcttctcgcagccgtgtc

SEQ ID NO: 5575068 - DNA, 25 bp, Homo sapien
ccgggacttcctctccccttctgtc

SEQ ID NO: 5575069 - DNA, 25 bp, Homo sapien
ccgctcttgtgaccgctgcacgctt

SEQ ID NO: 5575070 - DNA, 25 bp, Homo sapien
ctgccgctcttgtgaccgctgcacg

SEQ ID NO: 5575071 - DNA, 25 bp, Homo sapien
atttgacctccagatgaccatgact

SEQ ID NO: 5575072 - DNA, 25 bp, Homo sapien
tgactagaagcagcttagactgagc

SEQ ID NO: 5575073 - DNA, 25 bp, Homo sapien
ctgtaaaaccaaccacctttgtgca

SEQ ID NO: 5575074 - DNA, 25 bp, Homo sapien
atatgtccctaaaattgcaatgctc

SEQ ID NO: 5575075 - DNA, 25 bp, Homo sapien
agtttgaaacctagaaatgcctgat

SEQ ID NO: 5575076 - DNA, 25 bp, Homo sapien
aaagtcaagtccaagttgcccagtc

SEQ ID NO: 5575077 - DNA, 25 bp, Homo sapien
cttagactgagcaacctgtaaaacc

SEQ ID NO: 5575078 - DNA, 25 bp, Homo sapien
cccagtctaacaggcttgcttacct

SEQ ID NO: 5575079 - DNA, 25 bp, Homo sapien
tctagattgttgaaggagcaaagtc

SEQ ID NO: 5575080 - DNA, 25 bp, Homo sapien
tctgaattgagtctgccatctgaat

SEQ ID NO: 5575081 - DNA, 25 bp, Homo sapien
tgtgcagaaatatcatccaactggc

SEQ ID NO: 5575082 - DNA, 25 bp, Homo sapien
tgatcactgagtaatctagtaagaa

SEQ ID NO: 5575083 - DNA, 25 bp, Homo sapien
gggtttcagcagaggtctgatccag

SEQ ID NO: 5575084 - DNA, 25 bp, Homo sapien
tggaactgaaccagtaaagatttat

SEQ ID NO: 5575085 - DNA, 25 bp, Homo sapien
caggcaggaggtattatttgtggta

SEQ ID NO: 5575086 - DNA, 25 bp, Homo sapien
aagcctagatcttgacactcccaat

SEQ ID NO: 5575087 - DNA, 25 bp, Homo sapien
aatctagtaagaaatcagctcacat

SEQ ID NO: 5575088 - DNA, 25 bp, Homo sapien
aggtaaactaagaatcaaagactat

SEQ ID NO: 5575089 - DNA, 25 bp, Homo sapien
aagcagcagatataacactcaagcc

SEQ ID NO: 5575090 - DNA, 25 bp, Homo sapien
tacagatcaggtaaactaagaatca

SEQ ID NO: 5575091 - DNA, 25 bp, Homo sapien
gcagaggtctgatccagaagttctc

SEQ ID NO: 5575092 - DNA, 25 bp, Homo sapien
aatgtcaacaaggctcttccaggca

SEQ ID NO: 5575093 - DNA, 25 bp, Homo sapien
aagagcttcagcttttctgggcctt

SEQ ID NO: 5575094 - DNA, 25 bp, Homo sapien
acaccaatcccaagagcacgggaca

SEQ ID NO: 5575095 - DNA, 25 bp, Homo sapien
gtggagtctccagaggttttgccca

SEQ ID NO: 5575096 - DNA, 25 bp, Homo sapien
agcaaaacatgttcccagcatctac

SEQ ID NO: 5575097 - DNA, 25 bp, Homo sapien
cctaatcggcatgtcccagtggtta

SEQ ID NO: 5575098 - DNA, 25 bp, Homo sapien
aatctgtctaggaaataaggatgcc

SEQ ID NO: 5575099 - DNA, 25 bp, Homo sapien
gggacaggaaattgtgacgtcacat

SEQ ID NO: 5575100 - DNA, 25 bp, Homo sapien
atctgcagaaggtcagcccattctg

SEQ ID NO: 5575101 - DNA, 25 bp, Homo sapien
tgagtgcctgataaaccgacaaaca

SEQ ID NO: 5575102 - DNA, 25 bp, Homo sapien
cgacaaacatcagcagctaaactca

SEQ ID NO: 5575103 - DNA, 25 bp, Homo sapien
gggaatagagagtgcagttttttga

SEQ ID NO: 5575104 - DNA, 25 bp, Homo sapien
aacgccacgtttccaaagcaaatcc

SEQ ID NO: 5575105 - DNA, 25 bp, Homo sapien
cttcttaaacagggtgctaatcatc

SEQ ID NO: 5575106 - DNA, 25 bp, Homo sapien
gcccagccaacgcagaaaaattcta

SEQ ID NO: 5575107 - DNA, 25 bp, Homo sapien
cataacctagtaaacgccacgtttc

SEQ ID NO: 5575108 - DNA, 25 bp, Homo sapien
acagggtgctaatcatctaagttca

SEQ ID NO: 5575109 - DNA, 25 bp, Homo sapien
tgaaataacaactcacacttgatcc

SEQ ID NO: 5575110 - DNA, 25 bp, Homo sapien
tcagacccttcttaaacagggtgct

SEQ ID NO: 5575111 - DNA, 25 bp, Homo sapien
ctcaaacaatgtaccttttcaccct

SEQ ID NO: 5575112 - DNA, 25 bp, Homo sapien
ctaagttcatacgtcaaagattact

SEQ ID NO: 5575113 - DNA, 25 bp, Homo sapien
ctccccaagttttcagattacaggt

SEQ ID NO: 5575114 - DNA, 25 bp, Homo sapien
tcatatatgaaataacaactcacac

SEQ ID NO: 5575115 - DNA, 25 bp, Homo sapien
agaaagtggtagataaggccttttg

SEQ ID NO: 5575116 - DNA, 25 bp, Homo sapien
attccagcaaccacatgtgagcttc

SEQ ID NO: 5575117 - DNA, 25 bp, Homo sapien
ggtatgggagatttagtgattataa

SEQ ID NO: 5575118 - DNA, 25 bp, Homo sapien
aagcactacatgataaaagaatccc

SEQ ID NO: 5575119 - DNA, 25 bp, Homo sapien
tctgtttggtctgggtgcctatatt

SEQ ID NO: 5575120 - DNA, 25 bp, Homo sapien
atcagcatttgccaaccctggagtt

SEQ ID NO: 5575121 - DNA, 25 bp, Homo sapien
cataaagggatcatgataataaaaa

SEQ ID NO: 5575122 - DNA, 25 bp, Homo sapien
caagttgctgtatgacaggttaatc

SEQ ID NO: 5575123 - DNA, 25 bp, Homo sapien
aaccctggagttgtcaagttgctgt

SEQ ID NO: 5575124 - DNA, 25 bp, Homo sapien
tcctgatgggcacttacttcctgcc

SEQ ID NO: 5575125 - DNA, 25 bp, Homo sapien
tctgttttgttgtgggcttctattc

SEQ ID NO: 5575126 - DNA, 25 bp, Homo sapien
gatctaagtacacgaacaaatcttt

SEQ ID NO: 5575127 - DNA, 25 bp, Homo sapien
tgtgggagcaagttctacagaacac

SEQ ID NO: 5575128 - DNA, 25 bp, Homo sapien
gaagagcagaaatgattcagctcat

SEQ ID NO: 5575129 - DNA, 25 bp, Homo sapien
tcagctcataaagcagtgaaaagga

SEQ ID NO: 5575130 - DNA, 25 bp, Homo sapien
agtagtgctggaacaataatgacct

SEQ ID NO: 5575131 - DNA, 25 bp, Homo sapien
gaggcctggatactttggagaccaa

SEQ ID NO: 5575132 - DNA, 25 bp, Homo sapien
tgaaaaggaatgatctaagtacacg

SEQ ID NO: 5575133 - DNA, 25 bp, Homo sapien
cactctattgcccatgcaggggtgc

SEQ ID NO: 5575134 - DNA, 25 bp, Homo sapien
ataatgacctgaaagccagtggaac

SEQ ID NO: 5575135 - DNA, 25 bp, Homo sapien
ctcttatgaccctctagaagcttga

SEQ ID NO: 5575136 - DNA, 25 bp, Homo sapien
aagcaaaatgttaaagtgtgggagc

SEQ ID NO: 5575137 - DNA, 25 bp, Homo sapien
caaaaattgccatcatagcatgtat

SEQ ID NO: 5575138 - DNA, 25 bp, Homo sapien
ccgggcagagatgctcctcatctcc

SEQ ID NO: 5575139 - DNA, 25 bp, Homo sapien
atttgaatccattgtcaagaatttc

SEQ ID NO: 5575140 - DNA, 25 bp, Homo sapien
aaatgttcaggcagacttcccagac

SEQ ID NO: 5575141 - DNA, 25 bp, Homo sapien
taatattggaaatgttcaggcagac

SEQ ID NO: 5575142 - DNA, 25 bp, Homo sapien
tgtgatggcagtttccaaaaattgc

SEQ ID NO: 5575143 - DNA, 25 bp, Homo sapien
agatctggacctttggttgaccttt

SEQ ID NO: 5575144 - DNA, 25 bp, Homo sapien
tattggaaatgttcaggcagacttc

SEQ ID NO: 5575145 - DNA, 25 bp, Homo sapien
atgcaggtgattttgtagatctgga

SEQ ID NO: 5575146 - DNA, 25 bp, Homo sapien
gcaggtgattttgtagatctggacc

SEQ ID NO: 5575147 - DNA, 25 bp, Homo sapien
tcctcatctcccagacggggtcccg

SEQ ID NO: 5575148 - DNA, 25 bp, Homo sapien
actagattaacgaggacgctgttcc

SEQ ID NO: 5575149 - DNA, 25 bp, Homo sapien
ggaacagcgtcctcgttaatctagt

SEQ ID NO: 5575150 - DNA, 25 bp, Homo sapien
gttagcctaaagagtagaagaggag

SEQ ID NO: 5575151 - DNA, 25 bp, Homo sapien
ggtggggatgagttgtttatataaa

SEQ ID NO: 5575152 - DNA, 25 bp, Homo sapien
agaggagaagtaatttccgtggtcc

SEQ ID NO: 5575153 - DNA, 25 bp, Homo sapien
cttggtcaggtatttttaggattcc

SEQ ID NO: 5575154 - DNA, 25 bp, Homo sapien
catccaggatgtagtatcagacttt

SEQ ID NO: 5575155 - DNA, 25 bp, Homo sapien
tcatcacttacgtctggtgcccggg

SEQ ID NO: 5575156 - DNA, 25 bp, Homo sapien
gggcaggaatcatctggaagcctca

SEQ ID NO: 5575157 - DNA, 25 bp, Homo sapien
gggtcatggattccgcaggtcaaga

SEQ ID NO: 5575158 - DNA, 25 bp, Homo sapien
tccgtggtccggtgatctgttgtta

SEQ ID NO: 5575159 - DNA, 25 bp, Homo sapien
ccatcccagaacttaggggtgtaac

SEQ ID NO: 5575160 - DNA, 25 bp, Homo sapien
tacggcactgttcggaaactgctgc

SEQ ID NO: 5575161 - DNA, 25 bp, Homo sapien
tgcagcactcaaattcaggaccact

SEQ ID NO: 5575162 - DNA, 25 bp, Homo sapien
gtgtaggaattgactaggaaaatac

SEQ ID NO: 5575163 - DNA, 25 bp, Homo sapien
tggtcaacaaactcagcggagcaca

SEQ ID NO: 5575164 - DNA, 25 bp, Homo sapien
ctcaaaagtagcatatgcagcactc

SEQ ID NO: 5575165 - DNA, 25 bp, Homo sapien
cacctgtaggtgatttggtcaacaa

SEQ ID NO: 5575166 - DNA, 25 bp, Homo sapien
taaagatgagagaattgaggcttaa

SEQ ID NO: 5575167 - DNA, 25 bp, Homo sapien
agtacaagtgcaagatctgtgattt

SEQ ID NO: 5575168 - DNA, 25 bp, Homo sapien
attatcagatgggaccacatacatc

SEQ ID NO: 5575169 - DNA, 25 bp, Homo sapien
tcagcggagcacacactccagatta

SEQ ID NO: 5575170 - DNA, 25 bp, Homo sapien
tttgcttgaggtcagtgtaggaatt

SEQ ID NO: 5575171 - DNA, 25 bp, Homo sapien
ttatgacagaaagctgatcagtgtt

SEQ ID NO: 5575172 - DNA, 25 bp, Homo sapien
tccagggtggagtcttctcatgtga

SEQ ID NO: 5575173 - DNA, 25 bp, Homo sapien
taatggtttccccttgaggcgtcat

SEQ ID NO: 5575174 - DNA, 25 bp, Homo sapien
ctaagtcctccagctgctcaagggc

SEQ ID NO: 5575175 - DNA, 25 bp, Homo sapien
ccatcccagcctgtgtcttcctgtc

SEQ ID NO: 5575176 - DNA, 25 bp, Homo sapien
aagggctgtatacctcacaggccac

SEQ ID NO: 5575177 - DNA, 25 bp, Homo sapien
ccaggagtgagcccatctccatccc

SEQ ID NO: 5575178 - DNA, 25 bp, Homo sapien
aagggccttgtgaccagaaatcacc

SEQ ID NO: 5575179 - DNA, 25 bp, Homo sapien
tcttctcatgtgaatggctgctctc

SEQ ID NO: 5575180 - DNA, 25 bp, Homo sapien
tctccgcactctgcctaagtcctcc

SEQ ID NO: 5575181 - DNA, 25 bp, Homo sapien
tgaggcgtcattctctaagtgctga

SEQ ID NO: 5575182 - DNA, 25 bp, Homo sapien
ctgcctccagggtggagtcttctca

SEQ ID NO: 5575183 - DNA, 25 bp, Homo sapien
ggacagcagggagtcactttcataa

SEQ ID NO: 5575184 - DNA, 25 bp, Homo sapien
taaaagaaacaacaaatggattcat

SEQ ID NO: 5575185 - DNA, 25 bp, Homo sapien
caatgtcaacattaaaagaggaagt

SEQ ID NO: 5575186 - DNA, 25 bp, Homo sapien
agggagtcactttcataatggcatc

SEQ ID NO: 5575187 - DNA, 25 bp, Homo sapien
gcaccataaaacgtggacagcaggg

SEQ ID NO: 5575188 - DNA, 25 bp, Homo sapien
ttgcatacccaatgaagcaggctat

SEQ ID NO: 5575189 - DNA, 25 bp, Homo sapien
aaagtcttggtacagatggcatttc

SEQ ID NO: 5575190 - DNA, 25 bp, Homo sapien
ttaaaagaggaagtttgcataccca

SEQ ID NO: 5575191 - DNA, 25 bp, Homo sapien
ttacattattcagggtggaacacac

SEQ ID NO: 5575192 - DNA, 25 bp, Homo sapien
aatgaagcaggctatggaataaaag

SEQ ID NO: 5575193 - DNA, 25 bp, Homo sapien
ggaatacaaagggaattgatgcaca

SEQ ID NO: 5575194 - DNA, 25 bp, Homo sapien
gaccagagtatagtgaaaacagaac

SEQ ID NO: 5575195 - DNA, 25 bp, Homo sapien
accaaaccataatgtctccaaggta

SEQ ID NO: 5575196 - DNA, 25 bp, Homo sapien
aacgagatgtagttcttaaaagttc

SEQ ID NO: 5575197 - DNA, 25 bp, Homo sapien
cattctcagagtagttgacagcact

SEQ ID NO: 5575198 - DNA, 25 bp, Homo sapien
ggaaggtaatatgaaattctggccc

SEQ ID NO: 5575199 - DNA, 25 bp, Homo sapien
gcacacttaatagaccagagtatag

SEQ ID NO: 5575200 - DNA, 25 bp, Homo sapien
tatggctgtacttgattttggtttc

SEQ ID NO: 5575201 - DNA, 25 bp, Homo sapien
aggaaggagttgtaagatacacatt

SEQ ID NO: 5575202 - DNA, 25 bp, Homo sapien
ctggaagttagttttgtggaaggta

SEQ ID NO: 5575203 - DNA, 25 bp, Homo sapien
cctgaagacctctctggaagttagt

SEQ ID NO: 5575204 - DNA, 25 bp, Homo sapien
tgacagcactttaaagcaccaatgc

SEQ ID NO: 5575205 - DNA, 25 bp, Homo sapien
tttgctaagggcctgtggctgaaag

SEQ ID NO: 5575206 - DNA, 25 bp, Homo sapien
tgaaagggatcctgtcaggaccatt

SEQ ID NO: 5575207 - DNA, 25 bp, Homo sapien
ttaatccgaagtaggcatgaaccag

SEQ ID NO: 5575208 - DNA, 25 bp, Homo sapien
attctggtggagaatacagacatta

SEQ ID NO: 5575209 - DNA, 25 bp, Homo sapien
gctatgaaggacatctcatggagtt

SEQ ID NO: 5575210 - DNA, 25 bp, Homo sapien
gagagtgtgtaataaggacttggtc

SEQ ID NO: 5575211 - DNA, 25 bp, Homo sapien
gagcagcatttgctaagggcctgtg

SEQ ID NO: 5575212 - DNA, 25 bp, Homo sapien
ccattgaaaggagcaatgaggatag

SEQ ID NO: 5575213 - DNA, 25 bp, Homo sapien
acacatcctggctctcatgaagctc

SEQ ID NO: 5575214 - DNA, 25 bp, Homo sapien
tcatggagtttgagagtgtgtaata

SEQ ID NO: 5575215 - DNA, 25 bp, Homo sapien
attataactgggatgagagctatga

SEQ ID NO: 5575216 - DNA, 25 bp, Homo sapien
aaactttagggtgaaggtatatgga

SEQ ID NO: 5575217 - DNA, 25 bp, Homo sapien
gactggtgggagttaagttatatta

SEQ ID NO: 5575218 - DNA, 25 bp, Homo sapien
ccttactaagtctggctgacctgga

SEQ ID NO: 5575219 - DNA, 25 bp, Homo sapien
tttgactttgtcttggctgtttcca

SEQ ID NO: 5575220 - DNA, 25 bp, Homo sapien
tgtgctagcagttgacaatttttat

SEQ ID NO: 5575221 - DNA, 25 bp, Homo sapien
tggtgatggccttcctcaaaattgc

SEQ ID NO: 5575222 - DNA, 25 bp, Homo sapien
ccagtttccttccaatagattccct

SEQ ID NO: 5575223 - DNA, 25 bp, Homo sapien
tgctgactgtcccagagttatcttt

SEQ ID NO: 5575224 - DNA, 25 bp, Homo sapien
tgagaatgattccatgatacccagg

SEQ ID NO: 5575225 - DNA, 25 bp, Homo sapien
attgcttttgctctgagaatgattc

SEQ ID NO: 5575226 - DNA, 25 bp, Homo sapien
gacaatttttatggtgatggccttc

SEQ ID NO: 5575227 - DNA, 25 bp, Homo sapien
cccaccatgaccaacgagaaaactg

SEQ ID NO: 5575228 - DNA, 25 bp, Homo sapien
tacagtgctaacatgttgggagttt

SEQ ID NO: 5575229 - DNA, 25 bp, Homo sapien
agagaggtagagacctccagaaatg

SEQ ID NO: 5575230 - DNA, 25 bp, Homo sapien
actacatacaggtgaggcctcaaaa

SEQ ID NO: 5575231 - DNA, 25 bp, Homo sapien
tgtcactgtcactaagctgagagtc

SEQ ID NO: 5575232 - DNA, 25 bp, Homo sapien
aatgcaaaaccatgtggaaggacaa

SEQ ID NO: 5575233 - DNA, 25 bp, Homo sapien
aaaaagacgcagaaggacttcctct

SEQ ID NO: 5575234 - DNA, 25 bp, Homo sapien
gccaagatggacttgccctcccacc

SEQ ID NO: 5575235 - DNA, 25 bp, Homo sapien
aggaaaacactggaggcaaatctca

SEQ ID NO: 5575236 - DNA, 25 bp, Homo sapien
caggcagaacaggactgtgatattt

SEQ ID NO: 5575237 - DNA, 25 bp, Homo sapien
tgggagtttatagaataaggtactg

SEQ ID NO: 5575238 - DNA, 25 bp, Homo sapien
ctataggtctgtcttctctggctcc

SEQ ID NO: 5575239 - DNA, 25 bp, Homo sapien
aacttgcttaagtgcctgtccttcc

SEQ ID NO: 5575240 - DNA, 25 bp, Homo sapien
ttgggtgctcctataggtctgtctt

SEQ ID NO: 5575241 - DNA, 25 bp, Homo sapien
gccacagatctgacgcccttcccca

SEQ ID NO: 5575242 - DNA, 25 bp, Homo sapien
tctggctccagtcaactcctgggaa

SEQ ID NO: 5575243 - DNA, 25 bp, Homo sapien
aagacatatgggctactatggaggg

SEQ ID NO: 5575244 - DNA, 25 bp, Homo sapien
gatccatgtaagacatatgggctac

SEQ ID NO: 5575245 - DNA, 25 bp, Homo sapien
ccacttgtgtagttaggaaagtagc

SEQ ID NO: 5575246 - DNA, 25 bp, Homo sapien
ttgtgtagttaggaaagtagcttat

SEQ ID NO: 5575247 - DNA, 25 bp, Homo sapien
tgggaacctcagcttaagattccac

SEQ ID NO: 5575248 - DNA, 25 bp, Homo sapien
ggccccacgaaagctgatccatgta

SEQ ID NO: 5575249 - DNA, 25 bp, Homo sapien
gtgaagattggaggagattttaata

SEQ ID NO: 5575250 - DNA, 25 bp, Homo sapien
caaaattccaccaggaagggaaaca

SEQ ID NO: 5575251 - DNA, 25 bp, Homo sapien
ttagacagtagcagaaccagaattt

SEQ ID NO: 5575252 - DNA, 25 bp, Homo sapien
gaagtcccgggaactaacattcatc

SEQ ID NO: 5575253 - DNA, 25 bp, Homo sapien
acagtgccatccctgacagacaccc

SEQ ID NO: 5575254 - DNA, 25 bp, Homo sapien
gacagccatgtctcagaggtgaaga

SEQ ID NO: 5575255 - DNA, 25 bp, Homo sapien
gacatcccagaggatcgcaacattc

SEQ ID NO: 5575256 - DNA, 25 bp, Homo sapien
aatgcggcccttgcacgcccacttt

SEQ ID NO: 5575257 - DNA, 25 bp, Homo sapien
taatatagggtgtgaattccaattc

SEQ ID NO: 5575258 - DNA, 25 bp, Homo sapien
agattgagtccctgcagcacgcaat

SEQ ID NO: 5575259 - DNA, 25 bp, Homo sapien
gcagcacgcaattagacagtagcag

SEQ ID NO: 5575260 - DNA, 25 bp, Homo sapien
gcttcatgcttgtaggctgtaggac

SEQ ID NO: 5575261 - DNA, 25 bp, Homo sapien
tggctctttgtaagagataagaaat

SEQ ID NO: 5575262 - DNA, 25 bp, Homo sapien
atctgttatctcaaagggggtttta

SEQ ID NO: 5575263 - DNA, 25 bp, Homo sapien
aatgtaactttaccttggagccttg

SEQ ID NO: 5575264 - DNA, 25 bp, Homo sapien
catgcttgtaggctgtaggacttta

SEQ ID NO: 5575265 - DNA, 25 bp, Homo sapien
gtaggctgtaggactttaagagaat

SEQ ID NO: 5575266 - DNA, 25 bp, Homo sapien
tttaccttggagccttgatgttcac

SEQ ID NO: 5575267 - DNA, 25 bp, Homo sapien
taagagaataaagaactgaataaaa

SEQ ID NO: 5575268 - DNA, 25 bp, Homo sapien
ttacatcctgttggcttcatgcttg

SEQ ID NO: 5575269 - DNA, 25 bp, Homo sapien
cttggagccttgatgttcacatgta

SEQ ID NO: 5575270 - DNA, 25 bp, Homo sapien
tgaataaaatttagccttaagatat

SEQ ID NO: 5575271 - DNA, 25 bp, Homo sapien
tgcaagagggataatagcatctacc

SEQ ID NO: 5575272 - DNA, 25 bp, Homo sapien
agactccaacgaatgcaagagggat

SEQ ID NO: 5575273 - DNA, 25 bp, Homo sapien
atgcacacacagccggactctcaga

SEQ ID NO: 5575274 - DNA, 25 bp, Homo sapien
attcagatagccttcagaggtcccc

SEQ ID NO: 5575275 - DNA, 25 bp, Homo sapien
aagaaatgttatggtcagtagaatc

SEQ ID NO: 5575276 - DNA, 25 bp, Homo sapien
ggctactctataagcagaacagctc

SEQ ID NO: 5575277 - DNA, 25 bp, Homo sapien
cagtccagtgcatctggagggtctg

SEQ ID NO: 5575278 - DNA, 25 bp, Homo sapien
agaggtccccataacagcactgctg

SEQ ID NO: 5575279 - DNA, 25 bp, Homo sapien
acaaggatattggattaggttattg

SEQ ID NO: 5575280 - DNA, 25 bp, Homo sapien
tgacttgctaaatgcaggcacattc

SEQ ID NO: 5575281 - DNA, 25 bp, Homo sapien
agaacagctcaactagcatggtttc

SEQ ID NO: 5575282 - DNA, 25 bp, Homo sapien
tgccagagctaattcatgatgagtt

SEQ ID NO: 5575283 - DNA, 25 bp, Homo sapien
aaagaccaaagcatagaaatgccac

SEQ ID NO: 5575284 - DNA, 25 bp, Homo sapien
gagataggaaacagaacagtattct

SEQ ID NO: 5575285 - DNA, 25 bp, Homo sapien
cagtattctaactcagtcatgccag

SEQ ID NO: 5575286 - DNA, 25 bp, Homo sapien
aagcatagcagtcatcagttccggt

SEQ ID NO: 5575287 - DNA, 25 bp, Homo sapien
gatgaggaaacgttaattctggtaa

SEQ ID NO: 5575288 - DNA, 25 bp, Homo sapien
ctacatgtagagataggaaacagaa

SEQ ID NO: 5575289 - DNA, 25 bp, Homo sapien
tgttgaagctgctgtcaagcatagc

SEQ ID NO: 5575290 - DNA, 25 bp, Homo sapien
gagttgtatccgaggctgttgaagc

SEQ ID NO: 5575291 - DNA, 25 bp, Homo sapien
cagttccggtaaaatgcttcccaga

SEQ ID NO: 5575292 - DNA, 25 bp, Homo sapien
cttttacattcactgggaaagatga

SEQ ID NO: 5575293 - DNA, 25 bp, Homo sapien
gagtacccgacctgtcaggaggacc

SEQ ID NO: 5575294 - DNA, 25 bp, Homo sapien
ggtcctcctgacaggtcgggtactc

SEQ ID NO: 5575295 - DNA, 25 bp, Homo sapien
tgatttggtcttagtggcccctggg

SEQ ID NO: 5575296 - DNA, 25 bp, Homo sapien
taggtgtgtccctgcaaatcctgtc

SEQ ID NO: 5575297 - DNA, 25 bp, Homo sapien
aacacaggaaaactcgcactgcaat

SEQ ID NO: 5575298 - DNA, 25 bp, Homo sapien
ttctcagagtggcattaggttctcg

SEQ ID NO: 5575299 - DNA, 25 bp, Homo sapien
ggatctgaggagtgtcttttctgcc

SEQ ID NO: 5575300 - DNA, 25 bp, Homo sapien
tcttccctgcgcccagggtgctacc

SEQ ID NO: 5575301 - DNA, 25 bp, Homo sapien
caacttgcacccgtactgagctttc

SEQ ID NO: 5575302 - DNA, 25 bp, Homo sapien
tccatcgcaggggaatccctcctca

SEQ ID NO: 5575303 - DNA, 25 bp, Homo sapien
cagtaactgtcacacacgctgctgc

SEQ ID NO: 5575304 - DNA, 25 bp, Homo sapien
gctgcttccaggatctgaggagtgt

SEQ ID NO: 5575305 - DNA, 25 bp, Homo sapien
tgctgagatggccatgatttggtct

SEQ ID NO: 5575306 - DNA, 25 bp, Homo sapien
tcttgatatgaggtctgagaggtga

SEQ ID NO: 5575307 - DNA, 25 bp, Homo sapien
ggataggataagaaagctccagtct

SEQ ID NO: 5575308 - DNA, 25 bp, Homo sapien
gttagaaaggttgacagtattgatg

SEQ ID NO: 5575309 - DNA, 25 bp, Homo sapien
gacagagggagttgtgtcttgatat

SEQ ID NO: 5575310 - DNA, 25 bp, Homo sapien
tttaatgtaagcgccacaagaaacc

SEQ ID NO: 5575311 - DNA, 25 bp, Homo sapien
cctatgtctgattcagaggggcggg

SEQ ID NO: 5575312 - DNA, 25 bp, Homo sapien
ggaaattaggtcagtatgggacaga

SEQ ID NO: 5575313 - DNA, 25 bp, Homo sapien
gcacatggaaccaaaaggtgagaaa

SEQ ID NO: 5575314 - DNA, 25 bp, Homo sapien
cagaagatttttaggcgatgatgcc

SEQ ID NO: 5575315 - DNA, 25 bp, Homo sapien
aggtgagaaaatttgtaagaacgtc

SEQ ID NO: 5575316 - DNA, 25 bp, Homo sapien
ggtgagcagggacaatattatctgt

SEQ ID NO: 5575317 - DNA, 25 bp, Homo sapien
atcacactctaaagcctcaaactcc

SEQ ID NO: 5575318 - DNA, 25 bp, Homo sapien
tgtcccaccattgcatctcagaaac

SEQ ID NO: 5575319 - DNA, 25 bp, Homo sapien
aaaaaaatgggcaggctgccaatcc

SEQ ID NO: 5575320 - DNA, 25 bp, Homo sapien
ggtaaggccgtgtcaatgcacctag

SEQ ID NO: 5575321 - DNA, 25 bp, Homo sapien
ggctgttcacaggtgcaataatcac

SEQ ID NO: 5575322 - DNA, 25 bp, Homo sapien
tcatcataactcaagaagcatctgt

SEQ ID NO: 5575323 - DNA, 25 bp, Homo sapien
ctgaatggaatttgtcctgcagact

SEQ ID NO: 5575324 - DNA, 25 bp, Homo sapien
acggaatatcaagccacagagaact

SEQ ID NO: 5575325 - DNA, 25 bp, Homo sapien
caaaaaataggaactaagcagtcat

SEQ ID NO: 5575326 - DNA, 25 bp, Homo sapien
tcttttggaatgggaatgcttcttc

SEQ ID NO: 5575327 - DNA, 25 bp, Homo sapien
caatgcacctagagaacggaatatc

SEQ ID NO: 5575328 - DNA, 25 bp, Homo sapien
cttcagttctacagtaacagtcaaa

SEQ ID NO: 5575329 - DNA, 25 bp, Homo sapien
actagtagatcacacaaacaactcc

SEQ ID NO: 5575330 - DNA, 25 bp, Homo sapien
attagctgcattataaacctgtgat

SEQ ID NO: 5575331 - DNA, 25 bp, Homo sapien
ctagtaactagtagatcacacaaac

SEQ ID NO: 5575332 - DNA, 25 bp, Homo sapien
acgacttgaatgacctcatcatgcc

SEQ ID NO: 5575333 - DNA, 25 bp, Homo sapien
aaatttttacgacttgaatgacctc

SEQ ID NO: 5575334 - DNA, 25 bp, Homo sapien
tcatcatgccacctaagtctgtttc

SEQ ID NO: 5575335 - DNA, 25 bp, Homo sapien
tcactgccctaaaatcaaagtctgt

SEQ ID NO: 5575336 - DNA, 25 bp, Homo sapien
aaggcagccattctcagttagtggg

SEQ ID NO: 5575337 - DNA, 25 bp, Homo sapien
tatccatcatgcagagagtcttcac

SEQ ID NO: 5575338 - DNA, 25 bp, Homo sapien
aaacaactccaaaattcgctttatc

SEQ ID NO: 5575339 - DNA, 25 bp, Homo sapien
ctctggcagtctttataacggtgtc

SEQ ID NO: 5575340 - DNA, 25 bp, Homo sapien
gagtggcgtggatacttcctgactg

SEQ ID NO: 5575341 - DNA, 25 bp, Homo sapien
ggcactttctcggggtgtatctggc

SEQ ID NO: 5575342 - DNA, 25 bp, Homo sapien
cttcaggctgatacccacatttgtc

SEQ ID NO: 5575343 - DNA, 25 bp, Homo sapien
cccaggaagtccattgctctccagc

SEQ ID NO: 5575344 - DNA, 25 bp, Homo sapien
ataacggtgtctctggcagtgtgtc

SEQ ID NO: 5575345 - DNA, 25 bp, Homo sapien
ctctggcagtgtgtctgactgtgtg

SEQ ID NO: 5575346 - DNA, 25 bp, Homo sapien
gtgtctctggcagtgtttggagtgg

SEQ ID NO: 5575347 - DNA, 25 bp, Homo sapien
ggagctgagtctctggcactttctc

SEQ ID NO: 5575348 - DNA, 25 bp, Homo sapien
tatgtctgcactgtctggagctgag

SEQ ID NO: 5575349 - DNA, 25 bp, Homo sapien
gggtgtatctggcactgcgtctctg

SEQ ID NO: 5575350 - DNA, 25 bp, Homo sapien
ttgctttaacagtgggaaaattctg

SEQ ID NO: 5575351 - DNA, 25 bp, Homo sapien
tgtaggagttgaatgagtcttcatc

SEQ ID NO: 5575352 - DNA, 25 bp, Homo sapien
atagtgccaagtatgttcatccatt

SEQ ID NO: 5575353 - DNA, 25 bp, Homo sapien
aacagtgggaaaattctgtcgttac

SEQ ID NO: 5575354 - DNA, 25 bp, Homo sapien
taggttgcagttagtccacaaggac

SEQ ID NO: 5575355 - DNA, 25 bp, Homo sapien
tcttagtgcccctgagtttgtgggg

SEQ ID NO: 5575356 - DNA, 25 bp, Homo sapien
tgtatcaggacaaggcacattgttc

SEQ ID NO: 5575357 - DNA, 25 bp, Homo sapien
tgaggggtaacatcttaggttggat

SEQ ID NO: 5575358 - DNA, 25 bp, Homo sapien
ccacaactgtgtatcaggacaaggc

SEQ ID NO: 5575359 - DNA, 25 bp, Homo sapien
gtccaccctcctgggctggctttgc

SEQ ID NO: 5575360 - DNA, 25 bp, Homo sapien
aggttggatactcagattttgttac

SEQ ID NO: 5575361 - DNA, 25 bp, Homo sapien
tctctcacctccggtacgacgtatg

SEQ ID NO: 5575362 - DNA, 25 bp, Homo sapien
catacgtcgtaccggaggtgagaga

SEQ ID NO: 5575363 - DNA, 25 bp, Homo sapien
gaaaactagagaagccaaacttata

SEQ ID NO: 5575364 - DNA, 25 bp, Homo sapien
cgagtagtagtaaactaaagccctc

SEQ ID NO: 5575365 - DNA, 25 bp, Homo sapien
aatatccagagcacagtctcaggtt

SEQ ID NO: 5575366 - DNA, 25 bp, Homo sapien
gaggaagctcatcttgctaggcaga

SEQ ID NO: 5575367 - DNA, 25 bp, Homo sapien
atacagtgaaacctccctggaaagg

SEQ ID NO: 5575368 - DNA, 25 bp, Homo sapien
tatatatgttagctacgagtagtag

SEQ ID NO: 5575369 - DNA, 25 bp, Homo sapien
attaataactgcactggtacctttc

SEQ ID NO: 5575370 - DNA, 25 bp, Homo sapien
tcatatacacaagtaccaacccatc

SEQ ID NO: 5575371 - DNA, 25 bp, Homo sapien
aacagaggcactcaatatccagagc

SEQ ID NO: 5575372 - DNA, 25 bp, Homo sapien
aagatgccctgcttgaggaagctca

SEQ ID NO: 5575373 - DNA, 25 bp, Homo sapien
ctaaagccctcagagagaaacagca

SEQ ID NO: 5575374 - DNA, 25 bp, Homo sapien
tctggattccaaggggacattcaac

SEQ ID NO: 5575375 - DNA, 25 bp, Homo sapien
gcaagtgccaggatatccaggcctt

SEQ ID NO: 5575376 - DNA, 25 bp, Homo sapien
tacaataagatgaaagctacagcta

SEQ ID NO: 5575377 - DNA, 25 bp, Homo sapien
gagtgattttgagatagacataacc

SEQ ID NO: 5575378 - DNA, 25 bp, Homo sapien
ttcagagaaaagaggactacaataa

SEQ ID NO: 5575379 - DNA, 25 bp, Homo sapien
ttcaaccatgggagatgggttaaac

SEQ ID NO: 5575380 - DNA, 25 bp, Homo sapien
cagctatgcagtaaataaacgtggc

SEQ ID NO: 5575381 - DNA, 25 bp, Homo sapien
ggggataacatgtttgagaacttac

SEQ ID NO: 5575382 - DNA, 25 bp, Homo sapien
ctctatagtcaggacaaggggataa

SEQ ID NO: 5575383 - DNA, 25 bp, Homo sapien
gtcaaagggttgcataatcaggtac

SEQ ID NO: 5575384 - DNA, 25 bp, Homo sapien
attaggggattgatgcttcagagaa

SEQ ID NO: 5575385 - DNA, 25 bp, Homo sapien
ctggtgacttgtaacaggtaggtgg

SEQ ID NO: 5575386 - DNA, 25 bp, Homo sapien
atgatcggggtgaagtttccatcaa

SEQ ID NO: 5575387 - DNA, 25 bp, Homo sapien
ttagatgtattgaaagcaggcattt

SEQ ID NO: 5575388 - DNA, 25 bp, Homo sapien
gatgacagctgttgttcccccaccc

SEQ ID NO: 5575389 - DNA, 25 bp, Homo sapien
cagacactggattgatgacagctgt

SEQ ID NO: 5575390 - DNA, 25 bp, Homo sapien
tctgcgtccctcttcagatgggtca

SEQ ID NO: 5575391 - DNA, 25 bp, Homo sapien
cataataactgaggctggtgacttg

SEQ ID NO: 5575392 - DNA, 25 bp, Homo sapien
acagaacaacagaaaacgcagtatg

SEQ ID NO: 5575393 - DNA, 25 bp, Homo sapien
agcgagacccccagacactggattg

SEQ ID NO: 5575394 - DNA, 25 bp, Homo sapien
ttccatcaaatgcgggcacctcaac

SEQ ID NO: 5575395 - DNA, 25 bp, Homo sapien
caaagcattgctatgggtcgatgtc

SEQ ID NO: 5575396 - DNA, 25 bp, Homo sapien
ctcatctcatccccagtgctggtgc

SEQ ID NO: 5575397 - DNA, 25 bp, Homo sapien
acgtaacagcatcacttctggatcc

SEQ ID NO: 5575398 - DNA, 25 bp, Homo sapien
tttgagatatgctaaccaatgccac

SEQ ID NO: 5575399 - DNA, 25 bp, Homo sapien
tagagaaataactggagctgagcta

SEQ ID NO: 5575400 - DNA, 25 bp, Homo sapien
ttgagtccatgtggagtatgttttc

SEQ ID NO: 5575401 - DNA, 25 bp, Homo sapien
cttgtcagacagcatcatttcaccc

SEQ ID NO: 5575402 - DNA, 25 bp, Homo sapien
gaggttgaagacgtcacgtaacagc

SEQ ID NO: 5575403 - DNA, 25 bp, Homo sapien
tgctggtgcttgagtgctgcatttt

SEQ ID NO: 5575404 - DNA, 25 bp, Homo sapien
agtgctggtaattggtgtgtcctca

SEQ ID NO: 5575405 - DNA, 25 bp, Homo sapien
caatgccactcttgggactggcttc

SEQ ID NO: 5575406 - DNA, 25 bp, Homo sapien
ctgagctaagaggcttctcccactg

SEQ ID NO: 5575407 - DNA, 25 bp, Homo sapien
cacccgtgaccatgagaaagtgttg

SEQ ID NO: 5575408 - DNA, 25 bp, Homo sapien
tgagctggtgattccagtatttcca

SEQ ID NO: 5575409 - DNA, 25 bp, Homo sapien
agatctatgttgacctgaatgaagg

SEQ ID NO: 5575410 - DNA, 25 bp, Homo sapien
gaatgtacttcaagcttagcacgtc

SEQ ID NO: 5575411 - DNA, 25 bp, Homo sapien
ctgtaggagtatgatagatctatgt

SEQ ID NO: 5575412 - DNA, 25 bp, Homo sapien
cactcagttctgctctcttggttgc

SEQ ID NO: 5575413 - DNA, 25 bp, Homo sapien
cagaggggaattatccacgcaagta

SEQ ID NO: 5575414 - DNA, 25 bp, Homo sapien
cccaacccatatttggagagatgtt

SEQ ID NO: 5575415 - DNA, 25 bp, Homo sapien
gacctgaatgaaggtatgagcagag

SEQ ID NO: 5575416 - DNA, 25 bp, Homo sapien
ttagcacgtcccttatacactgtag

SEQ ID NO: 5575417 - DNA, 25 bp, Homo sapien
ctaatcagagctgcagatgtggtct

SEQ ID NO: 5575418 - DNA, 25 bp, Homo sapien
tgatgctggtaatctttggaaagcc

SEQ ID NO: 5575419 - DNA, 25 bp, Homo sapien
cggagcaggaagtatccacaaatga

SEQ ID NO: 5575420 - DNA, 25 bp, Homo sapien
agcgtatgagacaactgtttggcaa

SEQ ID NO: 5575421 - DNA, 25 bp, Homo sapien
atgaaagaataagctctgaggagat

SEQ ID NO: 5575422 - DNA, 25 bp, Homo sapien
tctcagtgtctgaagttaagccagc

SEQ ID NO: 5575423 - DNA, 25 bp, Homo sapien
cttcatgtttagtaagtgatctcac

SEQ ID NO: 5575424 - DNA, 25 bp, Homo sapien
ctttggaaagccaaagctagaggat

SEQ ID NO: 5575425 - DNA, 25 bp, Homo sapien
aatagcgtatgagacaactgtttgg

SEQ ID NO: 5575426 - DNA, 25 bp, Homo sapien
ccacaaatgagagactaatgcagct

SEQ ID NO: 5575427 - DNA, 25 bp, Homo sapien
aagttaagccagcttgagggtaagc

SEQ ID NO: 5575428 - DNA, 25 bp, Homo sapien
ctgtggatgatgctggtaatctttg

SEQ ID NO: 5575429 - DNA, 25 bp, Homo sapien
tcagggcctgttagcaattttgtat

SEQ ID NO: 5575430 - DNA, 25 bp, Homo sapien
tctggcaaattgattagctggatat

SEQ ID NO: 5575431 - DNA, 25 bp, Homo sapien
tgtagcagattcaagtctcacagtc

SEQ ID NO: 5575432 - DNA, 25 bp, Homo sapien
cagagaatagctacaatttcccgac

SEQ ID NO: 5575433 - DNA, 25 bp, Homo sapien
atcttgagatactgaggtgatggat

SEQ ID NO: 5575434 - DNA, 25 bp, Homo sapien
ccaaatgagacagcatctaccagca

SEQ ID NO: 5575435 - DNA, 25 bp, Homo sapien
ctatagagtgatgtgtagcagattc

SEQ ID NO: 5575436 - DNA, 25 bp, Homo sapien
ctggtagcctgtgtttcagggcctg

SEQ ID NO: 5575437 - DNA, 25 bp, Homo sapien
ataccctgctacagagaatagctac

SEQ ID NO: 5575438 - DNA, 25 bp, Homo sapien
ctcacagtcaaccaaatgagacagc

SEQ ID NO: 5575439 - DNA, 25 bp, Homo sapien
gaggtgatggatccaagaagttcta

SEQ ID NO: 5575440 - DNA, 25 bp, Homo sapien
ctaaatggatggcctaggctgctta

SEQ ID NO: 5575441 - DNA, 25 bp, Homo sapien
actgccccaactcacagaagggaaa

SEQ ID NO: 5575442 - DNA, 25 bp, Homo sapien
tgactcactgcctagcagcaggatc

SEQ ID NO: 5575443 - DNA, 25 bp, Homo sapien
tgagcagcccttcccttcaactgcc

SEQ ID NO: 5575444 - DNA, 25 bp, Homo sapien
cctagcagcaggatctgccctggtt

SEQ ID NO: 5575445 - DNA, 25 bp, Homo sapien
actcactagacacaacactgggatg

SEQ ID NO: 5575446 - DNA, 25 bp, Homo sapien
ggggcagggaaatcactattatcag

SEQ ID NO: 5575447 - DNA, 25 bp, Homo sapien
aaaacttagatagctggcagagagg

SEQ ID NO: 5575448 - DNA, 25 bp, Homo sapien
cctgattatgtaacaaagaaaactt

SEQ ID NO: 5575449 - DNA, 25 bp, Homo sapien
ttatcagtttacactggcacagagg

SEQ ID NO: 5575450 - DNA, 25 bp, Homo sapien
gcactctcacctgtactcactagac

SEQ ID NO: 5575451 - DNA, 25 bp, Homo sapien
tgattttgggggactgttaatagta

SEQ ID NO: 5575452 - DNA, 25 bp, Homo sapien
tagcttctgaatagagaatggtcta

SEQ ID NO: 5575453 - DNA, 25 bp, Homo sapien
tttttgttcaatgggtgagcagcac

SEQ ID NO: 5575454 - DNA, 25 bp, Homo sapien
aatcactgaaaaaagagtagccttt

SEQ ID NO: 5575455 - DNA, 25 bp, Homo sapien
atccttagcaataagggaaggcgac

SEQ ID NO: 5575456 - DNA, 25 bp, Homo sapien
tagaatagtctaccaagtgaaccat

SEQ ID NO: 5575457 - DNA, 25 bp, Homo sapien
tgggtgagcagcacttatccttagc

SEQ ID NO: 5575458 - DNA, 25 bp, Homo sapien
atatagacatctcagcagtgctttt

SEQ ID NO: 5575459 - DNA, 25 bp, Homo sapien
tgtcagtatagaagcctgtgggttt

SEQ ID NO: 5575460 - DNA, 25 bp, Homo sapien
tgggcttcttagagtagatgtgttc

SEQ ID NO: 5575461 - DNA, 25 bp, Homo sapien
ggaaggcgacaaacagtttagcttc

SEQ ID NO: 5575462 - DNA, 25 bp, Homo sapien
aacaacagaccaaccatagctcaat

SEQ ID NO: 5575463 - DNA, 25 bp, Homo sapien
aaatgtactgaccgtggaactgttt

SEQ ID NO: 5575464 - DNA, 25 bp, Homo sapien
tggcaggtacatgtctggaactctg

SEQ ID NO: 5575465 - DNA, 25 bp, Homo sapien
cctgtagaagcacagtagcaggtat

SEQ ID NO: 5575466 - DNA, 25 bp, Homo sapien
gctgtctggttgaacacaaactggc

SEQ ID NO: 5575467 - DNA, 25 bp, Homo sapien
aaccagaaccaaatttggcaggtac

SEQ ID NO: 5575468 - DNA, 25 bp, Homo sapien
tactcaggggacactgttaacatcc

SEQ ID NO: 5575469 - DNA, 25 bp, Homo sapien
gcatacgataagacaaccagaacca

SEQ ID NO: 5575470 - DNA, 25 bp, Homo sapien
acaaactggctgggtgttaaattcc

SEQ ID NO: 5575471 - DNA, 25 bp, Homo sapien
ctcaagagtatcctgtggagcacag

SEQ ID NO: 5575472 - DNA, 25 bp, Homo sapien
tgtactgaataagtaggcttcactc

SEQ ID NO: 5575473 - DNA, 25 bp, Homo sapien
ggggagattaatagaccatagggaa

SEQ ID NO: 5575474 - DNA, 25 bp, Homo sapien
gggtggattctcgcacacgcacact

SEQ ID NO: 5575475 - DNA, 25 bp, Homo sapien
cttatcttggtcagctggagttcac

SEQ ID NO: 5575476 - DNA, 25 bp, Homo sapien
ataaacacgaaaggctgcttaaacc

SEQ ID NO: 5575477 - DNA, 25 bp, Homo sapien
tgctgaccacatcaagcatgggctc

SEQ ID NO: 5575478 - DNA, 25 bp, Homo sapien
agttcacctaagcaaggactggacc

SEQ ID NO: 5575479 - DNA, 25 bp, Homo sapien
ttcctcttggagccgcagtcctgga

SEQ ID NO: 5575480 - DNA, 25 bp, Homo sapien
gcagtcctggagaatcatgctggga

SEQ ID NO: 5575481 - DNA, 25 bp, Homo sapien
ggagcacagcctacagtcgatttga

SEQ ID NO: 5575482 - DNA, 25 bp, Homo sapien
aggccctgaacagcagcctgcttct

SEQ ID NO: 5575483 - DNA, 25 bp, Homo sapien
gtgttagtgctcgtgagagcgcaca

SEQ ID NO: 5575484 - DNA, 25 bp, Homo sapien
atctctatccggcttcaatccttcc

SEQ ID NO: 5575485 - DNA, 25 bp, Homo sapien
tactgttgcctacagcagggcacaa

SEQ ID NO: 5575486 - DNA, 25 bp, Homo sapien
caaggtagtcaggctgcttccctca

SEQ ID NO: 5575487 - DNA, 25 bp, Homo sapien
cttagcatgtgaatttgccaacttg

SEQ ID NO: 5575488 - DNA, 25 bp, Homo sapien
gattaacataaaaatggcagactta

SEQ ID NO: 5575489 - DNA, 25 bp, Homo sapien
acttaggaaactgcaacctcttctc

SEQ ID NO: 5575490 - DNA, 25 bp, Homo sapien
ccaacttgatataggctagattaac

SEQ ID NO: 5575491 - DNA, 25 bp, Homo sapien
cagcagggcacaaatctgtagtttc

SEQ ID NO: 5575492 - DNA, 25 bp, Homo sapien
acttaattgtactatctgcccaccc

SEQ ID NO: 5575493 - DNA, 25 bp, Homo sapien
ccagttacaaccaaggtagtcaggc

SEQ ID NO: 5575494 - DNA, 25 bp, Homo sapien
cctccggttcagtactcagacagtt

SEQ ID NO: 5575495 - DNA, 25 bp, Homo sapien
ccagcaaacccataagaagaaatca

SEQ ID NO: 5575496 - DNA, 25 bp, Homo sapien
tccatccggaaacattccccacgcc

SEQ ID NO: 5575497 - DNA, 25 bp, Homo sapien
ggaagccaggccccattttgctgac

SEQ ID NO: 5575498 - DNA, 25 bp, Homo sapien
atcatctactatacggtccatattt

SEQ ID NO: 5575499 - DNA, 25 bp, Homo sapien
cggaaacattccccacgcctcacct

SEQ ID NO: 5575500 - DNA, 25 bp, Homo sapien
gtctggcttcagtggttgtgaatgt

SEQ ID NO: 5575501 - DNA, 25 bp, Homo sapien
cacgcctcacctaaaaataagaaca

SEQ ID NO: 5575502 - DNA, 25 bp, Homo sapien
ttaagagtaatcaaatgtctggctt

SEQ ID NO: 5575503 - DNA, 25 bp, Homo sapien
cagtggttgtgaatgtgatttttac

SEQ ID NO: 5575504 - DNA, 25 bp, Homo sapien
ttcccaatgagggattccctgagca

SEQ ID NO: 5575505 - DNA, 25 bp, Homo sapien
tgagggattccctgagcatcagatc

SEQ ID NO: 5575506 - DNA, 25 bp, Homo sapien
tattattggaaactgtggagaagga

SEQ ID NO: 5575507 - DNA, 25 bp, Homo sapien
agaagtaacacaagtactgcagctt

SEQ ID NO: 5575508 - DNA, 25 bp, Homo sapien
tatgtccaggatagaagtaacacaa

SEQ ID NO: 5575509 - DNA, 25 bp, Homo sapien
tcatgtcacacaggagcatagatcc

SEQ ID NO: 5575510 - DNA, 25 bp, Homo sapien
ggaggtgatgccaattttacaaata

SEQ ID NO: 5575511 - DNA, 25 bp, Homo sapien
agaaggaaatacatgcagagtttga

SEQ ID NO: 5575512 - DNA, 25 bp, Homo sapien
tgccatgggccatttagattcttat

SEQ ID NO: 5575513 - DNA, 25 bp, Homo sapien
ctcctaggaactttggaggtgatgc

SEQ ID NO: 5575514 - DNA, 25 bp, Homo sapien
ccaggcaaggaagtggtattattgg

SEQ ID NO: 5575515 - DNA, 25 bp, Homo sapien
tccaagtccactaatctacgcagac

SEQ ID NO: 5575516 - DNA, 25 bp, Homo sapien
gaagcactagactctctgtccagtt

SEQ ID NO: 5575517 - DNA, 25 bp, Homo sapien
tgggcctcggttcctagaaaacatc

SEQ ID NO: 5575518 - DNA, 25 bp, Homo sapien
tgtcttgcctagggaaagccatttc

SEQ ID NO: 5575519 - DNA, 25 bp, Homo sapien
cattacagtgccgatcaatgggaag

SEQ ID NO: 5575520 - DNA, 25 bp, Homo sapien
tgcagagagctatttaccattacag

SEQ ID NO: 5575521 - DNA, 25 bp, Homo sapien
gttttctcagacagaagcaagcaga

SEQ ID NO: 5575522 - DNA, 25 bp, Homo sapien
gggatattcttaccacccgggatgc

SEQ ID NO: 5575523 - DNA, 25 bp, Homo sapien
ctgggtcaagtgttatgctgtcctt

SEQ ID NO: 5575524 - DNA, 25 bp, Homo sapien
tacagggtgttttctgcacctctgc

SEQ ID NO: 5575525 - DNA, 25 bp, Homo sapien
tttcaaaatgaagtgaggaatccac

SEQ ID NO: 5575526 - DNA, 25 bp, Homo sapien
aagtgaggaatccacgtcagcttgc

SEQ ID NO: 5575527 - DNA, 25 bp, Homo sapien
ctagaaaacatccctggccatattc

SEQ ID NO: 5575528 - DNA, 25 bp, Homo sapien
atcttgagtccaggggatgataaga

SEQ ID NO: 5575529 - DNA, 25 bp, Homo sapien
aggggatgataagacagtaagtccc

SEQ ID NO: 5575530 - DNA, 25 bp, Homo sapien
gagatgcccgttctgggtcctgggc

SEQ ID NO: 5575531 - DNA, 25 bp, Homo sapien
ctgctctgtggcctctcacagggtt

SEQ ID NO: 5575532 - DNA, 25 bp, Homo sapien
ggatctgtggacctgtgtgtcccct

SEQ ID NO: 5575533 - DNA, 25 bp, Homo sapien
tgtggacccctgcactgtcttactc

SEQ ID NO: 5575534 - DNA, 25 bp, Homo sapien
gtttgctgttgtaaccttagcaccc

SEQ ID NO: 5575535 - DNA, 25 bp, Homo sapien
gaaatgtttgtggacccctgcactg

SEQ ID NO: 5575536 - DNA, 25 bp, Homo sapien
gagaaaaggaatgagtcagtcttgt

SEQ ID NO: 5575537 - DNA, 25 bp, Homo sapien
aagcctgaagtatttactctctggc

SEQ ID NO: 5575538 - DNA, 25 bp, Homo sapien
gagctacaatagcagaattgcgttt

SEQ ID NO: 5575539 - DNA, 25 bp, Homo sapien
tcagggtatttcacaaggctgcagt

SEQ ID NO: 5575540 - DNA, 25 bp, Homo sapien
tgttggaatgatgacctcaggtccg

SEQ ID NO: 5575541 - DNA, 25 bp, Homo sapien
cctcaggtccgtacagaagtctgtc

SEQ ID NO: 5575542 - DNA, 25 bp, Homo sapien
gtcacctcaaggcctgtttggggga

SEQ ID NO: 5575543 - DNA, 25 bp, Homo sapien
gttgtcaggattcagctcttcatgt

SEQ ID NO: 5575544 - DNA, 25 bp, Homo sapien
atgtgttgttggaatgatgacctca

SEQ ID NO: 5575545 - DNA, 25 bp, Homo sapien
cagcggtttgggaaccctctctgtg

SEQ ID NO: 5575546 - DNA, 25 bp, Homo sapien
accaatgaagttgttgtcaggattc

SEQ ID NO: 5575547 - DNA, 25 bp, Homo sapien
caattcctcgccactgagactctcc

SEQ ID NO: 5575548 - DNA, 25 bp, Homo sapien
caccctctggttggctgcataactc

SEQ ID NO: 5575549 - DNA, 25 bp, Homo sapien
tggctgagctgggtcttctgtctca

SEQ ID NO: 5575550 - DNA, 25 bp, Homo sapien
cagtttggggataaatacctgagag

SEQ ID NO: 5575551 - DNA, 25 bp, Homo sapien
gacatatctatcaaccttctccccc

SEQ ID NO: 5575552 - DNA, 25 bp, Homo sapien
tagaaggcttgtttttacgaacatc

SEQ ID NO: 5575553 - DNA, 25 bp, Homo sapien
ttgcagtttggggataaatacctga

SEQ ID NO: 5575554 - DNA, 25 bp, Homo sapien
tctatcacgcttctaactaaaacac

SEQ ID NO: 5575555 - DNA, 25 bp, Homo sapien
gaaagatatctttatagaaggcttg

SEQ ID NO: 5575556 - DNA, 25 bp, Homo sapien
aagttttccaagggttgactgtatc

SEQ ID NO: 5575557 - DNA, 25 bp, Homo sapien
cctcggacatacagaaatttgcagt

SEQ ID NO: 5575558 - DNA, 25 bp, Homo sapien
caagggttgactgtatctatcacgc

SEQ ID NO: 5575559 - DNA, 25 bp, Homo sapien
aaaaaaagtttgtatgaccatattg

SEQ ID NO: 5575560 - DNA, 25 bp, Homo sapien
taaatacctgagagatgacatatct

SEQ ID NO: 5575561 - DNA, 25 bp, Homo sapien
tgttcccaggaatataggcctcttc

SEQ ID NO: 5575562 - DNA, 25 bp, Homo sapien
atgggaaagaagaccatattccagt

SEQ ID NO: 5575563 - DNA, 25 bp, Homo sapien
aacgactgcatccggttatgaactc

SEQ ID NO: 5575564 - DNA, 25 bp, Homo sapien
tgacctgaaatgatgggaaagaaga

SEQ ID NO: 5575565 - DNA, 25 bp, Homo sapien
ctgaactgtgctcagagtagcagac

SEQ ID NO: 5575566 - DNA, 25 bp, Homo sapien
tatgaactcttagcctgtgaccacc

SEQ ID NO: 5575567 - DNA, 25 bp, Homo sapien
agtagcagacagaaacccattagca

SEQ ID NO: 5575568 - DNA, 25 bp, Homo sapien
ttcatgtcagttcttgagcctgaac

SEQ ID NO: 5575569 - DNA, 25 bp, Homo sapien
tcagagtccttgcaagggtatcatt

SEQ ID NO: 5575570 - DNA, 25 bp, Homo sapien
gtaatctaagctaactgacctgaaa

SEQ ID NO: 5575571 - DNA, 25 bp, Homo sapien
agcctgtgaccacctgcctacttcc

SEQ ID NO: 5575572 - DNA, 25 bp, Homo sapien
cctctaccaacggctatggaaacca

SEQ ID NO: 5575573 - DNA, 25 bp, Homo sapien
ttgaggatatttagagttactgaca

SEQ ID NO: 5575574 - DNA, 25 bp, Homo sapien
aagggctgtagtagagataaatttt

SEQ ID NO: 5575575 - DNA, 25 bp, Homo sapien
tgcctgagctcccatgtccaaacca

SEQ ID NO: 5575576 - DNA, 25 bp, Homo sapien
ccaaaccatcctgaagggctgtagt

SEQ ID NO: 5575577 - DNA, 25 bp, Homo sapien
tccttcttggccaacagatggtatc

SEQ ID NO: 5575578 - DNA, 25 bp, Homo sapien
gaaaccacagtttgcatttaggatt

SEQ ID NO: 5575579 - DNA, 25 bp, Homo sapien
ttcctggccatgacagtgtgattcc

SEQ ID NO: 5575580 - DNA, 25 bp, Homo sapien
catgacagtgtgattcccccagagg

SEQ ID NO: 5575581 - DNA, 25 bp, Homo sapien
aacacccagcaggccactgaaattc

SEQ ID NO: 5575582 - DNA, 25 bp, Homo sapien
ataaagataaatatgcctgagctcc

SEQ ID NO: 5575583 - DNA, 25 bp, Homo sapien
gaacaagaagtgttgtaagagaact

SEQ ID NO: 5575584 - DNA, 25 bp, Homo sapien
ggttaagcttggtagaggtgaacca

SEQ ID NO: 5575585 - DNA, 25 bp, Homo sapien
ctaagcagaaggtaggttaagcttg

SEQ ID NO: 5575586 - DNA, 25 bp, Homo sapien
gggagccatgcttggaaaactctgc

SEQ ID NO: 5575587 - DNA, 25 bp, Homo sapien
tcaagctcagagacgtttttaaacc

SEQ ID NO: 5575588 - DNA, 25 bp, Homo sapien
acaagcagagaacagctcttcactc

SEQ ID NO: 5575589 - DNA, 25 bp, Homo sapien
gatctgagttatgctgaggtgcctc

SEQ ID NO: 5575590 - DNA, 25 bp, Homo sapien
gctgaggtgcctcttcgctctgcct

SEQ ID NO: 5575591 - DNA, 25 bp, Homo sapien
gagcatgaactatcaccgcctacct

SEQ ID NO: 5575592 - DNA, 25 bp, Homo sapien
ttccaacgttacaagcagagaacag

SEQ ID NO: 5575593 - DNA, 25 bp, Homo sapien
agtgcaccaaggctttagaactccc

SEQ ID NO: 5575594 - DNA, 25 bp, Homo sapien
gtttgtcagaggatttaaagtttga

SEQ ID NO: 5575595 - DNA, 25 bp, Homo sapien
tgcacctctactaaggactggccac

SEQ ID NO: 5575596 - DNA, 25 bp, Homo sapien
agagaatcaagaactgacatccaac

SEQ ID NO: 5575597 - DNA, 25 bp, Homo sapien
gatgtagtggacacggataaacagt

SEQ ID NO: 5575598 - DNA, 25 bp, Homo sapien
gttccaggctgtgtacttcattctc

SEQ ID NO: 5575599 - DNA, 25 bp, Homo sapien
gcccagacctcaatgaagggtgctc

SEQ ID NO: 5575600 - DNA, 25 bp, Homo sapien
gataaacagtagtggctggctgata

SEQ ID NO: 5575601 - DNA, 25 bp, Homo sapien
aacctgagcaggtgcacctctacta

SEQ ID NO: 5575602 - DNA, 25 bp, Homo sapien
aaatgtacatagtggcagaaaaaaa

SEQ ID NO: 5575603 - DNA, 25 bp, Homo sapien
tccaacaacggataggcaactccta

SEQ ID NO: 5575604 - DNA, 25 bp, Homo sapien
agggcctagcacaggtttgtgctgt

SEQ ID NO: 5575605 - DNA, 25 bp, Homo sapien
accacttgctataattttgcggtta

SEQ ID NO: 5575606 - DNA, 25 bp, Homo sapien
taaccgcaaaattatagcaagtggt

SEQ ID NO: 5575607 - DNA, 25 bp, Homo sapien
tagcactaggaagttcaaaagttgt

SEQ ID NO: 5575608 - DNA, 25 bp, Homo sapien
cataatagctttagaaggctgattt

SEQ ID NO: 5575609 - DNA, 25 bp, Homo sapien
tctgagtatgatggggcccttaccg

SEQ ID NO: 5575610 - DNA, 25 bp, Homo sapien
ccggccctcgtcaaggactctgagt

SEQ ID NO: 5575611 - DNA, 25 bp, Homo sapien
acattgttcacagacaccatgctag

SEQ ID NO: 5575612 - DNA, 25 bp, Homo sapien
ctcttctgccggccctcgtcaagga

SEQ ID NO: 5575613 - DNA, 25 bp, Homo sapien
gcttatgattcaggatacattgttc

SEQ ID NO: 5575614 - DNA, 25 bp, Homo sapien
taacgctctggaatatagcacatcc

SEQ ID NO: 5575615 - DNA, 25 bp, Homo sapien
ggaaactgagtcatagagcgttttt

SEQ ID NO: 5575616 - DNA, 25 bp, Homo sapien
gaaggaaacgcaggctgcacatttg

SEQ ID NO: 5575617 - DNA, 25 bp, Homo sapien
tcaaggactctgagtatgatggggc

SEQ ID NO: 5575618 - DNA, 25 bp, Homo sapien
tactgagatcccaaaggcatcctga

SEQ ID NO: 5575619 - DNA, 25 bp, Homo sapien
actgcagcaagctcacagaactgcc

SEQ ID NO: 5575620 - DNA, 25 bp, Homo sapien
ctgtgcacggacatctcttctacac

SEQ ID NO: 5575621 - DNA, 25 bp, Homo sapien
cagataccaggtgttgagttgtttg

SEQ ID NO: 5575622 - DNA, 25 bp, Homo sapien
ctcactttggtagtagggagtaagg

SEQ ID NO: 5575623 - DNA, 25 bp, Homo sapien
cactgatatgccgctaggacactgc

SEQ ID NO: 5575624 - DNA, 25 bp, Homo sapien
taggggcactgcaaagcattactga

SEQ ID NO: 5575625 - DNA, 25 bp, Homo sapien
ggggctcagtgcaccatcaccatgt

SEQ ID NO: 5575626 - DNA, 25 bp, Homo sapien
atgtccacaattggatggccacgcg

SEQ ID NO: 5575627 - DNA, 25 bp, Homo sapien
aatttcaaagtggcaacagtggcat

SEQ ID NO: 5575628 - DNA, 25 bp, Homo sapien
cctgaatgggaaatgtttggcaggc

SEQ ID NO: 5575629 - DNA, 25 bp, Homo sapien
tgatgctgcaataaatgccaagccc

SEQ ID NO: 5575630 - DNA, 25 bp, Homo sapien
atggactatggaggccacattcatt

SEQ ID NO: 5575631 - DNA, 25 bp, Homo sapien
tgccaagccctgaggctccagagaa

SEQ ID NO: 5575632 - DNA, 25 bp, Homo sapien
ctgatggccactgccaaaatgccac

SEQ ID NO: 5575633 - DNA, 25 bp, Homo sapien
ttgtctgtccccctgctgatggcca

SEQ ID NO: 5575634 - DNA, 25 bp, Homo sapien
tgggaacagatacctatgccgaagg

SEQ ID NO: 5575635 - DNA, 25 bp, Homo sapien
gagaaacactatggactatggaggc

SEQ ID NO: 5575636 - DNA, 25 bp, Homo sapien
tgtcagctgaagatcatatgtcatc

SEQ ID NO: 5575637 - DNA, 25 bp, Homo sapien
ctgcagtcctcatgggaacagatac

SEQ ID NO: 5575638 - DNA, 25 bp, Homo sapien
tcaggttggggcataaaacctcttg

SEQ ID NO: 5575639 - DNA, 25 bp, Homo sapien
gccgaaggttcttagcatgatgctg

SEQ ID NO: 5575640 - DNA, 25 bp, Homo sapien
ttaaagctctaggctaggtgcagtg

SEQ ID NO: 5575641 - DNA, 25 bp, Homo sapien
ggaggtacaggggtatttatagctc

SEQ ID NO: 5575642 - DNA, 25 bp, Homo sapien
aaaatgtgaagaaacgtgtgcttta

SEQ ID NO: 5575643 - DNA, 25 bp, Homo sapien
caactataaggcaaatcccggattc

SEQ ID NO: 5575644 - DNA, 25 bp, Homo sapien
gatgagcgtatatacatatggtccc

SEQ ID NO: 5575645 - DNA, 25 bp, Homo sapien
acagaagcctctagtaaaatgcata

SEQ ID NO: 5575646 - DNA, 25 bp, Homo sapien
ggtcggtatgataatgatgagcgta

SEQ ID NO: 5575647 - DNA, 25 bp, Homo sapien
gtgaagagattcgctcactggatac

SEQ ID NO: 5575648 - DNA, 25 bp, Homo sapien
gaattcatggaataaggtcatcttc

SEQ ID NO: 5575649 - DNA, 25 bp, Homo sapien
catggttaacatgttccgtgggaac

SEQ ID NO: 5575650 - DNA, 25 bp, Homo sapien
ttctcaacatgcttcaccaggtcgg

SEQ ID NO: 5575651 - DNA, 25 bp, Homo sapien
accccctacacagacgcccagtgag

SEQ ID NO: 5575652 - DNA, 25 bp, Homo sapien
tgtgttcccaccacgagtgctgctc

SEQ ID NO: 5575653 - DNA, 25 bp, Homo sapien
cgctaaggacatcccgccttcccca

SEQ ID NO: 5575654 - DNA, 25 bp, Homo sapien
taagattcgctaaagacggtggcgt

SEQ ID NO: 5575655 - DNA, 25 bp, Homo sapien
tccccatcccccgcagtcacttttc

SEQ ID NO: 5575656 - DNA, 25 bp, Homo sapien
ggcaccgcacttccagaaccgcgtc

SEQ ID NO: 5575657 - DNA, 25 bp, Homo sapien
agggtccctggaggtattgattcag

SEQ ID NO: 5575658 - DNA, 25 bp, Homo sapien
gccacgcccttgttccagcctcagc

SEQ ID NO: 5575659 - DNA, 25 bp, Homo sapien
ccctgggttggtaagattcgctaaa

SEQ ID NO: 5575660 - DNA, 25 bp, Homo sapien
cggtggcgtgttctctcccgagtct

SEQ ID NO: 5575661 - DNA, 25 bp, Homo sapien
gagcactacgtgccgcacgcaggac

SEQ ID NO: 5575662 - DNA, 25 bp, Homo sapien
ggaccagcaatgacaccacgtggtg

SEQ ID NO: 5575663 - DNA, 25 bp, Homo sapien
catgagctatgatgcctggctgcaa

SEQ ID NO: 5575664 - DNA, 25 bp, Homo sapien
tgggccaccattccatgtgtgcata

SEQ ID NO: 5575665 - DNA, 25 bp, Homo sapien
gaacagaagactcagaggactaatg

SEQ ID NO: 5575666 - DNA, 25 bp, Homo sapien
ccagtatgtaggatattggaccccc

SEQ ID NO: 5575667 - DNA, 25 bp, Homo sapien
aagggaccggatgtatttatgtagc

SEQ ID NO: 5575668 - DNA, 25 bp, Homo sapien
ggtcctgggagctatggcaggacca

SEQ ID NO: 5575669 - DNA, 25 bp, Homo sapien
atattggacccccaggccctttatg

SEQ ID NO: 5575670 - DNA, 25 bp, Homo sapien
actaatgaggagtccagtatgtagg

SEQ ID NO: 5575671 - DNA, 25 bp, Homo sapien
ttttcaagatctcgagggaaaggga

SEQ ID NO: 5575672 - DNA, 25 bp, Homo sapien
cccaatgcagtgtgttggggaacag

SEQ ID NO: 5575673 - DNA, 25 bp, Homo sapien
aaccttagactgagactgttcgttt

SEQ ID NO: 5575674 - DNA, 25 bp, Homo sapien
aaacgaacagtctcagtctaaggtt

SEQ ID NO: 5575675 - DNA, 25 bp, Homo sapien
gccccacgtgcccctctgtggactc

SEQ ID NO: 5575676 - DNA, 25 bp, Homo sapien
ctcttgacagtggtaagagtgccag

SEQ ID NO: 5575677 - DNA, 25 bp, Homo sapien
ctcctgagttctggggtccctctct

SEQ ID NO: 5575678 - DNA, 25 bp, Homo sapien
gccattggtgcatcgagcacactcc

SEQ ID NO: 5575679 - DNA, 25 bp, Homo sapien
cacctctagaccaagtgcctgcctg

SEQ ID NO: 5575680 - DNA, 25 bp, Homo sapien
agaccaagtgcctgcctggaatgtc

SEQ ID NO: 5575681 - DNA, 25 bp, Homo sapien
agcacactcccagctccaggattat

SEQ ID NO: 5575682 - DNA, 25 bp, Homo sapien
cctccctgcaacaaagaggagctct

SEQ ID NO: 5575683 - DNA, 25 bp, Homo sapien
gtctcacgtttgtcagggttctgcc

SEQ ID NO: 5575684 - DNA, 25 bp, Homo sapien
aggtccacggcctggaaacttccta

SEQ ID NO: 5575685 - DNA, 25 bp, Homo sapien
ctggggtccctctcttgacagtggt

SEQ ID NO: 5575686 - DNA, 25 bp, Homo sapien
tctcagattccgagcagcaacattc

SEQ ID NO: 5575687 - DNA, 25 bp, Homo sapien
aagagaatcctaaaactcatcttct

SEQ ID NO: 5575688 - DNA, 25 bp, Homo sapien
atgcacttctcagattccgagcagc

SEQ ID NO: 5575689 - DNA, 25 bp, Homo sapien
tctaaaaatcttgctgagcgaccat

SEQ ID NO: 5575690 - DNA, 25 bp, Homo sapien
tgtgtggcaggcccagctctaatca

SEQ ID NO: 5575691 - DNA, 25 bp, Homo sapien
atactcgcagcgtcattatgcactt

SEQ ID NO: 5575692 - DNA, 25 bp, Homo sapien
atcttgctgagcgaccatgacatac

SEQ ID NO: 5575693 - DNA, 25 bp, Homo sapien
gacataccaggcagtccacagaatg

SEQ ID NO: 5575694 - DNA, 25 bp, Homo sapien
cagctctaatcacgatgatactcgc

SEQ ID NO: 5575695 - DNA, 25 bp, Homo sapien
taatcacgatgatactcgcagcgtc

SEQ ID NO: 5575696 - DNA, 25 bp, Homo sapien
agcgaccatgacataccaggcagtc

SEQ ID NO: 5575697 - DNA, 25 bp, Homo sapien
ctcatcgctttgaaggtcagccaac

SEQ ID NO: 5575698 - DNA, 25 bp, Homo sapien
tctgaagcctctagggaggaacttc

SEQ ID NO: 5575699 - DNA, 25 bp, Homo sapien
aataccaacgtatgaaagtcttctt

SEQ ID NO: 5575700 - DNA, 25 bp, Homo sapien
attccttagcttggagcagcatgac

SEQ ID NO: 5575701 - DNA, 25 bp, Homo sapien
ttggagcagcatgactacagatttt

SEQ ID NO: 5575702 - DNA, 25 bp, Homo sapien
tcaatgtgtcagatgtcatgttctc

SEQ ID NO: 5575703 - DNA, 25 bp, Homo sapien
agagaaaactagtattagcatgtgc

SEQ ID NO: 5575704 - DNA, 25 bp, Homo sapien
ttatatggacaccagtcctggcttc

SEQ ID NO: 5575705 - DNA, 25 bp, Homo sapien
gcttcttcgagcttctggtagcccc

SEQ ID NO: 5575706 - DNA, 25 bp, Homo sapien
ctggtagccccaggtattccttagc

SEQ ID NO: 5575707 - DNA, 25 bp, Homo sapien
gtcagccaactgaaatcaatgtgtc

SEQ ID NO: 5575708 - DNA, 25 bp, Homo sapien
agctgcatctcggtccccaccccga

SEQ ID NO: 5575709 - DNA, 25 bp, Homo sapien
tctgctcggcctagacctgagctca

SEQ ID NO: 5575710 - DNA, 25 bp, Homo sapien
tgcatctcggtccccaccccgactc

SEQ ID NO: 5575711 - DNA, 25 bp, Homo sapien
ccctctgctcggcctagacctgagc

SEQ ID NO: 5575712 - DNA, 25 bp, Homo sapien
ctcggcctagacctgagctcattag

SEQ ID NO: 5575713 - DNA, 25 bp, Homo sapien
gtgccccctctgctcggcctagacc

SEQ ID NO: 5575714 - DNA, 25 bp, Homo sapien
cctagacctgagctcattaggcggc

SEQ ID NO: 5575715 - DNA, 25 bp, Homo sapien
ccgaccaggtgccccctctgctcgg

SEQ ID NO: 5575716 - DNA, 25 bp, Homo sapien
atctcggtccccaccccgactctcg

SEQ ID NO: 5575717 - DNA, 25 bp, Homo sapien
caggtgccccctctgctcggcctag

SEQ ID NO: 5575718 - DNA, 25 bp, Homo sapien
agacctgagctcattaggcggcagg

SEQ ID NO: 5575719 - DNA, 25 bp, Homo sapien
tcctgcagatctttgggaaagggaa

SEQ ID NO: 5575720 - DNA, 25 bp, Homo sapien
gaggccccaaagctagttaatgtac

SEQ ID NO: 5575721 - DNA, 25 bp, Homo sapien
gaacacaaagactatgatgaactcc

SEQ ID NO: 5575722 - DNA, 25 bp, Homo sapien
gtgaactcccatgtggggctgcaag

SEQ ID NO: 5575723 - DNA, 25 bp, Homo sapien
gcagtgaagacggtgtaacaccaaa

SEQ ID NO: 5575724 - DNA, 25 bp, Homo sapien
gagccactcacaaatactagccaac

SEQ ID NO: 5575725 - DNA, 25 bp, Homo sapien
ctcatcacccacagagtgaactccc

SEQ ID NO: 5575726 - DNA, 25 bp, Homo sapien
aggttcaactgaggccccaaagcta

SEQ ID NO: 5575727 - DNA, 25 bp, Homo sapien
gaggttggggaaaactcatcaccca

SEQ ID NO: 5575728 - DNA, 25 bp, Homo sapien
gaactgcttaacaggctgcagaacc

SEQ ID NO: 5575729 - DNA, 25 bp, Homo sapien
ctagccaaccactatcctgcagatc

SEQ ID NO: 5575730 - DNA, 25 bp, Homo sapien
ttaataccaactaataatctaggga

SEQ ID NO: 5575731 - DNA, 25 bp, Homo sapien
acttaattagcaatcatagatattc

SEQ ID NO: 5575732 - DNA, 25 bp, Homo sapien
aatctggggcaaaacagttaaatgt

SEQ ID NO: 5575733 - DNA, 25 bp, Homo sapien
atttgcaacaaatcataatctatac

SEQ ID NO: 5575734 - DNA, 25 bp, Homo sapien
caacaaattcaagcacctatctata

SEQ ID NO: 5575735 - DNA, 25 bp, Homo sapien
ctggggcaaaacagttaaatgttgt

SEQ ID NO: 5575736 - DNA, 25 bp, Homo sapien
tgtttgatgtaattagtctgaaaat

SEQ ID NO: 5575737 - DNA, 25 bp, Homo sapien
aataaagtgctttctgagttgtttt

SEQ ID NO: 5575738 - DNA, 25 bp, Homo sapien
taacaaatgcatggtcaacaaattc

SEQ ID NO: 5575739 - DNA, 25 bp, Homo sapien
tagatattctaacaaatgcatggtc

SEQ ID NO: 5575740 - DNA, 25 bp, Homo sapien
atacaaccaaagatacatcacattt

SEQ ID NO: 5575741 - DNA, 25 bp, Homo sapien
attggagtttctggtccattgactc

SEQ ID NO: 5575742 - DNA, 25 bp, Homo sapien
tcacaggtcctcagcactacatagg

SEQ ID NO: 5575743 - DNA, 25 bp, Homo sapien
catggtacatttctgtagtccactc

SEQ ID NO: 5575744 - DNA, 25 bp, Homo sapien
gaaaaaagccatcagtatgaaatat

SEQ ID NO: 5575745 - DNA, 25 bp, Homo sapien
cagcactacataggattcatggtac

SEQ ID NO: 5575746 - DNA, 25 bp, Homo sapien
tctttatcagatgtagaaacacttt

SEQ ID NO: 5575747 - DNA, 25 bp, Homo sapien
ttaattttagatatagatgtgaatc

SEQ ID NO: 5575748 - DNA, 25 bp, Homo sapien
tctctaaattcgaggtcacaggtcc

SEQ ID NO: 5575749 - DNA, 25 bp, Homo sapien
tgcaatgactatttcaggtttggtt

SEQ ID NO: 5575750 - DNA, 25 bp, Homo sapien
gggcatcagacaggctgatacctct

SEQ ID NO: 5575751 - DNA, 25 bp, Homo sapien
tcttttttgtgctggagaagagtcg

SEQ ID NO: 5575752 - DNA, 25 bp, Homo sapien
tcctggcaccatttacacaactcgc

SEQ ID NO: 5575753 - DNA, 25 bp, Homo sapien
gagtaaggggattagaaattgtatc

SEQ ID NO: 5575754 - DNA, 25 bp, Homo sapien
gcatcagggtttgctcagtgtggac

SEQ ID NO: 5575755 - DNA, 25 bp, Homo sapien
gaggcatgattacatgatcacaatc

SEQ ID NO: 5575756 - DNA, 25 bp, Homo sapien
gatgatttagtgagtaaggggatta

SEQ ID NO: 5575757 - DNA, 25 bp, Homo sapien
acaatccagacacaagtcacctcct

SEQ ID NO: 5575758 - DNA, 25 bp, Homo sapien
ctttacgaaaatcaggaaggagatg

SEQ ID NO: 5575759 - DNA, 25 bp, Homo sapien
tatgtggttcttatatggccctcac

SEQ ID NO: 5575760 - DNA, 25 bp, Homo sapien
ttagccatgcccagtggtacacacc

SEQ ID NO: 5575761 - DNA, 25 bp, Homo sapien
tgaggcaagataagttgaggttgca

SEQ ID NO: 5575762 - DNA, 25 bp, Homo sapien
ggtacacacctactgtcccaggtac

SEQ ID NO: 5575763 - DNA, 25 bp, Homo sapien
aagcctcttcaaaaaatgggatttc

SEQ ID NO: 5575764 - DNA, 25 bp, Homo sapien
tgaatgaaactcaagtgtcctgaat

SEQ ID NO: 5575765 - DNA, 25 bp, Homo sapien
ccactgccaacactaggtaggaaaa

SEQ ID NO: 5575766 - DNA, 25 bp, Homo sapien
attgttggagcattcaagcaaagat

SEQ ID NO: 5575767 - DNA, 25 bp, Homo sapien
tttactactagaaagagaagctaac

SEQ ID NO: 5575768 - DNA, 25 bp, Homo sapien
agtgtcctgaataaagaataaatac

SEQ ID NO: 5575769 - DNA, 25 bp, Homo sapien
aacactaggtaggaaaaatctgact

SEQ ID NO: 5575770 - DNA, 25 bp, Homo sapien
taaaactatagcttgaatgaaactc

SEQ ID NO: 5575771 - DNA, 25 bp, Homo sapien
gagaagctaacaaaggaaagcctct

SEQ ID NO: 5575772 - DNA, 25 bp, Homo sapien
atgggatttccttggccttagcagt

SEQ ID NO: 5575773 - DNA, 25 bp, Homo sapien
agcaaagattgtgtaaaattcaggt

SEQ ID NO: 5575774 - DNA, 25 bp, Homo sapien
gcaagggttgggaaaaccttcatca

SEQ ID NO: 5575775 - DNA, 25 bp, Homo sapien
ttagtgccatctgtgctgtgccagg

SEQ ID NO: 5575776 - DNA, 25 bp, Homo sapien
tggatggagatgattcagaccagtg

SEQ ID NO: 5575777 - DNA, 25 bp, Homo sapien
ggaaggatctcagagtatgtgatga

SEQ ID NO: 5575778 - DNA, 25 bp, Homo sapien
caggcactatatggggcaatgttct

SEQ ID NO: 5575779 - DNA, 25 bp, Homo sapien
ctgagtttggaaagtacacagaggc

SEQ ID NO: 5575780 - DNA, 25 bp, Homo sapien
tcaagataaggggtttctgtaggtg

SEQ ID NO: 5575781 - DNA, 25 bp, Homo sapien
ggccaccttgtggaacacctcccat

SEQ ID NO: 5575782 - DNA, 25 bp, Homo sapien
ggtggcttactgtgtgtctggcatg

SEQ ID NO: 5575783 - DNA, 25 bp, Homo sapien
gaatagtaagtggatggccaatgtg

SEQ ID NO: 5575784 - DNA, 25 bp, Homo sapien
cagaggcatttttggggaatagtaa

SEQ ID NO: 5575785 - DNA, 25 bp, Homo sapien
gaggctatgggtctgtgtctccttc

SEQ ID NO: 5575786 - DNA, 25 bp, Homo sapien
cttcacagatgaggagcttgaagct

SEQ ID NO: 5575787 - DNA, 25 bp, Homo sapien
gtgaagtgtaaaagtcaagagctac

SEQ ID NO: 5575788 - DNA, 25 bp, Homo sapien
tggcttctggacccatagctctccc

SEQ ID NO: 5575789 - DNA, 25 bp, Homo sapien
tagctctcccgggttggttggctta

SEQ ID NO: 5575790 - DNA, 25 bp, Homo sapien
tggcagcttgaagcatagcctaact

SEQ ID NO: 5575791 - DNA, 25 bp, Homo sapien
cagaacactcccagcagaggctatg

SEQ ID NO: 5575792 - DNA, 25 bp, Homo sapien
caagagctaccgtttatcgcaggcc

SEQ ID NO: 5575793 - DNA, 25 bp, Homo sapien
atcgcaggccaattaggtccgtttt

SEQ ID NO: 5575794 - DNA, 25 bp, Homo sapien
acttgagtaccaagggaaacagtga

SEQ ID NO: 5575795 - DNA, 25 bp, Homo sapien
ccatacaactggaaagtaggaaagt

SEQ ID NO: 5575796 - DNA, 25 bp, Homo sapien
atcatgtagaatattgagctcactt

SEQ ID NO: 5575797 - DNA, 25 bp, Homo sapien
aaaagagtggccatggctcacctta

SEQ ID NO: 5575798 - DNA, 25 bp, Homo sapien
ctactgacactgccactgttctagg

SEQ ID NO: 5575799 - DNA, 25 bp, Homo sapien
aggcagcttaggaatggcaaatgcc

SEQ ID NO: 5575800 - DNA, 25 bp, Homo sapien
tggcaaatgccatgacaggaatatc

SEQ ID NO: 5575801 - DNA, 25 bp, Homo sapien
caggagagttgagtcgtctttacag

SEQ ID NO: 5575802 - DNA, 25 bp, Homo sapien
acctgggatcttggccctctagtcc

SEQ ID NO: 5575803 - DNA, 25 bp, Homo sapien
tgacaaatacgctaagggaaaagag

SEQ ID NO: 5575804 - DNA, 25 bp, Homo sapien
cttgtgagttgactgccttggtagt

SEQ ID NO: 5575805 - DNA, 25 bp, Homo sapien
agcccatgtacctcaccactagaat

SEQ ID NO: 5575806 - DNA, 25 bp, Homo sapien
tttgttttcagcaggagagttgagt

SEQ ID NO: 5575807 - DNA, 25 bp, Homo sapien
tgtgcagctgtgctagcgtcttcta

SEQ ID NO: 5575808 - DNA, 25 bp, Homo sapien
gcgggacttgagcataagacttctg

SEQ ID NO: 5575809 - DNA, 25 bp, Homo sapien
gcctctgtggcaccgtggtttcggt

SEQ ID NO: 5575810 - DNA, 25 bp, Homo sapien
aggaacgcacttttcgatcagtccc

SEQ ID NO: 5575811 - DNA, 25 bp, Homo sapien
acaggcgcagttttccccatgttgc

SEQ ID NO: 5575812 - DNA, 25 bp, Homo sapien
cgtggtttcggtcagagattaaatc

SEQ ID NO: 5575813 - DNA, 25 bp, Homo sapien
attaaggatatcacagcagaggttg

SEQ ID NO: 5575814 - DNA, 25 bp, Homo sapien
ctccacgaagtttacaggcgcagtt

SEQ ID NO: 5575815 - DNA, 25 bp, Homo sapien
atgatcacgcctattaggaacgcac

SEQ ID NO: 5575816 - DNA, 25 bp, Homo sapien
gtggaataacacagggtctaaagaa

SEQ ID NO: 5575817 - DNA, 25 bp, Homo sapien
gggagaggtttctaaatgaggacta

SEQ ID NO: 5575818 - DNA, 25 bp, Homo sapien
gtcgaaaagaacaatatgagtgcta

SEQ ID NO: 5575819 - DNA, 25 bp, Homo sapien
gacaggcctgcatcaataacacctc

SEQ ID NO: 5575820 - DNA, 25 bp, Homo sapien
agtgttgagagtgaaacccacaaag

SEQ ID NO: 5575821 - DNA, 25 bp, Homo sapien
ctttgcccggaactcccatccccca

SEQ ID NO: 5575822 - DNA, 25 bp, Homo sapien
gattttccaagagtgttgagagtga

SEQ ID NO: 5575823 - DNA, 25 bp, Homo sapien
tagtatcagaatacagttgctgtcc

SEQ ID NO: 5575824 - DNA, 25 bp, Homo sapien
tctgaggaggcctctctgtcagtcc

SEQ ID NO: 5575825 - DNA, 25 bp, Homo sapien
tccccacatgctaggtgtttgccat

SEQ ID NO: 5575826 - DNA, 25 bp, Homo sapien
gtccttgccaaaacaaagacacctg

SEQ ID NO: 5575827 - DNA, 25 bp, Homo sapien
agaggtgcttcagatccccacatgc

SEQ ID NO: 5575828 - DNA, 25 bp, Homo sapien
agtgaaacccacaaagaggtgcttc

SEQ ID NO: 5575829 - DNA, 25 bp, Homo sapien
actgtggattacggttaaatgacct

SEQ ID NO: 5575830 - DNA, 25 bp, Homo sapien
cattttacagagggagaactgtgga

SEQ ID NO: 5575831 - DNA, 25 bp, Homo sapien
atagaactatagatgagaagttatc

SEQ ID NO: 5575832 - DNA, 25 bp, Homo sapien
ttctgcttggttaagtgtcactacc

SEQ ID NO: 5575833 - DNA, 25 bp, Homo sapien
tcacactcagtggcatagatccttt

SEQ ID NO: 5575834 - DNA, 25 bp, Homo sapien
aaaaacataaagatggtcctaactc

SEQ ID NO: 5575835 - DNA, 25 bp, Homo sapien
aagtgttgcctgcaggaacctagtt

SEQ ID NO: 5575836 - DNA, 25 bp, Homo sapien
ggcttagaaaactgcaaagtgttgc

SEQ ID NO: 5575837 - DNA, 25 bp, Homo sapien
tgacaacagaaagaagaccatgtgt

SEQ ID NO: 5575838 - DNA, 25 bp, Homo sapien
gataaatctgaaatacaagaatgcc

SEQ ID NO: 5575839 - DNA, 25 bp, Homo sapien
ctgcaggaacctagttgacaaatcc

SEQ ID NO: 5575840 - DNA, 25 bp, Homo sapien
agcccgaggcgcaagcgcagctccg

SEQ ID NO: 5575841 - DNA, 25 bp, Homo sapien
cggagctgcgcttgcgcctcgggct

SEQ ID NO: 5575842 - DNA, 25 bp, Homo sapien
agctgcagagaaaaacatacccttc

SEQ ID NO: 5575843 - DNA, 25 bp, Homo sapien
acatacccttctgggcgtggcctgc

SEQ ID NO: 5575844 - DNA, 25 bp, Homo sapien
cattcagatgcccctcgagaaggat

SEQ ID NO: 5575845 - DNA, 25 bp, Homo sapien
cctgcatctggtgactgagcaaggt

SEQ ID NO: 5575846 - DNA, 25 bp, Homo sapien
gttccccactggtttggcaaggctc

SEQ ID NO: 5575847 - DNA, 25 bp, Homo sapien
taattgcttcaaagtgggaaagccc

SEQ ID NO: 5575848 - DNA, 25 bp, Homo sapien
caaggctctatctggcctgcagggc

SEQ ID NO: 5575849 - DNA, 25 bp, Homo sapien
gataaaagcacgactgtttcggctc

SEQ ID NO: 5575850 - DNA, 25 bp, Homo sapien
gtttcggctccacatgggaaactgg

SEQ ID NO: 5575851 - DNA, 25 bp, Homo sapien
cctgcagggcagttcaacctcttca

SEQ ID NO: 5575852 - DNA, 25 bp, Homo sapien
tgtagacctgatgaagatgccattc

SEQ ID NO: 5575853 - DNA, 25 bp, Homo sapien
aaataatgtgtcttaggctaattgc

SEQ ID NO: 5575854 - DNA, 25 bp, Homo sapien
gaggtactaactggtgaaacagcat

SEQ ID NO: 5575855 - DNA, 25 bp, Homo sapien
tgcattgctgctcacagtaaaatct

SEQ ID NO: 5575856 - DNA, 25 bp, Homo sapien
attgggttatgttgcattgctgctc

SEQ ID NO: 5575857 - DNA, 25 bp, Homo sapien
gcattccaggcagaaagaatggact

SEQ ID NO: 5575858 - DNA, 25 bp, Homo sapien
aaaaccacaactgtctatgcttgac

SEQ ID NO: 5575859 - DNA, 25 bp, Homo sapien
ggactcagcagaggtactaactggt

SEQ ID NO: 5575860 - DNA, 25 bp, Homo sapien
tgtaagtcagtataaaatccactag

SEQ ID NO: 5575861 - DNA, 25 bp, Homo sapien
tgctaactgtgaataggagataacc

SEQ ID NO: 5575862 - DNA, 25 bp, Homo sapien
tatgcttgacacaaactaaggtaaa

SEQ ID NO: 5575863 - DNA, 25 bp, Homo sapien
taggagataacctggcatagaagag

SEQ ID NO: 5575864 - DNA, 25 bp, Homo sapien
gacacataaatagaatcaaagtata

SEQ ID NO: 5575865 - DNA, 25 bp, Homo sapien
tgtaacatatgatttcaaagctgaa

SEQ ID NO: 5575866 - DNA, 25 bp, Homo sapien
atgattatgatcaactgacaaagta

SEQ ID NO: 5575867 - DNA, 25 bp, Homo sapien
catatttagatggctgggattttta

SEQ ID NO: 5575868 - DNA, 25 bp, Homo sapien
tttgaagggagtgcattttaaatca

SEQ ID NO: 5575869 - DNA, 25 bp, Homo sapien
agttttattcgagaatgacagcttc

SEQ ID NO: 5575870 - DNA, 25 bp, Homo sapien
tatattcaaactgtaacaataggcc

SEQ ID NO: 5575871 - DNA, 25 bp, Homo sapien
acttaatggagttgggaaacatatt

SEQ ID NO: 5575872 - DNA, 25 bp, Homo sapien
cataagctagtgaaagtcttaaggc

SEQ ID NO: 5575873 - DNA, 25 bp, Homo sapien
agtgaaagtcttaaggcaatgaaac

SEQ ID NO: 5575874 - DNA, 25 bp, Homo sapien
cttaaggcaatgaaactaatgaatg

SEQ ID NO: 5575875 - DNA, 25 bp, Homo sapien
tgttttaggctctggggacataaga

SEQ ID NO: 5575876 - DNA, 25 bp, Homo sapien
atgtgccaactattgttttaggctc

SEQ ID NO: 5575877 - DNA, 25 bp, Homo sapien
atgatctgcaaacattattgagcac

SEQ ID NO: 5575878 - DNA, 25 bp, Homo sapien
gagaaggtggccatagtaatgtttg

SEQ ID NO: 5575879 - DNA, 25 bp, Homo sapien
tgaccaattaacctcacgtgacttc

SEQ ID NO: 5575880 - DNA, 25 bp, Homo sapien
tcttggtatctgcagtatgtagtcc

SEQ ID NO: 5575881 - DNA, 25 bp, Homo sapien
atgtagtccagctcaacaggcattt

SEQ ID NO: 5575882 - DNA, 25 bp, Homo sapien
agaagacagcaaggcatacaaatga

SEQ ID NO: 5575883 - DNA, 25 bp, Homo sapien
cagagacttcggaagctagactggg

SEQ ID NO: 5575884 - DNA, 25 bp, Homo sapien
tttctgctatgctagatagggaggg

SEQ ID NO: 5575885 - DNA, 25 bp, Homo sapien
actgggaggctgttatatgtacttt

SEQ ID NO: 5575886 - DNA, 25 bp, Homo sapien
aggtaaacacatattttgaaagttc

SEQ ID NO: 5575887 - DNA, 25 bp, Homo sapien
gtgtgccccattgctagcctgaaga

SEQ ID NO: 5575888 - DNA, 25 bp, Homo sapien
ccattgctagcctgaagattctgat

SEQ ID NO: 5575889 - DNA, 25 bp, Homo sapien
attcaggcttacagttggaagttat

SEQ ID NO: 5575890 - DNA, 25 bp, Homo sapien
gtccttgtgtgccccattgctagcc

SEQ ID NO: 5575891 - DNA, 25 bp, Homo sapien
ctcaaagacaaatgaatttatatct

SEQ ID NO: 5575892 - DNA, 25 bp, Homo sapien
gtgggattaattgtccttgtgtgcc

SEQ ID NO: 5575893 - DNA, 25 bp, Homo sapien
cagctgattatttacatggtgtgca

SEQ ID NO: 5575894 - DNA, 25 bp, Homo sapien
ttacatggtgtgcagtgattacgtg

SEQ ID NO: 5575895 - DNA, 25 bp, Homo sapien
tgtgcagtgattacgtgggattaat

SEQ ID NO: 5575896 - DNA, 25 bp, Homo sapien
ttaaaggtgataaatgcacataccc

SEQ ID NO: 5575897 - DNA, 25 bp, Homo sapien
aaaacaggaataagaccatttgttc

SEQ ID NO: 5575898 - DNA, 25 bp, Homo sapien
ccaggggaaattaatctggaattaa

SEQ ID NO: 5575899 - DNA, 25 bp, Homo sapien
tgtggtttatacacagggtggataa

SEQ ID NO: 5575900 - DNA, 25 bp, Homo sapien
atatctacaggtatccaggggaaat

SEQ ID NO: 5575901 - DNA, 25 bp, Homo sapien
tgatggcccagatatctacaggtat

SEQ ID NO: 5575902 - DNA, 25 bp, Homo sapien
attaaagacacatgatggcccagat

SEQ ID NO: 5575903 - DNA, 25 bp, Homo sapien
ataaaaattatgggaggccattgtt

SEQ ID NO: 5575904 - DNA, 25 bp, Homo sapien
ggaattaaattaaatctgctgtggt

SEQ ID NO: 5575905 - DNA, 25 bp, Homo sapien
tgtcacataaaaattatgggaggcc

SEQ ID NO: 5575906 - DNA, 25 bp, Homo sapien
cacagggtggataaaagcttctgat

SEQ ID NO: 5575907 - DNA, 25 bp, Homo sapien
tcaattcaaataaagaggatgtcac

SEQ ID NO: 5575908 - DNA, 25 bp, Homo sapien
catgttgctaaaacgtgggaagatg

SEQ ID NO: 5575909 - DNA, 25 bp, Homo sapien
catagagttgcaaaagcatcgacaa

SEQ ID NO: 5575910 - DNA, 25 bp, Homo sapien
agattgcccattgcatgcagctatc

SEQ ID NO: 5575911 - DNA, 25 bp, Homo sapien
ctcagtagtccatcgttacagcaac

SEQ ID NO: 5575912 - DNA, 25 bp, Homo sapien
atattgttagcgaattgtgaaattg

SEQ ID NO: 5575913 - DNA, 25 bp, Homo sapien
tatatgccagcagaatctatgactc

SEQ ID NO: 5575914 - DNA, 25 bp, Homo sapien
aatcagatgagatgtggaaccattt

SEQ ID NO: 5575915 - DNA, 25 bp, Homo sapien
tctgagctccctgaagtttgcaatc

SEQ ID NO: 5575916 - DNA, 25 bp, Homo sapien
ggctgtaattactgaatattggctc

SEQ ID NO: 5575917 - DNA, 25 bp, Homo sapien
caattgtggaaatcagatgagatgt

SEQ ID NO: 5575918 - DNA, 25 bp, Homo sapien
gaagatgtgccagagaaattgtctc

SEQ ID NO: 5575919 - DNA, 25 bp, Homo sapien
atataagttatgaggctgcactgaa

SEQ ID NO: 5575920 - DNA, 25 bp, Homo sapien
acactgaaggacataagttgctttt

SEQ ID NO: 5575921 - DNA, 25 bp, Homo sapien
gaggctgcactgaagagctcaataa

SEQ ID NO: 5575922 - DNA, 25 bp, Homo sapien
cccctggatctgtcatacaagaatc

SEQ ID NO: 5575923 - DNA, 25 bp, Homo sapien
caagaatcaaggacttgtcaatgac

SEQ ID NO: 5575924 - DNA, 25 bp, Homo sapien
acactgaaaaccatggtaaactgat

SEQ ID NO: 5575925 - DNA, 25 bp, Homo sapien
aaagttgttttgtccagcatctctc

SEQ ID NO: 5575926 - DNA, 25 bp, Homo sapien
tgtcaatgactccaaacagcagggc

SEQ ID NO: 5575927 - DNA, 25 bp, Homo sapien
aaactgatatatacagcttgtgtcc

SEQ ID NO: 5575928 - DNA, 25 bp, Homo sapien
ttgacaactagtcaaagacaaagtt

SEQ ID NO: 5575929 - DNA, 25 bp, Homo sapien
gctcaataaactgacactgaaggac

SEQ ID NO: 5575930 - DNA, 25 bp, Homo sapien
aggccttaaacagtacggaaatgtg

SEQ ID NO: 5575931 - DNA, 25 bp, Homo sapien
ccagagatctcagcatagcccctag

SEQ ID NO: 5575932 - DNA, 25 bp, Homo sapien
tggcctcacacaggtatgcagcttc

SEQ ID NO: 5575933 - DNA, 25 bp, Homo sapien
tttatgggtgcacttgcccaggatc

SEQ ID NO: 5575934 - DNA, 25 bp, Homo sapien
acaatgaggacatctggacagatat

SEQ ID NO: 5575935 - DNA, 25 bp, Homo sapien
gtctgtccaaggagaacgaaatgtt

SEQ ID NO: 5575936 - DNA, 25 bp, Homo sapien
ctggacagatataaaagagaactct

SEQ ID NO: 5575937 - DNA, 25 bp, Homo sapien
gagtgggaattctaaggatgtctgt

SEQ ID NO: 5575938 - DNA, 25 bp, Homo sapien
aaggttataaagtcaagttggctcc

SEQ ID NO: 5575939 - DNA, 25 bp, Homo sapien
gaggaatctgggacacatctatgag

SEQ ID NO: 5575940 - DNA, 25 bp, Homo sapien
agcccctagatagcagtacaaggtc

SEQ ID NO: 5575941 - DNA, 25 bp, Homo sapien
tagtacactcaagcatcataagatc

SEQ ID NO: 5575942 - DNA, 25 bp, Homo sapien
tacccgtgctgttgttgtgaggata

SEQ ID NO: 5575943 - DNA, 25 bp, Homo sapien
tctgcaacagtttcgtctagtacac

SEQ ID NO: 5575944 - DNA, 25 bp, Homo sapien
aggtagagtttaatgaacgttagtc

SEQ ID NO: 5575945 - DNA, 25 bp, Homo sapien
catacctagcactgaacaaagatac

SEQ ID NO: 5575946 - DNA, 25 bp, Homo sapien
tctggactatcgatgaataagcata

SEQ ID NO: 5575947 - DNA, 25 bp, Homo sapien
tgaataagcataatgaggtagagtt

SEQ ID NO: 5575948 - DNA, 25 bp, Homo sapien
gaacgttagtcttggcatcagccct

SEQ ID NO: 5575949 - DNA, 25 bp, Homo sapien
acaaagatactaagggtatgaagaa

SEQ ID NO: 5575950 - DNA, 25 bp, Homo sapien
aaaagacatggttttggtctgcaac

SEQ ID NO: 5575951 - DNA, 25 bp, Homo sapien
atgtgcaggtaatagctacccgtgc

SEQ ID NO: 5575952 - DNA, 25 bp, Homo sapien
tgagagagctcccttacccaaagcc

SEQ ID NO: 5575953 - DNA, 25 bp, Homo sapien
tgctaagtttcatccgcgcagggcc

SEQ ID NO: 5575954 - DNA, 25 bp, Homo sapien
gcaggcctggaacccgtttcttata

SEQ ID NO: 5575955 - DNA, 25 bp, Homo sapien
tgtgtatggaactcattcaggcagg

SEQ ID NO: 5575956 - DNA, 25 bp, Homo sapien
ctgctctctggggaagataatatgg

SEQ ID NO: 5575957 - DNA, 25 bp, Homo sapien
cttgttaagaggccgttgaaaggaa

SEQ ID NO: 5575958 - DNA, 25 bp, Homo sapien
ctgtgcaaggcactgttgtaaggag

SEQ ID NO: 5575959 - DNA, 25 bp, Homo sapien
aaagccatcaagccctgagagagct

SEQ ID NO: 5575960 - DNA, 25 bp, Homo sapien
gcacacgacaaaggtaaagccatca

SEQ ID NO: 5575961 - DNA, 25 bp, Homo sapien
ggcaatgtgtgagcagtgaaactca

SEQ ID NO: 5575962 - DNA, 25 bp, Homo sapien
attgatacaacaggaagaatctctc

SEQ ID NO: 5575963 - DNA, 25 bp, Homo sapien
gatgctccatatataccagttgttc

SEQ ID NO: 5575964 - DNA, 25 bp, Homo sapien
gctgcacaaatcaacccatcgcctt

SEQ ID NO: 5575965 - DNA, 25 bp, Homo sapien
aatcccttagcctgaagaagacgct

SEQ ID NO: 5575966 - DNA, 25 bp, Homo sapien
ccatcgccttggtattaagctccac

SEQ ID NO: 5575967 - DNA, 25 bp, Homo sapien
ttacaactctgatagatgaggcccc

SEQ ID NO: 5575968 - DNA, 25 bp, Homo sapien
gtgttagggaatattacgtgttgaa

SEQ ID NO: 5575969 - DNA, 25 bp, Homo sapien
tgccctttggataccttcaacaacc

SEQ ID NO: 5575970 - DNA, 25 bp, Homo sapien
gttatggaaatattgtgttagggaa

SEQ ID NO: 5575971 - DNA, 25 bp, Homo sapien
gtacaggtatgctacacaggtaaac

SEQ ID NO: 5575972 - DNA, 25 bp, Homo sapien
actctgatagatgaggccccaatcc

SEQ ID NO: 5575973 - DNA, 25 bp, Homo sapien
tgaagaagacgctacagactgttat

SEQ ID NO: 5575974 - DNA, 25 bp, Homo sapien
gggactacgggtacataccatcatg

SEQ ID NO: 5575975 - DNA, 25 bp, Homo sapien
ttctgaacttgatcaaaggtgctcc

SEQ ID NO: 5575976 - DNA, 25 bp, Homo sapien
agctgtaggtcacgctgattctccc

SEQ ID NO: 5575977 - DNA, 25 bp, Homo sapien
aataatcccttcccgcctcagtctc

SEQ ID NO: 5575978 - DNA, 25 bp, Homo sapien
agccccacagccccacacttctgct

SEQ ID NO: 5575979 - DNA, 25 bp, Homo sapien
cttgtctgaagcccagctgtaggtc

SEQ ID NO: 5575980 - DNA, 25 bp, Homo sapien
aaaagcaatgtgaattccttgatcc

SEQ ID NO: 5575981 - DNA, 25 bp, Homo sapien
aaatctctgagataggtttgtcttt

SEQ ID NO: 5575982 - DNA, 25 bp, Homo sapien
aaaaagaatctggactgttctaggg

SEQ ID NO: 5575983 - DNA, 25 bp, Homo sapien
ctttaatcaaaagtagcccttggat

SEQ ID NO: 5575984 - DNA, 25 bp, Homo sapien
aggtgctcctatatgtggctgtctc

SEQ ID NO: 5575985 - DNA, 25 bp, Homo sapien
agagggatgcataccaagctctctc

SEQ ID NO: 5575986 - DNA, 25 bp, Homo sapien
ggtcagcacaaaaaagcccactcat

SEQ ID NO: 5575987 - DNA, 25 bp, Homo sapien
attggacagaagcctgtctgggtcc

SEQ ID NO: 5575988 - DNA, 25 bp, Homo sapien
ttagagcagatatccagccacaagc

SEQ ID NO: 5575989 - DNA, 25 bp, Homo sapien
ctcagccaaaactgagcggtgaagg

SEQ ID NO: 5575990 - DNA, 25 bp, Homo sapien
ccctagagaatgaagagctgtttta

SEQ ID NO: 5575991 - DNA, 25 bp, Homo sapien
tgatataggagtaactggcacttgt

SEQ ID NO: 5575992 - DNA, 25 bp, Homo sapien
gagatgggttgagacccacaccaca

SEQ ID NO: 5575993 - DNA, 25 bp, Homo sapien
taagacagtcagtaagcatggtata

SEQ ID NO: 5575994 - DNA, 25 bp, Homo sapien
ctgggtcctaaatctagagggatgc

SEQ ID NO: 5575995 - DNA, 25 bp, Homo sapien
gctctctcagggacccaggtaaagt

SEQ ID NO: 5575996 - DNA, 25 bp, Homo sapien
cgggtgtgggggtagagacgtgtat

SEQ ID NO: 5575997 - DNA, 25 bp, Homo sapien
atacacgtctctacccccacacccg

SEQ ID NO: 5575998 - DNA, 25 bp, Homo sapien
aattgaagataaccaagcacctgtc

SEQ ID NO: 5575999 - DNA, 25 bp, Homo sapien
tcctagaattcatagctggtctccc

SEQ ID NO: 5576000 - DNA, 25 bp, Homo sapien
caagaaggcatgttaatctggattc

SEQ ID NO: 5576001 - DNA, 25 bp, Homo sapien
tccctgcccaccaagaaggcatgtt

SEQ ID NO: 5576002 - DNA, 25 bp, Homo sapien
aagcatttgaattgagatcctagaa

SEQ ID NO: 5576003 - DNA, 25 bp, Homo sapien
tttgggtgcagtaaaatggccctag

SEQ ID NO: 5576004 - DNA, 25 bp, Homo sapien
aatggccctagcttgcactagcccc

SEQ ID NO: 5576005 - DNA, 25 bp, Homo sapien
aactgaacaagcaggaagaattcaa

SEQ ID NO: 5576006 - DNA, 25 bp, Homo sapien
aaaaagcaagattgtggtgacatat

SEQ ID NO: 5576007 - DNA, 25 bp, Homo sapien
ttgaaaggtagagattaaattgaag

SEQ ID NO: 5576008 - DNA, 25 bp, Homo sapien
actagccccattgaaaggtagagat

SEQ ID NO: 5576009 - DNA, 25 bp, Homo sapien
ctgttgtccaacaggcacagctgtt

SEQ ID NO: 5576010 - DNA, 25 bp, Homo sapien
atacaatgtggctgcgagaacagca

SEQ ID NO: 5576011 - DNA, 25 bp, Homo sapien
cccgtgcaacggtacacacttctga

SEQ ID NO: 5576012 - DNA, 25 bp, Homo sapien
gctgcgagaacagcaaatggcaaag

SEQ ID NO: 5576013 - DNA, 25 bp, Homo sapien
cggttacaggctccccgtgcaacgg

SEQ ID NO: 5576014 - DNA, 25 bp, Homo sapien
atgaatcacaaaacagttaagcttg

SEQ ID NO: 5576015 - DNA, 25 bp, Homo sapien
gtggcagactcttggttagcttgac

SEQ ID NO: 5576016 - DNA, 25 bp, Homo sapien
tgttgtgttttgagccagtgagaga

SEQ ID NO: 5576017 - DNA, 25 bp, Homo sapien
aaccacaacatcccaagcccagagg

SEQ ID NO: 5576018 - DNA, 25 bp, Homo sapien
acacttctgaagtggcagactcttg

SEQ ID NO: 5576019 - DNA, 25 bp, Homo sapien
gacattcaatgcagatccatgctgt

SEQ ID NO: 5576020 - DNA, 25 bp, Homo sapien
ggggatgcatgacaatgaaccaaga

SEQ ID NO: 5576021 - DNA, 25 bp, Homo sapien
tctggcaaggaagcatattttctgt

SEQ ID NO: 5576022 - DNA, 25 bp, Homo sapien
tcctctaggttgtatgaacggccag

SEQ ID NO: 5576023 - DNA, 25 bp, Homo sapien
gcaagaggtcaagtcctggaactta

SEQ ID NO: 5576024 - DNA, 25 bp, Homo sapien
taacaagagttatctggtgggcaag

SEQ ID NO: 5576025 - DNA, 25 bp, Homo sapien
caatgaaccaagagtcttcaggaga

SEQ ID NO: 5576026 - DNA, 25 bp, Homo sapien
tcaggagagattatgacttgaaatc

SEQ ID NO: 5576027 - DNA, 25 bp, Homo sapien
aataagctaagctatagagttcata

SEQ ID NO: 5576028 - DNA, 25 bp, Homo sapien
gtataatagtaccaggggatgcatg

SEQ ID NO: 5576029 - DNA, 25 bp, Homo sapien
acttagtagtatactctggcaagga

SEQ ID NO: 5576030 - DNA, 25 bp, Homo sapien
ctgtgttacgtttcctctaggttgt

SEQ ID NO: 5576031 - DNA, 25 bp, Homo sapien
gcagggcgcttcctctccccagcag

SEQ ID NO: 5576032 - DNA, 25 bp, Homo sapien
taaaaattgaggatagtttgtagct

SEQ ID NO: 5576033 - DNA, 25 bp, Homo sapien
ttttacagaggcttcaggctaagga

SEQ ID NO: 5576034 - DNA, 25 bp, Homo sapien
ttatgctgacaggtatgtaggatgt

SEQ ID NO: 5576035 - DNA, 25 bp, Homo sapien
gagaggttattcaaaacgctgagcc

SEQ ID NO: 5576036 - DNA, 25 bp, Homo sapien
tgtaggatgtgtccaggttttggct

SEQ ID NO: 5576037 - DNA, 25 bp, Homo sapien
gctatgtcataaaccccagtgtgct

SEQ ID NO: 5576038 - DNA, 25 bp, Homo sapien
ttgactatactgagagtgaggcagg

SEQ ID NO: 5576039 - DNA, 25 bp, Homo sapien
agacccagagagctactaccacatt

SEQ ID NO: 5576040 - DNA, 25 bp, Homo sapien
tccccagcagccttgcagcaaattt

SEQ ID NO: 5576041 - DNA, 25 bp, Homo sapien
gcagggcttgtgaagcaagcacttg

SEQ ID NO: 5576042 - DNA, 25 bp, Homo sapien
ctggcccgtcccacgtccacactcc

SEQ ID NO: 5576043 - DNA, 25 bp, Homo sapien
ggagtgtggacgtgggacgggccag

SEQ ID NO: 5576044 - DNA, 25 bp, Homo sapien
ggtagcgcaccgtgattaatggatt

SEQ ID NO: 5576045 - DNA, 25 bp, Homo sapien
gcgggattctgaacgctgccatggc

SEQ ID NO: 5576046 - DNA, 25 bp, Homo sapien
atggctcagaccgtgcagaatgtta

SEQ ID NO: 5576047 - DNA, 25 bp, Homo sapien
gacttccgtgttggcgggattctga

SEQ ID NO: 5576048 - DNA, 25 bp, Homo sapien
gtgattgtgggcacagctacaaaac

SEQ ID NO: 5576049 - DNA, 25 bp, Homo sapien
actctgcccatcacgtgccacattt

SEQ ID NO: 5576050 - DNA, 25 bp, Homo sapien
tacattgtcgctcactctgcccatc

SEQ ID NO: 5576051 - DNA, 25 bp, Homo sapien
gtgattaatggattcatctgggcgc

SEQ ID NO: 5576052 - DNA, 25 bp, Homo sapien
gccttggagatcgcgcgtttcgaaa

SEQ ID NO: 5576053 - DNA, 25 bp, Homo sapien
gccacatttgcttggggaaggtaat

SEQ ID NO: 5576054 - DNA, 25 bp, Homo sapien
ctaacccgcgttcttgatgggaggc

SEQ ID NO: 5576055 - DNA, 25 bp, Homo sapien
ctccatgcgtaagaggttactgagg

SEQ ID NO: 5576056 - DNA, 25 bp, Homo sapien
aacaaggcccttttctgacctctac

SEQ ID NO: 5576057 - DNA, 25 bp, Homo sapien
ctctacaggccatttggaggaaaca

SEQ ID NO: 5576058 - DNA, 25 bp, Homo sapien
gccatttggaggaaacaagaaattg

SEQ ID NO: 5576059 - DNA, 25 bp, Homo sapien
ctccttgaagctctgagttggctgg

SEQ ID NO: 5576060 - DNA, 25 bp, Homo sapien
taggcttgcttaattatagacaccc

SEQ ID NO: 5576061 - DNA, 25 bp, Homo sapien
agttggctggactcacgtgtgtcct

SEQ ID NO: 5576062 - DNA, 25 bp, Homo sapien
tgcttctggaaaattaccgaccagg

SEQ ID NO: 5576063 - DNA, 25 bp, Homo sapien
gaatgctaatgtagacaggacagtc

SEQ ID NO: 5576064 - DNA, 25 bp, Homo sapien
ctatgtgcccagcttaggcttgctt

SEQ ID NO: 5576065 - DNA, 25 bp, Homo sapien
atagacacccggggtgaatgctaat

SEQ ID NO: 5576066 - DNA, 25 bp, Homo sapien
aaaagtgatataatttgcccatggt

SEQ ID NO: 5576067 - DNA, 25 bp, Homo sapien
tcaggctcaagaatatgaattcacc

SEQ ID NO: 5576068 - DNA, 25 bp, Homo sapien
aatgtcttctagttgcttgctttgc

SEQ ID NO: 5576069 - DNA, 25 bp, Homo sapien
tgcattccattggtacatctgggac

SEQ ID NO: 5576070 - DNA, 25 bp, Homo sapien
tgtttacctgatagagatgcacggg

SEQ ID NO: 5576071 - DNA, 25 bp, Homo sapien
ccaaagtcaagagcacagcaaatgt

SEQ ID NO: 5576072 - DNA, 25 bp, Homo sapien
gagatgcacgggtaatgctccttga

SEQ ID NO: 5576073 - DNA, 25 bp, Homo sapien
ccattggtacatctgggacccagtg

SEQ ID NO: 5576074 - DNA, 25 bp, Homo sapien
tcagttgattcacatgccttatttc

SEQ ID NO: 5576075 - DNA, 25 bp, Homo sapien
tttcccaaagtcaagagcacagcaa

SEQ ID NO: 5576076 - DNA, 25 bp, Homo sapien
gacccagtgagacaatgaataattc

SEQ ID NO: 5576077 - DNA, 25 bp, Homo sapien
aaaagacacataacgtagcaagatt

SEQ ID NO: 5576078 - DNA, 25 bp, Homo sapien
tggagcataactacgctgagacgac

SEQ ID NO: 5576079 - DNA, 25 bp, Homo sapien
agacaacaaacagctagacaacaaa

SEQ ID NO: 5576080 - DNA, 25 bp, Homo sapien
gaacagaatagacaacaaacagcta

SEQ ID NO: 5576081 - DNA, 25 bp, Homo sapien
aaaaaagatgactggtggaatttat

SEQ ID NO: 5576082 - DNA, 25 bp, Homo sapien
tgagacgacaaatctgaaatctgcc

SEQ ID NO: 5576083 - DNA, 25 bp, Homo sapien
cttacctgaacacagaagatggact

SEQ ID NO: 5576084 - DNA, 25 bp, Homo sapien
tacatgttctagacactgtgccaaa

SEQ ID NO: 5576085 - DNA, 25 bp, Homo sapien
agaagatggacttgtggtaaagtat

SEQ ID NO: 5576086 - DNA, 25 bp, Homo sapien
tctgtaggtgagtgttagtattgtc

SEQ ID NO: 5576087 - DNA, 25 bp, Homo sapien
aaactgaggctgaggcattaacttg

SEQ ID NO: 5576088 - DNA, 25 bp, Homo sapien
ggaaacgtaccatgacttaattgtc

SEQ ID NO: 5576089 - DNA, 25 bp, Homo sapien
ttggatcctagaagctaaattagtt

SEQ ID NO: 5576090 - DNA, 25 bp, Homo sapien
aaaatagactaaaataatcagcata

SEQ ID NO: 5576091 - DNA, 25 bp, Homo sapien
cccctaaaattggatcgaaccctca

SEQ ID NO: 5576092 - DNA, 25 bp, Homo sapien
agtttactcaaggtctaaaatagac

SEQ ID NO: 5576093 - DNA, 25 bp, Homo sapien
ctatctttaggaaacgtaccatgac

SEQ ID NO: 5576094 - DNA, 25 bp, Homo sapien
aatcagcatattaaacagttctctt

SEQ ID NO: 5576095 - DNA, 25 bp, Homo sapien
caaacacacaaacagtaatacctac

SEQ ID NO: 5576096 - DNA, 25 bp, Homo sapien
acaaataaggaaacttggatcctag

SEQ ID NO: 5576097 - DNA, 25 bp, Homo sapien
tccaaagtagactcattcttcctcc

SEQ ID NO: 5576098 - DNA, 25 bp, Homo sapien
aattgtctccaaagtagactcattc

SEQ ID NO: 5576099 - DNA, 25 bp, Homo sapien
ctcagagcctcatagatacccgtgg

SEQ ID NO: 5576100 - DNA, 25 bp, Homo sapien
agggctgaggtgtcctctctgagct

SEQ ID NO: 5576101 - DNA, 25 bp, Homo sapien
agaaatgccaagatctttgcctcaa

SEQ ID NO: 5576102 - DNA, 25 bp, Homo sapien
gagcctcatagatacccgtggaagc

SEQ ID NO: 5576103 - DNA, 25 bp, Homo sapien
caagaagatacaaagaaatgccaag

SEQ ID NO: 5576104 - DNA, 25 bp, Homo sapien
agtgcagagagagactcctgcttct

SEQ ID NO: 5576105 - DNA, 25 bp, Homo sapien
ttctcctagcttccagctctggttc

SEQ ID NO: 5576106 - DNA, 25 bp, Homo sapien
gcctcaaagaaactctcagagcctc

SEQ ID NO: 5576107 - DNA, 25 bp, Homo sapien
tttgcctcaaagaaactctcagagc

SEQ ID NO: 5576108 - DNA, 25 bp, Homo sapien
gctgctcggaatcggcctctcaaag

SEQ ID NO: 5576109 - DNA, 25 bp, Homo sapien
tcctctctgagctcagggacaggag

SEQ ID NO: 5576110 - DNA, 25 bp, Homo sapien
ccatgcaggagatttgtgatccagc

SEQ ID NO: 5576111 - DNA, 25 bp, Homo sapien
ccacaggaaagcagctagaataatg

SEQ ID NO: 5576112 - DNA, 25 bp, Homo sapien
gtgggagaaagatgactcaccacca

SEQ ID NO: 5576113 - DNA, 25 bp, Homo sapien
cagctagaataatgagagacagtga

SEQ ID NO: 5576114 - DNA, 25 bp, Homo sapien
tcagaacagagaaagtaatagtcct

SEQ ID NO: 5576115 - DNA, 25 bp, Homo sapien
caggaggataaaatttaacagggat

SEQ ID NO: 5576116 - DNA, 25 bp, Homo sapien
ctcaccaccatcagtagaccacgtc

SEQ ID NO: 5576117 - DNA, 25 bp, Homo sapien
taacagggatatacttgggcttaaa

SEQ ID NO: 5576118 - DNA, 25 bp, Homo sapien
gaccataaaacttaacaggaggata

SEQ ID NO: 5576119 - DNA, 25 bp, Homo sapien
atatgagtcaacagtgtgatgcaac

SEQ ID NO: 5576120 - DNA, 25 bp, Homo sapien
taatagtcctgcgggtcaaaccatg

SEQ ID NO: 5576121 - DNA, 25 bp, Homo sapien
gggtatcctcatgataggaccagtc

SEQ ID NO: 5576122 - DNA, 25 bp, Homo sapien
tgctaatgattactaagggtgggtc

SEQ ID NO: 5576123 - DNA, 25 bp, Homo sapien
aagtgtggtataatatgaaatacat

SEQ ID NO: 5576124 - DNA, 25 bp, Homo sapien
tccctgataaaagtaaagtgtggta

SEQ ID NO: 5576125 - DNA, 25 bp, Homo sapien
tgataggaccagtctacagagctac

SEQ ID NO: 5576126 - DNA, 25 bp, Homo sapien
atgggctatcatatgaaagagaatc

SEQ ID NO: 5576127 - DNA, 25 bp, Homo sapien
aagagaatctgatctaaaatgtatt

SEQ ID NO: 5576128 - DNA, 25 bp, Homo sapien
gaccagtctacagagctacagaggg

SEQ ID NO: 5576129 - DNA, 25 bp, Homo sapien
tatgtttgagcccctgttatgatgg

SEQ ID NO: 5576130 - DNA, 25 bp, Homo sapien
actgacctacagaaagagggttgag

SEQ ID NO: 5576131 - DNA, 25 bp, Homo sapien
ggtgggtcccctgggtatcctcatg

SEQ ID NO: 5576132 - DNA, 25 bp, Homo sapien
ccgttcttcccgaagcacgtgcccc

SEQ ID NO: 5576133 - DNA, 25 bp, Homo sapien
ggggcacgtgcttcgggaagaacgg

SEQ ID NO: 5576134 - DNA, 25 bp, Homo sapien
tccgttcttcccgaagcacgtgccc

SEQ ID NO: 5576135 - DNA, 25 bp, Homo sapien
gggcacgtgcttcgggaagaacgga

SEQ ID NO: 5576136 - DNA, 25 bp, Homo sapien
attctaatcgagggagaagacaata

SEQ ID NO: 5576137 - DNA, 25 bp, Homo sapien
gagaggaagctctaaaagcaactga

SEQ ID NO: 5576138 - DNA, 25 bp, Homo sapien
tgacagacttgaagccccagatgct

SEQ ID NO: 5576139 - DNA, 25 bp, Homo sapien
gcgccatgagttcaacaggcaggtc

SEQ ID NO: 5576140 - DNA, 25 bp, Homo sapien
cacagtgccctgtctctccgcctac

SEQ ID NO: 5576141 - DNA, 25 bp, Homo sapien
cctctacatgtgcattcggctcgcg

SEQ ID NO: 5576142 - DNA, 25 bp, Homo sapien
ctcaacctggtgacagacttgaagc

SEQ ID NO: 5576143 - DNA, 25 bp, Homo sapien
tactagttgataggaagctctgtgg

SEQ ID NO: 5576144 - DNA, 25 bp, Homo sapien
gaagatttacatgaagaagctgccc

SEQ ID NO: 5576145 - DNA, 25 bp, Homo sapien
tccaggagcctaaaattcagcagtg

SEQ ID NO: 5576146 - DNA, 25 bp, Homo sapien
ccccagatgctgttggacacagtgc

SEQ ID NO: 5576147 - DNA, 25 bp, Homo sapien
acaaacaagcagccaaaatgtattc

SEQ ID NO: 5576148 - DNA, 25 bp, Homo sapien
aaagtggtgagctcagacaatttca

SEQ ID NO: 5576149 - DNA, 25 bp, Homo sapien
acagactttgggcaaaagtggtgag

SEQ ID NO: 5576150 - DNA, 25 bp, Homo sapien
gaagtggatgatcaggccaatctta

SEQ ID NO: 5576151 - DNA, 25 bp, Homo sapien
cagtatcacttagcagtggagcagg

SEQ ID NO: 5576152 - DNA, 25 bp, Homo sapien
tactacatgaagctgcccaactcac

SEQ ID NO: 5576153 - DNA, 25 bp, Homo sapien
atatacaaactacatggacggcacc

SEQ ID NO: 5576154 - DNA, 25 bp, Homo sapien
gacttaggaatttgaatggagaatt

SEQ ID NO: 5576155 - DNA, 25 bp, Homo sapien
ttggaaacgtcaatcgtgtacttgc

SEQ ID NO: 5576156 - DNA, 25 bp, Homo sapien
taagcaacgttaagaagtggatgat

SEQ ID NO: 5576157 - DNA, 25 bp, Homo sapien
gagtgaaaccagaataagcaacgtt

SEQ ID NO: 5576158 - DNA, 25 bp, Homo sapien
ggtaatcattaggcataggcaaatc

SEQ ID NO: 5576159 - DNA, 25 bp, Homo sapien
ctagagaggtatgcagacaatttat

SEQ ID NO: 5576160 - DNA, 25 bp, Homo sapien
ggaaaaactgattggattgtgacat

SEQ ID NO: 5576161 - DNA, 25 bp, Homo sapien
aggcataggcaaatcagagaattat

SEQ ID NO: 5576162 - DNA, 25 bp, Homo sapien
agatgagacttctagagaggtatgc

SEQ ID NO: 5576163 - DNA, 25 bp, Homo sapien
tcacgaactcaggtaatcattaggc

SEQ ID NO: 5576164 - DNA, 25 bp, Homo sapien
agggagccccataaatccacaacct

SEQ ID NO: 5576165 - DNA, 25 bp, Homo sapien
tatggacatgattccttgagatagg

SEQ ID NO: 5576166 - DNA, 25 bp, Homo sapien
tagatactcccttgcccaggcagat

SEQ ID NO: 5576167 - DNA, 25 bp, Homo sapien
atgcagatagttacatatgtggtat

SEQ ID NO: 5576168 - DNA, 25 bp, Homo sapien
atttatttacatggagatacctgtc

SEQ ID NO: 5576169 - DNA, 25 bp, Homo sapien
tactactgatcaataacaaggacat

SEQ ID NO: 5576170 - DNA, 25 bp, Homo sapien
ggattgagtcctgatttgagatcac

SEQ ID NO: 5576171 - DNA, 25 bp, Homo sapien
ttgagggcttaccctgtgtgaggca

SEQ ID NO: 5576172 - DNA, 25 bp, Homo sapien
gggagtaagctgtgacatcttggct

SEQ ID NO: 5576173 - DNA, 25 bp, Homo sapien
tgccagattctcaggattgagtcct

SEQ ID NO: 5576174 - DNA, 25 bp, Homo sapien
aggacattattgagggcttaccctg

SEQ ID NO: 5576175 - DNA, 25 bp, Homo sapien
gggcagacgaaggctacaatttaag

SEQ ID NO: 5576176 - DNA, 25 bp, Homo sapien
ttgtgcaaagtaccaacagaataac

SEQ ID NO: 5576177 - DNA, 25 bp, Homo sapien
aactatttacatggggcagacgaag

SEQ ID NO: 5576178 - DNA, 25 bp, Homo sapien
gagatcacagggagtaagctgtgac

SEQ ID NO: 5576179 - DNA, 25 bp, Homo sapien
accaacagaataacatacacagcaa

SEQ ID NO: 5576180 - DNA, 25 bp, Homo sapien
tagaaaggtaggtatgactacatac

SEQ ID NO: 5576181 - DNA, 25 bp, Homo sapien
atgagaacactgggcccagaagtta

SEQ ID NO: 5576182 - DNA, 25 bp, Homo sapien
attcaatggagactgacaaacagga

SEQ ID NO: 5576183 - DNA, 25 bp, Homo sapien
ctgtggcacataactattaagagat

SEQ ID NO: 5576184 - DNA, 25 bp, Homo sapien
ggtaataggtaatactgagcacttc

SEQ ID NO: 5576185 - DNA, 25 bp, Homo sapien
tttgatgccaggtaataggtaatac

SEQ ID NO: 5576186 - DNA, 25 bp, Homo sapien
ttaagagatagtaacaggactccag

SEQ ID NO: 5576187 - DNA, 25 bp, Homo sapien
gcaagaccttccacggtccaggcag

SEQ ID NO: 5576188 - DNA, 25 bp, Homo sapien
gcaggaagcaagagcatatgtattc

SEQ ID NO: 5576189 - DNA, 25 bp, Homo sapien
actacatacatgagaacactgggcc

SEQ ID NO: 5576190 - DNA, 25 bp, Homo sapien
taagagtactccataggctttcaac

SEQ ID NO: 5576191 - DNA, 25 bp, Homo sapien
tgtcgcctggttaggtgacctcttt

SEQ ID NO: 5576192 - DNA, 25 bp, Homo sapien
ttcagctcaatcatagtggccccat

SEQ ID NO: 5576193 - DNA, 25 bp, Homo sapien
tcctccagctcactaaggacagagt

SEQ ID NO: 5576194 - DNA, 25 bp, Homo sapien
ggcaaaggcttggcatctaccacac

SEQ ID NO: 5576195 - DNA, 25 bp, Homo sapien
aaggacagagtgttcacctgactcc

SEQ ID NO: 5576196 - DNA, 25 bp, Homo sapien
ctcttgacagctaggaaaatccatg

SEQ ID NO: 5576197 - DNA, 25 bp, Homo sapien
tcctggagcacctcatcaggctgtg

SEQ ID NO: 5576198 - DNA, 25 bp, Homo sapien
aatccatgctgcactctggtcttgc

SEQ ID NO: 5576199 - DNA, 25 bp, Homo sapien
aaataaactgggatgagcttccttc

SEQ ID NO: 5576200 - DNA, 25 bp, Homo sapien
cccctcctatgaggcactggggtac

SEQ ID NO: 5576201 - DNA, 25 bp, Homo sapien
ggtggagtcctcccaactgaaactc

SEQ ID NO: 5576202 - DNA, 25 bp, Homo sapien
gagagtcaccggagggccgatcacc

SEQ ID NO: 5576203 - DNA, 25 bp, Homo sapien
ggtgatcggccctccggtgactctc

SEQ ID NO: 5576204 - DNA, 25 bp, Homo sapien
ggaaacaaacgcacaatcgctctgg

SEQ ID NO: 5576205 - DNA, 25 bp, Homo sapien
aaaaactgtgattggagtctgtatt

SEQ ID NO: 5576206 - DNA, 25 bp, Homo sapien
gtcacgcactgtactagggtctagc

SEQ ID NO: 5576207 - DNA, 25 bp, Homo sapien
actgcacttatacggaaacaaacgc

SEQ ID NO: 5576208 - DNA, 25 bp, Homo sapien
gtcacggtacagagatctcagtggg

SEQ ID NO: 5576209 - DNA, 25 bp, Homo sapien
agcaaacgttgggtagcttagcttc

SEQ ID NO: 5576210 - DNA, 25 bp, Homo sapien
gccggctacacccagtcccctgcaa

SEQ ID NO: 5576211 - DNA, 25 bp, Homo sapien
tagcgagtgacagatgtcacggtac

SEQ ID NO: 5576212 - DNA, 25 bp, Homo sapien
atcgctctggtgcaaaagtaaaaac

SEQ ID NO: 5576213 - DNA, 25 bp, Homo sapien
tctctagcacgtggtagaattcatt

SEQ ID NO: 5576214 - DNA, 25 bp, Homo sapien
tctgcagttttcagccggctacacc

SEQ ID NO: 5576215 - DNA, 25 bp, Homo sapien
tgtagacagttgtagttaaaacacc

SEQ ID NO: 5576216 - DNA, 25 bp, Homo sapien
tgcatttcacttagcagagaaaata

SEQ ID NO: 5576217 - DNA, 25 bp, Homo sapien
aatggagtgtgtaagttgttttaat

SEQ ID NO: 5576218 - DNA, 25 bp, Homo sapien
ttgcatttattattggagaggctct

SEQ ID NO: 5576219 - DNA, 25 bp, Homo sapien
ttacaaagtcattatgcagacacac

SEQ ID NO: 5576220 - DNA, 25 bp, Homo sapien
atttctaaagcgaagctccacaggc

SEQ ID NO: 5576221 - DNA, 25 bp, Homo sapien
tcaaaagttataagcaatggagtgt

SEQ ID NO: 5576222 - DNA, 25 bp, Homo sapien
gcgaagctccacaggcacattctgt

SEQ ID NO: 5576223 - DNA, 25 bp, Homo sapien
tacagaattgcagttaatatttaca

SEQ ID NO: 5576224 - DNA, 25 bp, Homo sapien
ggagaggctcttcatacggcatgtt

SEQ ID NO: 5576225 - DNA, 25 bp, Homo sapien
aattgtgcaaacactttatgaaagt

SEQ ID NO: 5576226 - DNA, 25 bp, Homo sapien
atggtggcctgggcctcttaggata

SEQ ID NO: 5576227 - DNA, 25 bp, Homo sapien
cagacaagaactatttggaccaaac

SEQ ID NO: 5576228 - DNA, 25 bp, Homo sapien
gtcataaagagaatacaagcaggca

SEQ ID NO: 5576229 - DNA, 25 bp, Homo sapien
ggaagagcaaagctgatttcaaagt

SEQ ID NO: 5576230 - DNA, 25 bp, Homo sapien
cacctacaagagcaatcactgaaaa

SEQ ID NO: 5576231 - DNA, 25 bp, Homo sapien
tgacactgtcagctccgtactctat

SEQ ID NO: 5576232 - DNA, 25 bp, Homo sapien
cttaggataggagcctacacaagtt

SEQ ID NO: 5576233 - DNA, 25 bp, Homo sapien
ctcaaaagagacccaaggttcttct

SEQ ID NO: 5576234 - DNA, 25 bp, Homo sapien
tagggtgggcaagtaacattcttta

SEQ ID NO: 5576235 - DNA, 25 bp, Homo sapien
aatcactgaaaaaagcgtaaggctt

SEQ ID NO: 5576236 - DNA, 25 bp, Homo sapien
cttatcccctggccactagggtggg

SEQ ID NO: 5576237 - DNA, 25 bp, Homo sapien
atgggttaaataagttgtggtcttc

SEQ ID NO: 5576238 - DNA, 25 bp, Homo sapien
cttccctcatgtcctgaggccaact

SEQ ID NO: 5576239 - DNA, 25 bp, Homo sapien
agaaatgaacattgagtgcctgcta

SEQ ID NO: 5576240 - DNA, 25 bp, Homo sapien
ataacttgtccagggtacatgggtt

SEQ ID NO: 5576241 - DNA, 25 bp, Homo sapien
ttatgatgagcacaggaagcctcaa

SEQ ID NO: 5576242 - DNA, 25 bp, Homo sapien
cgcttggcatgtaactggccttccc

SEQ ID NO: 5576243 - DNA, 25 bp, Homo sapien
gaggttcagcatgctggccccatct

SEQ ID NO: 5576244 - DNA, 25 bp, Homo sapien
aggccaactctaggaggttcagcat

SEQ ID NO: 5576245 - DNA, 25 bp, Homo sapien
accaacgcaagatgataccaggaag

SEQ ID NO: 5576246 - DNA, 25 bp, Homo sapien
cagggtacatgggttaaataagttg

SEQ ID NO: 5576247 - DNA, 25 bp, Homo sapien
tgccaggaaccacgcttggcatgta

SEQ ID NO: 5576248 - DNA, 25 bp, Homo sapien
cagtgctgcacagatttgaaggcgt

SEQ ID NO: 5576249 - DNA, 25 bp, Homo sapien
cacatcacagtatcggtggtgtcct

SEQ ID NO: 5576250 - DNA, 25 bp, Homo sapien
caggtgaacagatgcccccttcttg

SEQ ID NO: 5576251 - DNA, 25 bp, Homo sapien
gggtgcaagtcattcaggtgccgtt

SEQ ID NO: 5576252 - DNA, 25 bp, Homo sapien
catgagtactgttgtggcagctgca

SEQ ID NO: 5576253 - DNA, 25 bp, Homo sapien
tctatgaatgaatgtgtggatctgc

SEQ ID NO: 5576254 - DNA, 25 bp, Homo sapien
tatagatcagccaacggcgcctcat

SEQ ID NO: 5576255 - DNA, 25 bp, Homo sapien
gcccactcgcatgggcctggtggac

SEQ ID NO: 5576256 - DNA, 25 bp, Homo sapien
gaggaacctagccatccaggtgaac

SEQ ID NO: 5576257 - DNA, 25 bp, Homo sapien
tctatatgtcgtgttgagaagggca

SEQ ID NO: 5576258 - DNA, 25 bp, Homo sapien
gtggtgtcctctagggacccacgac

SEQ ID NO: 5576259 - DNA, 25 bp, Homo sapien
cagcagaagagtattttaggttaga

SEQ ID NO: 5576260 - DNA, 25 bp, Homo sapien
gaaaaaaccctccttgctgagtgcc

SEQ ID NO: 5576261 - DNA, 25 bp, Homo sapien
catattaggccctgagaaaaggaac

SEQ ID NO: 5576262 - DNA, 25 bp, Homo sapien
tcatttttgtgagctgggagacatt

SEQ ID NO: 5576263 - DNA, 25 bp, Homo sapien
gctcccgggtgattatttgcagccc

SEQ ID NO: 5576264 - DNA, 25 bp, Homo sapien
gagacattctcccaggaggctcggc

SEQ ID NO: 5576265 - DNA, 25 bp, Homo sapien
acagaatagctgacagcagaagagt

SEQ ID NO: 5576266 - DNA, 25 bp, Homo sapien
taattgttcacggagagaaagcaag

SEQ ID NO: 5576267 - DNA, 25 bp, Homo sapien
tagtgttacttgccagtgagtagtc

SEQ ID NO: 5576268 - DNA, 25 bp, Homo sapien
ggaggctcggcctctgaactagttc

SEQ ID NO: 5576269 - DNA, 25 bp, Homo sapien
agaacaccaaccaactgatgacgtt

SEQ ID NO: 5576270 - DNA, 25 bp, Homo sapien
ttgctcacaacccccatctgggctg

SEQ ID NO: 5576271 - DNA, 25 bp, Homo sapien
gctgtcgctgaattgttgggcatat

SEQ ID NO: 5576272 - DNA, 25 bp, Homo sapien
tctggttcctggagatccatactcc

SEQ ID NO: 5576273 - DNA, 25 bp, Homo sapien
gttgggcatatgtatgcagctcttc

SEQ ID NO: 5576274 - DNA, 25 bp, Homo sapien
gtccctttacatgtctagcaccttc

SEQ ID NO: 5576275 - DNA, 25 bp, Homo sapien
gctgtcctgagactagagcagtgga

SEQ ID NO: 5576276 - DNA, 25 bp, Homo sapien
ccccatctgggctgatggtgctgtc

SEQ ID NO: 5576277 - DNA, 25 bp, Homo sapien
ttaacagagcaggctgtcctgagac

SEQ ID NO: 5576278 - DNA, 25 bp, Homo sapien
gctgatggtgctgtcgctgaattgt

SEQ ID NO: 5576279 - DNA, 25 bp, Homo sapien
gaagaaggaccaggtgctttaacag

SEQ ID NO: 5576280 - DNA, 25 bp, Homo sapien
aaggtgggactgaagtcttcaggaa

SEQ ID NO: 5576281 - DNA, 25 bp, Homo sapien
ccgacaggtgctgccttcggagctg

SEQ ID NO: 5576282 - DNA, 25 bp, Homo sapien
cagctccgaaggcagcacctgtcgg

SEQ ID NO: 5576283 - DNA, 25 bp, Homo sapien
agcccagttcacacaagccaggtct

SEQ ID NO: 5576284 - DNA, 25 bp, Homo sapien
tcggacagacgtgtgttccatgagc

SEQ ID NO: 5576285 - DNA, 25 bp, Homo sapien
ggaggcatatttgtagaagggattc

SEQ ID NO: 5576286 - DNA, 25 bp, Homo sapien
tgtagaagggattcaagcctcctaa

SEQ ID NO: 5576287 - DNA, 25 bp, Homo sapien
tgctgacggctggtctcacaagcca

SEQ ID NO: 5576288 - DNA, 25 bp, Homo sapien
ggggccagtgtgctcctgcacttga

SEQ ID NO: 5576289 - DNA, 25 bp, Homo sapien
ccaggtctgcactgctcggacagac

SEQ ID NO: 5576290 - DNA, 25 bp, Homo sapien
cagaatttctagatgtggcctcggc

SEQ ID NO: 5576291 - DNA, 25 bp, Homo sapien
ctgcacttgaacttggcctagtccc

SEQ ID NO: 5576292 - DNA, 25 bp, Homo sapien
gttccatgagccaaagtgctgacgg

SEQ ID NO: 5576293 - DNA, 25 bp, Homo sapien
cagcaaaacttggttacagggcgag

SEQ ID NO: 5576294 - DNA, 25 bp, Homo sapien
tcaagtctgccagccatgacaaggg

SEQ ID NO: 5576295 - DNA, 25 bp, Homo sapien
tgggattctccaagaggctcactcc

SEQ ID NO: 5576296 - DNA, 25 bp, Homo sapien
aactctgaaatatggtgtaccaggt

SEQ ID NO: 5576297 - DNA, 25 bp, Homo sapien
ggctgccccggtgccatcctcagat

SEQ ID NO: 5576298 - DNA, 25 bp, Homo sapien
agggaggataaagaaagtcattcaa

SEQ ID NO: 5576299 - DNA, 25 bp, Homo sapien
gacaagggtctatacatgaggcctg

SEQ ID NO: 5576300 - DNA, 25 bp, Homo sapien
gaagccagatgggacctttcctcaa

SEQ ID NO: 5576301 - DNA, 25 bp, Homo sapien
aggctcactccatggctgccgccca

SEQ ID NO: 5576302 - DNA, 25 bp, Homo sapien
aaatacatcaggcgtctgcagggtt

SEQ ID NO: 5576303 - DNA, 25 bp, Homo sapien
tctccagctgagctagactggggag

SEQ ID NO: 5576304 - DNA, 25 bp, Homo sapien
ggtgtaccaggtaagagcattatct

SEQ ID NO: 5576305 - DNA, 25 bp, Homo sapien
cctcagtctccacctctgcacaatg

SEQ ID NO: 5576306 - DNA, 25 bp, Homo sapien
ttccacgtggaaaccccacgcgcac

SEQ ID NO: 5576307 - DNA, 25 bp, Homo sapien
aggctttctgtctgggatttgtgtg

SEQ ID NO: 5576308 - DNA, 25 bp, Homo sapien
tgggactcagtttctccgtcgggag

SEQ ID NO: 5576309 - DNA, 25 bp, Homo sapien
agtttctccgtcgggagaatgggga

SEQ ID NO: 5576310 - DNA, 25 bp, Homo sapien
ggtccctgtccctcgttgggactca

SEQ ID NO: 5576311 - DNA, 25 bp, Homo sapien
tccctcgttgggactcagtttctcc

SEQ ID NO: 5576312 - DNA, 25 bp, Homo sapien
ggtgaggctttctgtctgggatttg

SEQ ID NO: 5576313 - DNA, 25 bp, Homo sapien
agtctccacctctgcacaatggggg

SEQ ID NO: 5576314 - DNA, 25 bp, Homo sapien
agacgcatcaccgctccgggaatgg

SEQ ID NO: 5576315 - DNA, 25 bp, Homo sapien
ggacggcgctgctttcggtcttttc

SEQ ID NO: 5576316 - DNA, 25 bp, Homo sapien
actgtgaaacagagcactagatttc

SEQ ID NO: 5576317 - DNA, 25 bp, Homo sapien
ggcttgcctagtagctgtgtggccc

SEQ ID NO: 5576318 - DNA, 25 bp, Homo sapien
agtaaagtacaggagttaaggatgt

SEQ ID NO: 5576319 - DNA, 25 bp, Homo sapien
tcgtgaatgcaaagatgagtaagac

SEQ ID NO: 5576320 - DNA, 25 bp, Homo sapien
tgagtaagacgttgtccctgtcctc

SEQ ID NO: 5576321 - DNA, 25 bp, Homo sapien
gacaacgcagtaatacagcaaggta

SEQ ID NO: 5576322 - DNA, 25 bp, Homo sapien
taagttgaacatatggacaggttat

SEQ ID NO: 5576323 - DNA, 25 bp, Homo sapien
gcacacagccggcttgcctagtagc

SEQ ID NO: 5576324 - DNA, 25 bp, Homo sapien
ggggcttagattatggagagaataa

SEQ ID NO: 5576325 - DNA, 25 bp, Homo sapien
atggagagaataatgtaagttgaac

SEQ ID NO: 5576326 - DNA, 25 bp, Homo sapien
caggactattacaaaaaggctaacc

SEQ ID NO: 5576327 - DNA, 25 bp, Homo sapien
atatggaaaaatagctattagttct

SEQ ID NO: 5576328 - DNA, 25 bp, Homo sapien
ttctaatctgggtagtcacagaata

SEQ ID NO: 5576329 - DNA, 25 bp, Homo sapien
attaagtaacacatgatatatatat

SEQ ID NO: 5576330 - DNA, 25 bp, Homo sapien
gtaatagctattaaattgtatactg

SEQ ID NO: 5576331 - DNA, 25 bp, Homo sapien
tataaatatatatggaaaaatagct

SEQ ID NO: 5576332 - DNA, 25 bp, Homo sapien
aaagataatatatacaataacatac

SEQ ID NO: 5576333 - DNA, 25 bp, Homo sapien
tggccctactcggatcggtctgtga

SEQ ID NO: 5576334 - DNA, 25 bp, Homo sapien
tattttgatgatatataatacacac

SEQ ID NO: 5576335 - DNA, 25 bp, Homo sapien
aatctgggtagtcacagaatatatc

SEQ ID NO: 5576336 - DNA, 25 bp, Homo sapien
ctttttctaatctgggtagtcacag

SEQ ID NO: 5576337 - DNA, 25 bp, Homo sapien
tgggtagtcacagaatatatcatcc

SEQ ID NO: 5576338 - DNA, 25 bp, Homo sapien
tcccacaaagaacatgtattgtctt

SEQ ID NO: 5576339 - DNA, 25 bp, Homo sapien
tgaatgtatgccacaaaagtttaca

SEQ ID NO: 5576340 - DNA, 25 bp, Homo sapien
accttggccttgtgggcatttcttc

SEQ ID NO: 5576341 - DNA, 25 bp, Homo sapien
tcaacacaggatagtaaagatatgg

SEQ ID NO: 5576342 - DNA, 25 bp, Homo sapien
aaatgtggttttaaacaatgtggtc

SEQ ID NO: 5576343 - DNA, 25 bp, Homo sapien
ttgggcccagccactgactgattta

SEQ ID NO: 5576344 - DNA, 25 bp, Homo sapien
cccaaaagtgcctttgggcccagcc

SEQ ID NO: 5576345 - DNA, 25 bp, Homo sapien
ctgatttaaaacccagaaatgtggt

SEQ ID NO: 5576346 - DNA, 25 bp, Homo sapien
gtcgtggtgaattcaggtgattttt

SEQ ID NO: 5576347 - DNA, 25 bp, Homo sapien
aaaaaaatcaacacaggatagtaaa

SEQ ID NO: 5576348 - DNA, 25 bp, Homo sapien
ttaaacaatgtggtcgtggtgaatt

SEQ ID NO: 5576349 - DNA, 25 bp, Homo sapien
tgagtgtacaagcagacaacaatgt

SEQ ID NO: 5576350 - DNA, 25 bp, Homo sapien
cacccagaaaggcttacctctccaa

SEQ ID NO: 5576351 - DNA, 25 bp, Homo sapien
acctgaatcaacagaactatgtatt

SEQ ID NO: 5576352 - DNA, 25 bp, Homo sapien
aggggtcacaaagtcttgaaaccat

SEQ ID NO: 5576353 - DNA, 25 bp, Homo sapien
aagcagacaacaatgttggccaccc

SEQ ID NO: 5576354 - DNA, 25 bp, Homo sapien
tgtacaagcagacaacaatgttggc

SEQ ID NO: 5576355 - DNA, 25 bp, Homo sapien
acaacaatgttggccacccagaaag

SEQ ID NO: 5576356 - DNA, 25 bp, Homo sapien
atgaatgaacttcctgctattagat

SEQ ID NO: 5576357 - DNA, 25 bp, Homo sapien
tgatcatcattgaattacctgaatc

SEQ ID NO: 5576358 - DNA, 25 bp, Homo sapien
ctgtactaggcataattgcatcttt

SEQ ID NO: 5576359 - DNA, 25 bp, Homo sapien
tttagggccttctgtactaggcata

SEQ ID NO: 5576360 - DNA, 25 bp, Homo sapien
accaattgcttggcacagagaatgg

SEQ ID NO: 5576361 - DNA, 25 bp, Homo sapien
cacagaggatcttaacacaatccac

SEQ ID NO: 5576362 - DNA, 25 bp, Homo sapien
atttcacaagccacgtgaagagggg

SEQ ID NO: 5576363 - DNA, 25 bp, Homo sapien
gtacaaaagtgcaaagctgtgtgtc

SEQ ID NO: 5576364 - DNA, 25 bp, Homo sapien
ctctccaaaccaattgcttggcaca

SEQ ID NO: 5576365 - DNA, 25 bp, Homo sapien
aggagtagcaattgagctttgcccc

SEQ ID NO: 5576366 - DNA, 25 bp, Homo sapien
acacaatccacattggccatttcac

SEQ ID NO: 5576367 - DNA, 25 bp, Homo sapien
gtgtccacttaaggagtagcaattg

SEQ ID NO: 5576368 - DNA, 25 bp, Homo sapien
ccacttaaggagtagcaattgagct

SEQ ID NO: 5576369 - DNA, 25 bp, Homo sapien
gctttgccccacgatcacagaggat

SEQ ID NO: 5576370 - DNA, 25 bp, Homo sapien
caaaagtgcaaagctgtgtgtccac

SEQ ID NO: 5576371 - DNA, 25 bp, Homo sapien
acaagcagttcctggtagaactcgc

SEQ ID NO: 5576372 - DNA, 25 bp, Homo sapien
ttcaaatcggaaagttagagaagtc

SEQ ID NO: 5576373 - DNA, 25 bp, Homo sapien
gggagcaagacgtcttgacagatgt

SEQ ID NO: 5576374 - DNA, 25 bp, Homo sapien
aatgggagagacaataataaacaca

SEQ ID NO: 5576375 - DNA, 25 bp, Homo sapien
gagaagtccttactgagaaagtgac

SEQ ID NO: 5576376 - DNA, 25 bp, Homo sapien
actgagaaagtgacatctgagcaaa

SEQ ID NO: 5576377 - DNA, 25 bp, Homo sapien
gaactcgcattccaatgggagagac

SEQ ID NO: 5576378 - DNA, 25 bp, Homo sapien
agcatcactgatggtactgaggctg

SEQ ID NO: 5576379 - DNA, 25 bp, Homo sapien
agctgcttcctggtgtccctgtctt

SEQ ID NO: 5576380 - DNA, 25 bp, Homo sapien
ggtactgaggctgtggatttcattt

SEQ ID NO: 5576381 - DNA, 25 bp, Homo sapien
atctgagcaaagatcagctgcttcc

SEQ ID NO: 5576382 - DNA, 25 bp, Homo sapien
ccactaaaaagactgagggtggaaa

SEQ ID NO: 5576383 - DNA, 25 bp, Homo sapien
tagccaggcaaatgctagacaaaca

SEQ ID NO: 5576384 - DNA, 25 bp, Homo sapien
ataagcacatgagactagccaggca

SEQ ID NO: 5576385 - DNA, 25 bp, Homo sapien
gaaaggaaggatataaagattacat

SEQ ID NO: 5576386 - DNA, 25 bp, Homo sapien
gaaaaataagcacatgagactagcc

SEQ ID NO: 5576387 - DNA, 25 bp, Homo sapien
gctagacaaacagtaatgatgaggt

SEQ ID NO: 5576388 - DNA, 25 bp, Homo sapien
aacttaataaagggataaatatgct

SEQ ID NO: 5576389 - DNA, 25 bp, Homo sapien
ataaagggataaatatgctacattc

SEQ ID NO: 5576390 - DNA, 25 bp, Homo sapien
caggcaaatgctagacaaacagtaa

SEQ ID NO: 5576391 - DNA, 25 bp, Homo sapien
tatgctacattcaagatactctatt

SEQ ID NO: 5576392 - DNA, 25 bp, Homo sapien
tctatccactaaaaagactgagggt

SEQ ID NO: 5576393 - DNA, 25 bp, Homo sapien
gcaagagtgacttaccacatgaggt

SEQ ID NO: 5576394 - DNA, 25 bp, Homo sapien
ctggtattgttcttggtgtggcctc

SEQ ID NO: 5576395 - DNA, 25 bp, Homo sapien
gcgctgtgctgtgtgccttgcaaga

SEQ ID NO: 5576396 - DNA, 25 bp, Homo sapien
taaatcctactgggccttctggggc

SEQ ID NO: 5576397 - DNA, 25 bp, Homo sapien
cccgaacaccacgccgcctggtatt

SEQ ID NO: 5576398 - DNA, 25 bp, Homo sapien
cacatgaggtaaatcctactgggcc

SEQ ID NO: 5576399 - DNA, 25 bp, Homo sapien
gtgtgccttgcaagagtgacttacc

SEQ ID NO: 5576400 - DNA, 25 bp, Homo sapien
tattgttcttggtgtggcctctggc

SEQ ID NO: 5576401 - DNA, 25 bp, Homo sapien
tcccctctccccgactgcgctgtgc

SEQ ID NO: 5576402 - DNA, 25 bp, Homo sapien
gtgctgtgtgccttgcaagagtgac

SEQ ID NO: 5576403 - DNA, 25 bp, Homo sapien
tccacctgccttccggaagcccgaa

SEQ ID NO: 5576404 - DNA, 25 bp, Homo sapien
agagtctgctctgcacccaggttac

SEQ ID NO: 5576405 - DNA, 25 bp, Homo sapien
aaaaggcatttgtattggaagaata

SEQ ID NO: 5576406 - DNA, 25 bp, Homo sapien
aaatgttaaatatggcaattgtagc

SEQ ID NO: 5576407 - DNA, 25 bp, Homo sapien
ggtattcttgaggaagagtctgctc

SEQ ID NO: 5576408 - DNA, 25 bp, Homo sapien
tcacggcctgttacaatggctaaga

SEQ ID NO: 5576409 - DNA, 25 bp, Homo sapien
cattgaaccctaattaaacacccca

SEQ ID NO: 5576410 - DNA, 25 bp, Homo sapien
gacacatcatgtttttcacggcctg

SEQ ID NO: 5576411 - DNA, 25 bp, Homo sapien
ttactggtacaatgtttccatgaaa

SEQ ID NO: 5576412 - DNA, 25 bp, Homo sapien
ttggaagaataaatgttatagtacc

SEQ ID NO: 5576413 - DNA, 25 bp, Homo sapien
cccaggttacatacttgcctagctc

SEQ ID NO: 5576414 - DNA, 25 bp, Homo sapien
ccaactgtacccattaaaaggcatt

SEQ ID NO: 5576415 - DNA, 25 bp, Homo sapien
gatagcacatgtgaacatacattat

SEQ ID NO: 5576416 - DNA, 25 bp, Homo sapien
gaacatacattataggcagttgccc

SEQ ID NO: 5576417 - DNA, 25 bp, Homo sapien
ctgcttcctgacccagtgtcccagc

SEQ ID NO: 5576418 - DNA, 25 bp, Homo sapien
aggctgtccccctgtgctgccactg

SEQ ID NO: 5576419 - DNA, 25 bp, Homo sapien
ctgcctgcttcctgacccagtgtcc

SEQ ID NO: 5576420 - DNA, 25 bp, Homo sapien
tgtgctgccactgtgcacaggtgac

SEQ ID NO: 5576421 - DNA, 25 bp, Homo sapien
tttcctcacctgtagtgtgtggtat

SEQ ID NO: 5576422 - DNA, 25 bp, Homo sapien
tgcacaggtgaccttaactgcctgc

SEQ ID NO: 5576423 - DNA, 25 bp, Homo sapien
cagtgtcccagcagagactcagttt

SEQ ID NO: 5576424 - DNA, 25 bp, Homo sapien
tgtggtattgaccaaaggagatagc

SEQ ID NO: 5576425 - DNA, 25 bp, Homo sapien
tcacctgtagtgtgtggtattgacc

SEQ ID NO: 5576426 - DNA, 25 bp, Homo sapien
gtaaagttctagatgtgtaggtgtc

SEQ ID NO: 5576427 - DNA, 25 bp, Homo sapien
ggcaattctttgttgcgggaggctg

SEQ ID NO: 5576428 - DNA, 25 bp, Homo sapien
gtgtcatgtagataaggattggttc

SEQ ID NO: 5576429 - DNA, 25 bp, Homo sapien
ttcaagtcatttagcaggaggggaa

SEQ ID NO: 5576430 - DNA, 25 bp, Homo sapien
tccctccagtcacgacagccaaaac

SEQ ID NO: 5576431 - DNA, 25 bp, Homo sapien
gcattagatgtaggagcaccacttc

SEQ ID NO: 5576432 - DNA, 25 bp, Homo sapien
agtcagaactgtatgccatggacac

SEQ ID NO: 5576433 - DNA, 25 bp, Homo sapien
gcaagaagccacacagctatatgcc

SEQ ID NO: 5576434 - DNA, 25 bp, Homo sapien
agaaaaataagagatgtagtcaatc

SEQ ID NO: 5576435 - DNA, 25 bp, Homo sapien
gtgtaacccatgtggcaatcgcttc

SEQ ID NO: 5576436 - DNA, 25 bp, Homo sapien
gtcctgtgtgggaatgatgtttagc

SEQ ID NO: 5576437 - DNA, 25 bp, Homo sapien
tctaaagagaatgcttgagacactt

SEQ ID NO: 5576438 - DNA, 25 bp, Homo sapien
caggaagcagatacaaagaatccta

SEQ ID NO: 5576439 - DNA, 25 bp, Homo sapien
tctcaaagattgccaggaagcagat

SEQ ID NO: 5576440 - DNA, 25 bp, Homo sapien
ctaagtagcctgaaggacaacgttc

SEQ ID NO: 5576441 - DNA, 25 bp, Homo sapien
agggcagccattccattacagcatc

SEQ ID NO: 5576442 - DNA, 25 bp, Homo sapien
tcccactgaaaaggtcaacttgacc

SEQ ID NO: 5576443 - DNA, 25 bp, Homo sapien
cttgaagatacaaatgaaaggaaat

SEQ ID NO: 5576444 - DNA, 25 bp, Homo sapien
gccagttgcaagtttagcccagccc

SEQ ID NO: 5576445 - DNA, 25 bp, Homo sapien
tactgttaacactcagggcagccat

SEQ ID NO: 5576446 - DNA, 25 bp, Homo sapien
aatttatgacaaaaagcagctcatc

SEQ ID NO: 5576447 - DNA, 25 bp, Homo sapien
gtcaccaaggccagttgcaagttta

SEQ ID NO: 5576448 - DNA, 25 bp, Homo sapien
aactgatagatcaagaaaacacaaa

SEQ ID NO: 5576449 - DNA, 25 bp, Homo sapien
attgctagtgaaccagaaagaagaa

SEQ ID NO: 5576450 - DNA, 25 bp, Homo sapien
atgtagtgtttatgtgcatggactc

SEQ ID NO: 5576451 - DNA, 25 bp, Homo sapien
aaagtagaaagtttcaacacatctt

SEQ ID NO: 5576452 - DNA, 25 bp, Homo sapien
ttagtaagaacatggaagatttaaa

SEQ ID NO: 5576453 - DNA, 25 bp, Homo sapien
aggcaaatcaaattgctagtgaacc

SEQ ID NO: 5576454 - DNA, 25 bp, Homo sapien
gatcggactgcaaaggttcaaatcc

SEQ ID NO: 5576455 - DNA, 25 bp, Homo sapien
aagttgcaccacagttggcaccatc

SEQ ID NO: 5576456 - DNA, 25 bp, Homo sapien
accatcctgaccatttgccaagcct

SEQ ID NO: 5576457 - DNA, 25 bp, Homo sapien
ataaagttaagaaaataccattgtg

SEQ ID NO: 5576458 - DNA, 25 bp, Homo sapien
gcatggactctgagatcggactgca

SEQ ID NO: 5576459 - DNA, 25 bp, Homo sapien
tttagtgtacagagacaaaatcacc

SEQ ID NO: 5576460 - DNA, 25 bp, Homo sapien
ctatgaagcacagagattgacaagg

SEQ ID NO: 5576461 - DNA, 25 bp, Homo sapien
ttaaaaaagcacaaccaacatttca

SEQ ID NO: 5576462 - DNA, 25 bp, Homo sapien
tctggttgtttggattcaatcgttt

SEQ ID NO: 5576463 - DNA, 25 bp, Homo sapien
gaccagcctgcatcacacagacaca

SEQ ID NO: 5576464 - DNA, 25 bp, Homo sapien
ttgaaacaccgcaagccgctttgtc

SEQ ID NO: 5576465 - DNA, 25 bp, Homo sapien
tcacacagacacaaatcacatctct

SEQ ID NO: 5576466 - DNA, 25 bp, Homo sapien
aagggcccacattagaccagctatg

SEQ ID NO: 5576467 - DNA, 25 bp, Homo sapien
gacaagggcaccaaacatccatctt

SEQ ID NO: 5576468 - DNA, 25 bp, Homo sapien
tagaccagctatgaagcacagagat

SEQ ID NO: 5576469 - DNA, 25 bp, Homo sapien
gtgagaactaagggcccacattaga

SEQ ID NO: 5576470 - DNA, 25 bp, Homo sapien
ttgacacagcacagtagatcttaac

SEQ ID NO: 5576471 - DNA, 25 bp, Homo sapien
tatggtttagtttacggaatacatc

SEQ ID NO: 5576472 - DNA, 25 bp, Homo sapien
tgcatgttgagatgacacacataat

SEQ ID NO: 5576473 - DNA, 25 bp, Homo sapien
tgcttctatggagtgctgtgaacaa

SEQ ID NO: 5576474 - DNA, 25 bp, Homo sapien
ctgtgaacaaatctgagctaaaaat

SEQ ID NO: 5576475 - DNA, 25 bp, Homo sapien
tggagtgctacacatttgacacagc

SEQ ID NO: 5576476 - DNA, 25 bp, Homo sapien
tatggcagtgaatctactatctagt

SEQ ID NO: 5576477 - DNA, 25 bp, Homo sapien
gaatgcgacttttgtgctaagcgtt

SEQ ID NO: 5576478 - DNA, 25 bp, Homo sapien
tgctaagcgttttggaagacaatgg

SEQ ID NO: 5576479 - DNA, 25 bp, Homo sapien
ggaaggaaaaccatgagctgtaaca

SEQ ID NO: 5576480 - DNA, 25 bp, Homo sapien
gtttaatcactgtggagtgctacac

SEQ ID NO: 5576481 - DNA, 25 bp, Homo sapien
ccccatgtgtatttcaaggagactc

SEQ ID NO: 5576482 - DNA, 25 bp, Homo sapien
acacttccaccggcagagagaagaa

SEQ ID NO: 5576483 - DNA, 25 bp, Homo sapien
gttcaggatgctggtttgtgtgtta

SEQ ID NO: 5576484 - DNA, 25 bp, Homo sapien
catacttagaggttcaggatgctgg

SEQ ID NO: 5576485 - DNA, 25 bp, Homo sapien
tacttatctgaacaaaggagatttc

SEQ ID NO: 5576486 - DNA, 25 bp, Homo sapien
atgtgctgcacgtctcatgcgtctc

SEQ ID NO: 5576487 - DNA, 25 bp, Homo sapien
gggagaagtgtgctgctctgttcaa

SEQ ID NO: 5576488 - DNA, 25 bp, Homo sapien
tttgtgtctggcacaggcttgatct

SEQ ID NO: 5576489 - DNA, 25 bp, Homo sapien
acatctaatagtgttgggggagaag

SEQ ID NO: 5576490 - DNA, 25 bp, Homo sapien
tgtgtgttacccctgagataaatcc

SEQ ID NO: 5576491 - DNA, 25 bp, Homo sapien
aagtttaggaaatcacccccatgtg

SEQ ID NO: 5576492 - DNA, 25 bp, Homo sapien
agggtaagggtctttcctggataca

SEQ ID NO: 5576493 - DNA, 25 bp, Homo sapien
aggtcctatggactcctgaggctga

SEQ ID NO: 5576494 - DNA, 25 bp, Homo sapien
ggagcatctgaataggtatgggctc

SEQ ID NO: 5576495 - DNA, 25 bp, Homo sapien
gcccagaagtggtcataatactctc

SEQ ID NO: 5576496 - DNA, 25 bp, Homo sapien
tatcaatgatggaagcatcgcaggg

SEQ ID NO: 5576497 - DNA, 25 bp, Homo sapien
gcagggtgatgtctaggtcctatgg

SEQ ID NO: 5576498 - DNA, 25 bp, Homo sapien
gccactttcatgggaggtgagaact

SEQ ID NO: 5576499 - DNA, 25 bp, Homo sapien
ggatcttcaaggtgagcatgttaga

SEQ ID NO: 5576500 - DNA, 25 bp, Homo sapien
agcatgttagaatctggggtctgga

SEQ ID NO: 5576501 - DNA, 25 bp, Homo sapien
gacagcctgcatcctacccactctc

SEQ ID NO: 5576502 - DNA, 25 bp, Homo sapien
tcttctcagacctgtgcagtggagg

SEQ ID NO: 5576503 - DNA, 25 bp, Homo sapien
taaagacactaacctaaatgccagc

SEQ ID NO: 5576504 - DNA, 25 bp, Homo sapien
tgccagcaaaccattgggttaggta

SEQ ID NO: 5576505 - DNA, 25 bp, Homo sapien
ataatgtcagaaagcaaacaacagg

SEQ ID NO: 5576506 - DNA, 25 bp, Homo sapien
caaaagaatttgaggctggaaaaaa

SEQ ID NO: 5576507 - DNA, 25 bp, Homo sapien
aagtgagagaatgttatcttatccc

SEQ ID NO: 5576508 - DNA, 25 bp, Homo sapien
caaattaacctatgtaacaggacac

SEQ ID NO: 5576509 - DNA, 25 bp, Homo sapien
ttaagcagtacccaagcttctgtcc

SEQ ID NO: 5576510 - DNA, 25 bp, Homo sapien
aacaggacacattaaaatttaggta

SEQ ID NO: 5576511 - DNA, 25 bp, Homo sapien
taaaatttaggtaagtgagagaatg

SEQ ID NO: 5576512 - DNA, 25 bp, Homo sapien
actctcccaatgagagctagctctt

SEQ ID NO: 5576513 - DNA, 25 bp, Homo sapien
atgtttactatggttgctctggctc

SEQ ID NO: 5576514 - DNA, 25 bp, Homo sapien
acggatgatgtgtttgataagggag

SEQ ID NO: 5576515 - DNA, 25 bp, Homo sapien
ccagaaacgctatggattggcatgg

SEQ ID NO: 5576516 - DNA, 25 bp, Homo sapien
aattcatgggcgacgctgattgcca

SEQ ID NO: 5576517 - DNA, 25 bp, Homo sapien
actaacacgccagatggtttgggga

SEQ ID NO: 5576518 - DNA, 25 bp, Homo sapien
cctagatttgggtcgtggttactgt

SEQ ID NO: 5576519 - DNA, 25 bp, Homo sapien
gcacagacagctgcaattcatgggc

SEQ ID NO: 5576520 - DNA, 25 bp, Homo sapien
ggggtagaaattagcagctctcctc

SEQ ID NO: 5576521 - DNA, 25 bp, Homo sapien
ttgggccccttatgcagattgggtt

SEQ ID NO: 5576522 - DNA, 25 bp, Homo sapien
tgaagatttctgttgaggagctgca

SEQ ID NO: 5576523 - DNA, 25 bp, Homo sapien
tattgacttacccccgaacggatga

SEQ ID NO: 5576524 - DNA, 25 bp, Homo sapien
gacaagatttcgagcattggggtag

SEQ ID NO: 5576525 - DNA, 25 bp, Homo sapien
gtgatgtatgcaatccagcagctga

SEQ ID NO: 5576526 - DNA, 25 bp, Homo sapien
caggttgctagtgatgtgatgtatg

SEQ ID NO: 5576527 - DNA, 25 bp, Homo sapien
caagaaggtcctgaagttgcaggga

SEQ ID NO: 5576528 - DNA, 25 bp, Homo sapien
ctacctgggtgcaccttgctagtac

SEQ ID NO: 5576529 - DNA, 25 bp, Homo sapien
cagcagctgaatatgcacaagaaat

SEQ ID NO: 5576530 - DNA, 25 bp, Homo sapien
gcctgagcaagtaggataactattc

SEQ ID NO: 5576531 - DNA, 25 bp, Homo sapien
gcagggaatacagcagaaatctcca

SEQ ID NO: 5576532 - DNA, 25 bp, Homo sapien
tggtccagcagccaatatgaaactg

SEQ ID NO: 5576533 - DNA, 25 bp, Homo sapien
aagaggatgttgttacatggtgagc

SEQ ID NO: 5576534 - DNA, 25 bp, Homo sapien
tcacatcacccagctgtcagtcttc

SEQ ID NO: 5576535 - DNA, 25 bp, Homo sapien
gcacatcatacaggactggtccagc

SEQ ID NO: 5576536 - DNA, 25 bp, Homo sapien
tccgtcccgtgtccctctgccctaa

SEQ ID NO: 5576537 - DNA, 25 bp, Homo sapien
ctggggttgtcctagctccagctgc

SEQ ID NO: 5576538 - DNA, 25 bp, Homo sapien
ttttctcacagcctcggagggggag

SEQ ID NO: 5576539 - DNA, 25 bp, Homo sapien
ctcctacaatgcgtatgggaagccg

SEQ ID NO: 5576540 - DNA, 25 bp, Homo sapien
tctaaccatgaactctgggggcaca

SEQ ID NO: 5576541 - DNA, 25 bp, Homo sapien
tcctgcaactaggacaccagtggga

SEQ ID NO: 5576542 - DNA, 25 bp, Homo sapien
gctggaacaaaataccgagcctggg

SEQ ID NO: 5576543 - DNA, 25 bp, Homo sapien
atctacacagggttgtcaggtacga

SEQ ID NO: 5576544 - DNA, 25 bp, Homo sapien
cttaaaaccccaagaagagcaaagc

SEQ ID NO: 5576545 - DNA, 25 bp, Homo sapien
agggctcatcctcacggctgcttcc

SEQ ID NO: 5576546 - DNA, 25 bp, Homo sapien
tgttggtactgagagtttggattct

SEQ ID NO: 5576547 - DNA, 25 bp, Homo sapien
tagcagaggtttacattagcaatat

SEQ ID NO: 5576548 - DNA, 25 bp, Homo sapien
ctggataaatgggatgttaagagtg

SEQ ID NO: 5576549 - DNA, 25 bp, Homo sapien
agctttgacactggataaatgggat

SEQ ID NO: 5576550 - DNA, 25 bp, Homo sapien
ttgaactgacaactagaggtgtatc

SEQ ID NO: 5576551 - DNA, 25 bp, Homo sapien
cttcctgaatcagaggtctaaccat

SEQ ID NO: 5576552 - DNA, 25 bp, Homo sapien
actttgaatatttgcgagagcctat

SEQ ID NO: 5576553 - DNA, 25 bp, Homo sapien
tttcttttcagtgtgggagacccca

SEQ ID NO: 5576554 - DNA, 25 bp, Homo sapien
ttgcgagagcctatttacttctagc

SEQ ID NO: 5576555 - DNA, 25 bp, Homo sapien
aatgggatgttaagagtgcacttct

SEQ ID NO: 5576556 - DNA, 25 bp, Homo sapien
agaccccacataaagcaacaatgta

SEQ ID NO: 5576557 - DNA, 25 bp, Homo sapien
gaggtctaaccataagcgttgattc

SEQ ID NO: 5576558 - DNA, 25 bp, Homo sapien
ttttaatgcagaatatcccagatca

SEQ ID NO: 5576559 - DNA, 25 bp, Homo sapien
aagataaatgaaggagtcagagtaa

SEQ ID NO: 5576560 - DNA, 25 bp, Homo sapien
actggtcatgcattaggtaaaagat

SEQ ID NO: 5576561 - DNA, 25 bp, Homo sapien
agttgagggagacattctcaagcac

SEQ ID NO: 5576562 - DNA, 25 bp, Homo sapien
tgtagaaggccactaataacattta

SEQ ID NO: 5576563 - DNA, 25 bp, Homo sapien
gagacattctcaagcacacactagc

SEQ ID NO: 5576564 - DNA, 25 bp, Homo sapien
gtaaaagatgaaccagtataatgcc

SEQ ID NO: 5576565 - DNA, 25 bp, Homo sapien
ttactgatcaaatgtagaaggccac

SEQ ID NO: 5576566 - DNA, 25 bp, Homo sapien
tagctgtcctggttatgaaggaact

SEQ ID NO: 5576567 - DNA, 25 bp, Homo sapien
acttcctctagtatactggtcatgc

SEQ ID NO: 5576568 - DNA, 25 bp, Homo sapien
caaaacaaaaagactctggtccatc

SEQ ID NO: 5576569 - DNA, 25 bp, Homo sapien
aaagcattgctggacattgaggaag

SEQ ID NO: 5576570 - DNA, 25 bp, Homo sapien
ggtcctcagatcagaaggctgcttc

SEQ ID NO: 5576571 - DNA, 25 bp, Homo sapien
gagcaaatctttctgtcacggagac

SEQ ID NO: 5576572 - DNA, 25 bp, Homo sapien
acggagacattggcaaagcattgct

SEQ ID NO: 5576573 - DNA, 25 bp, Homo sapien
acaactgaatgagcaaatctttctg

SEQ ID NO: 5576574 - DNA, 25 bp, Homo sapien
gaggaaggactcctctgtcagggga

SEQ ID NO: 5576575 - DNA, 25 bp, Homo sapien
ttctgtcacggagacattggcaaag

SEQ ID NO: 5576576 - DNA, 25 bp, Homo sapien
gcaggagggccaatatctgatctgc

SEQ ID NO: 5576577 - DNA, 25 bp, Homo sapien
ggagggccaatatctgatctgcagg

SEQ ID NO: 5576578 - DNA, 25 bp, Homo sapien
attgaggaaggactcctctgtcagg

SEQ ID NO: 5576579 - DNA, 25 bp, Homo sapien
gcaatcgttgctctgaaggatcttc

SEQ ID NO: 5576580 - DNA, 25 bp, Homo sapien
caaagagaagtgtaagtagttcatc

SEQ ID NO: 5576581 - DNA, 25 bp, Homo sapien
gatgaactacttacacttctctttg

SEQ ID NO: 5576582 - DNA, 25 bp, Homo sapien
tatgaagtcaaataaacctgagttt

SEQ ID NO: 5576583 - DNA, 25 bp, Homo sapien
agcagcactaacccactggtggagt

SEQ ID NO: 5576584 - DNA, 25 bp, Homo sapien
gattgttgagattaaacagagagga

SEQ ID NO: 5576585 - DNA, 25 bp, Homo sapien
tggtactaagtgtgtaaccttgtcc

SEQ ID NO: 5576586 - DNA, 25 bp, Homo sapien
acctcacgtgacagttaaaaatcta

SEQ ID NO: 5576587 - DNA, 25 bp, Homo sapien
gatgataatgcctacctcacgtgac

SEQ ID NO: 5576588 - DNA, 25 bp, Homo sapien
gattaaacagagaggacctagtgag

SEQ ID NO: 5576589 - DNA, 25 bp, Homo sapien
tctctgagtctgattctgtgtttgt

SEQ ID NO: 5576590 - DNA, 25 bp, Homo sapien
agaaattgtatgttcacaaggagat

SEQ ID NO: 5576591 - DNA, 25 bp, Homo sapien
ggataagagcaaagattatgaagtc

SEQ ID NO: 5576592 - DNA, 25 bp, Homo sapien
acaaggagattgtacagtattgatt

SEQ ID NO: 5576593 - DNA, 25 bp, Homo sapien
aatataacaatgaagcatgcttttc

SEQ ID NO: 5576594 - DNA, 25 bp, Homo sapien
aacacaaagagtaccaaaatgaatg

SEQ ID NO: 5576595 - DNA, 25 bp, Homo sapien
ttttatttccagagcttgcccaagc

SEQ ID NO: 5576596 - DNA, 25 bp, Homo sapien
cccaagcaagaatctacttgccctg

SEQ ID NO: 5576597 - DNA, 25 bp, Homo sapien
aatctctgataaaatgaaactcatc

SEQ ID NO: 5576598 - DNA, 25 bp, Homo sapien
tccagagcttgcccaagcaagaatc

SEQ ID NO: 5576599 - DNA, 25 bp, Homo sapien
acttgccctgtaaaattctgcttat

SEQ ID NO: 5576600 - DNA, 25 bp, Homo sapien
atgcttttctaacacaaagagtacc

SEQ ID NO: 5576601 - DNA, 25 bp, Homo sapien
ccaaaatgaatgtgctactttctgt

SEQ ID NO: 5576602 - DNA, 25 bp, Homo sapien
tgaagaccagtcaaaatgctaaagg

SEQ ID NO: 5576603 - DNA, 25 bp, Homo sapien
gaaactcatcatgaagaccagtcaa

SEQ ID NO: 5576604 - DNA, 25 bp, Homo sapien
cctacacttgaagctcctgtcagcc

SEQ ID NO: 5576605 - DNA, 25 bp, Homo sapien
agggaaggaggatagtttcctcttc

SEQ ID NO: 5576606 - DNA, 25 bp, Homo sapien
agaagtgacagacaagtgaactatt

SEQ ID NO: 5576607 - DNA, 25 bp, Homo sapien
tcacaagcagctgtcccaacaattg

SEQ ID NO: 5576608 - DNA, 25 bp, Homo sapien
ttctgggtccaaagctcagccatac

SEQ ID NO: 5576609 - DNA, 25 bp, Homo sapien
cattcaggtacacctaggagctgcg

SEQ ID NO: 5576610 - DNA, 25 bp, Homo sapien
agtgacatcgatgacattcaggtac

SEQ ID NO: 5576611 - DNA, 25 bp, Homo sapien
taggaaggggcaaccatcctttctg

SEQ ID NO: 5576612 - DNA, 25 bp, Homo sapien
aagaagatgacagacactcccgtat

SEQ ID NO: 5576613 - DNA, 25 bp, Homo sapien
agggaagtggctcatgttcctccct

SEQ ID NO: 5576614 - DNA, 25 bp, Homo sapien
tcagccatacgccaagaggaaaaga

SEQ ID NO: 5576615 - DNA, 25 bp, Homo sapien
aaatagagttgctggcctggtataa

SEQ ID NO: 5576616 - DNA, 25 bp, Homo sapien
agtgaacaaaatagagttgctggcc

SEQ ID NO: 5576617 - DNA, 25 bp, Homo sapien
atcctccatccaccctcctacctac

SEQ ID NO: 5576618 - DNA, 25 bp, Homo sapien
tccctcctttcaggtgagccagctc

SEQ ID NO: 5576619 - DNA, 25 bp, Homo sapien
ggactaaaggcagtgaacaaaatag

SEQ ID NO: 5576620 - DNA, 25 bp, Homo sapien
caccctcctacctactaatccctcc

SEQ ID NO: 5576621 - DNA, 25 bp, Homo sapien
ttcaggtgagccagctcttgtctcc

SEQ ID NO: 5576622 - DNA, 25 bp, Homo sapien
agccattaagagtaatatcaaagac

SEQ ID NO: 5576623 - DNA, 25 bp, Homo sapien
tgctggcctggtataacttgtgttt

SEQ ID NO: 5576624 - DNA, 25 bp, Homo sapien
cctatccacccacacatccatccat

SEQ ID NO: 5576625 - DNA, 25 bp, Homo sapien
tctctgtctatccaaccaatcattc

SEQ ID NO: 5576626 - DNA, 25 bp, Homo sapien
gcgatggaagtacccatatacctcc

SEQ ID NO: 5576627 - DNA, 25 bp, Homo sapien
ctgttgaagactgagtttagataac

SEQ ID NO: 5576628 - DNA, 25 bp, Homo sapien
tacctcctgaagctgatgagatgtc

SEQ ID NO: 5576629 - DNA, 25 bp, Homo sapien
tcacacgcatccgcataagtccagg

SEQ ID NO: 5576630 - DNA, 25 bp, Homo sapien
acagtggcaacatcacacgcatccg

SEQ ID NO: 5576631 - DNA, 25 bp, Homo sapien
cgatggagccattttgcgatggaag

SEQ ID NO: 5576632 - DNA, 25 bp, Homo sapien
tattgttagtgtaagtgccgatgga

SEQ ID NO: 5576633 - DNA, 25 bp, Homo sapien
ataagtccaggaaatcaatatattg

SEQ ID NO: 5576634 - DNA, 25 bp, Homo sapien
gaccatctggtcaaagtttgggatt

SEQ ID NO: 5576635 - DNA, 25 bp, Homo sapien
gattataatgagggtgaagtgactc

SEQ ID NO: 5576636 - DNA, 25 bp, Homo sapien
agtttgggattataatgagggtgaa

SEQ ID NO: 5576637 - DNA, 25 bp, Homo sapien
gtgtaaagcaaggttcacctgggga

SEQ ID NO: 5576638 - DNA, 25 bp, Homo sapien
catcctcgtagaaggtaagaaaggt

SEQ ID NO: 5576639 - DNA, 25 bp, Homo sapien
aagtaggtagtcttgacgtgttcac

SEQ ID NO: 5576640 - DNA, 25 bp, Homo sapien
aacggagcagtgtttagcgattaaa

SEQ ID NO: 5576641 - DNA, 25 bp, Homo sapien
tccatcctaggtgaggcagtaaaat

SEQ ID NO: 5576642 - DNA, 25 bp, Homo sapien
gagaaaagattttgagtgacatcct

SEQ ID NO: 5576643 - DNA, 25 bp, Homo sapien
ggctgcactaggaatgactctgtat

SEQ ID NO: 5576644 - DNA, 25 bp, Homo sapien
aaagtgagatctctgtggtgcattt

SEQ ID NO: 5576645 - DNA, 25 bp, Homo sapien
tgtaatcagccaatgaagaggaatt

SEQ ID NO: 5576646 - DNA, 25 bp, Homo sapien
aacatgcgactttcagggccctatc

SEQ ID NO: 5576647 - DNA, 25 bp, Homo sapien
atggaacatgattcaggagtcgtgt

SEQ ID NO: 5576648 - DNA, 25 bp, Homo sapien
aatgtttagatcaggtacacacacc

SEQ ID NO: 5576649 - DNA, 25 bp, Homo sapien
aggggaatctgactgcttggatcag

SEQ ID NO: 5576650 - DNA, 25 bp, Homo sapien
cactgtaagagaccttgaatctttt

SEQ ID NO: 5576651 - DNA, 25 bp, Homo sapien
ctggagcccctccccatatccatgt

SEQ ID NO: 5576652 - DNA, 25 bp, Homo sapien
ggctggtggaacttgaatgtataca

SEQ ID NO: 5576653 - DNA, 25 bp, Homo sapien
ggctctcaagggaacaccactcttg

SEQ ID NO: 5576654 - DNA, 25 bp, Homo sapien
catcctgaaaggtaagtagaattat

SEQ ID NO: 5576655 - DNA, 25 bp, Homo sapien
cacacacctgaactaaattgggact

SEQ ID NO: 5576656 - DNA, 25 bp, Homo sapien
actcttggattatttagccccgctc

SEQ ID NO: 5576657 - DNA, 25 bp, Homo sapien
tctacaagaattgcataccccaacc

SEQ ID NO: 5576658 - DNA, 25 bp, Homo sapien
ttgcataccccaacccctggagccc

SEQ ID NO: 5576659 - DNA, 25 bp, Homo sapien
ggtcacctttggctggagcatattt

SEQ ID NO: 5576660 - DNA, 25 bp, Homo sapien
gaacttgcttatgggctttgcaggc

SEQ ID NO: 5576661 - DNA, 25 bp, Homo sapien
tgttaggcaaatgttagacaaaatt

SEQ ID NO: 5576662 - DNA, 25 bp, Homo sapien
ttgctcagagtcacaccgctagagt

SEQ ID NO: 5576663 - DNA, 25 bp, Homo sapien
ggtgaagatcacagatatttgcaaa

SEQ ID NO: 5576664 - DNA, 25 bp, Homo sapien
tggcccaggcatctccttcatgtgt

SEQ ID NO: 5576665 - DNA, 25 bp, Homo sapien
agaaggtagttcaagaaagaaatga

SEQ ID NO: 5576666 - DNA, 25 bp, Homo sapien
ccgctagagttgtctgaacagagat

SEQ ID NO: 5576667 - DNA, 25 bp, Homo sapien
gaacagagatgaatctgaccccaga

SEQ ID NO: 5576668 - DNA, 25 bp, Homo sapien
tgaccccagagccttatcaataggt

SEQ ID NO: 5576669 - DNA, 25 bp, Homo sapien
caggaggtagattttaggatagaaa

SEQ ID NO: 5576670 - DNA, 25 bp, Homo sapien
aaaaatcaggccagcactttcactc

SEQ ID NO: 5576671 - DNA, 25 bp, Homo sapien
ctggctgtccgtgaaatggctttga

SEQ ID NO: 5576672 - DNA, 25 bp, Homo sapien
gttgagggcctcagtggctttttgg

SEQ ID NO: 5576673 - DNA, 25 bp, Homo sapien
tttgaaatgagcaggcactgttgag

SEQ ID NO: 5576674 - DNA, 25 bp, Homo sapien
atgccgtggaactttacatggaaca

SEQ ID NO: 5576675 - DNA, 25 bp, Homo sapien
cattcctgtctgagctggtcccttc

SEQ ID NO: 5576676 - DNA, 25 bp, Homo sapien
tttacatggaacatggagctctggg

SEQ ID NO: 5576677 - DNA, 25 bp, Homo sapien
caaagctgaactaaaccaatggcct

SEQ ID NO: 5576678 - DNA, 25 bp, Homo sapien
agtgggagctagcattttgacatgt

SEQ ID NO: 5576679 - DNA, 25 bp, Homo sapien
ttgggtaatggcaagataacttttg

SEQ ID NO: 5576680 - DNA, 25 bp, Homo sapien
gccgacattggggcaaatcagttgg

SEQ ID NO: 5576681 - DNA, 25 bp, Homo sapien
cccaaggaccagaccctcaaccatg

SEQ ID NO: 5576682 - DNA, 25 bp, Homo sapien
tgtgaaactgttctaggcatgatgc

SEQ ID NO: 5576683 - DNA, 25 bp, Homo sapien
taaattttaccgaagtgaatgcacc

SEQ ID NO: 5576684 - DNA, 25 bp, Homo sapien
accaacgaataaattgagatgtttc

SEQ ID NO: 5576685 - DNA, 25 bp, Homo sapien
gtgaggcctcccttttgagagccag

SEQ ID NO: 5576686 - DNA, 25 bp, Homo sapien
atgtctgacctcccagtgaggcctc

SEQ ID NO: 5576687 - DNA, 25 bp, Homo sapien
ttggtgtgagatatgtaaattttac

SEQ ID NO: 5576688 - DNA, 25 bp, Homo sapien
aagtagtttggttctcaggcagtat

SEQ ID NO: 5576689 - DNA, 25 bp, Homo sapien
ttgagagccagatagacgtgtttta

SEQ ID NO: 5576690 - DNA, 25 bp, Homo sapien
gaatgcaccttcaaggcttgccccc

SEQ ID NO: 5576691 - DNA, 25 bp, Homo sapien
gtgatcaaataaacttggaaaacac

SEQ ID NO: 5576692 - DNA, 25 bp, Homo sapien
gtcacttgatggtgagtcagcaatt

SEQ ID NO: 5576693 - DNA, 25 bp, Homo sapien
cacagtctggctccatcagtgaata

SEQ ID NO: 5576694 - DNA, 25 bp, Homo sapien
tgacagaggcaccttgtgtagctca

SEQ ID NO: 5576695 - DNA, 25 bp, Homo sapien
tctggtccttactctgggtggtcac

SEQ ID NO: 5576696 - DNA, 25 bp, Homo sapien
gtactggctctggagtaagagagat

SEQ ID NO: 5576697 - DNA, 25 bp, Homo sapien
taagagagatctggaattgaatcac

SEQ ID NO: 5576698 - DNA, 25 bp, Homo sapien
actatgccctttagggggtactggc

SEQ ID NO: 5576699 - DNA, 25 bp, Homo sapien
aaaatagttgctccggtgctttccc

SEQ ID NO: 5576700 - DNA, 25 bp, Homo sapien
ttcgacagagctgtttgacagaggc

SEQ ID NO: 5576701 - DNA, 25 bp, Homo sapien
catccccagaaggttaagccatttc

SEQ ID NO: 5576702 - DNA, 25 bp, Homo sapien
gaatcagattagcaccagctgcctc

SEQ ID NO: 5576703 - DNA, 25 bp, Homo sapien
agggctcctgaggaacctcacccca

SEQ ID NO: 5576704 - DNA, 25 bp, Homo sapien
gaacaaccgactccatgcaactcaa

SEQ ID NO: 5576705 - DNA, 25 bp, Homo sapien
acgctctcatcaaagaggcccactc

SEQ ID NO: 5576706 - DNA, 25 bp, Homo sapien
ctccatgcaactcaacgctctcatc

SEQ ID NO: 5576707 - DNA, 25 bp, Homo sapien
accgactccatgcaactcaacgctc

SEQ ID NO: 5576708 - DNA, 25 bp, Homo sapien
ggctgagcacacacctgactccctg

SEQ ID NO: 5576709 - DNA, 25 bp, Homo sapien
gcacacacctgactccctggagggg

SEQ ID NO: 5576710 - DNA, 25 bp, Homo sapien
ctgaggaacctcaccccaaattccc

SEQ ID NO: 5576711 - DNA, 25 bp, Homo sapien
tgggatgaacaaccgactccatgca

SEQ ID NO: 5576712 - DNA, 25 bp, Homo sapien
tctcatcaaagaggcccactcctcc

SEQ ID NO: 5576713 - DNA, 25 bp, Homo sapien
agtctttggggtctttaagtggcag

SEQ ID NO: 5576714 - DNA, 25 bp, Homo sapien
cacaaactcctagcctcaagcaatc

SEQ ID NO: 5576715 - DNA, 25 bp, Homo sapien
tgaatatattgagttaaatagattt

SEQ ID NO: 5576716 - DNA, 25 bp, Homo sapien
ccgactcactattgcccagactgga

SEQ ID NO: 5576717 - DNA, 25 bp, Homo sapien
atattgcccatctagtcacaaactc

SEQ ID NO: 5576718 - DNA, 25 bp, Homo sapien
gattgcatgatgaaatattttgaat

SEQ ID NO: 5576719 - DNA, 25 bp, Homo sapien
atcatgaccaacaaaaagaaatttt

SEQ ID NO: 5576720 - DNA, 25 bp, Homo sapien
gaaatggaatttgaccgactcacta

SEQ ID NO: 5576721 - DNA, 25 bp, Homo sapien
agatgacatcttactatattgccca

SEQ ID NO: 5576722 - DNA, 25 bp, Homo sapien
gcagtggctattcataagcacaatc

SEQ ID NO: 5576723 - DNA, 25 bp, Homo sapien
gcgtgtgccacagtggccagctaat

SEQ ID NO: 5576724 - DNA, 25 bp, Homo sapien
cataagcacaatcatagctcactgc

SEQ ID NO: 5576725 - DNA, 25 bp, Homo sapien
tcctcctggctagtagatgctgatg

SEQ ID NO: 5576726 - DNA, 25 bp, Homo sapien
tccagaccctgcataccccatttcc

SEQ ID NO: 5576727 - DNA, 25 bp, Homo sapien
gggagagagttcagtctctggaagg

SEQ ID NO: 5576728 - DNA, 25 bp, Homo sapien
tgggaccctgtaattagactgctgg

SEQ ID NO: 5576729 - DNA, 25 bp, Homo sapien
ctctggaaggttaacactgtgcagc

SEQ ID NO: 5576730 - DNA, 25 bp, Homo sapien
ctgggagccccagccctcttccttc

SEQ ID NO: 5576731 - DNA, 25 bp, Homo sapien
ctgatggccctgggtgaccatccaa

SEQ ID NO: 5576732 - DNA, 25 bp, Homo sapien
gcagctgatttgtccaagtccgacc

SEQ ID NO: 5576733 - DNA, 25 bp, Homo sapien
tgacttagcagtccttgaggagagg

SEQ ID NO: 5576734 - DNA, 25 bp, Homo sapien
gatgtatgaataagtgtcttggacc

SEQ ID NO: 5576735 - DNA, 25 bp, Homo sapien
tcttggacctgctcatttgggggat

SEQ ID NO: 5576736 - DNA, 25 bp, Homo sapien
tagacccctctaagccacctgccac

SEQ ID NO: 5576737 - DNA, 25 bp, Homo sapien
gacacaccctcataccccccacacc

SEQ ID NO: 5576738 - DNA, 25 bp, Homo sapien
cacctgccacagctccggaaatgaa

SEQ ID NO: 5576739 - DNA, 25 bp, Homo sapien
gggtgaacagaaagctcacaataaa

SEQ ID NO: 5576740 - DNA, 25 bp, Homo sapien
ttcccatcagggaatgtgacctcag

SEQ ID NO: 5576741 - DNA, 25 bp, Homo sapien
agctccggaaatgaacacagagaaa

SEQ ID NO: 5576742 - DNA, 25 bp, Homo sapien
agcagaagcaagattccatgtcctc

SEQ ID NO: 5576743 - DNA, 25 bp, Homo sapien
ggtcacagagccaagacgctcctat

SEQ ID NO: 5576744 - DNA, 25 bp, Homo sapien
ttttcccagagtcctgagccagggc

SEQ ID NO: 5576745 - DNA, 25 bp, Homo sapien
ggtgatggacttcaggagcctatat

SEQ ID NO: 5576746 - DNA, 25 bp, Homo sapien
tcctcatcagggttggtgatggact

SEQ ID NO: 5576747 - DNA, 25 bp, Homo sapien
cggcatgaagcaattgaacaaagaa

SEQ ID NO: 5576748 - DNA, 25 bp, Homo sapien
atttacagcatgtgagaacccagag

SEQ ID NO: 5576749 - DNA, 25 bp, Homo sapien
agtgaatctaggcaggtgattagag

SEQ ID NO: 5576750 - DNA, 25 bp, Homo sapien
aggtgtaaattcaagataagcattc

SEQ ID NO: 5576751 - DNA, 25 bp, Homo sapien
tgaagagcactactgggaccttgct

SEQ ID NO: 5576752 - DNA, 25 bp, Homo sapien
taagcattctgggaatgcgggagat

SEQ ID NO: 5576753 - DNA, 25 bp, Homo sapien
agagaggtgactccttcggcatgaa

SEQ ID NO: 5576754 - DNA, 25 bp, Homo sapien
aatggggcaatttacaacaggtgta

SEQ ID NO: 5576755 - DNA, 25 bp, Homo sapien
tgtctataaatgatcaggggaggga

SEQ ID NO: 5576756 - DNA, 25 bp, Homo sapien
tctggggagaatagcagatttctta

SEQ ID NO: 5576757 - DNA, 25 bp, Homo sapien
gggagatggcaagtgtctataaatg

SEQ ID NO: 5576758 - DNA, 25 bp, Homo sapien
ggaaaagccacagtcacaagatgtc

SEQ ID NO: 5576759 - DNA, 25 bp, Homo sapien
tcaatcccaacacaagggtacagtt

SEQ ID NO: 5576760 - DNA, 25 bp, Homo sapien
cctcagaacccccttactttgtgga

SEQ ID NO: 5576761 - DNA, 25 bp, Homo sapien
agtcacaagatgtcaatcccaacac

SEQ ID NO: 5576762 - DNA, 25 bp, Homo sapien
gtggaaaagccacagtcacaagatg

SEQ ID NO: 5576763 - DNA, 25 bp, Homo sapien
tacagttaaaggctcttgtgggtgg

SEQ ID NO: 5576764 - DNA, 25 bp, Homo sapien
gccacagtcacaagatgtcaatccc

SEQ ID NO: 5576765 - DNA, 25 bp, Homo sapien
ccaacacaagggtacagttaaaggc

SEQ ID NO: 5576766 - DNA, 25 bp, Homo sapien
tactttgtggaaaagccacagtcac

SEQ ID NO: 5576767 - DNA, 25 bp, Homo sapien
aagggtacagttaaaggctcttgtg

SEQ ID NO: 5576768 - DNA, 25 bp, Homo sapien
agatgtcaatcccaacacaagggta

SEQ ID NO: 5576769 - DNA, 25 bp, Homo sapien
tcagtcatctcaaggaagaatacat

SEQ ID NO: 5576770 - DNA, 25 bp, Homo sapien
ccacgtgttctggtggaatgagatg

SEQ ID NO: 5576771 - DNA, 25 bp, Homo sapien
acatagacagaaagtaggttttgga

SEQ ID NO: 5576772 - DNA, 25 bp, Homo sapien
aagagaaaagtgtgcgctccattct

SEQ ID NO: 5576773 - DNA, 25 bp, Homo sapien
tgctacactgctcgaggtacggtat

SEQ ID NO: 5576774 - DNA, 25 bp, Homo sapien
aggcgttcgaactagaagctatgcg

SEQ ID NO: 5576775 - DNA, 25 bp, Homo sapien
atgtcccatcgccctgtgcaccgta

SEQ ID NO: 5576776 - DNA, 25 bp, Homo sapien
gaaacagaatagcagccactcattc

SEQ ID NO: 5576777 - DNA, 25 bp, Homo sapien
gataaggcacatgtgaaatggaaat

SEQ ID NO: 5576778 - DNA, 25 bp, Homo sapien
gaagaagtagcacgtaatggctttt

SEQ ID NO: 5576779 - DNA, 25 bp, Homo sapien
gtgcaccgtagagacctcagtcatc

SEQ ID NO: 5576780 - DNA, 25 bp, Homo sapien
ttaaaaccagccatggagacaggca

SEQ ID NO: 5576781 - DNA, 25 bp, Homo sapien
cccaaaggtcagaactaatattaac

SEQ ID NO: 5576782 - DNA, 25 bp, Homo sapien
cctttaatgcacacgacaaccaacc

SEQ ID NO: 5576783 - DNA, 25 bp, Homo sapien
cgttcctgagccaccagaagccttt

SEQ ID NO: 5576784 - DNA, 25 bp, Homo sapien
gccactgcagaatggggaaattaaa

SEQ ID NO: 5576785 - DNA, 25 bp, Homo sapien
tattaacaagccactgcagaatggg

SEQ ID NO: 5576786 - DNA, 25 bp, Homo sapien
gcatttacagacccccaaggcaggt

SEQ ID NO: 5576787 - DNA, 25 bp, Homo sapien
tagttgccaaagacgttcctgagcc

SEQ ID NO: 5576788 - DNA, 25 bp, Homo sapien
tgaaatatcagctgttgtagttgcc

SEQ ID NO: 5576789 - DNA, 25 bp, Homo sapien
aatggatgtggatttgtgcaactcc

SEQ ID NO: 5576790 - DNA, 25 bp, Homo sapien
cagatcgatcttcagtgtaaatggg

SEQ ID NO: 5576791 - DNA, 25 bp, Homo sapien
tgtacatgtagtagtgctattgccc

SEQ ID NO: 5576792 - DNA, 25 bp, Homo sapien
gcacaagcctgaatgtataaacttc

SEQ ID NO: 5576793 - DNA, 25 bp, Homo sapien
actcacaggattcttaaagtatctc

SEQ ID NO: 5576794 - DNA, 25 bp, Homo sapien
catatctgaaggactgtgatcccac

SEQ ID NO: 5576795 - DNA, 25 bp, Homo sapien
atgaagttcttgaaaatatggatta

SEQ ID NO: 5576796 - DNA, 25 bp, Homo sapien
tcaagggcttaggcaaatgatataa

SEQ ID NO: 5576797 - DNA, 25 bp, Homo sapien
tagaatacgaatatgtaaagaaatc

SEQ ID NO: 5576798 - DNA, 25 bp, Homo sapien
aggaacatgtaaataatcaagggct

SEQ ID NO: 5576799 - DNA, 25 bp, Homo sapien
aaggactgtgatcccacataggaac

SEQ ID NO: 5576800 - DNA, 25 bp, Homo sapien
ataaacacatttgcacaagcctgaa

SEQ ID NO: 5576801 - DNA, 25 bp, Homo sapien
tatttccaggtacacaactcacagg

SEQ ID NO: 5576802 - DNA, 25 bp, Homo sapien
cctccctgacgacaagctgaggagc

SEQ ID NO: 5576803 - DNA, 25 bp, Homo sapien
agtttgtgcatgagattgcaggagg

SEQ ID NO: 5576804 - DNA, 25 bp, Homo sapien
tcctctggcaaggacttggagaggg

SEQ ID NO: 5576805 - DNA, 25 bp, Homo sapien
tggagaggggtcaataaatctctta

SEQ ID NO: 5576806 - DNA, 25 bp, Homo sapien
agtggtagaaaggacttgtcacctt

SEQ ID NO: 5576807 - DNA, 25 bp, Homo sapien
tcccaaggcagcagctaggacttgg

SEQ ID NO: 5576808 - DNA, 25 bp, Homo sapien
attagggatatggctacccagctgg

SEQ ID NO: 5576809 - DNA, 25 bp, Homo sapien
ggatataggtgtgcaggattcctct

SEQ ID NO: 5576810 - DNA, 25 bp, Homo sapien
cggaggagatggctgcttcctccct

SEQ ID NO: 5576811 - DNA, 25 bp, Homo sapien
cagctggggatatggctcccttcat

SEQ ID NO: 5576812 - DNA, 25 bp, Homo sapien
gagttgaggcttgaagtcagtcatc

SEQ ID NO: 5576813 - DNA, 25 bp, Homo sapien
tacaaaatgggaatctccaggttat

SEQ ID NO: 5576814 - DNA, 25 bp, Homo sapien
agaaagaatctggctctggttttag

SEQ ID NO: 5576815 - DNA, 25 bp, Homo sapien
gaggtctgtctcctgtggactcaac

SEQ ID NO: 5576816 - DNA, 25 bp, Homo sapien
atagtgttgtgaataaaaagagata

SEQ ID NO: 5576817 - DNA, 25 bp, Homo sapien
gctggcattgtgggtgtcttcaatt

SEQ ID NO: 5576818 - DNA, 25 bp, Homo sapien
aagttcactggacagtagaggagat

SEQ ID NO: 5576819 - DNA, 25 bp, Homo sapien
gcctcatagaggggacattacaaaa

SEQ ID NO: 5576820 - DNA, 25 bp, Homo sapien
tgagcaggcttcatgatcgtgtcat

SEQ ID NO: 5576821 - DNA, 25 bp, Homo sapien
aagtattattaggctgaaggtcaga

SEQ ID NO: 5576822 - DNA, 25 bp, Homo sapien
ccatagaaaacaatagctggcattg

SEQ ID NO: 5576823 - DNA, 25 bp, Homo sapien
actcattgagagtctgtcaggcctc

SEQ ID NO: 5576824 - DNA, 25 bp, Homo sapien
aattcttccagaataaggagggaac

SEQ ID NO: 5576825 - DNA, 25 bp, Homo sapien
taatataggtcttaagaagagagcc

SEQ ID NO: 5576826 - DNA, 25 bp, Homo sapien
taaggagggaactaatagcatcatt

SEQ ID NO: 5576827 - DNA, 25 bp, Homo sapien
aatcatcaattaagtctatccaaat

SEQ ID NO: 5576828 - DNA, 25 bp, Homo sapien
atataggtcttaagaagagagccag

SEQ ID NO: 5576829 - DNA, 25 bp, Homo sapien
ttccagaataaggagggaactaata

SEQ ID NO: 5576830 - DNA, 25 bp, Homo sapien
agcatcatttgcaggttacagactg

SEQ ID NO: 5576831 - DNA, 25 bp, Homo sapien
gagagccagactcctgaattgcagc

SEQ ID NO: 5576832 - DNA, 25 bp, Homo sapien
tgcaggttacagactgataaactga

SEQ ID NO: 5576833 - DNA, 25 bp, Homo sapien
acagactgataaactgaagtgcttc

SEQ ID NO: 5576834 - DNA, 25 bp, Homo sapien
agaagagagccagactcctgaattg

SEQ ID NO: 5576835 - DNA, 25 bp, Homo sapien
gtttcacctgtcagagccccatccc

SEQ ID NO: 5576836 - DNA, 25 bp, Homo sapien
aagcctgcaaaagagatcagaacct

SEQ ID NO: 5576837 - DNA, 25 bp, Homo sapien
tagaaagttcactgcatcccttggt

SEQ ID NO: 5576838 - DNA, 25 bp, Homo sapien
actgcatcccttggtgggaccctgg

SEQ ID NO: 5576839 - DNA, 25 bp, Homo sapien
gctgcttcagttgcacagaggagta

SEQ ID NO: 5576840 - DNA, 25 bp, Homo sapien
ttgagtgatgacattctgctcaccc

SEQ ID NO: 5576841 - DNA, 25 bp, Homo sapien
tgcacagaggagtatttattgctac

SEQ ID NO: 5576842 - DNA, 25 bp, Homo sapien
atcttttggaggagataagacagag

SEQ ID NO: 5576843 - DNA, 25 bp, Homo sapien
gcccttgaatgttttgcagactttc

SEQ ID NO: 5576844 - DNA, 25 bp, Homo sapien
gcaaaagagatcagaacctaccatg

SEQ ID NO: 5576845 - DNA, 25 bp, Homo sapien
aggagataagacagaggtcttgact

SEQ ID NO: 5576846 - DNA, 25 bp, Homo sapien
taaggaataaggaacgcacaaccta

SEQ ID NO: 5576847 - DNA, 25 bp, Homo sapien
aaaataaaatcagatgacaatatat

SEQ ID NO: 5576848 - DNA, 25 bp, Homo sapien
agcaaaaattaaacaagtgatgaga

SEQ ID NO: 5576849 - DNA, 25 bp, Homo sapien
aaaataaagatcactgaaatcacat

SEQ ID NO: 5576850 - DNA, 25 bp, Homo sapien
gatgagatagtagtatagggatata

SEQ ID NO: 5576851 - DNA, 25 bp, Homo sapien
tgaagatctgataaagcagtggttc

SEQ ID NO: 5576852 - DNA, 25 bp, Homo sapien
gtcccctctgaagatctgataaagc

SEQ ID NO: 5576853 - DNA, 25 bp, Homo sapien
attatcccaccatcaggcattagat

SEQ ID NO: 5576854 - DNA, 25 bp, Homo sapien
acaaaatctggagattagcagcaaa

SEQ ID NO: 5576855 - DNA, 25 bp, Homo sapien
gggaaaggtgatcgtttcaggataa

SEQ ID NO: 5576856 - DNA, 25 bp, Homo sapien
taaacaagtgatgagatagtagtat

SEQ ID NO: 5576857 - DNA, 25 bp, Homo sapien
attcaggccacctgcccatccatgt

SEQ ID NO: 5576858 - DNA, 25 bp, Homo sapien
aggtgctgggtctgaaccatagacc

SEQ ID NO: 5576859 - DNA, 25 bp, Homo sapien
gctaatgctcatggtcaggcctctg

SEQ ID NO: 5576860 - DNA, 25 bp, Homo sapien
ctcttaggagctaatgctcatggtc

SEQ ID NO: 5576861 - DNA, 25 bp, Homo sapien
tctcttgctggagtatggagctgat

SEQ ID NO: 5576862 - DNA, 25 bp, Homo sapien
taatcactgatcccacaatctaaac

SEQ ID NO: 5576863 - DNA, 25 bp, Homo sapien
gatgccaacatccctaagaattcag

SEQ ID NO: 5576864 - DNA, 25 bp, Homo sapien
tgtggctctcttgctggagtatgga

SEQ ID NO: 5576865 - DNA, 25 bp, Homo sapien
tctgaaccatagaccctggccaagt

SEQ ID NO: 5576866 - DNA, 25 bp, Homo sapien
ttacttgaagccgcaagtggaggaa

SEQ ID NO: 5576867 - DNA, 25 bp, Homo sapien
atccctaagaattcaggccacctgc

SEQ ID NO: 5576868 - DNA, 25 bp, Homo sapien
tgcttgattgtgaccttaaagttcc

SEQ ID NO: 5576869 - DNA, 25 bp, Homo sapien
tggagaaatattagatttggaaaac

SEQ ID NO: 5576870 - DNA, 25 bp, Homo sapien
tggatctgtcaggtagaacatttat

SEQ ID NO: 5576871 - DNA, 25 bp, Homo sapien
aaagcaactttggatctgtcaggta

SEQ ID NO: 5576872 - DNA, 25 bp, Homo sapien
catgagatttaattagtagacttgc

SEQ ID NO: 5576873 - DNA, 25 bp, Homo sapien
agctagaacttccccaaaaagcaac

SEQ ID NO: 5576874 - DNA, 25 bp, Homo sapien
tactggtgttgaaattgacccattc

SEQ ID NO: 5576875 - DNA, 25 bp, Homo sapien
tgacccattcaaaccaccgaaaatc

SEQ ID NO: 5576876 - DNA, 25 bp, Homo sapien
agatggccctatagaatatttggtt

SEQ ID NO: 5576877 - DNA, 25 bp, Homo sapien
accgaaaatccctgtagatggccct

SEQ ID NO: 5576878 - DNA, 25 bp, Homo sapien
tttgtaactatctggtgagcctgcc

SEQ ID NO: 5576879 - DNA, 25 bp, Homo sapien
ttaacctaaaccacatcttagagaa

SEQ ID NO: 5576880 - DNA, 25 bp, Homo sapien
ttctctaagatgtggtttaggttaa

SEQ ID NO: 5576881 - DNA, 25 bp, Homo sapien
aaaaattctacggatgctgctgcag

SEQ ID NO: 5576882 - DNA, 25 bp, Homo sapien
tttacaaaaaggcatgccaataaaa

SEQ ID NO: 5576883 - DNA, 25 bp, Homo sapien
aaaaagaataaccacacatgtcagc

SEQ ID NO: 5576884 - DNA, 25 bp, Homo sapien
gccttcccagtctggtattgggtgt

SEQ ID NO: 5576885 - DNA, 25 bp, Homo sapien
tcatcctagcagttagcagggtcac

SEQ ID NO: 5576886 - DNA, 25 bp, Homo sapien
agttagcagggtcactgaaagatag

SEQ ID NO: 5576887 - DNA, 25 bp, Homo sapien
tgcaaaactagtctggtggactgtg

SEQ ID NO: 5576888 - DNA, 25 bp, Homo sapien
gtcactgaaagataggccttcccag

SEQ ID NO: 5576889 - DNA, 25 bp, Homo sapien
ttgtgctgtttacaatgtagcctgt

SEQ ID NO: 5576890 - DNA, 25 bp, Homo sapien
ctagtctggtggactgtgaaattac

SEQ ID NO: 5576891 - DNA, 25 bp, Homo sapien
tattgggtgtagtacaaaaattcta

SEQ ID NO: 5576892 - DNA, 25 bp, Homo sapien
cccacggtctggtctggacctgatg

SEQ ID NO: 5576893 - DNA, 25 bp, Homo sapien
caacacacaccaaggctgagaaatc

SEQ ID NO: 5576894 - DNA, 25 bp, Homo sapien
tggactcaaccggtctgaatttccc

SEQ ID NO: 5576895 - DNA, 25 bp, Homo sapien
acgctgcctctgctaatgggtccct

SEQ ID NO: 5576896 - DNA, 25 bp, Homo sapien
ctgacaacttaagaggtctccgagt

SEQ ID NO: 5576897 - DNA, 25 bp, Homo sapien
cagagaagatctagtcacaacccct

SEQ ID NO: 5576898 - DNA, 25 bp, Homo sapien
caaaacactgggatggcttcctgac

SEQ ID NO: 5576899 - DNA, 25 bp, Homo sapien
ttgggaaacactgacccagccctta

SEQ ID NO: 5576900 - DNA, 25 bp, Homo sapien
ctgagcaagctggctaatcccacgt

SEQ ID NO: 5576901 - DNA, 25 bp, Homo sapien
ctctagtcattggcaaggaggattc

SEQ ID NO: 5576902 - DNA, 25 bp, Homo sapien
gatgggggccctgctctatattcaa

SEQ ID NO: 5576903 - DNA, 25 bp, Homo sapien
tagcaggcatgaacaaagaataaaa

SEQ ID NO: 5576904 - DNA, 25 bp, Homo sapien
aatctcaattgactcctggttcctg

SEQ ID NO: 5576905 - DNA, 25 bp, Homo sapien
tgggttatccatctgcaacatgggc

SEQ ID NO: 5576906 - DNA, 25 bp, Homo sapien
aaagaataaaacttgcctcacagag

SEQ ID NO: 5576907 - DNA, 25 bp, Homo sapien
gcaacatgggcacaattactggcac

SEQ ID NO: 5576908 - DNA, 25 bp, Homo sapien
tgctacacataagacacaagagtca

SEQ ID NO: 5576909 - DNA, 25 bp, Homo sapien
ataagacacaagagtcaaggtggaa

SEQ ID NO: 5576910 - DNA, 25 bp, Homo sapien
ttactggcacttagcaggcatgaac

SEQ ID NO: 5576911 - DNA, 25 bp, Homo sapien
ttgcctcacagagccaaagagattc

SEQ ID NO: 5576912 - DNA, 25 bp, Homo sapien
aaattatctgagttctgggttatcc

SEQ ID NO: 5576913 - DNA, 25 bp, Homo sapien
gtgtggggtctgaagttacaaatct

SEQ ID NO: 5576914 - DNA, 25 bp, Homo sapien
agcaagttgtggctacaggtaacca

SEQ ID NO: 5576915 - DNA, 25 bp, Homo sapien
tctataataatgagagagctcttta

SEQ ID NO: 5576916 - DNA, 25 bp, Homo sapien
aagtgtgtgtaaattacaaagcagc

SEQ ID NO: 5576917 - DNA, 25 bp, Homo sapien
gggaaaatcaccttgaaagtgtgtg

SEQ ID NO: 5576918 - DNA, 25 bp, Homo sapien
tctttaaaggaacagcaagttgtgg

SEQ ID NO: 5576919 - DNA, 25 bp, Homo sapien
ttccttgagtcatatgtgtacatct

SEQ ID NO: 5576920 - DNA, 25 bp, Homo sapien
tacaaagcagctagctctataataa

SEQ ID NO: 5576921 - DNA, 25 bp, Homo sapien
cactactcagtgggattcttaattt

SEQ ID NO: 5576922 - DNA, 25 bp, Homo sapien
tgagagagctctttaaaggaacagc

SEQ ID NO: 5576923 - DNA, 25 bp, Homo sapien
ctacaggtaaccaacaggaaaccaa

SEQ ID NO: 5576924 - DNA, 25 bp, Homo sapien
ttttcgtcagaaaactgcttttata

SEQ ID NO: 5576925 - DNA, 25 bp, Homo sapien
ctggcatttgaaaagtatcgccttt

SEQ ID NO: 5576926 - DNA, 25 bp, Homo sapien
agctgaggaagtctggcatttgaaa

SEQ ID NO: 5576927 - DNA, 25 bp, Homo sapien
ttttacggctgagtagcaggtgaaa

SEQ ID NO: 5576928 - DNA, 25 bp, Homo sapien
gaagtatagcacaagctgaggaagt

SEQ ID NO: 5576929 - DNA, 25 bp, Homo sapien
gattattctacgagatgacaaactc

SEQ ID NO: 5576930 - DNA, 25 bp, Homo sapien
aaacagaaactgctaattcgattaa

SEQ ID NO: 5576931 - DNA, 25 bp, Homo sapien
aaattcctgcctgtaaaagaaagaa

SEQ ID NO: 5576932 - DNA, 25 bp, Homo sapien
actgcctctaatccaaaaaacctct

SEQ ID NO: 5576933 - DNA, 25 bp, Homo sapien
gacaaactctcaatatgacctcctc

SEQ ID NO: 5576934 - DNA, 25 bp, Homo sapien
agtatcgcctttaaacatgcacgta

SEQ ID NO: 5576935 - DNA, 25 bp, Homo sapien
acatgcacgtataaattcctgcctg

SEQ ID NO: 5576936 - DNA, 25 bp, Homo sapien
taggagaggtcttgaccatggatgg

SEQ ID NO: 5576937 - DNA, 25 bp, Homo sapien
ggagaggtcttgaccatggatggtg

SEQ ID NO: 5576938 - DNA, 25 bp, Homo sapien
tgggactgccccaaccctctgggaa

SEQ ID NO: 5576939 - DNA, 25 bp, Homo sapien
gatggtggttagctctgagctctgg

SEQ ID NO: 5576940 - DNA, 25 bp, Homo sapien
gactgccccaaccctctgggaactc

SEQ ID NO: 5576941 - DNA, 25 bp, Homo sapien
agctaggagaggtcttgaccatgga

SEQ ID NO: 5576942 - DNA, 25 bp, Homo sapien
tcttgaccatggatggtggttagct

SEQ ID NO: 5576943 - DNA, 25 bp, Homo sapien
gaggtcttgaccatggatggtggtt

SEQ ID NO: 5576944 - DNA, 25 bp, Homo sapien
gtcatgggactgccccaaccctctg

SEQ ID NO: 5576945 - DNA, 25 bp, Homo sapien
gccaggcttacagggcttctgggta

SEQ ID NO: 5576946 - DNA, 25 bp, Homo sapien
aaccctctgggaactcataggctgg

SEQ ID NO: 5576947 - DNA, 25 bp, Homo sapien
ccaaaatgtattgcaaacccatctc

SEQ ID NO: 5576948 - DNA, 25 bp, Homo sapien
ttcctatctgagcttgcccctggtg

SEQ ID NO: 5576949 - DNA, 25 bp, Homo sapien
atccctacataggtgcctcttcctc

SEQ ID NO: 5576950 - DNA, 25 bp, Homo sapien
ccaggcaatgatacttgggacttcc

SEQ ID NO: 5576951 - DNA, 25 bp, Homo sapien
ttaagatgattggcatgatagtttc

SEQ ID NO: 5576952 - DNA, 25 bp, Homo sapien
aaaacctgaaaccaggcaatgatac

SEQ ID NO: 5576953 - DNA, 25 bp, Homo sapien
tttacctcaaaaaatggcatcacta

SEQ ID NO: 5576954 - DNA, 25 bp, Homo sapien
agggacagaaaacatcagtggttgt

SEQ ID NO: 5576955 - DNA, 25 bp, Homo sapien
tcagtggttgtctgtagatgtagag

SEQ ID NO: 5576956 - DNA, 25 bp, Homo sapien
cacaccccacccacatccaatccat

SEQ ID NO: 5576957 - DNA, 25 bp, Homo sapien
ctacaaagggcatcaggaaactttt

SEQ ID NO: 5576958 - DNA, 25 bp, Homo sapien
cctgatattctgatagcacccctgg

SEQ ID NO: 5576959 - DNA, 25 bp, Homo sapien
gatcttgcaagagacaaatgttttc

SEQ ID NO: 5576960 - DNA, 25 bp, Homo sapien
tgggaaacattggccagtcttgaca

SEQ ID NO: 5576961 - DNA, 25 bp, Homo sapien
ttgcaagagacaaatgttttcaatc

SEQ ID NO: 5576962 - DNA, 25 bp, Homo sapien
ttggccagtcttgacaagccctttc

SEQ ID NO: 5576963 - DNA, 25 bp, Homo sapien
tggatggatgaaagtaatcatttac

SEQ ID NO: 5576964 - DNA, 25 bp, Homo sapien
gcaaagtagggtgatcttgcaagag

SEQ ID NO: 5576965 - DNA, 25 bp, Homo sapien
gaagtttaagacagcttccactgtg

SEQ ID NO: 5576966 - DNA, 25 bp, Homo sapien
ttataatggatggatgaaagtaatc

SEQ ID NO: 5576967 - DNA, 25 bp, Homo sapien
atttcctgggaaacattggccagtc

SEQ ID NO: 5576968 - DNA, 25 bp, Homo sapien
accaacttgcaaagtagggtgatct

SEQ ID NO: 5576969 - DNA, 25 bp, Homo sapien
catggaaaaacatgtgttcaatcac

SEQ ID NO: 5576970 - DNA, 25 bp, Homo sapien
tgttcaatcacgaagtttaactgga

SEQ ID NO: 5576971 - DNA, 25 bp, Homo sapien
ctcattgacacaacactctccagtc

SEQ ID NO: 5576972 - DNA, 25 bp, Homo sapien
ttctacaggacatactgcctctaat

SEQ ID NO: 5576973 - DNA, 25 bp, Homo sapien
ccttactaggaaggaacatggaaaa

SEQ ID NO: 5576974 - DNA, 25 bp, Homo sapien
ccagtcacatgtattcggctttccc

SEQ ID NO: 5576975 - DNA, 25 bp, Homo sapien
ccttatgcctgtggatttatatatt

SEQ ID NO: 5576976 - DNA, 25 bp, Homo sapien
aacaggttctggagtatgaactgtc

SEQ ID NO: 5576977 - DNA, 25 bp, Homo sapien
gtcatgtttcatagtagcagtatct

SEQ ID NO: 5576978 - DNA, 25 bp, Homo sapien
cactctccagtcacatgtattcggc

SEQ ID NO: 5576979 - DNA, 25 bp, Homo sapien
attcttaaacaggttctggagtatg

SEQ ID NO: 5576980 - DNA, 25 bp, Homo sapien
acatagaagtcatgaaaaagaagat

SEQ ID NO: 5576981 - DNA, 25 bp, Homo sapien
tttggagagttacctgcgttgtctc

SEQ ID NO: 5576982 - DNA, 25 bp, Homo sapien
atgagattttagtgccagttctttc

SEQ ID NO: 5576983 - DNA, 25 bp, Homo sapien
agatatggaatatcacatagaagtc

SEQ ID NO: 5576984 - DNA, 25 bp, Homo sapien
cttgcggcttcccaggagattccaa

SEQ ID NO: 5576985 - DNA, 25 bp, Homo sapien
ttccaagaagattactgaaagcatt

SEQ ID NO: 5576986 - DNA, 25 bp, Homo sapien
gtctcttggacatgtatctgctttc

SEQ ID NO: 5576987 - DNA, 25 bp, Homo sapien
tgaaagcattggagtaaatgacttt

SEQ ID NO: 5576988 - DNA, 25 bp, Homo sapien
ctaataagaacaaccataagtcctg

SEQ ID NO: 5576989 - DNA, 25 bp, Homo sapien
ggagattccaagagatgcaaaccat

SEQ ID NO: 5576990 - DNA, 25 bp, Homo sapien
tggatctggatcagaattgttcaga

SEQ ID NO: 5576991 - DNA, 25 bp, Homo sapien
ggcgggcggcgaccgtcgggcagtg

SEQ ID NO: 5576992 - DNA, 25 bp, Homo sapien
cactgcccgacggtcgccgcccgcc

SEQ ID NO: 5576993 - DNA, 25 bp, Homo sapien
gcggcgggcggcgaccgtcgggcag

SEQ ID NO: 5576994 - DNA, 25 bp, Homo sapien
ctgcccgacggtcgccgcccgccgc

SEQ ID NO: 5576995 - DNA, 25 bp, Homo sapien
gggcggcgaccgtcgggcagtggta

SEQ ID NO: 5576996 - DNA, 25 bp, Homo sapien
taccactgcccgacggtcgccgccc

SEQ ID NO: 5576997 - DNA, 25 bp, Homo sapien
agccactgtggtcagaactgttcac

SEQ ID NO: 5576998 - DNA, 25 bp, Homo sapien
ctttgtcacatgggcgtgatggtca

SEQ ID NO: 5576999 - DNA, 25 bp, Homo sapien
ttgtcctctgagccggtgtgagtta

SEQ ID NO: 5577000 - DNA, 25 bp, Homo sapien
ggtcagaactgttcactgtggtgac

SEQ ID NO: 5577001 - DNA, 25 bp, Homo sapien
agttaaatttaacgaagcaggtgaa

SEQ ID NO: 5577002 - DNA, 25 bp, Homo sapien
gtcctctgagccggtgtgagttaaa

SEQ ID NO: 5577003 - DNA, 25 bp, Homo sapien
tctcccagcatctgtgctgtttacc

SEQ ID NO: 5577004 - DNA, 25 bp, Homo sapien
ctctgagccggtgtgagttaaattt

SEQ ID NO: 5577005 - DNA, 25 bp, Homo sapien
tgtggtcagaactgttcactgtggt

SEQ ID NO: 5577006 - DNA, 25 bp, Homo sapien
gacatcctttgtcacatgggcgtga

SEQ ID NO: 5577007 - DNA, 25 bp, Homo sapien
tcctttgtcacatgggcgtgatggt

SEQ ID NO: 5577008 - DNA, 25 bp, Homo sapien
tggcacaattatgtcttcctctgac

SEQ ID NO: 5577009 - DNA, 25 bp, Homo sapien
cattccacggtttatgaaacaattt

SEQ ID NO: 5577010 - DNA, 25 bp, Homo sapien
tcctttgtgctgaatggctgacgtc

SEQ ID NO: 5577011 - DNA, 25 bp, Homo sapien
tcaagaaggaaatggcacaattatg

SEQ ID NO: 5577012 - DNA, 25 bp, Homo sapien
aggagaatttggaagccttgatctt

SEQ ID NO: 5577013 - DNA, 25 bp, Homo sapien
ggaagccttgatcttctgaggtgct

SEQ ID NO: 5577014 - DNA, 25 bp, Homo sapien
tgacaacttgcaaatgtttgtaaac

SEQ ID NO: 5577015 - DNA, 25 bp, Homo sapien
cctttgtgctgaatggctgacgtct

SEQ ID NO: 5577016 - DNA, 25 bp, Homo sapien
caaggcacgtcctgtttcattccac

SEQ ID NO: 5577017 - DNA, 25 bp, Homo sapien
aagaaggtaacagaagccctttgat

SEQ ID NO: 5577018 - DNA, 25 bp, Homo sapien
cttcaagaaggaaatggcacaatta

SEQ ID NO: 5577019 - DNA, 25 bp, Homo sapien
ttagagccagaagtttaattaccac

SEQ ID NO: 5577020 - DNA, 25 bp, Homo sapien
aatacagcatagatcagtgagtgag

SEQ ID NO: 5577021 - DNA, 25 bp, Homo sapien
caacatttgtcacgcctcaggcctt

SEQ ID NO: 5577022 - DNA, 25 bp, Homo sapien
tagaggaacaagtatttggtgtagt

SEQ ID NO: 5577023 - DNA, 25 bp, Homo sapien
cactgtgaaatcccattgacaacct

SEQ ID NO: 5577024 - DNA, 25 bp, Homo sapien
acaacctattctgggctttagagcc

SEQ ID NO: 5577025 - DNA, 25 bp, Homo sapien
atccttgcttagtgtcagggagcca

SEQ ID NO: 5577026 - DNA, 25 bp, Homo sapien
gatttcagaattgccaggtcttccc

SEQ ID NO: 5577027 - DNA, 25 bp, Homo sapien
acctattgagcgagtttgatttgtc

SEQ ID NO: 5577028 - DNA, 25 bp, Homo sapien
actagaaactaagcagtcatgatcc

SEQ ID NO: 5577029 - DNA, 25 bp, Homo sapien
tcagtgagtgagatcaacatttgtc

SEQ ID NO: 5577030 - DNA, 25 bp, Homo sapien
acatcctatggaactggccagggag

SEQ ID NO: 5577031 - DNA, 25 bp, Homo sapien
gtgtgtgtccagcagagactcaaag

SEQ ID NO: 5577032 - DNA, 25 bp, Homo sapien
gccagggagtgtattcagctttctc

SEQ ID NO: 5577033 - DNA, 25 bp, Homo sapien
gggtctggggatttatgatgagaaa

SEQ ID NO: 5577034 - DNA, 25 bp, Homo sapien
gatttatgatgagaaaacggaaggt

SEQ ID NO: 5577035 - DNA, 25 bp, Homo sapien
atgggtggcaatattaacaactgtg

SEQ ID NO: 5577036 - DNA, 25 bp, Homo sapien
agtagctggaatcggaacatcctat

SEQ ID NO: 5577037 - DNA, 25 bp, Homo sapien
cgtcggtcaccactgcgagtgttca

SEQ ID NO: 5577038 - DNA, 25 bp, Homo sapien
aaacaaagaccaactcagtgggaac

SEQ ID NO: 5577039 - DNA, 25 bp, Homo sapien
caccactgcgagtgttcagcacagg

SEQ ID NO: 5577040 - DNA, 25 bp, Homo sapien
accaactcagtgggaacacacagag

SEQ ID NO: 5577041 - DNA, 25 bp, Homo sapien
tctcaaagcatcccctctttggctc

SEQ ID NO: 5577042 - DNA, 25 bp, Homo sapien
tgtcaagatccagaatctcaaagca

SEQ ID NO: 5577043 - DNA, 25 bp, Homo sapien
gcagcctccgcattagttccatagc

SEQ ID NO: 5577044 - DNA, 25 bp, Homo sapien
ggtggacgtcttatcaggacggagg

SEQ ID NO: 5577045 - DNA, 25 bp, Homo sapien
ttgactggcttctaagatgggcatg

SEQ ID NO: 5577046 - DNA, 25 bp, Homo sapien
gcacagcaagcagcctccgcattag

SEQ ID NO: 5577047 - DNA, 25 bp, Homo sapien
tcttggggacagtctgtcttgttgc

SEQ ID NO: 5577048 - DNA, 25 bp, Homo sapien
ctgtccagtgacatctagggaagcc

SEQ ID NO: 5577049 - DNA, 25 bp, Homo sapien
gtctgtcttgttgcaaagccagcac

SEQ ID NO: 5577050 - DNA, 25 bp, Homo sapien
ttagttccatagcttgactggcttc

SEQ ID NO: 5577051 - DNA, 25 bp, Homo sapien
gatgggcatgtcaagatccagaatc

SEQ ID NO: 5577052 - DNA, 25 bp, Homo sapien
aagaaggcagtgattttccaggtaa

SEQ ID NO: 5577053 - DNA, 25 bp, Homo sapien
attttaagaaggcagtgattttcca

SEQ ID NO: 5577054 - DNA, 25 bp, Homo sapien
cattttataaaatcagcagccagga

SEQ ID NO: 5577055 - DNA, 25 bp, Homo sapien
ctgcccctccagttctagctaaatc

SEQ ID NO: 5577056 - DNA, 25 bp, Homo sapien
ataaaatcagcagccaggattgttc

SEQ ID NO: 5577057 - DNA, 25 bp, Homo sapien
cacatgtcacaattaaaactgagaa

SEQ ID NO: 5577058 - DNA, 25 bp, Homo sapien
tcttaggactgtgataaaatgtttc

SEQ ID NO: 5577059 - DNA, 25 bp, Homo sapien
agttctagctaaatcccttctgttc

SEQ ID NO: 5577060 - DNA, 25 bp, Homo sapien
tccaggtaactaaagcacatgtcac

SEQ ID NO: 5577061 - DNA, 25 bp, Homo sapien
gcttctcttaggactgtgataaaat

SEQ ID NO: 5577062 - DNA, 25 bp, Homo sapien
tcagcagccaggattgttctatttg

SEQ ID NO: 5577063 - DNA, 25 bp, Homo sapien
gacaggcacagcttctgagctaagc

SEQ ID NO: 5577064 - DNA, 25 bp, Homo sapien
agactcgacatcagacgaagagaga

SEQ ID NO: 5577065 - DNA, 25 bp, Homo sapien
tcgcgggacacctcccgcccatgtg

SEQ ID NO: 5577066 - DNA, 25 bp, Homo sapien
ctgtcttcaaagcattaggttgtag

SEQ ID NO: 5577067 - DNA, 25 bp, Homo sapien
caaagcattaggttgtagactcgac

SEQ ID NO: 5577068 - DNA, 25 bp, Homo sapien
cgggacacctcccgcccatgtggac

SEQ ID NO: 5577069 - DNA, 25 bp, Homo sapien
ctgagctaagcttgcagcttgtgta

SEQ ID NO: 5577070 - DNA, 25 bp, Homo sapien
tggctggaacctaatcaaaggtatt

SEQ ID NO: 5577071 - DNA, 25 bp, Homo sapien
ttaggttgtagactcgacatcagac

SEQ ID NO: 5577072 - DNA, 25 bp, Homo sapien
gacggggaagtcagtctgtcttcaa

SEQ ID NO: 5577073 - DNA, 25 bp, Homo sapien
aggtttggctggaacctaatcaaag

SEQ ID NO: 5577074 - DNA, 25 bp, Homo sapien
gcagggctgaactggcaccctgaag

SEQ ID NO: 5577075 - DNA, 25 bp, Homo sapien
gtccctggcctgcacagaaagtgaa

SEQ ID NO: 5577076 - DNA, 25 bp, Homo sapien
acaagaacagaatggtgtataccaa

SEQ ID NO: 5577077 - DNA, 25 bp, Homo sapien
ttactgagcatctgccatagggcac

SEQ ID NO: 5577078 - DNA, 25 bp, Homo sapien
agggggcttagtgtctgcctgtgaa

SEQ ID NO: 5577079 - DNA, 25 bp, Homo sapien
ggtgtataccaagcaagataaagtg

SEQ ID NO: 5577080 - DNA, 25 bp, Homo sapien
agataaagtgtatggaagtgacaga

SEQ ID NO: 5577081 - DNA, 25 bp, Homo sapien
gctgggatttaaacagctccagtcc

SEQ ID NO: 5577082 - DNA, 25 bp, Homo sapien
agggcctcaggtcccacaccaaaga

SEQ ID NO: 5577083 - DNA, 25 bp, Homo sapien
tggaatctatcccaaagagatgcca

SEQ ID NO: 5577084 - DNA, 25 bp, Homo sapien
tgcagcaagtactcacagaattcca

SEQ ID NO: 5577085 - DNA, 25 bp, Homo sapien
gaggcaaggacacagattcccatag

SEQ ID NO: 5577086 - DNA, 25 bp, Homo sapien
taagatacactggaatgaacctatt

SEQ ID NO: 5577087 - DNA, 25 bp, Homo sapien
atttaatggactgactcccagagca

SEQ ID NO: 5577088 - DNA, 25 bp, Homo sapien
tggctgcacattcctggataacatc

SEQ ID NO: 5577089 - DNA, 25 bp, Homo sapien
tcagaagctatcaaaaatgacaggt

SEQ ID NO: 5577090 - DNA, 25 bp, Homo sapien
cccagagcccaaaaataacaggtac

SEQ ID NO: 5577091 - DNA, 25 bp, Homo sapien
ggccatccacccaacccccagagcc

SEQ ID NO: 5577092 - DNA, 25 bp, Homo sapien
aacaggtacaggggcttattatttc

SEQ ID NO: 5577093 - DNA, 25 bp, Homo sapien
aataagagaagactgattcttgccc

SEQ ID NO: 5577094 - DNA, 25 bp, Homo sapien
aaaatgacaggtttgctttggctct

SEQ ID NO: 5577095 - DNA, 25 bp, Homo sapien
ttaacagcagcttgaaacactatta

SEQ ID NO: 5577096 - DNA, 25 bp, Homo sapien
aaagcaattcacagggagatgatga

SEQ ID NO: 5577097 - DNA, 25 bp, Homo sapien
gacctcaagtcctgcagcctttgtc

SEQ ID NO: 5577098 - DNA, 25 bp, Homo sapien
tccagtggttctccagcgtgcatca

SEQ ID NO: 5577099 - DNA, 25 bp, Homo sapien
catcagaatcacctgcagcgtttgt

SEQ ID NO: 5577100 - DNA, 25 bp, Homo sapien
ataagttcccaggtgagatcaatgc

SEQ ID NO: 5577101 - DNA, 25 bp, Homo sapien
actttctaattcagtgggcctaggg

SEQ ID NO: 5577102 - DNA, 25 bp, Homo sapien
agtatacgccaagctgcctttgctc

SEQ ID NO: 5577103 - DNA, 25 bp, Homo sapien
ggccagctgcattccagacatggac

SEQ ID NO: 5577104 - DNA, 25 bp, Homo sapien
aatgctgtgggtcctggactgtaca

SEQ ID NO: 5577105 - DNA, 25 bp, Homo sapien
ttgggggtcaaatggactgacctca

SEQ ID NO: 5577106 - DNA, 25 bp, Homo sapien
gacatggacatcgtaacaaagcaat

SEQ ID NO: 5577107 - DNA, 25 bp, Homo sapien
gtcttaaagttggatttgcacagca

SEQ ID NO: 5577108 - DNA, 25 bp, Homo sapien
cccgctgatgcagcagacatagggg

SEQ ID NO: 5577109 - DNA, 25 bp, Homo sapien
gggaagggattcaagcacttctttg

SEQ ID NO: 5577110 - DNA, 25 bp, Homo sapien
gccaccacgccagctccccgctgat

SEQ ID NO: 5577111 - DNA, 25 bp, Homo sapien
gttggccagcaacagactctctgca

SEQ ID NO: 5577112 - DNA, 25 bp, Homo sapien
tgggctgtgcattcactcgtgtggc

SEQ ID NO: 5577113 - DNA, 25 bp, Homo sapien
tatggagagtctcaacctcacatct

SEQ ID NO: 5577114 - DNA, 25 bp, Homo sapien
cctagttgaagccatgaaacatgtc

SEQ ID NO: 5577115 - DNA, 25 bp, Homo sapien
attcactcgtgtggcttggaaggga

SEQ ID NO: 5577116 - DNA, 25 bp, Homo sapien
aggggagctcacgctggtttttttc

SEQ ID NO: 5577117 - DNA, 25 bp, Homo sapien
gtcctggaaataggtcctgagagag

SEQ ID NO: 5577118 - DNA, 25 bp, Homo sapien
gttggagaggttttgaactcgtgag

SEQ ID NO: 5577119 - DNA, 25 bp, Homo sapien
gtcggagagctggcaccagcttcga

SEQ ID NO: 5577120 - DNA, 25 bp, Homo sapien
gtttgattcaaacgggtgagttgcc

SEQ ID NO: 5577121 - DNA, 25 bp, Homo sapien
gcccccctcggccttctgcattctc

SEQ ID NO: 5577122 - DNA, 25 bp, Homo sapien
ttttgaactcgtgagaagatgaggc

SEQ ID NO: 5577123 - DNA, 25 bp, Homo sapien
gggaacatgtctttagactgagctc

SEQ ID NO: 5577124 - DNA, 25 bp, Homo sapien
aagatgaggcttcggtaatatgact

SEQ ID NO: 5577125 - DNA, 25 bp, Homo sapien
aatgaaaccttcagcttgggaacat

SEQ ID NO: 5577126 - DNA, 25 bp, Homo sapien
cttaaggaaaacctacatctgggta

SEQ ID NO: 5577127 - DNA, 25 bp, Homo sapien
agcttcgattctttggtgggacctt

SEQ ID NO: 5577128 - DNA, 25 bp, Homo sapien
ggtttctcctgagaggttggagagg

SEQ ID NO: 5577129 - DNA, 25 bp, Homo sapien
gattttggtgcatccatggtgaatc

SEQ ID NO: 5577130 - DNA, 25 bp, Homo sapien
aagaaagtattcaaaagtcagagat

SEQ ID NO: 5577131 - DNA, 25 bp, Homo sapien
ttctgtttgtctctgctggtgtatg

SEQ ID NO: 5577132 - DNA, 25 bp, Homo sapien
aaaagtcagagattacactagagtt

SEQ ID NO: 5577133 - DNA, 25 bp, Homo sapien
tctgctggtgtatgactacagcttt

SEQ ID NO: 5577134 - DNA, 25 bp, Homo sapien
ggtgcatccatggtgaatcaacttc

SEQ ID NO: 5577135 - DNA, 25 bp, Homo sapien
aagccactcttacaaaagtctctca

SEQ ID NO: 5577136 - DNA, 25 bp, Homo sapien
aaaagtctctcaatcgaggtctatc

SEQ ID NO: 5577137 - DNA, 25 bp, Homo sapien
ttcccaacttgcatatcagtctatc

SEQ ID NO: 5577138 - DNA, 25 bp, Homo sapien
gagctttcactccaagtcacttaac

SEQ ID NO: 5577139 - DNA, 25 bp, Homo sapien
agattacactagagtttgagctttc

SEQ ID NO: 5577140 - DNA, 25 bp, Homo sapien
ctggctcttggtagacatatctcct

SEQ ID NO: 5577141 - DNA, 25 bp, Homo sapien
gtggagattggctaacagaccttcc

SEQ ID NO: 5577142 - DNA, 25 bp, Homo sapien
ggtaacagtaatttatccaggtata

SEQ ID NO: 5577143 - DNA, 25 bp, Homo sapien
acctttactgagacattccagagca

SEQ ID NO: 5577144 - DNA, 25 bp, Homo sapien
attccagagcattaaacgtggcttt

SEQ ID NO: 5577145 - DNA, 25 bp, Homo sapien
aacgtggcttttacaaaactgattc

SEQ ID NO: 5577146 - DNA, 25 bp, Homo sapien
ggactgtgcttcaagtggagattgg

SEQ ID NO: 5577147 - DNA, 25 bp, Homo sapien
aacatgcatgatagcaaacacaact

SEQ ID NO: 5577148 - DNA, 25 bp, Homo sapien
tggacatggcagccctcaccaagca

SEQ ID NO: 5577149 - DNA, 25 bp, Homo sapien
cctcaccaagcattaggaggggact

SEQ ID NO: 5577150 - DNA, 25 bp, Homo sapien
catatctcctaggtggaggcagcaa

SEQ ID NO: 5577151 - DNA, 25 bp, Homo sapien
ccatgggatgaaaaattcgagatgt

SEQ ID NO: 5577152 - DNA, 25 bp, Homo sapien
gttcccttgagtcagagcatggaga

SEQ ID NO: 5577153 - DNA, 25 bp, Homo sapien
ctggaataaacacacacgtagctgc

SEQ ID NO: 5577154 - DNA, 25 bp, Homo sapien
gtggcctgtgactgatgcctggccc

SEQ ID NO: 5577155 - DNA, 25 bp, Homo sapien
cgagaccaggaacacaggttccctt

SEQ ID NO: 5577156 - DNA, 25 bp, Homo sapien
gagcagccgtcccacagcctggctg

SEQ ID NO: 5577157 - DNA, 25 bp, Homo sapien
ccatgagagtttgacaaccactgag

SEQ ID NO: 5577158 - DNA, 25 bp, Homo sapien
agtcaactgtggcagccctcaccct

SEQ ID NO: 5577159 - DNA, 25 bp, Homo sapien
gtcaactagagcccttgctgtggcc

SEQ ID NO: 5577160 - DNA, 25 bp, Homo sapien
gggacctgcaagatgcaactcctgt

SEQ ID NO: 5577161 - DNA, 25 bp, Homo sapien
agagagctcacctgaccgtcaacta

SEQ ID NO: 5577162 - DNA, 25 bp, Homo sapien
aatctctaaagatgcttccacattc

SEQ ID NO: 5577163 - DNA, 25 bp, Homo sapien
aacactgagaaaaatggtattatgg

SEQ ID NO: 5577164 - DNA, 25 bp, Homo sapien
gatgcttccacattctagaaatgcc

SEQ ID NO: 5577165 - DNA, 25 bp, Homo sapien
ttaatgtatagaaaaggaatgaact

SEQ ID NO: 5577166 - DNA, 25 bp, Homo sapien
tatctatattaaaccaaaaggtata

SEQ ID NO: 5577167 - DNA, 25 bp, Homo sapien
ttcagcttctcttatgggtaattgc

SEQ ID NO: 5577168 - DNA, 25 bp, Homo sapien
gagatctattactgtgcttgttatt

SEQ ID NO: 5577169 - DNA, 25 bp, Homo sapien
atgactgatctaccttaatgtatag

SEQ ID NO: 5577170 - DNA, 25 bp, Homo sapien
tactgtgcttgttattgaaattcta

SEQ ID NO: 5577171 - DNA, 25 bp, Homo sapien
tctataaaagctatagctatctaac

SEQ ID NO: 5577172 - DNA, 25 bp, Homo sapien
aaaaacactgagaaaaatggtatta

SEQ ID NO: 5577173 - DNA, 25 bp, Homo sapien
actcagctaatgaggaattggggaa

SEQ ID NO: 5577174 - DNA, 25 bp, Homo sapien
tgtattatgggtggctgcaacaaaa

SEQ ID NO: 5577175 - DNA, 25 bp, Homo sapien
ctagggccataagtcaaatgctcag

SEQ ID NO: 5577176 - DNA, 25 bp, Homo sapien
acctaagtgcagtcactagggccat

SEQ ID NO: 5577177 - DNA, 25 bp, Homo sapien
tgcccaggaagactataaccccgta

SEQ ID NO: 5577178 - DNA, 25 bp, Homo sapien
agcaaaaagaccctaaagaacatac

SEQ ID NO: 5577179 - DNA, 25 bp, Homo sapien
ttaagcaggccacatggaaacaaag

SEQ ID NO: 5577180 - DNA, 25 bp, Homo sapien
ggacttgcacactagggaagaaata

SEQ ID NO: 5577181 - DNA, 25 bp, Homo sapien
tactggtcagggccccctcaatgac

SEQ ID NO: 5577182 - DNA, 25 bp, Homo sapien
gagtcttgagacagtcgccatgtat

SEQ ID NO: 5577183 - DNA, 25 bp, Homo sapien
aaagaagcaaaatatactaagccac

SEQ ID NO: 5577184 - DNA, 25 bp, Homo sapien
tgttaatggaaatggcaatgaaagc

SEQ ID NO: 5577185 - DNA, 25 bp, Homo sapien
gtgagttagacctgggatagatttc

SEQ ID NO: 5577186 - DNA, 25 bp, Homo sapien
gggcatcacagaagatcaggccttc

SEQ ID NO: 5577187 - DNA, 25 bp, Homo sapien
catgatctttggtgacagttggact

SEQ ID NO: 5577188 - DNA, 25 bp, Homo sapien
ctgagcctcagggtcctctgttgtc

SEQ ID NO: 5577189 - DNA, 25 bp, Homo sapien
tttcctggttgagtggcacaagtca

SEQ ID NO: 5577190 - DNA, 25 bp, Homo sapien
agcagattatttaggcactgggggc

SEQ ID NO: 5577191 - DNA, 25 bp, Homo sapien
agggagtgttgctagagcagattat

SEQ ID NO: 5577192 - DNA, 25 bp, Homo sapien
acagtgccttctgctgaggtgagtt

SEQ ID NO: 5577193 - DNA, 25 bp, Homo sapien
gtcatttgaggacagagtttggagc

SEQ ID NO: 5577194 - DNA, 25 bp, Homo sapien
cctttttcaggggattgcagaggtt

SEQ ID NO: 5577195 - DNA, 25 bp, Homo sapien
gagtggaagcatgtgtaacatacat

SEQ ID NO: 5577196 - DNA, 25 bp, Homo sapien
taacatacatgaaaccaactaggtg

SEQ ID NO: 5577197 - DNA, 25 bp, Homo sapien
gggacagagagaaattaggtactgt

SEQ ID NO: 5577198 - DNA, 25 bp, Homo sapien
tctcatggtgtgagcaccttgtcaa

SEQ ID NO: 5577199 - DNA, 25 bp, Homo sapien
gctagggagtgatcctgctatgtgc

SEQ ID NO: 5577200 - DNA, 25 bp, Homo sapien
acagcaagagatcatagataaaagc

SEQ ID NO: 5577201 - DNA, 25 bp, Homo sapien
cttggtggttctcaagcaagatggc

SEQ ID NO: 5577202 - DNA, 25 bp, Homo sapien
gctgatgcctcttcccaaggtagcc

SEQ ID NO: 5577203 - DNA, 25 bp, Homo sapien
caactaggtgtgctcagagaagcta

SEQ ID NO: 5577204 - DNA, 25 bp, Homo sapien
agaaattaggtactgtggagtggaa

SEQ ID NO: 5577205 - DNA, 25 bp, Homo sapien
ggtgagatcaaggtgcatcttccct

SEQ ID NO: 5577206 - DNA, 25 bp, Homo sapien
ctgaagatacaatagtgaataaaac

SEQ ID NO: 5577207 - DNA, 25 bp, Homo sapien
gctgaagcaatgagacatttgtcac

SEQ ID NO: 5577208 - DNA, 25 bp, Homo sapien
tgtcaaagtggctggccataaacgc

SEQ ID NO: 5577209 - DNA, 25 bp, Homo sapien
tgaataaaacagacaggatctcttt

SEQ ID NO: 5577210 - DNA, 25 bp, Homo sapien
gtgcgatgtactttgggagaatata

SEQ ID NO: 5577211 - DNA, 25 bp, Homo sapien
ctcaggagtggtgtaaacattcagt

SEQ ID NO: 5577212 - DNA, 25 bp, Homo sapien
ccataaacgctccagtaccacattc

SEQ ID NO: 5577213 - DNA, 25 bp, Homo sapien
gagcactctagatgaaggcgactta

SEQ ID NO: 5577214 - DNA, 25 bp, Homo sapien
aaaaaatattaagtagtgcgatgta

SEQ ID NO: 5577215 - DNA, 25 bp, Homo sapien
aattgaatatctaagtgccacgtac

SEQ ID NO: 5577216 - DNA, 25 bp, Homo sapien
attctagtagaagagacaaaaaata

SEQ ID NO: 5577217 - DNA, 25 bp, Homo sapien
ggtggtgattaggcacaaccttgct

SEQ ID NO: 5577218 - DNA, 25 bp, Homo sapien
atcacttagtgtctcgaattcaaat

SEQ ID NO: 5577219 - DNA, 25 bp, Homo sapien
tccctactggtaaacaccaaggctc

SEQ ID NO: 5577220 - DNA, 25 bp, Homo sapien
tttgaacaacctgtcatttccctac

SEQ ID NO: 5577221 - DNA, 25 bp, Homo sapien
attgcttatgcaaagctacagcttc

SEQ ID NO: 5577222 - DNA, 25 bp, Homo sapien
tgatgccagcttccaaccagaactt

SEQ ID NO: 5577223 - DNA, 25 bp, Homo sapien
gaagttttcatggtggtgattaggc

SEQ ID NO: 5577224 - DNA, 25 bp, Homo sapien
tagagaaactaagaacagttctaga

SEQ ID NO: 5577225 - DNA, 25 bp, Homo sapien
tgaagaatggaaatccctgtaacaa

SEQ ID NO: 5577226 - DNA, 25 bp, Homo sapien
attgctaaatcattcagtctcagtt

SEQ ID NO: 5577227 - DNA, 25 bp, Homo sapien
accaaggctcatattccaaagaagt

SEQ ID NO: 5577228 - DNA, 25 bp, Homo sapien
tgctaaggatataaaacaatgaaat

SEQ ID NO: 5577229 - DNA, 25 bp, Homo sapien
ttcttgatgaacacagtagacatat

SEQ ID NO: 5577230 - DNA, 25 bp, Homo sapien
tatgaaatgtacttaaaataggtgt

SEQ ID NO: 5577231 - DNA, 25 bp, Homo sapien
cttaaaataggtgttgtgccaaagc

SEQ ID NO: 5577232 - DNA, 25 bp, Homo sapien
tgaacacagtagacatatgaaatgt

SEQ ID NO: 5577233 - DNA, 25 bp, Homo sapien
cacatgtaactatatgctaaggata

SEQ ID NO: 5577234 - DNA, 25 bp, Homo sapien
gcattttcaaaaggcacccaactac

SEQ ID NO: 5577235 - DNA, 25 bp, Homo sapien
tgttgtgccaaagcatcatttacac

SEQ ID NO: 5577236 - DNA, 25 bp, Homo sapien
caaaaggcacccaactacattaatt

SEQ ID NO: 5577237 - DNA, 25 bp, Homo sapien
ttacacagatcatcctaatgtttac

SEQ ID NO: 5577238 - DNA, 25 bp, Homo sapien
tataccacctgtataacagttatcc

SEQ ID NO: 5577239 - DNA, 25 bp, Homo sapien
ttgcccagttgcaacagggctaaga

SEQ ID NO: 5577240 - DNA, 25 bp, Homo sapien
gtcataagcgtggcttccctgccgt

SEQ ID NO: 5577241 - DNA, 25 bp, Homo sapien
agggaagtgcaatgatgaaagtttt

SEQ ID NO: 5577242 - DNA, 25 bp, Homo sapien
agttgcggtgtcctgtcagaaagat

SEQ ID NO: 5577243 - DNA, 25 bp, Homo sapien
tgtctaccccgatgatgcttctctc

SEQ ID NO: 5577244 - DNA, 25 bp, Homo sapien
gtcgcactatgacaatgagttgttg

SEQ ID NO: 5577245 - DNA, 25 bp, Homo sapien
ttaatagggtaccttgcagaccata

SEQ ID NO: 5577246 - DNA, 25 bp, Homo sapien
aacagggctaagattgtcgcactat

SEQ ID NO: 5577247 - DNA, 25 bp, Homo sapien
gcgtataatgaaaaggtgtaatagc

SEQ ID NO: 5577248 - DNA, 25 bp, Homo sapien
aatagcctgatgtacgaccttcgcg

SEQ ID NO: 5577249 - DNA, 25 bp, Homo sapien
tgcagaccataacgagtttgctgtt

SEQ ID NO: 5577250 - DNA, 25 bp, Homo sapien
ccgattcgttacttgtggaggtccg

SEQ ID NO: 5577251 - DNA, 25 bp, Homo sapien
ttcagttgatcccccgattcgttac

SEQ ID NO: 5577252 - DNA, 25 bp, Homo sapien
cgctggagagtcctgcccttatctt

SEQ ID NO: 5577253 - DNA, 25 bp, Homo sapien
gaggttttcagctggttggctgcct

SEQ ID NO: 5577254 - DNA, 25 bp, Homo sapien
ggcagggtttcccttggcatctgtc

SEQ ID NO: 5577255 - DNA, 25 bp, Homo sapien
gtgtctccatgatagatcgaaaggc

SEQ ID NO: 5577256 - DNA, 25 bp, Homo sapien
ttcctcccaagtgaggtcaagggca

SEQ ID NO: 5577257 - DNA, 25 bp, Homo sapien
atgatagatcgaaaggctccaaaag

SEQ ID NO: 5577258 - DNA, 25 bp, Homo sapien
ttggctgcctggtagttattattat

SEQ ID NO: 5577259 - DNA, 25 bp, Homo sapien
ggcaatgtagaggttttcagctggt

SEQ ID NO: 5577260 - DNA, 25 bp, Homo sapien
tttcctttgctagcggagctggcag

SEQ ID NO: 5577261 - DNA, 25 bp, Homo sapien
ctaacatgacatgtctcattagaca

SEQ ID NO: 5577262 - DNA, 25 bp, Homo sapien
gtctcattagacacatgaagttggc

SEQ ID NO: 5577263 - DNA, 25 bp, Homo sapien
agtgtgggcccacaatctgtgatat

SEQ ID NO: 5577264 - DNA, 25 bp, Homo sapien
tattctccaaatagcacttactgcc

SEQ ID NO: 5577265 - DNA, 25 bp, Homo sapien
ggattccctcaaggtagtgtgggcc

SEQ ID NO: 5577266 - DNA, 25 bp, Homo sapien
ctgtgatattaggaacaacataatc

SEQ ID NO: 5577267 - DNA, 25 bp, Homo sapien
agagcaaggggtatgtatctaacat

SEQ ID NO: 5577268 - DNA, 25 bp, Homo sapien
attagacacatgaagttggctttcc

SEQ ID NO: 5577269 - DNA, 25 bp, Homo sapien
caaggtagtgtgggcccacaatctg

SEQ ID NO: 5577270 - DNA, 25 bp, Homo sapien
atgaagttggctttccatgcatccc

SEQ ID NO: 5577271 - DNA, 25 bp, Homo sapien
gcaaggggtatgtatctaacatgac

SEQ ID NO: 5577272 - DNA, 25 bp, Homo sapien
ccagcgacagcaatgtccctcttgc

SEQ ID NO: 5577273 - DNA, 25 bp, Homo sapien
aaaccagggacagtcactcgtccac

SEQ ID NO: 5577274 - DNA, 25 bp, Homo sapien
catctcaccatcaaccagcgacagc

SEQ ID NO: 5577275 - DNA, 25 bp, Homo sapien
ccaatggacccttcataatggggaa

SEQ ID NO: 5577276 - DNA, 25 bp, Homo sapien
cttccctgcactctggttgccctct

SEQ ID NO: 5577277 - DNA, 25 bp, Homo sapien
ccttggctcttggttatgggctgtc

SEQ ID NO: 5577278 - DNA, 25 bp, Homo sapien
gggctgtctgctgaatatgagtctt

SEQ ID NO: 5577279 - DNA, 25 bp, Homo sapien
gaccaggttctcattaagtgccatc

SEQ ID NO: 5577280 - DNA, 25 bp, Homo sapien
ctaaatggcaccagcccaaaccagg

SEQ ID NO: 5577281 - DNA, 25 bp, Homo sapien
tgagtccaggtctccccactcccat

SEQ ID NO: 5577282 - DNA, 25 bp, Homo sapien
tggggctttcccaatgaccaggttc

SEQ ID NO: 5577283 - DNA, 25 bp, Homo sapien
aaaaagagtgtgcttttggctggga

SEQ ID NO: 5577284 - DNA, 25 bp, Homo sapien
taagttagtataaaaagagtgtgct

SEQ ID NO: 5577285 - DNA, 25 bp, Homo sapien
aaacctgcatatacagagggctgac

SEQ ID NO: 5577286 - DNA, 25 bp, Homo sapien
atggctgatacaaaactactgatac

SEQ ID NO: 5577287 - DNA, 25 bp, Homo sapien
atgctaagtacagtcagtcagtcct

SEQ ID NO: 5577288 - DNA, 25 bp, Homo sapien
tacaaagaaactaggtatggagaga

SEQ ID NO: 5577289 - DNA, 25 bp, Homo sapien
ggtcactgtgtgtaatgctaagtac

SEQ ID NO: 5577290 - DNA, 25 bp, Homo sapien
tccaagcattcaacccatggctgat

SEQ ID NO: 5577291 - DNA, 25 bp, Homo sapien
gagatagaggagcttaacagaatct

SEQ ID NO: 5577292 - DNA, 25 bp, Homo sapien
accaagatgggtaactagatatttc

SEQ ID NO: 5577293 - DNA, 25 bp, Homo sapien
atgaggatctcaagattgattaagt

SEQ ID NO: 5577294 - DNA, 25 bp, Homo sapien
accatatagcattaatagagtctgt

SEQ ID NO: 5577295 - DNA, 25 bp, Homo sapien
aaagtcaggggtagaataaccatat

SEQ ID NO: 5577296 - DNA, 25 bp, Homo sapien
taacaggtggcctctcaacttgcac

SEQ ID NO: 5577297 - DNA, 25 bp, Homo sapien
ttagaaaagtgtattcccatgccag

SEQ ID NO: 5577298 - DNA, 25 bp, Homo sapien
ttggttggctaaaatctatcagaga

SEQ ID NO: 5577299 - DNA, 25 bp, Homo sapien
agcattaatagagtctgtgtaagct

SEQ ID NO: 5577300 - DNA, 25 bp, Homo sapien
ctgtgtaagcttaaatagtccaact

SEQ ID NO: 5577301 - DNA, 25 bp, Homo sapien
tgaagtttccaaattacacagctaa

SEQ ID NO: 5577302 - DNA, 25 bp, Homo sapien
agtgtattcccatgccagtttctcc

SEQ ID NO: 5577303 - DNA, 25 bp, Homo sapien
gtatattccataacaggtggcctct

SEQ ID NO: 5577304 - DNA, 25 bp, Homo sapien
gtcaggggtagaataaccatatagc

SEQ ID NO: 5577305 - DNA, 25 bp, Homo sapien
ttctgtaagtgagaaatcttgtgta

SEQ ID NO: 5577306 - DNA, 25 bp, Homo sapien
gaaaaatcagcaccccatatcacac

SEQ ID NO: 5577307 - DNA, 25 bp, Homo sapien
ggtacaggcatgtttccgttggaac

SEQ ID NO: 5577308 - DNA, 25 bp, Homo sapien
aggcagaatgtgttatcaaactcgt

SEQ ID NO: 5577309 - DNA, 25 bp, Homo sapien
tagagcttgatagaggaagaatata

SEQ ID NO: 5577310 - DNA, 25 bp, Homo sapien
gtcagtcactgttcgagggtgctgg

SEQ ID NO: 5577311 - DNA, 25 bp, Homo sapien
taatcccacgggggtttcagatagc

SEQ ID NO: 5577312 - DNA, 25 bp, Homo sapien
tggaaccaaaggtagtagagcttga

SEQ ID NO: 5577313 - DNA, 25 bp, Homo sapien
tcagggttgtctccagccaaagaag

SEQ ID NO: 5577314 - DNA, 25 bp, Homo sapien
taccactacatgcaacaggagttta

SEQ ID NO: 5577315 - DNA, 25 bp, Homo sapien
aatagtggagaaaacactcccactt

SEQ ID NO: 5577316 - DNA, 25 bp, Homo sapien
tggctgtaatcaacatgggaaatac

SEQ ID NO: 5577317 - DNA, 25 bp, Homo sapien
atgggaaatacatggaaatagaagg

SEQ ID NO: 5577318 - DNA, 25 bp, Homo sapien
tagaagggaagtcatttataatgtc

SEQ ID NO: 5577319 - DNA, 25 bp, Homo sapien
ccaactctaaagaatagaaggggaa

SEQ ID NO: 5577320 - DNA, 25 bp, Homo sapien
aggaatctgaatctgtagaaccgat

SEQ ID NO: 5577321 - DNA, 25 bp, Homo sapien
aaagagaaatgtctgaatgttcatc

SEQ ID NO: 5577322 - DNA, 25 bp, Homo sapien
acctggagaattgggctcaaaagta

SEQ ID NO: 5577323 - DNA, 25 bp, Homo sapien
taggatgctatgacacctggtgctt

SEQ ID NO: 5577324 - DNA, 25 bp, Homo sapien
tggatacatgcatagatgaatggat

SEQ ID NO: 5577325 - DNA, 25 bp, Homo sapien
aactgtcttgctgaagtaagcagtc

SEQ ID NO: 5577326 - DNA, 25 bp, Homo sapien
atctgtagaaccgataaagtagggg

SEQ ID NO: 5577327 - DNA, 25 bp, Homo sapien
tattgtccctctcaggaagacagca

SEQ ID NO: 5577328 - DNA, 25 bp, Homo sapien
cccgggtcccctatcccacatcaac

SEQ ID NO: 5577329 - DNA, 25 bp, Homo sapien
cttgcttgccaggccttggccagag

SEQ ID NO: 5577330 - DNA, 25 bp, Homo sapien
ggctctgtcacttctattgtccctc

SEQ ID NO: 5577331 - DNA, 25 bp, Homo sapien
caggggtcaagactccccaggaaga

SEQ ID NO: 5577332 - DNA, 25 bp, Homo sapien
gcagagtttggaggatctagatttc

SEQ ID NO: 5577333 - DNA, 25 bp, Homo sapien
tcccacatcaaccacaaggcagggg

SEQ ID NO: 5577334 - DNA, 25 bp, Homo sapien
ctagatttccctaggaggacagggg

SEQ ID NO: 5577335 - DNA, 25 bp, Homo sapien
atcccacacttgcttgccaggcctt

SEQ ID NO: 5577336 - DNA, 25 bp, Homo sapien
ctgttcccgggtcccctatcccaca

SEQ ID NO: 5577337 - DNA, 25 bp, Homo sapien
gcttgccaggccttggccagaggaa

SEQ ID NO: 5577338 - DNA, 25 bp, Homo sapien
tcaaaaacatattaggtacattaac

SEQ ID NO: 5577339 - DNA, 25 bp, Homo sapien
gtcacatgtggccagttaagttagc

SEQ ID NO: 5577340 - DNA, 25 bp, Homo sapien
attcagtcacctaaataaaaacgta

SEQ ID NO: 5577341 - DNA, 25 bp, Homo sapien
gtgagggttggatgtttcattgaaa

SEQ ID NO: 5577342 - DNA, 25 bp, Homo sapien
gttgttgttttcgtcacatgtggcc

SEQ ID NO: 5577343 - DNA, 25 bp, Homo sapien
taagatgctcaaaaaagaagctaag

SEQ ID NO: 5577344 - DNA, 25 bp, Homo sapien
aacgtatatccaagggatgacagtg

SEQ ID NO: 5577345 - DNA, 25 bp, Homo sapien
atcacaagccataaaggttgaaaaa

SEQ ID NO: 5577346 - DNA, 25 bp, Homo sapien
aaacagagactaagatttattcaag

SEQ ID NO: 5577347 - DNA, 25 bp, Homo sapien
cagttaagttagctgagaacaggac

SEQ ID NO: 5577348 - DNA, 25 bp, Homo sapien
aataaaaacgtatatccaagggatg

SEQ ID NO: 5577349 - DNA, 25 bp, Homo sapien
gacacccctaaggctcaggagaaat

SEQ ID NO: 5577350 - DNA, 25 bp, Homo sapien
gggagacataatgcaggtgcttagt

SEQ ID NO: 5577351 - DNA, 25 bp, Homo sapien
ctctgcttgtggttaacagggtggg

SEQ ID NO: 5577352 - DNA, 25 bp, Homo sapien
ttgcagaatcccatgtgggagacat

SEQ ID NO: 5577353 - DNA, 25 bp, Homo sapien
gtgtctgtgacataccctgcaagcc

SEQ ID NO: 5577354 - DNA, 25 bp, Homo sapien
ctgcaagcctcaagacactatgtcc

SEQ ID NO: 5577355 - DNA, 25 bp, Homo sapien
acaatttgtcagcagagaaacattt

SEQ ID NO: 5577356 - DNA, 25 bp, Homo sapien
atgcgattttaagagtgacacccct

SEQ ID NO: 5577357 - DNA, 25 bp, Homo sapien
gagactgtgggcaagttaacctctc

SEQ ID NO: 5577358 - DNA, 25 bp, Homo sapien
cttcacctgtgagacgtaaaatttc

SEQ ID NO: 5577359 - DNA, 25 bp, Homo sapien
ttaatgggatcagaatatcaagaac

SEQ ID NO: 5577360 - DNA, 25 bp, Homo sapien
gcatcagggcacctcggactaaaaa

SEQ ID NO: 5577361 - DNA, 25 bp, Homo sapien
cagcaccacaatcatgagtacaaca

SEQ ID NO: 5577362 - DNA, 25 bp, Homo sapien
aatgggggttaccttcagcaccaca

SEQ ID NO: 5577363 - DNA, 25 bp, Homo sapien
ccttagtcacaggccagcatcaggg

SEQ ID NO: 5577364 - DNA, 25 bp, Homo sapien
cggactaaaaatgagaccaaaacac

SEQ ID NO: 5577365 - DNA, 25 bp, Homo sapien
ttacacggcctaaccagataaaatc

SEQ ID NO: 5577366 - DNA, 25 bp, Homo sapien
ctttcctgcccacgtgtttgattac

SEQ ID NO: 5577367 - DNA, 25 bp, Homo sapien
gtaccccctgcttctgggggcagcc

SEQ ID NO: 5577368 - DNA, 25 bp, Homo sapien
taagaatactattggctgtaccccc

SEQ ID NO: 5577369 - DNA, 25 bp, Homo sapien
atgagtacaacataatggatccact

SEQ ID NO: 5577370 - DNA, 25 bp, Homo sapien
cctcagattcagctcatgtgtcctc

SEQ ID NO: 5577371 - DNA, 25 bp, Homo sapien
atagcgagaccccataaggctccta

SEQ ID NO: 5577372 - DNA, 25 bp, Homo sapien
gaagtccagctgtgaacaaggtata

SEQ ID NO: 5577373 - DNA, 25 bp, Homo sapien
cagttgacctgtaagaagagatgtg

SEQ ID NO: 5577374 - DNA, 25 bp, Homo sapien
ccgcaaggcctctgttcatgccagg

SEQ ID NO: 5577375 - DNA, 25 bp, Homo sapien
agtactagacactgagaagtccagc

SEQ ID NO: 5577376 - DNA, 25 bp, Homo sapien
gaaggcttcagttctccgcaaggcc

SEQ ID NO: 5577377 - DNA, 25 bp, Homo sapien
aagaacttgagaattgggattacgg

SEQ ID NO: 5577378 - DNA, 25 bp, Homo sapien
tccaatgggaaaggatctgcttcca

SEQ ID NO: 5577379 - DNA, 25 bp, Homo sapien
gggattacggaggaactcaaatagc

SEQ ID NO: 5577380 - DNA, 25 bp, Homo sapien
gaacagtaattgcctaggtgcttgc

SEQ ID NO: 5577381 - DNA, 25 bp, Homo sapien
gtcaggtaaggtggctttaatctca

SEQ ID NO: 5577382 - DNA, 25 bp, Homo sapien
gcggagagcgcctgacgccacagtc

SEQ ID NO: 5577383 - DNA, 25 bp, Homo sapien
gactgtggcgtcaggcgctctccgc

SEQ ID NO: 5577384 - DNA, 25 bp, Homo sapien
atactggaaggtgtacagtgtgatg

SEQ ID NO: 5577385 - DNA, 25 bp, Homo sapien
tctctagagagaaatgatcctacat

SEQ ID NO: 5577386 - DNA, 25 bp, Homo sapien
cagtgtgaggatgaacatttaggta

SEQ ID NO: 5577387 - DNA, 25 bp, Homo sapien
ccagctttaccgatgtatgacaaat

SEQ ID NO: 5577388 - DNA, 25 bp, Homo sapien
tctgtggtggatatacatcatcttc

SEQ ID NO: 5577389 - DNA, 25 bp, Homo sapien
cactaagatggctgctgtttgtgtt

SEQ ID NO: 5577390 - DNA, 25 bp, Homo sapien
caacctaaaccaacctgccttccac

SEQ ID NO: 5577391 - DNA, 25 bp, Homo sapien
acaccaagaattaggattgctggat

SEQ ID NO: 5577392 - DNA, 25 bp, Homo sapien
tgcatcctcactaagactgattacc

SEQ ID NO: 5577393 - DNA, 25 bp, Homo sapien
actacttctgtggatatacaccatc

SEQ ID NO: 5577394 - DNA, 25 bp, Homo sapien
tgttggttaccactaagatggctgc

SEQ ID NO: 5577395 - DNA, 25 bp, Homo sapien
aacgtatccaacatctcaaaacttt

SEQ ID NO: 5577396 - DNA, 25 bp, Homo sapien
tagtcaccctgtagtgctagagaac

SEQ ID NO: 5577397 - DNA, 25 bp, Homo sapien
aacaagtatacaatgcgtaaagatc

SEQ ID NO: 5577398 - DNA, 25 bp, Homo sapien
gtagtgctagagaacactagaactt

SEQ ID NO: 5577399 - DNA, 25 bp, Homo sapien
ttttgctatcaggaacaaaactaga

SEQ ID NO: 5577400 - DNA, 25 bp, Homo sapien
caaaatgtgctcttctaggtatgtg

SEQ ID NO: 5577401 - DNA, 25 bp, Homo sapien
attgacacacaacaattgtacgtat

SEQ ID NO: 5577402 - DNA, 25 bp, Homo sapien
tgaaaatggaattgagagttaactt

SEQ ID NO: 5577403 - DNA, 25 bp, Homo sapien
acatgacattgtgcaacaagtatac

SEQ ID NO: 5577404 - DNA, 25 bp, Homo sapien
tatggggtacaacatgacattgtgc

SEQ ID NO: 5577405 - DNA, 25 bp, Homo sapien
atcagggtaattaacgtatccaaca

SEQ ID NO: 5577406 - DNA, 25 bp, Homo sapien
cccaagtgggatctgtttttaagtg

SEQ ID NO: 5577407 - DNA, 25 bp, Homo sapien
gatacctcaaattactgcctctgca

SEQ ID NO: 5577408 - DNA, 25 bp, Homo sapien
ccatctcagtaaccggccacaccat

SEQ ID NO: 5577409 - DNA, 25 bp, Homo sapien
tccccatctcagtaaccggccacac

SEQ ID NO: 5577410 - DNA, 25 bp, Homo sapien
ccatccaccttgttgctggtcactg

SEQ ID NO: 5577411 - DNA, 25 bp, Homo sapien
cccacagtcacgtccgccatgacac

SEQ ID NO: 5577412 - DNA, 25 bp, Homo sapien
tgtttggatgtcacacagatacctc

SEQ ID NO: 5577413 - DNA, 25 bp, Homo sapien
tgcctctgcaaccacatttcttact

SEQ ID NO: 5577414 - DNA, 25 bp, Homo sapien
cttgttgctggtcactgtccccgac

SEQ ID NO: 5577415 - DNA, 25 bp, Homo sapien
cagctgccaatctgacatctctgtt

SEQ ID NO: 5577416 - DNA, 25 bp, Homo sapien
cttcccacagtcacgtccgccatga

SEQ ID NO: 5577417 - DNA, 25 bp, Homo sapien
tatgccaacttgtctgccaggggcc

SEQ ID NO: 5577418 - DNA, 25 bp, Homo sapien
caagctcgggcatttcatttctgtg

SEQ ID NO: 5577419 - DNA, 25 bp, Homo sapien
aagtcctgcctgcccatgaacctgc

SEQ ID NO: 5577420 - DNA, 25 bp, Homo sapien
catgaacctgctctgcggccatgga

SEQ ID NO: 5577421 - DNA, 25 bp, Homo sapien
tatgctaggagcaaagccccttaga

SEQ ID NO: 5577422 - DNA, 25 bp, Homo sapien
ttttgaatcaaatgctagatctctc

SEQ ID NO: 5577423 - DNA, 25 bp, Homo sapien
ttggcaggagtaatgtattcagtcc

SEQ ID NO: 5577424 - DNA, 25 bp, Homo sapien
tgtctcaaaaaggtcaggagatatg

SEQ ID NO: 5577425 - DNA, 25 bp, Homo sapien
cattactttgtggagaatagatttc

SEQ ID NO: 5577426 - DNA, 25 bp, Homo sapien
gccccttagacacctgagcaagagg

SEQ ID NO: 5577427 - DNA, 25 bp, Homo sapien
attctgctggcagattgagtgcacg

SEQ ID NO: 5577428 - DNA, 25 bp, Homo sapien
gcatacagcacacaggcttgcagca

SEQ ID NO: 5577429 - DNA, 25 bp, Homo sapien
gctagactgctggcagcacagagag

SEQ ID NO: 5577430 - DNA, 25 bp, Homo sapien
caggcttgcagcagacagtcttgca

SEQ ID NO: 5577431 - DNA, 25 bp, Homo sapien
ggcttgcagcagacagtcttgcagc

SEQ ID NO: 5577432 - DNA, 25 bp, Homo sapien
ggcatacagcacacaggcttgcagc

SEQ ID NO: 5577433 - DNA, 25 bp, Homo sapien
cttgcagcagacagtcttgcagcag

SEQ ID NO: 5577434 - DNA, 25 bp, Homo sapien
ggcacacagcaggactgttgacacg

SEQ ID NO: 5577435 - DNA, 25 bp, Homo sapien
gcagctagactgctggcagcacaga

SEQ ID NO: 5577436 - DNA, 25 bp, Homo sapien
tgcagcagacagtcttgcagcagac

SEQ ID NO: 5577437 - DNA, 25 bp, Homo sapien
ggcagctagactgctggcagcatga

SEQ ID NO: 5577438 - DNA, 25 bp, Homo sapien
tagactgctggcagcatgaagaaga

SEQ ID NO: 5577439 - DNA, 25 bp, Homo sapien
tctcttaggactaaaggatgggctt

SEQ ID NO: 5577440 - DNA, 25 bp, Homo sapien
tgttggtcagagcctctcttaggac

SEQ ID NO: 5577441 - DNA, 25 bp, Homo sapien
ctttcagaatgcagtggagcatgga

SEQ ID NO: 5577442 - DNA, 25 bp, Homo sapien
cctattgcaggctatgaaggaagca

SEQ ID NO: 5577443 - DNA, 25 bp, Homo sapien
ttggccaccgtaagtgccactacta

SEQ ID NO: 5577444 - DNA, 25 bp, Homo sapien
gtgaaaacagtgggctacaactaca

SEQ ID NO: 5577445 - DNA, 25 bp, Homo sapien
ctttcctgcaaggtgttggtcagag

SEQ ID NO: 5577446 - DNA, 25 bp, Homo sapien
gcagaattctcccttacatgacccc

SEQ ID NO: 5577447 - DNA, 25 bp, Homo sapien
tttcattggtgaaaacagtgggcta

SEQ ID NO: 5577448 - DNA, 25 bp, Homo sapien
tgatatgtggaagactgtttgccta

SEQ ID NO: 5577449 - DNA, 25 bp, Homo sapien
ttccagatttggccaccgtaagtgc

SEQ ID NO: 5577450 - DNA, 25 bp, Homo sapien
ggaggcatgtccctctcaggccgtt

SEQ ID NO: 5577451 - DNA, 25 bp, Homo sapien
gcgctgccgtcccggcgcctcttta

SEQ ID NO: 5577452 - DNA, 25 bp, Homo sapien
tcccgccgatcccctgcgcctctca

SEQ ID NO: 5577453 - DNA, 25 bp, Homo sapien
aacactccgaggctcgtcggaggct

SEQ ID NO: 5577454 - DNA, 25 bp, Homo sapien
tccgacagccttcctcccgccgatc

SEQ ID NO: 5577455 - DNA, 25 bp, Homo sapien
accctccggcctctcacctggggtc

SEQ ID NO: 5577456 - DNA, 25 bp, Homo sapien
tttaaagagaaacactccgaggctc

SEQ ID NO: 5577457 - DNA, 25 bp, Homo sapien
gcgcctctttagcaggggagctgca

SEQ ID NO: 5577458 - DNA, 25 bp, Homo sapien
ccaggaccctccggcctctcacctg

SEQ ID NO: 5577459 - DNA, 25 bp, Homo sapien
ccggaacccagacagctccatctac

SEQ ID NO: 5577460 - DNA, 25 bp, Homo sapien
gcggcttgattggctccgacagcct

SEQ ID NO: 5577461 - DNA, 25 bp, Homo sapien
acctgggctgaactaaattagctgc

SEQ ID NO: 5577462 - DNA, 25 bp, Homo sapien
tagaggtggtctacgcagcctctca

SEQ ID NO: 5577463 - DNA, 25 bp, Homo sapien
tcttttaacatagactgggggagac

SEQ ID NO: 5577464 - DNA, 25 bp, Homo sapien
tacaacctagctattacatgggcat

SEQ ID NO: 5577465 - DNA, 25 bp, Homo sapien
caggcaagaaagctcactctgaaag

SEQ ID NO: 5577466 - DNA, 25 bp, Homo sapien
ttacatgggcataactgactcatta

SEQ ID NO: 5577467 - DNA, 25 bp, Homo sapien
tctggtgcatacatgttccactccc

SEQ ID NO: 5577468 - DNA, 25 bp, Homo sapien
taaactcgagaagtcttagatacac

SEQ ID NO: 5577469 - DNA, 25 bp, Homo sapien
gacaaaaagtaactgtagcatttag

SEQ ID NO: 5577470 - DNA, 25 bp, Homo sapien
attatagtatgaacctgggctgaac

SEQ ID NO: 5577471 - DNA, 25 bp, Homo sapien
ggtagggcagtaaccactgaaatta

SEQ ID NO: 5577472 - DNA, 25 bp, Homo sapien
cgctgtcatggaagataaataaacc

SEQ ID NO: 5577473 - DNA, 25 bp, Homo sapien
tggcagtccttgacaccatggaccc

SEQ ID NO: 5577474 - DNA, 25 bp, Homo sapien
tgtgattggaaaactgggctactta

SEQ ID NO: 5577475 - DNA, 25 bp, Homo sapien
taatgaagcaataagatgggagata

SEQ ID NO: 5577476 - DNA, 25 bp, Homo sapien
tctccgttatgtctgcagaatgcac

SEQ ID NO: 5577477 - DNA, 25 bp, Homo sapien
tcaggggattctttgggaagcaaag

SEQ ID NO: 5577478 - DNA, 25 bp, Homo sapien
accatggacccgccatactagtctt

SEQ ID NO: 5577479 - DNA, 25 bp, Homo sapien
gttgcacacagatgaacccatagtc

SEQ ID NO: 5577480 - DNA, 25 bp, Homo sapien
agatgagggccatcccctagagata

SEQ ID NO: 5577481 - DNA, 25 bp, Homo sapien
tcaacgttcgttggtgaaattggcc

SEQ ID NO: 5577482 - DNA, 25 bp, Homo sapien
ttggctgcaaactctcacgctgtca

SEQ ID NO: 5577483 - DNA, 25 bp, Homo sapien
gccctggccgtgattagttgaatga

SEQ ID NO: 5577484 - DNA, 25 bp, Homo sapien
acctgcctcagacagacccaccaga

SEQ ID NO: 5577485 - DNA, 25 bp, Homo sapien
atgaatggggtcacaacatcccttt

SEQ ID NO: 5577486 - DNA, 25 bp, Homo sapien
gttctggctggatgtcagaatggat

SEQ ID NO: 5577487 - DNA, 25 bp, Homo sapien
cccaccacatgctgggacaaggttc

SEQ ID NO: 5577488 - DNA, 25 bp, Homo sapien
tgtctcttcgtggcatttgggagat

SEQ ID NO: 5577489 - DNA, 25 bp, Homo sapien
cgtgattagttgaatgaatggggtc

SEQ ID NO: 5577490 - DNA, 25 bp, Homo sapien
ctctccacgtggcgtctgcctctgt

SEQ ID NO: 5577491 - DNA, 25 bp, Homo sapien
gttcggatgctgcagcctctgcacc

SEQ ID NO: 5577492 - DNA, 25 bp, Homo sapien
cacccccccacaccatcagaattcg

SEQ ID NO: 5577493 - DNA, 25 bp, Homo sapien
ctggagcgacgtttccacgttcgga

SEQ ID NO: 5577494 - DNA, 25 bp, Homo sapien
gagggcgcccgtacgcgtcccgccg

SEQ ID NO: 5577495 - DNA, 25 bp, Homo sapien
cggcgggacgcgtacgggcgccctc

SEQ ID NO: 5577496 - DNA, 25 bp, Homo sapien
ttacagctagaagaaatactatctc

SEQ ID NO: 5577497 - DNA, 25 bp, Homo sapien
caaagcctgatttttggcagtgtag

SEQ ID NO: 5577498 - DNA, 25 bp, Homo sapien
taagaacattggaaggaatattgat

SEQ ID NO: 5577499 - DNA, 25 bp, Homo sapien
tagaatttgacacatcccttgggat

SEQ ID NO: 5577500 - DNA, 25 bp, Homo sapien
tttcttagatagatgaatgaatgca

SEQ ID NO: 5577501 - DNA, 25 bp, Homo sapien
tcctggtgccaaaaaacattaactg

SEQ ID NO: 5577502 - DNA, 25 bp, Homo sapien
tttggaaagagatacatgaacatgt

SEQ ID NO: 5577503 - DNA, 25 bp, Homo sapien
agagtccagttaacaccactaatgc

SEQ ID NO: 5577504 - DNA, 25 bp, Homo sapien
atgcatgaatgtatgaaagaatgaa

SEQ ID NO: 5577505 - DNA, 25 bp, Homo sapien
aactgacgtgttatatgagctctgt

SEQ ID NO: 5577506 - DNA, 25 bp, Homo sapien
gtgtagggagaaatatcaaattcat

SEQ ID NO: 5577507 - DNA, 25 bp, Homo sapien
agttgacaatcaaggaacagtatga

SEQ ID NO: 5577508 - DNA, 25 bp, Homo sapien
tgaggcatgtaggaccaataagatt

SEQ ID NO: 5577509 - DNA, 25 bp, Homo sapien
atattggtgttgccgaaagaacttt

SEQ ID NO: 5577510 - DNA, 25 bp, Homo sapien
aagatgcttatttaacaggtggaat

SEQ ID NO: 5577511 - DNA, 25 bp, Homo sapien
tctggacctggtctgaaaggtcatt

SEQ ID NO: 5577512 - DNA, 25 bp, Homo sapien
tcatttaagccaaggaggaatactt

SEQ ID NO: 5577513 - DNA, 25 bp, Homo sapien
ggccactagtaaaccaagatgctta

SEQ ID NO: 5577514 - DNA, 25 bp, Homo sapien
gagtggtctcctggaaaggtctcat

SEQ ID NO: 5577515 - DNA, 25 bp, Homo sapien
ggagggggtatcatctttttgcctg

SEQ ID NO: 5577516 - DNA, 25 bp, Homo sapien
tctattggtggaatttagggaattc

SEQ ID NO: 5577517 - DNA, 25 bp, Homo sapien
tgtcaaaaaagcttagggatattct

SEQ ID NO: 5577518 - DNA, 25 bp, Homo sapien
atgtgatctgattccttcctatttc

SEQ ID NO: 5577519 - DNA, 25 bp, Homo sapien
aaaattaggcaatgggtttatgatg

SEQ ID NO: 5577520 - DNA, 25 bp, Homo sapien
tatgatgcaaacatttggggccagc

SEQ ID NO: 5577521 - DNA, 25 bp, Homo sapien
actcctgatttctgacccagtctcc

SEQ ID NO: 5577522 - DNA, 25 bp, Homo sapien
ccccattccccaggggtaacagtca

SEQ ID NO: 5577523 - DNA, 25 bp, Homo sapien
tttggggccagcatttatgtgatct

SEQ ID NO: 5577524 - DNA, 25 bp, Homo sapien
taggcaatgggtttatgatgcaaac

SEQ ID NO: 5577525 - DNA, 25 bp, Homo sapien
ccattccccaggggtaacagtcacc

SEQ ID NO: 5577526 - DNA, 25 bp, Homo sapien
gcagcgttggatggatcagagctgc

SEQ ID NO: 5577527 - DNA, 25 bp, Homo sapien
tgcaaacatttggggccagcattta

SEQ ID NO: 5577528 - DNA, 25 bp, Homo sapien
ttcaacaagtcctcactcctgattt

SEQ ID NO: 5577529 - DNA, 25 bp, Homo sapien
ttaacttgcaatttcaggtgatgga

SEQ ID NO: 5577530 - DNA, 25 bp, Homo sapien
atggtcactgaattttgagtgtgaa

SEQ ID NO: 5577531 - DNA, 25 bp, Homo sapien
aatagtagttacttctgtggaggtg

SEQ ID NO: 5577532 - DNA, 25 bp, Homo sapien
tctaatgacacgaataaaatttgtg

SEQ ID NO: 5577533 - DNA, 25 bp, Homo sapien
tcaggtgatggaaaattatgaattt

SEQ ID NO: 5577534 - DNA, 25 bp, Homo sapien
ctcagaaaaattagatttgtagcaa

SEQ ID NO: 5577535 - DNA, 25 bp, Homo sapien
acaggtaagtacgagaaactttgcc

SEQ ID NO: 5577536 - DNA, 25 bp, Homo sapien
aggtgataggtacaggtaagtacga

SEQ ID NO: 5577537 - DNA, 25 bp, Homo sapien
tattagacagatgtgtatgtgaaat

SEQ ID NO: 5577538 - DNA, 25 bp, Homo sapien
gcaaaaaagacaaagttaacttgca

SEQ ID NO: 5577539 - DNA, 25 bp, Homo sapien
aaacttgaaagacaggcattgaatt

SEQ ID NO: 5577540 - DNA, 25 bp, Homo sapien
tgagcttagacaagtatcagaatcc

SEQ ID NO: 5577541 - DNA, 25 bp, Homo sapien
attgaactcaatggctggcattttc

SEQ ID NO: 5577542 - DNA, 25 bp, Homo sapien
acacagaaggtactcataaatggtt

SEQ ID NO: 5577543 - DNA, 25 bp, Homo sapien
taatcttcaagaaaagtgcaagttg

SEQ ID NO: 5577544 - DNA, 25 bp, Homo sapien
aaaacagtgactgtgactaggaagc

SEQ ID NO: 5577545 - DNA, 25 bp, Homo sapien
gtatcaagaacttttggtgactcac

SEQ ID NO: 5577546 - DNA, 25 bp, Homo sapien
atgctgaggccttgaaatatttttc

SEQ ID NO: 5577547 - DNA, 25 bp, Homo sapien
ctgatgaatcatgagcttagacaag

SEQ ID NO: 5577548 - DNA, 25 bp, Homo sapien
tgcaagttgaatagacaggatgact

SEQ ID NO: 5577549 - DNA, 25 bp, Homo sapien
aattaggaggcaagatcatatttac

SEQ ID NO: 5577550 - DNA, 25 bp, Homo sapien
ggcaagtagcctccaaaacagtgac

SEQ ID NO: 5577551 - DNA, 25 bp, Homo sapien
atcaaaaaaatcatacagtaccctg

SEQ ID NO: 5577552 - DNA, 25 bp, Homo sapien
ttgcagagagagattttaaatattc

SEQ ID NO: 5577553 - DNA, 25 bp, Homo sapien
aaaaagtgaagtgatggatatgtta

SEQ ID NO: 5577554 - DNA, 25 bp, Homo sapien
ataccaccaaaaagtgaagtgatgg

SEQ ID NO: 5577555 - DNA, 25 bp, Homo sapien
tgagaggatgtgaaacccacagata

SEQ ID NO: 5577556 - DNA, 25 bp, Homo sapien
cagtaccctgtaaatccacagtgat

SEQ ID NO: 5577557 - DNA, 25 bp, Homo sapien
tgatggatatgttaattagcctggt

SEQ ID NO: 5577558 - DNA, 25 bp, Homo sapien
atatttgaaaattgcagagagagat

SEQ ID NO: 5577559 - DNA, 25 bp, Homo sapien
agatatagagggccaactgtattgt

SEQ ID NO: 5577560 - DNA, 25 bp, Homo sapien
ttagcctggtttaatcacatgtatc

SEQ ID NO: 5577561 - DNA, 25 bp, Homo sapien
aaacccacagatatagagggccaac

SEQ ID NO: 5577562 - DNA, 25 bp, Homo sapien
gccccggcggctcacgcagggaacg

SEQ ID NO: 5577563 - DNA, 25 bp, Homo sapien
cgttccctgcgtgagccgccggggc

SEQ ID NO: 5577564 - DNA, 25 bp, Homo sapien
agtctttatcggttttatagattgc

SEQ ID NO: 5577565 - DNA, 25 bp, Homo sapien
gctcactgtagcctcggactcctgg

SEQ ID NO: 5577566 - DNA, 25 bp, Homo sapien
tactgtgttcactgtacccacttgt

SEQ ID NO: 5577567 - DNA, 25 bp, Homo sapien
tattcctcgccttattccaaagtct

SEQ ID NO: 5577568 - DNA, 25 bp, Homo sapien
ggaccacaggtgcaagctactatgc

SEQ ID NO: 5577569 - DNA, 25 bp, Homo sapien
ggctagagtgcaatgacacgacata

SEQ ID NO: 5577570 - DNA, 25 bp, Homo sapien
agagtgcaatgacacgacatagctc

SEQ ID NO: 5577571 - DNA, 25 bp, Homo sapien
tgtagcctcggactcctgggctcaa

SEQ ID NO: 5577572 - DNA, 25 bp, Homo sapien
taaaatctgatattttgacgtcgac

SEQ ID NO: 5577573 - DNA, 25 bp, Homo sapien
tgacacgacatagctcactgtagcc

SEQ ID NO: 5577574 - DNA, 25 bp, Homo sapien
aggtgcaagctactatgcctgtctc

SEQ ID NO: 5577575 - DNA, 25 bp, Homo sapien
caacctttccaggagacgtcgagga

SEQ ID NO: 5577576 - DNA, 25 bp, Homo sapien
tcctcgacgtctcctggaaaggttg

SEQ ID NO: 5577577 - DNA, 25 bp, Homo sapien
gagcctggtcaagtgacttgagctc

SEQ ID NO: 5577578 - DNA, 25 bp, Homo sapien
aacaggaagtgaaagtctctgcatg

SEQ ID NO: 5577579 - DNA, 25 bp, Homo sapien
gctgcaggagagcttttcagatgtc

SEQ ID NO: 5577580 - DNA, 25 bp, Homo sapien
aatggcctttgttcagtgctgcttc

SEQ ID NO: 5577581 - DNA, 25 bp, Homo sapien
ggcatctagaagtgttgctgcagga

SEQ ID NO: 5577582 - DNA, 25 bp, Homo sapien
gagcagagcacaagctttggaaaag

SEQ ID NO: 5577583 - DNA, 25 bp, Homo sapien
gttccttccagcagtggagcagagc

SEQ ID NO: 5577584 - DNA, 25 bp, Homo sapien
aacatgagatccttgttgagccggg

SEQ ID NO: 5577585 - DNA, 25 bp, Homo sapien
ttttgacctcacccagacacgacac

SEQ ID NO: 5577586 - DNA, 25 bp, Homo sapien
gacacgacacaagaatctctgaccc

SEQ ID NO: 5577587 - DNA, 25 bp, Homo sapien
ccccgccttaggtttctggtgtcgc

SEQ ID NO: 5577588 - DNA, 25 bp, Homo sapien
gaggccaccagaaagttccacatca

SEQ ID NO: 5577589 - DNA, 25 bp, Homo sapien
accaactaaacacagtgtgcagctg

SEQ ID NO: 5577590 - DNA, 25 bp, Homo sapien
aggcagcaggctctttgaaagcatg

SEQ ID NO: 5577591 - DNA, 25 bp, Homo sapien
tccacatcacatgctctgaggcagc

SEQ ID NO: 5577592 - DNA, 25 bp, Homo sapien
aaacacagtgtgcagctgaggttga

SEQ ID NO: 5577593 - DNA, 25 bp, Homo sapien
gcatgggttggtattcacagcactt

SEQ ID NO: 5577594 - DNA, 25 bp, Homo sapien
tggtattcacagcacttggcattca

SEQ ID NO: 5577595 - DNA, 25 bp, Homo sapien
caggctctttgaaagcatgggttgg

SEQ ID NO: 5577596 - DNA, 25 bp, Homo sapien
gcattcatagtgtacatggaaagtc

SEQ ID NO: 5577597 - DNA, 25 bp, Homo sapien
gggagcttaaaaaatatactgatgc

SEQ ID NO: 5577598 - DNA, 25 bp, Homo sapien
tctttgaaagcatgggttggtattc

SEQ ID NO: 5577599 - DNA, 25 bp, Homo sapien
ctggtccaagaatcaagagacagga

SEQ ID NO: 5577600 - DNA, 25 bp, Homo sapien
aacattatgttactggtccaagaat

SEQ ID NO: 5577601 - DNA, 25 bp, Homo sapien
aatgtctataaaccaagtgaatttt

SEQ ID NO: 5577602 - DNA, 25 bp, Homo sapien
tcagtctatcctaagggaacacctt

SEQ ID NO: 5577603 - DNA, 25 bp, Homo sapien
gaagggatgttcaggatgatgaact

SEQ ID NO: 5577604 - DNA, 25 bp, Homo sapien
aagaaatattactgctgtgtgaaac

SEQ ID NO: 5577605 - DNA, 25 bp, Homo sapien
gtgtgaaacacaaatgtctataaac

SEQ ID NO: 5577606 - DNA, 25 bp, Homo sapien
tttcaccatatttgaagggatgttc

SEQ ID NO: 5577607 - DNA, 25 bp, Homo sapien
aatcctaaagctgaggtcgacagag

SEQ ID NO: 5577608 - DNA, 25 bp, Homo sapien
gggagggagcacatatttaacctgt

SEQ ID NO: 5577609 - DNA, 25 bp, Homo sapien
aatcaagagacaggataaatactgc

SEQ ID NO: 5577610 - DNA, 25 bp, Homo sapien
tatgaggattcgctatgtaagttct

SEQ ID NO: 5577611 - DNA, 25 bp, Homo sapien
acagaatgcctcttggagcaacatc

SEQ ID NO: 5577612 - DNA, 25 bp, Homo sapien
tttactcagtgatttccagaaacac

SEQ ID NO: 5577613 - DNA, 25 bp, Homo sapien
ccagaaacactggcagacaaatgca

SEQ ID NO: 5577614 - DNA, 25 bp, Homo sapien
agatgaaatcataaatagagataac

SEQ ID NO: 5577615 - DNA, 25 bp, Homo sapien
tagagataactgaagatttggtaat

SEQ ID NO: 5577616 - DNA, 25 bp, Homo sapien
cttgaagattatttagagccctatg

SEQ ID NO: 5577617 - DNA, 25 bp, Homo sapien
cagtatgtgaactacagaatgcctc

SEQ ID NO: 5577618 - DNA, 25 bp, Homo sapien
tggcagacaaatgcagtatgtgaac

SEQ ID NO: 5577619 - DNA, 25 bp, Homo sapien
gcctcttagatataagcaaagtgct

SEQ ID NO: 5577620 - DNA, 25 bp, Homo sapien
tagagccctatgcgattactactaa

SEQ ID NO: 5577621 - DNA, 25 bp, Homo sapien
agtgctaaaaggacggattccctga

SEQ ID NO: 5577622 - DNA, 25 bp, Homo sapien
gggaatccgtgcccacccgtgatga

SEQ ID NO: 5577623 - DNA, 25 bp, Homo sapien
taatggaaagaactggcctagaata

SEQ ID NO: 5577624 - DNA, 25 bp, Homo sapien
tataaactgagtgtctaccaggggc

SEQ ID NO: 5577625 - DNA, 25 bp, Homo sapien
aggctcctcaggatcggaaagctaa

SEQ ID NO: 5577626 - DNA, 25 bp, Homo sapien
ccctgcttcctggataaagggaggc

SEQ ID NO: 5577627 - DNA, 25 bp, Homo sapien
ccacccgtgatgaaggtcccagtgg

SEQ ID NO: 5577628 - DNA, 25 bp, Homo sapien
cggaaagctaaaggcctctaagccc

SEQ ID NO: 5577629 - DNA, 25 bp, Homo sapien
cctgaagaactgagatttgtggtca

SEQ ID NO: 5577630 - DNA, 25 bp, Homo sapien
atatttgcaggtggctcacggtttt

SEQ ID NO: 5577631 - DNA, 25 bp, Homo sapien
ctgtcaagggcataagcagcctata

SEQ ID NO: 5577632 - DNA, 25 bp, Homo sapien
actccaaatatcatgacagacctgc

SEQ ID NO: 5577633 - DNA, 25 bp, Homo sapien
acagaaagatactctaatgacactc

SEQ ID NO: 5577634 - DNA, 25 bp, Homo sapien
ttgcatcactgctgaagaggaaacg

SEQ ID NO: 5577635 - DNA, 25 bp, Homo sapien
tgtagtcagatatttggagtgtagt

SEQ ID NO: 5577636 - DNA, 25 bp, Homo sapien
atgacagacctgctgaattgtagtc

SEQ ID NO: 5577637 - DNA, 25 bp, Homo sapien
ctgaagaggaaacgttgttctgctt

SEQ ID NO: 5577638 - DNA, 25 bp, Homo sapien
aaatgactgcctaaaacaagatgtt

SEQ ID NO: 5577639 - DNA, 25 bp, Homo sapien
taacaaacaatgaagtttaaatcca

SEQ ID NO: 5577640 - DNA, 25 bp, Homo sapien
tcaaagtatagaaacctagggcctg

SEQ ID NO: 5577641 - DNA, 25 bp, Homo sapien
aaatacccggatatgaaactaattc

SEQ ID NO: 5577642 - DNA, 25 bp, Homo sapien
ggagtgtagttttaaaatgactgcc

SEQ ID NO: 5577643 - DNA, 25 bp, Homo sapien
agtacctagaattcagatgctcctc

SEQ ID NO: 5577644 - DNA, 25 bp, Homo sapien
agcattcgtgtacaaggagacaaac

SEQ ID NO: 5577645 - DNA, 25 bp, Homo sapien
acccgctatgatgctcacaagatga

SEQ ID NO: 5577646 - DNA, 25 bp, Homo sapien
tggttgtgagcattcgtgtacaagg

SEQ ID NO: 5577647 - DNA, 25 bp, Homo sapien
ccgctgctgtgcccttacccgctat

SEQ ID NO: 5577648 - DNA, 25 bp, Homo sapien
aagaactgtaatacttctggaatcc

SEQ ID NO: 5577649 - DNA, 25 bp, Homo sapien
tcctgcagttcagtacctagaattc

SEQ ID NO: 5577650 - DNA, 25 bp, Homo sapien
cacccacagaatgacagggtagcca

SEQ ID NO: 5577651 - DNA, 25 bp, Homo sapien
actgtttccaaaccattgtcaccct

SEQ ID NO: 5577652 - DNA, 25 bp, Homo sapien
gcctcagcagcctgcgccgctgctg

SEQ ID NO: 5577653 - DNA, 25 bp, Homo sapien
aagatgagccatgatgcatttactg

SEQ ID NO: 5577654 - DNA, 25 bp, Homo sapien
gtcagccacacaaaacgaggatgga

SEQ ID NO: 5577655 - DNA, 25 bp, Homo sapien
ttaaagggtgcactccataacacag

SEQ ID NO: 5577656 - DNA, 25 bp, Homo sapien
attcaccaagaatagaggttggggg

SEQ ID NO: 5577657 - DNA, 25 bp, Homo sapien
ccacactgtcccctttctgcatggg

SEQ ID NO: 5577658 - DNA, 25 bp, Homo sapien
gaactgagtcagccacacaaaacga

SEQ ID NO: 5577659 - DNA, 25 bp, Homo sapien
cggaacttttaaagggtgcactcca

SEQ ID NO: 5577660 - DNA, 25 bp, Homo sapien
ctggctagaccacctcggaactttt

SEQ ID NO: 5577661 - DNA, 25 bp, Homo sapien
cactccataacacagacagcacggc

SEQ ID NO: 5577662 - DNA, 25 bp, Homo sapien
cttcctcatcctttcctcgcccttt

SEQ ID NO: 5577663 - DNA, 25 bp, Homo sapien
cccctttctgcatgggaggaagggg

SEQ ID NO: 5577664 - DNA, 25 bp, Homo sapien
gggctcgagaactgagtcagccaca

SEQ ID NO: 5577665 - DNA, 25 bp, Homo sapien
tctattaaggagtatctgggttgaa

SEQ ID NO: 5577666 - DNA, 25 bp, Homo sapien
ggaagatcactgtgctccatgacat

SEQ ID NO: 5577667 - DNA, 25 bp, Homo sapien
ataaattacaaagacagggaaatac

SEQ ID NO: 5577668 - DNA, 25 bp, Homo sapien
caaagacagggaaatacagttgttt

SEQ ID NO: 5577669 - DNA, 25 bp, Homo sapien
taattccaggccacttctagcatcc

SEQ ID NO: 5577670 - DNA, 25 bp, Homo sapien
gagtatctgggttgaaagtggttat

SEQ ID NO: 5577671 - DNA, 25 bp, Homo sapien
ttagctacatgccctttaataggac

SEQ ID NO: 5577672 - DNA, 25 bp, Homo sapien
aagtttagaacaatgatggacaatt

SEQ ID NO: 5577673 - DNA, 25 bp, Homo sapien
tgaaagtggttatcatggtgaattc

SEQ ID NO: 5577674 - DNA, 25 bp, Homo sapien
agacctgtacagaaagtgacaacat

SEQ ID NO: 5577675 - DNA, 25 bp, Homo sapien
aggacaaatgataaagaagctatgg

SEQ ID NO: 5577676 - DNA, 25 bp, Homo sapien
gtgtgaggtatgtcggataacctcc

SEQ ID NO: 5577677 - DNA, 25 bp, Homo sapien
actaccacagctgacatcccggagc

SEQ ID NO: 5577678 - DNA, 25 bp, Homo sapien
aacctcccatgcaagtcactaccac

SEQ ID NO: 5577679 - DNA, 25 bp, Homo sapien
gtccccaggctgacttgccctccga

SEQ ID NO: 5577680 - DNA, 25 bp, Homo sapien
gccctccgagcctggagggcaaact

SEQ ID NO: 5577681 - DNA, 25 bp, Homo sapien
tttgcttgggttcgcctctgtcatc

SEQ ID NO: 5577682 - DNA, 25 bp, Homo sapien
tggagggcaaactctgctaattaac

SEQ ID NO: 5577683 - DNA, 25 bp, Homo sapien
ctccacagatagcctgctctcgtgt

SEQ ID NO: 5577684 - DNA, 25 bp, Homo sapien
aaaaaatagccacctggctccattc

SEQ ID NO: 5577685 - DNA, 25 bp, Homo sapien
aactctgaagaggtggagttaaagt

SEQ ID NO: 5577686 - DNA, 25 bp, Homo sapien
gaatgtcttcaatggtcacagctga

SEQ ID NO: 5577687 - DNA, 25 bp, Homo sapien
actccaggtcatagctgaagctgca

SEQ ID NO: 5577688 - DNA, 25 bp, Homo sapien
cccaccccagaatatgccaattttt

SEQ ID NO: 5577689 - DNA, 25 bp, Homo sapien
cctaccaaattcaggaacaggaccc

SEQ ID NO: 5577690 - DNA, 25 bp, Homo sapien
gctctggccaaacccacttcaagcc

SEQ ID NO: 5577691 - DNA, 25 bp, Homo sapien
cttcaagccttacatgcatgctgcc

SEQ ID NO: 5577692 - DNA, 25 bp, Homo sapien
tctaaaatggagcatacagactggt

SEQ ID NO: 5577693 - DNA, 25 bp, Homo sapien
aggtgaaccccgtatcctgcccacc

SEQ ID NO: 5577694 - DNA, 25 bp, Homo sapien
ctgttcatctgcaggtgaaccccgt

SEQ ID NO: 5577695 - DNA, 25 bp, Homo sapien
aaccagattcccccgacaccccatc

SEQ ID NO: 5577696 - DNA, 25 bp, Homo sapien
gtggaagcactccagcccatgctct

SEQ ID NO: 5577697 - DNA, 25 bp, Homo sapien
gacaccccatcaagcttttcctgcc

SEQ ID NO: 5577698 - DNA, 25 bp, Homo sapien
atcccaagtaaaagatccctggttc

SEQ ID NO: 5577699 - DNA, 25 bp, Homo sapien
gcaaaggtactgcctcgtgcccttg

SEQ ID NO: 5577700 - DNA, 25 bp, Homo sapien
aaattgctgggttgaaagatgtgtg

SEQ ID NO: 5577701 - DNA, 25 bp, Homo sapien
gcacatgggcaaacattcctctaga

SEQ ID NO: 5577702 - DNA, 25 bp, Homo sapien
ctgagcagaaacttgccaaacacag

SEQ ID NO: 5577703 - DNA, 25 bp, Homo sapien
gacacttggttaaggctttggaggc

SEQ ID NO: 5577704 - DNA, 25 bp, Homo sapien
atggcaatatgtccacagtgcttct

SEQ ID NO: 5577705 - DNA, 25 bp, Homo sapien
ccaaacacagaaatgcaggaattgc

SEQ ID NO: 5577706 - DNA, 25 bp, Homo sapien
gctggtggtaggactagtccaagca

SEQ ID NO: 5577707 - DNA, 25 bp, Homo sapien
cctccaagacagtgcaaaccttgcc

SEQ ID NO: 5577708 - DNA, 25 bp, Homo sapien
cagggatgaatatggcttccttcct

SEQ ID NO: 5577709 - DNA, 25 bp, Homo sapien
ctgaacataaatcgtaggaagactt

SEQ ID NO: 5577710 - DNA, 25 bp, Homo sapien
aagagttaaccgtttgtagatgttc

SEQ ID NO: 5577711 - DNA, 25 bp, Homo sapien
gggctaggtcaaatccaaactgcca

SEQ ID NO: 5577712 - DNA, 25 bp, Homo sapien
aataaaacctccagacagatcatgt

SEQ ID NO: 5577713 - DNA, 25 bp, Homo sapien
gccgcagcataccaaaaagtgagga

SEQ ID NO: 5577714 - DNA, 25 bp, Homo sapien
ggcaggccaccatgtgaataaaacc

SEQ ID NO: 5577715 - DNA, 25 bp, Homo sapien
tgctctaactactaaagaaggaaat

SEQ ID NO: 5577716 - DNA, 25 bp, Homo sapien
tcatgttctaaatgtgccgcagcat

SEQ ID NO: 5577717 - DNA, 25 bp, Homo sapien
cttgcacataccacagggctaggtc

SEQ ID NO: 5577718 - DNA, 25 bp, Homo sapien
tgtgtgtgaatgaactgaacataaa

SEQ ID NO: 5577719 - DNA, 25 bp, Homo sapien
gaaaatacggaaacagaatcatgct

SEQ ID NO: 5577720 - DNA, 25 bp, Homo sapien
aattaatggaaagtctcagtctgct

SEQ ID NO: 5577721 - DNA, 25 bp, Homo sapien
cctcgattagcaaacagatgtagac

SEQ ID NO: 5577722 - DNA, 25 bp, Homo sapien
taccagcagccatgttcagggtgtg

SEQ ID NO: 5577723 - DNA, 25 bp, Homo sapien
agaggctggacatgtgctaacagct

SEQ ID NO: 5577724 - DNA, 25 bp, Homo sapien
accaaaaaatggggtcatgaagcaa

SEQ ID NO: 5577725 - DNA, 25 bp, Homo sapien
ccgtgtcaccatgggacctcgatta

SEQ ID NO: 5577726 - DNA, 25 bp, Homo sapien
ccttaataggatggcagaatcccgg

SEQ ID NO: 5577727 - DNA, 25 bp, Homo sapien
gaatcttaaagtcagccgtgtcacc

SEQ ID NO: 5577728 - DNA, 25 bp, Homo sapien
gcagaatcccggtgttaaaagaatc

SEQ ID NO: 5577729 - DNA, 25 bp, Homo sapien
atgggcaaactgaggtttggaaaaa

SEQ ID NO: 5577730 - DNA, 25 bp, Homo sapien
ctgagcgcttgggatacatcccctt

SEQ ID NO: 5577731 - DNA, 25 bp, Homo sapien
acatcccatccatgcagagaggagg

SEQ ID NO: 5577732 - DNA, 25 bp, Homo sapien
aggccaagtatctaaggacagcagc

SEQ ID NO: 5577733 - DNA, 25 bp, Homo sapien
cactggcctctggctttcagacctc

SEQ ID NO: 5577734 - DNA, 25 bp, Homo sapien
acacctcacccaggtttggggtgct

SEQ ID NO: 5577735 - DNA, 25 bp, Homo sapien
cacagtaccctcagcagggctgggt

SEQ ID NO: 5577736 - DNA, 25 bp, Homo sapien
aggaggctgtatccagtcctgccct

SEQ ID NO: 5577737 - DNA, 25 bp, Homo sapien
atagttacatcacggagacccctct

SEQ ID NO: 5577738 - DNA, 25 bp, Homo sapien
cctctgcatttcaggtgggcagcag

SEQ ID NO: 5577739 - DNA, 25 bp, Homo sapien
ggagagctacggtgtctctggtctt

SEQ ID NO: 5577740 - DNA, 25 bp, Homo sapien
gacatttgctgtgtgagtcgaggga

SEQ ID NO: 5577741 - DNA, 25 bp, Homo sapien
ggctgggtgagctacctctgcattt

SEQ ID NO: 5577742 - DNA, 25 bp, Homo sapien
taaccatgaagcagtgatatcgcac

SEQ ID NO: 5577743 - DNA, 25 bp, Homo sapien
ggactcccactgagagaccccagta

SEQ ID NO: 5577744 - DNA, 25 bp, Homo sapien
accccactgatggatgctagtagtc

SEQ ID NO: 5577745 - DNA, 25 bp, Homo sapien
agagatggtccccaagcatgctaac

SEQ ID NO: 5577746 - DNA, 25 bp, Homo sapien
agagtgtaccgtacatcgcaggctg

SEQ ID NO: 5577747 - DNA, 25 bp, Homo sapien
ggctgtccagcatcgaccccactga

SEQ ID NO: 5577748 - DNA, 25 bp, Homo sapien
catgaagcagtgatatcgcacagca

SEQ ID NO: 5577749 - DNA, 25 bp, Homo sapien
tgcctggcagctctttagaaagttg

SEQ ID NO: 5577750 - DNA, 25 bp, Homo sapien
tagaaagttgtgtgacgtatgaacc

SEQ ID NO: 5577751 - DNA, 25 bp, Homo sapien
ttccctatatgagagtgtaccgtac

SEQ ID NO: 5577752 - DNA, 25 bp, Homo sapien
tgtgtgacgtatgaaccagttcttc

SEQ ID NO: 5577753 - DNA, 25 bp, Homo sapien
tggaatgcagatgggatctgtgcta

SEQ ID NO: 5577754 - DNA, 25 bp, Homo sapien
agaaacaacaggaacacatatagct

SEQ ID NO: 5577755 - DNA, 25 bp, Homo sapien
tttggaaaagagaactcaaggtctg

SEQ ID NO: 5577756 - DNA, 25 bp, Homo sapien
agccatgggatgattagaacaagat

SEQ ID NO: 5577757 - DNA, 25 bp, Homo sapien
cacatatagctggaatgcagatggg

SEQ ID NO: 5577758 - DNA, 25 bp, Homo sapien
agagacatgaggaagacttcttcaa

SEQ ID NO: 5577759 - DNA, 25 bp, Homo sapien
tacttacgctagccatgggatgatt

SEQ ID NO: 5577760 - DNA, 25 bp, Homo sapien
atgaggaagacttcttcaaggaggt

SEQ ID NO: 5577761 - DNA, 25 bp, Homo sapien
aaggaggtgctcaagccatgttttg

SEQ ID NO: 5577762 - DNA, 25 bp, Homo sapien
agatgggatctgtgctacttacgct

SEQ ID NO: 5577763 - DNA, 25 bp, Homo sapien
agccatgttttggaaaagagaactc

SEQ ID NO: 5577764 - DNA, 25 bp, Homo sapien
cattgccagagttcaggcacagttc

SEQ ID NO: 5577765 - DNA, 25 bp, Homo sapien
ggcaagctgtgactggattctctgc

SEQ ID NO: 5577766 - DNA, 25 bp, Homo sapien
cttcaggtcattgccagagttcagg

SEQ ID NO: 5577767 - DNA, 25 bp, Homo sapien
caggtcattgccagagttcaggcac

SEQ ID NO: 5577768 - DNA, 25 bp, Homo sapien
tgagggcccttcaggtcattgccag

SEQ ID NO: 5577769 - DNA, 25 bp, Homo sapien
attctctgcccagtattccatgagg

SEQ ID NO: 5577770 - DNA, 25 bp, Homo sapien
ggggtcgcagagctgcgttgttttc

SEQ ID NO: 5577771 - DNA, 25 bp, Homo sapien
gcccttcaggtcattgccagagttc

SEQ ID NO: 5577772 - DNA, 25 bp, Homo sapien
tgccagagttcaggcacagttctgc

SEQ ID NO: 5577773 - DNA, 25 bp, Homo sapien
cagagctgcgttgttttctggaggc

SEQ ID NO: 5577774 - DNA, 25 bp, Homo sapien
aagctgtgactggattctctgccca

SEQ ID NO: 5577775 - DNA, 25 bp, Homo sapien
tctttggactttaggatgcagctgc

SEQ ID NO: 5577776 - DNA, 25 bp, Homo sapien
gggtaatggatgtatctttggactt

SEQ ID NO: 5577777 - DNA, 25 bp, Homo sapien
aaatttaagattgggttgcgttctg

SEQ ID NO: 5577778 - DNA, 25 bp, Homo sapien
ttatgtctagagttggaagaagtag

SEQ ID NO: 5577779 - DNA, 25 bp, Homo sapien
atgcagctgccctgatgactcccag

SEQ ID NO: 5577780 - DNA, 25 bp, Homo sapien
ggaagaagtaggcaagatctattca

SEQ ID NO: 5577781 - DNA, 25 bp, Homo sapien
aaagtgaaatctgaagttatgggac

SEQ ID NO: 5577782 - DNA, 25 bp, Homo sapien
tctaatgacctgggtaatggatgta

SEQ ID NO: 5577783 - DNA, 25 bp, Homo sapien
gccctgatgactcccaggagcagca

SEQ ID NO: 5577784 - DNA, 25 bp, Homo sapien
attcaagatactaacaggtgatttt

SEQ ID NO: 5577785 - DNA, 25 bp, Homo sapien
atgctgtaccatatccagtgatctc

SEQ ID NO: 5577786 - DNA, 25 bp, Homo sapien
attcttagaccagcaaaagtgggga

SEQ ID NO: 5577787 - DNA, 25 bp, Homo sapien
aatggggcaactcatgagtagtgcc

SEQ ID NO: 5577788 - DNA, 25 bp, Homo sapien
ttgaaaccatggtaagacaaccctc

SEQ ID NO: 5577789 - DNA, 25 bp, Homo sapien
ggaagacaacactctgggcatcaaa

SEQ ID NO: 5577790 - DNA, 25 bp, Homo sapien
tctggtagctacaaaggtgtttccc

SEQ ID NO: 5577791 - DNA, 25 bp, Homo sapien
gatcagaatgagataccctggacgg

SEQ ID NO: 5577792 - DNA, 25 bp, Homo sapien
gggatcatatgctgaaatggggcaa

SEQ ID NO: 5577793 - DNA, 25 bp, Homo sapien
gatatgataactgagtgggactgat

SEQ ID NO: 5577794 - DNA, 25 bp, Homo sapien
cttcgtgaaacctggaagctggaag

SEQ ID NO: 5577795 - DNA, 25 bp, Homo sapien
tctaatatctgggggagaaagtata

SEQ ID NO: 5577796 - DNA, 25 bp, Homo sapien
agttgagagatgtgccttcgtgaaa

SEQ ID NO: 5577797 - DNA, 25 bp, Homo sapien
gttcacaggaaagtttttagcagac

SEQ ID NO: 5577798 - DNA, 25 bp, Homo sapien
tccattgtgtggtaagtcatcaact

SEQ ID NO: 5577799 - DNA, 25 bp, Homo sapien
tcagccagtatatgagggctatttc

SEQ ID NO: 5577800 - DNA, 25 bp, Homo sapien
ttaaaagcacttggtatggagagat

SEQ ID NO: 5577801 - DNA, 25 bp, Homo sapien
cagcagctctggcatttgacacaat

SEQ ID NO: 5577802 - DNA, 25 bp, Homo sapien
tacaggcagcacagacattctgctc

SEQ ID NO: 5577803 - DNA, 25 bp, Homo sapien
ggtgtggtgtaatacaggcagcaca

SEQ ID NO: 5577804 - DNA, 25 bp, Homo sapien
ctcggtagtatgtctagccagcagc

SEQ ID NO: 5577805 - DNA, 25 bp, Homo sapien
cgttgggtctgtcctggttttctcc

SEQ ID NO: 5577806 - DNA, 25 bp, Homo sapien
tttagcagacaacatcgttgggtct

SEQ ID NO: 5577807 - DNA, 25 bp, Homo sapien
ttgtgaagtacttggtcaagacatt

SEQ ID NO: 5577808 - DNA, 25 bp, Homo sapien
cttttaaagtgtgcacgggaatcac

SEQ ID NO: 5577809 - DNA, 25 bp, Homo sapien
aattaggagtttgtatcagatcatc

SEQ ID NO: 5577810 - DNA, 25 bp, Homo sapien
tccacacaggggtttctgatgcttt

SEQ ID NO: 5577811 - DNA, 25 bp, Homo sapien
tctaagggaatcactgtaaattgtc

SEQ ID NO: 5577812 - DNA, 25 bp, Homo sapien
atgaaaggtgcttgcagaacctcca

SEQ ID NO: 5577813 - DNA, 25 bp, Homo sapien
gcacgggaatcaccagctcattact

SEQ ID NO: 5577814 - DNA, 25 bp, Homo sapien
ttggctgctatctgctatggctgac

SEQ ID NO: 5577815 - DNA, 25 bp, Homo sapien
caaaaaccgtgtctctgaagcagat

SEQ ID NO: 5577816 - DNA, 25 bp, Homo sapien
attggaatagagatacactgatttc

SEQ ID NO: 5577817 - DNA, 25 bp, Homo sapien
ttcaggaactgaagatataggttat

SEQ ID NO: 5577818 - DNA, 25 bp, Homo sapien
cagaactgaaagaattggaatagag

SEQ ID NO: 5577819 - DNA, 25 bp, Homo sapien
tgcatcagaattaattttgcccctc

SEQ ID NO: 5577820 - DNA, 25 bp, Homo sapien
atttgtcgcatcagagtgcccaggt

SEQ ID NO: 5577821 - DNA, 25 bp, Homo sapien
gaggcactgctctaatcagctacct

SEQ ID NO: 5577822 - DNA, 25 bp, Homo sapien
acttatttgtcgcatcagagtgccc

SEQ ID NO: 5577823 - DNA, 25 bp, Homo sapien
cttgtggctgtggaccatgccttac

SEQ ID NO: 5577824 - DNA, 25 bp, Homo sapien
ctgcacaccctacccaccattgcac

SEQ ID NO: 5577825 - DNA, 25 bp, Homo sapien
gcgacttgagaggcactgctctaat

SEQ ID NO: 5577826 - DNA, 25 bp, Homo sapien
atcctacccataccatgagacttat

SEQ ID NO: 5577827 - DNA, 25 bp, Homo sapien
ggactataagctccttgtggctgtg

SEQ ID NO: 5577828 - DNA, 25 bp, Homo sapien
atttatatcctggactataagctcc

SEQ ID NO: 5577829 - DNA, 25 bp, Homo sapien
gtgggactgcttgcctgtgattcta

SEQ ID NO: 5577830 - DNA, 25 bp, Homo sapien
aaaacgaacatcacaggtaaatagc

SEQ ID NO: 5577831 - DNA, 25 bp, Homo sapien
acagaagattctgctaccaggaata

SEQ ID NO: 5577832 - DNA, 25 bp, Homo sapien
cacaaagggaggtttgcctcccagc

SEQ ID NO: 5577833 - DNA, 25 bp, Homo sapien
gctaccaggaatatgaaaacgaaca

SEQ ID NO: 5577834 - DNA, 25 bp, Homo sapien
caatgagaacacatgccaagttgac

SEQ ID NO: 5577835 - DNA, 25 bp, Homo sapien
catcacaggtaaatagccacgggtt

SEQ ID NO: 5577836 - DNA, 25 bp, Homo sapien
agctgctgcagtaaacagaagattc

SEQ ID NO: 5577837 - DNA, 25 bp, Homo sapien
tgtgccgattttgagtccatgaatt

SEQ ID NO: 5577838 - DNA, 25 bp, Homo sapien
tctcaacaatactatgtgccgattt

SEQ ID NO: 5577839 - DNA, 25 bp, Homo sapien
tcccacttttgtaagctgctgcagt

SEQ ID NO: 5577840 - DNA, 25 bp, Homo sapien
ggtaaatagccacgggttcaatgcg

SEQ ID NO: 5577841 - DNA, 25 bp, Homo sapien
aaagcaagtacttcgaaaatttgac

SEQ ID NO: 5577842 - DNA, 25 bp, Homo sapien
gtcaaattttcgaagtacttgcttt

SEQ ID NO: 5577843 - DNA, 25 bp, Homo sapien
tgcaaagcactggactcacctctct

SEQ ID NO: 5577844 - DNA, 25 bp, Homo sapien
gccttggtagctttctggtgccttc

SEQ ID NO: 5577845 - DNA, 25 bp, Homo sapien
tttccttggctggccctgaagttcc

SEQ ID NO: 5577846 - DNA, 25 bp, Homo sapien
tgtaaccagctagttcactgtaggt

SEQ ID NO: 5577847 - DNA, 25 bp, Homo sapien
ctggctattattcatgggtggaaga

SEQ ID NO: 5577848 - DNA, 25 bp, Homo sapien
aaggtgaacagttgtgcaaagcact

SEQ ID NO: 5577849 - DNA, 25 bp, Homo sapien
ctctgtgcagctggtcagtctctca

SEQ ID NO: 5577850 - DNA, 25 bp, Homo sapien
ggaaacgcctcaaggtgaacagttg

SEQ ID NO: 5577851 - DNA, 25 bp, Homo sapien
gggtggaagagttgattctgtaacc

SEQ ID NO: 5577852 - DNA, 25 bp, Homo sapien
cattactttggaaacaggaaacgcc

SEQ ID NO: 5577853 - DNA, 25 bp, Homo sapien
tttgagattgatggaagctctgtgc

SEQ ID NO: 5577854 - DNA, 25 bp, Homo sapien
gcacagactgtgtgacaggtatgtt

SEQ ID NO: 5577855 - DNA, 25 bp, Homo sapien
actaaaacaaggtaagtctgagttc

SEQ ID NO: 5577856 - DNA, 25 bp, Homo sapien
cttgtttgtagctccctcactctgc

SEQ ID NO: 5577857 - DNA, 25 bp, Homo sapien
cattttatgaggatagtgcaattat

SEQ ID NO: 5577858 - DNA, 25 bp, Homo sapien
agatctctaatctgggatttgaacc

SEQ ID NO: 5577859 - DNA, 25 bp, Homo sapien
aaggtaagtctgagttccgagcatc

SEQ ID NO: 5577860 - DNA, 25 bp, Homo sapien
gggatttgaacctagactgtctaca

SEQ ID NO: 5577861 - DNA, 25 bp, Homo sapien
ttccgagcatcgtaaccactgtgat

SEQ ID NO: 5577862 - DNA, 25 bp, Homo sapien
atagtaatgatagccaccatttatt

SEQ ID NO: 5577863 - DNA, 25 bp, Homo sapien
agtgaaacacaaacaagtaacttct

SEQ ID NO: 5577864 - DNA, 25 bp, Homo sapien
ccactgtgatacagagtggaaacca

SEQ ID NO: 5577865 - DNA, 25 bp, Homo sapien
tgcaagctaaagtatcaggggtatg

SEQ ID NO: 5577866 - DNA, 25 bp, Homo sapien
ttggccaacgcaatttgaccacgat

SEQ ID NO: 5577867 - DNA, 25 bp, Homo sapien
tccgtggaaaaaaacgttgtgcatc

SEQ ID NO: 5577868 - DNA, 25 bp, Homo sapien
caggggtatggacatacctgccctc

SEQ ID NO: 5577869 - DNA, 25 bp, Homo sapien
acataagctgccaatccaagataac

SEQ ID NO: 5577870 - DNA, 25 bp, Homo sapien
tctggtcatctggcgtttactgtgc

SEQ ID NO: 5577871 - DNA, 25 bp, Homo sapien
ggacaagcccaggtactgagtttcc

SEQ ID NO: 5577872 - DNA, 25 bp, Homo sapien
agaagagttctgcctgaaagatatc

SEQ ID NO: 5577873 - DNA, 25 bp, Homo sapien
caggcaagcgtagacgcactctacg

SEQ ID NO: 5577874 - DNA, 25 bp, Homo sapien
agccagcaatgttcagcggtgtgtt

SEQ ID NO: 5577875 - DNA, 25 bp, Homo sapien
ttgccagcaagcctgcctggaagac

SEQ ID NO: 5577876 - DNA, 25 bp, Homo sapien
tttgagctgtatatatttccccact

SEQ ID NO: 5577877 - DNA, 25 bp, Homo sapien
tgttgttggccatggttaccacctt

SEQ ID NO: 5577878 - DNA, 25 bp, Homo sapien
tcgaagccttaatcaaaccagaaaa

SEQ ID NO: 5577879 - DNA, 25 bp, Homo sapien
attactaagtattactgagagtatt

SEQ ID NO: 5577880 - DNA, 25 bp, Homo sapien
cattagtatgataggtgagagagaa

SEQ ID NO: 5577881 - DNA, 25 bp, Homo sapien
aaaacactactacttatatggcatt

SEQ ID NO: 5577882 - DNA, 25 bp, Homo sapien
tgggacttaaaggtcagagagtcaa

SEQ ID NO: 5577883 - DNA, 25 bp, Homo sapien
gagagaatgttgttggccatggtta

SEQ ID NO: 5577884 - DNA, 25 bp, Homo sapien
agaaccttgggacttaaaggtcaga

SEQ ID NO: 5577885 - DNA, 25 bp, Homo sapien
gggcatgttaggatttataatctcc

SEQ ID NO: 5577886 - DNA, 25 bp, Homo sapien
atatggcattagtatgataggtgag

SEQ ID NO: 5577887 - DNA, 25 bp, Homo sapien
gcacagccagaggattgactttggg

SEQ ID NO: 5577888 - DNA, 25 bp, Homo sapien
aatcccatgatggcagtgaaagaca

SEQ ID NO: 5577889 - DNA, 25 bp, Homo sapien
tgcacaaatgcctatccaaccttcc

SEQ ID NO: 5577890 - DNA, 25 bp, Homo sapien
tgggccagttgagattcacaactcc

SEQ ID NO: 5577891 - DNA, 25 bp, Homo sapien
atagcttaaaacatgggaagtattg

SEQ ID NO: 5577892 - DNA, 25 bp, Homo sapien
atgtagtaggcagagttcatagttc

SEQ ID NO: 5577893 - DNA, 25 bp, Homo sapien
gtgtgtgcttgtagaaagaaaatcc

SEQ ID NO: 5577894 - DNA, 25 bp, Homo sapien
gttcaacatgggataaatgtgagat

SEQ ID NO: 5577895 - DNA, 25 bp, Homo sapien
gtgaaagacaattgggccagttgag

SEQ ID NO: 5577896 - DNA, 25 bp, Homo sapien
agcctgagcactataatgtagtagg

SEQ ID NO: 5577897 - DNA, 25 bp, Homo sapien
tgagattttggcacacagcttcttc

SEQ ID NO: 5577898 - DNA, 25 bp, Homo sapien
aggtgagcaagaaaccgtactctaa

SEQ ID NO: 5577899 - DNA, 25 bp, Homo sapien
tgtaagagcaaattcaaagtcacct

SEQ ID NO: 5577900 - DNA, 25 bp, Homo sapien
ctctaaaggaatttgagctgctgcc

SEQ ID NO: 5577901 - DNA, 25 bp, Homo sapien
aactaaggaacttaatttgactgtc

SEQ ID NO: 5577902 - DNA, 25 bp, Homo sapien
atgacagaagattgcattaagtgca

SEQ ID NO: 5577903 - DNA, 25 bp, Homo sapien
cctcggtaacttatcctcccctgga

SEQ ID NO: 5577904 - DNA, 25 bp, Homo sapien
gcattaagtgcagctctattatttc

SEQ ID NO: 5577905 - DNA, 25 bp, Homo sapien
agtgtgtatctggaacaggacaggt

SEQ ID NO: 5577906 - DNA, 25 bp, Homo sapien
ccctcagtcatatcacctcggtaac

SEQ ID NO: 5577907 - DNA, 25 bp, Homo sapien
cattacaataggttttccgaaattc

SEQ ID NO: 5577908 - DNA, 25 bp, Homo sapien
cagagatcactgtcagctaagtgtg

SEQ ID NO: 5577909 - DNA, 25 bp, Homo sapien
tcagaagtgtcgttaggttgtattt

SEQ ID NO: 5577910 - DNA, 25 bp, Homo sapien
ttaacccagcagatttcgttcacat

SEQ ID NO: 5577911 - DNA, 25 bp, Homo sapien
caaatgatgcttgtattatgcccac

SEQ ID NO: 5577912 - DNA, 25 bp, Homo sapien
ctggagaattactgggttccgttgg

SEQ ID NO: 5577913 - DNA, 25 bp, Homo sapien
ataatatcactggagttgataattt

SEQ ID NO: 5577914 - DNA, 25 bp, Homo sapien
ctttaagaaacatgcttcagatttc

SEQ ID NO: 5577915 - DNA, 25 bp, Homo sapien
ttggaggcgccccatttccttgctt

SEQ ID NO: 5577916 - DNA, 25 bp, Homo sapien
tcttcagcttcagaagtgtcgttag

SEQ ID NO: 5577917 - DNA, 25 bp, Homo sapien
accccagtataagaattaacccagc

SEQ ID NO: 5577918 - DNA, 25 bp, Homo sapien
cagcttcagaagtgtcgttaggttg

SEQ ID NO: 5577919 - DNA, 25 bp, Homo sapien
taatggccagagtataataaccctt

SEQ ID NO: 5577920 - DNA, 25 bp, Homo sapien
gttgttacgtagtcttcaaagccat

SEQ ID NO: 5577921 - DNA, 25 bp, Homo sapien
taccctgttgagatgagtttggtct

SEQ ID NO: 5577922 - DNA, 25 bp, Homo sapien
atgatgtggggtatattcttggcta

SEQ ID NO: 5577923 - DNA, 25 bp, Homo sapien
agagggaaacctaccaagtacacat

SEQ ID NO: 5577924 - DNA, 25 bp, Homo sapien
cctgttaaggttctgtggcaaatga

SEQ ID NO: 5577925 - DNA, 25 bp, Homo sapien
tacatggccatcctgatacatagac

SEQ ID NO: 5577926 - DNA, 25 bp, Homo sapien
agaaaattttagaacacagagggaa

SEQ ID NO: 5577927 - DNA, 25 bp, Homo sapien
atcaaaacatagcaaaccatgcaga

SEQ ID NO: 5577928 - DNA, 25 bp, Homo sapien
ggcaaatgatcatggtctgaaaggc

SEQ ID NO: 5577929 - DNA, 25 bp, Homo sapien
cccttttaggggcaatgatgtgggg

SEQ ID NO: 5577930 - DNA, 25 bp, Homo sapien
caagctttccccagtatgatcatac

SEQ ID NO: 5577931 - DNA, 25 bp, Homo sapien
gctggggagtctaggactaattcca

SEQ ID NO: 5577932 - DNA, 25 bp, Homo sapien
ccaatacgtttggaattgctggata

SEQ ID NO: 5577933 - DNA, 25 bp, Homo sapien
gtttgcatgcaaaaggtatttagtt

SEQ ID NO: 5577934 - DNA, 25 bp, Homo sapien
aacctggtactatgtagattgtcta

SEQ ID NO: 5577935 - DNA, 25 bp, Homo sapien
taaaagacccagagcagttaatctt

SEQ ID NO: 5577936 - DNA, 25 bp, Homo sapien
ctccctgcattagtaggtagccagt

SEQ ID NO: 5577937 - DNA, 25 bp, Homo sapien
tgcccgtaaatactgctggggagtc

SEQ ID NO: 5577938 - DNA, 25 bp, Homo sapien
agacatgactgcccgtaaatactgc

SEQ ID NO: 5577939 - DNA, 25 bp, Homo sapien
tccccaaagtatagacatgactgcc

SEQ ID NO: 5577940 - DNA, 25 bp, Homo sapien
ataaagtcagctactaacctggtac

SEQ ID NO: 5577941 - DNA, 25 bp, Homo sapien
tagtaggtagccagtttgtattgtg

SEQ ID NO: 5577942 - DNA, 25 bp, Homo sapien
tccaagcagtaaagatgttcacatc

SEQ ID NO: 5577943 - DNA, 25 bp, Homo sapien
cggtatttgttatgcagaggtggcc

SEQ ID NO: 5577944 - DNA, 25 bp, Homo sapien
tggcaatttaggcatttcagagctc

SEQ ID NO: 5577945 - DNA, 25 bp, Homo sapien
tctgcttacttctgatgggctacac

SEQ ID NO: 5577946 - DNA, 25 bp, Homo sapien
tgtccaagctccacttgcagtgctc

SEQ ID NO: 5577947 - DNA, 25 bp, Homo sapien
ccttgagccgcttgagtaacttcca

SEQ ID NO: 5577948 - DNA, 25 bp, Homo sapien
ggccaactgagctgcagacttccct

SEQ ID NO: 5577949 - DNA, 25 bp, Homo sapien
tgtcaccatccaaggcaggtcaggt

SEQ ID NO: 5577950 - DNA, 25 bp, Homo sapien
gcaggtcaggtaactcctgtgtggc

SEQ ID NO: 5577951 - DNA, 25 bp, Homo sapien
cctcctaggcagatgatagcaaagg

SEQ ID NO: 5577952 - DNA, 25 bp, Homo sapien
aactgcaacagaaatagggactttt

SEQ ID NO: 5577953 - DNA, 25 bp, Homo sapien
cacctgacatctccacatgggatct

SEQ ID NO: 5577954 - DNA, 25 bp, Homo sapien
tgtcagaagtagaattcataccccc

SEQ ID NO: 5577955 - DNA, 25 bp, Homo sapien
ccttgggtgccaataggtcaccatg

SEQ ID NO: 5577956 - DNA, 25 bp, Homo sapien
acatgggatcttctagtcctctggt

SEQ ID NO: 5577957 - DNA, 25 bp, Homo sapien
ttgttgaatatctgggctctggacc

SEQ ID NO: 5577958 - DNA, 25 bp, Homo sapien
tcatacccccaagcaccagcagaga

SEQ ID NO: 5577959 - DNA, 25 bp, Homo sapien
gattccggctcactctgtccagact

SEQ ID NO: 5577960 - DNA, 25 bp, Homo sapien
gtcccaagtgtctgaggagtaatga

SEQ ID NO: 5577961 - DNA, 25 bp, Homo sapien
aatggctaagccacctgacatctcc

SEQ ID NO: 5577962 - DNA, 25 bp, Homo sapien
ggtcaccatgaatgtcccaagtgtc

SEQ ID NO: 5577963 - DNA, 25 bp, Homo sapien
agtggggcttcacccgttcgttcac

SEQ ID NO: 5577964 - DNA, 25 bp, Homo sapien
cattgcagcaatttacagaggtagg

SEQ ID NO: 5577965 - DNA, 25 bp, Homo sapien
gcagcaatttacagaggtaggtatt

SEQ ID NO: 5577966 - DNA, 25 bp, Homo sapien
tagtgtttacactgtgccaattaat

SEQ ID NO: 5577967 - DNA, 25 bp, Homo sapien
agtaccctctgaacagatgaggaaa

SEQ ID NO: 5577968 - DNA, 25 bp, Homo sapien
tgaagaactaatagatagtgtttac

SEQ ID NO: 5577969 - DNA, 25 bp, Homo sapien
aggagattgacaggaaatacctcat

SEQ ID NO: 5577970 - DNA, 25 bp, Homo sapien
gacagacaagacaagcaacttggat

SEQ ID NO: 5577971 - DNA, 25 bp, Homo sapien
acctcatgtaattcattgcagcaat

SEQ ID NO: 5577972 - DNA, 25 bp, Homo sapien
acaggcagcatcaagatttagatta

SEQ ID NO: 5577973 - DNA, 25 bp, Homo sapien
aatttagaaacatcagaatgaagaa

SEQ ID NO: 5577974 - DNA, 25 bp, Homo sapien
tagaaacagcataagattagtttgt

SEQ ID NO: 5577975 - DNA, 25 bp, Homo sapien
taagagtttgtgtttgacaagaacc

SEQ ID NO: 5577976 - DNA, 25 bp, Homo sapien
aacaacaacagtcatcaaggcacat

SEQ ID NO: 5577977 - DNA, 25 bp, Homo sapien
cagaatggagtcagcccaatgtttt

SEQ ID NO: 5577978 - DNA, 25 bp, Homo sapien
gggggaatgattaagcaacgattaa

SEQ ID NO: 5577979 - DNA, 25 bp, Homo sapien
taggtgcccaaaggttttcattaca

SEQ ID NO: 5577980 - DNA, 25 bp, Homo sapien
caaatgtctaatatgggggaatgat

SEQ ID NO: 5577981 - DNA, 25 bp, Homo sapien
tgcaaaagaataagttaggtgccca

SEQ ID NO: 5577982 - DNA, 25 bp, Homo sapien
aaaactgagaacagctccacctgcc

SEQ ID NO: 5577983 - DNA, 25 bp, Homo sapien
ttagctctgcataagtctctggtct

SEQ ID NO: 5577984 - DNA, 25 bp, Homo sapien
tttagctctgcggaaccagaatgga

SEQ ID NO: 5577985 - DNA, 25 bp, Homo sapien
acaagaaccacagctgttcaccttt

SEQ ID NO: 5577986 - DNA, 25 bp, Homo sapien
cttaagagtttgctgcagaagcgtg

SEQ ID NO: 5577987 - DNA, 25 bp, Homo sapien
gagtaggtgatgtatttgagccctc

SEQ ID NO: 5577988 - DNA, 25 bp, Homo sapien
atgcaatgagtaggtgatgtatttg

SEQ ID NO: 5577989 - DNA, 25 bp, Homo sapien
agctggaggacttaagagtttgctg

SEQ ID NO: 5577990 - DNA, 25 bp, Homo sapien
taggctctttaggaaggaccatgca

SEQ ID NO: 5577991 - DNA, 25 bp, Homo sapien
ttctaggctctttaggaaggaccat

SEQ ID NO: 5577992 - DNA, 25 bp, Homo sapien
cacccagcaggagaaaccattttct

SEQ ID NO: 5577993 - DNA, 25 bp, Homo sapien
agtctttacacccctagaggagctg

SEQ ID NO: 5577994 - DNA, 25 bp, Homo sapien
aaggaccatgcaatgagtaggtgat

SEQ ID NO: 5577995 - DNA, 25 bp, Homo sapien
ctttaggaaggaccatgcaatgagt

SEQ ID NO: 5577996 - DNA, 25 bp, Homo sapien
gccctcacagtctttacacccctag

SEQ ID NO: 5577997 - DNA, 25 bp, Homo sapien
cattgctacattattggcacctaga

SEQ ID NO: 5577998 - DNA, 25 bp, Homo sapien
ccatgctagcatgtagggtattgat

SEQ ID NO: 5577999 - DNA, 25 bp, Homo sapien
tatgcaaagatagataagtacattc

SEQ ID NO: 5578000 - DNA, 25 bp, Homo sapien
agcatgtagggtattgatttttgtc

SEQ ID NO: 5578001 - DNA, 25 bp, Homo sapien
aaaatccaaggacattattcagagt

SEQ ID NO: 5578002 - DNA, 25 bp, Homo sapien
accctaactaggaatttgaaggaga

SEQ ID NO: 5578003 - DNA, 25 bp, Homo sapien
gtaacaatatcaaaatggtctaaat

SEQ ID NO: 5578004 - DNA, 25 bp, Homo sapien
aaatggtctaaattgtgatgataat

SEQ ID NO: 5578005 - DNA, 25 bp, Homo sapien
aatatgatagaagacttagttgatc

SEQ ID NO: 5578006 - DNA, 25 bp, Homo sapien
ggcacctagaatagtatctgagatg

SEQ ID NO: 5578007 - DNA, 25 bp, Homo sapien
aggagaaataaggatcttctacatg

SEQ ID NO: 5578008 - DNA, 25 bp, Homo sapien
gcagacccgctcaatggaaaatttc

SEQ ID NO: 5578009 - DNA, 25 bp, Homo sapien
gtccacctgagtgacctcatggagc

SEQ ID NO: 5578010 - DNA, 25 bp, Homo sapien
tccctgatggaaagctagaggtttt

SEQ ID NO: 5578011 - DNA, 25 bp, Homo sapien
ataggctaccacatatggaagtttc

SEQ ID NO: 5578012 - DNA, 25 bp, Homo sapien
agggtggtcgtgcctcctgtccacc

SEQ ID NO: 5578013 - DNA, 25 bp, Homo sapien
tgtgactgagtcaaaagtacatttg

SEQ ID NO: 5578014 - DNA, 25 bp, Homo sapien
tttttgatccttagaagaaaacagc

SEQ ID NO: 5578015 - DNA, 25 bp, Homo sapien
gtgggtttaccagcagacccgctca

SEQ ID NO: 5578016 - DNA, 25 bp, Homo sapien
ctcatgctgttgaggatgaccatgg

SEQ ID NO: 5578017 - DNA, 25 bp, Homo sapien
tttagcagcaatgatgaaatagtaa

SEQ ID NO: 5578018 - DNA, 25 bp, Homo sapien
agtaaatgacaacttcaaataggct

SEQ ID NO: 5578019 - DNA, 25 bp, Homo sapien
tgtggagagctctgatgagcagtta

SEQ ID NO: 5578020 - DNA, 25 bp, Homo sapien
tgagcagttaaacgacacaaaaccc

SEQ ID NO: 5578021 - DNA, 25 bp, Homo sapien
agggggcagcttgcatttctcctgt

SEQ ID NO: 5578022 - DNA, 25 bp, Homo sapien
ggcccctgtggttgcaactctgagg

SEQ ID NO: 5578023 - DNA, 25 bp, Homo sapien
catgccaataccacctgccacagct

SEQ ID NO: 5578024 - DNA, 25 bp, Homo sapien
gccacagctctgcgaggctctcctt

SEQ ID NO: 5578025 - DNA, 25 bp, Homo sapien
gggcacccgcagacttctagtgtct

SEQ ID NO: 5578026 - DNA, 25 bp, Homo sapien
acaagagaattgaggtttcagtgtg

SEQ ID NO: 5578027 - DNA, 25 bp, Homo sapien
gggaaggagccaacctcttggctgg

SEQ ID NO: 5578028 - DNA, 25 bp, Homo sapien
actaagacccatgcagaagtttctc

SEQ ID NO: 5578029 - DNA, 25 bp, Homo sapien
tccttatggtagcacatgggagatc

SEQ ID NO: 5578030 - DNA, 25 bp, Homo sapien
tttgctgcaaaaagtctttgccaac

SEQ ID NO: 5578031 - DNA, 25 bp, Homo sapien
tcccaactaaacctgtggtgttcca

SEQ ID NO: 5578032 - DNA, 25 bp, Homo sapien
ttggtgaaagactcatacaacccac

SEQ ID NO: 5578033 - DNA, 25 bp, Homo sapien
gcaataaagttggtgaaagactcat

SEQ ID NO: 5578034 - DNA, 25 bp, Homo sapien
tcagcatcttgattataagcctaac

SEQ ID NO: 5578035 - DNA, 25 bp, Homo sapien
cccgatgctaaggttgaaaatcagc

SEQ ID NO: 5578036 - DNA, 25 bp, Homo sapien
aagtttctaactcagctgcaaaata

SEQ ID NO: 5578037 - DNA, 25 bp, Homo sapien
tttagatccagaaccaaagaaaagc

SEQ ID NO: 5578038 - DNA, 25 bp, Homo sapien
aaaaagaatgtagtataagtgaatc

SEQ ID NO: 5578039 - DNA, 25 bp, Homo sapien
gatatccttggattctgctgtctca

SEQ ID NO: 5578040 - DNA, 25 bp, Homo sapien
atacaacccacaatgttgcccccat

SEQ ID NO: 5578041 - DNA, 25 bp, Homo sapien
gtccttcacatggtaagtttggtgg

SEQ ID NO: 5578042 - DNA, 25 bp, Homo sapien
tcagaaagaatgcccatgtgctgtc

SEQ ID NO: 5578043 - DNA, 25 bp, Homo sapien
gaaatgcacttaaaggcacaaagac

SEQ ID NO: 5578044 - DNA, 25 bp, Homo sapien
tggtccaagttaatgctggggagga

SEQ ID NO: 5578045 - DNA, 25 bp, Homo sapien
gacctccagaggtcaactgcttgct

SEQ ID NO: 5578046 - DNA, 25 bp, Homo sapien
aaggcacaaagacaatacataatac

SEQ ID NO: 5578047 - DNA, 25 bp, Homo sapien
ctgattgatttgagaagaaagagtt

SEQ ID NO: 5578048 - DNA, 25 bp, Homo sapien
ttgcaggtctcagaaagaatgccca

SEQ ID NO: 5578049 - DNA, 25 bp, Homo sapien
tacataatacctcacaggcatattt

SEQ ID NO: 5578050 - DNA, 25 bp, Homo sapien
tgctggggaggaattttcttccttg

SEQ ID NO: 5578051 - DNA, 25 bp, Homo sapien
ctaaggacctccagaggtcaactgc

SEQ ID NO: 5578052 - DNA, 25 bp, Homo sapien
ggactgaattgtgcccaactccacc

SEQ ID NO: 5578053 - DNA, 25 bp, Homo sapien
atgaggatggaaataaatgcattgc

SEQ ID NO: 5578054 - DNA, 25 bp, Homo sapien
tgtactaagtgaatggaagctgaag

SEQ ID NO: 5578055 - DNA, 25 bp, Homo sapien
aatgtgcctgtaattggaaataggg

SEQ ID NO: 5578056 - DNA, 25 bp, Homo sapien
tcactgttgtggactgaattgtgcc

SEQ ID NO: 5578057 - DNA, 25 bp, Homo sapien
tgtcactgatttgctgggcacattc

SEQ ID NO: 5578058 - DNA, 25 bp, Homo sapien
tgtggaggctggattaaaccataaa

SEQ ID NO: 5578059 - DNA, 25 bp, Homo sapien
caaattcttgagggtatgaggatgg

SEQ ID NO: 5578060 - DNA, 25 bp, Homo sapien
catttgtaaaatgtggaggctggat

SEQ ID NO: 5578061 - DNA, 25 bp, Homo sapien
aaccataaagtgaagtcactgttgt

SEQ ID NO: 5578062 - DNA, 25 bp, Homo sapien
gaaatagggtctttagagagtccat

SEQ ID NO: 5578063 - DNA, 25 bp, Homo sapien
cgcacccagtctgcaagtggatttt

SEQ ID NO: 5578064 - DNA, 25 bp, Homo sapien
agccaacgcacccagtctgcaagtg

SEQ ID NO: 5578065 - DNA, 25 bp, Homo sapien
agtctccctgggcctgatacatttc

SEQ ID NO: 5578066 - DNA, 25 bp, Homo sapien
catttcgcatagctcagactgatct

SEQ ID NO: 5578067 - DNA, 25 bp, Homo sapien
caacgcacccagtctgcaagtggat

SEQ ID NO: 5578068 - DNA, 25 bp, Homo sapien
gcgtgtgaccgaagtcccctattca

SEQ ID NO: 5578069 - DNA, 25 bp, Homo sapien
ctgggcctgatacatttcgcatagc

SEQ ID NO: 5578070 - DNA, 25 bp, Homo sapien
gaccgaagtcccctattcactgtac

SEQ ID NO: 5578071 - DNA, 25 bp, Homo sapien
tccctgggcctgatacatttcgcat

SEQ ID NO: 5578072 - DNA, 25 bp, Homo sapien
attcactgtacagtctccctgggcc

SEQ ID NO: 5578073 - DNA, 25 bp, Homo sapien
cagactgatctgagctatttttctt

SEQ ID NO: 5578074 - DNA, 25 bp, Homo sapien
caagacctgtggaatttacatatgt

SEQ ID NO: 5578075 - DNA, 25 bp, Homo sapien
ccgggaccgttgcaatagtgtctta

SEQ ID NO: 5578076 - DNA, 25 bp, Homo sapien
agaaaaacaagcattgctgagaatg

SEQ ID NO: 5578077 - DNA, 25 bp, Homo sapien
agaatgctagcaatgatgggatttc

SEQ ID NO: 5578078 - DNA, 25 bp, Homo sapien
agttttatctcaccgggaccgttgc

SEQ ID NO: 5578079 - DNA, 25 bp, Homo sapien
cctatttgcttggtgtctctgcctc

SEQ ID NO: 5578080 - DNA, 25 bp, Homo sapien
aagaggagagacataatttaacaaa

SEQ ID NO: 5578081 - DNA, 25 bp, Homo sapien
tgtagttctgtgcaggtaggaagag

SEQ ID NO: 5578082 - DNA, 25 bp, Homo sapien
ccttttcaggggaatacaaacagcc

SEQ ID NO: 5578083 - DNA, 25 bp, Homo sapien
gtgcatgcctatgtctgtgtagttc

SEQ ID NO: 5578084 - DNA, 25 bp, Homo sapien
gggaatacaaacagccaagacctgt

SEQ ID NO: 5578085 - DNA, 25 bp, Homo sapien
accctttactgggcgccatggtggg

SEQ ID NO: 5578086 - DNA, 25 bp, Homo sapien
tgaaaccatcactagatggactccc

SEQ ID NO: 5578087 - DNA, 25 bp, Homo sapien
ctgtctcaagctcatatgcatctcc

SEQ ID NO: 5578088 - DNA, 25 bp, Homo sapien
agaaggtcaaagacccacacaccct

SEQ ID NO: 5578089 - DNA, 25 bp, Homo sapien
tctcaggactgaggttatttattcc

SEQ ID NO: 5578090 - DNA, 25 bp, Homo sapien
gccaactaggttttctcaggactga

SEQ ID NO: 5578091 - DNA, 25 bp, Homo sapien
ggaaaaaaatgctaactcaattatg

SEQ ID NO: 5578092 - DNA, 25 bp, Homo sapien
tcagtaaaattagcgatgccacagt

SEQ ID NO: 5578093 - DNA, 25 bp, Homo sapien
cattaggaccatgagcactccaatc

SEQ ID NO: 5578094 - DNA, 25 bp, Homo sapien
agatggactccctaattcaggtgtt

SEQ ID NO: 5578095 - DNA, 25 bp, Homo sapien
actggggcagttccggttctgccat

SEQ ID NO: 5578096 - DNA, 25 bp, Homo sapien
acagggttggtatgcacccgtatca

SEQ ID NO: 5578097 - DNA, 25 bp, Homo sapien
gcccccactgagtcctgtgagctgc

SEQ ID NO: 5578098 - DNA, 25 bp, Homo sapien
ccactgagtcctgtgagctgctgca

SEQ ID NO: 5578099 - DNA, 25 bp, Homo sapien
cctggggcacattacccattccgag

SEQ ID NO: 5578100 - DNA, 25 bp, Homo sapien
ctcccctacttgcccagctgagccc

SEQ ID NO: 5578101 - DNA, 25 bp, Homo sapien
ccccccaatctgtggttggggatgc

SEQ ID NO: 5578102 - DNA, 25 bp, Homo sapien
tatgcacccgtatcacagatgacaa

SEQ ID NO: 5578103 - DNA, 25 bp, Homo sapien
tagggactgccttgccaagggtcca

SEQ ID NO: 5578104 - DNA, 25 bp, Homo sapien
ctgaatgcagatcacctctgacatc

SEQ ID NO: 5578105 - DNA, 25 bp, Homo sapien
acacaccctcttggtgggctgctgc

SEQ ID NO: 5578106 - DNA, 25 bp, Homo sapien
ccaggctgctcttgctcccctactt

SEQ ID NO: 5578107 - DNA, 25 bp, Homo sapien
ccaatgcagggtgccaccatgcatt

SEQ ID NO: 5578108 - DNA, 25 bp, Homo sapien
tttgtcaacactatggaaccaatat

SEQ ID NO: 5578109 - DNA, 25 bp, Homo sapien
aagataataagactttacactcctc

SEQ ID NO: 5578110 - DNA, 25 bp, Homo sapien
ccttgaaagtctggagggatattgt

SEQ ID NO: 5578111 - DNA, 25 bp, Homo sapien
atcacagagccattcaaataagtat

SEQ ID NO: 5578112 - DNA, 25 bp, Homo sapien
gcagggtgccaccatgcatttagat

SEQ ID NO: 5578113 - DNA, 25 bp, Homo sapien
tcatggccttgaaagtctggaggga

SEQ ID NO: 5578114 - DNA, 25 bp, Homo sapien
catacattgccaccaactaaattcc

SEQ ID NO: 5578115 - DNA, 25 bp, Homo sapien
tagatatgatgtcttcccagtttcc

SEQ ID NO: 5578116 - DNA, 25 bp, Homo sapien
tacactcctcagctaattttcccca

SEQ ID NO: 5578117 - DNA, 25 bp, Homo sapien
atggaaccaatattcatacattgcc

SEQ ID NO: 5578118 - DNA, 25 bp, Homo sapien
agaaaaaacagaatggacgcttgat

SEQ ID NO: 5578119 - DNA, 25 bp, Homo sapien
cagtttgtaactgaaaccaggtgag

SEQ ID NO: 5578120 - DNA, 25 bp, Homo sapien
gcttgagaaaatggtggcataagtg

SEQ ID NO: 5578121 - DNA, 25 bp, Homo sapien
atgctgacattttgcgatgcctcat

SEQ ID NO: 5578122 - DNA, 25 bp, Homo sapien
ccaggtgagaaaatgagcattcaag

SEQ ID NO: 5578123 - DNA, 25 bp, Homo sapien
gccaggagagatttttctatccacc

SEQ ID NO: 5578124 - DNA, 25 bp, Homo sapien
gattgcagaatgatcaaaaccagtt

SEQ ID NO: 5578125 - DNA, 25 bp, Homo sapien
tggagccgagcttttcagcctcagc

SEQ ID NO: 5578126 - DNA, 25 bp, Homo sapien
ggcataagtggagccgagcttttca

SEQ ID NO: 5578127 - DNA, 25 bp, Homo sapien
aggatgatggaactgtagattgcag

SEQ ID NO: 5578128 - DNA, 25 bp, Homo sapien
tggacgcttgattgaggcttgagaa

SEQ ID NO: 5578129 - DNA, 25 bp, Homo sapien
gacaatataaaagaccagatgacag

SEQ ID NO: 5578130 - DNA, 25 bp, Homo sapien
catagcaggacatcaatgggtaatg

SEQ ID NO: 5578131 - DNA, 25 bp, Homo sapien
catattatgtaggtatggagataaa

SEQ ID NO: 5578132 - DNA, 25 bp, Homo sapien
gttcatggaacaggaaataaaggca

SEQ ID NO: 5578133 - DNA, 25 bp, Homo sapien
aaatattgtctgtagttcatggaac

SEQ ID NO: 5578134 - DNA, 25 bp, Homo sapien
ataaaggcattactcaataacccac

SEQ ID NO: 5578135 - DNA, 25 bp, Homo sapien
caggacggagttgaacttgctgtaa

SEQ ID NO: 5578136 - DNA, 25 bp, Homo sapien
ggctataggaaagggtattctctca

SEQ ID NO: 5578137 - DNA, 25 bp, Homo sapien
acttgctgtaaatgatctaaatcct

SEQ ID NO: 5578138 - DNA, 25 bp, Homo sapien
atgggtaatgtctgaaagtaatgat

SEQ ID NO: 5578139 - DNA, 25 bp, Homo sapien
tagaacccaactatagacaaacata

SEQ ID NO: 5578140 - DNA, 25 bp, Homo sapien
tcttcagactgtgttttgcttataa

SEQ ID NO: 5578141 - DNA, 25 bp, Homo sapien
tatcaaaatctgtgtcataatctga

SEQ ID NO: 5578142 - DNA, 25 bp, Homo sapien
ttgataatatcaaaatctgtgtcat

SEQ ID NO: 5578143 - DNA, 25 bp, Homo sapien
aatggtctcacatttcttagatgtt

SEQ ID NO: 5578144 - DNA, 25 bp, Homo sapien
tccttggctatgtcaagtctactta

SEQ ID NO: 5578145 - DNA, 25 bp, Homo sapien
ttttccttggctatgtcaagtctac

SEQ ID NO: 5578146 - DNA, 25 bp, Homo sapien
cattttttttggaggctggacgtat

SEQ ID NO: 5578147 - DNA, 25 bp, Homo sapien
tgtctcttcagactgtgttttgctt

SEQ ID NO: 5578148 - DNA, 25 bp, Homo sapien
tatgtcattttttttggaggctgga

SEQ ID NO: 5578149 - DNA, 25 bp, Homo sapien
gtcaagtctacttattagaacagca

SEQ ID NO: 5578150 - DNA, 25 bp, Homo sapien
tattagaacagcaaagatattcttc

SEQ ID NO: 5578151 - DNA, 25 bp, Homo sapien
acctaagacttttggccagagtaac

SEQ ID NO: 5578152 - DNA, 25 bp, Homo sapien
gagaggtgtggtttcattagaacat

SEQ ID NO: 5578153 - DNA, 25 bp, Homo sapien
aaatgcagttttaccagcctctttc

SEQ ID NO: 5578154 - DNA, 25 bp, Homo sapien
agtaacaccgaggtttgagagaaag

SEQ ID NO: 5578155 - DNA, 25 bp, Homo sapien
tcccatgggtctgtcctctacattc

SEQ ID NO: 5578156 - DNA, 25 bp, Homo sapien
tgttgaatcaacacttttgtgcaaa

SEQ ID NO: 5578157 - DNA, 25 bp, Homo sapien
acaaacacttcaagaaacctaagac

SEQ ID NO: 5578158 - DNA, 25 bp, Homo sapien
tttgaagttcccatgggtctgtcct

SEQ ID NO: 5578159 - DNA, 25 bp, Homo sapien
tgagaggggaattttgaagttccca

SEQ ID NO: 5578160 - DNA, 25 bp, Homo sapien
ttaacattctcggtacttgattttc

SEQ ID NO: 5578161 - DNA, 25 bp, Homo sapien
ggccagagtaacaccgaggtttgag

SEQ ID NO: 5578162 - DNA, 25 bp, Homo sapien
cagcagcctaaagagtcatagatat

SEQ ID NO: 5578163 - DNA, 25 bp, Homo sapien
ccaaatgcacataaagattcaaatg

SEQ ID NO: 5578164 - DNA, 25 bp, Homo sapien
gacatgtctgaaactaagagatttt

SEQ ID NO: 5578165 - DNA, 25 bp, Homo sapien
aagcatgtacacaaaccaaatgcac

SEQ ID NO: 5578166 - DNA, 25 bp, Homo sapien
tagatatgttgaccactgaaacttc

SEQ ID NO: 5578167 - DNA, 25 bp, Homo sapien
attaactgtgagacaggaacttgag

SEQ ID NO: 5578168 - DNA, 25 bp, Homo sapien
ggaacttgagatagcctgatgtata

SEQ ID NO: 5578169 - DNA, 25 bp, Homo sapien
atatagctgcttctgacatgtctga

SEQ ID NO: 5578170 - DNA, 25 bp, Homo sapien
tcccagcctgaataaacatgacatt

SEQ ID NO: 5578171 - DNA, 25 bp, Homo sapien
agaataagatatgctatatagctgc

SEQ ID NO: 5578172 - DNA, 25 bp, Homo sapien
ttgactgtaaaactacagcagccta

SEQ ID NO: 5578173 - DNA, 25 bp, Homo sapien
ctgcccctcttgcgattacaaagtc

SEQ ID NO: 5578174 - DNA, 25 bp, Homo sapien
tctccgcccgtgttctcctgagtgt

SEQ ID NO: 5578175 - DNA, 25 bp, Homo sapien
tcgacgtgatcagtgagctttctcc

SEQ ID NO: 5578176 - DNA, 25 bp, Homo sapien
ttacaaagtcaagcccagagcctga

SEQ ID NO: 5578177 - DNA, 25 bp, Homo sapien
cagagcctgacccacagtagtgctc

SEQ ID NO: 5578178 - DNA, 25 bp, Homo sapien
gtcctgagagcagcccgtttctgcc

SEQ ID NO: 5578179 - DNA, 25 bp, Homo sapien
cagtgagctttctccgcccgtgttc

SEQ ID NO: 5578180 - DNA, 25 bp, Homo sapien
agcccgtttctgcccctcttgcgat

SEQ ID NO: 5578181 - DNA, 25 bp, Homo sapien
gttctcctgagtgtcctgagagcag

SEQ ID NO: 5578182 - DNA, 25 bp, Homo sapien
cagtagtgctcaataaaggcttaga

SEQ ID NO: 5578183 - DNA, 25 bp, Homo sapien
gcgattacaaagtcaagcccagagc

SEQ ID NO: 5578184 - DNA, 25 bp, Homo sapien
aaatacacatactgggcgtccactt

SEQ ID NO: 5578185 - DNA, 25 bp, Homo sapien
ccccagtggaataacgcacgtgaaa

SEQ ID NO: 5578186 - DNA, 25 bp, Homo sapien
ggttcccggcctttccagcagtgcc

SEQ ID NO: 5578187 - DNA, 25 bp, Homo sapien
gcgtccacttaattaaggccctatc

SEQ ID NO: 5578188 - DNA, 25 bp, Homo sapien
ccagcgttttctccagcgtgcgctc

SEQ ID NO: 5578189 - DNA, 25 bp, Homo sapien
ctcgcttgctaggtcgacgtgatca

SEQ ID NO: 5578190 - DNA, 25 bp, Homo sapien
ctgccaagttcccaaaagagggatg

SEQ ID NO: 5578191 - DNA, 25 bp, Homo sapien
cctggcagatgcgtgttgatcccag

SEQ ID NO: 5578192 - DNA, 25 bp, Homo sapien
cagtgccccctctgccgtctgggcc

SEQ ID NO: 5578193 - DNA, 25 bp, Homo sapien
agatgcgtgttgatcccagcgtttt

SEQ ID NO: 5578194 - DNA, 25 bp, Homo sapien
gtggaataacgcacgtgaaatacac

SEQ ID NO: 5578195 - DNA, 25 bp, Homo sapien
accaaaattgatgtaccccaggacc

SEQ ID NO: 5578196 - DNA, 25 bp, Homo sapien
ttacaggatgttgaatgggtttgca

SEQ ID NO: 5578197 - DNA, 25 bp, Homo sapien
ataggcagtcatggccaaccaaaat

SEQ ID NO: 5578198 - DNA, 25 bp, Homo sapien
gtatagaaaagatggagtagctctt

SEQ ID NO: 5578199 - DNA, 25 bp, Homo sapien
aagacgtggtgttcaggttttgctt

SEQ ID NO: 5578200 - DNA, 25 bp, Homo sapien
taagccacaaactgaaccatgtttc

SEQ ID NO: 5578201 - DNA, 25 bp, Homo sapien
cacatttgcccttctggtggccttg

SEQ ID NO: 5578202 - DNA, 25 bp, Homo sapien
tatgtgatctaagaaccaaagaaac

SEQ ID NO: 5578203 - DNA, 25 bp, Homo sapien
tgttacataggcagtcatggccaac

SEQ ID NO: 5578204 - DNA, 25 bp, Homo sapien
gctttgccaataacctccatgggct

SEQ ID NO: 5578205 - DNA, 25 bp, Homo sapien
gaagttttcacttggccaataagcc

SEQ ID NO: 5578206 - DNA, 25 bp, Homo sapien
tggctctttcacaagggctggtcac

SEQ ID NO: 5578207 - DNA, 25 bp, Homo sapien
actctactgcctctgtgaccacatc

SEQ ID NO: 5578208 - DNA, 25 bp, Homo sapien
tggcagtcactggcttgtggcccta

SEQ ID NO: 5578209 - DNA, 25 bp, Homo sapien
caggacctacccagtgagatctgcc

SEQ ID NO: 5578210 - DNA, 25 bp, Homo sapien
tgacacccagccctaggacgctgtg

SEQ ID NO: 5578211 - DNA, 25 bp, Homo sapien
tggactgtccttcaaagggaatgac

SEQ ID NO: 5578212 - DNA, 25 bp, Homo sapien
tttccaggacctacccagtgagatc

SEQ ID NO: 5578213 - DNA, 25 bp, Homo sapien
tgtggccctatgtaattatctcagc

SEQ ID NO: 5578214 - DNA, 25 bp, Homo sapien
tgcgtattttacaggcctctttctc

SEQ ID NO: 5578215 - DNA, 25 bp, Homo sapien
ttcctatgagtcagttggcagtcac

SEQ ID NO: 5578216 - DNA, 25 bp, Homo sapien
gaaatctgttgaacagcctgacacc

SEQ ID NO: 5578217 - DNA, 25 bp, Homo sapien
ttagtaagtactcatgaacaattct

SEQ ID NO: 5578218 - DNA, 25 bp, Homo sapien
cttcagtccatgttgtacctcagtg

SEQ ID NO: 5578219 - DNA, 25 bp, Homo sapien
gcaactatacacatgaacctgaccc

SEQ ID NO: 5578220 - DNA, 25 bp, Homo sapien
tggggacaatgttgccccccacaga

SEQ ID NO: 5578221 - DNA, 25 bp, Homo sapien
agatactacaggataaataattcac

SEQ ID NO: 5578222 - DNA, 25 bp, Homo sapien
ctgaacatcagtaagatactacagg

SEQ ID NO: 5578223 - DNA, 25 bp, Homo sapien
atttgccaaagtctgaagaaatgtt

SEQ ID NO: 5578224 - DNA, 25 bp, Homo sapien
ttaacacatgctcctcttcagtcca

SEQ ID NO: 5578225 - DNA, 25 bp, Homo sapien
catcaacaacccagaatcgtaatac

SEQ ID NO: 5578226 - DNA, 25 bp, Homo sapien
tgccccccacagatgaaatttgcca

SEQ ID NO: 5578227 - DNA, 25 bp, Homo sapien
cggagaaaacacagtatgatcagcc

SEQ ID NO: 5578228 - DNA, 25 bp, Homo sapien
ttgtgcatagtctggagctcctctg

SEQ ID NO: 5578229 - DNA, 25 bp, Homo sapien
ttcttacatgggaaaggtgcaaaga

SEQ ID NO: 5578230 - DNA, 25 bp, Homo sapien
ctgtttcgttaggcagggaaatagg

SEQ ID NO: 5578231 - DNA, 25 bp, Homo sapien
gcgggttactataagtgcattttta

SEQ ID NO: 5578232 - DNA, 25 bp, Homo sapien
ataggtaagatgaacagctaggaaa

SEQ ID NO: 5578233 - DNA, 25 bp, Homo sapien
tactaccataccttgactctgccca

SEQ ID NO: 5578234 - DNA, 25 bp, Homo sapien
ggaaataggtaagatgaacagctag

SEQ ID NO: 5578235 - DNA, 25 bp, Homo sapien
aatggggattttctgcttaactgcc

SEQ ID NO: 5578236 - DNA, 25 bp, Homo sapien
ttgactctgcccaaagcactgtttc

SEQ ID NO: 5578237 - DNA, 25 bp, Homo sapien
agaaacaggaataaactagcctggc

SEQ ID NO: 5578238 - DNA, 25 bp, Homo sapien
actgattcttacatgggaaaggtgc

SEQ ID NO: 5578239 - DNA, 25 bp, Homo sapien
gctggccagcctctaagcacagttc

SEQ ID NO: 5578240 - DNA, 25 bp, Homo sapien
atgccctcacgggctgcccggactg

SEQ ID NO: 5578241 - DNA, 25 bp, Homo sapien
ggtcgctggccagcctctaagcaca

SEQ ID NO: 5578242 - DNA, 25 bp, Homo sapien
aaggcccacatgataggcactgacc

SEQ ID NO: 5578243 - DNA, 25 bp, Homo sapien
tcagggacttacaccattccctggg

SEQ ID NO: 5578244 - DNA, 25 bp, Homo sapien
ggaaggcccacatgataggcactga

SEQ ID NO: 5578245 - DNA, 25 bp, Homo sapien
acttacaccattccctgggggggca

SEQ ID NO: 5578246 - DNA, 25 bp, Homo sapien
taagcacagttctgagttctagaaa

SEQ ID NO: 5578247 - DNA, 25 bp, Homo sapien
cttacaccattccctgggggggcat

SEQ ID NO: 5578248 - DNA, 25 bp, Homo sapien
gatgccctcacgggctgcccggact

SEQ ID NO: 5578249 - DNA, 25 bp, Homo sapien
ccacatgataggcactgaccaaggg

SEQ ID NO: 5578250 - DNA, 25 bp, Homo sapien
actaacggtttctgtcccatccctc

SEQ ID NO: 5578251 - DNA, 25 bp, Homo sapien
ttcaccctcaagcaaaatcctcctg

SEQ ID NO: 5578252 - DNA, 25 bp, Homo sapien
tcagctacatgattccaagtgacat

SEQ ID NO: 5578253 - DNA, 25 bp, Homo sapien
aaatagattaagataaccaggaaat

SEQ ID NO: 5578254 - DNA, 25 bp, Homo sapien
ggcatttagaagctgaggtaggttt

SEQ ID NO: 5578255 - DNA, 25 bp, Homo sapien
ggaaataaaaatagaggctgatgat

SEQ ID NO: 5578256 - DNA, 25 bp, Homo sapien
cctccagggtcttctgacagatcta

SEQ ID NO: 5578257 - DNA, 25 bp, Homo sapien
tgatgataacggtgtcaggaaacaa

SEQ ID NO: 5578258 - DNA, 25 bp, Homo sapien
tgaggtaggtttccagtacagcctt

SEQ ID NO: 5578259 - DNA, 25 bp, Homo sapien
tcaggaaacaagccccaagtaaatc

SEQ ID NO: 5578260 - DNA, 25 bp, Homo sapien
actacaagaagttttgcccatgttc

SEQ ID NO: 5578261 - DNA, 25 bp, Homo sapien
gacccctacggctctgaagtgtatg

SEQ ID NO: 5578262 - DNA, 25 bp, Homo sapien
aacacacccttattcattggctggc

SEQ ID NO: 5578263 - DNA, 25 bp, Homo sapien
ggtggacttgctccctcctatcctc

SEQ ID NO: 5578264 - DNA, 25 bp, Homo sapien
tcagctgttatcatcctaggtggac

SEQ ID NO: 5578265 - DNA, 25 bp, Homo sapien
ttatcatcctaggtggacttgctcc

SEQ ID NO: 5578266 - DNA, 25 bp, Homo sapien
caaatgcagaacttcaatcgtttac

SEQ ID NO: 5578267 - DNA, 25 bp, Homo sapien
tctctaagttgacccctacggctct

SEQ ID NO: 5578268 - DNA, 25 bp, Homo sapien
gaagactgaatcgtataatagaaca

SEQ ID NO: 5578269 - DNA, 25 bp, Homo sapien
cattggctggcttcaccaatctcat

SEQ ID NO: 5578270 - DNA, 25 bp, Homo sapien
gaatcgtataatagaacacaccctt

SEQ ID NO: 5578271 - DNA, 25 bp, Homo sapien
tgaagtgtatgttgagaaattcagc

SEQ ID NO: 5578272 - DNA, 25 bp, Homo sapien
gataacaaagataaaggagcattca

SEQ ID NO: 5578273 - DNA, 25 bp, Homo sapien
attgaatgggtagtaatgcagatta

SEQ ID NO: 5578274 - DNA, 25 bp, Homo sapien
agtaatgcagattagaattttggga

SEQ ID NO: 5578275 - DNA, 25 bp, Homo sapien
atacacaatgtaaggctgctagaaa

SEQ ID NO: 5578276 - DNA, 25 bp, Homo sapien
tgaggtaaatggcattgaatgggta

SEQ ID NO: 5578277 - DNA, 25 bp, Homo sapien
caacattttgaggtaaatggcattg

SEQ ID NO: 5578278 - DNA, 25 bp, Homo sapien
gtaaggctgctagaaatgaaaacaa

SEQ ID NO: 5578279 - DNA, 25 bp, Homo sapien
atgaaaacaaggctaacatcatttt

SEQ ID NO: 5578280 - DNA, 25 bp, Homo sapien
caaagataaaggagcattcaacatt

SEQ ID NO: 5578281 - DNA, 25 bp, Homo sapien
aactctctcacacaatgcagaggga

SEQ ID NO: 5578282 - DNA, 25 bp, Homo sapien
gataaggattagaaaccagataaca

SEQ ID NO: 5578283 - DNA, 25 bp, Homo sapien
gatccaggtgggaaacctaatcttc

SEQ ID NO: 5578284 - DNA, 25 bp, Homo sapien
gctcaggtcaaggaactgaagagct

SEQ ID NO: 5578285 - DNA, 25 bp, Homo sapien
ttcgataagccggacagttcacaga

SEQ ID NO: 5578286 - DNA, 25 bp, Homo sapien
atcttttaacgagagaatggggtga

SEQ ID NO: 5578287 - DNA, 25 bp, Homo sapien
aaggaaaaatgggtcttcttcgata

SEQ ID NO: 5578288 - DNA, 25 bp, Homo sapien
cacagtaactgccttgatgactggc

SEQ ID NO: 5578289 - DNA, 25 bp, Homo sapien
aacagcaactgtaagaaggaaaaat

SEQ ID NO: 5578290 - DNA, 25 bp, Homo sapien
gacagagcacattccatagggctgg

SEQ ID NO: 5578291 - DNA, 25 bp, Homo sapien
acgttcagggtgaatcacttgcaat

SEQ ID NO: 5578292 - DNA, 25 bp, Homo sapien
agaatggggtgacatttctccacca

SEQ ID NO: 5578293 - DNA, 25 bp, Homo sapien
aaaaccacagatattggaatcaatc

SEQ ID NO: 5578294 - DNA, 25 bp, Homo sapien
gtgcaaactaagaaagatcagctca

SEQ ID NO: 5578295 - DNA, 25 bp, Homo sapien
agtggagggtattatagtgcaaact

SEQ ID NO: 5578296 - DNA, 25 bp, Homo sapien
atggaaactgaaagctctaacactg

SEQ ID NO: 5578297 - DNA, 25 bp, Homo sapien
aacaagactgatacaataatggccc

SEQ ID NO: 5578298 - DNA, 25 bp, Homo sapien
aaaaaactgagtaaaggaaatctgc

SEQ ID NO: 5578299 - DNA, 25 bp, Homo sapien
ccaaactaatacgtacagggcttct

SEQ ID NO: 5578300 - DNA, 25 bp, Homo sapien
gaaatccgaggtgatgataaacact

SEQ ID NO: 5578301 - DNA, 25 bp, Homo sapien
tcattgaagaagtctcccgaagatt

SEQ ID NO: 5578302 - DNA, 25 bp, Homo sapien
tgactaaatgactcactggcccgtg

SEQ ID NO: 5578303 - DNA, 25 bp, Homo sapien
tgactggcattaggccgtgaaatcc

SEQ ID NO: 5578304 - DNA, 25 bp, Homo sapien
ttaaaagcagttgcagtgagacttc

SEQ ID NO: 5578305 - DNA, 25 bp, Homo sapien
tctgctcatctgaaaaatgaaatac

SEQ ID NO: 5578306 - DNA, 25 bp, Homo sapien
ggaagcatcttgtaaactgtaaagg

SEQ ID NO: 5578307 - DNA, 25 bp, Homo sapien
gctgtgtgacctggactagtttttt

SEQ ID NO: 5578308 - DNA, 25 bp, Homo sapien
acttgctgtgtgacctggactagtt

SEQ ID NO: 5578309 - DNA, 25 bp, Homo sapien
ctgaaaaatgaaatactaatgtctt

SEQ ID NO: 5578310 - DNA, 25 bp, Homo sapien
atgtcttcatcttagtgtaataggg

SEQ ID NO: 5578311 - DNA, 25 bp, Homo sapien
tgctacttgctgtgtgacctggact

SEQ ID NO: 5578312 - DNA, 25 bp, Homo sapien
actgctgctacttgctgtgtgacct

SEQ ID NO: 5578313 - DNA, 25 bp, Homo sapien
tcgcttggatttaagaactgctgct

SEQ ID NO: 5578314 - DNA, 25 bp, Homo sapien
tcaaatatatggaagcatcttgtaa

SEQ ID NO: 5578315 - DNA, 25 bp, Homo sapien
cttggatttaagaactgctgctact

SEQ ID NO: 5578316 - DNA, 25 bp, Homo sapien
aagcatcagcatgtgatgcaaatct

SEQ ID NO: 5578317 - DNA, 25 bp, Homo sapien
tcctgtagtaagttctgagtggtcc

SEQ ID NO: 5578318 - DNA, 25 bp, Homo sapien
aagttctgagtggtccaaactggtc

SEQ ID NO: 5578319 - DNA, 25 bp, Homo sapien
gtggtccaaactggtcttggcagtc

SEQ ID NO: 5578320 - DNA, 25 bp, Homo sapien
gctgtggctgctgtaagcatcagca

SEQ ID NO: 5578321 - DNA, 25 bp, Homo sapien
tgtttgaggtgttcctttccccagc

SEQ ID NO: 5578322 - DNA, 25 bp, Homo sapien
atttggtgcctaacgaacggccatg

SEQ ID NO: 5578323 - DNA, 25 bp, Homo sapien
cccagctcctgtagtaagttctgag

SEQ ID NO: 5578324 - DNA, 25 bp, Homo sapien
cctaacgaacggccatgccctcttc

SEQ ID NO: 5578325 - DNA, 25 bp, Homo sapien
gggagagcttatttggtgcctaacg

SEQ ID NO: 5578326 - DNA, 25 bp, Homo sapien
cttcttcttggagtcacagcttgat

SEQ ID NO: 5578327 - DNA, 25 bp, Homo sapien
cagtcttgatgggatgattaaaatg

SEQ ID NO: 5578328 - DNA, 25 bp, Homo sapien
aacaaataagaaatcagatagaaaa

SEQ ID NO: 5578329 - DNA, 25 bp, Homo sapien
gatgattaaaatgtaggataaggtc

SEQ ID NO: 5578330 - DNA, 25 bp, Homo sapien
aataaaacagaaactcataacaaat

SEQ ID NO: 5578331 - DNA, 25 bp, Homo sapien
aaggtcacaaagcaataactgggag

SEQ ID NO: 5578332 - DNA, 25 bp, Homo sapien
aatcagatagaaaaactgttagaaa

SEQ ID NO: 5578333 - DNA, 25 bp, Homo sapien
tgatgggatgattaaaatgtaggat

SEQ ID NO: 5578334 - DNA, 25 bp, Homo sapien
agggggttgtttctttctgcttctg

SEQ ID NO: 5578335 - DNA, 25 bp, Homo sapien
ctgcttctgctaagttctcagtctt

SEQ ID NO: 5578336 - DNA, 25 bp, Homo sapien
ttaaaatgtaggataaggtcacaaa

SEQ ID NO: 5578337 - DNA, 25 bp, Homo sapien
attagtaaactcaactctcccaaat

SEQ ID NO: 5578338 - DNA, 25 bp, Homo sapien
ggcgtcgcggccacagcacccactc

SEQ ID NO: 5578339 - DNA, 25 bp, Homo sapien
gagtgggtgctgtggccgcgacgcc

SEQ ID NO: 5578340 - DNA, 25 bp, Homo sapien
aggtaggtatacaattggctgtgag

SEQ ID NO: 5578341 - DNA, 25 bp, Homo sapien
gtgagctcgctttcaagtcagaatc

SEQ ID NO: 5578342 - DNA, 25 bp, Homo sapien
actcagaggaatttgacaacgacat

SEQ ID NO: 5578343 - DNA, 25 bp, Homo sapien
tatggaacagttaatgtgagctcgc

SEQ ID NO: 5578344 - DNA, 25 bp, Homo sapien
tagagagaataactcacaagccctg

SEQ ID NO: 5578345 - DNA, 25 bp, Homo sapien
agtcagaatctaaaagtccaggtgc

SEQ ID NO: 5578346 - DNA, 25 bp, Homo sapien
tggctgtgagtactgatacaaatac

SEQ ID NO: 5578347 - DNA, 25 bp, Homo sapien
aatggttacaactaggtaggtatac

SEQ ID NO: 5578348 - DNA, 25 bp, Homo sapien
cagaatccatttgaggggcagtaca

SEQ ID NO: 5578349 - DNA, 25 bp, Homo sapien
ttgcagcatcactttagagagaata

SEQ ID NO: 5578350 - DNA, 25 bp, Homo sapien
tatgtgcccccaaactgcgatttac

SEQ ID NO: 5578351 - DNA, 25 bp, Homo sapien
tgtatactacgtatttggggaagga

SEQ ID NO: 5578352 - DNA, 25 bp, Homo sapien
tgagaaggaacaaaaggcatttgaa

SEQ ID NO: 5578353 - DNA, 25 bp, Homo sapien
tgggtgaaagataacagaatctgat

SEQ ID NO: 5578354 - DNA, 25 bp, Homo sapien
ttgtctctgttgggtgaaagataac

SEQ ID NO: 5578355 - DNA, 25 bp, Homo sapien
aactgtgtagtataaccaatatgtc

SEQ ID NO: 5578356 - DNA, 25 bp, Homo sapien
catgaagcggtttgtatactacgta

SEQ ID NO: 5578357 - DNA, 25 bp, Homo sapien
tccaccagctagaaatgactattgt

SEQ ID NO: 5578358 - DNA, 25 bp, Homo sapien
ggaaggactgctggtttatagagat

SEQ ID NO: 5578359 - DNA, 25 bp, Homo sapien
gtatattcagccaaatgttcactct

SEQ ID NO: 5578360 - DNA, 25 bp, Homo sapien
aggaacaaaaggcatttgaaggacc

SEQ ID NO: 5578361 - DNA, 25 bp, Homo sapien
aaatgacagacatgaagcggtttgt

SEQ ID NO: 5578362 - DNA, 25 bp, Homo sapien
cccgggtgcgacctgacccctgcga

SEQ ID NO: 5578363 - DNA, 25 bp, Homo sapien
tcgcaggggtcaggtcgcacccggg

SEQ ID NO: 5578364 - DNA, 25 bp, Homo sapien
tggggaggcttttattcctctcgcc

SEQ ID NO: 5578365 - DNA, 25 bp, Homo sapien
tatttgcctggccgctcaggctgtg

SEQ ID NO: 5578366 - DNA, 25 bp, Homo sapien
tgcttccccaaatctgatgttgctc

SEQ ID NO: 5578367 - DNA, 25 bp, Homo sapien
atatgaaatatttgcctggccgctc

SEQ ID NO: 5578368 - DNA, 25 bp, Homo sapien
tcaggctgtgccatcttgagtgatg

SEQ ID NO: 5578369 - DNA, 25 bp, Homo sapien
ttccaggttccagtttaggtcttgc

SEQ ID NO: 5578370 - DNA, 25 bp, Homo sapien
ccacaccctggttctgcttaacttc

SEQ ID NO: 5578371 - DNA, 25 bp, Homo sapien
ttgagtgatgtgttcctctctcccc

SEQ ID NO: 5578372 - DNA, 25 bp, Homo sapien
cagagcatgtgcttctaagaagttc

SEQ ID NO: 5578373 - DNA, 25 bp, Homo sapien
ggggcatgttgcccagagcatgtgc

SEQ ID NO: 5578374 - DNA, 25 bp, Homo sapien
ttgctgtctgtcatgtctgaaattc

SEQ ID NO: 5578375 - DNA, 25 bp, Homo sapien
ccttgtgaaaattgtaaagtactgt

SEQ ID NO: 5578376 - DNA, 25 bp, Homo sapien
agtttacttgcctgtgaagtgggaa

SEQ ID NO: 5578377 - DNA, 25 bp, Homo sapien
aagcactacagacctgagttctggt

SEQ ID NO: 5578378 - DNA, 25 bp, Homo sapien
atggtaataatggtgtagtgagaag

SEQ ID NO: 5578379 - DNA, 25 bp, Homo sapien
tagccttgcttacctgtgactcagt

SEQ ID NO: 5578380 - DNA, 25 bp, Homo sapien
agacctgagttctggtgttagctct

SEQ ID NO: 5578381 - DNA, 25 bp, Homo sapien
gctctgtgagattatctatgcaaac

SEQ ID NO: 5578382 - DNA, 25 bp, Homo sapien
ctgggaaatggaaatgaagtcattg

SEQ ID NO: 5578383 - DNA, 25 bp, Homo sapien
aggaagctgaagattcaggagctat

SEQ ID NO: 5578384 - DNA, 25 bp, Homo sapien
ctcctacaatcatggctcttgcagg

SEQ ID NO: 5578385 - DNA, 25 bp, Homo sapien
ggggtagagaggactcaaatactta

SEQ ID NO: 5578386 - DNA, 25 bp, Homo sapien
attctctgtattctgcaatgccttc

SEQ ID NO: 5578387 - DNA, 25 bp, Homo sapien
ctcccaaccgttactctaggcttat

SEQ ID NO: 5578388 - DNA, 25 bp, Homo sapien
tctaggcttatcctgaagttcagta

SEQ ID NO: 5578389 - DNA, 25 bp, Homo sapien
tgaagttcagtataaaaataacctc

SEQ ID NO: 5578390 - DNA, 25 bp, Homo sapien
ctgaaatattgttgaggatattctc

SEQ ID NO: 5578391 - DNA, 25 bp, Homo sapien
ttataaagacctcagggagaaagat

SEQ ID NO: 5578392 - DNA, 25 bp, Homo sapien
tcataaaacatttcattgtgattac

SEQ ID NO: 5578393 - DNA, 25 bp, Homo sapien
ctgggccccattatgtaggtctctc

SEQ ID NO: 5578394 - DNA, 25 bp, Homo sapien
gtgattactgaaatattgttgagga

SEQ ID NO: 5578395 - DNA, 25 bp, Homo sapien
atgtaggtctctctctcctaaggtt

SEQ ID NO: 5578396 - DNA, 25 bp, Homo sapien
acctgggccccattatgtaggtctc

SEQ ID NO: 5578397 - DNA, 25 bp, Homo sapien
agaaaaaaagatagatggcttaaat

SEQ ID NO: 5578398 - DNA, 25 bp, Homo sapien
taacatagaattagaaatcccagtc

SEQ ID NO: 5578399 - DNA, 25 bp, Homo sapien
aaaaagatagatggcttaaattgtc

SEQ ID NO: 5578400 - DNA, 25 bp, Homo sapien
aaggaatggccacaaaatgaaatca

SEQ ID NO: 5578401 - DNA, 25 bp, Homo sapien
tcccagtcttcgtggctgccaaaaa

SEQ ID NO: 5578402 - DNA, 25 bp, Homo sapien
aaatagaccaaactgacatgatcat

SEQ ID NO: 5578403 - DNA, 25 bp, Homo sapien
aaggaaacagaaaaaaagatagatg

SEQ ID NO: 5578404 - DNA, 25 bp, Homo sapien
acacgtataaaaatagaccaaactg

SEQ ID NO: 5578405 - DNA, 25 bp, Homo sapien
agaaatcccagtcttcgtggctgcc

SEQ ID NO: 5578406 - DNA, 25 bp, Homo sapien
cttttgtctgttagtgctctcctta

SEQ ID NO: 5578407 - DNA, 25 bp, Homo sapien
aaaaaaaggaatggccacaaaatga

SEQ ID NO: 5578408 - DNA, 25 bp, Homo sapien
ttcagggtccccactatttagtcag

SEQ ID NO: 5578409 - DNA, 25 bp, Homo sapien
atatactcctattcagggtccccac

SEQ ID NO: 5578410 - DNA, 25 bp, Homo sapien
aaaagaaccaaagtgctatcatgcc

SEQ ID NO: 5578411 - DNA, 25 bp, Homo sapien
agggtccatgaagttgaaaagaacc

SEQ ID NO: 5578412 - DNA, 25 bp, Homo sapien
tcagagataccaaagcatatactcc

SEQ ID NO: 5578413 - DNA, 25 bp, Homo sapien
tgactggtagaaatgtagctacacc

SEQ ID NO: 5578414 - DNA, 25 bp, Homo sapien
gtcagtctgccctggcgtttacaga

SEQ ID NO: 5578415 - DNA, 25 bp, Homo sapien
actttgtcgcgttgattctgatttc

SEQ ID NO: 5578416 - DNA, 25 bp, Homo sapien
tagacagtatatgctcggccatgct

SEQ ID NO: 5578417 - DNA, 25 bp, Homo sapien
tcagaactgaaatgagggtccatga

SEQ ID NO: 5578418 - DNA, 25 bp, Homo sapien
aataattctagaagaagggaattca

SEQ ID NO: 5578419 - DNA, 25 bp, Homo sapien
ccaaagactaattgacacaggtcat

SEQ ID NO: 5578420 - DNA, 25 bp, Homo sapien
ttgcttaggaaaagtatgcagctta

SEQ ID NO: 5578421 - DNA, 25 bp, Homo sapien
agcagctgtgtctggtcatgtatag

SEQ ID NO: 5578422 - DNA, 25 bp, Homo sapien
taggaaaagtatgcagcttaaaatc

SEQ ID NO: 5578423 - DNA, 25 bp, Homo sapien
taagaccctggagcaactatccttc

SEQ ID NO: 5578424 - DNA, 25 bp, Homo sapien
gtttgggaagtagctgctccataca

SEQ ID NO: 5578425 - DNA, 25 bp, Homo sapien
taatagcatgtggaaacaatgtcgt

SEQ ID NO: 5578426 - DNA, 25 bp, Homo sapien
gtactgttaagaccctggagcaact

SEQ ID NO: 5578427 - DNA, 25 bp, Homo sapien
acaggtcatgtgtcaaatggcttaa

SEQ ID NO: 5578428 - DNA, 25 bp, Homo sapien
cggatgaagttgatgtttaatagca

SEQ ID NO: 5578429 - DNA, 25 bp, Homo sapien
tcatgtatagagtatgttttgactt

SEQ ID NO: 5578430 - DNA, 25 bp, Homo sapien
agcgttcgtcattaataaccgtagc

SEQ ID NO: 5578431 - DNA, 25 bp, Homo sapien
ccaaaacaaacatggacctgcatat

SEQ ID NO: 5578432 - DNA, 25 bp, Homo sapien
ttacaagaaaagtcaatatccaatc

SEQ ID NO: 5578433 - DNA, 25 bp, Homo sapien
gatgttcaagtatttcacgaagatc

SEQ ID NO: 5578434 - DNA, 25 bp, Homo sapien
atccaaattaatatagtgggtcact

SEQ ID NO: 5578435 - DNA, 25 bp, Homo sapien
ttcatgagcccaaaaatggcatctc

SEQ ID NO: 5578436 - DNA, 25 bp, Homo sapien
acaggtaattccagcacaccggagg

SEQ ID NO: 5578437 - DNA, 25 bp, Homo sapien
aaaaaaatggtctgcttcttcggtc

SEQ ID NO: 5578438 - DNA, 25 bp, Homo sapien
caatcggatctgaatagagcatttc

SEQ ID NO: 5578439 - DNA, 25 bp, Homo sapien
ccttagcagatacttgcaggcaaga

SEQ ID NO: 5578440 - DNA, 25 bp, Homo sapien
tccataagcggtccacaggtaattc

SEQ ID NO: 5578441 - DNA, 25 bp, Homo sapien
actgctcacccattgtggaggataa

SEQ ID NO: 5578442 - DNA, 25 bp, Homo sapien
aaacagattactggacaccatcccc

SEQ ID NO: 5578443 - DNA, 25 bp, Homo sapien
tggtctgggaccacacttagagaac

SEQ ID NO: 5578444 - DNA, 25 bp, Homo sapien
agagaaccactagcatagaagagtc

SEQ ID NO: 5578445 - DNA, 25 bp, Homo sapien
agaagtcatagaccagaggtgcttc

SEQ ID NO: 5578446 - DNA, 25 bp, Homo sapien
cagtaagtaccgggtgacgttgatg

SEQ ID NO: 5578447 - DNA, 25 bp, Homo sapien
tacactagtatcacctgctgggctt

SEQ ID NO: 5578448 - DNA, 25 bp, Homo sapien
taagaatagggattagtatagtata

SEQ ID NO: 5578449 - DNA, 25 bp, Homo sapien
gtgaggtctgagaacttgcatttcc

SEQ ID NO: 5578450 - DNA, 25 bp, Homo sapien
tctcagggacacctcaaatcttggg

SEQ ID NO: 5578451 - DNA, 25 bp, Homo sapien
tggggctgatttatatgccagcaga

SEQ ID NO: 5578452 - DNA, 25 bp, Homo sapien
cagatgagagttggctagactcact

SEQ ID NO: 5578453 - DNA, 25 bp, Homo sapien
aataaagccctatgtatggagcctc

SEQ ID NO: 5578454 - DNA, 25 bp, Homo sapien
ggctgaagacaattgggacaactta

SEQ ID NO: 5578455 - DNA, 25 bp, Homo sapien
tccagcagggatacctcagctctgc

SEQ ID NO: 5578456 - DNA, 25 bp, Homo sapien
gggcatgtcagtagagaactttcca

SEQ ID NO: 5578457 - DNA, 25 bp, Homo sapien
caagcttgtgattctgtgggttagg

SEQ ID NO: 5578458 - DNA, 25 bp, Homo sapien
tctatagtcacagctggggtgattc

SEQ ID NO: 5578459 - DNA, 25 bp, Homo sapien
ggggtgattcaaatggctgaagaca

SEQ ID NO: 5578460 - DNA, 25 bp, Homo sapien
cctaagtgaaagcagcaacgcttct

SEQ ID NO: 5578461 - DNA, 25 bp, Homo sapien
tggtgtctcctgtggagctagctcc

SEQ ID NO: 5578462 - DNA, 25 bp, Homo sapien
tggcttcccacagagtgggcatgtc

SEQ ID NO: 5578463 - DNA, 25 bp, Homo sapien
cctagcacagtgaaagtcatgtagt

SEQ ID NO: 5578464 - DNA, 25 bp, Homo sapien
ggtttggaacaaacacactgaggaa

SEQ ID NO: 5578465 - DNA, 25 bp, Homo sapien
agcaataatgcttctggtttggaac

SEQ ID NO: 5578466 - DNA, 25 bp, Homo sapien
atactacctatataaaaggaagcaa

SEQ ID NO: 5578467 - DNA, 25 bp, Homo sapien
aaaaaaagcacaagaattggatcac

SEQ ID NO: 5578468 - DNA, 25 bp, Homo sapien
aattggatcacagagagaaaataat

SEQ ID NO: 5578469 - DNA, 25 bp, Homo sapien
acactgaggaaatactaagactgct

SEQ ID NO: 5578470 - DNA, 25 bp, Homo sapien
gactgctcaaaattccagtaggaaa

SEQ ID NO: 5578471 - DNA, 25 bp, Homo sapien
agccaactaaaaccgactccctctc

SEQ ID NO: 5578472 - DNA, 25 bp, Homo sapien
gtcatgtagtaaacaccaaacaaaa

SEQ ID NO: 5578473 - DNA, 25 bp, Homo sapien
tccatacctaggcccagccagaacc

SEQ ID NO: 5578474 - DNA, 25 bp, Homo sapien
cctgccatgcatgtaaaatgaaggc

SEQ ID NO: 5578475 - DNA, 25 bp, Homo sapien
aaaaggaacttcagggattcacact

SEQ ID NO: 5578476 - DNA, 25 bp, Homo sapien
gaataaaggagtagcccgcctattc

SEQ ID NO: 5578477 - DNA, 25 bp, Homo sapien
agtgtagatgtttgtaaactgacct

SEQ ID NO: 5578478 - DNA, 25 bp, Homo sapien
atatattggttgctgtaagaattac

SEQ ID NO: 5578479 - DNA, 25 bp, Homo sapien
gaggttgagagttagtggatatttc

SEQ ID NO: 5578480 - DNA, 25 bp, Homo sapien
cagggattcacactgggcatctgac

SEQ ID NO: 5578481 - DNA, 25 bp, Homo sapien
gacttagtgatcagaggttgagagt

SEQ ID NO: 5578482 - DNA, 25 bp, Homo sapien
gcagagtatatgatgaagctaagtt

SEQ ID NO: 5578483 - DNA, 25 bp, Homo sapien
tttggacaagtacaatggtttatac

SEQ ID NO: 5578484 - DNA, 25 bp, Homo sapien
tcccttgggtttgcagtgtagatgt

SEQ ID NO: 5578485 - DNA, 25 bp, Homo sapien
agaacattccatactgcctaacatt

SEQ ID NO: 5578486 - DNA, 25 bp, Homo sapien
ggtgattaggtttcagcataatttg

SEQ ID NO: 5578487 - DNA, 25 bp, Homo sapien
cattcatcagagctcagtcccacct

SEQ ID NO: 5578488 - DNA, 25 bp, Homo sapien
ttggtcataatttataagggcacta

SEQ ID NO: 5578489 - DNA, 25 bp, Homo sapien
atgataagctaaataagaacattcc

SEQ ID NO: 5578490 - DNA, 25 bp, Homo sapien
gaggagtgaagagctcttttggtca

SEQ ID NO: 5578491 - DNA, 25 bp, Homo sapien
aggcccagatattcggaccatagca

SEQ ID NO: 5578492 - DNA, 25 bp, Homo sapien
tagataggatctagattttaccaaa

SEQ ID NO: 5578493 - DNA, 25 bp, Homo sapien
atagatgaaggcttctcactgtatc

SEQ ID NO: 5578494 - DNA, 25 bp, Homo sapien
tcggaccatagcaactaccttattc

SEQ ID NO: 5578495 - DNA, 25 bp, Homo sapien
tcctcaaatggtaggaggagtgaag

SEQ ID NO: 5578496 - DNA, 25 bp, Homo sapien
agaggcctggacttcaggctcccct

SEQ ID NO: 5578497 - DNA, 25 bp, Homo sapien
tctcagaggcctggacttcaggctc

SEQ ID NO: 5578498 - DNA, 25 bp, Homo sapien
gtcacttggaagtgcttctggagtc

SEQ ID NO: 5578499 - DNA, 25 bp, Homo sapien
tggaagtgcttctggagtctctctc

SEQ ID NO: 5578500 - DNA, 25 bp, Homo sapien
ttttccccagaggtgtcaggaaagc

SEQ ID NO: 5578501 - DNA, 25 bp, Homo sapien
gaaactcggtgtactcgtcttggac

SEQ ID NO: 5578502 - DNA, 25 bp, Homo sapien
cgtgccaggttgcctactcagctct

SEQ ID NO: 5578503 - DNA, 25 bp, Homo sapien
tactcagctctgtgcctcgtggaga

SEQ ID NO: 5578504 - DNA, 25 bp, Homo sapien
cagctctgtgcctcgtggagaaact

SEQ ID NO: 5578505 - DNA, 25 bp, Homo sapien
cgtcttggaccgtttcccctggtca

SEQ ID NO: 5578506 - DNA, 25 bp, Homo sapien
ggagaaactcggtgtactcgtcttg

SEQ ID NO: 5578507 - DNA, 25 bp, Homo sapien
tccacagctggcaaaacacatacct

SEQ ID NO: 5578508 - DNA, 25 bp, Homo sapien
tggcagtgacgcaggattttttcag

SEQ ID NO: 5578509 - DNA, 25 bp, Homo sapien
cctgtgcgttggcatcccaacaagg

SEQ ID NO: 5578510 - DNA, 25 bp, Homo sapien
gattttttcagtgctgcttggccag

SEQ ID NO: 5578511 - DNA, 25 bp, Homo sapien
cagctggatatatccacagctggca

SEQ ID NO: 5578512 - DNA, 25 bp, Homo sapien
cctgagctcccttaaaagatgcact

SEQ ID NO: 5578513 - DNA, 25 bp, Homo sapien
catacctgagcctcactcagccctg

SEQ ID NO: 5578514 - DNA, 25 bp, Homo sapien
ttaaaagatgcactctctgatttcc

SEQ ID NO: 5578515 - DNA, 25 bp, Homo sapien
tgaccctgcaagcaagtggcagtga

SEQ ID NO: 5578516 - DNA, 25 bp, Homo sapien
tccattatgaccctgcaagcaagtg

SEQ ID NO: 5578517 - DNA, 25 bp, Homo sapien
cgttggcatcccaacaaggggaaat

SEQ ID NO: 5578518 - DNA, 25 bp, Homo sapien
gaccagccccctcctgcggggcagg

SEQ ID NO: 5578519 - DNA, 25 bp, Homo sapien
tgtcctttaggctcccagggccaaa

SEQ ID NO: 5578520 - DNA, 25 bp, Homo sapien
cctgctctaggcctcttgtgaagcc

SEQ ID NO: 5578521 - DNA, 25 bp, Homo sapien
gtaacccatgaccagccccctcctg

SEQ ID NO: 5578522 - DNA, 25 bp, Homo sapien
aaccgagcagactctccagccatct

SEQ ID NO: 5578523 - DNA, 25 bp, Homo sapien
tcaggtgccagcggctcctcttttg

SEQ ID NO: 5578524 - DNA, 25 bp, Homo sapien
ccaggggacgtaactccccctgctc

SEQ ID NO: 5578525 - DNA, 25 bp, Homo sapien
agagcccagtaccctgagaagggca

SEQ ID NO: 5578526 - DNA, 25 bp, Homo sapien
aaagactgtatcctgcaccagccct

SEQ ID NO: 5578527 - DNA, 25 bp, Homo sapien
gggccaaagcagccaaagactgtat

SEQ ID NO: 5578528 - DNA, 25 bp, Homo sapien
tgtgggccgacactcctgttgtatc

SEQ ID NO: 5578529 - DNA, 25 bp, Homo sapien
tggtgtgcacagaagtattgtataa

SEQ ID NO: 5578530 - DNA, 25 bp, Homo sapien
gaagtattgtataatctggcctgta

SEQ ID NO: 5578531 - DNA, 25 bp, Homo sapien
tgtgatttactaaatgcgggggaaa

SEQ ID NO: 5578532 - DNA, 25 bp, Homo sapien
acaaccatctggtgtgcacagaagt

SEQ ID NO: 5578533 - DNA, 25 bp, Homo sapien
tatctctgataattggatgccagtc

SEQ ID NO: 5578534 - DNA, 25 bp, Homo sapien
gataattggatgccagtcaggtagg

SEQ ID NO: 5578535 - DNA, 25 bp, Homo sapien
tactgtgaaacatattgaaacactt

SEQ ID NO: 5578536 - DNA, 25 bp, Homo sapien
gtgtgtacagaaattcatgaagttc

SEQ ID NO: 5578537 - DNA, 25 bp, Homo sapien
tctcattttaggatgtcgtgaaaag

SEQ ID NO: 5578538 - DNA, 25 bp, Homo sapien
tgtttaggtgtgtgtacagaaattc

SEQ ID NO: 5578539 - DNA, 25 bp, Homo sapien
taaagagggtagcttaaacactgaa

SEQ ID NO: 5578540 - DNA, 25 bp, Homo sapien
ctgtattttctcttggaggagggat

SEQ ID NO: 5578541 - DNA, 25 bp, Homo sapien
gccccattgggcacacactcctggg

SEQ ID NO: 5578542 - DNA, 25 bp, Homo sapien
gtcacctctcactgccccattgggc

SEQ ID NO: 5578543 - DNA, 25 bp, Homo sapien
caagagtaagactgagccatacttc

SEQ ID NO: 5578544 - DNA, 25 bp, Homo sapien
tctctttggagacatgaattgactc

SEQ ID NO: 5578545 - DNA, 25 bp, Homo sapien
tggagacatgaattgactctgtcac

SEQ ID NO: 5578546 - DNA, 25 bp, Homo sapien
gggatgtcagcaggtcacctctcac

SEQ ID NO: 5578547 - DNA, 25 bp, Homo sapien
gagtaagactgagccatacttcttc

SEQ ID NO: 5578548 - DNA, 25 bp, Homo sapien
attttctcttggaggagggatatgc

SEQ ID NO: 5578549 - DNA, 25 bp, Homo sapien
ctctgtcacttgagggatgtcagca

SEQ ID NO: 5578550 - DNA, 25 bp, Homo sapien
ttgactctgtcacttgagggatgtc

SEQ ID NO: 5578551 - DNA, 25 bp, Homo sapien
gacaatgaaaatcaagcagccacac

SEQ ID NO: 5578552 - DNA, 25 bp, Homo sapien
gtcgtgttgttagactgctgatgag

SEQ ID NO: 5578553 - DNA, 25 bp, Homo sapien
agccacacagccctttatccccttc

SEQ ID NO: 5578554 - DNA, 25 bp, Homo sapien
ctggttgaatcagtcttggagcaga

SEQ ID NO: 5578555 - DNA, 25 bp, Homo sapien
ttcccaaacacatggggtgtgcctg

SEQ ID NO: 5578556 - DNA, 25 bp, Homo sapien
agcaaggcccaaacatttaagtctg

SEQ ID NO: 5578557 - DNA, 25 bp, Homo sapien
tccaaagcacaaagactctatggtc

SEQ ID NO: 5578558 - DNA, 25 bp, Homo sapien
gggtctttgtatggaggactgtttc

SEQ ID NO: 5578559 - DNA, 25 bp, Homo sapien
ttgacatcctgcacagggtgatggg

SEQ ID NO: 5578560 - DNA, 25 bp, Homo sapien
ggcctgtcatctgtcgtgttgttag

SEQ ID NO: 5578561 - DNA, 25 bp, Homo sapien
gactctatggtcttagcaaggccca

SEQ ID NO: 5578562 - DNA, 25 bp, Homo sapien
taaaggtttttatctgcagtcattc

SEQ ID NO: 5578563 - DNA, 25 bp, Homo sapien
ggcacataggcaaatgagatgattt

SEQ ID NO: 5578564 - DNA, 25 bp, Homo sapien
cttctgggaaattttacgacataaa

SEQ ID NO: 5578565 - DNA, 25 bp, Homo sapien
aaatatagggcacataggcaaatga

SEQ ID NO: 5578566 - DNA, 25 bp, Homo sapien
ccttggccatttagaaggtaggagg

SEQ ID NO: 5578567 - DNA, 25 bp, Homo sapien
gatgatttgaacatggaacagaaat

SEQ ID NO: 5578568 - DNA, 25 bp, Homo sapien
aagggcaaggttagacataattacc

SEQ ID NO: 5578569 - DNA, 25 bp, Homo sapien
ttgggttattagaaggctagttagc

SEQ ID NO: 5578570 - DNA, 25 bp, Homo sapien
cagaagctacccaagagtgttcctt

SEQ ID NO: 5578571 - DNA, 25 bp, Homo sapien
aggctagttagctgctggagttcct

SEQ ID NO: 5578572 - DNA, 25 bp, Homo sapien
tacactgaacagaagctacccaaga

SEQ ID NO: 5578573 - DNA, 25 bp, Homo sapien
ttaatagtctctcagccctagttag

SEQ ID NO: 5578574 - DNA, 25 bp, Homo sapien
cataactattacacttaaggaagtc

SEQ ID NO: 5578575 - DNA, 25 bp, Homo sapien
taaggaagtccataagattttctgc

SEQ ID NO: 5578576 - DNA, 25 bp, Homo sapien
atagtgtggttattcagtatgtttc

SEQ ID NO: 5578577 - DNA, 25 bp, Homo sapien
ctattttgataatgtttggggggga

SEQ ID NO: 5578578 - DNA, 25 bp, Homo sapien
aaagtaggttcataaaacatcttca

SEQ ID NO: 5578579 - DNA, 25 bp, Homo sapien
gtccataagattttctgcagaacat

SEQ ID NO: 5578580 - DNA, 25 bp, Homo sapien
tatttaaatcgggttatcataacta

SEQ ID NO: 5578581 - DNA, 25 bp, Homo sapien
ctgcagaacatttttaaacaaacat

SEQ ID NO: 5578582 - DNA, 25 bp, Homo sapien
cagttttagaaaaatagtgtggtta

SEQ ID NO: 5578583 - DNA, 25 bp, Homo sapien
tacacttaaggaagtccataagatt

SEQ ID NO: 5578584 - DNA, 25 bp, Homo sapien
cggaatgctccgtggtcataaacta

SEQ ID NO: 5578585 - DNA, 25 bp, Homo sapien
acgcagtgacagtggttccacggaa

SEQ ID NO: 5578586 - DNA, 25 bp, Homo sapien
acccagcctagcttttagggtgatg

SEQ ID NO: 5578587 - DNA, 25 bp, Homo sapien
ccccgtccgggagctgctccttcag

SEQ ID NO: 5578588 - DNA, 25 bp, Homo sapien
tcacgtggggtttcgctacactttg

SEQ ID NO: 5578589 - DNA, 25 bp, Homo sapien
acaaactcttgtgcaggattgcctc

SEQ ID NO: 5578590 - DNA, 25 bp, Homo sapien
atcaacctgcccccgacgcagtgac

SEQ ID NO: 5578591 - DNA, 25 bp, Homo sapien
gattgcctcgccactcggaggaagg

SEQ ID NO: 5578592 - DNA, 25 bp, Homo sapien
ctccccaggaaggtctatgccatca

SEQ ID NO: 5578593 - DNA, 25 bp, Homo sapien
gggcgtgtgtggaacttttcacgtg

SEQ ID NO: 5578594 - DNA, 25 bp, Homo sapien
tcataaactagtaacattgggtgta

SEQ ID NO: 5578595 - DNA, 25 bp, Homo sapien
ttctgcctgccgtaacccacgttac

SEQ ID NO: 5578596 - DNA, 25 bp, Homo sapien
tgtcagatttgcccccatcccgccc

SEQ ID NO: 5578597 - DNA, 25 bp, Homo sapien
ccccaaacgccacagcacttttttc

SEQ ID NO: 5578598 - DNA, 25 bp, Homo sapien
ctgccgtaacccacgttacagtcgg

SEQ ID NO: 5578599 - DNA, 25 bp, Homo sapien
ttttaaaaaatcgcatgtcacctct

SEQ ID NO: 5578600 - DNA, 25 bp, Homo sapien
cgcccgcaaaacgtgctttacaacc

SEQ ID NO: 5578601 - DNA, 25 bp, Homo sapien
cctctggctccactcgaaaatggcg

SEQ ID NO: 5578602 - DNA, 25 bp, Homo sapien
gatgtttttctgcctgccgtaaccc

SEQ ID NO: 5578603 - DNA, 25 bp, Homo sapien
cactttaaatgtcagatttgccccc

SEQ ID NO: 5578604 - DNA, 25 bp, Homo sapien
catcccgcccgcaaaacgtgcttta

SEQ ID NO: 5578605 - DNA, 25 bp, Homo sapien
aaaatcgcatgtcacctctggctcc

SEQ ID NO: 5578606 - DNA, 25 bp, Homo sapien
tccagaaatttgcctgtaatggtac

SEQ ID NO: 5578607 - DNA, 25 bp, Homo sapien
ttcttggcatgtaaagtattcaaat

SEQ ID NO: 5578608 - DNA, 25 bp, Homo sapien
tatgtgtaaccttgagattgctttt

SEQ ID NO: 5578609 - DNA, 25 bp, Homo sapien
tattcagcttcaaggtgaccaaaga

SEQ ID NO: 5578610 - DNA, 25 bp, Homo sapien
gtaatggtactgtgattgaacatcc

SEQ ID NO: 5578611 - DNA, 25 bp, Homo sapien
gtatttaaaggcaacatgatttgtt

SEQ ID NO: 5578612 - DNA, 25 bp, Homo sapien
cagtgttgcagtaaggctgtgatag

SEQ ID NO: 5578613 - DNA, 25 bp, Homo sapien
agtaaggctgtgatagtgattcttt

SEQ ID NO: 5578614 - DNA, 25 bp, Homo sapien
gaacatcctgaatacggagaggtta

SEQ ID NO: 5578615 - DNA, 25 bp, Homo sapien
tgttcatacggtgaaataaaacctc

SEQ ID NO: 5578616 - DNA, 25 bp, Homo sapien
agtgattgggtgctttatgtgtaac

SEQ ID NO: 5578617 - DNA, 25 bp, Homo sapien
tcctacgcctcacccggcgacaggg

SEQ ID NO: 5578618 - DNA, 25 bp, Homo sapien
ccctgtcgccgggtgaggcgtagga

SEQ ID NO: 5578619 - DNA, 25 bp, Homo sapien
cccaaactgaagctcggaactcatt

SEQ ID NO: 5578620 - DNA, 25 bp, Homo sapien
gagcccactggatgcaaagaaaatg

SEQ ID NO: 5578621 - DNA, 25 bp, Homo sapien
aagaaaatgtagttccggacgatag

SEQ ID NO: 5578622 - DNA, 25 bp, Homo sapien
aaatagacataataagtaatgcatg

SEQ ID NO: 5578623 - DNA, 25 bp, Homo sapien
gaacacatggactttcaggagagga

SEQ ID NO: 5578624 - DNA, 25 bp, Homo sapien
cggacgataggttacttcatgtctc

SEQ ID NO: 5578625 - DNA, 25 bp, Homo sapien
gtcaaactgtgaacacatggacttt

SEQ ID NO: 5578626 - DNA, 25 bp, Homo sapien
gcaaccactaccaatatctaccttc

SEQ ID NO: 5578627 - DNA, 25 bp, Homo sapien
ctctaaagggtgtgagaacattgag

SEQ ID NO: 5578628 - DNA, 25 bp, Homo sapien
tctgagctcctctctaaagggtgtg

SEQ ID NO: 5578629 - DNA, 25 bp, Homo sapien
acaagggcctaactgctttcacccc

SEQ ID NO: 5578630 - DNA, 25 bp, Homo sapien
ttcatgtctatcgtcctcctgggtg

SEQ ID NO: 5578631 - DNA, 25 bp, Homo sapien
accttggtcttcatgtctatcgtcc

SEQ ID NO: 5578632 - DNA, 25 bp, Homo sapien
tgaagccagtattttctcctctgtc

SEQ ID NO: 5578633 - DNA, 25 bp, Homo sapien
ttggtcttcatgtctatcgtcctcc

SEQ ID NO: 5578634 - DNA, 25 bp, Homo sapien
gcccaggggttttctgaagccagta

SEQ ID NO: 5578635 - DNA, 25 bp, Homo sapien
atgtctatcgtcctcctgggtgggg

SEQ ID NO: 5578636 - DNA, 25 bp, Homo sapien
gtctatcgtcctcctgggtggggac

SEQ ID NO: 5578637 - DNA, 25 bp, Homo sapien
ccttggcccaggggttttctgaagc

SEQ ID NO: 5578638 - DNA, 25 bp, Homo sapien
ggaccttggtcttcatgtctatcgt

SEQ ID NO: 5578639 - DNA, 25 bp, Homo sapien
ttggcccaggggttttctgaagcca

SEQ ID NO: 5578640 - DNA, 25 bp, Homo sapien
ccaggggttttctgaagccagtatt

SEQ ID NO: 5578641 - DNA, 25 bp, Homo sapien
agtaaaattagagagagattccatg

SEQ ID NO: 5578642 - DNA, 25 bp, Homo sapien
ttagagagagattccatgtccttgg

SEQ ID NO: 5578643 - DNA, 25 bp, Homo sapien
acctttagagggactctgcttccaa

SEQ ID NO: 5578644 - DNA, 25 bp, Homo sapien
gggggaaagatgtcaagtctgattt

SEQ ID NO: 5578645 - DNA, 25 bp, Homo sapien
atgatgatgcttacatgtagcttct

SEQ ID NO: 5578646 - DNA, 25 bp, Homo sapien
aatattgagtgaccacaagagttac

SEQ ID NO: 5578647 - DNA, 25 bp, Homo sapien
attgagtgagagttctcattgtaat

SEQ ID NO: 5578648 - DNA, 25 bp, Homo sapien
cttaggcttcaaatgctggctttac

SEQ ID NO: 5578649 - DNA, 25 bp, Homo sapien
ccacaagagttacctttagagggac

SEQ ID NO: 5578650 - DNA, 25 bp, Homo sapien
caaagactttcaatacttaggcttc

SEQ ID NO: 5578651 - DNA, 25 bp, Homo sapien
gttaagagtctgctctggtcaagat

SEQ ID NO: 5578652 - DNA, 25 bp, Homo sapien
attgaacttttgagccacaggggca

SEQ ID NO: 5578653 - DNA, 25 bp, Homo sapien
gttcatcattgcgagagaaaagatc

SEQ ID NO: 5578654 - DNA, 25 bp, Homo sapien
tttatcaaaagttcggttcatcatt

SEQ ID NO: 5578655 - DNA, 25 bp, Homo sapien
gggcaagtcggtacttcaccaggta

SEQ ID NO: 5578656 - DNA, 25 bp, Homo sapien
ttggctaaaaggagatcaaatattt

SEQ ID NO: 5578657 - DNA, 25 bp, Homo sapien
gctgttctgagtgaaatgtctataa

SEQ ID NO: 5578658 - DNA, 25 bp, Homo sapien
attaaatgggcttataaagaagagt

SEQ ID NO: 5578659 - DNA, 25 bp, Homo sapien
gagaaaagatcatggaatagctgct

SEQ ID NO: 5578660 - DNA, 25 bp, Homo sapien
agattacaaaggagccgtgatagct

SEQ ID NO: 5578661 - DNA, 25 bp, Homo sapien
gttaatgatagtgcatagccaattt

SEQ ID NO: 5578662 - DNA, 25 bp, Homo sapien
caaaggagccgtgatagcttctgtt

SEQ ID NO: 5578663 - DNA, 25 bp, Homo sapien
ccctgcctcccttgtgaactctgcc

SEQ ID NO: 5578664 - DNA, 25 bp, Homo sapien
gttccccagcttcaccgggtgtgcc

SEQ ID NO: 5578665 - DNA, 25 bp, Homo sapien
gtgccccagggttgagactaccctg

SEQ ID NO: 5578666 - DNA, 25 bp, Homo sapien
cagggttgagactaccctgcctccc

SEQ ID NO: 5578667 - DNA, 25 bp, Homo sapien
gcagagtcatctgttccccagcttc

SEQ ID NO: 5578668 - DNA, 25 bp, Homo sapien
gccccagggttgagactaccctgcc

SEQ ID NO: 5578669 - DNA, 25 bp, Homo sapien
tgacttctgctgcatgtgcctgggg

SEQ ID NO: 5578670 - DNA, 25 bp, Homo sapien
gctgggcagagtcatctgttcccca

SEQ ID NO: 5578671 - DNA, 25 bp, Homo sapien
ttcctgacttctgctgcatgtgcct

SEQ ID NO: 5578672 - DNA, 25 bp, Homo sapien
gccacacagccatttcctgacttct

SEQ ID NO: 5578673 - DNA, 25 bp, Homo sapien
cagcttcaccgggtgtgccaaggaa

SEQ ID NO: 5578674 - DNA, 25 bp, Homo sapien
ttggattccatggatggacctcaaa

SEQ ID NO: 5578675 - DNA, 25 bp, Homo sapien
tggggaggtccattagactgttctg

SEQ ID NO: 5578676 - DNA, 25 bp, Homo sapien
taatatcctagagaagctcaggaga

SEQ ID NO: 5578677 - DNA, 25 bp, Homo sapien
ttagactgttctgtgggaaagagag

SEQ ID NO: 5578678 - DNA, 25 bp, Homo sapien
cagaggctcctcaatatcagatcca

SEQ ID NO: 5578679 - DNA, 25 bp, Homo sapien
cacttatctctgaggagtgaggtgg

SEQ ID NO: 5578680 - DNA, 25 bp, Homo sapien
tttcagtaatatgttcaggagtttc

SEQ ID NO: 5578681 - DNA, 25 bp, Homo sapien
tgaggtggcatgtaagatattaaga

SEQ ID NO: 5578682 - DNA, 25 bp, Homo sapien
gcatgtgcattttcctggggaggtc

SEQ ID NO: 5578683 - DNA, 25 bp, Homo sapien
aataaaacagcagcattagtcagtc

SEQ ID NO: 5578684 - DNA, 25 bp, Homo sapien
gcattagtcagtccagctgggcagt

SEQ ID NO: 5578685 - DNA, 25 bp, Homo sapien
aagtcctaacagagggcaaataacc

SEQ ID NO: 5578686 - DNA, 25 bp, Homo sapien
gattgattagaattgaaagggtctt

SEQ ID NO: 5578687 - DNA, 25 bp, Homo sapien
gaagaggagccatccccttttcact

SEQ ID NO: 5578688 - DNA, 25 bp, Homo sapien
tccttgtgaagagactaaagtccta

SEQ ID NO: 5578689 - DNA, 25 bp, Homo sapien
gcccaccaaatctgaagaggagcca

SEQ ID NO: 5578690 - DNA, 25 bp, Homo sapien
tgagaagcccttggatccttgtgaa

SEQ ID NO: 5578691 - DNA, 25 bp, Homo sapien
agcagatgagcaaagaaataaaaat

SEQ ID NO: 5578692 - DNA, 25 bp, Homo sapien
tgtttccaagcagatgagcaaagaa

SEQ ID NO: 5578693 - DNA, 25 bp, Homo sapien
tgagtaaaggcagattgattgatta

SEQ ID NO: 5578694 - DNA, 25 bp, Homo sapien
atagaaaaacttgcagtgatgaaat

SEQ ID NO: 5578695 - DNA, 25 bp, Homo sapien
gtgcttctataatgtaggatgggac

SEQ ID NO: 5578696 - DNA, 25 bp, Homo sapien
tagatgaacatgcttaagattagaa

SEQ ID NO: 5578697 - DNA, 25 bp, Homo sapien
tatgctaaaaggacaggtgcacatt

SEQ ID NO: 5578698 - DNA, 25 bp, Homo sapien
ataattcagaagtcttagtacactc

SEQ ID NO: 5578699 - DNA, 25 bp, Homo sapien
tgctaaaaggacaggtgcacattac

SEQ ID NO: 5578700 - DNA, 25 bp, Homo sapien
aagattagaatctccacttccttag

SEQ ID NO: 5578701 - DNA, 25 bp, Homo sapien
ggtgcacattacctaatagtgggat

SEQ ID NO: 5578702 - DNA, 25 bp, Homo sapien
taagtaacagatatgctaaaaggac

SEQ ID NO: 5578703 - DNA, 25 bp, Homo sapien
aacagatatgctaaaaggacaggtg

SEQ ID NO: 5578704 - DNA, 25 bp, Homo sapien
agatatgctaaaaggacaggtgcac

SEQ ID NO: 5578705 - DNA, 25 bp, Homo sapien
gtgggattgttataattcagaagtc

SEQ ID NO: 5578706 - DNA, 25 bp, Homo sapien
cctaatagtgggattgttataattc

SEQ ID NO: 5578707 - DNA, 25 bp, Homo sapien
ttctccctatagctattacccaatc

SEQ ID NO: 5578708 - DNA, 25 bp, Homo sapien
aggaaactatggttataaccctggc

SEQ ID NO: 5578709 - DNA, 25 bp, Homo sapien
taggctataaggaggtgttttcatt

SEQ ID NO: 5578710 - DNA, 25 bp, Homo sapien
tcttgtctgtgctttctgtcctcat

SEQ ID NO: 5578711 - DNA, 25 bp, Homo sapien
aaaaaggcctcctgcattcactttc

SEQ ID NO: 5578712 - DNA, 25 bp, Homo sapien
aatgtaaaaaagattagcctaggaa

SEQ ID NO: 5578713 - DNA, 25 bp, Homo sapien
ctgtcctcatttaggtagctatttt

SEQ ID NO: 5578714 - DNA, 25 bp, Homo sapien
tctccataagctgtatctacccctc

SEQ ID NO: 5578715 - DNA, 25 bp, Homo sapien
aagattagcctaggaaactatggtt

SEQ ID NO: 5578716 - DNA, 25 bp, Homo sapien
tcttcctaggctataaggaggtgtt

SEQ ID NO: 5578717 - DNA, 25 bp, Homo sapien
tcaaataaccttgtgataaagttta

SEQ ID NO: 5578718 - DNA, 25 bp, Homo sapien
ggttcccacagagttgttcaaagcc

SEQ ID NO: 5578719 - DNA, 25 bp, Homo sapien
tatgtggcatatgcagtattcattg

SEQ ID NO: 5578720 - DNA, 25 bp, Homo sapien
atttcttccagccttggggaattta

SEQ ID NO: 5578721 - DNA, 25 bp, Homo sapien
ccagccttggggaatttacatcatt

SEQ ID NO: 5578722 - DNA, 25 bp, Homo sapien
cttatgttaattgttcagctctgaa

SEQ ID NO: 5578723 - DNA, 25 bp, Homo sapien
gttcaaagcctgactcatgctcctt

SEQ ID NO: 5578724 - DNA, 25 bp, Homo sapien
atttatgaccctgtctgccttccat

SEQ ID NO: 5578725 - DNA, 25 bp, Homo sapien
cccacagagttgttcaaagcctgac

SEQ ID NO: 5578726 - DNA, 25 bp, Homo sapien
tcctaatagcaaaaggctttctggt

SEQ ID NO: 5578727 - DNA, 25 bp, Homo sapien
aaggctttctggttcccacagagtt

SEQ ID NO: 5578728 - DNA, 25 bp, Homo sapien
tcagctctgaaaatacagcacttac

SEQ ID NO: 5578729 - DNA, 25 bp, Homo sapien
tgttagagttttctctacaaaagag

SEQ ID NO: 5578730 - DNA, 25 bp, Homo sapien
ctcttttgtagagaaaactctaaca

SEQ ID NO: 5578731 - DNA, 25 bp, Homo sapien
aattagctaccaggatcataaccat

SEQ ID NO: 5578732 - DNA, 25 bp, Homo sapien
atgattaacagtaggtatgaagggt

SEQ ID NO: 5578733 - DNA, 25 bp, Homo sapien
atggtaagttcatatttgagaagaa

SEQ ID NO: 5578734 - DNA, 25 bp, Homo sapien
acaggcgacttgaggttcacatgta

SEQ ID NO: 5578735 - DNA, 25 bp, Homo sapien
taatcagcttgagaagtagacactt

SEQ ID NO: 5578736 - DNA, 25 bp, Homo sapien
aaggctaaaaatgatactagtattc

SEQ ID NO: 5578737 - DNA, 25 bp, Homo sapien
tccagagactaaaatgatatttgtt

SEQ ID NO: 5578738 - DNA, 25 bp, Homo sapien
gtattcagaacactaacaatctcac

SEQ ID NO: 5578739 - DNA, 25 bp, Homo sapien
tttgttaagcatactgatgcacaca

SEQ ID NO: 5578740 - DNA, 25 bp, Homo sapien
ttagcaagctttcttccagagacta

SEQ ID NO: 5578741 - DNA, 25 bp, Homo sapien
atctcacttgggtcacaggcgactt

SEQ ID NO: 5578742 - DNA, 25 bp, Homo sapien
aaagaattccaaaatatcaggcttc

SEQ ID NO: 5578743 - DNA, 25 bp, Homo sapien
agtgacagaaaatgggccctatgaa

SEQ ID NO: 5578744 - DNA, 25 bp, Homo sapien
agtaaatgggtatgttaagtctgcc

SEQ ID NO: 5578745 - DNA, 25 bp, Homo sapien
taggacctagtgaagaggaatctag

SEQ ID NO: 5578746 - DNA, 25 bp, Homo sapien
gagagaagttgagaacataataaaa

SEQ ID NO: 5578747 - DNA, 25 bp, Homo sapien
gaagaggaatctagtgacagaaaat

SEQ ID NO: 5578748 - DNA, 25 bp, Homo sapien
caatctgaaccaagagaggtgatat

SEQ ID NO: 5578749 - DNA, 25 bp, Homo sapien
gtcaccaataccagagagaagttga

SEQ ID NO: 5578750 - DNA, 25 bp, Homo sapien
tatcaggcttcaaagtggctatttc

SEQ ID NO: 5578751 - DNA, 25 bp, Homo sapien
gttttagagaagatgtaggacctag

SEQ ID NO: 5578752 - DNA, 25 bp, Homo sapien
gggccctatgaaactgtctacaatc

SEQ ID NO: 5578753 - DNA, 25 bp, Homo sapien
gtttatctgaaacggtaatactatt

SEQ ID NO: 5578754 - DNA, 25 bp, Homo sapien
aatagtattaccgtttcagataaac

SEQ ID NO: 5578755 - DNA, 25 bp, Homo sapien
gaaatacaaagtacaactgaacaaa

SEQ ID NO: 5578756 - DNA, 25 bp, Homo sapien
atctatgagtgtggttattaaaaaa

SEQ ID NO: 5578757 - DNA, 25 bp, Homo sapien
atgcgtacatacacaatcactcaac

SEQ ID NO: 5578758 - DNA, 25 bp, Homo sapien
actgcaactgggacattaaaaatac

SEQ ID NO: 5578759 - DNA, 25 bp, Homo sapien
atgcttgcaactgaaatgtctctac

SEQ ID NO: 5578760 - DNA, 25 bp, Homo sapien
ctactccaagggaagtttctgattt

SEQ ID NO: 5578761 - DNA, 25 bp, Homo sapien
attacgttcatacaatggtagaaaa

SEQ ID NO: 5578762 - DNA, 25 bp, Homo sapien
ctgaacaaaacattcctatgcgtac

SEQ ID NO: 5578763 - DNA, 25 bp, Homo sapien
acataaaggtaagatttctgattat

SEQ ID NO: 5578764 - DNA, 25 bp, Homo sapien
tcacaatgattaaaatgccttacac

SEQ ID NO: 5578765 - DNA, 25 bp, Homo sapien
acacaatcactcaactggaacaatc

SEQ ID NO: 5578766 - DNA, 25 bp, Homo sapien
ataatacaggttgggtttagagctt

SEQ ID NO: 5578767 - DNA, 25 bp, Homo sapien
ctgctgcatataatacaggttgggt

SEQ ID NO: 5578768 - DNA, 25 bp, Homo sapien
acatttcaaatgcagatcacacgga

SEQ ID NO: 5578769 - DNA, 25 bp, Homo sapien
ggtgactaagtacagaataacaaat

SEQ ID NO: 5578770 - DNA, 25 bp, Homo sapien
ggttgggtttagagcttggagctca

SEQ ID NO: 5578771 - DNA, 25 bp, Homo sapien
tgcagatcacacggaaaggtgacta

SEQ ID NO: 5578772 - DNA, 25 bp, Homo sapien
aaaaatgctacttgtgaaaacccag

SEQ ID NO: 5578773 - DNA, 25 bp, Homo sapien
caggaggaataaaaatgctacttgt

SEQ ID NO: 5578774 - DNA, 25 bp, Homo sapien
caaatgcagatcacacggaaaggtg

SEQ ID NO: 5578775 - DNA, 25 bp, Homo sapien
cggaaaggtgactaagtacagaata

SEQ ID NO: 5578776 - DNA, 25 bp, Homo sapien
aacaaagataacctgctgctgcata

SEQ ID NO: 5578777 - DNA, 25 bp, Homo sapien
tttggcaccctacactttggctcac

SEQ ID NO: 5578778 - DNA, 25 bp, Homo sapien
ctttggctcacagtctcttctcccc

SEQ ID NO: 5578779 - DNA, 25 bp, Homo sapien
cagtacacatgaccaccgccaagtc

SEQ ID NO: 5578780 - DNA, 25 bp, Homo sapien
tgagaaaacctcaagatctttcccc

SEQ ID NO: 5578781 - DNA, 25 bp, Homo sapien
caacatgacctttcttgagggaaca

SEQ ID NO: 5578782 - DNA, 25 bp, Homo sapien
gccttgaaatcctatcctgacctgc

SEQ ID NO: 5578783 - DNA, 25 bp, Homo sapien
tcccacaaagctctttttggcaccc

SEQ ID NO: 5578784 - DNA, 25 bp, Homo sapien
gggctgaccctgatcacaccccacc

SEQ ID NO: 5578785 - DNA, 25 bp, Homo sapien
ccctatggttccaggtcaacatgac

SEQ ID NO: 5578786 - DNA, 25 bp, Homo sapien
tcttttgttggttgcactggtgggt

SEQ ID NO: 5578787 - DNA, 25 bp, Homo sapien
actgccccagctttgccctaaaatc

SEQ ID NO: 5578788 - DNA, 25 bp, Homo sapien
tagctgtcagggttaagtgtcatat

SEQ ID NO: 5578789 - DNA, 25 bp, Homo sapien
ataaagtttatgggctgcattattc

SEQ ID NO: 5578790 - DNA, 25 bp, Homo sapien
tcaagggtcttagaagctctgtacc

SEQ ID NO: 5578791 - DNA, 25 bp, Homo sapien
ctagcattagcataaagtaagactc

SEQ ID NO: 5578792 - DNA, 25 bp, Homo sapien
ccactcaggaaatttcaagggtctt

SEQ ID NO: 5578793 - DNA, 25 bp, Homo sapien
tcagaagagtatagcatgtttacac

SEQ ID NO: 5578794 - DNA, 25 bp, Homo sapien
gtgattaaatggtagtgaagaactt

SEQ ID NO: 5578795 - DNA, 25 bp, Homo sapien
agtaagactctagctgtcagggtta

SEQ ID NO: 5578796 - DNA, 25 bp, Homo sapien
gtggttaaaggggcttgtcatccta

SEQ ID NO: 5578797 - DNA, 25 bp, Homo sapien
ttagaagctgtgattaaatggtagt

SEQ ID NO: 5578798 - DNA, 25 bp, Homo sapien
aatgtgcactaggaaaaccaaaact

SEQ ID NO: 5578799 - DNA, 25 bp, Homo sapien
ttagtgaaccagtgacggaaacact

SEQ ID NO: 5578800 - DNA, 25 bp, Homo sapien
catggcagtaatactgaaaaaggag

SEQ ID NO: 5578801 - DNA, 25 bp, Homo sapien
aaatattagaaggactaagagcttt

SEQ ID NO: 5578802 - DNA, 25 bp, Homo sapien
gtggcatgaatgataacataaaacc

SEQ ID NO: 5578803 - DNA, 25 bp, Homo sapien
ctaagagctttagagccagtggagc

SEQ ID NO: 5578804 - DNA, 25 bp, Homo sapien
aacaggttggtggcaacccacatct

SEQ ID NO: 5578805 - DNA, 25 bp, Homo sapien
aatttcaagtgagatggtaggttgc

SEQ ID NO: 5578806 - DNA, 25 bp, Homo sapien
tgggaagttgatagttataggatac

SEQ ID NO: 5578807 - DNA, 25 bp, Homo sapien
gaggacaggaatcaatcaatcagta

SEQ ID NO: 5578808 - DNA, 25 bp, Homo sapien
agagccagtggagctatataaatac

SEQ ID NO: 5578809 - DNA, 25 bp, Homo sapien
gtgagatggtaggttgcacatactt

SEQ ID NO: 5578810 - DNA, 25 bp, Homo sapien
gataataaggacacccagttgaagt

SEQ ID NO: 5578811 - DNA, 25 bp, Homo sapien
tctgtagattctttcaaggggccct

SEQ ID NO: 5578812 - DNA, 25 bp, Homo sapien
cacatgaattagaggtatgaaccct

SEQ ID NO: 5578813 - DNA, 25 bp, Homo sapien
tcagcctgcctcaaataccagattc

SEQ ID NO: 5578814 - DNA, 25 bp, Homo sapien
tctaaatacataggacatgaagagg

SEQ ID NO: 5578815 - DNA, 25 bp, Homo sapien
ttgccaaacgcatgaatttagactc

SEQ ID NO: 5578816 - DNA, 25 bp, Homo sapien
ttctcacaaaccagtacagcacaac

SEQ ID NO: 5578817 - DNA, 25 bp, Homo sapien
aagaggactgagttgcttcatataa

SEQ ID NO: 5578818 - DNA, 25 bp, Homo sapien
ttaataatggccctagtactagaac

SEQ ID NO: 5578819 - DNA, 25 bp, Homo sapien
tcaaggggccctattacttcaccac

SEQ ID NO: 5578820 - DNA, 25 bp, Homo sapien
tgaaccctaagagtaagaatgcatt

SEQ ID NO: 5578821 - DNA, 25 bp, Homo sapien
acaatgtatacaccaaaagaggaca

SEQ ID NO: 5578822 - DNA, 25 bp, Homo sapien
tggcttcttgaaatcatgccgctcc

SEQ ID NO: 5578823 - DNA, 25 bp, Homo sapien
catgccgctccaagtatgtcataac

SEQ ID NO: 5578824 - DNA, 25 bp, Homo sapien
ttaaagagatatcaaaagtccctat

SEQ ID NO: 5578825 - DNA, 25 bp, Homo sapien
gtgagccaccttgccggccttatca

SEQ ID NO: 5578826 - DNA, 25 bp, Homo sapien
gagtaaaaccagagctaaggagcta

SEQ ID NO: 5578827 - DNA, 25 bp, Homo sapien
gagataaatgggtagattttcacaa

SEQ ID NO: 5578828 - DNA, 25 bp, Homo sapien
aagaggacatcttttccgtgagtca

SEQ ID NO: 5578829 - DNA, 25 bp, Homo sapien
aggagctataagaatttggaatggc

SEQ ID NO: 5578830 - DNA, 25 bp, Homo sapien
accttgccggccttatcagataatt

SEQ ID NO: 5578831 - DNA, 25 bp, Homo sapien
cgtgagtcagggaatatttaaagag

SEQ ID NO: 5578832 - DNA, 25 bp, Homo sapien
acagaaaggtcagaatctggccctt

SEQ ID NO: 5578833 - DNA, 25 bp, Homo sapien
acttggaggaacagctataaatatg

SEQ ID NO: 5578834 - DNA, 25 bp, Homo sapien
tagtcaagcacctttagctcgaaat

SEQ ID NO: 5578835 - DNA, 25 bp, Homo sapien
tagctcgaaataatcagtatgccaa

SEQ ID NO: 5578836 - DNA, 25 bp, Homo sapien
ttgaaaaattgatacttggaggaac

SEQ ID NO: 5578837 - DNA, 25 bp, Homo sapien
atgccaaatcggcatatttgggggt

SEQ ID NO: 5578838 - DNA, 25 bp, Homo sapien
tcagttggactaaacatctaaatgt

SEQ ID NO: 5578839 - DNA, 25 bp, Homo sapien
ctcagctgattagagccatcttctc

SEQ ID NO: 5578840 - DNA, 25 bp, Homo sapien
ctgcaactactgttagtcaagcacc

SEQ ID NO: 5578841 - DNA, 25 bp, Homo sapien
ggggtggcatgttcaaatttccttc

SEQ ID NO: 5578842 - DNA, 25 bp, Homo sapien
cttacatagtaactgcatgacagat

SEQ ID NO: 5578843 - DNA, 25 bp, Homo sapien
cagacctgggtaattcttctagttc

SEQ ID NO: 5578844 - DNA, 25 bp, Homo sapien
ctttcgcccgctagtccagtatgca

SEQ ID NO: 5578845 - DNA, 25 bp, Homo sapien
agtccctccaaatccggctacactc

SEQ ID NO: 5578846 - DNA, 25 bp, Homo sapien
gagtcatggcctttcgcccgctagt

SEQ ID NO: 5578847 - DNA, 25 bp, Homo sapien
gcattctgagactgcgcttggtgga

SEQ ID NO: 5578848 - DNA, 25 bp, Homo sapien
gccagactggatttctcagcctgcg

SEQ ID NO: 5578849 - DNA, 25 bp, Homo sapien
gatttctcagcctgcgactcagccc

SEQ ID NO: 5578850 - DNA, 25 bp, Homo sapien
gggctcttgggcattctgagactgc

SEQ ID NO: 5578851 - DNA, 25 bp, Homo sapien
tcacactgagtgtccagtccctcca

SEQ ID NO: 5578852 - DNA, 25 bp, Homo sapien
gggcattctgagactgcgcttggtg

SEQ ID NO: 5578853 - DNA, 25 bp, Homo sapien
cacgacccactcctcttggagaccc

SEQ ID NO: 5578854 - DNA, 25 bp, Homo sapien
acgtaagctcgaggccttggccttg

SEQ ID NO: 5578855 - DNA, 25 bp, Homo sapien
tcgcgcccatccttgtggagcgacc

SEQ ID NO: 5578856 - DNA, 25 bp, Homo sapien
cacctttttggtattggactctccc

SEQ ID NO: 5578857 - DNA, 25 bp, Homo sapien
gtgggacccttcgcgcccatccttg

SEQ ID NO: 5578858 - DNA, 25 bp, Homo sapien
tgacccttctttggaatcaggccca

SEQ ID NO: 5578859 - DNA, 25 bp, Homo sapien
gccacctgcacaccccgatccctgc

SEQ ID NO: 5578860 - DNA, 25 bp, Homo sapien
gtggccacacgtaagctcgaggcct

SEQ ID NO: 5578861 - DNA, 25 bp, Homo sapien
acctgcacaccccgatccctgctgc

SEQ ID NO: 5578862 - DNA, 25 bp, Homo sapien
gtcaagcacaccctgatgcccgagc

SEQ ID NO: 5578863 - DNA, 25 bp, Homo sapien
ttggccttgacccttctttggaatc

SEQ ID NO: 5578864 - DNA, 25 bp, Homo sapien
cccgagctggacttctgacccatgg

SEQ ID NO: 5578865 - DNA, 25 bp, Homo sapien
taaagagatctgttgaggattctaa

SEQ ID NO: 5578866 - DNA, 25 bp, Homo sapien
ttcaaaaacatacatcttcagtcat

SEQ ID NO: 5578867 - DNA, 25 bp, Homo sapien
atcaagaatgttggttggattttat

SEQ ID NO: 5578868 - DNA, 25 bp, Homo sapien
tcagtgcaaagcagcattttctatg

SEQ ID NO: 5578869 - DNA, 25 bp, Homo sapien
attgtaagcataacctgaaaatagt

SEQ ID NO: 5578870 - DNA, 25 bp, Homo sapien
tgctttggtcttggcattgggggaa

SEQ ID NO: 5578871 - DNA, 25 bp, Homo sapien
attcctcaagaaaaattagggcagg

SEQ ID NO: 5578872 - DNA, 25 bp, Homo sapien
gcataacctgaaaatagtttgctct

SEQ ID NO: 5578873 - DNA, 25 bp, Homo sapien
tttaagtatttcagtgcaaagcagc

SEQ ID NO: 5578874 - DNA, 25 bp, Homo sapien
ttcattattgtgctttggtcttggc

SEQ ID NO: 5578875 - DNA, 25 bp, Homo sapien
aagatgaatttttctgatcaagttc

SEQ ID NO: 5578876 - DNA, 25 bp, Homo sapien
aattcctttggaagtaggagcctgg

SEQ ID NO: 5578877 - DNA, 25 bp, Homo sapien
cagagagcctccaggatccttgtat

SEQ ID NO: 5578878 - DNA, 25 bp, Homo sapien
aaagaaagaaatatcacaagctcat

SEQ ID NO: 5578879 - DNA, 25 bp, Homo sapien
aagctcatagattagtgctggacac

SEQ ID NO: 5578880 - DNA, 25 bp, Homo sapien
ttatctgcgcagatttatgggggag

SEQ ID NO: 5578881 - DNA, 25 bp, Homo sapien
ggcttggtgattgatagggttattt

SEQ ID NO: 5578882 - DNA, 25 bp, Homo sapien
taagaatcaagatggtagttgggat

SEQ ID NO: 5578883 - DNA, 25 bp, Homo sapien
gtaggagcctggcaccagaattcta

SEQ ID NO: 5578884 - DNA, 25 bp, Homo sapien
ctccagggattacttctaggaagac

SEQ ID NO: 5578885 - DNA, 25 bp, Homo sapien
agaggttgaatgcagctcgctcatc

SEQ ID NO: 5578886 - DNA, 25 bp, Homo sapien
agagagatcaggaaaccagaaatat

SEQ ID NO: 5578887 - DNA, 25 bp, Homo sapien
tttccgtgcactattcccaacctcc

SEQ ID NO: 5578888 - DNA, 25 bp, Homo sapien
aggaggcctgcttaaagtgcaatct

SEQ ID NO: 5578889 - DNA, 25 bp, Homo sapien
catagtatcacaaagcacttggcag

SEQ ID NO: 5578890 - DNA, 25 bp, Homo sapien
tgtccagtcacaagtcccaagagct

SEQ ID NO: 5578891 - DNA, 25 bp, Homo sapien
ctaaaatatttaggaggcctgctta

SEQ ID NO: 5578892 - DNA, 25 bp, Homo sapien
taccagattaaaacatgaagccaaa

SEQ ID NO: 5578893 - DNA, 25 bp, Homo sapien
agaaagctgccacctttccgtgcac

SEQ ID NO: 5578894 - DNA, 25 bp, Homo sapien
gtttgaagccagcataggcaagagt

SEQ ID NO: 5578895 - DNA, 25 bp, Homo sapien
gccaaagcccatcaacataatctcc

SEQ ID NO: 5578896 - DNA, 25 bp, Homo sapien
tatgagtggagtaatatggcttaat

SEQ ID NO: 5578897 - DNA, 25 bp, Homo sapien
ctatccaaatgaactgccaaagccc

SEQ ID NO: 5578898 - DNA, 25 bp, Homo sapien
tatcagtgttaggaaaaatgccttc

SEQ ID NO: 5578899 - DNA, 25 bp, Homo sapien
ccagtccccaaaatcagggctgcac

SEQ ID NO: 5578900 - DNA, 25 bp, Homo sapien
aaggcatcaagagtattggtgactt

SEQ ID NO: 5578901 - DNA, 25 bp, Homo sapien
gcaaagccaggcttaaccttgtttc

SEQ ID NO: 5578902 - DNA, 25 bp, Homo sapien
gtaactggcccaaacctagcactcc

SEQ ID NO: 5578903 - DNA, 25 bp, Homo sapien
gggctgcacaggtctgaatagcaaa

SEQ ID NO: 5578904 - DNA, 25 bp, Homo sapien
cctaagactcatggctccttgggcc

SEQ ID NO: 5578905 - DNA, 25 bp, Homo sapien
gcccagccaaccaatcctaccactc

SEQ ID NO: 5578906 - DNA, 25 bp, Homo sapien
gacctggccatgtaaggcccctagt

SEQ ID NO: 5578907 - DNA, 25 bp, Homo sapien
ccgccaggtctcccccgcgttcgta

SEQ ID NO: 5578908 - DNA, 25 bp, Homo sapien
gcccctagtgtcaagcctaagactc

SEQ ID NO: 5578909 - DNA, 25 bp, Homo sapien
ttcaaaacatagtaagtcaacacac

SEQ ID NO: 5578910 - DNA, 25 bp, Homo sapien
aaaattacttggatacatgagggga

SEQ ID NO: 5578911 - DNA, 25 bp, Homo sapien
attacttggatacatgaggggaaaa

SEQ ID NO: 5578912 - DNA, 25 bp, Homo sapien
acaaactgaacgtgagcaagtctaa

SEQ ID NO: 5578913 - DNA, 25 bp, Homo sapien
tttttgacaatgggaacttccactc

SEQ ID NO: 5578914 - DNA, 25 bp, Homo sapien
tcattcggtagaagtcaccactttc

SEQ ID NO: 5578915 - DNA, 25 bp, Homo sapien
gggaaaacgataaagcacatgatat

SEQ ID NO: 5578916 - DNA, 25 bp, Homo sapien
aacatagtaagtcaacacacaactg

SEQ ID NO: 5578917 - DNA, 25 bp, Homo sapien
ttccactcattcggtagaagtcacc

SEQ ID NO: 5578918 - DNA, 25 bp, Homo sapien
aaactgaacgtgagcaagtctaact

SEQ ID NO: 5578919 - DNA, 25 bp, Homo sapien
tgacaatgggaacttccactcattc

SEQ ID NO: 5578920 - DNA, 25 bp, Homo sapien
tgacagcaaacagaagcctcattat

SEQ ID NO: 5578921 - DNA, 25 bp, Homo sapien
cacttccatcaagaggagaagggat

SEQ ID NO: 5578922 - DNA, 25 bp, Homo sapien
gagcatgaatggcactcgaagtttc

SEQ ID NO: 5578923 - DNA, 25 bp, Homo sapien
taattggtcagataatggcgagtta

SEQ ID NO: 5578924 - DNA, 25 bp, Homo sapien
aaacactcctggctctgggggtttg

SEQ ID NO: 5578925 - DNA, 25 bp, Homo sapien
tgtctagtatcactgcaggctgcgg

SEQ ID NO: 5578926 - DNA, 25 bp, Homo sapien
cagggagcactgctggtcatcctga

SEQ ID NO: 5578927 - DNA, 25 bp, Homo sapien
tggtctagtactcttgggccacccc

SEQ ID NO: 5578928 - DNA, 25 bp, Homo sapien
ggaagctctcagatgcagccaccag

SEQ ID NO: 5578929 - DNA, 25 bp, Homo sapien
gtcagatgactgaaccgagcatgaa

SEQ ID NO: 5578930 - DNA, 25 bp, Homo sapien
ttggtgttaggcaagaagccacaat

SEQ ID NO: 5578931 - DNA, 25 bp, Homo sapien
tcacaggaaatattgaaatgtcagg

SEQ ID NO: 5578932 - DNA, 25 bp, Homo sapien
accacaaggttctcggtggagcaag

SEQ ID NO: 5578933 - DNA, 25 bp, Homo sapien
aaataagatgaagttgtactagaat

SEQ ID NO: 5578934 - DNA, 25 bp, Homo sapien
atgttcaagtcttaacccctgggac

SEQ ID NO: 5578935 - DNA, 25 bp, Homo sapien
tttgagcagtgttctgtggaaacgg

SEQ ID NO: 5578936 - DNA, 25 bp, Homo sapien
gtccccaaggagacttcgccatagg

SEQ ID NO: 5578937 - DNA, 25 bp, Homo sapien
cttttgggttgaagtgtatctttcc

SEQ ID NO: 5578938 - DNA, 25 bp, Homo sapien
ttgtactagaatatggtgaacccta

SEQ ID NO: 5578939 - DNA, 25 bp, Homo sapien
ttcgccataggagttcacaggaaat

SEQ ID NO: 5578940 - DNA, 25 bp, Homo sapien
aacgggtacctagaacacaaccaca

SEQ ID NO: 5578941 - DNA, 25 bp, Homo sapien
ttaacccctgggacctgtgaatgag

SEQ ID NO: 5578942 - DNA, 25 bp, Homo sapien
tgtcttcatacaaacgcagcagaaa

SEQ ID NO: 5578943 - DNA, 25 bp, Homo sapien
caaaagtgccataatgcagtcctgc

SEQ ID NO: 5578944 - DNA, 25 bp, Homo sapien
caaagttcaatggttcccctaagtc

SEQ ID NO: 5578945 - DNA, 25 bp, Homo sapien
atacaacagaaactactgcaccgca

SEQ ID NO: 5578946 - DNA, 25 bp, Homo sapien
ctgcaccgcaatcacatgggcagga

SEQ ID NO: 5578947 - DNA, 25 bp, Homo sapien
aaattatcagtagcattccctcctt

SEQ ID NO: 5578948 - DNA, 25 bp, Homo sapien
taggagcactacattctgtgtacat

SEQ ID NO: 5578949 - DNA, 25 bp, Homo sapien
ggccaccaaggcaaaagtgccataa

SEQ ID NO: 5578950 - DNA, 25 bp, Homo sapien
aaaaatagtaactaggagcactaca

SEQ ID NO: 5578951 - DNA, 25 bp, Homo sapien
cacataaaaaactgggctaactttc

SEQ ID NO: 5578952 - DNA, 25 bp, Homo sapien
gagctgctgtccacactattataca

SEQ ID NO: 5578953 - DNA, 25 bp, Homo sapien
aaaacgattgttaccagcttcatat

SEQ ID NO: 5578954 - DNA, 25 bp, Homo sapien
aaaacttttgggtctgagtaggcag

SEQ ID NO: 5578955 - DNA, 25 bp, Homo sapien
tctgagtaggcagtactggaattta

SEQ ID NO: 5578956 - DNA, 25 bp, Homo sapien
ctacaattaagagcctaaggggatg

SEQ ID NO: 5578957 - DNA, 25 bp, Homo sapien
tttaagtgattgtaacgcaggagtg

SEQ ID NO: 5578958 - DNA, 25 bp, Homo sapien
agcctaaggggatgcttgctctatt

SEQ ID NO: 5578959 - DNA, 25 bp, Homo sapien
gtttaacagaaccacttgagcagct

SEQ ID NO: 5578960 - DNA, 25 bp, Homo sapien
tgtaacgcaggagtgtttaacagaa

SEQ ID NO: 5578961 - DNA, 25 bp, Homo sapien
ctccagagatgttgatttagtaagc

SEQ ID NO: 5578962 - DNA, 25 bp, Homo sapien
aaataggcttgacatgctttcagct

SEQ ID NO: 5578963 - DNA, 25 bp, Homo sapien
tgtgtaacaggtagcataacatgtc

SEQ ID NO: 5578964 - DNA, 25 bp, Homo sapien
tgcagaatcaatgatgagtaaaatc

SEQ ID NO: 5578965 - DNA, 25 bp, Homo sapien
agttaccctgaggaactcaagactt

SEQ ID NO: 5578966 - DNA, 25 bp, Homo sapien
atctctgacaggttcagtgtccttc

SEQ ID NO: 5578967 - DNA, 25 bp, Homo sapien
cttgctgggtacactatgcagaatc

SEQ ID NO: 5578968 - DNA, 25 bp, Homo sapien
tcaccgcgcccaccactaccatatt

SEQ ID NO: 5578969 - DNA, 25 bp, Homo sapien
tcaagccttactgaagaggacggga

SEQ ID NO: 5578970 - DNA, 25 bp, Homo sapien
tcaaagtgactaaaatgtgcctctt

SEQ ID NO: 5578971 - DNA, 25 bp, Homo sapien
gagattacaggcttcagtcaccgcg

SEQ ID NO: 5578972 - DNA, 25 bp, Homo sapien
ctgggcgaccaggttcccaagctta

SEQ ID NO: 5578973 - DNA, 25 bp, Homo sapien
tcttcagaaagccattagtgcaaat

SEQ ID NO: 5578974 - DNA, 25 bp, Homo sapien
acgggagacatcaacacagttaccc

SEQ ID NO: 5578975 - DNA, 25 bp, Homo sapien
tcgttgactacctagaagcagctgc

SEQ ID NO: 5578976 - DNA, 25 bp, Homo sapien
aacctgaatcccgtcaaagggagat

SEQ ID NO: 5578977 - DNA, 25 bp, Homo sapien
gcatagagcaagctccccaaaggcc

SEQ ID NO: 5578978 - DNA, 25 bp, Homo sapien
tgagcactaagttaaaaccgggcac

SEQ ID NO: 5578979 - DNA, 25 bp, Homo sapien
ggggggagtatcatttcctgggtga

SEQ ID NO: 5578980 - DNA, 25 bp, Homo sapien
agagtagcacaggtagtatcagaat

SEQ ID NO: 5578981 - DNA, 25 bp, Homo sapien
aacctgacacatacactgagcacta

SEQ ID NO: 5578982 - DNA, 25 bp, Homo sapien
aagcagctgcttcgacatctatccc

SEQ ID NO: 5578983 - DNA, 25 bp, Homo sapien
tagctagtgtttcacagtgggggga

SEQ ID NO: 5578984 - DNA, 25 bp, Homo sapien
tcaaagggagattacaacaaatgtg

SEQ ID NO: 5578985 - DNA, 25 bp, Homo sapien
agaattgggattcaaacctgacaca

SEQ ID NO: 5578986 - DNA, 25 bp, Homo sapien
tgtattcactatgggctggctttaa

SEQ ID NO: 5578987 - DNA, 25 bp, Homo sapien
gtggaatgatagtttgggaagatct

SEQ ID NO: 5578988 - DNA, 25 bp, Homo sapien
caaaaacagttgaaaggctgccctt

SEQ ID NO: 5578989 - DNA, 25 bp, Homo sapien
ttcctcttgatgtagcactgtattc

SEQ ID NO: 5578990 - DNA, 25 bp, Homo sapien
tcagaatctggatatacatgttaac

SEQ ID NO: 5578991 - DNA, 25 bp, Homo sapien
tagtgtgataagtatccaatccttc

SEQ ID NO: 5578992 - DNA, 25 bp, Homo sapien
atgagaaattaaaatgccccttaag

SEQ ID NO: 5578993 - DNA, 25 bp, Homo sapien
tccttcatagcaagaaattagggaa

SEQ ID NO: 5578994 - DNA, 25 bp, Homo sapien
ccgcgcccggccgttttcctcttga

SEQ ID NO: 5578995 - DNA, 25 bp, Homo sapien
atgagaaagatttggtatggaagga

SEQ ID NO: 5578996 - DNA, 25 bp, Homo sapien
gaggttaaatgtgtggaatgatagt

SEQ ID NO: 5578997 - DNA, 25 bp, Homo sapien
agcagaagcggcctagaaatctgca

SEQ ID NO: 5578998 - DNA, 25 bp, Homo sapien
cttaggtgacaagaaccataagagc

SEQ ID NO: 5578999 - DNA, 25 bp, Homo sapien
aaagaaaacatgaactatagaaaag

SEQ ID NO: 5579000 - DNA, 25 bp, Homo sapien
tgagcttagatttgaatcgaggact

SEQ ID NO: 5579001 - DNA, 25 bp, Homo sapien
tttaatgccaaagcttaagattctt

SEQ ID NO: 5579002 - DNA, 25 bp, Homo sapien
tgaagttaatcagatgttgagctta

SEQ ID NO: 5579003 - DNA, 25 bp, Homo sapien
atgaggtcatttactagatggtctc

SEQ ID NO: 5579004 - DNA, 25 bp, Homo sapien
gtgacaagaaccataagagctttcc

SEQ ID NO: 5579005 - DNA, 25 bp, Homo sapien
atcgaggactatttaatgccaaagc

SEQ ID NO: 5579006 - DNA, 25 bp, Homo sapien
ttcttagagacatacaatctgagtc

SEQ ID NO: 5579007 - DNA, 25 bp, Homo sapien
tagaaatctgcaaagagaaagagaa

SEQ ID NO: 5579008 - DNA, 25 bp, Homo sapien
gcaagatgatctcaagcaggctgta

SEQ ID NO: 5579009 - DNA, 25 bp, Homo sapien
gtgttgcgcatcaggatagaaaaac

SEQ ID NO: 5579010 - DNA, 25 bp, Homo sapien
gtaaatcttgattcgggggtgagaa

SEQ ID NO: 5579011 - DNA, 25 bp, Homo sapien
cttgttgcccaacggtcagactctg

SEQ ID NO: 5579012 - DNA, 25 bp, Homo sapien
aactcagtttataggcaagatgatc

SEQ ID NO: 5579013 - DNA, 25 bp, Homo sapien
ctggatatgttcggagtttgtatac

SEQ ID NO: 5579014 - DNA, 25 bp, Homo sapien
ggtcagactctgcgtatcggttaca

SEQ ID NO: 5579015 - DNA, 25 bp, Homo sapien
gcaggctgtaaattcttcgtgggct

SEQ ID NO: 5579016 - DNA, 25 bp, Homo sapien
ggtacacatgtaaagtctgggcatc

SEQ ID NO: 5579017 - DNA, 25 bp, Homo sapien
tttaggacaaagcaataactcagtt

SEQ ID NO: 5579018 - DNA, 25 bp, Homo sapien
aaagtctgggcatcctgtaaatttc

SEQ ID NO: 5579019 - DNA, 25 bp, Homo sapien
cagccgctgtcgcctcagagcttta

SEQ ID NO: 5579020 - DNA, 25 bp, Homo sapien
tgtctgcccgcggcttctcaaggga

SEQ ID NO: 5579021 - DNA, 25 bp, Homo sapien
agggagaaaatgccaagtcccgatt

SEQ ID NO: 5579022 - DNA, 25 bp, Homo sapien
acagccaccttcagccatcttgcgc

SEQ ID NO: 5579023 - DNA, 25 bp, Homo sapien
tgccaagtcccgatttctctccacc

SEQ ID NO: 5579024 - DNA, 25 bp, Homo sapien
ctccacccaccccggtcctgtccaa

SEQ ID NO: 5579025 - DNA, 25 bp, Homo sapien
cgttgctcggtccgaggtccgtctg

SEQ ID NO: 5579026 - DNA, 25 bp, Homo sapien
tcgataataaaaacgatcggcgggc

SEQ ID NO: 5579027 - DNA, 25 bp, Homo sapien
gctggcggcctccaacaaattagga

SEQ ID NO: 5579028 - DNA, 25 bp, Homo sapien
caaccccaacactctcatcacagcc

SEQ ID NO: 5579029 - DNA, 25 bp, Homo sapien
aatacctgcgtatccagcccctccc

SEQ ID NO: 5579030 - DNA, 25 bp, Homo sapien
gctctctggagcccttccgtcccca

SEQ ID NO: 5579031 - DNA, 25 bp, Homo sapien
gagcccggtcatcaagatctcctac

SEQ ID NO: 5579032 - DNA, 25 bp, Homo sapien
cggagcccggtcatcaagatctcct

SEQ ID NO: 5579033 - DNA, 25 bp, Homo sapien
tcaagatctcctacagcacgcccca

SEQ ID NO: 5579034 - DNA, 25 bp, Homo sapien
cgtgcacggctctctggagcccttc

SEQ ID NO: 5579035 - DNA, 25 bp, Homo sapien
agatctcctacagcacgccccaggg

SEQ ID NO: 5579036 - DNA, 25 bp, Homo sapien
gtcatcaagatctcctacagcacgc

SEQ ID NO: 5579037 - DNA, 25 bp, Homo sapien
ctggagcccttccgtccccagcagg

SEQ ID NO: 5579038 - DNA, 25 bp, Homo sapien
cgccctcggcctccatccccaagtt

SEQ ID NO: 5579039 - DNA, 25 bp, Homo sapien
tccatccccaagttgaaactgacac

SEQ ID NO: 5579040 - DNA, 25 bp, Homo sapien
tccccaagttgaaactgacacggcc

SEQ ID NO: 5579041 - DNA, 25 bp, Homo sapien
aaatgccagagaagttttaacaatc

SEQ ID NO: 5579042 - DNA, 25 bp, Homo sapien
ataaaggaattacagagacgatagt

SEQ ID NO: 5579043 - DNA, 25 bp, Homo sapien
tttaaagcagatccaggcaataaaa

SEQ ID NO: 5579044 - DNA, 25 bp, Homo sapien
tgtgtgttaccagagcatgtcccac

SEQ ID NO: 5579045 - DNA, 25 bp, Homo sapien
gttttgctgacaagagggtgtaaac

SEQ ID NO: 5579046 - DNA, 25 bp, Homo sapien
ggatcccagaaacactaattagacc

SEQ ID NO: 5579047 - DNA, 25 bp, Homo sapien
ttgagctcagcagttgttacccatt

SEQ ID NO: 5579048 - DNA, 25 bp, Homo sapien
attaatgattaaatgccagagaagt

SEQ ID NO: 5579049 - DNA, 25 bp, Homo sapien
tttatggaccttagcagttgtcatc

SEQ ID NO: 5579050 - DNA, 25 bp, Homo sapien
attagacctacacttgaggtttccc

SEQ ID NO: 5579051 - DNA, 25 bp, Homo sapien
tacagagacgatagttaagaacatt

SEQ ID NO: 5579052 - DNA, 25 bp, Homo sapien
gagctcctgctctaccttggcgccc

SEQ ID NO: 5579053 - DNA, 25 bp, Homo sapien
aggttcgagatgaagctcagactct

SEQ ID NO: 5579054 - DNA, 25 bp, Homo sapien
agaaggcgtgtgtctgtgtcttatt

SEQ ID NO: 5579055 - DNA, 25 bp, Homo sapien
ggttcgagcaactaccgggtatcat

SEQ ID NO: 5579056 - DNA, 25 bp, Homo sapien
ccgggtatcattaatgggattggaa

SEQ ID NO: 5579057 - DNA, 25 bp, Homo sapien
tttaagtgcctttgtggacagatta

SEQ ID NO: 5579058 - DNA, 25 bp, Homo sapien
ctatgtacatttgggagcagttggc

SEQ ID NO: 5579059 - DNA, 25 bp, Homo sapien
agatgccaaagacaaggttcgagat

SEQ ID NO: 5579060 - DNA, 25 bp, Homo sapien
tgaagttaatggatcaagtagcacc

SEQ ID NO: 5579061 - DNA, 25 bp, Homo sapien
tgtggacagattatcaacacgcttt

SEQ ID NO: 5579062 - DNA, 25 bp, Homo sapien
gagtacttctgcgcccaggtgcagc

SEQ ID NO: 5579063 - DNA, 25 bp, Homo sapien
aagccaatattgacaagcaaacaga

SEQ ID NO: 5579064 - DNA, 25 bp, Homo sapien
taagcacaagtgtaattgtgggaca

SEQ ID NO: 5579065 - DNA, 25 bp, Homo sapien
tcactgaccagtaactcaccaagat

SEQ ID NO: 5579066 - DNA, 25 bp, Homo sapien
accaagatagtctactaggtgtttc

SEQ ID NO: 5579067 - DNA, 25 bp, Homo sapien
ccctggtcatggtgtaagcacaagt

SEQ ID NO: 5579068 - DNA, 25 bp, Homo sapien
acagtgtgcactagcatggtgcctt

SEQ ID NO: 5579069 - DNA, 25 bp, Homo sapien
gaacacagaagacatttaaggattt

SEQ ID NO: 5579070 - DNA, 25 bp, Homo sapien
tggtgccttgaacacagaagacatt

SEQ ID NO: 5579071 - DNA, 25 bp, Homo sapien
aagttgtgaagtctctgaaggcata

SEQ ID NO: 5579072 - DNA, 25 bp, Homo sapien
tcctaagctcttcccacaccctggt

SEQ ID NO: 5579073 - DNA, 25 bp, Homo sapien
aaggatttgtgggatgattcagtcc

SEQ ID NO: 5579074 - DNA, 25 bp, Homo sapien
tattgatacaaatatgagatacaaa

SEQ ID NO: 5579075 - DNA, 25 bp, Homo sapien
ctgggagcataaatatctcctaaca

SEQ ID NO: 5579076 - DNA, 25 bp, Homo sapien
accctatgaaaccagagtgaagtac

SEQ ID NO: 5579077 - DNA, 25 bp, Homo sapien
ctacagacaaagaagccagtcatat

SEQ ID NO: 5579078 - DNA, 25 bp, Homo sapien
acaaagaagccagtcatattgatac

SEQ ID NO: 5579079 - DNA, 25 bp, Homo sapien
ttaactaagaaattattatggctaa

SEQ ID NO: 5579080 - DNA, 25 bp, Homo sapien
ttcatcagatataaactgtaagttt

SEQ ID NO: 5579081 - DNA, 25 bp, Homo sapien
ttacagaactaatattaccacacac

SEQ ID NO: 5579082 - DNA, 25 bp, Homo sapien
aagacacttgctaaccctatgaaac

SEQ ID NO: 5579083 - DNA, 25 bp, Homo sapien
gagtgaagtacatgcatacatttcc

SEQ ID NO: 5579084 - DNA, 25 bp, Homo sapien
gaaaccagagtgaagtacatgcata

SEQ ID NO: 5579085 - DNA, 25 bp, Homo sapien
cacccggatgtataattagcccttc

SEQ ID NO: 5579086 - DNA, 25 bp, Homo sapien
ccggagagctgctcacccggatgta

SEQ ID NO: 5579087 - DNA, 25 bp, Homo sapien
aaagctgacattaagatctgggtgc

SEQ ID NO: 5579088 - DNA, 25 bp, Homo sapien
ttcctttgcccaagatgacctcctc

SEQ ID NO: 5579089 - DNA, 25 bp, Homo sapien
ctttggacggaagatgctttttctg

SEQ ID NO: 5579090 - DNA, 25 bp, Homo sapien
tattgaagacaagctacaggatgga

SEQ ID NO: 5579091 - DNA, 25 bp, Homo sapien
atctgggtgcttactggagacaaaa

SEQ ID NO: 5579092 - DNA, 25 bp, Homo sapien
gcagtaattgtgaaacatggcagcc

SEQ ID NO: 5579093 - DNA, 25 bp, Homo sapien
cattgtgcagggaagcatatctgtt

SEQ ID NO: 5579094 - DNA, 25 bp, Homo sapien
tcgctgttaacactggcccttggcc

SEQ ID NO: 5579095 - DNA, 25 bp, Homo sapien
tggagacaaaaagggtaattcattg

SEQ ID NO: 5579096 - DNA, 25 bp, Homo sapien
aagagaaagttggtctgaatcatgg

SEQ ID NO: 5579097 - DNA, 25 bp, Homo sapien
atcacccaaatggtacgaaaccacc

SEQ ID NO: 5579098 - DNA, 25 bp, Homo sapien
ctgagcatggacaactaacaactac

SEQ ID NO: 5579099 - DNA, 25 bp, Homo sapien
ttgtaacacaattaggagaaggaag

SEQ ID NO: 5579100 - DNA, 25 bp, Homo sapien
agggaaaagaacatacagtggtttg

SEQ ID NO: 5579101 - DNA, 25 bp, Homo sapien
tctgaatcatggaaaaagggcagaa

SEQ ID NO: 5579102 - DNA, 25 bp, Homo sapien
ttaaggcagaataacaaacatgatg

SEQ ID NO: 5579103 - DNA, 25 bp, Homo sapien
ggcagaacctcaaagaaccagtccc

SEQ ID NO: 5579104 - DNA, 25 bp, Homo sapien
gacagtaagtagaaatttaaggcag

SEQ ID NO: 5579105 - DNA, 25 bp, Homo sapien
atgatgctctgtcacaccccccacc

SEQ ID NO: 5579106 - DNA, 25 bp, Homo sapien
cagaaatagaattgagtagagtatg

SEQ ID NO: 5579107 - DNA, 25 bp, Homo sapien
tattgcacatatttggtttaggctt

SEQ ID NO: 5579108 - DNA, 25 bp, Homo sapien
tgatttctacgtaaacaaaaacatc

SEQ ID NO: 5579109 - DNA, 25 bp, Homo sapien
tttaacaatgcactagatactatct

SEQ ID NO: 5579110 - DNA, 25 bp, Homo sapien
aaaaacagtaggaataatatgtatt

SEQ ID NO: 5579111 - DNA, 25 bp, Homo sapien
tgtcaataacgtaaactgtgaaaat

SEQ ID NO: 5579112 - DNA, 25 bp, Homo sapien
agttacacagctgttttctagaaac

SEQ ID NO: 5579113 - DNA, 25 bp, Homo sapien
ttttaaaaggaatcaggatgtcatt

SEQ ID NO: 5579114 - DNA, 25 bp, Homo sapien
aaaggaatcaggatgtcattttgta

SEQ ID NO: 5579115 - DNA, 25 bp, Homo sapien
acaaaaattagatgagggttgatac

SEQ ID NO: 5579116 - DNA, 25 bp, Homo sapien
tacagtaacaccaaaataacgctca

SEQ ID NO: 5579117 - DNA, 25 bp, Homo sapien
gatgagggttgatacatttcacagc

SEQ ID NO: 5579118 - DNA, 25 bp, Homo sapien
ccctccgtctgataggtgcggtctg

SEQ ID NO: 5579119 - DNA, 25 bp, Homo sapien
agggccctgttaaacgctgggtgct

SEQ ID NO: 5579120 - DNA, 25 bp, Homo sapien
gaacggtgtccctgtcgtcagggag

SEQ ID NO: 5579121 - DNA, 25 bp, Homo sapien
ctgctgcagaccccaactctgagct

SEQ ID NO: 5579122 - DNA, 25 bp, Homo sapien
tttctgggtgaatccaaagaacaag

SEQ ID NO: 5579123 - DNA, 25 bp, Homo sapien
tctccagccaactgtgcttttcccc

SEQ ID NO: 5579124 - DNA, 25 bp, Homo sapien
ttcagtcaggtttctgggtgaatcc

SEQ ID NO: 5579125 - DNA, 25 bp, Homo sapien
cccgcttctcaacccatcccctccc

SEQ ID NO: 5579126 - DNA, 25 bp, Homo sapien
ctgtcgtcagggagtttccagctag

SEQ ID NO: 5579127 - DNA, 25 bp, Homo sapien
ggccgccctccgtctgataggtgcg

SEQ ID NO: 5579128 - DNA, 25 bp, Homo sapien
gggagtttccagctagtggccttct

SEQ ID NO: 5579129 - DNA, 25 bp, Homo sapien
gacgccagcagcatcgtgttcctct

SEQ ID NO: 5579130 - DNA, 25 bp, Homo sapien
gcgtcgtcctggtggatttcgagag

SEQ ID NO: 5579131 - DNA, 25 bp, Homo sapien
ttcatcgtgccagtgaaaaaccagg

SEQ ID NO: 5579132 - DNA, 25 bp, Homo sapien
tcagcgtcgtcctggtggatttcga

SEQ ID NO: 5579133 - DNA, 25 bp, Homo sapien
cgcgtttcagcgtcgtcctggtgga

SEQ ID NO: 5579134 - DNA, 25 bp, Homo sapien
gatggttcacttcatcgtgccagtg

SEQ ID NO: 5579135 - DNA, 25 bp, Homo sapien
gtttcagcgtcgtcctggtggattt

SEQ ID NO: 5579136 - DNA, 25 bp, Homo sapien
gttcctctgcgacctgcacatccac

SEQ ID NO: 5579137 - DNA, 25 bp, Homo sapien
gggactcgcgtttcagcgtcgtcct

SEQ ID NO: 5579138 - DNA, 25 bp, Homo sapien
cgccaggacgtgatggttcacttca

SEQ ID NO: 5579139 - DNA, 25 bp, Homo sapien
agcatcgtgttcctctgcgacctgc

SEQ ID NO: 5579140 - DNA, 25 bp, Homo sapien
aggtaactcaggtgcttgcagctcg

SEQ ID NO: 5579141 - DNA, 25 bp, Homo sapien
atcatagcattgccccccagtaccc

SEQ ID NO: 5579142 - DNA, 25 bp, Homo sapien
cacccggtccactgaaaggcagtgc

SEQ ID NO: 5579143 - DNA, 25 bp, Homo sapien
gtcttctgtccatgggtgagctggg

SEQ ID NO: 5579144 - DNA, 25 bp, Homo sapien
ctcaggccaagctccactctgggca

SEQ ID NO: 5579145 - DNA, 25 bp, Homo sapien
ccactctgggcaccctcgcaggtaa

SEQ ID NO: 5579146 - DNA, 25 bp, Homo sapien
ggaaggcagaaaggctttcagatga

SEQ ID NO: 5579147 - DNA, 25 bp, Homo sapien
ctggtatcctgctacaaggagcatc

SEQ ID NO: 5579148 - DNA, 25 bp, Homo sapien
tctctaatccacccaaggagcccgc

SEQ ID NO: 5579149 - DNA, 25 bp, Homo sapien
gcctgagaaagcgacagctacagga

SEQ ID NO: 5579150 - DNA, 25 bp, Homo sapien
aaggagcatcacaccatttgggcac

SEQ ID NO: 5579151 - DNA, 25 bp, Homo sapien
agttaatggagtgttgaactggtgg

SEQ ID NO: 5579152 - DNA, 25 bp, Homo sapien
gctaggcccctctcaccaggctgcc

SEQ ID NO: 5579153 - DNA, 25 bp, Homo sapien
agtgctgcctcatggtgcaaagtgg

SEQ ID NO: 5579154 - DNA, 25 bp, Homo sapien
gagaaagacgtgaccccaccatcta

SEQ ID NO: 5579155 - DNA, 25 bp, Homo sapien
ccaggctgccctaccgtgctcagtg

SEQ ID NO: 5579156 - DNA, 25 bp, Homo sapien
ggatctaggggttctttaagtctca

SEQ ID NO: 5579157 - DNA, 25 bp, Homo sapien
ggacaggactctgggcttcccagtt

SEQ ID NO: 5579158 - DNA, 25 bp, Homo sapien
gaaggggaaactgatacccaagtca

SEQ ID NO: 5579159 - DNA, 25 bp, Homo sapien
ctgtacttctcagaaggggaaactg

SEQ ID NO: 5579160 - DNA, 25 bp, Homo sapien
ctcatggtgcaaagtggttgctgag

SEQ ID NO: 5579161 - DNA, 25 bp, Homo sapien
cagagctctgtcctggcaccagcta

SEQ ID NO: 5579162 - DNA, 25 bp, Homo sapien
catgaagttccaggaccccagatgc

SEQ ID NO: 5579163 - DNA, 25 bp, Homo sapien
tcatcaacatgaagttccaggaccc

SEQ ID NO: 5579164 - DNA, 25 bp, Homo sapien
ataccctgacagaataaactatctt

SEQ ID NO: 5579165 - DNA, 25 bp, Homo sapien
ccccagatgcctctctgagaagttc

SEQ ID NO: 5579166 - DNA, 25 bp, Homo sapien
agacacaaggtacaagaattgaggc

SEQ ID NO: 5579167 - DNA, 25 bp, Homo sapien
ctgagaagtttgactaggctatgtt

SEQ ID NO: 5579168 - DNA, 25 bp, Homo sapien
aatattcgaaagtcagattttgttc

SEQ ID NO: 5579169 - DNA, 25 bp, Homo sapien
atgacatgtcgctgaaatttgcttc

SEQ ID NO: 5579170 - DNA, 25 bp, Homo sapien
gaggcttggctgttctggctgtata

SEQ ID NO: 5579171 - DNA, 25 bp, Homo sapien
tccaattagggcaaattagtgaggg

SEQ ID NO: 5579172 - DNA, 25 bp, Homo sapien
gcttaaaatgtacgaaaatgcaatc

SEQ ID NO: 5579173 - DNA, 25 bp, Homo sapien
tacaaatcacagcagaggtggttaa

SEQ ID NO: 5579174 - DNA, 25 bp, Homo sapien
caacacagctcctagtaagattctc

SEQ ID NO: 5579175 - DNA, 25 bp, Homo sapien
ggtgcttcaagaaaatgactctccc

SEQ ID NO: 5579176 - DNA, 25 bp, Homo sapien
tatgaacaatgtgatatgaagcaac

SEQ ID NO: 5579177 - DNA, 25 bp, Homo sapien
ggcagtttacatcagggagactgaa

SEQ ID NO: 5579178 - DNA, 25 bp, Homo sapien
aaggtacggccattgtaagcatcaa

SEQ ID NO: 5579179 - DNA, 25 bp, Homo sapien
aagcaatcaagaaggcagtttacat

SEQ ID NO: 5579180 - DNA, 25 bp, Homo sapien
agtgggggttgaattcaaatcctct

SEQ ID NO: 5579181 - DNA, 25 bp, Homo sapien
catttccactagagagcagcctaaa

SEQ ID NO: 5579182 - DNA, 25 bp, Homo sapien
ttggagtgggtagaagttatttcaa

SEQ ID NO: 5579183 - DNA, 25 bp, Homo sapien
ccaaagaatcccagtatgaaggtac

SEQ ID NO: 5579184 - DNA, 25 bp, Homo sapien
gacactggcgtctcaaaagcagctt

SEQ ID NO: 5579185 - DNA, 25 bp, Homo sapien
acagccggcctctaagcaaatactc

SEQ ID NO: 5579186 - DNA, 25 bp, Homo sapien
gtgcagtctctgggataaacagctc

SEQ ID NO: 5579187 - DNA, 25 bp, Homo sapien
tcgactttgtcaagggaaccgtgta

SEQ ID NO: 5579188 - DNA, 25 bp, Homo sapien
actagaagtcagattcacgtccggc

SEQ ID NO: 5579189 - DNA, 25 bp, Homo sapien
tatcttaacaccacaccctccgccc

SEQ ID NO: 5579190 - DNA, 25 bp, Homo sapien
agttatccactcacacagccggcct

SEQ ID NO: 5579191 - DNA, 25 bp, Homo sapien
gttaacctataaaaggcccagcaca

SEQ ID NO: 5579192 - DNA, 25 bp, Homo sapien
tcagcctgagatgtcagtgttaacc

SEQ ID NO: 5579193 - DNA, 25 bp, Homo sapien
tgatatggttgtgaaggaaaatgta

SEQ ID NO: 5579194 - DNA, 25 bp, Homo sapien
tatcaacggaaaattgtgcagtctc

SEQ ID NO: 5579195 - DNA, 25 bp, Homo sapien
aagacaagtaaagccaccttataac

SEQ ID NO: 5579196 - DNA, 25 bp, Homo sapien
ttctcctgcagactcagaaaataaa

SEQ ID NO: 5579197 - DNA, 25 bp, Homo sapien
tcagcaaagtgtgtacaatagtgcc

SEQ ID NO: 5579198 - DNA, 25 bp, Homo sapien
tttggttaacaagatagcagctata

SEQ ID NO: 5579199 - DNA, 25 bp, Homo sapien
caatagcagatgtataatagtttcc

SEQ ID NO: 5579200 - DNA, 25 bp, Homo sapien
aaaaggcataggatgtttatttacc

SEQ ID NO: 5579201 - DNA, 25 bp, Homo sapien
atagtgccttgtatacatgtgtctt

SEQ ID NO: 5579202 - DNA, 25 bp, Homo sapien
acatgtgtctttctagagctacttc

SEQ ID NO: 5579203 - DNA, 25 bp, Homo sapien
taagctgtaaaatatggacatagtt

SEQ ID NO: 5579204 - DNA, 25 bp, Homo sapien
tgcataaggtataatgaactggttc

SEQ ID NO: 5579205 - DNA, 25 bp, Homo sapien
acatatatgctcttaagaaagtacc

SEQ ID NO: 5579206 - DNA, 25 bp, Homo sapien
atttatgaggacaaagtaaaaatgg

SEQ ID NO: 5579207 - DNA, 25 bp, Homo sapien
aaaatgggactggaacccaatcatc

SEQ ID NO: 5579208 - DNA, 25 bp, Homo sapien
tcaaaaacaagatggcatgctacac

SEQ ID NO: 5579209 - DNA, 25 bp, Homo sapien
gaaaaaagcagaatgcataaaatac

SEQ ID NO: 5579210 - DNA, 25 bp, Homo sapien
tctggacaaggcccaacagacataa

SEQ ID NO: 5579211 - DNA, 25 bp, Homo sapien
aatgcccaatgcagaaagcttaagc

SEQ ID NO: 5579212 - DNA, 25 bp, Homo sapien
gatgctgacagacttatctgaggtc

SEQ ID NO: 5579213 - DNA, 25 bp, Homo sapien
catttaatgttgtgaaggaggtgtt

SEQ ID NO: 5579214 - DNA, 25 bp, Homo sapien
gcaatgtctaccagggcagagattt

SEQ ID NO: 5579215 - DNA, 25 bp, Homo sapien
acaacaatgtaaccagtcccccaac

SEQ ID NO: 5579216 - DNA, 25 bp, Homo sapien
tgcctggcacaggaacataacagga

SEQ ID NO: 5579217 - DNA, 25 bp, Homo sapien
tgagattatgatgaaagttagagac

SEQ ID NO: 5579218 - DNA, 25 bp, Homo sapien
tttgggatttgtgaatgttgtaggg

SEQ ID NO: 5579219 - DNA, 25 bp, Homo sapien
gggtaaggtcttgcaccagcaatta

SEQ ID NO: 5579220 - DNA, 25 bp, Homo sapien
aggataattattaagacaagggtaa

SEQ ID NO: 5579221 - DNA, 25 bp, Homo sapien
aaaaggtgtattacttagacaggat

SEQ ID NO: 5579222 - DNA, 25 bp, Homo sapien
tcaaaacagtttatgggccacttta

SEQ ID NO: 5579223 - DNA, 25 bp, Homo sapien
gtgagggcccacttctgttcataaa

SEQ ID NO: 5579224 - DNA, 25 bp, Homo sapien
aggggacgtaaaccttcagttcata

SEQ ID NO: 5579225 - DNA, 25 bp, Homo sapien
tcagtatctaccaaggacgatcatc

SEQ ID NO: 5579226 - DNA, 25 bp, Homo sapien
cctcacatgggaaaagtacaaggca

SEQ ID NO: 5579227 - DNA, 25 bp, Homo sapien
aaagtacaaggcatctctgtgggtc

SEQ ID NO: 5579228 - DNA, 25 bp, Homo sapien
attcccaggtcaatggtcaaagcag

SEQ ID NO: 5579229 - DNA, 25 bp, Homo sapien
gggaagaagagctacttccactgaa

SEQ ID NO: 5579230 - DNA, 25 bp, Homo sapien
acttccactgaatgtaaatgaaaca

SEQ ID NO: 5579231 - DNA, 25 bp, Homo sapien
caataaccccaggtttcagccttac

SEQ ID NO: 5579232 - DNA, 25 bp, Homo sapien
ggaaggacaactagtagacaaactg

SEQ ID NO: 5579233 - DNA, 25 bp, Homo sapien
aatggtcaaagcagattagaattac

SEQ ID NO: 5579234 - DNA, 25 bp, Homo sapien
ctggtaaagcattacaaatgtcgta

SEQ ID NO: 5579235 - DNA, 25 bp, Homo sapien
cacataaatctttcaggacattccc

SEQ ID NO: 5579236 - DNA, 25 bp, Homo sapien
tacttatagaggaaggacaactagt

SEQ ID NO: 5579237 - DNA, 25 bp, Homo sapien
ccagaaatacttatagaggaaggac

SEQ ID NO: 5579238 - DNA, 25 bp, Homo sapien
gaaagcactctgtaactggtaaagc

SEQ ID NO: 5579239 - DNA, 25 bp, Homo sapien
cttcaccgcagccttcgaggtgccg

SEQ ID NO: 5579240 - DNA, 25 bp, Homo sapien
agatggccaaatagagatgttcaat

SEQ ID NO: 5579241 - DNA, 25 bp, Homo sapien
gtccattcattcagttggggggttc

SEQ ID NO: 5579242 - DNA, 25 bp, Homo sapien
atctcttctcgggccagaaggaggg

SEQ ID NO: 5579243 - DNA, 25 bp, Homo sapien
tctgatactggcgtccccaatctcc

SEQ ID NO: 5579244 - DNA, 25 bp, Homo sapien
tggtccagctgagcaaattctccat

SEQ ID NO: 5579245 - DNA, 25 bp, Homo sapien
ccttaccccgtcatggctgaggact

SEQ ID NO: 5579246 - DNA, 25 bp, Homo sapien
aatattcatgaaaggagaagcgtgt

SEQ ID NO: 5579247 - DNA, 25 bp, Homo sapien
tgagacctaagccttcaccgcagcc

SEQ ID NO: 5579248 - DNA, 25 bp, Homo sapien
ccatggactgcccagaaccaatctc

SEQ ID NO: 5579249 - DNA, 25 bp, Homo sapien
gggacaggaatttacgctgaaggag

SEQ ID NO: 5579250 - DNA, 25 bp, Homo sapien
cagggaagagcatgaacccttgtat

SEQ ID NO: 5579251 - DNA, 25 bp, Homo sapien
atataaccgtacaaagcacaaacat

SEQ ID NO: 5579252 - DNA, 25 bp, Homo sapien
aaagaatagttctacacaagttacc

SEQ ID NO: 5579253 - DNA, 25 bp, Homo sapien
acaaaactagccaagtgttacaact

SEQ ID NO: 5579254 - DNA, 25 bp, Homo sapien
ctattacccagggaagagcatgaac

SEQ ID NO: 5579255 - DNA, 25 bp, Homo sapien
aaatgatcagtgcactggacgtggg

SEQ ID NO: 5579256 - DNA, 25 bp, Homo sapien
tatcaactagattatgcatagcgag

SEQ ID NO: 5579257 - DNA, 25 bp, Homo sapien
acgtgggagagtgctccctcagtca

SEQ ID NO: 5579258 - DNA, 25 bp, Homo sapien
ttatataacaagacaagaaaagcaa

SEQ ID NO: 5579259 - DNA, 25 bp, Homo sapien
attatgcatagcgagtaactgtttc

SEQ ID NO: 5579260 - DNA, 25 bp, Homo sapien
ttcacaacaaacatgacaatatatc

SEQ ID NO: 5579261 - DNA, 25 bp, Homo sapien
tcaaagcgccgatctcaagcggccg

SEQ ID NO: 5579262 - DNA, 25 bp, Homo sapien
acggctctggtccagagcgcgcgtg

SEQ ID NO: 5579263 - DNA, 25 bp, Homo sapien
tcacggggctttccaggtaagccaa

SEQ ID NO: 5579264 - DNA, 25 bp, Homo sapien
ccgaattcccctggagaccctcgca

SEQ ID NO: 5579265 - DNA, 25 bp, Homo sapien
gtcacggcggaaccctcaaatcgcc

SEQ ID NO: 5579266 - DNA, 25 bp, Homo sapien
gaccctcgcactagcacggcgtcag

SEQ ID NO: 5579267 - DNA, 25 bp, Homo sapien
cggcccgacttgtgccccgaattcc

SEQ ID NO: 5579268 - DNA, 25 bp, Homo sapien
cgagccacactccgccccacgctcg

SEQ ID NO: 5579269 - DNA, 25 bp, Homo sapien
ccacttcccagaggcctgcttaggc

SEQ ID NO: 5579270 - DNA, 25 bp, Homo sapien
cctttcctagagacctcagcggagc

SEQ ID NO: 5579271 - DNA, 25 bp, Homo sapien
cccggatgctccggcccgacttgtg

SEQ ID NO: 5579272 - DNA, 25 bp, Homo sapien
tttctgagatggagaaaactaggag

SEQ ID NO: 5579273 - DNA, 25 bp, Homo sapien
tagataagtcagggaaagactttgc

SEQ ID NO: 5579274 - DNA, 25 bp, Homo sapien
acaggaaaattaaggcaacttatta

SEQ ID NO: 5579275 - DNA, 25 bp, Homo sapien
aattcccacagcaaacagaggaggt

SEQ ID NO: 5579276 - DNA, 25 bp, Homo sapien
caggaatcaaaagctgtttttggtc

SEQ ID NO: 5579277 - DNA, 25 bp, Homo sapien
cagagctaatccaaatatgaaactt

SEQ ID NO: 5579278 - DNA, 25 bp, Homo sapien
tgttcagataaataaatgtcagagc

SEQ ID NO: 5579279 - DNA, 25 bp, Homo sapien
aagtcagggaaagactttgcagagg

SEQ ID NO: 5579280 - DNA, 25 bp, Homo sapien
agtgtctttactgaggcaattacca

SEQ ID NO: 5579281 - DNA, 25 bp, Homo sapien
acagcaaacagaggaggttattatt

SEQ ID NO: 5579282 - DNA, 25 bp, Homo sapien
tgcaaaacaggacactatactcttc

SEQ ID NO: 5579283 - DNA, 25 bp, Homo sapien
gagacagactgtgaaacagctgcct

SEQ ID NO: 5579284 - DNA, 25 bp, Homo sapien
ctgtgaaacagctgcctttagcggg

SEQ ID NO: 5579285 - DNA, 25 bp, Homo sapien
gaaacagctgcctttagcggggttc

SEQ ID NO: 5579286 - DNA, 25 bp, Homo sapien
cccaaccccaatctatcctttcacc

SEQ ID NO: 5579287 - DNA, 25 bp, Homo sapien
cagatgggagtgtatttgccttttt

SEQ ID NO: 5579288 - DNA, 25 bp, Homo sapien
tgaatctgtcactgctgaaatgctc

SEQ ID NO: 5579289 - DNA, 25 bp, Homo sapien
aaaggaaacttaaagagagttgtgc

SEQ ID NO: 5579290 - DNA, 25 bp, Homo sapien
acttaaagagagttgtgcaaaaggg

SEQ ID NO: 5579291 - DNA, 25 bp, Homo sapien
atctgaaacagatgggagtgtattt

SEQ ID NO: 5579292 - DNA, 25 bp, Homo sapien
tttatttcccaaacacaatgcagaa

SEQ ID NO: 5579293 - DNA, 25 bp, Homo sapien
cagcatctgaaacagatgggagtgt

SEQ ID NO: 5579294 - DNA, 25 bp, Homo sapien
ctgcaccaggcataaagagtaagtt

SEQ ID NO: 5579295 - DNA, 25 bp, Homo sapien
atatgcatagaaagaaacagttgtc

SEQ ID NO: 5579296 - DNA, 25 bp, Homo sapien
agaaaagctctgttaagggtagatt

SEQ ID NO: 5579297 - DNA, 25 bp, Homo sapien
tagccttctagttgagttagggacc

SEQ ID NO: 5579298 - DNA, 25 bp, Homo sapien
tgtaaaaagcagtacttaataagta

SEQ ID NO: 5579299 - DNA, 25 bp, Homo sapien
ctggtagacagtacacttgggaatt

SEQ ID NO: 5579300 - DNA, 25 bp, Homo sapien
tcaaaggcatcatgagtactctgct

SEQ ID NO: 5579301 - DNA, 25 bp, Homo sapien
agagtaagttttctaccacagggac

SEQ ID NO: 5579302 - DNA, 25 bp, Homo sapien
ttggaaactaggtcaccctacatga

SEQ ID NO: 5579303 - DNA, 25 bp, Homo sapien
tagttgagttagggaccattttatc

SEQ ID NO: 5579304 - DNA, 25 bp, Homo sapien
tctagtcagacatttccatggctac

SEQ ID NO: 5579305 - DNA, 25 bp, Homo sapien
ggaggtagctcctgaaccaaactgg

SEQ ID NO: 5579306 - DNA, 25 bp, Homo sapien
aattaaccagaatgctccaacttcc

SEQ ID NO: 5579307 - DNA, 25 bp, Homo sapien
ggtgcgagctgtgtcaatacagagc

SEQ ID NO: 5579308 - DNA, 25 bp, Homo sapien
gtcaatacagagcaaaatctcaatt

SEQ ID NO: 5579309 - DNA, 25 bp, Homo sapien
gaataccaaacattgtaactcgtca

SEQ ID NO: 5579310 - DNA, 25 bp, Homo sapien
tcaattcaatgacaaggaggtagct

SEQ ID NO: 5579311 - DNA, 25 bp, Homo sapien
aaaaatagttggtgaggagttttca

SEQ ID NO: 5579312 - DNA, 25 bp, Homo sapien
atagttggtgaggagttttcaagtg

SEQ ID NO: 5579313 - DNA, 25 bp, Homo sapien
cctgaaccaaactggtgcgagctgt

SEQ ID NO: 5579314 - DNA, 25 bp, Homo sapien
tgctgaatgtatccgaataccaaac

SEQ ID NO: 5579315 - DNA, 25 bp, Homo sapien
tcaagtgttcttgctgaatgtatcc

SEQ ID NO: 5579316 - DNA, 25 bp, Homo sapien
tccctgataatagctaaaacaaaac

SEQ ID NO: 5579317 - DNA, 25 bp, Homo sapien
caccgcacccagccgcgttatcagg

SEQ ID NO: 5579318 - DNA, 25 bp, Homo sapien
tatttggtctagcgttcttttcagc

SEQ ID NO: 5579319 - DNA, 25 bp, Homo sapien
acccagccgcgttatcaggatcttt

SEQ ID NO: 5579320 - DNA, 25 bp, Homo sapien
gcaaggcagagaacctatttggtct

SEQ ID NO: 5579321 - DNA, 25 bp, Homo sapien
gaaagacaaatgcagctgttctctc

SEQ ID NO: 5579322 - DNA, 25 bp, Homo sapien
aggtcagaaagacaaatgcagctgt

SEQ ID NO: 5579323 - DNA, 25 bp, Homo sapien
aaaaattaagaccagtactagctcc

SEQ ID NO: 5579324 - DNA, 25 bp, Homo sapien
ctaggaattgcatgaggtcagaaag

SEQ ID NO: 5579325 - DNA, 25 bp, Homo sapien
cacagaacacagagtttcctaggaa

SEQ ID NO: 5579326 - DNA, 25 bp, Homo sapien
attgcctgactaaatcacagaacac

SEQ ID NO: 5579327 - DNA, 25 bp, Homo sapien
tatgcctgtctgttcctaaaatgat

SEQ ID NO: 5579328 - DNA, 25 bp, Homo sapien
ggcttagatttgcattaatgggctt

SEQ ID NO: 5579329 - DNA, 25 bp, Homo sapien
agactttgataagaatgagaaaatc

SEQ ID NO: 5579330 - DNA, 25 bp, Homo sapien
tagtacagtcagatcttcagttgac

SEQ ID NO: 5579331 - DNA, 25 bp, Homo sapien
ttcagtagaagttgcaagctacata

SEQ ID NO: 5579332 - DNA, 25 bp, Homo sapien
ttcagctatgtgaaagacatgatta

SEQ ID NO: 5579333 - DNA, 25 bp, Homo sapien
ttgacgcagttaaaatttgaggcac

SEQ ID NO: 5579334 - DNA, 25 bp, Homo sapien
tacaatgcccttaacttgacgcagt

SEQ ID NO: 5579335 - DNA, 25 bp, Homo sapien
ctacccccaggtgagactttgataa

SEQ ID NO: 5579336 - DNA, 25 bp, Homo sapien
aaagtctatgaaggcttagatttgc

SEQ ID NO: 5579337 - DNA, 25 bp, Homo sapien
ctaaaatgatagtatagaggtggga

SEQ ID NO: 5579338 - DNA, 25 bp, Homo sapien
accgtgctgcccaaggtcagactta

SEQ ID NO: 5579339 - DNA, 25 bp, Homo sapien
aaagctgactttcaatgcagtgccc

SEQ ID NO: 5579340 - DNA, 25 bp, Homo sapien
cataattggtggcagagcctaaacc

SEQ ID NO: 5579341 - DNA, 25 bp, Homo sapien
ggtcacataattggtggcagagcct

SEQ ID NO: 5579342 - DNA, 25 bp, Homo sapien
tatagcccttaaatcagagtccaca

SEQ ID NO: 5579343 - DNA, 25 bp, Homo sapien
ggtcagacttacagagggagaccaa

SEQ ID NO: 5579344 - DNA, 25 bp, Homo sapien
tccaccacccctgacctcattttgc

SEQ ID NO: 5579345 - DNA, 25 bp, Homo sapien
ctgggcaaagacaccgtgctgccca

SEQ ID NO: 5579346 - DNA, 25 bp, Homo sapien
agtccacataggagccccagctccc

SEQ ID NO: 5579347 - DNA, 25 bp, Homo sapien
taaatcagagtccacataggagccc

SEQ ID NO: 5579348 - DNA, 25 bp, Homo sapien
ggcagagcctaaaccaaagctgact

SEQ ID NO: 5579349 - DNA, 25 bp, Homo sapien
ctctcctaagcgaggcctcatctgc

SEQ ID NO: 5579350 - DNA, 25 bp, Homo sapien
ggacgcacatcaggtgtgaagaaca

SEQ ID NO: 5579351 - DNA, 25 bp, Homo sapien
ctttgaaggatctaaggaactcctc

SEQ ID NO: 5579352 - DNA, 25 bp, Homo sapien
gaatgtggggtctctcctgtgtttc

SEQ ID NO: 5579353 - DNA, 25 bp, Homo sapien
ttggaaactgccagcagtgagcact

SEQ ID NO: 5579354 - DNA, 25 bp, Homo sapien
ctcctctggagatttggaaactgcc

SEQ ID NO: 5579355 - DNA, 25 bp, Homo sapien
cgtcagcggtagccacacttagaaa

SEQ ID NO: 5579356 - DNA, 25 bp, Homo sapien
ggcctcaggttagcataagagccga

SEQ ID NO: 5579357 - DNA, 25 bp, Homo sapien
cttagaaaaacactcaggtccagcc

SEQ ID NO: 5579358 - DNA, 25 bp, Homo sapien
tctaacaccaaagcacagactcatc

SEQ ID NO: 5579359 - DNA, 25 bp, Homo sapien
agtgagcactgtcacagcggctact

SEQ ID NO: 5579360 - DNA, 25 bp, Homo sapien
agttagcaagtcacgtaagtagttt

SEQ ID NO: 5579361 - DNA, 25 bp, Homo sapien
aaactacttacgtgacttgctaact

SEQ ID NO: 5579362 - DNA, 25 bp, Homo sapien
gaaagggagcacataacatatttgc

SEQ ID NO: 5579363 - DNA, 25 bp, Homo sapien
ccactcattaagcatcagggcgcat

SEQ ID NO: 5579364 - DNA, 25 bp, Homo sapien
gggtgaagagcagtcactgttcatg

SEQ ID NO: 5579365 - DNA, 25 bp, Homo sapien
gctccttagccagagacatgacccc

SEQ ID NO: 5579366 - DNA, 25 bp, Homo sapien
atttgcaagagatgcacccagaatg

SEQ ID NO: 5579367 - DNA, 25 bp, Homo sapien
ccttaaggagaaacactgcatttgg

SEQ ID NO: 5579368 - DNA, 25 bp, Homo sapien
ggcaggctaggtacgctccttagcc

SEQ ID NO: 5579369 - DNA, 25 bp, Homo sapien
cagggcgcattcagtgagtaaatgt

SEQ ID NO: 5579370 - DNA, 25 bp, Homo sapien
cccaaatcccagaacagcaccgtgg

SEQ ID NO: 5579371 - DNA, 25 bp, Homo sapien
cccaacaggctcatggcttaggcag

SEQ ID NO: 5579372 - DNA, 25 bp, Homo sapien
ctccacaacggtgctgctgacccgt

SEQ ID NO: 5579373 - DNA, 25 bp, Homo sapien
aaaacatatctggggatgaatctgc

SEQ ID NO: 5579374 - DNA, 25 bp, Homo sapien
gggatgaatctgcgaaacctactag

SEQ ID NO: 5579375 - DNA, 25 bp, Homo sapien
tagaatgagacatgcctattaaatg

SEQ ID NO: 5579376 - DNA, 25 bp, Homo sapien
aaatatttacggccagctgtggtgg

SEQ ID NO: 5579377 - DNA, 25 bp, Homo sapien
agtgcccactaggtagaaggtatat

SEQ ID NO: 5579378 - DNA, 25 bp, Homo sapien
taggtagaaggtatatatcattaga

SEQ ID NO: 5579379 - DNA, 25 bp, Homo sapien
tacttctcttaattgtttggcttcc

SEQ ID NO: 5579380 - DNA, 25 bp, Homo sapien
atcattagaatgagacatgcctatt

SEQ ID NO: 5579381 - DNA, 25 bp, Homo sapien
taaatatgtacaagtgcccactagg

SEQ ID NO: 5579382 - DNA, 25 bp, Homo sapien
atgaatctgcgaaacctactagggt

SEQ ID NO: 5579383 - DNA, 25 bp, Homo sapien
tcaaaaaatatttacggccagctgt

SEQ ID NO: 5579384 - DNA, 25 bp, Homo sapien
taatcgcttggctttgagggcgcga

SEQ ID NO: 5579385 - DNA, 25 bp, Homo sapien
ccgcggctctgtcccgcggaccggt

SEQ ID NO: 5579386 - DNA, 25 bp, Homo sapien
gatgaatcagcgtaaccgtcccgtc

SEQ ID NO: 5579387 - DNA, 25 bp, Homo sapien
tcctgtcgggaacaatttgaggaac

SEQ ID NO: 5579388 - DNA, 25 bp, Homo sapien
ttttggacctcagtaatgccatctc

SEQ ID NO: 5579389 - DNA, 25 bp, Homo sapien
catttagtgaggcagtttgtaacag

SEQ ID NO: 5579390 - DNA, 25 bp, Homo sapien
agcgagtggctctagtttttggacc

SEQ ID NO: 5579391 - DNA, 25 bp, Homo sapien
ggctttgaccgatggacctctgaac

SEQ ID NO: 5579392 - DNA, 25 bp, Homo sapien
ttatcggctgtatgacccagagcga

SEQ ID NO: 5579393 - DNA, 25 bp, Homo sapien
tttaggacaaatgagctgtgctttc

SEQ ID NO: 5579394 - DNA, 25 bp, Homo sapien
ggctgcgtgcgtttatcggctgtat

SEQ ID NO: 5579395 - DNA, 25 bp, Homo sapien
ctccgtccggtatgaaaacacctat

SEQ ID NO: 5579396 - DNA, 25 bp, Homo sapien
agtaaagcgtgtaatcgagtaagtc

SEQ ID NO: 5579397 - DNA, 25 bp, Homo sapien
ataaagctgtcagtggagtactagg

SEQ ID NO: 5579398 - DNA, 25 bp, Homo sapien
tcaatgccatgactgttctgccacc

SEQ ID NO: 5579399 - DNA, 25 bp, Homo sapien
ctggtgatgtgcaagagttagcaat

SEQ ID NO: 5579400 - DNA, 25 bp, Homo sapien
tgggcgtaaagctctaccaccctgc

SEQ ID NO: 5579401 - DNA, 25 bp, Homo sapien
aagactcttggcaaccccaggagaa

SEQ ID NO: 5579402 - DNA, 25 bp, Homo sapien
tatgcagcagcaggttatctttgtt

SEQ ID NO: 5579403 - DNA, 25 bp, Homo sapien
actggaggtctgtttctggtattat

SEQ ID NO: 5579404 - DNA, 25 bp, Homo sapien
ctggtattatggcttcccgggactc

SEQ ID NO: 5579405 - DNA, 25 bp, Homo sapien
cacctattccgggtagtctggctcc

SEQ ID NO: 5579406 - DNA, 25 bp, Homo sapien
gttcctcagagtccaaaagcaggga

SEQ ID NO: 5579407 - DNA, 25 bp, Homo sapien
aagttctcgagaaactgatcgcctc

SEQ ID NO: 5579408 - DNA, 25 bp, Homo sapien
tcctgcagctgaacgacaccttgga

SEQ ID NO: 5579409 - DNA, 25 bp, Homo sapien
tcagcacccagcacggatctatcct

SEQ ID NO: 5579410 - DNA, 25 bp, Homo sapien
ccgtctactggaaatctgaatgctg

SEQ ID NO: 5579411 - DNA, 25 bp, Homo sapien
acagatttggagaatttggaaacta

SEQ ID NO: 5579412 - DNA, 25 bp, Homo sapien
gcaggacagaccctctcgatggtga

SEQ ID NO: 5579413 - DNA, 25 bp, Homo sapien
agaaagaagtttgtaggttggaata

SEQ ID NO: 5579414 - DNA, 25 bp, Homo sapien
tctctggaccaacttgaccgtctac

SEQ ID NO: 5579415 - DNA, 25 bp, Homo sapien
gctgtgaacgaggatccagttgata

SEQ ID NO: 5579416 - DNA, 25 bp, Homo sapien
ggagttagtgaaattgcctgtgacc

SEQ ID NO: 5579417 - DNA, 25 bp, Homo sapien
gacgggcgtctttgtcacatgtcgc

SEQ ID NO: 5579418 - DNA, 25 bp, Homo sapien
gcgcgaacctcactctgcagacagc

SEQ ID NO: 5579419 - DNA, 25 bp, Homo sapien
tcactctgcagacagccagacaaag

SEQ ID NO: 5579420 - DNA, 25 bp, Homo sapien
gagacgggcgtctttgtcacatgtc

SEQ ID NO: 5579421 - DNA, 25 bp, Homo sapien
gcgcactcaccctggcacaggcgcg

SEQ ID NO: 5579422 - DNA, 25 bp, Homo sapien
cggagacgggcgtctttgtcacatg

SEQ ID NO: 5579423 - DNA, 25 bp, Homo sapien
acccacacgtccctgcacccacggg

SEQ ID NO: 5579424 - DNA, 25 bp, Homo sapien
agcgcactcaccctggcacaggcgc

SEQ ID NO: 5579425 - DNA, 25 bp, Homo sapien
gtctttgtcacatgtcgctgggcac

SEQ ID NO: 5579426 - DNA, 25 bp, Homo sapien
ttcaccatctcccggagacgggcgt

SEQ ID NO: 5579427 - DNA, 25 bp, Homo sapien
ccttcaccatctcccggagacgggc

SEQ ID NO: 5579428 - DNA, 25 bp, Homo sapien
acaggcgtgaacccctcgcccagat

SEQ ID NO: 5579429 - DNA, 25 bp, Homo sapien
actggcagccagtcaactctgaacc

SEQ ID NO: 5579430 - DNA, 25 bp, Homo sapien
gagggccccaagttggccctgttca

SEQ ID NO: 5579431 - DNA, 25 bp, Homo sapien
gacaagggcttcattagcaaagtac

SEQ ID NO: 5579432 - DNA, 25 bp, Homo sapien
cctctgtgcccccaggtgagaggta

SEQ ID NO: 5579433 - DNA, 25 bp, Homo sapien
tgtgacaccctctagcctctgtgcc

SEQ ID NO: 5579434 - DNA, 25 bp, Homo sapien
ctgccctggtggattctgggccaag

SEQ ID NO: 5579435 - DNA, 25 bp, Homo sapien
ctcgcccagataaaacccgtgtttc

SEQ ID NO: 5579436 - DNA, 25 bp, Homo sapien
tgggaccaactggtggtcagctcca

SEQ ID NO: 5579437 - DNA, 25 bp, Homo sapien
caactctgaacccggcacaacctgg

SEQ ID NO: 5579438 - DNA, 25 bp, Homo sapien
tcacacaggctggctgttcctttgc

SEQ ID NO: 5579439 - DNA, 25 bp, Homo sapien
gatcctggtgtctaggaacactggc

SEQ ID NO: 5579440 - DNA, 25 bp, Homo sapien
gagagaaatgagttcaggctttgga

SEQ ID NO: 5579441 - DNA, 25 bp, Homo sapien
ggaaaagagatcctggtgtctagga

SEQ ID NO: 5579442 - DNA, 25 bp, Homo sapien
tgccagcactcccgggtcctgcata

SEQ ID NO: 5579443 - DNA, 25 bp, Homo sapien
ccaactccagctcaatcggggtctc

SEQ ID NO: 5579444 - DNA, 25 bp, Homo sapien
ttgcctttctggtgtaggatgcagt

SEQ ID NO: 5579445 - DNA, 25 bp, Homo sapien
gaaaacaaatctgacaagcatccat

SEQ ID NO: 5579446 - DNA, 25 bp, Homo sapien
ggtgtaggatgcagtaagttttctt

SEQ ID NO: 5579447 - DNA, 25 bp, Homo sapien
tcggggtctcttagaatgtaatggt

SEQ ID NO: 5579448 - DNA, 25 bp, Homo sapien
gggcctgtagatcaggagaacactg

SEQ ID NO: 5579449 - DNA, 25 bp, Homo sapien
caggagaacactggagctttctgtg

SEQ ID NO: 5579450 - DNA, 25 bp, Homo sapien
tgtttttcaatatggggtggtgcac

SEQ ID NO: 5579451 - DNA, 25 bp, Homo sapien
ggggtctagctggctcacaatgtta

SEQ ID NO: 5579452 - DNA, 25 bp, Homo sapien
tgccccgctcctccgctccctgtgg

SEQ ID NO: 5579453 - DNA, 25 bp, Homo sapien
agtagtccgacccgggatttctgac

SEQ ID NO: 5579454 - DNA, 25 bp, Homo sapien
ccgaatttagttatagtagtccgac

SEQ ID NO: 5579455 - DNA, 25 bp, Homo sapien
ctgtggcctcctgacatacatcacc

SEQ ID NO: 5579456 - DNA, 25 bp, Homo sapien
aaaatcagggcttgttgttgaaggg

SEQ ID NO: 5579457 - DNA, 25 bp, Homo sapien
catcaccggccattcacagctgcgt

SEQ ID NO: 5579458 - DNA, 25 bp, Homo sapien
gaagaacctctggagggacagtttc

SEQ ID NO: 5579459 - DNA, 25 bp, Homo sapien
gaatcaaattggaagacttaaaatc

SEQ ID NO: 5579460 - DNA, 25 bp, Homo sapien
gctcctgaagctgatgccagacaac

SEQ ID NO: 5579461 - DNA, 25 bp, Homo sapien
cactgctgttggccctggagataaa

SEQ ID NO: 5579462 - DNA, 25 bp, Homo sapien
tttaagctgagatgtaaggacagga

SEQ ID NO: 5579463 - DNA, 25 bp, Homo sapien
ggccctggagataaaacagtcacag

SEQ ID NO: 5579464 - DNA, 25 bp, Homo sapien
aaggcctcccaaaagagggagcatt

SEQ ID NO: 5579465 - DNA, 25 bp, Homo sapien
gctcccatagggcttacactccagt

SEQ ID NO: 5579466 - DNA, 25 bp, Homo sapien
gcttacactccagtggggacaccca

SEQ ID NO: 5579467 - DNA, 25 bp, Homo sapien
gggacacccacaaagcatgaaaata

SEQ ID NO: 5579468 - DNA, 25 bp, Homo sapien
actatgttgaaggcagaaaaaggcc

SEQ ID NO: 5579469 - DNA, 25 bp, Homo sapien
gggggaaaaggctctactatgttga

SEQ ID NO: 5579470 - DNA, 25 bp, Homo sapien
tgttacatagtaggttaggatttct

SEQ ID NO: 5579471 - DNA, 25 bp, Homo sapien
aacagggcattatgttacagagggg

SEQ ID NO: 5579472 - DNA, 25 bp, Homo sapien
agagcctcttcatctgaggccaggg

SEQ ID NO: 5579473 - DNA, 25 bp, Homo sapien
ctgctatgaccacatcgacgtctcc

SEQ ID NO: 5579474 - DNA, 25 bp, Homo sapien
ctgaaatggctttaatctctaacca

SEQ ID NO: 5579475 - DNA, 25 bp, Homo sapien
cacatcgacgtctccagacgccccg

SEQ ID NO: 5579476 - DNA, 25 bp, Homo sapien
tccaggccctgctatgaccacatcg

SEQ ID NO: 5579477 - DNA, 25 bp, Homo sapien
agccccagccccctgtgtgcttcag

SEQ ID NO: 5579478 - DNA, 25 bp, Homo sapien
tctctaaccaaacatcgtagcggca

SEQ ID NO: 5579479 - DNA, 25 bp, Homo sapien
cctggtcctcgtttcctcgtaactc

SEQ ID NO: 5579480 - DNA, 25 bp, Homo sapien
tgaccacatcgacgtctccagacgc

SEQ ID NO: 5579481 - DNA, 25 bp, Homo sapien
agccccctgtgtgcttcagagtaga

SEQ ID NO: 5579482 - DNA, 25 bp, Homo sapien
ttcctcgtaactccgaaggccagcc

SEQ ID NO: 5579483 - DNA, 25 bp, Homo sapien
tattgtgatatcagtatgtggggca

SEQ ID NO: 5579484 - DNA, 25 bp, Homo sapien
atggcatgttccagtgagcagatac

SEQ ID NO: 5579485 - DNA, 25 bp, Homo sapien
ttaaggatgaaaaaagttcagtcat

SEQ ID NO: 5579486 - DNA, 25 bp, Homo sapien
atacttccaatagggagaatggccc

SEQ ID NO: 5579487 - DNA, 25 bp, Homo sapien
ggcccaacagaacttgggagatgtt

SEQ ID NO: 5579488 - DNA, 25 bp, Homo sapien
aaaaagttcagtcatatgctgtaac

SEQ ID NO: 5579489 - DNA, 25 bp, Homo sapien
aacagaacttgggagatgttttctc

SEQ ID NO: 5579490 - DNA, 25 bp, Homo sapien
tccagtgagcagatactattagtat

SEQ ID NO: 5579491 - DNA, 25 bp, Homo sapien
tagtatacttccaatagggagaatg

SEQ ID NO: 5579492 - DNA, 25 bp, Homo sapien
gacatatatggcatgttccagtgag

SEQ ID NO: 5579493 - DNA, 25 bp, Homo sapien
cattagtggttgtgtcatattgctt

SEQ ID NO: 5579494 - DNA, 25 bp, Homo sapien
atctgatctaaggacatgagtggct

SEQ ID NO: 5579495 - DNA, 25 bp, Homo sapien
ccttccctccgctggtgagggtgcg

SEQ ID NO: 5579496 - DNA, 25 bp, Homo sapien
gaatgtgctgtggattaaaggctta

SEQ ID NO: 5579497 - DNA, 25 bp, Homo sapien
cttagactcttgagagaacccgaca

SEQ ID NO: 5579498 - DNA, 25 bp, Homo sapien
ggccaggcagcgtgtcacttgcctg

SEQ ID NO: 5579499 - DNA, 25 bp, Homo sapien
tgtgttccttgttagggcctaccac

SEQ ID NO: 5579500 - DNA, 25 bp, Homo sapien
tgagggtgcgatcttagactcttga

SEQ ID NO: 5579501 - DNA, 25 bp, Homo sapien
gcctaccaccgggtaggtgcttgga

SEQ ID NO: 5579502 - DNA, 25 bp, Homo sapien
gcgcaacaaggctaagcgaaagaaa

SEQ ID NO: 5579503 - DNA, 25 bp, Homo sapien
aggcttaaatcctgcgggcccctca

SEQ ID NO: 5579504 - DNA, 25 bp, Homo sapien
aggtctgagcggacctttcaggcca

SEQ ID NO: 5579505 - DNA, 25 bp, Homo sapien
gaaatcaaaaccctgtacagacacc

SEQ ID NO: 5579506 - DNA, 25 bp, Homo sapien
tgggcacacccagattgtgtccagc

SEQ ID NO: 5579507 - DNA, 25 bp, Homo sapien
gggtgaccatgaggcatgttgtcat

SEQ ID NO: 5579508 - DNA, 25 bp, Homo sapien
tcatgttagtgcaggggcctttatt

SEQ ID NO: 5579509 - DNA, 25 bp, Homo sapien
ttgtgtccagcttgtcagcacactt

SEQ ID NO: 5579510 - DNA, 25 bp, Homo sapien
gagtaagtacatatagagagggtga

SEQ ID NO: 5579511 - DNA, 25 bp, Homo sapien
gccaaggaaaaccagctgaacatat

SEQ ID NO: 5579512 - DNA, 25 bp, Homo sapien
ctgtaggattgttgtgtagttatac

SEQ ID NO: 5579513 - DNA, 25 bp, Homo sapien
acagaggacctgctgaaagcttata

SEQ ID NO: 5579514 - DNA, 25 bp, Homo sapien
cccttttgatgatggacaatggcac

SEQ ID NO: 5579515 - DNA, 25 bp, Homo sapien
tgaacatattccattggctgcagcc

SEQ ID NO: 5579516 - DNA, 25 bp, Homo sapien
tccaaacccctcgtcagccagtgaa

SEQ ID NO: 5579517 - DNA, 25 bp, Homo sapien
aattgtggaggaaaactcctggact

SEQ ID NO: 5579518 - DNA, 25 bp, Homo sapien
caggaaggctcaagttacaacgaaa

SEQ ID NO: 5579519 - DNA, 25 bp, Homo sapien
cctgtgcatacattaggtggctgga

SEQ ID NO: 5579520 - DNA, 25 bp, Homo sapien
gtccacagtcagacctcagacaatg

SEQ ID NO: 5579521 - DNA, 25 bp, Homo sapien
cgcagagagtcgaatgatcttggat

SEQ ID NO: 5579522 - DNA, 25 bp, Homo sapien
gtagacatagagatgcagtatatgc

SEQ ID NO: 5579523 - DNA, 25 bp, Homo sapien
gcagtgcagtcgagttcttagcctc

SEQ ID NO: 5579524 - DNA, 25 bp, Homo sapien
ggatgcctttgcccagcagtgcagt

SEQ ID NO: 5579525 - DNA, 25 bp, Homo sapien
taggtggctggacttccccagcaac

SEQ ID NO: 5579526 - DNA, 25 bp, Homo sapien
acgtccgaatcccatggccacccat

SEQ ID NO: 5579527 - DNA, 25 bp, Homo sapien
cgggagcatcaccgctttctggacc

SEQ ID NO: 5579528 - DNA, 25 bp, Homo sapien
cactcatcccggtggagcagattgt

SEQ ID NO: 5579529 - DNA, 25 bp, Homo sapien
accactcatcccggtggagcagatt

SEQ ID NO: 5579530 - DNA, 25 bp, Homo sapien
tctggacctgtccttcaaatgatcc

SEQ ID NO: 5579531 - DNA, 25 bp, Homo sapien
tcaaatgatccaacgccgggactcg

SEQ ID NO: 5579532 - DNA, 25 bp, Homo sapien
gcatcaccgctttctggacctgtcc

SEQ ID NO: 5579533 - DNA, 25 bp, Homo sapien
caggaaccactcatcccggtggagc

SEQ ID NO: 5579534 - DNA, 25 bp, Homo sapien
ccccgggagcatcaccgctttctgg

SEQ ID NO: 5579535 - DNA, 25 bp, Homo sapien
ggaaccactcatcccggtggagcag

SEQ ID NO: 5579536 - DNA, 25 bp, Homo sapien
cggcaggaaccactcatcccggtgg

SEQ ID NO: 5579537 - DNA, 25 bp, Homo sapien
aaccggcaggaaccactcatcccgg

SEQ ID NO: 5579538 - DNA, 25 bp, Homo sapien
ccaggcaaagggcctgttgctggca

SEQ ID NO: 5579539 - DNA, 25 bp, Homo sapien
ccgtctcacccaggcaaagggcctg

SEQ ID NO: 5579540 - DNA, 25 bp, Homo sapien
gcactcccctccaggggaggctgcc

SEQ ID NO: 5579541 - DNA, 25 bp, Homo sapien
ggccgagcactcccctccaggggag

SEQ ID NO: 5579542 - DNA, 25 bp, Homo sapien
acccaggcaaagggcctgttgctgg

SEQ ID NO: 5579543 - DNA, 25 bp, Homo sapien
ttggtcgccatcacccccatctggg

SEQ ID NO: 5579544 - DNA, 25 bp, Homo sapien
tcacccaggcaaagggcctgttgct

SEQ ID NO: 5579545 - DNA, 25 bp, Homo sapien
ggtcgccatcacccccatctgggcc

SEQ ID NO: 5579546 - DNA, 25 bp, Homo sapien
gcctgttgctggcagactttggggt

SEQ ID NO: 5579547 - DNA, 25 bp, Homo sapien
gcaccttggtcgccatcacccccat

SEQ ID NO: 5579548 - DNA, 25 bp, Homo sapien
gccaccctgacccccgtctcaccca

SEQ ID NO: 5579549 - DNA, 25 bp, Homo sapien
ccccggactcgtctgctagtgcccc

SEQ ID NO: 5579550 - DNA, 25 bp, Homo sapien
ggggcactagcagacgagtccgggg

SEQ ID NO: 5579551 - DNA, 25 bp, Homo sapien
cacacaagacctctgcgtaaggctc

SEQ ID NO: 5579552 - DNA, 25 bp, Homo sapien
taggaacacacaagacctctgcgta

SEQ ID NO: 5579553 - DNA, 25 bp, Homo sapien
actaaatgatttatggcacacgtac

SEQ ID NO: 5579554 - DNA, 25 bp, Homo sapien
cattccccaaatccagggcggggta

SEQ ID NO: 5579555 - DNA, 25 bp, Homo sapien
ctactccgcaaggcttttgttttcc

SEQ ID NO: 5579556 - DNA, 25 bp, Homo sapien
aagacctctgcgtaaggctcaaggg

SEQ ID NO: 5579557 - DNA, 25 bp, Homo sapien
ttccccaccccaaatctctcaagat

SEQ ID NO: 5579558 - DNA, 25 bp, Homo sapien
gagggcttaactaggaacacacaag

SEQ ID NO: 5579559 - DNA, 25 bp, Homo sapien
acacgtaccccgccgtcacaattac

SEQ ID NO: 5579560 - DNA, 25 bp, Homo sapien
ttatggcacacgtaccccgccgtca

SEQ ID NO: 5579561 - DNA, 25 bp, Homo sapien
tcacaattacggcgtctcggagcat

SEQ ID NO: 5579562 - DNA, 25 bp, Homo sapien
ggggtgttttgtaatatatggtaga

SEQ ID NO: 5579563 - DNA, 25 bp, Homo sapien
tatggtagatgtacagtagccccca

SEQ ID NO: 5579564 - DNA, 25 bp, Homo sapien
cccccattatgtaagtggatgccta

SEQ ID NO: 5579565 - DNA, 25 bp, Homo sapien
ccattattcacaggggatacattcc

SEQ ID NO: 5579566 - DNA, 25 bp, Homo sapien
tctacagccatcaattcacactccc

SEQ ID NO: 5579567 - DNA, 25 bp, Homo sapien
gttacatagtacagccccagtctcc

SEQ ID NO: 5579568 - DNA, 25 bp, Homo sapien
aagctctaaaaactcagatggcagc

SEQ ID NO: 5579569 - DNA, 25 bp, Homo sapien
gatacattccaaggtcccccattat

SEQ ID NO: 5579570 - DNA, 25 bp, Homo sapien
aactgcggacggtacctaccctata

SEQ ID NO: 5579571 - DNA, 25 bp, Homo sapien
ttagtgtacacagctacacagcaca

SEQ ID NO: 5579572 - DNA, 25 bp, Homo sapien
cagatggcagcaaaacttgacccat

SEQ ID NO: 5579573 - DNA, 25 bp, Homo sapien
ctgcagcacgagctcgtccattgac

SEQ ID NO: 5579574 - DNA, 25 bp, Homo sapien
gctaaattgtgagcgcccccatggc

SEQ ID NO: 5579575 - DNA, 25 bp, Homo sapien
gtcccctgctaggagctcacagtct

SEQ ID NO: 5579576 - DNA, 25 bp, Homo sapien
cccgctttcctcgtggggctggagt

SEQ ID NO: 5579577 - DNA, 25 bp, Homo sapien
gcagtggccagatctggttcgtcct

SEQ ID NO: 5579578 - DNA, 25 bp, Homo sapien
gttccagtacaggatggttagtgcc

SEQ ID NO: 5579579 - DNA, 25 bp, Homo sapien
tgcgtgccaggcactcggaattcaa

SEQ ID NO: 5579580 - DNA, 25 bp, Homo sapien
gcttccagttcccgcgccacgtgtg

SEQ ID NO: 5579581 - DNA, 25 bp, Homo sapien
acccatcaatgtgcagagcgctcac

SEQ ID NO: 5579582 - DNA, 25 bp, Homo sapien
cggggtgccttcacctagtgggcag

SEQ ID NO: 5579583 - DNA, 25 bp, Homo sapien
tccagcgttctatgagcgccggtct

SEQ ID NO: 5579584 - DNA, 25 bp, Homo sapien
aggttgacaaacccccattgataac

SEQ ID NO: 5579585 - DNA, 25 bp, Homo sapien
actgcatttgaatgaagttcactgt

SEQ ID NO: 5579586 - DNA, 25 bp, Homo sapien
taccaattagtcaagaacccaagct

SEQ ID NO: 5579587 - DNA, 25 bp, Homo sapien
agtcaagaacccaagcttgcacata

SEQ ID NO: 5579588 - DNA, 25 bp, Homo sapien
agaccaaggaaacctgagagttcca

SEQ ID NO: 5579589 - DNA, 25 bp, Homo sapien
tctatgttcgccccttgtaatgtcc

SEQ ID NO: 5579590 - DNA, 25 bp, Homo sapien
tattaggtttaggcatcaagtgtct

SEQ ID NO: 5579591 - DNA, 25 bp, Homo sapien
aacaaatatagtaaaatctaggctg

SEQ ID NO: 5579592 - DNA, 25 bp, Homo sapien
acctgagagttccacactgcatttg

SEQ ID NO: 5579593 - DNA, 25 bp, Homo sapien
tttgacagtgtggtgctgatgagta

SEQ ID NO: 5579594 - DNA, 25 bp, Homo sapien
tcaagtgtctatgcaataccaatat

SEQ ID NO: 5579595 - DNA, 25 bp, Homo sapien
taattccaaatactgagcgtgatgt

SEQ ID NO: 5579596 - DNA, 25 bp, Homo sapien
tcttagtccaccaggagctgattcc

SEQ ID NO: 5579597 - DNA, 25 bp, Homo sapien
taaatgagggcagaataaatatgaa

SEQ ID NO: 5579598 - DNA, 25 bp, Homo sapien
tggatgaggtggccagattttttca

SEQ ID NO: 5579599 - DNA, 25 bp, Homo sapien
aatccagatgtagtggatgaggtgg

SEQ ID NO: 5579600 - DNA, 25 bp, Homo sapien
cttggtggccactgcatgacatatc

SEQ ID NO: 5579601 - DNA, 25 bp, Homo sapien
ctgagcgtgatgtaaatgatgtaat

SEQ ID NO: 5579602 - DNA, 25 bp, Homo sapien
gacatatcaacagtgcagcctcaaa

SEQ ID NO: 5579603 - DNA, 25 bp, Homo sapien
gcaagctcctgtgaggagcagtgca

SEQ ID NO: 5579604 - DNA, 25 bp, Homo sapien
ggagcagtgcatgcagatgatgtac

SEQ ID NO: 5579605 - DNA, 25 bp, Homo sapien
aaatatgaatgaagtgcaagctcct

SEQ ID NO: 5579606 - DNA, 25 bp, Homo sapien
cgggaatacaaaaatgcgctagagc

SEQ ID NO: 5579607 - DNA, 25 bp, Homo sapien
ggtccgcaacgctgtagcctgcgta

SEQ ID NO: 5579608 - DNA, 25 bp, Homo sapien
ttgatactaagtggcactaggctgc

SEQ ID NO: 5579609 - DNA, 25 bp, Homo sapien
aacgggaatacaaaaatgcgctaga

SEQ ID NO: 5579610 - DNA, 25 bp, Homo sapien
atactaagtggcactaggctgcagg

SEQ ID NO: 5579611 - DNA, 25 bp, Homo sapien
atacaaaaatgcgctagagcggtcc

SEQ ID NO: 5579612 - DNA, 25 bp, Homo sapien
caacgctgtagcctgcgtaaggaac

SEQ ID NO: 5579613 - DNA, 25 bp, Homo sapien
aggaacaattgatactaagtggcac

SEQ ID NO: 5579614 - DNA, 25 bp, Homo sapien
gcctgcgtaaggaacaattgatact

SEQ ID NO: 5579615 - DNA, 25 bp, Homo sapien
gtagcctgcgtaaggaacaattgat

SEQ ID NO: 5579616 - DNA, 25 bp, Homo sapien
gctgtagcctgcgtaaggaacaatt

SEQ ID NO: 5579617 - DNA, 25 bp, Homo sapien
gacccaggggcacccgtgtcgcgca

SEQ ID NO: 5579618 - DNA, 25 bp, Homo sapien
tgcgcgacacgggtgcccctgggtc

SEQ ID NO: 5579619 - DNA, 25 bp, Homo sapien
gggcacccgtgtcgcgcagggcggc

SEQ ID NO: 5579620 - DNA, 25 bp, Homo sapien
gccgccctgcgcgacacgggtgccc

SEQ ID NO: 5579621 - DNA, 25 bp, Homo sapien
caggggcacccgtgtcgcgcagggc

SEQ ID NO: 5579622 - DNA, 25 bp, Homo sapien
gccctgcgcgacacgggtgcccctg

SEQ ID NO: 5579623 - DNA, 25 bp, Homo sapien
ggagcaccagaaaccggctcactag

SEQ ID NO: 5579624 - DNA, 25 bp, Homo sapien
cgcctacaacgcgttccaggtgggc

SEQ ID NO: 5579625 - DNA, 25 bp, Homo sapien
ggtcgcctacaacgcgttccaggtg

SEQ ID NO: 5579626 - DNA, 25 bp, Homo sapien
aaatgaaatcccactagcagtctgc

SEQ ID NO: 5579627 - DNA, 25 bp, Homo sapien
cactagcagtctgcgtagtggagtt

SEQ ID NO: 5579628 - DNA, 25 bp, Homo sapien
gggctcagccaaccacaaggtgata

SEQ ID NO: 5579629 - DNA, 25 bp, Homo sapien
ggctcactagcctcctgatcagtct

SEQ ID NO: 5579630 - DNA, 25 bp, Homo sapien
ctgatcagtctcggcccagaggaaa

SEQ ID NO: 5579631 - DNA, 25 bp, Homo sapien
ggagttgaaccctagcacccgctcc

SEQ ID NO: 5579632 - DNA, 25 bp, Homo sapien
agggcttgagcttctgcttttacaa

SEQ ID NO: 5579633 - DNA, 25 bp, Homo sapien
gccaaccacaaggtgataacgaggt

SEQ ID NO: 5579634 - DNA, 25 bp, Homo sapien
atctggtctccactaaggacttatt

SEQ ID NO: 5579635 - DNA, 25 bp, Homo sapien
actcgcacctaataatctggtctcc

SEQ ID NO: 5579636 - DNA, 25 bp, Homo sapien
tatacaagatttggaaatatctctc

SEQ ID NO: 5579637 - DNA, 25 bp, Homo sapien
gtaaatattagctcttaagtgccag

SEQ ID NO: 5579638 - DNA, 25 bp, Homo sapien
ataaagaattggaggccattatccc

SEQ ID NO: 5579639 - DNA, 25 bp, Homo sapien
caataaatctgttttaaggagggaa

SEQ ID NO: 5579640 - DNA, 25 bp, Homo sapien
ttgatatgatatactcgcacctaat

SEQ ID NO: 5579641 - DNA, 25 bp, Homo sapien
ctatattataattaaaggtggggga

SEQ ID NO: 5579642 - DNA, 25 bp, Homo sapien
aagagaaaacaggcccttgtaaata

SEQ ID NO: 5579643 - DNA, 25 bp, Homo sapien
taaacaagttagctgatggacaata

SEQ ID NO: 5579644 - DNA, 25 bp, Homo sapien
tcatttgaaagatctcctaccatac

SEQ ID NO: 5579645 - DNA, 25 bp, Homo sapien
ttgtagttaacaagtgctatttctc

SEQ ID NO: 5579646 - DNA, 25 bp, Homo sapien
aggatctaaaaaggcaagttaccta

SEQ ID NO: 5579647 - DNA, 25 bp, Homo sapien
aaataggatctaaaaaggcaagtta

SEQ ID NO: 5579648 - DNA, 25 bp, Homo sapien
tagactaataagcctaaataggatc

SEQ ID NO: 5579649 - DNA, 25 bp, Homo sapien
ttagattataattttcagaaaggat

SEQ ID NO: 5579650 - DNA, 25 bp, Homo sapien
gaatgtagaatatagactaataagc

SEQ ID NO: 5579651 - DNA, 25 bp, Homo sapien
acctagagtcacaattgtagttaac

SEQ ID NO: 5579652 - DNA, 25 bp, Homo sapien
aaggcccaagtttacctagagtcac

SEQ ID NO: 5579653 - DNA, 25 bp, Homo sapien
ttctctagtaatttccatcgtgcaa

SEQ ID NO: 5579654 - DNA, 25 bp, Homo sapien
tttccatcgtgcaagaatgtagaat

SEQ ID NO: 5579655 - DNA, 25 bp, Homo sapien
taacatctgctaggctaattccatc

SEQ ID NO: 5579656 - DNA, 25 bp, Homo sapien
taacacaaaaatacatataggtagt

SEQ ID NO: 5579657 - DNA, 25 bp, Homo sapien
tactgacaaagtattctacctatgc

SEQ ID NO: 5579658 - DNA, 25 bp, Homo sapien
tagcaagcaggatattcactattta

SEQ ID NO: 5579659 - DNA, 25 bp, Homo sapien
tatgagtatcccaagagaaaccctg

SEQ ID NO: 5579660 - DNA, 25 bp, Homo sapien
taaatcactgaaaagtaacacaaaa

SEQ ID NO: 5579661 - DNA, 25 bp, Homo sapien
tactcaatggggaaaatctggatta

SEQ ID NO: 5579662 - DNA, 25 bp, Homo sapien
ctggattacagaactgaggaaaatt

SEQ ID NO: 5579663 - DNA, 25 bp, Homo sapien
ctcagtgtttgagcatgctggtttt

SEQ ID NO: 5579664 - DNA, 25 bp, Homo sapien
ataggtagtaactaagtactgacaa

SEQ ID NO: 5579665 - DNA, 25 bp, Homo sapien
taatgttaatgtttgagctcagtgt

SEQ ID NO: 5579666 - DNA, 25 bp, Homo sapien
taagccagtaatataccatatgagt

SEQ ID NO: 5579667 - DNA, 25 bp, Homo sapien
caggacatccaggtcttggtctttc

SEQ ID NO: 5579668 - DNA, 25 bp, Homo sapien
gactactgaccctgggcatgcagtc

SEQ ID NO: 5579669 - DNA, 25 bp, Homo sapien
ttcacagaatgttaccgacttggct

SEQ ID NO: 5579670 - DNA, 25 bp, Homo sapien
cgacttggctgacctctgaagaatc

SEQ ID NO: 5579671 - DNA, 25 bp, Homo sapien
tcactgcctgggcccagcatcactt

SEQ ID NO: 5579672 - DNA, 25 bp, Homo sapien
aagtgaccctgaacaactgggctat

SEQ ID NO: 5579673 - DNA, 25 bp, Homo sapien
tgtacatttaatgaggacaaagaag

SEQ ID NO: 5579674 - DNA, 25 bp, Homo sapien
ctttgttaaagtccggaccagtcaa

SEQ ID NO: 5579675 - DNA, 25 bp, Homo sapien
cagtcacctggtgaagctctgctgc

SEQ ID NO: 5579676 - DNA, 25 bp, Homo sapien
tgaagaatcccccggtactgcccta

SEQ ID NO: 5579677 - DNA, 25 bp, Homo sapien
cctttttgggtcaggtcgtccagga

SEQ ID NO: 5579678 - DNA, 25 bp, Homo sapien
tttccataggcaaagtcccaaacca

SEQ ID NO: 5579679 - DNA, 25 bp, Homo sapien
ctgaaagagatagaagcaccttagc

SEQ ID NO: 5579680 - DNA, 25 bp, Homo sapien
tcccaccctaacacccgcagcctgg

SEQ ID NO: 5579681 - DNA, 25 bp, Homo sapien
cgccgggcagattcccaccctaaca

SEQ ID NO: 5579682 - DNA, 25 bp, Homo sapien
gtcccctggccagtgaccctagaga

SEQ ID NO: 5579683 - DNA, 25 bp, Homo sapien
aggatggtagggttttgatgtaacc

SEQ ID NO: 5579684 - DNA, 25 bp, Homo sapien
cccacctggcattatagaaatggcc

SEQ ID NO: 5579685 - DNA, 25 bp, Homo sapien
tcccaaaccagaatgcagtcccctg

SEQ ID NO: 5579686 - DNA, 25 bp, Homo sapien
gctgtgtggctgacgtctgctataa

SEQ ID NO: 5579687 - DNA, 25 bp, Homo sapien
agaaatggccagactcaccgaaaaa

SEQ ID NO: 5579688 - DNA, 25 bp, Homo sapien
ttgtcacataggctgtgtggctgac

SEQ ID NO: 5579689 - DNA, 25 bp, Homo sapien
tagtatttgtccactggagggcctc

SEQ ID NO: 5579690 - DNA, 25 bp, Homo sapien
gcatcaattagggcaagagactcaa

SEQ ID NO: 5579691 - DNA, 25 bp, Homo sapien
agttgaaagaattatacagtgggcc

SEQ ID NO: 5579692 - DNA, 25 bp, Homo sapien
agggcaagagactcaatctgaaatc

SEQ ID NO: 5579693 - DNA, 25 bp, Homo sapien
cttcacacctgaacactttagcaca

SEQ ID NO: 5579694 - DNA, 25 bp, Homo sapien
tggagggcctccaaatgccataaaa

SEQ ID NO: 5579695 - DNA, 25 bp, Homo sapien
tacagtgggccatatcatataatat

SEQ ID NO: 5579696 - DNA, 25 bp, Homo sapien
ttagcacagcaaaaggatttttttc

SEQ ID NO: 5579697 - DNA, 25 bp, Homo sapien
tttttcaggtatagtatttgtccac

SEQ ID NO: 5579698 - DNA, 25 bp, Homo sapien
ggagatgcatggagtgtaaattgca

SEQ ID NO: 5579699 - DNA, 25 bp, Homo sapien
aattgcatcaattagggcaagagac

SEQ ID NO: 5579700 - DNA, 25 bp, Homo sapien
ttgggtgtcctgtatgaattttaac

SEQ ID NO: 5579701 - DNA, 25 bp, Homo sapien
gtctagttttagatgaaagtccagc

SEQ ID NO: 5579702 - DNA, 25 bp, Homo sapien
cgctggcgtcacgtgtgtctagttt

SEQ ID NO: 5579703 - DNA, 25 bp, Homo sapien
ttcccaggcatggctttggagctgg

SEQ ID NO: 5579704 - DNA, 25 bp, Homo sapien
ttaacataccttcagcacaacccac

SEQ ID NO: 5579705 - DNA, 25 bp, Homo sapien
tcaatttgtaggagtttgcacatta

SEQ ID NO: 5579706 - DNA, 25 bp, Homo sapien
ataagattgattgttttgggtgtcc

SEQ ID NO: 5579707 - DNA, 25 bp, Homo sapien
cttcagcacaacccacacagctccc

SEQ ID NO: 5579708 - DNA, 25 bp, Homo sapien
attagccattggtagtaaagttatc

SEQ ID NO: 5579709 - DNA, 25 bp, Homo sapien
gtaggagtttgcacattagccattg

SEQ ID NO: 5579710 - DNA, 25 bp, Homo sapien
ctcttcccaggcatggctttggagc

SEQ ID NO: 5579711 - DNA, 25 bp, Homo sapien
gtttacaaacaaggagaaactcatc

SEQ ID NO: 5579712 - DNA, 25 bp, Homo sapien
ctccaccgagtcggtcttggacgca

SEQ ID NO: 5579713 - DNA, 25 bp, Homo sapien
gatttccaggtctcatgccataggg

SEQ ID NO: 5579714 - DNA, 25 bp, Homo sapien
tggtcaaacgcgagactctgctgtg

SEQ ID NO: 5579715 - DNA, 25 bp, Homo sapien
ccggcacctccaccgagtcggtctt

SEQ ID NO: 5579716 - DNA, 25 bp, Homo sapien
gacccatccagcagcaataagggct

SEQ ID NO: 5579717 - DNA, 25 bp, Homo sapien
gcctccccctcgccacccctgcggc

SEQ ID NO: 5579718 - DNA, 25 bp, Homo sapien
agcaataagggctacacacccctgc

SEQ ID NO: 5579719 - DNA, 25 bp, Homo sapien
caaggagaaactcatcatgatttcc

SEQ ID NO: 5579720 - DNA, 25 bp, Homo sapien
gtcttggacgcagtagctggtcaaa

SEQ ID NO: 5579721 - DNA, 25 bp, Homo sapien
agctcccagtcggatgacccatcca

SEQ ID NO: 5579722 - DNA, 25 bp, Homo sapien
atcagtactcctggtggggtgtatg

SEQ ID NO: 5579723 - DNA, 25 bp, Homo sapien
ggcgaatgcttcccctagacatgaa

SEQ ID NO: 5579724 - DNA, 25 bp, Homo sapien
ctgctaacctgaacgccagagattt

SEQ ID NO: 5579725 - DNA, 25 bp, Homo sapien
aaccaacccagaaactgctaacctg

SEQ ID NO: 5579726 - DNA, 25 bp, Homo sapien
gatttgcaaacaagtgctcaaaggc

SEQ ID NO: 5579727 - DNA, 25 bp, Homo sapien
gctcaaaggcgaatgcttcccctag

SEQ ID NO: 5579728 - DNA, 25 bp, Homo sapien
gcatttttgggccactggaagcact

SEQ ID NO: 5579729 - DNA, 25 bp, Homo sapien
aaacaagtgctcaaaggcgaatgct

SEQ ID NO: 5579730 - DNA, 25 bp, Homo sapien
gaggtctcaaactccccagatttgc

SEQ ID NO: 5579731 - DNA, 25 bp, Homo sapien
ggaggcaggatcagtactcctggtg

SEQ ID NO: 5579732 - DNA, 25 bp, Homo sapien
aaaaagcatttttgggccactggaa

SEQ ID NO: 5579733 - DNA, 25 bp, Homo sapien
gcctccgcttacccctccaactcac

SEQ ID NO: 5579734 - DNA, 25 bp, Homo sapien
tgatcctgaagggttcactgtcacc

SEQ ID NO: 5579735 - DNA, 25 bp, Homo sapien
actcccaagggtgatcctgaagggt

SEQ ID NO: 5579736 - DNA, 25 bp, Homo sapien
cccacatgaaactcaacagtccttc

SEQ ID NO: 5579737 - DNA, 25 bp, Homo sapien
ggaagctggattggaaccatacctt

SEQ ID NO: 5579738 - DNA, 25 bp, Homo sapien
agaatccactcccaagggtgatcct

SEQ ID NO: 5579739 - DNA, 25 bp, Homo sapien
tccccaagcgattcattccccacat

SEQ ID NO: 5579740 - DNA, 25 bp, Homo sapien
acctttcaggagtcacccaagagtc

SEQ ID NO: 5579741 - DNA, 25 bp, Homo sapien
tgcctgcctccgcttacccctccaa

SEQ ID NO: 5579742 - DNA, 25 bp, Homo sapien
ggattggaaccataccttaagctca

SEQ ID NO: 5579743 - DNA, 25 bp, Homo sapien
aggagtcacccaagagtcctgcctg

SEQ ID NO: 5579744 - DNA, 25 bp, Homo sapien
cattataaagcaagattcaaggtct

SEQ ID NO: 5579745 - DNA, 25 bp, Homo sapien
agaccttgaatcttgctttataatg

SEQ ID NO: 5579746 - DNA, 25 bp, Homo sapien
gactggcctcgtgtcatggagaaaa

SEQ ID NO: 5579747 - DNA, 25 bp, Homo sapien
ctgctcgtgtaaagcttggtttatc

SEQ ID NO: 5579748 - DNA, 25 bp, Homo sapien
tttggtctccacagctcttcggggt

SEQ ID NO: 5579749 - DNA, 25 bp, Homo sapien
tcttctcggcgttctgtgtgtagcg

SEQ ID NO: 5579750 - DNA, 25 bp, Homo sapien
cgtgtcatggagaaaagcatgtgtg

SEQ ID NO: 5579751 - DNA, 25 bp, Homo sapien
ccatccccatcctgctcgtgtaaag

SEQ ID NO: 5579752 - DNA, 25 bp, Homo sapien
cagggtatggctctccgccctggct

SEQ ID NO: 5579753 - DNA, 25 bp, Homo sapien
ttctgtgtgtagcgtagtcttggtt

SEQ ID NO: 5579754 - DNA, 25 bp, Homo sapien
gttcaagcccgctccgtgggagctg

SEQ ID NO: 5579755 - DNA, 25 bp, Homo sapien
tgtagcgtagtcttggtttggtctc

SEQ ID NO: 5579756 - DNA, 25 bp, Homo sapien
gtcccccagctatctcctggtctgc

SEQ ID NO: 5579757 - DNA, 25 bp, Homo sapien
gccaggcggttctatgccgcttggc

SEQ ID NO: 5579758 - DNA, 25 bp, Homo sapien
atgaagacgttgagcttagtcagaa

SEQ ID NO: 5579759 - DNA, 25 bp, Homo sapien
cccgggtttccttcgcgcattcctc

SEQ ID NO: 5579760 - DNA, 25 bp, Homo sapien
acgcgacgcacccaaagtccgtttg

SEQ ID NO: 5579761 - DNA, 25 bp, Homo sapien
actcaagtcagaaatgtcactgcac

SEQ ID NO: 5579762 - DNA, 25 bp, Homo sapien
acgcttctggattgcggctcccgga

SEQ ID NO: 5579763 - DNA, 25 bp, Homo sapien
aaatatacatggcccacgacgcttc

SEQ ID NO: 5579764 - DNA, 25 bp, Homo sapien
cattggcgccaagaagatcctctaa

SEQ ID NO: 5579765 - DNA, 25 bp, Homo sapien
cacatagcactgatggcagtgagac

SEQ ID NO: 5579766 - DNA, 25 bp, Homo sapien
ggggcataaatcaggacaattagca

SEQ ID NO: 5579767 - DNA, 25 bp, Homo sapien
aagccgcaggacgattttctggttc

SEQ ID NO: 5579768 - DNA, 25 bp, Homo sapien
gaatggtaccatgagccacctagcc

SEQ ID NO: 5579769 - DNA, 25 bp, Homo sapien
ttgtctgccaggattaagtaagtgc

SEQ ID NO: 5579770 - DNA, 25 bp, Homo sapien
tacctccatctgtggccactccttc

SEQ ID NO: 5579771 - DNA, 25 bp, Homo sapien
acatcgtgcctgtgttacctcatcc

SEQ ID NO: 5579772 - DNA, 25 bp, Homo sapien
agggctgatgagtctgtcttcttaa

SEQ ID NO: 5579773 - DNA, 25 bp, Homo sapien
cactaccgtggtcttaaaggtcctc

SEQ ID NO: 5579774 - DNA, 25 bp, Homo sapien
taagctatagccaagacctgtcttc

SEQ ID NO: 5579775 - DNA, 25 bp, Homo sapien
catgtatacagggctgatgagtctg

SEQ ID NO: 5579776 - DNA, 25 bp, Homo sapien
tctaaccaagcctgttctgcacttc

SEQ ID NO: 5579777 - DNA, 25 bp, Homo sapien
ccacgttatcttacataggtccctc

SEQ ID NO: 5579778 - DNA, 25 bp, Homo sapien
ggattaagtaagtgcaaaactgaac

SEQ ID NO: 5579779 - DNA, 25 bp, Homo sapien
ttcctcatgtggaaggctcagcttt

SEQ ID NO: 5579780 - DNA, 25 bp, Homo sapien
gatttgcaaactggacaagtgtgac

SEQ ID NO: 5579781 - DNA, 25 bp, Homo sapien
ggccattccggagactctgagaacc

SEQ ID NO: 5579782 - DNA, 25 bp, Homo sapien
aaaccaaggctcactgactccagag

SEQ ID NO: 5579783 - DNA, 25 bp, Homo sapien
tgtaggtactgcagctctggtccag

SEQ ID NO: 5579784 - DNA, 25 bp, Homo sapien
gcataggggatttaaaccaaggctc

SEQ ID NO: 5579785 - DNA, 25 bp, Homo sapien
gactccagagcccgtttagagacac

SEQ ID NO: 5579786 - DNA, 25 bp, Homo sapien
acacagccagttacagagtgcatag

SEQ ID NO: 5579787 - DNA, 25 bp, Homo sapien
gcacagtgaggttaagagatagtgt

SEQ ID NO: 5579788 - DNA, 25 bp, Homo sapien
cactaatacccgagtcaggcactat

SEQ ID NO: 5579789 - DNA, 25 bp, Homo sapien
agtgacctcctgtggggcaatttct

SEQ ID NO: 5579790 - DNA, 25 bp, Homo sapien
ctgtgccaactgaatagggacaggg

SEQ ID NO: 5579791 - DNA, 25 bp, Homo sapien
acctgctcccacccctcaagacctc

SEQ ID NO: 5579792 - DNA, 25 bp, Homo sapien
atcttctccctgtgaagtgccccct

SEQ ID NO: 5579793 - DNA, 25 bp, Homo sapien
atttgcatttgttggggcatgggga

SEQ ID NO: 5579794 - DNA, 25 bp, Homo sapien
agggtcttcaggtgtggaactattt

SEQ ID NO: 5579795 - DNA, 25 bp, Homo sapien
aggggaattgtcagtacacacctgc

SEQ ID NO: 5579796 - DNA, 25 bp, Homo sapien
gtgtgtgcttgtgtatgcatgggtt

SEQ ID NO: 5579797 - DNA, 25 bp, Homo sapien
ctctggctgtcctcaccagggaatt

SEQ ID NO: 5579798 - DNA, 25 bp, Homo sapien
ctcccccaaccagacggggagatgc

SEQ ID NO: 5579799 - DNA, 25 bp, Homo sapien
acgaggtcccagctcaagacatgtg

SEQ ID NO: 5579800 - DNA, 25 bp, Homo sapien
ggtcaggcagcctgtgccaactgaa

SEQ ID NO: 5579801 - DNA, 25 bp, Homo sapien
attagatgacaaaaggttaaccttc

SEQ ID NO: 5579802 - DNA, 25 bp, Homo sapien
ctgaggctggcaacaacttaaagaa

SEQ ID NO: 5579803 - DNA, 25 bp, Homo sapien
ggtattaaattaactgaggctggca

SEQ ID NO: 5579804 - DNA, 25 bp, Homo sapien
ctaaaagcagcaaatacagatatga

SEQ ID NO: 5579805 - DNA, 25 bp, Homo sapien
aattttgcaaaatgactcccctcca

SEQ ID NO: 5579806 - DNA, 25 bp, Homo sapien
ccaatgtgctgaaaaggatcctctc

SEQ ID NO: 5579807 - DNA, 25 bp, Homo sapien
ataacagtaagaaaagtatggtatt

SEQ ID NO: 5579808 - DNA, 25 bp, Homo sapien
actggcatgctcaaactggaaaaat

SEQ ID NO: 5579809 - DNA, 25 bp, Homo sapien
gtaaaggaatgtacaaccaatgtgc

SEQ ID NO: 5579810 - DNA, 25 bp, Homo sapien
aatttgtactttgggtatcagcttc

SEQ ID NO: 5579811 - DNA, 25 bp, Homo sapien
acactgcaagtatcgattcacccat

SEQ ID NO: 5579812 - DNA, 25 bp, Homo sapien
aggaactgctcatagacatgctgac

SEQ ID NO: 5579813 - DNA, 25 bp, Homo sapien
cagcaggaactgctcatagacatgc

SEQ ID NO: 5579814 - DNA, 25 bp, Homo sapien
gcaggaactgctcatagacatgctg

SEQ ID NO: 5579815 - DNA, 25 bp, Homo sapien
ggagaacaactacctgaagctgcag

SEQ ID NO: 5579816 - DNA, 25 bp, Homo sapien
ggaggagaacaactacctgaagctg

SEQ ID NO: 5579817 - DNA, 25 bp, Homo sapien
ccaaaagccaagtgttgctggagga

SEQ ID NO: 5579818 - DNA, 25 bp, Homo sapien
gctgcagcaggaactgctcatagac

SEQ ID NO: 5579819 - DNA, 25 bp, Homo sapien
agacatgctgactgagaccatggcg

SEQ ID NO: 5579820 - DNA, 25 bp, Homo sapien
tcatagacatgctgactgagaccat

SEQ ID NO: 5579821 - DNA, 25 bp, Homo sapien
tgctcatagacatgctgactgagac

SEQ ID NO: 5579822 - DNA, 25 bp, Homo sapien
tccaaaagccaagtgttgctggagg

SEQ ID NO: 5579823 - DNA, 25 bp, Homo sapien
gcccaaagttttgcagctcgctgtc

SEQ ID NO: 5579824 - DNA, 25 bp, Homo sapien
atattgagacaaaataagctggctg

SEQ ID NO: 5579825 - DNA, 25 bp, Homo sapien
ttgtgtgccaaccaagtttgaggcc

SEQ ID NO: 5579826 - DNA, 25 bp, Homo sapien
gatggtagtgctagactttcacacc

SEQ ID NO: 5579827 - DNA, 25 bp, Homo sapien
agtttgaggcctcctggtttgctcc

SEQ ID NO: 5579828 - DNA, 25 bp, Homo sapien
gcgaagagctgttgaatgccattcc

SEQ ID NO: 5579829 - DNA, 25 bp, Homo sapien
agtcacagttttaccgcgaagagct

SEQ ID NO: 5579830 - DNA, 25 bp, Homo sapien
gcagctcgctgtcagatggtagtgc

SEQ ID NO: 5579831 - DNA, 25 bp, Homo sapien
aagctggctgacttatgcctgaggc

SEQ ID NO: 5579832 - DNA, 25 bp, Homo sapien
tctccgtgtgtgcatccagttcgta

SEQ ID NO: 5579833 - DNA, 25 bp, Homo sapien
ttgggattctagatccttggcagtc

SEQ ID NO: 5579834 - DNA, 25 bp, Homo sapien
atcaactgttctggaatgaagagct

SEQ ID NO: 5579835 - DNA, 25 bp, Homo sapien
cttgtgaattttaggagcataggtt

SEQ ID NO: 5579836 - DNA, 25 bp, Homo sapien
aggagcataggttcaagagactctg

SEQ ID NO: 5579837 - DNA, 25 bp, Homo sapien
ggggaagcaggcttacatcaactgt

SEQ ID NO: 5579838 - DNA, 25 bp, Homo sapien
aggatcaatgaagcagcgatatgtc

SEQ ID NO: 5579839 - DNA, 25 bp, Homo sapien
agagactctgggtgaaagtatgttt

SEQ ID NO: 5579840 - DNA, 25 bp, Homo sapien
attttaggagcataggttcaagaga

SEQ ID NO: 5579841 - DNA, 25 bp, Homo sapien
cagcgatatgtctgaagacccaaaa

SEQ ID NO: 5579842 - DNA, 25 bp, Homo sapien
atgtctgaagacccaaaaaggtgga

SEQ ID NO: 5579843 - DNA, 25 bp, Homo sapien
tgaagacccaaaaaggtggattagc

SEQ ID NO: 5579844 - DNA, 25 bp, Homo sapien
acccaaaaaggtggattagctgggc

SEQ ID NO: 5579845 - DNA, 25 bp, Homo sapien
atctcagacccccgagctaccgggc

SEQ ID NO: 5579846 - DNA, 25 bp, Homo sapien
cctccaggacgcagcctttgtcact

SEQ ID NO: 5579847 - DNA, 25 bp, Homo sapien
cctccatctcagacccccgagctac

SEQ ID NO: 5579848 - DNA, 25 bp, Homo sapien
tgagttccgactcgggtcctgcagg

SEQ ID NO: 5579849 - DNA, 25 bp, Homo sapien
ggccgtgcatgaatccaggcatgga

SEQ ID NO: 5579850 - DNA, 25 bp, Homo sapien
ggccaggctgccttctgcatccgtg

SEQ ID NO: 5579851 - DNA, 25 bp, Homo sapien
tcttatctacaggacaagcaccgcg

SEQ ID NO: 5579852 - DNA, 25 bp, Homo sapien
tgtcactctgtcttactccacctcc

SEQ ID NO: 5579853 - DNA, 25 bp, Homo sapien
agcctgcctccaggacgcagccttt

SEQ ID NO: 5579854 - DNA, 25 bp, Homo sapien
cagcctctgagttccgactcgggtc

SEQ ID NO: 5579855 - DNA, 25 bp, Homo sapien
agcaccgcggctgtaccagcctctg

SEQ ID NO: 5579856 - DNA, 25 bp, Homo sapien
gaaaggccgaccctgccagatatta

SEQ ID NO: 5579857 - DNA, 25 bp, Homo sapien
cagaccactgtgtatatgagaattg

SEQ ID NO: 5579858 - DNA, 25 bp, Homo sapien
aggggaattacggagtatgaattcg

SEQ ID NO: 5579859 - DNA, 25 bp, Homo sapien
cagatattaagataggctgcaaagc

SEQ ID NO: 5579860 - DNA, 25 bp, Homo sapien
acagaaacaaaaatacctgagaaac

SEQ ID NO: 5579861 - DNA, 25 bp, Homo sapien
gagcgatcagaaacagaccactgtg

SEQ ID NO: 5579862 - DNA, 25 bp, Homo sapien
acaaaaatacctgagaaacacaaca

SEQ ID NO: 5579863 - DNA, 25 bp, Homo sapien
acggagtatgaattcgttatctatc

SEQ ID NO: 5579864 - DNA, 25 bp, Homo sapien
actgtgtatatgagaattggtattt

SEQ ID NO: 5579865 - DNA, 25 bp, Homo sapien
ggtatcagttcgggcacagaaacaa

SEQ ID NO: 5579866 - DNA, 25 bp, Homo sapien
acaacagtgagaacggtatcagttc

SEQ ID NO: 5579867 - DNA, 25 bp, Homo sapien
cacctcgggtaagtcaccttctttc

SEQ ID NO: 5579868 - DNA, 25 bp, Homo sapien
actcagaattctatttcagagccct

SEQ ID NO: 5579869 - DNA, 25 bp, Homo sapien
ttccgtgcaggaagccctgccaaaa

SEQ ID NO: 5579870 - DNA, 25 bp, Homo sapien
atcctccggcacctcgggtaagtca

SEQ ID NO: 5579871 - DNA, 25 bp, Homo sapien
gccatcttgtgccccggtgcctgtt

SEQ ID NO: 5579872 - DNA, 25 bp, Homo sapien
cggtgcctgttacgtgtcctccctc

SEQ ID NO: 5579873 - DNA, 25 bp, Homo sapien
ccagcaccacatggctcctggcagc

SEQ ID NO: 5579874 - DNA, 25 bp, Homo sapien
tccttctgtcgtgaagacgagccga

SEQ ID NO: 5579875 - DNA, 25 bp, Homo sapien
gaagacgcctccatcctccggcacc

SEQ ID NO: 5579876 - DNA, 25 bp, Homo sapien
ttttcctcgtactccggggctggca

SEQ ID NO: 5579877 - DNA, 25 bp, Homo sapien
tcagagccctccatcttccgtgcag

SEQ ID NO: 5579878 - DNA, 25 bp, Homo sapien
actagacagtcaaggcatcacagaa

SEQ ID NO: 5579879 - DNA, 25 bp, Homo sapien
aagtagaatgaaaaccctggacatt

SEQ ID NO: 5579880 - DNA, 25 bp, Homo sapien
agaaaagtccagaaggaagttcact

SEQ ID NO: 5579881 - DNA, 25 bp, Homo sapien
gaagcaaacccaagtccaagggcca

SEQ ID NO: 5579882 - DNA, 25 bp, Homo sapien
ccagaatctgacacggccacttagc

SEQ ID NO: 5579883 - DNA, 25 bp, Homo sapien
gatgggcaagatagataaacatgtc

SEQ ID NO: 5579884 - DNA, 25 bp, Homo sapien
accaatgcttacatgctggggagga

SEQ ID NO: 5579885 - DNA, 25 bp, Homo sapien
caaataaattggcagagaaaagtcc

SEQ ID NO: 5579886 - DNA, 25 bp, Homo sapien
gacagacagtgctccagtcacctcc

SEQ ID NO: 5579887 - DNA, 25 bp, Homo sapien
aacaggacattgatctacagcggga

SEQ ID NO: 5579888 - DNA, 25 bp, Homo sapien
taaaatgagcacaggagactctgaa

SEQ ID NO: 5579889 - DNA, 25 bp, Homo sapien
tagcaacttaaaaactcagaactgg

SEQ ID NO: 5579890 - DNA, 25 bp, Homo sapien
gttctaataaggaatcaggaggtaa

SEQ ID NO: 5579891 - DNA, 25 bp, Homo sapien
taaaataagggattttgaagatata

SEQ ID NO: 5579892 - DNA, 25 bp, Homo sapien
taaaaaatctgaaatagcaacttaa

SEQ ID NO: 5579893 - DNA, 25 bp, Homo sapien
gatgacctagtattgctggtaactc

SEQ ID NO: 5579894 - DNA, 25 bp, Homo sapien
aggaatcaggaggtaagacctccat

SEQ ID NO: 5579895 - DNA, 25 bp, Homo sapien
atattcttgaactaacccagaccct

SEQ ID NO: 5579896 - DNA, 25 bp, Homo sapien
gatataaatgaaaagagccaagaaa

SEQ ID NO: 5579897 - DNA, 25 bp, Homo sapien
aagaagagatacaaccaaatgtaaa

SEQ ID NO: 5579898 - DNA, 25 bp, Homo sapien
tattgaatgatacctgatctcacaa

SEQ ID NO: 5579899 - DNA, 25 bp, Homo sapien
gtgaatgactggctaaaatcaggaa

SEQ ID NO: 5579900 - DNA, 25 bp, Homo sapien
gcctggcccaacccaatgggaacac

SEQ ID NO: 5579901 - DNA, 25 bp, Homo sapien
tccccaagggagacttggcacattg

SEQ ID NO: 5579902 - DNA, 25 bp, Homo sapien
tggcccaacccaatgggaacaccca

SEQ ID NO: 5579903 - DNA, 25 bp, Homo sapien
tataaaccatgacaataacagctgt

SEQ ID NO: 5579904 - DNA, 25 bp, Homo sapien
aaaccatgacaataacagctgttgc

SEQ ID NO: 5579905 - DNA, 25 bp, Homo sapien
gccttgcctggcccaacccaatggg

SEQ ID NO: 5579906 - DNA, 25 bp, Homo sapien
ccaagggagacttggcacattggca

SEQ ID NO: 5579907 - DNA, 25 bp, Homo sapien
caaataaataaagcaggatgacagg

SEQ ID NO: 5579908 - DNA, 25 bp, Homo sapien
acccaatgggaacacccagactcag

SEQ ID NO: 5579909 - DNA, 25 bp, Homo sapien
catgacaataacagctgttgctcag

SEQ ID NO: 5579910 - DNA, 25 bp, Homo sapien
caacccaatgggaacacccagactc

SEQ ID NO: 5579911 - DNA, 25 bp, Homo sapien
gcatgaataggaatgaaccacacct

SEQ ID NO: 5579912 - DNA, 25 bp, Homo sapien
atgccagttgtgaaacgtctgtgta

SEQ ID NO: 5579913 - DNA, 25 bp, Homo sapien
gttcttccagggagcatgaatagga

SEQ ID NO: 5579914 - DNA, 25 bp, Homo sapien
agtgtcttaatgtcctggcgtgcca

SEQ ID NO: 5579915 - DNA, 25 bp, Homo sapien
cgaaacaaaactccagtgtcttaat

SEQ ID NO: 5579916 - DNA, 25 bp, Homo sapien
tcctttcctataagccagtggccct

SEQ ID NO: 5579917 - DNA, 25 bp, Homo sapien
aacagtagcaaaacataatgccagt

SEQ ID NO: 5579918 - DNA, 25 bp, Homo sapien
gaaccacacctaatgaagtaggccc

SEQ ID NO: 5579919 - DNA, 25 bp, Homo sapien
cactgaacacaataagcatgacttt

SEQ ID NO: 5579920 - DNA, 25 bp, Homo sapien
tcctggcgtgccatctcctggtcaa

SEQ ID NO: 5579921 - DNA, 25 bp, Homo sapien
gaagggcacactgaacacaataagc

SEQ ID NO: 5579922 - DNA, 25 bp, Homo sapien
taatgaagtaggccctatcatttta

SEQ ID NO: 5579923 - DNA, 25 bp, Homo sapien
aaagcataaaatcaacagatctcaa

SEQ ID NO: 5579924 - DNA, 25 bp, Homo sapien
ctcaaacatcagacggaaaccagta

SEQ ID NO: 5579925 - DNA, 25 bp, Homo sapien
gaaaggcctgtaagaaaagcataaa

SEQ ID NO: 5579926 - DNA, 25 bp, Homo sapien
cagatctcaaacatcagacggaaac

SEQ ID NO: 5579927 - DNA, 25 bp, Homo sapien
caaagatcataatgaaaggcctgta

SEQ ID NO: 5579928 - DNA, 25 bp, Homo sapien
agacggaaaccagtaatagtagtgt

SEQ ID NO: 5579929 - DNA, 25 bp, Homo sapien
accagtaatagtagtgtagcctttc

SEQ ID NO: 5579930 - DNA, 25 bp, Homo sapien
acatcagacggaaaccagtaatagt

SEQ ID NO: 5579931 - DNA, 25 bp, Homo sapien
cataatgaaaggcctgtaagaaaag

SEQ ID NO: 5579932 - DNA, 25 bp, Homo sapien
gtgtagcctttccaagaaacttcac

SEQ ID NO: 5579933 - DNA, 25 bp, Homo sapien
attgttcccacgccaggctcagcag

SEQ ID NO: 5579934 - DNA, 25 bp, Homo sapien
gtccccttctaatgcctgtggaggc

SEQ ID NO: 5579935 - DNA, 25 bp, Homo sapien
gcctggctcgctccagggatagagg

SEQ ID NO: 5579936 - DNA, 25 bp, Homo sapien
ggccctcgcagtgagtccccttcta

SEQ ID NO: 5579937 - DNA, 25 bp, Homo sapien
cggcctggctcgctccagggataga

SEQ ID NO: 5579938 - DNA, 25 bp, Homo sapien
ccacattgttcccacgccaggctca

SEQ ID NO: 5579939 - DNA, 25 bp, Homo sapien
gatagaggccacattgttcccacgc

SEQ ID NO: 5579940 - DNA, 25 bp, Homo sapien
cttctaatgcctgtggaggctggcg

SEQ ID NO: 5579941 - DNA, 25 bp, Homo sapien
tggccactcagtggccagccaggga

SEQ ID NO: 5579942 - DNA, 25 bp, Homo sapien
agggatagaggccacattgttccca

SEQ ID NO: 5579943 - DNA, 25 bp, Homo sapien
cgccccggctgtttccccagggtga

SEQ ID NO: 5579944 - DNA, 25 bp, Homo sapien
catgtggcccatcattgactgaaac

SEQ ID NO: 5579945 - DNA, 25 bp, Homo sapien
tgaatgcttcaggccattgtaacac

SEQ ID NO: 5579946 - DNA, 25 bp, Homo sapien
tacacctgccgcacacctaggctgt

SEQ ID NO: 5579947 - DNA, 25 bp, Homo sapien
ttgtaggctgagcctagaagcaaag

SEQ ID NO: 5579948 - DNA, 25 bp, Homo sapien
cacacctaggctgtgtggtgtggcc

SEQ ID NO: 5579949 - DNA, 25 bp, Homo sapien
ggcatcagagtgcgctacacctgcc

SEQ ID NO: 5579950 - DNA, 25 bp, Homo sapien
cctgctcgcatgtgactgtactgaa

SEQ ID NO: 5579951 - DNA, 25 bp, Homo sapien
gcatgagcagcaagcttttgtaggc

SEQ ID NO: 5579952 - DNA, 25 bp, Homo sapien
ttttgtcgtcgtgcaggcatcagag

SEQ ID NO: 5579953 - DNA, 25 bp, Homo sapien
gctcctaggctgcatacctgctcgc

SEQ ID NO: 5579954 - DNA, 25 bp, Homo sapien
tgaggagtttgctgttagttgattt

SEQ ID NO: 5579955 - DNA, 25 bp, Homo sapien
tcatgcccctctgagaacaggtgca

SEQ ID NO: 5579956 - DNA, 25 bp, Homo sapien
ccagccctcgtccacagctctgtgc

SEQ ID NO: 5579957 - DNA, 25 bp, Homo sapien
gcacatcatctggcaataacagggg

SEQ ID NO: 5579958 - DNA, 25 bp, Homo sapien
ttcccacagccctaggaagagaatc

SEQ ID NO: 5579959 - DNA, 25 bp, Homo sapien
cccatcacctaaacagaaagcacaa

SEQ ID NO: 5579960 - DNA, 25 bp, Homo sapien
aagcaatttgatcattaggcacatc

SEQ ID NO: 5579961 - DNA, 25 bp, Homo sapien
ttccaacatctcaaggggcttccca

SEQ ID NO: 5579962 - DNA, 25 bp, Homo sapien
gcagcaggccagcattttcaaaaga

SEQ ID NO: 5579963 - DNA, 25 bp, Homo sapien
ggagatagaagcatcccatcaccta

SEQ ID NO: 5579964 - DNA, 25 bp, Homo sapien
cgggatggctttcccagccctcgtc

SEQ ID NO: 5579965 - DNA, 25 bp, Homo sapien
ccctgccctgcttccaacatctcaa

SEQ ID NO: 5579966 - DNA, 25 bp, Homo sapien
ataagcgtataaattggtgtggtcc

SEQ ID NO: 5579967 - DNA, 25 bp, Homo sapien
tggagggcaattgatttgcagtatc

SEQ ID NO: 5579968 - DNA, 25 bp, Homo sapien
gcacaaagacccaagaaccaagatg

SEQ ID NO: 5579969 - DNA, 25 bp, Homo sapien
acactcatcaacaggagaatgcttc

SEQ ID NO: 5579970 - DNA, 25 bp, Homo sapien
agcaagggaaaaccaataacctgca

SEQ ID NO: 5579971 - DNA, 25 bp, Homo sapien
atacatacgacaaaaaggtaatttc

SEQ ID NO: 5579972 - DNA, 25 bp, Homo sapien
tgtcaggtaagaaacactcacaggc

SEQ ID NO: 5579973 - DNA, 25 bp, Homo sapien
gaatgcttcaataatgggatatcat

SEQ ID NO: 5579974 - DNA, 25 bp, Homo sapien
tgattagattggtaaggatgaaaga

SEQ ID NO: 5579975 - DNA, 25 bp, Homo sapien
tagggaatacacatagaatacatac

SEQ ID NO: 5579976 - DNA, 25 bp, Homo sapien
ttaaagtatccagtgggactgaggg

SEQ ID NO: 5579977 - DNA, 25 bp, Homo sapien
aatattgctatttgaggtcctcact

SEQ ID NO: 5579978 - DNA, 25 bp, Homo sapien
ctcagcaccttgaacagtacctgtg

SEQ ID NO: 5579979 - DNA, 25 bp, Homo sapien
acaccagtcctgaaaaccaaaatcc

SEQ ID NO: 5579980 - DNA, 25 bp, Homo sapien
tctactatatggacaaaagttctta

SEQ ID NO: 5579981 - DNA, 25 bp, Homo sapien
cctcactggtgagtatgttgtctac

SEQ ID NO: 5579982 - DNA, 25 bp, Homo sapien
agtacctgtgctcaagtaagtgtaa

SEQ ID NO: 5579983 - DNA, 25 bp, Homo sapien
aacagacgtatactatctatgccat

SEQ ID NO: 5579984 - DNA, 25 bp, Homo sapien
aggtaaagctccaaaatccctaaca

SEQ ID NO: 5579985 - DNA, 25 bp, Homo sapien
caggaaaacccaaccttgactgaca

SEQ ID NO: 5579986 - DNA, 25 bp, Homo sapien
gtgtaattactgacttaacagacgt

SEQ ID NO: 5579987 - DNA, 25 bp, Homo sapien
catgtatgttaagtcacaccagtcc

SEQ ID NO: 5579988 - DNA, 25 bp, Homo sapien
tgggaggaaaccttctgttagagcc

SEQ ID NO: 5579989 - DNA, 25 bp, Homo sapien
tactcagcaggtatgcaatgactgt

SEQ ID NO: 5579990 - DNA, 25 bp, Homo sapien
ccaaatgtacatggttgtggggaac

SEQ ID NO: 5579991 - DNA, 25 bp, Homo sapien
acactaacagcaaagggtgtccagg

SEQ ID NO: 5579992 - DNA, 25 bp, Homo sapien
tccttagggctcagatgttccatgc

SEQ ID NO: 5579993 - DNA, 25 bp, Homo sapien
acttaacagaattttaggcagcatt

SEQ ID NO: 5579994 - DNA, 25 bp, Homo sapien
agaacctcctggaaggtctgccatc

SEQ ID NO: 5579995 - DNA, 25 bp, Homo sapien
gccgggtctgactatagcacattcc

SEQ ID NO: 5579996 - DNA, 25 bp, Homo sapien
tttctgcagctaaaagtgcaccttc

SEQ ID NO: 5579997 - DNA, 25 bp, Homo sapien
ggttgtggggaactaagctatcaac

SEQ ID NO: 5579998 - DNA, 25 bp, Homo sapien
gtccaggtcagtcttgaatggaatc

SEQ ID NO: 5579999 - DNA, 25 bp, Homo sapien
gcccaatgcaggcgtgttaagaggc

SEQ ID NO: 5580000 - DNA, 25 bp, Homo sapien
tggatacttggtgcccaatgcaggc

SEQ ID NO: 5580001 - DNA, 25 bp, Homo sapien
tgttaagaggcgagacctttaggaa

SEQ ID NO: 5580002 - DNA, 25 bp, Homo sapien
atgtggctgtctctcgttagtcccc

SEQ ID NO: 5580003 - DNA, 25 bp, Homo sapien
cccgcaacgatttgaatgtgtcccc

SEQ ID NO: 5580004 - DNA, 25 bp, Homo sapien
tgctattgctcagggttatgctaac

SEQ ID NO: 5580005 - DNA, 25 bp, Homo sapien
tagttagcacaagagtgggtctgta

SEQ ID NO: 5580006 - DNA, 25 bp, Homo sapien
ccatgaaaggagtctattctctagg

SEQ ID NO: 5580007 - DNA, 25 bp, Homo sapien
tttaggaagtgcttgagccattctc

SEQ ID NO: 5580008 - DNA, 25 bp, Homo sapien
cactttgaaaactgctaggctactc

SEQ ID NO: 5580009 - DNA, 25 bp, Homo sapien
attaatgggttattcagagaagggg

SEQ ID NO: 5580010 - DNA, 25 bp, Homo sapien
gcctccaggcaagaaagcaattaag

SEQ ID NO: 5580011 - DNA, 25 bp, Homo sapien
agaatgacataattgagaggagatt

SEQ ID NO: 5580012 - DNA, 25 bp, Homo sapien
ttcacttatatgagggacctagaac

SEQ ID NO: 5580013 - DNA, 25 bp, Homo sapien
tcactccgacccatgcctccaggca

SEQ ID NO: 5580014 - DNA, 25 bp, Homo sapien
gacttgtcaggtcaagacaccaatt

SEQ ID NO: 5580015 - DNA, 25 bp, Homo sapien
cagtaaatccgaatgtgaccttgac

SEQ ID NO: 5580016 - DNA, 25 bp, Homo sapien
gggacagaaagtgttatagaggtta

SEQ ID NO: 5580017 - DNA, 25 bp, Homo sapien
agtgttatagaggttaccagggcct

SEQ ID NO: 5580018 - DNA, 25 bp, Homo sapien
tagaataaaaggagtctgtatgatt

SEQ ID NO: 5580019 - DNA, 25 bp, Homo sapien
atgggtacggtttcagtttaggatg

SEQ ID NO: 5580020 - DNA, 25 bp, Homo sapien
cataggtgaacacacaggtcatgat

SEQ ID NO: 5580021 - DNA, 25 bp, Homo sapien
actgattcaattatggatgtgtgca

SEQ ID NO: 5580022 - DNA, 25 bp, Homo sapien
ggggcgatacagaaatgtgtcgttc

SEQ ID NO: 5580023 - DNA, 25 bp, Homo sapien
ctgcggccgtaacagttaaacagac

SEQ ID NO: 5580024 - DNA, 25 bp, Homo sapien
cggtgagtcattgttaattgtcggc

SEQ ID NO: 5580025 - DNA, 25 bp, Homo sapien
caaagaatctgctgctcggtgagtc

SEQ ID NO: 5580026 - DNA, 25 bp, Homo sapien
tcatgtgcgtagagctcttcacggg

SEQ ID NO: 5580027 - DNA, 25 bp, Homo sapien
gctgcgctcagccccgctttcgcta

SEQ ID NO: 5580028 - DNA, 25 bp, Homo sapien
tattggcaatttatcgtgtttcgac

SEQ ID NO: 5580029 - DNA, 25 bp, Homo sapien
tatggatgtgtgcaaagaatctgct

SEQ ID NO: 5580030 - DNA, 25 bp, Homo sapien
aaagcgttaacgacctgcaatttgc

SEQ ID NO: 5580031 - DNA, 25 bp, Homo sapien
acggggaacattcatgtgcgtagag

SEQ ID NO: 5580032 - DNA, 25 bp, Homo sapien
caaatgggagagaaacaatactcaa

SEQ ID NO: 5580033 - DNA, 25 bp, Homo sapien
taaggggtaacaagttatctgaatg

SEQ ID NO: 5580034 - DNA, 25 bp, Homo sapien
ggtacgaccctctagaaaataatca

SEQ ID NO: 5580035 - DNA, 25 bp, Homo sapien
ctgggcagtctgtttcagtaataac

SEQ ID NO: 5580036 - DNA, 25 bp, Homo sapien
aacataaagcaagaatcgaatcctc

SEQ ID NO: 5580037 - DNA, 25 bp, Homo sapien
cttagatgataagccatagagaaac

SEQ ID NO: 5580038 - DNA, 25 bp, Homo sapien
caagcagccttttgttaaggggtaa

SEQ ID NO: 5580039 - DNA, 25 bp, Homo sapien
caggcaagctcatgaaccaccgaat

SEQ ID NO: 5580040 - DNA, 25 bp, Homo sapien
tctctagagaagattactgggcagt

SEQ ID NO: 5580041 - DNA, 25 bp, Homo sapien
agagaaacaaataccaggcaagctc

SEQ ID NO: 5580042 - DNA, 25 bp, Homo sapien
cacagcttaataaagggtacgaccc

SEQ ID NO: 5580043 - DNA, 25 bp, Homo sapien
gggacggttgagtaagtatctaatc

SEQ ID NO: 5580044 - DNA, 25 bp, Homo sapien
ggtggttccacagccagcagaaaat

SEQ ID NO: 5580045 - DNA, 25 bp, Homo sapien
tcagatgtttctgggacggttgagt

SEQ ID NO: 5580046 - DNA, 25 bp, Homo sapien
ttggttagaaagtgcagaatcagat

SEQ ID NO: 5580047 - DNA, 25 bp, Homo sapien
cttcagtaatgagcagaaagcttcc

SEQ ID NO: 5580048 - DNA, 25 bp, Homo sapien
ctgtgcagcattcaccaggtggttc

SEQ ID NO: 5580049 - DNA, 25 bp, Homo sapien
tattggtatggtgccttgagttttc

SEQ ID NO: 5580050 - DNA, 25 bp, Homo sapien
gaggcctgccacaccaaacattcat

SEQ ID NO: 5580051 - DNA, 25 bp, Homo sapien
tgcaaagtgaccaatccagctgtcc

SEQ ID NO: 5580052 - DNA, 25 bp, Homo sapien
agctacttttctcaggaggcctgcc

SEQ ID NO: 5580053 - DNA, 25 bp, Homo sapien
tagtggaagtcgcaaaaataatttg

SEQ ID NO: 5580054 - DNA, 25 bp, Homo sapien
ttcacatttagaaaaggtgcttttg

SEQ ID NO: 5580055 - DNA, 25 bp, Homo sapien
gacaccactccctggcttacaaggt

SEQ ID NO: 5580056 - DNA, 25 bp, Homo sapien
gtgaaggaacatgtctaaggctaca

SEQ ID NO: 5580057 - DNA, 25 bp, Homo sapien
gtaatctatgtattggacatgagaa

SEQ ID NO: 5580058 - DNA, 25 bp, Homo sapien
ggtggagtctggatttgaactcagg

SEQ ID NO: 5580059 - DNA, 25 bp, Homo sapien
gcttttgctacagtacaggtgacac

SEQ ID NO: 5580060 - DNA, 25 bp, Homo sapien
tttagaaaaggtgcttttgctacag

SEQ ID NO: 5580061 - DNA, 25 bp, Homo sapien
tctcttcaagccatacttcacattt

SEQ ID NO: 5580062 - DNA, 25 bp, Homo sapien
aaggctacatagccagtcagtggtg

SEQ ID NO: 5580063 - DNA, 25 bp, Homo sapien
tgctacagtacaggtgacaccactc

SEQ ID NO: 5580064 - DNA, 25 bp, Homo sapien
atgtattggacatgagaaaatggac

SEQ ID NO: 5580065 - DNA, 25 bp, Homo sapien
ttgcttcatccctaacacagccatc

SEQ ID NO: 5580066 - DNA, 25 bp, Homo sapien
ctcctccctgtcaccacgcacggcc

SEQ ID NO: 5580067 - DNA, 25 bp, Homo sapien
atgcctcctccctgtcaccacgcac

SEQ ID NO: 5580068 - DNA, 25 bp, Homo sapien
atccacccccatccttgcttcatcc

SEQ ID NO: 5580069 - DNA, 25 bp, Homo sapien
tcagctcctcgcacctctggcccag

SEQ ID NO: 5580070 - DNA, 25 bp, Homo sapien
ggcccagcttggtcaatccaccccc

SEQ ID NO: 5580071 - DNA, 25 bp, Homo sapien
ggctcgcagatcagctcctcgcacc

SEQ ID NO: 5580072 - DNA, 25 bp, Homo sapien
gccactccgccaggactcacaggca

SEQ ID NO: 5580073 - DNA, 25 bp, Homo sapien
atccctaacacagccatcttccatc

SEQ ID NO: 5580074 - DNA, 25 bp, Homo sapien
tcgcagatcagctcctcgcacctct

SEQ ID NO: 5580075 - DNA, 25 bp, Homo sapien
agatcagctcctcgcacctctggcc

SEQ ID NO: 5580076 - DNA, 25 bp, Homo sapien
caaagattattgagcagtcagtgtg

SEQ ID NO: 5580077 - DNA, 25 bp, Homo sapien
aagagttgataatagcatgtagcac

SEQ ID NO: 5580078 - DNA, 25 bp, Homo sapien
catgatgctgtgcccaagagttgat

SEQ ID NO: 5580079 - DNA, 25 bp, Homo sapien
ggcacgggctctgtcctgaaagagc

SEQ ID NO: 5580080 - DNA, 25 bp, Homo sapien
aaattctggcaagtttggatattta

SEQ ID NO: 5580081 - DNA, 25 bp, Homo sapien
ttctaaaggaagaggcaattcacaa

SEQ ID NO: 5580082 - DNA, 25 bp, Homo sapien
gtgtgagtctgacactgagccagag

SEQ ID NO: 5580083 - DNA, 25 bp, Homo sapien
ggaagcaaattcatgggattaaacc

SEQ ID NO: 5580084 - DNA, 25 bp, Homo sapien
gagcatagcttctaaaggaagaggc

SEQ ID NO: 5580085 - DNA, 25 bp, Homo sapien
acgcccggctgatagctcttcactt

SEQ ID NO: 5580086 - DNA, 25 bp, Homo sapien
atagcatgtagcacactgcatttgc

SEQ ID NO: 5580087 - DNA, 25 bp, Homo sapien
tctgagttagacctctcctggggcc

SEQ ID NO: 5580088 - DNA, 25 bp, Homo sapien
ctgttaatttctctccgggttgctc

SEQ ID NO: 5580089 - DNA, 25 bp, Homo sapien
aaaccttgtcttatcagtagtcttc

SEQ ID NO: 5580090 - DNA, 25 bp, Homo sapien
cctctcctggggccagtatgttcta

SEQ ID NO: 5580091 - DNA, 25 bp, Homo sapien
ataaagcaaataaaatctatggtgc

SEQ ID NO: 5580092 - DNA, 25 bp, Homo sapien
tctccgggttgctcctcccagattc

SEQ ID NO: 5580093 - DNA, 25 bp, Homo sapien
aatctatggtgcaatttgatgtctt

SEQ ID NO: 5580094 - DNA, 25 bp, Homo sapien
ttaggcactaagagcagtctgtaac

SEQ ID NO: 5580095 - DNA, 25 bp, Homo sapien
actaccagaacttcaggtcaacttg

SEQ ID NO: 5580096 - DNA, 25 bp, Homo sapien
gcattaagtaattacaggaaagtca

SEQ ID NO: 5580097 - DNA, 25 bp, Homo sapien
caggaaagtcatatgttgcgttata

SEQ ID NO: 5580098 - DNA, 25 bp, Homo sapien
caactgctaagcatggaactgtctc

SEQ ID NO: 5580099 - DNA, 25 bp, Homo sapien
tgggcactcagataatacataattg

SEQ ID NO: 5580100 - DNA, 25 bp, Homo sapien
taaccagtgagtctagatttgctaa

SEQ ID NO: 5580101 - DNA, 25 bp, Homo sapien
gccctgggtctcagcaaaacacaac

SEQ ID NO: 5580102 - DNA, 25 bp, Homo sapien
agcttgctgaaatgtcccttagtcc

SEQ ID NO: 5580103 - DNA, 25 bp, Homo sapien
aaacccactgccaaaatgggcactc

SEQ ID NO: 5580104 - DNA, 25 bp, Homo sapien
caaggcatactttaaccagtgagtc

SEQ ID NO: 5580105 - DNA, 25 bp, Homo sapien
aagggttagagcccagcttgctgaa

SEQ ID NO: 5580106 - DNA, 25 bp, Homo sapien
ttaatctgtacagcagccctgggtc

SEQ ID NO: 5580107 - DNA, 25 bp, Homo sapien
aaaacacaactagaaacccactgcc

SEQ ID NO: 5580108 - DNA, 25 bp, Homo sapien
aactaatagttaaaccaaggcatac

SEQ ID NO: 5580109 - DNA, 25 bp, Homo sapien
tctagaaatggaactgcttgcttaa

SEQ ID NO: 5580110 - DNA, 25 bp, Homo sapien
taaacagagcaatagatgctgacgc

SEQ ID NO: 5580111 - DNA, 25 bp, Homo sapien
agccgtgtcccctggctcctgagtc

SEQ ID NO: 5580112 - DNA, 25 bp, Homo sapien
agatgctgacgcagccatcggaatg

SEQ ID NO: 5580113 - DNA, 25 bp, Homo sapien
cacggccagtgtgttcacagagcta

SEQ ID NO: 5580114 - DNA, 25 bp, Homo sapien
ttcacagagctagaattggagccgt

SEQ ID NO: 5580115 - DNA, 25 bp, Homo sapien
gcagccatcggaatgggttgaattt

SEQ ID NO: 5580116 - DNA, 25 bp, Homo sapien
ttactgcctcatgcatggggtcggc

SEQ ID NO: 5580117 - DNA, 25 bp, Homo sapien
atttaataacgccaagatgctgctc

SEQ ID NO: 5580118 - DNA, 25 bp, Homo sapien
gtcggcaaactgtagcccacaggat

SEQ ID NO: 5580119 - DNA, 25 bp, Homo sapien
aacaccgatgtgccccctctagatt

SEQ ID NO: 5580120 - DNA, 25 bp, Homo sapien
atcccacaataccccgcgagggagg

SEQ ID NO: 5580121 - DNA, 25 bp, Homo sapien
gtgccctcagcccttctcttgggcc

SEQ ID NO: 5580122 - DNA, 25 bp, Homo sapien
tgcttcgggccttgctgtcccgcgg

SEQ ID NO: 5580123 - DNA, 25 bp, Homo sapien
cctcccagagctcagacatcccgga

SEQ ID NO: 5580124 - DNA, 25 bp, Homo sapien
tctggaccacaactcccaggcgcca

SEQ ID NO: 5580125 - DNA, 25 bp, Homo sapien
gtcgccagtgactcgtgatcccaca

SEQ ID NO: 5580126 - DNA, 25 bp, Homo sapien
cagtttgggtcattcgggcctctga

SEQ ID NO: 5580127 - DNA, 25 bp, Homo sapien
tcgggcctctgagtagagttacttc

SEQ ID NO: 5580128 - DNA, 25 bp, Homo sapien
tcccagagcccagtttgggtcattc

SEQ ID NO: 5580129 - DNA, 25 bp, Homo sapien
gtcctgacccaccgtcgccagtgac

SEQ ID NO: 5580130 - DNA, 25 bp, Homo sapien
ggaagtgtagtcctgacccaccgtc

SEQ ID NO: 5580131 - DNA, 25 bp, Homo sapien
caggacgggtcgcaccggcggtctc

SEQ ID NO: 5580132 - DNA, 25 bp, Homo sapien
gagaccgccggtgcgacccgtcctg

SEQ ID NO: 5580133 - DNA, 25 bp, Homo sapien
ttctgaacagaatgatgataaagca

SEQ ID NO: 5580134 - DNA, 25 bp, Homo sapien
aagctacagtcaccaaaagcaatgc

SEQ ID NO: 5580135 - DNA, 25 bp, Homo sapien
agaatgatgataaagcaattactcc

SEQ ID NO: 5580136 - DNA, 25 bp, Homo sapien
gcatatgacccaactgactgaattc

SEQ ID NO: 5580137 - DNA, 25 bp, Homo sapien
tgccacaaatacccatgtagggctt

SEQ ID NO: 5580138 - DNA, 25 bp, Homo sapien
caagaaacataaagtaccctagaaa

SEQ ID NO: 5580139 - DNA, 25 bp, Homo sapien
gcaaaatcagaatccatatatcttc

SEQ ID NO: 5580140 - DNA, 25 bp, Homo sapien
tataaaaatggcatatgacccaact

SEQ ID NO: 5580141 - DNA, 25 bp, Homo sapien
tggtagaaatacagtttttacaaca

SEQ ID NO: 5580142 - DNA, 25 bp, Homo sapien
agcaatgcaattacttctgaacaga

SEQ ID NO: 5580143 - DNA, 25 bp, Homo sapien
ttctaaatgtaagctacagtcacca

SEQ ID NO: 5580144 - DNA, 25 bp, Homo sapien
ggtcatacaagatttgctcacacac

SEQ ID NO: 5580145 - DNA, 25 bp, Homo sapien
ctctgaacagtaatttgaatgtagc

SEQ ID NO: 5580146 - DNA, 25 bp, Homo sapien
agtgggaaactctaccagagctgac

SEQ ID NO: 5580147 - DNA, 25 bp, Homo sapien
ctaccagagctgacaaacttgagtg

SEQ ID NO: 5580148 - DNA, 25 bp, Homo sapien
aacacctctggctataagacacttt

SEQ ID NO: 5580149 - DNA, 25 bp, Homo sapien
tgttgaaactcatgcaggaaaaata

SEQ ID NO: 5580150 - DNA, 25 bp, Homo sapien
gagtgtctttaggctctgaacagta

SEQ ID NO: 5580151 - DNA, 25 bp, Homo sapien
tttacaacagaataagtcccttaga

SEQ ID NO: 5580152 - DNA, 25 bp, Homo sapien
ataaagtacagtaaggcatagaata

SEQ ID NO: 5580153 - DNA, 25 bp, Homo sapien
acaagaactccaggtcatacaagat

SEQ ID NO: 5580154 - DNA, 25 bp, Homo sapien
attattgccagtgggaaactctacc

SEQ ID NO: 5580155 - DNA, 25 bp, Homo sapien
ccaaagagagttaattagtgaagta

SEQ ID NO: 5580156 - DNA, 25 bp, Homo sapien
caagcatagctgaactaacactctt

SEQ ID NO: 5580157 - DNA, 25 bp, Homo sapien
ccgttaagaaaatcaaactacaatg

SEQ ID NO: 5580158 - DNA, 25 bp, Homo sapien
tcctcaagcatagctgaactaacac

SEQ ID NO: 5580159 - DNA, 25 bp, Homo sapien
accacgaggacctcatggtaacggg

SEQ ID NO: 5580160 - DNA, 25 bp, Homo sapien
taattagtgaagtaccacgaggacc

SEQ ID NO: 5580161 - DNA, 25 bp, Homo sapien
cagaagagtttaatttcaaaggccc

SEQ ID NO: 5580162 - DNA, 25 bp, Homo sapien
tattcatttaaacacccccacacac

SEQ ID NO: 5580163 - DNA, 25 bp, Homo sapien
ttacaacaacctttcctactagtga

SEQ ID NO: 5580164 - DNA, 25 bp, Homo sapien
aaaatcaaactacaatggaacttct

SEQ ID NO: 5580165 - DNA, 25 bp, Homo sapien
agagagttaattagtgaagtaccac

SEQ ID NO: 5580166 - DNA, 25 bp, Homo sapien
atcgccagcaactgcccactccggc

SEQ ID NO: 5580167 - DNA, 25 bp, Homo sapien
gctggcattcattaagccgggaagc

SEQ ID NO: 5580168 - DNA, 25 bp, Homo sapien
ggtggatgcggccaagttttctcag

SEQ ID NO: 5580169 - DNA, 25 bp, Homo sapien
ggcattcattaagccgggaagcggc

SEQ ID NO: 5580170 - DNA, 25 bp, Homo sapien
gccagcaactgcccactccggcttc

SEQ ID NO: 5580171 - DNA, 25 bp, Homo sapien
tggcaggagcaatgattaaatggct

SEQ ID NO: 5580172 - DNA, 25 bp, Homo sapien
atggctggcattcattaagccggga

SEQ ID NO: 5580173 - DNA, 25 bp, Homo sapien
ctgcccactccggcttccgagaggc

SEQ ID NO: 5580174 - DNA, 25 bp, Homo sapien
ggatgcggccaagttttctcagaat

SEQ ID NO: 5580175 - DNA, 25 bp, Homo sapien
ttctcagaatcgccagcaactgccc

SEQ ID NO: 5580176 - DNA, 25 bp, Homo sapien
ggagcaatgattaaatggctggcat

SEQ ID NO: 5580177 - DNA, 25 bp, Homo sapien
tgaagcagactgcatgaaagtacct

SEQ ID NO: 5580178 - DNA, 25 bp, Homo sapien
tgcatgaaagtacctgcgtcaggat

SEQ ID NO: 5580179 - DNA, 25 bp, Homo sapien
ttctaactggcaggaatcttatgca

SEQ ID NO: 5580180 - DNA, 25 bp, Homo sapien
ctttatgttgggaacattgcaattc

SEQ ID NO: 5580181 - DNA, 25 bp, Homo sapien
gcgtcaggattttgcacataaacag

SEQ ID NO: 5580182 - DNA, 25 bp, Homo sapien
ctttggaaatactttggaatcaacg

SEQ ID NO: 5580183 - DNA, 25 bp, Homo sapien
tgaagatttaaatgaagcagactgc

SEQ ID NO: 5580184 - DNA, 25 bp, Homo sapien
gatacatgtgtgtgatatacaatga

SEQ ID NO: 5580185 - DNA, 25 bp, Homo sapien
tgggaacattgcaattcttctcttc

SEQ ID NO: 5580186 - DNA, 25 bp, Homo sapien
gtgatactttgatacatgtgtgtga

SEQ ID NO: 5580187 - DNA, 25 bp, Homo sapien
tggaatcaacgaatgaatgtacgaa

SEQ ID NO: 5580188 - DNA, 25 bp, Homo sapien
gggacagcgtttgaggtccgttctg

SEQ ID NO: 5580189 - DNA, 25 bp, Homo sapien
atacaaccacacacaggagtttctg

SEQ ID NO: 5580190 - DNA, 25 bp, Homo sapien
gggatggctgtcatgacggctttaa

SEQ ID NO: 5580191 - DNA, 25 bp, Homo sapien
gctactgcagcagtgcttggaaccg

SEQ ID NO: 5580192 - DNA, 25 bp, Homo sapien
acctttgctgaatgagtgcacgatt

SEQ ID NO: 5580193 - DNA, 25 bp, Homo sapien
tggaaccgtgtctccacacagcagg

SEQ ID NO: 5580194 - DNA, 25 bp, Homo sapien
tcccaagggccgatttccagggata

SEQ ID NO: 5580195 - DNA, 25 bp, Homo sapien
gaaggagcctccatggcccgtaaat

SEQ ID NO: 5580196 - DNA, 25 bp, Homo sapien
ccagttacacatccacaaggcagag

SEQ ID NO: 5580197 - DNA, 25 bp, Homo sapien
gagagtactgtgtcacgcaccggat

SEQ ID NO: 5580198 - DNA, 25 bp, Homo sapien
aggagtttctggtacatcacgtgcc

SEQ ID NO: 5580199 - DNA, 25 bp, Homo sapien
ttttctggagaaagtggcacttgaa

SEQ ID NO: 5580200 - DNA, 25 bp, Homo sapien
gataaaggagaaattactaagcagt

SEQ ID NO: 5580201 - DNA, 25 bp, Homo sapien
aatgagaggcaagctgtgctcttaa

SEQ ID NO: 5580202 - DNA, 25 bp, Homo sapien
tgagcagagtaactagagatgaaaa

SEQ ID NO: 5580203 - DNA, 25 bp, Homo sapien
agggtgtagagagtactaaatacca

SEQ ID NO: 5580204 - DNA, 25 bp, Homo sapien
attttggacttgttggtaggcagca

SEQ ID NO: 5580205 - DNA, 25 bp, Homo sapien
tgtgacaggtcatagctagagacaa

SEQ ID NO: 5580206 - DNA, 25 bp, Homo sapien
tgtacaagtagaaaatgaagtgacc

SEQ ID NO: 5580207 - DNA, 25 bp, Homo sapien
tctcaggggtttgaaaggtaaatga

SEQ ID NO: 5580208 - DNA, 25 bp, Homo sapien
aagtgacccacattggtggagggca

SEQ ID NO: 5580209 - DNA, 25 bp, Homo sapien
aggagaagaatcatagatgtacaag

SEQ ID NO: 5580210 - DNA, 25 bp, Homo sapien
ggggttggcactgcatgatatcctg

SEQ ID NO: 5580211 - DNA, 25 bp, Homo sapien
ttgtttgtgcatagaggtaacttac

SEQ ID NO: 5580212 - DNA, 25 bp, Homo sapien
tcaagttgaaagagaaacagttgtg

SEQ ID NO: 5580213 - DNA, 25 bp, Homo sapien
agttgtgttgggattaaaagcctta

SEQ ID NO: 5580214 - DNA, 25 bp, Homo sapien
ggagtccaacacgtgcagcttcaag

SEQ ID NO: 5580215 - DNA, 25 bp, Homo sapien
tacattatcccccagctgagaagct

SEQ ID NO: 5580216 - DNA, 25 bp, Homo sapien
ctgacagagatacacttgtttgtgc

SEQ ID NO: 5580217 - DNA, 25 bp, Homo sapien
ctagatattacagagttgaaaactc

SEQ ID NO: 5580218 - DNA, 25 bp, Homo sapien
agaaagcccttactgaagatgaaac

SEQ ID NO: 5580219 - DNA, 25 bp, Homo sapien
ctctgcagtatgtttgttctggaac

SEQ ID NO: 5580220 - DNA, 25 bp, Homo sapien
aagtctcttgcccgggtttggattc

SEQ ID NO: 5580221 - DNA, 25 bp, Homo sapien
gcgtaccctgaatgtatgcgatgtc

SEQ ID NO: 5580222 - DNA, 25 bp, Homo sapien
tccctcctcagctctacccaccctc

SEQ ID NO: 5580223 - DNA, 25 bp, Homo sapien
tgcgatgtccccaacagtgacctgc

SEQ ID NO: 5580224 - DNA, 25 bp, Homo sapien
agctctacccaccctcgcacgccct

SEQ ID NO: 5580225 - DNA, 25 bp, Homo sapien
atagagagatcctgcgtaccctgaa

SEQ ID NO: 5580226 - DNA, 25 bp, Homo sapien
ttgagtgcggttgttagaaataata

SEQ ID NO: 5580227 - DNA, 25 bp, Homo sapien
cctgaatgtatgcgatgtccccaac

SEQ ID NO: 5580228 - DNA, 25 bp, Homo sapien
caacagtgacctgctgtgtacacac

SEQ ID NO: 5580229 - DNA, 25 bp, Homo sapien
tgtacacacagtgccacgccatggc

SEQ ID NO: 5580230 - DNA, 25 bp, Homo sapien
agaaataatatagagagatcctgcg

SEQ ID NO: 5580231 - DNA, 25 bp, Homo sapien
cctcgcacgccctgtgtgcaggttt

SEQ ID NO: 5580232 - DNA, 25 bp, Homo sapien
gatgactgagtgctttacgctgtgc

SEQ ID NO: 5580233 - DNA, 25 bp, Homo sapien
agtgactggctatctgctggttgtt

SEQ ID NO: 5580234 - DNA, 25 bp, Homo sapien
ctgtacaagagaaaacagatgtctg

SEQ ID NO: 5580235 - DNA, 25 bp, Homo sapien
ttctttcggatgatgactgagtgct

SEQ ID NO: 5580236 - DNA, 25 bp, Homo sapien
tcacgtgaacgttagtagctgttta

SEQ ID NO: 5580237 - DNA, 25 bp, Homo sapien
tacgctgtgcaggacttccgatcct

SEQ ID NO: 5580238 - DNA, 25 bp, Homo sapien
ccttccatgcctagggacaaaggag

SEQ ID NO: 5580239 - DNA, 25 bp, Homo sapien
caaaggaggcctgttgaccctattt

SEQ ID NO: 5580240 - DNA, 25 bp, Homo sapien
acttgttatggaagcccttgaaccc

SEQ ID NO: 5580241 - DNA, 25 bp, Homo sapien
acggccaatgtgagatctagttttc

SEQ ID NO: 5580242 - DNA, 25 bp, Homo sapien
gaaccattccacacgcacggggagg

SEQ ID NO: 5580243 - DNA, 25 bp, Homo sapien
agcttctggaccccaatgcagtctc

SEQ ID NO: 5580244 - DNA, 25 bp, Homo sapien
acccataaggctgtgtctggatttc

SEQ ID NO: 5580245 - DNA, 25 bp, Homo sapien
ttgataacgccaaagacaaaaaaga

SEQ ID NO: 5580246 - DNA, 25 bp, Homo sapien
aatcccttagccagacgctgcactc

SEQ ID NO: 5580247 - DNA, 25 bp, Homo sapien
gtacctcatcaaaccacaaagtccc

SEQ ID NO: 5580248 - DNA, 25 bp, Homo sapien
ctcaatgaacatgtcactggctttc

SEQ ID NO: 5580249 - DNA, 25 bp, Homo sapien
ccccaaatgaaagactgccagttgc

SEQ ID NO: 5580250 - DNA, 25 bp, Homo sapien
taactgccacactgtagggtggacc

SEQ ID NO: 5580251 - DNA, 25 bp, Homo sapien
tctcacaacagactgacttgcattc

SEQ ID NO: 5580252 - DNA, 25 bp, Homo sapien
aacgtgtacccacagatgctgctcc

SEQ ID NO: 5580253 - DNA, 25 bp, Homo sapien
gtggacccagaactagcactcagct

SEQ ID NO: 5580254 - DNA, 25 bp, Homo sapien
tgcagcaggtctgccacagtgctgt

SEQ ID NO: 5580255 - DNA, 25 bp, Homo sapien
ggctgagctggtccctgacaccagc

SEQ ID NO: 5580256 - DNA, 25 bp, Homo sapien
gctccactgtctccagcacacgggt

SEQ ID NO: 5580257 - DNA, 25 bp, Homo sapien
tggtgatttattgcatgggctgggg

SEQ ID NO: 5580258 - DNA, 25 bp, Homo sapien
agctgtgcagcaggtctgccacagt

SEQ ID NO: 5580259 - DNA, 25 bp, Homo sapien
ggggtccctgtgcagggctctaatc

SEQ ID NO: 5580260 - DNA, 25 bp, Homo sapien
ccctgtgcagggctctaatcatagt

SEQ ID NO: 5580261 - DNA, 25 bp, Homo sapien
ctcactggtgatttattgcatgggc

SEQ ID NO: 5580262 - DNA, 25 bp, Homo sapien
agcaggtctgccacagtgctgtggc

SEQ ID NO: 5580263 - DNA, 25 bp, Homo sapien
cactgtctccagcacacgggtgatg

SEQ ID NO: 5580264 - DNA, 25 bp, Homo sapien
gaggccactgaaccagcccttcggg

SEQ ID NO: 5580265 - DNA, 25 bp, Homo sapien
attgagtaagtcttctttggtgctt

SEQ ID NO: 5580266 - DNA, 25 bp, Homo sapien
tgctgggactctgcaccataaggac

SEQ ID NO: 5580267 - DNA, 25 bp, Homo sapien
gggtggatatgtcatagcagtgtgc

SEQ ID NO: 5580268 - DNA, 25 bp, Homo sapien
ttattcaacagatacaaagacctct

SEQ ID NO: 5580269 - DNA, 25 bp, Homo sapien
gtgtgcggttcctgcctaaattgtc

SEQ ID NO: 5580270 - DNA, 25 bp, Homo sapien
atgtcatagcagtgtgcggttcctg

SEQ ID NO: 5580271 - DNA, 25 bp, Homo sapien
tggggccaccttgtagatgtgtcac

SEQ ID NO: 5580272 - DNA, 25 bp, Homo sapien
gcaccataaggacacattgagtaag

SEQ ID NO: 5580273 - DNA, 25 bp, Homo sapien
caaagacctctgcttgctgggactc

SEQ ID NO: 5580274 - DNA, 25 bp, Homo sapien
ggggtatgggacatcactcctcgag

SEQ ID NO: 5580275 - DNA, 25 bp, Homo sapien
gatgtgtcacctactaccagggaaa

SEQ ID NO: 5580276 - DNA, 25 bp, Homo sapien
tcttagcgctggtcagactacgtgg

SEQ ID NO: 5580277 - DNA, 25 bp, Homo sapien
gactacgtggagcgatacatgaatt

SEQ ID NO: 5580278 - DNA, 25 bp, Homo sapien
acctcgcctgagcttcgtgaacatc

SEQ ID NO: 5580279 - DNA, 25 bp, Homo sapien
acaaaatgctctgtggggaaatgaa

SEQ ID NO: 5580280 - DNA, 25 bp, Homo sapien
acatgaattcagatactacctcgcc

SEQ ID NO: 5580281 - DNA, 25 bp, Homo sapien
agcagtattgctggctaacagaatt

SEQ ID NO: 5580282 - DNA, 25 bp, Homo sapien
ttctccccaggaatctacggcggat

SEQ ID NO: 5580283 - DNA, 25 bp, Homo sapien
gggaaatgaaacttgtcagtgagcc

SEQ ID NO: 5580284 - DNA, 25 bp, Homo sapien
tgaacatctagcacagaaaccagta

SEQ ID NO: 5580285 - DNA, 25 bp, Homo sapien
tgcccaatgcattaggagctgtttt

SEQ ID NO: 5580286 - DNA, 25 bp, Homo sapien
tgaattcggggcattgtaatcatag

SEQ ID NO: 5580287 - DNA, 25 bp, Homo sapien
ggctccagagcgatagaacattctt

SEQ ID NO: 5580288 - DNA, 25 bp, Homo sapien
acagaatgtgaatggatgctagaca

SEQ ID NO: 5580289 - DNA, 25 bp, Homo sapien
tgagctgaagccatgctggctccag

SEQ ID NO: 5580290 - DNA, 25 bp, Homo sapien
ggaggctgaataacggcatcctact

SEQ ID NO: 5580291 - DNA, 25 bp, Homo sapien
tggaagcaaacctacagcatctgag

SEQ ID NO: 5580292 - DNA, 25 bp, Homo sapien
agtattccgaggaaacaagatgggt

SEQ ID NO: 5580293 - DNA, 25 bp, Homo sapien
ccaatttgcacaaaggacacaggac

SEQ ID NO: 5580294 - DNA, 25 bp, Homo sapien
aggcaatcactaagctcactggact

SEQ ID NO: 5580295 - DNA, 25 bp, Homo sapien
cgttaaaactgctctgggatctcac

SEQ ID NO: 5580296 - DNA, 25 bp, Homo sapien
ctgaggtatgcctgtccagtccctg

SEQ ID NO: 5580297 - DNA, 25 bp, Homo sapien
gggtttggcacctgagctgaagcca

SEQ ID NO: 5580298 - DNA, 25 bp, Homo sapien
atggtgcatcccaaaatggaatatt

SEQ ID NO: 5580299 - DNA, 25 bp, Homo sapien
cccaagatagtcaaaaagcaaatca

SEQ ID NO: 5580300 - DNA, 25 bp, Homo sapien
tcataaagatacatagggatttttc

SEQ ID NO: 5580301 - DNA, 25 bp, Homo sapien
tatgggtctgaacaaactatggtgc

SEQ ID NO: 5580302 - DNA, 25 bp, Homo sapien
gtatgcagagaagatttctggaagg

SEQ ID NO: 5580303 - DNA, 25 bp, Homo sapien
atggtcatccatatgggtctgaaca

SEQ ID NO: 5580304 - DNA, 25 bp, Homo sapien
aaatgagtaacagcagttgccctga

SEQ ID NO: 5580305 - DNA, 25 bp, Homo sapien
gagcaagactgagagttgaaatcaa

SEQ ID NO: 5580306 - DNA, 25 bp, Homo sapien
aagcaaatcaaaaagcaatgtggac

SEQ ID NO: 5580307 - DNA, 25 bp, Homo sapien
cattagtgtttgtatgcagagaaga

SEQ ID NO: 5580308 - DNA, 25 bp, Homo sapien
aagcaatgtggacagctctctcatt

SEQ ID NO: 5580309 - DNA, 25 bp, Homo sapien
tgttggaactggtattttgaaatga

SEQ ID NO: 5580310 - DNA, 25 bp, Homo sapien
agatggtccatagttggaagctgct

SEQ ID NO: 5580311 - DNA, 25 bp, Homo sapien
gcttgggtggccaagccaacaaacc

SEQ ID NO: 5580312 - DNA, 25 bp, Homo sapien
tttcaggtgtacacagaaatgtatt

SEQ ID NO: 5580313 - DNA, 25 bp, Homo sapien
gtgtttagaacatactagatggtcc

SEQ ID NO: 5580314 - DNA, 25 bp, Homo sapien
gataagaacaatctgcaaaggtgac

SEQ ID NO: 5580315 - DNA, 25 bp, Homo sapien
gatgggctgccaatttttcaggtgt

SEQ ID NO: 5580316 - DNA, 25 bp, Homo sapien
tgaaatcttctaaggatgggctgcc

SEQ ID NO: 5580317 - DNA, 25 bp, Homo sapien
taatctaaatgcatacttggccttc

SEQ ID NO: 5580318 - DNA, 25 bp, Homo sapien
ctggcctgaggctaactgaaatgtt

SEQ ID NO: 5580319 - DNA, 25 bp, Homo sapien
tctttagaacagtaagctggggaga

SEQ ID NO: 5580320 - DNA, 25 bp, Homo sapien
tgaggactggtgttccatttggcgg

SEQ ID NO: 5580321 - DNA, 25 bp, Homo sapien
tgctcttatggacacagcacagggc

SEQ ID NO: 5580322 - DNA, 25 bp, Homo sapien
gagaggaataggcacactttgtgga

SEQ ID NO: 5580323 - DNA, 25 bp, Homo sapien
catataggatggaatggtgctaatg

SEQ ID NO: 5580324 - DNA, 25 bp, Homo sapien
ttatttgcaggggcctctgaggaaa

SEQ ID NO: 5580325 - DNA, 25 bp, Homo sapien
aaatcatatagccaagcaaggtctc

SEQ ID NO: 5580326 - DNA, 25 bp, Homo sapien
agggaagatgacgttgaccctgact

SEQ ID NO: 5580327 - DNA, 25 bp, Homo sapien
atggtgctaatgggtttggttgctt

SEQ ID NO: 5580328 - DNA, 25 bp, Homo sapien
agcaaggtctcatataggatggaat

SEQ ID NO: 5580329 - DNA, 25 bp, Homo sapien
ccatttgtgtcctgagggaagatga

SEQ ID NO: 5580330 - DNA, 25 bp, Homo sapien
cacagcacagggcctttctggagaa

SEQ ID NO: 5580331 - DNA, 25 bp, Homo sapien
gtaaaaatgtaaagagccagtctag

SEQ ID NO: 5580332 - DNA, 25 bp, Homo sapien
tatggatacaatgttgagcagaaaa

SEQ ID NO: 5580333 - DNA, 25 bp, Homo sapien
gagcagaaaaggcaagatcataaaa

SEQ ID NO: 5580334 - DNA, 25 bp, Homo sapien
gtaaagagccagtctagtgatcacc

SEQ ID NO: 5580335 - DNA, 25 bp, Homo sapien
agtttagggatacatacaaaggtag

SEQ ID NO: 5580336 - DNA, 25 bp, Homo sapien
gatcacctttgggatacagggagag

SEQ ID NO: 5580337 - DNA, 25 bp, Homo sapien
ctgcagtgccagtagatcctatttc

SEQ ID NO: 5580338 - DNA, 25 bp, Homo sapien
aataacaaattacagctaccctctt

SEQ ID NO: 5580339 - DNA, 25 bp, Homo sapien
cccaaaaagaccacacgaaactata

SEQ ID NO: 5580340 - DNA, 25 bp, Homo sapien
actagatgatagctagactggtgtg

SEQ ID NO: 5580341 - DNA, 25 bp, Homo sapien
tgaaatccacagtaaggggaacttc

SEQ ID NO: 5580342 - DNA, 25 bp, Homo sapien
tcccctgcttggcctcaggtgcttc

SEQ ID NO: 5580343 - DNA, 25 bp, Homo sapien
tgtaaacatattgacggtgagcatt

SEQ ID NO: 5580344 - DNA, 25 bp, Homo sapien
tcagctagaacaaggccctttccca

SEQ ID NO: 5580345 - DNA, 25 bp, Homo sapien
tgatgacggaattcaagttggtggt

SEQ ID NO: 5580346 - DNA, 25 bp, Homo sapien
cagctccgtctatccatgtgggcaa

SEQ ID NO: 5580347 - DNA, 25 bp, Homo sapien
ctgtccaaacaagtgcgtaagtctg

SEQ ID NO: 5580348 - DNA, 25 bp, Homo sapien
gcccgcactccgatccctggcagtc

SEQ ID NO: 5580349 - DNA, 25 bp, Homo sapien
ggtgagcattgatgacggaattcaa

SEQ ID NO: 5580350 - DNA, 25 bp, Homo sapien
aggtgcttcactgggaatcttggtt

SEQ ID NO: 5580351 - DNA, 25 bp, Homo sapien
tcctgcacctgttgcgggaaaagtt

SEQ ID NO: 5580352 - DNA, 25 bp, Homo sapien
gtctgtgatgactgcaatgtgagcg

SEQ ID NO: 5580353 - DNA, 25 bp, Homo sapien
gactcgaagtactctgaggcttgga

SEQ ID NO: 5580354 - DNA, 25 bp, Homo sapien
gatgtttggatgtaaagggaaatat

SEQ ID NO: 5580355 - DNA, 25 bp, Homo sapien
tcgaagtactctgaggcttggagga

SEQ ID NO: 5580356 - DNA, 25 bp, Homo sapien
tgtttggatgtaaagggaaatatta

SEQ ID NO: 5580357 - DNA, 25 bp, Homo sapien
ctggggctacaaaaaatgttgagcc

SEQ ID NO: 5580358 - DNA, 25 bp, Homo sapien
ccaaagggatgtttggatgtaaagg

SEQ ID NO: 5580359 - DNA, 25 bp, Homo sapien
ggatgtttggatgtaaagggaaata

SEQ ID NO: 5580360 - DNA, 25 bp, Homo sapien
ctcgaagtactctgaggcttggagg

SEQ ID NO: 5580361 - DNA, 25 bp, Homo sapien
agcctggggctacaaaaaatgttga

SEQ ID NO: 5580362 - DNA, 25 bp, Homo sapien
ggagactcgaagtactctgaggctt

SEQ ID NO: 5580363 - DNA, 25 bp, Homo sapien
tggatgtaaagggaaatattagttg

SEQ ID NO: 5580364 - DNA, 25 bp, Homo sapien
tgatctttggggaggtgcctccaat

SEQ ID NO: 5580365 - DNA, 25 bp, Homo sapien
actctgccctgaaggtaaaagtgat

SEQ ID NO: 5580366 - DNA, 25 bp, Homo sapien
ttggtggagcataacttttgatctt

SEQ ID NO: 5580367 - DNA, 25 bp, Homo sapien
atactctcaggcctaactctgccct

SEQ ID NO: 5580368 - DNA, 25 bp, Homo sapien
ggggaggtgcctccaattcagaccc

SEQ ID NO: 5580369 - DNA, 25 bp, Homo sapien
tgaaagattttggcagatctctgct

SEQ ID NO: 5580370 - DNA, 25 bp, Homo sapien
gctaatgcccttttagatcacggcc

SEQ ID NO: 5580371 - DNA, 25 bp, Homo sapien
gtgtatactaaccatcagctaatgc

SEQ ID NO: 5580372 - DNA, 25 bp, Homo sapien
cagtgtctctgtgttggtggagcat

SEQ ID NO: 5580373 - DNA, 25 bp, Homo sapien
ggcagatctctgctcaccaccaggg

SEQ ID NO: 5580374 - DNA, 25 bp, Homo sapien
agatcacggccaaaatgggtctttt

SEQ ID NO: 5580375 - DNA, 25 bp, Homo sapien
ttctgctatttgggcactggggaga

SEQ ID NO: 5580376 - DNA, 25 bp, Homo sapien
agttggatatcttacatggtgctgt

SEQ ID NO: 5580377 - DNA, 25 bp, Homo sapien
agtccctgggaccctctgctcccct

SEQ ID NO: 5580378 - DNA, 25 bp, Homo sapien
ctggggagaaaagctcatctctgtt

SEQ ID NO: 5580379 - DNA, 25 bp, Homo sapien
taaattccttggcaggagagccagg

SEQ ID NO: 5580380 - DNA, 25 bp, Homo sapien
ccaggtggcttggttagactcttca

SEQ ID NO: 5580381 - DNA, 25 bp, Homo sapien
tgtctcagtcacatgcctggcaggc

SEQ ID NO: 5580382 - DNA, 25 bp, Homo sapien
ggtgctgtgacaaggaaatgtaaat

SEQ ID NO: 5580383 - DNA, 25 bp, Homo sapien
tcacatgcctggcaggctggtgctg

SEQ ID NO: 5580384 - DNA, 25 bp, Homo sapien
ggtagtttcagagtagttggatatc

SEQ ID NO: 5580385 - DNA, 25 bp, Homo sapien
ttcacagtgtggtagtttcagagta

SEQ ID NO: 5580386 - DNA, 25 bp, Homo sapien
gggccctcaggcaaactgccagtac

SEQ ID NO: 5580387 - DNA, 25 bp, Homo sapien
ttaagcatcactatatcttggtcaa

SEQ ID NO: 5580388 - DNA, 25 bp, Homo sapien
tcctcgcttcatatccacgctggtg

SEQ ID NO: 5580389 - DNA, 25 bp, Homo sapien
gagtctatatgagtctacggctgta

SEQ ID NO: 5580390 - DNA, 25 bp, Homo sapien
tatctattggtctacataatgattt

SEQ ID NO: 5580391 - DNA, 25 bp, Homo sapien
ttggcagtcagagtctatatgagtc

SEQ ID NO: 5580392 - DNA, 25 bp, Homo sapien
catatccacgctggtgagagttagg

SEQ ID NO: 5580393 - DNA, 25 bp, Homo sapien
ggtgctttagattggcagtcagagt

SEQ ID NO: 5580394 - DNA, 25 bp, Homo sapien
ctctaggtgctttagattggcagtc

SEQ ID NO: 5580395 - DNA, 25 bp, Homo sapien
gtctacggctgtaattaaaaaatga

SEQ ID NO: 5580396 - DNA, 25 bp, Homo sapien
tgtgagctcaggttttcctcgcttc

SEQ ID NO: 5580397 - DNA, 25 bp, Homo sapien
tgcattctatggctcaggatattcc

SEQ ID NO: 5580398 - DNA, 25 bp, Homo sapien
aatgagatagcatcgataaagcctt

SEQ ID NO: 5580399 - DNA, 25 bp, Homo sapien
atacaggtacaaactctgaagagtt

SEQ ID NO: 5580400 - DNA, 25 bp, Homo sapien
tggcaggcatgtaaatattagcgtc

SEQ ID NO: 5580401 - DNA, 25 bp, Homo sapien
tttggctccagaaggcactcaatca

SEQ ID NO: 5580402 - DNA, 25 bp, Homo sapien
tattagcgtcgccactcctgtcccc

SEQ ID NO: 5580403 - DNA, 25 bp, Homo sapien
agacactaacaagccgttgggagaa

SEQ ID NO: 5580404 - DNA, 25 bp, Homo sapien
ccaagtcactggatcagtaaggggc

SEQ ID NO: 5580405 - DNA, 25 bp, Homo sapien
ggaaagaaggtctctcgtgatgtgc

SEQ ID NO: 5580406 - DNA, 25 bp, Homo sapien
tgtcccccatgcatggcgctgtgtg

SEQ ID NO: 5580407 - DNA, 25 bp, Homo sapien
ccctgggctttctgtctcaccgcac

SEQ ID NO: 5580408 - DNA, 25 bp, Homo sapien
tacaactgacttggagacgcatgca

SEQ ID NO: 5580409 - DNA, 25 bp, Homo sapien
tttgctaagtattagtggagaaatg

SEQ ID NO: 5580410 - DNA, 25 bp, Homo sapien
ttcggatttgtgactgaacagcaat

SEQ ID NO: 5580411 - DNA, 25 bp, Homo sapien
acaatggttagaaacaaaagcttac

SEQ ID NO: 5580412 - DNA, 25 bp, Homo sapien
caagatagcatctgagtgcccaaac

SEQ ID NO: 5580413 - DNA, 25 bp, Homo sapien
gaaatgaggcaatataaagatgaca

SEQ ID NO: 5580414 - DNA, 25 bp, Homo sapien
agtgcccaaacatctaagggaaaac

SEQ ID NO: 5580415 - DNA, 25 bp, Homo sapien
gaacagcaatgttgtgtgtgtgcac

SEQ ID NO: 5580416 - DNA, 25 bp, Homo sapien
atattaagttgttcggatttgtgac

SEQ ID NO: 5580417 - DNA, 25 bp, Homo sapien
tactaatcctgggtcagcacagcct

SEQ ID NO: 5580418 - DNA, 25 bp, Homo sapien
tgtgtgtgtgcaccaagatagcatc

SEQ ID NO: 5580419 - DNA, 25 bp, Homo sapien
tcacattatgaaagcaaaaaattct

SEQ ID NO: 5580420 - DNA, 25 bp, Homo sapien
cacacaccataacattcacccatct

SEQ ID NO: 5580421 - DNA, 25 bp, Homo sapien
tgaaatgtgtacatacagacctttc

SEQ ID NO: 5580422 - DNA, 25 bp, Homo sapien
gtagagactagagaagaacaactag

SEQ ID NO: 5580423 - DNA, 25 bp, Homo sapien
aataagtgcattatggtttgattcc

SEQ ID NO: 5580424 - DNA, 25 bp, Homo sapien
tatctcacgtgctggcagtgcaaag

SEQ ID NO: 5580425 - DNA, 25 bp, Homo sapien
catctaaagtgggtgaattaaacca

SEQ ID NO: 5580426 - DNA, 25 bp, Homo sapien
aaaagttagtatctcacgtgctggc

SEQ ID NO: 5580427 - DNA, 25 bp, Homo sapien
ctaataacgtagagactagagaaga

SEQ ID NO: 5580428 - DNA, 25 bp, Homo sapien
tcctgaatcagtgcattccagctct

SEQ ID NO: 5580429 - DNA, 25 bp, Homo sapien
ttggtgtatttgaaactatctgaaa

SEQ ID NO: 5580430 - DNA, 25 bp, Homo sapien
gatgggagtagttagttaatggttc

SEQ ID NO: 5580431 - DNA, 25 bp, Homo sapien
atgagaatacgatgaaccaccgtcc

SEQ ID NO: 5580432 - DNA, 25 bp, Homo sapien
tctccctgatggcagaggtcattac

SEQ ID NO: 5580433 - DNA, 25 bp, Homo sapien
tcaagccatctcccagctgtgactc

SEQ ID NO: 5580434 - DNA, 25 bp, Homo sapien
agcagtcaagtcactaaaaatggtt

SEQ ID NO: 5580435 - DNA, 25 bp, Homo sapien
gagtatggccatataattgagaatc

SEQ ID NO: 5580436 - DNA, 25 bp, Homo sapien
tagtgtaggtagtgctttaaggaga

SEQ ID NO: 5580437 - DNA, 25 bp, Homo sapien
gtgactctgggcttgctgcactgta

SEQ ID NO: 5580438 - DNA, 25 bp, Homo sapien
agggcaaacatggagtatggccata

SEQ ID NO: 5580439 - DNA, 25 bp, Homo sapien
ggaatcctagatgacacaactgggc

SEQ ID NO: 5580440 - DNA, 25 bp, Homo sapien
gatgacacaactgggcatgagaata

SEQ ID NO: 5580441 - DNA, 25 bp, Homo sapien
ggggagagtgacacagtttgtctat

SEQ ID NO: 5580442 - DNA, 25 bp, Homo sapien
aaagagagtccacataggcaatcac

SEQ ID NO: 5580443 - DNA, 25 bp, Homo sapien
agacctgatcctgagttggctgctc

SEQ ID NO: 5580444 - DNA, 25 bp, Homo sapien
agaattgttggtgcctggaaagaga

SEQ ID NO: 5580445 - DNA, 25 bp, Homo sapien
atgtggcagacactgctgtgtgttc

SEQ ID NO: 5580446 - DNA, 25 bp, Homo sapien
agccattaaaggagtatgagaggcc

SEQ ID NO: 5580447 - DNA, 25 bp, Homo sapien
gaggccctgcaaagaatccagatct

SEQ ID NO: 5580448 - DNA, 25 bp, Homo sapien
aagggagagcagtcacatgttttat

SEQ ID NO: 5580449 - DNA, 25 bp, Homo sapien
gagcaccacataagccaggagcttc

SEQ ID NO: 5580450 - DNA, 25 bp, Homo sapien
caatgcagcatggtcatgtggcaga

SEQ ID NO: 5580451 - DNA, 25 bp, Homo sapien
gtgcagaacctgagccagccattaa

SEQ ID NO: 5580452 - DNA, 25 bp, Homo sapien
ccagtggatctttcaagggccccat

SEQ ID NO: 5580453 - DNA, 25 bp, Homo sapien
ctttccattgagaaaggtggccagt

SEQ ID NO: 5580454 - DNA, 25 bp, Homo sapien
ggtggaccagagagctctctgcctg

SEQ ID NO: 5580455 - DNA, 25 bp, Homo sapien
cagcatggaccccacttgttccctc

SEQ ID NO: 5580456 - DNA, 25 bp, Homo sapien
cccacagagctttgacctggggacc

SEQ ID NO: 5580457 - DNA, 25 bp, Homo sapien
agggccccattcagcatggacccca

SEQ ID NO: 5580458 - DNA, 25 bp, Homo sapien
ggtgccataaaggcccacagagctt

SEQ ID NO: 5580459 - DNA, 25 bp, Homo sapien
tccctcttagccccggagcagtttc

SEQ ID NO: 5580460 - DNA, 25 bp, Homo sapien
ttatgaaatctgcaacactgggggg

SEQ ID NO: 5580461 - DNA, 25 bp, Homo sapien
tttccagaagtgacccaccaggaga

SEQ ID NO: 5580462 - DNA, 25 bp, Homo sapien
ggggaaatcccacgtcttgttgctg

SEQ ID NO: 5580463 - DNA, 25 bp, Homo sapien
tgcaacagacaaagactgtgacccc

SEQ ID NO: 5580464 - DNA, 25 bp, Homo sapien
tacatagctatatcacaagaggtgg

SEQ ID NO: 5580465 - DNA, 25 bp, Homo sapien
tatatcacaagaggtggaaaatgag

SEQ ID NO: 5580466 - DNA, 25 bp, Homo sapien
tagaatgaagtcagaactttgggaa

SEQ ID NO: 5580467 - DNA, 25 bp, Homo sapien
actgggtgctagagatacagcaatg

SEQ ID NO: 5580468 - DNA, 25 bp, Homo sapien
agaagcaattagggacctacccctg

SEQ ID NO: 5580469 - DNA, 25 bp, Homo sapien
cagaactttgggaaagatcataatt

SEQ ID NO: 5580470 - DNA, 25 bp, Homo sapien
agatacagcaatgaatgcaacagac

SEQ ID NO: 5580471 - DNA, 25 bp, Homo sapien
gtgacccctacattccagtaaggat

SEQ ID NO: 5580472 - DNA, 25 bp, Homo sapien
catgtcaggtactgtactgggtgct

SEQ ID NO: 5580473 - DNA, 25 bp, Homo sapien
tgtatggagatactaaccctgtctt

SEQ ID NO: 5580474 - DNA, 25 bp, Homo sapien
ccattgtgcccaaggcttcagacag

SEQ ID NO: 5580475 - DNA, 25 bp, Homo sapien
cacgtggaaaaagtacattgtatat

SEQ ID NO: 5580476 - DNA, 25 bp, Homo sapien
aattgcccattgtgcccaaggcttc

SEQ ID NO: 5580477 - DNA, 25 bp, Homo sapien
gattctttccctcactgaaggggtg

SEQ ID NO: 5580478 - DNA, 25 bp, Homo sapien
ccttactctcacgaattgcccattg

SEQ ID NO: 5580479 - DNA, 25 bp, Homo sapien
cactgtcatgtaaaaagtgacactt

SEQ ID NO: 5580480 - DNA, 25 bp, Homo sapien
ccctccccaccacttccttactctc

SEQ ID NO: 5580481 - DNA, 25 bp, Homo sapien
tcagacagcacaagttggagtgtgg

SEQ ID NO: 5580482 - DNA, 25 bp, Homo sapien
agtgtggggtaggtgcctacattta

SEQ ID NO: 5580483 - DNA, 25 bp, Homo sapien
acatacacgtggaaaaagtacattg

SEQ ID NO: 5580484 - DNA, 25 bp, Homo sapien
atagacatatatgcaaacacaaaca

SEQ ID NO: 5580485 - DNA, 25 bp, Homo sapien
gaaatgacacgtagggatcacaaaa

SEQ ID NO: 5580486 - DNA, 25 bp, Homo sapien
tttgaacaatgcacagatcttggat

SEQ ID NO: 5580487 - DNA, 25 bp, Homo sapien
agggtagaaatcaaaatagcctccc

SEQ ID NO: 5580488 - DNA, 25 bp, Homo sapien
tgtagaaacagggactatttgtaga

SEQ ID NO: 5580489 - DNA, 25 bp, Homo sapien
cttaaaacaagaatgcagccttttc

SEQ ID NO: 5580490 - DNA, 25 bp, Homo sapien
tggctggtgatgcttttctccccac

SEQ ID NO: 5580491 - DNA, 25 bp, Homo sapien
acagaaacatgggttaccatagaaa

SEQ ID NO: 5580492 - DNA, 25 bp, Homo sapien
ttcccagtaacacatgaattcattc

SEQ ID NO: 5580493 - DNA, 25 bp, Homo sapien
gttaaaaattggagatgtcaaagtc

SEQ ID NO: 5580494 - DNA, 25 bp, Homo sapien
ggatcacaaaataggttgtggtaaa

SEQ ID NO: 5580495 - DNA, 25 bp, Homo sapien
tatttgtagaagagtccagaaggaa

SEQ ID NO: 5580496 - DNA, 25 bp, Homo sapien
gtttacaatacacatgcgaaataac

SEQ ID NO: 5580497 - DNA, 25 bp, Homo sapien
aaaaacgaaaatgacattgcagttt

SEQ ID NO: 5580498 - DNA, 25 bp, Homo sapien
aggggcacgattgttaaccaagtct

SEQ ID NO: 5580499 - DNA, 25 bp, Homo sapien
aatgctttcaaatgaccagggtggg

SEQ ID NO: 5580500 - DNA, 25 bp, Homo sapien
tgtggctaaccaagctccaagaacc

SEQ ID NO: 5580501 - DNA, 25 bp, Homo sapien
aatgtgcccaattctgtggctaacc

SEQ ID NO: 5580502 - DNA, 25 bp, Homo sapien
cttgcctcagtccttcagatccctc

SEQ ID NO: 5580503 - DNA, 25 bp, Homo sapien
gagttgggaaatcaatgagaccatc

SEQ ID NO: 5580504 - DNA, 25 bp, Homo sapien
ctgcttaaaattagtggcttgcctc

SEQ ID NO: 5580505 - DNA, 25 bp, Homo sapien
tctcacagggacttatgctaggcat

SEQ ID NO: 5580506 - DNA, 25 bp, Homo sapien
tgctatgtataaatctcacagggac

SEQ ID NO: 5580507 - DNA, 25 bp, Homo sapien
aagggcagctaatcttggcaagaat

SEQ ID NO: 5580508 - DNA, 25 bp, Homo sapien
cttcttcaagactgtggcaggactg

SEQ ID NO: 5580509 - DNA, 25 bp, Homo sapien
tttacctcgctcagggctaaggaag

SEQ ID NO: 5580510 - DNA, 25 bp, Homo sapien
gcagcccgcagttcccaagtgcttg

SEQ ID NO: 5580511 - DNA, 25 bp, Homo sapien
ggagggctctagttgtccacagcaa

SEQ ID NO: 5580512 - DNA, 25 bp, Homo sapien
aacacagagataggctcaccgaaag

SEQ ID NO: 5580513 - DNA, 25 bp, Homo sapien
gaaggcagagcagaattgtttacct

SEQ ID NO: 5580514 - DNA, 25 bp, Homo sapien
caagtgcttgttcgtgctgggatta

SEQ ID NO: 5580515 - DNA, 25 bp, Homo sapien
aagctgcgtgaaaacgctggttgaa

SEQ ID NO: 5580516 - DNA, 25 bp, Homo sapien
tgaagacgcgaaagctgatctcttc

SEQ ID NO: 5580517 - DNA, 25 bp, Homo sapien
gctacagaagcaacaaagactaaag

SEQ ID NO: 5580518 - DNA, 25 bp, Homo sapien
gtgaatcttagtggctcaggttctc

SEQ ID NO: 5580519 - DNA, 25 bp, Homo sapien
tacttaggatgctaacaacatagta

SEQ ID NO: 5580520 - DNA, 25 bp, Homo sapien
ggagaggttgaactagatgatctct

SEQ ID NO: 5580521 - DNA, 25 bp, Homo sapien
ctccatttgaacggagaggttgaac

SEQ ID NO: 5580522 - DNA, 25 bp, Homo sapien
aaggaaatgggtttagcaactgagt

SEQ ID NO: 5580523 - DNA, 25 bp, Homo sapien
gaaactcaagtctataagcagaaaa

SEQ ID NO: 5580524 - DNA, 25 bp, Homo sapien
tttagtcactacaggatacaatatt

SEQ ID NO: 5580525 - DNA, 25 bp, Homo sapien
ttatcttgaaggtaacagtggaatc

SEQ ID NO: 5580526 - DNA, 25 bp, Homo sapien
aaattcggagacaatgaaaatatcc

SEQ ID NO: 5580527 - DNA, 25 bp, Homo sapien
caactgagtgttgtcttgaaagcaa

SEQ ID NO: 5580528 - DNA, 25 bp, Homo sapien
tgtacagctgcttttgaaactcaag

SEQ ID NO: 5580529 - DNA, 25 bp, Homo sapien
aaagttactggaagtgatggtgtcc

SEQ ID NO: 5580530 - DNA, 25 bp, Homo sapien
aaacatgaaaaagttactggaagtg

SEQ ID NO: 5580531 - DNA, 25 bp, Homo sapien
tggtatcagcaaacatgccaaagga

SEQ ID NO: 5580532 - DNA, 25 bp, Homo sapien
atgatcagatagagatgaaggaaaa

SEQ ID NO: 5580533 - DNA, 25 bp, Homo sapien
gtccagaaggtgacttatgctagta

SEQ ID NO: 5580534 - DNA, 25 bp, Homo sapien
aaggaaaagaccagctgggtatttg

SEQ ID NO: 5580535 - DNA, 25 bp, Homo sapien
gtaatccacagatgagggataaggg

SEQ ID NO: 5580536 - DNA, 25 bp, Homo sapien
gctgcagagcttggtggtatcagca

SEQ ID NO: 5580537 - DNA, 25 bp, Homo sapien
caccctaccctggagacaccaagtc

SEQ ID NO: 5580538 - DNA, 25 bp, Homo sapien
tgccaaaggaggatcaaaatgatca

SEQ ID NO: 5580539 - DNA, 25 bp, Homo sapien
taccccatagattgtctcagacacc

SEQ ID NO: 5580540 - DNA, 25 bp, Homo sapien
agtaaggcaccagtagccaccctca

SEQ ID NO: 5580541 - DNA, 25 bp, Homo sapien
tcctcccatggaccaggtactttgc

SEQ ID NO: 5580542 - DNA, 25 bp, Homo sapien
agacaggggctgtgaacccttaaac

SEQ ID NO: 5580543 - DNA, 25 bp, Homo sapien
cctcagccagaagtaagtcattcac

SEQ ID NO: 5580544 - DNA, 25 bp, Homo sapien
cttgttaaaggaggatttctggatt

SEQ ID NO: 5580545 - DNA, 25 bp, Homo sapien
tgctacccaaaacaggccctagaac

SEQ ID NO: 5580546 - DNA, 25 bp, Homo sapien
ggggcagatctaaccacacagacag

SEQ ID NO: 5580547 - DNA, 25 bp, Homo sapien
aaacagacgcctcaagtgccttgct

SEQ ID NO: 5580548 - DNA, 25 bp, Homo sapien
tcttgatcaacatttgggggctttc

SEQ ID NO: 5580549 - DNA, 25 bp, Homo sapien
ctagaacattcagcagtaaggcacc

SEQ ID NO: 5580550 - DNA, 25 bp, Homo sapien
taatatagtccgggcagtagatcac

SEQ ID NO: 5580551 - DNA, 25 bp, Homo sapien
atgtacttctaaagggatctgaagg

SEQ ID NO: 5580552 - DNA, 25 bp, Homo sapien
actacatatggtatatggacatgtt

SEQ ID NO: 5580553 - DNA, 25 bp, Homo sapien
aattaggcaaaagatttaatctctt

SEQ ID NO: 5580554 - DNA, 25 bp, Homo sapien
aagataatcaccataagcatgtcac

SEQ ID NO: 5580555 - DNA, 25 bp, Homo sapien
cagattattctcaagtcaaccctac

SEQ ID NO: 5580556 - DNA, 25 bp, Homo sapien
aagcttggaaacaattcaaaccatc

SEQ ID NO: 5580557 - DNA, 25 bp, Homo sapien
aaggaagagatataattaggcaaaa

SEQ ID NO: 5580558 - DNA, 25 bp, Homo sapien
gtttatatattagtccagcagttac

SEQ ID NO: 5580559 - DNA, 25 bp, Homo sapien
ccagcagttacaattaagataatca

SEQ ID NO: 5580560 - DNA, 25 bp, Homo sapien
tcatacctcccgaactgcactcctt

SEQ ID NO: 5580561 - DNA, 25 bp, Homo sapien
tagaaagtgatttgaggaaatacat

SEQ ID NO: 5580562 - DNA, 25 bp, Homo sapien
gcaggatgcgcctgctcccctgcag

SEQ ID NO: 5580563 - DNA, 25 bp, Homo sapien
cggcccagggtttaccactccaatc

SEQ ID NO: 5580564 - DNA, 25 bp, Homo sapien
tctagatccctcctcggcacagcga

SEQ ID NO: 5580565 - DNA, 25 bp, Homo sapien
ctctagagcgttctgtgcaggatgc

SEQ ID NO: 5580566 - DNA, 25 bp, Homo sapien
ccactccaatcggccctgctggtgc

SEQ ID NO: 5580567 - DNA, 25 bp, Homo sapien
agcctcccccgaggaagttctggtc

SEQ ID NO: 5580568 - DNA, 25 bp, Homo sapien
ctttggcatgccttccggcccaggg

SEQ ID NO: 5580569 - DNA, 25 bp, Homo sapien
ccacaccctgcacgctaaccctctc

SEQ ID NO: 5580570 - DNA, 25 bp, Homo sapien
gctggtgccatccaggaaaggaaga

SEQ ID NO: 5580571 - DNA, 25 bp, Homo sapien
agcctggcagtgtcagcttctctcc

SEQ ID NO: 5580572 - DNA, 25 bp, Homo sapien
ggggaccctcttgcagcacgtgtca

SEQ ID NO: 5580573 - DNA, 25 bp, Homo sapien
caagccaaggtgtcaccagcctggg

SEQ ID NO: 5580574 - DNA, 25 bp, Homo sapien
tactccacgcctctatcagggtgcg

SEQ ID NO: 5580575 - DNA, 25 bp, Homo sapien
ccagcctccctcaccagtgtgccca

SEQ ID NO: 5580576 - DNA, 25 bp, Homo sapien
gaaaacaccagaacaattgctctca

SEQ ID NO: 5580577 - DNA, 25 bp, Homo sapien
acgcctctatcagggtgcgtagggg

SEQ ID NO: 5580578 - DNA, 25 bp, Homo sapien
ccacgcctctatcagggtgcgtagg

SEQ ID NO: 5580579 - DNA, 25 bp, Homo sapien
ccagaacaattgctctcagaggagg

SEQ ID NO: 5580580 - DNA, 25 bp, Homo sapien
ttctggaacattctcccgggttctc

SEQ ID NO: 5580581 - DNA, 25 bp, Homo sapien
caagttatcttttactccacgcctc

SEQ ID NO: 5580582 - DNA, 25 bp, Homo sapien
gcgggatttctagaggctgcctttt

SEQ ID NO: 5580583 - DNA, 25 bp, Homo sapien
gttccagcctccctcaccagtgtgc

SEQ ID NO: 5580584 - DNA, 25 bp, Homo sapien
ttgggatgtaaagatacagagatgt

SEQ ID NO: 5580585 - DNA, 25 bp, Homo sapien
agcaccttgttgaaaaggggcttta

SEQ ID NO: 5580586 - DNA, 25 bp, Homo sapien
tgttcaccagatgcctcccaatgtc

SEQ ID NO: 5580587 - DNA, 25 bp, Homo sapien
acaggcgtctgtgatcaagtcaaga

SEQ ID NO: 5580588 - DNA, 25 bp, Homo sapien
gactgaagctatgggaacctctgag

SEQ ID NO: 5580589 - DNA, 25 bp, Homo sapien
cctgacccaaagaaatgggaggaag

SEQ ID NO: 5580590 - DNA, 25 bp, Homo sapien
aaggggctttattgtacaggcgtct

SEQ ID NO: 5580591 - DNA, 25 bp, Homo sapien
tctgatgtagtggatctatgaaaac

SEQ ID NO: 5580592 - DNA, 25 bp, Homo sapien
agactaaacaggcaaattccacgtg

SEQ ID NO: 5580593 - DNA, 25 bp, Homo sapien
tgggaacctctgaggttgccagggc

SEQ ID NO: 5580594 - DNA, 25 bp, Homo sapien
ctatgaaaacagacacacaccgatc

SEQ ID NO: 5580595 - DNA, 25 bp, Homo sapien
ccccaggcccaggccctttacctgc

SEQ ID NO: 5580596 - DNA, 25 bp, Homo sapien
gacagtttgcctctgcaaggacagc

SEQ ID NO: 5580597 - DNA, 25 bp, Homo sapien
ggcaaactgagcccccatcccagtc

SEQ ID NO: 5580598 - DNA, 25 bp, Homo sapien
ggtccagggctgccccctcatcctg

SEQ ID NO: 5580599 - DNA, 25 bp, Homo sapien
ccctttacctgctggcacaggggag

SEQ ID NO: 5580600 - DNA, 25 bp, Homo sapien
cagtcctcaaggctctgactctatc

SEQ ID NO: 5580601 - DNA, 25 bp, Homo sapien
cctcttggtctgagatggccaggta

SEQ ID NO: 5580602 - DNA, 25 bp, Homo sapien
agctcctcacaaggcaaactgagcc

SEQ ID NO: 5580603 - DNA, 25 bp, Homo sapien
caggagccagagctcctccagtcca

SEQ ID NO: 5580604 - DNA, 25 bp, Homo sapien
gtacaaagaccctggccccaggcag

SEQ ID NO: 5580605 - DNA, 25 bp, Homo sapien
agtccagattctccagggtccaggg

SEQ ID NO: 5580606 - DNA, 25 bp, Homo sapien
atgggaataggtttggagccaattt

SEQ ID NO: 5580607 - DNA, 25 bp, Homo sapien
gaaggaaaacaacaatacaagcctc

SEQ ID NO: 5580608 - DNA, 25 bp, Homo sapien
acaaggtactcatgaaaatgaagac

SEQ ID NO: 5580609 - DNA, 25 bp, Homo sapien
ggagttaaagggaagtgttcaatca

SEQ ID NO: 5580610 - DNA, 25 bp, Homo sapien
gtaatgacattagtgggtgatgatg

SEQ ID NO: 5580611 - DNA, 25 bp, Homo sapien
tacacatggcctatatgctactctc

SEQ ID NO: 5580612 - DNA, 25 bp, Homo sapien
ctagtacctgggatacaatatgatc

SEQ ID NO: 5580613 - DNA, 25 bp, Homo sapien
atcacagttgaaaatgactagataa

SEQ ID NO: 5580614 - DNA, 25 bp, Homo sapien
acaagcctcaaagcagatttcattc

SEQ ID NO: 5580615 - DNA, 25 bp, Homo sapien
aataaccaagtaagacccctgcatt

SEQ ID NO: 5580616 - DNA, 25 bp, Homo sapien
aaggtaatctagagaagtttagtta

SEQ ID NO: 5580617 - DNA, 25 bp, Homo sapien
tgtttcattgagtacttcaagtagt

SEQ ID NO: 5580618 - DNA, 25 bp, Homo sapien
actacttgaagtactcaatgaaaca

SEQ ID NO: 5580619 - DNA, 25 bp, Homo sapien
tgatttacagactcgtacccgggcg

SEQ ID NO: 5580620 - DNA, 25 bp, Homo sapien
gtgtgagctaatgaactagctgagg

SEQ ID NO: 5580621 - DNA, 25 bp, Homo sapien
gcctgtctccgctcctgtcctcaca

SEQ ID NO: 5580622 - DNA, 25 bp, Homo sapien
tctccgctcctgtcctcacacacac

SEQ ID NO: 5580623 - DNA, 25 bp, Homo sapien
ccccaggagtagccgcctgttcttg

SEQ ID NO: 5580624 - DNA, 25 bp, Homo sapien
agcgcaggctgatttacagactcgt

SEQ ID NO: 5580625 - DNA, 25 bp, Homo sapien
agcgggttacacaggctccctggaa

SEQ ID NO: 5580626 - DNA, 25 bp, Homo sapien
tgcctctccccgtgaagacgccatg

SEQ ID NO: 5580627 - DNA, 25 bp, Homo sapien
gagctaatgaactagctgaggagtg

SEQ ID NO: 5580628 - DNA, 25 bp, Homo sapien
catgcagcgcaggctgatttacaga

SEQ ID NO: 5580629 - DNA, 25 bp, Homo sapien
caggagtagccgcctgttcttggga

SEQ ID NO: 5580630 - DNA, 25 bp, Homo sapien
gctgttttcaggaactcagtgttgt

SEQ ID NO: 5580631 - DNA, 25 bp, Homo sapien
tcttggatttaatagtgaagtgaaa

SEQ ID NO: 5580632 - DNA, 25 bp, Homo sapien
acaagtagagataatacaaaccttt

SEQ ID NO: 5580633 - DNA, 25 bp, Homo sapien
tcacaaaagtatacacaattggctc

SEQ ID NO: 5580634 - DNA, 25 bp, Homo sapien
acatgcctgtacaatgctagaattc

SEQ ID NO: 5580635 - DNA, 25 bp, Homo sapien
attggctcattaatctacatgcctg

SEQ ID NO: 5580636 - DNA, 25 bp, Homo sapien
aagcttggacattctgagtcagagc

SEQ ID NO: 5580637 - DNA, 25 bp, Homo sapien
ctattcaaagagtaacataaatttt

SEQ ID NO: 5580638 - DNA, 25 bp, Homo sapien
acacagccgtgagttatggaacggg

SEQ ID NO: 5580639 - DNA, 25 bp, Homo sapien
agtgttgtaacatttgagcaatctc

SEQ ID NO: 5580640 - DNA, 25 bp, Homo sapien
acattctgagtcagagcgccaaggt

SEQ ID NO: 5580641 - DNA, 25 bp, Homo sapien
acagtctcgtgggtctggtataagg

SEQ ID NO: 5580642 - DNA, 25 bp, Homo sapien
ccttataccagacccacgagactgt

SEQ ID NO: 5580643 - DNA, 25 bp, Homo sapien
atgagtacttggggtaatttggacc

SEQ ID NO: 5580644 - DNA, 25 bp, Homo sapien
cagaatacatgctatgttcctctct

SEQ ID NO: 5580645 - DNA, 25 bp, Homo sapien
ggatgagaaaggtctaattagctat

SEQ ID NO: 5580646 - DNA, 25 bp, Homo sapien
tctggagagccacagaattctgctc

SEQ ID NO: 5580647 - DNA, 25 bp, Homo sapien
aatgataaaggatcagaaagagaag

SEQ ID NO: 5580648 - DNA, 25 bp, Homo sapien
gagaaatgataaaggatcagaaaga

SEQ ID NO: 5580649 - DNA, 25 bp, Homo sapien
tataaactgtcaaacttcctgtccc

SEQ ID NO: 5580650 - DNA, 25 bp, Homo sapien
tatttctaatgagtacttggggtaa

SEQ ID NO: 5580651 - DNA, 25 bp, Homo sapien
aacttcctgtcccatcagtggcaca

SEQ ID NO: 5580652 - DNA, 25 bp, Homo sapien
aaaaggatgagaaaggtctaattag

SEQ ID NO: 5580653 - DNA, 25 bp, Homo sapien
cacacacaatcttctctggggaatt

SEQ ID NO: 5580654 - DNA, 25 bp, Homo sapien
tgagaatgtggaagctccagagttt

SEQ ID NO: 5580655 - DNA, 25 bp, Homo sapien
gaagcctaagcaggctctgtgaagt

SEQ ID NO: 5580656 - DNA, 25 bp, Homo sapien
ggctcagttgtggaagctgatcgag

SEQ ID NO: 5580657 - DNA, 25 bp, Homo sapien
ggagaggtgaataaatagattgaag

SEQ ID NO: 5580658 - DNA, 25 bp, Homo sapien
gcttaactggaaagcccgtgagaag

SEQ ID NO: 5580659 - DNA, 25 bp, Homo sapien
atatggaacactaaggatccttctc

SEQ ID NO: 5580660 - DNA, 25 bp, Homo sapien
tcctacgaggacaccatcagccaat

SEQ ID NO: 5580661 - DNA, 25 bp, Homo sapien
gtgggaatagtggtatttgagtcaa

SEQ ID NO: 5580662 - DNA, 25 bp, Homo sapien
tggttgaatccaaggagtctgtgtc

SEQ ID NO: 5580663 - DNA, 25 bp, Homo sapien
aagtaatggtggctgtctaagtgat

SEQ ID NO: 5580664 - DNA, 25 bp, Homo sapien
ttgagtcaaggtttgcttaactgga

SEQ ID NO: 5580665 - DNA, 25 bp, Homo sapien
cttcacgcctctccaggcgactcgc

SEQ ID NO: 5580666 - DNA, 25 bp, Homo sapien
agcgcggtctcgtacatgccccgct

SEQ ID NO: 5580667 - DNA, 25 bp, Homo sapien
gcgactcgcttagttctgcctcggc

SEQ ID NO: 5580668 - DNA, 25 bp, Homo sapien
cctctccaggcgactcgcttagttc

SEQ ID NO: 5580669 - DNA, 25 bp, Homo sapien
gacgcggtcgtccttcctaaatctg

SEQ ID NO: 5580670 - DNA, 25 bp, Homo sapien
aggaccggatccttcccaagtcctc

SEQ ID NO: 5580671 - DNA, 25 bp, Homo sapien
ctttggcttccgcctcacaacccgg

SEQ ID NO: 5580672 - DNA, 25 bp, Homo sapien
ccaagtcctctttcgtgccccagca

SEQ ID NO: 5580673 - DNA, 25 bp, Homo sapien
gtgccccagcattgctcccggctct

SEQ ID NO: 5580674 - DNA, 25 bp, Homo sapien
ctaaatctgaaccccacagcgcggt

SEQ ID NO: 5580675 - DNA, 25 bp, Homo sapien
cacgtgcaggctcccttcacgcctc

SEQ ID NO: 5580676 - DNA, 25 bp, Homo sapien
aaacgttaaagtgtgagagatttta

SEQ ID NO: 5580677 - DNA, 25 bp, Homo sapien
ttgctgctaggctctagacagaatt

SEQ ID NO: 5580678 - DNA, 25 bp, Homo sapien
agactgaggaatgacaggttagtat

SEQ ID NO: 5580679 - DNA, 25 bp, Homo sapien
gcagggtaagtcaggtttgtgattt

SEQ ID NO: 5580680 - DNA, 25 bp, Homo sapien
gagtggaagaagccaaaagttataa

SEQ ID NO: 5580681 - DNA, 25 bp, Homo sapien
agttactagagggcctacaaaggta

SEQ ID NO: 5580682 - DNA, 25 bp, Homo sapien
caaactttggcatcagagcaaggtc

SEQ ID NO: 5580683 - DNA, 25 bp, Homo sapien
atggctaaagattgaggtgtgataa

SEQ ID NO: 5580684 - DNA, 25 bp, Homo sapien
tcaacttgagagacaaatgatgtta

SEQ ID NO: 5580685 - DNA, 25 bp, Homo sapien
tgttaaaatataagaagcagggtaa

SEQ ID NO: 5580686 - DNA, 25 bp, Homo sapien
tcagagcaaggtccacacttatcac

SEQ ID NO: 5580687 - DNA, 25 bp, Homo sapien
tctggtacgagactacaagtcgcac

SEQ ID NO: 5580688 - DNA, 25 bp, Homo sapien
atttgctgaataaacgaaaagttaa

SEQ ID NO: 5580689 - DNA, 25 bp, Homo sapien
aagagcccacgttttcagattcagc

SEQ ID NO: 5580690 - DNA, 25 bp, Homo sapien
tccacgaagtcggaacttgatacat

SEQ ID NO: 5580691 - DNA, 25 bp, Homo sapien
gcctccttacccgacgctcaggccc

SEQ ID NO: 5580692 - DNA, 25 bp, Homo sapien
gttcggtgtaagcgttgcctcctta

SEQ ID NO: 5580693 - DNA, 25 bp, Homo sapien
ggcctctggtttcacgtctccctcc

SEQ ID NO: 5580694 - DNA, 25 bp, Homo sapien
cttcaggtccgggacccctgcttct

SEQ ID NO: 5580695 - DNA, 25 bp, Homo sapien
aagggcagctctcaagagcccacgt

SEQ ID NO: 5580696 - DNA, 25 bp, Homo sapien
ccaggccaactctaagagccagaac

SEQ ID NO: 5580697 - DNA, 25 bp, Homo sapien
atctcagcacaggttcggtgtaagc

SEQ ID NO: 5580698 - DNA, 25 bp, Homo sapien
cgatggtcatttgttagggttgggg

SEQ ID NO: 5580699 - DNA, 25 bp, Homo sapien
gacacattgttgatgctactggttt

SEQ ID NO: 5580700 - DNA, 25 bp, Homo sapien
ccacttaattgggcctgatgatttt

SEQ ID NO: 5580701 - DNA, 25 bp, Homo sapien
tctggtaataaatgtgaattctgac

SEQ ID NO: 5580702 - DNA, 25 bp, Homo sapien
ccgtgtgagttcccaaccaagactg

SEQ ID NO: 5580703 - DNA, 25 bp, Homo sapien
accaagactgtcagcccagtgtggt

SEQ ID NO: 5580704 - DNA, 25 bp, Homo sapien
gtgcgagctgacccgatggtcattt

SEQ ID NO: 5580705 - DNA, 25 bp, Homo sapien
acctatagaggccatagaagcagtt

SEQ ID NO: 5580706 - DNA, 25 bp, Homo sapien
gaaagcagtcagagaacgttttgct

SEQ ID NO: 5580707 - DNA, 25 bp, Homo sapien
ggaaaaacatgagatgtgtatttgt

SEQ ID NO: 5580708 - DNA, 25 bp, Homo sapien
gcagttcagcttaggctggaggcca

SEQ ID NO: 5580709 - DNA, 25 bp, Homo sapien
ggaagtctgttcacccatggcgcct

SEQ ID NO: 5580710 - DNA, 25 bp, Homo sapien
attggtcgcagccgaaaaaaatctg

SEQ ID NO: 5580711 - DNA, 25 bp, Homo sapien
cactgaggagctgattttaccttca

SEQ ID NO: 5580712 - DNA, 25 bp, Homo sapien
cccaggagtacagccatcccctaga

SEQ ID NO: 5580713 - DNA, 25 bp, Homo sapien
ctccctcgtgaggacttcaggagtg

SEQ ID NO: 5580714 - DNA, 25 bp, Homo sapien
gccatcccctagactgctccccacc

SEQ ID NO: 5580715 - DNA, 25 bp, Homo sapien
ggccagtctgtcctcgctcgccacc

SEQ ID NO: 5580716 - DNA, 25 bp, Homo sapien
ggcgcctcccagcccatggcattcc

SEQ ID NO: 5580717 - DNA, 25 bp, Homo sapien
aaatctgcacagaaaccagtagaat

SEQ ID NO: 5580718 - DNA, 25 bp, Homo sapien
tagaatacactcttagggaggactt

SEQ ID NO: 5580719 - DNA, 25 bp, Homo sapien
aggagaggctgcttctccctcgtga

SEQ ID NO: 5580720 - DNA, 25 bp, Homo sapien
aaggaaagaagttgaggtccaaata

SEQ ID NO: 5580721 - DNA, 25 bp, Homo sapien
gcattccatagcagtctggactgag

SEQ ID NO: 5580722 - DNA, 25 bp, Homo sapien
gactatcaatttcccaaagccaggc

SEQ ID NO: 5580723 - DNA, 25 bp, Homo sapien
tacaactagtaagtgacagagctgg

SEQ ID NO: 5580724 - DNA, 25 bp, Homo sapien
caaagccaggcttaataactcactc

SEQ ID NO: 5580725 - DNA, 25 bp, Homo sapien
ggcttgaaccaggcagtgctttgac

SEQ ID NO: 5580726 - DNA, 25 bp, Homo sapien
actggccagggcataaccatcattt

SEQ ID NO: 5580727 - DNA, 25 bp, Homo sapien
tattgacacctagagagggactatc

SEQ ID NO: 5580728 - DNA, 25 bp, Homo sapien
ctggactgagaccattcctgctctc

SEQ ID NO: 5580729 - DNA, 25 bp, Homo sapien
atgaaatatgatttgcccagcattc

SEQ ID NO: 5580730 - DNA, 25 bp, Homo sapien
aggcagtgctttgactctgtccccc

SEQ ID NO: 5580731 - DNA, 25 bp, Homo sapien
agtccgtgacgtgtctacgacctac

SEQ ID NO: 5580732 - DNA, 25 bp, Homo sapien
gtaggtcgtagacacgtcacggact

SEQ ID NO: 5580733 - DNA, 25 bp, Homo sapien
ttatgggaactgtgtgctatgctga

SEQ ID NO: 5580734 - DNA, 25 bp, Homo sapien
ggcattctgagaacgtttggtgtct

SEQ ID NO: 5580735 - DNA, 25 bp, Homo sapien
aatgagccttggatgggaattttta

SEQ ID NO: 5580736 - DNA, 25 bp, Homo sapien
taagcgttctagtcccaccaggtgg

SEQ ID NO: 5580737 - DNA, 25 bp, Homo sapien
tttagtcacacggaaatgagccttg

SEQ ID NO: 5580738 - DNA, 25 bp, Homo sapien
cacgagaacagagaatatgactttt

SEQ ID NO: 5580739 - DNA, 25 bp, Homo sapien
tttacttggagtcacgagaacagag

SEQ ID NO: 5580740 - DNA, 25 bp, Homo sapien
gcgcccgcgttcggcattctgagaa

SEQ ID NO: 5580741 - DNA, 25 bp, Homo sapien
tagaaaggctaaagtaacattgatc

SEQ ID NO: 5580742 - DNA, 25 bp, Homo sapien
tgctgatttgggacaataagcgttc

SEQ ID NO: 5580743 - DNA, 25 bp, Homo sapien
actccagaatctggacggtccgacc

SEQ ID NO: 5580744 - DNA, 25 bp, Homo sapien
tacaaaagtatccaagtgatctgtc

SEQ ID NO: 5580745 - DNA, 25 bp, Homo sapien
gggtggaaaatgaatctacaagagg

SEQ ID NO: 5580746 - DNA, 25 bp, Homo sapien
tctacaagaggtatcagaattcttc

SEQ ID NO: 5580747 - DNA, 25 bp, Homo sapien
ttgaatagcaagtgggctacaggta

SEQ ID NO: 5580748 - DNA, 25 bp, Homo sapien
caagagcagttaagagttcaggtta

SEQ ID NO: 5580749 - DNA, 25 bp, Homo sapien
aaagactgttgaatagcaagtgggc

SEQ ID NO: 5580750 - DNA, 25 bp, Homo sapien
atcagtcaatagagctggagtgaag

SEQ ID NO: 5580751 - DNA, 25 bp, Homo sapien
gacagagtgaactttcaagagcagt

SEQ ID NO: 5580752 - DNA, 25 bp, Homo sapien
ggctgaatgggacttctggtttgta

SEQ ID NO: 5580753 - DNA, 25 bp, Homo sapien
acctaatctttggggtggaaaatga

SEQ ID NO: 5580754 - DNA, 25 bp, Homo sapien
cttatttggtggctcaagatgtctt

SEQ ID NO: 5580755 - DNA, 25 bp, Homo sapien
tctctaggcatgactgcatgtggaa

SEQ ID NO: 5580756 - DNA, 25 bp, Homo sapien
tttagagaatatgatgcacaagaat

SEQ ID NO: 5580757 - DNA, 25 bp, Homo sapien
tcaccattagcaaggcaagcaaaat

SEQ ID NO: 5580758 - DNA, 25 bp, Homo sapien
ctggttttcctcttgtagtgctcac

SEQ ID NO: 5580759 - DNA, 25 bp, Homo sapien
aatttgtcagcatgttaagatacct

SEQ ID NO: 5580760 - DNA, 25 bp, Homo sapien
actatgacgatgaccacatactggt

SEQ ID NO: 5580761 - DNA, 25 bp, Homo sapien
ctgcatgtggaaattaagtgacttt

SEQ ID NO: 5580762 - DNA, 25 bp, Homo sapien
agggaggagaatttactgtaatgca

SEQ ID NO: 5580763 - DNA, 25 bp, Homo sapien
acaccatcagaaacgtctcaaatcc

SEQ ID NO: 5580764 - DNA, 25 bp, Homo sapien
tccttagggaggagaatttactgta

SEQ ID NO: 5580765 - DNA, 25 bp, Homo sapien
atgtcaggatattaaatgaaatgtc

SEQ ID NO: 5580766 - DNA, 25 bp, Homo sapien
attactgcaaaaactccacaacatc

SEQ ID NO: 5580767 - DNA, 25 bp, Homo sapien
ggcctcccattagacacatgctgtc

SEQ ID NO: 5580768 - DNA, 25 bp, Homo sapien
gtatctgagaaggtcaagatgaagg

SEQ ID NO: 5580769 - DNA, 25 bp, Homo sapien
cttccaggggtcccaaattggatgg

SEQ ID NO: 5580770 - DNA, 25 bp, Homo sapien
caaattggatgggtgtttccagtgg

SEQ ID NO: 5580771 - DNA, 25 bp, Homo sapien
tttccagtggcatgctcttacagac

SEQ ID NO: 5580772 - DNA, 25 bp, Homo sapien
aagagtaaaggagttgtactaggac

SEQ ID NO: 5580773 - DNA, 25 bp, Homo sapien
agcaaactacagtgcgaggtgatct

SEQ ID NO: 5580774 - DNA, 25 bp, Homo sapien
gtacatgaagccatgcagctttgtc

SEQ ID NO: 5580775 - DNA, 25 bp, Homo sapien
ttgtactaggacaggcctcccatta

SEQ ID NO: 5580776 - DNA, 25 bp, Homo sapien
tctggggactattgtacatgaagcc

SEQ ID NO: 5580777 - DNA, 25 bp, Homo sapien
caggcaacatgaactaaatagatcc

SEQ ID NO: 5580778 - DNA, 25 bp, Homo sapien
tggaagattcactctcaaatgctgc

SEQ ID NO: 5580779 - DNA, 25 bp, Homo sapien
acctcagcagtggaaaaaggttttc

SEQ ID NO: 5580780 - DNA, 25 bp, Homo sapien
gacaatctgaaaaacagggactaaa

SEQ ID NO: 5580781 - DNA, 25 bp, Homo sapien
tgtaacgacaatctgaaaaacaggg

SEQ ID NO: 5580782 - DNA, 25 bp, Homo sapien
gtgaaaaataacaatcttatctgtc

SEQ ID NO: 5580783 - DNA, 25 bp, Homo sapien
tttgggatgtggcagatcctcttga

SEQ ID NO: 5580784 - DNA, 25 bp, Homo sapien
tgaactaaatagatccacctcagca

SEQ ID NO: 5580785 - DNA, 25 bp, Homo sapien
tctaagccatgaaaatggaagattc

SEQ ID NO: 5580786 - DNA, 25 bp, Homo sapien
ttctcacataatagcaagtccggag

SEQ ID NO: 5580787 - DNA, 25 bp, Homo sapien
caagtaggaagtttatctttctcac

SEQ ID NO: 5580788 - DNA, 25 bp, Homo sapien
tgtgacccacgctgggagctcaata

SEQ ID NO: 5580789 - DNA, 25 bp, Homo sapien
attctgccacccagtggagacactc

SEQ ID NO: 5580790 - DNA, 25 bp, Homo sapien
agaccgtgtagaaaccccagattat

SEQ ID NO: 5580791 - DNA, 25 bp, Homo sapien
aggagatattaaacgttcacgggtc

SEQ ID NO: 5580792 - DNA, 25 bp, Homo sapien
gcatgctactgctgtggtcaccatt

SEQ ID NO: 5580793 - DNA, 25 bp, Homo sapien
ttgaacacgggatcaggtttactga

SEQ ID NO: 5580794 - DNA, 25 bp, Homo sapien
gaggcacaagatatacaacacgcac

SEQ ID NO: 5580795 - DNA, 25 bp, Homo sapien
tgctaaacggaaatgaacccaattc

SEQ ID NO: 5580796 - DNA, 25 bp, Homo sapien
ggagacactcaaaagtgatctcgcc

SEQ ID NO: 5580797 - DNA, 25 bp, Homo sapien
ttgaaaatgcgtgatggctaaattc

SEQ ID NO: 5580798 - DNA, 25 bp, Homo sapien
ctgccctgcatcggaatatagcacc

SEQ ID NO: 5580799 - DNA, 25 bp, Homo sapien
aacactgggcttttctgtgaatagc

SEQ ID NO: 5580800 - DNA, 25 bp, Homo sapien
atgtgttcagttctcagttctatgc

SEQ ID NO: 5580801 - DNA, 25 bp, Homo sapien
ttgtactgtcttaatgagccactgg

SEQ ID NO: 5580802 - DNA, 25 bp, Homo sapien
tcctgttagagaatttctgcagtgt

SEQ ID NO: 5580803 - DNA, 25 bp, Homo sapien
aagtaacataacactgggcttttct

SEQ ID NO: 5580804 - DNA, 25 bp, Homo sapien
gtgtttagtaatcctgtgaatgttc

SEQ ID NO: 5580805 - DNA, 25 bp, Homo sapien
gtgaatgttcaccagttgacgtttt

SEQ ID NO: 5580806 - DNA, 25 bp, Homo sapien
tttgtgattgatgtgttcagttctc

SEQ ID NO: 5580807 - DNA, 25 bp, Homo sapien
cagttgacgttttgtcgcatttgtc

SEQ ID NO: 5580808 - DNA, 25 bp, Homo sapien
cagttctatgcaatgaaagtaacat

SEQ ID NO: 5580809 - DNA, 25 bp, Homo sapien
gacatgtccaagtagtcatgcctgt

SEQ ID NO: 5580810 - DNA, 25 bp, Homo sapien
tcagtttcgtgtgcgtctggatgtg

SEQ ID NO: 5580811 - DNA, 25 bp, Homo sapien
caggcggtgtccctgaccctcctga

SEQ ID NO: 5580812 - DNA, 25 bp, Homo sapien
ctgaccctgttccccacaatggctt

SEQ ID NO: 5580813 - DNA, 25 bp, Homo sapien
tttgtaggccacacagggccacttg

SEQ ID NO: 5580814 - DNA, 25 bp, Homo sapien
ccacttggctacaggagccatgtgt

SEQ ID NO: 5580815 - DNA, 25 bp, Homo sapien
tcgacctcggtccagggtcatgttc

SEQ ID NO: 5580816 - DNA, 25 bp, Homo sapien
ctgcctggctccaaggctcaaacac

SEQ ID NO: 5580817 - DNA, 25 bp, Homo sapien
gctcaaacacacttgcagcgagaac

SEQ ID NO: 5580818 - DNA, 25 bp, Homo sapien
cagcgagaacccgtattccagcatc

SEQ ID NO: 5580819 - DNA, 25 bp, Homo sapien
gctctcctcatggtggtccagggtc

SEQ ID NO: 5580820 - DNA, 25 bp, Homo sapien
gcatgaaggaggtgccattttcctg

SEQ ID NO: 5580821 - DNA, 25 bp, Homo sapien
ttcattagagtgtcatggcagagtc

SEQ ID NO: 5580822 - DNA, 25 bp, Homo sapien
ctgcctcctgactctcaacccctac

SEQ ID NO: 5580823 - DNA, 25 bp, Homo sapien
gcatgggctcaggcctcgatttcat

SEQ ID NO: 5580824 - DNA, 25 bp, Homo sapien
gggatgcttgctgtcacgttgtgcc

SEQ ID NO: 5580825 - DNA, 25 bp, Homo sapien
taaattgggactgggtcaagcttag

SEQ ID NO: 5580826 - DNA, 25 bp, Homo sapien
cctgatggccttgggtttaaatgtg

SEQ ID NO: 5580827 - DNA, 25 bp, Homo sapien
aaaagtttagagtaagggatgcttg

SEQ ID NO: 5580828 - DNA, 25 bp, Homo sapien
gtgggcatctgcccctgtgtctgcc

SEQ ID NO: 5580829 - DNA, 25 bp, Homo sapien
catggcagagtcaaatcaatgcatt

SEQ ID NO: 5580830 - DNA, 25 bp, Homo sapien
cataacttgactgatgtgtattgtc

SEQ ID NO: 5580831 - DNA, 25 bp, Homo sapien
gggtttaaatgtgggcatctgcccc

SEQ ID NO: 5580832 - DNA, 25 bp, Homo sapien
taggatgattatatgacagagagaa

SEQ ID NO: 5580833 - DNA, 25 bp, Homo sapien
tgtttgcccaggccctatgggtggg

SEQ ID NO: 5580834 - DNA, 25 bp, Homo sapien
ccaagcagatcatgacggtgtaact

SEQ ID NO: 5580835 - DNA, 25 bp, Homo sapien
taggtcattgttaaagggctaggct

SEQ ID NO: 5580836 - DNA, 25 bp, Homo sapien
ggggagtttgaaaccaagcagatca

SEQ ID NO: 5580837 - DNA, 25 bp, Homo sapien
gaagtcaatgtgggagttcgaaata

SEQ ID NO: 5580838 - DNA, 25 bp, Homo sapien
catgtgcacaagactcatcaaggcc

SEQ ID NO: 5580839 - DNA, 25 bp, Homo sapien
aaattctcctgtggcggggagtttg

SEQ ID NO: 5580840 - DNA, 25 bp, Homo sapien
atttacctggtagggcactgaagat

SEQ ID NO: 5580841 - DNA, 25 bp, Homo sapien
cagtgttcaaagactgtggggttct

SEQ ID NO: 5580842 - DNA, 25 bp, Homo sapien
cagagcatgaatgtgaggttaaatg

SEQ ID NO: 5580843 - DNA, 25 bp, Homo sapien
aaaaaatccaataggttatggtgat

SEQ ID NO: 5580844 - DNA, 25 bp, Homo sapien
tgtcgtttttaggagcacacctttc

SEQ ID NO: 5580845 - DNA, 25 bp, Homo sapien
tatcatgaggccacataggtcttta

SEQ ID NO: 5580846 - DNA, 25 bp, Homo sapien
tttttgaagtatataaatgatgtct

SEQ ID NO: 5580847 - DNA, 25 bp, Homo sapien
ataggttatggtgattgtttgtaca

SEQ ID NO: 5580848 - DNA, 25 bp, Homo sapien
taggtctttagtcaggtaaattgta

SEQ ID NO: 5580849 - DNA, 25 bp, Homo sapien
gcttatatctgtgggctcaagacac

SEQ ID NO: 5580850 - DNA, 25 bp, Homo sapien
ttaaccataagccccagaggacaag

SEQ ID NO: 5580851 - DNA, 25 bp, Homo sapien
ataggctcctgtgtatcatgaggcc

SEQ ID NO: 5580852 - DNA, 25 bp, Homo sapien
gacacagaagtgaatactaattttt

SEQ ID NO: 5580853 - DNA, 25 bp, Homo sapien
tgccttctaaagatagtttggtcat

SEQ ID NO: 5580854 - DNA, 25 bp, Homo sapien
ccaggacctgcgcaccctcctgtct

SEQ ID NO: 5580855 - DNA, 25 bp, Homo sapien
aggacctgcgcaccctcctgtctac

SEQ ID NO: 5580856 - DNA, 25 bp, Homo sapien
cacccctccacctccaggggcgggc

SEQ ID NO: 5580857 - DNA, 25 bp, Homo sapien
caggagtgctttgccctccaggacc

SEQ ID NO: 5580858 - DNA, 25 bp, Homo sapien
ctttgccctccaggacctgcgcacc

SEQ ID NO: 5580859 - DNA, 25 bp, Homo sapien
ccctcctgtctacctggaggccctc

SEQ ID NO: 5580860 - DNA, 25 bp, Homo sapien
ggccggcgcccttttcagggtgtca

SEQ ID NO: 5580861 - DNA, 25 bp, Homo sapien
cgcccttttcagggtgtcaggggac

SEQ ID NO: 5580862 - DNA, 25 bp, Homo sapien
gagtgctttgccctccaggacctgc

SEQ ID NO: 5580863 - DNA, 25 bp, Homo sapien
ggacaggagtgctttgccctccagg

SEQ ID NO: 5580864 - DNA, 25 bp, Homo sapien
cggcgcccttttcagggtgtcaggg

SEQ ID NO: 5580865 - DNA, 25 bp, Homo sapien
tggctgctgcactatgggtttgttt

SEQ ID NO: 5580866 - DNA, 25 bp, Homo sapien
ttgtttatgtttagcaggtggggtc

SEQ ID NO: 5580867 - DNA, 25 bp, Homo sapien
ggtgattctcaagctggtgtccctg

SEQ ID NO: 5580868 - DNA, 25 bp, Homo sapien
tgcggggagataaaaatcaacctcc

SEQ ID NO: 5580869 - DNA, 25 bp, Homo sapien
caaaggcctcccagcttgagttgtg

SEQ ID NO: 5580870 - DNA, 25 bp, Homo sapien
ctactcacaggggttctgagagaag

SEQ ID NO: 5580871 - DNA, 25 bp, Homo sapien
ggctgcagcagttgaagatatgcct

SEQ ID NO: 5580872 - DNA, 25 bp, Homo sapien
gtgtccctgggatcacccctggaga

SEQ ID NO: 5580873 - DNA, 25 bp, Homo sapien
tttcatctatggtaaaaggaggttg

SEQ ID NO: 5580874 - DNA, 25 bp, Homo sapien
ttacagtgcaaagagctggctgtga

SEQ ID NO: 5580875 - DNA, 25 bp, Homo sapien
gagaaaccacaccgatggaagtcac

SEQ ID NO: 5580876 - DNA, 25 bp, Homo sapien
actgacctttttacaactatggtaa

SEQ ID NO: 5580877 - DNA, 25 bp, Homo sapien
ttaccatagttgtaaaaaggtcagt

SEQ ID NO: 5580878 - DNA, 25 bp, Homo sapien
tcacaagcctaaaaaaattctccta

SEQ ID NO: 5580879 - DNA, 25 bp, Homo sapien
ctttatgaagttgggttagacactc

SEQ ID NO: 5580880 - DNA, 25 bp, Homo sapien
atgaagctctctacaaggcccttgc

SEQ ID NO: 5580881 - DNA, 25 bp, Homo sapien
ttatagcaggcatgaagctctctac

SEQ ID NO: 5580882 - DNA, 25 bp, Homo sapien
ttttgagcaggtctgttgcctatgc

SEQ ID NO: 5580883 - DNA, 25 bp, Homo sapien
ttatggttgcaaagtccatccagaa

SEQ ID NO: 5580884 - DNA, 25 bp, Homo sapien
ggttagacactcaggcagcaatatc

SEQ ID NO: 5580885 - DNA, 25 bp, Homo sapien
aatcaaaaccttactcggctgttct

SEQ ID NO: 5580886 - DNA, 25 bp, Homo sapien
ttcttctagctggcagtggaacagg

SEQ ID NO: 5580887 - DNA, 25 bp, Homo sapien
cagtggaacagggttagttttacca

SEQ ID NO: 5580888 - DNA, 25 bp, Homo sapien
tgagctgttcctgtaaatcaaaacc

SEQ ID NO: 5580889 - DNA, 25 bp, Homo sapien
ggcagctccatcctctgctccctcc

SEQ ID NO: 5580890 - DNA, 25 bp, Homo sapien
tcccacacatgccaggccctccgca

SEQ ID NO: 5580891 - DNA, 25 bp, Homo sapien
ggcgctggtcgttaccctcagcccc

SEQ ID NO: 5580892 - DNA, 25 bp, Homo sapien
tgctcgtaaaattactaagtgtggc

SEQ ID NO: 5580893 - DNA, 25 bp, Homo sapien
tcagtgagaattttcttacaagtct

SEQ ID NO: 5580894 - DNA, 25 bp, Homo sapien
ttttccggctttttcccacacatgc

SEQ ID NO: 5580895 - DNA, 25 bp, Homo sapien
gaacataaaaccgtgtgatgtatag

SEQ ID NO: 5580896 - DNA, 25 bp, Homo sapien
ttagtgctgtgaaagcttggggtaa

SEQ ID NO: 5580897 - DNA, 25 bp, Homo sapien
cctcagccccaattacagctgtgct

SEQ ID NO: 5580898 - DNA, 25 bp, Homo sapien
actaagtgtggcatatttagtgctg

SEQ ID NO: 5580899 - DNA, 25 bp, Homo sapien
accgtgtgatgtatagtttggtttg

SEQ ID NO: 5580900 - DNA, 25 bp, Homo sapien
ttttggcaggacaatgttcatagtc

SEQ ID NO: 5580901 - DNA, 25 bp, Homo sapien
tacagctttttggcaggacaatgtt

SEQ ID NO: 5580902 - DNA, 25 bp, Homo sapien
ttagtgatgggtatataattggaaa

SEQ ID NO: 5580903 - DNA, 25 bp, Homo sapien
aacaacagaaacaggtatgaagtct

SEQ ID NO: 5580904 - DNA, 25 bp, Homo sapien
atgaagtctttctggattgagtttt

SEQ ID NO: 5580905 - DNA, 25 bp, Homo sapien
attctttgggtgatttaacaggatg

SEQ ID NO: 5580906 - DNA, 25 bp, Homo sapien
gttcagctcaaccttcccctcccac

SEQ ID NO: 5580907 - DNA, 25 bp, Homo sapien
ttcatagtccacagttcagctcaac

SEQ ID NO: 5580908 - DNA, 25 bp, Homo sapien
tgtaggtggtttaggaatttagcta

SEQ ID NO: 5580909 - DNA, 25 bp, Homo sapien
tggatccttgtatgtggttcagttt

SEQ ID NO: 5580910 - DNA, 25 bp, Homo sapien
aagagaattcactttaacaagccac

SEQ ID NO: 5580911 - DNA, 25 bp, Homo sapien
gccccgctcttcggcagctccactc

SEQ ID NO: 5580912 - DNA, 25 bp, Homo sapien
ccgctcttcggcagctccactcacc

SEQ ID NO: 5580913 - DNA, 25 bp, Homo sapien
cctcaaagttttagggacttggatg

SEQ ID NO: 5580914 - DNA, 25 bp, Homo sapien
gaagctctggaaacgcacactctct

SEQ ID NO: 5580915 - DNA, 25 bp, Homo sapien
cgcggcacacaataagaagctctgg

SEQ ID NO: 5580916 - DNA, 25 bp, Homo sapien
cacaataagaagctctggaaacgca

SEQ ID NO: 5580917 - DNA, 25 bp, Homo sapien
gcacacaataagaagctctggaaac

SEQ ID NO: 5580918 - DNA, 25 bp, Homo sapien
caaagttttagggacttggatggct

SEQ ID NO: 5580919 - DNA, 25 bp, Homo sapien
tctggaaacgcacactctctgacac

SEQ ID NO: 5580920 - DNA, 25 bp, Homo sapien
tctgacacctcaaagttttagggac

SEQ ID NO: 5580921 - DNA, 25 bp, Homo sapien
tcggcagctccactcaccaggaact

SEQ ID NO: 5580922 - DNA, 25 bp, Homo sapien
agccaggtcccattcctcagctctc

SEQ ID NO: 5580923 - DNA, 25 bp, Homo sapien
gcaagcagagttcagcagaactgct

SEQ ID NO: 5580924 - DNA, 25 bp, Homo sapien
tcagtcgagcaaggaagtttttcaa

SEQ ID NO: 5580925 - DNA, 25 bp, Homo sapien
tcagcagaactgctcacaggcatgg

SEQ ID NO: 5580926 - DNA, 25 bp, Homo sapien
gatggcgttcatcatgcactcttac

SEQ ID NO: 5580927 - DNA, 25 bp, Homo sapien
acctgcttctggcacaaatgcatcc

SEQ ID NO: 5580928 - DNA, 25 bp, Homo sapien
ttggtctcagagccaactgagagca

SEQ ID NO: 5580929 - DNA, 25 bp, Homo sapien
actgaacaaggataaaaaatctacc

SEQ ID NO: 5580930 - DNA, 25 bp, Homo sapien
cttggccaagtgctgatggcgttca

SEQ ID NO: 5580931 - DNA, 25 bp, Homo sapien
ggagaaaatatcagtcgagcaagga

SEQ ID NO: 5580932 - DNA, 25 bp, Homo sapien
tcagctctcaccgttcatgtccctc

SEQ ID NO: 5580933 - DNA, 25 bp, Homo sapien
tcgagatatgtttatgaccagagac

SEQ ID NO: 5580934 - DNA, 25 bp, Homo sapien
tgggaggctactataatggtccaac

SEQ ID NO: 5580935 - DNA, 25 bp, Homo sapien
aaccatgatgtaacagcagatgtgt

SEQ ID NO: 5580936 - DNA, 25 bp, Homo sapien
agcagatgtgtagctgtgagaatag

SEQ ID NO: 5580937 - DNA, 25 bp, Homo sapien
cccaggacaaataaggatgggagaa

SEQ ID NO: 5580938 - DNA, 25 bp, Homo sapien
aggaaggaccaacagaacttggtga

SEQ ID NO: 5580939 - DNA, 25 bp, Homo sapien
gacctgcaagggtcagactccctca

SEQ ID NO: 5580940 - DNA, 25 bp, Homo sapien
aatttccaggccagggctatcagga

SEQ ID NO: 5580941 - DNA, 25 bp, Homo sapien
agaacagggagattcaaaaacaatt

SEQ ID NO: 5580942 - DNA, 25 bp, Homo sapien
aagaaccaaaaatgagtctgaagtt

SEQ ID NO: 5580943 - DNA, 25 bp, Homo sapien
ggagaccatttgggaggctactata

SEQ ID NO: 5580944 - DNA, 25 bp, Homo sapien
aacaaacctgcacagccagttgtat

SEQ ID NO: 5580945 - DNA, 25 bp, Homo sapien
cacctagtaatgtcacagtggaagc

SEQ ID NO: 5580946 - DNA, 25 bp, Homo sapien
acaaatgaatatgttagtggtttat

SEQ ID NO: 5580947 - DNA, 25 bp, Homo sapien
ttggtcaataagagaccacatatac

SEQ ID NO: 5580948 - DNA, 25 bp, Homo sapien
tctgtcatcgcaatggtgttttccc

SEQ ID NO: 5580949 - DNA, 25 bp, Homo sapien
tttaaggtatgtgactctaagaatg

SEQ ID NO: 5580950 - DNA, 25 bp, Homo sapien
gtgttttccccaagatgagacattc

SEQ ID NO: 5580951 - DNA, 25 bp, Homo sapien
atacaacagtagtcccataacatta

SEQ ID NO: 5580952 - DNA, 25 bp, Homo sapien
gtcacagtggaagcattactcacgt

SEQ ID NO: 5580953 - DNA, 25 bp, Homo sapien
taagcctagatataacagacccctc

SEQ ID NO: 5580954 - DNA, 25 bp, Homo sapien
cacgtttgtagtgatgctggtgtaa

SEQ ID NO: 5580955 - DNA, 25 bp, Homo sapien
atgtgccatcatgcccggcttgtat

SEQ ID NO: 5580956 - DNA, 25 bp, Homo sapien
tatgtaatacaacaatttgcaggaa

SEQ ID NO: 5580957 - DNA, 25 bp, Homo sapien
tgttagagctaactgtatgagtatt

SEQ ID NO: 5580958 - DNA, 25 bp, Homo sapien
ctcaaactccaggctcaaacaatcc

SEQ ID NO: 5580959 - DNA, 25 bp, Homo sapien
gctaacgtgcaataatgtgatcata

SEQ ID NO: 5580960 - DNA, 25 bp, Homo sapien
ctcaaacaatcctcctgactcagcc

SEQ ID NO: 5580961 - DNA, 25 bp, Homo sapien
gctcactgtagcctcaaactccagg

SEQ ID NO: 5580962 - DNA, 25 bp, Homo sapien
gtatgagtattttaggttgctgttc

SEQ ID NO: 5580963 - DNA, 25 bp, Homo sapien
aaaaaccatggttgaggagtcaata

SEQ ID NO: 5580964 - DNA, 25 bp, Homo sapien
catggttgaggagtcaataacattt

SEQ ID NO: 5580965 - DNA, 25 bp, Homo sapien
ttgcaggaatagttttaagacttgt

SEQ ID NO: 5580966 - DNA, 25 bp, Homo sapien
aacaagaagaatggtttggcatata

SEQ ID NO: 5580967 - DNA, 25 bp, Homo sapien
aaaatgtggaagtaactagtatgtt

SEQ ID NO: 5580968 - DNA, 25 bp, Homo sapien
ttccaaacagaagtttcaaaatgac

SEQ ID NO: 5580969 - DNA, 25 bp, Homo sapien
tagatgaccatgccattcttcagtt

SEQ ID NO: 5580970 - DNA, 25 bp, Homo sapien
catgacagacagcagatcctaagag

SEQ ID NO: 5580971 - DNA, 25 bp, Homo sapien
ccaaaatagactgggtcactaaaac

SEQ ID NO: 5580972 - DNA, 25 bp, Homo sapien
tattttcggaaggttaaagcacaca

SEQ ID NO: 5580973 - DNA, 25 bp, Homo sapien
ggcaagaatcatgacagacagcaga

SEQ ID NO: 5580974 - DNA, 25 bp, Homo sapien
ctgggtcactaaaacaagaagaatg

SEQ ID NO: 5580975 - DNA, 25 bp, Homo sapien
tttaggtagattaggcaacacttgt

SEQ ID NO: 5580976 - DNA, 25 bp, Homo sapien
ccaatatagcccaacggatggtatt

SEQ ID NO: 5580977 - DNA, 25 bp, Homo sapien
cctatcactggcaggattcaggtag

SEQ ID NO: 5580978 - DNA, 25 bp, Homo sapien
gggagacagacttcaacttgttatg

SEQ ID NO: 5580979 - DNA, 25 bp, Homo sapien
acataagccatttaagccccatacc

SEQ ID NO: 5580980 - DNA, 25 bp, Homo sapien
tggcaggattcaggtagtaaccatt

SEQ ID NO: 5580981 - DNA, 25 bp, Homo sapien
actagtgggtatactaatacgactt

SEQ ID NO: 5580982 - DNA, 25 bp, Homo sapien
ccacccatgtggatacctaattgtt

SEQ ID NO: 5580983 - DNA, 25 bp, Homo sapien
gttagcattaagtggtgacctgtcc

SEQ ID NO: 5580984 - DNA, 25 bp, Homo sapien
agctccaagagattatatactacta

SEQ ID NO: 5580985 - DNA, 25 bp, Homo sapien
gatgtgcgttttgggcaaaatgaca

SEQ ID NO: 5580986 - DNA, 25 bp, Homo sapien
gttatgaggaaaacatgttagcatt

SEQ ID NO: 5580987 - DNA, 25 bp, Homo sapien
tagaaggaatttgttgatgtgcgtt

SEQ ID NO: 5580988 - DNA, 25 bp, Homo sapien
gtgtgggccacatgtagttcatgcc

SEQ ID NO: 5580989 - DNA, 25 bp, Homo sapien
tagggcctgtacaaataaatgcaaa

SEQ ID NO: 5580990 - DNA, 25 bp, Homo sapien
cccctccatgaagtgaggtggaggc

SEQ ID NO: 5580991 - DNA, 25 bp, Homo sapien
caagcagagtatttgcaaagagcaa

SEQ ID NO: 5580992 - DNA, 25 bp, Homo sapien
ccaaatgccaaggcagttgtagggc

SEQ ID NO: 5580993 - DNA, 25 bp, Homo sapien
tggctgcacccagggatccttgcca

SEQ ID NO: 5580994 - DNA, 25 bp, Homo sapien
gagcaacaactgaatgtgatgggac

SEQ ID NO: 5580995 - DNA, 25 bp, Homo sapien
gtgatgggactgcttatgtagattt

SEQ ID NO: 5580996 - DNA, 25 bp, Homo sapien
gcagcccaataaaatggagcctggc

SEQ ID NO: 5580997 - DNA, 25 bp, Homo sapien
gcatttcagaagtgtgggccacatg

SEQ ID NO: 5580998 - DNA, 25 bp, Homo sapien
aggtggaggcctttagcatttcaga

SEQ ID NO: 5580999 - DNA, 25 bp, Homo sapien
ctaaaatgaatcaagcctctgagat

SEQ ID NO: 5581000 - DNA, 25 bp, Homo sapien
caagcctctgagattagttgtcact

SEQ ID NO: 5581001 - DNA, 25 bp, Homo sapien
ccacgaaccgcattccctgccttgc

SEQ ID NO: 5581002 - DNA, 25 bp, Homo sapien
ttctccaacacgcgaaaaaggtaga

SEQ ID NO: 5581003 - DNA, 25 bp, Homo sapien
cctgggctcactcaaccctcctgcc

SEQ ID NO: 5581004 - DNA, 25 bp, Homo sapien
ctcgaaggagccttctacctcagcc

SEQ ID NO: 5581005 - DNA, 25 bp, Homo sapien
aagcgcccacgaaccgcattccctg

SEQ ID NO: 5581006 - DNA, 25 bp, Homo sapien
ctgccttgctagttagttctccaac

SEQ ID NO: 5581007 - DNA, 25 bp, Homo sapien
tgagattagttgtcactgtgttgcc

SEQ ID NO: 5581008 - DNA, 25 bp, Homo sapien
aaactcctaggctcgaaggagcctt

SEQ ID NO: 5581009 - DNA, 25 bp, Homo sapien
gtagacgaggactggttttctttgc

SEQ ID NO: 5581010 - DNA, 25 bp, Homo sapien
atcaagctacgcaaaccaggactta

SEQ ID NO: 5581011 - DNA, 25 bp, Homo sapien
gagagaatggaagttgtataatcac

SEQ ID NO: 5581012 - DNA, 25 bp, Homo sapien
catgcgaagcagagcttttagcaat

SEQ ID NO: 5581013 - DNA, 25 bp, Homo sapien
aagttttttaccatgcgaagcagag

SEQ ID NO: 5581014 - DNA, 25 bp, Homo sapien
atcagggaggcaaatattaaatagt

SEQ ID NO: 5581015 - DNA, 25 bp, Homo sapien
tgaagccaggtactgtcttaggcac

SEQ ID NO: 5581016 - DNA, 25 bp, Homo sapien
ttaagagtttgcacttccgacatct

SEQ ID NO: 5581017 - DNA, 25 bp, Homo sapien
taccataggaatttcaccatgaatg

SEQ ID NO: 5581018 - DNA, 25 bp, Homo sapien
tagtaattgtaaatagcaagtcatc

SEQ ID NO: 5581019 - DNA, 25 bp, Homo sapien
tcctcagacacatcagggaggcaaa

SEQ ID NO: 5581020 - DNA, 25 bp, Homo sapien
tcttagtgactctgaagccaggtac

SEQ ID NO: 5581021 - DNA, 25 bp, Homo sapien
agagcaggagccaaccttctcccca

SEQ ID NO: 5581022 - DNA, 25 bp, Homo sapien
atggacagtctcggcttggaatttg

SEQ ID NO: 5581023 - DNA, 25 bp, Homo sapien
gctgggccagggctaattctttgtc

SEQ ID NO: 5581024 - DNA, 25 bp, Homo sapien
gaaatgaagcagcttggtgtacagc

SEQ ID NO: 5581025 - DNA, 25 bp, Homo sapien
gatgctgaagcagataagcctcctt

SEQ ID NO: 5581026 - DNA, 25 bp, Homo sapien
ccttgcatgcaaacctctctccacc

SEQ ID NO: 5581027 - DNA, 25 bp, Homo sapien
gaaatcctctctggagcatggacag

SEQ ID NO: 5581028 - DNA, 25 bp, Homo sapien
gcttggaatttgctagctgggagaa

SEQ ID NO: 5581029 - DNA, 25 bp, Homo sapien
tccttgaaaataatgatgagatcca

SEQ ID NO: 5581030 - DNA, 25 bp, Homo sapien
ttggtgtacagcagataatcaagag

SEQ ID NO: 5581031 - DNA, 25 bp, Homo sapien
ttgtcagcagattctcaggagctat

SEQ ID NO: 5581032 - DNA, 25 bp, Homo sapien
ggatggatgtgccttaaccttggac

SEQ ID NO: 5581033 - DNA, 25 bp, Homo sapien
ttgaaagggatcaaaggcccttgga

SEQ ID NO: 5581034 - DNA, 25 bp, Homo sapien
taagtcgcccagtctacagtattct

SEQ ID NO: 5581035 - DNA, 25 bp, Homo sapien
ataaaaagggctaagacaaacaaca

SEQ ID NO: 5581036 - DNA, 25 bp, Homo sapien
ggaggacacagggatcttccccttg

SEQ ID NO: 5581037 - DNA, 25 bp, Homo sapien
tgcagcataaaaagggctaagacaa

SEQ ID NO: 5581038 - DNA, 25 bp, Homo sapien
catctatcagcaggatggatgtgcc

SEQ ID NO: 5581039 - DNA, 25 bp, Homo sapien
agacatgctatggtgtgaaggtgtc

SEQ ID NO: 5581040 - DNA, 25 bp, Homo sapien
gacttcaggcctccaactgtgagaa

SEQ ID NO: 5581041 - DNA, 25 bp, Homo sapien
agtgtgttagtatgaagaccggact

SEQ ID NO: 5581042 - DNA, 25 bp, Homo sapien
aaaatgtaagtgtcttcagtgtgtt

SEQ ID NO: 5581043 - DNA, 25 bp, Homo sapien
tctctctgtacatctacgtgcaatt

SEQ ID NO: 5581044 - DNA, 25 bp, Homo sapien
gtgcagttgtacatgctcctcgtgc

SEQ ID NO: 5581045 - DNA, 25 bp, Homo sapien
ccgcatctcagaggtcatcactgtc

SEQ ID NO: 5581046 - DNA, 25 bp, Homo sapien
tacgtgcaatttattgtgcagttgt

SEQ ID NO: 5581047 - DNA, 25 bp, Homo sapien
tgcagcccctcccggacttccgcat

SEQ ID NO: 5581048 - DNA, 25 bp, Homo sapien
gatcccagcatccaagcacggtgca

SEQ ID NO: 5581049 - DNA, 25 bp, Homo sapien
aggatcccagcatccaagcacggtg

SEQ ID NO: 5581050 - DNA, 25 bp, Homo sapien
tgtccagaattttgtgttcaccgtt

SEQ ID NO: 5581051 - DNA, 25 bp, Homo sapien
cactagggctctgtggaagacacag

SEQ ID NO: 5581052 - DNA, 25 bp, Homo sapien
taataacaggcactagggctctgtg

SEQ ID NO: 5581053 - DNA, 25 bp, Homo sapien
cccggacttccgcatctcagaggtc

SEQ ID NO: 5581054 - DNA, 25 bp, Homo sapien
cacagcctggtatctccaacgacac

SEQ ID NO: 5581055 - DNA, 25 bp, Homo sapien
aacatcacccttagacacagcctgg

SEQ ID NO: 5581056 - DNA, 25 bp, Homo sapien
ctaaagtcactcactggccataacc

SEQ ID NO: 5581057 - DNA, 25 bp, Homo sapien
ttaaataagccttgcctagacctgc

SEQ ID NO: 5581058 - DNA, 25 bp, Homo sapien
tctacctacaatgccctcctctccc

SEQ ID NO: 5581059 - DNA, 25 bp, Homo sapien
ctttccacaacagtcacagcccatt

SEQ ID NO: 5581060 - DNA, 25 bp, Homo sapien
ccaactaaacctgaagaaccctgtc

SEQ ID NO: 5581061 - DNA, 25 bp, Homo sapien
tagccacttcccaacccaatgccca

SEQ ID NO: 5581062 - DNA, 25 bp, Homo sapien
tgccggaaagactggtataatgttc

SEQ ID NO: 5581063 - DNA, 25 bp, Homo sapien
taaattctgccggaaagactggtat

SEQ ID NO: 5581064 - DNA, 25 bp, Homo sapien
ccaatgcccagaagagtgctttcta

SEQ ID NO: 5581065 - DNA, 25 bp, Homo sapien
acatccccctcaagctcacatcccc

SEQ ID NO: 5581066 - DNA, 25 bp, Homo sapien
ctggccagatgctgaaggctattca

SEQ ID NO: 5581067 - DNA, 25 bp, Homo sapien
aatgccacagccatgttaaggcaaa

SEQ ID NO: 5581068 - DNA, 25 bp, Homo sapien
aagggaatatgtgatctggccagat

SEQ ID NO: 5581069 - DNA, 25 bp, Homo sapien
tatttggcttaacagtcactttgct

SEQ ID NO: 5581070 - DNA, 25 bp, Homo sapien
gttaaggcaaattttgcagcttgac

SEQ ID NO: 5581071 - DNA, 25 bp, Homo sapien
attgtcattgctgaaaaatgtgtgc

SEQ ID NO: 5581072 - DNA, 25 bp, Homo sapien
gcagcttgacacaatctaaccaatc

SEQ ID NO: 5581073 - DNA, 25 bp, Homo sapien
aaaatcagatgctaactagtgctct

SEQ ID NO: 5581074 - DNA, 25 bp, Homo sapien
tcctagtcacgagaattgtcattgc

SEQ ID NO: 5581075 - DNA, 25 bp, Homo sapien
tcaaccacatgctatctaaatccca

SEQ ID NO: 5581076 - DNA, 25 bp, Homo sapien
tagacaccctccagacagaaaggta

SEQ ID NO: 5581077 - DNA, 25 bp, Homo sapien
aaccactggaatggcaaaataggaa

SEQ ID NO: 5581078 - DNA, 25 bp, Homo sapien
gatctgttgtggtgtaaggtttctt

SEQ ID NO: 5581079 - DNA, 25 bp, Homo sapien
atcagtttccgaaaggatgaacggg

SEQ ID NO: 5581080 - DNA, 25 bp, Homo sapien
gctcagctaaggcaaacatgacagc

SEQ ID NO: 5581081 - DNA, 25 bp, Homo sapien
atgagcagagatttgactggcccaa

SEQ ID NO: 5581082 - DNA, 25 bp, Homo sapien
tgatttgtgtagttagaaaggttcc

SEQ ID NO: 5581083 - DNA, 25 bp, Homo sapien
tacgcttgaattgagtagacaccct

SEQ ID NO: 5581084 - DNA, 25 bp, Homo sapien
ggagcagtgaagactctgcagatgt

SEQ ID NO: 5581085 - DNA, 25 bp, Homo sapien
ccaacaaagagtctgtgtgggtgca

SEQ ID NO: 5581086 - DNA, 25 bp, Homo sapien
agaggcatcatcttggagaaaagtc

SEQ ID NO: 5581087 - DNA, 25 bp, Homo sapien
ctagaatactagaacaagaggttaa

SEQ ID NO: 5581088 - DNA, 25 bp, Homo sapien
tgttgcaacctctgaaaagctgaag

SEQ ID NO: 5581089 - DNA, 25 bp, Homo sapien
gaggccggagttctagcttttagca

SEQ ID NO: 5581090 - DNA, 25 bp, Homo sapien
gtatgcaaggattctgggctctgaa

SEQ ID NO: 5581091 - DNA, 25 bp, Homo sapien
tagtaactgtctgtaaaaggaggcc

SEQ ID NO: 5581092 - DNA, 25 bp, Homo sapien
ggaaaaagaccagttgtatgttgca

SEQ ID NO: 5581093 - DNA, 25 bp, Homo sapien
gagaaaatgtatgcaaggattctgg

SEQ ID NO: 5581094 - DNA, 25 bp, Homo sapien
tttgtgatagagtcttgaaacaaga

SEQ ID NO: 5581095 - DNA, 25 bp, Homo sapien
agctgaaggatgtttctaagcctta

SEQ ID NO: 5581096 - DNA, 25 bp, Homo sapien
acggccctatcagtgaaagagaact

SEQ ID NO: 5581097 - DNA, 25 bp, Homo sapien
taggaaaagatgaacggccctatca

SEQ ID NO: 5581098 - DNA, 25 bp, Homo sapien
cccctcgcccttcgctgacgggatc

SEQ ID NO: 5581099 - DNA, 25 bp, Homo sapien
aactactgaattgctggagttggtt

SEQ ID NO: 5581100 - DNA, 25 bp, Homo sapien
tgtggttgtaccagtgtgtctgtcg

SEQ ID NO: 5581101 - DNA, 25 bp, Homo sapien
ccttcgcaccccctcgcccttcgct

SEQ ID NO: 5581102 - DNA, 25 bp, Homo sapien
gggccgaacttaactactgaattgc

SEQ ID NO: 5581103 - DNA, 25 bp, Homo sapien
cagtgtgtctgtcggaacatgattc

SEQ ID NO: 5581104 - DNA, 25 bp, Homo sapien
tgcctccaggccctttcctccgtaa

SEQ ID NO: 5581105 - DNA, 25 bp, Homo sapien
gctgacgggatcagaacttctcccc

SEQ ID NO: 5581106 - DNA, 25 bp, Homo sapien
ggcgctgcgcctgacgccttcgtca

SEQ ID NO: 5581107 - DNA, 25 bp, Homo sapien
tacccaaattacggcagcttgctgc

SEQ ID NO: 5581108 - DNA, 25 bp, Homo sapien
tcctccgtaaactctgtggcgcagt

SEQ ID NO: 5581109 - DNA, 25 bp, Homo sapien
tttcagaagctaataggggattcca

SEQ ID NO: 5581110 - DNA, 25 bp, Homo sapien
tgtgtttagtttgggcacctactca

SEQ ID NO: 5581111 - DNA, 25 bp, Homo sapien
ggcacgtcatggaaacagaaatctt

SEQ ID NO: 5581112 - DNA, 25 bp, Homo sapien
tgacatggggacataccacaaaaga

SEQ ID NO: 5581113 - DNA, 25 bp, Homo sapien
attttcagttttcatgggcacgtca

SEQ ID NO: 5581114 - DNA, 25 bp, Homo sapien
ctgcacctggccccctattatgctt

SEQ ID NO: 5581115 - DNA, 25 bp, Homo sapien
cattgcttagctagtggcctgcacc

SEQ ID NO: 5581116 - DNA, 25 bp, Homo sapien
ggcctgcacccttaaaacacatgtc

SEQ ID NO: 5581117 - DNA, 25 bp, Homo sapien
gctgctgagataaggacatgttcat

SEQ ID NO: 5581118 - DNA, 25 bp, Homo sapien
attgttctgaacctgtggctgagac

SEQ ID NO: 5581119 - DNA, 25 bp, Homo sapien
ttgtagtgacaaatatttcagaagc

SEQ ID NO: 5581120 - DNA, 25 bp, Homo sapien
ctggaaaattacaagctaaagctaa

SEQ ID NO: 5581121 - DNA, 25 bp, Homo sapien
cattagccaagtagttttgaacaat

SEQ ID NO: 5581122 - DNA, 25 bp, Homo sapien
atcttcacttgaatgggtatttttc

SEQ ID NO: 5581123 - DNA, 25 bp, Homo sapien
tactgatcacattgcaaccttctcc

SEQ ID NO: 5581124 - DNA, 25 bp, Homo sapien
tcctccagaattccatgctagagca

SEQ ID NO: 5581125 - DNA, 25 bp, Homo sapien
acagcagcactggcaacatcctact

SEQ ID NO: 5581126 - DNA, 25 bp, Homo sapien
aaagtgaacccaagtagcatcatat

SEQ ID NO: 5581127 - DNA, 25 bp, Homo sapien
taaactcaagattaagacactgtct

SEQ ID NO: 5581128 - DNA, 25 bp, Homo sapien
ttatgctgccattcacctagctacc

SEQ ID NO: 5581129 - DNA, 25 bp, Homo sapien
ttgataagtacagcagcactggcaa

SEQ ID NO: 5581130 - DNA, 25 bp, Homo sapien
aatgcaagctctaaagtgaacccaa

SEQ ID NO: 5581131 - DNA, 25 bp, Homo sapien
tcacacacgtatgggctccatttat

SEQ ID NO: 5581132 - DNA, 25 bp, Homo sapien
cagtgtatatacatgatccccagag

SEQ ID NO: 5581133 - DNA, 25 bp, Homo sapien
cctgaaatcatcagatttgggactc

SEQ ID NO: 5581134 - DNA, 25 bp, Homo sapien
tgacacctcaggtctctcagccttc

SEQ ID NO: 5581135 - DNA, 25 bp, Homo sapien
aggattcctccaagattgaaaccat

SEQ ID NO: 5581136 - DNA, 25 bp, Homo sapien
gttcagccctgaaatcatcagattt

SEQ ID NO: 5581137 - DNA, 25 bp, Homo sapien
tcaaagaagggaactgttcagccct

SEQ ID NO: 5581138 - DNA, 25 bp, Homo sapien
atcaggattcctccaagattgaaac

SEQ ID NO: 5581139 - DNA, 25 bp, Homo sapien
ccagtctgagctgtaaaagacctca

SEQ ID NO: 5581140 - DNA, 25 bp, Homo sapien
agtctgagctgtaaaagacctcatg

SEQ ID NO: 5581141 - DNA, 25 bp, Homo sapien
cctgggcatgacacctcaggtctct

SEQ ID NO: 5581142 - DNA, 25 bp, Homo sapien
aaaatcattttcaccagcctcctac

SEQ ID NO: 5581143 - DNA, 25 bp, Homo sapien
atagaattcttattgagtgtggctt

SEQ ID NO: 5581144 - DNA, 25 bp, Homo sapien
cagtgttcttggactctgcctattt

SEQ ID NO: 5581145 - DNA, 25 bp, Homo sapien
attgagtgtggctttgtcaacaccc

SEQ ID NO: 5581146 - DNA, 25 bp, Homo sapien
tctagggtacagattggaatgaaga

SEQ ID NO: 5581147 - DNA, 25 bp, Homo sapien
tagtggtccccaaaggtcaatatct

SEQ ID NO: 5581148 - DNA, 25 bp, Homo sapien
tgttaccataggtgaataattaagc

SEQ ID NO: 5581149 - DNA, 25 bp, Homo sapien
tagaaataagcacgtgcattaaatc

SEQ ID NO: 5581150 - DNA, 25 bp, Homo sapien
ataggtgaataattacagatgttac

SEQ ID NO: 5581151 - DNA, 25 bp, Homo sapien
tttcctaagggtatagaaataagca

SEQ ID NO: 5581152 - DNA, 25 bp, Homo sapien
ttggaatctaaaatgcacttactca

SEQ ID NO: 5581153 - DNA, 25 bp, Homo sapien
agaggttagagagttttgccacact

SEQ ID NO: 5581154 - DNA, 25 bp, Homo sapien
gacacagataagttaggttacgggc

SEQ ID NO: 5581155 - DNA, 25 bp, Homo sapien
ttcttcaccacgacatgggcagagg

SEQ ID NO: 5581156 - DNA, 25 bp, Homo sapien
gcagcttgactggcagagccttttt

SEQ ID NO: 5581157 - DNA, 25 bp, Homo sapien
ttttgccacactggcggtcgagtga

SEQ ID NO: 5581158 - DNA, 25 bp, Homo sapien
ctggcagagcctttttcttcaccac

SEQ ID NO: 5581159 - DNA, 25 bp, Homo sapien
ttttcttcaccacgacatgggcaga

SEQ ID NO: 5581160 - DNA, 25 bp, Homo sapien
agtaatacagtgattgagcagtgga

SEQ ID NO: 5581161 - DNA, 25 bp, Homo sapien
agacacagataagttaggttacggg

SEQ ID NO: 5581162 - DNA, 25 bp, Homo sapien
gttacgggccaaagtaatacagtga

SEQ ID NO: 5581163 - DNA, 25 bp, Homo sapien
ggcagaggttagagagttttgccac

SEQ ID NO: 5581164 - DNA, 25 bp, Homo sapien
ctgccttcccgtctgtggctgactg

SEQ ID NO: 5581165 - DNA, 25 bp, Homo sapien
tcaggctttgccgcttcatgctcat

SEQ ID NO: 5581166 - DNA, 25 bp, Homo sapien
cagtttcctgcgctgccttcccgtc

SEQ ID NO: 5581167 - DNA, 25 bp, Homo sapien
atcccagctaagtccgtgggagcgt

SEQ ID NO: 5581168 - DNA, 25 bp, Homo sapien
agacaaaggcccagcttctattctg

SEQ ID NO: 5581169 - DNA, 25 bp, Homo sapien
tccaacgatggaaatctgcttaaca

SEQ ID NO: 5581170 - DNA, 25 bp, Homo sapien
aagcgcggctcctttggcctcagtt

SEQ ID NO: 5581171 - DNA, 25 bp, Homo sapien
ggtgtttctgaggtgtcttagcatc

SEQ ID NO: 5581172 - DNA, 25 bp, Homo sapien
gactgttgcagggtagtcagacaaa

SEQ ID NO: 5581173 - DNA, 25 bp, Homo sapien
gacggttaggcgttagaagcttcta

SEQ ID NO: 5581174 - DNA, 25 bp, Homo sapien
tgtcttagcatcagaaaaggaaaaa

SEQ ID NO: 5581175 - DNA, 25 bp, Homo sapien
atcatcttggaaataaaatctgtac

SEQ ID NO: 5581176 - DNA, 25 bp, Homo sapien
tatgtgacaccccaggattttagca

SEQ ID NO: 5581177 - DNA, 25 bp, Homo sapien
tgttgctaaaaagtatttcccatct

SEQ ID NO: 5581178 - DNA, 25 bp, Homo sapien
cttggaaataaaatctgtacgtact

SEQ ID NO: 5581179 - DNA, 25 bp, Homo sapien
cgaggtttagcgtgtctatgtgaca

SEQ ID NO: 5581180 - DNA, 25 bp, Homo sapien
tagcagatacacaagtgaaaaacca

SEQ ID NO: 5581181 - DNA, 25 bp, Homo sapien
caagtgaaaaaccatgttgctaaaa

SEQ ID NO: 5581182 - DNA, 25 bp, Homo sapien
cccaggattttagcagatacacaag

SEQ ID NO: 5581183 - DNA, 25 bp, Homo sapien
atctgtacgtacttgggaataaaat

SEQ ID NO: 5581184 - DNA, 25 bp, Homo sapien
gagacgaggtttagcgtgtctatgt

SEQ ID NO: 5581185 - DNA, 25 bp, Homo sapien
gacaccccaggattttagcagatac

SEQ ID NO: 5581186 - DNA, 25 bp, Homo sapien
tcaacctgaatatttcgactggcgg

SEQ ID NO: 5581187 - DNA, 25 bp, Homo sapien
ccgccagtcgaaatattcaggttga

SEQ ID NO: 5581188 - DNA, 25 bp, Homo sapien
ggaggtacatgaagactggctcctc

SEQ ID NO: 5581189 - DNA, 25 bp, Homo sapien
aatgctaagattgatcagtgggttc

SEQ ID NO: 5581190 - DNA, 25 bp, Homo sapien
agtgggttcaagtgttttaagcctg

SEQ ID NO: 5581191 - DNA, 25 bp, Homo sapien
aattagatgttagctgtaaaggcat

SEQ ID NO: 5581192 - DNA, 25 bp, Homo sapien
attgcatcccatcgggaggtacatg

SEQ ID NO: 5581193 - DNA, 25 bp, Homo sapien
gtatttcaagagcagcatataactg

SEQ ID NO: 5581194 - DNA, 25 bp, Homo sapien
actaagttatggatttggccaattg

SEQ ID NO: 5581195 - DNA, 25 bp, Homo sapien
tgcctggacccaatctagcattttc

SEQ ID NO: 5581196 - DNA, 25 bp, Homo sapien
aaaggcatcattaaatttagctccc

SEQ ID NO: 5581197 - DNA, 25 bp, Homo sapien
cacttaaaaattgtagcacccttag

SEQ ID NO: 5581198 - DNA, 25 bp, Homo sapien
ccttagataatttttgcctggaccc

SEQ ID NO: 5581199 - DNA, 25 bp, Homo sapien
ttggctctatctatgaagggtattc

SEQ ID NO: 5581200 - DNA, 25 bp, Homo sapien
acatatcagcataagaaaatctgtt

SEQ ID NO: 5581201 - DNA, 25 bp, Homo sapien
aaggaagccaactttgtgcgtgttt

SEQ ID NO: 5581202 - DNA, 25 bp, Homo sapien
atgattggtgtagcaccacactgga

SEQ ID NO: 5581203 - DNA, 25 bp, Homo sapien
gtgatcaaagagatattgacaacta

SEQ ID NO: 5581204 - DNA, 25 bp, Homo sapien
aagacaaagaccaatgttacactct

SEQ ID NO: 5581205 - DNA, 25 bp, Homo sapien
gcaccacactggattgagttaccta

SEQ ID NO: 5581206 - DNA, 25 bp, Homo sapien
ttgacaactaaattaagatgaactt

SEQ ID NO: 5581207 - DNA, 25 bp, Homo sapien
ttcaaatatgcttggtagtctgttc

SEQ ID NO: 5581208 - DNA, 25 bp, Homo sapien
atattttaaaggtactatgaaggaa

SEQ ID NO: 5581209 - DNA, 25 bp, Homo sapien
aaaaggtaggcttctacatatcagc

SEQ ID NO: 5581210 - DNA, 25 bp, Homo sapien
ggaccgtgggacttcggggcgacga

SEQ ID NO: 5581211 - DNA, 25 bp, Homo sapien
tcgtcgccccgaagtcccacggtcc

SEQ ID NO: 5581212 - DNA, 25 bp, Homo sapien
ctggccataaaccaggatgctttgg

SEQ ID NO: 5581213 - DNA, 25 bp, Homo sapien
taaagcaattttagccattacgtgc

SEQ ID NO: 5581214 - DNA, 25 bp, Homo sapien
ttagccattacgtgcaggtgttatt

SEQ ID NO: 5581215 - DNA, 25 bp, Homo sapien
aattttagccattacgtgcaggtgt

SEQ ID NO: 5581216 - DNA, 25 bp, Homo sapien
cgtgcaggtgttattagagttactc

SEQ ID NO: 5581217 - DNA, 25 bp, Homo sapien
attacgtgcaggtgttattagagtt

SEQ ID NO: 5581218 - DNA, 25 bp, Homo sapien
tacgtgcaggtgttattagagttac

SEQ ID NO: 5581219 - DNA, 25 bp, Homo sapien
ataaaccaggatgctttgggaatgg

SEQ ID NO: 5581220 - DNA, 25 bp, Homo sapien
agagttactctagctcactggtctc

SEQ ID NO: 5581221 - DNA, 25 bp, Homo sapien
tactctagctcactggtctctggcc

SEQ ID NO: 5581222 - DNA, 25 bp, Homo sapien
ctcactggtctctggccataaacca

SEQ ID NO: 5581223 - DNA, 25 bp, Homo sapien
cgggaccagggccctgcgtacggca

SEQ ID NO: 5581224 - DNA, 25 bp, Homo sapien
tgccgtacgcagggccctggtcccg

SEQ ID NO: 5581225 - DNA, 25 bp, Homo sapien
gtccagtggttttttaagctctagc

SEQ ID NO: 5581226 - DNA, 25 bp, Homo sapien
ttcctcataaggttcttgtcacttc

SEQ ID NO: 5581227 - DNA, 25 bp, Homo sapien
ttctatgtcaccaactagctcttct

SEQ ID NO: 5581228 - DNA, 25 bp, Homo sapien
ggaaacaattaagttcagaacagga

SEQ ID NO: 5581229 - DNA, 25 bp, Homo sapien
tttaagctctagcatgagtcccttc

SEQ ID NO: 5581230 - DNA, 25 bp, Homo sapien
tattggaaacaattaagttcagaac

SEQ ID NO: 5581231 - DNA, 25 bp, Homo sapien
aagctctagcatgagtcccttcctc

SEQ ID NO: 5581232 - DNA, 25 bp, Homo sapien
attaagttcagaacaggaatgctct

SEQ ID NO: 5581233 - DNA, 25 bp, Homo sapien
aatctctaattatgtccagtggttt

SEQ ID NO: 5581234 - DNA, 25 bp, Homo sapien
tgtcacttctatgtcaccaactagc

SEQ ID NO: 5581235 - DNA, 25 bp, Homo sapien
tcagaacaggaatgctcttttgtgc

SEQ ID NO: 5581236 - DNA, 25 bp, Homo sapien
gaaaacaaagattacctatccacaa

SEQ ID NO: 5581237 - DNA, 25 bp, Homo sapien
tggaagtatccacgaaatagaatca

SEQ ID NO: 5581238 - DNA, 25 bp, Homo sapien
tgtcaagaacacttaagtagaaatc

SEQ ID NO: 5581239 - DNA, 25 bp, Homo sapien
tgtgattaagagaccatagtagtca

SEQ ID NO: 5581240 - DNA, 25 bp, Homo sapien
tttaaaagggtgcagtaaaatgtca

SEQ ID NO: 5581241 - DNA, 25 bp, Homo sapien
atagaatcaatgtgattaagagacc

SEQ ID NO: 5581242 - DNA, 25 bp, Homo sapien
aaatgtacatcacagacaattttga

SEQ ID NO: 5581243 - DNA, 25 bp, Homo sapien
ccaaggaagattacaatcacccata

SEQ ID NO: 5581244 - DNA, 25 bp, Homo sapien
ttctcttgcctaaactctatgctca

SEQ ID NO: 5581245 - DNA, 25 bp, Homo sapien
gaatgtttttcagcagtcgggtata

SEQ ID NO: 5581246 - DNA, 25 bp, Homo sapien
ataccaaaaagcccaaggaagatta

SEQ ID NO: 5581247 - DNA, 25 bp, Homo sapien
ccaggaactgccccactactgtgtt

SEQ ID NO: 5581248 - DNA, 25 bp, Homo sapien
aaataagataacagacgcttggcgg

SEQ ID NO: 5581249 - DNA, 25 bp, Homo sapien
tccttagtcaccggtgagctagagc

SEQ ID NO: 5581250 - DNA, 25 bp, Homo sapien
ccccactactgtgttgcgggggtgg

SEQ ID NO: 5581251 - DNA, 25 bp, Homo sapien
ggagggttttgctagtgcttggaga

SEQ ID NO: 5581252 - DNA, 25 bp, Homo sapien
gagcggccaccacaactctggaatg

SEQ ID NO: 5581253 - DNA, 25 bp, Homo sapien
gaccaatgtgaaggcaccgttcctg

SEQ ID NO: 5581254 - DNA, 25 bp, Homo sapien
caccacaactctggaatgaggccca

SEQ ID NO: 5581255 - DNA, 25 bp, Homo sapien
gtctgcttttagggagtctgccatc

SEQ ID NO: 5581256 - DNA, 25 bp, Homo sapien
tgtgcagattccagtaaataagata

SEQ ID NO: 5581257 - DNA, 25 bp, Homo sapien
tttctttttggtcatgggctctcag

SEQ ID NO: 5581258 - DNA, 25 bp, Homo sapien
ttgaagttcaaacatgtgcaggtat

SEQ ID NO: 5581259 - DNA, 25 bp, Homo sapien
ctagtaactcaacagtccacagtgc

SEQ ID NO: 5581260 - DNA, 25 bp, Homo sapien
gatgccactgaatcacccacagggt

SEQ ID NO: 5581261 - DNA, 25 bp, Homo sapien
accaaggcagacatgaatacagata

SEQ ID NO: 5581262 - DNA, 25 bp, Homo sapien
tccacagtgcaagacaggctgtgtg

SEQ ID NO: 5581263 - DNA, 25 bp, Homo sapien
tgtggtgtacccacgcctgtacagc

SEQ ID NO: 5581264 - DNA, 25 bp, Homo sapien
caactggccatgacggtggcctctg

SEQ ID NO: 5581265 - DNA, 25 bp, Homo sapien
tgtgcaggtatggctttgaacagtt

SEQ ID NO: 5581266 - DNA, 25 bp, Homo sapien
atgttgaaaagaccaaggcagacat

SEQ ID NO: 5581267 - DNA, 25 bp, Homo sapien
gaatacagatatgcggtgcttacct

SEQ ID NO: 5581268 - DNA, 25 bp, Homo sapien
tcaatgggaccaacctccttgaggt

SEQ ID NO: 5581269 - DNA, 25 bp, Homo sapien
gaggccctggccatctatccaccct

SEQ ID NO: 5581270 - DNA, 25 bp, Homo sapien
gaatgaactgatcgcccgctacatc

SEQ ID NO: 5581271 - DNA, 25 bp, Homo sapien
tccagacaatggcaaccatgtcctc

SEQ ID NO: 5581272 - DNA, 25 bp, Homo sapien
atcaagggaaatccagtccaagttg

SEQ ID NO: 5581273 - DNA, 25 bp, Homo sapien
ccaggtttccaaggacaaggctttc

SEQ ID NO: 5581274 - DNA, 25 bp, Homo sapien
cgctacatcaagctgagaacgggga

SEQ ID NO: 5581275 - DNA, 25 bp, Homo sapien
ctgcccagctcatctccgcgccttc

SEQ ID NO: 5581276 - DNA, 25 bp, Homo sapien
caagatgtatggtcggaatgaactg

SEQ ID NO: 5581277 - DNA, 25 bp, Homo sapien
gcccagacattgagcagagcttcca

SEQ ID NO: 5581278 - DNA, 25 bp, Homo sapien
ctgcggccgccggaaaataattttg

SEQ ID NO: 5581279 - DNA, 25 bp, Homo sapien
tttgtctgatgaaggcaagatgtat

SEQ ID NO: 5581280 - DNA, 25 bp, Homo sapien
actccatctacggccgcccacgccg

SEQ ID NO: 5581281 - DNA, 25 bp, Homo sapien
agtctccgccccaacttgctccatc

SEQ ID NO: 5581282 - DNA, 25 bp, Homo sapien
cgggacctggcaggtacttcccgga

SEQ ID NO: 5581283 - DNA, 25 bp, Homo sapien
cgcctcggcacaccattgctccccg

SEQ ID NO: 5581284 - DNA, 25 bp, Homo sapien
cagtgcgcctcggcacaccattgct

SEQ ID NO: 5581285 - DNA, 25 bp, Homo sapien
gacggcgcccccgcctactccatct

SEQ ID NO: 5581286 - DNA, 25 bp, Homo sapien
tatacggtgccctcgctcttgggtc

SEQ ID NO: 5581287 - DNA, 25 bp, Homo sapien
acttgctccatctacggccgcagag

SEQ ID NO: 5581288 - DNA, 25 bp, Homo sapien
ccgcctactccatctacggccgccc

SEQ ID NO: 5581289 - DNA, 25 bp, Homo sapien
cacaccattgctccccgaaactggg

SEQ ID NO: 5581290 - DNA, 25 bp, Homo sapien
cggcctatacggtgccctcgctctt

SEQ ID NO: 5581291 - DNA, 25 bp, Homo sapien
ggacttcgctcccccaagacaacac

SEQ ID NO: 5581292 - DNA, 25 bp, Homo sapien
cccagttcacgattctggcgcggac

SEQ ID NO: 5581293 - DNA, 25 bp, Homo sapien
gccccccagttcacgattctggcgc

SEQ ID NO: 5581294 - DNA, 25 bp, Homo sapien
gcccctgcgcctatcaggtcgtgag

SEQ ID NO: 5581295 - DNA, 25 bp, Homo sapien
cgggccccccagttcacgattctgg

SEQ ID NO: 5581296 - DNA, 25 bp, Homo sapien
cggcctacaacgtggatcagcaccg

SEQ ID NO: 5581297 - DNA, 25 bp, Homo sapien
tcgctcccccaagacaacactcgga

SEQ ID NO: 5581298 - DNA, 25 bp, Homo sapien
cagttcacgattctggcgcggactt

SEQ ID NO: 5581299 - DNA, 25 bp, Homo sapien
gggcccctgcgcctatcaggtcgtg

SEQ ID NO: 5581300 - DNA, 25 bp, Homo sapien
gcgcggacttcgctcccccaagaca

SEQ ID NO: 5581301 - DNA, 25 bp, Homo sapien
ctcccccaagacaacactcggaagc

SEQ ID NO: 5581302 - DNA, 25 bp, Homo sapien
tgaaccagtgcacagatgtggtgga

SEQ ID NO: 5581303 - DNA, 25 bp, Homo sapien
atgagatgcccacgacccttcctca

SEQ ID NO: 5581304 - DNA, 25 bp, Homo sapien
gcatttcatccgggcggagaccaag

SEQ ID NO: 5581305 - DNA, 25 bp, Homo sapien
gagcatttcatccgggcggagacca

SEQ ID NO: 5581306 - DNA, 25 bp, Homo sapien
tctatccccggaccaacaagcagaa

SEQ ID NO: 5581307 - DNA, 25 bp, Homo sapien
cacgacccttcctcagggcaccatc

SEQ ID NO: 5581308 - DNA, 25 bp, Homo sapien
tcctcagggcaccatcaacatgaac

SEQ ID NO: 5581309 - DNA, 25 bp, Homo sapien
ccatcaacatgaaccagtgcacaga

SEQ ID NO: 5581310 - DNA, 25 bp, Homo sapien
ggagatgctcatggtctatccccgg

SEQ ID NO: 5581311 - DNA, 25 bp, Homo sapien
ggctggagatgctcatggtctatcc

SEQ ID NO: 5581312 - DNA, 25 bp, Homo sapien
cagggcaccatcaacatgaaccagt

SEQ ID NO: 5581313 - DNA, 25 bp, Homo sapien
acctgacgcaggcaaaacccattta

SEQ ID NO: 5581314 - DNA, 25 bp, Homo sapien
atcttcaacaagagcaagtgtcaga

SEQ ID NO: 5581315 - DNA, 25 bp, Homo sapien
agaactgcttcaagccccgcgagtc

SEQ ID NO: 5581316 - DNA, 25 bp, Homo sapien
gctccagatgggaccgactttgaca

SEQ ID NO: 5581317 - DNA, 25 bp, Homo sapien
gccgcgccgaccatgtcggcagcca

SEQ ID NO: 5581318 - DNA, 25 bp, Homo sapien
cccagtgcaccggtctcggaaatgg

SEQ ID NO: 5581319 - DNA, 25 bp, Homo sapien
tttacgagcacggcctcttgcgcta

SEQ ID NO: 5581320 - DNA, 25 bp, Homo sapien
atggcagcgacggttcttcatcctt

SEQ ID NO: 5581321 - DNA, 25 bp, Homo sapien
tcgcatctgctcaacgacgaggacc

SEQ ID NO: 5581322 - DNA, 25 bp, Homo sapien
tcttgcgctacgccctggatgagat

SEQ ID NO: 5581323 - DNA, 25 bp, Homo sapien
ccgtgcaggaaattccaggccaaca

SEQ ID NO: 5581324 - DNA, 25 bp, Homo sapien
ttatgtctgaaagttaaatctggac

SEQ ID NO: 5581325 - DNA, 25 bp, Homo sapien
gtccagatttaactttcagacataa

SEQ ID NO: 5581326 - DNA, 25 bp, Homo sapien
cacattcagggatcacacagttctg

SEQ ID NO: 5581327 - DNA, 25 bp, Homo sapien
gcaactgccaatcccgctgaagagg

SEQ ID NO: 5581328 - DNA, 25 bp, Homo sapien
gcacgcatttccctgaaggcagccc

SEQ ID NO: 5581329 - DNA, 25 bp, Homo sapien
ctgcacggtgcacgcatttccctga

SEQ ID NO: 5581330 - DNA, 25 bp, Homo sapien
cattcagggatcacacagttctgcc

SEQ ID NO: 5581331 - DNA, 25 bp, Homo sapien
actgccaatcccgctgaagaggcct

SEQ ID NO: 5581332 - DNA, 25 bp, Homo sapien
cagggatcacacagttctgcctgtt

SEQ ID NO: 5581333 - DNA, 25 bp, Homo sapien
gtgcacgcatttccctgaaggcagc

SEQ ID NO: 5581334 - DNA, 25 bp, Homo sapien
acgcatttccctgaaggcagcccct

SEQ ID NO: 5581335 - DNA, 25 bp, Homo sapien
aggttcacattcagggatcacacag

SEQ ID NO: 5581336 - DNA, 25 bp, Homo sapien
acggtgcacgcatttccctgaaggc

SEQ ID NO: 5581337 - DNA, 25 bp, Homo sapien
tgcctccagcactggacacacctgt

SEQ ID NO: 5581338 - DNA, 25 bp, Homo sapien
aggtcttgggtctgccacgttctct

SEQ ID NO: 5581339 - DNA, 25 bp, Homo sapien
tccaagtcctttgaacttcaggttc

SEQ ID NO: 5581340 - DNA, 25 bp, Homo sapien
caggagctaactcagaccccaaagc

SEQ ID NO: 5581341 - DNA, 25 bp, Homo sapien
ggacagtcacgacaaggacttgcct

SEQ ID NO: 5581342 - DNA, 25 bp, Homo sapien
ctctgcttcccagtcccgccagcct

SEQ ID NO: 5581343 - DNA, 25 bp, Homo sapien
gccaggagctaactcagaccccaaa

SEQ ID NO: 5581344 - DNA, 25 bp, Homo sapien
aggcagccccttcttcggaagcagc

SEQ ID NO: 5581345 - DNA, 25 bp, Homo sapien
aaggacttgcctccagcactggaca

SEQ ID NO: 5581346 - DNA, 25 bp, Homo sapien
ttcttcggaagcagctgttccaggc

SEQ ID NO: 5581347 - DNA, 25 bp, Homo sapien
gggtctgccacgttctctagctctc

SEQ ID NO: 5581348 - DNA, 25 bp, Homo sapien
agaattatggatgacaatttcaatg

SEQ ID NO: 5581349 - DNA, 25 bp, Homo sapien
tgaaaaaacctgtcagagtacctgc

SEQ ID NO: 5581350 - DNA, 25 bp, Homo sapien
atccaaaaagtgaagctaaaagtgt

SEQ ID NO: 5581351 - DNA, 25 bp, Homo sapien
gctgaaccacaaacaatgagtgttc

SEQ ID NO: 5581352 - DNA, 25 bp, Homo sapien
atgtgatgatccaaaaagtgaagct

SEQ ID NO: 5581353 - DNA, 25 bp, Homo sapien
agtgaagctaaaagtgttcctaaac

SEQ ID NO: 5581354 - DNA, 25 bp, Homo sapien
agagtacctgctgaaccacaaacaa

SEQ ID NO: 5581355 - DNA, 25 bp, Homo sapien
cctgtcagagtacctgctgaaccac

SEQ ID NO: 5581356 - DNA, 25 bp, Homo sapien
caaagatatgaaaaaacctgtcaga

SEQ ID NO: 5581357 - DNA, 25 bp, Homo sapien
tgacaatttcaatgtaaatggacct

SEQ ID NO: 5581358 - DNA, 25 bp, Homo sapien
aaaccatgtgatgatccaaaaagtg

SEQ ID NO: 5581359 - DNA, 25 bp, Homo sapien
tttgaccatctaaaggccacaggtc

SEQ ID NO: 5581360 - DNA, 25 bp, Homo sapien
tagagattctgcctgtgcttttgtt

SEQ ID NO: 5581361 - DNA, 25 bp, Homo sapien
tacattgtggaagattattttttat

SEQ ID NO: 5581362 - DNA, 25 bp, Homo sapien
gagtgttcttatcagctgtacaacc

SEQ ID NO: 5581363 - DNA, 25 bp, Homo sapien
agctgtacaacctgccatagtgaat

SEQ ID NO: 5581364 - DNA, 25 bp, Homo sapien
gcctgtgcttttgtttgactgtctc

SEQ ID NO: 5581365 - DNA, 25 bp, Homo sapien
gcaagagcaccttcatcatcgtctt

SEQ ID NO: 5581366 - DNA, 25 bp, Homo sapien
gccatagtgaatttccatctcggaa

SEQ ID NO: 5581367 - DNA, 25 bp, Homo sapien
ctaaagagttaaaatttcagtgatc

SEQ ID NO: 5581368 - DNA, 25 bp, Homo sapien
aaacgtaaaaacagatagagattct

SEQ ID NO: 5581369 - DNA, 25 bp, Homo sapien
tctcggaataaactttttgaccatc

SEQ ID NO: 5581370 - DNA, 25 bp, Homo sapien
gcctcacctgcacaggcagagaaca

SEQ ID NO: 5581371 - DNA, 25 bp, Homo sapien
tgtctgacttggaaacatgagcttc

SEQ ID NO: 5581372 - DNA, 25 bp, Homo sapien
cccagggggaacatcctactacttg

SEQ ID NO: 5581373 - DNA, 25 bp, Homo sapien
acacataggaaaggcaccctgcctt

SEQ ID NO: 5581374 - DNA, 25 bp, Homo sapien
ataaggcagcacattaaaaccaagc

SEQ ID NO: 5581375 - DNA, 25 bp, Homo sapien
agtgatggaggctcatgtctgcttg

SEQ ID NO: 5581376 - DNA, 25 bp, Homo sapien
tgcttgagagaaccttgcacatccc

SEQ ID NO: 5581377 - DNA, 25 bp, Homo sapien
ctgccttgcagctggacctatagtc

SEQ ID NO: 5581378 - DNA, 25 bp, Homo sapien
agcacaacaggctcagctataaggc

SEQ ID NO: 5581379 - DNA, 25 bp, Homo sapien
ggcagggaagttcctaccccatcca

SEQ ID NO: 5581380 - DNA, 25 bp, Homo sapien
agcaggcaggccttctagcttaggc

SEQ ID NO: 5581381 - DNA, 25 bp, Homo sapien
aaggaagctcttggtatacggaaaa

SEQ ID NO: 5581382 - DNA, 25 bp, Homo sapien
ctcaaggaacaagtgctatttaaag

SEQ ID NO: 5581383 - DNA, 25 bp, Homo sapien
aagaggtgtgaggatcaacactttt

SEQ ID NO: 5581384 - DNA, 25 bp, Homo sapien
tggagactcctgagatgctgctcat

SEQ ID NO: 5581385 - DNA, 25 bp, Homo sapien
gattggcagttgcaaactagtggtc

SEQ ID NO: 5581386 - DNA, 25 bp, Homo sapien
tggtaattcaagaattggagactcc

SEQ ID NO: 5581387 - DNA, 25 bp, Homo sapien
tcattttggagggtaagtctctcaa

SEQ ID NO: 5581388 - DNA, 25 bp, Homo sapien
ggtgcaagactataaagaggtgtga

SEQ ID NO: 5581389 - DNA, 25 bp, Homo sapien
aaactagtggtcctcagcgtgcttt

SEQ ID NO: 5581390 - DNA, 25 bp, Homo sapien
cgtggttgaagtgatataatgtcta

SEQ ID NO: 5581391 - DNA, 25 bp, Homo sapien
actgtgctaggtgcaagactataaa

SEQ ID NO: 5581392 - DNA, 25 bp, Homo sapien
gaacttaagacatagtgtaaacctt

SEQ ID NO: 5581393 - DNA, 25 bp, Homo sapien
aaggtttacactatgtcttaagttc

SEQ ID NO: 5581394 - DNA, 25 bp, Homo sapien
tgtcataaaaagcacgctgaggacc

SEQ ID NO: 5581395 - DNA, 25 bp, Homo sapien
agcagcatctcaggagtctccaatt

SEQ ID NO: 5581396 - DNA, 25 bp, Homo sapien
aaaagtgaagtattgataagtgctc

SEQ ID NO: 5581397 - DNA, 25 bp, Homo sapien
ctcagctaatatgagcagcatctca

SEQ ID NO: 5581398 - DNA, 25 bp, Homo sapien
ataaaagtgttgatcctcacacctc

SEQ ID NO: 5581399 - DNA, 25 bp, Homo sapien
aattcttgaattaccagggagtatt

SEQ ID NO: 5581400 - DNA, 25 bp, Homo sapien
gcacctagcacagtggagtgaaaca

SEQ ID NO: 5581401 - DNA, 25 bp, Homo sapien
agaaaatggaagcaaccatgcctaa

SEQ ID NO: 5581402 - DNA, 25 bp, Homo sapien
ttgagagacttaccctccaaaatga

SEQ ID NO: 5581403 - DNA, 25 bp, Homo sapien
ctttttccgtataccaagagcttcc

SEQ ID NO: 5581404 - DNA, 25 bp, Homo sapien
cacgctgaggaccactagtttgcaa

SEQ ID NO: 5581405 - DNA, 25 bp, Homo sapien
ctgcaagaacgtaagaaatttttgt

SEQ ID NO: 5581406 - DNA, 25 bp, Homo sapien
tgcaaaagcacagctactttttcct

SEQ ID NO: 5581407 - DNA, 25 bp, Homo sapien
gcctggtacacagtacctctcaaac

SEQ ID NO: 5581408 - DNA, 25 bp, Homo sapien
agtacctctcaaactgcaagaacgt

SEQ ID NO: 5581409 - DNA, 25 bp, Homo sapien
tcaaactgcaagaacgtaagaaatt

SEQ ID NO: 5581410 - DNA, 25 bp, Homo sapien
tgttcactataaaattacagacctg

SEQ ID NO: 5581411 - DNA, 25 bp, Homo sapien
ctcttttgcaaaagcacagctactt

SEQ ID NO: 5581412 - DNA, 25 bp, Homo sapien
ttctcttaaaacaatggcttttctc

SEQ ID NO: 5581413 - DNA, 25 bp, Homo sapien
atttcaaaacactcagagggcaccg

SEQ ID NO: 5581414 - DNA, 25 bp, Homo sapien
aaaaaagattcatttcaaaacactc

SEQ ID NO: 5581415 - DNA, 25 bp, Homo sapien
tacagacctgtacaaactttttcta

SEQ ID NO: 5581416 - DNA, 25 bp, Homo sapien
tccttgctccttaaccccttctgtc

SEQ ID NO: 5581417 - DNA, 25 bp, Homo sapien
taagagctagtctgctgctgcctcc

SEQ ID NO: 5581418 - DNA, 25 bp, Homo sapien
cacacctgctctgcagtaggccctt

SEQ ID NO: 5581419 - DNA, 25 bp, Homo sapien
ccctcaaaagctttaagagctagtc

SEQ ID NO: 5581420 - DNA, 25 bp, Homo sapien
ctgctctgcagtaggcccttcctta

SEQ ID NO: 5581421 - DNA, 25 bp, Homo sapien
cccagcaatgctgtcttaccttcct

SEQ ID NO: 5581422 - DNA, 25 bp, Homo sapien
aagcaagtcctttaattagccattc

SEQ ID NO: 5581423 - DNA, 25 bp, Homo sapien
ctgcacccggcccatctatagcttt

SEQ ID NO: 5581424 - DNA, 25 bp, Homo sapien
tgcctcctactgaattccttgctcc

SEQ ID NO: 5581425 - DNA, 25 bp, Homo sapien
gtgtcattccttagtgaccaactcc

SEQ ID NO: 5581426 - DNA, 25 bp, Homo sapien
tctcttatgacttttggcccagcaa

SEQ ID NO: 5581427 - DNA, 25 bp, Homo sapien
accccctggccgtcacttccgggca

SEQ ID NO: 5581428 - DNA, 25 bp, Homo sapien
gccccagaatcggtcctgggaataa

SEQ ID NO: 5581429 - DNA, 25 bp, Homo sapien
cctctcattggctcgcgtcccacca

SEQ ID NO: 5581430 - DNA, 25 bp, Homo sapien
cccttctctccagcccgcgactgcc

SEQ ID NO: 5581431 - DNA, 25 bp, Homo sapien
cgcgactgcccatccaaaccgaggc

SEQ ID NO: 5581432 - DNA, 25 bp, Homo sapien
cccctccgggcccgcctctcattgg

SEQ ID NO: 5581433 - DNA, 25 bp, Homo sapien
ccagaatcggtcctgggaataaagg

SEQ ID NO: 5581434 - DNA, 25 bp, Homo sapien
cgtcacttccgggcaacggagcccg

SEQ ID NO: 5581435 - DNA, 25 bp, Homo sapien
ctggccgtcacttccgggcaacgga

SEQ ID NO: 5581436 - DNA, 25 bp, Homo sapien
ctccccttctctccagcccgcgact

SEQ ID NO: 5581437 - DNA, 25 bp, Homo sapien
gactgcccatccaaaccgaggcctc

SEQ ID NO: 5581438 - DNA, 25 bp, Homo sapien
aagtagacattctgattcgtattcg

SEQ ID NO: 5581439 - DNA, 25 bp, Homo sapien
cgaatacgaatcagaatgtctactt

SEQ ID NO: 5581440 - DNA, 25 bp, Homo sapien
gtttgagaggtactgtgtaccaggc

SEQ ID NO: 5581441 - DNA, 25 bp, Homo sapien
gccaggaaaaagtagctgtgctttt

SEQ ID NO: 5581442 - DNA, 25 bp, Homo sapien
ggtctgtaattttatagtgaacaaa

SEQ ID NO: 5581443 - DNA, 25 bp, Homo sapien
tgcagtttgagaggtactgtgtacc

SEQ ID NO: 5581444 - DNA, 25 bp, Homo sapien
tttttgccaggaaaaagtagctgtg

SEQ ID NO: 5581445 - DNA, 25 bp, Homo sapien
tgcaaaagagaaaagccattgtttt

SEQ ID NO: 5581446 - DNA, 25 bp, Homo sapien
gtagctgtgcttttgcaaaagagaa

SEQ ID NO: 5581447 - DNA, 25 bp, Homo sapien
tgtgtaccaggcaatgtttttcaaa

SEQ ID NO: 5581448 - DNA, 25 bp, Homo sapien
tagaaaaagtttgtacaggtctgta

SEQ ID NO: 5581449 - DNA, 25 bp, Homo sapien
tacgttcttgcagtttgagaggtac

SEQ ID NO: 5581450 - DNA, 25 bp, Homo sapien
agccattgttttaagagaatacatt

SEQ ID NO: 5581451 - DNA, 25 bp, Homo sapien
gcgtgctgcctcactgggtctcact

SEQ ID NO: 5581452 - DNA, 25 bp, Homo sapien
tcctagactgctgacttgcccccac

SEQ ID NO: 5581453 - DNA, 25 bp, Homo sapien
ttgcctcagtggcctctgcagcaga

SEQ ID NO: 5581454 - DNA, 25 bp, Homo sapien
gggtctcactccagccgcgctttgc

SEQ ID NO: 5581455 - DNA, 25 bp, Homo sapien
gagggccggctccttggtcattatt

SEQ ID NO: 5581456 - DNA, 25 bp, Homo sapien
agggcctgccctcacacttggagtg

SEQ ID NO: 5581457 - DNA, 25 bp, Homo sapien
gcccccacagcaacccccttctgtc

SEQ ID NO: 5581458 - DNA, 25 bp, Homo sapien
tgcagcagagcctcatgccagctct

SEQ ID NO: 5581459 - DNA, 25 bp, Homo sapien
ctgtgccacctcctagactgctgac

SEQ ID NO: 5581460 - DNA, 25 bp, Homo sapien
ctcacacttggagtgacccaggagg

SEQ ID NO: 5581461 - DNA, 25 bp, Homo sapien
ccctcttcttgggatgcccctgtta

SEQ ID NO: 5581462 - DNA, 25 bp, Homo sapien
aaataacaggggcatcccaagaaga

SEQ ID NO: 5581463 - DNA, 25 bp, Homo sapien
acatgtgaataatgaccaaggagcc

SEQ ID NO: 5581464 - DNA, 25 bp, Homo sapien
tgaggctctgctgcagaggccactg

SEQ ID NO: 5581465 - DNA, 25 bp, Homo sapien
aaaataacaggggcatcccaagaag

SEQ ID NO: 5581466 - DNA, 25 bp, Homo sapien
ggcaggccctggcacactgcttttc

SEQ ID NO: 5581467 - DNA, 25 bp, Homo sapien
gaaaaataacaggggcatcccaaga

SEQ ID NO: 5581468 - DNA, 25 bp, Homo sapien
acagagatgacatgtgaataatgac

SEQ ID NO: 5581469 - DNA, 25 bp, Homo sapien
gcacctcctgggtcactccaagtgt

SEQ ID NO: 5581470 - DNA, 25 bp, Homo sapien
agcacctcctgggtcactccaagtg

SEQ ID NO: 5581471 - DNA, 25 bp, Homo sapien
gtggcacagagatgacatgtgaata

SEQ ID NO: 5581472 - DNA, 25 bp, Homo sapien
ggcacagagatgacatgtgaataat

SEQ ID NO: 5581473 - DNA, 25 bp, Homo sapien
gagccccatagctcctccgtccggg

SEQ ID NO: 5581474 - DNA, 25 bp, Homo sapien
cccggacggaggagctatggggctc

SEQ ID NO: 5581475 - DNA, 25 bp, Homo sapien
gaagtgtatgttaagaatcagaatt

SEQ ID NO: 5581476 - DNA, 25 bp, Homo sapien
tctaggatactatgaagtgtatgtt

SEQ ID NO: 5581477 - DNA, 25 bp, Homo sapien
ataattgacgagaagtctgactgga

SEQ ID NO: 5581478 - DNA, 25 bp, Homo sapien
aagcacttaggatgcataccttgac

SEQ ID NO: 5581479 - DNA, 25 bp, Homo sapien
tgcaacacggcactttcctttggtt

SEQ ID NO: 5581480 - DNA, 25 bp, Homo sapien
gagggcaagctcaagcacttaggat

SEQ ID NO: 5581481 - DNA, 25 bp, Homo sapien
atggacgctgatttagactttgcaa

SEQ ID NO: 5581482 - DNA, 25 bp, Homo sapien
aacaaactatagctcaatgtggctt

SEQ ID NO: 5581483 - DNA, 25 bp, Homo sapien
ctaaaggtttaaagcagagtgttct

SEQ ID NO: 5581484 - DNA, 25 bp, Homo sapien
caagagtcctgattgaacaagggaa

SEQ ID NO: 5581485 - DNA, 25 bp, Homo sapien
gagaagtctgactggaaagtatttt

SEQ ID NO: 5581486 - DNA, 25 bp, Homo sapien
aatcacaagaaattgtggggatcag

SEQ ID NO: 5581487 - DNA, 25 bp, Homo sapien
tgccactaaggtcatctccggtgtc

SEQ ID NO: 5581488 - DNA, 25 bp, Homo sapien
agaaaacccaggaaggtgtatccat

SEQ ID NO: 5581489 - DNA, 25 bp, Homo sapien
ctgatgcaaccaaccagaggtatgg

SEQ ID NO: 5581490 - DNA, 25 bp, Homo sapien
ctgtgtataagctgattaaggctac

SEQ ID NO: 5581491 - DNA, 25 bp, Homo sapien
ggccgagtggctaaagatttcgctt

SEQ ID NO: 5581492 - DNA, 25 bp, Homo sapien
tatccaattaggtgtcaggccgagt

SEQ ID NO: 5581493 - DNA, 25 bp, Homo sapien
gtcttgatgtgggatctgatgcaac

SEQ ID NO: 5581494 - DNA, 25 bp, Homo sapien
ttcgcttcaagtgccagaaggataa

SEQ ID NO: 5581495 - DNA, 25 bp, Homo sapien
ggatgggagtcatttatagttcctc

SEQ ID NO: 5581496 - DNA, 25 bp, Homo sapien
ccagaaggataagaacgtacacttt

SEQ ID NO: 5581497 - DNA, 25 bp, Homo sapien
agctttcacgctcgcacaacctcac

SEQ ID NO: 5581498 - DNA, 25 bp, Homo sapien
accaaagaacagtgcattgcaggaa

SEQ ID NO: 5581499 - DNA, 25 bp, Homo sapien
cagactgtggagctttcacgctcgc

SEQ ID NO: 5581500 - DNA, 25 bp, Homo sapien
agactgtgcctgatttatggatgac

SEQ ID NO: 5581501 - DNA, 25 bp, Homo sapien
ttgtgtatgtttaaagcacggtaca

SEQ ID NO: 5581502 - DNA, 25 bp, Homo sapien
cacgctcgcacaacctcacagactg

SEQ ID NO: 5581503 - DNA, 25 bp, Homo sapien
aaagtagttatttagaaccattgtg

SEQ ID NO: 5581504 - DNA, 25 bp, Homo sapien
ttcccaaaccaaagaacagtgcatt

SEQ ID NO: 5581505 - DNA, 25 bp, Homo sapien
gcattgcaggaaaaaatagcagctc

SEQ ID NO: 5581506 - DNA, 25 bp, Homo sapien
aaatagcagctcacaaaaaaaaaaa

SEQ ID NO: 5581507 - DNA, 25 bp, Homo sapien
tttaaagcacggtacaaatatagca

SEQ ID NO: 5581508 - DNA, 25 bp, Homo sapien
tgcctaattgcaaatagatgggtct

SEQ ID NO: 5581509 - DNA, 25 bp, Homo sapien
attgcaaatagatgggtcttaggat

SEQ ID NO: 5581510 - DNA, 25 bp, Homo sapien
gctccgttttctctccgcccttctg

SEQ ID NO: 5581511 - DNA, 25 bp, Homo sapien
aaatagatgggtcttaggattgttt

SEQ ID NO: 5581512 - DNA, 25 bp, Homo sapien
gggctgcagtccagtagtttctttt

SEQ ID NO: 5581513 - DNA, 25 bp, Homo sapien
ctggagccctaaaagataccacctt

SEQ ID NO: 5581514 - DNA, 25 bp, Homo sapien
gctgaaagcagtagactttgggctg

SEQ ID NO: 5581515 - DNA, 25 bp, Homo sapien
acactggttagtgtctctggagccc

SEQ ID NO: 5581516 - DNA, 25 bp, Homo sapien
gttgcctgcaaaaattacactggtt

SEQ ID NO: 5581517 - DNA, 25 bp, Homo sapien
agcagtagactttgggctgcagtcc

SEQ ID NO: 5581518 - DNA, 25 bp, Homo sapien
gtgtctctggagccctaaaagatac

SEQ ID NO: 5581519 - DNA, 25 bp, Homo sapien
agtggaatcattagatcaaaggata

SEQ ID NO: 5581520 - DNA, 25 bp, Homo sapien
tctcatcagtggaatcattagatca

SEQ ID NO: 5581521 - DNA, 25 bp, Homo sapien
attgagtcaaaagtatagaattccc

SEQ ID NO: 5581522 - DNA, 25 bp, Homo sapien
tagttgttatcttaaggtgatttcc

SEQ ID NO: 5581523 - DNA, 25 bp, Homo sapien
gtgtatgtaaattaataggctgttt

SEQ ID NO: 5581524 - DNA, 25 bp, Homo sapien
tcaaaggatatgactgttgctcagc

SEQ ID NO: 5581525 - DNA, 25 bp, Homo sapien
ttgagcagttgtaggcttacaaaaa

SEQ ID NO: 5581526 - DNA, 25 bp, Homo sapien
tggttgtttgtgatgaactacaggt

SEQ ID NO: 5581527 - DNA, 25 bp, Homo sapien
gctgtttatttgagcagttgtaggc

SEQ ID NO: 5581528 - DNA, 25 bp, Homo sapien
aggatatgactgttgctcagctctc

SEQ ID NO: 5581529 - DNA, 25 bp, Homo sapien
ttgtgatgaactacaggttgctgac

SEQ ID NO: 5581530 - DNA, 25 bp, Homo sapien
ttgtaaagagcaaatgattggttcc

SEQ ID NO: 5581531 - DNA, 25 bp, Homo sapien
tcagttagttaacgttctagcacat

SEQ ID NO: 5581532 - DNA, 25 bp, Homo sapien
ataatgcaatacttccttgggaata

SEQ ID NO: 5581533 - DNA, 25 bp, Homo sapien
actaacttgttatgcagaaggaaaa

SEQ ID NO: 5581534 - DNA, 25 bp, Homo sapien
actgtataagacaagacactaactt

SEQ ID NO: 5581535 - DNA, 25 bp, Homo sapien
atgctgttggttttgtagaaatgtg

SEQ ID NO: 5581536 - DNA, 25 bp, Homo sapien
attgcagtgacacgattgcagctca

SEQ ID NO: 5581537 - DNA, 25 bp, Homo sapien
tgaggaggaatagaattaattcaat

SEQ ID NO: 5581538 - DNA, 25 bp, Homo sapien
attcagttagggagaactcgtttca

SEQ ID NO: 5581539 - DNA, 25 bp, Homo sapien
gctgcctcaatcccctgggccaagc

SEQ ID NO: 5581540 - DNA, 25 bp, Homo sapien
cttgggaataggaagtaatactgta

SEQ ID NO: 5581541 - DNA, 25 bp, Homo sapien
tgccacgtgtccggaataaattctt

SEQ ID NO: 5581542 - DNA, 25 bp, Homo sapien
agctcccagctcatccagcaccagc

SEQ ID NO: 5581543 - DNA, 25 bp, Homo sapien
ccagagctcccagctcatccagcac

SEQ ID NO: 5581544 - DNA, 25 bp, Homo sapien
caccgcatgccacgtgtccggaata

SEQ ID NO: 5581545 - DNA, 25 bp, Homo sapien
gagctcccagctcatccagcaccag

SEQ ID NO: 5581546 - DNA, 25 bp, Homo sapien
cgcatgccacgtgtccggaataaat

SEQ ID NO: 5581547 - DNA, 25 bp, Homo sapien
gcaccgcatgccacgtgtccggaat

SEQ ID NO: 5581548 - DNA, 25 bp, Homo sapien
gcatgccacgtgtccggaataaatt

SEQ ID NO: 5581549 - DNA, 25 bp, Homo sapien
ctcccagctcatccagcaccagcgg

SEQ ID NO: 5581550 - DNA, 25 bp, Homo sapien
accgcatgccacgtgtccggaataa

SEQ ID NO: 5581551 - DNA, 25 bp, Homo sapien
catgccacgtgtccggaataaattc

SEQ ID NO: 5581552 - DNA, 25 bp, Homo sapien
tcacacacttcgaggaggatgtaga

SEQ ID NO: 5581553 - DNA, 25 bp, Homo sapien
gattcggctcagatggcctacctca

SEQ ID NO: 5581554 - DNA, 25 bp, Homo sapien
acagcccctgtggcaaaccaggaag

SEQ ID NO: 5581555 - DNA, 25 bp, Homo sapien
aatcaaaggagtaacagcccctgtg

SEQ ID NO: 5581556 - DNA, 25 bp, Homo sapien
gaatcaaaggagtaacagcccctgt

SEQ ID NO: 5581557 - DNA, 25 bp, Homo sapien
gcgattcggctcagatggcctacct

SEQ ID NO: 5581558 - DNA, 25 bp, Homo sapien
gctcagatggcctacctcacacact

SEQ ID NO: 5581559 - DNA, 25 bp, Homo sapien
tcggctcagatggcctacctcacac

SEQ ID NO: 5581560 - DNA, 25 bp, Homo sapien
ctcacgctggagtgcttcgtgcaga

SEQ ID NO: 5581561 - DNA, 25 bp, Homo sapien
cctcacgctggagtgcttcgtgcag

SEQ ID NO: 5581562 - DNA, 25 bp, Homo sapien
acctcacacacttcgaggaggatgt

SEQ ID NO: 5581563 - DNA, 25 bp, Homo sapien
ggcctaatggccgccatgggcaaca

SEQ ID NO: 5581564 - DNA, 25 bp, Homo sapien
atggcagctcctacagcatgaacac

SEQ ID NO: 5581565 - DNA, 25 bp, Homo sapien
tgcctccatggcagctcctacagca

SEQ ID NO: 5581566 - DNA, 25 bp, Homo sapien
agtcaatgttaccaaagccctgtgc

SEQ ID NO: 5581567 - DNA, 25 bp, Homo sapien
acacagtcaatgttaccaaagccct

SEQ ID NO: 5581568 - DNA, 25 bp, Homo sapien
ggacttgtacatgaaaatagacagc

SEQ ID NO: 5581569 - DNA, 25 bp, Homo sapien
accaaagccctgtgcctccatggca

SEQ ID NO: 5581570 - DNA, 25 bp, Homo sapien
ttgtacatgaaaatagacagcattc

SEQ ID NO: 5581571 - DNA, 25 bp, Homo sapien
gttaccaaagccctgtgcctccatg

SEQ ID NO: 5581572 - DNA, 25 bp, Homo sapien
gctcctacagcatgaacactctcta

SEQ ID NO: 5581573 - DNA, 25 bp, Homo sapien
atcttggcggccaacacagtcaatg

SEQ ID NO: 5581574 - DNA, 25 bp, Homo sapien
tgtaagcctacaactgctcaaataa

SEQ ID NO: 5581575 - DNA, 25 bp, Homo sapien
caaaatggtagttgaaaaggttaca

SEQ ID NO: 5581576 - DNA, 25 bp, Homo sapien
acaaccacatggataaaagcaaatt

SEQ ID NO: 5581577 - DNA, 25 bp, Homo sapien
gaataaagtggacaatgcttgtgga

SEQ ID NO: 5581578 - DNA, 25 bp, Homo sapien
gtcagcaacctgtagttcatcacaa

SEQ ID NO: 5581579 - DNA, 25 bp, Homo sapien
tggtagttgaaaaggttacagaata

SEQ ID NO: 5581580 - DNA, 25 bp, Homo sapien
ggttacagaataaagtggacaatgc

SEQ ID NO: 5581581 - DNA, 25 bp, Homo sapien
aatgattccactgatgagatcctct

SEQ ID NO: 5581582 - DNA, 25 bp, Homo sapien
cacaaacaaccacatggataaaagc

SEQ ID NO: 5581583 - DNA, 25 bp, Homo sapien
agagagctgagcaacagtcatatcc

SEQ ID NO: 5581584 - DNA, 25 bp, Homo sapien
ttggaaatcaccttaagataacaac

SEQ ID NO: 5581585 - DNA, 25 bp, Homo sapien
agaacccgaggtgtatggaaaagaa

SEQ ID NO: 5581586 - DNA, 25 bp, Homo sapien
ttcttttccatacacctcgggttct

SEQ ID NO: 5581587 - DNA, 25 bp, Homo sapien
tctgtatcctggaccttttgaagtc

SEQ ID NO: 5581588 - DNA, 25 bp, Homo sapien
tggaaaacttagccatgatctgttc

SEQ ID NO: 5581589 - DNA, 25 bp, Homo sapien
aaatattgtatcccttctgtcgtct

SEQ ID NO: 5581590 - DNA, 25 bp, Homo sapien
tgtgactgtttctagtgctcatgtc

SEQ ID NO: 5581591 - DNA, 25 bp, Homo sapien
ttttgaagtcttactgcaacatctc

SEQ ID NO: 5581592 - DNA, 25 bp, Homo sapien
tgcaacatctctaagtttggacttt

SEQ ID NO: 5581593 - DNA, 25 bp, Homo sapien
tctctctgcaagcttaagatttttc

SEQ ID NO: 5581594 - DNA, 25 bp, Homo sapien
ttttggtacttcttgtgactgtttc

SEQ ID NO: 5581595 - DNA, 25 bp, Homo sapien
ttgtgggtaatctgtcttttctctc

SEQ ID NO: 5581596 - DNA, 25 bp, Homo sapien
atgatctgttcaaatattgtatccc

SEQ ID NO: 5581597 - DNA, 25 bp, Homo sapien
attaattctggaaaacttagccatg

SEQ ID NO: 5581598 - DNA, 25 bp, Homo sapien
gaaaatggaattgttagtatagagt

SEQ ID NO: 5581599 - DNA, 25 bp, Homo sapien
cacaaaaaggatctggaataaagga

SEQ ID NO: 5581600 - DNA, 25 bp, Homo sapien
agcggttagactcactgacccctgc

SEQ ID NO: 5581601 - DNA, 25 bp, Homo sapien
gaggcagttgatgtatgcaccagct

SEQ ID NO: 5581602 - DNA, 25 bp, Homo sapien
actatgtggtcttgaatcttttccc

SEQ ID NO: 5581603 - DNA, 25 bp, Homo sapien
tgcaccagctagaaatctgagactt

SEQ ID NO: 5581604 - DNA, 25 bp, Homo sapien
ttttactaactcagagatgcttctt

SEQ ID NO: 5581605 - DNA, 25 bp, Homo sapien
gacccctgcacagtcagaaattttt

SEQ ID NO: 5581606 - DNA, 25 bp, Homo sapien
gaaatctgagacttaactatgtggt

SEQ ID NO: 5581607 - DNA, 25 bp, Homo sapien
ttcaatagtgcagcggttagactca

SEQ ID NO: 5581608 - DNA, 25 bp, Homo sapien
gttgacccttcaatagtgcagcggt

SEQ ID NO: 5581609 - DNA, 25 bp, Homo sapien
ttaaaaatcgtcacaaaggtaatgt

SEQ ID NO: 5581610 - DNA, 25 bp, Homo sapien
acattacctttgtgacgatttttaa

SEQ ID NO: 5581611 - DNA, 25 bp, Homo sapien
gaatagcatgggaaaagattcaaga

SEQ ID NO: 5581612 - DNA, 25 bp, Homo sapien
tcacttgtagcaggaagaatagcat

SEQ ID NO: 5581613 - DNA, 25 bp, Homo sapien
ggtcagtgagtctaaccgctgcact

SEQ ID NO: 5581614 - DNA, 25 bp, Homo sapien
ctagctggtgcatacatcaactgcc

SEQ ID NO: 5581615 - DNA, 25 bp, Homo sapien
accgctgcactattgaagggtcaac

SEQ ID NO: 5581616 - DNA, 25 bp, Homo sapien
gggaaaagattcaagaccacatagt

SEQ ID NO: 5581617 - DNA, 25 bp, Homo sapien
ttgaaaaaagtcacttgtagcagga

SEQ ID NO: 5581618 - DNA, 25 bp, Homo sapien
tatgataagatctaaaagaactgac

SEQ ID NO: 5581619 - DNA, 25 bp, Homo sapien
accacatagttaagtctcagatttc

SEQ ID NO: 5581620 - DNA, 25 bp, Homo sapien
aaaagaactgacagatgttactcta

SEQ ID NO: 5581621 - DNA, 25 bp, Homo sapien
ttctcaacatacaccctgcaaatcc

SEQ ID NO: 5581622 - DNA, 25 bp, Homo sapien
ctaaaaccgaccggacatctagcgg

SEQ ID NO: 5581623 - DNA, 25 bp, Homo sapien
cttccacaaagacctcccctaaatc

SEQ ID NO: 5581624 - DNA, 25 bp, Homo sapien
gaccatccagtagccaacgcgggct

SEQ ID NO: 5581625 - DNA, 25 bp, Homo sapien
atccagtagccaacgcgggctaaaa

SEQ ID NO: 5581626 - DNA, 25 bp, Homo sapien
cgggctaaaaccgaccggacatcta

SEQ ID NO: 5581627 - DNA, 25 bp, Homo sapien
gtctggaaggttcccaagcccagga

SEQ ID NO: 5581628 - DNA, 25 bp, Homo sapien
tcctgatccagttgggaatgcatct

SEQ ID NO: 5581629 - DNA, 25 bp, Homo sapien
ctaaagacttccacaaagacctccc

SEQ ID NO: 5581630 - DNA, 25 bp, Homo sapien
ccgccagccccttcgcaaggcggcc

SEQ ID NO: 5581631 - DNA, 25 bp, Homo sapien
ctaaatctgaaggtcttcctgatcc

SEQ ID NO: 5581632 - DNA, 25 bp, Homo sapien
aggggaagactccactaaagacttc

SEQ ID NO: 5581633 - DNA, 25 bp, Homo sapien
gttgcagtaagacttcaaaaggtcc

SEQ ID NO: 5581634 - DNA, 25 bp, Homo sapien
agacatgagcactagaaacagtcac

SEQ ID NO: 5581635 - DNA, 25 bp, Homo sapien
cagtcacaagaagtaccaaaaaaga

SEQ ID NO: 5581636 - DNA, 25 bp, Homo sapien
cttaagcttgcagagagaaaagaca

SEQ ID NO: 5581637 - DNA, 25 bp, Homo sapien
acttcaaaaggtccaggatacagag

SEQ ID NO: 5581638 - DNA, 25 bp, Homo sapien
tagaaacagtcacaagaagtaccaa

SEQ ID NO: 5581639 - DNA, 25 bp, Homo sapien
aatcttaagcttgcagagagaaaag

SEQ ID NO: 5581640 - DNA, 25 bp, Homo sapien
ttagagatgttgcagtaagacttca

SEQ ID NO: 5581641 - DNA, 25 bp, Homo sapien
gtccaaacttagagatgttgcagta

SEQ ID NO: 5581642 - DNA, 25 bp, Homo sapien
aagaaaagtccaaacttagagatgt

SEQ ID NO: 5581643 - DNA, 25 bp, Homo sapien
aataaaagacatgagcactagaaac

SEQ ID NO: 5581644 - DNA, 25 bp, Homo sapien
atgcaactgtggtgaacaggaccac

SEQ ID NO: 5581645 - DNA, 25 bp, Homo sapien
agagtggacctcacagaagatacca

SEQ ID NO: 5581646 - DNA, 25 bp, Homo sapien
agagcttggtattcctgcaggcatc

SEQ ID NO: 5581647 - DNA, 25 bp, Homo sapien
acagcatcctcatggcatgccagca

SEQ ID NO: 5581648 - DNA, 25 bp, Homo sapien
gtggctaaatcctgtgggaagacac

SEQ ID NO: 5581649 - DNA, 25 bp, Homo sapien
aatccagacatggccagtggctaaa

SEQ ID NO: 5581650 - DNA, 25 bp, Homo sapien
tggtggcccagagaccacacattga

SEQ ID NO: 5581651 - DNA, 25 bp, Homo sapien
ctaatagaagggcttgtatgtgtcc

SEQ ID NO: 5581652 - DNA, 25 bp, Homo sapien
gtccaggaagtctagtgaattcgac

SEQ ID NO: 5581653 - DNA, 25 bp, Homo sapien
cctgcagcgcctccggttataagtt

SEQ ID NO: 5581654 - DNA, 25 bp, Homo sapien
agatcaaaaggacagcacattcaac

SEQ ID NO: 5581655 - DNA, 25 bp, Homo sapien
agcaaaactcagaggagtaagagaa

SEQ ID NO: 5581656 - DNA, 25 bp, Homo sapien
aaggcttttaacaattgagtggtaa

SEQ ID NO: 5581657 - DNA, 25 bp, Homo sapien
tgcaaagtgagcattgttattctca

SEQ ID NO: 5581658 - DNA, 25 bp, Homo sapien
ttctcagtttccagatgaatgcact

SEQ ID NO: 5581659 - DNA, 25 bp, Homo sapien
atacaatggcaaaattcaaggcttt

SEQ ID NO: 5581660 - DNA, 25 bp, Homo sapien
ttccaagcccagatatttaccacaa

SEQ ID NO: 5581661 - DNA, 25 bp, Homo sapien
ggaggtgttttggtttactcagcca

SEQ ID NO: 5581662 - DNA, 25 bp, Homo sapien
agggtcctttgattccaagcccaga

SEQ ID NO: 5581663 - DNA, 25 bp, Homo sapien
attgagtggtaaagttcaagtggaa

SEQ ID NO: 5581664 - DNA, 25 bp, Homo sapien
agaaagcaaaactcagaggagtaag

SEQ ID NO: 5581665 - DNA, 25 bp, Homo sapien
atagaatacaatggcaaaattcaag

SEQ ID NO: 5581666 - DNA, 25 bp, Homo sapien
gaacgtttcccgactagataaatgc

SEQ ID NO: 5581667 - DNA, 25 bp, Homo sapien
gcatttatctagtcgggaaacgttc

SEQ ID NO: 5581668 - DNA, 25 bp, Homo sapien
agtgcattcatctggaaactgagaa

SEQ ID NO: 5581669 - DNA, 25 bp, Homo sapien
ttggaatcaaaggaccctgggttca

SEQ ID NO: 5581670 - DNA, 25 bp, Homo sapien
ccaccagaccccacctccaaatttc

SEQ ID NO: 5581671 - DNA, 25 bp, Homo sapien
ttggctgagtaaaccaaaacacctc

SEQ ID NO: 5581672 - DNA, 25 bp, Homo sapien
gaccctgggttcaaatctcagcttc

SEQ ID NO: 5581673 - DNA, 25 bp, Homo sapien
tgtgggaattaaatggcataggcaa

SEQ ID NO: 5581674 - DNA, 25 bp, Homo sapien
ggaaactgagaataacaatgctcac

SEQ ID NO: 5581675 - DNA, 25 bp, Homo sapien
aatggcataggcaaaatattgttct

SEQ ID NO: 5581676 - DNA, 25 bp, Homo sapien
tgaaatttggagaggataaatatcc

SEQ ID NO: 5581677 - DNA, 25 bp, Homo sapien
ttcaacatgaaatttggagaggata

SEQ ID NO: 5581678 - DNA, 25 bp, Homo sapien
tgttaaaagccttgaattttgccat

SEQ ID NO: 5581679 - DNA, 25 bp, Homo sapien
cttcaccccatctaggagctgcttc

SEQ ID NO: 5581680 - DNA, 25 bp, Homo sapien
tttctcaggacaatctaatcacatc

SEQ ID NO: 5581681 - DNA, 25 bp, Homo sapien
ccatctaggagctgcttcctgaagc

SEQ ID NO: 5581682 - DNA, 25 bp, Homo sapien
acagggagaaaaacattcatgacct

SEQ ID NO: 5581683 - DNA, 25 bp, Homo sapien
cacacgggttgcctgcttcacccca

SEQ ID NO: 5581684 - DNA, 25 bp, Homo sapien
aggaagggtctcatgtatagtagca

SEQ ID NO: 5581685 - DNA, 25 bp, Homo sapien
aataaggagacgtcaacattccatc

SEQ ID NO: 5581686 - DNA, 25 bp, Homo sapien
gaagagccctgtaatcctgaggagg

SEQ ID NO: 5581687 - DNA, 25 bp, Homo sapien
aacatgtaatacatacaaagtcctg

SEQ ID NO: 5581688 - DNA, 25 bp, Homo sapien
taatcacatccggacagggagaaaa

SEQ ID NO: 5581689 - DNA, 25 bp, Homo sapien
tgtaataaggagacgtcaacattcc

SEQ ID NO: 5581690 - DNA, 25 bp, Homo sapien
tatacccacgggtccaaacacatac

SEQ ID NO: 5581691 - DNA, 25 bp, Homo sapien
gtatgtgtttggacccgtgggtata

SEQ ID NO: 5581692 - DNA, 25 bp, Homo sapien
ctaatttggatttctcgtgtatctc

SEQ ID NO: 5581693 - DNA, 25 bp, Homo sapien
tcaaatgttgcccttctgtcgtctt

SEQ ID NO: 5581694 - DNA, 25 bp, Homo sapien
ttaagaatcagctcaaatgttgccc

SEQ ID NO: 5581695 - DNA, 25 bp, Homo sapien
ttctgtcgtcttctcgcagccgtat

SEQ ID NO: 5581696 - DNA, 25 bp, Homo sapien
gctcaaatgttgcccttctgtcgtc

SEQ ID NO: 5581697 - DNA, 25 bp, Homo sapien
cgtcttctcgcagccgtatagtagt

SEQ ID NO: 5581698 - DNA, 25 bp, Homo sapien
tttgcacatgctactcccttcttct

SEQ ID NO: 5581699 - DNA, 25 bp, Homo sapien
aagaatcagctcaaatgttgccctt

SEQ ID NO: 5581700 - DNA, 25 bp, Homo sapien
taatttggatttctcgtgtatctct

SEQ ID NO: 5581701 - DNA, 25 bp, Homo sapien
ctcgcagccgtatagtagtagtagg

SEQ ID NO: 5581702 - DNA, 25 bp, Homo sapien
ttgcacatgctactcccttcttctg

SEQ ID NO: 5581703 - DNA, 25 bp, Homo sapien
aatttcacacctagatgagtttttc

SEQ ID NO: 5581704 - DNA, 25 bp, Homo sapien
taagaaacagtattatctgtagtcc

SEQ ID NO: 5581705 - DNA, 25 bp, Homo sapien
gtgttacccaggatggtctcttatc

SEQ ID NO: 5581706 - DNA, 25 bp, Homo sapien
tcaagtacagcatcaagaataagaa

SEQ ID NO: 5581707 - DNA, 25 bp, Homo sapien
acagcatcaagaataagaaacagta

SEQ ID NO: 5581708 - DNA, 25 bp, Homo sapien
gtgcccagccagacttccattaatc

SEQ ID NO: 5581709 - DNA, 25 bp, Homo sapien
agaaaaagtgtacatatcataattt

SEQ ID NO: 5581710 - DNA, 25 bp, Homo sapien
ctcattaagaaaaagtgtacatatc

SEQ ID NO: 5581711 - DNA, 25 bp, Homo sapien
tctgtagtccagatgttcccttcat

SEQ ID NO: 5581712 - DNA, 25 bp, Homo sapien
tataactaagatcaagtacagcatc

SEQ ID NO: 5581713 - DNA, 25 bp, Homo sapien
gccgctgtgcccagccagacttcca

SEQ ID NO: 5581714 - DNA, 25 bp, Homo sapien
aagtctcaaagtatacaatccttgt

SEQ ID NO: 5581715 - DNA, 25 bp, Homo sapien
atttaccaactgatgccttaagtct

SEQ ID NO: 5581716 - DNA, 25 bp, Homo sapien
cctttagtcattctccaggcccttc

SEQ ID NO: 5581717 - DNA, 25 bp, Homo sapien
aaggtcttccttagttctgcatcat

SEQ ID NO: 5581718 - DNA, 25 bp, Homo sapien
ctatgtggtcccataaaacctaaaa

SEQ ID NO: 5581719 - DNA, 25 bp, Homo sapien
aagaaaaaaatttaccaactgatgc

SEQ ID NO: 5581720 - DNA, 25 bp, Homo sapien
gatgccttaagtctcaaagtataca

SEQ ID NO: 5581721 - DNA, 25 bp, Homo sapien
caagttgaaggtcttccttagttct

SEQ ID NO: 5581722 - DNA, 25 bp, Homo sapien
aaaaaaaaatatgcgacagtactat

SEQ ID NO: 5581723 - DNA, 25 bp, Homo sapien
atatgcgacagtactatgtggtccc

SEQ ID NO: 5581724 - DNA, 25 bp, Homo sapien
aatccttgtttcaagttgaaggtct

SEQ ID NO: 5581725 - DNA, 25 bp, Homo sapien
gttgaagtacttatgggctgcacac

SEQ ID NO: 5581726 - DNA, 25 bp, Homo sapien
gggtactggctgtggatcatttagc

SEQ ID NO: 5581727 - DNA, 25 bp, Homo sapien
ttgcccccacccaagaatgagagga

SEQ ID NO: 5581728 - DNA, 25 bp, Homo sapien
gcagaagcgcattttgagagaagtt

SEQ ID NO: 5581729 - DNA, 25 bp, Homo sapien
gggctgcacacacttcaaccttggc

SEQ ID NO: 5581730 - DNA, 25 bp, Homo sapien
atatgcttgacaatgtggataaatc

SEQ ID NO: 5581731 - DNA, 25 bp, Homo sapien
gacaatgaacaagtggaacaccttt

SEQ ID NO: 5581732 - DNA, 25 bp, Homo sapien
gggcatgccaccacgaattcttctt

SEQ ID NO: 5581733 - DNA, 25 bp, Homo sapien
atgtatatagagatcattcggaatc

SEQ ID NO: 5581734 - DNA, 25 bp, Homo sapien
aagaatgagaggaagttttgttatg

SEQ ID NO: 5581735 - DNA, 25 bp, Homo sapien
ggggatatcatcagaccaagtcagg

SEQ ID NO: 5581736 - DNA, 25 bp, Homo sapien
ccaaattaggatagaattccagaag

SEQ ID NO: 5581737 - DNA, 25 bp, Homo sapien
aggatagaattccagaagaagggag

SEQ ID NO: 5581738 - DNA, 25 bp, Homo sapien
gatagaattccagaagaagggagta

SEQ ID NO: 5581739 - DNA, 25 bp, Homo sapien
tagagatacacgagaaatccaaatt

SEQ ID NO: 5581740 - DNA, 25 bp, Homo sapien
aagggcaacatttgagctgattctt

SEQ ID NO: 5581741 - DNA, 25 bp, Homo sapien
agaagggcaacatttgagctgattc

SEQ ID NO: 5581742 - DNA, 25 bp, Homo sapien
agatacacgagaaatccaaattagg

SEQ ID NO: 5581743 - DNA, 25 bp, Homo sapien
gacagaagggcaacatttgagctga

SEQ ID NO: 5581744 - DNA, 25 bp, Homo sapien
agtagcatgtgcaaaaaaaaaaaaa

SEQ ID NO: 5581745 - DNA, 25 bp, Homo sapien
agggagtagcatgtgcaaaaaaaaa

SEQ ID NO: 5581746 - DNA, 25 bp, Homo sapien
gaaatccaaattaggatagaattcc

SEQ ID NO: 5581747 - DNA, 25 bp, Homo sapien
gcccccacagcaacccccttctgtc

SEQ ID NO: 5581748 - DNA, 25 bp, Homo sapien
ttgcctcagtggcctctgcagcaga

SEQ ID NO: 5581749 - DNA, 25 bp, Homo sapien
gcgtgctgcctcactgggtctcact

SEQ ID NO: 5581750 - DNA, 25 bp, Homo sapien
tcctagactgctgacttgcccccac

SEQ ID NO: 5581751 - DNA, 25 bp, Homo sapien
gagggccggctccttggtcattatt

SEQ ID NO: 5581752 - DNA, 25 bp, Homo sapien
gggtctcactccagccgcgctttgc

SEQ ID NO: 5581753 - DNA, 25 bp, Homo sapien
tgcagcagagcctcatgccagctct

SEQ ID NO: 5581754 - DNA, 25 bp, Homo sapien
ctgtgccacctcctagactgctgac

SEQ ID NO: 5581755 - DNA, 25 bp, Homo sapien
ctcacacttggagtgacccaggagg

SEQ ID NO: 5581756 - DNA, 25 bp, Homo sapien
ccctcttcttgggatgcccctgtta

SEQ ID NO: 5581757 - DNA, 25 bp, Homo sapien
gtgtgccagggcctgccctcacact

SEQ ID NO: 5581758 - DNA, 25 bp, Homo sapien
attagaatttggacaacggcaaatg

SEQ ID NO: 5581759 - DNA, 25 bp, Homo sapien
cctgaagtccgtccgcctctctccg

SEQ ID NO: 5581760 - DNA, 25 bp, Homo sapien
ttacagcaagtaacacatgagtttt

SEQ ID NO: 5581761 - DNA, 25 bp, Homo sapien
ggcgaacaatccgaaagccggatca

SEQ ID NO: 5581762 - DNA, 25 bp, Homo sapien
aatccgaaagccggatcactgagga

SEQ ID NO: 5581763 - DNA, 25 bp, Homo sapien
tccagtttgcggtgtacgtttgtta

SEQ ID NO: 5581764 - DNA, 25 bp, Homo sapien
cggggaactccattttgtcgggaca

SEQ ID NO: 5581765 - DNA, 25 bp, Homo sapien
ctttatccagtttgcggtgtacgtt

SEQ ID NO: 5581766 - DNA, 25 bp, Homo sapien
cacacggggaactccattttgtcgg

SEQ ID NO: 5581767 - DNA, 25 bp, Homo sapien
acgtttgttaaccttacagcaagta

SEQ ID NO: 5581768 - DNA, 25 bp, Homo sapien
actccattttgtcgggacagggtcg

SEQ ID NO: 5581769 - DNA, 25 bp, Homo sapien
gatgcagaactaaggaagaccttca

SEQ ID NO: 5581770 - DNA, 25 bp, Homo sapien
ctaaggaagaccttcaacttgaaac

SEQ ID NO: 5581771 - DNA, 25 bp, Homo sapien
agacttaaggcatcagttggtaaat

SEQ ID NO: 5581772 - DNA, 25 bp, Homo sapien
cttaaggcatcagttggtaaatttt

SEQ ID NO: 5581773 - DNA, 25 bp, Homo sapien
gcagaactaaggaagaccttcaact

SEQ ID NO: 5581774 - DNA, 25 bp, Homo sapien
ttgtatactttgagacttaaggcat

SEQ ID NO: 5581775 - DNA, 25 bp, Homo sapien
aacttgaaacaaggattgtatactt

SEQ ID NO: 5581776 - DNA, 25 bp, Homo sapien
taggttttatgggaccacatagtac

SEQ ID NO: 5581777 - DNA, 25 bp, Homo sapien
atattttaggttttatgggaccaca

SEQ ID NO: 5581778 - DNA, 25 bp, Homo sapien
tgggaccacatagtactgtcgcata

SEQ ID NO: 5581779 - DNA, 25 bp, Homo sapien
ttatgggaccacatagtactgtcgc

SEQ ID NO: 5581780 - DNA, 25 bp, Homo sapien
ttgcgccactccattccagcctaag

SEQ ID NO: 5581781 - DNA, 25 bp, Homo sapien
ttgcagcatgaatgaaatgaattgc

SEQ ID NO: 5581782 - DNA, 25 bp, Homo sapien
aaaagcagggctaatatgattgttg

SEQ ID NO: 5581783 - DNA, 25 bp, Homo sapien
agtgagtcgtgtttgcgccactcca

SEQ ID NO: 5581784 - DNA, 25 bp, Homo sapien
taggataattacctcagaacctgta

SEQ ID NO: 5581785 - DNA, 25 bp, Homo sapien
tgttgaaagaggagaattctgaatc

SEQ ID NO: 5581786 - DNA, 25 bp, Homo sapien
gttgaaatgtttaaatgctgatact

SEQ ID NO: 5581787 - DNA, 25 bp, Homo sapien
tatgattgttgaggtaaattactat

SEQ ID NO: 5581788 - DNA, 25 bp, Homo sapien
attagattaactacttgccaggtac

SEQ ID NO: 5581789 - DNA, 25 bp, Homo sapien
tgccaggtactgaatatattaagtt

SEQ ID NO: 5581790 - DNA, 25 bp, Homo sapien
atgctgatactgttcttaggataat

SEQ ID NO: 5581791 - DNA, 25 bp, Homo sapien
gagttacagcaaaacaaaaccgtca

SEQ ID NO: 5581792 - DNA, 25 bp, Homo sapien
cttgtatgaaaacagttactggctc

SEQ ID NO: 5581793 - DNA, 25 bp, Homo sapien
aagaaaccttagaagtcagaattta

SEQ ID NO: 5581794 - DNA, 25 bp, Homo sapien
acaaaaccgtcaagaaaaagcctca

SEQ ID NO: 5581795 - DNA, 25 bp, Homo sapien
tgagttgagcaagctatacactact

SEQ ID NO: 5581796 - DNA, 25 bp, Homo sapien
ctatacactacttaaggaagaaacc

SEQ ID NO: 5581797 - DNA, 25 bp, Homo sapien
accgtcaagaaaaagcctcatccac

SEQ ID NO: 5581798 - DNA, 25 bp, Homo sapien
actggctctactaaaattcagtttt

SEQ ID NO: 5581799 - DNA, 25 bp, Homo sapien
gaaatgatggacccccttgtatgaa

SEQ ID NO: 5581800 - DNA, 25 bp, Homo sapien
tacagcaaaacaaaaccgtcaagaa

SEQ ID NO: 5581801 - DNA, 25 bp, Homo sapien
tagaagtcagaatttaccctggtta

SEQ ID NO: 5581802 - DNA, 25 bp, Homo sapien
ttcaacagatatagtaatttacctc

SEQ ID NO: 5581803 - DNA, 25 bp, Homo sapien
atatattcagtacctggcaagtagt

SEQ ID NO: 5581804 - DNA, 25 bp, Homo sapien
attcatgctgcaaaacaaactaggc

SEQ ID NO: 5581805 - DNA, 25 bp, Homo sapien
tatcctaagaacagtatcagcattt

SEQ ID NO: 5581806 - DNA, 25 bp, Homo sapien
acctcaacaatcatattagccctgc

SEQ ID NO: 5581807 - DNA, 25 bp, Homo sapien
taatgaaggaattttaggcaattca

SEQ ID NO: 5581808 - DNA, 25 bp, Homo sapien
aacatttcaacaaggcaaaattggt

SEQ ID NO: 5581809 - DNA, 25 bp, Homo sapien
tgctgcaaaacaaactaggccctta

SEQ ID NO: 5581810 - DNA, 25 bp, Homo sapien
agtacctggcaagtagttaatctaa

SEQ ID NO: 5581811 - DNA, 25 bp, Homo sapien
taaaagatacaggttctgaggtaat

SEQ ID NO: 5581812 - DNA, 25 bp, Homo sapien
ctgaggtaattatcctaagaacagt

SEQ ID NO: 5581813 - DNA, 25 bp, Homo sapien
ttctaaggaacaaagctaataagta

SEQ ID NO: 5581814 - DNA, 25 bp, Homo sapien
atacaagggggtccatcatttccaa

SEQ ID NO: 5581815 - DNA, 25 bp, Homo sapien
agctaataagtaatgtggatgaggc

SEQ ID NO: 5581816 - DNA, 25 bp, Homo sapien
tcatttccaactccctgtgtcttcc

SEQ ID NO: 5581817 - DNA, 25 bp, Homo sapien
taagtaatgtggatgaggctttttc

SEQ ID NO: 5581818 - DNA, 25 bp, Homo sapien
gaattttagtagagccagtaactgt

SEQ ID NO: 5581819 - DNA, 25 bp, Homo sapien
cctgtgtcttcctcagcggatgttt

SEQ ID NO: 5581820 - DNA, 25 bp, Homo sapien
tccttaagtagtgtatagcttgctc

SEQ ID NO: 5581821 - DNA, 25 bp, Homo sapien
ttcatacaagggggtccatcatttc

SEQ ID NO: 5581822 - DNA, 25 bp, Homo sapien
aagtagtgtatagcttgctcaactc

SEQ ID NO: 5581823 - DNA, 25 bp, Homo sapien
gtggatgaggctttttcttgacggt

SEQ ID NO: 5581824 - DNA, 25 bp, Homo sapien
agagacagaatcataggtgctggga

SEQ ID NO: 5581825 - DNA, 25 bp, Homo sapien
tgtgcctcacagccagagtcaagtc

SEQ ID NO: 5581826 - DNA, 25 bp, Homo sapien
aatgtcagacacctgccagggcaca

SEQ ID NO: 5581827 - DNA, 25 bp, Homo sapien
atcactgaaaatgcacaggcaaggc

SEQ ID NO: 5581828 - DNA, 25 bp, Homo sapien
ctcttgggaaacagaatgtcagaca

SEQ ID NO: 5581829 - DNA, 25 bp, Homo sapien
tgctctatgtggacctgagacgcag

SEQ ID NO: 5581830 - DNA, 25 bp, Homo sapien
gaaggcccagacaccatgctctatg

SEQ ID NO: 5581831 - DNA, 25 bp, Homo sapien
atcagttcagtaacaggatagcctc

SEQ ID NO: 5581832 - DNA, 25 bp, Homo sapien
atgtggcgttagatcccagcaagtc

SEQ ID NO: 5581833 - DNA, 25 bp, Homo sapien
tgcctgcagccctacttacggtgcc

SEQ ID NO: 5581834 - DNA, 25 bp, Homo sapien
gcctacaaaggctcgcaggcatgat

SEQ ID NO: 5581835 - DNA, 25 bp, Homo sapien
tactgaactgatggtaatggagagg

SEQ ID NO: 5581836 - DNA, 25 bp, Homo sapien
gctgcaggcatccctgtgtgccctg

SEQ ID NO: 5581837 - DNA, 25 bp, Homo sapien
ataagccaaaggcaaagagatgtgt

SEQ ID NO: 5581838 - DNA, 25 bp, Homo sapien
ttggtcctatgcaaaggcaagaagg

SEQ ID NO: 5581839 - DNA, 25 bp, Homo sapien
gtgacttgctgggatctaacgccac

SEQ ID NO: 5581840 - DNA, 25 bp, Homo sapien
cgagatcatgcctgcgagcctttgt

SEQ ID NO: 5581841 - DNA, 25 bp, Homo sapien
agcgagtcacattaggtgttgaggc

SEQ ID NO: 5581842 - DNA, 25 bp, Homo sapien
agtcagtgtagctctcccttggtcc

SEQ ID NO: 5581843 - DNA, 25 bp, Homo sapien
caagacttgactctggctgtgaggc

SEQ ID NO: 5581844 - DNA, 25 bp, Homo sapien
ggggctgaggtcccagcatctcaga

SEQ ID NO: 5581845 - DNA, 25 bp, Homo sapien
gctgcgtctcaggtccacatagagc

SEQ ID NO: 5581846 - DNA, 25 bp, Homo sapien
gctgcagcctgcacgacccctgcag

SEQ ID NO: 5581847 - DNA, 25 bp, Homo sapien
ctcccactttggcgtcctaacagac

SEQ ID NO: 5581848 - DNA, 25 bp, Homo sapien
cacaaggagaagatccgactcctgc

SEQ ID NO: 5581849 - DNA, 25 bp, Homo sapien
ctcagaggacagatctctatggggg

SEQ ID NO: 5581850 - DNA, 25 bp, Homo sapien
cagactcgaggagactcattccctc

SEQ ID NO: 5581851 - DNA, 25 bp, Homo sapien
cctaacagacctgccgtgtgttggg

SEQ ID NO: 5581852 - DNA, 25 bp, Homo sapien
gactcctgcagactcgaggagactc

SEQ ID NO: 5581853 - DNA, 25 bp, Homo sapien
ctgctcccgagagcacatccgcaag

SEQ ID NO: 5581854 - DNA, 25 bp, Homo sapien
cagaggtgaccacggcccctctttg

SEQ ID NO: 5581855 - DNA, 25 bp, Homo sapien
gctccgtcatcggctggtcagctgt

SEQ ID NO: 5581856 - DNA, 25 bp, Homo sapien
cggtgcctcagaggacagatctcta

SEQ ID NO: 5581857 - DNA, 25 bp, Homo sapien
cactagtcagggtcctggaacagtc

SEQ ID NO: 5581858 - DNA, 25 bp, Homo sapien
gcatgcactagtcagggtcctggaa

SEQ ID NO: 5581859 - DNA, 25 bp, Homo sapien
cagggtcctggaacagtccagagaa

SEQ ID NO: 5581860 - DNA, 25 bp, Homo sapien
agtcagggtcctggaacagtccaga

SEQ ID NO: 5581861 - DNA, 25 bp, Homo sapien
caagcaccttacagagtgcatgcac

SEQ ID NO: 5581862 - DNA, 25 bp, Homo sapien
tacagagtgcatgcactagtcaggg

SEQ ID NO: 5581863 - DNA, 25 bp, Homo sapien
aaagacattttgggatctgattgtt

SEQ ID NO: 5581864 - DNA, 25 bp, Homo sapien
ggaccagcacaagcaccttacagag

SEQ ID NO: 5581865 - DNA, 25 bp, Homo sapien
ggtcctggaacagtccagagaagcg

SEQ ID NO: 5581866 - DNA, 25 bp, Homo sapien
tttgggatctgattgttaaatgcca

SEQ ID NO: 5581867 - DNA, 25 bp, Homo sapien
cagagtgcatgcactagtcagggtc

SEQ ID NO: 5581868 - DNA, 25 bp, Homo sapien
gggctccaggcgacccctagcccaa

SEQ ID NO: 5581869 - DNA, 25 bp, Homo sapien
gcgacccctagcccaattctgcccc

SEQ ID NO: 5581870 - DNA, 25 bp, Homo sapien
cccagtcccctagcttggggtccag

SEQ ID NO: 5581871 - DNA, 25 bp, Homo sapien
agtcccctagcttggggtccagaca

SEQ ID NO: 5581872 - DNA, 25 bp, Homo sapien
tccaggcgacccctagcccaattct

SEQ ID NO: 5581873 - DNA, 25 bp, Homo sapien
ggtccagacagcccagtggacccag

SEQ ID NO: 5581874 - DNA, 25 bp, Homo sapien
ctctcggccccaccccctgcagccg

SEQ ID NO: 5581875 - DNA, 25 bp, Homo sapien
ccctccatcccaaggggcagagaaa

SEQ ID NO: 5581876 - DNA, 25 bp, Homo sapien
aaggggcagagaaattgtctttctt

SEQ ID NO: 5581877 - DNA, 25 bp, Homo sapien
tctcctccccagtcccctagcttgg

SEQ ID NO: 5581878 - DNA, 25 bp, Homo sapien
tagcccaattctgcccctccatccc

SEQ ID NO: 5581879 - DNA, 25 bp, Homo sapien
tcctgactggctcccaccgcttctc

SEQ ID NO: 5581880 - DNA, 25 bp, Homo sapien
cctcctcctgatagcccttctgtcg

SEQ ID NO: 5581881 - DNA, 25 bp, Homo sapien
tggtccctcctcctgatagcccttc

SEQ ID NO: 5581882 - DNA, 25 bp, Homo sapien
cactctgtaaggtgcttgtgctggt

SEQ ID NO: 5581883 - DNA, 25 bp, Homo sapien
ggctcccaccgcttctctggactgt

SEQ ID NO: 5581884 - DNA, 25 bp, Homo sapien
tgttccaggaccctgactagtgcat

SEQ ID NO: 5581885 - DNA, 25 bp, Homo sapien
ttttggcatttaacaatcagatccc

SEQ ID NO: 5581886 - DNA, 25 bp, Homo sapien
tagtgcatgcactctgtaaggtgct

SEQ ID NO: 5581887 - DNA, 25 bp, Homo sapien
ttccaggaccctgactagtgcatgc

SEQ ID NO: 5581888 - DNA, 25 bp, Homo sapien
gtgcttgtgctggtccctcctcctg

SEQ ID NO: 5581889 - DNA, 25 bp, Homo sapien
taacaatcagatcccaaaatgtctt

SEQ ID NO: 5581890 - DNA, 25 bp, Homo sapien
gctgtctggaccccaagctagggga

SEQ ID NO: 5581891 - DNA, 25 bp, Homo sapien
ggtggcctgggttaccctcctgctc

SEQ ID NO: 5581892 - DNA, 25 bp, Homo sapien
actgggctgtctggaccccaagcta

SEQ ID NO: 5581893 - DNA, 25 bp, Homo sapien
gcctggagcccacccccctttgctc

SEQ ID NO: 5581894 - DNA, 25 bp, Homo sapien
tgggtccactgggctgtctggaccc

SEQ ID NO: 5581895 - DNA, 25 bp, Homo sapien
tttctctgccccttgggatggaggg

SEQ ID NO: 5581896 - DNA, 25 bp, Homo sapien
aggagtcagcaaagaaagacaattt

SEQ ID NO: 5581897 - DNA, 25 bp, Homo sapien
tgggttaccctcctgctcaggcgcc

SEQ ID NO: 5581898 - DNA, 25 bp, Homo sapien
gaaagacaatttctctgccccttgg

SEQ ID NO: 5581899 - DNA, 25 bp, Homo sapien
ttaccctcctgctcaggcgcctggg

SEQ ID NO: 5581900 - DNA, 25 bp, Homo sapien
ctgccccttgggatggaggggcaga

SEQ ID NO: 5581901 - DNA, 25 bp, Homo sapien
gtggactggacaagtatagaattcc

SEQ ID NO: 5581902 - DNA, 25 bp, Homo sapien
gttcaaagtttgtcactacccattc

SEQ ID NO: 5581903 - DNA, 25 bp, Homo sapien
tgttgggaagccagtattgcaaagg

SEQ ID NO: 5581904 - DNA, 25 bp, Homo sapien
tagtagtccgtaatttcatctcctt

SEQ ID NO: 5581905 - DNA, 25 bp, Homo sapien
atggtgtctgctgtatataagtatc

SEQ ID NO: 5581906 - DNA, 25 bp, Homo sapien
aaaggggagacatgatagactccca

SEQ ID NO: 5581907 - DNA, 25 bp, Homo sapien
tcagctgacctgcttagtagtccgt

SEQ ID NO: 5581908 - DNA, 25 bp, Homo sapien
acccattatggtggactggacaagt

SEQ ID NO: 5581909 - DNA, 25 bp, Homo sapien
taatttggagagctccagcaccaaa

SEQ ID NO: 5581910 - DNA, 25 bp, Homo sapien
aatgagaatacccattatggtggac

SEQ ID NO: 5581911 - DNA, 25 bp, Homo sapien
ctccagcaccaaataacccttctgt

SEQ ID NO: 5581912 - DNA, 25 bp, Homo sapien
atcaccgcaggatcgatgctctaaa

SEQ ID NO: 5581913 - DNA, 25 bp, Homo sapien
cacactctgcagacgcctccaggtg

SEQ ID NO: 5581914 - DNA, 25 bp, Homo sapien
atatttaggtagtgtcagtggctga

SEQ ID NO: 5581915 - DNA, 25 bp, Homo sapien
acgcctccaggtgcccccttctgtc

SEQ ID NO: 5581916 - DNA, 25 bp, Homo sapien
gatgctctaaatactgaagaactgc

SEQ ID NO: 5581917 - DNA, 25 bp, Homo sapien
ggtagtgtcagtggctgagtatcac

SEQ ID NO: 5581918 - DNA, 25 bp, Homo sapien
gctgagtatcaccgcaggatcgatg

SEQ ID NO: 5581919 - DNA, 25 bp, Homo sapien
ctaaatactgaagaactgcgcacac

SEQ ID NO: 5581920 - DNA, 25 bp, Homo sapien
ctcaactgtcagtggaattattgtc

SEQ ID NO: 5581921 - DNA, 25 bp, Homo sapien
actgcgcacactctgcagacgcctc

SEQ ID NO: 5581922 - DNA, 25 bp, Homo sapien
ctgtctccatatttaggtagtgtca

SEQ ID NO: 5581923 - DNA, 25 bp, Homo sapien
ttccactgacagttgagaaaaacag

SEQ ID NO: 5581924 - DNA, 25 bp, Homo sapien
tagagcatcgatcctgcggtgatac

SEQ ID NO: 5581925 - DNA, 25 bp, Homo sapien
acaggaagacaataattccactgac

SEQ ID NO: 5581926 - DNA, 25 bp, Homo sapien
ctgcggtgatactcagccactgaca

SEQ ID NO: 5581927 - DNA, 25 bp, Homo sapien
actacctaaatatggagacaggaag

SEQ ID NO: 5581928 - DNA, 25 bp, Homo sapien
cttcagtatttagagcatcgatcct

SEQ ID NO: 5581929 - DNA, 25 bp, Homo sapien
cagttgagaaaaacagcaaaaaaaa

SEQ ID NO: 5581930 - DNA, 25 bp, Homo sapien
gagtgtgcgcagttcttcagtattt

SEQ ID NO: 5581931 - DNA, 25 bp, Homo sapien
actgacactacctaaatatggagac

SEQ ID NO: 5581932 - DNA, 25 bp, Homo sapien
gtctgcagagtgtgcgcagttcttc

SEQ ID NO: 5581933 - DNA, 25 bp, Homo sapien
acctaaatatggagacaggaagaca

SEQ ID NO: 5581934 - DNA, 25 bp, Homo sapien
tccaaaaatatccactctgaggcat

SEQ ID NO: 5581935 - DNA, 25 bp, Homo sapien
ttctgtcgtcttctcgcagccgtat

SEQ ID NO: 5581936 - DNA, 25 bp, Homo sapien
tgcagtgccatttccaaaaatatcc

SEQ ID NO: 5581937 - DNA, 25 bp, Homo sapien
attacactacacggtggaaggctga

SEQ ID NO: 5581938 - DNA, 25 bp, Homo sapien
aacacggaaggttatgtaatgcagt

SEQ ID NO: 5581939 - DNA, 25 bp, Homo sapien
ttaaacacggaaggttatgtaatgc

SEQ ID NO: 5581940 - DNA, 25 bp, Homo sapien
ctcgcagccgtatagtagtagtagg

SEQ ID NO: 5581941 - DNA, 25 bp, Homo sapien
ggaaggttatgtaatgcagtgccat

SEQ ID NO: 5581942 - DNA, 25 bp, Homo sapien
ggcattacactacacggtggaaggc

SEQ ID NO: 5581943 - DNA, 25 bp, Homo sapien
actctgaggcattacactacacggt

SEQ ID NO: 5581944 - DNA, 25 bp, Homo sapien
tgaggcattacactacacggtggaa

SEQ ID NO: 5581945 - DNA, 25 bp, Homo sapien
cttccaccgtgtagtgtaatgcctc

SEQ ID NO: 5581946 - DNA, 25 bp, Homo sapien
caccgtgtagtgtaatgcctcagag

SEQ ID NO: 5581947 - DNA, 25 bp, Homo sapien
ccgtgtagtgtaatgcctcagagtg

SEQ ID NO: 5581948 - DNA, 25 bp, Homo sapien
tgtagtgtaatgcctcagagtggat

SEQ ID NO: 5581949 - DNA, 25 bp, Homo sapien
gtgtagtgtaatgcctcagagtgga

SEQ ID NO: 5581950 - DNA, 25 bp, Homo sapien
gccttccaccgtgtagtgtaatgcc

SEQ ID NO: 5581951 - DNA, 25 bp, Homo sapien
gagtggatatttttggaaatggcac

SEQ ID NO: 5581952 - DNA, 25 bp, Homo sapien
gtgtaatgcctcagagtggatattt

SEQ ID NO: 5581953 - DNA, 25 bp, Homo sapien
tggcactgcattacataaccttccg

SEQ ID NO: 5581954 - DNA, 25 bp, Homo sapien
tggaaatggcactgcattacataac

SEQ ID NO: 5581955 - DNA, 25 bp, Homo sapien
aatcagccttccaccgtgtagtgta

SEQ ID NO: 5581956 - DNA, 25 bp, Homo sapien
cactgttaaaagcccggaagaatcc

SEQ ID NO: 5581957 - DNA, 25 bp, Homo sapien
acaagaccactgttaaaagcccgga

SEQ ID NO: 5581958 - DNA, 25 bp, Homo sapien
tattcagcatttcagacagaaaagc

SEQ ID NO: 5581959 - DNA, 25 bp, Homo sapien
gggctgttttgcgtgtgctagagtc

SEQ ID NO: 5581960 - DNA, 25 bp, Homo sapien
tttcccatctgagtctttgtgccat

SEQ ID NO: 5581961 - DNA, 25 bp, Homo sapien
aatctctgctttctcacactttccc

SEQ ID NO: 5581962 - DNA, 25 bp, Homo sapien
tcttgcacacacctggggagtgtag

SEQ ID NO: 5581963 - DNA, 25 bp, Homo sapien
ttgcgtgtgctagagtctattcagc

SEQ ID NO: 5581964 - DNA, 25 bp, Homo sapien
gtcttgcacacacctggggagtgta

SEQ ID NO: 5581965 - DNA, 25 bp, Homo sapien
agaccactgttaaaagcccggaaga

SEQ ID NO: 5581966 - DNA, 25 bp, Homo sapien
ctgagtctttgtgccatggccgtcc

SEQ ID NO: 5581967 - DNA, 25 bp, Homo sapien
ggaatgctgaggcttttctgtctga

SEQ ID NO: 5581968 - DNA, 25 bp, Homo sapien
tctgtctgaaatgctgaatagactc

SEQ ID NO: 5581969 - DNA, 25 bp, Homo sapien
tgagaaagcagagatttcaaaggag

SEQ ID NO: 5581970 - DNA, 25 bp, Homo sapien
ccgggcttttaacagtggtcttgta

SEQ ID NO: 5581971 - DNA, 25 bp, Homo sapien
cacaaagactcagatgggaaagtgt

SEQ ID NO: 5581972 - DNA, 25 bp, Homo sapien
tagactctagcacacgcaaaacagc

SEQ ID NO: 5581973 - DNA, 25 bp, Homo sapien
aagtgtgagaaagcagagatttcaa

SEQ ID NO: 5581974 - DNA, 25 bp, Homo sapien
actctagcacacgcaaaacagccca

SEQ ID NO: 5581975 - DNA, 25 bp, Homo sapien
gagctgcaggattcttccgggcttt

SEQ ID NO: 5581976 - DNA, 25 bp, Homo sapien
gctgaatagactctagcacacgcaa

SEQ ID NO: 5581977 - DNA, 25 bp, Homo sapien
ggccatggcacaaagactcagatgg

SEQ ID NO: 5581978 - DNA, 25 bp, Homo sapien
ctgtagtgcactaggatcacgccta

SEQ ID NO: 5581979 - DNA, 25 bp, Homo sapien
caatgaaatatgaggccagagttag

SEQ ID NO: 5581980 - DNA, 25 bp, Homo sapien
gtgcataacaagaaccaggcgcaca

SEQ ID NO: 5581981 - DNA, 25 bp, Homo sapien
ttaagctgtagtgcactaggatcac

SEQ ID NO: 5581982 - DNA, 25 bp, Homo sapien
ggatcacgcctatgaacagccacca

SEQ ID NO: 5581983 - DNA, 25 bp, Homo sapien
ctgcctaggttctgcctgcatctgt

SEQ ID NO: 5581984 - DNA, 25 bp, Homo sapien
ttctcaatgaaatatgaggccagag

SEQ ID NO: 5581985 - DNA, 25 bp, Homo sapien
gggagttttaagctgtagtgcacta

SEQ ID NO: 5581986 - DNA, 25 bp, Homo sapien
ggacaatttgtgcataacaagaacc

SEQ ID NO: 5581987 - DNA, 25 bp, Homo sapien
gatggaggttccctgcctaggttct

SEQ ID NO: 5581988 - DNA, 25 bp, Homo sapien
ctatgaacagccaccatgctccagc

SEQ ID NO: 5581989 - DNA, 25 bp, Homo sapien
tatgtgcgcctggttcttgttatgc

SEQ ID NO: 5581990 - DNA, 25 bp, Homo sapien
ccatctgcctacctgtatgtgcgcc

SEQ ID NO: 5581991 - DNA, 25 bp, Homo sapien
aggcagggaacctccatcagcctca

SEQ ID NO: 5581992 - DNA, 25 bp, Homo sapien
aggcgtgatcctagtgcactacagc

SEQ ID NO: 5581993 - DNA, 25 bp, Homo sapien
gctgttgaagcttggaccctagatc

SEQ ID NO: 5581994 - DNA, 25 bp, Homo sapien
gcttggaccctagatcccatctccc

SEQ ID NO: 5581995 - DNA, 25 bp, Homo sapien
ccaccacacctaactctggcctcat

SEQ ID NO: 5581996 - DNA, 25 bp, Homo sapien
gttcataggcgtgatcctagtgcac

SEQ ID NO: 5581997 - DNA, 25 bp, Homo sapien
gcctacctgtatgtgcgcctggttc

SEQ ID NO: 5581998 - DNA, 25 bp, Homo sapien
gtggctgttcataggcgtgatccta

SEQ ID NO: 5581999 - DNA, 25 bp, Homo sapien
cagggaacctccatcagcctcagtc

SEQ ID NO: 5582000 - DNA, 25 bp, Homo sapien
tcccccttcatcatgcccctctgct

SEQ ID NO: 5582001 - DNA, 25 bp, Homo sapien
catggtgctcctttgtggtggcata

SEQ ID NO: 5582002 - DNA, 25 bp, Homo sapien
agaaaactgagcagccacgtgatga

SEQ ID NO: 5582003 - DNA, 25 bp, Homo sapien
tttatatatcttgcactacagccag

SEQ ID NO: 5582004 - DNA, 25 bp, Homo sapien
aacacacttcatgtcagtggtaggc

SEQ ID NO: 5582005 - DNA, 25 bp, Homo sapien
agtggtaggctgattctgattttgc

SEQ ID NO: 5582006 - DNA, 25 bp, Homo sapien
cttcatgtcagtggtaggctgattc

SEQ ID NO: 5582007 - DNA, 25 bp, Homo sapien
tgctttagggttacgctagtggaaa

SEQ ID NO: 5582008 - DNA, 25 bp, Homo sapien
gcactacagccagtgtgtgtagctc

SEQ ID NO: 5582009 - DNA, 25 bp, Homo sapien
ccacgtgatgaacatggtgctcctt

SEQ ID NO: 5582010 - DNA, 25 bp, Homo sapien
gtgtgtagctcaaggacttgcctcc

SEQ ID NO: 5582011 - DNA, 25 bp, Homo sapien
ttcctcgatgatatcagtaggtacc

SEQ ID NO: 5582012 - DNA, 25 bp, Homo sapien
ccaaatgacgggaaatgcctcaatt

SEQ ID NO: 5582013 - DNA, 25 bp, Homo sapien
cctaggtctgatttgtaacattttc

SEQ ID NO: 5582014 - DNA, 25 bp, Homo sapien
ttaagcccaccatgacagacagaag

SEQ ID NO: 5582015 - DNA, 25 bp, Homo sapien
gaaggtgaccactacatagagaatg

SEQ ID NO: 5582016 - DNA, 25 bp, Homo sapien
gagaatggatgcaacacagaataat

SEQ ID NO: 5582017 - DNA, 25 bp, Homo sapien
gtggcagagaaccaatggctttact

SEQ ID NO: 5582018 - DNA, 25 bp, Homo sapien
ataatctcaacacagaaacaattcc

SEQ ID NO: 5582019 - DNA, 25 bp, Homo sapien
tcacatcttgttggtaaaaaggcca

SEQ ID NO: 5582020 - DNA, 25 bp, Homo sapien
tagacaataggtaacatatgcagtt

SEQ ID NO: 5582021 - DNA, 25 bp, Homo sapien
cagtaggtaccattctgaagaagga

SEQ ID NO: 5582022 - DNA, 25 bp, Homo sapien
caccagaaagttttaagggcagaga

SEQ ID NO: 5582023 - DNA, 25 bp, Homo sapien
gcctagcatgtcaaatcaaagaatt

SEQ ID NO: 5582024 - DNA, 25 bp, Homo sapien
ttctcttaagccatggaaaaccacc

SEQ ID NO: 5582025 - DNA, 25 bp, Homo sapien
gagattaaaagtagagtgaagttag

SEQ ID NO: 5582026 - DNA, 25 bp, Homo sapien
tgaagttaggaggctgttaaatagt

SEQ ID NO: 5582027 - DNA, 25 bp, Homo sapien
tggggatggagatttataaagatta

SEQ ID NO: 5582028 - DNA, 25 bp, Homo sapien
ggagatttataaagattaggctggg

SEQ ID NO: 5582029 - DNA, 25 bp, Homo sapien
ttaagccatggaaaaccaccagaaa

SEQ ID NO: 5582030 - DNA, 25 bp, Homo sapien
tgttaaatagtctaagaaacgatag

SEQ ID NO: 5582031 - DNA, 25 bp, Homo sapien
gttcaagtgaacttactgcagtaag

SEQ ID NO: 5582032 - DNA, 25 bp, Homo sapien
ggagaggattatggaatgcctagca

SEQ ID NO: 5582033 - DNA, 25 bp, Homo sapien
cagccttctgagtagctaggactcc

SEQ ID NO: 5582034 - DNA, 25 bp, Homo sapien
ttagatgtttatagtgtaaggttga

SEQ ID NO: 5582035 - DNA, 25 bp, Homo sapien
tatagtgtaaggttgaactccattc

SEQ ID NO: 5582036 - DNA, 25 bp, Homo sapien
ttctgaggtcaagtgatcgtcctgc

SEQ ID NO: 5582037 - DNA, 25 bp, Homo sapien
tggcctcctaaagtcctgggatcac

SEQ ID NO: 5582038 - DNA, 25 bp, Homo sapien
taggactccaggtgtgcatcaccat

SEQ ID NO: 5582039 - DNA, 25 bp, Homo sapien
aggaacagtctgtgatctggattta

SEQ ID NO: 5582040 - DNA, 25 bp, Homo sapien
gtgcactggtatgatcatagctcac

SEQ ID NO: 5582041 - DNA, 25 bp, Homo sapien
gggatcacaagcatgagccaccatg

SEQ ID NO: 5582042 - DNA, 25 bp, Homo sapien
agtgatttgcagtatattccaagtt

SEQ ID NO: 5582043 - DNA, 25 bp, Homo sapien
tacatattggtaaaggaacagtctg

SEQ ID NO: 5582044 - DNA, 25 bp, Homo sapien
ttcagtcaattatggacacaagaac

SEQ ID NO: 5582045 - DNA, 25 bp, Homo sapien
gccttgcattcctggagcttgacat

SEQ ID NO: 5582046 - DNA, 25 bp, Homo sapien
actaagcatggaaattcaccagtaa

SEQ ID NO: 5582047 - DNA, 25 bp, Homo sapien
gcacaaacataaatatcccccagtc

SEQ ID NO: 5582048 - DNA, 25 bp, Homo sapien
ggtcacctgataaatgccttgcatt

SEQ ID NO: 5582049 - DNA, 25 bp, Homo sapien
acgaaacagctgactgcactgcttt

SEQ ID NO: 5582050 - DNA, 25 bp, Homo sapien
taaaaagaggttaatgtacatacta

SEQ ID NO: 5582051 - DNA, 25 bp, Homo sapien
tcaacaaggttctacttctggtcac

SEQ ID NO: 5582052 - DNA, 25 bp, Homo sapien
acacaagaacaatgttacaagcata

SEQ ID NO: 5582053 - DNA, 25 bp, Homo sapien
agcataaaccagacacaatacgtta

SEQ ID NO: 5582054 - DNA, 25 bp, Homo sapien
tcccccagtcatctacgaaacagct

SEQ ID NO: 5582055 - DNA, 25 bp, Homo sapien
atgactgaacaacacaaaaggcaag

SEQ ID NO: 5582056 - DNA, 25 bp, Homo sapien
tcgcagtgcttttggtaagagagcc

SEQ ID NO: 5582057 - DNA, 25 bp, Homo sapien
gcacctggatgactgaacaacacaa

SEQ ID NO: 5582058 - DNA, 25 bp, Homo sapien
acggattataatcagccttcacggt

SEQ ID NO: 5582059 - DNA, 25 bp, Homo sapien
gcacatcagacactggctgcaggac

SEQ ID NO: 5582060 - DNA, 25 bp, Homo sapien
ggtttaatggcttacagagggcaaa

SEQ ID NO: 5582061 - DNA, 25 bp, Homo sapien
tgcttttggtaagagagccaaggca

SEQ ID NO: 5582062 - DNA, 25 bp, Homo sapien
aaaagtagttacggaatccctgtgc

SEQ ID NO: 5582063 - DNA, 25 bp, Homo sapien
aagcacggcttcatttggaaagcac

SEQ ID NO: 5582064 - DNA, 25 bp, Homo sapien
cttgaaactactggatcacgtatcc

SEQ ID NO: 5582065 - DNA, 25 bp, Homo sapien
gccttcacggtaaacaagcacggct

SEQ ID NO: 5582066 - DNA, 25 bp, Homo sapien
gctgaggcaatcctactggctgtgc

SEQ ID NO: 5582067 - DNA, 25 bp, Homo sapien
tttgggagcaatgtgtgtaacttca

SEQ ID NO: 5582068 - DNA, 25 bp, Homo sapien
cttctgtgcttttcagggaggtggg

SEQ ID NO: 5582069 - DNA, 25 bp, Homo sapien
gctgacccaacaagcagtgctgggc

SEQ ID NO: 5582070 - DNA, 25 bp, Homo sapien
ctcagttcccccaaaggccttgcac

SEQ ID NO: 5582071 - DNA, 25 bp, Homo sapien
gataaaccccctggctgaggcaatc

SEQ ID NO: 5582072 - DNA, 25 bp, Homo sapien
tgcaagacattcagtgagcagaggg

SEQ ID NO: 5582073 - DNA, 25 bp, Homo sapien
ggtaaaggagactgcccactatagg

SEQ ID NO: 5582074 - DNA, 25 bp, Homo sapien
tgaaaggtaaggtactgtggtctat

SEQ ID NO: 5582075 - DNA, 25 bp, Homo sapien
gcagcagtcagcacatgcaagacat

SEQ ID NO: 5582076 - DNA, 25 bp, Homo sapien
ctaggattgtaaaatgggacttgtc

SEQ ID NO: 5582077 - DNA, 25 bp, Homo sapien
gtggtatgtgctagaaagcaagtcc

SEQ ID NO: 5582078 - DNA, 25 bp, Homo sapien
aggtctacaattgtggtatgtgcta

SEQ ID NO: 5582079 - DNA, 25 bp, Homo sapien
gttgttttaagtcccagatggagct

SEQ ID NO: 5582080 - DNA, 25 bp, Homo sapien
gagcaggccagagactgctattctt

SEQ ID NO: 5582081 - DNA, 25 bp, Homo sapien
ggccagagactgctattctttgatc

SEQ ID NO: 5582082 - DNA, 25 bp, Homo sapien
gtgctagaaagcaagtccaatataa

SEQ ID NO: 5582083 - DNA, 25 bp, Homo sapien
tgtcttacgctgaacacctcctgtt

SEQ ID NO: 5582084 - DNA, 25 bp, Homo sapien
gtcccagatggagcttcaatgaagc

SEQ ID NO: 5582085 - DNA, 25 bp, Homo sapien
tttaagtcccagatggagcttcaat

SEQ ID NO: 5582086 - DNA, 25 bp, Homo sapien
caattgtggtatgtgctagaaagca

SEQ ID NO: 5582087 - DNA, 25 bp, Homo sapien
agtaatgagaagtagctccgtgtgc

SEQ ID NO: 5582088 - DNA, 25 bp, Homo sapien
attgagtatgacaaaatgctgagtc

SEQ ID NO: 5582089 - DNA, 25 bp, Homo sapien
tctttcggtgtggtaaatcatagcc

SEQ ID NO: 5582090 - DNA, 25 bp, Homo sapien
gtccatgtagattctcttcgaggtc

SEQ ID NO: 5582091 - DNA, 25 bp, Homo sapien
tctggacttgggtttgagccttttg

SEQ ID NO: 5582092 - DNA, 25 bp, Homo sapien
ttctcaaagattgtgcctggtttcc

SEQ ID NO: 5582093 - DNA, 25 bp, Homo sapien
aaatgctgagtcctgtgagtcttcc

SEQ ID NO: 5582094 - DNA, 25 bp, Homo sapien
tgctgagtttgctctggattctttc

SEQ ID NO: 5582095 - DNA, 25 bp, Homo sapien
tcatcccttggctgaagtctgtact

SEQ ID NO: 5582096 - DNA, 25 bp, Homo sapien
tgtgtacgtaggtccataaaagtcc

SEQ ID NO: 5582097 - DNA, 25 bp, Homo sapien
agtagctccgtgtgcatacattgtc

SEQ ID NO: 5582098 - DNA, 25 bp, Homo sapien
ttcgaggtcaaggtacgccatatat

SEQ ID NO: 5582099 - DNA, 25 bp, Homo sapien
tcaagattgaaacaagcagcaggat

SEQ ID NO: 5582100 - DNA, 25 bp, Homo sapien
agagcctccgaaagattctgaaagc

SEQ ID NO: 5582101 - DNA, 25 bp, Homo sapien
aagcagcaggatactaagtctgttt

SEQ ID NO: 5582102 - DNA, 25 bp, Homo sapien
agcaagaaaggaccacttctgagag

SEQ ID NO: 5582103 - DNA, 25 bp, Homo sapien
taacacagccatccaaatccctccc

SEQ ID NO: 5582104 - DNA, 25 bp, Homo sapien
ctccccttgaaaagttggcagagca

SEQ ID NO: 5582105 - DNA, 25 bp, Homo sapien
gcttgaaagacaatacatcagtgat

SEQ ID NO: 5582106 - DNA, 25 bp, Homo sapien
ccacttctgagagggttaccatgat

SEQ ID NO: 5582107 - DNA, 25 bp, Homo sapien
ttcccagatcccagtgtgcagtaac

SEQ ID NO: 5582108 - DNA, 25 bp, Homo sapien
ttagcaagttaagcacagagaaagg

SEQ ID NO: 5582109 - DNA, 25 bp, Homo sapien
aatacgaaactgaaatgagcaagaa

SEQ ID NO: 5582110 - DNA, 25 bp, Homo sapien
ccatatggttaatgaaagacaaatc

SEQ ID NO: 5582111 - DNA, 25 bp, Homo sapien
aaactgaaatttgaatcggagttta

SEQ ID NO: 5582112 - DNA, 25 bp, Homo sapien
ataaaaagtggtcccaatttcaaca

SEQ ID NO: 5582113 - DNA, 25 bp, Homo sapien
atgaagtacttcaatgggtcaatgt

SEQ ID NO: 5582114 - DNA, 25 bp, Homo sapien
gcttataagcaatcagacaggctgc

SEQ ID NO: 5582115 - DNA, 25 bp, Homo sapien
caaaggtatgctaagaatgaatgaa

SEQ ID NO: 5582116 - DNA, 25 bp, Homo sapien
tgggtcaatgtatcaacctatggat

SEQ ID NO: 5582117 - DNA, 25 bp, Homo sapien
agcactggaagtctgttcatttttt

SEQ ID NO: 5582118 - DNA, 25 bp, Homo sapien
tatgagtttcatatggtgcaaacat

SEQ ID NO: 5582119 - DNA, 25 bp, Homo sapien
caataaatacgtaatgaagtacttc

SEQ ID NO: 5582120 - DNA, 25 bp, Homo sapien
tggtgcaaacattaattaggaagaa

SEQ ID NO: 5582121 - DNA, 25 bp, Homo sapien
gaaggtatgatatgaatgttaagta

SEQ ID NO: 5582122 - DNA, 25 bp, Homo sapien
tggcatgccagtcttccacatgtac

SEQ ID NO: 5582123 - DNA, 25 bp, Homo sapien
tatatttgggaaggtatgatatgaa

SEQ ID NO: 5582124 - DNA, 25 bp, Homo sapien
atatgagtggtcattggttatgatg

SEQ ID NO: 5582125 - DNA, 25 bp, Homo sapien
aataagactttatatgagtggtcat

SEQ ID NO: 5582126 - DNA, 25 bp, Homo sapien
ttggtatatggcatgccagtcttcc

SEQ ID NO: 5582127 - DNA, 25 bp, Homo sapien
tacaagctgatactaccataaaatt

SEQ ID NO: 5582128 - DNA, 25 bp, Homo sapien
aagagaaaatctgtgtatactgtta

SEQ ID NO: 5582129 - DNA, 25 bp, Homo sapien
aaggcttggaaaccaggttatccta

SEQ ID NO: 5582130 - DNA, 25 bp, Homo sapien
atttgggaaggtatgatatgaatgt

SEQ ID NO: 5582131 - DNA, 25 bp, Homo sapien
gctgaatggcatttggtatatggca

SEQ ID NO: 5582132 - DNA, 25 bp, Homo sapien
ctttcccccacaggttagtccttga

SEQ ID NO: 5582133 - DNA, 25 bp, Homo sapien
gcgtccagcctggcccctccaccaa

SEQ ID NO: 5582134 - DNA, 25 bp, Homo sapien
cagcctggcccctccaccaactctc

SEQ ID NO: 5582135 - DNA, 25 bp, Homo sapien
catcccggggctgcctcccgggaag

SEQ ID NO: 5582136 - DNA, 25 bp, Homo sapien
ggcagtgttctgaaggcctgacccg

SEQ ID NO: 5582137 - DNA, 25 bp, Homo sapien
ccaccaactctcagcatcccggggc

SEQ ID NO: 5582138 - DNA, 25 bp, Homo sapien
agagtgtctctattgctttccccca

SEQ ID NO: 5582139 - DNA, 25 bp, Homo sapien
aaaaagagagaaaaagagtgtctct

SEQ ID NO: 5582140 - DNA, 25 bp, Homo sapien
agtccttgagaaccaatgagatttt

SEQ ID NO: 5582141 - DNA, 25 bp, Homo sapien
gcacctcacatcccaataaaatatt

SEQ ID NO: 5582142 - DNA, 25 bp, Homo sapien
cccccacaggttagtccttgagaac

SEQ ID NO: 5582143 - DNA, 25 bp, Homo sapien
tgaagtgtgtttatcaagacagaaa

SEQ ID NO: 5582144 - DNA, 25 bp, Homo sapien
tgagaggttcttttgagaggttatc

SEQ ID NO: 5582145 - DNA, 25 bp, Homo sapien
tcctacagagtaaaaagcatgattg

SEQ ID NO: 5582146 - DNA, 25 bp, Homo sapien
gagcacctgtacttacaagctgatc

SEQ ID NO: 5582147 - DNA, 25 bp, Homo sapien
tacttctggggaaaaattcacaaga

SEQ ID NO: 5582148 - DNA, 25 bp, Homo sapien
tgggttgatgagaaaatctttggaa

SEQ ID NO: 5582149 - DNA, 25 bp, Homo sapien
ttgtgatgtaattaaagcctctgac

SEQ ID NO: 5582150 - DNA, 25 bp, Homo sapien
cagaaaaagaacaggttttaatagc

SEQ ID NO: 5582151 - DNA, 25 bp, Homo sapien
ttggaatagtagtaaataatgtcac

SEQ ID NO: 5582152 - DNA, 25 bp, Homo sapien
ctgggggaagatttgctttacttct

SEQ ID NO: 5582153 - DNA, 25 bp, Homo sapien
aaacaagtgaaggataggatatcta

SEQ ID NO: 5582154 - DNA, 25 bp, Homo sapien
tagttagagggcccaattatagtcc

SEQ ID NO: 5582155 - DNA, 25 bp, Homo sapien
caccaatgttggtgggtacaaggtc

SEQ ID NO: 5582156 - DNA, 25 bp, Homo sapien
gaaatgaggaacttgacatcttcaa

SEQ ID NO: 5582157 - DNA, 25 bp, Homo sapien
acaaagttacaaacacagtcccttc

SEQ ID NO: 5582158 - DNA, 25 bp, Homo sapien
attccactaaaataagatgacgatc

SEQ ID NO: 5582159 - DNA, 25 bp, Homo sapien
attctttgtatgggaaatgaggaac

SEQ ID NO: 5582160 - DNA, 25 bp, Homo sapien
gccccaccccacggactgtcctata

SEQ ID NO: 5582161 - DNA, 25 bp, Homo sapien
taatgcccatacaacaggtcactgt

SEQ ID NO: 5582162 - DNA, 25 bp, Homo sapien
catctatctaaggggcataggagac

SEQ ID NO: 5582163 - DNA, 25 bp, Homo sapien
aggggcataggagactttttagtta

SEQ ID NO: 5582164 - DNA, 25 bp, Homo sapien
tgtttagaaagtgctacaaagttac

SEQ ID NO: 5582165 - DNA, 25 bp, Homo sapien
gtaaataactgaagcaattatctgc

SEQ ID NO: 5582166 - DNA, 25 bp, Homo sapien
taatacacttagaactcactgtctg

SEQ ID NO: 5582167 - DNA, 25 bp, Homo sapien
gcctaaattactcaggtgattgcct

SEQ ID NO: 5582168 - DNA, 25 bp, Homo sapien
tcagggtaaagaatttggactgcct

SEQ ID NO: 5582169 - DNA, 25 bp, Homo sapien
aaatgtgggtatttcagggtaaaga

SEQ ID NO: 5582170 - DNA, 25 bp, Homo sapien
tcactgtctggatcacgttgttata

SEQ ID NO: 5582171 - DNA, 25 bp, Homo sapien
gacttcaggttggcaaccctccctc

SEQ ID NO: 5582172 - DNA, 25 bp, Homo sapien
gctctgcgcttaaggtctggacctt

SEQ ID NO: 5582173 - DNA, 25 bp, Homo sapien
ctagctctgcgcttaaggtctggac

SEQ ID NO: 5582174 - DNA, 25 bp, Homo sapien
aaaaatattgttctagctctgcgct

SEQ ID NO: 5582175 - DNA, 25 bp, Homo sapien
tggactgcctaaattactcaggtga

SEQ ID NO: 5582176 - DNA, 25 bp, Homo sapien
tctaaatgcagaaggttaatgggaa

SEQ ID NO: 5582177 - DNA, 25 bp, Homo sapien
acagagagatacaacttccataatg

SEQ ID NO: 5582178 - DNA, 25 bp, Homo sapien
ttcaaggtgtacttggaagtagatc

SEQ ID NO: 5582179 - DNA, 25 bp, Homo sapien
ggctgccagtttgtgactcttgctt

SEQ ID NO: 5582180 - DNA, 25 bp, Homo sapien
tgagcacctaacatacacacacagt

SEQ ID NO: 5582181 - DNA, 25 bp, Homo sapien
atgggaaagttccagaacattagtc

SEQ ID NO: 5582182 - DNA, 25 bp, Homo sapien
cacagattcaacaatggatgggagg

SEQ ID NO: 5582183 - DNA, 25 bp, Homo sapien
agagaaccagggtgcaaatcaaata

SEQ ID NO: 5582184 - DNA, 25 bp, Homo sapien
ccgtgggctctgcatccacagattc

SEQ ID NO: 5582185 - DNA, 25 bp, Homo sapien
agaatcactgtttactggagcactc

SEQ ID NO: 5582186 - DNA, 25 bp, Homo sapien
tggaagtagatcaaatgcaggtaga

SEQ ID NO: 5582187 - DNA, 25 bp, Homo sapien
tgggtgtttagtactgaaaaggcat

SEQ ID NO: 5582188 - DNA, 25 bp, Homo sapien
gcaatgaaatgggtgtttagtactg

SEQ ID NO: 5582189 - DNA, 25 bp, Homo sapien
gttgacataaacgaaaaagtggatc

SEQ ID NO: 5582190 - DNA, 25 bp, Homo sapien
ctctatggaagtaatgcagtgatgc

SEQ ID NO: 5582191 - DNA, 25 bp, Homo sapien
tgtcttgatgacaaaacgcactctt

SEQ ID NO: 5582192 - DNA, 25 bp, Homo sapien
ttactgtatgattcagcagggtttt

SEQ ID NO: 5582193 - DNA, 25 bp, Homo sapien
actcttagagtcacaagatcctgcc

SEQ ID NO: 5582194 - DNA, 25 bp, Homo sapien
tcttagacaggaatcagcaatgaaa

SEQ ID NO: 5582195 - DNA, 25 bp, Homo sapien
tttaaggagctttctgcatccactt

SEQ ID NO: 5582196 - DNA, 25 bp, Homo sapien
ttctatcgccatgctgacgtgaatg

SEQ ID NO: 5582197 - DNA, 25 bp, Homo sapien
gacgtgaatggcttcttagacagga

SEQ ID NO: 5582198 - DNA, 25 bp, Homo sapien
agaaatgacttcagaaatgacgatt

SEQ ID NO: 5582199 - DNA, 25 bp, Homo sapien
aatattgcaaaggatggtagtgttc

SEQ ID NO: 5582200 - DNA, 25 bp, Homo sapien
ctcagttcagaaatgacgacttcag

SEQ ID NO: 5582201 - DNA, 25 bp, Homo sapien
aaggccattggcatctgtttgcttt

SEQ ID NO: 5582202 - DNA, 25 bp, Homo sapien
ctgtttaaacagctggtagcctaaa

SEQ ID NO: 5582203 - DNA, 25 bp, Homo sapien
tgttttcaaaaaggccattggcatc

SEQ ID NO: 5582204 - DNA, 25 bp, Homo sapien
atatgtggagttatgttttgagatt

SEQ ID NO: 5582205 - DNA, 25 bp, Homo sapien
tgtagtaaatacatatgtggagtta

SEQ ID NO: 5582206 - DNA, 25 bp, Homo sapien
gaaatgacgacttcagaaatgactt

SEQ ID NO: 5582207 - DNA, 25 bp, Homo sapien
ttctctggagaaattacgggcacag

SEQ ID NO: 5582208 - DNA, 25 bp, Homo sapien
gcaaaggatggtagtgttccacttc

SEQ ID NO: 5582209 - DNA, 25 bp, Homo sapien
tatatatgtattgatgtgtatttac

SEQ ID NO: 5582210 - DNA, 25 bp, Homo sapien
acagcgacggagacctccaaaatat

SEQ ID NO: 5582211 - DNA, 25 bp, Homo sapien
tttgggctatgcaagcctcatgcac

SEQ ID NO: 5582212 - DNA, 25 bp, Homo sapien
ggctatgcaagcctcatgcactgac

SEQ ID NO: 5582213 - DNA, 25 bp, Homo sapien
caccaaaaaaacacgaagtttctga

SEQ ID NO: 5582214 - DNA, 25 bp, Homo sapien
tcatgcactgactacacagggccca

SEQ ID NO: 5582215 - DNA, 25 bp, Homo sapien
tgcatgggtcacagtccaaaaactg

SEQ ID NO: 5582216 - DNA, 25 bp, Homo sapien
tccaaaatattctgtccaccaaaaa

SEQ ID NO: 5582217 - DNA, 25 bp, Homo sapien
ccacattctaaacagcgacggagac

SEQ ID NO: 5582218 - DNA, 25 bp, Homo sapien
aaacacgaagtttctgaatatgtaa

SEQ ID NO: 5582219 - DNA, 25 bp, Homo sapien
agtggccacattctaaacagcgacg

SEQ ID NO: 5582220 - DNA, 25 bp, Homo sapien
taaattgcttattatgaaatgattc

SEQ ID NO: 5582221 - DNA, 25 bp, Homo sapien
gaacagtttatagaaggaaacactg

SEQ ID NO: 5582222 - DNA, 25 bp, Homo sapien
caagagtgataatatgatggaaatc

SEQ ID NO: 5582223 - DNA, 25 bp, Homo sapien
gaaatgattctgagaagtaccataa

SEQ ID NO: 5582224 - DNA, 25 bp, Homo sapien
aaacactgacaataacagcatacat

SEQ ID NO: 5582225 - DNA, 25 bp, Homo sapien
cagtaagttggaacttaagctaaat

SEQ ID NO: 5582226 - DNA, 25 bp, Homo sapien
taacagcatacatgtagtcagtaca

SEQ ID NO: 5582227 - DNA, 25 bp, Homo sapien
tttaagataatgtaagaatgtaaga

SEQ ID NO: 5582228 - DNA, 25 bp, Homo sapien
gaatgtaagacaggttgctttgcaa

SEQ ID NO: 5582229 - DNA, 25 bp, Homo sapien
ataagtaacaattcagtgagatatt

SEQ ID NO: 5582230 - DNA, 25 bp, Homo sapien
tctgagaagtaccataaactgttta

SEQ ID NO: 5582231 - DNA, 25 bp, Homo sapien
acttgattacccactagacttaaat

SEQ ID NO: 5582232 - DNA, 25 bp, Homo sapien
atttaagtctagtgggtaatcaagt

SEQ ID NO: 5582233 - DNA, 25 bp, Homo sapien
agagatagctctaatgccctttctg

SEQ ID NO: 5582234 - DNA, 25 bp, Homo sapien
ccagtttacaggcgctattccagca

SEQ ID NO: 5582235 - DNA, 25 bp, Homo sapien
tcaaaaacagagtcaatgagaaaat

SEQ ID NO: 5582236 - DNA, 25 bp, Homo sapien
ctacaaaaataagtcagcaagtttc

SEQ ID NO: 5582237 - DNA, 25 bp, Homo sapien
tcctaaacttagatggccaattaca

SEQ ID NO: 5582238 - DNA, 25 bp, Homo sapien
acatgatgttaacaagttctactac

SEQ ID NO: 5582239 - DNA, 25 bp, Homo sapien
agatggccaattacatacttatacc

SEQ ID NO: 5582240 - DNA, 25 bp, Homo sapien
tcacagactgtgatactaaagcacc

SEQ ID NO: 5582241 - DNA, 25 bp, Homo sapien
tggctcatagagatagctctaatgc

SEQ ID NO: 5582242 - DNA, 25 bp, Homo sapien
actaaagcacccttaacatgatgtt

SEQ ID NO: 5582243 - DNA, 25 bp, Homo sapien
cagccccagtttacaggcgctattc

SEQ ID NO: 5582244 - DNA, 25 bp, Homo sapien
tttcgtaacaataaatccaatttat

SEQ ID NO: 5582245 - DNA, 25 bp, Homo sapien
ataaattggatttattgttacgaaa

SEQ ID NO: 5582246 - DNA, 25 bp, Homo sapien
gtaatggcagctaagtgtaaagtat

SEQ ID NO: 5582247 - DNA, 25 bp, Homo sapien
gatctgtgtataaccaaaatgcctt

SEQ ID NO: 5582248 - DNA, 25 bp, Homo sapien
ccacggagagtttacaaagaatttg

SEQ ID NO: 5582249 - DNA, 25 bp, Homo sapien
taaatgagaaagaaaccaatacacc

SEQ ID NO: 5582250 - DNA, 25 bp, Homo sapien
tgtacagagtccatgatagttgaac

SEQ ID NO: 5582251 - DNA, 25 bp, Homo sapien
aatgccttggcatggtgtttccatc

SEQ ID NO: 5582252 - DNA, 25 bp, Homo sapien
caatacaggtaggtgtggttttcct

SEQ ID NO: 5582253 - DNA, 25 bp, Homo sapien
gctcctgaaaggtgcatctgtaatt

SEQ ID NO: 5582254 - DNA, 25 bp, Homo sapien
gatagttgaacagctggaaaattcc

SEQ ID NO: 5582255 - DNA, 25 bp, Homo sapien
aagaatttggcaatacaggtaggtg

SEQ ID NO: 5582256 - DNA, 25 bp, Homo sapien
ccatagctgtatcaacaggggagag

SEQ ID NO: 5582257 - DNA, 25 bp, Homo sapien
caatcagccaattaggtcagcactt

SEQ ID NO: 5582258 - DNA, 25 bp, Homo sapien
gaagatagactgcaatattgaaagc

SEQ ID NO: 5582259 - DNA, 25 bp, Homo sapien
ggaggtgaatacaagcaacccactt

SEQ ID NO: 5582260 - DNA, 25 bp, Homo sapien
ttagctcagcccagtgtattccaat

SEQ ID NO: 5582261 - DNA, 25 bp, Homo sapien
aaatccaatcagtcagttacctcat

SEQ ID NO: 5582262 - DNA, 25 bp, Homo sapien
aaaaaaaggtaagtcagagatcatt

SEQ ID NO: 5582263 - DNA, 25 bp, Homo sapien
ttggtctaggtaattctgatcagcc

SEQ ID NO: 5582264 - DNA, 25 bp, Homo sapien
caattagctcagatcaggtaaatcc

SEQ ID NO: 5582265 - DNA, 25 bp, Homo sapien
tcaatcagccaattagctcagccca

SEQ ID NO: 5582266 - DNA, 25 bp, Homo sapien
aacttgaaggttaacagatataata

SEQ ID NO: 5582267 - DNA, 25 bp, Homo sapien
agcaacccacttactcagccctgat

SEQ ID NO: 5582268 - DNA, 25 bp, Homo sapien
acaggagccatactcataggaaatc

SEQ ID NO: 5582269 - DNA, 25 bp, Homo sapien
agtgatttattggggggacactgat

SEQ ID NO: 5582270 - DNA, 25 bp, Homo sapien
aaaagtggtaaaaatgagtgaatag

SEQ ID NO: 5582271 - DNA, 25 bp, Homo sapien
tgagtgaatagttgcaaaaagttaa

SEQ ID NO: 5582272 - DNA, 25 bp, Homo sapien
attcaacccacaggagtttggaaga

SEQ ID NO: 5582273 - DNA, 25 bp, Homo sapien
agaggtgggaaaattcttacaacag

SEQ ID NO: 5582274 - DNA, 25 bp, Homo sapien
acattcatgtcagaagaggtgggaa

SEQ ID NO: 5582275 - DNA, 25 bp, Homo sapien
gagtttggaagaaccgattgctaac

SEQ ID NO: 5582276 - DNA, 25 bp, Homo sapien
tggaaccttaacttgcaacactgct

SEQ ID NO: 5582277 - DNA, 25 bp, Homo sapien
tgtaaatgaaacacgtccagggttg

SEQ ID NO: 5582278 - DNA, 25 bp, Homo sapien
atatgtgttaataaaggtgcttcca

SEQ ID NO: 5582279 - DNA, 25 bp, Homo sapien
catggtttaagggactactgtcttg

SEQ ID NO: 5582280 - DNA, 25 bp, Homo sapien
tactagagttgcatatatggacttt

SEQ ID NO: 5582281 - DNA, 25 bp, Homo sapien
tcgtaatccatagaacactgacata

SEQ ID NO: 5582282 - DNA, 25 bp, Homo sapien
aaaaacacgtttgggctaagcaaca

SEQ ID NO: 5582283 - DNA, 25 bp, Homo sapien
attagaagtcccactctgttccatg

SEQ ID NO: 5582284 - DNA, 25 bp, Homo sapien
tcttaaccagtgctatgtaacctat

SEQ ID NO: 5582285 - DNA, 25 bp, Homo sapien
cttgttcacagtgcaagaggcatgc

SEQ ID NO: 5582286 - DNA, 25 bp, Homo sapien
tgggctaagcaacattactaatttc

SEQ ID NO: 5582287 - DNA, 25 bp, Homo sapien
cacagtgcaagaggcatgcctttta

SEQ ID NO: 5582288 - DNA, 25 bp, Homo sapien
atttatatggaacagccatagagag

SEQ ID NO: 5582289 - DNA, 25 bp, Homo sapien
ttgataacttagagatgtacaaact

SEQ ID NO: 5582290 - DNA, 25 bp, Homo sapien
gagcccgtttgtctgaatccaacac

SEQ ID NO: 5582291 - DNA, 25 bp, Homo sapien
aacacctgtgctctgtaagccactc

SEQ ID NO: 5582292 - DNA, 25 bp, Homo sapien
gggggcccagtctgttacagacacc

SEQ ID NO: 5582293 - DNA, 25 bp, Homo sapien
gacaccctttgggaaagtctcagca

SEQ ID NO: 5582294 - DNA, 25 bp, Homo sapien
gattggtgcctgctaagtaccatcc

SEQ ID NO: 5582295 - DNA, 25 bp, Homo sapien
ctccacgcccttggctaggatggtg

SEQ ID NO: 5582296 - DNA, 25 bp, Homo sapien
gcccaaatcacacaggtggtaagag

SEQ ID NO: 5582297 - DNA, 25 bp, Homo sapien
aagaaagctaacattgattggtgcc

SEQ ID NO: 5582298 - DNA, 25 bp, Homo sapien
gactcaatcagcgggagccattatt

SEQ ID NO: 5582299 - DNA, 25 bp, Homo sapien
acagaaatagtaaggatcccaagtt

SEQ ID NO: 5582300 - DNA, 25 bp, Homo sapien
gcagaagcagaatctgagcccgttt

SEQ ID NO: 5582301 - DNA, 25 bp, Homo sapien
tcttgccaaaatgagatgctaagtt

SEQ ID NO: 5582302 - DNA, 25 bp, Homo sapien
cctcgagcagggcaatatttttttc

SEQ ID NO: 5582303 - DNA, 25 bp, Homo sapien
caaaatagacatactcacagacttt

SEQ ID NO: 5582304 - DNA, 25 bp, Homo sapien
gggctccagatgccctcgagcaggg

SEQ ID NO: 5582305 - DNA, 25 bp, Homo sapien
acatagacgcagttcaaaagattcc

SEQ ID NO: 5582306 - DNA, 25 bp, Homo sapien
gtttaaactgagagatgctatcttt

SEQ ID NO: 5582307 - DNA, 25 bp, Homo sapien
ggtaactgtagggctccagatgccc

SEQ ID NO: 5582308 - DNA, 25 bp, Homo sapien
ttgaaaacacaaatataactaagaa

SEQ ID NO: 5582309 - DNA, 25 bp, Homo sapien
ttcacagaagatagaatcagttcaa

SEQ ID NO: 5582310 - DNA, 25 bp, Homo sapien
actttagtaatggtaactgtagggc

SEQ ID NO: 5582311 - DNA, 25 bp, Homo sapien
ttttatgactggctatgcacatttc

SEQ ID NO: 5582312 - DNA, 25 bp, Homo sapien
agctgatgaattgaacacacctttc

SEQ ID NO: 5582313 - DNA, 25 bp, Homo sapien
taggaagcaaataaagtcaagcatc

SEQ ID NO: 5582314 - DNA, 25 bp, Homo sapien
aagaaatccaaactaacagcattgt

SEQ ID NO: 5582315 - DNA, 25 bp, Homo sapien
aaagaagatgtatgagaaatgcatg

SEQ ID NO: 5582316 - DNA, 25 bp, Homo sapien
aataactataaagagagggaatttg

SEQ ID NO: 5582317 - DNA, 25 bp, Homo sapien
agaaaagggatgtagtgaaattact

SEQ ID NO: 5582318 - DNA, 25 bp, Homo sapien
attaatgaaggcaaacatcagatca

SEQ ID NO: 5582319 - DNA, 25 bp, Homo sapien
agagagggaatttgaaaccataccc

SEQ ID NO: 5582320 - DNA, 25 bp, Homo sapien
aaatgcagactattgctaggaagca

SEQ ID NO: 5582321 - DNA, 25 bp, Homo sapien
aaacaaaatgggtactcttctccta

SEQ ID NO: 5582322 - DNA, 25 bp, Homo sapien
ttcccccctatattcaaagaccatc

SEQ ID NO: 5582323 - DNA, 25 bp, Homo sapien
ggtgcaatcacaggtcaccgcagcc

SEQ ID NO: 5582324 - DNA, 25 bp, Homo sapien
gagtgagctagaaaactgagattgt

SEQ ID NO: 5582325 - DNA, 25 bp, Homo sapien
caagaaaaccaaggatgacagtgta

SEQ ID NO: 5582326 - DNA, 25 bp, Homo sapien
agtgtagaaatgtcaagacggagtg

SEQ ID NO: 5582327 - DNA, 25 bp, Homo sapien
ggccccatggattctaagcgaggtg

SEQ ID NO: 5582328 - DNA, 25 bp, Homo sapien
gcctgggaagattgaatttgaggag

SEQ ID NO: 5582329 - DNA, 25 bp, Homo sapien
aagatacaaaagttccaggtgacaa

SEQ ID NO: 5582330 - DNA, 25 bp, Homo sapien
aggcccacgaaatagctgctgtcac

SEQ ID NO: 5582331 - DNA, 25 bp, Homo sapien
gggaacagaaactagacgcaagttc

SEQ ID NO: 5582332 - DNA, 25 bp, Homo sapien
cttctcatgattccagaggaggccc

SEQ ID NO: 5582333 - DNA, 25 bp, Homo sapien
gtatggtgtgagaagctaaaaataa

SEQ ID NO: 5582334 - DNA, 25 bp, Homo sapien
aggcagcaaccttagaaatgatatc

SEQ ID NO: 5582335 - DNA, 25 bp, Homo sapien
atagtcactaagaagcaaaggactc

SEQ ID NO: 5582336 - DNA, 25 bp, Homo sapien
taagaagcaaaggactctgaacaca

SEQ ID NO: 5582337 - DNA, 25 bp, Homo sapien
ttcaaagcatagcattaggttttac

SEQ ID NO: 5582338 - DNA, 25 bp, Homo sapien
cttctcaaggtcacatagtcactaa

SEQ ID NO: 5582339 - DNA, 25 bp, Homo sapien
agcaccaatgaccatccatccttca

SEQ ID NO: 5582340 - DNA, 25 bp, Homo sapien
ttggaacccactacattcaaagcat

SEQ ID NO: 5582341 - DNA, 25 bp, Homo sapien
gaaaaagggagctcaagttatcttc

SEQ ID NO: 5582342 - DNA, 25 bp, Homo sapien
acaggtttactggcagatgcaggag

SEQ ID NO: 5582343 - DNA, 25 bp, Homo sapien
gcttcttctgacaaggcagcaacct

SEQ ID NO: 5582344 - DNA, 25 bp, Homo sapien
gtaagtaaagtgacaagcagcacca

SEQ ID NO: 5582345 - DNA, 25 bp, Homo sapien
tgagagcctccaaaataggacaggg

SEQ ID NO: 5582346 - DNA, 25 bp, Homo sapien
tcaacctaatgggacagtgtactca

SEQ ID NO: 5582347 - DNA, 25 bp, Homo sapien
aagggttaagagcagtttacaccaa

SEQ ID NO: 5582348 - DNA, 25 bp, Homo sapien
ttggagtctagaagctccatctacc

SEQ ID NO: 5582349 - DNA, 25 bp, Homo sapien
taccacaggcgccatctgtaccaag

SEQ ID NO: 5582350 - DNA, 25 bp, Homo sapien
cagttcacaggttggataagtcacg

SEQ ID NO: 5582351 - DNA, 25 bp, Homo sapien
agcagatcacaatcagttcacaggt

SEQ ID NO: 5582352 - DNA, 25 bp, Homo sapien
ctaacccaataaaggcaaaatctta

SEQ ID NO: 5582353 - DNA, 25 bp, Homo sapien
agttagaagatccattgagagcctc

SEQ ID NO: 5582354 - DNA, 25 bp, Homo sapien
caaaccaagttaccaagcagatcac

SEQ ID NO: 5582355 - DNA, 25 bp, Homo sapien
aggccagaaaatgtactcagacttc

SEQ ID NO: 5582356 - DNA, 25 bp, Homo sapien
gtggtggccatggcttaatgccatc

SEQ ID NO: 5582357 - DNA, 25 bp, Homo sapien
gcagagaactacgagattgtcagca

SEQ ID NO: 5582358 - DNA, 25 bp, Homo sapien
agaattcagggtgtctaaaagtttc

SEQ ID NO: 5582359 - DNA, 25 bp, Homo sapien
agaacatttgcaaatcgtggtggcc

SEQ ID NO: 5582360 - DNA, 25 bp, Homo sapien
tgtcagcaagcagtgctccagaaat

SEQ ID NO: 5582361 - DNA, 25 bp, Homo sapien
ctgactggaggcgctacagtttaat

SEQ ID NO: 5582362 - DNA, 25 bp, Homo sapien
gtgcgtgcattcatgctggaggctg

SEQ ID NO: 5582363 - DNA, 25 bp, Homo sapien
cctccggcaaatggacagattttgt

SEQ ID NO: 5582364 - DNA, 25 bp, Homo sapien
aataatagcattcgagaggcaagag

SEQ ID NO: 5582365 - DNA, 25 bp, Homo sapien
agctccagcttgggagagaacattt

SEQ ID NO: 5582366 - DNA, 25 bp, Homo sapien
atagagccttgcattggtcagttcg

SEQ ID NO: 5582367 - DNA, 25 bp, Homo sapien
gaaagtcattaaatggagagaacta

SEQ ID NO: 5582368 - DNA, 25 bp, Homo sapien
agtcattaaatggagagaactagtc

SEQ ID NO: 5582369 - DNA, 25 bp, Homo sapien
aggaagatattataggtaacaattt

SEQ ID NO: 5582370 - DNA, 25 bp, Homo sapien
cagaaaacagcaaacctgaaaaaac

SEQ ID NO: 5582371 - DNA, 25 bp, Homo sapien
ttaacacatgtagtaagaaaacgtc

SEQ ID NO: 5582372 - DNA, 25 bp, Homo sapien
aacacatgtagtaagaaaacgtctt

SEQ ID NO: 5582373 - DNA, 25 bp, Homo sapien
aatttaacacatgtagtaagaaaac

SEQ ID NO: 5582374 - DNA, 25 bp, Homo sapien
ataaatgcagtaatgtgcacatgca

SEQ ID NO: 5582375 - DNA, 25 bp, Homo sapien
aacgtcttaaattcggaaaatcaca

SEQ ID NO: 5582376 - DNA, 25 bp, Homo sapien
aatgcagtaatgtgcacatgcacgc

SEQ ID NO: 5582377 - DNA, 25 bp, Homo sapien
cttaaattcggaaaatcacaactag

SEQ ID NO: 5582378 - DNA, 25 bp, Homo sapien
aaatttacaaaatgtgtcaggtagc

SEQ ID NO: 5582379 - DNA, 25 bp, Homo sapien
gctggtggccatcgttgaattaaga

SEQ ID NO: 5582380 - DNA, 25 bp, Homo sapien
acaaaatgtgtcaggtagctggtgg

SEQ ID NO: 5582381 - DNA, 25 bp, Homo sapien
tgaaaacgtgccaaattaagggtca

SEQ ID NO: 5582382 - DNA, 25 bp, Homo sapien
gtacatctttatggcaacttatccc

SEQ ID NO: 5582383 - DNA, 25 bp, Homo sapien
aaatgtgaaaacgtgccaaattaag

SEQ ID NO: 5582384 - DNA, 25 bp, Homo sapien
tagtagattactaagagtcatccca

SEQ ID NO: 5582385 - DNA, 25 bp, Homo sapien
attactaagagtcatcccagattcc

SEQ ID NO: 5582386 - DNA, 25 bp, Homo sapien
acatgaatagctcaagtacttgtac

SEQ ID NO: 5582387 - DNA, 25 bp, Homo sapien
taggaactgtatatgaaaagctgta

SEQ ID NO: 5582388 - DNA, 25 bp, Homo sapien
atcgttgaattaagaatagtagatt

SEQ ID NO: 5582389 - DNA, 25 bp, Homo sapien
ctatgactgacacaactgtatgtct

SEQ ID NO: 5582390 - DNA, 25 bp, Homo sapien
agacatacagttgtgtcagtcatag

SEQ ID NO: 5582391 - DNA, 25 bp, Homo sapien
tggtgacactgctttgcaagagatc

SEQ ID NO: 5582392 - DNA, 25 bp, Homo sapien
ttcctgggacattggcttagtggca

SEQ ID NO: 5582393 - DNA, 25 bp, Homo sapien
ggagacccaggcagacatttactgt

SEQ ID NO: 5582394 - DNA, 25 bp, Homo sapien
gggagaaacattcctgggtaagctc

SEQ ID NO: 5582395 - DNA, 25 bp, Homo sapien
ttagtggcagtgatgctactggtga

SEQ ID NO: 5582396 - DNA, 25 bp, Homo sapien
ctgtgtgtaaagaactaagccagtt

SEQ ID NO: 5582397 - DNA, 25 bp, Homo sapien
tttggggatcaccaatggagaaaaa

SEQ ID NO: 5582398 - DNA, 25 bp, Homo sapien
ttaaacaaaggaaggcaaacatgta

SEQ ID NO: 5582399 - DNA, 25 bp, Homo sapien
tgggatgtggtcttggcattactat

SEQ ID NO: 5582400 - DNA, 25 bp, Homo sapien
cacctaagacagtttagggagaccc

SEQ ID NO: 5582401 - DNA, 25 bp, Homo sapien
atgagaaataggaaattgaactggc

SEQ ID NO: 5582402 - DNA, 25 bp, Homo sapien
cagagtacaactgcagcgtgtagct

SEQ ID NO: 5582403 - DNA, 25 bp, Homo sapien
aattactgctaaagtgctggggaag

SEQ ID NO: 5582404 - DNA, 25 bp, Homo sapien
cacggtacaccttgagggaactttg

SEQ ID NO: 5582405 - DNA, 25 bp, Homo sapien
ctgctatgctggcaacaatattaat

SEQ ID NO: 5582406 - DNA, 25 bp, Homo sapien
gtacaactgcagcgtgtagctgggg

SEQ ID NO: 5582407 - DNA, 25 bp, Homo sapien
agtgtttaggaaattggaacatctt

SEQ ID NO: 5582408 - DNA, 25 bp, Homo sapien
atccagctacaagtaaaaggacagc

SEQ ID NO: 5582409 - DNA, 25 bp, Homo sapien
agctacaagtaaaaggacagcagag

SEQ ID NO: 5582410 - DNA, 25 bp, Homo sapien
ttgacatatggagactcttcagttt

SEQ ID NO: 5582411 - DNA, 25 bp, Homo sapien
tgtagctgggggaattactgctaaa

SEQ ID NO: 5582412 - DNA, 25 bp, Homo sapien
ccaagagtttgacatatggagactc

SEQ ID NO: 5582413 - DNA, 25 bp, Homo sapien
tcagataatagtcaaaaactataac

SEQ ID NO: 5582414 - DNA, 25 bp, Homo sapien
ctgggattacaagcagcctgtcacc

SEQ ID NO: 5582415 - DNA, 25 bp, Homo sapien
taaaattataagaagaatcatgttt

SEQ ID NO: 5582416 - DNA, 25 bp, Homo sapien
atgattgtgctataagaatcacata

SEQ ID NO: 5582417 - DNA, 25 bp, Homo sapien
aaactataacaatttagacagggac

SEQ ID NO: 5582418 - DNA, 25 bp, Homo sapien
ttacaagcagcctgtcaccacaccg

SEQ ID NO: 5582419 - DNA, 25 bp, Homo sapien
ttcagcatttttaagcaccctcaat

SEQ ID NO: 5582420 - DNA, 25 bp, Homo sapien
tctgcatatgaaatttggataagac

SEQ ID NO: 5582421 - DNA, 25 bp, Homo sapien
agcagcctgtcaccacaccggataa

SEQ ID NO: 5582422 - DNA, 25 bp, Homo sapien
ataacaatttagacagggactgggg

SEQ ID NO: 5582423 - DNA, 25 bp, Homo sapien
tttggataagactaattcagataat

SEQ ID NO: 5582424 - DNA, 25 bp, Homo sapien
tgttcttaaacggcttgtaaagcaa

SEQ ID NO: 5582425 - DNA, 25 bp, Homo sapien
tgtaagctgtcaaatatgagccatc

SEQ ID NO: 5582426 - DNA, 25 bp, Homo sapien
gactggcctcctctcaatatgattc

SEQ ID NO: 5582427 - DNA, 25 bp, Homo sapien
acgtgttgttgcaaataggggctat

SEQ ID NO: 5582428 - DNA, 25 bp, Homo sapien
tgaagtcatgaacagtgccaaatct

SEQ ID NO: 5582429 - DNA, 25 bp, Homo sapien
ttgtaaagcaattcaggaaggataa

SEQ ID NO: 5582430 - DNA, 25 bp, Homo sapien
caattgagccttaaagagaaaaatg

SEQ ID NO: 5582431 - DNA, 25 bp, Homo sapien
atgaaaataaacagacaattgagcc

SEQ ID NO: 5582432 - DNA, 25 bp, Homo sapien
aaaacaactgcagaagaaatgtact

SEQ ID NO: 5582433 - DNA, 25 bp, Homo sapien
aggggggaatgtgtgtttataacac

SEQ ID NO: 5582434 - DNA, 25 bp, Homo sapien
aaaaaatataattcagactggcctc

SEQ ID NO: 5582435 - DNA, 25 bp, Homo sapien
atcctcaggagcctccgtctgtggg

SEQ ID NO: 5582436 - DNA, 25 bp, Homo sapien
cccacagacggaggctcctgaggat

SEQ ID NO: 5582437 - DNA, 25 bp, Homo sapien
tgaagggctacttaactcatgtccc

SEQ ID NO: 5582438 - DNA, 25 bp, Homo sapien
ggcaacccccaaactctattcacat

SEQ ID NO: 5582439 - DNA, 25 bp, Homo sapien
aaaggcagacatctcaacttgaagt

SEQ ID NO: 5582440 - DNA, 25 bp, Homo sapien
attcagggtcatggctaagtcattt

SEQ ID NO: 5582441 - DNA, 25 bp, Homo sapien
aaatacatgaagggctacttaactc

SEQ ID NO: 5582442 - DNA, 25 bp, Homo sapien
cagcgtttcagaatggcagatctta

SEQ ID NO: 5582443 - DNA, 25 bp, Homo sapien
agtaaaacaaggtccattcagggtc

SEQ ID NO: 5582444 - DNA, 25 bp, Homo sapien
ggagaaaaagaccagcgtttcagaa

SEQ ID NO: 5582445 - DNA, 25 bp, Homo sapien
gatcaaacagaattttatggtgcac

SEQ ID NO: 5582446 - DNA, 25 bp, Homo sapien
aattttatggtgcactataggaagg

SEQ ID NO: 5582447 - DNA, 25 bp, Homo sapien
atacaaattcataaaaggcagacat

SEQ ID NO: 5582448 - DNA, 25 bp, Homo sapien
tgtcatggccactatgctaagtgct

SEQ ID NO: 5582449 - DNA, 25 bp, Homo sapien
tttttggagccacaatctcacattg

SEQ ID NO: 5582450 - DNA, 25 bp, Homo sapien
ttctgactccagggcccataatttt

SEQ ID NO: 5582451 - DNA, 25 bp, Homo sapien
gttttttgcaacatacctgagaggt

SEQ ID NO: 5582452 - DNA, 25 bp, Homo sapien
atttacaagtgagacgaaattgctc

SEQ ID NO: 5582453 - DNA, 25 bp, Homo sapien
aaagctaataaatgacggactctgt

SEQ ID NO: 5582454 - DNA, 25 bp, Homo sapien
cggactctgtattcaaacctggatc

SEQ ID NO: 5582455 - DNA, 25 bp, Homo sapien
gcttactctgtcatggccactatgc

SEQ ID NO: 5582456 - DNA, 25 bp, Homo sapien
aagtgagacgaaattgctcaaattc

SEQ ID NO: 5582457 - DNA, 25 bp, Homo sapien
tgtagtgtccactccaagccttcta

SEQ ID NO: 5582458 - DNA, 25 bp, Homo sapien
ggactatagatgcctgcctctgcct

SEQ ID NO: 5582459 - DNA, 25 bp, Homo sapien
atgaatgacaaattagtatactatt

SEQ ID NO: 5582460 - DNA, 25 bp, Homo sapien
aaacatacaacagaaacgcttttat

SEQ ID NO: 5582461 - DNA, 25 bp, Homo sapien
acagagcacccacaaagttagcttt

SEQ ID NO: 5582462 - DNA, 25 bp, Homo sapien
tactaactataacacagtggcatta

SEQ ID NO: 5582463 - DNA, 25 bp, Homo sapien
aactgactggtcacagactgatttt

SEQ ID NO: 5582464 - DNA, 25 bp, Homo sapien
cacagtggcattaacaatttgtccc

SEQ ID NO: 5582465 - DNA, 25 bp, Homo sapien
taaatagaaaagctcacattcttcc

SEQ ID NO: 5582466 - DNA, 25 bp, Homo sapien
gggaaccagctggcaaaatcacaac

SEQ ID NO: 5582467 - DNA, 25 bp, Homo sapien
aaagttaatatgataaatgaatgac

SEQ ID NO: 5582468 - DNA, 25 bp, Homo sapien
ttgcttggtgataccacagagcacc

SEQ ID NO: 5582469 - DNA, 25 bp, Homo sapien
ttttggtaatgaataactatagatt

SEQ ID NO: 5582470 - DNA, 25 bp, Homo sapien
tggtcaccgatatcaacccagtcga

SEQ ID NO: 5582471 - DNA, 25 bp, Homo sapien
tcgactgggttgatatcggtgacca

SEQ ID NO: 5582472 - DNA, 25 bp, Homo sapien
ctaaaatcagcattccccagcatcc

SEQ ID NO: 5582473 - DNA, 25 bp, Homo sapien
aagctgaaatgagggattcccttcc

SEQ ID NO: 5582474 - DNA, 25 bp, Homo sapien
ccaaaacaacaagatctgcagtccc

SEQ ID NO: 5582475 - DNA, 25 bp, Homo sapien
tgaccgcaattttgttggaaagaag

SEQ ID NO: 5582476 - DNA, 25 bp, Homo sapien
cagttccatgaaagtgtccccaaaa

SEQ ID NO: 5582477 - DNA, 25 bp, Homo sapien
gtatggaacaggttgcactgtgcca

SEQ ID NO: 5582478 - DNA, 25 bp, Homo sapien
tttttaagctcatgtgccaggccac

SEQ ID NO: 5582479 - DNA, 25 bp, Homo sapien
cattacacagtaatccagtgcaaat

SEQ ID NO: 5582480 - DNA, 25 bp, Homo sapien
catttgtctggtatggaacaggttg

SEQ ID NO: 5582481 - DNA, 25 bp, Homo sapien
tgtggtttcagaacttagcattgtc

SEQ ID NO: 5582482 - DNA, 25 bp, Homo sapien
tgcactgtgccaaaattcaagagcc

SEQ ID NO: 5582483 - DNA, 25 bp, Homo sapien
ttatagaaaagccaccaaggtagaa

SEQ ID NO: 5582484 - DNA, 25 bp, Homo sapien
tccatgagcttgggtagcatcctgt

SEQ ID NO: 5582485 - DNA, 25 bp, Homo sapien
tggccccaggtcaccctgtactgca

SEQ ID NO: 5582486 - DNA, 25 bp, Homo sapien
acacattgttcatggggtaaaaccc

SEQ ID NO: 5582487 - DNA, 25 bp, Homo sapien
tattgggaccaatcactcgtgtaac

SEQ ID NO: 5582488 - DNA, 25 bp, Homo sapien
cagggaggatatctggatttgctca

SEQ ID NO: 5582489 - DNA, 25 bp, Homo sapien
ctgttaaccctaggggtgtaagcca

SEQ ID NO: 5582490 - DNA, 25 bp, Homo sapien
aggcaggaggtgacatttgtcctgt

SEQ ID NO: 5582491 - DNA, 25 bp, Homo sapien
tcaagggaacttaagattcaacttc

SEQ ID NO: 5582492 - DNA, 25 bp, Homo sapien
ctcgtgtaaccaaaagtcaggatcc

SEQ ID NO: 5582493 - DNA, 25 bp, Homo sapien
tttcagagcctcacacagtgcctgg

SEQ ID NO: 5582494 - DNA, 25 bp, Homo sapien
aaggtgtgaagtcgccagcaacgtc

SEQ ID NO: 5582495 - DNA, 25 bp, Homo sapien
gacgttgctggcgacttcacacctt

SEQ ID NO: 5582496 - DNA, 25 bp, Homo sapien
tttaaacagaggtgagctcataagg

SEQ ID NO: 5582497 - DNA, 25 bp, Homo sapien
tatgcctcatgctctgaccagtact

SEQ ID NO: 5582498 - DNA, 25 bp, Homo sapien
agatattctgtcaaatgagcatacc

SEQ ID NO: 5582499 - DNA, 25 bp, Homo sapien
tacactgccaaattactccctctgc

SEQ ID NO: 5582500 - DNA, 25 bp, Homo sapien
attactccctctgcacaagttgtgc

SEQ ID NO: 5582501 - DNA, 25 bp, Homo sapien
atccatctagtagtttgcaagtcat

SEQ ID NO: 5582502 - DNA, 25 bp, Homo sapien
acaagcagtgtgtaaaaatatttac

SEQ ID NO: 5582503 - DNA, 25 bp, Homo sapien
gaccagtactggggatcatttaaaa

SEQ ID NO: 5582504 - DNA, 25 bp, Homo sapien
caatttctaatcccacaagcagtgt

SEQ ID NO: 5582505 - DNA, 25 bp, Homo sapien
gtttgcaagtcatgaactgacaatc

SEQ ID NO: 5582506 - DNA, 25 bp, Homo sapien
catgttaaggttattatatgcatcc

SEQ ID NO: 5582507 - DNA, 25 bp, Homo sapien
tctactaccgaaaacattttagtgg

SEQ ID NO: 5582508 - DNA, 25 bp, Homo sapien
ccactaaaatgttttcggtagtaga

SEQ ID NO: 5582509 - DNA, 25 bp, Homo sapien
tcctcagtgcaagaaggcaatagag

SEQ ID NO: 5582510 - DNA, 25 bp, Homo sapien
ttgcccctgcaagtatctctgagtc

SEQ ID NO: 5582511 - DNA, 25 bp, Homo sapien
gctaggaggctagttcataacactc

SEQ ID NO: 5582512 - DNA, 25 bp, Homo sapien
gttaactgccatgatgaggagagta

SEQ ID NO: 5582513 - DNA, 25 bp, Homo sapien
aacataactctggagggtaatgagg

SEQ ID NO: 5582514 - DNA, 25 bp, Homo sapien
ttgagtagcttggattgcagaaatc

SEQ ID NO: 5582515 - DNA, 25 bp, Homo sapien
cagagtatatttaggaggtagacca

SEQ ID NO: 5582516 - DNA, 25 bp, Homo sapien
aatagaggtgatagattcagagtat

SEQ ID NO: 5582517 - DNA, 25 bp, Homo sapien
ctgaagacactaaggtttggtttgt

SEQ ID NO: 5582518 - DNA, 25 bp, Homo sapien
gaggtagaccagcctagcagatatt

SEQ ID NO: 5582519 - DNA, 25 bp, Homo sapien
agagtactgagagcagctcagagca

SEQ ID NO: 5582520 - DNA, 25 bp, Homo sapien
gtatcacctgatgttctaatgccta

SEQ ID NO: 5582521 - DNA, 25 bp, Homo sapien
acaatctgcttttaagaaatggtgt

SEQ ID NO: 5582522 - DNA, 25 bp, Homo sapien
ttaatgattaccagtaagcacttac

SEQ ID NO: 5582523 - DNA, 25 bp, Homo sapien
ccatagttaaagtagttctggaaac

SEQ ID NO: 5582524 - DNA, 25 bp, Homo sapien
cagaaatcagaaaaggtatcacctg

SEQ ID NO: 5582525 - DNA, 25 bp, Homo sapien
taaagtagttctggaaactgttcca

SEQ ID NO: 5582526 - DNA, 25 bp, Homo sapien
cattaggtataaggacaatgactcc

SEQ ID NO: 5582527 - DNA, 25 bp, Homo sapien
agtagagaaagatggtccagtacat

SEQ ID NO: 5582528 - DNA, 25 bp, Homo sapien
catgggtgagagtcatattttttcc

SEQ ID NO: 5582529 - DNA, 25 bp, Homo sapien
ccagtacatgacatgggtgagagtc

SEQ ID NO: 5582530 - DNA, 25 bp, Homo sapien
ctgctatacattaaggatacaatat

SEQ ID NO: 5582531 - DNA, 25 bp, Homo sapien
gcgatgttaacaggaataagtgact

SEQ ID NO: 5582532 - DNA, 25 bp, Homo sapien
attgacaaaaagggcgatgttaaca

SEQ ID NO: 5582533 - DNA, 25 bp, Homo sapien
ctcttagggaataagaaggttctac

SEQ ID NO: 5582534 - DNA, 25 bp, Homo sapien
cagaatgcaccagtagtgccgtggg

SEQ ID NO: 5582535 - DNA, 25 bp, Homo sapien
ctagaatccagcagaaaggctattc

SEQ ID NO: 5582536 - DNA, 25 bp, Homo sapien
cagttctttaaataagcggggatgg

SEQ ID NO: 5582537 - DNA, 25 bp, Homo sapien
gtgaaaacaatcctgaattggtggt

SEQ ID NO: 5582538 - DNA, 25 bp, Homo sapien
gggtttgttcactgaagactgtgac

SEQ ID NO: 5582539 - DNA, 25 bp, Homo sapien
tagtgatcaccaccgcctgggagtt

SEQ ID NO: 5582540 - DNA, 25 bp, Homo sapien
cagtagtgccgtgggttttaacaaa

SEQ ID NO: 5582541 - DNA, 25 bp, Homo sapien
agactgtgacagattttagtgatca

SEQ ID NO: 5582542 - DNA, 25 bp, Homo sapien
ttagctggtgcatctccaaccacac

SEQ ID NO: 5582543 - DNA, 25 bp, Homo sapien
ctagtttgatagaactgatatagtc

SEQ ID NO: 5582544 - DNA, 25 bp, Homo sapien
cctgaagctccgttgaatcagcaac

SEQ ID NO: 5582545 - DNA, 25 bp, Homo sapien
actggaatatcacaaaaactagttt

SEQ ID NO: 5582546 - DNA, 25 bp, Homo sapien
gaaacagtggcaatctcctctctcc

SEQ ID NO: 5582547 - DNA, 25 bp, Homo sapien
cagtcccccatgcacatcgtggacc

SEQ ID NO: 5582548 - DNA, 25 bp, Homo sapien
aaagtcctagaaacagtggcaatct

SEQ ID NO: 5582549 - DNA, 25 bp, Homo sapien
ggcacacagcacagtcccccatgca

SEQ ID NO: 5582550 - DNA, 25 bp, Homo sapien
ccaaccacacgaatagtgggagccg

SEQ ID NO: 5582551 - DNA, 25 bp, Homo sapien
agaaagcctccaaattagctggtgc

SEQ ID NO: 5582552 - DNA, 25 bp, Homo sapien
tgggagccgcatcttttccaccctc

SEQ ID NO: 5582553 - DNA, 25 bp, Homo sapien
aactgtcgtgtccatctcaaacaac

SEQ ID NO: 5582554 - DNA, 25 bp, Homo sapien
gttgtttgagatggacacgacagtt

SEQ ID NO: 5582555 - DNA, 25 bp, Homo sapien
atatggcacacgttttggcttattc

SEQ ID NO: 5582556 - DNA, 25 bp, Homo sapien
agcttatgtcagattccatgggttt

SEQ ID NO: 5582557 - DNA, 25 bp, Homo sapien
agagaactaagatgatactaacaaa

SEQ ID NO: 5582558 - DNA, 25 bp, Homo sapien
tacatagggaaattacagtgcaacc

SEQ ID NO: 5582559 - DNA, 25 bp, Homo sapien
ggatggcattgagagtaaccttctg

SEQ ID NO: 5582560 - DNA, 25 bp, Homo sapien
aaccagttatacaagttgagacttc

SEQ ID NO: 5582561 - DNA, 25 bp, Homo sapien
tacagtgcaacctgaaacatgcttc

SEQ ID NO: 5582562 - DNA, 25 bp, Homo sapien
atcactggttttgtggctgcctccc

SEQ ID NO: 5582563 - DNA, 25 bp, Homo sapien
gtgctgtcacagttgaatgtaaacc

SEQ ID NO: 5582564 - DNA, 25 bp, Homo sapien
aaaacaaccagcatgagcaatcagc

SEQ ID NO: 5582565 - DNA, 25 bp, Homo sapien
gggagaacagatgaaaaataagcca

SEQ ID NO: 5582566 - DNA, 25 bp, Homo sapien
tcccctaatagtgttaatggcatac

SEQ ID NO: 5582567 - DNA, 25 bp, Homo sapien
tagaagaatgaaggtactgatatat

SEQ ID NO: 5582568 - DNA, 25 bp, Homo sapien
tatgagtaatgtgaaattgagtttt

SEQ ID NO: 5582569 - DNA, 25 bp, Homo sapien
aaaaagtctcttgtacgtctaggaa

SEQ ID NO: 5582570 - DNA, 25 bp, Homo sapien
gttaagcactgacaaatatttagca

SEQ ID NO: 5582571 - DNA, 25 bp, Homo sapien
gtacgtctaggaagagtacacacac

SEQ ID NO: 5582572 - DNA, 25 bp, Homo sapien
aaaagtgtatataacaggaaacctc

SEQ ID NO: 5582573 - DNA, 25 bp, Homo sapien
acaaaaacaatatgagtaatgtgaa

SEQ ID NO: 5582574 - DNA, 25 bp, Homo sapien
gaaggtactgatatatgtcacacat

SEQ ID NO: 5582575 - DNA, 25 bp, Homo sapien
taggaagagtacacacacataaatt

SEQ ID NO: 5582576 - DNA, 25 bp, Homo sapien
taaactgttgaggtgttagagaaac

SEQ ID NO: 5582577 - DNA, 25 bp, Homo sapien
gggtcaaagattgcaatgagcattt

SEQ ID NO: 5582578 - DNA, 25 bp, Homo sapien
gaacttgtatcaccccccacctgcc

SEQ ID NO: 5582579 - DNA, 25 bp, Homo sapien
gaaagcttaagtgggtcatcatccc

SEQ ID NO: 5582580 - DNA, 25 bp, Homo sapien
agaaaggcagaaacacgtgtttgtg

SEQ ID NO: 5582581 - DNA, 25 bp, Homo sapien
aggagaaacacagagtgtgaacttg

SEQ ID NO: 5582582 - DNA, 25 bp, Homo sapien
aagtcaccacagcagttagtggggg

SEQ ID NO: 5582583 - DNA, 25 bp, Homo sapien
ccagatgattggacttaacaaggcc

SEQ ID NO: 5582584 - DNA, 25 bp, Homo sapien
tcttgctgattatgctgagaaaggc

SEQ ID NO: 5582585 - DNA, 25 bp, Homo sapien
cccacctgcctacccagagactgtc

SEQ ID NO: 5582586 - DNA, 25 bp, Homo sapien
ccttaaacatcagcagggtgggaat

SEQ ID NO: 5582587 - DNA, 25 bp, Homo sapien
agagactgtctatgtgagtgagatg

SEQ ID NO: 5582588 - DNA, 25 bp, Homo sapien
agaggaatatgagtgagaaaatatt

SEQ ID NO: 5582589 - DNA, 25 bp, Homo sapien
tactaagtactctgataatcgaaaa

SEQ ID NO: 5582590 - DNA, 25 bp, Homo sapien
agtgagaaaatattgttcaggagat

SEQ ID NO: 5582591 - DNA, 25 bp, Homo sapien
aaaaaattacgtgccagaagactga

SEQ ID NO: 5582592 - DNA, 25 bp, Homo sapien
gtgaaaaatgtactaggcaagataa

SEQ ID NO: 5582593 - DNA, 25 bp, Homo sapien
aataatttgttaataggaagaatat

SEQ ID NO: 5582594 - DNA, 25 bp, Homo sapien
cagctgaataaatggtaggtatagt

SEQ ID NO: 5582595 - DNA, 25 bp, Homo sapien
agaagactgaaaatagattaagggc

SEQ ID NO: 5582596 - DNA, 25 bp, Homo sapien
ataggaagaatataagctgtgaaaa

SEQ ID NO: 5582597 - DNA, 25 bp, Homo sapien
agtgataagatagaggaatatgagt

SEQ ID NO: 5582598 - DNA, 25 bp, Homo sapien
aagctgtgaaaaaaattacgtgcca

SEQ ID NO: 5582599 - DNA, 25 bp, Homo sapien
tcgtcgtgggaggtcacgttattta

SEQ ID NO: 5582600 - DNA, 25 bp, Homo sapien
gaagtgatggcccaggatttctctc

SEQ ID NO: 5582601 - DNA, 25 bp, Homo sapien
tattaggaaccaacagaggagattt

SEQ ID NO: 5582602 - DNA, 25 bp, Homo sapien
atgcgcatgtctaggtgcgagcata

SEQ ID NO: 5582603 - DNA, 25 bp, Homo sapien
tcctccgaaacgtcagtagcctgtt

SEQ ID NO: 5582604 - DNA, 25 bp, Homo sapien
agtactctattggaaggatgcacat

SEQ ID NO: 5582605 - DNA, 25 bp, Homo sapien
gtgaaggtacgacaggtacatatgc

SEQ ID NO: 5582606 - DNA, 25 bp, Homo sapien
ctggactcacagcaagttacgattc

SEQ ID NO: 5582607 - DNA, 25 bp, Homo sapien
atcttatggcagtagacagaagctg

SEQ ID NO: 5582608 - DNA, 25 bp, Homo sapien
cctcattatgctgacgtggggtcca

SEQ ID NO: 5582609 - DNA, 25 bp, Homo sapien
ccctcatgaccactgagagggagcc

SEQ ID NO: 5582610 - DNA, 25 bp, Homo sapien
agccctgaacaggtatgagtggaaa

SEQ ID NO: 5582611 - DNA, 25 bp, Homo sapien
ataacctatgtaaagctgctgtctg

SEQ ID NO: 5582612 - DNA, 25 bp, Homo sapien
ccgagcctagctgcaactggttatc

SEQ ID NO: 5582613 - DNA, 25 bp, Homo sapien
gtctggagccctgaacaggtatgag

SEQ ID NO: 5582614 - DNA, 25 bp, Homo sapien
tctctctctggtgaagaaacagaga

SEQ ID NO: 5582615 - DNA, 25 bp, Homo sapien
ctgctgtctggttaccaagcacatc

SEQ ID NO: 5582616 - DNA, 25 bp, Homo sapien
ggatgaaggctattggctgtctgga

SEQ ID NO: 5582617 - DNA, 25 bp, Homo sapien
agcccaaactgtgggatgaaggcta

SEQ ID NO: 5582618 - DNA, 25 bp, Homo sapien
tgagtggaaataattcttaacagca

SEQ ID NO: 5582619 - DNA, 25 bp, Homo sapien
gcccactactggttatggtaaagga

SEQ ID NO: 5582620 - DNA, 25 bp, Homo sapien
ctgaccgcagaactgcccactactg

SEQ ID NO: 5582621 - DNA, 25 bp, Homo sapien
tcatctgctgagaatagaacataac

SEQ ID NO: 5582622 - DNA, 25 bp, Homo sapien
aagggacttgcattccgggaaaata

SEQ ID NO: 5582623 - DNA, 25 bp, Homo sapien
atatggaccaagggacttgcattcc

SEQ ID NO: 5582624 - DNA, 25 bp, Homo sapien
gaaaatacagttaagcacactagat

SEQ ID NO: 5582625 - DNA, 25 bp, Homo sapien
gtgcaaacctgaataaattacatcc

SEQ ID NO: 5582626 - DNA, 25 bp, Homo sapien
aatagaacataacgaagccagaaca

SEQ ID NO: 5582627 - DNA, 25 bp, Homo sapien
agtgctttaatatggaccaagggac

SEQ ID NO: 5582628 - DNA, 25 bp, Homo sapien
atggaaggcatgcaattcatctgct

SEQ ID NO: 5582629 - DNA, 25 bp, Homo sapien
ttacatcctgatatggaaggcatgc

SEQ ID NO: 5582630 - DNA, 25 bp, Homo sapien
tcactagaaaatacggtcctcttgt

SEQ ID NO: 5582631 - DNA, 25 bp, Homo sapien
taagcacactagatattatgatgtc

SEQ ID NO: 5582632 - DNA, 25 bp, Homo sapien
ttatgacagagaaataacctcagcc

SEQ ID NO: 5582633 - DNA, 25 bp, Homo sapien
ccttgtagactaaggtatgagggtg

SEQ ID NO: 5582634 - DNA, 25 bp, Homo sapien
tacctatgactaaagaccacaaatc

SEQ ID NO: 5582635 - DNA, 25 bp, Homo sapien
tatgagggtgaaatcgatttgctat

SEQ ID NO: 5582636 - DNA, 25 bp, Homo sapien
tatggtattaaaatgagcagggaat

SEQ ID NO: 5582637 - DNA, 25 bp, Homo sapien
gtactgaaggaacacgtgctttgat

SEQ ID NO: 5582638 - DNA, 25 bp, Homo sapien
tcttgtgcagatgaaattaagcaat

SEQ ID NO: 5582639 - DNA, 25 bp, Homo sapien
ttctcaagagcaaggccttgtagac

SEQ ID NO: 5582640 - DNA, 25 bp, Homo sapien
taaagtggcaatttgtaccatcatt

SEQ ID NO: 5582641 - DNA, 25 bp, Homo sapien
aattaagcaatatcatggaaaacct

SEQ ID NO: 5582642 - DNA, 25 bp, Homo sapien
aatcaccaaagtactgaaggaacac

SEQ ID NO: 5582643 - DNA, 25 bp, Homo sapien
cagcagaaatggagcatggtctcca

SEQ ID NO: 5582644 - DNA, 25 bp, Homo sapien
gggaagagatggcctcaacttgtat

SEQ ID NO: 5582645 - DNA, 25 bp, Homo sapien
ggaggttgcactcagcccatgatcc

SEQ ID NO: 5582646 - DNA, 25 bp, Homo sapien
gaaggctacaccttgccgaggcctc

SEQ ID NO: 5582647 - DNA, 25 bp, Homo sapien
tagaggagattgttacatggccact

SEQ ID NO: 5582648 - DNA, 25 bp, Homo sapien
agctcctgagtttgtgctgctaggc

SEQ ID NO: 5582649 - DNA, 25 bp, Homo sapien
gtgatatggggctatcagaagaaaa

SEQ ID NO: 5582650 - DNA, 25 bp, Homo sapien
aagccagaacagtgcgtacttctca

SEQ ID NO: 5582651 - DNA, 25 bp, Homo sapien
aggtagcagcctcaggtgctaaggt

SEQ ID NO: 5582652 - DNA, 25 bp, Homo sapien
tacaccttgccgaggcctcagcagg

SEQ ID NO: 5582653 - DNA, 25 bp, Homo sapien
gctaggcttagaggttaggccctag

SEQ ID NO: 5582654 - DNA, 25 bp, Homo sapien
gtggaccagccctcaggtgtctcca

SEQ ID NO: 5582655 - DNA, 25 bp, Homo sapien
aaatgacccgtatggcaaaggtgag

SEQ ID NO: 5582656 - DNA, 25 bp, Homo sapien
tttcttgagacccccacacaccttc

SEQ ID NO: 5582657 - DNA, 25 bp, Homo sapien
aaggacaatttcttgagacccccac

SEQ ID NO: 5582658 - DNA, 25 bp, Homo sapien
tctaaagctaaggacaatgattctg

SEQ ID NO: 5582659 - DNA, 25 bp, Homo sapien
ttgatcaagaaatgacccgtatggc

SEQ ID NO: 5582660 - DNA, 25 bp, Homo sapien
gattacaggcgaccacgactgccta

SEQ ID NO: 5582661 - DNA, 25 bp, Homo sapien
ccagccctcaggtgtctccaactct

SEQ ID NO: 5582662 - DNA, 25 bp, Homo sapien
caggaccccagtcatatatttgatc

SEQ ID NO: 5582663 - DNA, 25 bp, Homo sapien
aaggacaatgattctgtaaagtgca

SEQ ID NO: 5582664 - DNA, 25 bp, Homo sapien
ttaacaacctctaaagctaaggaca

SEQ ID NO: 5582665 - DNA, 25 bp, Homo sapien
ggcccataagtctttcagtgtagaa

SEQ ID NO: 5582666 - DNA, 25 bp, Homo sapien
tccagatgatccaggataatttatt

SEQ ID NO: 5582667 - DNA, 25 bp, Homo sapien
catattcatatgtttcagagtggta

SEQ ID NO: 5582668 - DNA, 25 bp, Homo sapien
ttctacctaccataccacccaacac

SEQ ID NO: 5582669 - DNA, 25 bp, Homo sapien
ttacattaggcccatccagatgatc

SEQ ID NO: 5582670 - DNA, 25 bp, Homo sapien
atgtgagagctcaacccacccttgc

SEQ ID NO: 5582671 - DNA, 25 bp, Homo sapien
agtctttcagtgtagaagagggaag

SEQ ID NO: 5582672 - DNA, 25 bp, Homo sapien
caggacggttctgaactcctggggc

SEQ ID NO: 5582673 - DNA, 25 bp, Homo sapien
accataccacccaacacaaatctac

SEQ ID NO: 5582674 - DNA, 25 bp, Homo sapien
cgcaccaccacgtccagttagcgtg

SEQ ID NO: 5582675 - DNA, 25 bp, Homo sapien
gtttcagagtggtaggccattattc

SEQ ID NO: 5582676 - DNA, 25 bp, Homo sapien
ccgacatctcggtgaactgtctcac

SEQ ID NO: 5582677 - DNA, 25 bp, Homo sapien
gtgagacagttcaccgagatgtcgg

SEQ ID NO: 5582678 - DNA, 25 bp, Homo sapien
actggattaggtgttacgaagtaat

SEQ ID NO: 5582679 - DNA, 25 bp, Homo sapien
tgttgggattcgctgacgtccatga

SEQ ID NO: 5582680 - DNA, 25 bp, Homo sapien
tgagagacttgagcaacctggattt

SEQ ID NO: 5582681 - DNA, 25 bp, Homo sapien
acagtggctcggtccaacaaaacag

SEQ ID NO: 5582682 - DNA, 25 bp, Homo sapien
cgccgctcttgaggtcgcctctcgc

SEQ ID NO: 5582683 - DNA, 25 bp, Homo sapien
aagcacggctctgaatccgctcgtc

SEQ ID NO: 5582684 - DNA, 25 bp, Homo sapien
gagccaggaattatggcgaacctgc

SEQ ID NO: 5582685 - DNA, 25 bp, Homo sapien
gtcgacctcatcgtcggaacggcgc

SEQ ID NO: 5582686 - DNA, 25 bp, Homo sapien
cagcacggctttgaccgacagtgtg

SEQ ID NO: 5582687 - DNA, 25 bp, Homo sapien
cccgtcctcccttggcgcacagatc

SEQ ID NO: 5582688 - DNA, 25 bp, Homo sapien
acgtccatgagaaagcttggcagca

SEQ ID NO: 5582689 - DNA, 25 bp, Homo sapien
aaacataggtgggcatgtgtcttta

SEQ ID NO: 5582690 - DNA, 25 bp, Homo sapien
taaaatgaacagggcatgaattttc

SEQ ID NO: 5582691 - DNA, 25 bp, Homo sapien
tgagaaaataaaggatagttaacaa

SEQ ID NO: 5582692 - DNA, 25 bp, Homo sapien
aggaataatgaaatagaatgtataa

SEQ ID NO: 5582693 - DNA, 25 bp, Homo sapien
tattggaaaaagaggaataatgaaa

SEQ ID NO: 5582694 - DNA, 25 bp, Homo sapien
gctgcaataaacataggtgggcatg

SEQ ID NO: 5582695 - DNA, 25 bp, Homo sapien
tatgacttattggaaaaagaggaat

SEQ ID NO: 5582696 - DNA, 25 bp, Homo sapien
cacaattgatgacaaaggattggca

SEQ ID NO: 5582697 - DNA, 25 bp, Homo sapien
ttttggtgacagactataaggtaca

SEQ ID NO: 5582698 - DNA, 25 bp, Homo sapien
cataaagatatagtgaataatacaa

SEQ ID NO: 5582699 - DNA, 25 bp, Homo sapien
aacaagcccttaaagacaaatcaac

SEQ ID NO: 5582700 - DNA, 25 bp, Homo sapien
gtgagtcagtttagacttcaggctg

SEQ ID NO: 5582701 - DNA, 25 bp, Homo sapien
cggggcaagttcgtatcgctcttct

SEQ ID NO: 5582702 - DNA, 25 bp, Homo sapien
cgtggtcatcctgctgctgccgttt

SEQ ID NO: 5582703 - DNA, 25 bp, Homo sapien
tctgcaagatttgtcctaaggagtc

SEQ ID NO: 5582704 - DNA, 25 bp, Homo sapien
accctcaggaataagaaagtgaagg

SEQ ID NO: 5582705 - DNA, 25 bp, Homo sapien
agtattaagccagaacccaaggatg

SEQ ID NO: 5582706 - DNA, 25 bp, Homo sapien
tacggctcggccatctacacctacc

SEQ ID NO: 5582707 - DNA, 25 bp, Homo sapien
ggatggaaataccccttagtgagtc

SEQ ID NO: 5582708 - DNA, 25 bp, Homo sapien
gggcacgtgtgggtcccacctgaca

SEQ ID NO: 5582709 - DNA, 25 bp, Homo sapien
cgagctgtctgttgcatgcggttca

SEQ ID NO: 5582710 - DNA, 25 bp, Homo sapien
acggagacactaccgagaaccagat

SEQ ID NO: 5582711 - DNA, 25 bp, Homo sapien
ttgtggctaagttatttcagtcaaa

SEQ ID NO: 5582712 - DNA, 25 bp, Homo sapien
atctattgaacttgaggggatatat

SEQ ID NO: 5582713 - DNA, 25 bp, Homo sapien
ggaattccttcctgagctagacctc

SEQ ID NO: 5582714 - DNA, 25 bp, Homo sapien
ggggaaactgctgatttgtggctaa

SEQ ID NO: 5582715 - DNA, 25 bp, Homo sapien
ttctttagagttaatatgcagtctt

SEQ ID NO: 5582716 - DNA, 25 bp, Homo sapien
catcagacatgataactaggaggca

SEQ ID NO: 5582717 - DNA, 25 bp, Homo sapien
cgcttaacttttgaagtaggaggta

SEQ ID NO: 5582718 - DNA, 25 bp, Homo sapien
taccacatccaactcgcagaaataa

SEQ ID NO: 5582719 - DNA, 25 bp, Homo sapien
aaaaaactgagcactcctcacttac

SEQ ID NO: 5582720 - DNA, 25 bp, Homo sapien
ctgacattcagataaaaggggcttg

SEQ ID NO: 5582721 - DNA, 25 bp, Homo sapien
cctgagctagacctcatcagacatg

SEQ ID NO: 5582722 - DNA, 25 bp, Homo sapien
aaaggaattaagaacactcactcaa

SEQ ID NO: 5582723 - DNA, 25 bp, Homo sapien
agaaacttacaaacgagatagtgat

SEQ ID NO: 5582724 - DNA, 25 bp, Homo sapien
atctctttctggaagagagtattac

SEQ ID NO: 5582725 - DNA, 25 bp, Homo sapien
ctagtgctagaaaaaagcaggaaag

SEQ ID NO: 5582726 - DNA, 25 bp, Homo sapien
gacaccgtttgcatgtaccatacta

SEQ ID NO: 5582727 - DNA, 25 bp, Homo sapien
atgttgattaggaaaagaaacttac

SEQ ID NO: 5582728 - DNA, 25 bp, Homo sapien
tgtgtgtctttcccatcccttctcc

SEQ ID NO: 5582729 - DNA, 25 bp, Homo sapien
acaaacgagatagtgatgtaatcat

SEQ ID NO: 5582730 - DNA, 25 bp, Homo sapien
agatgaggtatattgctgaaggaaa

SEQ ID NO: 5582731 - DNA, 25 bp, Homo sapien
gcaccttaagctatgaacaagaaaa

SEQ ID NO: 5582732 - DNA, 25 bp, Homo sapien
aatttaaggcagatgaggtatattg

SEQ ID NO: 5582733 - DNA, 25 bp, Homo sapien
caccatgcctgtggacagaaatgtc

SEQ ID NO: 5582734 - DNA, 25 bp, Homo sapien
ctgtatatctgaagagcgaacctct

SEQ ID NO: 5582735 - DNA, 25 bp, Homo sapien
aatgatggtttgcctaggctgaatg

SEQ ID NO: 5582736 - DNA, 25 bp, Homo sapien
aaagcatgtgatgaagtccacgagg

SEQ ID NO: 5582737 - DNA, 25 bp, Homo sapien
gctaaaagcatgtgatgaagtccac

SEQ ID NO: 5582738 - DNA, 25 bp, Homo sapien
ttcaatacagtaagtgtgtgctctg

SEQ ID NO: 5582739 - DNA, 25 bp, Homo sapien
ttgcctaggctgaatgtaatcatat

SEQ ID NO: 5582740 - DNA, 25 bp, Homo sapien
gtgccgctgcttcctgagaaagcca

SEQ ID NO: 5582741 - DNA, 25 bp, Homo sapien
tggaaagcacacagattgtgcccct

SEQ ID NO: 5582742 - DNA, 25 bp, Homo sapien
agtaagtgtgtgctctgtatatctg

SEQ ID NO: 5582743 - DNA, 25 bp, Homo sapien
ccaggccactctctctcgggaccag

SEQ ID NO: 5582744 - DNA, 25 bp, Homo sapien
gcatctctgaagttaggggcagtgc

SEQ ID NO: 5582745 - DNA, 25 bp, Homo sapien
aagggaagattcatccttgaacaaa

SEQ ID NO: 5582746 - DNA, 25 bp, Homo sapien
tttggatcccacatgctttatgctc

SEQ ID NO: 5582747 - DNA, 25 bp, Homo sapien
agaaccattatcactgagtaggtct

SEQ ID NO: 5582748 - DNA, 25 bp, Homo sapien
cctcttgggagcttgttcgcacaga

SEQ ID NO: 5582749 - DNA, 25 bp, Homo sapien
tgcaaggaaacacgaaattaagaga

SEQ ID NO: 5582750 - DNA, 25 bp, Homo sapien
tcttaaagaaaatacatcaatgctg

SEQ ID NO: 5582751 - DNA, 25 bp, Homo sapien
tctggtgatggtgtttacactattt

SEQ ID NO: 5582752 - DNA, 25 bp, Homo sapien
aggggcagtgctattatgtgcaagg

SEQ ID NO: 5582753 - DNA, 25 bp, Homo sapien
tcttcttgtgcaaaccaaagcctcc

SEQ ID NO: 5582754 - DNA, 25 bp, Homo sapien
actgagtaggtctgtcttcttgtgc

SEQ ID NO: 5582755 - DNA, 25 bp, Homo sapien
ccgtagaattgtagggaacaaagta

SEQ ID NO: 5582756 - DNA, 25 bp, Homo sapien
cttgcctagcagcaccaaagagtgg

SEQ ID NO: 5582757 - DNA, 25 bp, Homo sapien
ctagaaattgagaactcagagtcat

SEQ ID NO: 5582758 - DNA, 25 bp, Homo sapien
ggaccttaagtccacgatggtgacc

SEQ ID NO: 5582759 - DNA, 25 bp, Homo sapien
agagtcatatagaatcctgagtgat

SEQ ID NO: 5582760 - DNA, 25 bp, Homo sapien
ttatgaggtaattgagataggcatt

SEQ ID NO: 5582761 - DNA, 25 bp, Homo sapien
ccacgatggtgacctaaactcagtt

SEQ ID NO: 5582762 - DNA, 25 bp, Homo sapien
ccaaagagtggtatgtgattccatg

SEQ ID NO: 5582763 - DNA, 25 bp, Homo sapien
aagactccgtagaattgtagggaac

SEQ ID NO: 5582764 - DNA, 25 bp, Homo sapien
ttcttcactagaggggagaagaatc

SEQ ID NO: 5582765 - DNA, 25 bp, Homo sapien
ttgtctccctgaggtgatatggacc

SEQ ID NO: 5582766 - DNA, 25 bp, Homo sapien
acaactagatgttatcctgaaagtc

SEQ ID NO: 5582767 - DNA, 25 bp, Homo sapien
aaccaagtagttcatttcagtcttt

SEQ ID NO: 5582768 - DNA, 25 bp, Homo sapien
gattcctgccccaattacagggtcc

SEQ ID NO: 5582769 - DNA, 25 bp, Homo sapien
aatttcaagatctatgacatttgtc

SEQ ID NO: 5582770 - DNA, 25 bp, Homo sapien
aagggtgaagtctgaacaactagat

SEQ ID NO: 5582771 - DNA, 25 bp, Homo sapien
agcatcagaagtctagttcaagaac

SEQ ID NO: 5582772 - DNA, 25 bp, Homo sapien
acaaaagcgtattataaacagtatt

SEQ ID NO: 5582773 - DNA, 25 bp, Homo sapien
catcaaaacagatttgagattagtt

SEQ ID NO: 5582774 - DNA, 25 bp, Homo sapien
gcaagaagcatcagaagtctagttc

SEQ ID NO: 5582775 - DNA, 25 bp, Homo sapien
attatgcctccaaacaatgtcacca

SEQ ID NO: 5582776 - DNA, 25 bp, Homo sapien
ttacagggtccatcacataggtttt

SEQ ID NO: 5582777 - DNA, 25 bp, Homo sapien
cattgtgaaggtatataaaactgta

SEQ ID NO: 5582778 - DNA, 25 bp, Homo sapien
ttacaactgtgcagtaatgtgttgc

SEQ ID NO: 5582779 - DNA, 25 bp, Homo sapien
cctccgcctggctccgcaccaggtc

SEQ ID NO: 5582780 - DNA, 25 bp, Homo sapien
aactgtacagcgtttacggatacac

SEQ ID NO: 5582781 - DNA, 25 bp, Homo sapien
aaccacgcggatttgactccatttc

SEQ ID NO: 5582782 - DNA, 25 bp, Homo sapien
ctggctctgtgtccctccgcctggc

SEQ ID NO: 5582783 - DNA, 25 bp, Homo sapien
ggctccgcaccaggtctgaagccca

SEQ ID NO: 5582784 - DNA, 25 bp, Homo sapien
gcaggtcactgtttgtgagaggtgg

SEQ ID NO: 5582785 - DNA, 25 bp, Homo sapien
gtttgtgagaggtggacaccttaat

SEQ ID NO: 5582786 - DNA, 25 bp, Homo sapien
cctgcccctccgacctgcaggtcac

SEQ ID NO: 5582787 - DNA, 25 bp, Homo sapien
ttggctctgtagtgtttcaagttac

SEQ ID NO: 5582788 - DNA, 25 bp, Homo sapien
ttgcggatcccctgagatccacctc

SEQ ID NO: 5582789 - DNA, 25 bp, Homo sapien
taggcctcaacttcccgcggcggcc

SEQ ID NO: 5582790 - DNA, 25 bp, Homo sapien
agcagcctcctccgtggtaggcctc

SEQ ID NO: 5582791 - DNA, 25 bp, Homo sapien
gcggcccacagccaacgactaatgc

SEQ ID NO: 5582792 - DNA, 25 bp, Homo sapien
gccaacgactaatgcctgagcggga

SEQ ID NO: 5582793 - DNA, 25 bp, Homo sapien
tgcgacgtcagtttccccctgggac

SEQ ID NO: 5582794 - DNA, 25 bp, Homo sapien
gcggttcgcgggctttctgaccgca

SEQ ID NO: 5582795 - DNA, 25 bp, Homo sapien
ctgaccgcattcggccgagttcttc

SEQ ID NO: 5582796 - DNA, 25 bp, Homo sapien
gttccgctgagctcaagctgaggga

SEQ ID NO: 5582797 - DNA, 25 bp, Homo sapien
gggacgacgacctcatgcgacgtca

SEQ ID NO: 5582798 - DNA, 25 bp, Homo sapien
ttcttctctgaagacccaggacccc

SEQ ID NO: 5582799 - DNA, 25 bp, Homo sapien
aatgagctattgggtccatgatgtc

SEQ ID NO: 5582800 - DNA, 25 bp, Homo sapien
taggtataactgctggtaaaattgt

SEQ ID NO: 5582801 - DNA, 25 bp, Homo sapien
gaatcaaggcagtgaatgagctatt

SEQ ID NO: 5582802 - DNA, 25 bp, Homo sapien
aagtgcaggaattccatcaggtagc

SEQ ID NO: 5582803 - DNA, 25 bp, Homo sapien
tagtcagccagaactttaagtgcag

SEQ ID NO: 5582804 - DNA, 25 bp, Homo sapien
tctttcaggacacggaaagaatccc

SEQ ID NO: 5582805 - DNA, 25 bp, Homo sapien
aaagaatccccagaggtctgaagtc

SEQ ID NO: 5582806 - DNA, 25 bp, Homo sapien
gaggtctgaagtctaacgtgattat

SEQ ID NO: 5582807 - DNA, 25 bp, Homo sapien
aaattgttggcaaaaggaatcaagg

SEQ ID NO: 5582808 - DNA, 25 bp, Homo sapien
caggtagcaccaagagaaaattgca

SEQ ID NO: 5582809 - DNA, 25 bp, Homo sapien
catttgcaagaaagagatcatcatt

SEQ ID NO: 5582810 - DNA, 25 bp, Homo sapien
tcggctggcttagcacatggacaag

SEQ ID NO: 5582811 - DNA, 25 bp, Homo sapien
ggtgagtgaggccgttctaatttca

SEQ ID NO: 5582812 - DNA, 25 bp, Homo sapien
acatggacaaggcattgccgctgga

SEQ ID NO: 5582813 - DNA, 25 bp, Homo sapien
tgtgggcaccccatacctgctactc

SEQ ID NO: 5582814 - DNA, 25 bp, Homo sapien
tctggacatagagccttcacggtaa

SEQ ID NO: 5582815 - DNA, 25 bp, Homo sapien
gactcgtgggactgaaccctcatcc

SEQ ID NO: 5582816 - DNA, 25 bp, Homo sapien
ctttcaggcaagtcagacagaagtg

SEQ ID NO: 5582817 - DNA, 25 bp, Homo sapien
gtgctaactccaggtggtgagtgtc

SEQ ID NO: 5582818 - DNA, 25 bp, Homo sapien
agagactcctgaaaaggagctccac

SEQ ID NO: 5582819 - DNA, 25 bp, Homo sapien
gttatcagacctgaaagcaaggggc

SEQ ID NO: 5582820 - DNA, 25 bp, Homo sapien
gctactcgcatctgcagcaagggca

SEQ ID NO: 5582821 - DNA, 25 bp, Homo sapien
tgcagcaaataattcgttggcatct

SEQ ID NO: 5582822 - DNA, 25 bp, Homo sapien
cttagtcatgcgctcagctggcagg

SEQ ID NO: 5582823 - DNA, 25 bp, Homo sapien
tccaactaagcccacgctatcaacc

SEQ ID NO: 5582824 - DNA, 25 bp, Homo sapien
gctatcaaccaagccaaacagagga

SEQ ID NO: 5582825 - DNA, 25 bp, Homo sapien
atcttctctgtgatgggcagcttgc

SEQ ID NO: 5582826 - DNA, 25 bp, Homo sapien
attcctgtgtagataatgctgtgtt

SEQ ID NO: 5582827 - DNA, 25 bp, Homo sapien
gattagactcaggccccttagcttc

SEQ ID NO: 5582828 - DNA, 25 bp, Homo sapien
tgctggagacaaagaatctacattc

SEQ ID NO: 5582829 - DNA, 25 bp, Homo sapien
aaacagaggaaatcagtttgggttg

SEQ ID NO: 5582830 - DNA, 25 bp, Homo sapien
aatgctgtgtttgctctgtgcagac

SEQ ID NO: 5582831 - DNA, 25 bp, Homo sapien
tgggcagcttgctaagattagactc

SEQ ID NO: 5582832 - DNA, 25 bp, Homo sapien
gatcaccaacatgattgcccttctt

SEQ ID NO: 5582833 - DNA, 25 bp, Homo sapien
tctgcaagccggtcaaagataaaga

SEQ ID NO: 5582834 - DNA, 25 bp, Homo sapien
agggcagggatctagactgttttgt

SEQ ID NO: 5582835 - DNA, 25 bp, Homo sapien
atggttactgagtgacagaagaaaa

SEQ ID NO: 5582836 - DNA, 25 bp, Homo sapien
aaactgtaacccttctgagggcagg

SEQ ID NO: 5582837 - DNA, 25 bp, Homo sapien
gaattgtaaagtgtgggcaatagaa

SEQ ID NO: 5582838 - DNA, 25 bp, Homo sapien
attaaatgaggaaggatcatggtta

SEQ ID NO: 5582839 - DNA, 25 bp, Homo sapien
tacctggcacattaagtgggtaacc

SEQ ID NO: 5582840 - DNA, 25 bp, Homo sapien
cattaagtgggtaaccagcatttaa

SEQ ID NO: 5582841 - DNA, 25 bp, Homo sapien
tgggtataaatacaatttggacaat

SEQ ID NO: 5582842 - DNA, 25 bp, Homo sapien
tggacaattgctttgatacagtttc

SEQ ID NO: 5582843 - DNA, 25 bp, Homo sapien
aatggttcaagaatataatcctctc

SEQ ID NO: 5582844 - DNA, 25 bp, Homo sapien
tctgacacctcaaaagctgactgga

SEQ ID NO: 5582845 - DNA, 25 bp, Homo sapien
atggaagcatatattcatgaagaaa

SEQ ID NO: 5582846 - DNA, 25 bp, Homo sapien
accatctagaaatctgtgtcacatc

SEQ ID NO: 5582847 - DNA, 25 bp, Homo sapien
catacttaggctattcagaaaaatt

SEQ ID NO: 5582848 - DNA, 25 bp, Homo sapien
ttataggctcacaaacttaaagtgc

SEQ ID NO: 5582849 - DNA, 25 bp, Homo sapien
agaaaagatcctgcagtattaataa

SEQ ID NO: 5582850 - DNA, 25 bp, Homo sapien
cataaaaatgttagcccatcccacc

SEQ ID NO: 5582851 - DNA, 25 bp, Homo sapien
ctaagcacagtaataaaaaagcata

SEQ ID NO: 5582852 - DNA, 25 bp, Homo sapien
tatcaatacaaaatggttcaagaat

SEQ ID NO: 5582853 - DNA, 25 bp, Homo sapien
acttaaagtgcatggttaaaaatta

SEQ ID NO: 5582854 - DNA, 25 bp, Homo sapien
cgcgagaaaggcgttcctttggtca

SEQ ID NO: 5582855 - DNA, 25 bp, Homo sapien
tgaccaaaggaacgcctttctcgcg

SEQ ID NO: 5582856 - DNA, 25 bp, Homo sapien
gtttatagcagatacaggagctggc

SEQ ID NO: 5582857 - DNA, 25 bp, Homo sapien
tggtagaagactgtattttagagta

SEQ ID NO: 5582858 - DNA, 25 bp, Homo sapien
ctatcaggatagatgatgtaaaacc

SEQ ID NO: 5582859 - DNA, 25 bp, Homo sapien
ttggcagacagaactgcccaaaggc

SEQ ID NO: 5582860 - DNA, 25 bp, Homo sapien
cataaacttcttaggtgaaaaccga

SEQ ID NO: 5582861 - DNA, 25 bp, Homo sapien
caggagctggctatctagaagttgg

SEQ ID NO: 5582862 - DNA, 25 bp, Homo sapien
cctggaccatacataactagttacc

SEQ ID NO: 5582863 - DNA, 25 bp, Homo sapien
attggagtagagaacttcttcagtt

SEQ ID NO: 5582864 - DNA, 25 bp, Homo sapien
gtataagattctgcagttcacacaa

SEQ ID NO: 5582865 - DNA, 25 bp, Homo sapien
aggtggatataagatcttcagagtc

SEQ ID NO: 5582866 - DNA, 25 bp, Homo sapien
gtagtaggcacatttcaagccagtg

SEQ ID NO: 5582867 - DNA, 25 bp, Homo sapien
agcttaagccagaataatcacaata

SEQ ID NO: 5582868 - DNA, 25 bp, Homo sapien
ctttacgaccctttgcaagcatata

SEQ ID NO: 5582869 - DNA, 25 bp, Homo sapien
gtcagccaaatacatatgctcagat

SEQ ID NO: 5582870 - DNA, 25 bp, Homo sapien
gcatatatgagaaacttaccaaaag

SEQ ID NO: 5582871 - DNA, 25 bp, Homo sapien
gtgtattatgtgaatgttgtgactc

SEQ ID NO: 5582872 - DNA, 25 bp, Homo sapien
atgaaactttgtttagaggtaagaa

SEQ ID NO: 5582873 - DNA, 25 bp, Homo sapien
tttcatgggagttttttcaggtgcc

SEQ ID NO: 5582874 - DNA, 25 bp, Homo sapien
ttcttaagctaagagaatggaaaaa

SEQ ID NO: 5582875 - DNA, 25 bp, Homo sapien
ttcaggtgccctgaaaagtcctgtc

SEQ ID NO: 5582876 - DNA, 25 bp, Homo sapien
caaaagttttgtaatgatctgtttc

SEQ ID NO: 5582877 - DNA, 25 bp, Homo sapien
gagatcagggttgtacagtgtatta

SEQ ID NO: 5582878 - DNA, 25 bp, Homo sapien
aaataactgaagtaatggtttgccc

SEQ ID NO: 5582879 - DNA, 25 bp, Homo sapien
tcatagtcaaaggtgaagttaaaaa

SEQ ID NO: 5582880 - DNA, 25 bp, Homo sapien
gcccaaatagcaaacgtaggataca

SEQ ID NO: 5582881 - DNA, 25 bp, Homo sapien
tggatatagggtaggtaacttgaca

SEQ ID NO: 5582882 - DNA, 25 bp, Homo sapien
ggcaaagagcagctactgaagctca

SEQ ID NO: 5582883 - DNA, 25 bp, Homo sapien
gtaacttgacaaatgcctctgcttc

SEQ ID NO: 5582884 - DNA, 25 bp, Homo sapien
agctactgaagctcatgaggaggat

SEQ ID NO: 5582885 - DNA, 25 bp, Homo sapien
aggaggaggtaatgaacattaacgt

SEQ ID NO: 5582886 - DNA, 25 bp, Homo sapien
tctaacaaacgttcactgtgtgcgc

SEQ ID NO: 5582887 - DNA, 25 bp, Homo sapien
tgtgtgcgcattccagcagaaagag

SEQ ID NO: 5582888 - DNA, 25 bp, Homo sapien
ctgaaaaaggtaaactaactgcatt

SEQ ID NO: 5582889 - DNA, 25 bp, Homo sapien
aatgaggatcgtatagtttggtaat

SEQ ID NO: 5582890 - DNA, 25 bp, Homo sapien
agatcaatggttgccctacatactg

SEQ ID NO: 5582891 - DNA, 25 bp, Homo sapien
gcgtgtattgcaaaaggacacaagg

SEQ ID NO: 5582892 - DNA, 25 bp, Homo sapien
ctttagcgcgtatctgtaatatttc

SEQ ID NO: 5582893 - DNA, 25 bp, Homo sapien
tgtcaaaattagtcaagttatatac

SEQ ID NO: 5582894 - DNA, 25 bp, Homo sapien
aaatactatagtgacaaatatcctt

SEQ ID NO: 5582895 - DNA, 25 bp, Homo sapien
ttgtagttacactttagcgcgtatc

SEQ ID NO: 5582896 - DNA, 25 bp, Homo sapien
ggtgtgtgtgtttgcgtgtattgca

SEQ ID NO: 5582897 - DNA, 25 bp, Homo sapien
gaatgcttgcattagtatcccattt

SEQ ID NO: 5582898 - DNA, 25 bp, Homo sapien
gcaatctgttgcacacaaattacaa

SEQ ID NO: 5582899 - DNA, 25 bp, Homo sapien
ataactggtagtttcatgggtgtat

SEQ ID NO: 5582900 - DNA, 25 bp, Homo sapien
atagaatcatcaaagcaccaagctc

SEQ ID NO: 5582901 - DNA, 25 bp, Homo sapien
aagcaccaagctcaggatattccca

SEQ ID NO: 5582902 - DNA, 25 bp, Homo sapien
acaggggctacatgacaccttccta

SEQ ID NO: 5582903 - DNA, 25 bp, Homo sapien
tagggctgcagaacaaaatcatgaa

SEQ ID NO: 5582904 - DNA, 25 bp, Homo sapien
caaaagaagttggattgccattatc

SEQ ID NO: 5582905 - DNA, 25 bp, Homo sapien
cctgaactcaggaccatgtgactct

SEQ ID NO: 5582906 - DNA, 25 bp, Homo sapien
tatatgtagctgagatgtgataagg

SEQ ID NO: 5582907 - DNA, 25 bp, Homo sapien
tgggctcacccctagctagggctgc

SEQ ID NO: 5582908 - DNA, 25 bp, Homo sapien
aattcaaatgttagacaggggctac

SEQ ID NO: 5582909 - DNA, 25 bp, Homo sapien
cagcggagaagttagtgactaacta

SEQ ID NO: 5582910 - DNA, 25 bp, Homo sapien
aggcaccaaagctgaaatagaatca

SEQ ID NO: 5582911 - DNA, 25 bp, Homo sapien
tcaacagattaaaatagccaatatt

SEQ ID NO: 5582912 - DNA, 25 bp, Homo sapien
tttctggggtcaagaaatctcctgc

SEQ ID NO: 5582913 - DNA, 25 bp, Homo sapien
tcccaaataagctcacatctgtctt

SEQ ID NO: 5582914 - DNA, 25 bp, Homo sapien
tccacaaaggagtaaatataagtct

SEQ ID NO: 5582915 - DNA, 25 bp, Homo sapien
tgacattgctgtctgaccgaaacca

SEQ ID NO: 5582916 - DNA, 25 bp, Homo sapien
aaagtacttcatccccctgccccta

SEQ ID NO: 5582917 - DNA, 25 bp, Homo sapien
tgaccgaaaccaattcagctccaca

SEQ ID NO: 5582918 - DNA, 25 bp, Homo sapien
gtcaagtttcgtgctgttcagatta

SEQ ID NO: 5582919 - DNA, 25 bp, Homo sapien
ccgtctcccttggtactagccttcc

SEQ ID NO: 5582920 - DNA, 25 bp, Homo sapien
tcaaagcccagtttagctcccaaat

SEQ ID NO: 5582921 - DNA, 25 bp, Homo sapien
ttagccctagcacttccagttccac

SEQ ID NO: 5582922 - DNA, 25 bp, Homo sapien
caacacaaaagggacacaaaatcta

SEQ ID NO: 5582923 - DNA, 25 bp, Homo sapien
tatccatataggggtcattccattg

SEQ ID NO: 5582924 - DNA, 25 bp, Homo sapien
ctggagtgcagtttaaattcattta

SEQ ID NO: 5582925 - DNA, 25 bp, Homo sapien
acattaaacgatgggtggaaatgct

SEQ ID NO: 5582926 - DNA, 25 bp, Homo sapien
attagggcactgtcttcggaattac

SEQ ID NO: 5582927 - DNA, 25 bp, Homo sapien
caagtttgtaaaaagtacgcacagg

SEQ ID NO: 5582928 - DNA, 25 bp, Homo sapien
cttgatgccaaatcttaggtaatgc

SEQ ID NO: 5582929 - DNA, 25 bp, Homo sapien
taggtaatgcagttatggccataat

SEQ ID NO: 5582930 - DNA, 25 bp, Homo sapien
aaaatgtcatgagcattagggcact

SEQ ID NO: 5582931 - DNA, 25 bp, Homo sapien
cattccattgactactaagcagcca

SEQ ID NO: 5582932 - DNA, 25 bp, Homo sapien
aagttagttggccaaataggtactc

SEQ ID NO: 5582933 - DNA, 25 bp, Homo sapien
accctgaggtagtaatgccagaggg

SEQ ID NO: 5582934 - DNA, 25 bp, Homo sapien
ggggccataagcaacccagtgtgat

SEQ ID NO: 5582935 - DNA, 25 bp, Homo sapien
ttgggttggtgtgattccttcctac

SEQ ID NO: 5582936 - DNA, 25 bp, Homo sapien
gtgcatgtctagccgaccctgaggt

SEQ ID NO: 5582937 - DNA, 25 bp, Homo sapien
gactgcaggctccttgcttcccatc

SEQ ID NO: 5582938 - DNA, 25 bp, Homo sapien
gtgtgagaataggcatctcggctca

SEQ ID NO: 5582939 - DNA, 25 bp, Homo sapien
cccagtgacaatgctgactgcaggc

SEQ ID NO: 5582940 - DNA, 25 bp, Homo sapien
agtgtgatgggttgacctaactggt

SEQ ID NO: 5582941 - DNA, 25 bp, Homo sapien
gaacacaggaaggcatttgtccaag

SEQ ID NO: 5582942 - DNA, 25 bp, Homo sapien
atgctggtgcccaaactgctgtgca

SEQ ID NO: 5582943 - DNA, 25 bp, Homo sapien
tcagaattagggataaatgaaacct

SEQ ID NO: 5582944 - DNA, 25 bp, Homo sapien
taaagctataattccaacttccagc

SEQ ID NO: 5582945 - DNA, 25 bp, Homo sapien
tacgtcatcatgataacctaatgtt

SEQ ID NO: 5582946 - DNA, 25 bp, Homo sapien
tctatgggaataaatgtgaactgtc

SEQ ID NO: 5582947 - DNA, 25 bp, Homo sapien
agaatcactgctctagtgtggctcc

SEQ ID NO: 5582948 - DNA, 25 bp, Homo sapien
actgctctagtgtggctccagaagc

SEQ ID NO: 5582949 - DNA, 25 bp, Homo sapien
atttctatgggaataaatgtgaact

SEQ ID NO: 5582950 - DNA, 25 bp, Homo sapien
tatgggaataaatgtgaactgtctc

SEQ ID NO: 5582951 - DNA, 25 bp, Homo sapien
atgacattgcaatccaaacactacc

SEQ ID NO: 5582952 - DNA, 25 bp, Homo sapien
ttaagaatttactcatacgtcatca

SEQ ID NO: 5582953 - DNA, 25 bp, Homo sapien
gctctagtgtggctccagaagctgt

SEQ ID NO: 5582954 - DNA, 25 bp, Homo sapien
ccaacttccagcaaagaagtatctc

SEQ ID NO: 5582955 - DNA, 25 bp, Homo sapien
agattagtctacgtgtcactccttg

SEQ ID NO: 5582956 - DNA, 25 bp, Homo sapien
gtgtcactccttggtgtaaagctat

SEQ ID NO: 5582957 - DNA, 25 bp, Homo sapien
taactgaattgaccctcattgatcc

SEQ ID NO: 5582958 - DNA, 25 bp, Homo sapien
cattcacagtcaatctcaaagagaa

SEQ ID NO: 5582959 - DNA, 25 bp, Homo sapien
caggaactactgatacgatttcact

SEQ ID NO: 5582960 - DNA, 25 bp, Homo sapien
gggaattcagagagacacgtttcat

SEQ ID NO: 5582961 - DNA, 25 bp, Homo sapien
tattggacaagtagaactcaaacaa

SEQ ID NO: 5582962 - DNA, 25 bp, Homo sapien
tttggcctgataaatgactaaaaca

SEQ ID NO: 5582963 - DNA, 25 bp, Homo sapien
aagctgtcagtcaggaactactgat

SEQ ID NO: 5582964 - DNA, 25 bp, Homo sapien
ttgatcctcagactaatttagacac

SEQ ID NO: 5582965 - DNA, 25 bp, Homo sapien
ctctgaattcaaatgagaatgacat

SEQ ID NO: 5582966 - DNA, 25 bp, Homo sapien
gtgcaatttgaggtaaacagaaaga

SEQ ID NO: 5582967 - DNA, 25 bp, Homo sapien
aaatcaaaagaaattcccaccatta

SEQ ID NO: 5582968 - DNA, 25 bp, Homo sapien
atggaaagtgatattaatgactacc

SEQ ID NO: 5582969 - DNA, 25 bp, Homo sapien
actacgctgtctcaaacatgccaat

SEQ ID NO: 5582970 - DNA, 25 bp, Homo sapien
tattcaaagacagagtaattaagca

SEQ ID NO: 5582971 - DNA, 25 bp, Homo sapien
ttaagcaggcatcacaaacagtttt

SEQ ID NO: 5582972 - DNA, 25 bp, Homo sapien
tgttgagatgtgcaatttgaggtaa

SEQ ID NO: 5582973 - DNA, 25 bp, Homo sapien
ctgactgcaattagtgttgagatgt

SEQ ID NO: 5582974 - DNA, 25 bp, Homo sapien
gagtaattaagcaggcatcacaaac

SEQ ID NO: 5582975 - DNA, 25 bp, Homo sapien
tggtaagtctaaattttggaagaga

SEQ ID NO: 5582976 - DNA, 25 bp, Homo sapien
agtatactcaatatagacacgtctc

SEQ ID NO: 5582977 - DNA, 25 bp, Homo sapien
acacgaagacaaattccacagtaac

SEQ ID NO: 5582978 - DNA, 25 bp, Homo sapien
actaaaagcaatggagcagtgctga

SEQ ID NO: 5582979 - DNA, 25 bp, Homo sapien
tcagtcgtcagtacctgagccaagc

SEQ ID NO: 5582980 - DNA, 25 bp, Homo sapien
actgttcccgcaaagccaagcaaat

SEQ ID NO: 5582981 - DNA, 25 bp, Homo sapien
ctgagccaagcagttgtagaagtgt

SEQ ID NO: 5582982 - DNA, 25 bp, Homo sapien
gcagtgctgataaaagtaccctaca

SEQ ID NO: 5582983 - DNA, 25 bp, Homo sapien
ccaccttgacggttccagtgtctgt

SEQ ID NO: 5582984 - DNA, 25 bp, Homo sapien
acaacaacagcaaaagcagctggag

SEQ ID NO: 5582985 - DNA, 25 bp, Homo sapien
gatggctacgtgttgacccctctgc

SEQ ID NO: 5582986 - DNA, 25 bp, Homo sapien
tggaaaaccagaagaatgccaatat

SEQ ID NO: 5582987 - DNA, 25 bp, Homo sapien
ttgcttacaaagatggctacgtgtt

SEQ ID NO: 5582988 - DNA, 25 bp, Homo sapien
catatagtctattcagtgttcccaa

SEQ ID NO: 5582989 - DNA, 25 bp, Homo sapien
cctgtatttgtgaaacagctgtaac

SEQ ID NO: 5582990 - DNA, 25 bp, Homo sapien
aaatgtaggtgcacaacatatagtc

SEQ ID NO: 5582991 - DNA, 25 bp, Homo sapien
tggtagagaactatacaaaaggcta

SEQ ID NO: 5582992 - DNA, 25 bp, Homo sapien
aatacaatgtgagccatgagatggt

SEQ ID NO: 5582993 - DNA, 25 bp, Homo sapien
ggttgaggtgtataacatgggaaca

SEQ ID NO: 5582994 - DNA, 25 bp, Homo sapien
gggtcccaactctaagagtatctca

SEQ ID NO: 5582995 - DNA, 25 bp, Homo sapien
ttgctattaggctgagcatctctaa

SEQ ID NO: 5582996 - DNA, 25 bp, Homo sapien
catgagatggtagagaactatacaa

SEQ ID NO: 5582997 - DNA, 25 bp, Homo sapien
catgggaacatttgctattaggctg

SEQ ID NO: 5582998 - DNA, 25 bp, Homo sapien
agggtatgtactatggagtagtgac

SEQ ID NO: 5582999 - DNA, 25 bp, Homo sapien
gaaaagagcaagatcagtatacaca

SEQ ID NO: 5583000 - DNA, 25 bp, Homo sapien
ttaccaactagataagcccacttcc

SEQ ID NO: 5583001 - DNA, 25 bp, Homo sapien
cctgaaggacataaaaactgaataa

SEQ ID NO: 5583002 - DNA, 25 bp, Homo sapien
ctgatcaaattgagttggaggatgc

SEQ ID NO: 5583003 - DNA, 25 bp, Homo sapien
caggcaatatctgtgacaagaaatt

SEQ ID NO: 5583004 - DNA, 25 bp, Homo sapien
tacttgcaggtcagcccacaatgaa

SEQ ID NO: 5583005 - DNA, 25 bp, Homo sapien
atgggccaattagctgaatgacaga

SEQ ID NO: 5583006 - DNA, 25 bp, Homo sapien
ggaggatgcaacttagtgtgaccat

SEQ ID NO: 5583007 - DNA, 25 bp, Homo sapien
aacgataaaaaattaagtagcagac

SEQ ID NO: 5583008 - DNA, 25 bp, Homo sapien
gctgagcaaacccagttacccatca

SEQ ID NO: 5583009 - DNA, 25 bp, Homo sapien
agggccccaaataaatagcacaatt

SEQ ID NO: 5583010 - DNA, 25 bp, Homo sapien
tctgtgcctgtccctcgcagcagtc

SEQ ID NO: 5583011 - DNA, 25 bp, Homo sapien
ggttgacccagcctgcagtcaggat

SEQ ID NO: 5583012 - DNA, 25 bp, Homo sapien
agaatcgcactctggctgaaagttc

SEQ ID NO: 5583013 - DNA, 25 bp, Homo sapien
ggtttcagtgtgcaagacgtagtca

SEQ ID NO: 5583014 - DNA, 25 bp, Homo sapien
tggagtgcagaattggctagtctga

SEQ ID NO: 5583015 - DNA, 25 bp, Homo sapien
tgctggaccagccaaaagcttagtt

SEQ ID NO: 5583016 - DNA, 25 bp, Homo sapien
gactgccctgtcttgctggaccagc

SEQ ID NO: 5583017 - DNA, 25 bp, Homo sapien
agacgtagtcagatggctcacattt

SEQ ID NO: 5583018 - DNA, 25 bp, Homo sapien
accgttcacccgggagttcagaatc

SEQ ID NO: 5583019 - DNA, 25 bp, Homo sapien
caagagcaccattgtcagcctgact

SEQ ID NO: 5583020 - DNA, 25 bp, Homo sapien
attctttgtccgatggcattgggcg

SEQ ID NO: 5583021 - DNA, 25 bp, Homo sapien
ggaggttgtctaggaagtacagaaa

SEQ ID NO: 5583022 - DNA, 25 bp, Homo sapien
actgagttatgtgaggaaagtaaag

SEQ ID NO: 5583023 - DNA, 25 bp, Homo sapien
atcttgaaagaatctaccagggtag

SEQ ID NO: 5583024 - DNA, 25 bp, Homo sapien
gtacagaaaaggacctgtcttcttc

SEQ ID NO: 5583025 - DNA, 25 bp, Homo sapien
aatggtaaactagaagcagaataac

SEQ ID NO: 5583026 - DNA, 25 bp, Homo sapien
ggcatacaaatgggatgactgcatc

SEQ ID NO: 5583027 - DNA, 25 bp, Homo sapien
ctatattattagagcacaggaagag

SEQ ID NO: 5583028 - DNA, 25 bp, Homo sapien
aagtccacccctggatgggactctc

SEQ ID NO: 5583029 - DNA, 25 bp, Homo sapien
tgaacacatatccatcgagccctct

SEQ ID NO: 5583030 - DNA, 25 bp, Homo sapien
aggtgaggaaccttgaagtctaagt

SEQ ID NO: 5583031 - DNA, 25 bp, Homo sapien
gtagaggaagtatgaggcatacaaa

SEQ ID NO: 5583032 - DNA, 25 bp, Homo sapien
ggatgataaactcctacagggaaac

SEQ ID NO: 5583033 - DNA, 25 bp, Homo sapien
ctcaccatggatgataaactcctac

SEQ ID NO: 5583034 - DNA, 25 bp, Homo sapien
ggattacaaagagccttctgaaggg

SEQ ID NO: 5583035 - DNA, 25 bp, Homo sapien
ctcccgctccccttctggaggagtc

SEQ ID NO: 5583036 - DNA, 25 bp, Homo sapien
ctgctgccctcctcaccatggatga

SEQ ID NO: 5583037 - DNA, 25 bp, Homo sapien
tacaaagcacattgatcagtcaggg

SEQ ID NO: 5583038 - DNA, 25 bp, Homo sapien
agcacattgatcagtcagggtaggg

SEQ ID NO: 5583039 - DNA, 25 bp, Homo sapien
actcctacagggaaactcccgctcc

SEQ ID NO: 5583040 - DNA, 25 bp, Homo sapien
tgggctcagaggcctaactaaagac

SEQ ID NO: 5583041 - DNA, 25 bp, Homo sapien
gcctaactaaagacctcaccctgag

SEQ ID NO: 5583042 - DNA, 25 bp, Homo sapien
gggggtggatctcaccaagtccatt

SEQ ID NO: 5583043 - DNA, 25 bp, Homo sapien
agaagagtcccttttggagctgttc

SEQ ID NO: 5583044 - DNA, 25 bp, Homo sapien
ttcctaggctcgaggctcagaatat

SEQ ID NO: 5583045 - DNA, 25 bp, Homo sapien
caggaggtggctggtctctccttga

SEQ ID NO: 5583046 - DNA, 25 bp, Homo sapien
aggttatctggtagatccacagaaa

SEQ ID NO: 5583047 - DNA, 25 bp, Homo sapien
tatcccctgtcaacagaagagtccc

SEQ ID NO: 5583048 - DNA, 25 bp, Homo sapien
gagagctgctgttggcctccttcct

SEQ ID NO: 5583049 - DNA, 25 bp, Homo sapien
caacaaccctgaaatgtcttctgtc

SEQ ID NO: 5583050 - DNA, 25 bp, Homo sapien
tatccatgggtcagtggctgatact

SEQ ID NO: 5583051 - DNA, 25 bp, Homo sapien
atgaccattttagaactggggggaa

SEQ ID NO: 5583052 - DNA, 25 bp, Homo sapien
gagagttaggtaagatcgacactat

SEQ ID NO: 5583053 - DNA, 25 bp, Homo sapien
atttgggcattaaaggagccataat

SEQ ID NO: 5583054 - DNA, 25 bp, Homo sapien
aagtaggagtataatccagtggttt

SEQ ID NO: 5583055 - DNA, 25 bp, Homo sapien
tgaaagttagactgctaccctgttc

SEQ ID NO: 5583056 - DNA, 25 bp, Homo sapien
tgaggaccaaaatccaggcacaaac

SEQ ID NO: 5583057 - DNA, 25 bp, Homo sapien
ctgagtgcttgagcttctgctgcct

SEQ ID NO: 5583058 - DNA, 25 bp, Homo sapien
agggttactcagtatagggaggaaa

SEQ ID NO: 5583059 - DNA, 25 bp, Homo sapien
ggaacacaggcgatctcctagagtt

SEQ ID NO: 5583060 - DNA, 25 bp, Homo sapien
ttaccaactctggaagcaaggcttg

SEQ ID NO: 5583061 - DNA, 25 bp, Homo sapien
gagccacgtcataagcttgggggat

SEQ ID NO: 5583062 - DNA, 25 bp, Homo sapien
caggaagcataaccccagggacttt

SEQ ID NO: 5583063 - DNA, 25 bp, Homo sapien
tgttgaaggatgagtcttcagctcc

SEQ ID NO: 5583064 - DNA, 25 bp, Homo sapien
tctgtgcattatgagggtttgggag

SEQ ID NO: 5583065 - DNA, 25 bp, Homo sapien
ttaagagttaatgagctgctgtttt

SEQ ID NO: 5583066 - DNA, 25 bp, Homo sapien
atgcattccatgggcctcaacctct

SEQ ID NO: 5583067 - DNA, 25 bp, Homo sapien
cagtacaccacccttctggcctcag

SEQ ID NO: 5583068 - DNA, 25 bp, Homo sapien
tggctgcaactgtggaaatagtgaa

SEQ ID NO: 5583069 - DNA, 25 bp, Homo sapien
cttagatgggggccccagttttcca

SEQ ID NO: 5583070 - DNA, 25 bp, Homo sapien
ctggaacaaagaggtatacacctgc

SEQ ID NO: 5583071 - DNA, 25 bp, Homo sapien
tacacctgctaagaaggtggcccag

SEQ ID NO: 5583072 - DNA, 25 bp, Homo sapien
tcctaaaggctacagagcaccacca

SEQ ID NO: 5583073 - DNA, 25 bp, Homo sapien
cagaaagtcagtctggaacaaagag

SEQ ID NO: 5583074 - DNA, 25 bp, Homo sapien
tgattctagaagtcctaaaggctac

SEQ ID NO: 5583075 - DNA, 25 bp, Homo sapien
atagtgaagatattgtgagacagaa

SEQ ID NO: 5583076 - DNA, 25 bp, Homo sapien
taaccctaataggagattaagattt

SEQ ID NO: 5583077 - DNA, 25 bp, Homo sapien
aaatcttaatctcctattagggtta

SEQ ID NO: 5583078 - DNA, 25 bp, Homo sapien
ctgagagtgtaagccagcttcccca

SEQ ID NO: 5583079 - DNA, 25 bp, Homo sapien
taggccacagcaagatgtttggtct

SEQ ID NO: 5583080 - DNA, 25 bp, Homo sapien
cttcaaccgagatctgaaggacagc

SEQ ID NO: 5583081 - DNA, 25 bp, Homo sapien
gagtacagcgtgccccaagtaatca

SEQ ID NO: 5583082 - DNA, 25 bp, Homo sapien
attagagaacacaaataaaatgtac

SEQ ID NO: 5583083 - DNA, 25 bp, Homo sapien
gaacctaaccgagtcctgagagtgt

SEQ ID NO: 5583084 - DNA, 25 bp, Homo sapien
gcaagcactttgaacacatggattt

SEQ ID NO: 5583085 - DNA, 25 bp, Homo sapien
agaaaatcagagaaaacatcattgc

SEQ ID NO: 5583086 - DNA, 25 bp, Homo sapien
cgtgccccaagtaatcaggaagtgc

SEQ ID NO: 5583087 - DNA, 25 bp, Homo sapien
attttttggaagaaaggtgacaaga

SEQ ID NO: 5583088 - DNA, 25 bp, Homo sapien
atagaaacatggtgacatagaagag

SEQ ID NO: 5583089 - DNA, 25 bp, Homo sapien
aggttctgagaagcatcacatcttt

SEQ ID NO: 5583090 - DNA, 25 bp, Homo sapien
ggatggtgcttccagacagtggaac

SEQ ID NO: 5583091 - DNA, 25 bp, Homo sapien
acacacttgaagtctgcactgaccg

SEQ ID NO: 5583092 - DNA, 25 bp, Homo sapien
tctgcactgaccgactgcttgtggc

SEQ ID NO: 5583093 - DNA, 25 bp, Homo sapien
atacagagatctacttagcacgtct

SEQ ID NO: 5583094 - DNA, 25 bp, Homo sapien
catacagatggaacaggttctgaga

SEQ ID NO: 5583095 - DNA, 25 bp, Homo sapien
aggcatgaacaatggcatacagatg

SEQ ID NO: 5583096 - DNA, 25 bp, Homo sapien
tcagagtaaagcacgtgttgttcac

SEQ ID NO: 5583097 - DNA, 25 bp, Homo sapien
acagtggaacaatcgtgtggtttct

SEQ ID NO: 5583098 - DNA, 25 bp, Homo sapien
ttttcgacaaggccagcacaatcac

SEQ ID NO: 5583099 - DNA, 25 bp, Homo sapien
ttgagaaagtgaatcatgccatgat

SEQ ID NO: 5583100 - DNA, 25 bp, Homo sapien
cttctggctaaaaggaccatgacgc

SEQ ID NO: 5583101 - DNA, 25 bp, Homo sapien
tgtgactctaacaccaaggtttggt

SEQ ID NO: 5583102 - DNA, 25 bp, Homo sapien
ctcaccaactatgcaaaagaaaacc

SEQ ID NO: 5583103 - DNA, 25 bp, Homo sapien
atgcccagaaagacaagttattgtc

SEQ ID NO: 5583104 - DNA, 25 bp, Homo sapien
taaaggattcttgatgctcaccaac

SEQ ID NO: 5583105 - DNA, 25 bp, Homo sapien
aagtcagcaccgccaccctccttaa

SEQ ID NO: 5583106 - DNA, 25 bp, Homo sapien
tagtgatgcctctatagtgagatct

SEQ ID NO: 5583107 - DNA, 25 bp, Homo sapien
gagaaggataagcggacatctttca

SEQ ID NO: 5583108 - DNA, 25 bp, Homo sapien
ggctgactctcaatggggagaagtc

SEQ ID NO: 5583109 - DNA, 25 bp, Homo sapien
atacaaccaacactcatgcacctgc

SEQ ID NO: 5583110 - DNA, 25 bp, Homo sapien
tagtgagatctataaatgttggttc

SEQ ID NO: 5583111 - DNA, 25 bp, Homo sapien
tccgtatcagctaggtttcaggaag

SEQ ID NO: 5583112 - DNA, 25 bp, Homo sapien
ctgatgcaaattacgatacggtttc

SEQ ID NO: 5583113 - DNA, 25 bp, Homo sapien
aggtggttcaatagctgcagcatta

SEQ ID NO: 5583114 - DNA, 25 bp, Homo sapien
aacacaaaggcaagagttatcatgt

SEQ ID NO: 5583115 - DNA, 25 bp, Homo sapien
aaagcagaagtcgacgttgactgaa

SEQ ID NO: 5583116 - DNA, 25 bp, Homo sapien
gcagttgggtttcctgatgcaaatt

SEQ ID NO: 5583117 - DNA, 25 bp, Homo sapien
atcataattgaacacacccaggtcc

SEQ ID NO: 5583118 - DNA, 25 bp, Homo sapien
tacggtttcagatgggaacagtcta

SEQ ID NO: 5583119 - DNA, 25 bp, Homo sapien
tttttgatggaaatcaggggctcca

SEQ ID NO: 5583120 - DNA, 25 bp, Homo sapien
caggggctccatataaccttggcga

SEQ ID NO: 5583121 - DNA, 25 bp, Homo sapien
acccaggtcctcaatgtcagcagtt

SEQ ID NO: 5583122 - DNA, 25 bp, Homo sapien
ggaaaagcacaagatgtacagagaa

SEQ ID NO: 5583123 - DNA, 25 bp, Homo sapien
cacctctcccacggcattggaagag

SEQ ID NO: 5583124 - DNA, 25 bp, Homo sapien
aagctccttcccactggaacaagtc

SEQ ID NO: 5583125 - DNA, 25 bp, Homo sapien
acagtcaacatgcacaacagacctc

SEQ ID NO: 5583126 - DNA, 25 bp, Homo sapien
cagatgacatgaactaatcagatac

SEQ ID NO: 5583127 - DNA, 25 bp, Homo sapien
atcgtctggaaaacttaatggcatg

SEQ ID NO: 5583128 - DNA, 25 bp, Homo sapien
aaaatgaaacagtgaaagacaaagg

SEQ ID NO: 5583129 - DNA, 25 bp, Homo sapien
aagaagtaaatgaagcaatataaaa

SEQ ID NO: 5583130 - DNA, 25 bp, Homo sapien
gagaagactgggatcacctctccca

SEQ ID NO: 5583131 - DNA, 25 bp, Homo sapien
tgtcatgaaaatgccctgaagattc

SEQ ID NO: 5583132 - DNA, 25 bp, Homo sapien
ggaacaagtcttaatggaaaagcac

SEQ ID NO: 5583133 - DNA, 25 bp, Homo sapien
gagtcaacacatattggacgattat

SEQ ID NO: 5583134 - DNA, 25 bp, Homo sapien
ataatcgtccaatatgtgttgactc

SEQ ID NO: 5583135 - DNA, 25 bp, Homo sapien
cagatcacaacaaagagggtctaga

SEQ ID NO: 5583136 - DNA, 25 bp, Homo sapien
ataagggaacatattgcaaaacaat

SEQ ID NO: 5583137 - DNA, 25 bp, Homo sapien
cgttggacatacccacaatagaccc

SEQ ID NO: 5583138 - DNA, 25 bp, Homo sapien
tcattaaaggaaggtccagttattc

SEQ ID NO: 5583139 - DNA, 25 bp, Homo sapien
tacatacagagacacaagtacatac

SEQ ID NO: 5583140 - DNA, 25 bp, Homo sapien
gaagaaaccccaaacagatcacaac

SEQ ID NO: 5583141 - DNA, 25 bp, Homo sapien
taagggactgtcttgctatgggaat

SEQ ID NO: 5583142 - DNA, 25 bp, Homo sapien
gcagccagttctagtggtggacaag

SEQ ID NO: 5583143 - DNA, 25 bp, Homo sapien
cttaggaaaaatcgggctaatacca

SEQ ID NO: 5583144 - DNA, 25 bp, Homo sapien
tgggaataaaaaggcagccagttct

SEQ ID NO: 5583145 - DNA, 25 bp, Homo sapien
tagtggtggacaagaacaacttgag

SEQ ID NO: 5583146 - DNA, 25 bp, Homo sapien
ccactggcaccatctgtgggctgcg

SEQ ID NO: 5583147 - DNA, 25 bp, Homo sapien
ttggggtttaaagtctgctcacaga

SEQ ID NO: 5583148 - DNA, 25 bp, Homo sapien
cctttaggcaaacaaaggagaggta

SEQ ID NO: 5583149 - DNA, 25 bp, Homo sapien
tgtagtggctctaaggaactgtaac

SEQ ID NO: 5583150 - DNA, 25 bp, Homo sapien
tgtagtcccagcaatgaactgtgat

SEQ ID NO: 5583151 - DNA, 25 bp, Homo sapien
atccattgaggaaagaaatctgtag

SEQ ID NO: 5583152 - DNA, 25 bp, Homo sapien
tgggtatcccaaatggtcaagagtc

SEQ ID NO: 5583153 - DNA, 25 bp, Homo sapien
gaaaagatgacaaatgggtatccca

SEQ ID NO: 5583154 - DNA, 25 bp, Homo sapien
tcacttcggcctgaactgagacttc

SEQ ID NO: 5583155 - DNA, 25 bp, Homo sapien
gctgcggagtagctgtcttcagtaa

SEQ ID NO: 5583156 - DNA, 25 bp, Homo sapien
atccagtctcagcgggaatgctgct

SEQ ID NO: 5583157 - DNA, 25 bp, Homo sapien
acgcagattgtctattgacagtgcc

SEQ ID NO: 5583158 - DNA, 25 bp, Homo sapien
tagcactataagcaagcattaaatt

SEQ ID NO: 5583159 - DNA, 25 bp, Homo sapien
agcccttaagcctatgacacaattt

SEQ ID NO: 5583160 - DNA, 25 bp, Homo sapien
attgtgttcaggttataaaatgccc

SEQ ID NO: 5583161 - DNA, 25 bp, Homo sapien
aaggaaacatctcactgtccacaga

SEQ ID NO: 5583162 - DNA, 25 bp, Homo sapien
agaatagcagcctccacccagttga

SEQ ID NO: 5583163 - DNA, 25 bp, Homo sapien
tttggcacattatatggcattcctt

SEQ ID NO: 5583164 - DNA, 25 bp, Homo sapien
acccagttgaaagctgcacattgtt

SEQ ID NO: 5583165 - DNA, 25 bp, Homo sapien
ttaagttgtgctcttggtgagggtg

SEQ ID NO: 5583166 - DNA, 25 bp, Homo sapien
cactgtccacagaatagcagcctcc

SEQ ID NO: 5583167 - DNA, 25 bp, Homo sapien
cagcttggaatttctctacgcagat

SEQ ID NO: 5583168 - DNA, 25 bp, Homo sapien
cggccaacccacttccggggcctga

SEQ ID NO: 5583169 - DNA, 25 bp, Homo sapien
acatcaggtaaggggaccccaatgt

SEQ ID NO: 5583170 - DNA, 25 bp, Homo sapien
ggggcacggccttactcagccagtg

SEQ ID NO: 5583171 - DNA, 25 bp, Homo sapien
ttggtactgtcaattcaggggtgag

SEQ ID NO: 5583172 - DNA, 25 bp, Homo sapien
caaggaaaggatggaaatcccttct

SEQ ID NO: 5583173 - DNA, 25 bp, Homo sapien
tgataacaggtctaggccaaaagga

SEQ ID NO: 5583174 - DNA, 25 bp, Homo sapien
agtggagacagagcattcattactt

SEQ ID NO: 5583175 - DNA, 25 bp, Homo sapien
tgtcagatgctgccagcagtggaga

SEQ ID NO: 5583176 - DNA, 25 bp, Homo sapien
gtcccctacgcagggatagaaagca

SEQ ID NO: 5583177 - DNA, 25 bp, Homo sapien
gcccacgagtatgccaggttctcct

SEQ ID NO: 5583178 - DNA, 25 bp, Homo sapien
gtgaggctcctccttgcacgcactc

SEQ ID NO: 5583179 - DNA, 25 bp, Homo sapien
ttttccactgaatgaatgaccgaaa

SEQ ID NO: 5583180 - DNA, 25 bp, Homo sapien
taaaatgtcagcagccaaggaagaa

SEQ ID NO: 5583181 - DNA, 25 bp, Homo sapien
tgaatgaccgaaactgtagtaactc

SEQ ID NO: 5583182 - DNA, 25 bp, Homo sapien
tctgtccctggtcgcttttccactg

SEQ ID NO: 5583183 - DNA, 25 bp, Homo sapien
aatgaatgaccgaaactgtagtaac

SEQ ID NO: 5583184 - DNA, 25 bp, Homo sapien
ctgaatgaatgaccgaaactgtagt

SEQ ID NO: 5583185 - DNA, 25 bp, Homo sapien
tccactgaatgaatgaccgaaactg

SEQ ID NO: 5583186 - DNA, 25 bp, Homo sapien
gcccggtccctgtcctgtgcgtcgg

SEQ ID NO: 5583187 - DNA, 25 bp, Homo sapien
gacctggcgtctgctcgggccaggt

SEQ ID NO: 5583188 - DNA, 25 bp, Homo sapien
tgttaaaatgtcagcagccaaggaa

SEQ ID NO: 5583189 - DNA, 25 bp, Homo sapien
cgctgttaaaatgtcagcagccaag

SEQ ID NO: 5583190 - DNA, 25 bp, Homo sapien
ggcattaccggattgatgtggcaca

SEQ ID NO: 5583191 - DNA, 25 bp, Homo sapien
ggggtgaagcaataagctcctagct

SEQ ID NO: 5583192 - DNA, 25 bp, Homo sapien
tctgaactccatactggggtgaagc

SEQ ID NO: 5583193 - DNA, 25 bp, Homo sapien
tctgtctgtgaataacactggggca

SEQ ID NO: 5583194 - DNA, 25 bp, Homo sapien
ccatcagatggccatttaatcagcc

SEQ ID NO: 5583195 - DNA, 25 bp, Homo sapien
aagtagaaactcctccaagcctttc

SEQ ID NO: 5583196 - DNA, 25 bp, Homo sapien
tacagagtgaaaaatacgcccctct

SEQ ID NO: 5583197 - DNA, 25 bp, Homo sapien
aaaatgaaacccccagcttatgcat

SEQ ID NO: 5583198 - DNA, 25 bp, Homo sapien
gaacagacgcggtattttaaaatca

SEQ ID NO: 5583199 - DNA, 25 bp, Homo sapien
attgatgtggcacacttgtagaagc

SEQ ID NO: 5583200 - DNA, 25 bp, Homo sapien
gctcctagctaccaatgcagtgatg

SEQ ID NO: 5583201 - DNA, 25 bp, Homo sapien
cagcattgtcaaaataaccttagtt

SEQ ID NO: 5583202 - DNA, 25 bp, Homo sapien
aaaggtgtggcattgtattatattc

SEQ ID NO: 5583203 - DNA, 25 bp, Homo sapien
cttagttagcatcatatattccttc

SEQ ID NO: 5583204 - DNA, 25 bp, Homo sapien
tttctggcacaatgactgtacatgg

SEQ ID NO: 5583205 - DNA, 25 bp, Homo sapien
tacctgtagtaaagtgtctctcttc

SEQ ID NO: 5583206 - DNA, 25 bp, Homo sapien
atgcctaccagaaataagctaaact

SEQ ID NO: 5583207 - DNA, 25 bp, Homo sapien
gactacaagaccaaaggtgtggcat

SEQ ID NO: 5583208 - DNA, 25 bp, Homo sapien
tgtacatggaaggcctttaaattat

SEQ ID NO: 5583209 - DNA, 25 bp, Homo sapien
tccagcggcaccccaatgcctacca

SEQ ID NO: 5583210 - DNA, 25 bp, Homo sapien
tgctctctccagcggcaccccaatg

SEQ ID NO: 5583211 - DNA, 25 bp, Homo sapien
attatagactacaagaccaaaggtg

SEQ ID NO: 5583212 - DNA, 25 bp, Homo sapien
tttggggtctaaggccccactgctc

SEQ ID NO: 5583213 - DNA, 25 bp, Homo sapien
tgacaatcacaacaagtccacagcc

SEQ ID NO: 5583214 - DNA, 25 bp, Homo sapien
catacagacagcaattaaataccac

SEQ ID NO: 5583215 - DNA, 25 bp, Homo sapien
ttcactggacattagatctagtgct

SEQ ID NO: 5583216 - DNA, 25 bp, Homo sapien
cacagccttgctcctagcctgcctc

SEQ ID NO: 5583217 - DNA, 25 bp, Homo sapien
ggcatgaaagaaccggctctaatga

SEQ ID NO: 5583218 - DNA, 25 bp, Homo sapien
tagggtcttaagcaccacaaaggga

SEQ ID NO: 5583219 - DNA, 25 bp, Homo sapien
cagatttggctgagtaactttttcc

SEQ ID NO: 5583220 - DNA, 25 bp, Homo sapien
ccacacataaatggactttggggtc

SEQ ID NO: 5583221 - DNA, 25 bp, Homo sapien
taagcaccacaaagggaatcttgat

SEQ ID NO: 5583222 - DNA, 25 bp, Homo sapien
aactgcaggagagtagttcagattt

SEQ ID NO: 5583223 - DNA, 25 bp, Homo sapien
aagagctgtgttaatattgacggta

SEQ ID NO: 5583224 - DNA, 25 bp, Homo sapien
catgaacaccaagtcggagattcgt

SEQ ID NO: 5583225 - DNA, 25 bp, Homo sapien
tggcaaactctgcgtgagccctgga

SEQ ID NO: 5583226 - DNA, 25 bp, Homo sapien
ctgccccagtacctaggcctgcagg

SEQ ID NO: 5583227 - DNA, 25 bp, Homo sapien
tcaactgcttagaaaggggcagaaa

SEQ ID NO: 5583228 - DNA, 25 bp, Homo sapien
agattcgtccacgctggtgcctgca

SEQ ID NO: 5583229 - DNA, 25 bp, Homo sapien
atttgcagtgtcccttgcccacggc

SEQ ID NO: 5583230 - DNA, 25 bp, Homo sapien
aagagccacttgctgtccgggtgtt

SEQ ID NO: 5583231 - DNA, 25 bp, Homo sapien
tcacgtgtttaaagagaagcagcag

SEQ ID NO: 5583232 - DNA, 25 bp, Homo sapien
gcaggcccatttgcccccaggtccc

SEQ ID NO: 5583233 - DNA, 25 bp, Homo sapien
ttgctgctggcaacacagtcttact

SEQ ID NO: 5583234 - DNA, 25 bp, Homo sapien
atgcaatcacatatttgggctcaac

SEQ ID NO: 5583235 - DNA, 25 bp, Homo sapien
aggccaaagactttaaaactggtca

SEQ ID NO: 5583236 - DNA, 25 bp, Homo sapien
gtagaaaagttgtatatgaagtaga

SEQ ID NO: 5583237 - DNA, 25 bp, Homo sapien
aggtacaggtgatactgcatttttt

SEQ ID NO: 5583238 - DNA, 25 bp, Homo sapien
aaactggtcaatatcacaagtgatg

SEQ ID NO: 5583239 - DNA, 25 bp, Homo sapien
aggaaaattacattggctggacatc

SEQ ID NO: 5583240 - DNA, 25 bp, Homo sapien
gtgaacactgaatatgcagcatgaa

SEQ ID NO: 5583241 - DNA, 25 bp, Homo sapien
agttgagggttacatgtagaaaagt

SEQ ID NO: 5583242 - DNA, 25 bp, Homo sapien
actaggcaatgtgtaagttgagggt

SEQ ID NO: 5583243 - DNA, 25 bp, Homo sapien
atatgcagcatgaagatgcaatcac

SEQ ID NO: 5583244 - DNA, 25 bp, Homo sapien
cacaagtgatgaaggaaaattacat

SEQ ID NO: 5583245 - DNA, 25 bp, Homo sapien
gcctcccgcagcactggaggaggca

SEQ ID NO: 5583246 - DNA, 25 bp, Homo sapien
tggacttcccagcaaataacaggag

SEQ ID NO: 5583247 - DNA, 25 bp, Homo sapien
ttaagctttattacaacacattgtc

SEQ ID NO: 5583248 - DNA, 25 bp, Homo sapien
acttcccagcaaataacaggagggg

SEQ ID NO: 5583249 - DNA, 25 bp, Homo sapien
gcccgcctcccgcagcactggagga

SEQ ID NO: 5583250 - DNA, 25 bp, Homo sapien
tgtctccaaatacaaagggaggggc

SEQ ID NO: 5583251 - DNA, 25 bp, Homo sapien
attgtctccaaatacaaagggaggg

SEQ ID NO: 5583252 - DNA, 25 bp, Homo sapien
cgcctcccgcagcactggaggaggc

SEQ ID NO: 5583253 - DNA, 25 bp, Homo sapien
cgggtccattttggggcgatcccaa

SEQ ID NO: 5583254 - DNA, 25 bp, Homo sapien
cccgcctcccgcagcactggaggag

SEQ ID NO: 5583255 - DNA, 25 bp, Homo sapien
cacattgtctccaaatacaaaggga

SEQ ID NO: 5583256 - DNA, 25 bp, Homo sapien
acaacaatgctaggaggtaagctgt

SEQ ID NO: 5583257 - DNA, 25 bp, Homo sapien
atttcagagtaattacacagcactt

SEQ ID NO: 5583258 - DNA, 25 bp, Homo sapien
gagagggctattgataagaagctct

SEQ ID NO: 5583259 - DNA, 25 bp, Homo sapien
taggaggtaagctgtcacacctaca

SEQ ID NO: 5583260 - DNA, 25 bp, Homo sapien
aaaaaagagaatggaagatttatgc

SEQ ID NO: 5583261 - DNA, 25 bp, Homo sapien
attctatccatgaatgagagaaaaa

SEQ ID NO: 5583262 - DNA, 25 bp, Homo sapien
ctttatcttgtgccagccaaacctc

SEQ ID NO: 5583263 - DNA, 25 bp, Homo sapien
gccagccaaacctcacaacaatgct

SEQ ID NO: 5583264 - DNA, 25 bp, Homo sapien
cagaacaaatctgagagggctattg

SEQ ID NO: 5583265 - DNA, 25 bp, Homo sapien
ttcaattggagaaatgagataggag

SEQ ID NO: 5583266 - DNA, 25 bp, Homo sapien
tggtttctactgacaaagtgcctac

SEQ ID NO: 5583267 - DNA, 25 bp, Homo sapien
gtagttgtaacactcggtacttcct

SEQ ID NO: 5583268 - DNA, 25 bp, Homo sapien
aggaagtaccgagtgttacaactac

SEQ ID NO: 5583269 - DNA, 25 bp, Homo sapien
aattacattcagagtgaaagagaat

SEQ ID NO: 5583270 - DNA, 25 bp, Homo sapien
cagagtgaaagagaatttgactcat

SEQ ID NO: 5583271 - DNA, 25 bp, Homo sapien
agccttaggaaacgttaccgattca

SEQ ID NO: 5583272 - DNA, 25 bp, Homo sapien
caccaggcttccaagtacggctaat

SEQ ID NO: 5583273 - DNA, 25 bp, Homo sapien
caggcttccaagtacggctaatccc

SEQ ID NO: 5583274 - DNA, 25 bp, Homo sapien
aggcaccttcagaagtctggtgatt

SEQ ID NO: 5583275 - DNA, 25 bp, Homo sapien
accgattcaagaccctaaattaaga

SEQ ID NO: 5583276 - DNA, 25 bp, Homo sapien
taagatacagctgcttggcaattat

SEQ ID NO: 5583277 - DNA, 25 bp, Homo sapien
tcatagtctccacagcactcgaccc

SEQ ID NO: 5583278 - DNA, 25 bp, Homo sapien
ccaagtacggctaatcccaaaacac

SEQ ID NO: 5583279 - DNA, 25 bp, Homo sapien
tcaagaccctaaattaagatacagc

SEQ ID NO: 5583280 - DNA, 25 bp, Homo sapien
atacacaacctcaggtaataaaacc

SEQ ID NO: 5583281 - DNA, 25 bp, Homo sapien
ggttttattacctgaggttgtgtat

SEQ ID NO: 5583282 - DNA, 25 bp, Homo sapien
ctcagaaaacacatttgcaagtaat

SEQ ID NO: 5583283 - DNA, 25 bp, Homo sapien
ggagtagcacaggaaaacttcagaa

SEQ ID NO: 5583284 - DNA, 25 bp, Homo sapien
ttaagcaggaagctaacactcagaa

SEQ ID NO: 5583285 - DNA, 25 bp, Homo sapien
tatgtaacatttaagcaggaagcta

SEQ ID NO: 5583286 - DNA, 25 bp, Homo sapien
aagtgtcagctctcaattccctctc

SEQ ID NO: 5583287 - DNA, 25 bp, Homo sapien
tacgtgtcacagattctgaatgctt

SEQ ID NO: 5583288 - DNA, 25 bp, Homo sapien
ctaggatagcagttttctggtaact

SEQ ID NO: 5583289 - DNA, 25 bp, Homo sapien
ctgaatgctttcaggagtagcacag

SEQ ID NO: 5583290 - DNA, 25 bp, Homo sapien
aaagcatgaagtcaatacgtgtcac

SEQ ID NO: 5583291 - DNA, 25 bp, Homo sapien
gtttgatttcaactaggatagcagt

SEQ ID NO: 5583292 - DNA, 25 bp, Homo sapien
ctccagttatgaagtgtcagctctc

SEQ ID NO: 5583293 - DNA, 25 bp, Homo sapien
aaagcgaagtacaataaagtgtgcc

SEQ ID NO: 5583294 - DNA, 25 bp, Homo sapien
tatgaatgtacaaaatatagtagtt

SEQ ID NO: 5583295 - DNA, 25 bp, Homo sapien
ttgagacaattatgcaaggtgtaat

SEQ ID NO: 5583296 - DNA, 25 bp, Homo sapien
acatagagataaaaagtgagcacat

SEQ ID NO: 5583297 - DNA, 25 bp, Homo sapien
attcatcacccacatccagtcctta

SEQ ID NO: 5583298 - DNA, 25 bp, Homo sapien
aaagtgtgcctgtaatatgaatgta

SEQ ID NO: 5583299 - DNA, 25 bp, Homo sapien
tgatacagggttgtcacaaaccttc

SEQ ID NO: 5583300 - DNA, 25 bp, Homo sapien
caaagagcaataaagcgaagtacaa

SEQ ID NO: 5583301 - DNA, 25 bp, Homo sapien
ttaccaaatgagacatagagataaa

SEQ ID NO: 5583302 - DNA, 25 bp, Homo sapien
atggcactgatagacttccttgata

SEQ ID NO: 5583303 - DNA, 25 bp, Homo sapien
gtataggcagagttattggcaccct

SEQ ID NO: 5583304 - DNA, 25 bp, Homo sapien
taaaagatgtttgtgcagctatgta

SEQ ID NO: 5583305 - DNA, 25 bp, Homo sapien
cgtaggtagaaaatggcgttttaga

SEQ ID NO: 5583306 - DNA, 25 bp, Homo sapien
aacagagaaaattataccagccctc

SEQ ID NO: 5583307 - DNA, 25 bp, Homo sapien
tgaagtgccattttgtgctaaacgt

SEQ ID NO: 5583308 - DNA, 25 bp, Homo sapien
tccacagttacaagaaaaagtgcac

SEQ ID NO: 5583309 - DNA, 25 bp, Homo sapien
actcggtcacaatcacagtcattac

SEQ ID NO: 5583310 - DNA, 25 bp, Homo sapien
gtgctaaacgtaggtagaaaatggc

SEQ ID NO: 5583311 - DNA, 25 bp, Homo sapien
aagaaaaagtgcacattactcggtc

SEQ ID NO: 5583312 - DNA, 25 bp, Homo sapien
agataagaaatatcactgatgcctc

SEQ ID NO: 5583313 - DNA, 25 bp, Homo sapien
tgtaaggaacagtaattctagaaac

SEQ ID NO: 5583314 - DNA, 25 bp, Homo sapien
tatgtaacaagtagataagaaatat

SEQ ID NO: 5583315 - DNA, 25 bp, Homo sapien
gggcccaaatcaatacagcaactgc

SEQ ID NO: 5583316 - DNA, 25 bp, Homo sapien
actgcgactttctgagagcctaggt

SEQ ID NO: 5583317 - DNA, 25 bp, Homo sapien
aaaacactgcctgggcccaaatcaa

SEQ ID NO: 5583318 - DNA, 25 bp, Homo sapien
gcccaactcccaacaactgcgactt

SEQ ID NO: 5583319 - DNA, 25 bp, Homo sapien
ggaccacagtaagttgggagttctg

SEQ ID NO: 5583320 - DNA, 25 bp, Homo sapien
aatggctactcatgcttggtcagga

SEQ ID NO: 5583321 - DNA, 25 bp, Homo sapien
gagcctaggtgaacttgcgaaatct

SEQ ID NO: 5583322 - DNA, 25 bp, Homo sapien
gttctggctccggcccaactcccaa

SEQ ID NO: 5583323 - DNA, 25 bp, Homo sapien
tcaatacagcaactgcaggcgagat

SEQ ID NO: 5583324 - DNA, 25 bp, Homo sapien
ttggtgcaaaatatccctttagatc

SEQ ID NO: 5583325 - DNA, 25 bp, Homo sapien
acagtaagttgggagttctggctcc

SEQ ID NO: 5583326 - DNA, 25 bp, Homo sapien
aaagctgtaatgaagtttgaactct

SEQ ID NO: 5583327 - DNA, 25 bp, Homo sapien
aatgagtatgaaacctagcaggcat

SEQ ID NO: 5583328 - DNA, 25 bp, Homo sapien
cgcccacggagatgcctccggttca

SEQ ID NO: 5583329 - DNA, 25 bp, Homo sapien
ttgaactcttctgcgcctatgtacc

SEQ ID NO: 5583330 - DNA, 25 bp, Homo sapien
ctgggctaagagaacacaaacctta

SEQ ID NO: 5583331 - DNA, 25 bp, Homo sapien
aaagtttcagaagataatgagtatg

SEQ ID NO: 5583332 - DNA, 25 bp, Homo sapien
tacaatatgtaaggaaggaatcaat

SEQ ID NO: 5583333 - DNA, 25 bp, Homo sapien
tcttgtaggtcacacagaacttgtt

SEQ ID NO: 5583334 - DNA, 25 bp, Homo sapien
acccaccgcccatgcatctccctgc

SEQ ID NO: 5583335 - DNA, 25 bp, Homo sapien
atgcctccggttcaagacaaaaatc

SEQ ID NO: 5583336 - DNA, 25 bp, Homo sapien
gaggaagcatcactaagacaaagct

SEQ ID NO: 5583337 - DNA, 25 bp, Homo sapien
atctggtgcactattgagcctattt

SEQ ID NO: 5583338 - DNA, 25 bp, Homo sapien
ctcttcgatgtgttgcaataatgtt

SEQ ID NO: 5583339 - DNA, 25 bp, Homo sapien
cttcaggctccaagtttaactcaat

SEQ ID NO: 5583340 - DNA, 25 bp, Homo sapien
atgctacccgcatatctggtgcact

SEQ ID NO: 5583341 - DNA, 25 bp, Homo sapien
aataatgttctcttcgatgtgttgc

SEQ ID NO: 5583342 - DNA, 25 bp, Homo sapien
tgtttttaaccgtgtcaagattgaa

SEQ ID NO: 5583343 - DNA, 25 bp, Homo sapien
gtgtcaagattgaaaatcctagttc

SEQ ID NO: 5583344 - DNA, 25 bp, Homo sapien
ttctttagtgtgaatgatgaactga

SEQ ID NO: 5583345 - DNA, 25 bp, Homo sapien
aatggtagtaacagcaatatactct

SEQ ID NO: 5583346 - DNA, 25 bp, Homo sapien
tttgtatttaatgtgatgggtgtgc

SEQ ID NO: 5583347 - DNA, 25 bp, Homo sapien
tatttaatgtgatgggtgtgcttgt

SEQ ID NO: 5583348 - DNA, 25 bp, Homo sapien
atggagtgtgttttcctagactgtt

SEQ ID NO: 5583349 - DNA, 25 bp, Homo sapien
tcggagtgctccccacaccctctac

SEQ ID NO: 5583350 - DNA, 25 bp, Homo sapien
agtgctgattctctggagaaccaca

SEQ ID NO: 5583351 - DNA, 25 bp, Homo sapien
ttcctagactgttcttagatgttct

SEQ ID NO: 5583352 - DNA, 25 bp, Homo sapien
ctctggagaaccacaaatggagtgt

SEQ ID NO: 5583353 - DNA, 25 bp, Homo sapien
atgttctgagatacggcactcggag

SEQ ID NO: 5583354 - DNA, 25 bp, Homo sapien
attctctggagaaccacaaatggag

SEQ ID NO: 5583355 - DNA, 25 bp, Homo sapien
tcttagatgttctgagatacggcac

SEQ ID NO: 5583356 - DNA, 25 bp, Homo sapien
tgagatacggcactcggagtgctcc

SEQ ID NO: 5583357 - DNA, 25 bp, Homo sapien
atacggcactcggagtgctccccac

SEQ ID NO: 5583358 - DNA, 25 bp, Homo sapien
tggagaaccacaaatggagtgtgtt

SEQ ID NO: 5583359 - DNA, 25 bp, Homo sapien
tgacacagtcgatggtgaactggca

SEQ ID NO: 5583360 - DNA, 25 bp, Homo sapien
gtttagaagtagatggaaatcagga

SEQ ID NO: 5583361 - DNA, 25 bp, Homo sapien
gagtagagtgatgcagtttagaagt

SEQ ID NO: 5583362 - DNA, 25 bp, Homo sapien
ttagggaatttgagttgttgctgtg

SEQ ID NO: 5583363 - DNA, 25 bp, Homo sapien
ggtaaaatgttactcagagcagatt

SEQ ID NO: 5583364 - DNA, 25 bp, Homo sapien
agaaatctggcttggtaaaatgtta

SEQ ID NO: 5583365 - DNA, 25 bp, Homo sapien
cagagcagattagtctgggtgtgct

SEQ ID NO: 5583366 - DNA, 25 bp, Homo sapien
taatctcgcagtcaggattcagagc

SEQ ID NO: 5583367 - DNA, 25 bp, Homo sapien
ctccttcccacttgaccagcattct

SEQ ID NO: 5583368 - DNA, 25 bp, Homo sapien
ttaagaacagattagtcattaggga

SEQ ID NO: 5583369 - DNA, 25 bp, Homo sapien
gaactggcaggtgtaatctcgcagt

SEQ ID NO: 5583370 - DNA, 25 bp, Homo sapien
taggagggtctcatcaaattctaca

SEQ ID NO: 5583371 - DNA, 25 bp, Homo sapien
cacaactgagagattcaattatcat

SEQ ID NO: 5583372 - DNA, 25 bp, Homo sapien
gacaaccaaaaatgtgccctagccc

SEQ ID NO: 5583373 - DNA, 25 bp, Homo sapien
cccagttgagaatgactaggagggt

SEQ ID NO: 5583374 - DNA, 25 bp, Homo sapien
ctgatctgaaaagtgaattagaagc

SEQ ID NO: 5583375 - DNA, 25 bp, Homo sapien
attcggtgacagcaccgccccagtt

SEQ ID NO: 5583376 - DNA, 25 bp, Homo sapien
cactgtccctggcattcataatgtt

SEQ ID NO: 5583377 - DNA, 25 bp, Homo sapien
caaatgccaccccagttgctgtgac

SEQ ID NO: 5583378 - DNA, 25 bp, Homo sapien
agtgaattagaagctgtacaatatc

SEQ ID NO: 5583379 - DNA, 25 bp, Homo sapien
aatgtgccctagccccaacactctc

SEQ ID NO: 5583380 - DNA, 25 bp, Homo sapien
aatgttactattcctggcactgggc

SEQ ID NO: 5583381 - DNA, 25 bp, Homo sapien
acttcaaacgtaataactctgcaaa

SEQ ID NO: 5583382 - DNA, 25 bp, Homo sapien
atgttgagaaatattggattagaat

SEQ ID NO: 5583383 - DNA, 25 bp, Homo sapien
gaaaagatcataaataatggccacc

SEQ ID NO: 5583384 - DNA, 25 bp, Homo sapien
ggaaatattttgagagttgaattac

SEQ ID NO: 5583385 - DNA, 25 bp, Homo sapien
ctttaagtaaaatggaaacaggata

SEQ ID NO: 5583386 - DNA, 25 bp, Homo sapien
tctcacaacgcaaaatattactctg

SEQ ID NO: 5583387 - DNA, 25 bp, Homo sapien
aggttcggggcataataacacttct

SEQ ID NO: 5583388 - DNA, 25 bp, Homo sapien
tggaataaagaaacagtaggaaata

SEQ ID NO: 5583389 - DNA, 25 bp, Homo sapien
catgtgaatacaactggaataaaga

SEQ ID NO: 5583390 - DNA, 25 bp, Homo sapien
aatggccacctaataaaaaagactc

SEQ ID NO: 5583391 - DNA, 25 bp, Homo sapien
taaattaaccataaagagcctcttc

SEQ ID NO: 5583392 - DNA, 25 bp, Homo sapien
tgacagattctaagccaagtagtgc

SEQ ID NO: 5583393 - DNA, 25 bp, Homo sapien
agaaggaaagtatagaagaaccttc

SEQ ID NO: 5583394 - DNA, 25 bp, Homo sapien
agctgtaagaaagtaagaagtttgc
